United States Patent Application Publication US 2008/0113351 A1 - sequence listing, part 18

SEQ ID NO: 428965 - DNA, 19 bp, Homo sapiens
  siRNA target sequence for LOC144100 (NM_175058.2,1206-1224).
gaaaatgcttggaacgaat

SEQ ID NO: 428966 - DNA, 19 bp, Homo sapiens
  siRNA target sequence for LOC144100 (NM_175058.2,1309-1327).
cgcagatacagaaagatct

SEQ ID NO: 428967 - DNA, 19 bp, Homo sapiens
  siRNA target sequence for LOC144100 (NM_175058.2,1663-1681).
ccccactccccgaactcta

SEQ ID NO: 428968 - DNA, 19 bp, Homo sapiens
  siRNA target sequence for LOC144100 (NM_175058.2,1833-1851).
gagctgcggtcgtatgtca

SEQ ID NO: 428969 - DNA, 19 bp, Homo sapiens
  siRNA target sequence for LOC255426 (NM_175062.2,469-487).
cccgagaaagcctacatct

SEQ ID NO: 428970 - DNA, 19 bp, Homo sapiens
  siRNA target sequence for LOC255426 (NM_175062.2,470-488).
ccgagaaagcctacatctt

SEQ ID NO: 428971 - DNA, 19 bp, Homo sapiens
  siRNA target sequence for LOC255426 (NM_175062.2,683-701).
cgactatcgggcaccttaa

SEQ ID NO: 428972 - DNA, 19 bp, Homo sapiens
  siRNA target sequence for LOC255426 (NM_175062.2,686-704).
ctatcgggcaccttaagga

SEQ ID NO: 428973 - DNA, 19 bp, Homo sapiens
  siRNA target sequence for LOC255426 (NM_175062.2,1034-1052).
gcaacctggaggcttatgt

SEQ ID NO: 428974 - DNA, 19 bp, Homo sapiens
  siRNA target sequence for LOC255426 (NM_175062.2,1126-1144).
caggtgattgagttcttca

SEQ ID NO: 428975 - DNA, 19 bp, Homo sapiens
  siRNA target sequence for LOC255426 (NM_175062.2,1294-1312).
gacccaacggggaatttct

SEQ ID NO: 428976 - DNA, 19 bp, Homo sapiens
  siRNA target sequence for LOC255426 (NM_175062.2,1375-1393).
gagaagattgtcattcctt

SEQ ID NO: 428977 - DNA, 19 bp, Homo sapiens
  siRNA target sequence for LOC255426 (NM_175062.2,1455-1473).
caatggacacgtcaacttt

SEQ ID NO: 428978 - DNA, 19 bp, Homo sapiens
  siRNA target sequence for LOC284361 (NM_175063.2,1396-1414).
gcctgatggatgtacatca

SEQ ID NO: 428979 - DNA, 19 bp, Homo sapiens
  siRNA target sequence for K6IRS3 (NM_175068.2,235-253).
gggcaggaggctatggatt

SEQ ID NO: 428980 - DNA, 19 bp, Homo sapiens
  siRNA target sequence for K6IRS3 (NM_175068.2,236-254).
ggcaggaggctatggattt

SEQ ID NO: 428981 - DNA, 19 bp, Homo sapiens
  siRNA target sequence for K6IRS3 (NM_175068.2,1092-1110).
ctgacccgtctcatccaaa

SEQ ID NO: 428982 - DNA, 19 bp, Homo sapiens
  siRNA target sequence for K6IRS3 (NM_175068.2,1096-1114).
cccgtctcatccaaagact

SEQ ID NO: 428983 - DNA, 19 bp, Homo sapiens
  siRNA target sequence for K6IRS3 (NM_175068.2,1111-1129).
gactgcgctcggagattga

SEQ ID NO: 428984 - DNA, 19 bp, Homo sapiens
  siRNA target sequence for K6IRS3 (NM_175068.2,1581-1599).
gggagtgcaagtgaattca

SEQ ID NO: 428985 - DNA, 19 bp, Homo sapiens
  siRNA target sequence for APTX (NM_175069.1,102-120).
ccggcaccagcgaatcaga

SEQ ID NO: 428986 - DNA, 19 bp, Homo sapiens
  siRNA target sequence for APTX (NM_175069.1,113-131).
gaatcagacttccacattt

SEQ ID NO: 428987 - DNA, 19 bp, Homo sapiens
  siRNA target sequence for APTX (NM_175069.1,160-178).
gagaccaagatcactgata

SEQ ID NO: 428988 - DNA, 19 bp, Homo sapiens
  siRNA target sequence for APTX (NM_175069.1,165-183).
caagatcactgataagaaa

SEQ ID NO: 428989 - DNA, 19 bp, Homo sapiens
  siRNA target sequence for APTX (NM_175069.1,168-186).
gatcactgataagaaatgt

SEQ ID NO: 428990 - DNA, 19 bp, Homo sapiens
  siRNA target sequence for APTX (NM_175069.1,188-206).
ctcgacagcaagtacagtt

SEQ ID NO: 428991 - DNA, 19 bp, Homo sapiens
  siRNA target sequence for APTX (NM_175069.1,218-236).
gtaacaagggatatgtcaa

SEQ ID NO: 428992 - DNA, 19 bp, Homo sapiens
  siRNA target sequence for APTX (NM_175069.1,227-245).
gatatgtcaaggtaaagca

SEQ ID NO: 428993 - DNA, 19 bp, Homo sapiens
  siRNA target sequence for APTX (NM_175069.1,266-284).
gcattgactcagtcgtaat

SEQ ID NO: 428994 - DNA, 19 bp, Homo sapiens
  siRNA target sequence for APTX (NM_175069.1,267-285).
cattgactcagtcgtaatt

SEQ ID NO: 428995 - DNA, 19 bp, Homo sapiens
  siRNA target sequence for APTX (NM_175069.1,333-351).
ggtgaatgaactttatcca

SEQ ID NO: 428996 - DNA, 19 bp, Homo sapiens
  siRNA target sequence for APTX (NM_175069.1,423-441).
caacagtgattctatagaa

SEQ ID NO: 428997 - DNA, 19 bp, Homo sapiens
  siRNA target sequence for APTX (NM_175069.1,535-553).
gcacctatcaaaaaggaat

SEQ ID NO: 428998 - DNA, 19 bp, Homo sapiens
  siRNA target sequence for APTX (NM_175069.1,587-605).
ctatgcaggaccccaaaat

SEQ ID NO: 428999 - DNA, 19 bp, Homo sapiens
  siRNA target sequence for INM01 (NM_175075.2,750-768).
gcatctcctggaaagatgt

SEQ ID NO: 429000 - DNA, 19 bp, Homo sapiens
  siRNA target sequence for INM01 (NM_175075.2,751-769).
catctcctggaaagatgta

SEQ ID NO: 429001 - DNA, 19 bp, Homo sapiens
  siRNA target sequence for INM01 (NM_175075.2,787-805).
ggaactaacttacgattaa

SEQ ID NO: 429002 - DNA, 19 bp, Homo sapiens
  siRNA target sequence for INM01 (NM_175075.2,788-806).
gaactaacttacgattaaa

SEQ ID NO: 429003 - DNA, 19 bp, Homo sapiens
  siRNA target sequence for INM01 (NM_175075.2,836-854).
gattttgggacaatttggt

SEQ ID NO: 429004 - DNA, 19 bp, Homo sapiens
  siRNA target sequence for INM01 (NM_175075.2,852-870).
ggttttaaaacagaatata

SEQ ID NO: 429005 - DNA, 19 bp, Homo sapiens
  siRNA target sequence for INM01 (NM_175075.2,899-917).
gttgggagcctccaaaact

SEQ ID NO: 429006 - DNA, 19 bp, Homo sapiens
  siRNA target sequence for C8orf15 (NM_175076.1,1089-1107).
gagattgcttgggatttga

SEQ ID NO: 429007 - DNA, 19 bp, Homo sapiens
  siRNA target sequence for C8orf15 (NM_175076.1,1284-1302).
gaactgccttggtgtgttt

SEQ ID NO: 429008 - DNA, 19 bp, Homo sapiens
  siRNA target sequence for C8orf15 (NM_175076.1,1287-1305).
ctgccttggtgtgtttatt

SEQ ID NO: 429009 - DNA, 19 bp, Homo sapiens
  siRNA target sequence for hIAN6 (NM_175571.1,290-308).
gtgatcagacagtgatcaa

SEQ ID NO: 429010 - DNA, 19 bp, Homo sapiens
  siRNA target sequence for hIAN6 (NM_175571.1,292-310).
gatcagacagtgatcaaaa

SEQ ID NO: 429011 - DNA, 19 bp, Homo sapiens
  siRNA target sequence for hIAN6 (NM_175571.1,344-362).
ggaaggttgtggtaattga

SEQ ID NO: 429012 - DNA, 19 bp, Homo sapiens
  siRNA target sequence for hIAN6 (NM_175571.1,361-379).
gacacccctgaccttttct

SEQ ID NO: 429013 - DNA, 19 bp, Homo sapiens
  siRNA target sequence for hIAN6 (NM_175571.1,373-391).
cttttctcctcaatagctt

SEQ ID NO: 429014 - DNA, 19 bp, Homo sapiens
  siRNA target sequence for hIAN6 (NM_175571.1,513-531).
gggcatccaacaagtgttt

SEQ ID NO: 429015 - DNA, 19 bp, Homo sapiens
  siRNA target sequence for hIAN6 (NM_175571.1,542-560).
ccaggaggcacatcattat

SEQ ID NO: 429016 - DNA, 19 bp, Homo sapiens
  siRNA target sequence for hIAN6 (NM_175571.1,543-561).
caggaggcacatcattatt

SEQ ID NO: 429017 - DNA, 19 bp, Homo sapiens
  siRNA target sequence for hIAN6 (NM_175571.1,545-563).
ggaggcacatcattattgt

SEQ ID NO: 429018 - DNA, 19 bp, Homo sapiens
  siRNA target sequence for hIAN6 (NM_175571.1,548-566).
ggcacatcattattgtctt

SEQ ID NO: 429019 - DNA, 19 bp, Homo sapiens
  siRNA target sequence for hIAN6 (NM_175571.1,633-651).
gcagttggttcaagactat

SEQ ID NO: 429020 - DNA, 19 bp, Homo sapiens
  siRNA target sequence for hIAN6 (NM_175571.1,655-673).
ggccgatactgcattttca

SEQ ID NO: 429021 - DNA, 19 bp, Homo sapiens
  siRNA target sequence for hIAN6 (NM_175571.1,658-676).
cgatactgcattttcaaca

SEQ ID NO: 429022 - DNA, 19 bp, Homo sapiens
  siRNA target sequence for hIAN6 (NM_175571.1,672-690).
caacaacaagaccaatagt

SEQ ID NO: 429023 - DNA, 19 bp, Homo sapiens
  siRNA target sequence for hIAN6 (NM_175571.1,678-696).
caagaccaatagtaaggat

SEQ ID NO: 429024 - DNA, 19 bp, Homo sapiens
  siRNA target sequence for hIAN6 (NM_175571.1,736-754).
gagtctttggtgaatacga

SEQ ID NO: 429025 - DNA, 19 bp, Homo sapiens
  siRNA target sequence for hIAN6 (NM_175571.1,753-771).
gaacggaggaccctatcat

SEQ ID NO: 429026 - DNA, 19 bp, Homo sapiens
  siRNA target sequence for hIAN6 (NM_175571.1,764-782).
cctatcatgtgaacttcaa

SEQ ID NO: 429027 - DNA, 19 bp, Homo sapiens
  siRNA target sequence for hIAN6 (NM_175571.1,794-812).
gcaggtttcaagattgtgt

SEQ ID NO: 429028 - DNA, 19 bp, Homo sapiens
  siRNA target sequence for hIAN6 (NM_175571.1,891-909).
gaatccggggacatcagaa

SEQ ID NO: 429029 - DNA, 19 bp, Homo sapiens
  siRNA target sequence for hIAN6 (NM_175571.1,930-948).
gaaacgcggtgctggaaaa

SEQ ID NO: 429030 - DNA, 19 bp, Homo sapiens
  siRNA target sequence for hIAN6 (NM_175571.1,982-1000).
gcctttcagaccggattta

SEQ ID NO: 429031 - DNA, 19 bp, Homo sapiens
  siRNA target sequence for hIAN6 (NM_175571.1,984-1002).
ctttcagaccggatttagt

SEQ ID NO: 429032 - DNA, 19 bp, Homo sapiens
  siRNA target sequence for hIAN6 (NM_175571.1,1072-1090).
gatgctccggacatctcat

SEQ ID NO: 429033 - DNA, 19 bp, Homo sapiens
  siRNA target sequence for hIAN6 (NM_175571.1,1075-1093).
gctccggacatctcatctt

SEQ ID NO: 429034 - DNA, 19 bp, Homo sapiens
  siRNA target sequence for hIAN6 (NM_175571.1,1076-1094).
ctccggacatctcatcttt

SEQ ID NO: 429035 - DNA, 19 bp, Homo sapiens
  siRNA target sequence for hIAN6 (NM_175571.1,1078-1096).
ccggacatctcatctttaa

SEQ ID NO: 429036 - DNA, 19 bp, Homo sapiens
  siRNA target sequence for hIAN6 (NM_175571.1,1109-1127).
cagaagttagaaaacacat

SEQ ID NO: 429037 - DNA, 19 bp, Homo sapiens
  siRNA target sequence for hIAN6 (NM_175571.1,1198-1216).
ctgagcaccatccaaaaca

SEQ ID NO: 429038 - DNA, 19 bp, Homo sapiens
  siRNA target sequence for hIAN6 (NM_175571.1,1200-1218).
gagcaccatccaaaacaat

SEQ ID NO: 429039 - DNA, 19 bp, Homo sapiens
  siRNA target sequence for hIAN6 (NM_175571.1,1202-1220).
gcaccatccaaaacaattt

SEQ ID NO: 429040 - DNA, 19 bp, Homo sapiens
  siRNA target sequence for hIAN6 (NM_175571.1,1284-1302).
ggatctagatacgttctta

SEQ ID NO: 429041 - DNA, 19 bp, Homo sapiens
  siRNA target sequence for hIAN6 (NM_175571.1,1285-1303).
gatctagatacgttcttaa

SEQ ID NO: 429042 - DNA, 19 bp, Homo sapiens
  siRNA target sequence for hIAN6 (NM_175571.1,1288-1306).
ctagatacgttcttaagaa

SEQ ID NO: 429043 - DNA, 19 bp, Homo sapiens
  siRNA target sequence for hIAN6 (NM_175571.1,1327-1345).
ggtctcatccagaagtgta

SEQ ID NO: 429044 - DNA, 19 bp, Homo sapiens
  siRNA target sequence for hIAN6 (NM_175571.1,1352-1370).
gatatagtgccttcaacta

SEQ ID NO: 429045 - DNA, 19 bp, Homo sapiens
  siRNA target sequence for hIAN6 (NM_175571.1,1428-1446).
gagcatggtgcatcagaat

SEQ ID NO: 429046 - DNA, 19 bp, Homo sapiens
  siRNA target sequence for hIAN6 (NM_175571.1,1441-1459).
cagaatgggaacaagcatt

SEQ ID NO: 429047 - DNA, 19 bp, Homo sapiens
  siRNA target sequence for hIAN6 (NM_175571.1,1523-1541).
gtgcgaccgggaactctat

SEQ ID NO: 429048 - DNA, 19 bp, Homo sapiens
  siRNA target sequence for hIAN6 (NM_175571.1,1683-1701).
ggacccatcccggttagaa

SEQ ID NO: 429049 - DNA, 19 bp, Homo sapiens
  siRNA target sequence for hIAN6 (NM_175571.1,1705-1723).
gaggtcaagcgctgtttgt

SEQ ID NO: 429050 - DNA, 19 bp, Homo sapiens
  siRNA target sequence for hIAN6 (NM_175571.1,1825-1843).
ggagcagactttacgaaat

SEQ ID NO: 429051 - DNA, 19 bp, Homo sapiens
  siRNA target sequence for hIAN6 (NM_175571.1,1826-1844).
gagcagactttacgaaata

SEQ ID NO: 429052 - DNA, 19 bp, Homo sapiens
  siRNA target sequence for hIAN6 (NM_175571.1,1838-1856).
cgaaatacgcgattatgct

SEQ ID NO: 429053 - DNA, 19 bp, Homo sapiens
  siRNA target sequence for hIAN6 (NM_175571.1,1924-1942).
gcccttcggcgcattttta

SEQ ID NO: 429054 - DNA, 19 bp, Homo sapiens
  siRNA target sequence for hIAN6 (NM_175571.1,1925-1943).
cccttcggcgcatttttaa

SEQ ID NO: 429055 - DNA, 19 bp, Homo sapiens
  siRNA target sequence for hIAN6 (NM_175571.1,1926-1944).
ccttcggcgcatttttaaa

SEQ ID NO: 429056 - DNA, 19 bp, Homo sapiens
  siRNA target sequence for hIAN6 (NM_175571.1,1955-1973).
ggcgagtttgtgcttttaa

SEQ ID NO: 429057 - DNA, 19 bp, Homo sapiens
  siRNA target sequence for hIAN6 (NM_175571.1,1957-1975).
cgagtttgtgcttttaaca

SEQ ID NO: 429058 - DNA, 19 bp, Homo sapiens
  siRNA target sequence for hIAN6 (NM_175571.1,2028-2046).
ggtcaatgatctgagaaaa

SEQ ID NO: 429059 - DNA, 19 bp, Homo sapiens
  siRNA target sequence for hIAN6 (NM_175571.1,2060-2078).
ccgggtatccccatacaca

SEQ ID NO: 429060 - DNA, 19 bp, Homo sapiens
  siRNA target sequence for hIAN6 (NM_175571.1,2079-2097).
ggagaacgtcagcaaacta

SEQ ID NO: 429061 - DNA, 19 bp, Homo sapiens
  siRNA target sequence for hIAN6 (NM_175571.1,2080-2098).
gagaacgtcagcaaactaa

SEQ ID NO: 429062 - DNA, 19 bp, Homo sapiens
  siRNA target sequence for hIAN6 (NM_175571.1,2082-2100).
gaacgtcagcaaactaatt

SEQ ID NO: 429063 - DNA, 19 bp, Homo sapiens
  siRNA target sequence for CNTN4 (NM_175607.1,245-263).
ggtactgcaatcattcatt

SEQ ID NO: 429064 - DNA, 19 bp, Homo sapiens
  siRNA target sequence for CNTN4 (NM_175607.1,246-264).
gtactgcaatcattcattt

SEQ ID NO: 429065 - DNA, 19 bp, Homo sapiens
  siRNA target sequence for CNTN4 (NM_175607.1,288-306).
ctgcatggcccgattttta

SEQ ID NO: 429066 - DNA, 19 bp, Homo sapiens
  siRNA target sequence for CNTN4 (NM_175607.1,324-342).
gtaatgttccctttggatt

SEQ ID NO: 429067 - DNA, 19 bp, Homo sapiens
  siRNA target sequence for CNTN4 (NM_175607.1,362-380).
gctcaattgtgaagttaaa

SEQ ID NO: 429068 - DNA, 19 bp, Homo sapiens
  siRNA target sequence for CNTN4 (NM_175607.1,382-400).
gaaatccaaaacctcatat

SEQ ID NO: 429069 - DNA, 19 bp, Homo sapiens
  siRNA target sequence for CNTN4 (NM_175607.1,426-444).
gttgacactggtatggatt

SEQ ID NO: 429070 - DNA, 19 bp, Homo sapiens
  siRNA target sequence for CNTN4 (NM_175607.1,446-464).
ccgctacagtgttgttgaa

SEQ ID NO: 429071 - DNA, 19 bp, Homo sapiens
  siRNA target sequence for CNTN4 (NM_175607.1,459-477).
gttgaagggagcttgttga

SEQ ID NO: 429072 - DNA, 19 bp, Homo sapiens
  siRNA target sequence for CNTN4 (NM_175607.1,462-480).
gaagggagcttgttgatca

SEQ ID NO: 429073 - DNA, 19 bp, Homo sapiens
  siRNA target sequence for CNTN4 (NM_175607.1,465-483).
gggagcttgttgatcaata

SEQ ID NO: 429074 - DNA, 19 bp, Homo sapiens
  siRNA target sequence for CNTN4 (NM_175607.1,466-484).
ggagcttgttgatcaataa

SEQ ID NO: 429075 - DNA, 19 bp, Homo sapiens
  siRNA target sequence for CNTN4 (NM_175607.1,525-543).
gcgacaaactcgtttggaa

SEQ ID NO: 429076 - DNA, 19 bp, Homo sapiens
  siRNA target sequence for CNTN4 (NM_175607.1,529-547).
caaactcgtttggaacaat

SEQ ID NO: 429077 - DNA, 19 bp, Homo sapiens
  siRNA target sequence for CNTN4 (NM_175607.1,576-594).
gcttatcttgacaacttta

SEQ ID NO: 429078 - DNA, 19 bp, Homo sapiens
  siRNA target sequence for CNTN4 (NM_175607.1,682-700).
gttatgcctggatcttcaa

SEQ ID NO: 429079 - DNA, 19 bp, Homo sapiens
  siRNA target sequence for CNTN4 (NM_175607.1,698-716).
caatgaatacccttcctat

SEQ ID NO: 429080 - DNA, 19 bp, Homo sapiens
  siRNA target sequence for CNTN4 (NM_175607.1,707-725).
cccttcctatcaggataat

SEQ ID NO: 429081 - DNA, 19 bp, Homo sapiens
  siRNA target sequence for CNTN4 (NM_175607.1,719-737).
ggataatcgccgctttgtt

SEQ ID NO: 429082 - DNA, 19 bp, Homo sapiens
  siRNA target sequence for CNTN4 (NM_175607.1,720-738).
gataatcgccgctttgttt

SEQ ID NO: 429083 - DNA, 19 bp, Homo sapiens
  siRNA target sequence for CNTN4 (NM_175607.1,973-991).
gaaatccagtaccaactat

SEQ ID NO: 429084 - DNA, 19 bp, Homo sapiens
  siRNA target sequence for CNTN4 (NM_175607.1,1080-1098).
caggaggatgctggtttat

SEQ ID NO: 429085 - DNA, 19 bp, Homo sapiens
  siRNA target sequence for CNTN4 (NM_175607.1,1090-1108).
ctggtttatatgaatgtgt

SEQ ID NO: 429086 - DNA, 19 bp, Homo sapiens
  siRNA target sequence for CNTN4 (NM_175607.1,1137-1155).
gcaaggggacagctaactt

SEQ ID NO: 429087 - DNA, 19 bp, Homo sapiens
  siRNA target sequence for CNTN4 (NM_175607.1,1141-1159).
ggggacagctaactttcta

SEQ ID NO: 429088 - DNA, 19 bp, Homo sapiens
  siRNA target sequence for CNTN4 (NM_175607.1,1142-1160).
gggacagctaactttctat

SEQ ID NO: 429089 - DNA, 19 bp, Homo sapiens
  siRNA target sequence for CNTN4 (NM_175607.1,1153-1171).
ctttctatgctcaacctaa

SEQ ID NO: 429090 - DNA, 19 bp, Homo sapiens
  siRNA target sequence for CNTN4 (NM_175607.1,1164-1182).
caacctaattggattcaaa

SEQ ID NO: 429091 - DNA, 19 bp, Homo sapiens
  siRNA target sequence for CNTN4 (NM_175607.1,1167-1185).
cctaattggattcaaaaaa

SEQ ID NO: 429092 - DNA, 19 bp, Homo sapiens
  siRNA target sequence for CNTN4 (NM_175607.1,1168-1186).
ctaattggattcaaaaaat

SEQ ID NO: 429093 - DNA, 19 bp, Homo sapiens
  siRNA target sequence for CNTN4 (NM_175607.1,1197-1215).
cacgtggccatggaagaaa

SEQ ID NO: 429094 - DNA, 19 bp, Homo sapiens
  siRNA target sequence for CNTN4 (NM_175607.1,1199-1217).
cgtggccatggaagaaaat

SEQ ID NO: 429095 - DNA, 19 bp, Homo sapiens
  siRNA target sequence for CNTN4 (NM_175607.1,1243-1261).
gaaggcctaagcctacata

SEQ ID NO: 429096 - DNA, 19 bp, Homo sapiens
  siRNA target sequence for CNTN4 (NM_175607.1,1246-1264).
ggcctaagcctacatacaa

SEQ ID NO: 429097 - DNA, 19 bp, Homo sapiens
  siRNA target sequence for CNTN4 (NM_175607.1,1248-1266).
cctaagcctacatacaagt

SEQ ID NO: 429098 - DNA, 19 bp, Homo sapiens
  siRNA target sequence for CNTN4 (NM_175607.1,1287-1305).
ctgctaactcgggatagaa

SEQ ID NO: 429099 - DNA, 19 bp, Homo sapiens
  siRNA target sequence for CNTN4 (NM_175607.1,1289-1307).
gctaactcgggatagaatt

SEQ ID NO: 429100 - DNA, 19 bp, Homo sapiens
  siRNA target sequence for CNTN4 (NM_175607.1,1294-1312).
ctcgggatagaattcaaat

SEQ ID NO: 429101 - DNA, 19 bp, Homo sapiens
  siRNA target sequence for CNTN4 (NM_175607.1,1316-1334).
gcaaggaacactcaacata

SEQ ID NO: 429102 - DNA, 19 bp, Homo sapiens
  siRNA target sequence for CNTN4 (NM_175607.1,1405-1423).
ccaacgcagagcttagtgt

SEQ ID NO: 429103 - DNA, 19 bp, Homo sapiens
  siRNA target sequence for CNTN4 (NM_175607.1,1409-1427).
cgcagagcttagtgttata

SEQ ID NO: 429104 - DNA, 19 bp, Homo sapiens
  siRNA target sequence for CNTN4 (NM_175607.1,1450-1468).
gaacactcttgaaaagagt

SEQ ID NO: 429105 - DNA, 19 bp, Homo sapiens
  siRNA target sequence for CNTN4 (NM_175607.1,1465-1483).
gagtaactcttgtcaaagt

SEQ ID NO: 429106 - DNA, 19 bp, Homo sapiens
  siRNA target sequence for CNTN4 (NM_175607.1,1484-1502).
gggaggtgaagttgtcatt

SEQ ID NO: 429107 - DNA, 19 bp, Homo sapiens
  siRNA target sequence for CNTN4 (NM_175607.1,1488-1506).
ggtgaagttgtcattgagt

SEQ ID NO: 429108 - DNA, 19 bp, Homo sapiens
  siRNA target sequence for CNTN4 (NM_175607.1,1511-1529).
gccaaaagcgtctccaaaa

SEQ ID NO: 429109 - DNA, 19 bp, Homo sapiens
  siRNA target sequence for CNTN4 (NM_175607.1,1519-1537).
cgtctccaaaacctgttta

SEQ ID NO: 429110 - DNA, 19 bp, Homo sapiens
  siRNA target sequence for CNTN4 (NM_175607.1,1596-1614).
gatggaaacctcagaatca

SEQ ID NO: 429111 - DNA, 19 bp, Homo sapiens
  siRNA target sequence for CNTN4 (NM_175607.1,1599-1617).
ggaaacctcagaatcatca

SEQ ID NO: 429112 - DNA, 19 bp, Homo sapiens
  siRNA target sequence for CNTN4 (NM_175607.1,1605-1623).
ctcagaatcatcaacgtta

SEQ ID NO: 429113 - DNA, 19 bp, Homo sapiens
  siRNA target sequence for CNTN4 (NM_175607.1,1609-1627).
gaatcatcaacgttactaa

SEQ ID NO: 429114 - DNA, 19 bp, Homo sapiens
  siRNA target sequence for CNTN4 (NM_175607.1,1777-1795).
gccaggtaacgcatgatca

SEQ ID NO: 429115 - DNA, 19 bp, Homo sapiens
  siRNA target sequence for CNTN4 (NM_175607.1,1799-1817).
gctagacatcgtgtttact

SEQ ID NO: 429116 - DNA, 19 bp, Homo sapiens
  siRNA target sequence for CNTN4 (NM_175607.1,1808-1826).
cgtgtttacttggtcattt

SEQ ID NO: 429117 - DNA, 19 bp, Homo sapiens
  siRNA target sequence for CNTN4 (NM_175607.1,1809-1827).
gtgtttacttggtcattta

SEQ ID NO: 429118 - DNA, 19 bp, Homo sapiens
  siRNA target sequence for CNTN4 (NM_175607.1,1887-1905).
gattcagctggtgatttga

SEQ ID NO: 429119 - DNA, 19 bp, Homo sapiens
  siRNA target sequence for CNTN4 (NM_175607.1,1946-1964).
ctgcatggtccaaacaagt

SEQ ID NO: 429120 - DNA, 19 bp, Homo sapiens
  siRNA target sequence for CNTN4 (NM_175607.1,1983-2001).
gctgcagacctgattgtaa

SEQ ID NO: 429121 - DNA, 19 bp, Homo sapiens
  siRNA target sequence for CNTN4 (NM_175607.1,2030-2048).
gacaatagacgaaatcaca

SEQ ID NO: 429122 - DNA, 19 bp, Homo sapiens
  siRNA target sequence for CNTN4 (NM_175607.1,2161-2179).
cagtcccagaactcattga

SEQ ID NO: 429123 - DNA, 19 bp, Homo sapiens
  siRNA target sequence for CNTN4 (NM_175607.1,2213-2231).
gaacccttgggttgaatat

SEQ ID NO: 429124 - DNA, 19 bp, Homo sapiens
  siRNA target sequence for CNTN4 (NM_175607.1,2322-2340).
gtcacaccagcgaatgtca

SEQ ID NO: 429125 - DNA, 19 bp, Homo sapiens
  siRNA target sequence for CNTN4 (NM_175607.1,2550-2568).
gtaggtgtcttcaacaaca

SEQ ID NO: 429126 - DNA, 19 bp, Homo sapiens
  siRNA target sequence for CNTN4 (NM_175607.1,2589-2607).
cccaccacggtggtgtatt

SEQ ID NO: 429127 - DNA, 19 bp, Homo sapiens
  siRNA target sequence for CNTN4 (NM_175607.1,2600-2618).
ggtgtattctgcagaagaa

SEQ ID NO: 429128 - DNA, 19 bp, Homo sapiens
  siRNA target sequence for CNTN4 (NM_175607.1,2662-2680).
ctgccacagatattgaagt

SEQ ID NO: 429129 - DNA, 19 bp, Homo sapiens
  siRNA target sequence for CNTN4 (NM_175607.1,2664-2682).
gccacagatattgaagttt

SEQ ID NO: 429130 - DNA, 19 bp, Homo sapiens
  siRNA target sequence for CNTN4 (NM_175607.1,2702-2720).
gaagaatagaggacgaata

SEQ ID NO: 429131 - DNA, 19 bp, Homo sapiens
  siRNA target sequence for CNTN4 (NM_175607.1,2710-2728).
gaggacgaatacaaggtta

SEQ ID NO: 429132 - DNA, 19 bp, Homo sapiens
  siRNA target sequence for CNTN4 (NM_175607.1,2713-2731).
gacgaatacaaggttatga

SEQ ID NO: 429133 - DNA, 19 bp, Homo sapiens
  siRNA target sequence for CNTN4 (NM_175607.1,2724-2742).
ggttatgaggttaaatatt

SEQ ID NO: 429134 - DNA, 19 bp, Homo sapiens
  siRNA target sequence for CNTN4 (NM_175607.1,2787-2805).
gttggaaatcagacatcaa

SEQ ID NO: 429135 - DNA, 19 bp, Homo sapiens
  siRNA target sequence for CNTN4 (NM_175607.1,2826-2844).
ggcagtgtgctgtatcact

SEQ ID NO: 429136 - DNA, 19 bp, Homo sapiens
  siRNA target sequence for CNTN4 (NM_175607.1,2827-2845).
gcagtgtgctgtatcactt

SEQ ID NO: 429137 - DNA, 19 bp, Homo sapiens
  siRNA target sequence for CNTN4 (NM_175607.1,2884-2902).
ctagtgcaacagtcaatgt

SEQ ID NO: 429138 - DNA, 19 bp, Homo sapiens
  siRNA target sequence for CNTN4 (NM_175607.1,2935-2953).
ccggaaacatcatatggaa

SEQ ID NO: 429139 - DNA, 19 bp, Homo sapiens
  siRNA target sequence for CNTN4 (NM_175607.1,2936-2954).
cggaaacatcatatggaat

SEQ ID NO: 429140 - DNA, 19 bp, Homo sapiens
  siRNA target sequence for CNTN4 (NM_175607.1,2959-2977).
cagactccaaaattatcct

SEQ ID NO: 429141 - DNA, 19 bp, Homo sapiens
  siRNA target sequence for CNTN4 (NM_175607.1,3013-3031).
cggaagtaaaaggatacaa

SEQ ID NO: 429142 - DNA, 19 bp, Homo sapiens
  siRNA target sequence for CNTN4 (NM_175607.1,3088-3106).
catcggtggagctttcttt

SEQ ID NO: 429143 - DNA, 19 bp, Homo sapiens
  siRNA target sequence for CNTN4 (NM_175607.1,3107-3125).
gcctttcgatgaagattat

SEQ ID NO: 429144 - DNA, 19 bp, Homo sapiens
  siRNA target sequence for CNTN4 (NM_175607.1,3113-3131).
cgatgaagattatataata

SEQ ID NO: 429145 - DNA, 19 bp, Homo sapiens
  siRNA target sequence for CNTN4 (NM_175607.1,3183-3201).
cgaattccaaagatatcaa

SEQ ID NO: 429146 - DNA, 19 bp, Homo sapiens
  siRNA target sequence for CNTN4 (NM_175607.1,3225-3243).
gcttccacttcgaatgcat

SEQ ID NO: 429147 - DNA, 19 bp, Homo sapiens
  siRNA target sequence for CNTN4 (NM_175607.1,3249-3267).
ctgtcagccatcagtacaa

SEQ ID NO: 429148 - DNA, 19 bp, Homo sapiens
  siRNA target sequence for CNTN4 (NM_175607.1,3281-3299).
cacagctaggtccagttta

SEQ ID NO: 429149 - DNA, 19 bp, Homo sapiens
  siRNA target sequence for TJP1 (NM_175610.1,3227-3245).
gcctctcaacaggtgtata

SEQ ID NO: 429150 - DNA, 19 bp, Homo sapiens
  siRNA target sequence for TJP1 (NM_175610.1,3229-3247).
ctctcaacaggtgtataga

SEQ ID NO: 429151 - DNA, 19 bp, Homo sapiens
  siRNA target sequence for FIS (NM_175616.2,471-489).
gactggccgttgtctgaaa

SEQ ID NO: 429152 - DNA, 19 bp, Homo sapiens
  siRNA target sequence for FIS (NM_175616.2,475-493).
ggccgttgtctgaaagcaa

SEQ ID NO: 429153 - DNA, 19 bp, Homo sapiens
  siRNA target sequence for FIS (NM_175616.2,537-555).
gctgctccatcgcatgaat

SEQ ID NO: 429154 - DNA, 19 bp, Homo sapiens
  siRNA target sequence for FIS (NM_175616.2,538-556).
ctgctccatcgcatgaatt

SEQ ID NO: 429155 - DNA, 19 bp, Homo sapiens
  siRNA target sequence for FIS (NM_175616.2,541-559).
ctccatcgcatgaattcca

SEQ ID NO: 429156 - DNA, 19 bp, Homo sapiens
  siRNA target sequence for FIS (NM_175616.2,606-624).
cagggaggtcggttgatga

SEQ ID NO: 429157 - DNA, 19 bp, Homo sapiens
  siRNA target sequence for MT1E (NM_175617.2,246-264).
cctcattgcccgtgtcatt

SEQ ID NO: 429158 - DNA, 19 bp, Homo sapiens
  siRNA target sequence for MT1E (NM_175617.2,369-387).
gccagacgaaaaaaagcat

SEQ ID NO: 429159 - DNA, 19 bp, Homo sapiens
  siRNA target sequence for MT1E (NM_175617.2,409-427).
ctcgagccaggcttgctat

SEQ ID NO: 429160 - DNA, 19 bp, Homo sapiens
  siRNA target sequence for ZAR1 (NM_175619.1,950-968).
ggctgcgcttccagttctt

SEQ ID NO: 429161 - DNA, 19 bp, Homo sapiens
  siRNA target sequence for ZAR1 (NM_175619.1,1037-1055).
gtgtacagggaactaacaa

SEQ ID NO: 429162 - DNA, 19 bp, Homo sapiens
  siRNA target sequence for ZAR1 (NM_175619.1,1042-1060).
cagggaactaacaaggttt

SEQ ID NO: 429163 - DNA, 19 bp, Homo sapiens
  siRNA target sequence for ZAR1 (NM_175619.1,1045-1063).
ggaactaacaaggtttact

SEQ ID NO: 429164 - DNA, 19 bp, Homo sapiens
  siRNA target sequence for ZAR1 (NM_175619.1,1046-1064).
gaactaacaaggtttactt

SEQ ID NO: 429165 - DNA, 19 bp, Homo sapiens
  siRNA target sequence for ZAR1 (NM_175619.1,1103-1121).
cttaccgagtggaggatat

SEQ ID NO: 429166 - DNA, 19 bp, Homo sapiens
  siRNA target sequence for ZAR1 (NM_175619.1,1151-1169).
gttcctgcccagtaaaact

SEQ ID NO: 429167 - DNA, 19 bp, Homo sapiens
  siRNA target sequence for ZAR1 (NM_175619.1,1192-1210).
ccccaccgtcaagatttgt

SEQ ID NO: 429168 - DNA, 19 bp, Homo sapiens
  siRNA target sequence for ZAR1 (NM_175619.1,1250-1268).
ctttcagcttcaaatacat

SEQ ID NO: 429169 - DNA, 19 bp, Homo sapiens
  siRNA target sequence for LOC201243 (NM_175734.2,620-638).
ggctggatgctgtatgact

SEQ ID NO: 429170 - DNA, 19 bp, Homo sapiens
  siRNA target sequence for LOC201243 (NM_175734.2,1029-1047).
ctcccccgaccatgtttgt

SEQ ID NO: 429171 - DNA, 19 bp, Homo sapiens
  siRNA target sequence for FMNL3 (NM_175736.3,299-317).
cttggaccccagtgtaact

SEQ ID NO: 429172 - DNA, 19 bp, Homo sapiens
  siRNA target sequence for FMNL3 (NM_175736.3,310-328).
gtgtaactcggaagaagtt

SEQ ID NO: 429173 - DNA, 19 bp, Homo sapiens
  siRNA target sequence for FMNL3 (NM_175736.3,338-356).
ggtgcaggagtcaaccaaa

SEQ ID NO: 429174 - DNA, 19 bp, Homo sapiens
  siRNA target sequence for FMNL3 (NM_175736.3,341-359).
gcaggagtcaaccaaagta

SEQ ID NO: 429175 - DNA, 19 bp, Homo sapiens
  siRNA target sequence for FMNL3 (NM_175736.3,344-362).
ggagtcaaccaaagtacta

SEQ ID NO: 429176 - DNA, 19 bp, Homo sapiens
  siRNA target sequence for FMNL3 (NM_175736.3,345-363).
gagtcaaccaaagtactaa

SEQ ID NO: 429177 - DNA, 19 bp, Homo sapiens
  siRNA target sequence for FMNL3 (NM_175736.3,400-418).
ggtgggtgcgggaatttct

SEQ ID NO: 429178 - DNA, 19 bp, Homo sapiens
  siRNA target sequence for FMNL3 (NM_175736.3,404-422).
ggtgcgggaatttctgaat

SEQ ID NO: 429179 - DNA, 19 bp, Homo sapiens
  siRNA target sequence for FMNL3 (NM_175736.3,513-531).
gacgatggtgcatttgaca

SEQ ID NO: 429180 - DNA, 19 bp, Homo sapiens
  siRNA target sequence for FMNL3 (NM_175736.3,701-719).
cgtccacgtctgtatcctt

SEQ ID NO: 429181 - DNA, 19 bp, Homo sapiens
  siRNA target sequence for FMNL3 (NM_175736.3,795-813).
gcacttagcctcaataaca

SEQ ID NO: 429182 - DNA, 19 bp, Homo sapiens
  siRNA target sequence for FMNL3 (NM_175736.3,796-814).
cacttagcctcaataacaa

SEQ ID NO: 429183 - DNA, 19 bp, Homo sapiens
  siRNA target sequence for FMNL3 (NM_175736.3,870-888).
cgaggaggtcacgaaatca

SEQ ID NO: 429184 - DNA, 19 bp, Homo sapiens
  siRNA target sequence for FMNL3 (NM_175736.3,871-889).
gaggaggtcacgaaatcat

SEQ ID NO: 429185 - DNA, 19 bp, Homo sapiens
  siRNA target sequence for FMNL3 (NM_175736.3,1092-1110).
gagttcctgcagaagtcaa

SEQ ID NO: 429186 - DNA, 19 bp, Homo sapiens
  siRNA target sequence for FMNL3 (NM_175736.3,1348-1366).
gcatcaaggagacatatga

SEQ ID NO: 429187 - DNA, 19 bp, Homo sapiens
  siRNA target sequence for FMNL3 (NM_175736.3,1356-1374).
gagacatatgagaacacaa

SEQ ID NO: 429188 - DNA, 19 bp, Homo sapiens
  siRNA target sequence for FMNL3 (NM_175736.3,1391-1409).
cctgcggaggctcattaaa

SEQ ID NO: 429189 - DNA, 19 bp, Homo sapiens
  siRNA target sequence for FMNL3 (NM_175736.3,1438-1456).
gtcatttggagccaaatgt

SEQ ID NO: 429190 - DNA, 19 bp, Homo sapiens
  siRNA target sequence for FMNL3 (NM_175736.3,1695-1713).
ggcctgtcagccattcgaa

SEQ ID NO: 429191 - DNA, 19 bp, Homo sapiens
  siRNA target sequence for FMNL3 (NM_175736.3,1696-1714).
gcctgtcagccattcgaat

SEQ ID NO: 429192 - DNA, 19 bp, Homo sapiens
  siRNA target sequence for FMNL3 (NM_175736.3,1697-1715).
cctgtcagccattcgaatt

SEQ ID NO: 429193 - DNA, 19 bp, Homo sapiens
  siRNA target sequence for FMNL3 (NM_175736.3,1698-1716).
ctgtcagccattcgaatta

SEQ ID NO: 429194 - DNA, 19 bp, Homo sapiens
  siRNA target sequence for FMNL3 (NM_175736.3,1702-1720).
cagccattcgaattaagaa

SEQ ID NO: 429195 - DNA, 19 bp, Homo sapiens
  siRNA target sequence for FMNL3 (NM_175736.3,1740-1758).
cggctgcctgtcttcaact

SEQ ID NO: 429196 - DNA, 19 bp, Homo sapiens
  siRNA target sequence for FMNL3 (NM_175736.3,1792-1810).
ctgtcttcagcgaacttga

SEQ ID NO: 429197 - DNA, 19 bp, Homo sapiens
  siRNA target sequence for FMNL3 (NM_175736.3,1796-1814).
cttcagcgaacttgatgat

SEQ ID NO: 429198 - DNA, 19 bp, Homo sapiens
  siRNA target sequence for FMNL3 (NM_175736.3,1827-1845).
gaggacctggatcttgata

SEQ ID NO: 429199 - DNA, 19 bp, Homo sapiens
  siRNA target sequence for FMNL3 (NM_175736.3,1830-1848).
gacctggatcttgataagt

SEQ ID NO: 429200 - DNA, 19 bp, Homo sapiens
  siRNA target sequence for FMNL3 (NM_175736.3,1832-1850).
cctggatcttgataagttt

SEQ ID NO: 429201 - DNA, 19 bp, Homo sapiens
  siRNA target sequence for FMNL3 (NM_175736.3,1910-1928).
caagacagcgcaaaaagct

SEQ ID NO: 429202 - DNA, 19 bp, Homo sapiens
  siRNA target sequence for FMNL3 (NM_175736.3,2012-2030).
gatctgcagggccattcat

SEQ ID NO: 429203 - DNA, 19 bp, Homo sapiens
  siRNA target sequence for FMNL3 (NM_175736.3,2017-2035).
gcagggccattcatacgtt

SEQ ID NO: 429204 - DNA, 19 bp, Homo sapiens
  siRNA target sequence for FMNL3 (NM_175736.3,2022-2040).
gccattcatacgtttgact

SEQ ID NO: 429205 - DNA, 19 bp, Homo sapiens
  siRNA target sequence for FMNL3 (NM_175736.3,2233-2251).
ggaacttccaggataacct

SEQ ID NO: 429206 - DNA, 19 bp, Homo sapiens
  siRNA target sequence for FMNL3 (NM_175736.3,2324-2342).
gcagatgttggagatcata

SEQ ID NO: 429207 - DNA, 19 bp, Homo sapiens
  siRNA target sequence for FMNL3 (NM_175736.3,2343-2361).
cttgcactggggaactaca

SEQ ID NO: 429208 - DNA, 19 bp, Homo sapiens
  siRNA target sequence for FMNL3 (NM_175736.3,2346-2364).
gcactggggaactacatga

SEQ ID NO: 429209 - DNA, 19 bp, Homo sapiens
  siRNA target sequence for FMNL3 (NM_175736.3,2372-2390).
caagcggggagctgtgtat

SEQ ID NO: 429210 - DNA, 19 bp, Homo sapiens
  siRNA target sequence for FMNL3 (NM_175736.3,2512-2530).
ggcatgagctgcactttgt

SEQ ID NO: 429211 - DNA, 19 bp, Homo sapiens
  siRNA target sequence for FMNL3 (NM_175736.3,2645-2663).
gaacttcctcagtaccaat

SEQ ID NO: 429212 - DNA, 19 bp, Homo sapiens
  siRNA target sequence for FMNL3 (NM_175736.3,2739-2757).
ggcgagagtcccaagacta

SEQ ID NO: 429213 - DNA, 19 bp, Homo sapiens
  siRNA target sequence for FMNL3 (NM_175736.3,2755-2773).
ctacacctccttctgtatt

SEQ ID NO: 429214 - DNA, 19 bp, Homo sapiens
  siRNA target sequence for FMNL3 (NM_175736.3,2779-2797).
cagtatttgtccgattcat

SEQ ID NO: 429215 - DNA, 19 bp, Homo sapiens
  siRNA target sequence for CTAG3 (NM_175745.2,400-418).
gacttgcctcagaacgaaa

SEQ ID NO: 429216 - DNA, 19 bp, Homo sapiens
  siRNA target sequence for CTAG3 (NM_175745.2,402-420).
cttgcctcagaacgaaata

SEQ ID NO: 429217 - DNA, 19 bp, Homo sapiens
  siRNA target sequence for CTAG3 (NM_175745.2,470-488).
cttatggcacactagacaa

SEQ ID NO: 429218 - DNA, 19 bp, Homo sapiens
  siRNA target sequence for CTAG3 (NM_175745.2,475-493).
ggcacactagacaatttgt

SEQ ID NO: 429219 - DNA, 19 bp, Homo sapiens
  siRNA target sequence for CTAG3 (NM_175745.2,476-494).
gcacactagacaatttgtt

SEQ ID NO: 429220 - DNA, 19 bp, Homo sapiens
  siRNA target sequence for CTAG3 (NM_175745.2,477-495).
cacactagacaatttgtta

SEQ ID NO: 429221 - DNA, 19 bp, Homo sapiens
  siRNA target sequence for CTAG3 (NM_175745.2,504-522).
caacattgaaaattactca

SEQ ID NO: 429222 - DNA, 19 bp, Homo sapiens
  siRNA target sequence for CTAG3 (NM_175745.2,519-537).
ctcaacgaatgcactaatt

SEQ ID NO: 429223 - DNA, 19 bp, Homo sapiens
  siRNA target sequence for CTAG3 (NM_175745.2,521-539).
caacgaatgcactaattca

SEQ ID NO: 429224 - DNA, 19 bp, Homo sapiens
  siRNA target sequence for CTAG3 (NM_175745.2,563-581).
cttccttgagacaatttga

SEQ ID NO: 429225 - DNA, 19 bp, Homo sapiens
  siRNA target sequence for CTAG3 (NM_175745.2,602-620).
gggtagaagcatttgatga

SEQ ID NO: 429226 - DNA, 19 bp, Homo sapiens
  siRNA target sequence for CTAG3 (NM_175745.2,646-664).
caaagtcaagtgtataatt

SEQ ID NO: 429227 - DNA, 19 bp, Homo sapiens
  siRNA target sequence for CTAG3 (NM_175745.2,652-670).
caagtgtataattatgcaa

SEQ ID NO: 429228 - DNA, 19 bp, Homo sapiens
  siRNA target sequence for CTAG3 (NM_175745.2,745-763).
caacttggtaacgagtatt

SEQ ID NO: 429229 - DNA, 19 bp, Homo sapiens
  siRNA target sequence for CTAG3 (NM_175745.2,752-770).
gtaacgagtattttagaca

SEQ ID NO: 429230 - DNA, 19 bp, Homo sapiens
  siRNA target sequence for CTAG3 (NM_175745.2,806-824).
gtggagagatgctgaaatt

SEQ ID NO: 429231 - DNA, 19 bp, Homo sapiens
  siRNA target sequence for CTAG3 (NM_175745.2,879-897).
ccaacctccaagcttctta

SEQ ID NO: 429232 - DNA, 19 bp, Homo sapiens
  siRNA target sequence for CTAG3 (NM_175745.2,883-901).
cctccaagcttcttatgta

SEQ ID NO: 429233 - DNA, 19 bp, Homo sapiens
  siRNA target sequence for CTAG3 (NM_175745.2,886-904).
ccaagcttcttatgtaaga

SEQ ID NO: 429234 - DNA, 19 bp, Homo sapiens
  siRNA target sequence for CTAG3 (NM_175745.2,989-1007).
gtgtggagaggccagaaat

SEQ ID NO: 429235 - DNA, 19 bp, Homo sapiens
  siRNA target sequence for CTAG3 (NM_175745.2,994-1012).
gagaggccagaaattgtct

SEQ ID NO: 429236 - DNA, 19 bp, Homo sapiens
  siRNA target sequence for CTAG3 (NM_175745.2,1086-1104).
gcaaagtgctgaaagctta

SEQ ID NO: 429237 - DNA, 19 bp, Homo sapiens
  siRNA target sequence for CTAG3 (NM_175745.2,1170-1188).
gcaggaagtgcgaatccaa

SEQ ID NO: 429238 - DNA, 19 bp, Homo sapiens
  siRNA target sequence for CTAG3 (NM_175745.2,1186-1204).
caagaactccagtgtagta

SEQ ID NO: 429239 - DNA, 19 bp, Homo sapiens
  siRNA target sequence for CTAG3 (NM_175745.2,1197-1215).
gtgtagtaacctgtattta

SEQ ID NO: 429240 - DNA, 19 bp, Homo sapiens
  siRNA target sequence for CTAG3 (NM_175745.2,1199-1217).
gtagtaacctgtatttaga

SEQ ID NO: 429241 - DNA, 19 bp, Homo sapiens
  siRNA target sequence for CTAG3 (NM_175745.2,1218-1236).
gaagagggttaaagaacta

SEQ ID NO: 429242 - DNA, 19 bp, Homo sapiens
  siRNA target sequence for CTAG3 (NM_175745.2,1234-1252).
ctacagatgaagattacca

SEQ ID NO: 429243 - DNA, 19 bp, Homo sapiens
  siRNA target sequence for CTAG3 (NM_175745.2,1250-1268).
ccaaacagcaagtgttcat

SEQ ID NO: 429244 - DNA, 19 bp, Homo sapiens
  siRNA target sequence for CTAG3 (NM_175745.2,1333-1351).
ctagagaagaatgatacta

SEQ ID NO: 429245 - DNA, 19 bp, Homo sapiens
  siRNA target sequence for CTAG3 (NM_175745.2,1385-1403).
ctaacacgcaaaaacatct

SEQ ID NO: 429246 - DNA, 19 bp, Homo sapiens
  siRNA target sequence for CTAG3 (NM_175745.2,1416-1434).
gaatgacaaggaaatgtta

SEQ ID NO: 429247 - DNA, 19 bp, Homo sapiens
  siRNA target sequence for CTAG3 (NM_175745.2,1426-1444).
gaaatgttacagcttcaat

SEQ ID NO: 429248 - DNA, 19 bp, Homo sapiens
  siRNA target sequence for CTAG3 (NM_175745.2,1519-1537).
gtaagtcagtatttagaga

SEQ ID NO: 429249 - DNA, 19 bp, Homo sapiens
  siRNA target sequence for CTAG3 (NM_175745.2,1575-1593).
gagactacaacaactcaaa

SEQ ID NO: 429250 - DNA, 19 bp, Homo sapiens
  siRNA target sequence for CTAG3 (NM_175745.2,1673-1691).
ctttacaggaggaattcca

SEQ ID NO: 429251 - DNA, 19 bp, Homo sapiens
  siRNA target sequence for CTAG3 (NM_175745.2,1736-1754).
ctagacttgagaaattgct

SEQ ID NO: 429252 - DNA, 19 bp, Homo sapiens
  siRNA target sequence for CTAG3 (NM_175745.2,1753-1771).
ctcactcaagttagaaatt

SEQ ID NO: 429253 - DNA, 19 bp, Homo sapiens
  siRNA target sequence for CTAG3 (NM_175745.2,1759-1777).
caagttagaaatttgcaat

SEQ ID NO: 429254 - DNA, 19 bp, Homo sapiens
  siRNA target sequence for CTAG3 (NM_175745.2,1762-1780).
gttagaaatttgcaattta

SEQ ID NO: 429255 - DNA, 19 bp, Homo sapiens
  siRNA target sequence for CTAG3 (NM_175745.2,1796-1814).
gaacgaagaatataaaact

SEQ ID NO: 429256 - DNA, 19 bp, Homo sapiens
  siRNA target sequence for CTAG3 (NM_175745.2,1799-1817).
cgaagaatataaaacttca

SEQ ID NO: 429257 - DNA, 19 bp, Homo sapiens
  siRNA target sequence for CTAG3 (NM_175745.2,1936-1954).
gaagtcttgaagtcagata

SEQ ID NO: 429258 - DNA, 19 bp, Homo sapiens
  siRNA target sequence for CTAG3 (NM_175745.2,1939-1957).
gtcttgaagtcagatatta

SEQ ID NO: 429259 - DNA, 19 bp, Homo sapiens
  siRNA target sequence for CTAG3 (NM_175745.2,2019-2037).
gctgaatcctgcagatata

SEQ ID NO: 429260 - DNA, 19 bp, Homo sapiens
  siRNA target sequence for CTAG3 (NM_175745.2,2048-2066).
ctcagctggcctccaaaat

SEQ ID NO: 429261 - DNA, 19 bp, Homo sapiens
  siRNA target sequence for CTAG3 (NM_175745.2,2109-2127).
ggacatcatcaattctgat

SEQ ID NO: 429262 - DNA, 19 bp, Homo sapiens
  siRNA target sequence for CTAG3 (NM_175745.2,2123-2141).
ctgatgctgaacatttcaa

SEQ ID NO: 429263 - DNA, 19 bp, Homo sapiens
  siRNA target sequence for CTAG3 (NM_175745.2,2149-2167).
gagaaggttagtgatataa

SEQ ID NO: 429264 - DNA, 19 bp, Homo sapiens
  siRNA target sequence for CTAG3 (NM_175745.2,2230-2248).
cataaagatagaatcacaa

SEQ ID NO: 429265 - DNA, 19 bp, Homo sapiens
  siRNA target sequence for CTAG3 (NM_175745.2,2240-2258).
gaatcacaacctttagaga

SEQ ID NO: 429266 - DNA, 19 bp, Homo sapiens
  siRNA target sequence for CTAG3 (NM_175745.2,2287-2305).
gatcatgctattaaggtat

SEQ ID NO: 429267 - DNA, 19 bp, Homo sapiens
  siRNA target sequence for OLIG3 (NM_175747.2,349-367).
ccacgcagggcgatatgat

SEQ ID NO: 429268 - DNA, 19 bp, Homo sapiens
  siRNA target sequence for OLIG3 (NM_175747.2,358-376).
gcgatatgatgcagaagat

SEQ ID NO: 429269 - DNA, 19 bp, Homo sapiens
  siRNA target sequence for OLIG3 (NM_175747.2,661-679).
ggctggttggcgagatcta

SEQ ID NO: 429270 - DNA, 19 bp, Homo sapiens
  siRNA target sequence for OLIG3 (NM_175747.2,662-680).
gctggttggcgagatctat

SEQ ID NO: 429271 - DNA, 19 bp, Homo sapiens
  siRNA target sequence for OLIG3 (NM_175747.2,856-874).
ctccccactcgctactcaa

SEQ ID NO: 429272 - DNA, 19 bp, Homo sapiens
  siRNA target sequence for KRT6L (NM_175834.2,44-62).
ccgtctctcggcaaacata

SEQ ID NO: 429273 - DNA, 19 bp, Homo sapiens
  siRNA target sequence for KRT6L (NM_175834.2,46-64).
gtctctcggcaaacatact

SEQ ID NO: 429274 - DNA, 19 bp, Homo sapiens
  siRNA target sequence for KRT6L (NM_175834.2,54-72).
gcaaacatactccacaaaa

SEQ ID NO: 429275 - DNA, 19 bp, Homo sapiens
  siRNA target sequence for KRT6L (NM_175834.2,209-227).
gccgaagcctctataactt

SEQ ID NO: 429276 - DNA, 19 bp, Homo sapiens
  siRNA target sequence for KRT6L (NM_175834.2,1417-1435).
cccagtgcagtcagcattt

SEQ ID NO: 429277 - DNA, 19 bp, Homo sapiens
  siRNA target sequence for LOC150759 (NM_175853.2,70-88).
gtctgctagcagactaata

SEQ ID NO: 429278 - DNA, 19 bp, Homo sapiens
  siRNA target sequence for LOC150759 (NM_175853.2,74-92).
gctagcagactaatacaga

SEQ ID NO: 429279 - DNA, 19 bp, Homo sapiens
  siRNA target sequence for LOC150759 (NM_175853.2,174-192).
gaaactactgcaaacactt

SEQ ID NO: 429280 - DNA, 19 bp, Homo sapiens
  siRNA target sequence for PAN3 (NM_175854.4,111-129).
gcagagaatgactaatagt

SEQ ID NO: 429281 - DNA, 19 bp, Homo sapiens
  siRNA target sequence for PAN3 (NM_175854.4,112-130).
cagagaatgactaatagta

SEQ ID NO: 429282 - DNA, 19 bp, Homo sapiens
  siRNA target sequence for PAN3 (NM_175854.4,139-157).
ccaagccttctaaatgaca

SEQ ID NO: 429283 - DNA, 19 bp, Homo sapiens
  siRNA target sequence for PAN3 (NM_175854.4,154-172).
gacagtgccaagccatatt

SEQ ID NO: 429284 - DNA, 19 bp, Homo sapiens
  siRNA target sequence for PAN3 (NM_175854.4,156-174).
cagtgccaagccatattca

SEQ ID NO: 429285 - DNA, 19 bp, Homo sapiens
  siRNA target sequence for PAN3 (NM_175854.4,175-193).
gcccatgatcctctaacat

SEQ ID NO: 429286 - DNA, 19 bp, Homo sapiens
  siRNA target sequence for PAN3 (NM_175854.4,177-195).
ccatgatcctctaacatca

SEQ ID NO: 429287 - DNA, 19 bp, Homo sapiens
  siRNA target sequence for PAN3 (NM_175854.4,196-214).
cctgcttcatccttgttta

SEQ ID NO: 429288 - DNA, 19 bp, Homo sapiens
  siRNA target sequence for PAN3 (NM_175854.4,262-280).
cctactgcaagcgagttta

SEQ ID NO: 429289 - DNA, 19 bp, Homo sapiens
  siRNA target sequence for PAN3 (NM_175854.4,263-281).
ctactgcaagcgagtttat

SEQ ID NO: 429290 - DNA, 19 bp, Homo sapiens
  siRNA target sequence for PAN3 (NM_175854.4,268-286).
gcaagcgagtttattccta

SEQ ID NO: 429291 - DNA, 19 bp, Homo sapiens
  siRNA target sequence for PAN3 (NM_175854.4,269-287).
caagcgagtttattcctaa

SEQ ID NO: 429292 - DNA, 19 bp, Homo sapiens
  siRNA target sequence for PAN3 (NM_175854.4,273-291).
cgagtttattcctaaagga

SEQ ID NO: 429293 - DNA, 19 bp, Homo sapiens
  siRNA target sequence for PAN3 (NM_175854.4,311-329).
gtaacgtgtcccagtcaaa

SEQ ID NO: 429294 - DNA, 19 bp, Homo sapiens
  siRNA target sequence for PAN3 (NM_175854.4,316-334).
gtgtcccagtcaaatatgt

SEQ ID NO: 429295 - DNA, 19 bp, Homo sapiens
  siRNA target sequence for PAN3 (NM_175854.4,318-336).
gtcccagtcaaatatgtct

SEQ ID NO: 429296 - DNA, 19 bp, Homo sapiens
  siRNA target sequence for PAN3 (NM_175854.4,441-459).
caagattactccacatact

SEQ ID NO: 429297 - DNA, 19 bp, Homo sapiens
  siRNA target sequence for PAN3 (NM_175854.4,488-506).
ctccaaatccagcaagtta

SEQ ID NO: 429298 - DNA, 19 bp, Homo sapiens
  siRNA target sequence for PAN3 (NM_175854.4,490-508).
ccaaatccagcaagttaca

SEQ ID NO: 429299 - DNA, 19 bp, Homo sapiens
  siRNA target sequence for PAN3 (NM_175854.4,514-532).
ccttctagtgcctctacat

SEQ ID NO: 429300 - DNA, 19 bp, Homo sapiens
  siRNA target sequence for PAN3 (NM_175854.4,521-539).
gtgcctctacatctgttaa

SEQ ID NO: 429301 - DNA, 19 bp, Homo sapiens
  siRNA target sequence for PAN3 (NM_175854.4,523-541).
gcctctacatctgttaata

SEQ ID NO: 429302 - DNA, 19 bp, Homo sapiens
  siRNA target sequence for PAN3 (NM_175854.4,566-584).
ctggtcaggtgatccaaaa

SEQ ID NO: 429303 - DNA, 19 bp, Homo sapiens
  siRNA target sequence for PAN3 (NM_175854.4,592-610).
gttggtgggacgacttact

SEQ ID NO: 429304 - DNA, 19 bp, Homo sapiens
  siRNA target sequence for PAN3 (NM_175854.4,595-613).
ggtgggacgacttacttct

SEQ ID NO: 429305 - DNA, 19 bp, Homo sapiens
  siRNA target sequence for PAN3 (NM_175854.4,596-614).
gtgggacgacttacttcta

SEQ ID NO: 429306 - DNA, 19 bp, Homo sapiens
  siRNA target sequence for PAN3 (NM_175854.4,598-616).
gggacgacttacttctata

SEQ ID NO: 429307 - DNA, 19 bp, Homo sapiens
  siRNA target sequence for PAN3 (NM_175854.4,600-618).
gacgacttacttctataca

SEQ ID NO: 429308 - DNA, 19 bp, Homo sapiens
  siRNA target sequence for PAN3 (NM_175854.4,644-662).
gaatggtgtttccaaacta

SEQ ID NO: 429309 - DNA, 19 bp, Homo sapiens
  siRNA target sequence for PAN3 (NM_175854.4,680-698).
ctgcacctcacgttgctta

SEQ ID NO: 429310 - DNA, 19 bp, Homo sapiens
  siRNA target sequence for PAN3 (NM_175854.4,682-700).
gcacctcacgttgcttata

SEQ ID NO: 429311 - DNA, 19 bp, Homo sapiens
  siRNA target sequence for PAN3 (NM_175854.4,683-701).
cacctcacgttgcttatat

SEQ ID NO: 429312 - DNA, 19 bp, Homo sapiens
  siRNA target sequence for PAN3 (NM_175854.4,759-777).
gatcaacagacatttaata

SEQ ID NO: 429313 - DNA, 19 bp, Homo sapiens
  siRNA target sequence for PAN3 (NM_175854.4,779-797).
caatggctcaaattgatca

SEQ ID NO: 429314 - DNA, 19 bp, Homo sapiens
  siRNA target sequence for PAN3 (NM_175854.4,823-841).
gaggttgacagctaccata

SEQ ID NO: 429315 - DNA, 19 bp, Homo sapiens
  siRNA target sequence for PAN3 (NM_175854.4,876-894).
ccggatacagaaatcaagt

SEQ ID NO: 429316 - DNA, 19 bp, Homo sapiens
  siRNA target sequence for PAN3 (NM_175854.4,877-895).
cggatacagaaatcaagta

SEQ ID NO: 429317 - DNA, 19 bp, Homo sapiens
  siRNA target sequence for PAN3 (NM_175854.4,879-897).
gatacagaaatcaagtaat

SEQ ID NO: 429318 - DNA, 19 bp, Homo sapiens
  siRNA target sequence for PAN3 (NM_175854.4,963-981).
gaggatacatggttttcgt

SEQ ID NO: 429319 - DNA, 19 bp, Homo sapiens
  siRNA target sequence for PAN3 (NM_175854.4,970-988).
catggttttcgtcttgtta

SEQ ID NO: 429320 - DNA, 19 bp, Homo sapiens
  siRNA target sequence for PAN3 (NM_175854.4,1023-1041).
gaaaattcaacactcaaat

SEQ ID NO: 429321 - DNA, 19 bp, Homo sapiens
  siRNA target sequence for PAN3 (NM_175854.4,1030-1048).
caacactcaaatatcgtaa

SEQ ID NO: 429322 - DNA, 19 bp, Homo sapiens
  siRNA target sequence for PAN3 (NM_175854.4,1033-1051).
cactcaaatatcgtaactt

SEQ ID NO: 429323 - DNA, 19 bp, Homo sapiens
  siRNA target sequence for PAN3 (NM_175854.4,1087-1105).
ccctctcttgtgtttgcat

SEQ ID NO: 429324 - DNA, 19 bp, Homo sapiens
  siRNA target sequence for PAN3 (NM_175854.4,1088-1106).
cctctcttgtgtttgcata

SEQ ID NO: 429325 - DNA, 19 bp, Homo sapiens
  siRNA target sequence for PAN3 (NM_175854.4,1089-1107).
ctctcttgtgtttgcatat

SEQ ID NO: 429326 - DNA, 19 bp, Homo sapiens
  siRNA target sequence for PAN3 (NM_175854.4,1118-1136).
ctggaggagaaactatgat

SEQ ID NO: 429327 - DNA, 19 bp, Homo sapiens
  siRNA target sequence for PAN3 (NM_175854.4,1120-1138).
ggaggagaaactatgatga

SEQ ID NO: 429328 - DNA, 19 bp, Homo sapiens
  siRNA target sequence for PAN3 (NM_175854.4,1134-1152).
gatgagcagacactttaat

SEQ ID NO: 429329 - DNA, 19 bp, Homo sapiens
  siRNA target sequence for PAN3 (NM_175854.4,1279-1297).
gcattgcgtaccattcata

SEQ ID NO: 429330 - DNA, 19 bp, Homo sapiens
  siRNA target sequence for PAN3 (NM_175854.4,1304-1322).
gtttggcatgtcgagttat

SEQ ID NO: 429331 - DNA, 19 bp, Homo sapiens
  siRNA target sequence for PAN3 (NM_175854.4,1308-1326).
ggcatgtcgagttatggat

SEQ ID NO: 429332 - DNA, 19 bp, Homo sapiens
  siRNA target sequence for PAN3 (NM_175854.4,1324-1342).
gatccaacaaagattctga

SEQ ID NO: 429333 - DNA, 19 bp, Homo sapiens
  siRNA target sequence for PAN3 (NM_175854.4,1339-1357).
ctgataactggcaaaacaa

SEQ ID NO: 429334 - DNA, 19 bp, Homo sapiens
  siRNA target sequence for PAN3 (NM_175854.4,1358-1376).
ggttgcgagtaaattgtgt

SEQ ID NO: 429335 - DNA, 19 bp, Homo sapiens
  siRNA target sequence for PAN3 (NM_175854.4,1359-1377).
gttgcgagtaaattgtgtt

SEQ ID NO: 429336 - DNA, 19 bp, Homo sapiens
  siRNA target sequence for PAN3 (NM_175854.4,1449-1467).
gcaagcagatctgatatca

SEQ ID NO: 429337 - DNA, 19 bp, Homo sapiens
  siRNA target sequence for PAN3 (NM_175854.4,1456-1474).
gatctgatatcattaggaa

SEQ ID NO: 429338 - DNA, 19 bp, Homo sapiens
  siRNA target sequence for PAN3 (NM_175854.4,1486-1504).
gctttggcttgcaactctt

SEQ ID NO: 429339 - DNA, 19 bp, Homo sapiens
  siRNA target sequence for PAN3 (NM_175854.4,1487-1505).
ctttggcttgcaactcttt

SEQ ID NO: 429340 - DNA, 19 bp, Homo sapiens
  siRNA target sequence for PAN3 (NM_175854.4,1510-1528).
ggaattcagcgagagaatt

SEQ ID NO: 429341 - DNA, 19 bp, Homo sapiens
  siRNA target sequence for PAN3 (NM_175854.4,1511-1529).
gaattcagcgagagaattt

SEQ ID NO: 429342 - DNA, 19 bp, Homo sapiens
  siRNA target sequence for PAN3 (NM_175854.4,1543-1561).
gaactggtgacaatcaact

SEQ ID NO: 429343 - DNA, 19 bp, Homo sapiens
  siRNA target sequence for PAN3 (NM_175854.4,1549-1567).
gtgacaatcaactattcct

SEQ ID NO: 429344 - DNA, 19 bp, Homo sapiens
  siRNA target sequence for PAN3 (NM_175854.4,1575-1593).
gaagaatctgattttgtat

SEQ ID NO: 429345 - DNA, 19 bp, Homo sapiens
  siRNA target sequence for PAN3 (NM_175854.4,1611-1629).
caggatgcgaagtgtaaat

SEQ ID NO: 429346 - DNA, 19 bp, Homo sapiens
  siRNA target sequence for PAN3 (NM_175854.4,1613-1631).
ggatgcgaagtgtaaatga

SEQ ID NO: 429347 - DNA, 19 bp, Homo sapiens
  siRNA target sequence for PAN3 (NM_175854.4,1644-1662).
gattggtgctcgattttat

SEQ ID NO: 429348 - DNA, 19 bp, Homo sapiens
  siRNA target sequence for PAN3 (NM_175854.4,1649-1667).
gtgctcgattttatactca

SEQ ID NO: 429349 - DNA, 19 bp, Homo sapiens
  siRNA target sequence for PAN3 (NM_175854.4,1651-1669).
gctcgattttatactcaat

SEQ ID NO: 429350 - DNA, 19 bp, Homo sapiens
  siRNA target sequence for PAN3 (NM_175854.4,1652-1670).
ctcgattttatactcaatt

SEQ ID NO: 429351 - DNA, 19 bp, Homo sapiens
  siRNA target sequence for PAN3 (NM_175854.4,1655-1673).
gattttatactcaattgga

SEQ ID NO: 429352 - DNA, 19 bp, Homo sapiens
  siRNA target sequence for PAN3 (NM_175854.4,1740-1758).
gtttaggctcctagcaaaa

SEQ ID NO: 429353 - DNA, 19 bp, Homo sapiens
  siRNA target sequence for PAN3 (NM_175854.4,1753-1771).
gcaaaattgggaacaatca

SEQ ID NO: 429354 - DNA, 19 bp, Homo sapiens
  siRNA target sequence for PAN3 (NM_175854.4,1754-1772).
caaaattgggaacaatcaa

SEQ ID NO: 429355 - DNA, 19 bp, Homo sapiens
  siRNA target sequence for PAN3 (NM_175854.4,1817-1835).
gagaccgttatctgttgaa

SEQ ID NO: 429356 - DNA, 19 bp, Homo sapiens
  siRNA target sequence for PAN3 (NM_175854.4,1822-1840).
cgttatctgttgaaactct

SEQ ID NO: 429357 - DNA, 19 bp, Homo sapiens
  siRNA target sequence for PAN3 (NM_175854.4,1823-1841).
gttatctgttgaaactctt

SEQ ID NO: 429358 - DNA, 19 bp, Homo sapiens
  siRNA target sequence for PAN3 (NM_175854.4,1887-1905).
gattgacctcagtcatata

SEQ ID NO: 429359 - DNA, 19 bp, Homo sapiens
  siRNA target sequence for PAN3 (NM_175854.4,1891-1909).
gacctcagtcatataattt

SEQ ID NO: 429360 - DNA, 19 bp, Homo sapiens
  siRNA target sequence for PAN3 (NM_175854.4,1893-1911).
cctcagtcatataatttct

SEQ ID NO: 429361 - DNA, 19 bp, Homo sapiens
  siRNA target sequence for PAN3 (NM_175854.4,1986-2004).
ggtgacctacagtgactta

SEQ ID NO: 429362 - DNA, 19 bp, Homo sapiens
  siRNA target sequence for PAN3 (NM_175854.4,1987-2005).
gtgacctacagtgacttaa

SEQ ID NO: 429363 - DNA, 19 bp, Homo sapiens
  siRNA target sequence for ARG99 (NM_175861.1,477-495).
gaacccattctactttcat

SEQ ID NO: 429364 - DNA, 19 bp, Homo sapiens
  siRNA target sequence for ARG99 (NM_175861.1,486-504).
ctactttcatgcagtaaat

SEQ ID NO: 429365 - DNA, 19 bp, Homo sapiens
  siRNA target sequence for ARG99 (NM_175861.1,537-555).
gatgtacacctgtgataaa

SEQ ID NO: 429366 - DNA, 19 bp, Homo sapiens
  siRNA target sequence for ARG99 (NM_175861.1,571-589).
cgtggacttgcttttgtaa

SEQ ID NO: 429367 - DNA, 19 bp, Homo sapiens
  siRNA target sequence for ARG99 (NM_175861.1,604-622).
gctgtacatcctattcata

SEQ ID NO: 429368 - DNA, 19 bp, Homo sapiens
  siRNA target sequence for ARG99 (NM_175861.1,664-682).
gcgtgtctgctgtttctat

SEQ ID NO: 429369 - DNA, 19 bp, Homo sapiens
  siRNA target sequence for ARG99 (NM_175861.1,665-683).
cgtgtctgctgtttctatt

SEQ ID NO: 429370 - DNA, 19 bp, Homo sapiens
  siRNA target sequence for ARG99 (NM_175861.1,685-703).
gcctttctctcgtacaaca

SEQ ID NO: 429371 - DNA, 19 bp, Homo sapiens
  siRNA target sequence for ARG99 (NM_175861.1,746-764).
cggtgtctcccttcttctt

SEQ ID NO: 429372 - DNA, 19 bp, Homo sapiens
  siRNA target sequence for ARG99 (NM_175861.1,762-780).
cttgctgctcagtttgttt

SEQ ID NO: 429373 - DNA, 19 bp, Homo sapiens
  siRNA target sequence for ARG99 (NM_175861.1,791-809).
gtgcgatgctggtgaaaga

SEQ ID NO: 429374 - DNA, 19 bp, Homo sapiens
  siRNA target sequence for ARG99 (NM_175861.1,978-996).
gcagcggttccctcacaaa

SEQ ID NO: 429375 - DNA, 19 bp, Homo sapiens
  siRNA target sequence for LOC90925 (NM_175870.3,140-158).
ctgaggatctcctgtaaga

SEQ ID NO: 429376 - DNA, 19 bp, Homo sapiens
  siRNA target sequence for FLJ35119 (NM_175871.2,157-175).
gacacgaaggcctcttcaa

SEQ ID NO: 429377 - DNA, 19 bp, Homo sapiens
  siRNA target sequence for FLJ35119 (NM_175871.2,504-522).
cactgctccagcggtattt

SEQ ID NO: 429378 - DNA, 19 bp, Homo sapiens
  siRNA target sequence for FLJ35119 (NM_175871.2,508-526).
gctccagcggtattttcct

SEQ ID NO: 429379 - DNA, 19 bp, Homo sapiens
  siRNA target sequence for FLJ35119 (NM_175871.2,615-633).
cagagtggtgggtgacttt

SEQ ID NO: 429380 - DNA, 19 bp, Homo sapiens
  siRNA target sequence for FLJ35119 (NM_175871.2,625-643).
ggtgactttccgatcagat

SEQ ID NO: 429381 - DNA, 19 bp, Homo sapiens
  siRNA target sequence for LOC134548 (NM_175873.2,718-736).
gcccgaggcttgaagaagt

SEQ ID NO: 429382 - DNA, 19 bp, Homo sapiens
  siRNA target sequence for LOC134548 (NM_175873.2,768-786).
gcccatggctccacgtaaa

SEQ ID NO: 429383 - DNA, 19 bp, Homo sapiens
  siRNA target sequence for LOC134548 (NM_175873.2,769-787).
cccatggctccacgtaaaa

SEQ ID NO: 429384 - DNA, 19 bp, Homo sapiens
  siRNA target sequence for LOC134548 (NM_175873.2,770-788).
ccatggctccacgtaaaaa

SEQ ID NO: 429385 - DNA, 19 bp, Homo sapiens
  siRNA target sequence for LOC134548 (NM_175873.2,774-792).
ggctccacgtaaaaagaca

SEQ ID NO: 429386 - DNA, 19 bp, Homo sapiens
  siRNA target sequence for LOC134548 (NM_175873.2,775-793).
gctccacgtaaaaagacaa

SEQ ID NO: 429387 - DNA, 19 bp, Homo sapiens
  siRNA target sequence for LOC134548 (NM_175873.2,776-794).
ctccacgtaaaaagacaaa

SEQ ID NO: 429388 - DNA, 19 bp, Homo sapiens
  siRNA target sequence for MGC47869 (NM_175874.2,248-266).
ctgccaaaatgttcttctt

SEQ ID NO: 429389 - DNA, 19 bp, Homo sapiens
  siRNA target sequence for MGC47869 (NM_175874.2,261-279).
cttctttcatgtacaagat

SEQ ID NO: 429390 - DNA, 19 bp, Homo sapiens
  siRNA target sequence for MGC47869 (NM_175874.2,312-330).
gtttagccgcagtatgaat

SEQ ID NO: 429391 - DNA, 19 bp, Homo sapiens
  siRNA target sequence for MGC47869 (NM_175874.2,317-335).
gccgcagtatgaatactca

SEQ ID NO: 429392 - DNA, 19 bp, Homo sapiens
  siRNA target sequence for MGC47869 (NM_175874.2,318-336).
ccgcagtatgaatactcaa

SEQ ID NO: 429393 - DNA, 19 bp, Homo sapiens
  siRNA target sequence for MGC47869 (NM_175874.2,319-337).
cgcagtatgaatactcaaa

SEQ ID NO: 429394 - DNA, 19 bp, Homo sapiens
  siRNA target sequence for MGC47869 (NM_175874.2,320-338).
gcagtatgaatactcaaat

SEQ ID NO: 429395 - DNA, 19 bp, Homo sapiens
  siRNA target sequence for MGC47869 (NM_175874.2,323-341).
gtatgaatactcaaatcct

SEQ ID NO: 429396 - DNA, 19 bp, Homo sapiens
  siRNA target sequence for MGC47869 (NM_175874.2,360-378).
caatagttacattaaggat

SEQ ID NO: 429397 - DNA, 19 bp, Homo sapiens
  siRNA target sequence for MGC47869 (NM_175874.2,495-513).
ggttcagaagagtaccaat

SEQ ID NO: 429398 - DNA, 19 bp, Homo sapiens
  siRNA target sequence for MGC47869 (NM_175874.2,522-540).
gttgcatcagtcagctaaa

SEQ ID NO: 429399 - DNA, 19 bp, Homo sapiens
  siRNA target sequence for MGC47869 (NM_175874.2,533-551).
cagctaaagaagtattcaa

SEQ ID NO: 429400 - DNA, 19 bp, Homo sapiens
  siRNA target sequence for MGC47869 (NM_175874.2,559-577).
catacgccagtcatcatct

SEQ ID NO: 429401 - DNA, 19 bp, Homo sapiens
  siRNA target sequence for MGC47869 (NM_175874.2,648-666).
catgaatcttcaattaagt

SEQ ID NO: 429402 - DNA, 19 bp, Homo sapiens
  siRNA target sequence for MGC47869 (NM_175874.2,658-676).
caattaagtgacttctata

SEQ ID NO: 429403 - DNA, 19 bp, Homo sapiens
  siRNA target sequence for MGC47869 (NM_175874.2,743-761).
ccaaaaccactatgataga

SEQ ID NO: 429404 - DNA, 19 bp, Homo sapiens
  siRNA target sequence for MGC47869 (NM_175874.2,826-844).
gcagatttgttggaacaaa

SEQ ID NO: 429405 - DNA, 19 bp, Homo sapiens
  siRNA target sequence for MGC47869 (NM_175874.2,852-870).
ggctatgggaccaatctta

SEQ ID NO: 429406 - DNA, 19 bp, Homo sapiens
  siRNA target sequence for MGC47869 (NM_175874.2,854-872).
ctatgggaccaatcttaga

SEQ ID NO: 429407 - DNA, 19 bp, Homo sapiens
  siRNA target sequence for MGC47869 (NM_175874.2,867-885).
cttagagatcctccaaaaa

SEQ ID NO: 429408 - DNA, 19 bp, Homo sapiens
  siRNA target sequence for MGC47869 (NM_175874.2,879-897).
ccaaaaagcgataaagact

SEQ ID NO: 429409 - DNA, 19 bp, Homo sapiens
  siRNA target sequence for SIX5 (NM_175875.3,1612-1630).
cccacctccccactattga

SEQ ID NO: 429410 - DNA, 19 bp, Homo sapiens
  siRNA target sequence for SIX5 (NM_175875.3,1613-1631).
ccacctccccactattgaa

SEQ ID NO: 429411 - DNA, 19 bp, Homo sapiens
  siRNA target sequence for SIX5 (NM_175875.3,2162-2180).
caccagaggggctgatgtt

SEQ ID NO: 429412 - DNA, 19 bp, Homo sapiens
  siRNA target sequence for EXOC8 (NM_175876.1,268-286).
gaactaccggcagttcata

SEQ ID NO: 429413 - DNA, 19 bp, Homo sapiens
  siRNA target sequence for EXOC8 (NM_175876.1,344-362).
ctgaccgagcagaaaagca

SEQ ID NO: 429414 - DNA, 19 bp, Homo sapiens
  siRNA target sequence for EXOC8 (NM_175876.1,633-651).
gggacctagtggaatacga

SEQ ID NO: 429415 - DNA, 19 bp, Homo sapiens
  siRNA target sequence for EXOC8 (NM_175876.1,634-652).
ggacctagtggaatacgat

SEQ ID NO: 429416 - DNA, 19 bp, Homo sapiens
  siRNA target sequence for EXOC8 (NM_175876.1,677-695).
cgggtgcacggctttctca

SEQ ID NO: 429417 - DNA, 19 bp, Homo sapiens
  siRNA target sequence for EXOC8 (NM_175876.1,678-696).
gggtgcacggctttctcat

SEQ ID NO: 429418 - DNA, 19 bp, Homo sapiens
  siRNA target sequence for EXOC8 (NM_175876.1,686-704).
ggctttctcatgaacgatt

SEQ ID NO: 429419 - DNA, 19 bp, Homo sapiens
  siRNA target sequence for EXOC8 (NM_175876.1,749-767).
cgctacaacgctctctatt

SEQ ID NO: 429420 - DNA, 19 bp, Homo sapiens
  siRNA target sequence for EXOC8 (NM_175876.1,843-861).
ccgagagccgtattttcca

SEQ ID NO: 429421 - DNA, 19 bp, Homo sapiens
  siRNA target sequence for EXOC8 (NM_175876.1,859-877).
ccaggccgaaaatgctaaa

SEQ ID NO: 429422 - DNA, 19 bp, Homo sapiens
  siRNA target sequence for EXOC8 (NM_175876.1,860-878).
caggccgaaaatgctaaaa

SEQ ID NO: 429423 - DNA, 19 bp, Homo sapiens
  siRNA target sequence for EXOC8 (NM_175876.1,1061-1079).
gtggacctctccatggaat

SEQ ID NO: 429424 - DNA, 19 bp, Homo sapiens
  siRNA target sequence for EXOC8 (NM_175876.1,1140-1158).
cggttgacctgctggataa

SEQ ID NO: 429425 - DNA, 19 bp, Homo sapiens
  siRNA target sequence for EXOC8 (NM_175876.1,1141-1159).
ggttgacctgctggataaa

SEQ ID NO: 429426 - DNA, 19 bp, Homo sapiens
  siRNA target sequence for EXOC8 (NM_175876.1,1145-1163).
gacctgctggataaattga

SEQ ID NO: 429427 - DNA, 19 bp, Homo sapiens
  siRNA target sequence for EXOC8 (NM_175876.1,1165-1183).
ccattacctggaagataaa

SEQ ID NO: 429428 - DNA, 19 bp, Homo sapiens
  siRNA target sequence for EXOC8 (NM_175876.1,1185-1203).
ctagcccacctcctgtaaa

SEQ ID NO: 429429 - DNA, 19 bp, Homo sapiens
  siRNA target sequence for EXOC8 (NM_175876.1,1188-1206).
gcccacctcctgtaaaaga

SEQ ID NO: 429430 - DNA, 19 bp, Homo sapiens
  siRNA target sequence for EXOC8 (NM_175876.1,1191-1209).
cacctcctgtaaaagaact

SEQ ID NO: 429431 - DNA, 19 bp, Homo sapiens
  siRNA target sequence for EXOC8 (NM_175876.1,1193-1211).
cctcctgtaaaagaactaa

SEQ ID NO: 429432 - DNA, 19 bp, Homo sapiens
  siRNA target sequence for EXOC8 (NM_175876.1,1241-1259).
ctcactgaggtgctagttt

SEQ ID NO: 429433 - DNA, 19 bp, Homo sapiens
  siRNA target sequence for EXOC8 (NM_175876.1,1245-1263).
ctgaggtgctagttttcga

SEQ ID NO: 429434 - DNA, 19 bp, Homo sapiens
  siRNA target sequence for EXOC8 (NM_175876.1,1311-1329).
gagcagtttcgcaactgat

SEQ ID NO: 429435 - DNA, 19 bp, Homo sapiens
  siRNA target sequence for EXOC8 (NM_175876.1,1347-1365).
cgaaggcctgtgagctatt

SEQ ID NO: 429436 - DNA, 19 bp, Homo sapiens
  siRNA target sequence for EXOC8 (NM_175876.1,1348-1366).
gaaggcctgtgagctattt

SEQ ID NO: 429437 - DNA, 19 bp, Homo sapiens
  siRNA target sequence for EXOC8 (NM_175876.1,1354-1372).
ctgtgagctatttttgaga

SEQ ID NO: 429438 - DNA, 19 bp, Homo sapiens
  siRNA target sequence for EXOC8 (NM_175876.1,1358-1376).
gagctatttttgagaaaca

SEQ ID NO: 429439 - DNA, 19 bp, Homo sapiens
  siRNA target sequence for EXOC8 (NM_175876.1,1384-1402).
cgctgttcatactgcaatt

SEQ ID NO: 429440 - DNA, 19 bp, Homo sapiens
  siRNA target sequence for EXOC8 (NM_175876.1,1421-1439).
ggtgccactttactctata

SEQ ID NO: 429441 - DNA, 19 bp, Homo sapiens
  siRNA target sequence for EXOC8 (NM_175876.1,1425-1443).
ccactttactctatattca

SEQ ID NO: 429442 - DNA, 19 bp, Homo sapiens
  siRNA target sequence for EXOC8 (NM_175876.1,1426-1444).
cactttactctatattcat

SEQ ID NO: 429443 - DNA, 19 bp, Homo sapiens
  siRNA target sequence for EXOC8 (NM_175876.1,1447-1465).
gctgtgccatgtcttcttt

SEQ ID NO: 429444 - DNA, 19 bp, Homo sapiens
  siRNA target sequence for EXOC8 (NM_175876.1,1475-1493).
ctcgagactgcaagagaat

SEQ ID NO: 429445 - DNA, 19 bp, Homo sapiens
  siRNA target sequence for EXOC8 (NM_175876.1,1626-1644).
cagctgagtgtgtaaaagt

SEQ ID NO: 429446 - DNA, 19 bp, Homo sapiens
  siRNA target sequence for EXOC8 (NM_175876.1,1659-1677).
gccagcaactgggtgatat

SEQ ID NO: 429447 - DNA, 19 bp, Homo sapiens
  siRNA target sequence for EXOC8 (NM_175876.1,1730-1748).
ggggccttgcacagttaca

SEQ ID NO: 429448 - DNA, 19 bp, Homo sapiens
  siRNA target sequence for EXOC8 (NM_175876.1,1731-1749).
gggccttgcacagttacaa

SEQ ID NO: 429449 - DNA, 19 bp, Homo sapiens
  siRNA target sequence for EXOC8 (NM_175876.1,1732-1750).
ggccttgcacagttacaaa

SEQ ID NO: 429450 - DNA, 19 bp, Homo sapiens
  siRNA target sequence for EXOC8 (NM_175876.1,1743-1761).
gttacaaagaaatcatcat

SEQ ID NO: 429451 - DNA, 19 bp, Homo sapiens
  siRNA target sequence for EXOC8 (NM_175876.1,1827-1845).
ccctgggtaagctcaaaga

SEQ ID NO: 429452 - DNA, 19 bp, Homo sapiens
  siRNA target sequence for EXOC8 (NM_175876.1,1828-1846).
cctgggtaagctcaaagaa

SEQ ID NO: 429453 - DNA, 19 bp, Homo sapiens
  siRNA target sequence for EXOC8 (NM_175876.1,1857-1875).
gttgtggggtaagtaactt

SEQ ID NO: 429454 - DNA, 19 bp, Homo sapiens
  siRNA target sequence for EXOC8 (NM_175876.1,1895-1913).
gactgctgggtgaacctaa

SEQ ID NO: 429455 - DNA, 19 bp, Homo sapiens
  siRNA target sequence for EXOC8 (NM_175876.1,1899-1917).
gctgggtgaacctaagtta

SEQ ID NO: 429456 - DNA, 19 bp, Homo sapiens
  siRNA target sequence for EXOC8 (NM_175876.1,1903-1921).
ggtgaacctaagttacaca

SEQ ID NO: 429457 - DNA, 19 bp, Homo sapiens
  siRNA target sequence for EXOC8 (NM_175876.1,1914-1932).
gttacacagtggttgcttt

SEQ ID NO: 429458 - DNA, 19 bp, Homo sapiens
  siRNA target sequence for EXOC8 (NM_175876.1,2097-2115).
gacagaatgcatccttttt

SEQ ID NO: 429459 - DNA, 19 bp, Homo sapiens
  siRNA target sequence for EXOC8 (NM_175876.1,2186-2204).
caagatctgaggaatgcat

SEQ ID NO: 429460 - DNA, 19 bp, Homo sapiens
  siRNA target sequence for EXOC8 (NM_175876.1,2194-2212).
gaggaatgcatctagactt

SEQ ID NO: 429461 - DNA, 19 bp, Homo sapiens
  siRNA target sequence for MGC57211 (NM_175878.2,173-191).
ggccagagactccatctaa

SEQ ID NO: 429462 - DNA, 19 bp, Homo sapiens
  siRNA target sequence for MGC57211 (NM_175878.2,178-196).
gagactccatctaagcttt

SEQ ID NO: 429463 - DNA, 19 bp, Homo sapiens
  siRNA target sequence for MGC57211 (NM_175878.2,188-206).
ctaagctttccttttagca

SEQ ID NO: 429464 - DNA, 19 bp, Homo sapiens
  siRNA target sequence for MGC57211 (NM_175878.2,192-210).
gctttccttttagcattat

SEQ ID NO: 429465 - DNA, 19 bp, Homo sapiens
  siRNA target sequence for MGC57211 (NM_175878.2,236-254).
gaggttgcctttggtttat

SEQ ID NO: 429466 - DNA, 19 bp, Homo sapiens
  siRNA target sequence for MGC57211 (NM_175878.2,433-451).
gtgtttgcacaccattaga

SEQ ID NO: 429467 - DNA, 19 bp, Homo sapiens
  siRNA target sequence for MGC57211 (NM_175878.2,435-453).
gtttgcacaccattagaaa

SEQ ID NO: 429468 - DNA, 19 bp, Homo sapiens
  siRNA target sequence for MGC57211 (NM_175878.2,503-521).
gttagcatcacaaagagaa

SEQ ID NO: 429469 - DNA, 19 bp, Homo sapiens
  siRNA target sequence for MGC57211 (NM_175878.2,552-570).
caatccgggataatttcat

SEQ ID NO: 429470 - DNA, 19 bp, Homo sapiens
  siRNA target sequence for MGC57211 (NM_175878.2,586-604).
caagtacatgtcagtgatt

SEQ ID NO: 429471 - DNA, 19 bp, Homo sapiens
  siRNA target sequence for MGC57211 (NM_175878.2,607-625).
ggcttttctcggttctgtt

SEQ ID NO: 429472 - DNA, 19 bp, Homo sapiens
  siRNA target sequence for MGC57211 (NM_175878.2,616-634).
cggttctgttccacaatta

SEQ ID NO: 429473 - DNA, 19 bp, Homo sapiens
  siRNA target sequence for MGC57211 (NM_175878.2,665-683).
cgagaatggcctttgaata

SEQ ID NO: 429474 - DNA, 19 bp, Homo sapiens
  siRNA target sequence for MGC57211 (NM_175878.2,705-723).
ccctgttatcagttactta

SEQ ID NO: 429475 - DNA, 19 bp, Homo sapiens
  siRNA target sequence for MGC57211 (NM_175878.2,755-773).
cagatcagcaatgatgata

SEQ ID NO: 429476 - DNA, 19 bp, Homo sapiens
  siRNA target sequence for MGC57211 (NM_175878.2,785-803).
ctaccgccgatagaattct

SEQ ID NO: 429477 - DNA, 19 bp, Homo sapiens
  siRNA target sequence for MGC57211 (NM_175878.2,788-806).
ccgccgatagaattcttct

SEQ ID NO: 429478 - DNA, 19 bp, Homo sapiens
  siRNA target sequence for MGC57211 (NM_175878.2,809-827).
gtcgtgatgtggcgttttt

SEQ ID NO: 429479 - DNA, 19 bp, Homo sapiens
  siRNA target sequence for MGC57211 (NM_175878.2,819-837).
ggcgttttttggaggttat

SEQ ID NO: 429480 - DNA, 19 bp, Homo sapiens
  siRNA target sequence for MGC57211 (NM_175878.2,821-839).
cgttttttggaggttatct

SEQ ID NO: 429481 - DNA, 19 bp, Homo sapiens
  siRNA target sequence for MGC57211 (NM_175878.2,888-906).
gcctacccgttttgttaat

SEQ ID NO: 429482 - DNA, 19 bp, Homo sapiens
  siRNA target sequence for MGC57211 (NM_175878.2,890-908).
ctacccgttttgttaatca

SEQ ID NO: 429483 - DNA, 19 bp, Homo sapiens
  siRNA target sequence for MGC57211 (NM_175878.2,991-1009).
caatatggtgggtacagta

SEQ ID NO: 429484 - DNA, 19 bp, Homo sapiens
  siRNA target sequence for MGC57211 (NM_175878.2,1021-1039).
cttgatcacactgctatat

SEQ ID NO: 429485 - DNA, 19 bp, Homo sapiens
  siRNA target sequence for MGC57211 (NM_175878.2,1024-1042).
gatcacactgctatatgct

SEQ ID NO: 429486 - DNA, 19 bp, Homo sapiens
  siRNA target sequence for MGC57211 (NM_175878.2,1078-1096).
gcagttgtcagatgacaaa

SEQ ID NO: 429487 - DNA, 19 bp, Homo sapiens
  siRNA target sequence for MGC48986 (NM_175881.2,372-390).
ctgcacgggctacatagat

SEQ ID NO: 429488 - DNA, 19 bp, Homo sapiens
  siRNA target sequence for MGC48986 (NM_175881.2,374-392).
gcacgggctacatagatca

SEQ ID NO: 429489 - DNA, 19 bp, Homo sapiens
  siRNA target sequence for MGC48986 (NM_175881.2,375-393).
cacgggctacatagatcat

SEQ ID NO: 429490 - DNA, 19 bp, Homo sapiens
  siRNA target sequence for MGC48986 (NM_175881.2,377-395).
cgggctacatagatcatga

SEQ ID NO: 429491 - DNA, 19 bp, Homo sapiens
  siRNA target sequence for MGC48986 (NM_175881.2,391-409).
catgacatctccatgttca

SEQ ID NO: 429492 - DNA, 19 bp, Homo sapiens
  siRNA target sequence for MGC48986 (NM_175881.2,405-423).
gttcaaggcaccagcttat

SEQ ID NO: 429493 - DNA, 19 bp, Homo sapiens
  siRNA target sequence for MGC48986 (NM_175881.2,842-860).
ctgagccatccatctatca

SEQ ID NO: 429494 - DNA, 19 bp, Homo sapiens
  siRNA target sequence for MGC48986 (NM_175881.2,844-862).
gagccatccatctatcaga

SEQ ID NO: 429495 - DNA, 19 bp, Homo sapiens
  siRNA target sequence for MGC33846 (NM_175885.2,327-345).
cgatctactcagcttcatt

SEQ ID NO: 429496 - DNA, 19 bp, Homo sapiens
  siRNA target sequence for MGC33846 (NM_175885.2,911-929).
cggaggccgtggagttctt

SEQ ID NO: 429497 - DNA, 19 bp, Homo sapiens
  siRNA target sequence for LOC222171 (NM_175887.2,925-943).
ccccaaaccagacaagtta

SEQ ID NO: 429498 - DNA, 19 bp, Homo sapiens
  siRNA target sequence for LOC222171 (NM_175887.2,927-945).
ccaaaccagacaagttata

SEQ ID NO: 429499 - DNA, 19 bp, Homo sapiens
  siRNA target sequence for FLJ37045 (NM_175889.2,775-793).
cggctcgtttaatatcact

SEQ ID NO: 429500 - DNA, 19 bp, Homo sapiens
  siRNA target sequence for FLJ37266 (NM_175892.3,1211-1229).
cagaattgtcggccattta

SEQ ID NO: 429501 - DNA, 19 bp, Homo sapiens
  siRNA target sequence for FLJ37266 (NM_175892.3,1213-1231).
gaattgtcggccatttatt

SEQ ID NO: 429502 - DNA, 19 bp, Homo sapiens
  siRNA target sequence for FLJ37266 (NM_175892.3,1245-1263).
cgggatttcttggctattt

SEQ ID NO: 429503 - DNA, 19 bp, Homo sapiens
  siRNA target sequence for FLJ37266 (NM_175892.3,1246-1264).
gggatttcttggctattta

SEQ ID NO: 429504 - DNA, 19 bp, Homo sapiens
  siRNA target sequence for FLJ37266 (NM_175892.3,1300-1318).
gttggctctgtctgcttaa

SEQ ID NO: 429505 - DNA, 19 bp, Homo sapiens
  siRNA target sequence for FLJ37266 (NM_175892.3,1352-1370).
ctctgtgcgctgtcttaga

SEQ ID NO: 429506 - DNA, 19 bp, Homo sapiens
  siRNA target sequence for FLJ37266 (NM_175892.3,1422-1440).
ctggctcgagactctactt

SEQ ID NO: 429507 - DNA, 19 bp, Homo sapiens
  siRNA target sequence for FLJ37266 (NM_175892.3,1424-1442).
ggctcgagactctactttt

SEQ ID NO: 429508 - DNA, 19 bp, Homo sapiens
  siRNA target sequence for FLJ37266 (NM_175892.3,1425-1443).
gctcgagactctacttttt

SEQ ID NO: 429509 - DNA, 19 bp, Homo sapiens
  siRNA target sequence for FLJ37266 (NM_175892.3,1426-1444).
ctcgagactctactttttt

SEQ ID NO: 429510 - DNA, 19 bp, Homo sapiens
  siRNA target sequence for FLJ37266 (NM_175892.3,1472-1490).
ccttctacttccgactaat

SEQ ID NO: 429511 - DNA, 19 bp, Homo sapiens
  siRNA target sequence for FLJ37266 (NM_175892.3,1476-1494).
ctacttccgactaattcca

SEQ ID NO: 429512 - DNA, 19 bp, Homo sapiens
  siRNA target sequence for FLJ37266 (NM_175892.3,1482-1500).
ccgactaattccatctctt

SEQ ID NO: 429513 - DNA, 19 bp, Homo sapiens
  siRNA target sequence for LOC283241 (NM_175893.2,378-396).
cgttttaacacctctttta

SEQ ID NO: 429514 - DNA, 19 bp, Homo sapiens
  siRNA target sequence for LOC283241 (NM_175893.2,388-406).
cctcttttatacttggtaa

SEQ ID NO: 429515 - DNA, 19 bp, Homo sapiens
  siRNA target sequence for LOC283241 (NM_175893.2,411-429).
gcctgtgtttcgctttatt

SEQ ID NO: 429516 - DNA, 19 bp, Homo sapiens
  siRNA target sequence for FLJ25590 (NM_175895.2,461-479).
gaggcgaaaacggaacaaa

SEQ ID NO: 429517 - DNA, 19 bp, Homo sapiens
  siRNA target sequence for LOC283476 (NM_175896.2,144-162).
cctcttattaggaatgaaa

SEQ ID NO: 429518 - DNA, 19 bp, Homo sapiens
  siRNA target sequence for LOC283476 (NM_175896.2,147-165).
cttattaggaatgaaatat

SEQ ID NO: 429519 - DNA, 19 bp, Homo sapiens
  siRNA target sequence for LOC283476 (NM_175896.2,182-200).
gctgcaggggagaccaaaa

SEQ ID NO: 429520 - DNA, 19 bp, Homo sapiens
  siRNA target sequence for LOC283476 (NM_175896.2,186-204).
caggggagaccaaaactca

SEQ ID NO: 429521 - DNA, 19 bp, Homo sapiens
  siRNA target sequence for LOC283476 (NM_175896.2,201-219).
ctcagaggaggcattcaaa

SEQ ID NO: 429522 - DNA, 19 bp, Homo sapiens
  siRNA target sequence for LOC283476 (NM_175896.2,243-261).
catccaactcaaaacctat

SEQ ID NO: 429523 - DNA, 19 bp, Homo sapiens
  siRNA target sequence for LOC283476 (NM_175896.2,250-268).
ctcaaaacctattcaatat

SEQ ID NO: 429524 - DNA, 19 bp, Homo sapiens
  siRNA target sequence for LOC283476 (NM_175896.2,252-270).
caaaacctattcaatatga

SEQ ID NO: 429525 - DNA, 19 bp, Homo sapiens
  siRNA target sequence for LOC283476 (NM_175896.2,286-304).
gctcacaactccctattaa

SEQ ID NO: 429526 - DNA, 19 bp, Homo sapiens
  siRNA target sequence for LOC283476 (NM_175896.2,296-314).
ccctattaagggaaatcaa

SEQ ID NO: 429527 - DNA, 19 bp, Homo sapiens
  siRNA target sequence for LOC283476 (NM_175896.2,297-315).
cctattaagggaaatcaat

SEQ ID NO: 429528 - DNA, 19 bp, Homo sapiens
  siRNA target sequence for LOC283476 (NM_175896.2,359-377).
ctctccctttttaatgtct

SEQ ID NO: 429529 - DNA, 19 bp, Homo sapiens
  siRNA target sequence for LOC283476 (NM_175896.2,385-403).
caggctcctggtactttgt

SEQ ID NO: 429530 - DNA, 19 bp, Homo sapiens
  siRNA target sequence for LOC283476 (NM_175896.2,387-405).
ggctcctggtactttgtca

SEQ ID NO: 429531 - DNA, 19 bp, Homo sapiens
  siRNA target sequence for LOC283476 (NM_175896.2,395-413).
gtactttgtcagcaacata

SEQ ID NO: 429532 - DNA, 19 bp, Homo sapiens
  siRNA target sequence for LOC283476 (NM_175896.2,406-424).
gcaacatactgctttcatt

SEQ ID NO: 429533 - DNA, 19 bp, Homo sapiens
  siRNA target sequence for LOC283687 (NM_175898.2,21-39).
cgaaagctggtctcctata

SEQ ID NO: 429534 - DNA, 19 bp, Homo sapiens
  siRNA target sequence for LOC283932 (NM_175901.2,325-343).
gaggagactaccgtaaaga

SEQ ID NO: 429535 - DNA, 19 bp, Homo sapiens
  siRNA target sequence for LOC283932 (NM_175901.2,461-479).
cccggctcccgtctatcat

SEQ ID NO: 429536 - DNA, 19 bp, Homo sapiens
  siRNA target sequence for LOC283932 (NM_175901.2,463-481).
cggctcccgtctatcatct

SEQ ID NO: 429537 - DNA, 19 bp, Homo sapiens
  siRNA target sequence for LOC283932 (NM_175901.2,551-569).
ctgcgacatgggatgtgta

SEQ ID NO: 429538 - DNA, 19 bp, Homo sapiens
  siRNA target sequence for LOC283932 (NM_175901.2,606-624).
gagaggactacgaaaaaga

SEQ ID NO: 429539 - DNA, 19 bp, Homo sapiens
  siRNA target sequence for LOC283932 (NM_175901.2,654-672).
ggtgcctgctgggaaatgt

SEQ ID NO: 429540 - DNA, 19 bp, Homo sapiens
  siRNA target sequence for LOC284033 (NM_175903.2,495-513).
ccagcctccaacttcatat

SEQ ID NO: 429541 - DNA, 19 bp, Homo sapiens
  siRNA target sequence for LOC284033 (NM_175903.2,499-517).
cctccaacttcatattcct

SEQ ID NO: 429542 - DNA, 19 bp, Homo sapiens
  siRNA target sequence for LOC284033 (NM_175903.2,533-551).
gcacttgacccaaggtaaa

SEQ ID NO: 429543 - DNA, 19 bp, Homo sapiens
  siRNA target sequence for LOC284033 (NM_175903.2,554-572).
gaaagggctgccaatcact

SEQ ID NO: 429544 - DNA, 19 bp, Homo sapiens
  siRNA target sequence for LOC284033 (NM_175903.2,680-698).
gaaagcgcattgtgtttta

SEQ ID NO: 429545 - DNA, 19 bp, Homo sapiens
  siRNA target sequence for LOC284033 (NM_175903.2,685-703).
cgcattgtgttttaatgaa

SEQ ID NO: 429546 - DNA, 19 bp, Homo sapiens
  siRNA target sequence for LOC284033 (NM_175903.2,712-730).
cagggttccaatgttattt

SEQ ID NO: 429547 - DNA, 19 bp, Homo sapiens
  siRNA target sequence for LOC284296 (NM_175908.3,198-216).
cgccttgttccatgacatt

SEQ ID NO: 429548 - DNA, 19 bp, Homo sapiens
  siRNA target sequence for LOC284296 (NM_175908.3,231-249).
cactgcagagacaatctca

SEQ ID NO: 429549 - DNA, 19 bp, Homo sapiens
  siRNA target sequence for LOC284296 (NM_175908.3,295-313).
cgccatggggaagatattt

SEQ ID NO: 429550 - DNA, 19 bp, Homo sapiens
  siRNA target sequence for LOC284296 (NM_175908.3,340-358).
gatgcctctgtcctatgat

SEQ ID NO: 429551 - DNA, 19 bp, Homo sapiens
  siRNA target sequence for LOC284296 (NM_175908.3,349-367).
gtcctatgatgtcatcatt

SEQ ID NO: 429552 - DNA, 19 bp, Homo sapiens
  siRNA target sequence for LOC284296 (NM_175908.3,422-440).
gtgtcctcactagacataa

SEQ ID NO: 429553 - DNA, 19 bp, Homo sapiens
  siRNA target sequence for FLJ37818 (NM_175916.2,336-354).
gcgactgataacgttcaat

SEQ ID NO: 429554 - DNA, 19 bp, Homo sapiens
  siRNA target sequence for FLJ37818 (NM_175916.2,359-377).
cggacgaaagtgtgaacta

SEQ ID NO: 429555 - DNA, 19 bp, Homo sapiens
  siRNA target sequence for FLJ37818 (NM_175916.2,360-378).
ggacgaaagtgtgaactat

SEQ ID NO: 429556 - DNA, 19 bp, Homo sapiens
  siRNA target sequence for FLJ37818 (NM_175916.2,361-379).
gacgaaagtgtgaactata

SEQ ID NO: 429557 - DNA, 19 bp, Homo sapiens
  siRNA target sequence for FLJ37818 (NM_175916.2,364-382).
gaaagtgtgaactataaga

SEQ ID NO: 429558 - DNA, 19 bp, Homo sapiens
  siRNA target sequence for FLJ37818 (NM_175916.2,385-403).
ggtcctaagccagttagat

SEQ ID NO: 429559 - DNA, 19 bp, Homo sapiens
  siRNA target sequence for FLJ37818 (NM_175916.2,416-434).
ccacaagtacccaaattaa

SEQ ID NO: 429560 - DNA, 19 bp, Homo sapiens
  siRNA target sequence for FLJ37818 (NM_175916.2,417-435).
cacaagtacccaaattaaa

SEQ ID NO: 429561 - DNA, 19 bp, Homo sapiens
  siRNA target sequence for FLJ37818 (NM_175916.2,419-437).
caagtacccaaattaaagt

SEQ ID NO: 429562 - DNA, 19 bp, Homo sapiens
  siRNA target sequence for FLJ37818 (NM_175916.2,422-440).
gtacccaaattaaagtcaa

SEQ ID NO: 429563 - DNA, 19 bp, Homo sapiens
  siRNA target sequence for FLJ37818 (NM_175916.2,498-516).
gacagcaaaccggtttcaa

SEQ ID NO: 429564 - DNA, 19 bp, Homo sapiens
  siRNA target sequence for FLJ37818 (NM_175916.2,686-704).
caccccagcgggtgataaa

SEQ ID NO: 429565 - DNA, 19 bp, Homo sapiens
  siRNA target sequence for FLJ37818 (NM_175916.2,689-707).
cccagcgggtgataaagct

SEQ ID NO: 429566 - DNA, 19 bp, Homo sapiens
  siRNA target sequence for FLJ34443 (NM_175918.2,1713-1731).
gacgctgttaccgtacatt

SEQ ID NO: 429567 - DNA, 19 bp, Homo sapiens
  siRNA target sequence for FLJ34443 (NM_175918.2,1715-1733).
cgctgttaccgtacattct

SEQ ID NO: 429568 - DNA, 19 bp, Homo sapiens
  siRNA target sequence for FLJ34443 (NM_175918.2,1716-1734).
gctgttaccgtacattcta

SEQ ID NO: 429569 - DNA, 19 bp, Homo sapiens
  siRNA target sequence for FLJ34443 (NM_175918.2,1764-1782).
gtcaaggatcccttttata

SEQ ID NO: 429570 - DNA, 19 bp, Homo sapiens
  siRNA target sequence for FLJ34443 (NM_175918.2,1766-1784).
caaggatcccttttatatt

SEQ ID NO: 429571 - DNA, 19 bp, Homo sapiens
  siRNA target sequence for FLJ34443 (NM_175918.2,1769-1787).
ggatcccttttatatttct

SEQ ID NO: 429572 - DNA, 19 bp, Homo sapiens
  siRNA target sequence for FLJ34443 (NM_175918.2,1788-1806).
ctgcacctcgagataacgt

SEQ ID NO: 429573 - DNA, 19 bp, Homo sapiens
  siRNA target sequence for FLJ39485 (NM_175920.2,835-853).
cctgtaggagcgttaagtt

SEQ ID NO: 429574 - DNA, 19 bp, Homo sapiens
  siRNA target sequence for FLJ39485 (NM_175920.2,860-878).
gctgccgagcccaactttt

SEQ ID NO: 429575 - DNA, 19 bp, Homo sapiens
  siRNA target sequence for LOC285636 (NM_175921.2,754-772).
gtggctgacaaggcatata

SEQ ID NO: 429576 - DNA, 19 bp, Homo sapiens
  siRNA target sequence for LOC285636 (NM_175921.2,839-857).
cttaagaagttggaaactt

SEQ ID NO: 429577 - DNA, 19 bp, Homo sapiens
  siRNA target sequence for LOC285636 (NM_175921.2,893-911).
ctcactggttggtacaatt

SEQ ID NO: 429578 - DNA, 19 bp, Homo sapiens
  siRNA target sequence for LOC285636 (NM_175921.2,895-913).
cactggttggtacaattat

SEQ ID NO: 429579 - DNA, 19 bp, Homo sapiens
  siRNA target sequence for LOC285636 (NM_175921.2,897-915).
ctggttggtacaattatga

SEQ ID NO: 429580 - DNA, 19 bp, Homo sapiens
  siRNA target sequence for LOC285636 (NM_175921.2,917-935).
ggtagtactgggtgctttt

SEQ ID NO: 429581 - DNA, 19 bp, Homo sapiens
  siRNA target sequence for LOC285636 (NM_175921.2,918-936).
gtagtactgggtgcttttt

SEQ ID NO: 429582 - DNA, 19 bp, Homo sapiens
  siRNA target sequence for LOC285636 (NM_175921.2,926-944).
gggtgctttttatacaact

SEQ ID NO: 429583 - DNA, 19 bp, Homo sapiens
  siRNA target sequence for LOC285636 (NM_175921.2,953-971).
cccacacagttggagaata

SEQ ID NO: 429584 - DNA, 19 bp, Homo sapiens
  siRNA target sequence for LOC285636 (NM_175921.2,954-972).
ccacacagttggagaataa

SEQ ID NO: 429585 - DNA, 19 bp, Homo sapiens
  siRNA target sequence for LOC285636 (NM_175921.2,957-975).
cacagttggagaataattt

SEQ ID NO: 429586 - DNA, 19 bp, Homo sapiens
  siRNA target sequence for LOC285636 (NM_175921.2,959-977).
cagttggagaataatttgt

SEQ ID NO: 429587 - DNA, 19 bp, Homo sapiens
  siRNA target sequence for MGC42630 (NM_175923.2,49-67).
ctccgggaccgaagaatct

SEQ ID NO: 429588 - DNA, 19 bp, Homo sapiens
  siRNA target sequence for MGC42630 (NM_175923.2,106-124).
ccgcgtcggcgaaaaggat

SEQ ID NO: 429589 - DNA, 19 bp, Homo sapiens
  siRNA target sequence for MGC42630 (NM_175923.2,107-125).
cgcgtcggcgaaaaggatt

SEQ ID NO: 429590 - DNA, 19 bp, Homo sapiens
  siRNA target sequence for MGC27169 (NM_176782.1,134-152).
gtctgcagggagcagttat

SEQ ID NO: 429591 - DNA, 19 bp, Homo sapiens
  siRNA target sequence for MGC27169 (NM_176782.1,141-159).
gggagcagttatcaaagaa

SEQ ID NO: 429592 - DNA, 19 bp, Homo sapiens
  siRNA target sequence for MGC27169 (NM_176782.1,173-191).
gtgtttgccggcattacct

SEQ ID NO: 429593 - DNA, 19 bp, Homo sapiens
  siRNA target sequence for MGC27169 (NM_176782.1,434-452).
ctcggcacagccaatgaga

SEQ ID NO: 429594 - DNA, 19 bp, Homo sapiens
  siRNA target sequence for MGC27169 (NM_176782.1,755-773).
ggctggaccaccttctaca

SEQ ID NO: 429595 - DNA, 19 bp, Homo sapiens
  siRNA target sequence for MGC27169 (NM_176782.1,966-984).
ccatgtcggtggaagatct

SEQ ID NO: 429596 - DNA, 19 bp, Homo sapiens
  siRNA target sequence for MGC27169 (NM_176782.1,986-1004).
ctctacgtccgggataaca

SEQ ID NO: 429597 - DNA, 19 bp, Homo sapiens
  siRNA target sequence for MGC27169 (NM_176782.1,988-1006).
ctacgtccgggataacact

SEQ ID NO: 429598 - DNA, 19 bp, Homo sapiens
  siRNA target sequence for MGC27169 (NM_176782.1,1008-1026).
ctgtccaccaagtctacta

SEQ ID NO: 429599 - DNA, 19 bp, Homo sapiens
  siRNA target sequence for MGC27169 (NM_176782.1,1041-1059).
ctctcctgtcacagttcaa

SEQ ID NO: 429600 - DNA, 19 bp, Homo sapiens
  siRNA target sequence for MGC27169 (NM_176782.1,1077-1095).
ccacacggaaaccaatgta

SEQ ID NO: 429601 - DNA, 19 bp, Homo sapiens
  siRNA target sequence for MGC27169 (NM_176782.1,1080-1098).
cacggaaaccaatgtacta

SEQ ID NO: 429602 - DNA, 19 bp, Homo sapiens
  siRNA target sequence for MGC27169 (NM_176782.1,1175-1193).
gtccagggcagcggtaaaa

SEQ ID NO: 429603 - DNA, 19 bp, Homo sapiens
  siRNA target sequence for MGC27169 (NM_176782.1,1177-1195).
ccagggcagcggtaaaaca

SEQ ID NO: 429604 - DNA, 19 bp, Homo sapiens
  siRNA target sequence for MGC27169 (NM_176782.1,1273-1291).
cgtgcccattgttcatact

SEQ ID NO: 429605 - DNA, 19 bp, Homo sapiens
  siRNA target sequence for MGC27169 (NM_176782.1,1357-1375).
gggcatccatttgcaaata

SEQ ID NO: 429606 - DNA, 19 bp, Homo sapiens
  siRNA target sequence for MGC27169 (NM_176782.1,1606-1624).
gctgctcacagatatgcta

SEQ ID NO: 429607 - DNA, 19 bp, Homo sapiens
  siRNA target sequence for MGC27169 (NM_176782.1,1858-1876).
ggacttgctggctcatgtt

SEQ ID NO: 429608 - DNA, 19 bp, Homo sapiens
  siRNA target sequence for MGC27169 (NM_176782.1,1868-1886).
gctcatgttggtagaaact

SEQ ID NO: 429609 - DNA, 19 bp, Homo sapiens
  siRNA target sequence for C20orf65 (NM_176791.2,380-398).
cgtggtccccatcaaaaat

SEQ ID NO: 429610 - DNA, 19 bp, Homo sapiens
  siRNA target sequence for C20orf65 (NM_176791.2,452-470).
caccgagaaccctctgaaa

SEQ ID NO: 429611 - DNA, 19 bp, Homo sapiens
  siRNA target sequence for C20orf65 (NM_176791.2,456-474).
gagaaccctctgaaagtca

SEQ ID NO: 429612 - DNA, 19 bp, Homo sapiens
  siRNA target sequence for C20orf65 (NM_176791.2,525-543).
cttcccagccccgatatct

SEQ ID NO: 429613 - DNA, 19 bp, Homo sapiens
  siRNA target sequence for C20orf65 (NM_176791.2,559-577).
ctaattgccagcatgtgtt

SEQ ID NO: 429614 - DNA, 19 bp, Homo sapiens
  siRNA target sequence for C20orf65 (NM_176791.2,573-591).
gtgtttgtccttaagactt

SEQ ID NO: 429615 - DNA, 19 bp, Homo sapiens
  siRNA target sequence for C20orf65 (NM_176791.2,615-633).
gaaaatgacacgaaagagt

SEQ ID NO: 429616 - DNA, 19 bp, Homo sapiens
  siRNA target sequence for NALP8 (NM_176811.2,170-188).
cggctccccatgtgaaaat

SEQ ID NO: 429617 - DNA, 19 bp, Homo sapiens
  siRNA target sequence for NALP8 (NM_176811.2,376-394).
cgaacatctttgccattat

SEQ ID NO: 429618 - DNA, 19 bp, Homo sapiens
  siRNA target sequence for NALP8 (NM_176811.2,387-405).
gccattatgaactgtgata

SEQ ID NO: 429619 - DNA, 19 bp, Homo sapiens
  siRNA target sequence for NALP8 (NM_176811.2,417-435).
gtagtccgcagagagataa

SEQ ID NO: 429620 - DNA, 19 bp, Homo sapiens
  siRNA target sequence for NALP8 (NM_176811.2,514-532).
gtaaaatacggcggtataa

SEQ ID NO: 429621 - DNA, 19 bp, Homo sapiens
  siRNA target sequence for NALP8 (NM_176811.2,525-543).
cggtataaatcgaatgtga

SEQ ID NO: 429622 - DNA, 19 bp, Homo sapiens
  siRNA target sequence for NALP8 (NM_176811.2,535-553).
cgaatgtgatggaaaagtt

SEQ ID NO: 429623 - DNA, 19 bp, Homo sapiens
  siRNA target sequence for NALP8 (NM_176811.2,558-576).
cccatatgggacattacga

SEQ ID NO: 429624 - DNA, 19 bp, Homo sapiens
  siRNA target sequence for NALP8 (NM_176811.2,620-638).
caggcacgaggagtactta

SEQ ID NO: 429625 - DNA, 19 bp, Homo sapiens
  siRNA target sequence for NALP8 (NM_176811.2,780-798).
cgctggtgtgctttctact

SEQ ID NO: 429626 - DNA, 19 bp, Homo sapiens
  siRNA target sequence for NALP8 (NM_176811.2,841-859).
ccgagctgattgagcaaaa

SEQ ID NO: 429627 - DNA, 19 bp, Homo sapiens
  siRNA target sequence for NALP8 (NM_176811.2,871-889).
ctcaggacctcgtgtcaaa

SEQ ID NO: 429628 - DNA, 19 bp, Homo sapiens
  siRNA target sequence for NALP8 (NM_176811.2,876-894).
gacctcgtgtcaaagatta

SEQ ID NO: 429629 - DNA, 19 bp, Homo sapiens
  siRNA target sequence for NALP8 (NM_176811.2,879-897).
ctcgtgtcaaagattatgt

SEQ ID NO: 429630 - DNA, 19 bp, Homo sapiens
  siRNA target sequence for NALP8 (NM_176811.2,1024-1042).
gtttgctgagcaaaacgat

SEQ ID NO: 429631 - DNA, 19 bp, Homo sapiens
  siRNA target sequence for NALP8 (NM_176811.2,1048-1066).
cagaggccacgctactgat

SEQ ID NO: 429632 - DNA, 19 bp, Homo sapiens
  siRNA target sequence for NALP8 (NM_176811.2,1053-1071).
gccacgctactgatcatga

SEQ ID NO: 429633 - DNA, 19 bp, Homo sapiens
  siRNA target sequence for NALP8 (NM_176811.2,1054-1072).
ccacgctactgatcatgat

SEQ ID NO: 429634 - DNA, 19 bp, Homo sapiens
  siRNA target sequence for NALP8 (NM_176811.2,1055-1073).
cacgctactgatcatgata

SEQ ID NO: 429635 - DNA, 19 bp, Homo sapiens
  siRNA target sequence for NALP8 (NM_176811.2,1058-1076).
gctactgatcatgataaga

SEQ ID NO: 429636 - DNA, 19 bp, Homo sapiens
  siRNA target sequence for NALP8 (NM_176811.2,1059-1077).
ctactgatcatgataagat

SEQ ID NO: 429637 - DNA, 19 bp, Homo sapiens
  siRNA target sequence for NALP8 (NM_176811.2,1131-1149).
cttccggggtttaatacga

SEQ ID NO: 429638 - DNA, 19 bp, Homo sapiens
  siRNA target sequence for NALP8 (NM_176811.2,1139-1157).
gtttaatacgatggaaaaa

SEQ ID NO: 429639 - DNA, 19 bp, Homo sapiens
  siRNA target sequence for NALP8 (NM_176811.2,1197-1215).
ggagaccaagtcttgagtt

SEQ ID NO: 429640 - DNA, 19 bp, Homo sapiens
  siRNA target sequence for NALP8 (NM_176811.2,1345-1363).
ctgtgttcgtccggtatat

SEQ ID NO: 429641 - DNA, 19 bp, Homo sapiens
  siRNA target sequence for NALP8 (NM_176811.2,1347-1365).
gtgttcgtccggtatattt

SEQ ID NO: 429642 - DNA, 19 bp, Homo sapiens
  siRNA target sequence for NALP8 (NM_176811.2,1349-1367).
gttcgtccggtatatttct

SEQ ID NO: 429643 - DNA, 19 bp, Homo sapiens
  siRNA target sequence for NALP8 (NM_176811.2,1378-1396).
ccaccagagctgagaactt

SEQ ID NO: 429644 - DNA, 19 bp, Homo sapiens
  siRNA target sequence for NALP8 (NM_176811.2,1465-1483).
ggaaatgggtgttaggtaa

SEQ ID NO: 429645 - DNA, 19 bp, Homo sapiens
  siRNA target sequence for NALP8 (NM_176811.2,1527-1545).
gccttccttggcatgagta

SEQ ID NO: 429646 - DNA, 19 bp, Homo sapiens
  siRNA target sequence for NALP8 (NM_176811.2,1541-1559).
gagtattcttcggagaatt

SEQ ID NO: 429647 - DNA, 19 bp, Homo sapiens
  siRNA target sequence for NALP8 (NM_176811.2,1564-1582).
gtgaggaagaccactatgt

SEQ ID NO: 429648 - DNA, 19 bp, Homo sapiens
  siRNA target sequence for NALP8 (NM_176811.2,1583-1601).
ctttaccctcgtgactttt

SEQ ID NO: 429649 - DNA, 19 bp, Homo sapiens
  siRNA target sequence for NALP8 (NM_176811.2,1615-1633).
cggccttgttttatgttct

SEQ ID NO: 429650 - DNA, 19 bp, Homo sapiens
  siRNA target sequence for NALP8 (NM_176811.2,1777-1795).
cggccgtggaacagtcatt

SEQ ID NO: 429651 - DNA, 19 bp, Homo sapiens
  siRNA target sequence for NALP8 (NM_176811.2,1781-1799).
cgtggaacagtcattccaa

SEQ ID NO: 429652 - DNA, 19 bp, Homo sapiens
  siRNA target sequence for NALP8 (NM_176811.2,1841-1859).
catacctctgttgcataaa

SEQ ID NO: 429653 - DNA, 19 bp, Homo sapiens
  siRNA target sequence for NALP8 (NM_176811.2,1846-1864).
ctctgttgcataaatgtga

SEQ ID NO: 429654 - DNA, 19 bp, Homo sapiens
  siRNA target sequence for NALP8 (NM_176811.2,1882-1900).
gtggggtcccgcagttatt

SEQ ID NO: 429655 - DNA, 19 bp, Homo sapiens
  siRNA target sequence for NALP8 (NM_176811.2,1884-1902).
ggggtcccgcagttattct

SEQ ID NO: 429656 - DNA, 19 bp, Homo sapiens
  siRNA target sequence for NALP8 (NM_176811.2,1885-1903).
gggtcccgcagttattcta

SEQ ID NO: 429657 - DNA, 19 bp, Homo sapiens
  siRNA target sequence for NALP8 (NM_176811.2,1887-1905).
gtcccgcagttattctact

SEQ ID NO: 429658 - DNA, 19 bp, Homo sapiens
  siRNA target sequence for NALP8 (NM_176811.2,1939-1957).
gccaagccctaaatgatta

SEQ ID NO: 429659 - DNA, 19 bp, Homo sapiens
  siRNA target sequence for NALP8 (NM_176811.2,1944-1962).
gccctaaatgattatcata

SEQ ID NO: 429660 - DNA, 19 bp, Homo sapiens
  siRNA target sequence for NALP8 (NM_176811.2,2014-2032).
gcctgaagcggtgtcaata

SEQ ID NO: 429661 - DNA, 19 bp, Homo sapiens
  siRNA target sequence for NALP8 (NM_176811.2,2015-2033).
cctgaagcggtgtcaatat

SEQ ID NO: 429662 - DNA, 19 bp, Homo sapiens
  siRNA target sequence for NALP8 (NM_176811.2,2016-2034).
ctgaagcggtgtcaatatt

SEQ ID NO: 429663 - DNA, 19 bp, Homo sapiens
  siRNA target sequence for NALP8 (NM_176811.2,2139-2157).
cgttggtggcaagacttat

SEQ ID NO: 429664 - DNA, 19 bp, Homo sapiens
  siRNA target sequence for NALP8 (NM_176811.2,2283-2301).
ctcctaaggcgtgtgaata

SEQ ID NO: 429665 - DNA, 19 bp, Homo sapiens
  siRNA target sequence for NALP8 (NM_176811.2,2286-2304).
ctaaggcgtgtgaatagca

SEQ ID NO: 429666 - DNA, 19 bp, Homo sapiens
  siRNA target sequence for NALP8 (NM_176811.2,2295-2313).
gtgaatagcaccatgttga

SEQ ID NO: 429667 - DNA, 19 bp, Homo sapiens
  siRNA target sequence for NALP8 (NM_176811.2,2319-2337).
gacttaatcggtgttttga

SEQ ID NO: 429668 - DNA, 19 bp, Homo sapiens
  siRNA target sequence for NALP8 (NM_176811.2,2464-2482).
gcttggccacccctagaat

SEQ ID NO: 429669 - DNA, 19 bp, Homo sapiens
  siRNA target sequence for NALP8 (NM_176811.2,2465-2483).
cttggccacccctagaatt

SEQ ID NO: 429670 - DNA, 19 bp, Homo sapiens
  siRNA target sequence for NALP8 (NM_176811.2,2508-2526).
caaggtaacgggcatctaa

SEQ ID NO: 429671 - DNA, 19 bp, Homo sapiens
  siRNA target sequence for NALP8 (NM_176811.2,2511-2529).
ggtaacgggcatctaaaga

SEQ ID NO: 429672 - DNA, 19 bp, Homo sapiens
  siRNA target sequence for NALP8 (NM_176811.2,2656-2674).
gtctcaggcagagtaagat

SEQ ID NO: 429673 - DNA, 19 bp, Homo sapiens
  siRNA target sequence for NALP8 (NM_176811.2,2715-2733).
gaaggggccaagcatattt

SEQ ID NO: 429674 - DNA, 19 bp, Homo sapiens
  siRNA target sequence for NALP8 (NM_176811.2,2718-2736).
ggggccaagcatatttgga

SEQ ID NO: 429675 - DNA, 19 bp, Homo sapiens
  siRNA target sequence for NALP8 (NM_176811.2,2720-2738).
ggccaagcatatttggaat

SEQ ID NO: 429676 - DNA, 19 bp, Homo sapiens
  siRNA target sequence for NALP8 (NM_176811.2,2790-2808).
gacttgacctttaattgct

SEQ ID NO: 429677 - DNA, 19 bp, Homo sapiens
  siRNA target sequence for NALP8 (NM_176811.2,2824-2842).
ctgcgctctgtaaaaataa

SEQ ID NO: 429678 - DNA, 19 bp, Homo sapiens
  siRNA target sequence for NALP8 (NM_176811.2,2856-2874).
cttgacctaagttttaata

SEQ ID NO: 429679 - DNA, 19 bp, Homo sapiens
  siRNA target sequence for NALP8 (NM_176811.2,2996-3014).
catgctccgcaaaaaccaa

SEQ ID NO: 429680 - DNA, 19 bp, Homo sapiens
  siRNA target sequence for NALP8 (NM_176811.2,3041-3059).
gaatgcgattggagtctat

SEQ ID NO: 429681 - DNA, 19 bp, Homo sapiens
  siRNA target sequence for NALP8 (NM_176811.2,3045-3063).
gcgattggagtctatggta

SEQ ID NO: 429682 - DNA, 19 bp, Homo sapiens
  siRNA target sequence for NALP8 (NM_176811.2,3046-3064).
cgattggagtctatggtat

SEQ ID NO: 429683 - DNA, 19 bp, Homo sapiens
  siRNA target sequence for NALP8 (NM_176811.2,3051-3069).
ggagtctatggtattctga

SEQ ID NO: 429684 - DNA, 19 bp, Homo sapiens
  siRNA target sequence for NALP8 (NM_176811.2,3126-3144).
cctgcctggactcgaataa

SEQ ID NO: 429685 - DNA, 19 bp, Homo sapiens
  siRNA target sequence for NALP8 (NM_176811.2,3129-3147).
gcctggactcgaataacta

SEQ ID NO: 429686 - DNA, 19 bp, Homo sapiens
  siRNA target sequence for NALP8 (NM_176811.2,3192-3210).
gactgcctatcccagatta

SEQ ID NO: 429687 - DNA, 19 bp, Homo sapiens
  siRNA target sequence for NALP8 (NM_176811.2,3194-3212).
ctgcctatcccagattaat

SEQ ID NO: 429688 - DNA, 19 bp, Homo sapiens
  siRNA target sequence for NALP8 (NM_176811.2,3197-3215).
cctatcccagattaatcct

SEQ ID NO: 429689 - DNA, 19 bp, Homo sapiens
  siRNA target sequence for BCMP11 (NM_176813.3,127-145).
caaccttgccattgcaata

SEQ ID NO: 429690 - DNA, 19 bp, Homo sapiens
  siRNA target sequence for BCMP11 (NM_176813.3,194-212).
gacatcacttgggtacaaa

SEQ ID NO: 429691 - DNA, 19 bp, Homo sapiens
  siRNA target sequence for BCMP11 (NM_176813.3,199-217).
cacttgggtacaaacttat

SEQ ID NO: 429692 - DNA, 19 bp, Homo sapiens
  siRNA target sequence for BCMP11 (NM_176813.3,246-264).
gtaagaagccattaatggt

SEQ ID NO: 429693 - DNA, 19 bp, Homo sapiens
  siRNA target sequence for BCMP11 (NM_176813.3,250-268).
gaagccattaatggttatt

SEQ ID NO: 429694 - DNA, 19 bp, Homo sapiens
  siRNA target sequence for BCMP11 (NM_176813.3,253-271).
gccattaatggttattcat

SEQ ID NO: 429695 - DNA, 19 bp, Homo sapiens
  siRNA target sequence for BCMP11 (NM_176813.3,255-273).
cattaatggttattcatca

SEQ ID NO: 429696 - DNA, 19 bp, Homo sapiens
  siRNA target sequence for BCMP11 (NM_176813.3,272-290).
cacctggaggattgtcaat

SEQ ID NO: 429697 - DNA, 19 bp, Homo sapiens
  siRNA target sequence for BCMP11 (NM_176813.3,275-293).
ctggaggattgtcaatact

SEQ ID NO: 429698 - DNA, 19 bp, Homo sapiens
  siRNA target sequence for BCMP11 (NM_176813.3,355-373).
gttcatcatgctaaacctt

SEQ ID NO: 429699 - DNA, 19 bp, Homo sapiens
  siRNA target sequence for BCMP11 (NM_176813.3,413-431).
caatatgtgcctagaatca

SEQ ID NO: 429700 - DNA, 19 bp, Homo sapiens
  siRNA target sequence for BCMP11 (NM_176813.3,421-439).
gcctagaatcatgtttgta

SEQ ID NO: 429701 - DNA, 19 bp, Homo sapiens
  siRNA target sequence for BCMP11 (NM_176813.3,423-441).
ctagaatcatgtttgtaga

SEQ ID NO: 429702 - DNA, 19 bp, Homo sapiens
  siRNA target sequence for BCMP11 (NM_176813.3,440-458).
gacccttctttaacagtta

SEQ ID NO: 429703 - DNA, 19 bp, Homo sapiens
  siRNA target sequence for BCMP11 (NM_176813.3,442-460).
cccttctttaacagttaga

SEQ ID NO: 429704 - DNA, 19 bp, Homo sapiens
  siRNA target sequence for BCMP11 (NM_176813.3,470-488).
gctggaagatactctaaca

SEQ ID NO: 429705 - DNA, 19 bp, Homo sapiens
  siRNA target sequence for BCMP11 (NM_176813.3,477-495).
gatactctaacagattgta

SEQ ID NO: 429706 - DNA, 19 bp, Homo sapiens
  siRNA target sequence for BCMP11 (NM_176813.3,483-501).
ctaacagattgtacacata

SEQ ID NO: 429707 - DNA, 19 bp, Homo sapiens
  siRNA target sequence for BCMP11 (NM_176813.3,509-527).
cgggatttacccctattga

SEQ ID NO: 429708 - DNA, 19 bp, Homo sapiens
  siRNA target sequence for BCMP11 (NM_176813.3,510-528).
gggatttacccctattgat

SEQ ID NO: 429709 - DNA, 19 bp, Homo sapiens
  siRNA target sequence for BCMP11 (NM_176813.3,519-537).
ccctattgatagaaaacat

SEQ ID NO: 429710 - DNA, 19 bp, Homo sapiens
  siRNA target sequence for BCMP11 (NM_176813.3,541-559).
gaaagcattaagacttatt

SEQ ID NO: 429711 - DNA, 19 bp, Homo sapiens
  siRNA target sequence for BCMP11 (NM_176813.3,545-563).
gcattaagacttattcagt

SEQ ID NO: 429712 - DNA, 19 bp, Homo sapiens
  siRNA target sequence for LOC168850 (NM_176814.3,716-734).
cctttaagggacaaatact

SEQ ID NO: 429713 - DNA, 19 bp, Homo sapiens
  siRNA target sequence for LOC168850 (NM_176814.3,765-783).
gtgaaccagtttatatcct

SEQ ID NO: 429714 - DNA, 19 bp, Homo sapiens
  siRNA target sequence for LOC168850 (NM_176814.3,828-846).
ccaaatctggtattcaaca

SEQ ID NO: 429715 - DNA, 19 bp, Homo sapiens
  siRNA target sequence for LOC168850 (NM_176814.3,859-877).
ctttcgatcaggaactaaa

SEQ ID NO: 429716 - DNA, 19 bp, Homo sapiens
  siRNA target sequence for LOC168850 (NM_176814.3,870-888).
gaactaaacaacttaagca

SEQ ID NO: 429717 - DNA, 19 bp, Homo sapiens
  siRNA target sequence for LOC168850 (NM_176814.3,907-925).
ggacactatttttgaatgt

SEQ ID NO: 429718 - DNA, 19 bp, Homo sapiens
  siRNA target sequence for LOC168850 (NM_176814.3,941-959).
ctcttcagaggattaccaa

SEQ ID NO: 429719 - DNA, 19 bp, Homo sapiens
  siRNA target sequence for LOC168850 (NM_176814.3,948-966).
gaggattaccaaatttaat

SEQ ID NO: 429720 - DNA, 19 bp, Homo sapiens
  siRNA target sequence for LOC168850 (NM_176814.3,1012-1030).
caaccttcctgatgtaaat

SEQ ID NO: 429721 - DNA, 19 bp, Homo sapiens
  siRNA target sequence for LOC168850 (NM_176814.3,1061-1079).
ctagaagccatatatccaa

SEQ ID NO: 429722 - DNA, 19 bp, Homo sapiens
  siRNA target sequence for LOC168850 (NM_176814.3,1082-1100).
gtggacaaacgagaatata

SEQ ID NO: 429723 - DNA, 19 bp, Homo sapiens
  siRNA target sequence for LOC168850 (NM_176814.3,1092-1110).
gagaatatattattaagct

SEQ ID NO: 429724 - DNA, 19 bp, Homo sapiens
  siRNA target sequence for LOC168850 (NM_176814.3,1115-1133).
cccatagaaactaatcaaa

SEQ ID NO: 429725 - DNA, 19 bp, Homo sapiens
  siRNA target sequence for LOC168850 (NM_176814.3,1125-1143).
ctaatcaaaatgcagtatt

SEQ ID NO: 429726 - DNA, 19 bp, Homo sapiens
  siRNA target sequence for LOC168850 (NM_176814.3,1139-1157).
gtatttcaatatatttcga

SEQ ID NO: 429727 - DNA, 19 bp, Homo sapiens
  siRNA target sequence for LOC168850 (NM_176814.3,1155-1173).
cgaggactgataatcctat

SEQ ID NO: 429728 - DNA, 19 bp, Homo sapiens
  siRNA target sequence for LOC168850 (NM_176814.3,1158-1176).
ggactgataatcctattga

SEQ ID NO: 429729 - DNA, 19 bp, Homo sapiens
  siRNA target sequence for LOC168850 (NM_176814.3,1200-1218).
ctgaacaaaccgaagttca

SEQ ID NO: 429730 - DNA, 19 bp, Homo sapiens
  siRNA target sequence for LOC168850 (NM_176814.3,1214-1232).
gttcagatacaggaaacta

SEQ ID NO: 429731 - DNA, 19 bp, Homo sapiens
  siRNA target sequence for LOC168850 (NM_176814.3,1230-1248).
ctagcactgaacagtcaaa

SEQ ID NO: 429732 - DNA, 19 bp, Homo sapiens
  siRNA target sequence for LOC168850 (NM_176814.3,1236-1254).
ctgaacagtcaaaaacagt

SEQ ID NO: 429733 - DNA, 19 bp, Homo sapiens
  siRNA target sequence for LOC168850 (NM_176814.3,1288-1306).
gccccctcctgttgagatt

SEQ ID NO: 429734 - DNA, 19 bp, Homo sapiens
  siRNA target sequence for LOC168850 (NM_176814.3,1291-1309).
ccctcctgttgagattgtt

SEQ ID NO: 429735 - DNA, 19 bp, Homo sapiens
  siRNA target sequence for LOC168850 (NM_176814.3,1292-1310).
cctcctgttgagattgtta

SEQ ID NO: 429736 - DNA, 19 bp, Homo sapiens
  siRNA target sequence for LOC168850 (NM_176814.3,1445-1463).
gttcgccgtcacattcgaa

SEQ ID NO: 429737 - DNA, 19 bp, Homo sapiens
  siRNA target sequence for LOC168850 (NM_176814.3,1449-1467).
gccgtcacattcgaaaagt

SEQ ID NO: 429738 - DNA, 19 bp, Homo sapiens
  siRNA target sequence for LOC168850 (NM_176814.3,1450-1468).
ccgtcacattcgaaaagta

SEQ ID NO: 429739 - DNA, 19 bp, Homo sapiens
  siRNA target sequence for LOC168850 (NM_176814.3,1452-1470).
gtcacattcgaaaagtaca

SEQ ID NO: 429740 - DNA, 19 bp, Homo sapiens
  siRNA target sequence for LOC168850 (NM_176814.3,1539-1557).
gacgcagtaagaatgttct

SEQ ID NO: 429741 - DNA, 19 bp, Homo sapiens
  siRNA target sequence for LOC168850 (NM_176814.3,1543-1561).
cagtaagaatgttctagtt

SEQ ID NO: 429742 - DNA, 19 bp, Homo sapiens
  siRNA target sequence for LOC168850 (NM_176814.3,1549-1567).
gaatgttctagttccatta

SEQ ID NO: 429743 - DNA, 19 bp, Homo sapiens
  siRNA target sequence for LOC168850 (NM_176814.3,1573-1591).
gagttgtccagtatgttgt

SEQ ID NO: 429744 - DNA, 19 bp, Homo sapiens
  siRNA target sequence for LOC168850 (NM_176814.3,1580-1598).
ccagtatgttgtaaatcat

SEQ ID NO: 429745 - DNA, 19 bp, Homo sapiens
  siRNA target sequence for LOC168850 (NM_176814.3,1601-1619).
gctacaaaagcgaatgtaa

SEQ ID NO: 429746 - DNA, 19 bp, Homo sapiens
  siRNA target sequence for LOC168850 (NM_176814.3,1647-1665).
gactaaggagggattcaat

SEQ ID NO: 429747 - DNA, 19 bp, Homo sapiens
  siRNA target sequence for LOC168850 (NM_176814.3,1668-1686).
ctcctgatatagcaacaaa

SEQ ID NO: 429748 - DNA, 19 bp, Homo sapiens
  siRNA target sequence for LOC168850 (NM_176814.3,1702-1720).
gttcctggattctatttct

SEQ ID NO: 429749 - DNA, 19 bp, Homo sapiens
  siRNA target sequence for LOC168850 (NM_176814.3,1765-1783).
ggctgaatacaatttaact

SEQ ID NO: 429750 - DNA, 19 bp, Homo sapiens
  siRNA target sequence for LOC168850 (NM_176814.3,1807-1825).
gaggaaatatagttcacaa

SEQ ID NO: 429751 - DNA, 19 bp, Homo sapiens
  siRNA target sequence for LOC168850 (NM_176814.3,1846-1864).
gcaaattgtccacaagata

SEQ ID NO: 429752 - DNA, 19 bp, Homo sapiens
  siRNA target sequence for LOC168850 (NM_176814.3,1949-1967).
gcagattctgtagaatctt

SEQ ID NO: 429753 - DNA, 19 bp, Homo sapiens
  siRNA target sequence for LOC168850 (NM_176814.3,1984-2002).
ccattctccacagaatgaa

SEQ ID NO: 429754 - DNA, 19 bp, Homo sapiens
  siRNA target sequence for LOC168850 (NM_176814.3,1985-2003).
cattctccacagaatgaat

SEQ ID NO: 429755 - DNA, 19 bp, Homo sapiens
  siRNA target sequence for LOC168850 (NM_176814.3,1989-2007).
ctccacagaatgaattaaa

SEQ ID NO: 429756 - DNA, 19 bp, Homo sapiens
  siRNA target sequence for LOC168850 (NM_176814.3,2040-2058).
caccggcagcacagaaaaa

SEQ ID NO: 429757 - DNA, 19 bp, Homo sapiens
  siRNA target sequence for LOC168850 (NM_176814.3,2042-2060).
ccggcagcacagaaaaata

SEQ ID NO: 429758 - DNA, 19 bp, Homo sapiens
  siRNA target sequence for LOC168850 (NM_176814.3,2108-2126).
gcaggtggccagcaaaaaa

SEQ ID NO: 429759 - DNA, 19 bp, Homo sapiens
  siRNA target sequence for LOC168850 (NM_176814.3,2111-2129).
ggtggccagcaaaaaacca

SEQ ID NO: 429760 - DNA, 19 bp, Homo sapiens
  siRNA target sequence for LOC168850 (NM_176814.3,2145-2163).
cagctggctttgactttaa

SEQ ID NO: 429761 - DNA, 19 bp, Homo sapiens
  siRNA target sequence for LOC168850 (NM_176814.3,2203-2221).
caaacagaacttgactaaa

SEQ ID NO: 429762 - DNA, 19 bp, Homo sapiens
  siRNA target sequence for LOC168850 (NM_176814.3,2274-2292).
gtcctctttgcacttatga

SEQ ID NO: 429763 - DNA, 19 bp, Homo sapiens
  siRNA target sequence for LOC168850 (NM_176814.3,2298-2316).
gtcggaaacgtgatgtgat

SEQ ID NO: 429764 - DNA, 19 bp, Homo sapiens
  siRNA target sequence for LOC168850 (NM_176814.3,2309-2327).
gatgtgatacgacatataa

SEQ ID NO: 429765 - DNA, 19 bp, Homo sapiens
  siRNA target sequence for LOC168850 (NM_176814.3,2401-2419).
gcctattgattttgttcta

SEQ ID NO: 429766 - DNA, 19 bp, Homo sapiens
  siRNA target sequence for LOC168850 (NM_176814.3,2445-2463).
cgagggatgaagcaaaaca

SEQ ID NO: 429767 - DNA, 19 bp, Homo sapiens
  siRNA target sequence for LOC168850 (NM_176814.3,2449-2467).
ggatgaagcaaaacatagt

SEQ ID NO: 429768 - DNA, 19 bp, Homo sapiens
  siRNA target sequence for LOC168850 (NM_176814.3,2453-2471).
gaagcaaaacatagtgatt

SEQ ID NO: 429769 - DNA, 19 bp, Homo sapiens
  siRNA target sequence for LOC168850 (NM_176814.3,2520-2538).
ctgacgtcggtattgaagt

SEQ ID NO: 429770 - DNA, 19 bp, Homo sapiens
  siRNA target sequence for LOC168850 (NM_176814.3,2522-2540).
gacgtcggtattgaagtaa

SEQ ID NO: 429771 - DNA, 19 bp, Homo sapiens
  siRNA target sequence for LOC168850 (NM_176814.3,2524-2542).
cgtcggtattgaagtaaaa

SEQ ID NO: 429772 - DNA, 19 bp, Homo sapiens
  siRNA target sequence for LOC168850 (NM_176814.3,2589-2607).
catttgccaaaaagactta

SEQ ID NO: 429773 - DNA, 19 bp, Homo sapiens
  siRNA target sequence for LOC168850 (NM_176814.3,2608-2626).
ccttgaacatcataagaaa

SEQ ID NO: 429774 - DNA, 19 bp, Homo sapiens
  siRNA target sequence for LOC168850 (NM_176814.3,2635-2653).
ggcaaatgcttccaattca

SEQ ID NO: 429775 - DNA, 19 bp, Homo sapiens
  siRNA target sequence for LOC168850 (NM_176814.3,2671-2689).
caaaggccgaagtacaaga

SEQ ID NO: 429776 - DNA, 19 bp, Homo sapiens
  siRNA target sequence for LOC168850 (NM_176814.3,2675-2693).
ggccgaagtacaagatcta

SEQ ID NO: 429777 - DNA, 19 bp, Homo sapiens
  siRNA target sequence for KENAE (NM_176816.2,209-227).
ggaaacctggtgggattta

SEQ ID NO: 429778 - DNA, 19 bp, Homo sapiens
  siRNA target sequence for KENAE (NM_176816.2,218-236).
gtgggatttatgaaataga

SEQ ID NO: 429779 - DNA, 19 bp, Homo sapiens
  siRNA target sequence for KENAE (NM_176816.2,249-267).
gtctagaaaaagatcagat

SEQ ID NO: 429780 - DNA, 19 bp, Homo sapiens
  siRNA target sequence for KENAE (NM_176816.2,404-422).
gtagcactgtagattcgaa

SEQ ID NO: 429781 - DNA, 19 bp, Homo sapiens
  siRNA target sequence for KENAE (NM_176816.2,410-428).
ctgtagattcgaattcaga

SEQ ID NO: 429782 - DNA, 19 bp, Homo sapiens
  siRNA target sequence for KENAE (NM_176816.2,412-430).
gtagattcgaattcagaat

SEQ ID NO: 429783 - DNA, 19 bp, Homo sapiens
  siRNA target sequence for KENAE (NM_176816.2,450-468).
gcaatgtcttaatgaaact

SEQ ID NO: 429784 - DNA, 19 bp, Homo sapiens
  siRNA target sequence for KENAE (NM_176816.2,571-589).
ggcaaagccacaagtcata

SEQ ID NO: 429785 - DNA, 19 bp, Homo sapiens
  siRNA target sequence for KENAE (NM_176816.2,590-608).
cgcaggcagtgcttcaaaa

SEQ ID NO: 429786 - DNA, 19 bp, Homo sapiens
  siRNA target sequence for KENAE (NM_176816.2,594-612).
ggcagtgcttcaaaaaact

SEQ ID NO: 429787 - DNA, 19 bp, Homo sapiens
  siRNA target sequence for KENAE (NM_176816.2,596-614).
cagtgcttcaaaaaactat

SEQ ID NO: 429788 - DNA, 19 bp, Homo sapiens
  siRNA target sequence for KENAE (NM_176816.2,600-618).
gcttcaaaaaactatggaa

SEQ ID NO: 429789 - DNA, 19 bp, Homo sapiens
  siRNA target sequence for KENAE (NM_176816.2,667-685).
gaatttgatcataatagat

SEQ ID NO: 429790 - DNA, 19 bp, Homo sapiens
  siRNA target sequence for KENAE (NM_176816.2,832-850).
gccctcgccatgcttgata

SEQ ID NO: 429791 - DNA, 19 bp, Homo sapiens
  siRNA target sequence for KENAE (NM_176816.2,835-853).
ctcgccatgcttgatatca

SEQ ID NO: 429792 - DNA, 19 bp, Homo sapiens
  siRNA target sequence for KENAE (NM_176816.2,837-855).
cgccatgcttgatatcaaa

SEQ ID NO: 429793 - DNA, 19 bp, Homo sapiens
  siRNA target sequence for KENAE (NM_176816.2,1036-1054).
gaaattttgcagaagagta

SEQ ID NO: 429794 - DNA, 19 bp, Homo sapiens
  siRNA target sequence for KENAE (NM_176816.2,1078-1096).
gatgctttcagaattgcat

SEQ ID NO: 429795 - DNA, 19 bp, Homo sapiens
  siRNA target sequence for KENAE (NM_176816.2,1093-1111).
gcatttgagcaacaattaa

SEQ ID NO: 429796 - DNA, 19 bp, Homo sapiens
  siRNA target sequence for KENAE (NM_176816.2,1123-1141).
gaccaggcactacaattga

SEQ ID NO: 429797 - DNA, 19 bp, Homo sapiens
  siRNA target sequence for KENAE (NM_176816.2,1129-1147).
gcactacaattgacacaaa

SEQ ID NO: 429798 - DNA, 19 bp, Homo sapiens
  siRNA target sequence for KENAE (NM_176816.2,1254-1272).
gggtatgctcccttcagaa

SEQ ID NO: 429799 - DNA, 19 bp, Homo sapiens
  siRNA target sequence for KENAE (NM_176816.2,1255-1273).
ggtatgctcccttcagaaa

SEQ ID NO: 429800 - DNA, 19 bp, Homo sapiens
  siRNA target sequence for KENAE (NM_176816.2,1394-1412).
ctcgggcattggaagacaa

SEQ ID NO: 429801 - DNA, 19 bp, Homo sapiens
  siRNA target sequence for KENAE (NM_176816.2,1397-1415).
gggcattggaagacaaaga

SEQ ID NO: 429802 - DNA, 19 bp, Homo sapiens
  siRNA target sequence for KENAE (NM_176816.2,1483-1501).
cgtaagacttcagaattct

SEQ ID NO: 429803 - DNA, 19 bp, Homo sapiens
  siRNA target sequence for KENAE (NM_176816.2,1502-1520).
ctgttttgggtgatcctat

SEQ ID NO: 429804 - DNA, 19 bp, Homo sapiens
  siRNA target sequence for KENAE (NM_176816.2,1549-1567).
gtgggctgcatttgttcaa

SEQ ID NO: 429805 - DNA, 19 bp, Homo sapiens
  siRNA target sequence for KENAE (NM_176816.2,1569-1587).
ccagcactctcaaatagat

SEQ ID NO: 429806 - DNA, 19 bp, Homo sapiens
  siRNA target sequence for KENAE (NM_176816.2,1577-1595).
ctcaaatagatccaaacta

SEQ ID NO: 429807 - DNA, 19 bp, Homo sapiens
  siRNA target sequence for KENAE (NM_176816.2,1579-1597).
caaatagatccaaactata

SEQ ID NO: 429808 - DNA, 19 bp, Homo sapiens
  siRNA target sequence for KENAE (NM_176816.2,1623-1641).
gccatcaagtatcatattt

SEQ ID NO: 429809 - DNA, 19 bp, Homo sapiens
  siRNA target sequence for NALP10 (NM_176821.2,61-79).
gaccttgaggagaacgatt

SEQ ID NO: 429810 - DNA, 19 bp, Homo sapiens
  siRNA target sequence for NALP10 (NM_176821.2,168-186).
ggtggacctggcagaatta

SEQ ID NO: 429811 - DNA, 19 bp, Homo sapiens
  siRNA target sequence for NALP10 (NM_176821.2,174-192).
cctggcagaattactgatt

SEQ ID NO: 429812 - DNA, 19 bp, Homo sapiens
  siRNA target sequence for NALP10 (NM_176821.2,280-298).
catatttgtctgcatgatt

SEQ ID NO: 429813 - DNA, 19 bp, Homo sapiens
  siRNA target sequence for NALP10 (NM_176821.2,291-309).
gcatgattacagagaagta

SEQ ID NO: 429814 - DNA, 19 bp, Homo sapiens
  siRNA target sequence for NALP10 (NM_176821.2,292-310).
catgattacagagaagtat

SEQ ID NO: 429815 - DNA, 19 bp, Homo sapiens
  siRNA target sequence for NALP10 (NM_176821.2,456-474).
cacggtggaggctctattt

SEQ ID NO: 429816 - DNA, 19 bp, Homo sapiens
  siRNA target sequence for NALP10 (NM_176821.2,458-476).
cggtggaggctctatttga

SEQ ID NO: 429817 - DNA, 19 bp, Homo sapiens
  siRNA target sequence for NALP10 (NM_176821.2,460-478).
gtggaggctctatttgatt

SEQ ID NO: 429818 - DNA, 19 bp, Homo sapiens
  siRNA target sequence for NALP10 (NM_176821.2,462-480).
ggaggctctatttgattca

SEQ ID NO: 429819 - DNA, 19 bp, Homo sapiens
  siRNA target sequence for NALP10 (NM_176821.2,545-563).
caactctcgccagaaaaat

SEQ ID NO: 429820 - DNA, 19 bp, Homo sapiens
  siRNA target sequence for NALP10 (NM_176821.2,591-609).
gtacccaggccggtttgat

SEQ ID NO: 429821 - DNA, 19 bp, Homo sapiens
  siRNA target sequence for NALP10 (NM_176821.2,594-612).
cccaggccggtttgattat

SEQ ID NO: 429822 - DNA, 19 bp, Homo sapiens
  siRNA target sequence for NALP10 (NM_176821.2,596-614).
caggccggtttgattatgt

SEQ ID NO: 429823 - DNA, 19 bp, Homo sapiens
  siRNA target sequence for NALP10 (NM_176821.2,598-616).
ggccggtttgattatgtct

SEQ ID NO: 429824 - DNA, 19 bp, Homo sapiens
  siRNA target sequence for NALP10 (NM_176821.2,599-617).
gccggtttgattatgtctt

SEQ ID NO: 429825 - DNA, 19 bp, Homo sapiens
  siRNA target sequence for NALP10 (NM_176821.2,600-618).
ccggtttgattatgtcttt

SEQ ID NO: 429826 - DNA, 19 bp, Homo sapiens
  siRNA target sequence for NALP10 (NM_176821.2,680-698).
ggtgctgcggggacaatca

SEQ ID NO: 429827 - DNA, 19 bp, Homo sapiens
  siRNA target sequence for NALP10 (NM_176821.2,681-699).
gtgctgcggggacaatcaa

SEQ ID NO: 429828 - DNA, 19 bp, Homo sapiens
  siRNA target sequence for NALP10 (NM_176821.2,821-839).
gcctgctgcaccttctaat

SEQ ID NO: 429829 - DNA, 19 bp, Homo sapiens
  siRNA target sequence for NALP10 (NM_176821.2,822-840).
cctgctgcaccttctaatt

SEQ ID NO: 429830 - DNA, 19 bp, Homo sapiens
  siRNA target sequence for NALP10 (NM_176821.2,826-844).
ctgcaccttctaattagga

SEQ ID NO: 429831 - DNA, 19 bp, Homo sapiens
  siRNA target sequence for NALP10 (NM_176821.2,832-850).
cttctaattaggagacata

SEQ ID NO: 429832 - DNA, 19 bp, Homo sapiens
  siRNA target sequence for NALP10 (NM_176821.2,926-944).
cacgtcatgtccatatcct

SEQ ID NO: 429833 - DNA, 19 bp, Homo sapiens
  siRNA target sequence for NALP10 (NM_176821.2,961-979).
gagagggcgaggtacttca

SEQ ID NO: 429834 - DNA, 19 bp, Homo sapiens
  siRNA target sequence for NALP10 (NM_176821.2,1013-1031).
gtgccttcgacattgtaca

SEQ ID NO: 429835 - DNA, 19 bp, Homo sapiens
  siRNA target sequence for NALP10 (NM_176821.2,1117-1135).
ggcaaagttgtcttagaga

SEQ ID NO: 429836 - DNA, 19 bp, Homo sapiens
  siRNA target sequence for NALP10 (NM_176821.2,1275-1293).
ccagaggttcctatttgaa

SEQ ID NO: 429837 - DNA, 19 bp, Homo sapiens
  siRNA target sequence for NALP10 (NM_176821.2,1336-1354).
gccgctttcctgagtagta

SEQ ID NO: 429838 - DNA, 19 bp, Homo sapiens
  siRNA target sequence for NALP10 (NM_176821.2,1349-1367).
gtagtaacgactaccaatt

SEQ ID NO: 429839 - DNA, 19 bp, Homo sapiens
  siRNA target sequence for NALP10 (NM_176821.2,1370-1388).
gacttgccatcaagaagtt

SEQ ID NO: 429840 - DNA, 19 bp, Homo sapiens
  siRNA target sequence for NALP10 (NM_176821.2,1372-1390).
cttgccatcaagaagttct

SEQ ID NO: 429841 - DNA, 19 bp, Homo sapiens
  siRNA target sequence for NALP10 (NM_176821.2,1539-1557).
cctcactatgcagttttta

SEQ ID NO: 429842 - DNA, 19 bp, Homo sapiens
  siRNA target sequence for NALP10 (NM_176821.2,1625-1643).
gtttagcgcaggatctgaa

SEQ ID NO: 429843 - DNA, 19 bp, Homo sapiens
  siRNA target sequence for NALP10 (NM_176821.2,1631-1649).
cgcaggatctgaagcattt

SEQ ID NO: 429844 - DNA, 19 bp, Homo sapiens
  siRNA target sequence for NALP10 (NM_176821.2,1695-1713).
ggaattctccctgtatgaa

SEQ ID NO: 429845 - DNA, 19 bp, Homo sapiens
  siRNA target sequence for NALP10 (NM_176821.2,1884-1902).
gggcaaagataatatagca

SEQ ID NO: 429846 - DNA, 19 bp, Homo sapiens
  siRNA target sequence for BBS7 (NM_176824.1,2189-2207).
gcatgatcactgatctttt

SEQ ID NO: 429847 - DNA, 19 bp, Homo sapiens
  siRNA target sequence for BBS7 (NM_176824.1,2196-2214).
cactgatcttttcatagat

SEQ ID NO: 429848 - DNA, 19 bp, Homo sapiens
  siRNA target sequence for BBS7 (NM_176824.1,2200-2218).
gatcttttcatagataaat

SEQ ID NO: 429849 - DNA, 19 bp, Homo sapiens
  siRNA target sequence for BBS7 (NM_176824.1,2223-2241).
gtttaaaggcaccaatgta

SEQ ID NO: 429850 - DNA, 19 bp, Homo sapiens
  siRNA target sequence for BBS7 (NM_176824.1,2230-2248).
ggcaccaatgtaaaaacta

SEQ ID NO: 429851 - DNA, 19 bp, Homo sapiens
  siRNA target sequence for BBS7 (NM_176824.1,2231-2249).
gcaccaatgtaaaaactaa

SEQ ID NO: 429852 - DNA, 19 bp, Homo sapiens
  siRNA target sequence for BBS7 (NM_176824.1,2251-2269).
gtaccccttctattggaaa

SEQ ID NO: 429853 - DNA, 19 bp, Homo sapiens
  siRNA target sequence for PDLIM2 (NM_176871.2,1144-1162).
gattgtcactggaagcttt

SEQ ID NO: 429854 - DNA, 19 bp, Homo sapiens
  siRNA target sequence for TRA16 (NM_176880.3,596-614).
ctcaggctctccacaagat

SEQ ID NO: 429855 - DNA, 19 bp, Homo sapiens
  siRNA target sequence for TRA16 (NM_176880.3,600-618).
ggctctccacaagattgta

SEQ ID NO: 429856 - DNA, 19 bp, Homo sapiens
  siRNA target sequence for TRA16 (NM_176880.3,602-620).
ctctccacaagattgtaga

SEQ ID NO: 429857 - DNA, 19 bp, Homo sapiens
  siRNA target sequence for TRA16 (NM_176880.3,604-622).
ctccacaagattgtagatt

SEQ ID NO: 429858 - DNA, 19 bp, Homo sapiens
  siRNA target sequence for TRA16 (NM_176880.3,607-625).
cacaagattgtagatttct

SEQ ID NO: 429859 - DNA, 19 bp, Homo sapiens
  siRNA target sequence for MGC3123 (NM_177441.1,1114-1132).
ctgtgcggctcaaattcct

SEQ ID NO: 429860 - DNA, 19 bp, Homo sapiens
  siRNA target sequence for MGC3123 (NM_177441.1,1179-1197).
ggtgccctgaagagcaaat

SEQ ID NO: 429861 - DNA, 19 bp, Homo sapiens
  siRNA target sequence for MGC3123 (NM_177441.1,1216-1234).
gccagatgaaactgatcta

SEQ ID NO: 429862 - DNA, 19 bp, Homo sapiens
  siRNA target sequence for MGC3123 (NM_177441.1,1288-1306).
ccgacaactgtgtgattca

SEQ ID NO: 429863 - DNA, 19 bp, Homo sapiens
  siRNA target sequence for MGC3123 (NM_177441.1,1445-1463).
ctggtacttccgaatcaat

SEQ ID NO: 429864 - DNA, 19 bp, Homo sapiens
  siRNA target sequence for MGC3123 (NM_177441.1,1447-1465).
ggtacttccgaatcaatta

SEQ ID NO: 429865 - DNA, 19 bp, Homo sapiens
  siRNA target sequence for MGC3123 (NM_177441.1,1529-1547).
cctagtatttgggatgtat

SEQ ID NO: 429866 - DNA, 19 bp, Homo sapiens
  siRNA target sequence for TRAPPC6B (NM_177452.2,223-241).
gcggatgaggcgttgtttt

SEQ ID NO: 429867 - DNA, 19 bp, Homo sapiens
  siRNA target sequence for TRAPPC6B (NM_177452.2,300-318).
ggaaaacggacgatgtatt

SEQ ID NO: 429868 - DNA, 19 bp, Homo sapiens
  siRNA target sequence for TRAPPC6B (NM_177452.2,301-319).
gaaaacggacgatgtatta

SEQ ID NO: 429869 - DNA, 19 bp, Homo sapiens
  siRNA target sequence for TRAPPC6B (NM_177452.2,344-362).
gagtgggacaaggattgat

SEQ ID NO: 429870 - DNA, 19 bp, Homo sapiens
  siRNA target sequence for TRAPPC6B (NM_177452.2,349-367).
ggacaaggattgatagaaa

SEQ ID NO: 429871 - DNA, 19 bp, Homo sapiens
  siRNA target sequence for TRAPPC6B (NM_177452.2,355-373).
ggattgatagaaaggttta

SEQ ID NO: 429872 - DNA, 19 bp, Homo sapiens
  siRNA target sequence for TRAPPC6B (NM_177452.2,390-408).
gttcaaggatgagttagat

SEQ ID NO: 429873 - DNA, 19 bp, Homo sapiens
  siRNA target sequence for TRAPPC6B (NM_177452.2,437-455).
ggactacggtattcaagaa

SEQ ID NO: 429874 - DNA, 19 bp, Homo sapiens
  siRNA target sequence for TRAPPC6B (NM_177452.2,440-458).
ctacggtattcaagaaaca

SEQ ID NO: 429875 - DNA, 19 bp, Homo sapiens
  siRNA target sequence for TRAPPC6B (NM_177452.2,453-471).
gaaacaaatcgacaatcta

SEQ ID NO: 429876 - DNA, 19 bp, Homo sapiens
  siRNA target sequence for TRAPPC6B (NM_177452.2,462-480).
cgacaatctaaggacaaat

SEQ ID NO: 429877 - DNA, 19 bp, Homo sapiens
  siRNA target sequence for TRAPPC6B (NM_177452.2,465-483).
caatctaaggacaaatcat

SEQ ID NO: 429878 - DNA, 19 bp, Homo sapiens
  siRNA target sequence for TRAPPC6B (NM_177452.2,473-491).
ggacaaatcatcagtattt

SEQ ID NO: 429879 - DNA, 19 bp, Homo sapiens
  siRNA target sequence for TRAPPC6B (NM_177452.2,484-502).
cagtatttagcatttacgt

SEQ ID NO: 429880 - DNA, 19 bp, Homo sapiens
  siRNA target sequence for TRAPPC6B (NM_177452.2,515-533).
gaggtggcttatcaaactt

SEQ ID NO: 429881 - DNA, 19 bp, Homo sapiens
  siRNA target sequence for TRAPPC6B (NM_177452.2,582-600).
caaatttcaggtgatgata

SEQ ID NO: 429882 - DNA, 19 bp, Homo sapiens
  siRNA target sequence for MIST1 (NM_177455.2,274-292).
cagcggatgcacaagctaa

SEQ ID NO: 429883 - DNA, 19 bp, Homo sapiens
  siRNA target sequence for MIST1 (NM_177455.2,276-294).
gcggatgcacaagctaaat

SEQ ID NO: 429884 - DNA, 19 bp, Homo sapiens
  siRNA target sequence for MAGEC3 (NM_177456.1,417-435).
cacaggattccatagatga

SEQ ID NO: 429885 - DNA, 19 bp, Homo sapiens
  siRNA target sequence for MAGEC3 (NM_177456.1,532-550).
cttaccctctactctcatt

SEQ ID NO: 429886 - DNA, 19 bp, Homo sapiens
  siRNA target sequence for PKHD1L1 (NM_177531.2,173-191).
cacagatggctctcaaata

SEQ ID NO: 429887 - DNA, 19 bp, Homo sapiens
  siRNA target sequence for PKHD1L1 (NM_177531.2,175-193).
cagatggctctcaaataat

SEQ ID NO: 429888 - DNA, 19 bp, Homo sapiens
  siRNA target sequence for PKHD1L1 (NM_177531.2,186-204).
caaataatccccaaagtca

SEQ ID NO: 429889 - DNA, 19 bp, Homo sapiens
  siRNA target sequence for PKHD1L1 (NM_177531.2,205-223).
cagaaataatacctaaata

SEQ ID NO: 429890 - DNA, 19 bp, Homo sapiens
  siRNA target sequence for PKHD1L1 (NM_177531.2,216-234).
cctaaatatggcagtataa

SEQ ID NO: 429891 - DNA, 19 bp, Homo sapiens
  siRNA target sequence for PKHD1L1 (NM_177531.2,217-235).
ctaaatatggcagtataaa

SEQ ID NO: 429892 - DNA, 19 bp, Homo sapiens
  siRNA target sequence for PKHD1L1 (NM_177531.2,287-305).
gtttaactatggagttgat

SEQ ID NO: 429893 - DNA, 19 bp, Homo sapiens
  siRNA target sequence for PKHD1L1 (NM_177531.2,317-335).
gggaaacagtgtgcaatta

SEQ ID NO: 429894 - DNA, 19 bp, Homo sapiens
  siRNA target sequence for PKHD1L1 (NM_177531.2,350-368).
gtcaattacttgtgatgta

SEQ ID NO: 429895 - DNA, 19 bp, Homo sapiens
  siRNA target sequence for PKHD1L1 (NM_177531.2,379-397).
caagtcattcaactcaaat

SEQ ID NO: 429896 - DNA, 19 bp, Homo sapiens
  siRNA target sequence for PKHD1L1 (NM_177531.2,393-411).
caaattacatgctatacta

SEQ ID NO: 429897 - DNA, 19 bp, Homo sapiens
  siRNA target sequence for PKHD1L1 (NM_177531.2,415-433).
caatgccggaagattccta

SEQ ID NO: 429898 - DNA, 19 bp, Homo sapiens
  siRNA target sequence for PKHD1L1 (NM_177531.2,518-536).
caacgcaaaaagttttaga

SEQ ID NO: 429899 - DNA, 19 bp, Homo sapiens
  siRNA target sequence for PKHD1L1 (NM_177531.2,529-547).
gttttagaaccccaacaat

SEQ ID NO: 429900 - DNA, 19 bp, Homo sapiens
  siRNA target sequence for PKHD1L1 (NM_177531.2,570-588).
ggaactccaggtacactaa

SEQ ID NO: 429901 - DNA, 19 bp, Homo sapiens
  siRNA target sequence for PKHD1L1 (NM_177531.2,571-589).
gaactccaggtacactaat

SEQ ID NO: 429902 - DNA, 19 bp, Homo sapiens
  siRNA target sequence for PKHD1L1 (NM_177531.2,577-595).
caggtacactaataacaat

SEQ ID NO: 429903 - DNA, 19 bp, Homo sapiens
  siRNA target sequence for PKHD1L1 (NM_177531.2,692-710).
gccctgtgagcttctcata

SEQ ID NO: 429904 - DNA, 19 bp, Homo sapiens
  siRNA target sequence for PKHD1L1 (NM_177531.2,705-723).
ctcataccacaatctgata

SEQ ID NO: 429905 - DNA, 19 bp, Homo sapiens
  siRNA target sequence for PKHD1L1 (NM_177531.2,765-783).
ggttctatggtttgtaaga

SEQ ID NO: 429906 - DNA, 19 bp, Homo sapiens
  siRNA target sequence for PKHD1L1 (NM_177531.2,778-796).
gtaagacgactggaacttt

SEQ ID NO: 429907 - DNA, 19 bp, Homo sapiens
  siRNA target sequence for PKHD1L1 (NM_177531.2,785-803).
gactggaacttttattggt

SEQ ID NO: 429908 - DNA, 19 bp, Homo sapiens
  siRNA target sequence for PKHD1L1 (NM_177531.2,793-811).
cttttattggtcatcacaa

SEQ ID NO: 429909 - DNA, 19 bp, Homo sapiens
  siRNA target sequence for PKHD1L1 (NM_177531.2,813-831).
gtcagcttcatcttagata

SEQ ID NO: 429910 - DNA, 19 bp, Homo sapiens
  siRNA target sequence for PKHD1L1 (NM_177531.2,815-833).
cagcttcatcttagataat

SEQ ID NO: 429911 - DNA, 19 bp, Homo sapiens
  siRNA target sequence for PKHD1L1 (NM_177531.2,817-835).
gcttcatcttagataatga

SEQ ID NO: 429912 - DNA, 19 bp, Homo sapiens
  siRNA target sequence for PKHD1L1 (NM_177531.2,818-836).
cttcatcttagataatgat

SEQ ID NO: 429913 - DNA, 19 bp, Homo sapiens
  siRNA target sequence for PKHD1L1 (NM_177531.2,955-973).
gtggcaccacgctgacaat

SEQ ID NO: 429914 - DNA, 19 bp, Homo sapiens
  siRNA target sequence for PKHD1L1 (NM_177531.2,959-977).
caccacgctgacaataagt

SEQ ID NO: 429915 - DNA, 19 bp, Homo sapiens
  siRNA target sequence for PKHD1L1 (NM_177531.2,976-994).
gtgggcgtttctttgatca

SEQ ID NO: 429916 - DNA, 19 bp, Homo sapiens
  siRNA target sequence for PKHD1L1 (NM_177531.2,1033-1051).
cttgtgatattttgaatgt

SEQ ID NO: 429917 - DNA, 19 bp, Homo sapiens
  siRNA target sequence for PKHD1L1 (NM_177531.2,1078-1096).
caccccccaaacctcatat

SEQ ID NO: 429918 - DNA, 19 bp, Homo sapiens
  siRNA target sequence for PKHD1L1 (NM_177531.2,1134-1152).
cttgaggtgtggaataata

SEQ ID NO: 429919 - DNA, 19 bp, Homo sapiens
  siRNA target sequence for PKHD1L1 (NM_177531.2,1154-1172).
ccgtccaatacgtttggaa

SEQ ID NO: 429920 - DNA, 19 bp, Homo sapiens
  siRNA target sequence for PKHD1L1 (NM_177531.2,1223-1241).
ggtagattcagcttcctat

SEQ ID NO: 429921 - DNA, 19 bp, Homo sapiens
  siRNA target sequence for PKHD1L1 (NM_177531.2,1224-1242).
gtagattcagcttcctata

SEQ ID NO: 429922 - DNA, 19 bp, Homo sapiens
  siRNA target sequence for PKHD1L1 (NM_177531.2,1250-1268).
catggaacaagacacattt

SEQ ID NO: 429923 - DNA, 19 bp, Homo sapiens
  siRNA target sequence for PKHD1L1 (NM_177531.2,1272-1290).
gcacgctttagtggatttt

SEQ ID NO: 429924 - DNA, 19 bp, Homo sapiens
  siRNA target sequence for PKHD1L1 (NM_177531.2,1276-1294).
gctttagtggatttttggt

SEQ ID NO: 429925 - DNA, 19 bp, Homo sapiens
  siRNA target sequence for PKHD1L1 (NM_177531.2,1302-1320).
gattctgatgtttatagat

SEQ ID NO: 429926 - DNA, 19 bp, Homo sapiens
  siRNA target sequence for PKHD1L1 (NM_177531.2,1332-1350).
ggtgatgaccgttatgcta

SEQ ID NO: 429927 - DNA, 19 bp, Homo sapiens
  siRNA target sequence for PKHD1L1 (NM_177531.2,1333-1351).
gtgatgaccgttatgctat

SEQ ID NO: 429928 - DNA, 19 bp, Homo sapiens
  siRNA target sequence for PKHD1L1 (NM_177531.2,1335-1353).
gatgaccgttatgctattt

SEQ ID NO: 429929 - DNA, 19 bp, Homo sapiens
  siRNA target sequence for PKHD1L1 (NM_177531.2,1338-1356).
gaccgttatgctatttatt

SEQ ID NO: 429930 - DNA, 19 bp, Homo sapiens
  siRNA target sequence for PKHD1L1 (NM_177531.2,1380-1398).
gataaggtgaggattgcat

SEQ ID NO: 429931 - DNA, 19 bp, Homo sapiens
  siRNA target sequence for PKHD1L1 (NM_177531.2,1430-1448).
cagtccaacacaaagatca

SEQ ID NO: 429932 - DNA, 19 bp, Homo sapiens
  siRNA target sequence for PKHD1L1 (NM_177531.2,1438-1456).
cacaaagatcagatgatat

SEQ ID NO: 429933 - DNA, 19 bp, Homo sapiens
  siRNA target sequence for PKHD1L1 (NM_177531.2,1444-1462).
gatcagatgatattcatct

SEQ ID NO: 429934 - DNA, 19 bp, Homo sapiens
  siRNA target sequence for PKHD1L1 (NM_177531.2,1499-1517).
gcaggagtacagattaagt

SEQ ID NO: 429935 - DNA, 19 bp, Homo sapiens
  siRNA target sequence for PKHD1L1 (NM_177531.2,1533-1551).
ggactgtaccagtatcgaa

SEQ ID NO: 429936 - DNA, 19 bp, Homo sapiens
  siRNA target sequence for PKHD1L1 (NM_177531.2,1538-1556).
gtaccagtatcgaaatgtt

SEQ ID NO: 429937 - DNA, 19 bp, Homo sapiens
  siRNA target sequence for PKHD1L1 (NM_177531.2,1541-1559).
ccagtatcgaaatgtttat

SEQ ID NO: 429938 - DNA, 19 bp, Homo sapiens
  siRNA target sequence for PKHD1L1 (NM_177531.2,1542-1560).
cagtatcgaaatgtttata

SEQ ID NO: 429939 - DNA, 19 bp, Homo sapiens
  siRNA target sequence for PKHD1L1 (NM_177531.2,1584-1602).
gtgaatgaagaacaagtta

SEQ ID NO: 429940 - DNA, 19 bp, Homo sapiens
  siRNA target sequence for PKHD1L1 (NM_177531.2,1618-1636).
caatcctccaggaagtaca

SEQ ID NO: 429941 - DNA, 19 bp, Homo sapiens
  siRNA target sequence for PKHD1L1 (NM_177531.2,1638-1656).
gttataacattggaaaact

SEQ ID NO: 429942 - DNA, 19 bp, Homo sapiens
  siRNA target sequence for PKHD1L1 (NM_177531.2,1655-1673).
ctgggaaacaactaatgca

SEQ ID NO: 429943 - DNA, 19 bp, Homo sapiens
  siRNA target sequence for PKHD1L1 (NM_177531.2,1657-1675).
gggaaacaactaatgcaat

SEQ ID NO: 429944 - DNA, 19 bp, Homo sapiens
  siRNA target sequence for PKHD1L1 (NM_177531.2,1719-1737).
gctaattcatgttcacttt

SEQ ID NO: 429945 - DNA, 19 bp, Homo sapiens
  siRNA target sequence for PKHD1L1 (NM_177531.2,1726-1744).
catgttcactttaccaata

SEQ ID NO: 429946 - DNA, 19 bp, Homo sapiens
  siRNA target sequence for PKHD1L1 (NM_177531.2,1732-1750).
cactttaccaatatagatt

SEQ ID NO: 429947 - DNA, 19 bp, Homo sapiens
  siRNA target sequence for PKHD1L1 (NM_177531.2,1734-1752).
ctttaccaatatagattaa

SEQ ID NO: 429948 - DNA, 19 bp, Homo sapiens
  siRNA target sequence for PKHD1L1 (NM_177531.2,1820-1838).
gaatgacctctggtctata

SEQ ID NO: 429949 - DNA, 19 bp, Homo sapiens
  siRNA target sequence for PKHD1L1 (NM_177531.2,1842-1860).
ccggacacagttcaagtaa

SEQ ID NO: 429950 - DNA, 19 bp, Homo sapiens
  siRNA target sequence for PKHD1L1 (NM_177531.2,1844-1862).
ggacacagttcaagtaata

SEQ ID NO: 429951 - DNA, 19 bp, Homo sapiens
  siRNA target sequence for PKHD1L1 (NM_177531.2,1887-1905).
gtctacatggtaacattca

SEQ ID NO: 429952 - DNA, 19 bp, Homo sapiens
  siRNA target sequence for PKHD1L1 (NM_177531.2,1895-1913).
ggtaacattcatatcaact

SEQ ID NO: 429953 - DNA, 19 bp, Homo sapiens
  siRNA target sequence for PKHD1L1 (NM_177531.2,1896-1914).
gtaacattcatatcaacta

SEQ ID NO: 429954 - DNA, 19 bp, Homo sapiens
  siRNA target sequence for PKHD1L1 (NM_177531.2,1931-1949).
gcttggttatgaagtagtt

SEQ ID NO: 429955 - DNA, 19 bp, Homo sapiens
  siRNA target sequence for PKHD1L1 (NM_177531.2,1947-1965).
gttgaagggaataatgtca

SEQ ID NO: 429956 - DNA, 19 bp, Homo sapiens
  siRNA target sequence for PKHD1L1 (NM_177531.2,2026-2044).
gggatgggatcgcttctaa

SEQ ID NO: 429957 - DNA, 19 bp, Homo sapiens
  siRNA target sequence for PKHD1L1 (NM_177531.2,2051-2069).
cactctatggtcatcagaa

SEQ ID NO: 429958 - DNA, 19 bp, Homo sapiens
  siRNA target sequence for PKHD1L1 (NM_177531.2,2094-2112).
gaaatggttagcactaagt

SEQ ID NO: 429959 - DNA, 19 bp, Homo sapiens
  siRNA target sequence for PKHD1L1 (NM_177531.2,2107-2125).
ctaagtgtccaccacaaat

SEQ ID NO: 429960 - DNA, 19 bp, Homo sapiens
  siRNA target sequence for PKHD1L1 (NM_177531.2,2113-2131).
gtccaccacaaattgcaaa

SEQ ID NO: 429961 - DNA, 19 bp, Homo sapiens
  siRNA target sequence for PKHD1L1 (NM_177531.2,2115-2133).
ccaccacaaattgcaaatt

SEQ ID NO: 429962 - DNA, 19 bp, Homo sapiens
  siRNA target sequence for PKHD1L1 (NM_177531.2,2178-2196).
gattttaatctggaacata

SEQ ID NO: 429963 - DNA, 19 bp, Homo sapiens
  siRNA target sequence for PKHD1L1 (NM_177531.2,2215-2233).
cagctgaaaccgatgctta

SEQ ID NO: 429964 - DNA, 19 bp, Homo sapiens
  siRNA target sequence for PKHD1L1 (NM_177531.2,2229-2247).
gcttactgtggtcgttatt

SEQ ID NO: 429965 - DNA, 19 bp, Homo sapiens
  siRNA target sequence for PKHD1L1 (NM_177531.2,2238-2256).
ggtcgttattccctgaaaa

SEQ ID NO: 429966 - DNA, 19 bp, Homo sapiens
  siRNA target sequence for PKHD1L1 (NM_177531.2,2301-2319).
cgaccatatggagatattt

SEQ ID NO: 429967 - DNA, 19 bp, Homo sapiens
  siRNA target sequence for PKHD1L1 (NM_177531.2,2328-2346).
ccttataatcagttatgtt

SEQ ID NO: 429968 - DNA, 19 bp, Homo sapiens
  siRNA target sequence for PKHD1L1 (NM_177531.2,2344-2362).
gtttagcatacaaaggatt

SEQ ID NO: 429969 - DNA, 19 bp, Homo sapiens
  siRNA target sequence for PKHD1L1 (NM_177531.2,2359-2377).
gattcctggcaaattatat

SEQ ID NO: 429970 - DNA, 19 bp, Homo sapiens
  siRNA target sequence for PKHD1L1 (NM_177531.2,2396-2414).
ccaagacaatagcaagatt

SEQ ID NO: 429971 - DNA, 19 bp, Homo sapiens
  siRNA target sequence for PKHD1L1 (NM_177531.2,2397-2415).
caagacaatagcaagatta

SEQ ID NO: 429972 - DNA, 19 bp, Homo sapiens
  siRNA target sequence for PKHD1L1 (NM_177531.2,2400-2418).
gacaatagcaagattacta

SEQ ID NO: 429973 - DNA, 19 bp, Homo sapiens
  siRNA target sequence for PKHD1L1 (NM_177531.2,2423-2441).
cactgatacacagtttaca

SEQ ID NO: 429974 - DNA, 19 bp, Homo sapiens
  siRNA target sequence for PKHD1L1 (NM_177531.2,2425-2443).
ctgatacacagtttacata

SEQ ID NO: 429975 - DNA, 19 bp, Homo sapiens
  siRNA target sequence for PKHD1L1 (NM_177531.2,2465-2483).
ctggacttacacttgcata

SEQ ID NO: 429976 - DNA, 19 bp, Homo sapiens
  siRNA target sequence for PKHD1L1 (NM_177531.2,2492-2510).
ggatctcgtaagaacgaaa

SEQ ID NO: 429977 - DNA, 19 bp, Homo sapiens
  siRNA target sequence for PKHD1L1 (NM_177531.2,2493-2511).
gatctcgtaagaacgaaat

SEQ ID NO: 429978 - DNA, 19 bp, Homo sapiens
  siRNA target sequence for PKHD1L1 (NM_177531.2,2496-2514).
ctcgtaagaacgaaataca

SEQ ID NO: 429979 - DNA, 19 bp, Homo sapiens
  siRNA target sequence for PKHD1L1 (NM_177531.2,2513-2531).
cactgggacaaatgtttct

SEQ ID NO: 429980 - DNA, 19 bp, Homo sapiens
  siRNA target sequence for PKHD1L1 (NM_177531.2,2540-2558).
gattagcttacataaagca

SEQ ID NO: 429981 - DNA, 19 bp, Homo sapiens
  siRNA target sequence for PKHD1L1 (NM_177531.2,2572-2590).
ccttctatgtggatgtagt

SEQ ID NO: 429982 - DNA, 19 bp, Homo sapiens
  siRNA target sequence for PKHD1L1 (NM_177531.2,2598-2616).
ggacacacatctacaatct

SEQ ID NO: 429983 - DNA, 19 bp, Homo sapiens
  siRNA target sequence for PKHD1L1 (NM_177531.2,2601-2619).
cacacatctacaatctcaa

SEQ ID NO: 429984 - DNA, 19 bp, Homo sapiens
  siRNA target sequence for PKHD1L1 (NM_177531.2,2625-2643).
gatgaaatgcccaagagaa

SEQ ID NO: 429985 - DNA, 19 bp, Homo sapiens
  siRNA target sequence for PKHD1L1 (NM_177531.2,2752-2770).
catacaattgcagttacaa

SEQ ID NO: 429986 - DNA, 19 bp, Homo sapiens
  siRNA target sequence for PKHD1L1 (NM_177531.2,2792-2810).
ctttgggcagataatcaca

SEQ ID NO: 429987 - DNA, 19 bp, Homo sapiens
  siRNA target sequence for PKHD1L1 (NM_177531.2,2851-2869).
ggccaggcgagtcaaaaat

SEQ ID NO: 429988 - DNA, 19 bp, Homo sapiens
  siRNA target sequence for PKHD1L1 (NM_177531.2,2852-2870).
gccaggcgagtcaaaaatt

SEQ ID NO: 429989 - DNA, 19 bp, Homo sapiens
  siRNA target sequence for PKHD1L1 (NM_177531.2,2858-2876).
cgagtcaaaaattcatatt

SEQ ID NO: 429990 - DNA, 19 bp, Homo sapiens
  siRNA target sequence for PKHD1L1 (NM_177531.2,2928-2946).
gcttatggacatattctta

SEQ ID NO: 429991 - DNA, 19 bp, Homo sapiens
  siRNA target sequence for PKHD1L1 (NM_177531.2,2929-2947).
cttatggacatattcttaa

SEQ ID NO: 429992 - DNA, 19 bp, Homo sapiens
  siRNA target sequence for PKHD1L1 (NM_177531.2,3048-3066).
ggctacgcgtggaacatca

SEQ ID NO: 429993 - DNA, 19 bp, Homo sapiens
  siRNA target sequence for PKHD1L1 (NM_177531.2,3049-3067).
gctacgcgtggaacatcaa

SEQ ID NO: 429994 - DNA, 19 bp, Homo sapiens
  siRNA target sequence for PKHD1L1 (NM_177531.2,3054-3072).
gcgtggaacatcaaatgga

SEQ ID NO: 429995 - DNA, 19 bp, Homo sapiens
  siRNA target sequence for PKHD1L1 (NM_177531.2,3080-3098).
ctgcggaaagcagaatctt

SEQ ID NO: 429996 - DNA, 19 bp, Homo sapiens
  siRNA target sequence for PKHD1L1 (NM_177531.2,3135-3153).
gctaatatgacagttacaa

SEQ ID NO: 429997 - DNA, 19 bp, Homo sapiens
  siRNA target sequence for PKHD1L1 (NM_177531.2,3161-3179).
ggaaggtggcttattcaga

SEQ ID NO: 429998 - DNA, 19 bp, Homo sapiens
  siRNA target sequence for PKHD1L1 (NM_177531.2,3170-3188).
cttattcagacaacatgta

SEQ ID NO: 429999 - DNA, 19 bp, Homo sapiens
  siRNA target sequence for PKHD1L1 (NM_177531.2,3225-3243).
caggttgaagtctatgtca

SEQ ID NO: 430000 - DNA, 19 bp, Homo sapiens
  siRNA target sequence for PKHD1L1 (NM_177531.2,3227-3245).
ggttgaagtctatgtcaat

SEQ ID NO: 430001 - DNA, 19 bp, Homo sapiens
  siRNA target sequence for PKHD1L1 (NM_177531.2,3231-3249).
gaagtctatgtcaatggaa

SEQ ID NO: 430002 - DNA, 19 bp, Homo sapiens
  siRNA target sequence for PKHD1L1 (NM_177531.2,3236-3254).
ctatgtcaatggaattcca

SEQ ID NO: 430003 - DNA, 19 bp, Homo sapiens
  siRNA target sequence for PKHD1L1 (NM_177531.2,3277-3295).
gatttacatgggattccaa

SEQ ID NO: 430004 - DNA, 19 bp, Homo sapiens
  siRNA target sequence for PKHD1L1 (NM_177531.2,3314-3332).
ggcgataagcccttctcaa

SEQ ID NO: 430005 - DNA, 19 bp, Homo sapiens
  siRNA target sequence for PKHD1L1 (NM_177531.2,3543-3561).
gaagagttctactttgttt

SEQ ID NO: 430006 - DNA, 19 bp, Homo sapiens
  siRNA target sequence for PKHD1L1 (NM_177531.2,3587-3605).
gcctgattctggaagcata

SEQ ID NO: 430007 - DNA, 19 bp, Homo sapiens
  siRNA target sequence for PKHD1L1 (NM_177531.2,3602-3620).
catagcaggtggtactcta

SEQ ID NO: 430008 - DNA, 19 bp, Homo sapiens
  siRNA target sequence for PKHD1L1 (NM_177531.2,3610-3628).
gtggtactctactgacttt

SEQ ID NO: 430009 - DNA, 19 bp, Homo sapiens
  siRNA target sequence for PKHD1L1 (NM_177531.2,3612-3630).
ggtactctactgactttat

SEQ ID NO: 430010 - DNA, 19 bp, Homo sapiens
  siRNA target sequence for PKHD1L1 (NM_177531.2,3689-3707).
gattgaaggggatttgaat

SEQ ID NO: 430011 - DNA, 19 bp, Homo sapiens
  siRNA target sequence for PKHD1L1 (NM_177531.2,3742-3760).
gtacagttgatatttcagt

SEQ ID NO: 430012 - DNA, 19 bp, Homo sapiens
  siRNA target sequence for PKHD1L1 (NM_177531.2,3757-3775).
cagttactaccaatggatt

SEQ ID NO: 430013 - DNA, 19 bp, Homo sapiens
  siRNA target sequence for PKHD1L1 (NM_177531.2,3811-3829).
gtttacagacaccaattat

SEQ ID NO: 430014 - DNA, 19 bp, Homo sapiens
  siRNA target sequence for PKHD1L1 (NM_177531.2,3818-3836).
gacaccaattataactgat

SEQ ID NO: 430015 - DNA, 19 bp, Homo sapiens
  siRNA target sequence for PKHD1L1 (NM_177531.2,3832-3850).
ctgattttagtccaaaagt

SEQ ID NO: 430016 - DNA, 19 bp, Homo sapiens
  siRNA target sequence for PKHD1L1 (NM_177531.2,3841-3859).
gtccaaaagtacgaacaat

SEQ ID NO: 430017 - DNA, 19 bp, Homo sapiens
  siRNA target sequence for PKHD1L1 (NM_177531.2,3844-3862).
caaaagtacgaacaatact

SEQ ID NO: 430018 - DNA, 19 bp, Homo sapiens
  siRNA target sequence for PKHD1L1 (NM_177531.2,3889-3907).
gctataattttggaaatga

SEQ ID NO: 430019 - DNA, 19 bp, Homo sapiens
  siRNA target sequence for PKHD1L1 (NM_177531.2,3926-3944).
ggtgtatgttggaggaaaa

SEQ ID NO: 430020 - DNA, 19 bp, Homo sapiens
  siRNA target sequence for PKHD1L1 (NM_177531.2,3965-3983).
gaacttcacagatattaga

SEQ ID NO: 430021 - DNA, 19 bp, Homo sapiens
  siRNA target sequence for PKHD1L1 (NM_177531.2,4001-4019).
gtctcctggaaaacatgat

SEQ ID NO: 430022 - DNA, 19 bp, Homo sapiens
  siRNA target sequence for PKHD1L1 (NM_177531.2,4043-4061).
gggttttgcatcaacaaga

SEQ ID NO: 430023 - DNA, 19 bp, Homo sapiens
  siRNA target sequence for PKHD1L1 (NM_177531.2,4137-4155).
ggaactgaaatcaccataa

SEQ ID NO: 430024 - DNA, 19 bp, Homo sapiens
  siRNA target sequence for PKHD1L1 (NM_177531.2,4172-4190).
cacaataccagctgagaat

SEQ ID NO: 430025 - DNA, 19 bp, Homo sapiens
  siRNA target sequence for PKHD1L1 (NM_177531.2,4205-4223).
gtccatcccttgcaatgtt

SEQ ID NO: 430026 - DNA, 19 bp, Homo sapiens
  siRNA target sequence for PKHD1L1 (NM_177531.2,4208-4226).
catcccttgcaatgttaca

SEQ ID NO: 430027 - DNA, 19 bp, Homo sapiens
  siRNA target sequence for PKHD1L1 (NM_177531.2,4212-4230).
ccttgcaatgttacatcat

SEQ ID NO: 430028 - DNA, 19 bp, Homo sapiens
  siRNA target sequence for PKHD1L1 (NM_177531.2,4306-4324).
cagtacatggattaggtta

SEQ ID NO: 430029 - DNA, 19 bp, Homo sapiens
  siRNA target sequence for PKHD1L1 (NM_177531.2,4331-4349).
gtcaccaccagtcctaaat

SEQ ID NO: 430030 - DNA, 19 bp, Homo sapiens
  siRNA target sequence for PKHD1L1 (NM_177531.2,4335-4353).
ccaccagtcctaaatgtgt

SEQ ID NO: 430031 - DNA, 19 bp, Homo sapiens
  siRNA target sequence for PKHD1L1 (NM_177531.2,4372-4390).
catggcattggcaaacaca

SEQ ID NO: 430032 - DNA, 19 bp, Homo sapiens
  siRNA target sequence for PKHD1L1 (NM_177531.2,4398-4416).
cttagagggataggatata

SEQ ID NO: 430033 - DNA, 19 bp, Homo sapiens
  siRNA target sequence for PKHD1L1 (NM_177531.2,4402-4420).
gagggataggatataggat

SEQ ID NO: 430034 - DNA, 19 bp, Homo sapiens
  siRNA target sequence for PKHD1L1 (NM_177531.2,4435-4453).
gtcctggaagtgtaattta

SEQ ID NO: 430035 - DNA, 19 bp, Homo sapiens
  siRNA target sequence for PKHD1L1 (NM_177531.2,4646-4664).
ctctgaagccacatatgct

SEQ ID NO: 430036 - DNA, 19 bp, Homo sapiens
  siRNA target sequence for PKHD1L1 (NM_177531.2,4648-4666).
ctgaagccacatatgctta

SEQ ID NO: 430037 - DNA, 19 bp, Homo sapiens
  siRNA target sequence for PKHD1L1 (NM_177531.2,4727-4745).
cctgtgcagcctgaacaat

SEQ ID NO: 430038 - DNA, 19 bp, Homo sapiens
  siRNA target sequence for PKHD1L1 (NM_177531.2,4742-4760).
caataccagggttaaaaat

SEQ ID NO: 430039 - DNA, 19 bp, Homo sapiens
  siRNA target sequence for PKHD1L1 (NM_177531.2,4748-4766).
cagggttaaaaattcaaaa

SEQ ID NO: 430040 - DNA, 19 bp, Homo sapiens
  siRNA target sequence for PKHD1L1 (NM_177531.2,4772-4790).
gctatttgaggtttcaagt

SEQ ID NO: 430041 - DNA, 19 bp, Homo sapiens
  siRNA target sequence for PKHD1L1 (NM_177531.2,4800-4818).
ccatctataagcaacatta

SEQ ID NO: 430042 - DNA, 19 bp, Homo sapiens
  siRNA target sequence for PKHD1L1 (NM_177531.2,4821-4839).
ccgtccactggaacagtaa

SEQ ID NO: 430043 - DNA, 19 bp, Homo sapiens
  siRNA target sequence for PKHD1L1 (NM_177531.2,4822-4840).
cgtccactggaacagtaaa

SEQ ID NO: 430044 - DNA, 19 bp, Homo sapiens
  siRNA target sequence for PKHD1L1 (NM_177531.2,4881-4899).
ccatgggctaataaggtta

SEQ ID NO: 430045 - DNA, 19 bp, Homo sapiens
  siRNA target sequence for PKHD1L1 (NM_177531.2,4913-4931).
cccctgtgtcgtagaagaa

SEQ ID NO: 430046 - DNA, 19 bp, Homo sapiens
  siRNA target sequence for PKHD1L1 (NM_177531.2,4940-4958).
ggattcaattacatgtcat

SEQ ID NO: 430047 - DNA, 19 bp, Homo sapiens
  siRNA target sequence for PKHD1L1 (NM_177531.2,4941-4959).
gattcaattacatgtcata

SEQ ID NO: 430048 - DNA, 19 bp, Homo sapiens
  siRNA target sequence for PKHD1L1 (NM_177531.2,4956-4974).
catattgaccctcaaaact

SEQ ID NO: 430049 - DNA, 19 bp, Homo sapiens
  siRNA target sequence for PKHD1L1 (NM_177531.2,4964-4982).
ccctcaaaactcaatggat

SEQ ID NO: 430050 - DNA, 19 bp, Homo sapiens
  siRNA target sequence for PKHD1L1 (NM_177531.2,4994-5012).
ggaaactgtcactttgact

SEQ ID NO: 430051 - DNA, 19 bp, Homo sapiens
  siRNA target sequence for PKHD1L1 (NM_177531.2,5025-5043).
ggcactgctatcaatacgt

SEQ ID NO: 430052 - DNA, 19 bp, Homo sapiens
  siRNA target sequence for PKHD1L1 (NM_177531.2,5026-5044).
gcactgctatcaatacgtt

SEQ ID NO: 430053 - DNA, 19 bp, Homo sapiens
  siRNA target sequence for PKHD1L1 (NM_177531.2,5041-5059).
cgttgtccaatgaatttga

SEQ ID NO: 430054 - DNA, 19 bp, Homo sapiens
  siRNA target sequence for PKHD1L1 (NM_177531.2,5042-5060).
gttgtccaatgaatttgat

SEQ ID NO: 430055 - DNA, 19 bp, Homo sapiens
  siRNA target sequence for PKHD1L1 (NM_177531.2,5090-5108).
cctggtgttgccaaatgca

SEQ ID NO: 430056 - DNA, 19 bp, Homo sapiens
  siRNA target sequence for PKHD1L1 (NM_177531.2,5099-5117).
gccaaatgcaggatcaact

SEQ ID NO: 430057 - DNA, 19 bp, Homo sapiens
  siRNA target sequence for PKHD1L1 (NM_177531.2,5138-5156).
cataaaaggctctggattt

SEQ ID NO: 430058 - DNA, 19 bp, Homo sapiens
  siRNA target sequence for PKHD1L1 (NM_177531.2,5170-5188).
caggtgtaaaagtccttat

SEQ ID NO: 430059 - DNA, 19 bp, Homo sapiens
  siRNA target sequence for PKHD1L1 (NM_177531.2,5191-5209).
gtcatttcccatgtaaagt

SEQ ID NO: 430060 - DNA, 19 bp, Homo sapiens
  siRNA target sequence for PKHD1L1 (NM_177531.2,5198-5216).
cccatgtaaagttctatca

SEQ ID NO: 430061 - DNA, 19 bp, Homo sapiens
  siRNA target sequence for PKHD1L1 (NM_177531.2,5208-5226).
gttctatcagtgaattata

SEQ ID NO: 430062 - DNA, 19 bp, Homo sapiens
  siRNA target sequence for PKHD1L1 (NM_177531.2,5219-5237).
gaattatacggccattgaa

SEQ ID NO: 430063 - DNA, 19 bp, Homo sapiens
  siRNA target sequence for PKHD1L1 (NM_177531.2,5264-5282).
gcttgtggatgtagatctt

SEQ ID NO: 430064 - DNA, 19 bp, Homo sapiens
  siRNA target sequence for PKHD1L1 (NM_177531.2,5270-5288).
ggatgtagatcttctaata

SEQ ID NO: 430065 - DNA, 19 bp, Homo sapiens
  siRNA target sequence for PKHD1L1 (NM_177531.2,5318-5336).
ctgcaccttttcatactta

SEQ ID NO: 430066 - DNA, 19 bp, Homo sapiens
  siRNA target sequence for PKHD1L1 (NM_177531.2,5342-5360).
catcactccttacataaca

SEQ ID NO: 430067 - DNA, 19 bp, Homo sapiens
  siRNA target sequence for PKHD1L1 (NM_177531.2,5370-5388).
ccaaactctgtcataggat

SEQ ID NO: 430068 - DNA, 19 bp, Homo sapiens
  siRNA target sequence for PKHD1L1 (NM_177531.2,5375-5393).
ctctgtcataggatctgta

SEQ ID NO: 430069 - DNA, 19 bp, Homo sapiens
  siRNA target sequence for PKHD1L1 (NM_177531.2,5468-5486).
cagagcaatagaggttaat

SEQ ID NO: 430070 - DNA, 19 bp, Homo sapiens
  siRNA target sequence for PKHD1L1 (NM_177531.2,5470-5488).
gagcaatagaggttaatga

SEQ ID NO: 430071 - DNA, 19 bp, Homo sapiens
  siRNA target sequence for PKHD1L1 (NM_177531.2,5680-5698).
gcaacactacagtcactat

SEQ ID NO: 430072 - DNA, 19 bp, Homo sapiens
  siRNA target sequence for PKHD1L1 (NM_177531.2,5681-5699).
caacactacagtcactatt

SEQ ID NO: 430073 - DNA, 19 bp, Homo sapiens
  siRNA target sequence for PKHD1L1 (NM_177531.2,5700-5718).
ggggatgaaccttgtcaaa

SEQ ID NO: 430074 - DNA, 19 bp, Homo sapiens
  siRNA target sequence for PKHD1L1 (NM_177531.2,5701-5719).
gggatgaaccttgtcaaat

SEQ ID NO: 430075 - DNA, 19 bp, Homo sapiens
  siRNA target sequence for PKHD1L1 (NM_177531.2,5725-5743).
ccatcaaccccaatgaagt

SEQ ID NO: 430076 - DNA, 19 bp, Homo sapiens
  siRNA target sequence for PKHD1L1 (NM_177531.2,5770-5788).
ctggaatggtcgatgttaa

SEQ ID NO: 430077 - DNA, 19 bp, Homo sapiens
  siRNA target sequence for PKHD1L1 (NM_177531.2,5772-5790).
ggaatggtcgatgttaaaa

SEQ ID NO: 430078 - DNA, 19 bp, Homo sapiens
  siRNA target sequence for PKHD1L1 (NM_177531.2,5773-5791).
gaatggtcgatgttaaaat

SEQ ID NO: 430079 - DNA, 19 bp, Homo sapiens
  siRNA target sequence for PKHD1L1 (NM_177531.2,5777-5795).
ggtcgatgttaaaatcttt

SEQ ID NO: 430080 - DNA, 19 bp, Homo sapiens
  siRNA target sequence for PKHD1L1 (NM_177531.2,5923-5941).
gctttgagatcttggaaat

SEQ ID NO: 430081 - DNA, 19 bp, Homo sapiens
  siRNA target sequence for PKHD1L1 (NM_177531.2,5936-5954).
ggaaatctccgtgatgata

SEQ ID NO: 430082 - DNA, 19 bp, Homo sapiens
  siRNA target sequence for PKHD1L1 (NM_177531.2,5944-5962).
ccgtgatgataaataacat

SEQ ID NO: 430083 - DNA, 19 bp, Homo sapiens
  siRNA target sequence for PKHD1L1 (NM_177531.2,5945-5963).
cgtgatgataaataacatt

SEQ ID NO: 430084 - DNA, 19 bp, Homo sapiens
  siRNA target sequence for PKHD1L1 (NM_177531.2,6036-6054).
cctgttatgatgcatcata

SEQ ID NO: 430085 - DNA, 19 bp, Homo sapiens
  siRNA target sequence for PKHD1L1 (NM_177531.2,6039-6057).
gttatgatgcatcataaga

SEQ ID NO: 430086 - DNA, 19 bp, Homo sapiens
  siRNA target sequence for PKHD1L1 (NM_177531.2,6092-6110).
gtacccgcttaatattcaa

SEQ ID NO: 430087 - DNA, 19 bp, Homo sapiens
  siRNA target sequence for PKHD1L1 (NM_177531.2,6095-6113).
cccgcttaatattcaaaat

SEQ ID NO: 430088 - DNA, 19 bp, Homo sapiens
  siRNA target sequence for PKHD1L1 (NM_177531.2,6096-6114).
ccgcttaatattcaaaata

SEQ ID NO: 430089 - DNA, 19 bp, Homo sapiens
  siRNA target sequence for PKHD1L1 (NM_177531.2,6161-6179).
gacaggcaccggatttaat

SEQ ID NO: 430090 - DNA, 19 bp, Homo sapiens
  siRNA target sequence for PKHD1L1 (NM_177531.2,6208-6226).
gctcagaatgtgcaattga

SEQ ID NO: 430091 - DNA, 19 bp, Homo sapiens
  siRNA target sequence for PKHD1L1 (NM_177531.2,6225-6243).
gacaggcttagatctgatt

SEQ ID NO: 430092 - DNA, 19 bp, Homo sapiens
  siRNA target sequence for PKHD1L1 (NM_177531.2,6238-6256).
ctgattacacaacactatt

SEQ ID NO: 430093 - DNA, 19 bp, Homo sapiens
  siRNA target sequence for PKHD1L1 (NM_177531.2,6245-6263).
cacaacactattatgtgaa

SEQ ID NO: 430094 - DNA, 19 bp, Homo sapiens
  siRNA target sequence for PKHD1L1 (NM_177531.2,6301-6319).
gtgaagtgagtgtggttaa

SEQ ID NO: 430095 - DNA, 19 bp, Homo sapiens
  siRNA target sequence for PKHD1L1 (NM_177531.2,6312-6330).
gtggttaatgggaaagatt

SEQ ID NO: 430096 - DNA, 19 bp, Homo sapiens
  siRNA target sequence for PKHD1L1 (NM_177531.2,6340-6358).
ccatgactccgtttacgta

SEQ ID NO: 430097 - DNA, 19 bp, Homo sapiens
  siRNA target sequence for PKHD1L1 (NM_177531.2,6445-6463).
caggattcagtgaaaatat

SEQ ID NO: 430098 - DNA, 19 bp, Homo sapiens
  siRNA target sequence for PKHD1L1 (NM_177531.2,6482-6500).
catagctgaagccaaatgt

SEQ ID NO: 430099 - DNA, 19 bp, Homo sapiens
  siRNA target sequence for PKHD1L1 (NM_177531.2,6494-6512).
caaatgtgatgttgagtat

SEQ ID NO: 430100 - DNA, 19 bp, Homo sapiens
  siRNA target sequence for PKHD1L1 (NM_177531.2,6562-6580).
ggtgggctccagtttgtgt

SEQ ID NO: 430101 - DNA, 19 bp, Homo sapiens
  siRNA target sequence for PKHD1L1 (NM_177531.2,6598-6616).
gcatggccaaactggataa

SEQ ID NO: 430102 - DNA, 19 bp, Homo sapiens
  siRNA target sequence for PKHD1L1 (NM_177531.2,6729-6747).
gatcaaagcacccctattt

SEQ ID NO: 430103 - DNA, 19 bp, Homo sapiens
  siRNA target sequence for PKHD1L1 (NM_177531.2,6765-6783).
cagggtgggactctaatat

SEQ ID NO: 430104 - DNA, 19 bp, Homo sapiens
  siRNA target sequence for PKHD1L1 (NM_177531.2,6767-6785).
gggtgggactctaatattt

SEQ ID NO: 430105 - DNA, 19 bp, Homo sapiens
  siRNA target sequence for PKHD1L1 (NM_177531.2,6801-6819).
gaactccaggcagaaaata

SEQ ID NO: 430106 - DNA, 19 bp, Homo sapiens
  siRNA target sequence for PKHD1L1 (NM_177531.2,6806-6824).
ccaggcagaaaatattcta

SEQ ID NO: 430107 - DNA, 19 bp, Homo sapiens
  siRNA target sequence for PKHD1L1 (NM_177531.2,6829-6847).
cagatggaggtgttcttca

SEQ ID NO: 430108 - DNA, 19 bp, Homo sapiens
  siRNA target sequence for PKHD1L1 (NM_177531.2,7001-7019).
gactcgcttggctcatact

SEQ ID NO: 430109 - DNA, 19 bp, Homo sapiens
  siRNA target sequence for PKHD1L1 (NM_177531.2,7155-7173).
gctgatggcataaacataa

SEQ ID NO: 430110 - DNA, 19 bp, Homo sapiens
  siRNA target sequence for PKHD1L1 (NM_177531.2,7174-7192).
cactaagtaacccactaaa

SEQ ID NO: 430111 - DNA, 19 bp, Homo sapiens
  siRNA target sequence for PKHD1L1 (NM_177531.2,7223-7241).
ccctgatggaactctgttt

SEQ ID NO: 430112 - DNA, 19 bp, Homo sapiens
  siRNA target sequence for PKHD1L1 (NM_177531.2,7225-7243).
ctgatggaactctgtttga

SEQ ID NO: 430113 - DNA, 19 bp, Homo sapiens
  siRNA target sequence for PKHD1L1 (NM_177531.2,7254-7272).
gaagttggaattcttacaa

SEQ ID NO: 430114 - DNA, 19 bp, Homo sapiens
  siRNA target sequence for PKHD1L1 (NM_177531.2,7302-7320).
gttgagtggaataacaaaa

SEQ ID NO: 430115 - DNA, 19 bp, Homo sapiens
  siRNA target sequence for PKHD1L1 (NM_177531.2,7327-7345).
catgtcctgatggatttga

SEQ ID NO: 430116 - DNA, 19 bp, Homo sapiens
  siRNA target sequence for PKHD1L1 (NM_177531.2,7339-7357).
gatttgacacaggagaatt

SEQ ID NO: 430117 - DNA, 19 bp, Homo sapiens
  siRNA target sequence for PKHD1L1 (NM_177531.2,7441-7459).
ctgtacctggtgctaacat

SEQ ID NO: 430118 - DNA, 19 bp, Homo sapiens
  siRNA target sequence for PKHD1L1 (NM_177531.2,7446-7464).
cctggtgctaacatggtaa

SEQ ID NO: 430119 - DNA, 19 bp, Homo sapiens
  siRNA target sequence for PKHD1L1 (NM_177531.2,7511-7529).
ccggttggggcgatatcca

SEQ ID NO: 430120 - DNA, 19 bp, Homo sapiens
  siRNA target sequence for PKHD1L1 (NM_177531.2,7512-7530).
cggttggggcgatatccaa

SEQ ID NO: 430121 - DNA, 19 bp, Homo sapiens
  siRNA target sequence for PKHD1L1 (NM_177531.2,7513-7531).
ggttggggcgatatccaat

SEQ ID NO: 430122 - DNA, 19 bp, Homo sapiens
  siRNA target sequence for PKHD1L1 (NM_177531.2,7514-7532).
gttggggcgatatccaata

SEQ ID NO: 430123 - DNA, 19 bp, Homo sapiens
  siRNA target sequence for PKHD1L1 (NM_177531.2,7517-7535).
ggggcgatatccaatacat

SEQ ID NO: 430124 - DNA, 19 bp, Homo sapiens
  siRNA target sequence for PKHD1L1 (NM_177531.2,7518-7536).
gggcgatatccaatacatt

SEQ ID NO: 430125 - DNA, 19 bp, Homo sapiens
  siRNA target sequence for PKHD1L1 (NM_177531.2,7538-7556).
gcacctgcttggagactta

SEQ ID NO: 430126 - DNA, 19 bp, Homo sapiens
  siRNA target sequence for PKHD1L1 (NM_177531.2,7598-7616).
ctataacagagctgttact

SEQ ID NO: 430127 - DNA, 19 bp, Homo sapiens
  siRNA target sequence for PKHD1L1 (NM_177531.2,7721-7739).
gtataacttggcagtattt

SEQ ID NO: 430128 - DNA, 19 bp, Homo sapiens
  siRNA target sequence for PKHD1L1 (NM_177531.2,7798-7816).
ccaacccgaacaataccat

SEQ ID NO: 430129 - DNA, 19 bp, Homo sapiens
  siRNA target sequence for PKHD1L1 (NM_177531.2,7799-7817).
caacccgaacaataccata

SEQ ID NO: 430130 - DNA, 19 bp, Homo sapiens
  siRNA target sequence for PKHD1L1 (NM_177531.2,7888-7906).
catcctatgacagaaacat

SEQ ID NO: 430131 - DNA, 19 bp, Homo sapiens
  siRNA target sequence for PKHD1L1 (NM_177531.2,7920-7938).
gttccccttggcgaatttt

SEQ ID NO: 430132 - DNA, 19 bp, Homo sapiens
  siRNA target sequence for PKHD1L1 (NM_177531.2,8000-8018).
catgcaaacgggatcttgt

SEQ ID NO: 430133 - DNA, 19 bp, Homo sapiens
  siRNA target sequence for PKHD1L1 (NM_177531.2,8004-8022).
caaacgggatcttgtacat

SEQ ID NO: 430134 - DNA, 19 bp, Homo sapiens
  siRNA target sequence for PKHD1L1 (NM_177531.2,8059-8077).
ctacttggaattgtcaaaa

SEQ ID NO: 430135 - DNA, 19 bp, Homo sapiens
  siRNA target sequence for PKHD1L1 (NM_177531.2,8100-8118).
ggtgcccttcagttccata

SEQ ID NO: 430136 - DNA, 19 bp, Homo sapiens
  siRNA target sequence for PKHD1L1 (NM_177531.2,8101-8119).
gtgcccttcagttccataa

SEQ ID NO: 430137 - DNA, 19 bp, Homo sapiens
  siRNA target sequence for PKHD1L1 (NM_177531.2,8145-8163).
gctggaattgagactaaga

SEQ ID NO: 430138 - DNA, 19 bp, Homo sapiens
  siRNA target sequence for PKHD1L1 (NM_177531.2,8185-8203).
gagggtggggtgaaaccaa

SEQ ID NO: 430139 - DNA, 19 bp, Homo sapiens
  siRNA target sequence for PKHD1L1 (NM_177531.2,8200-8218).
ccaatggagcggtgattaa

SEQ ID NO: 430140 - DNA, 19 bp, Homo sapiens
  siRNA target sequence for PKHD1L1 (NM_177531.2,8252-8270).
gggaatggggtctgcattt

SEQ ID NO: 430141 - DNA, 19 bp, Homo sapiens
  siRNA target sequence for PKHD1L1 (NM_177531.2,8288-8306).
ggttctcccatttagtgaa

SEQ ID NO: 430142 - DNA, 19 bp, Homo sapiens
  siRNA target sequence for PKHD1L1 (NM_177531.2,8410-8428).
gttggagtgcaaagtttgt

SEQ ID NO: 430143 - DNA, 19 bp, Homo sapiens
  siRNA target sequence for PKHD1L1 (NM_177531.2,8464-8482).
gctttcgctgggaacatga

SEQ ID NO: 430144 - DNA, 19 bp, Homo sapiens
  siRNA target sequence for PKHD1L1 (NM_177531.2,8470-8488).
gctgggaacatgaaatggt

SEQ ID NO: 430145 - DNA, 19 bp, Homo sapiens
  siRNA target sequence for PKHD1L1 (NM_177531.2,8496-8514).
gatgttgatggctcactta

SEQ ID NO: 430146 - DNA, 19 bp, Homo sapiens
  siRNA target sequence for PKHD1L1 (NM_177531.2,8555-8573).
gctagacccttctcattgt

SEQ ID NO: 430147 - DNA, 19 bp, Homo sapiens
  siRNA target sequence for PKHD1L1 (NM_177531.2,8556-8574).
ctagacccttctcattgta

SEQ ID NO: 430148 - DNA, 19 bp, Homo sapiens
  siRNA target sequence for PKHD1L1 (NM_177531.2,8808-8826).
ggtgtggatcacataacca

SEQ ID NO: 430149 - DNA, 19 bp, Homo sapiens
  siRNA target sequence for PKHD1L1 (NM_177531.2,8809-8827).
gtgtggatcacataaccaa

SEQ ID NO: 430150 - DNA, 19 bp, Homo sapiens
  siRNA target sequence for PKHD1L1 (NM_177531.2,8813-8831).
ggatcacataaccaacatt

SEQ ID NO: 430151 - DNA, 19 bp, Homo sapiens
  siRNA target sequence for PKHD1L1 (NM_177531.2,8839-8857).
catcgacattctatggatt

SEQ ID NO: 430152 - DNA, 19 bp, Homo sapiens
  siRNA target sequence for PKHD1L1 (NM_177531.2,8842-8860).
cgacattctatggattcaa

SEQ ID NO: 430153 - DNA, 19 bp, Homo sapiens
  siRNA target sequence for PKHD1L1 (NM_177531.2,8874-8892).
gtaattatatcacataact

SEQ ID NO: 430154 - DNA, 19 bp, Homo sapiens
  siRNA target sequence for PKHD1L1 (NM_177531.2,8985-9003).
caccttgaagcaaacacta

SEQ ID NO: 430155 - DNA, 19 bp, Homo sapiens
  siRNA target sequence for PKHD1L1 (NM_177531.2,8988-9006).
cttgaagcaaacactagta

SEQ ID NO: 430156 - DNA, 19 bp, Homo sapiens
  siRNA target sequence for PKHD1L1 (NM_177531.2,8994-9012).
gcaaacactagtactctat

SEQ ID NO: 430157 - DNA, 19 bp, Homo sapiens
  siRNA target sequence for PKHD1L1 (NM_177531.2,9042-9060).
catcagagtcagctcattt

SEQ ID NO: 430158 - DNA, 19 bp, Homo sapiens
  siRNA target sequence for PKHD1L1 (NM_177531.2,9083-9101).
gaaagacgttgttattaat

SEQ ID NO: 430159 - DNA, 19 bp, Homo sapiens
  siRNA target sequence for PKHD1L1 (NM_177531.2,9089-9107).
cgttgttattaatttccaa

SEQ ID NO: 430160 - DNA, 19 bp, Homo sapiens
  siRNA target sequence for PKHD1L1 (NM_177531.2,9141-9159).
gtacatccgccatcaagaa

SEQ ID NO: 430161 - DNA, 19 bp, Homo sapiens
  siRNA target sequence for PKHD1L1 (NM_177531.2,9149-9167).
gccatcaagaaaaccaatt

SEQ ID NO: 430162 - DNA, 19 bp, Homo sapiens
  siRNA target sequence for PKHD1L1 (NM_177531.2,9173-9191).
gaagcgaccagccacatat

SEQ ID NO: 430163 - DNA, 19 bp, Homo sapiens
  siRNA target sequence for PKHD1L1 (NM_177531.2,9176-9194).
gcgaccagccacatataat

SEQ ID NO: 430164 - DNA, 19 bp, Homo sapiens
  siRNA target sequence for PKHD1L1 (NM_177531.2,9177-9195).
cgaccagccacatataatt

SEQ ID NO: 430165 - DNA, 19 bp, Homo sapiens
  siRNA target sequence for PKHD1L1 (NM_177531.2,9178-9196).
gaccagccacatataattt

SEQ ID NO: 430166 - DNA, 19 bp, Homo sapiens
  siRNA target sequence for PKHD1L1 (NM_177531.2,9183-9201).
gccacatataatttatggt

SEQ ID NO: 430167 - DNA, 19 bp, Homo sapiens
  siRNA target sequence for PKHD1L1 (NM_177531.2,9218-9236).
gcaatcatcacgagaaaat

SEQ ID NO: 430168 - DNA, 19 bp, Homo sapiens
  siRNA target sequence for PKHD1L1 (NM_177531.2,9219-9237).
caatcatcacgagaaaata

SEQ ID NO: 430169 - DNA, 19 bp, Homo sapiens
  siRNA target sequence for PKHD1L1 (NM_177531.2,9252-9270).
cacccaggggcaaatgtga

SEQ ID NO: 430170 - DNA, 19 bp, Homo sapiens
  siRNA target sequence for PKHD1L1 (NM_177531.2,9254-9272).
cccaggggcaaatgtgatt

SEQ ID NO: 430171 - DNA, 19 bp, Homo sapiens
  siRNA target sequence for PKHD1L1 (NM_177531.2,9255-9273).
ccaggggcaaatgtgatta

SEQ ID NO: 430172 - DNA, 19 bp, Homo sapiens
  siRNA target sequence for PKHD1L1 (NM_177531.2,9256-9274).
caggggcaaatgtgattat

SEQ ID NO: 430173 - DNA, 19 bp, Homo sapiens
  siRNA target sequence for PKHD1L1 (NM_177531.2,9388-9406).
cttacagagaagttgtttt

SEQ ID NO: 430174 - DNA, 19 bp, Homo sapiens
  siRNA target sequence for PKHD1L1 (NM_177531.2,9407-9425).
gaatgctacctacatatca

SEQ ID NO: 430175 - DNA, 19 bp, Homo sapiens
  siRNA target sequence for PKHD1L1 (NM_177531.2,9424-9442).
cactgcagggaggtagatt

SEQ ID NO: 430176 - DNA, 19 bp, Homo sapiens
  siRNA target sequence for PKHD1L1 (NM_177531.2,9426-9444).
ctgcagggaggtagattaa

SEQ ID NO: 430177 - DNA, 19 bp, Homo sapiens
  siRNA target sequence for PKHD1L1 (NM_177531.2,9492-9510).
cttagaggaaatcatacta

SEQ ID NO: 430178 - DNA, 19 bp, Homo sapiens
  siRNA target sequence for PKHD1L1 (NM_177531.2,9703-9721).
caaccacaagctacgattt

SEQ ID NO: 430179 - DNA, 19 bp, Homo sapiens
  siRNA target sequence for PKHD1L1 (NM_177531.2,9706-9724).
ccacaagctacgatttcca

SEQ ID NO: 430180 - DNA, 19 bp, Homo sapiens
  siRNA target sequence for PKHD1L1 (NM_177531.2,9739-9757).
gaagtatcgttaaaatcct

SEQ ID NO: 430181 - DNA, 19 bp, Homo sapiens
  siRNA target sequence for PKHD1L1 (NM_177531.2,9848-9866).
cacgttagcagctgatgtt

SEQ ID NO: 430182 - DNA, 19 bp, Homo sapiens
  siRNA target sequence for PKHD1L1 (NM_177531.2,9877-9895).
gtaggaacatcaaaatagt

SEQ ID NO: 430183 - DNA, 19 bp, Homo sapiens
  siRNA target sequence for PKHD1L1 (NM_177531.2,9951-9969).
ggctcattcactgaaaata

SEQ ID NO: 430184 - DNA, 19 bp, Homo sapiens
  siRNA target sequence for PKHD1L1 (NM_177531.2,9952-9970).
gctcattcactgaaaatat

SEQ ID NO: 430185 - DNA, 19 bp, Homo sapiens
  siRNA target sequence for PKHD1L1 (NM_177531.2,10095-10113).
gaacatggctcatcttata

SEQ ID NO: 430186 - DNA, 19 bp, Homo sapiens
  siRNA target sequence for PKHD1L1 (NM_177531.2,10144-10162).
ctccagcaattggtgtatt

SEQ ID NO: 430187 - DNA, 19 bp, Homo sapiens
  siRNA target sequence for PKHD1L1 (NM_177531.2,10209-10227).
gtgggggaaggcataagaa

SEQ ID NO: 430188 - DNA, 19 bp, Homo sapiens
  siRNA target sequence for PKHD1L1 (NM_177531.2,10245-10263).
cgagtccgagggaatttga

SEQ ID NO: 430189 - DNA, 19 bp, Homo sapiens
  siRNA target sequence for PKHD1L1 (NM_177531.2,10279-10297).
ggccaggaacctatcagaa

SEQ ID NO: 430190 - DNA, 19 bp, Homo sapiens
  siRNA target sequence for PKHD1L1 (NM_177531.2,10285-10303).
gaacctatcagaacagaaa

SEQ ID NO: 430191 - DNA, 19 bp, Homo sapiens
  siRNA target sequence for PKHD1L1 (NM_177531.2,10289-10307).
ctatcagaacagaaaagat

SEQ ID NO: 430192 - DNA, 19 bp, Homo sapiens
  siRNA target sequence for PKHD1L1 (NM_177531.2,10325-10343).
gcatgcagcaattgagata

SEQ ID NO: 430193 - DNA, 19 bp, Homo sapiens
  siRNA target sequence for PKHD1L1 (NM_177531.2,10479-10497).
ggtttatatgggatctata

SEQ ID NO: 430194 - DNA, 19 bp, Homo sapiens
  siRNA target sequence for PKHD1L1 (NM_177531.2,10516-10534).
ctggatgttctcttataca

SEQ ID NO: 430195 - DNA, 19 bp, Homo sapiens
  siRNA target sequence for PKHD1L1 (NM_177531.2,10585-10603).
cagagagtgtgcacattta

SEQ ID NO: 430196 - DNA, 19 bp, Homo sapiens
  siRNA target sequence for PKHD1L1 (NM_177531.2,10627-10645).
gaatggccatttttccaat

SEQ ID NO: 430197 - DNA, 19 bp, Homo sapiens
  siRNA target sequence for PKHD1L1 (NM_177531.2,10652-10670).
catgccagctgctatatca

SEQ ID NO: 430198 - DNA, 19 bp, Homo sapiens
  siRNA target sequence for PKHD1L1 (NM_177531.2,10744-10762).
ctgatgtcctaactaatga

SEQ ID NO: 430199 - DNA, 19 bp, Homo sapiens
  siRNA target sequence for PKHD1L1 (NM_177531.2,10756-10774).
ctaatgatgatcctaatat

SEQ ID NO: 430200 - DNA, 19 bp, Homo sapiens
  siRNA target sequence for PKHD1L1 (NM_177531.2,10829-10847).
gatttgttggcctaccttt

SEQ ID NO: 430201 - DNA, 19 bp, Homo sapiens
  siRNA target sequence for PKHD1L1 (NM_177531.2,10878-10896).
ccccatgcaggaatcatga

SEQ ID NO: 430202 - DNA, 19 bp, Homo sapiens
  siRNA target sequence for PKHD1L1 (NM_177531.2,10885-10903).
caggaatcatgagttacaa

SEQ ID NO: 430203 - DNA, 19 bp, Homo sapiens
  siRNA target sequence for PKHD1L1 (NM_177531.2,10923-10941).
gacatctcaggttcaacat

SEQ ID NO: 430204 - DNA, 19 bp, Homo sapiens
  siRNA target sequence for PKHD1L1 (NM_177531.2,10928-10946).
ctcaggttcaacatttgtt

SEQ ID NO: 430205 - DNA, 19 bp, Homo sapiens
  siRNA target sequence for PKHD1L1 (NM_177531.2,10966-10984).
caggggaaactaatgttat

SEQ ID NO: 430206 - DNA, 19 bp, Homo sapiens
  siRNA target sequence for PKHD1L1 (NM_177531.2,10968-10986).
ggggaaactaatgttatat

SEQ ID NO: 430207 - DNA, 19 bp, Homo sapiens
  siRNA target sequence for PKHD1L1 (NM_177531.2,11048-11066).
ggttgataccactgaacaa

SEQ ID NO: 430208 - DNA, 19 bp, Homo sapiens
  siRNA target sequence for PKHD1L1 (NM_177531.2,11056-11074).
ccactgaacaatcaaaaat

SEQ ID NO: 430209 - DNA, 19 bp, Homo sapiens
  siRNA target sequence for PKHD1L1 (NM_177531.2,11102-11120).
ggtcaatccatctgattgt

SEQ ID NO: 430210 - DNA, 19 bp, Homo sapiens
  siRNA target sequence for PKHD1L1 (NM_177531.2,11105-11123).
caatccatctgattgtgta

SEQ ID NO: 430211 - DNA, 19 bp, Homo sapiens
  siRNA target sequence for PKHD1L1 (NM_177531.2,11110-11128).
catctgattgtgtagacat

SEQ ID NO: 430212 - DNA, 19 bp, Homo sapiens
  siRNA target sequence for PKHD1L1 (NM_177531.2,11119-11137).
gtgtagacatggtttgtga

SEQ ID NO: 430213 - DNA, 19 bp, Homo sapiens
  siRNA target sequence for PKHD1L1 (NM_177531.2,11152-11170).
cttttcttagagacataga

SEQ ID NO: 430214 - DNA, 19 bp, Homo sapiens
  siRNA target sequence for PKHD1L1 (NM_177531.2,11186-11204).
gaatgctggttctgtgata

SEQ ID NO: 430215 - DNA, 19 bp, Homo sapiens
  siRNA target sequence for PKHD1L1 (NM_177531.2,11244-11262).
ggaattggagactacagaa

SEQ ID NO: 430216 - DNA, 19 bp, Homo sapiens
  siRNA target sequence for PKHD1L1 (NM_177531.2,11266-11284).
ctaaggcgatgctcacatt

SEQ ID NO: 430217 - DNA, 19 bp, Homo sapiens
  siRNA target sequence for PKHD1L1 (NM_177531.2,11271-11289).
gcgatgctcacattcttga

SEQ ID NO: 430218 - DNA, 19 bp, Homo sapiens
  siRNA target sequence for PKHD1L1 (NM_177531.2,11272-11290).
cgatgctcacattcttgaa

SEQ ID NO: 430219 - DNA, 19 bp, Homo sapiens
  siRNA target sequence for PKHD1L1 (NM_177531.2,11277-11295).
ctcacattcttgaatggaa

SEQ ID NO: 430220 - DNA, 19 bp, Homo sapiens
  siRNA target sequence for PKHD1L1 (NM_177531.2,11288-11306).
gaatggaagtagaattcct

SEQ ID NO: 430221 - DNA, 19 bp, Homo sapiens
  siRNA target sequence for PKHD1L1 (NM_177531.2,11320-11338).
cacctcataaaggaattat

SEQ ID NO: 430222 - DNA, 19 bp, Homo sapiens
  siRNA target sequence for PKHD1L1 (NM_177531.2,11341-11359).
gagattcaacctgtaagta

SEQ ID NO: 430223 - DNA, 19 bp, Homo sapiens
  siRNA target sequence for PKHD1L1 (NM_177531.2,11471-11489).
gggcaacggttatgttgat

SEQ ID NO: 430224 - DNA, 19 bp, Homo sapiens
  siRNA target sequence for PKHD1L1 (NM_177531.2,11473-11491).
gcaacggttatgttgatct

SEQ ID NO: 430225 - DNA, 19 bp, Homo sapiens
  siRNA target sequence for PKHD1L1 (NM_177531.2,11474-11492).
caacggttatgttgatctt

SEQ ID NO: 430226 - DNA, 19 bp, Homo sapiens
  siRNA target sequence for PKHD1L1 (NM_177531.2,11477-11495).
cggttatgttgatcttatt

SEQ ID NO: 430227 - DNA, 19 bp, Homo sapiens
  siRNA target sequence for PKHD1L1 (NM_177531.2,11605-11623).
gcaccagtcctcagaatct

SEQ ID NO: 430228 - DNA, 19 bp, Homo sapiens
  siRNA target sequence for PKHD1L1 (NM_177531.2,11606-11624).
caccagtcctcagaatctt

SEQ ID NO: 430229 - DNA, 19 bp, Homo sapiens
  siRNA target sequence for PKHD1L1 (NM_177531.2,11622-11640).
cttcgactgatgttgctta

SEQ ID NO: 430230 - DNA, 19 bp, Homo sapiens
  siRNA target sequence for PKHD1L1 (NM_177531.2,11633-11651).
gttgcttaatgttgatcat

SEQ ID NO: 430231 - DNA, 19 bp, Homo sapiens
  siRNA target sequence for PKHD1L1 (NM_177531.2,11661-11679).
gttctagtaggaattttct

SEQ ID NO: 430232 - DNA, 19 bp, Homo sapiens
  siRNA target sequence for PKHD1L1 (NM_177531.2,11694-11712).
cgtttggatgtctatgtga

SEQ ID NO: 430233 - DNA, 19 bp, Homo sapiens
  siRNA target sequence for PKHD1L1 (NM_177531.2,11700-11718).
gatgtctatgtgaacaact

SEQ ID NO: 430234 - DNA, 19 bp, Homo sapiens
  siRNA target sequence for PKHD1L1 (NM_177531.2,11703-11721).
gtctatgtgaacaacttat

SEQ ID NO: 430235 - DNA, 19 bp, Homo sapiens
  siRNA target sequence for PKHD1L1 (NM_177531.2,11765-11783).
ctgtgaacttaataaccat

SEQ ID NO: 430236 - DNA, 19 bp, Homo sapiens
  siRNA target sequence for PKHD1L1 (NM_177531.2,11786-11804).
gtacaaagaccaattcctt

SEQ ID NO: 430237 - DNA, 19 bp, Homo sapiens
  siRNA target sequence for PKHD1L1 (NM_177531.2,11823-11841).
gtccttggtgaaaactact

SEQ ID NO: 430238 - DNA, 19 bp, Homo sapiens
  siRNA target sequence for PKHD1L1 (NM_177531.2,11873-11891).
ggttaaaggaactatacct

SEQ ID NO: 430239 - DNA, 19 bp, Homo sapiens
  siRNA target sequence for PKHD1L1 (NM_177531.2,11957-11975).
cttttatacctctcacaat

SEQ ID NO: 430240 - DNA, 19 bp, Homo sapiens
  siRNA target sequence for PKHD1L1 (NM_177531.2,11965-11983).
cctctcacaatctggttaa

SEQ ID NO: 430241 - DNA, 19 bp, Homo sapiens
  siRNA target sequence for PKHD1L1 (NM_177531.2,12023-12041).
ccgtatcagcaaaataaga

SEQ ID NO: 430242 - DNA, 19 bp, Homo sapiens
  siRNA target sequence for PKHD1L1 (NM_177531.2,12062-12080).
gagatccatgggattcata

SEQ ID NO: 430243 - DNA, 19 bp, Homo sapiens
  siRNA target sequence for PKHD1L1 (NM_177531.2,12064-12082).
gatccatgggattcataat

SEQ ID NO: 430244 - DNA, 19 bp, Homo sapiens
  siRNA target sequence for PKHD1L1 (NM_177531.2,12067-12085).
ccatgggattcataattga

SEQ ID NO: 430245 - DNA, 19 bp, Homo sapiens
  siRNA target sequence for PKHD1L1 (NM_177531.2,12077-12095).
cataattgaaatagagatt

SEQ ID NO: 430246 - DNA, 19 bp, Homo sapiens
  siRNA target sequence for PKHD1L1 (NM_177531.2,12092-12110).
gattggagaccctcctatt

SEQ ID NO: 430247 - DNA, 19 bp, Homo sapiens
  siRNA target sequence for PKHD1L1 (NM_177531.2,12096-12114).
ggagaccctcctattcagt

SEQ ID NO: 430248 - DNA, 19 bp, Homo sapiens
  siRNA target sequence for PKHD1L1 (NM_177531.2,12097-12115).
gagaccctcctattcagtt

SEQ ID NO: 430249 - DNA, 19 bp, Homo sapiens
  siRNA target sequence for PKHD1L1 (NM_177531.2,12101-12119).
ccctcctattcagttcata

SEQ ID NO: 430250 - DNA, 19 bp, Homo sapiens
  siRNA target sequence for PKHD1L1 (NM_177531.2,12102-12120).
cctcctattcagttcataa

SEQ ID NO: 430251 - DNA, 19 bp, Homo sapiens
  siRNA target sequence for PKHD1L1 (NM_177531.2,12105-12123).
cctattcagttcataagca

SEQ ID NO: 430252 - DNA, 19 bp, Homo sapiens
  siRNA target sequence for PKHD1L1 (NM_177531.2,12136-12154).
gtcagatgcagttatctga

SEQ ID NO: 430253 - DNA, 19 bp, Homo sapiens
  siRNA target sequence for PKHD1L1 (NM_177531.2,12208-12226).
gtagtatccttggatttaa

SEQ ID NO: 430254 - DNA, 19 bp, Homo sapiens
  siRNA target sequence for PKHD1L1 (NM_177531.2,12211-12229).
gtatccttggatttaacat

SEQ ID NO: 430255 - DNA, 19 bp, Homo sapiens
  siRNA target sequence for PKHD1L1 (NM_177531.2,12216-12234).
cttggatttaacatttcgt

SEQ ID NO: 430256 - DNA, 19 bp, Homo sapiens
  siRNA target sequence for PKHD1L1 (NM_177531.2,12227-12245).
catttcgtccatgtctatt

SEQ ID NO: 430257 - DNA, 19 bp, Homo sapiens
  siRNA target sequence for PKHD1L1 (NM_177531.2,12232-12250).
cgtccatgtctattactaa

SEQ ID NO: 430258 - DNA, 19 bp, Homo sapiens
  siRNA target sequence for PKHD1L1 (NM_177531.2,12233-12251).
gtccatgtctattactaat

SEQ ID NO: 430259 - DNA, 19 bp, Homo sapiens
  siRNA target sequence for PKHD1L1 (NM_177531.2,12311-12329).
gtctgcatttcctgttcat

SEQ ID NO: 430260 - DNA, 19 bp, Homo sapiens
  siRNA target sequence for PKHD1L1 (NM_177531.2,12413-12431).
ggtaaaggcaacagattct

SEQ ID NO: 430261 - DNA, 19 bp, Homo sapiens
  siRNA target sequence for PKHD1L1 (NM_177531.2,12454-12472).
gaattactgcactaacttt

SEQ ID NO: 430262 - DNA, 19 bp, Homo sapiens
  siRNA target sequence for PKHD1L1 (NM_177531.2,12469-12487).
ctttgagggccatactcaa

SEQ ID NO: 430263 - DNA, 19 bp, Homo sapiens
  siRNA target sequence for PKHD1L1 (NM_177531.2,12488-12506).
ggactccaataataaccaa

SEQ ID NO: 430264 - DNA, 19 bp, Homo sapiens
  siRNA target sequence for PKHD1L1 (NM_177531.2,12513-12531).
ggccttagtggaaatacaa

SEQ ID NO: 430265 - DNA, 19 bp, Homo sapiens
  siRNA target sequence for PKHD1L1 (NM_177531.2,12515-12533).
ccttagtggaaatacaaca

SEQ ID NO: 430266 - DNA, 19 bp, Homo sapiens
  siRNA target sequence for PKHD1L1 (NM_177531.2,12516-12534).
cttagtggaaatacaacaa

SEQ ID NO: 430267 - DNA, 19 bp, Homo sapiens
  siRNA target sequence for PKHD1L1 (NM_177531.2,12630-12648).
ggggtagaatccagaactt

SEQ ID NO: 430268 - DNA, 19 bp, Homo sapiens
  siRNA target sequence for PKHD1L1 (NM_177531.2,12720-12738).
ggtacatatgcccagataa

SEQ ID NO: 430269 - DNA, 19 bp, Homo sapiens
  siRNA target sequence for PKHD1L1 (NM_177531.2,12734-12752).
gataatgactgtagtaatt

SEQ ID NO: 430270 - DNA, 19 bp, Homo sapiens
  siRNA target sequence for PKHD1L1 (NM_177531.2,12754-12772).
gctgtctggttggaagaat

SEQ ID NO: 430271 - DNA, 19 bp, Homo sapiens
  siRNA target sequence for PKHD1L1 (NM_177531.2,12795-12813).
gctgcagtttcaactttga

SEQ ID NO: 430272 - DNA, 19 bp, Homo sapiens
  siRNA target sequence for PKHD1L1 (NM_177531.2,12798-12816).
gcagtttcaactttgaata

SEQ ID NO: 430273 - DNA, 19 bp, Homo sapiens
  siRNA target sequence for PKHD1L1 (NM_177531.2,12799-12817).
cagtttcaactttgaatat

SEQ ID NO: 430274 - DNA, 19 bp, Homo sapiens
  siRNA target sequence for NUDT14 (NM_177533.2,201-219).
gcgtgaccgttctcttatt

SEQ ID NO: 430275 - DNA, 19 bp, Homo sapiens
  siRNA target sequence for NUDT14 (NM_177533.2,203-221).
gtgaccgttctcttattca

SEQ ID NO: 430276 - DNA, 19 bp, Homo sapiens
  siRNA target sequence for NUDT14 (NM_177533.2,256-274).
gttccggccagctgtgtat

SEQ ID NO: 430277 - DNA, 19 bp, Homo sapiens
  siRNA target sequence for NUDT14 (NM_177533.2,528-546).
ccagacagaccatgttcta

SEQ ID NO: 430278 - DNA, 19 bp, Homo sapiens
  siRNA target sequence for LOC149830 (NM_177549.2,1053-1071).
ctaattcccatgtctaaca

SEQ ID NO: 430279 - DNA, 19 bp, Homo sapiens
  siRNA target sequence for LOC149830 (NM_177549.2,1061-1079).
catgtctaacacaacactt

SEQ ID NO: 430280 - DNA, 19 bp, Homo sapiens
  siRNA target sequence for LOC149830 (NM_177549.2,1083-1101).
catactgcatggccattat

SEQ ID NO: 430281 - DNA, 19 bp, Homo sapiens
  siRNA target sequence for LOC149830 (NM_177549.2,1181-1199).
ctgccaggcatgcaataga

SEQ ID NO: 430282 - DNA, 19 bp, Homo sapiens
  siRNA target sequence for LOC149830 (NM_177549.2,1183-1201).
gccaggcatgcaatagaaa

SEQ ID NO: 430283 - DNA, 19 bp, Homo sapiens
  siRNA target sequence for ALEX2 (NM_177949.1,2018-2036).
cagcacctgcttgtcaatt

SEQ ID NO: 430284 - DNA, 19 bp, Homo sapiens
  siRNA target sequence for LOC130576 (NM_177964.3,546-564).
gctgttgtccagatcgtta

SEQ ID NO: 430285 - DNA, 19 bp, Homo sapiens
  siRNA target sequence for LOC130576 (NM_177964.3,547-565).
ctgttgtccagatcgttat

SEQ ID NO: 430286 - DNA, 19 bp, Homo sapiens
  siRNA target sequence for LOC130576 (NM_177964.3,549-567).
gttgtccagatcgttatct

SEQ ID NO: 430287 - DNA, 19 bp, Homo sapiens
  siRNA target sequence for LOC130576 (NM_177964.3,580-598).
gggcatttgccaagaacat

SEQ ID NO: 430288 - DNA, 19 bp, Homo sapiens
  siRNA target sequence for LOC130576 (NM_177964.3,593-611).
gaacatcaacttctataat

SEQ ID NO: 430289 - DNA, 19 bp, Homo sapiens
  siRNA target sequence for LOC130576 (NM_177964.3,669-687).
gaaaacgcaggggataatt

SEQ ID NO: 430290 - DNA, 19 bp, Homo sapiens
  siRNA target sequence for LOC130576 (NM_177964.3,675-693).
gcaggggataattataact

SEQ ID NO: 430291 - DNA, 19 bp, Homo sapiens
  siRNA target sequence for LOC130576 (NM_177964.3,718-736).
ggtgtccacaaaatacaca

SEQ ID NO: 430292 - DNA, 19 bp, Homo sapiens
  siRNA target sequence for LOC130576 (NM_177964.3,742-760).
gtttgacagttcatcactt

SEQ ID NO: 430293 - DNA, 19 bp, Homo sapiens
  siRNA target sequence for LOC130576 (NM_177964.3,836-854).
ccacagccgagattctgaa

SEQ ID NO: 430294 - DNA, 19 bp, Homo sapiens
  siRNA target sequence for LOC130576 (NM_177964.3,883-901).
gaatgatctgcaatgtaga

SEQ ID NO: 430295 - DNA, 19 bp, Homo sapiens
  siRNA target sequence for LOC130576 (NM_177964.3,887-905).
gatctgcaatgtagaatta

SEQ ID NO: 430296 - DNA, 19 bp, Homo sapiens
  siRNA target sequence for LOC130576 (NM_177964.3,925-943).
cagtgtttgccgtaatgca

SEQ ID NO: 430297 - DNA, 19 bp, Homo sapiens
  siRNA target sequence for LOC157657 (NM_177965.2,51-69).
gaagtcgagtccaagtttt

SEQ ID NO: 430298 - DNA, 19 bp, Homo sapiens
  siRNA target sequence for LOC157657 (NM_177965.2,54-72).
gtcgagtccaagttttgca

SEQ ID NO: 430299 - DNA, 19 bp, Homo sapiens
  siRNA target sequence for LOC157657 (NM_177965.2,71-89).
cacacctgaccttctaaga

SEQ ID NO: 430300 - DNA, 19 bp, Homo sapiens
  siRNA target sequence for LOC157657 (NM_177965.2,167-185).
gacgctcagatcaacagaa

SEQ ID NO: 430301 - DNA, 19 bp, Homo sapiens
  siRNA target sequence for LOC157657 (NM_177965.2,204-222).
gatcttgacagtcttatta

SEQ ID NO: 430302 - DNA, 19 bp, Homo sapiens
  siRNA target sequence for LOC157657 (NM_177965.2,258-276).
ccctctaaattaaaatcta

SEQ ID NO: 430303 - DNA, 19 bp, Homo sapiens
  siRNA target sequence for LOC157657 (NM_177965.2,307-325).
ccattgaaggccttggtaa

SEQ ID NO: 430304 - DNA, 19 bp, Homo sapiens
  siRNA target sequence for LOC157657 (NM_177965.2,367-385).
gtgggattggaacaaatat

SEQ ID NO: 430305 - DNA, 19 bp, Homo sapiens
  siRNA target sequence for LOC157657 (NM_177965.2,411-429).
cgttgtatagcctgtgatt

SEQ ID NO: 430306 - DNA, 19 bp, Homo sapiens
  siRNA target sequence for LOC157657 (NM_177965.2,450-468).
gactatatgtgggacaaat

SEQ ID NO: 430307 - DNA, 19 bp, Homo sapiens
  siRNA target sequence for LOC157657 (NM_177965.2,460-478).
gggacaaatcgtgtgatta

SEQ ID NO: 430308 - DNA, 19 bp, Homo sapiens
  siRNA target sequence for LOC157657 (NM_177965.2,568-586).
gtagctggagaactattga

SEQ ID NO: 430309 - DNA, 19 bp, Homo sapiens
  siRNA target sequence for LOC157657 (NM_177965.2,571-589).
gctggagaactattgaaga

SEQ ID NO: 430310 - DNA, 19 bp, Homo sapiens
  siRNA target sequence for LOC157657 (NM_177965.2,622-640).
gctgggtttgtggtaaaca

SEQ ID NO: 430311 - DNA, 19 bp, Homo sapiens
  siRNA target sequence for DKFZp667B1218 (NM_177966.3,273-291).
gatggtagccacaagaaca

SEQ ID NO: 430312 - DNA, 19 bp, Homo sapiens
  siRNA target sequence for DKFZp667B1218 (NM_177966.3,329-347).
cagccgcatcgctaccaat

SEQ ID NO: 430313 - DNA, 19 bp, Homo sapiens
  siRNA target sequence for DKFZp667B1218 (NM_177966.3,549-567).
cagatcggcgatgttaagt

SEQ ID NO: 430314 - DNA, 19 bp, Homo sapiens
  siRNA target sequence for DKFZp667B1218 (NM_177966.3,647-665).
caaactcagcctcgaattt

SEQ ID NO: 430315 - DNA, 19 bp, Homo sapiens
  siRNA target sequence for DKFZp667B1218 (NM_177966.3,682-700).
cccttttccgctggtataa

SEQ ID NO: 430316 - DNA, 19 bp, Homo sapiens
  siRNA target sequence for DKFZp667B1218 (NM_177966.3,735-753).
ggtgtcccctcgtcattgt

SEQ ID NO: 430317 - DNA, 19 bp, Homo sapiens
  siRNA target sequence for DKFZp667B1218 (NM_177966.3,990-1008).
cgcactgtctcttacaaca

SEQ ID NO: 430318 - DNA, 19 bp, Homo sapiens
  siRNA target sequence for DKFZp667B1218 (NM_177966.3,1049-1067).
ggttctgtacccatactgt

SEQ ID NO: 430319 - DNA, 19 bp, Homo sapiens
  siRNA target sequence for DKFZp667B1218 (NM_177966.3,1089-1107).
gactaccgccagaacctta

SEQ ID NO: 430320 - DNA, 19 bp, Homo sapiens
  siRNA target sequence for DKFZp667B1218 (NM_177966.3,1126-1144).
gctacaacgccgatgtcat

SEQ ID NO: 430321 - DNA, 19 bp, Homo sapiens
  siRNA target sequence for DKFZp667B1218 (NM_177966.3,1157-1175).
ggttgaccgcgcagtgttt

SEQ ID NO: 430322 - DNA, 19 bp, Homo sapiens
  siRNA target sequence for DKFZp667B1218 (NM_177966.3,1158-1176).
gttgaccgcgcagtgtttt

SEQ ID NO: 430323 - DNA, 19 bp, Homo sapiens
  siRNA target sequence for DKFZp667B1218 (NM_177966.3,1212-1230).
ctcgagggggtgtttcgaa

SEQ ID NO: 430324 - DNA, 19 bp, Homo sapiens
  siRNA target sequence for DKFZp667B1218 (NM_177966.3,1255-1273).
ctttctaccgaaagtctaa

SEQ ID NO: 430325 - DNA, 19 bp, Homo sapiens
  siRNA target sequence for DKFZp667B1218 (NM_177966.3,1324-1342).
ccgacccacttcacaaaga

SEQ ID NO: 430326 - DNA, 19 bp, Homo sapiens
  siRNA target sequence for DKFZp667B1218 (NM_177966.3,1439-1457).
ctcttctaaaaggatatgt

SEQ ID NO: 430327 - DNA, 19 bp, Homo sapiens
  siRNA target sequence for DKFZp667B1218 (NM_177966.3,1441-1459).
cttctaaaaggatatgtgt

SEQ ID NO: 430328 - DNA, 19 bp, Homo sapiens
  siRNA target sequence for DKFZp667B1218 (NM_177966.3,1458-1476).
gttgctaatacccatcttt

SEQ ID NO: 430329 - DNA, 19 bp, Homo sapiens
  siRNA target sequence for DKFZp667B1218 (NM_177966.3,1486-1504).
ctaaaggtaggttttattt

SEQ ID NO: 430330 - DNA, 19 bp, Homo sapiens
  siRNA target sequence for PHGDHL1 (NM_177967.2,521-539).
gtctccaagaagagttttt

SEQ ID NO: 430331 - DNA, 19 bp, Homo sapiens
  siRNA target sequence for PHGDHL1 (NM_177967.2,555-573).
gatgagagtgctttcaagt

SEQ ID NO: 430332 - DNA, 19 bp, Homo sapiens
  siRNA target sequence for PHGDHL1 (NM_177967.2,866-884).
cgttgtccatcacaaacaa

SEQ ID NO: 430333 - DNA, 19 bp, Homo sapiens
  siRNA target sequence for PHGDHL1 (NM_177967.2,882-900).
caagacattgatttatata

SEQ ID NO: 430334 - DNA, 19 bp, Homo sapiens
  siRNA target sequence for PHGDHL1 (NM_177967.2,946-964).
gccataagtggacttatgt

SEQ ID NO: 430335 - DNA, 19 bp, Homo sapiens
  siRNA target sequence for PHGDHL1 (NM_177967.2,970-988).
ctgtgctacgacagcaaaa

SEQ ID NO: 430336 - DNA, 19 bp, Homo sapiens
  siRNA target sequence for PHGDHL1 (NM_177967.2,974-992).
gctacgacagcaaaatgtt

SEQ ID NO: 430337 - DNA, 19 bp, Homo sapiens
  siRNA target sequence for PHGDHL1 (NM_177967.2,1022-1040).
gctggatggcaaaattctt

SEQ ID NO: 430338 - DNA, 19 bp, Homo sapiens
  siRNA target sequence for PHGDHL1 (NM_177967.2,1054-1072).
gaacccatcttctcttctt

SEQ ID NO: 430339 - DNA, 19 bp, Homo sapiens
  siRNA target sequence for PHGDHL1 (NM_177967.2,1158-1176).
gctgatgttctctcagttt

SEQ ID NO: 430340 - DNA, 19 bp, Homo sapiens
  siRNA target sequence for PHGDHL1 (NM_177967.2,1207-1225).
ggaggaatgatcaattgga

SEQ ID NO: 430341 - DNA, 19 bp, Homo sapiens
  siRNA target sequence for PHGDHL1 (NM_177967.2,1218-1236).
caattggaatcgtcttttt

SEQ ID NO: 430342 - DNA, 19 bp, Homo sapiens
  siRNA target sequence for PHGDHL1 (NM_177967.2,1246-1264).
cgtcagcgacaaaacgtaa

SEQ ID NO: 430343 - DNA, 19 bp, Homo sapiens
  siRNA target sequence for PHGDHL1 (NM_177967.2,1247-1265).
gtcagcgacaaaacgtaaa

SEQ ID NO: 430344 - DNA, 19 bp, Homo sapiens
  siRNA target sequence for PHGDHL1 (NM_177967.2,1249-1267).
cagcgacaaaacgtaaact

SEQ ID NO: 430345 - DNA, 19 bp, Homo sapiens
  siRNA target sequence for PHGDHL1 (NM_177967.2,1251-1269).
gcgacaaaacgtaaactat

SEQ ID NO: 430346 - DNA, 19 bp, Homo sapiens
  siRNA target sequence for PHGDHL1 (NM_177967.2,1253-1271).
gacaaaacgtaaactatca

SEQ ID NO: 430347 - DNA, 19 bp, Homo sapiens
  siRNA target sequence for PHGDHL1 (NM_177967.2,1301-1319).
cccctctagaagtttctga

SEQ ID NO: 430348 - DNA, 19 bp, Homo sapiens
  siRNA target sequence for PHGDHL1 (NM_177967.2,1375-1393).
gccctgagagcttcaaaca

SEQ ID NO: 430349 - DNA, 19 bp, Homo sapiens
  siRNA target sequence for OTOP1 (NM_177998.1,422-440).
gctggctgcgcggtagtat

SEQ ID NO: 430350 - DNA, 19 bp, Homo sapiens
  siRNA target sequence for OTOP1 (NM_177998.1,426-444).
gctgcgcggtagtatcaca

SEQ ID NO: 430351 - DNA, 19 bp, Homo sapiens
  siRNA target sequence for OTOP1 (NM_177998.1,427-445).
ctgcgcggtagtatcacat

SEQ ID NO: 430352 - DNA, 19 bp, Homo sapiens
  siRNA target sequence for OTOP1 (NM_177998.1,430-448).
cgcggtagtatcacattgt

SEQ ID NO: 430353 - DNA, 19 bp, Homo sapiens
  siRNA target sequence for OTOP1 (NM_177998.1,431-449).
gcggtagtatcacattgtt

SEQ ID NO: 430354 - DNA, 19 bp, Homo sapiens
  siRNA target sequence for OTOP1 (NM_177998.1,432-450).
cggtagtatcacattgttt

SEQ ID NO: 430355 - DNA, 19 bp, Homo sapiens
  siRNA target sequence for OTOP1 (NM_177998.1,465-483).
catcctgggatgccttaaa

SEQ ID NO: 430356 - DNA, 19 bp, Homo sapiens
  siRNA target sequence for OTOP1 (NM_177998.1,468-486).
cctgggatgccttaaaatt

SEQ ID NO: 430357 - DNA, 19 bp, Homo sapiens
  siRNA target sequence for OTOP1 (NM_177998.1,478-496).
cttaaaattggatacttca

SEQ ID NO: 430358 - DNA, 19 bp, Homo sapiens
  siRNA target sequence for OTOP1 (NM_177998.1,487-505).
ggatacttcattggatttt

SEQ ID NO: 430359 - DNA, 19 bp, Homo sapiens
  siRNA target sequence for OTOP1 (NM_177998.1,584-602).
gggggcatgcaaaggatat

SEQ ID NO: 430360 - DNA, 19 bp, Homo sapiens
  siRNA target sequence for OTOP1 (NM_177998.1,585-603).
ggggcatgcaaaggatatt

SEQ ID NO: 430361 - DNA, 19 bp, Homo sapiens
  siRNA target sequence for OTOP1 (NM_177998.1,586-604).
gggcatgcaaaggatatta

SEQ ID NO: 430362 - DNA, 19 bp, Homo sapiens
  siRNA target sequence for OTOP1 (NM_177998.1,587-605).
ggcatgcaaaggatattat

SEQ ID NO: 430363 - DNA, 19 bp, Homo sapiens
  siRNA target sequence for OTOP1 (NM_177998.1,695-713).
caaagcaccaactcaatga

SEQ ID NO: 430364 - DNA, 19 bp, Homo sapiens
  siRNA target sequence for OTOP1 (NM_177998.1,1724-1742).
gtcgacctgagtatgacaa

SEQ ID NO: 430365 - DNA, 19 bp, Homo sapiens
  siRNA target sequence for OTOP1 (NM_177998.1,1729-1747).
cctgagtatgacaatggat

SEQ ID NO: 430366 - DNA, 19 bp, Homo sapiens
  siRNA target sequence for OTOP1 (NM_177998.1,1730-1748).
ctgagtatgacaatggatt

SEQ ID NO: 430367 - DNA, 19 bp, Homo sapiens
  siRNA target sequence for OTOP1 (NM_177998.1,1766-1784).
gctttgaaccctggataat

SEQ ID NO: 430368 - DNA, 19 bp, Homo sapiens
  siRNA target sequence for OTOP1 (NM_177998.1,1767-1785).
ctttgaaccctggataatt

SEQ ID NO: 430369 - DNA, 19 bp, Homo sapiens
  siRNA target sequence for OTOP1 (NM_177998.1,1797-1815).
ggccatgcctttttctatt

SEQ ID NO: 430370 - DNA, 19 bp, Homo sapiens
  siRNA target sequence for OTOP1 (NM_177998.1,1843-1861).
ctctttgaggtctattgta

SEQ ID NO: 430371 - DNA, 19 bp, Homo sapiens
  siRNA target sequence for OTOP1 (NM_177998.1,1849-1867).
gaggtctattgtaagatat

SEQ ID NO: 430372 - DNA, 19 bp, Homo sapiens
  siRNA target sequence for PRIMA1 (NM_178004.1,311-329).
ggtcggggctggtgatcat

SEQ ID NO: 430373 - DNA, 19 bp, Homo sapiens
  siRNA target sequence for LRRTM3 (NM_178011.2,564-582).
cagctgtagcactggttat

SEQ ID NO: 430374 - DNA, 19 bp, Homo sapiens
  siRNA target sequence for LRRTM3 (NM_178011.2,648-666).
gtgaaggcaaaatggtata

SEQ ID NO: 430375 - DNA, 19 bp, Homo sapiens
  siRNA target sequence for LRRTM3 (NM_178011.2,654-672).
gcaaaatggtatattgtga

SEQ ID NO: 430376 - DNA, 19 bp, Homo sapiens
  siRNA target sequence for LRRTM3 (NM_178011.2,686-704).
caggagataccctcaagta

SEQ ID NO: 430377 - DNA, 19 bp, Homo sapiens
  siRNA target sequence for LRRTM3 (NM_178011.2,689-707).
gagataccctcaagtatat

SEQ ID NO: 430378 - DNA, 19 bp, Homo sapiens
  siRNA target sequence for LRRTM3 (NM_178011.2,708-726).
ctgctggttgcttaggttt

SEQ ID NO: 430379 - DNA, 19 bp, Homo sapiens
  siRNA target sequence for LRRTM3 (NM_178011.2,723-741).
gtttgtcccttcgctataa

SEQ ID NO: 430380 - DNA, 19 bp, Homo sapiens
  siRNA target sequence for LRRTM3 (NM_178011.2,736-754).
ctataacagccttcaaaaa

SEQ ID NO: 430381 - DNA, 19 bp, Homo sapiens
  siRNA target sequence for LRRTM3 (NM_178011.2,744-762).
gccttcaaaaacttaagta

SEQ ID NO: 430382 - DNA, 19 bp, Homo sapiens
  siRNA target sequence for LRRTM3 (NM_178011.2,746-764).
cttcaaaaacttaagtata

SEQ ID NO: 430383 - DNA, 19 bp, Homo sapiens
  siRNA target sequence for LRRTM3 (NM_178011.2,755-773).
cttaagtataatcaattta

SEQ ID NO: 430384 - DNA, 19 bp, Homo sapiens
  siRNA target sequence for LRRTM3 (NM_178011.2,803-821).
cttgaccataaccatatca

SEQ ID NO: 430385 - DNA, 19 bp, Homo sapiens
  siRNA target sequence for LRRTM3 (NM_178011.2,823-841).
caatattgacgaaaatgct

SEQ ID NO: 430386 - DNA, 19 bp, Homo sapiens
  siRNA target sequence for LRRTM3 (NM_178011.2,849-867).
gaatacgcagactcaaaga

SEQ ID NO: 430387 - DNA, 19 bp, Homo sapiens
  siRNA target sequence for LRRTM3 (NM_178011.2,860-878).
ctcaaagagctgattctta

SEQ ID NO: 430388 - DNA, 19 bp, Homo sapiens
  siRNA target sequence for LRRTM3 (NM_178011.2,868-886).
gctgattcttagttccaat

SEQ ID NO: 430389 - DNA, 19 bp, Homo sapiens
  siRNA target sequence for LRRTM3 (NM_178011.2,871-889).
gattcttagttccaataga

SEQ ID NO: 430390 - DNA, 19 bp, Homo sapiens
  siRNA target sequence for LRRTM3 (NM_178011.2,964-982).
gcattctctgggatctgaa

SEQ ID NO: 430391 - DNA, 19 bp, Homo sapiens
  siRNA target sequence for LRRTM3 (NM_178011.2,997-1015).
gcggaagctgctgagttta

SEQ ID NO: 430392 - DNA, 19 bp, Homo sapiens
  siRNA target sequence for LRRTM3 (NM_178011.2,1000-1018).
gaagctgctgagtttacat

SEQ ID NO: 430393 - DNA, 19 bp, Homo sapiens
  siRNA target sequence for LRRTM3 (NM_178011.2,1041-1059).
ccatccctgtgcgaatatt

SEQ ID NO: 430394 - DNA, 19 bp, Homo sapiens
  siRNA target sequence for LRRTM3 (NM_178011.2,1068-1086).
gccgcaacctggaactttt

SEQ ID NO: 430395 - DNA, 19 bp, Homo sapiens
  siRNA target sequence for LRRTM3 (NM_178011.2,1141-1159).
gatcagactcaaagaactt

SEQ ID NO: 430396 - DNA, 19 bp, Homo sapiens
  siRNA target sequence for LRRTM3 (NM_178011.2,1209-1227).
ggttggtcagccttcagaa

SEQ ID NO: 430397 - DNA, 19 bp, Homo sapiens
  siRNA target sequence for LRRTM3 (NM_178011.2,1279-1297).
gacctggagctccttacaa

SEQ ID NO: 430398 - DNA, 19 bp, Homo sapiens
  siRNA target sequence for LRRTM3 (NM_178011.2,1290-1308).
ccttacaaaggcttgattt

SEQ ID NO: 430399 - DNA, 19 bp, Homo sapiens
  siRNA target sequence for LRRTM3 (NM_178011.2,1389-1407).
ccaacaagctcacatttat

SEQ ID NO: 430400 - DNA, 19 bp, Homo sapiens
  siRNA target sequence for LRRTM3 (NM_178011.2,1390-1408).
caacaagctcacatttatt

SEQ ID NO: 430401 - DNA, 19 bp, Homo sapiens
  siRNA target sequence for LRRTM3 (NM_178011.2,1428-1446).
cttggatatccctcaatga

SEQ ID NO: 430402 - DNA, 19 bp, Homo sapiens
  siRNA target sequence for LRRTM3 (NM_178011.2,1431-1449).
ggatatccctcaatgacat

SEQ ID NO: 430403 - DNA, 19 bp, Homo sapiens
  siRNA target sequence for LRRTM3 (NM_178011.2,1450-1468).
cagtcttgctgggaatata

SEQ ID NO: 430404 - DNA, 19 bp, Homo sapiens
  siRNA target sequence for LRRTM3 (NM_178011.2,1470-1488).
gggaatgcagcagaaatat

SEQ ID NO: 430405 - DNA, 19 bp, Homo sapiens
  siRNA target sequence for LRRTM3 (NM_178011.2,1523-1541).
ggtctaagggagaatacaa

SEQ ID NO: 430406 - DNA, 19 bp, Homo sapiens
  siRNA target sequence for LRRTM3 (NM_178011.2,1524-1542).
gtctaagggagaatacaat

SEQ ID NO: 430407 - DNA, 19 bp, Homo sapiens
  siRNA target sequence for LRRTM3 (NM_178011.2,1526-1544).
ctaagggagaatacaatta

SEQ ID NO: 430408 - DNA, 19 bp, Homo sapiens
  siRNA target sequence for LRRTM3 (NM_178011.2,1586-1604).
gatgcagtgaagaactaca

SEQ ID NO: 430409 - DNA, 19 bp, Homo sapiens
  siRNA target sequence for LRRTM3 (NM_178011.2,1609-1627).
ctgtggcaaaagtactaca

SEQ ID NO: 430410 - DNA, 19 bp, Homo sapiens
  siRNA target sequence for LRRTM3 (NM_178011.2,1623-1641).
ctacagagaggtttgatct

SEQ ID NO: 430411 - DNA, 19 bp, Homo sapiens
  siRNA target sequence for LRRTM3 (NM_178011.2,1765-1783).
cgagcacatctctttccat

SEQ ID NO: 430412 - DNA, 19 bp, Homo sapiens
  siRNA target sequence for LRRTM3 (NM_178011.2,1766-1784).
gagcacatctctttccata

SEQ ID NO: 430413 - DNA, 19 bp, Homo sapiens
  siRNA target sequence for LRRTM3 (NM_178011.2,1926-1944).
gacagtccctaaagcaaat

SEQ ID NO: 430414 - DNA, 19 bp, Homo sapiens
  siRNA target sequence for LRRTM3 (NM_178011.2,1928-1946).
cagtccctaaagcaaatga

SEQ ID NO: 430415 - DNA, 19 bp, Homo sapiens
  siRNA target sequence for LRRTM3 (NM_178011.2,1949-1967).
cccagcacccaggaatttt

SEQ ID NO: 430416 - DNA, 19 bp, Homo sapiens
  siRNA target sequence for LRRTM3 (NM_178011.2,1950-1968).
ccagcacccaggaatttta

SEQ ID NO: 430417 - DNA, 19 bp, Homo sapiens
  siRNA target sequence for LRRTM3 (NM_178011.2,1953-1971).
gcacccaggaattttatgt

SEQ ID NO: 430418 - DNA, 19 bp, Homo sapiens
  siRNA target sequence for LRRTM3 (NM_178011.2,1954-1972).
cacccaggaattttatgta

SEQ ID NO: 430419 - DNA, 19 bp, Homo sapiens
  siRNA target sequence for LRRTM3 (NM_178011.2,2027-2045).
ccctgcacctataacaaat

SEQ ID NO: 430420 - DNA, 19 bp, Homo sapiens
  siRNA target sequence for LRRTM3 (NM_178011.2,2057-2075).
gagtgtgagatacctttat

SEQ ID NO: 430421 - DNA, 19 bp, Homo sapiens
  siRNA target sequence for LRRTM3 (NM_178011.2,2059-2077).
gtgtgagatacctttatca

SEQ ID NO: 430422 - DNA, 19 bp, Homo sapiens
  siRNA target sequence for LRRTM3 (NM_178011.2,2061-2079).
gtgagatacctttatcaat

SEQ ID NO: 430423 - DNA, 19 bp, Homo sapiens
  siRNA target sequence for LRRTM3 (NM_178011.2,2104-2122).
cgaccagcccacaataagt

SEQ ID NO: 430424 - DNA, 19 bp, Homo sapiens
  siRNA target sequence for LRRTM3 (NM_178011.2,2105-2123).
gaccagcccacaataagtt

SEQ ID NO: 430425 - DNA, 19 bp, Homo sapiens
  siRNA target sequence for LRRTM3 (NM_178011.2,2108-2126).
cagcccacaataagttact

SEQ ID NO: 430426 - DNA, 19 bp, Homo sapiens
  siRNA target sequence for LRRTM3 (NM_178011.2,2125-2143).
ctgtggggtgcatcatgaa

SEQ ID NO: 430427 - DNA, 19 bp, Homo sapiens
  siRNA target sequence for LRRTM3 (NM_178011.2,2141-2159).
gaacttctctcccataagt

SEQ ID NO: 430428 - DNA, 19 bp, Homo sapiens
  siRNA target sequence for LRRTM3 (NM_178011.2,2216-2234).
gacctgagcacaatcacaa

SEQ ID NO: 430429 - DNA, 19 bp, Homo sapiens
  siRNA target sequence for LRRTM3 (NM_178011.2,2241-2259).
gccgaatcagtgaccataa

SEQ ID NO: 430430 - DNA, 19 bp, Homo sapiens
  siRNA target sequence for LRRTM3 (NM_178011.2,2242-2260).
ccgaatcagtgaccataaa

SEQ ID NO: 430431 - DNA, 19 bp, Homo sapiens
  siRNA target sequence for LRRTM3 (NM_178011.2,2244-2262).
gaatcagtgaccataaaca

SEQ ID NO: 430432 - DNA, 19 bp, Homo sapiens
  siRNA target sequence for ELKS (NM_178039.1,2500-2518).
gttggaaaggcaagtgaaa

SEQ ID NO: 430433 - DNA, 19 bp, Homo sapiens
  siRNA target sequence for ELKS (NM_178039.1,3216-3234).
gaagtaaattaaagttgta

SEQ ID NO: 430434 - DNA, 19 bp, Homo sapiens
  siRNA target sequence for ELKS (NM_178040.1,1573-1591).
ggaggaactaagttcgaaa

SEQ ID NO: 430435 - DNA, 19 bp, Homo sapiens
  siRNA target sequence for FLJ10378 (NM_178043.1,1645-1663).
cagccataaaggtaattgt

SEQ ID NO: 430436 - DNA, 19 bp, Homo sapiens
  siRNA target sequence for LOC90529 (NM_178122.2,156-174).
gacctgggttctacaatgt

SEQ ID NO: 430437 - DNA, 19 bp, Homo sapiens
  siRNA target sequence for LOC90529 (NM_178122.2,257-275).
gacaccatcatttctaaat

SEQ ID NO: 430438 - DNA, 19 bp, Homo sapiens
  siRNA target sequence for LOC90529 (NM_178122.2,281-299).
gcagcgaatgcatacacta

SEQ ID NO: 430439 - DNA, 19 bp, Homo sapiens
  siRNA target sequence for LOC90529 (NM_178122.2,282-300).
cagcgaatgcatacactat

SEQ ID NO: 430440 - DNA, 19 bp, Homo sapiens
  siRNA target sequence for LOC90529 (NM_178122.2,295-313).
cactatcccatcggatttt

SEQ ID NO: 430441 - DNA, 19 bp, Homo sapiens
  siRNA target sequence for LOC90529 (NM_178122.2,302-320).
ccatcggattttatttcca

SEQ ID NO: 430442 - DNA, 19 bp, Homo sapiens
  siRNA target sequence for LOC90529 (NM_178122.2,303-321).
catcggattttatttccaa

SEQ ID NO: 430443 - DNA, 19 bp, Homo sapiens
  siRNA target sequence for LOC90529 (NM_178122.2,352-370).
gttccagttgccaagcttt

SEQ ID NO: 430444 - DNA, 19 bp, Homo sapiens
  siRNA target sequence for LOC90529 (NM_178122.2,393-411).
ctcctgcaccaaactatta

SEQ ID NO: 430445 - DNA, 19 bp, Homo sapiens
  siRNA target sequence for LOC90529 (NM_178122.2,396-414).
ctgcaccaaactattacaa

SEQ ID NO: 430446 - DNA, 19 bp, Homo sapiens
  siRNA target sequence for LOC90529 (NM_178122.2,453-471).
gtactcgagccgggtttat

SEQ ID NO: 430447 - DNA, 19 bp, Homo sapiens
  siRNA target sequence for LOC90529 (NM_178122.2,458-476).
cgagccgggtttatgtcaa

SEQ ID NO: 430448 - DNA, 19 bp, Homo sapiens
  siRNA target sequence for LOC90529 (NM_178122.2,459-477).
gagccgggtttatgtcaaa

SEQ ID NO: 430449 - DNA, 19 bp, Homo sapiens
  siRNA target sequence for LOC90529 (NM_178122.2,492-510).
ctttcgcttttgctgataa

SEQ ID NO: 430450 - DNA, 19 bp, Homo sapiens
  siRNA target sequence for LOC90529 (NM_178122.2,518-536).
cccccagggcattatgata

SEQ ID NO: 430451 - DNA, 19 bp, Homo sapiens
  siRNA target sequence for LOC90529 (NM_178122.2,521-539).
ccagggcattatgatatca

SEQ ID NO: 430452 - DNA, 19 bp, Homo sapiens
  siRNA target sequence for LOC90529 (NM_178122.2,551-569).
gtgaagcagtcgccaaata

SEQ ID NO: 430453 - DNA, 19 bp, Homo sapiens
  siRNA target sequence for LOC90529 (NM_178122.2,557-575).
cagtcgccaaatacattaa

SEQ ID NO: 430454 - DNA, 19 bp, Homo sapiens
  siRNA target sequence for LOC90529 (NM_178122.2,562-580).
gccaaatacattaatgtct

SEQ ID NO: 430455 - DNA, 19 bp, Homo sapiens
  siRNA target sequence for LOC90529 (NM_178122.2,597-615).
ccaaccgtggattaaaact

SEQ ID NO: 430456 - DNA, 19 bp, Homo sapiens
  siRNA target sequence for LOC90529 (NM_178122.2,649-667).
ccccagtgattgcacaaaa

SEQ ID NO: 430457 - DNA, 19 bp, Homo sapiens
  siRNA target sequence for LOC90529 (NM_178122.2,651-669).
ccagtgattgcacaaaagt

SEQ ID NO: 430458 - DNA, 19 bp, Homo sapiens
  siRNA target sequence for LOC90529 (NM_178122.2,652-670).
cagtgattgcacaaaagtt

SEQ ID NO: 430459 - DNA, 19 bp, Homo sapiens
  siRNA target sequence for LOC90529 (NM_178122.2,660-678).
gcacaaaagttccaaaaaa

SEQ ID NO: 430460 - DNA, 19 bp, Homo sapiens
  siRNA target sequence for LOC90529 (NM_178122.2,756-774).
gtcctggtcagtatgagat

SEQ ID NO: 430461 - DNA, 19 bp, Homo sapiens
  siRNA target sequence for LOC90529 (NM_178122.2,794-812).
cgcaagcatttcatctcta

SEQ ID NO: 430462 - DNA, 19 bp, Homo sapiens
  siRNA target sequence for LOC90529 (NM_178122.2,815-833).
gcatcattcgtgtccaata

SEQ ID NO: 430463 - DNA, 19 bp, Homo sapiens
  siRNA target sequence for LOC91966 (NM_178124.3,582-600).
ggctttgtcttaaatggaa

SEQ ID NO: 430464 - DNA, 19 bp, Homo sapiens
  siRNA target sequence for LOC91966 (NM_178124.3,583-601).
gctttgtcttaaatggaat

SEQ ID NO: 430465 - DNA, 19 bp, Homo sapiens
  siRNA target sequence for LOC91966 (NM_178124.3,588-606).
gtcttaaatggaatcaaga

SEQ ID NO: 430466 - DNA, 19 bp, Homo sapiens
  siRNA target sequence for LOC91966 (NM_178124.3,773-791).
gtttggtcgaggagtgata

SEQ ID NO: 430467 - DNA, 19 bp, Homo sapiens
  siRNA target sequence for LOC91966 (NM_178124.3,806-824).
cattggggaaactttgcaa

SEQ ID NO: 430468 - DNA, 19 bp, Homo sapiens
  siRNA target sequence for LOC91966 (NM_178124.3,821-839).
gcaatgccccgaagactta

SEQ ID NO: 430469 - DNA, 19 bp, Homo sapiens
  siRNA target sequence for LOC91966 (NM_178124.3,822-840).
caatgccccgaagacttaa

SEQ ID NO: 430470 - DNA, 19 bp, Homo sapiens
  siRNA target sequence for LOC162427 (NM_178126.2,100-118).
gcttcggggtcgactttca

SEQ ID NO: 430471 - DNA, 19 bp, Homo sapiens
  siRNA target sequence for LOC162427 (NM_178126.2,288-306).
cgcggctttctggtttttt

SEQ ID NO: 430472 - DNA, 19 bp, Homo sapiens
  siRNA target sequence for LOC162427 (NM_178126.2,337-355).
cttgcatttggcttgatga

SEQ ID NO: 430473 - DNA, 19 bp, Homo sapiens
  siRNA target sequence for LOC162427 (NM_178126.2,340-358).
gcatttggcttgatgatca

SEQ ID NO: 430474 - DNA, 19 bp, Homo sapiens
  siRNA target sequence for LOC162427 (NM_178126.2,341-359).
catttggcttgatgatcat

SEQ ID NO: 430475 - DNA, 19 bp, Homo sapiens
  siRNA target sequence for LOC162427 (NM_178126.2,357-375).
cattgtgtgtattgatcaa

SEQ ID NO: 430476 - DNA, 19 bp, Homo sapiens
  siRNA target sequence for LOC162427 (NM_178126.2,410-428).
caagacccgacgcattaga

SEQ ID NO: 430477 - DNA, 19 bp, Homo sapiens
  siRNA target sequence for LOC162427 (NM_178126.2,413-431).
gacccgacgcattagacaa

SEQ ID NO: 430478 - DNA, 19 bp, Homo sapiens
  siRNA target sequence for LOC162427 (NM_178126.2,416-434).
ccgacgcattagacaatga

SEQ ID NO: 430479 - DNA, 19 bp, Homo sapiens
  siRNA target sequence for LOC162427 (NM_178126.2,418-436).
gacgcattagacaatgaga

SEQ ID NO: 430480 - DNA, 19 bp, Homo sapiens
  siRNA target sequence for LOC162427 (NM_178126.2,511-529).
gggaccattttcataagga

SEQ ID NO: 430481 - DNA, 19 bp, Homo sapiens
  siRNA target sequence for LOC162427 (NM_178126.2,649-667).
cttgtcactgtcatgatgt

SEQ ID NO: 430482 - DNA, 19 bp, Homo sapiens
  siRNA target sequence for LOC162427 (NM_178126.2,725-743).
ctctgcagcggctagactt

SEQ ID NO: 430483 - DNA, 19 bp, Homo sapiens
  siRNA target sequence for LOC162427 (NM_178126.2,748-766).
gtccgtggctacatgatgt

SEQ ID NO: 430484 - DNA, 19 bp, Homo sapiens
  siRNA target sequence for LOC162427 (NM_178126.2,870-888).
gctggacgattctactgtt

SEQ ID NO: 430485 - DNA, 19 bp, Homo sapiens
  siRNA target sequence for LOC162427 (NM_178126.2,944-962).
cagacaatggcacattcaa

SEQ ID NO: 430486 - DNA, 19 bp, Homo sapiens
  siRNA target sequence for LOC162427 (NM_178126.2,1019-1037).
gtgatccagaggaatcctt

SEQ ID NO: 430487 - DNA, 19 bp, Homo sapiens
  siRNA target sequence for LOC162427 (NM_178126.2,1054-1072).
gacttcccttccattaata

SEQ ID NO: 430488 - DNA, 19 bp, Homo sapiens
  siRNA target sequence for LOC162427 (NM_178126.2,1114-1132).
ggcatgcccagcttgatgt

SEQ ID NO: 430489 - DNA, 19 bp, Homo sapiens
  siRNA target sequence for LOC162427 (NM_178126.2,1260-1278).
ggtctcccagggtatgatt

SEQ ID NO: 430490 - DNA, 19 bp, Homo sapiens
  siRNA target sequence for ANGPTL5 (NM_178127.2,620-638).
ctcactcttattcttaaat

SEQ ID NO: 430491 - DNA, 19 bp, Homo sapiens
  siRNA target sequence for ANGPTL5 (NM_178127.2,672-690).
ggtaactgtgtacatcatt

SEQ ID NO: 430492 - DNA, 19 bp, Homo sapiens
  siRNA target sequence for ANGPTL5 (NM_178127.2,694-712).
cggactcttcagtagttaa

SEQ ID NO: 430493 - DNA, 19 bp, Homo sapiens
  siRNA target sequence for ANGPTL5 (NM_178127.2,698-716).
ctcttcagtagttaacatt

SEQ ID NO: 430494 - DNA, 19 bp, Homo sapiens
  siRNA target sequence for ANGPTL5 (NM_178127.2,703-721).
cagtagttaacattgtaga

SEQ ID NO: 430495 - DNA, 19 bp, Homo sapiens
  siRNA target sequence for ANGPTL5 (NM_178127.2,720-738).
gaagatggatctaatgcaa

SEQ ID NO: 430496 - DNA, 19 bp, Homo sapiens
  siRNA target sequence for ANGPTL5 (NM_178127.2,785-803).
ggaatcatgtgatgttaaa

SEQ ID NO: 430497 - DNA, 19 bp, Homo sapiens
  siRNA target sequence for ANGPTL5 (NM_178127.2,786-804).
gaatcatgtgatgttaaaa

SEQ ID NO: 430498 - DNA, 19 bp, Homo sapiens
  siRNA target sequence for ANGPTL5 (NM_178127.2,795-813).
gatgttaaaactaaaatta

SEQ ID NO: 430499 - DNA, 19 bp, Homo sapiens
  siRNA target sequence for ANGPTL5 (NM_178127.2,836-854).
gtgtagaaatttgcaaaat

SEQ ID NO: 430500 - DNA, 19 bp, Homo sapiens
  siRNA target sequence for ANGPTL5 (NM_178127.2,861-879).
gtttcctacacaagaagta

SEQ ID NO: 430501 - DNA, 19 bp, Homo sapiens
  siRNA target sequence for ANGPTL5 (NM_178127.2,945-963).
gttaacgagctcatgaata

SEQ ID NO: 430502 - DNA, 19 bp, Homo sapiens
  siRNA target sequence for ANGPTL5 (NM_178127.2,1029-1047).
cagtcacatggtttagatt

SEQ ID NO: 430503 - DNA, 19 bp, Homo sapiens
  siRNA target sequence for ANGPTL5 (NM_178127.2,1038-1056).
ggtttagattgcactgata

SEQ ID NO: 430504 - DNA, 19 bp, Homo sapiens
  siRNA target sequence for ANGPTL5 (NM_178127.2,1039-1057).
gtttagattgcactgatat

SEQ ID NO: 430505 - DNA, 19 bp, Homo sapiens
  siRNA target sequence for ANGPTL5 (NM_178127.2,1087-1105).
caccgagtggtttatacat

SEQ ID NO: 430506 - DNA, 19 bp, Homo sapiens
  siRNA target sequence for ANGPTL5 (NM_178127.2,1089-1107).
ccgagtggtttatacataa

SEQ ID NO: 430507 - DNA, 19 bp, Homo sapiens
  siRNA target sequence for ANGPTL5 (NM_178127.2,1090-1108).
cgagtggtttatacataat

SEQ ID NO: 430508 - DNA, 19 bp, Homo sapiens
  siRNA target sequence for ANGPTL5 (NM_178127.2,1091-1109).
gagtggtttatacataatt

SEQ ID NO: 430509 - DNA, 19 bp, Homo sapiens
  siRNA target sequence for ANGPTL5 (NM_178127.2,1126-1144).
gctacccatttgaggtaat

SEQ ID NO: 430510 - DNA, 19 bp, Homo sapiens
  siRNA target sequence for ANGPTL5 (NM_178127.2,1145-1163).
gtgtgacatggattacaga

SEQ ID NO: 430511 - DNA, 19 bp, Homo sapiens
  siRNA target sequence for ANGPTL5 (NM_178127.2,1192-1210).
gaattgatgggataattga

SEQ ID NO: 430512 - DNA, 19 bp, Homo sapiens
  siRNA target sequence for ANGPTL5 (NM_178127.2,1219-1237).
ggttgtggtgtgattatct

SEQ ID NO: 430513 - DNA, 19 bp, Homo sapiens
  siRNA target sequence for ANGPTL5 (NM_178127.2,1270-1288).
ggctaggactgaaaaagat

SEQ ID NO: 430514 - DNA, 19 bp, Homo sapiens
  siRNA target sequence for ANGPTL5 (NM_178127.2,1305-1323).
cagaaaaataccagtttta

SEQ ID NO: 430515 - DNA, 19 bp, Homo sapiens
  siRNA target sequence for ANGPTL5 (NM_178127.2,1353-1371).
gacactcttgcttatgcat

SEQ ID NO: 430516 - DNA, 19 bp, Homo sapiens
  siRNA target sequence for ANGPTL5 (NM_178127.2,1368-1386).
gcatcatatgataattttt

SEQ ID NO: 430517 - DNA, 19 bp, Homo sapiens
  siRNA target sequence for ANGPTL5 (NM_178127.2,1418-1436).
gcacttaggacggtattca

SEQ ID NO: 430518 - DNA, 19 bp, Homo sapiens
  siRNA target sequence for ANGPTL5 (NM_178127.2,1502-1520).
cacatcagatgttgataat

SEQ ID NO: 430519 - DNA, 19 bp, Homo sapiens
  siRNA target sequence for ANGPTL5 (NM_178127.2,1504-1522).
catcagatgttgataatga

SEQ ID NO: 430520 - DNA, 19 bp, Homo sapiens
  siRNA target sequence for ANGPTL5 (NM_178127.2,1591-1609).
ccggctggtggtttaacga

SEQ ID NO: 430521 - DNA, 19 bp, Homo sapiens
  siRNA target sequence for ANGPTL5 (NM_178127.2,1607-1625).
cgagtgtggtctagcaaat

SEQ ID NO: 430522 - DNA, 19 bp, Homo sapiens
  siRNA target sequence for ANGPTL5 (NM_178127.2,1610-1628).
gtgtggtctagcaaatcta

SEQ ID NO: 430523 - DNA, 19 bp, Homo sapiens
  siRNA target sequence for ANGPTL5 (NM_178127.2,1638-1656).
catcacttctctggaaaat

SEQ ID NO: 430524 - DNA, 19 bp, Homo sapiens
  siRNA target sequence for ANGPTL5 (NM_178127.2,1659-1677).
cttgcaactggaattcaat

SEQ ID NO: 430525 - DNA, 19 bp, Homo sapiens
  siRNA target sequence for ANGPTL5 (NM_178127.2,1678-1696).
ggggcacgtggaccaaaaa

SEQ ID NO: 430526 - DNA, 19 bp, Homo sapiens
  siRNA target sequence for ANGPTL5 (NM_178127.2,1680-1698).
ggcacgtggaccaaaaaca

SEQ ID NO: 430527 - DNA, 19 bp, Homo sapiens
  siRNA target sequence for ANGPTL5 (NM_178127.2,1681-1699).
gcacgtggaccaaaaacaa

SEQ ID NO: 430528 - DNA, 19 bp, Homo sapiens
  siRNA target sequence for ANGPTL5 (NM_178127.2,1738-1756).
gaagaatgtacaatccata

SEQ ID NO: 430529 - DNA, 19 bp, Homo sapiens
  siRNA target sequence for OTOP2 (NM_178160.1,421-439).
gaatctgcaccctcatcat

SEQ ID NO: 430530 - DNA, 19 bp, Homo sapiens
  siRNA target sequence for OTOP2 (NM_178160.1,649-667).
ccgtggtggatgaatctgt

SEQ ID NO: 430531 - DNA, 19 bp, Homo sapiens
  siRNA target sequence for OTOP2 (NM_178160.1,778-796).
cggccgtctgccagatctt

SEQ ID NO: 430532 - DNA, 19 bp, Homo sapiens
  siRNA target sequence for OTOP2 (NM_178160.1,801-819).
caggggtacttctacctat

SEQ ID NO: 430533 - DNA, 19 bp, Homo sapiens
  siRNA target sequence for OTOP2 (NM_178160.1,803-821).
ggggtacttctacctatat

SEQ ID NO: 430534 - DNA, 19 bp, Homo sapiens
  siRNA target sequence for OTOP2 (NM_178160.1,1070-1088).
ctactacagcttcaacatt

SEQ ID NO: 430535 - DNA, 19 bp, Homo sapiens
  siRNA target sequence for OTOP2 (NM_178160.1,1119-1137).
ctgagcggctccatcatct

SEQ ID NO: 430536 - DNA, 19 bp, Homo sapiens
  siRNA target sequence for OTOP2 (NM_178160.1,1129-1147).
ccatcatctaccgttttga

SEQ ID NO: 430537 - DNA, 19 bp, Homo sapiens
  siRNA target sequence for OTOP2 (NM_178160.1,1221-1239).
ggtcagtacgccatctctt

SEQ ID NO: 430538 - DNA, 19 bp, Homo sapiens
  siRNA target sequence for OTOP2 (NM_178160.1,1222-1240).
gtcagtacgccatctctta

SEQ ID NO: 430539 - DNA, 19 bp, Homo sapiens
  siRNA target sequence for OTOP2 (NM_178160.1,1224-1242).
cagtacgccatctcttact

SEQ ID NO: 430540 - DNA, 19 bp, Homo sapiens
  siRNA target sequence for OTOP2 (NM_178160.1,1555-1573).
gacgccagtgcctaaaaga

SEQ ID NO: 430541 - DNA, 19 bp, Homo sapiens
  siRNA target sequence for OTOP2 (NM_178160.1,1557-1575).
cgccagtgcctaaaagaca

SEQ ID NO: 430542 - DNA, 19 bp, Homo sapiens
  siRNA target sequence for OTOP2 (NM_178160.1,1558-1576).
gccagtgcctaaaagacat

SEQ ID NO: 430543 - DNA, 19 bp, Homo sapiens
  siRNA target sequence for OTOP2 (NM_178160.1,1559-1577).
ccagtgcctaaaagacatt

SEQ ID NO: 430544 - DNA, 19 bp, Homo sapiens
  siRNA target sequence for OTOP2 (NM_178160.1,1587-1605).
ctcctactctgcaatgtca

SEQ ID NO: 430545 - DNA, 19 bp, Homo sapiens
  siRNA target sequence for OTOP2 (NM_178160.1,1589-1607).
cctactctgcaatgtcatt

SEQ ID NO: 430546 - DNA, 19 bp, Homo sapiens
  siRNA target sequence for PTF1A (NM_178161.1,34-52).
ggcctagacgcctttcctt

SEQ ID NO: 430547 - DNA, 19 bp, Homo sapiens
  siRNA target sequence for PTF1A (NM_178161.1,794-812).
cccccagcgaccctgatta

SEQ ID NO: 430548 - DNA, 19 bp, Homo sapiens
  siRNA target sequence for PTF1A (NM_178161.1,960-978).
cgaaccaccatttgagttt

SEQ ID NO: 430549 - DNA, 19 bp, Homo sapiens
  siRNA target sequence for LOC90850 (NM_178167.2,295-313).
catgagaagaaatatgata

SEQ ID NO: 430550 - DNA, 19 bp, Homo sapiens
  siRNA target sequence for LOC90850 (NM_178167.2,329-347).
gaaaggtgtacgcattgta

SEQ ID NO: 430551 - DNA, 19 bp, Homo sapiens
  siRNA target sequence for LOC90850 (NM_178167.2,571-589).
cacccgctctgcaagttct

SEQ ID NO: 430552 - DNA, 19 bp, Homo sapiens
  siRNA target sequence for LOC90850 (NM_178167.2,1221-1239).
caaggaaacctcgacaaat

SEQ ID NO: 430553 - DNA, 19 bp, Homo sapiens
  siRNA target sequence for LOC90850 (NM_178167.2,1224-1242).
ggaaacctcgacaaatggt

SEQ ID NO: 430554 - DNA, 19 bp, Homo sapiens
  siRNA target sequence for LOC90850 (NM_178167.2,1755-1773).
ctccatccaaccctctaaa

SEQ ID NO: 430555 - DNA, 19 bp, Homo sapiens
  siRNA target sequence for LOC90850 (NM_178167.2,1757-1775).
ccatccaaccctctaaagt

SEQ ID NO: 430556 - DNA, 19 bp, Homo sapiens
  siRNA target sequence for LOC90850 (NM_178167.2,1758-1776).
catccaaccctctaaagtt

SEQ ID NO: 430557 - DNA, 19 bp, Homo sapiens
  siRNA target sequence for LOC90850 (NM_178167.2,1769-1787).
ctaaagttgggaagaagaa

SEQ ID NO: 430558 - DNA, 19 bp, Homo sapiens
  siRNA target sequence for LOC90850 (NM_178167.2,1898-1916).
cagttgccgtcgtcgttaa

SEQ ID NO: 430559 - DNA, 19 bp, Homo sapiens
  siRNA target sequence for LOC90850 (NM_178167.2,2387-2405).
ccgcagcccagtattacaa

SEQ ID NO: 430560 - DNA, 19 bp, Homo sapiens
  siRNA target sequence for GSDM (NM_178171.2,781-799).
ccacatatctgcaatgata

SEQ ID NO: 430561 - DNA, 19 bp, Homo sapiens
  siRNA target sequence for GSDM (NM_178171.2,887-905).
gcttcaggacactaaaaga

SEQ ID NO: 430562 - DNA, 19 bp, Homo sapiens
  siRNA target sequence for GSDM (NM_178171.2,888-906).
cttcaggacactaaaagaa

SEQ ID NO: 430563 - DNA, 19 bp, Homo sapiens
  siRNA target sequence for GSDM (NM_178171.2,972-990).
ctccctcagcaaacttcta

SEQ ID NO: 430564 - DNA, 19 bp, Homo sapiens
  siRNA target sequence for GSDM (NM_178171.2,1014-1032).
ccttgagctcgcacttgaa

SEQ ID NO: 430565 - DNA, 19 bp, Homo sapiens
  siRNA target sequence for GSDM (NM_178171.2,1110-1128).
cgccatcctctatttcgtt

SEQ ID NO: 430566 - DNA, 19 bp, Homo sapiens
  siRNA target sequence for GSDM (NM_178171.2,1133-1151).
ccctaacagagctaagtga

SEQ ID NO: 430567 - DNA, 19 bp, Homo sapiens
  siRNA target sequence for LOC339834 (NM_178173.2,453-471).
gtcatccaactggaataat

SEQ ID NO: 430568 - DNA, 19 bp, Homo sapiens
  siRNA target sequence for LOC339834 (NM_178173.2,455-473).
catccaactggaataataa

SEQ ID NO: 430569 - DNA, 19 bp, Homo sapiens
  siRNA target sequence for LOC339834 (NM_178173.2,458-476).
ccaactggaataataatca

SEQ ID NO: 430570 - DNA, 19 bp, Homo sapiens
  siRNA target sequence for LOC339834 (NM_178173.2,464-482).
ggaataataatcaaaatga

SEQ ID NO: 430571 - DNA, 19 bp, Homo sapiens
  siRNA target sequence for LOC339834 (NM_178173.2,525-543).
gttctgtccagaaaattca

SEQ ID NO: 430572 - DNA, 19 bp, Homo sapiens
  siRNA target sequence for LOC339834 (NM_178173.2,574-592).
gcccacttgagacattcaa

SEQ ID NO: 430573 - DNA, 19 bp, Homo sapiens
  siRNA target sequence for LOC339834 (NM_178173.2,575-593).
cccacttgagacattcaaa

SEQ ID NO: 430574 - DNA, 19 bp, Homo sapiens
  siRNA target sequence for LOC339834 (NM_178173.2,615-633).
ggagggtgaacctagcatt

SEQ ID NO: 430575 - DNA, 19 bp, Homo sapiens
  siRNA target sequence for LOC339834 (NM_178173.2,619-637).
ggtgaacctagcattttca

SEQ ID NO: 430576 - DNA, 19 bp, Homo sapiens
  siRNA target sequence for LOC339834 (NM_178173.2,660-678).
gctgttcggaggagatata

SEQ ID NO: 430577 - DNA, 19 bp, Homo sapiens
  siRNA target sequence for LOC339834 (NM_178173.2,661-679).
ctgttcggaggagatataa

SEQ ID NO: 430578 - DNA, 19 bp, Homo sapiens
  siRNA target sequence for LOC339834 (NM_178173.2,703-721).
cctttgtcagttggaaaat

SEQ ID NO: 430579 - DNA, 19 bp, Homo sapiens
  siRNA target sequence for LOC339834 (NM_178173.2,728-746).
gcctcttggaacagtttga

SEQ ID NO: 430580 - DNA, 19 bp, Homo sapiens
  siRNA target sequence for LOC339834 (NM_178173.2,811-829).
gttagagaaagcattctca

SEQ ID NO: 430581 - DNA, 19 bp, Homo sapiens
  siRNA target sequence for LOC339834 (NM_178173.2,835-853).
cagacgtctgtggaaaagt

SEQ ID NO: 430582 - DNA, 19 bp, Homo sapiens
  siRNA target sequence for LOC339834 (NM_178173.2,856-874).
gaggaccatctcagttcaa

SEQ ID NO: 430583 - DNA, 19 bp, Homo sapiens
  siRNA target sequence for LOC339834 (NM_178173.2,858-876).
ggaccatctcagttcaaga

SEQ ID NO: 430584 - DNA, 19 bp, Homo sapiens
  siRNA target sequence for LOC339834 (NM_178173.2,915-933).
gacattacaagagactata

SEQ ID NO: 430585 - DNA, 19 bp, Homo sapiens
  siRNA target sequence for LOC339834 (NM_178173.2,917-935).
cattacaagagactataca

SEQ ID NO: 430586 - DNA, 19 bp, Homo sapiens
  siRNA target sequence for LOC339834 (NM_178173.2,1021-1039).
gctagacaaggagagttta

SEQ ID NO: 430587 - DNA, 19 bp, Homo sapiens
  siRNA target sequence for LOC339834 (NM_178173.2,1022-1040).
ctagacaaggagagtttat

SEQ ID NO: 430588 - DNA, 19 bp, Homo sapiens
  siRNA target sequence for LOC339834 (NM_178173.2,1059-1077).
gaagcaccttgaagtttta

SEQ ID NO: 430589 - DNA, 19 bp, Homo sapiens
  siRNA target sequence for LOC339834 (NM_178173.2,1062-1080).
gcaccttgaagttttagtt

SEQ ID NO: 430590 - DNA, 19 bp, Homo sapiens
  siRNA target sequence for LOC339834 (NM_178173.2,1172-1190).
cagtgcctccagtgaaaga

SEQ ID NO: 430591 - DNA, 19 bp, Homo sapiens
  siRNA target sequence for LOC339834 (NM_178173.2,1358-1376).
gagcaaagaatgatgatct

SEQ ID NO: 430592 - DNA, 19 bp, Homo sapiens
  siRNA target sequence for LOC339834 (NM_178173.2,1461-1479).
gaactgggctgttactaaa

SEQ ID NO: 430593 - DNA, 19 bp, Homo sapiens
  siRNA target sequence for LOC339834 (NM_178173.2,1464-1482).
ctgggctgttactaaaaca

SEQ ID NO: 430594 - DNA, 19 bp, Homo sapiens
  siRNA target sequence for LOC339834 (NM_178173.2,1505-1523).
gcgtcccaggccataagat

SEQ ID NO: 430595 - DNA, 19 bp, Homo sapiens
  siRNA target sequence for LOC339834 (NM_178173.2,1602-1620).
gaatgcctgccaaaaatat

SEQ ID NO: 430596 - DNA, 19 bp, Homo sapiens
  siRNA target sequence for LOC339834 (NM_178173.2,1641-1659).
gtgtgacccacgtgaacat

SEQ ID NO: 430597 - DNA, 19 bp, Homo sapiens
  siRNA target sequence for LOC339834 (NM_178173.2,1643-1661).
gtgacccacgtgaacattt

SEQ ID NO: 430598 - DNA, 19 bp, Homo sapiens
  siRNA target sequence for LOC339834 (NM_178173.2,1651-1669).
cgtgaacatttggtgatta

SEQ ID NO: 430599 - DNA, 19 bp, Homo sapiens
  siRNA target sequence for LOC339834 (NM_178173.2,1657-1675).
catttggtgattaaacaga

SEQ ID NO: 430600 - DNA, 19 bp, Homo sapiens
  siRNA target sequence for LOC339834 (NM_178173.2,1780-1798).
ccaatccagacctgtaaat

SEQ ID NO: 430601 - DNA, 19 bp, Homo sapiens
  siRNA target sequence for LOC339834 (NM_178173.2,1815-1833).
gagtcctcagcctgcaatt

SEQ ID NO: 430602 - DNA, 19 bp, Homo sapiens
  siRNA target sequence for LOC339834 (NM_178173.2,1940-1958).
gaacagtcatgcccaataa

SEQ ID NO: 430603 - DNA, 19 bp, Homo sapiens
  siRNA target sequence for LOC339834 (NM_178173.2,2000-2018).
ggtgctcttcccaagacaa

SEQ ID NO: 430604 - DNA, 19 bp, Homo sapiens
  siRNA target sequence for LOC339834 (NM_178173.2,2117-2135).
gaaagaatttgctctatga

SEQ ID NO: 430605 - DNA, 19 bp, Homo sapiens
  siRNA target sequence for TREML1 (NM_178174.2,264-282).
ggcaggcgtacgtttctca

SEQ ID NO: 430606 - DNA, 19 bp, Homo sapiens
  siRNA target sequence for TREML1 (NM_178174.2,303-321).
ctgcaggtggaaatggtta

SEQ ID NO: 430607 - DNA, 19 bp, Homo sapiens
  siRNA target sequence for TREML1 (NM_178174.2,392-410).
cagagtctctctgaacata

SEQ ID NO: 430608 - DNA, 19 bp, Homo sapiens
  siRNA target sequence for TREML1 (NM_178174.2,394-412).
gagtctctctgaacatact

SEQ ID NO: 430609 - DNA, 19 bp, Homo sapiens
  siRNA target sequence for TREML1 (NM_178174.2,650-668).
cagagtttcaggcatgaat

SEQ ID NO: 430610 - DNA, 19 bp, Homo sapiens
  siRNA target sequence for TREML1 (NM_178174.2,879-897).
gtgacatatgccacagtaa

SEQ ID NO: 430611 - DNA, 19 bp, Homo sapiens
  siRNA target sequence for TREML1 (NM_178174.2,883-901).
catatgccacagtaatctt

SEQ ID NO: 430612 - DNA, 19 bp, Homo sapiens
  siRNA target sequence for TREML1 (NM_178174.2,943-961).
cccagaatccacctaacaa

SEQ ID NO: 430613 - DNA, 19 bp, Homo sapiens
  siRNA target sequence for LHFPL1 (NM_178175.2,279-297).
cttcctgtcccttgttact

SEQ ID NO: 430614 - DNA, 19 bp, Homo sapiens
  siRNA target sequence for LHFPL1 (NM_178175.2,314-332).
ccagttacttcctacctta

SEQ ID NO: 430615 - DNA, 19 bp, Homo sapiens
  siRNA target sequence for LHFPL1 (NM_178175.2,444-462).
gcgctatgccagcttcaat

SEQ ID NO: 430616 - DNA, 19 bp, Homo sapiens
  siRNA target sequence for LHFPL1 (NM_178175.2,600-618).
gggagcagcgcagtttgtt

SEQ ID NO: 430617 - DNA, 19 bp, Homo sapiens
  siRNA target sequence for LHFPL1 (NM_178175.2,646-664).
gccttataccctttaggat

SEQ ID NO: 430618 - DNA, 19 bp, Homo sapiens
  siRNA target sequence for LHFPL1 (NM_178175.2,665-683).
ggaatagcccggagataat

SEQ ID NO: 430619 - DNA, 19 bp, Homo sapiens
  siRNA target sequence for LHFPL1 (NM_178175.2,700-718).
gtctccaatcaatttcagt

SEQ ID NO: 430620 - DNA, 19 bp, Homo sapiens
  siRNA target sequence for LHFPL1 (NM_178175.2,702-720).
ctccaatcaatttcagtta

SEQ ID NO: 430621 - DNA, 19 bp, Homo sapiens
  siRNA target sequence for LHFPL1 (NM_178175.2,733-751).
cttggctgggcctattact

SEQ ID NO: 430622 - DNA, 19 bp, Homo sapiens
  siRNA target sequence for LHFPL1 (NM_178175.2,852-870).
gaggaataccaattcttat

SEQ ID NO: 430623 - DNA, 19 bp, Homo sapiens
  siRNA target sequence for LHFPL1 (NM_178175.2,883-901).
gaccattgcctcaaacctt

SEQ ID NO: 430624 - DNA, 19 bp, Homo sapiens
  siRNA target sequence for ALS2CR14 (NM_178231.1,606-624).
ctcaatggtatgaaatcat

SEQ ID NO: 430625 - DNA, 19 bp, Homo sapiens
  siRNA target sequence for OTOP3 (NM_178233.1,301-319).
ctgggtggcgccttcatct

SEQ ID NO: 430626 - DNA, 19 bp, Homo sapiens
  siRNA target sequence for OTOP3 (NM_178233.1,399-417).
gctttggcttctctactat

SEQ ID NO: 430627 - DNA, 19 bp, Homo sapiens
  siRNA target sequence for OTOP3 (NM_178233.1,728-746).
gggttctggccgttaccaa

SEQ ID NO: 430628 - DNA, 19 bp, Homo sapiens
  siRNA target sequence for OTOP3 (NM_178233.1,733-751).
ctggccgttaccaatgact

SEQ ID NO: 430629 - DNA, 19 bp, Homo sapiens
  siRNA target sequence for OTOP3 (NM_178233.1,781-799).
ggcatcctcatggaaaaat

SEQ ID NO: 430630 - DNA, 19 bp, Homo sapiens
  siRNA target sequence for OTOP3 (NM_178233.1,839-857).
ccaccgcgtgtgaagcttt

SEQ ID NO: 430631 - DNA, 19 bp, Homo sapiens
  siRNA target sequence for OTOP3 (NM_178233.1,1049-1067).
caggtgtgtgcgtctttgt

SEQ ID NO: 430632 - DNA, 19 bp, Homo sapiens
  siRNA target sequence for OTOP3 (NM_178233.1,1097-1115).
ccattgcttgccagtactt

SEQ ID NO: 430633 - DNA, 19 bp, Homo sapiens
  siRNA target sequence for OTOP3 (NM_178233.1,1110-1128).
gtacttcaccctctactat

SEQ ID NO: 430634 - DNA, 19 bp, Homo sapiens
  siRNA target sequence for OTOP3 (NM_178233.1,1119-1137).
cctctactatgccttctat

SEQ ID NO: 430635 - DNA, 19 bp, Homo sapiens
  siRNA target sequence for OTOP3 (NM_178233.1,1387-1405).
gctcagaacctcttcatca

SEQ ID NO: 430636 - DNA, 19 bp, Homo sapiens
  siRNA target sequence for OTOP3 (NM_178233.1,1602-1620).
catcctctgcaatatcaca

SEQ ID NO: 430637 - DNA, 19 bp, Homo sapiens
  siRNA target sequence for OTOP3 (NM_178233.1,1643-1661).
gcatacacccggagtttga

SEQ ID NO: 430638 - DNA, 19 bp, Homo sapiens
  siRNA target sequence for OTOP3 (NM_178233.1,1700-1718).
ggttcgccatcgtcaactt

SEQ ID NO: 430639 - DNA, 19 bp, Homo sapiens
  siRNA target sequence for URB (NM_178274.2,193-211).
gctagtgtgtggatcagaa

SEQ ID NO: 430640 - DNA, 19 bp, Homo sapiens
  siRNA target sequence for URB (NM_178274.2,214-232).
ccacccccatgccactatt

SEQ ID NO: 430641 - DNA, 19 bp, Homo sapiens
  siRNA target sequence for URB (NM_178274.2,215-233).
cacccccatgccactatta

SEQ ID NO: 430642 - DNA, 19 bp, Homo sapiens
  siRNA target sequence for URB (NM_178274.2,217-235).
cccccatgccactattaga

SEQ ID NO: 430643 - DNA, 19 bp, Homo sapiens
  siRNA target sequence for URB (NM_178274.2,312-330).
ggaggtctcgcggaattga

SEQ ID NO: 430644 - DNA, 19 bp, Homo sapiens
  siRNA target sequence for URB (NM_178274.2,336-354).
ccactctggaggaaccaaa

SEQ ID NO: 430645 - DNA, 19 bp, Homo sapiens
  siRNA target sequence for URB (NM_178274.2,420-438).
cagcccgctcggacatcaa

SEQ ID NO: 430646 - DNA, 19 bp, Homo sapiens
  siRNA target sequence for URB (NM_178274.2,480-498).
gctctccgcgtgagatgat

SEQ ID NO: 430647 - DNA, 19 bp, Homo sapiens
  siRNA target sequence for URB (NM_178274.2,630-648).
gctactaccgcctcatgat

SEQ ID NO: 430648 - DNA, 19 bp, Homo sapiens
  siRNA target sequence for URB (NM_178274.2,688-706).
gaggcacatccaacagatt

SEQ ID NO: 430649 - DNA, 19 bp, Homo sapiens
  siRNA target sequence for URB (NM_178274.2,875-893).
gtggaggagcgctatccat

SEQ ID NO: 430650 - DNA, 19 bp, Homo sapiens
  siRNA target sequence for URB (NM_178274.2,877-895).
ggaggagcgctatccatat

SEQ ID NO: 430651 - DNA, 19 bp, Homo sapiens
  siRNA target sequence for URB (NM_178274.2,944-962).
cgtaggatcgagaagatca

SEQ ID NO: 430652 - DNA, 19 bp, Homo sapiens
  siRNA target sequence for URB (NM_178274.2,971-989).
ggctttgtccagaaatgta

SEQ ID NO: 430653 - DNA, 19 bp, Homo sapiens
  siRNA target sequence for URB (NM_178274.2,1633-1651).
ggcccaggacaaaattctt

SEQ ID NO: 430654 - DNA, 19 bp, Homo sapiens
  siRNA target sequence for URB (NM_178274.2,1636-1654).
ccaggacaaaattcttagt

SEQ ID NO: 430655 - DNA, 19 bp, Homo sapiens
  siRNA target sequence for URB (NM_178274.2,1639-1657).
ggacaaaattcttagtaat

SEQ ID NO: 430656 - DNA, 19 bp, Homo sapiens
  siRNA target sequence for URB (NM_178274.2,1724-1742).
gggaatgttccccttaaaa

SEQ ID NO: 430657 - DNA, 19 bp, Homo sapiens
  siRNA target sequence for URB (NM_178274.2,2036-2054).
cccaaggctgagaacaata

SEQ ID NO: 430658 - DNA, 19 bp, Homo sapiens
  siRNA target sequence for URB (NM_178274.2,2043-2061).
ctgagaacaatatgtatgt

SEQ ID NO: 430659 - DNA, 19 bp, Homo sapiens
  siRNA target sequence for URB (NM_178274.2,2060-2078).
gtgcaacaacgtgatgaat

SEQ ID NO: 430660 - DNA, 19 bp, Homo sapiens
  siRNA target sequence for URB (NM_178274.2,2062-2080).
gcaacaacgtgatgaatat

SEQ ID NO: 430661 - DNA, 19 bp, Homo sapiens
  siRNA target sequence for URB (NM_178274.2,2101-2119).
ggctaccaggaaaatctct

SEQ ID NO: 430662 - DNA, 19 bp, Homo sapiens
  siRNA target sequence for URB (NM_178274.2,2165-2183).
gaccactttcagctagata

SEQ ID NO: 430663 - DNA, 19 bp, Homo sapiens
  siRNA target sequence for URB (NM_178274.2,2167-2185).
ccactttcagctagataat

SEQ ID NO: 430664 - DNA, 19 bp, Homo sapiens
  siRNA target sequence for URB (NM_178274.2,2241-2259).
gcgagctgaggaaagagta

SEQ ID NO: 430665 - DNA, 19 bp, Homo sapiens
  siRNA target sequence for URB (NM_178274.2,2257-2275).
gtacggaatgacctacaat

SEQ ID NO: 430666 - DNA, 19 bp, Homo sapiens
  siRNA target sequence for URB (NM_178274.2,2261-2279).
ggaatgacctacaatgact

SEQ ID NO: 430667 - DNA, 19 bp, Homo sapiens
  siRNA target sequence for URB (NM_178274.2,2262-2280).
gaatgacctacaatgactt

SEQ ID NO: 430668 - DNA, 19 bp, Homo sapiens
  siRNA target sequence for URB (NM_178274.2,2281-2299).
cttcatggtgctaacagat

SEQ ID NO: 430669 - DNA, 19 bp, Homo sapiens
  siRNA target sequence for URB (NM_178274.2,2303-2321).
gatctgagagtcaagcaat

SEQ ID NO: 430670 - DNA, 19 bp, Homo sapiens
  siRNA target sequence for URB (NM_178274.2,2306-2324).
ctgagagtcaagcaatact

SEQ ID NO: 430671 - DNA, 19 bp, Homo sapiens
  siRNA target sequence for URB (NM_178274.2,2308-2326).
gagagtcaagcaatactat

SEQ ID NO: 430672 - DNA, 19 bp, Homo sapiens
  siRNA target sequence for URB (NM_178274.2,2327-2345).
gaggtaccaataacaatga

SEQ ID NO: 430673 - DNA, 19 bp, Homo sapiens
  siRNA target sequence for URB (NM_178274.2,2340-2358).
caatgaagtctgtgtttga

SEQ ID NO: 430674 - DNA, 19 bp, Homo sapiens
  siRNA target sequence for URB (NM_178274.2,2351-2369).
gtgtttgatctgatcgata

SEQ ID NO: 430675 - DNA, 19 bp, Homo sapiens
  siRNA target sequence for URB (NM_178274.2,2379-2397).
cccgaatcaaagatatgga

SEQ ID NO: 430676 - DNA, 19 bp, Homo sapiens
  siRNA target sequence for URB (NM_178274.2,2570-2588).
ggtctgcgccacataacca

SEQ ID NO: 430677 - DNA, 19 bp, Homo sapiens
  siRNA target sequence for URB (NM_178274.2,2576-2594).
cgccacataaccattctga

SEQ ID NO: 430678 - DNA, 19 bp, Homo sapiens
  siRNA target sequence for URB (NM_178274.2,2695-2713).
gaaagacattcgtaactat

SEQ ID NO: 430679 - DNA, 19 bp, Homo sapiens
  siRNA target sequence for URB (NM_178274.2,2701-2719).
cattcgtaactattttcaa

SEQ ID NO: 430680 - DNA, 19 bp, Homo sapiens
  siRNA target sequence for URB (NM_178274.2,2759-2777).
gacggaaatgtcaaatcct

SEQ ID NO: 430681 - DNA, 19 bp, Homo sapiens
  siRNA target sequence for URB (NM_178274.2,2875-2893).
gatgcgctgcccagaagat

SEQ ID NO: 430682 - DNA, 19 bp, Homo sapiens
  siRNA target sequence for URB (NM_178274.2,2881-2899).
ctgcccagaagatgagtat

SEQ ID NO: 430683 - DNA, 19 bp, Homo sapiens
  siRNA target sequence for URB (NM_178274.2,2900-2918).
gcaggctatggttaccata

SEQ ID NO: 430684 - DNA, 19 bp, Homo sapiens
  siRNA target sequence for URB (NM_178274.2,2903-2921).
ggctatggttaccatagtt

SEQ ID NO: 430685 - DNA, 19 bp, Homo sapiens
  siRNA target sequence for DKFZp434B1231 (NM_178275.3,883-901).
cggcaggttggacatctat

SEQ ID NO: 430686 - DNA, 19 bp, Homo sapiens
  siRNA target sequence for DKFZp434B1231 (NM_178275.3,1113-1131).
cccaggatggagtcatctt

SEQ ID NO: 430687 - DNA, 19 bp, Homo sapiens
  siRNA target sequence for DKFZp434B1231 (NM_178275.3,1243-1261).
ccaggattcccctaccatt

SEQ ID NO: 430688 - DNA, 19 bp, Homo sapiens
  siRNA target sequence for DKFZp434B1231 (NM_178275.3,1310-1328).
gggaagccggtgatagtga

SEQ ID NO: 430689 - DNA, 19 bp, Homo sapiens
  siRNA target sequence for DKFZp434B1231 (NM_178275.3,1311-1329).
ggaagccggtgatagtgaa

SEQ ID NO: 430690 - DNA, 19 bp, Homo sapiens
  siRNA target sequence for DKFZp434B1231 (NM_178275.3,1755-1773).
caggcaggaagtatacctt

SEQ ID NO: 430691 - DNA, 19 bp, Homo sapiens
  siRNA target sequence for DKFZp434B1231 (NM_178275.3,2047-2065).
gcggcagggctgtcagtat

SEQ ID NO: 430692 - DNA, 19 bp, Homo sapiens
  siRNA target sequence for DKFZp434B1231 (NM_178275.3,2049-2067).
ggcagggctgtcagtatga

SEQ ID NO: 430693 - DNA, 19 bp, Homo sapiens
  siRNA target sequence for DKFZp434B1231 (NM_178275.3,2374-2392).
gcgggtgacagcagttaat

SEQ ID NO: 430694 - DNA, 19 bp, Homo sapiens
  siRNA target sequence for DKFZp434B1231 (NM_178275.3,2376-2394).
gggtgacagcagttaatga

SEQ ID NO: 430695 - DNA, 19 bp, Homo sapiens
  siRNA target sequence for DKFZp434B1231 (NM_178275.3,2584-2602).
gcccttgcccaaaagaagt

SEQ ID NO: 430696 - DNA, 19 bp, Homo sapiens
  siRNA target sequence for DKFZp434B1231 (NM_178275.3,2598-2616).
gaagtgtgactgtcactaa

SEQ ID NO: 430697 - DNA, 19 bp, Homo sapiens
  siRNA target sequence for DKFZp434B1231 (NM_178275.3,3182-3200).
cacgtcacctggttcaaga

SEQ ID NO: 430698 - DNA, 19 bp, Homo sapiens
  siRNA target sequence for DKFZp434B1231 (NM_178275.3,3349-3367).
caccctcattgtcatagaa

SEQ ID NO: 430699 - DNA, 19 bp, Homo sapiens
  siRNA target sequence for FLJ39378 (NM_178314.2,1133-1151).
gcatcaagcgactgatctt

SEQ ID NO: 430700 - DNA, 19 bp, Homo sapiens
  siRNA target sequence for FLJ39378 (NM_178314.2,1171-1189).
gtagcagcgggactgataa

SEQ ID NO: 430701 - DNA, 19 bp, Homo sapiens
  siRNA target sequence for FLJ39378 (NM_178314.2,1175-1193).
cagcgggactgataataga

SEQ ID NO: 430702 - DNA, 19 bp, Homo sapiens
  siRNA target sequence for FLJ39378 (NM_178314.2,1178-1196).
cgggactgataatagatga

SEQ ID NO: 430703 - DNA, 19 bp, Homo sapiens
  siRNA target sequence for FLJ39378 (NM_178314.2,1209-1227).
gcctgtccgacgacttgtt

SEQ ID NO: 430704 - DNA, 19 bp, Homo sapiens
  siRNA target sequence for FLJ39378 (NM_178314.2,1210-1228).
cctgtccgacgacttgttt

SEQ ID NO: 430705 - DNA, 19 bp, Homo sapiens
  siRNA target sequence for FLJ39582 (NM_178315.2,279-297).
cgaaagaacccgacaaaaa

SEQ ID NO: 430706 - DNA, 19 bp, Homo sapiens
  siRNA target sequence for FLJ39582 (NM_178315.2,359-377).
ggaatctctcaaagtacaa

SEQ ID NO: 430707 - DNA, 19 bp, Homo sapiens
  siRNA target sequence for FLJ39582 (NM_178315.2,389-407).
gacagtatcgcaatacaga

SEQ ID NO: 430708 - DNA, 19 bp, Homo sapiens
  siRNA target sequence for FLJ39582 (NM_178315.2,391-409).
cagtatcgcaatacagaaa

SEQ ID NO: 430709 - DNA, 19 bp, Homo sapiens
  siRNA target sequence for FLJ39582 (NM_178315.2,393-411).
gtatcgcaatacagaaatt

SEQ ID NO: 430710 - DNA, 19 bp, Homo sapiens
  siRNA target sequence for FLJ39582 (NM_178315.2,594-612).
caatacggaaattttaata

SEQ ID NO: 430711 - DNA, 19 bp, Homo sapiens
  siRNA target sequence for MRPL52 (NM_178336.1,161-179).
gctcccagactggtcatat

SEQ ID NO: 430712 - DNA, 19 bp, Homo sapiens
  siRNA target sequence for MRPL52 (NM_178336.1,242-260).
gtttgcaagacgagttgta

SEQ ID NO: 430713 - DNA, 19 bp, Homo sapiens
  siRNA target sequence for MRPL52 (NM_178336.1,377-395).
gagcccacttccaagtcaa

SEQ ID NO: 430714 - DNA, 19 bp, Homo sapiens
  siRNA target sequence for APRG1 (NM_178338.2,1027-1045).
gcccagaatttgaaaatgt

SEQ ID NO: 430715 - DNA, 19 bp, Homo sapiens
  siRNA target sequence for APRG1 (NM_178339.1,1199-1217).
gacccaaggtaagaaaact

SEQ ID NO: 430716 - DNA, 19 bp, Homo sapiens
  siRNA target sequence for APRG1 (NM_178339.1,1310-1328).
cttctcacgtggaatcaca

SEQ ID NO: 430717 - DNA, 19 bp, Homo sapiens
  siRNA target sequence for APRG1 (NM_178339.1,1387-1405).
gggatgcctggaaaacaaa

SEQ ID NO: 430718 - DNA, 19 bp, Homo sapiens
  siRNA target sequence for APRG1 (NM_178339.1,1456-1474).
ccatcctgattctagaatt

SEQ ID NO: 430719 - DNA, 19 bp, Homo sapiens
  siRNA target sequence for APRG1 (NM_178340.1,815-833).
gagctgctggatcaagtat

SEQ ID NO: 430720 - DNA, 19 bp, Homo sapiens
  siRNA target sequence for APRG1 (NM_178340.1,817-835).
gctgctggatcaagtatca

SEQ ID NO: 430721 - DNA, 19 bp, Homo sapiens
  siRNA target sequence for APRG1 (NM_178340.1,1016-1034).
cttggttcctgggatagaa

SEQ ID NO: 430722 - DNA, 19 bp, Homo sapiens
  siRNA target sequence for APRG1 (NM_178340.1,1059-1077).
gttcaatccaacatcctta

SEQ ID NO: 430723 - DNA, 19 bp, Homo sapiens
  siRNA target sequence for APRG1 (NM_178340.1,1062-1080).
caatccaacatccttatat

SEQ ID NO: 430724 - DNA, 19 bp, Homo sapiens
  siRNA target sequence for APRG1 (NM_178340.1,1067-1085).
caacatccttatattgcaa

SEQ ID NO: 430725 - DNA, 19 bp, Homo sapiens
  siRNA target sequence for APRG1 (NM_178342.1,789-807).
ggacccaaggtgattgcat

SEQ ID NO: 430726 - DNA, 19 bp, Homo sapiens
  siRNA target sequence for APRG1 (NM_178342.1,808-826).
gctggtgtctttagctaaa

SEQ ID NO: 430727 - DNA, 19 bp, Homo sapiens
  siRNA target sequence for APRG1 (NM_178342.1,811-829).
ggtgtctttagctaaaaat

SEQ ID NO: 430728 - DNA, 19 bp, Homo sapiens
  siRNA target sequence for APRG1 (NM_178342.1,839-857).
gtctttggggcaatcataa

SEQ ID NO: 430729 - DNA, 19 bp, Homo sapiens
  siRNA target sequence for ZMYND17 (NM_178451.2,312-330).
ccgtatcaggctttggatt

SEQ ID NO: 430730 - DNA, 19 bp, Homo sapiens
  siRNA target sequence for ZMYND17 (NM_178451.2,313-331).
cgtatcaggctttggattt

SEQ ID NO: 430731 - DNA, 19 bp, Homo sapiens
  siRNA target sequence for ZMYND17 (NM_178451.2,358-376).
gatggaagacacatttcga

SEQ ID NO: 430732 - DNA, 19 bp, Homo sapiens
  siRNA target sequence for ZMYND17 (NM_178451.2,425-443).
gttctccggcactgtaaga

SEQ ID NO: 430733 - DNA, 19 bp, Homo sapiens
  siRNA target sequence for ZMYND17 (NM_178451.2,442-460).
gaggtgcagaaatgtctat

SEQ ID NO: 430734 - DNA, 19 bp, Homo sapiens
  siRNA target sequence for ZMYND17 (NM_178451.2,536-554).
gtggaccgtctcatggaat

SEQ ID NO: 430735 - DNA, 19 bp, Homo sapiens
  siRNA target sequence for ZMYND17 (NM_178451.2,692-710).
ggcattccatccaggtttt

SEQ ID NO: 430736 - DNA, 19 bp, Homo sapiens
  siRNA target sequence for ZMYND17 (NM_178451.2,752-770).
gctgctacttcgtgactat

SEQ ID NO: 430737 - DNA, 19 bp, Homo sapiens
  siRNA target sequence for ZMYND17 (NM_178451.2,753-771).
ctgctacttcgtgactata

SEQ ID NO: 430738 - DNA, 19 bp, Homo sapiens
  siRNA target sequence for ZMYND17 (NM_178451.2,762-780).
cgtgactataagattccta

SEQ ID NO: 430739 - DNA, 19 bp, Homo sapiens
  siRNA target sequence for ZMYND17 (NM_178451.2,859-877).
cctttgggtctaatccttt

SEQ ID NO: 430740 - DNA, 19 bp, Homo sapiens
  siRNA target sequence for ZMYND17 (NM_178451.2,864-882).
gggtctaatcctttcatgt

SEQ ID NO: 430741 - DNA, 19 bp, Homo sapiens
  siRNA target sequence for ZMYND17 (NM_178451.2,891-909).
cctgaacaggtctattcca

SEQ ID NO: 430742 - DNA, 19 bp, Homo sapiens
  siRNA target sequence for ZMYND17 (NM_178451.2,934-952).
gcagtgcatactatatcat

SEQ ID NO: 430743 - DNA, 19 bp, Homo sapiens
  siRNA target sequence for ZMYND17 (NM_178451.2,937-955).
gtgcatactatatcatgtt

SEQ ID NO: 430744 - DNA, 19 bp, Homo sapiens
  siRNA target sequence for ZMYND17 (NM_178451.2,974-992).
gctggataataggcaatta

SEQ ID NO: 430745 - DNA, 19 bp, Homo sapiens
  siRNA target sequence for LOC123872 (NM_178452.3,414-432).
gcaagcagcacaagcttta

SEQ ID NO: 430746 - DNA, 19 bp, Homo sapiens
  siRNA target sequence for LOC123872 (NM_178452.3,452-470).
gatacgctgtatttacact

SEQ ID NO: 430747 - DNA, 19 bp, Homo sapiens
  siRNA target sequence for LOC123872 (NM_178452.3,476-494).
ggttttgatcgcattgaga

SEQ ID NO: 430748 - DNA, 19 bp, Homo sapiens
  siRNA target sequence for LOC123872 (NM_178452.3,537-555).
gcaatggaatacagaaaat

SEQ ID NO: 430749 - DNA, 19 bp, Homo sapiens
  siRNA target sequence for LOC123872 (NM_178452.3,584-602).
cgttgcctcttcttgcaaa

SEQ ID NO: 430750 - DNA, 19 bp, Homo sapiens
  siRNA target sequence for LOC123872 (NM_178452.3,858-876).
ccgatttgcgtgtactgaa

SEQ ID NO: 430751 - DNA, 19 bp, Homo sapiens
  siRNA target sequence for LOC123872 (NM_178452.3,859-877).
cgatttgcgtgtactgaat

SEQ ID NO: 430752 - DNA, 19 bp, Homo sapiens
  siRNA target sequence for LOC123872 (NM_178452.3,860-878).
gatttgcgtgtactgaatt

SEQ ID NO: 430753 - DNA, 19 bp, Homo sapiens
  siRNA target sequence for LOC123872 (NM_178452.3,883-901).
gggaaacccggttatcaga

SEQ ID NO: 430754 - DNA, 19 bp, Homo sapiens
  siRNA target sequence for LOC123872 (NM_178452.3,889-907).
cccggttatcagacagatt

SEQ ID NO: 430755 - DNA, 19 bp, Homo sapiens
  siRNA target sequence for LOC123872 (NM_178452.3,924-942).
cagtcactgtacgactaaa

SEQ ID NO: 430756 - DNA, 19 bp, Homo sapiens
  siRNA target sequence for LOC123872 (NM_178452.3,932-950).
gtacgactaaagcacttaa

SEQ ID NO: 430757 - DNA, 19 bp, Homo sapiens
  siRNA target sequence for LOC123872 (NM_178452.3,935-953).
cgactaaagcacttaacat

SEQ ID NO: 430758 - DNA, 19 bp, Homo sapiens
  siRNA target sequence for LOC123872 (NM_178452.3,1014-1032).
gagggtacgcagctgaaaa

SEQ ID NO: 430759 - DNA, 19 bp, Homo sapiens
  siRNA target sequence for LOC123872 (NM_178452.3,1017-1035).
ggtacgcagctgaaaagga

SEQ ID NO: 430760 - DNA, 19 bp, Homo sapiens
  siRNA target sequence for LOC123872 (NM_178452.3,1319-1337).
ccgcctgtggaggctaaaa

SEQ ID NO: 430761 - DNA, 19 bp, Homo sapiens
  siRNA target sequence for LOC123872 (NM_178452.3,1321-1339).
gcctgtggaggctaaaaga

SEQ ID NO: 430762 - DNA, 19 bp, Homo sapiens
  siRNA target sequence for LOC123872 (NM_178452.3,1551-1569).
caccgcctgtgaaggttaa

SEQ ID NO: 430763 - DNA, 19 bp, Homo sapiens
  siRNA target sequence for LOC123872 (NM_178452.3,1674-1692).
ccactgagggtgtattcgt

SEQ ID NO: 430764 - DNA, 19 bp, Homo sapiens
  siRNA target sequence for LOC123872 (NM_178452.3,1675-1693).
cactgagggtgtattcgtt

SEQ ID NO: 430765 - DNA, 19 bp, Homo sapiens
  siRNA target sequence for LOC123872 (NM_178452.3,1681-1699).
gggtgtattcgttacagaa

SEQ ID NO: 430766 - DNA, 19 bp, Homo sapiens
  siRNA target sequence for LOC123872 (NM_178452.3,1706-1724).
ggaacgagaacggaagatt

SEQ ID NO: 430767 - DNA, 19 bp, Homo sapiens
  siRNA target sequence for LOC123872 (NM_178452.3,1707-1725).
gaacgagaacggaagattt

SEQ ID NO: 430768 - DNA, 19 bp, Homo sapiens
  siRNA target sequence for LOC123872 (NM_178452.3,1710-1728).
cgagaacggaagatttaga

SEQ ID NO: 430769 - DNA, 19 bp, Homo sapiens
  siRNA target sequence for LOC123872 (NM_178452.3,1716-1734).
cggaagatttagaaaccat

SEQ ID NO: 430770 - DNA, 19 bp, Homo sapiens
  siRNA target sequence for LOC123872 (NM_178452.3,1718-1736).
gaagatttagaaaccatta

SEQ ID NO: 430771 - DNA, 19 bp, Homo sapiens
  siRNA target sequence for MGC54289 (NM_178454.1,203-221).
gagtaagtgcacttagcat

SEQ ID NO: 430772 - DNA, 19 bp, Homo sapiens
  siRNA target sequence for MGC54289 (NM_178454.1,222-240).
gctgacttgctcatcagtt

SEQ ID NO: 430773 - DNA, 19 bp, Homo sapiens
  siRNA target sequence for MGC54289 (NM_178454.1,250-268).
ggcaattttgggactgatt

SEQ ID NO: 430774 - DNA, 19 bp, Homo sapiens
  siRNA target sequence for MGC54289 (NM_178454.1,251-269).
gcaattttgggactgattt

SEQ ID NO: 430775 - DNA, 19 bp, Homo sapiens
  siRNA target sequence for MGC54289 (NM_178454.1,252-270).
caattttgggactgattta

SEQ ID NO: 430776 - DNA, 19 bp, Homo sapiens
  siRNA target sequence for MGC54289 (NM_178454.1,291-309).
ccccgaggacaaaggttat

SEQ ID NO: 430777 - DNA, 19 bp, Homo sapiens
  siRNA target sequence for MGC54289 (NM_178454.1,293-311).
ccgaggacaaaggttatgt

SEQ ID NO: 430778 - DNA, 19 bp, Homo sapiens
  siRNA target sequence for MGC54289 (NM_178454.1,310-328).
gtgcttcacatgatcacta

SEQ ID NO: 430779 - DNA, 19 bp, Homo sapiens
  siRNA target sequence for MGC54289 (NM_178454.1,331-349).
gcagcagaatggtctatgt

SEQ ID NO: 430780 - DNA, 19 bp, Homo sapiens
  siRNA target sequence for MGC54289 (NM_178454.1,334-352).
gcagaatggtctatgtcat

SEQ ID NO: 430781 - DNA, 19 bp, Homo sapiens
  siRNA target sequence for MGC54289 (NM_178454.1,337-355).
gaatggtctatgtcatttt

SEQ ID NO: 430782 - DNA, 19 bp, Homo sapiens
  siRNA target sequence for MGC54289 (NM_178454.1,341-359).
ggtctatgtcattttcctt

SEQ ID NO: 430783 - DNA, 19 bp, Homo sapiens
  siRNA target sequence for MGC54289 (NM_178454.1,418-436).
gccaatttacatggattaa

SEQ ID NO: 430784 - DNA, 19 bp, Homo sapiens
  siRNA target sequence for MGC54289 (NM_178454.1,430-448).
ggattaaccctctatgaca

SEQ ID NO: 430785 - DNA, 19 bp, Homo sapiens
  siRNA target sequence for MGC54289 (NM_178454.1,472-490).
gaacgaacacggctacttt

SEQ ID NO: 430786 - DNA, 19 bp, Homo sapiens
  siRNA target sequence for C20orf85 (NM_178456.1,176-194).
ccccttttgaggagttgat

SEQ ID NO: 430787 - DNA, 19 bp, Homo sapiens
  siRNA target sequence for C20orf85 (NM_178456.1,179-197).
cttttgaggagttgatcaa

SEQ ID NO: 430788 - DNA, 19 bp, Homo sapiens
  siRNA target sequence for C20orf85 (NM_178456.1,218-236).
ccccaaagcccaaaatcga

SEQ ID NO: 430789 - DNA, 19 bp, Homo sapiens
  siRNA target sequence for C20orf85 (NM_178456.1,379-397).
ctcgacgatgcgatcagaa

SEQ ID NO: 430790 - DNA, 19 bp, Homo sapiens
  siRNA target sequence for PTPNS1L2 (NM_178460.1,155-173).
gtcacagactgtatcaact

SEQ ID NO: 430791 - DNA, 19 bp, Homo sapiens
  siRNA target sequence for PTPNS1L2 (NM_178460.1,169-187).
caactggggagtcaatcat

SEQ ID NO: 430792 - DNA, 19 bp, Homo sapiens
  siRNA target sequence for PTPNS1L2 (NM_178460.1,177-195).
gagtcaatcatcttgagtt

SEQ ID NO: 430793 - DNA, 19 bp, Homo sapiens
  siRNA target sequence for PTPNS1L2 (NM_178460.1,247-265).
cagggccaaaccggaaatt

SEQ ID NO: 430794 - DNA, 19 bp, Homo sapiens
  siRNA target sequence for PTPNS1L2 (NM_178460.1,252-270).
ccaaaccggaaattaatct

SEQ ID NO: 430795 - DNA, 19 bp, Homo sapiens
  siRNA target sequence for PTPNS1L2 (NM_178460.1,327-345).
cctggcaacacagactttt

SEQ ID NO: 430796 - DNA, 19 bp, Homo sapiens
  siRNA target sequence for PTPNS1L2 (NM_178460.1,346-364).
ccacccgcatccgtgaaat

SEQ ID NO: 430797 - DNA, 19 bp, Homo sapiens
  siRNA target sequence for PTPNS1L2 (NM_178460.1,350-368).
ccgcatccgtgaaatctct

SEQ ID NO: 430798 - DNA, 19 bp, Homo sapiens
  siRNA target sequence for PTPNS1L2 (NM_178460.1,373-391).
ctgatgctggcacctatta

SEQ ID NO: 430799 - DNA, 19 bp, Homo sapiens
  siRNA target sequence for PTPNS1L2 (NM_178460.1,392-410).
ctgcgtgaagttcataaaa

SEQ ID NO: 430800 - DNA, 19 bp, Homo sapiens
  siRNA target sequence for PTPNS1L2 (NM_178460.1,417-435).
gctatcaaggagtaccaat

SEQ ID NO: 430801 - DNA, 19 bp, Homo sapiens
  siRNA target sequence for C20orf166 (NM_178463.1,655-673).
cagctgacggggaagttca

SEQ ID NO: 430802 - DNA, 19 bp, Homo sapiens
  siRNA target sequence for C20orf71 (NM_178466.1,297-315).
cctggcaagaattattgct

SEQ ID NO: 430803 - DNA, 19 bp, Homo sapiens
  siRNA target sequence for C20orf71 (NM_178466.1,337-355).
gcagaaagccgaattcaga

SEQ ID NO: 430804 - DNA, 19 bp, Homo sapiens
  siRNA target sequence for C20orf71 (NM_178466.1,363-381).
ctttggggacagactgaat

SEQ ID NO: 430805 - DNA, 19 bp, Homo sapiens
  siRNA target sequence for C20orf71 (NM_178466.1,490-508).
ggtgggatccagatatcat

SEQ ID NO: 430806 - DNA, 19 bp, Homo sapiens
  siRNA target sequence for C20orf71 (NM_178466.1,491-509).
gtgggatccagatatcatt

SEQ ID NO: 430807 - DNA, 19 bp, Homo sapiens
  siRNA target sequence for C20orf71 (NM_178466.1,495-513).
gatccagatatcattccat

SEQ ID NO: 430808 - DNA, 19 bp, Homo sapiens
  siRNA target sequence for C20orf71 (NM_178466.1,522-540).
gttctcggcaaatatctca

SEQ ID NO: 430809 - DNA, 19 bp, Homo sapiens
  siRNA target sequence for C20orf71 (NM_178466.1,563-581).
gaccgtccttcgataacaa

SEQ ID NO: 430810 - DNA, 19 bp, Homo sapiens
  siRNA target sequence for C20orf71 (NM_178466.1,565-583).
ccgtccttcgataacaaca

SEQ ID NO: 430811 - DNA, 19 bp, Homo sapiens
  siRNA target sequence for C20orf71 (NM_178466.1,566-584).
cgtccttcgataacaacat

SEQ ID NO: 430812 - DNA, 19 bp, Homo sapiens
  siRNA target sequence for C20orf71 (NM_178466.1,574-592).
gataacaacatcgtaaaga

SEQ ID NO: 430813 - DNA, 19 bp, Homo sapiens
  siRNA target sequence for C20orf71 (NM_178466.1,719-737).
ctatcccaccaaagatgaa

SEQ ID NO: 430814 - DNA, 19 bp, Homo sapiens
  siRNA target sequence for C20orf71 (NM_178466.1,778-796).
ctcccacacatggtagaaa

SEQ ID NO: 430815 - DNA, 19 bp, Homo sapiens
  siRNA target sequence for C20orf71 (NM_178466.1,780-798).
cccacacatggtagaaagt

SEQ ID NO: 430816 - DNA, 19 bp, Homo sapiens
  siRNA target sequence for C20orf128 (NM_178468.1,226-244).
ctggatgtggactacatga

SEQ ID NO: 430817 - DNA, 19 bp, Homo sapiens
  siRNA target sequence for C20orf128 (NM_178468.1,637-655).
ctggagatgtgctacaaga

SEQ ID NO: 430818 - DNA, 19 bp, Homo sapiens
  siRNA target sequence for C20orf128 (NM_178468.1,698-716).
gcacgtgtggggacacata

SEQ ID NO: 430819 - DNA, 19 bp, Homo sapiens
  siRNA target sequence for C20orf128 (NM_178468.1,861-879).
ccgcatcgtggaagacttt

SEQ ID NO: 430820 - DNA, 19 bp, Homo sapiens
  siRNA target sequence for C20orf128 (NM_178468.1,1278-1296).
ccctgccctcaaccataat

SEQ ID NO: 430821 - DNA, 19 bp, Homo sapiens
  siRNA target sequence for C20orf128 (NM_178468.1,1279-1297).
cctgccctcaaccataata

SEQ ID NO: 430822 - DNA, 19 bp, Homo sapiens
  siRNA target sequence for C20orf128 (NM_178468.1,1282-1300).
gccctcaaccataatagta

SEQ ID NO: 430823 - DNA, 19 bp, Homo sapiens
  siRNA target sequence for C20orf128 (NM_178468.1,1748-1766).
ggaggctgtccctaaacca

SEQ ID NO: 430824 - DNA, 19 bp, Homo sapiens
  siRNA target sequence for C20orf128 (NM_178468.1,1749-1767).
gaggctgtccctaaaccaa

SEQ ID NO: 430825 - DNA, 19 bp, Homo sapiens
  siRNA target sequence for C20orf128 (NM_178468.1,1820-1838).
gagtgccccttgaaaccaa

SEQ ID NO: 430826 - DNA, 19 bp, Homo sapiens
  siRNA target sequence for C20orf128 (NM_178468.1,1953-1971).
caatggtctcccgatatca

SEQ ID NO: 430827 - DNA, 19 bp, Homo sapiens
  siRNA target sequence for C20orf128 (NM_178468.1,2102-2120).
ccaagggtggccatctcaa

SEQ ID NO: 430828 - DNA, 19 bp, Homo sapiens
  siRNA target sequence for C20orf128 (NM_178468.1,2185-2203).
ctcatcactaagtacaaca

SEQ ID NO: 430829 - DNA, 19 bp, Homo sapiens
  siRNA target sequence for C20orf128 (NM_178468.1,2221-2239).
ctccgaagccgctttgagt

SEQ ID NO: 430830 - DNA, 19 bp, Homo sapiens
  siRNA target sequence for KIAA1892L (NM_178470.2,389-407).
gctcgatggcgcactatct

SEQ ID NO: 430831 - DNA, 19 bp, Homo sapiens
  siRNA target sequence for KIAA1892L (NM_178470.2,1152-1170).
gccctacttccgggataat

SEQ ID NO: 430832 - DNA, 19 bp, Homo sapiens
  siRNA target sequence for KIAA1892L (NM_178470.2,1154-1172).
cctacttccgggataatgt

SEQ ID NO: 430833 - DNA, 19 bp, Homo sapiens
  siRNA target sequence for KIAA1892L (NM_178470.2,1470-1488).
ctggctcaaccacaatgat

SEQ ID NO: 430834 - DNA, 19 bp, Homo sapiens
  siRNA target sequence for LOC147111 (NM_178493.3,1437-1455).
gcctctcccatgagatcat

SEQ ID NO: 430835 - DNA, 19 bp, Homo sapiens
  siRNA target sequence for LOC147111 (NM_178493.3,1439-1457).
ctctcccatgagatcatca

SEQ ID NO: 430836 - DNA, 19 bp, Homo sapiens
  siRNA target sequence for KIAA1754L (NM_178495.3,807-825).
catgaaccggcctttgatt

SEQ ID NO: 430837 - DNA, 19 bp, Homo sapiens
  siRNA target sequence for KIAA1754L (NM_178495.3,906-924).
gaggccctggactcctttt

SEQ ID NO: 430838 - DNA, 19 bp, Homo sapiens
  siRNA target sequence for KIAA1754L (NM_178495.3,926-944).
caaacactatgtccaaaat

SEQ ID NO: 430839 - DNA, 19 bp, Homo sapiens
  siRNA target sequence for KIAA1754L (NM_178495.3,1095-1113).
ctccatgagacccagaaat

SEQ ID NO: 430840 - DNA, 19 bp, Homo sapiens
  siRNA target sequence for KIAA1754L (NM_178495.3,1290-1308).
gcagtcttggggaagtgta

SEQ ID NO: 430841 - DNA, 19 bp, Homo sapiens
  siRNA target sequence for KIAA1754L (NM_178495.3,1293-1311).
gtcttggggaagtgtagta

SEQ ID NO: 430842 - DNA, 19 bp, Homo sapiens
  siRNA target sequence for KIAA1754L (NM_178495.3,1403-1421).
ccttgtggcccacaagtat

SEQ ID NO: 430843 - DNA, 19 bp, Homo sapiens
  siRNA target sequence for KIAA1754L (NM_178495.3,1411-1429).
cccacaagtatgactttaa

SEQ ID NO: 430844 - DNA, 19 bp, Homo sapiens
  siRNA target sequence for KIAA1754L (NM_178495.3,1889-1907).
cctcattggtaacaatttt

SEQ ID NO: 430845 - DNA, 19 bp, Homo sapiens
  siRNA target sequence for KIAA1754L (NM_178495.3,1919-1937).
catcccaatccctaagaca

SEQ ID NO: 430846 - DNA, 19 bp, Homo sapiens
  siRNA target sequence for KIAA1754L (NM_178495.3,1922-1940).
cccaatccctaagacattt

SEQ ID NO: 430847 - DNA, 19 bp, Homo sapiens
  siRNA target sequence for KIAA1754L (NM_178495.3,1928-1946).
ccctaagacatttaggaat

SEQ ID NO: 430848 - DNA, 19 bp, Homo sapiens
  siRNA target sequence for KIAA1754L (NM_178495.3,1982-2000).
caaccccaaggcacattca

SEQ ID NO: 430849 - DNA, 19 bp, Homo sapiens
  siRNA target sequence for KIAA1754L (NM_178495.3,2005-2023).
cagtggaagagttccaaaa

SEQ ID NO: 430850 - DNA, 19 bp, Homo sapiens
  siRNA target sequence for LOC151963 (NM_178496.2,355-373).
gcctccctgggctgtaaca

SEQ ID NO: 430851 - DNA, 19 bp, Homo sapiens
  siRNA target sequence for LOC151963 (NM_178496.2,356-374).
cctccctgggctgtaacaa

SEQ ID NO: 430852 - DNA, 19 bp, Homo sapiens
  siRNA target sequence for LOC151963 (NM_178496.2,412-430).
gctcgggtggaggaattga

SEQ ID NO: 430853 - DNA, 19 bp, Homo sapiens
  siRNA target sequence for LOC151963 (NM_178496.2,413-431).
ctcgggtggaggaattgaa

SEQ ID NO: 430854 - DNA, 19 bp, Homo sapiens
  siRNA target sequence for LOC151963 (NM_178496.2,415-433).
cgggtggaggaattgaaca

SEQ ID NO: 430855 - DNA, 19 bp, Homo sapiens
  siRNA target sequence for LOC151963 (NM_178496.2,436-454).
ctcatccaagaatttacga

SEQ ID NO: 430856 - DNA, 19 bp, Homo sapiens
  siRNA target sequence for LOC151963 (NM_178496.2,499-517).
cacacagccaaggatttca

SEQ ID NO: 430857 - DNA, 19 bp, Homo sapiens
  siRNA target sequence for LOC151963 (NM_178496.2,558-576).
gcttccagtggctaatgaa

SEQ ID NO: 430858 - DNA, 19 bp, Homo sapiens
  siRNA target sequence for LOC151963 (NM_178496.2,559-577).
cttccagtggctaatgaat

SEQ ID NO: 430859 - DNA, 19 bp, Homo sapiens
  siRNA target sequence for LOC151963 (NM_178496.2,563-581).
cagtggctaatgaatacct

SEQ ID NO: 430860 - DNA, 19 bp, Homo sapiens
  siRNA target sequence for LOC151963 (NM_178496.2,621-639).
ggacttagatgagcttaat

SEQ ID NO: 430861 - DNA, 19 bp, Homo sapiens
  siRNA target sequence for LOC151963 (NM_178496.2,653-671).
gtactgactatgatatgga

SEQ ID NO: 430862 - DNA, 19 bp, Homo sapiens
  siRNA target sequence for LOC151963 (NM_178496.2,658-676).
gactatgatatggacttta

SEQ ID NO: 430863 - DNA, 19 bp, Homo sapiens
  siRNA target sequence for LOC151963 (NM_178496.2,765-783).
gagccttcggctctttgat

SEQ ID NO: 430864 - DNA, 19 bp, Homo sapiens
  siRNA target sequence for LOC151963 (NM_178496.2,767-785).
gccttcggctctttgatga

SEQ ID NO: 430865 - DNA, 19 bp, Homo sapiens
  siRNA target sequence for LOC151963 (NM_178496.2,781-799).
gatgaggggacaatcagta

SEQ ID NO: 430866 - DNA, 19 bp, Homo sapiens
  siRNA target sequence for LOC151963 (NM_178496.2,787-805).
gggacaatcagtaaatgga

SEQ ID NO: 430867 - DNA, 19 bp, Homo sapiens
  siRNA target sequence for LOC151963 (NM_178496.2,789-807).
gacaatcagtaaatggaaa

SEQ ID NO: 430868 - DNA, 19 bp, Homo sapiens
  siRNA target sequence for LOC151963 (NM_178496.2,810-828).
ctgctgcaccattgtagat

SEQ ID NO: 430869 - DNA, 19 bp, Homo sapiens
  siRNA target sequence for LOC151963 (NM_178496.2,812-830).
gctgcaccattgtagatca

SEQ ID NO: 430870 - DNA, 19 bp, Homo sapiens
  siRNA target sequence for LOC151963 (NM_178496.2,818-836).
ccattgtagatcacatcaa

SEQ ID NO: 430871 - DNA, 19 bp, Homo sapiens
  siRNA target sequence for LOC151963 (NM_178496.2,819-837).
cattgtagatcacatcaat

SEQ ID NO: 430872 - DNA, 19 bp, Homo sapiens
  siRNA target sequence for LOC151963 (NM_178496.2,874-892).
gctgactggttctatgact

SEQ ID NO: 430873 - DNA, 19 bp, Homo sapiens
  siRNA target sequence for LOC151963 (NM_178496.2,1000-1018).
gggagtagtcgcatgttgt

SEQ ID NO: 430874 - DNA, 19 bp, Homo sapiens
  siRNA target sequence for LOC151963 (NM_178496.2,1001-1019).
ggagtagtcgcatgttgta

SEQ ID NO: 430875 - DNA, 19 bp, Homo sapiens
  siRNA target sequence for LOC151963 (NM_178496.2,1002-1020).
gagtagtcgcatgttgtat

SEQ ID NO: 430876 - DNA, 19 bp, Homo sapiens
  siRNA target sequence for LOC151963 (NM_178496.2,1004-1022).
gtagtcgcatgttgtatga

SEQ ID NO: 430877 - DNA, 19 bp, Homo sapiens
  siRNA target sequence for LOC151963 (NM_178496.2,1007-1025).
gtcgcatgttgtatgatat

SEQ ID NO: 430878 - DNA, 19 bp, Homo sapiens
  siRNA target sequence for LOC151963 (NM_178496.2,1010-1028).
gcatgttgtatgatattgt

SEQ ID NO: 430879 - DNA, 19 bp, Homo sapiens
  siRNA target sequence for LOC151963 (NM_178496.2,1029-1047).
ccctgtggtatctttcaaa

SEQ ID NO: 430880 - DNA, 19 bp, Homo sapiens
  siRNA target sequence for LOC151963 (NM_178496.2,1120-1138).
gtcatcagtgggttttact

SEQ ID NO: 430881 - DNA, 19 bp, Homo sapiens
  siRNA target sequence for LOC151963 (NM_178496.2,1151-1169).
gctcctacaagggtaagaa

SEQ ID NO: 430882 - DNA, 19 bp, Homo sapiens
  siRNA target sequence for LOC151963 (NM_178496.2,1199-1217).
ggagcgaggtgcagttgaa

SEQ ID NO: 430883 - DNA, 19 bp, Homo sapiens
  siRNA target sequence for LOC151963 (NM_178496.2,1202-1220).
gcgaggtgcagttgaagaa

SEQ ID NO: 430884 - DNA, 19 bp, Homo sapiens
  siRNA target sequence for LOC151963 (NM_178496.2,1346-1364).
gacttcctgccaactactt

SEQ ID NO: 430885 - DNA, 19 bp, Homo sapiens
  siRNA target sequence for LOC151963 (NM_178496.2,1362-1380).
cttggctcaagaagactat

SEQ ID NO: 430886 - DNA, 19 bp, Homo sapiens
  siRNA target sequence for LOC151963 (NM_178496.2,1716-1734).
cccgggaaagtcaatctct

SEQ ID NO: 430887 - DNA, 19 bp, Homo sapiens
  siRNA target sequence for LOC151963 (NM_178496.2,1758-1776).
cacaaggccccatttcaga

SEQ ID NO: 430888 - DNA, 19 bp, Homo sapiens
  siRNA target sequence for LOC151963 (NM_178496.2,1760-1778).
caaggccccatttcagaat

SEQ ID NO: 430889 - DNA, 19 bp, Homo sapiens
  siRNA target sequence for FLJ23657 (NM_178497.2,154-172).
ctaccgactgccagatctt

SEQ ID NO: 430890 - DNA, 19 bp, Homo sapiens
  siRNA target sequence for FLJ23657 (NM_178497.2,270-288).
cccagaatccattttaggt

SEQ ID NO: 430891 - DNA, 19 bp, Homo sapiens
  siRNA target sequence for FLJ23657 (NM_178497.2,354-372).
ccacaccgttaccttactt

SEQ ID NO: 430892 - DNA, 19 bp, Homo sapiens
  siRNA target sequence for FLJ23657 (NM_178497.2,355-373).
cacaccgttaccttactta

SEQ ID NO: 430893 - DNA, 19 bp, Homo sapiens
  siRNA target sequence for FLJ23657 (NM_178497.2,357-375).
caccgttaccttacttata

SEQ ID NO: 430894 - DNA, 19 bp, Homo sapiens
  siRNA target sequence for FLJ23657 (NM_178497.2,360-378).
cgttaccttacttataggt

SEQ ID NO: 430895 - DNA, 19 bp, Homo sapiens
  siRNA target sequence for FLJ23657 (NM_178497.2,361-379).
gttaccttacttataggta

SEQ ID NO: 430896 - DNA, 19 bp, Homo sapiens
  siRNA target sequence for MGC39827 (NM_178499.2,612-630).
caaaaaggaccttatacga

SEQ ID NO: 430897 - DNA, 19 bp, Homo sapiens
  siRNA target sequence for MGC39827 (NM_178499.2,654-672).
gaagataggccgtggatat

SEQ ID NO: 430898 - DNA, 19 bp, Homo sapiens
  siRNA target sequence for MGC39827 (NM_178499.2,661-679).
ggccgtggatattttgcta

SEQ ID NO: 430899 - DNA, 19 bp, Homo sapiens
  siRNA target sequence for MGC39827 (NM_178499.2,662-680).
gccgtggatattttgctat

SEQ ID NO: 430900 - DNA, 19 bp, Homo sapiens
  siRNA target sequence for MGC39827 (NM_178499.2,665-683).
gtggatattttgctattct

SEQ ID NO: 430901 - DNA, 19 bp, Homo sapiens
  siRNA target sequence for MGC39827 (NM_178499.2,849-867).
cacacgtcgcccattcact

SEQ ID NO: 430902 - DNA, 19 bp, Homo sapiens
  siRNA target sequence for MGC39827 (NM_178499.2,1299-1317).
ggacaatgagtcatcttca

SEQ ID NO: 430903 - DNA, 19 bp, Homo sapiens
  siRNA target sequence for MGC39827 (NM_178499.2,1386-1404).
ccggaggacagtcacaata

SEQ ID NO: 430904 - DNA, 19 bp, Homo sapiens
  siRNA target sequence for MGC39827 (NM_178499.2,1392-1410).
gacagtcacaatagaaaat

SEQ ID NO: 430905 - DNA, 19 bp, Homo sapiens
  siRNA target sequence for MGC39827 (NM_178499.2,1437-1455).
cttgtcagtgctgaaacaa

SEQ ID NO: 430906 - DNA, 19 bp, Homo sapiens
  siRNA target sequence for MGC39827 (NM_178499.2,1485-1503).
gcagaccactctcaaatca

SEQ ID NO: 430907 - DNA, 19 bp, Homo sapiens
  siRNA target sequence for MGC39827 (NM_178499.2,1486-1504).
cagaccactctcaaatcaa

SEQ ID NO: 430908 - DNA, 19 bp, Homo sapiens
  siRNA target sequence for MGC39827 (NM_178499.2,1560-1578).
gtctaaaaaccgcactaat

SEQ ID NO: 430909 - DNA, 19 bp, Homo sapiens
  siRNA target sequence for MGC39827 (NM_178499.2,1737-1755).
ccttgtctcaaattttcaa

SEQ ID NO: 430910 - DNA, 19 bp, Homo sapiens
  siRNA target sequence for MGC39827 (NM_178499.2,1777-1795).
catcacatatctgtagtaa

SEQ ID NO: 430911 - DNA, 19 bp, Homo sapiens
  siRNA target sequence for MGC39827 (NM_178499.2,1853-1871).
cagaggatctaaagaactt

SEQ ID NO: 430912 - DNA, 19 bp, Homo sapiens
  siRNA target sequence for MGC39827 (NM_178499.2,1893-1911).
ggtgaaactgcagaagttt

SEQ ID NO: 430913 - DNA, 19 bp, Homo sapiens
  siRNA target sequence for MGC39827 (NM_178499.2,2044-2062).
cctcaagaggattacatca

SEQ ID NO: 430914 - DNA, 19 bp, Homo sapiens
  siRNA target sequence for MGC39827 (NM_178499.2,2070-2088).
gcagagccggatcaacata

SEQ ID NO: 430915 - DNA, 19 bp, Homo sapiens
  siRNA target sequence for PHOSPHO1 (NM_178500.2,415-433).
ggcctccgctgcctatcta

SEQ ID NO: 430916 - DNA, 19 bp, Homo sapiens
  siRNA target sequence for PHOSPHO1 (NM_178500.2,698-716).
gcgacctgctgcagtttgt

SEQ ID NO: 430917 - DNA, 19 bp, Homo sapiens
  siRNA target sequence for FLJ34766 (NM_178502.2,493-511).
cgagacttctgacatctat

SEQ ID NO: 430918 - DNA, 19 bp, Homo sapiens
  siRNA target sequence for FLJ34766 (NM_178502.2,498-516).
cttctgacatctatgttct

SEQ ID NO: 430919 - DNA, 19 bp, Homo sapiens
  siRNA target sequence for FLJ34766 (NM_178502.2,869-887).
gagaagtgccggcattcat

SEQ ID NO: 430920 - DNA, 19 bp, Homo sapiens
  siRNA target sequence for FLJ34766 (NM_178502.2,987-1005).
ggcggatgctggtctctaa

SEQ ID NO: 430921 - DNA, 19 bp, Homo sapiens
  siRNA target sequence for FLJ34766 (NM_178502.2,1199-1217).
cagcgtctcaccttcacta

SEQ ID NO: 430922 - DNA, 19 bp, Homo sapiens
  siRNA target sequence for FLJ34766 (NM_178502.2,1236-1254).
cagggagaccgaatgtcat

SEQ ID NO: 430923 - DNA, 19 bp, Homo sapiens
  siRNA target sequence for FLJ34766 (NM_178502.2,1354-1372).
gagagcgaagggtatcaca

SEQ ID NO: 430924 - DNA, 19 bp, Homo sapiens
  siRNA target sequence for FLJ40542 (NM_178503.2,335-353).
gccgtgcccacgcatttat

SEQ ID NO: 430925 - DNA, 19 bp, Homo sapiens
  siRNA target sequence for FLJ40542 (NM_178503.2,337-355).
cgtgcccacgcatttatct

SEQ ID NO: 430926 - DNA, 19 bp, Homo sapiens
  siRNA target sequence for FLJ40542 (NM_178503.2,356-374).
ccgccttccggctcagaat

SEQ ID NO: 430927 - DNA, 19 bp, Homo sapiens
  siRNA target sequence for FLJ40542 (NM_178503.2,357-375).
cgccttccggctcagaatt

SEQ ID NO: 430928 - DNA, 19 bp, Homo sapiens
  siRNA target sequence for FLJ40542 (NM_178503.2,359-377).
ccttccggctcagaattgt

SEQ ID NO: 430929 - DNA, 19 bp, Homo sapiens
  siRNA target sequence for MGC35010 (NM_178505.2,235-253).
ctgcgctcaccctcaagtt

SEQ ID NO: 430930 - DNA, 19 bp, Homo sapiens
  siRNA target sequence for MGC35010 (NM_178505.2,421-439).
cattgacatccaatgaaca

SEQ ID NO: 430931 - DNA, 19 bp, Homo sapiens
  siRNA target sequence for MGC35010 (NM_178505.2,442-460).
ccagtagagctgatgatct

SEQ ID NO: 430932 - DNA, 19 bp, Homo sapiens
  siRNA target sequence for MGC35010 (NM_178505.2,461-479).
cattgagacggccaaagtt

SEQ ID NO: 430933 - DNA, 19 bp, Homo sapiens
  siRNA target sequence for MGC35010 (NM_178505.2,469-487).
cggccaaagtttttgtgaa

SEQ ID NO: 430934 - DNA, 19 bp, Homo sapiens
  siRNA target sequence for MGC35010 (NM_178505.2,472-490).
ccaaagtttttgtgaataa

SEQ ID NO: 430935 - DNA, 19 bp, Homo sapiens
  siRNA target sequence for MGC35010 (NM_178505.2,536-554).
gacattcctgttaatgcta

SEQ ID NO: 430936 - DNA, 19 bp, Homo sapiens
  siRNA target sequence for MGC35010 (NM_178505.2,587-605).
cgggatcactcgagatcaa

SEQ ID NO: 430937 - DNA, 19 bp, Homo sapiens
  siRNA target sequence for MGC35010 (NM_178505.2,632-650).
ggggacagcggctgacata

SEQ ID NO: 430938 - DNA, 19 bp, Homo sapiens
  siRNA target sequence for MGC35010 (NM_178505.2,634-652).
ggacagcggctgacatact

SEQ ID NO: 430939 - DNA, 19 bp, Homo sapiens
  siRNA target sequence for MGC35010 (NM_178505.2,640-658).
cggctgacatactggaatt

SEQ ID NO: 430940 - DNA, 19 bp, Homo sapiens
  siRNA target sequence for MGC35010 (NM_178505.2,642-660).
gctgacatactggaattca

SEQ ID NO: 430941 - DNA, 19 bp, Homo sapiens
  siRNA target sequence for MGC35010 (NM_178505.2,661-679).
caagtgagaccctagaaga

SEQ ID NO: 430942 - DNA, 19 bp, Homo sapiens
  siRNA target sequence for MGC35010 (NM_178505.2,701-719).
gaaaaattccactaataga

SEQ ID NO: 430943 - DNA, 19 bp, Homo sapiens
  siRNA target sequence for MGC35010 (NM_178505.2,712-730).
ctaatagaagacatactaa

SEQ ID NO: 430944 - DNA, 19 bp, Homo sapiens
  siRNA target sequence for MGC35010 (NM_178505.2,733-751).
ccaagtggcaacttgttct

SEQ ID NO: 430945 - DNA, 19 bp, Homo sapiens
  siRNA target sequence for NS5ATP13TP2 (NM_178507.2,595-613).
caagctccggcagaaaaat

SEQ ID NO: 430946 - DNA, 19 bp, Homo sapiens
  siRNA target sequence for NS5ATP13TP2 (NM_178507.2,917-935).
ccctgcatgctcaagtact

SEQ ID NO: 430947 - DNA, 19 bp, Homo sapiens
  siRNA target sequence for MGC57858 (NM_178508.2,909-927).
ctggtagacacctttgctt

SEQ ID NO: 430948 - DNA, 19 bp, Homo sapiens
  siRNA target sequence for STXBP4 (NM_178509.3,318-336).
ggagccaagttgagtacta

SEQ ID NO: 430949 - DNA, 19 bp, Homo sapiens
  siRNA target sequence for STXBP4 (NM_178509.3,323-341).
caagttgagtactaggtta

SEQ ID NO: 430950 - DNA, 19 bp, Homo sapiens
  siRNA target sequence for STXBP4 (NM_178509.3,356-374).
gatagcattcataagacaa

SEQ ID NO: 430951 - DNA, 19 bp, Homo sapiens
  siRNA target sequence for STXBP4 (NM_178509.3,370-388).
gacaaaaatccgacaacat

SEQ ID NO: 430952 - DNA, 19 bp, Homo sapiens
  siRNA target sequence for STXBP4 (NM_178509.3,441-459).
ggacctcaagcctcaacat

SEQ ID NO: 430953 - DNA, 19 bp, Homo sapiens
  siRNA target sequence for STXBP4 (NM_178509.3,450-468).
gcctcaacattaagtcttt

SEQ ID NO: 430954 - DNA, 19 bp, Homo sapiens
  siRNA target sequence for STXBP4 (NM_178509.3,451-469).
cctcaacattaagtctttt

SEQ ID NO: 430955 - DNA, 19 bp, Homo sapiens
  siRNA target sequence for STXBP4 (NM_178509.3,452-470).
ctcaacattaagtcttttt

SEQ ID NO: 430956 - DNA, 19 bp, Homo sapiens
  siRNA target sequence for STXBP4 (NM_178509.3,475-493).
ctcctcctgaaatactaat

SEQ ID NO: 430957 - DNA, 19 bp, Homo sapiens
  siRNA target sequence for STXBP4 (NM_178509.3,505-523).
catccactcccaaaacaaa

SEQ ID NO: 430958 - DNA, 19 bp, Homo sapiens
  siRNA target sequence for STXBP4 (NM_178509.3,556-574).
ctggatacaacaaaacagt

SEQ ID NO: 430959 - DNA, 19 bp, Homo sapiens
  siRNA target sequence for STXBP4 (NM_178509.3,563-581).
caacaaaacagtacagatt

SEQ ID NO: 430960 - DNA, 19 bp, Homo sapiens
  siRNA target sequence for STXBP4 (NM_178509.3,599-617).
cagtactgtgggtttgtct

SEQ ID NO: 430961 - DNA, 19 bp, Homo sapiens
  siRNA target sequence for STXBP4 (NM_178509.3,601-619).
gtactgtgggtttgtctaa

SEQ ID NO: 430962 - DNA, 19 bp, Homo sapiens
  siRNA target sequence for STXBP4 (NM_178509.3,634-652).
ctgcctggactgaaaatta

SEQ ID NO: 430963 - DNA, 19 bp, Homo sapiens
  siRNA target sequence for STXBP4 (NM_178509.3,710-728).
ggaaatggctctaaattat

SEQ ID NO: 430964 - DNA, 19 bp, Homo sapiens
  siRNA target sequence for STXBP4 (NM_178509.3,718-736).
ctctaaattatcttggtat

SEQ ID NO: 430965 - DNA, 19 bp, Homo sapiens
  siRNA target sequence for STXBP4 (NM_178509.3,819-837).
gtccaggttgccagaaact

SEQ ID NO: 430966 - DNA, 19 bp, Homo sapiens
  siRNA target sequence for STXBP4 (NM_178509.3,942-960).
gaaaggctcaagtgtgaaa

SEQ ID NO: 430967 - DNA, 19 bp, Homo sapiens
  siRNA target sequence for LOC283487 (NM_178514.2,630-648).
gaggtaccacgccattagt

SEQ ID NO: 430968 - DNA, 19 bp, Homo sapiens
  siRNA target sequence for LOC283487 (NM_178514.2,685-703).
gtccttacgaggcatgttt

SEQ ID NO: 430969 - DNA, 19 bp, Homo sapiens
  siRNA target sequence for LOC283487 (NM_178514.2,744-762).
ggagacggaccgagttgaa

SEQ ID NO: 430970 - DNA, 19 bp, Homo sapiens
  siRNA target sequence for LOC283487 (NM_178514.2,805-823).
cccatccagggaagctttt

SEQ ID NO: 430971 - DNA, 19 bp, Homo sapiens
  siRNA target sequence for LOC283487 (NM_178514.2,867-885).
cattcatggactttcgttt

SEQ ID NO: 430972 - DNA, 19 bp, Homo sapiens
  siRNA target sequence for LOC283487 (NM_178514.2,899-917).
gtggttcacgtgacacaaa

SEQ ID NO: 430973 - DNA, 19 bp, Homo sapiens
  siRNA target sequence for LOC283487 (NM_178514.2,1024-1042).
cagggtgtgcccatctcat

SEQ ID NO: 430974 - DNA, 19 bp, Homo sapiens
  siRNA target sequence for LOC283487 (NM_178514.2,1027-1045).
ggtgtgcccatctcatgta

SEQ ID NO: 430975 - DNA, 19 bp, Homo sapiens
  siRNA target sequence for LOC283487 (NM_178514.2,1028-1046).
gtgtgcccatctcatgtaa

SEQ ID NO: 430976 - DNA, 19 bp, Homo sapiens
  siRNA target sequence for LOC283487 (NM_178514.2,1030-1048).
gtgcccatctcatgtaaga

SEQ ID NO: 430977 - DNA, 19 bp, Homo sapiens
  siRNA target sequence for LOC283487 (NM_178514.2,1032-1050).
gcccatctcatgtaagaca

SEQ ID NO: 430978 - DNA, 19 bp, Homo sapiens
  siRNA target sequence for LOC283849 (NM_178516.2,1450-1468).
gacccgtctggctcctatt

SEQ ID NO: 430979 - DNA, 19 bp, Homo sapiens
  siRNA target sequence for LOC283849 (NM_178516.2,1453-1471).
ccgtctggctcctattact

SEQ ID NO: 430980 - DNA, 19 bp, Homo sapiens
  siRNA target sequence for LOC283849 (NM_178516.2,1574-1592).
cagaactgggcacattctt

SEQ ID NO: 430981 - DNA, 19 bp, Homo sapiens
  siRNA target sequence for LOC283849 (NM_178516.2,1883-1901).
ctgagctcctgcaaagtgt

SEQ ID NO: 430982 - DNA, 19 bp, Homo sapiens
  siRNA target sequence for LOC283849 (NM_178516.2,2212-2230).
gctggcctgcggcaacaat

SEQ ID NO: 430983 - DNA, 19 bp, Homo sapiens
  siRNA target sequence for PIGW (NM_178517.2,86-104).
gtcagtaacctcaatggaa

SEQ ID NO: 430984 - DNA, 19 bp, Homo sapiens
  siRNA target sequence for PIGW (NM_178517.2,102-120).
gaaccaccgtgctggaaat

SEQ ID NO: 430985 - DNA, 19 bp, Homo sapiens
  siRNA target sequence for PIGW (NM_178517.2,135-153).
gctttcctgcattctgtat

SEQ ID NO: 430986 - DNA, 19 bp, Homo sapiens
  siRNA target sequence for PIGW (NM_178517.2,206-224).
cctacctggaaaactagat

SEQ ID NO: 430987 - DNA, 19 bp, Homo sapiens
  siRNA target sequence for PIGW (NM_178517.2,207-225).
ctacctggaaaactagatt

SEQ ID NO: 430988 - DNA, 19 bp, Homo sapiens
  siRNA target sequence for PIGW (NM_178517.2,254-272).
cccatggtagccactttga

SEQ ID NO: 430989 - DNA, 19 bp, Homo sapiens
  siRNA target sequence for PIGW (NM_178517.2,260-278).
gtagccactttgaccattt

SEQ ID NO: 430990 - DNA, 19 bp, Homo sapiens
  siRNA target sequence for PIGW (NM_178517.2,271-289).
gaccatttgggcttcattt

SEQ ID NO: 430991 - DNA, 19 bp, Homo sapiens
  siRNA target sequence for PIGW (NM_178517.2,299-317).
gagcttctcggtgtaatta

SEQ ID NO: 430992 - DNA, 19 bp, Homo sapiens
  siRNA target sequence for PIGW (NM_178517.2,324-342).
gggcagggctgttgtatca

SEQ ID NO: 430993 - DNA, 19 bp, Homo sapiens
  siRNA target sequence for PIGW (NM_178517.2,329-347).
gggctgttgtatcaaatat

SEQ ID NO: 430994 - DNA, 19 bp, Homo sapiens
  siRNA target sequence for PIGW (NM_178517.2,406-424).
gaacatcagtctagaatca

SEQ ID NO: 430995 - DNA, 19 bp, Homo sapiens
  siRNA target sequence for PIGW (NM_178517.2,467-485).
gcgtttactgctattgcta

SEQ ID NO: 430996 - DNA, 19 bp, Homo sapiens
  siRNA target sequence for PIGW (NM_178517.2,468-486).
cgtttactgctattgctat

SEQ ID NO: 430997 - DNA, 19 bp, Homo sapiens
  siRNA target sequence for PIGW (NM_178517.2,542-560).
gggacaggagcaatggatt

SEQ ID NO: 430998 - DNA, 19 bp, Homo sapiens
  siRNA target sequence for PIGW (NM_178517.2,585-603).
ggtctgcaatggtttgtct

SEQ ID NO: 430999 - DNA, 19 bp, Homo sapiens
  siRNA target sequence for PIGW (NM_178517.2,586-604).
gtctgcaatggtttgtcta

SEQ ID NO: 431000 - DNA, 19 bp, Homo sapiens
  siRNA target sequence for PIGW (NM_178517.2,628-646).
ggaagggtccaaattgcat

SEQ ID NO: 431001 - DNA, 19 bp, Homo sapiens
  siRNA target sequence for PIGW (NM_178517.2,629-647).
gaagggtccaaattgcatt

SEQ ID NO: 431002 - DNA, 19 bp, Homo sapiens
  siRNA target sequence for PIGW (NM_178517.2,632-650).
gggtccaaattgcattact

SEQ ID NO: 431003 - DNA, 19 bp, Homo sapiens
  siRNA target sequence for PIGW (NM_178517.2,633-651).
ggtccaaattgcattactt

SEQ ID NO: 431004 - DNA, 19 bp, Homo sapiens
  siRNA target sequence for PIGW (NM_178517.2,688-706).
cctaggaatcggacgatta

SEQ ID NO: 431005 - DNA, 19 bp, Homo sapiens
  siRNA target sequence for PIGW (NM_178517.2,697-715).
cggacgattagccattata

SEQ ID NO: 431006 - DNA, 19 bp, Homo sapiens
  siRNA target sequence for PIGW (NM_178517.2,698-716).
ggacgattagccattataa

SEQ ID NO: 431007 - DNA, 19 bp, Homo sapiens
  siRNA target sequence for PIGW (NM_178517.2,701-719).
cgattagccattataaaat

SEQ ID NO: 431008 - DNA, 19 bp, Homo sapiens
  siRNA target sequence for PIGW (NM_178517.2,725-743).
ggctatcaggaacatttaa

SEQ ID NO: 431009 - DNA, 19 bp, Homo sapiens
  siRNA target sequence for PIGW (NM_178517.2,848-866).
gccctcggcattactgtat

SEQ ID NO: 431010 - DNA, 19 bp, Homo sapiens
  siRNA target sequence for PIGW (NM_178517.2,849-867).
ccctcggcattactgtatt

SEQ ID NO: 431011 - DNA, 19 bp, Homo sapiens
  siRNA target sequence for PIGW (NM_178517.2,850-868).
cctcggcattactgtatta

SEQ ID NO: 431012 - DNA, 19 bp, Homo sapiens
  siRNA target sequence for PIGW (NM_178517.2,851-869).
ctcggcattactgtattat

SEQ ID NO: 431013 - DNA, 19 bp, Homo sapiens
  siRNA target sequence for PIGW (NM_178517.2,855-873).
gcattactgtattatacca

SEQ ID NO: 431014 - DNA, 19 bp, Homo sapiens
  siRNA target sequence for PIGW (NM_178517.2,872-890).
cagctagcccttgacttta

SEQ ID NO: 431015 - DNA, 19 bp, Homo sapiens
  siRNA target sequence for PIGW (NM_178517.2,875-893).
ctagcccttgactttacct

SEQ ID NO: 431016 - DNA, 19 bp, Homo sapiens
  siRNA target sequence for PIGW (NM_178517.2,891-909).
cctcactgaagaggttaat

SEQ ID NO: 431017 - DNA, 19 bp, Homo sapiens
  siRNA target sequence for PIGW (NM_178517.2,892-910).
ctcactgaagaggttaata

SEQ ID NO: 431018 - DNA, 19 bp, Homo sapiens
  siRNA target sequence for PIGW (NM_178517.2,933-951).
gcacacgggttggtctatt

SEQ ID NO: 431019 - DNA, 19 bp, Homo sapiens
  siRNA target sequence for PIGW (NM_178517.2,934-952).
cacacgggttggtctatta

SEQ ID NO: 431020 - DNA, 19 bp, Homo sapiens
  siRNA target sequence for PIGW (NM_178517.2,936-954).
cacgggttggtctattaaa

SEQ ID NO: 431021 - DNA, 19 bp, Homo sapiens
  siRNA target sequence for PIGW (NM_178517.2,956-974).
gccaaccgcgaaggaataa

SEQ ID NO: 431022 - DNA, 19 bp, Homo sapiens
  siRNA target sequence for PIGW (NM_178517.2,957-975).
ccaaccgcgaaggaataat

SEQ ID NO: 431023 - DNA, 19 bp, Homo sapiens
  siRNA target sequence for PIGW (NM_178517.2,961-979).
ccgcgaaggaataatctct

SEQ ID NO: 431024 - DNA, 19 bp, Homo sapiens
  siRNA target sequence for PIGW (NM_178517.2,962-980).
cgcgaaggaataatctcta

SEQ ID NO: 431025 - DNA, 19 bp, Homo sapiens
  siRNA target sequence for PIGW (NM_178517.2,1011-1029).
gtgtgcaaacagggttata

SEQ ID NO: 431026 - DNA, 19 bp, Homo sapiens
  siRNA target sequence for PIGW (NM_178517.2,1033-1051).
gcataagaaccgatcacat

SEQ ID NO: 431027 - DNA, 19 bp, Homo sapiens
  siRNA target sequence for PIGW (NM_178517.2,1034-1052).
cataagaaccgatcacata

SEQ ID NO: 431028 - DNA, 19 bp, Homo sapiens
  siRNA target sequence for PIGW (NM_178517.2,1039-1057).
gaaccgatcacatatcaaa

SEQ ID NO: 431029 - DNA, 19 bp, Homo sapiens
  siRNA target sequence for PIGW (NM_178517.2,1043-1061).
cgatcacatatcaaagact

SEQ ID NO: 431030 - DNA, 19 bp, Homo sapiens
  siRNA target sequence for PIGW (NM_178517.2,1049-1067).
catatcaaagacttgataa

SEQ ID NO: 431031 - DNA, 19 bp, Homo sapiens
  siRNA target sequence for PIGW (NM_178517.2,1094-1112).
gctattagcctcttcatat

SEQ ID NO: 431032 - DNA, 19 bp, Homo sapiens
  siRNA target sequence for PIGW (NM_178517.2,1101-1119).
gcctcttcatatctcttta

SEQ ID NO: 431033 - DNA, 19 bp, Homo sapiens
  siRNA target sequence for PIGW (NM_178517.2,1105-1123).
cttcatatctctttacgta

SEQ ID NO: 431034 - DNA, 19 bp, Homo sapiens
  siRNA target sequence for PIGW (NM_178517.2,1113-1131).
ctctttacgtagttcaagt

SEQ ID NO: 431035 - DNA, 19 bp, Homo sapiens
  siRNA target sequence for PIGW (NM_178517.2,1115-1133).
ctttacgtagttcaagtaa

SEQ ID NO: 431036 - DNA, 19 bp, Homo sapiens
  siRNA target sequence for PIGW (NM_178517.2,1120-1138).
cgtagttcaagtaaatgta

SEQ ID NO: 431037 - DNA, 19 bp, Homo sapiens
  siRNA target sequence for PIGW (NM_178517.2,1149-1167).
ctcgaagaatggcaaattt

SEQ ID NO: 431038 - DNA, 19 bp, Homo sapiens
  siRNA target sequence for PIGW (NM_178517.2,1199-1217).
ctgatccttcttagtagtt

SEQ ID NO: 431039 - DNA, 19 bp, Homo sapiens
  siRNA target sequence for PIGW (NM_178517.2,1215-1233).
gtttattactgggtgatat

SEQ ID NO: 431040 - DNA, 19 bp, Homo sapiens
  siRNA target sequence for PIGW (NM_178517.2,1225-1243).
gggtgatataattttgagt

SEQ ID NO: 431041 - DNA, 19 bp, Homo sapiens
  siRNA target sequence for PIGW (NM_178517.2,1268-1286).
gctctagtaccatgttctt

SEQ ID NO: 431042 - DNA, 19 bp, Homo sapiens
  siRNA target sequence for PIGW (NM_178517.2,1277-1295).
ccatgttcttggaaactta

SEQ ID NO: 431043 - DNA, 19 bp, Homo sapiens
  siRNA target sequence for PIGW (NM_178517.2,1298-1316).
cagtcacctgttacaaata

SEQ ID NO: 431044 - DNA, 19 bp, Homo sapiens
  siRNA target sequence for PIGW (NM_178517.2,1357-1375).
ggaacccagtctttgttta

SEQ ID NO: 431045 - DNA, 19 bp, Homo sapiens
  siRNA target sequence for PIGW (NM_178517.2,1358-1376).
gaacccagtctttgtttaa

SEQ ID NO: 431046 - DNA, 19 bp, Homo sapiens
  siRNA target sequence for PIGW (NM_178517.2,1363-1381).
cagtctttgtttaatcaca

SEQ ID NO: 431047 - DNA, 19 bp, Homo sapiens
  siRNA target sequence for PIGW (NM_178517.2,1371-1389).
gtttaatcacagctctaaa

SEQ ID NO: 431048 - DNA, 19 bp, Homo sapiens
  siRNA target sequence for PIGW (NM_178517.2,1385-1403).
ctaaacagaaaacagttaa

SEQ ID NO: 431049 - DNA, 19 bp, Homo sapiens
  siRNA target sequence for PIGW (NM_178517.2,1414-1432).
gctgtcaaatataacaact

SEQ ID NO: 431050 - DNA, 19 bp, Homo sapiens
  siRNA target sequence for PIGW (NM_178517.2,1441-1459).
caacctgatggtagataca

SEQ ID NO: 431051 - DNA, 19 bp, Homo sapiens
  siRNA target sequence for PIGW (NM_178517.2,1482-1500).
ccttatttgtggtcaatct

SEQ ID NO: 431052 - DNA, 19 bp, Homo sapiens
  siRNA target sequence for PIGW (NM_178517.2,1490-1508).
gtggtcaatctctatatgt

SEQ ID NO: 431053 - DNA, 19 bp, Homo sapiens
  siRNA target sequence for FLJ36878 (NM_178518.2,776-794).
caggagcacgtgattcgat

SEQ ID NO: 431054 - DNA, 19 bp, Homo sapiens
  siRNA target sequence for FLJ36878 (NM_178518.2,799-817).
cgaacggagagcgaagaaa

SEQ ID NO: 431055 - DNA, 19 bp, Homo sapiens
  siRNA target sequence for FLJ36878 (NM_178518.2,953-971).
gctctaccgcacctttgaa

SEQ ID NO: 431056 - DNA, 19 bp, Homo sapiens
  siRNA target sequence for FLJ36878 (NM_178518.2,1038-1056).
ggaagcgtggcccacatta

SEQ ID NO: 431057 - DNA, 19 bp, Homo sapiens
  siRNA target sequence for FLJ36878 (NM_178518.2,1039-1057).
gaagcgtggcccacattat

SEQ ID NO: 431058 - DNA, 19 bp, Homo sapiens
  siRNA target sequence for FLJ36878 (NM_178518.2,1042-1060).
gcgtggcccacattatgtt

SEQ ID NO: 431059 - DNA, 19 bp, Homo sapiens
  siRNA target sequence for FLJ36878 (NM_178518.2,1614-1632).
cgggacgttgcctcactat

SEQ ID NO: 431060 - DNA, 19 bp, Homo sapiens
  siRNA target sequence for FLJ36878 (NM_178518.2,1615-1633).
gggacgttgcctcactatt

SEQ ID NO: 431061 - DNA, 19 bp, Homo sapiens
  siRNA target sequence for FLJ36878 (NM_178518.2,1616-1634).
ggacgttgcctcactattt

SEQ ID NO: 431062 - DNA, 19 bp, Homo sapiens
  siRNA target sequence for FLJ36878 (NM_178518.2,1673-1691).
ctgcgctgctcggagaatt

SEQ ID NO: 431063 - DNA, 19 bp, Homo sapiens
  siRNA target sequence for FLJ39421 (NM_178519.2,1151-1169).
ctccctgcgcacgctttaa

SEQ ID NO: 431064 - DNA, 19 bp, Homo sapiens
  siRNA target sequence for FLJ39421 (NM_178519.2,1154-1172).
cctgcgcacgctttaatca

SEQ ID NO: 431065 - DNA, 19 bp, Homo sapiens
  siRNA target sequence for FLJ39421 (NM_178519.2,1155-1173).
ctgcgcacgctttaatcaa

SEQ ID NO: 431066 - DNA, 19 bp, Homo sapiens
  siRNA target sequence for FLJ38792 (NM_178520.2,626-644).
gtgatcgggcagctgattt

SEQ ID NO: 431067 - DNA, 19 bp, Homo sapiens
  siRNA target sequence for FLJ38792 (NM_178520.2,628-646).
gatcgggcagctgatttat

SEQ ID NO: 431068 - DNA, 19 bp, Homo sapiens
  siRNA target sequence for FLJ38792 (NM_178520.2,768-786).
gcctctgtgagatgaagat

SEQ ID NO: 431069 - DNA, 19 bp, Homo sapiens
  siRNA target sequence for FLJ38773 (NM_178528.2,648-666).
gtgcaagctcggagatgaa

SEQ ID NO: 431070 - DNA, 19 bp, Homo sapiens
  siRNA target sequence for FLJ38773 (NM_178528.2,650-668).
gcaagctcggagatgaatt

SEQ ID NO: 431071 - DNA, 19 bp, Homo sapiens
  siRNA target sequence for FLJ38773 (NM_178528.2,654-672).
gctcggagatgaattggtt

SEQ ID NO: 431072 - DNA, 19 bp, Homo sapiens
  siRNA target sequence for FLJ38773 (NM_178528.2,655-673).
ctcggagatgaattggtta

SEQ ID NO: 431073 - DNA, 19 bp, Homo sapiens
  siRNA target sequence for FLJ38379 (NM_178530.2,722-740).
gtctgcacacagtgtcttt

SEQ ID NO: 431074 - DNA, 19 bp, Homo sapiens
  siRNA target sequence for LOC285671 (NM_178532.2,208-226).
gttgttttatggagtatct

SEQ ID NO: 431075 - DNA, 19 bp, Homo sapiens
  siRNA target sequence for LOC285671 (NM_178532.2,211-229).
gttttatggagtatcttga

SEQ ID NO: 431076 - DNA, 19 bp, Homo sapiens
  siRNA target sequence for LOC285671 (NM_178532.2,230-248).
gaatcaagtgattaaggat

SEQ ID NO: 431077 - DNA, 19 bp, Homo sapiens
  siRNA target sequence for LOC285671 (NM_178532.2,245-263).
ggataaagatgattcagtt

SEQ ID NO: 431078 - DNA, 19 bp, Homo sapiens
  siRNA target sequence for LOC285671 (NM_178532.2,319-337).
ggataagctgcctaatcca

SEQ ID NO: 431079 - DNA, 19 bp, Homo sapiens
  siRNA target sequence for LOC285671 (NM_178532.2,320-338).
gataagctgcctaatccaa

SEQ ID NO: 431080 - DNA, 19 bp, Homo sapiens
  siRNA target sequence for LOC285671 (NM_178532.2,386-404).
ccgtttagggggctttaat

SEQ ID NO: 431081 - DNA, 19 bp, Homo sapiens
  siRNA target sequence for LOC285671 (NM_178532.2,387-405).
cgtttagggggctttaatt

SEQ ID NO: 431082 - DNA, 19 bp, Homo sapiens
  siRNA target sequence for LOC285671 (NM_178532.2,393-411).
gggggctttaattttgtca

SEQ ID NO: 431083 - DNA, 19 bp, Homo sapiens
  siRNA target sequence for LOC285671 (NM_178532.2,457-475).
ccaagagccggactgatta

SEQ ID NO: 431084 - DNA, 19 bp, Homo sapiens
  siRNA target sequence for LOC285671 (NM_178532.2,484-502).
cacaggcaggcagactaat

SEQ ID NO: 431085 - DNA, 19 bp, Homo sapiens
  siRNA target sequence for LOC285671 (NM_178532.2,488-506).
ggcaggcagactaatgaga

SEQ ID NO: 431086 - DNA, 19 bp, Homo sapiens
  siRNA target sequence for LOC285671 (NM_178532.2,521-539).
cttgtcacatcctagagtt

SEQ ID NO: 431087 - DNA, 19 bp, Homo sapiens
  siRNA target sequence for LOC285671 (NM_178532.2,611-629).
catggcccgaaataataat

SEQ ID NO: 431088 - DNA, 19 bp, Homo sapiens
  siRNA target sequence for LOC285671 (NM_178532.2,662-680).
ggaggtgcgaccaacatat

SEQ ID NO: 431089 - DNA, 19 bp, Homo sapiens
  siRNA target sequence for LOC285671 (NM_178532.2,665-683).
ggtgcgaccaacatatttt

SEQ ID NO: 431090 - DNA, 19 bp, Homo sapiens
  siRNA target sequence for LOC285671 (NM_178532.2,669-687).
cgaccaacatattttgaga

SEQ ID NO: 431091 - DNA, 19 bp, Homo sapiens
  siRNA target sequence for LOC285671 (NM_178532.2,767-785).
cgctacaagagcttttcat

SEQ ID NO: 431092 - DNA, 19 bp, Homo sapiens
  siRNA target sequence for LOC285671 (NM_178532.2,768-786).
gctacaagagcttttcata

SEQ ID NO: 431093 - DNA, 19 bp, Homo sapiens
  siRNA target sequence for LOC285671 (NM_178532.2,778-796).
cttttcatagaaaatcaca

SEQ ID NO: 431094 - DNA, 19 bp, Homo sapiens
  siRNA target sequence for LOC285671 (NM_178532.2,838-856).
ccactttatatgaaataca

SEQ ID NO: 431095 - DNA, 19 bp, Homo sapiens
  siRNA target sequence for LOC285671 (NM_178532.2,868-886).
ctgcctattccagactaaa

SEQ ID NO: 431096 - DNA, 19 bp, Homo sapiens
  siRNA target sequence for LOC285671 (NM_178532.2,877-895).
ccagactaaatgaaacaca

SEQ ID NO: 431097 - DNA, 19 bp, Homo sapiens
  siRNA target sequence for LOC285671 (NM_178532.2,912-930).
ggcttgcctttacaatcta

SEQ ID NO: 431098 - DNA, 19 bp, Homo sapiens
  siRNA target sequence for LOC285671 (NM_178532.2,917-935).
gcctttacaatctagtaaa

SEQ ID NO: 431099 - DNA, 19 bp, Homo sapiens
  siRNA target sequence for LOC285671 (NM_178532.2,919-937).
ctttacaatctagtaaaaa

SEQ ID NO: 431100 - DNA, 19 bp, Homo sapiens
  siRNA target sequence for LOC285671 (NM_178532.2,924-942).
caatctagtaaaaatagct

SEQ ID NO: 431101 - DNA, 19 bp, Homo sapiens
  siRNA target sequence for LOC285671 (NM_178532.2,953-971).
gaatccatccagttttgat

SEQ ID NO: 431102 - DNA, 19 bp, Homo sapiens
  siRNA target sequence for LOC285671 (NM_178532.2,976-994).
gtatgctgctgcaaagatt

SEQ ID NO: 431103 - DNA, 19 bp, Homo sapiens
  siRNA target sequence for LOC285671 (NM_178532.2,1065-1083).
gtgtattctgaccatacta

SEQ ID NO: 431104 - DNA, 19 bp, Homo sapiens
  siRNA target sequence for LOC285671 (NM_178532.2,1067-1085).
gtattctgaccatactaat

SEQ ID NO: 431105 - DNA, 19 bp, Homo sapiens
  siRNA target sequence for LOC285671 (NM_178532.2,1072-1090).
ctgaccatactaatactaa

SEQ ID NO: 431106 - DNA, 19 bp, Homo sapiens
  siRNA target sequence for LOC285671 (NM_178532.2,1074-1092).
gaccatactaatactaaca

SEQ ID NO: 431107 - DNA, 19 bp, Homo sapiens
  siRNA target sequence for LOC285671 (NM_178532.2,1076-1094).
ccatactaatactaacaat

SEQ ID NO: 431108 - DNA, 19 bp, Homo sapiens
  siRNA target sequence for LOC285671 (NM_178532.2,1181-1199).
cctgcactcagccaatttt

SEQ ID NO: 431109 - DNA, 19 bp, Homo sapiens
  siRNA target sequence for LOC285671 (NM_178532.2,1201-1219).
cattgggcagcattaatca

SEQ ID NO: 431110 - DNA, 19 bp, Homo sapiens
  siRNA target sequence for LOC285671 (NM_178532.2,1290-1308).
ctacagaagcagggtaaat

SEQ ID NO: 431111 - DNA, 19 bp, Homo sapiens
  siRNA target sequence for LOC285671 (NM_178532.2,1295-1313).
gaagcagggtaaatactca

SEQ ID NO: 431112 - DNA, 19 bp, Homo sapiens
  siRNA target sequence for LOC285671 (NM_178532.2,1337-1355).
ggtaagtatatatttactt

SEQ ID NO: 431113 - DNA, 19 bp, Homo sapiens
  siRNA target sequence for FLJ35700 (NM_178533.2,847-865).
ctccaaggactatttaaga

SEQ ID NO: 431114 - DNA, 19 bp, Homo sapiens
  siRNA target sequence for FLJ35700 (NM_178533.2,966-984).
gtgtcaggcggtcttttgt

SEQ ID NO: 431115 - DNA, 19 bp, Homo sapiens
  siRNA target sequence for FLJ37940 (NM_178534.2,433-451).
cagagagccaggaacagtt

SEQ ID NO: 431116 - DNA, 19 bp, Homo sapiens
  siRNA target sequence for MGC48935 (NM_178536.2,198-216).
cgctttcaccgcaactttt

SEQ ID NO: 431117 - DNA, 19 bp, Homo sapiens
  siRNA target sequence for MGC48935 (NM_178536.2,200-218).
ctttcaccgcaacttttga

SEQ ID NO: 431118 - DNA, 19 bp, Homo sapiens
  siRNA target sequence for MGC48935 (NM_178536.2,209-227).
caacttttgagctaagtga

SEQ ID NO: 431119 - DNA, 19 bp, Homo sapiens
  siRNA target sequence for MGC48935 (NM_178536.2,275-293).
gtgacacatggtcttatgt

SEQ ID NO: 431120 - DNA, 19 bp, Homo sapiens
  siRNA target sequence for MGC48935 (NM_178536.2,551-569).
cagatgtgactggtaacat

SEQ ID NO: 431121 - DNA, 19 bp, Homo sapiens
  siRNA target sequence for MGC48935 (NM_178536.2,609-627).
cgcaggaatgagtttggtt

SEQ ID NO: 431122 - DNA, 19 bp, Homo sapiens
  siRNA target sequence for FLJ25045 (NM_178537.3,7-25).
cggctcccggtgaagaaga

SEQ ID NO: 431123 - DNA, 19 bp, Homo sapiens
  siRNA target sequence for FLJ25045 (NM_178537.3,335-353).
catggcgggaggagtacaa

SEQ ID NO: 431124 - DNA, 19 bp, Homo sapiens
  siRNA target sequence for FLJ25045 (NM_178537.3,446-464).
cgcgcaccaccgtgaagaa

SEQ ID NO: 431125 - DNA, 19 bp, Homo sapiens
  siRNA target sequence for FLJ25045 (NM_178537.3,497-515).
gactccgtatttttggttt

SEQ ID NO: 431126 - DNA, 19 bp, Homo sapiens
  siRNA target sequence for FLJ25045 (NM_178537.3,532-550).
gacggagacgtccagtttt

SEQ ID NO: 431127 - DNA, 19 bp, Homo sapiens
  siRNA target sequence for FLJ25045 (NM_178537.3,534-552).
cggagacgtccagttttct

SEQ ID NO: 431128 - DNA, 19 bp, Homo sapiens
  siRNA target sequence for FLJ25045 (NM_178537.3,536-554).
gagacgtccagttttctgt

SEQ ID NO: 431129 - DNA, 19 bp, Homo sapiens
  siRNA target sequence for FLJ25045 (NM_178537.3,650-668).
ggacagcgcctggagaatt

SEQ ID NO: 431130 - DNA, 19 bp, Homo sapiens
  siRNA target sequence for FLJ25045 (NM_178537.3,661-679).
ggagaattcaccaagttca

SEQ ID NO: 431131 - DNA, 19 bp, Homo sapiens
  siRNA target sequence for FLJ25045 (NM_178537.3,714-732).
ctcccggaggtactacttt

SEQ ID NO: 431132 - DNA, 19 bp, Homo sapiens
  siRNA target sequence for FLJ25045 (NM_178537.3,718-736).
cggaggtactactttgagt

SEQ ID NO: 431133 - DNA, 19 bp, Homo sapiens
  siRNA target sequence for FLJ25045 (NM_178537.3,719-737).
ggaggtactactttgagtt

SEQ ID NO: 431134 - DNA, 19 bp, Homo sapiens
  siRNA target sequence for FLJ25045 (NM_178537.3,959-977).
cagatcccagggatacctt

SEQ ID NO: 431135 - DNA, 19 bp, Homo sapiens
  siRNA target sequence for FLJ25045 (NM_178537.3,961-979).
gatcccagggatacctttt

SEQ ID NO: 431136 - DNA, 19 bp, Homo sapiens
  siRNA target sequence for FLJ25045 (NM_178537.3,1096-1114).
gtgtacctgtccttcgttt

SEQ ID NO: 431137 - DNA, 19 bp, Homo sapiens
  siRNA target sequence for FLJ25045 (NM_178537.3,1172-1190).
gcgagtctccgctgtatct

SEQ ID NO: 431138 - DNA, 19 bp, Homo sapiens
  siRNA target sequence for FLJ25045 (NM_178537.3,1191-1209).
ggagaggtttgggttctat

SEQ ID NO: 431139 - DNA, 19 bp, Homo sapiens
  siRNA target sequence for FLJ25045 (NM_178537.3,1192-1210).
gagaggtttgggttctata

SEQ ID NO: 431140 - DNA, 19 bp, Homo sapiens
  siRNA target sequence for FLJ25045 (NM_178537.3,1196-1214).
ggtttgggttctataaata

SEQ ID NO: 431141 - DNA, 19 bp, Homo sapiens
  siRNA target sequence for FLJ25045 (NM_178537.3,2104-2122).
gacctgcgatgcaacgttt

SEQ ID NO: 431142 - DNA, 19 bp, Homo sapiens
  siRNA target sequence for FLJ25045 (NM_178537.3,2926-2944).
cgggttggaggaatgaaca

SEQ ID NO: 431143 - DNA, 19 bp, Homo sapiens
  siRNA target sequence for FLJ25045 (NM_178537.3,3026-3044).
ggctccgactgcggaattt

SEQ ID NO: 431144 - DNA, 19 bp, Homo sapiens
  siRNA target sequence for FLJ25045 (NM_178537.3,3028-3046).
ctccgactgcggaatttct

SEQ ID NO: 431145 - DNA, 19 bp, Homo sapiens
  siRNA target sequence for FLJ25045 (NM_178537.3,3030-3048).
ccgactgcggaatttctat

SEQ ID NO: 431146 - DNA, 19 bp, Homo sapiens
  siRNA target sequence for LOC338799 (NM_178538.2,599-617).
cagcttaaagaatctttct

SEQ ID NO: 431147 - DNA, 19 bp, Homo sapiens
  siRNA target sequence for TAFA2 (NM_178539.2,939-957).
gtaagagatacttacagaa

SEQ ID NO: 431148 - DNA, 19 bp, Homo sapiens
  siRNA target sequence for TAFA2 (NM_178539.2,999-1017).
ccttgtgggggaaagttgt

SEQ ID NO: 431149 - DNA, 19 bp, Homo sapiens
  siRNA target sequence for TAFA2 (NM_178539.2,1000-1018).
cttgtgggggaaagttgta

SEQ ID NO: 431150 - DNA, 19 bp, Homo sapiens
  siRNA target sequence for TAFA2 (NM_178539.2,1079-1097).
ctccacagatgctgtaata

SEQ ID NO: 431151 - DNA, 19 bp, Homo sapiens
  siRNA target sequence for TAFA2 (NM_178539.2,1089-1107).
gctgtaataagaacaagat

SEQ ID NO: 431152 - DNA, 19 bp, Homo sapiens
  siRNA target sequence for TAFA2 (NM_178539.2,1168-1186).
gcgagctgctccatcatgt

SEQ ID NO: 431153 - DNA, 19 bp, Homo sapiens
  siRNA target sequence for TAFA2 (NM_178539.2,1185-1203).
gtgtggatgcttcaatagt

SEQ ID NO: 431154 - DNA, 19 bp, Homo sapiens
  siRNA target sequence for TAFA2 (NM_178539.2,1262-1280).
cttccggatcggaaaggat

SEQ ID NO: 431155 - DNA, 19 bp, Homo sapiens
  siRNA target sequence for TAFA2 (NM_178539.2,1287-1305).
gttcctctgggaataaagt

SEQ ID NO: 431156 - DNA, 19 bp, Homo sapiens
  siRNA target sequence for DKFZp762C2414 (NM_178542.2,1113-1131).
gtcctccatgagaatcata

SEQ ID NO: 431157 - DNA, 19 bp, Homo sapiens
  siRNA target sequence for DKFZp762C2414 (NM_178542.2,1138-1156).
ccgctacagacaacagaat

SEQ ID NO: 431158 - DNA, 19 bp, Homo sapiens
  siRNA target sequence for DKFZp762C2414 (NM_178542.2,1139-1157).
cgctacagacaacagaatt

SEQ ID NO: 431159 - DNA, 19 bp, Homo sapiens
  siRNA target sequence for ARCH (NM_178547.2,28-46).
cggaagtagagtgtctaat

SEQ ID NO: 431160 - DNA, 19 bp, Homo sapiens
  siRNA target sequence for ARCH (NM_178547.2,380-398).
cgggaagtgaaagtactta

SEQ ID NO: 431161 - DNA, 19 bp, Homo sapiens
  siRNA target sequence for AP2E (NM_178548.2,749-767).
gaccagtccgtgatcaaga

SEQ ID NO: 431162 - DNA, 19 bp, Homo sapiens
  siRNA target sequence for AP2E (NM_178548.2,751-769).
ccagtccgtgatcaagaaa

SEQ ID NO: 431163 - DNA, 19 bp, Homo sapiens
  siRNA target sequence for AP2E (NM_178548.2,894-912).
gctcaacgtccaagtacaa

SEQ ID NO: 431164 - DNA, 19 bp, Homo sapiens
  siRNA target sequence for AP2E (NM_178548.2,989-1007).
cgcagggccaagtccaaaa

SEQ ID NO: 431165 - DNA, 19 bp, Homo sapiens
  siRNA target sequence for AP2E (NM_178548.2,1453-1471).
gctggacaagatgtttcta

SEQ ID NO: 431166 - DNA, 19 bp, Homo sapiens
  siRNA target sequence for MGC42493 (NM_178549.2,496-514).
gtgacactgacaagacata

SEQ ID NO: 431167 - DNA, 19 bp, Homo sapiens
  siRNA target sequence for MGC42493 (NM_178549.2,498-516).
gacactgacaagacataga

SEQ ID NO: 431168 - DNA, 19 bp, Homo sapiens
  siRNA target sequence for MGC42493 (NM_178549.2,521-539).
ggggccttgacaatttgca

SEQ ID NO: 431169 - DNA, 19 bp, Homo sapiens
  siRNA target sequence for MGC42493 (NM_178549.2,572-590).
gtaaggggcagaaagaata

SEQ ID NO: 431170 - DNA, 19 bp, Homo sapiens
  siRNA target sequence for MGC42493 (NM_178549.2,578-596).
ggcagaaagaatattgcaa

SEQ ID NO: 431171 - DNA, 19 bp, Homo sapiens
  siRNA target sequence for MGC42493 (NM_178549.2,586-604).
gaatattgcaatagactta

SEQ ID NO: 431172 - DNA, 19 bp, Homo sapiens
  siRNA target sequence for MGC42493 (NM_178549.2,594-612).
caatagacttactcaatgt

SEQ ID NO: 431173 - DNA, 19 bp, Homo sapiens
  siRNA target sequence for MGC42493 (NM_178549.2,668-686).
ggaggtcaatccttactga

SEQ ID NO: 431174 - DNA, 19 bp, Homo sapiens
  siRNA target sequence for MGC42493 (NM_178549.2,669-687).
gaggtcaatccttactgaa

SEQ ID NO: 431175 - DNA, 19 bp, Homo sapiens
  siRNA target sequence for MGC42493 (NM_178549.2,1409-1427).
gcagaacctttactcaatt

SEQ ID NO: 431176 - DNA, 19 bp, Homo sapiens
  siRNA target sequence for MGC48998 (NM_178550.2,136-154).
ggtcaggggacaattgtat

SEQ ID NO: 431177 - DNA, 19 bp, Homo sapiens
  siRNA target sequence for MGC48998 (NM_178550.2,137-155).
gtcaggggacaattgtata

SEQ ID NO: 431178 - DNA, 19 bp, Homo sapiens
  siRNA target sequence for MGC48998 (NM_178550.2,141-159).
ggggacaattgtataagca

SEQ ID NO: 431179 - DNA, 19 bp, Homo sapiens
  siRNA target sequence for MGC48998 (NM_178550.2,142-160).
gggacaattgtataagcat

SEQ ID NO: 431180 - DNA, 19 bp, Homo sapiens
  siRNA target sequence for MGC48998 (NM_178550.2,143-161).
ggacaattgtataagcatt

SEQ ID NO: 431181 - DNA, 19 bp, Homo sapiens
  siRNA target sequence for MGC48998 (NM_178550.2,198-216).
ccagactggaccaaagact

SEQ ID NO: 431182 - DNA, 19 bp, Homo sapiens
  siRNA target sequence for MGC48998 (NM_178550.2,213-231).
gactgcagagactaaaggt

SEQ ID NO: 431183 - DNA, 19 bp, Homo sapiens
  siRNA target sequence for MGC48998 (NM_178550.2,215-233).
ctgcagagactaaaggtta

SEQ ID NO: 431184 - DNA, 19 bp, Homo sapiens
  siRNA target sequence for MGC48998 (NM_178550.2,411-429).
gagccccacaggctaagaa

SEQ ID NO: 431185 - DNA, 19 bp, Homo sapiens
  siRNA target sequence for MGC48998 (NM_178550.2,413-431).
gccccacaggctaagaaaa

SEQ ID NO: 431186 - DNA, 19 bp, Homo sapiens
  siRNA target sequence for MGC48998 (NM_178550.2,454-472).
ggcccaagacacatgcaaa

SEQ ID NO: 431187 - DNA, 19 bp, Homo sapiens
  siRNA target sequence for MGC48998 (NM_178550.2,646-664).
ctctgttccatgccaaaat

SEQ ID NO: 431188 - DNA, 19 bp, Homo sapiens
  siRNA target sequence for MGC48998 (NM_178550.2,648-666).
ctgttccatgccaaaatca

SEQ ID NO: 431189 - DNA, 19 bp, Homo sapiens
  siRNA target sequence for MGC35206 (NM_178552.2,568-586).
ccgaggagcaggctcaaaa

SEQ ID NO: 431190 - DNA, 19 bp, Homo sapiens
  siRNA target sequence for MGC35206 (NM_178552.2,600-618).
gtcttcgagggccagaaaa

SEQ ID NO: 431191 - DNA, 19 bp, Homo sapiens
  siRNA target sequence for MGC35206 (NM_178552.2,667-685).
ccgtcttctcagactacta

SEQ ID NO: 431192 - DNA, 19 bp, Homo sapiens
  siRNA target sequence for MGC35206 (NM_178552.2,745-763).
gcctcatgaaggcttctta

SEQ ID NO: 431193 - DNA, 19 bp, Homo sapiens
  siRNA target sequence for MGC35206 (NM_178552.2,747-765).
ctcatgaaggcttcttaca

SEQ ID NO: 431194 - DNA, 19 bp, Homo sapiens
  siRNA target sequence for MGC35206 (NM_178552.2,787-805).
cagtgagggacttagaaca

SEQ ID NO: 431195 - DNA, 19 bp, Homo sapiens
  siRNA target sequence for MGC35206 (NM_178552.2,814-832).
gcaggaagacggatgatct

SEQ ID NO: 431196 - DNA, 19 bp, Homo sapiens
  siRNA target sequence for MGC35206 (NM_178552.2,841-859).
ggcaccagaaaaatgctat

SEQ ID NO: 431197 - DNA, 19 bp, Homo sapiens
  siRNA target sequence for MGC44505 (NM_178553.2,591-609).
ggggcttctcacaacttgt

SEQ ID NO: 431198 - DNA, 19 bp, Homo sapiens
  siRNA target sequence for MGC44505 (NM_178553.2,745-763).
cggctcttgtgactcaaat

SEQ ID NO: 431199 - DNA, 19 bp, Homo sapiens
  siRNA target sequence for MGC44505 (NM_178553.2,1259-1277).
ccagtcgtggagtatccta

SEQ ID NO: 431200 - DNA, 19 bp, Homo sapiens
  siRNA target sequence for MGC44505 (NM_178553.2,1262-1280).
gtcgtggagtatcctatat

SEQ ID NO: 431201 - DNA, 19 bp, Homo sapiens
  siRNA target sequence for MGC44505 (NM_178553.2,1659-1677).
cacctcgggcaccaaaaca

SEQ ID NO: 431202 - DNA, 19 bp, Homo sapiens
  siRNA target sequence for MGC44505 (NM_178553.2,1736-1754).
gagctcattctccaaaagt

SEQ ID NO: 431203 - DNA, 19 bp, Homo sapiens
  siRNA target sequence for MGC44505 (NM_178553.2,1738-1756).
gctcattctccaaaagtca

SEQ ID NO: 431204 - DNA, 19 bp, Homo sapiens
  siRNA target sequence for FLJ33207 (NM_178554.2,77-95).
ggacatcaacgctgtatct

SEQ ID NO: 431205 - DNA, 19 bp, Homo sapiens
  siRNA target sequence for FLJ33207 (NM_178554.2,222-240).
gtccgaagatggcagaaat

SEQ ID NO: 431206 - DNA, 19 bp, Homo sapiens
  siRNA target sequence for FLJ33207 (NM_178554.2,383-401).
gttctccttggctaaacgt

SEQ ID NO: 431207 - DNA, 19 bp, Homo sapiens
  siRNA target sequence for FLJ33207 (NM_178554.2,386-404).
ctccttggctaaacgttta

SEQ ID NO: 431208 - DNA, 19 bp, Homo sapiens
  siRNA target sequence for FLJ33207 (NM_178554.2,388-406).
ccttggctaaacgtttaca

SEQ ID NO: 431209 - DNA, 19 bp, Homo sapiens
  siRNA target sequence for FLJ33207 (NM_178554.2,437-455).
gcaacctggagggaaagat

SEQ ID NO: 431210 - DNA, 19 bp, Homo sapiens
  siRNA target sequence for FLJ33207 (NM_178554.2,474-492).
gatcgatctagcctgaaat

SEQ ID NO: 431211 - DNA, 19 bp, Homo sapiens
  siRNA target sequence for FLJ33207 (NM_178554.2,477-495).
cgatctagcctgaaatcca

SEQ ID NO: 431212 - DNA, 19 bp, Homo sapiens
  siRNA target sequence for FLJ33207 (NM_178554.2,478-496).
gatctagcctgaaatccat

SEQ ID NO: 431213 - DNA, 19 bp, Homo sapiens
  siRNA target sequence for FLJ33207 (NM_178554.2,641-659).
ctgccatcacatagagtat

SEQ ID NO: 431214 - DNA, 19 bp, Homo sapiens
  siRNA target sequence for FLJ33207 (NM_178554.2,643-661).
gccatcacatagagtatga

SEQ ID NO: 431215 - DNA, 19 bp, Homo sapiens
  siRNA target sequence for FLJ33207 (NM_178554.2,645-663).
catcacatagagtatgaca

SEQ ID NO: 431216 - DNA, 19 bp, Homo sapiens
  siRNA target sequence for FLJ33207 (NM_178554.2,683-701).
ggaccgccaagccttcaaa

SEQ ID NO: 431217 - DNA, 19 bp, Homo sapiens
  siRNA target sequence for FLJ33207 (NM_178554.2,933-951).
gacaccatcacctccaaat

SEQ ID NO: 431218 - DNA, 19 bp, Homo sapiens
  siRNA target sequence for FLJ33207 (NM_178554.2,1063-1081).
ggcagtttgagaacaacat

SEQ ID NO: 431219 - DNA, 19 bp, Homo sapiens
  siRNA target sequence for FLJ33207 (NM_178554.2,1067-1085).
gtttgagaacaacatgtat

SEQ ID NO: 431220 - DNA, 19 bp, Homo sapiens
  siRNA target sequence for FLJ33207 (NM_178554.2,1191-1209).
ccgacgctgttcatgttca

SEQ ID NO: 431221 - DNA, 19 bp, Homo sapiens
  siRNA target sequence for FLJ33207 (NM_178554.2,1192-1210).
cgacgctgttcatgttcat

SEQ ID NO: 431222 - DNA, 19 bp, Homo sapiens
  siRNA target sequence for FLJ33207 (NM_178554.2,1355-1373).
cacgctcaagtgcaattat

SEQ ID NO: 431223 - DNA, 19 bp, Homo sapiens
  siRNA target sequence for FLJ33207 (NM_178554.2,1357-1375).
cgctcaagtgcaattatgt

SEQ ID NO: 431224 - DNA, 19 bp, Homo sapiens
  siRNA target sequence for FLJ33207 (NM_178554.2,1516-1534).
gcgtggaggagggcattaa

SEQ ID NO: 431225 - DNA, 19 bp, Homo sapiens
  siRNA target sequence for FLJ33207 (NM_178554.2,1517-1535).
cgtggaggagggcattaat

SEQ ID NO: 431226 - DNA, 19 bp, Homo sapiens
  siRNA target sequence for FLJ33207 (NM_178554.2,1658-1676).
gtttgccctcaagatctat

SEQ ID NO: 431227 - DNA, 19 bp, Homo sapiens
  siRNA target sequence for FLJ33207 (NM_178554.2,1689-1707).
gagaatgccaaccacaatt

SEQ ID NO: 431228 - DNA, 19 bp, Homo sapiens
  siRNA target sequence for FLJ25770 (NM_178555.2,200-218).
gtagtggtgtcacatctaa

SEQ ID NO: 431229 - DNA, 19 bp, Homo sapiens
  siRNA target sequence for FLJ25770 (NM_178555.2,248-266).
catctattcgtggtacaat

SEQ ID NO: 431230 - DNA, 19 bp, Homo sapiens
  siRNA target sequence for FLJ25770 (NM_178555.2,418-436).
gatttacagagaagactaa

SEQ ID NO: 431231 - DNA, 19 bp, Homo sapiens
  siRNA target sequence for FLJ25770 (NM_178555.2,443-461).
gcaatgaattgcatgagaa

SEQ ID NO: 431232 - DNA, 19 bp, Homo sapiens
  siRNA target sequence for FLJ25770 (NM_178555.2,444-462).
caatgaattgcatgagaaa

SEQ ID NO: 431233 - DNA, 19 bp, Homo sapiens
  siRNA target sequence for FLJ25770 (NM_178555.2,565-583).
cagtcccaggaggatttaa

SEQ ID NO: 431234 - DNA, 19 bp, Homo sapiens
  siRNA target sequence for FLJ25770 (NM_178555.2,804-822).
cttgggctcagctattagt

SEQ ID NO: 431235 - DNA, 19 bp, Homo sapiens
  siRNA target sequence for FLJ25770 (NM_178555.2,807-825).
gggctcagctattagtaaa

SEQ ID NO: 431236 - DNA, 19 bp, Homo sapiens
  siRNA target sequence for FLJ25770 (NM_178555.2,809-827).
gctcagctattagtaaaat

SEQ ID NO: 431237 - DNA, 19 bp, Homo sapiens
  siRNA target sequence for FLJ25770 (NM_178555.2,835-853).
gaattagacacagagattt

SEQ ID NO: 431238 - DNA, 19 bp, Homo sapiens
  siRNA target sequence for FLJ25770 (NM_178555.2,845-863).
cagagatttcttatcttaa

SEQ ID NO: 431239 - DNA, 19 bp, Homo sapiens
  siRNA target sequence for FLJ25770 (NM_178555.2,908-926).
ctgaatcacagaacaaaat

SEQ ID NO: 431240 - DNA, 19 bp, Homo sapiens
  siRNA target sequence for FLJ25770 (NM_178555.2,963-981).
gcagttaataagtgaacat

SEQ ID NO: 431241 - DNA, 19 bp, Homo sapiens
  siRNA target sequence for FLJ25770 (NM_178555.2,966-984).
gttaataagtgaacatgaa

SEQ ID NO: 431242 - DNA, 19 bp, Homo sapiens
  siRNA target sequence for FLJ25770 (NM_178555.2,1024-1042).
cgaagccaagccaatagta

SEQ ID NO: 431243 - DNA, 19 bp, Homo sapiens
  siRNA target sequence for FLJ25770 (NM_178555.2,1047-1065).
gagtcaaatggaaatcatt

SEQ ID NO: 431244 - DNA, 19 bp, Homo sapiens
  siRNA target sequence for FLJ25770 (NM_178555.2,1108-1126).
ctcagcgatctggaatcta

SEQ ID NO: 431245 - DNA, 19 bp, Homo sapiens
  siRNA target sequence for FLJ25770 (NM_178555.2,1113-1131).
cgatctggaatctactgtt

SEQ ID NO: 431246 - DNA, 19 bp, Homo sapiens
  siRNA target sequence for FLJ25770 (NM_178555.2,1114-1132).
gatctggaatctactgttt

SEQ ID NO: 431247 - DNA, 19 bp, Homo sapiens
  siRNA target sequence for FLJ25770 (NM_178555.2,1133-1151).
ctcagctacgttctgaatt

SEQ ID NO: 431248 - DNA, 19 bp, Homo sapiens
  siRNA target sequence for FLJ25770 (NM_178555.2,1135-1153).
cagctacgttctgaattaa

SEQ ID NO: 431249 - DNA, 19 bp, Homo sapiens
  siRNA target sequence for FLJ25770 (NM_178555.2,1236-1254).
ccggacagagcgtgatcaa

SEQ ID NO: 431250 - DNA, 19 bp, Homo sapiens
  siRNA target sequence for FLJ25770 (NM_178555.2,1237-1255).
cggacagagcgtgatcaat

SEQ ID NO: 431251 - DNA, 19 bp, Homo sapiens
  siRNA target sequence for FLJ25770 (NM_178555.2,1381-1399).
ccctctggttgcttcacat

SEQ ID NO: 431252 - DNA, 19 bp, Homo sapiens
  siRNA target sequence for FLJ25770 (NM_178555.2,1387-1405).
ggttgcttcacattcacat

SEQ ID NO: 431253 - DNA, 19 bp, Homo sapiens
  siRNA target sequence for FLJ25770 (NM_178555.2,1433-1451).
cagcttctcgttcattcaa

SEQ ID NO: 431254 - DNA, 19 bp, Homo sapiens
  siRNA target sequence for FLJ25770 (NM_178555.2,1435-1453).
gcttctcgttcattcaatt

SEQ ID NO: 431255 - DNA, 19 bp, Homo sapiens
  siRNA target sequence for FLJ25770 (NM_178555.2,1476-1494).
gcactcactcctaactagt

SEQ ID NO: 431256 - DNA, 19 bp, Homo sapiens
  siRNA target sequence for FLJ25770 (NM_178555.2,1493-1511).
gttcagttgaaggttcaat

SEQ ID NO: 431257 - DNA, 19 bp, Homo sapiens
  siRNA target sequence for FLJ25770 (NM_178555.2,1498-1516).
gttgaaggttcaataggtt

SEQ ID NO: 431258 - DNA, 19 bp, Homo sapiens
  siRNA target sequence for FLJ25770 (NM_178555.2,1518-1536).
cacatcacagtatagatct

SEQ ID NO: 431259 - DNA, 19 bp, Homo sapiens
  siRNA target sequence for FLJ25770 (NM_178555.2,1537-1555).
gccaaacctattcattcat

SEQ ID NO: 431260 - DNA, 19 bp, Homo sapiens
  siRNA target sequence for FLJ25770 (NM_178555.2,1553-1571).
catctgattctgttaaaga

SEQ ID NO: 431261 - DNA, 19 bp, Homo sapiens
  siRNA target sequence for FLJ25770 (NM_178555.2,1578-1596).
gtctccgccaatagaaaca

SEQ ID NO: 431262 - DNA, 19 bp, Homo sapiens
  siRNA target sequence for FLJ25770 (NM_178555.2,1617-1635).
gcttcagaacagactagaa

SEQ ID NO: 431263 - DNA, 19 bp, Homo sapiens
  siRNA target sequence for FLJ36180 (NM_178556.3,162-180).
gtttcatctgcttagacta

SEQ ID NO: 431264 - DNA, 19 bp, Homo sapiens
  siRNA target sequence for FLJ36180 (NM_178556.3,244-262).
ctgggaggaacataacaca

SEQ ID NO: 431265 - DNA, 19 bp, Homo sapiens
  siRNA target sequence for FLJ36180 (NM_178556.3,250-268).
ggaacataacacaccttta

SEQ ID NO: 431266 - DNA, 19 bp, Homo sapiens
  siRNA target sequence for FLJ36180 (NM_178556.3,568-586).
ggaagctcaggctgtacta

SEQ ID NO: 431267 - DNA, 19 bp, Homo sapiens
  siRNA target sequence for FLJ36180 (NM_178556.3,569-587).
gaagctcaggctgtactaa

SEQ ID NO: 431268 - DNA, 19 bp, Homo sapiens
  siRNA target sequence for FLJ36180 (NM_178556.3,579-597).
ctgtactaacccatgagaa

SEQ ID NO: 431269 - DNA, 19 bp, Homo sapiens
  siRNA target sequence for FLJ36180 (NM_178556.3,633-651).
cttgtaaacaggttgttgt

SEQ ID NO: 431270 - DNA, 19 bp, Homo sapiens
  siRNA target sequence for FLJ36180 (NM_178556.3,641-659).
caggttgttgtgtcagaat

SEQ ID NO: 431271 - DNA, 19 bp, Homo sapiens
  siRNA target sequence for FLJ36180 (NM_178556.3,767-785).
ctgacccagcaaatcagaa

SEQ ID NO: 431272 - DNA, 19 bp, Homo sapiens
  siRNA target sequence for FLJ36180 (NM_178556.3,793-811).
caaaatgatcgcacagatt

SEQ ID NO: 431273 - DNA, 19 bp, Homo sapiens
  siRNA target sequence for FLJ36180 (NM_178556.3,824-842).
caaagctcggctttcgaat

SEQ ID NO: 431274 - DNA, 19 bp, Homo sapiens
  siRNA target sequence for FLJ36180 (NM_178556.3,828-846).
gctcggctttcgaatctct

SEQ ID NO: 431275 - DNA, 19 bp, Homo sapiens
  siRNA target sequence for FLJ36180 (NM_178556.3,829-847).
ctcggctttcgaatctctt

SEQ ID NO: 431276 - DNA, 19 bp, Homo sapiens
  siRNA target sequence for FLJ36180 (NM_178556.3,930-948).
gccgcatcacgggaatgaa

SEQ ID NO: 431277 - DNA, 19 bp, Homo sapiens
  siRNA target sequence for FLJ36180 (NM_178556.3,1232-1250).
ggggacctgttctcactaa

SEQ ID NO: 431278 - DNA, 19 bp, Homo sapiens
  siRNA target sequence for FLJ36180 (NM_178556.3,1234-1252).
ggacctgttctcactaata

SEQ ID NO: 431279 - DNA, 19 bp, Homo sapiens
  siRNA target sequence for FLJ36180 (NM_178556.3,1240-1258).
gttctcactaataggttta

SEQ ID NO: 431280 - DNA, 19 bp, Homo sapiens
  siRNA target sequence for FLJ36180 (NM_178556.3,1351-1369).
ctatgaatctggacatata

SEQ ID NO: 431281 - DNA, 19 bp, Homo sapiens
  siRNA target sequence for FLJ36180 (NM_178556.3,1362-1380).
gacatatagcattctacaa

SEQ ID NO: 431282 - DNA, 19 bp, Homo sapiens
  siRNA target sequence for FLJ36180 (NM_178556.3,1386-1404).
cggatgaatccctcatcta

SEQ ID NO: 431283 - DNA, 19 bp, Homo sapiens
  siRNA target sequence for FLJ36180 (NM_178556.3,1432-1450).
ggccctcaggcctatcttt

SEQ ID NO: 431284 - DNA, 19 bp, Homo sapiens
  siRNA target sequence for FLJ36180 (NM_178556.3,1463-1481).
ccaaatgaggggacaaaca

SEQ ID NO: 431285 - DNA, 19 bp, Homo sapiens
  siRNA target sequence for MGC50844 (NM_178562.2,281-299).
gtcagcccgctggtgaaat

SEQ ID NO: 431286 - DNA, 19 bp, Homo sapiens
  siRNA target sequence for MGC50844 (NM_178562.2,285-303).
gcccgctggtgaaatacct

SEQ ID NO: 431287 - DNA, 19 bp, Homo sapiens
  siRNA target sequence for MGC50844 (NM_178562.2,362-380).
gtctacgctcggctaatga

SEQ ID NO: 431288 - DNA, 19 bp, Homo sapiens
  siRNA target sequence for MGC50844 (NM_178562.2,483-501).
ggtccctccgcgagaacat

SEQ ID NO: 431289 - DNA, 19 bp, Homo sapiens
  siRNA target sequence for MGC50844 (NM_178562.2,721-739).
ctggtctcagaacatgtat

SEQ ID NO: 431290 - DNA, 19 bp, Homo sapiens
  siRNA target sequence for MGC50844 (NM_178562.2,845-863).
ggtatgcaggcctttgact

SEQ ID NO: 431291 - DNA, 19 bp, Homo sapiens
  siRNA target sequence for MGC50844 (NM_178562.2,846-864).
gtatgcaggcctttgacta

SEQ ID NO: 431292 - DNA, 19 bp, Homo sapiens
  siRNA target sequence for MGC50844 (NM_178562.2,862-880).
ctacttggaagctagcaaa

SEQ ID NO: 431293 - DNA, 19 bp, Homo sapiens
  siRNA target sequence for MGC50844 (NM_178562.2,921-939).
ggatacacagcaacctatt

SEQ ID NO: 431294 - DNA, 19 bp, Homo sapiens
  siRNA target sequence for MGC50844 (NM_178562.2,928-946).
cagcaacctattcttactt

SEQ ID NO: 431295 - DNA, 19 bp, Homo sapiens
  siRNA target sequence for MGC35555 (NM_178565.3,394-412).
gcagtaagcgagctagtta

SEQ ID NO: 431296 - DNA, 19 bp, Homo sapiens
  siRNA target sequence for MGC35555 (NM_178565.3,395-413).
cagtaagcgagctagttat

SEQ ID NO: 431297 - DNA, 19 bp, Homo sapiens
  siRNA target sequence for MGC35555 (NM_178565.3,397-415).
gtaagcgagctagttatgt

SEQ ID NO: 431298 - DNA, 19 bp, Homo sapiens
  siRNA target sequence for MGC35555 (NM_178565.3,401-419).
gcgagctagttatgtatca

SEQ ID NO: 431299 - DNA, 19 bp, Homo sapiens
  siRNA target sequence for MGC35555 (NM_178565.3,402-420).
cgagctagttatgtatcaa

SEQ ID NO: 431300 - DNA, 19 bp, Homo sapiens
  siRNA target sequence for MGC35555 (NM_178565.3,466-484).
gtagccgatgtcaacagaa

SEQ ID NO: 431301 - DNA, 19 bp, Homo sapiens
  siRNA target sequence for MGC35555 (NM_178565.3,542-560).
ctgcccatccgggtactat

SEQ ID NO: 431302 - DNA, 19 bp, Homo sapiens
  siRNA target sequence for MGC35555 (NM_178565.3,562-580).
gacaccgagccccagatat

SEQ ID NO: 431303 - DNA, 19 bp, Homo sapiens
  siRNA target sequence for MGC35555 (NM_178565.3,564-582).
caccgagccccagatatga

SEQ ID NO: 431304 - DNA, 19 bp, Homo sapiens
  siRNA target sequence for MGC35555 (NM_178565.3,668-686).
gcatagaggccgttgcttt

SEQ ID NO: 431305 - DNA, 19 bp, Homo sapiens
  siRNA target sequence for MGC35555 (NM_178565.3,675-693).
ggccgttgctttgatgaat

SEQ ID NO: 431306 - DNA, 19 bp, Homo sapiens
  siRNA target sequence for MGC35555 (NM_178565.3,677-695).
ccgttgctttgatgaatgt

SEQ ID NO: 431307 - DNA, 19 bp, Homo sapiens
  siRNA target sequence for MGC35555 (NM_178565.3,703-721).
gttttgcaccattagaaga

SEQ ID NO: 431308 - DNA, 19 bp, Homo sapiens
  siRNA target sequence for MGC35555 (NM_178565.3,761-779).
gagcgaatggggaacttgt

SEQ ID NO: 431309 - DNA, 19 bp, Homo sapiens
  siRNA target sequence for MGC35555 (NM_178565.3,792-810).
cgcacatgtggatttaaat

SEQ ID NO: 431310 - DNA, 19 bp, Homo sapiens
  siRNA target sequence for MGC35555 (NM_178565.3,823-841).
ccagaacacggcaaattgt

SEQ ID NO: 431311 - DNA, 19 bp, Homo sapiens
  siRNA target sequence for MGC35555 (NM_178565.3,824-842).
cagaacacggcaaattgtt

SEQ ID NO: 431312 - DNA, 19 bp, Homo sapiens
  siRNA target sequence for MGC35555 (NM_178565.3,826-844).
gaacacggcaaattgttaa

SEQ ID NO: 431313 - DNA, 19 bp, Homo sapiens
  siRNA target sequence for ZDHHC21 (NM_178566.2,475-493).
gggtctccggattcacttt

SEQ ID NO: 431314 - DNA, 19 bp, Homo sapiens
  siRNA target sequence for ZDHHC21 (NM_178566.2,477-495).
gtctccggattcactttgt

SEQ ID NO: 431315 - DNA, 19 bp, Homo sapiens
  siRNA target sequence for ZDHHC21 (NM_178566.2,481-499).
ccggattcactttgttgtt

SEQ ID NO: 431316 - DNA, 19 bp, Homo sapiens
  siRNA target sequence for ZDHHC21 (NM_178566.2,514-532).
gtgctgcatgggtttgatt

SEQ ID NO: 431317 - DNA, 19 bp, Homo sapiens
  siRNA target sequence for ZDHHC21 (NM_178566.2,533-551).
gtctttgtttggttataca

SEQ ID NO: 431318 - DNA, 19 bp, Homo sapiens
  siRNA target sequence for ZDHHC21 (NM_178566.2,608-626).
ccaggcatattaataataa

SEQ ID NO: 431319 - DNA, 19 bp, Homo sapiens
  siRNA target sequence for ZDHHC21 (NM_178566.2,667-685).
gagggcctccataactgat

SEQ ID NO: 431320 - DNA, 19 bp, Homo sapiens
  siRNA target sequence for ZDHHC21 (NM_178566.2,909-927).
cttgctacgcactgatgtt

SEQ ID NO: 431321 - DNA, 19 bp, Homo sapiens
  siRNA target sequence for ZDHHC21 (NM_178566.2,956-974).
ccactaaaaaagcgtaatt

SEQ ID NO: 431322 - DNA, 19 bp, Homo sapiens
  siRNA target sequence for ZDHHC21 (NM_178566.2,957-975).
cactaaaaaagcgtaattt

SEQ ID NO: 431323 - DNA, 19 bp, Homo sapiens
  siRNA target sequence for ZDHHC21 (NM_178566.2,979-997).
cctctttgtttttagacat

SEQ ID NO: 431324 - DNA, 19 bp, Homo sapiens
  siRNA target sequence for ZDHHC21 (NM_178566.2,993-1011).
gacatgaattggccataat

SEQ ID NO: 431325 - DNA, 19 bp, Homo sapiens
  siRNA target sequence for ZDHHC21 (NM_178566.2,995-1013).
catgaattggccataatga

SEQ ID NO: 431326 - DNA, 19 bp, Homo sapiens
  siRNA target sequence for ZDHHC21 (NM_178566.2,1022-1040).
gcctttatgggcattacta

SEQ ID NO: 431327 - DNA, 19 bp, Homo sapiens
  siRNA target sequence for ZDHHC21 (NM_178566.2,1030-1048).
gggcattactatgttagtt

SEQ ID NO: 431328 - DNA, 19 bp, Homo sapiens
  siRNA target sequence for ZDHHC21 (NM_178566.2,1050-1068).
gaataactggactctttta

SEQ ID NO: 431329 - DNA, 19 bp, Homo sapiens
  siRNA target sequence for ZDHHC21 (NM_178566.2,1084-1102).
catcatcacagatacaaca

SEQ ID NO: 431330 - DNA, 19 bp, Homo sapiens
  siRNA target sequence for ZDHHC21 (NM_178566.2,1109-1127).
gaaaagatgtcaaactgtt

SEQ ID NO: 431331 - DNA, 19 bp, Homo sapiens
  siRNA target sequence for ZDHHC21 (NM_178566.2,1117-1135).
gtcaaactgttgtgaagat

SEQ ID NO: 431332 - DNA, 19 bp, Homo sapiens
  siRNA target sequence for CEI (NM_178569.2,334-352).
cactggggggatgattgtt

SEQ ID NO: 431333 - DNA, 19 bp, Homo sapiens
  siRNA target sequence for CEI (NM_178569.2,431-449).
cggtgcagtgggcattaca

SEQ ID NO: 431334 - DNA, 19 bp, Homo sapiens
  siRNA target sequence for CEI (NM_178569.2,454-472).
caagggaaccagttgcaaa

SEQ ID NO: 431335 - DNA, 19 bp, Homo sapiens
  siRNA target sequence for CEI (NM_178569.2,511-529).
gcaggctcccgccaaagaa

SEQ ID NO: 431336 - DNA, 19 bp, Homo sapiens
  siRNA target sequence for CEI (NM_178569.2,514-532).
ggctcccgccaaagaattt

SEQ ID NO: 431337 - DNA, 19 bp, Homo sapiens
  siRNA target sequence for MGC51025 (NM_178571.2,898-916).
gcactccctgtggtattct

SEQ ID NO: 431338 - DNA, 19 bp, Homo sapiens
  siRNA target sequence for MGC51025 (NM_178571.2,899-917).
cactccctgtggtattcta

SEQ ID NO: 431339 - DNA, 19 bp, Homo sapiens
  siRNA target sequence for MGC51025 (NM_178571.2,901-919).
ctccctgtggtattctaca

SEQ ID NO: 431340 - DNA, 19 bp, Homo sapiens
  siRNA target sequence for LYRIC (NM_178812.2,697-715).
cgagaagcccaaaccaaat

SEQ ID NO: 431341 - DNA, 19 bp, Homo sapiens
  siRNA target sequence for LYRIC (NM_178812.2,752-770).
cgaacacctcaaagtgtaa

SEQ ID NO: 431342 - DNA, 19 bp, Homo sapiens
  siRNA target sequence for LYRIC (NM_178812.2,901-919).
ctgggaaactaaaattagt

SEQ ID NO: 431343 - DNA, 19 bp, Homo sapiens
  siRNA target sequence for LYRIC (NM_178812.2,950-968).
gataaggtgctgactgatt

SEQ ID NO: 431344 - DNA, 19 bp, Homo sapiens
  siRNA target sequence for LYRIC (NM_178812.2,972-990).
gttcattggattcaactat

SEQ ID NO: 431345 - DNA, 19 bp, Homo sapiens
  siRNA target sequence for LYRIC (NM_178812.2,987-1005).
ctatccctgggatagaaaa

SEQ ID NO: 431346 - DNA, 19 bp, Homo sapiens
  siRNA target sequence for LYRIC (NM_178812.2,1016-1034).
gttaccaccgagcaactta

SEQ ID NO: 431347 - DNA, 19 bp, Homo sapiens
  siRNA target sequence for LYRIC (NM_178812.2,1091-1109).
gttcaagttagcaacttta

SEQ ID NO: 431348 - DNA, 19 bp, Homo sapiens
  siRNA target sequence for LYRIC (NM_178812.2,1094-1112).
caagttagcaactttaaat

SEQ ID NO: 431349 - DNA, 19 bp, Homo sapiens
  siRNA target sequence for LYRIC (NM_178812.2,1190-1208).
gaaaagtctgtaaaactct

SEQ ID NO: 431350 - DNA, 19 bp, Homo sapiens
  siRNA target sequence for LYRIC (NM_178812.2,1310-1328).
gatgctaatacaaatggaa

SEQ ID NO: 431351 - DNA, 19 bp, Homo sapiens
  siRNA target sequence for LYRIC (NM_178812.2,1314-1332).
ctaatacaaatggaaaaga

SEQ ID NO: 431352 - DNA, 19 bp, Homo sapiens
  siRNA target sequence for LYRIC (NM_178812.2,1347-1365).
ggagtgaccgttcaatatt

SEQ ID NO: 431353 - DNA, 19 bp, Homo sapiens
  siRNA target sequence for LYRIC (NM_178812.2,1348-1366).
gagtgaccgttcaatattt

SEQ ID NO: 431354 - DNA, 19 bp, Homo sapiens
  siRNA target sequence for LYRIC (NM_178812.2,1402-1420).
gtctaccacttctgattat

SEQ ID NO: 431355 - DNA, 19 bp, Homo sapiens
  siRNA target sequence for LYRIC (NM_178812.2,1404-1422).
ctaccacttctgattatca

SEQ ID NO: 431356 - DNA, 19 bp, Homo sapiens
  siRNA target sequence for LYRIC (NM_178812.2,1425-1443).
gggatgttagccgtaatca

SEQ ID NO: 431357 - DNA, 19 bp, Homo sapiens
  siRNA target sequence for LYRIC (NM_178812.2,1426-1444).
ggatgttagccgtaatcaa

SEQ ID NO: 431358 - DNA, 19 bp, Homo sapiens
  siRNA target sequence for LYRIC (NM_178812.2,1434-1452).
gccgtaatcaaccctatat

SEQ ID NO: 431359 - DNA, 19 bp, Homo sapiens
  siRNA target sequence for LYRIC (NM_178812.2,1437-1455).
gtaatcaaccctatatcga

SEQ ID NO: 431360 - DNA, 19 bp, Homo sapiens
  siRNA target sequence for LYRIC (NM_178812.2,1445-1463).
ccctatatcgatgatgaat

SEQ ID NO: 431361 - DNA, 19 bp, Homo sapiens
  siRNA target sequence for LYRIC (NM_178812.2,1546-1564).
cgaagaaagagcttcactt

SEQ ID NO: 431362 - DNA, 19 bp, Homo sapiens
  siRNA target sequence for LYRIC (NM_178812.2,1759-1777).
ctctaaaacccgtccaaaa

SEQ ID NO: 431363 - DNA, 19 bp, Homo sapiens
  siRNA target sequence for LYRIC (NM_178812.2,1801-1819).
gaccataagcactagtgat

SEQ ID NO: 431364 - DNA, 19 bp, Homo sapiens
  siRNA target sequence for LYRIC (NM_178812.2,1823-1841).
gccgaagtactcgtcaaaa

SEQ ID NO: 431365 - DNA, 19 bp, Homo sapiens
  siRNA target sequence for LYRIC (NM_178812.2,1825-1843).
cgaagtactcgtcaaaaat

SEQ ID NO: 431366 - DNA, 19 bp, Homo sapiens
  siRNA target sequence for LYRIC (NM_178812.2,1878-1896).
ctaccgagccatctgtaat

SEQ ID NO: 431367 - DNA, 19 bp, Homo sapiens
  siRNA target sequence for LYRIC (NM_178812.2,1881-1899).
ccgagccatctgtaatctt

SEQ ID NO: 431368 - DNA, 19 bp, Homo sapiens
  siRNA target sequence for LYRIC (NM_178812.2,1882-1900).
cgagccatctgtaatctta

SEQ ID NO: 431369 - DNA, 19 bp, Homo sapiens
  siRNA target sequence for LYRIC (NM_178812.2,1883-1901).
gagccatctgtaatcttat

SEQ ID NO: 431370 - DNA, 19 bp, Homo sapiens
  siRNA target sequence for LYRIC (NM_178812.2,1886-1904).
ccatctgtaatcttatcaa

SEQ ID NO: 431371 - DNA, 19 bp, Homo sapiens
  siRNA target sequence for LYRIC (NM_178812.2,1929-1947).
cccaagtgccgccaatact

SEQ ID NO: 431372 - DNA, 19 bp, Homo sapiens
  siRNA target sequence for LYRIC (NM_178812.2,2003-2021).
cagaccaagtctgaaacta

SEQ ID NO: 431373 - DNA, 19 bp, Homo sapiens
  siRNA target sequence for C10orf5 (NM_178816.2,144-162).
cttccccaaggtatcatta

SEQ ID NO: 431374 - DNA, 19 bp, Homo sapiens
  siRNA target sequence for C10orf5 (NM_178816.2,153-171).
ggtatcattatagtcttta

SEQ ID NO: 431375 - DNA, 19 bp, Homo sapiens
  siRNA target sequence for C10orf5 (NM_178816.2,185-203).
caccacacctcaaatatat

SEQ ID NO: 431376 - DNA, 19 bp, Homo sapiens
  siRNA target sequence for FBXO27 (NM_178820.3,409-427).
catcggacgcaaccttatt

SEQ ID NO: 431377 - DNA, 19 bp, Homo sapiens
  siRNA target sequence for FBXO27 (NM_178820.3,537-555).
cgtgcttcgtgacttcatt

SEQ ID NO: 431378 - DNA, 19 bp, Homo sapiens
  siRNA target sequence for FBXO27 (NM_178820.3,627-645).
gcaggattgagatttgtgt

SEQ ID NO: 431379 - DNA, 19 bp, Homo sapiens
  siRNA target sequence for FBXO27 (NM_178820.3,668-686).
cacgacagcggctgtatgt

SEQ ID NO: 431380 - DNA, 19 bp, Homo sapiens
  siRNA target sequence for FBXO27 (NM_178820.3,671-689).
gacagcggctgtatgtaca

SEQ ID NO: 431381 - DNA, 19 bp, Homo sapiens
  siRNA target sequence for FBXO27 (NM_178820.3,712-730).
cgccaaccagactgttcta

SEQ ID NO: 431382 - DNA, 19 bp, Homo sapiens
  siRNA target sequence for FBXO27 (NM_178820.3,714-732).
ccaaccagactgttctaga

SEQ ID NO: 431383 - DNA, 19 bp, Homo sapiens
  siRNA target sequence for FBXO27 (NM_178820.3,715-733).
caaccagactgttctagat

SEQ ID NO: 431384 - DNA, 19 bp, Homo sapiens
  siRNA target sequence for FBXO27 (NM_178820.3,718-736).
ccagactgttctagataaa

SEQ ID NO: 431385 - DNA, 19 bp, Homo sapiens
  siRNA target sequence for FBXO27 (NM_178820.3,719-737).
cagactgttctagataaat

SEQ ID NO: 431386 - DNA, 19 bp, Homo sapiens
  siRNA target sequence for FLJ25955 (NM_178821.1,93-111).
gcctcctgctccggtatta

SEQ ID NO: 431387 - DNA, 19 bp, Homo sapiens
  siRNA target sequence for FLJ25955 (NM_178821.1,106-124).
gtattacccgccaggaatt

SEQ ID NO: 431388 - DNA, 19 bp, Homo sapiens
  siRNA target sequence for FLJ25955 (NM_178821.1,120-138).
gaattatgttggaatatga

SEQ ID NO: 431389 - DNA, 19 bp, Homo sapiens
  siRNA target sequence for FLJ25955 (NM_178821.1,146-164).
ggagaattaaagactaagt

SEQ ID NO: 431390 - DNA, 19 bp, Homo sapiens
  siRNA target sequence for FLJ25955 (NM_178821.1,202-220).
cagtgcgttagtagaagaa

SEQ ID NO: 431391 - DNA, 19 bp, Homo sapiens
  siRNA target sequence for FLJ25955 (NM_178821.1,204-222).
gtgcgttagtagaagaaat

SEQ ID NO: 431392 - DNA, 19 bp, Homo sapiens
  siRNA target sequence for FLJ25955 (NM_178821.1,258-276).
cagagcaagtcaaactttt

SEQ ID NO: 431393 - DNA, 19 bp, Homo sapiens
  siRNA target sequence for FLJ25955 (NM_178821.1,260-278).
gagcaagtcaaacttttga

SEQ ID NO: 431394 - DNA, 19 bp, Homo sapiens
  siRNA target sequence for FLJ25955 (NM_178821.1,262-280).
gcaagtcaaacttttgata

SEQ ID NO: 431395 - DNA, 19 bp, Homo sapiens
  siRNA target sequence for FLJ25955 (NM_178821.1,266-284).
gtcaaacttttgatacaga

SEQ ID NO: 431396 - DNA, 19 bp, Homo sapiens
  siRNA target sequence for FLJ25955 (NM_178821.1,302-320).
ggccagaacagcaatcaca

SEQ ID NO: 431397 - DNA, 19 bp, Homo sapiens
  siRNA target sequence for FLJ25955 (NM_178821.1,310-328).
cagcaatcacacgttctat

SEQ ID NO: 431398 - DNA, 19 bp, Homo sapiens
  siRNA target sequence for FLJ25955 (NM_178821.1,312-330).
gcaatcacacgttctatct

SEQ ID NO: 431399 - DNA, 19 bp, Homo sapiens
  siRNA target sequence for FLJ25955 (NM_178821.1,313-331).
caatcacacgttctatctt

SEQ ID NO: 431400 - DNA, 19 bp, Homo sapiens
  siRNA target sequence for FLJ25955 (NM_178821.1,317-335).
cacacgttctatcttttta

SEQ ID NO: 431401 - DNA, 19 bp, Homo sapiens
  siRNA target sequence for FLJ25955 (NM_178821.1,382-400).
caaatcgggctcatgcttt

SEQ ID NO: 431402 - DNA, 19 bp, Homo sapiens
  siRNA target sequence for FLJ25955 (NM_178821.1,388-406).
gggctcatgctttatcaca

SEQ ID NO: 431403 - DNA, 19 bp, Homo sapiens
  siRNA target sequence for FLJ25955 (NM_178821.1,485-503).
gtggtttatgccatagcat

SEQ ID NO: 431404 - DNA, 19 bp, Homo sapiens
  siRNA target sequence for FLJ25955 (NM_178821.1,529-547).
cgccactgggtcctttgat

SEQ ID NO: 431405 - DNA, 19 bp, Homo sapiens
  siRNA target sequence for FLJ25955 (NM_178821.1,531-549).
ccactgggtcctttgataa

SEQ ID NO: 431406 - DNA, 19 bp, Homo sapiens
  siRNA target sequence for FLJ25955 (NM_178821.1,603-621).
gtcatacagcagaaatagt

SEQ ID NO: 431407 - DNA, 19 bp, Homo sapiens
  siRNA target sequence for FLJ25955 (NM_178821.1,709-727).
ggaagtttacaccttaaga

SEQ ID NO: 431408 - DNA, 19 bp, Homo sapiens
  siRNA target sequence for FLJ25955 (NM_178821.1,784-802).
cacggggtcttttgatcat

SEQ ID NO: 431409 - DNA, 19 bp, Homo sapiens
  siRNA target sequence for FLJ25955 (NM_178821.1,830-848).
ggaaggaaggtaaatatct

SEQ ID NO: 431410 - DNA, 19 bp, Homo sapiens
  siRNA target sequence for FLJ25955 (NM_178821.1,854-872).
ggtcattgtgctgagatta

SEQ ID NO: 431411 - DNA, 19 bp, Homo sapiens
  siRNA target sequence for FLJ25955 (NM_178821.1,893-911).
gattgctctctaatattaa

SEQ ID NO: 431412 - DNA, 19 bp, Homo sapiens
  siRNA target sequence for FLJ25955 (NM_178821.1,914-932).
ggctctatggacaaaacct

SEQ ID NO: 431413 - DNA, 19 bp, Homo sapiens
  siRNA target sequence for FLJ25955 (NM_178821.1,937-955).
gctgtgggatgctacaaat

SEQ ID NO: 431414 - DNA, 19 bp, Homo sapiens
  siRNA target sequence for FLJ25955 (NM_178821.1,948-966).
ctacaaatggaaaatgtgt

SEQ ID NO: 431415 - DNA, 19 bp, Homo sapiens
  siRNA target sequence for FLJ25955 (NM_178821.1,972-990).
ccttaacaggccatgatga

SEQ ID NO: 431416 - DNA, 19 bp, Homo sapiens
  siRNA target sequence for FLJ25955 (NM_178821.1,973-991).
cttaacaggccatgatgat

SEQ ID NO: 431417 - DNA, 19 bp, Homo sapiens
  siRNA target sequence for FLJ25955 (NM_178821.1,1013-1031).
gattacactggaaagctta

SEQ ID NO: 431418 - DNA, 19 bp, Homo sapiens
  siRNA target sequence for FLJ25955 (NM_178821.1,1232-1250).
gggcacactgatgaaatct

SEQ ID NO: 431419 - DNA, 19 bp, Homo sapiens
  siRNA target sequence for FLJ25955 (NM_178821.1,1233-1251).
ggcacactgatgaaatctt

SEQ ID NO: 431420 - DNA, 19 bp, Homo sapiens
  siRNA target sequence for FLJ25972 (NM_178822.3,91-109).
cgccgctgtgcctgttata

SEQ ID NO: 431421 - DNA, 19 bp, Homo sapiens
  siRNA target sequence for FLJ25972 (NM_178822.3,92-110).
gccgctgtgcctgttatat

SEQ ID NO: 431422 - DNA, 19 bp, Homo sapiens
  siRNA target sequence for FLJ25972 (NM_178822.3,177-195).
ggaacgcatcaatttagga

SEQ ID NO: 431423 - DNA, 19 bp, Homo sapiens
  siRNA target sequence for FLJ25972 (NM_178822.3,178-196).
gaacgcatcaatttaggat

SEQ ID NO: 431424 - DNA, 19 bp, Homo sapiens
  siRNA target sequence for FLJ25972 (NM_178822.3,193-211).
ggatacaacagcttggtta

SEQ ID NO: 431425 - DNA, 19 bp, Homo sapiens
  siRNA target sequence for FLJ25972 (NM_178822.3,269-287).
gcaatggcattcacacaat

SEQ ID NO: 431426 - DNA, 19 bp, Homo sapiens
  siRNA target sequence for FLJ25972 (NM_178822.3,292-310).
gacaagaccttctcagatt

SEQ ID NO: 431427 - DNA, 19 bp, Homo sapiens
  siRNA target sequence for FLJ25972 (NM_178822.3,352-370).
cgaaaacttcagaaagata

SEQ ID NO: 431428 - DNA, 19 bp, Homo sapiens
  siRNA target sequence for FLJ25972 (NM_178822.3,405-423).
catggaccacaacaatatt

SEQ ID NO: 431429 - DNA, 19 bp, Homo sapiens
  siRNA target sequence for FLJ25972 (NM_178822.3,501-519).
gctccacccagatacattt

SEQ ID NO: 431430 - DNA, 19 bp, Homo sapiens
  siRNA target sequence for FLJ25972 (NM_178822.3,530-548).
gctacctccagatatttaa

SEQ ID NO: 431431 - DNA, 19 bp, Homo sapiens
  siRNA target sequence for FLJ25972 (NM_178822.3,568-586).
ctatacttgtctgataact

SEQ ID NO: 431432 - DNA, 19 bp, Homo sapiens
  siRNA target sequence for FLJ25972 (NM_178822.3,703-721).
caggagaagccagatgtaa

SEQ ID NO: 431433 - DNA, 19 bp, Homo sapiens
  siRNA target sequence for FLJ25972 (NM_178822.3,706-724).
gagaagccagatgtaataa

SEQ ID NO: 431434 - DNA, 19 bp, Homo sapiens
  siRNA target sequence for FLJ25972 (NM_178822.3,712-730).
ccagatgtaataaaatgca

SEQ ID NO: 431435 - DNA, 19 bp, Homo sapiens
  siRNA target sequence for FLJ25972 (NM_178822.3,834-852).
gtgtgccaagccaaccatt

SEQ ID NO: 431436 - DNA, 19 bp, Homo sapiens
  siRNA target sequence for FLJ25972 (NM_178822.3,940-958).
ggctccctcactttgaata

SEQ ID NO: 431437 - DNA, 19 bp, Homo sapiens
  siRNA target sequence for FLJ25972 (NM_178822.3,941-959).
gctccctcactttgaatat

SEQ ID NO: 431438 - DNA, 19 bp, Homo sapiens
  siRNA target sequence for FLJ25972 (NM_178822.3,1050-1068).
ctacatcgtgctaaatact

SEQ ID NO: 431439 - DNA, 19 bp, Homo sapiens
  siRNA target sequence for FLJ25972 (NM_178822.3,1056-1074).
cgtgctaaatacttcattt

SEQ ID NO: 431440 - DNA, 19 bp, Homo sapiens
  siRNA target sequence for FLJ25972 (NM_178822.3,1059-1077).
gctaaatacttcattttca

SEQ ID NO: 431441 - DNA, 19 bp, Homo sapiens
  siRNA target sequence for FLJ25972 (NM_178822.3,1126-1144).
caaattttggctttgtaca

SEQ ID NO: 431442 - DNA, 19 bp, Homo sapiens
  siRNA target sequence for FLJ25972 (NM_178822.3,1134-1152).
ggctttgtacagtgattct

SEQ ID NO: 431443 - DNA, 19 bp, Homo sapiens
  siRNA target sequence for FLJ25972 (NM_178822.3,1143-1161).
cagtgattctcctctgata

SEQ ID NO: 431444 - DNA, 19 bp, Homo sapiens
  siRNA target sequence for FLJ25972 (NM_178822.3,1145-1163).
gtgattctcctctgatact

SEQ ID NO: 431445 - DNA, 19 bp, Homo sapiens
  siRNA target sequence for FLJ25972 (NM_178822.3,1190-1208).
caccgcagctctattacaa

SEQ ID NO: 431446 - DNA, 19 bp, Homo sapiens
  siRNA target sequence for FLJ25972 (NM_178822.3,1192-1210).
ccgcagctctattacaaat

SEQ ID NO: 431447 - DNA, 19 bp, Homo sapiens
  siRNA target sequence for FLJ25972 (NM_178822.3,1193-1211).
cgcagctctattacaaata

SEQ ID NO: 431448 - DNA, 19 bp, Homo sapiens
  siRNA target sequence for FLJ25972 (NM_178822.3,1226-1244).
ctaagcctgaagacatttt

SEQ ID NO: 431449 - DNA, 19 bp, Homo sapiens
  siRNA target sequence for FLJ25972 (NM_178822.3,1283-1301).
ggttaatgcaagaccaaat

SEQ ID NO: 431450 - DNA, 19 bp, Homo sapiens
  siRNA target sequence for FLJ25972 (NM_178822.3,1284-1302).
gttaatgcaagaccaaatt

SEQ ID NO: 431451 - DNA, 19 bp, Homo sapiens
  siRNA target sequence for FLJ25972 (NM_178822.3,1395-1413).
gaggccagtgaaacacaaa

SEQ ID NO: 431452 - DNA, 19 bp, Homo sapiens
  siRNA target sequence for FLJ25972 (NM_178822.3,1408-1426).
cacaaatggactatgattt

SEQ ID NO: 431453 - DNA, 19 bp, Homo sapiens
  siRNA target sequence for FLJ25972 (NM_178822.3,1422-1440).
gatttcaagggataacaat

SEQ ID NO: 431454 - DNA, 19 bp, Homo sapiens
  siRNA target sequence for FLJ25972 (NM_178822.3,1427-1445).
caagggataacaatactaa

SEQ ID NO: 431455 - DNA, 19 bp, Homo sapiens
  siRNA target sequence for FLJ25972 (NM_178822.3,1442-1460).
ctaagctggaacatactgt

SEQ ID NO: 431456 - DNA, 19 bp, Homo sapiens
  siRNA target sequence for FLJ25972 (NM_178822.3,1549-1567).
gtgagagccccttatgtca

SEQ ID NO: 431457 - DNA, 19 bp, Homo sapiens
  siRNA target sequence for FLJ25972 (NM_178822.3,1572-1590).
ggatggacggatcctaata

SEQ ID NO: 431458 - DNA, 19 bp, Homo sapiens
  siRNA target sequence for FLJ25972 (NM_178822.3,1576-1594).
ggacggatcctaatagaca

SEQ ID NO: 431459 - DNA, 19 bp, Homo sapiens
  siRNA target sequence for FLJ25972 (NM_178822.3,1577-1595).
gacggatcctaatagacaa

SEQ ID NO: 431460 - DNA, 19 bp, Homo sapiens
  siRNA target sequence for FLJ25972 (NM_178822.3,1579-1597).
cggatcctaatagacaaaa

SEQ ID NO: 431461 - DNA, 19 bp, Homo sapiens
  siRNA target sequence for FLJ25972 (NM_178822.3,1581-1599).
gatcctaatagacaaaagt

SEQ ID NO: 431462 - DNA, 19 bp, Homo sapiens
  siRNA target sequence for FLJ25972 (NM_178822.3,1633-1651).
gacacaggcgtatatcact

SEQ ID NO: 431463 - DNA, 19 bp, Homo sapiens
  siRNA target sequence for FLJ25972 (NM_178822.3,1637-1655).
caggcgtatatcactgtat

SEQ ID NO: 431464 - DNA, 19 bp, Homo sapiens
  siRNA target sequence for FLJ25972 (NM_178822.3,1639-1657).
ggcgtatatcactgtataa

SEQ ID NO: 431465 - DNA, 19 bp, Homo sapiens
  siRNA target sequence for FLJ25972 (NM_178822.3,1642-1660).
gtatatcactgtataagca

SEQ ID NO: 431466 - DNA, 19 bp, Homo sapiens
  siRNA target sequence for FLJ25972 (NM_178822.3,1650-1668).
ctgtataagcagcaattat

SEQ ID NO: 431467 - DNA, 19 bp, Homo sapiens
  siRNA target sequence for FLJ25972 (NM_178822.3,1652-1670).
gtataagcagcaattatga

SEQ ID NO: 431468 - DNA, 19 bp, Homo sapiens
  siRNA target sequence for FLJ25972 (NM_178822.3,1738-1756).
gggattcatcacacagttt

SEQ ID NO: 431469 - DNA, 19 bp, Homo sapiens
  siRNA target sequence for FLJ25972 (NM_178822.3,1739-1757).
ggattcatcacacagtttt

SEQ ID NO: 431470 - DNA, 19 bp, Homo sapiens
  siRNA target sequence for FLJ25972 (NM_178822.3,1758-1776).
cattggtgaaacacttgat

SEQ ID NO: 431471 - DNA, 19 bp, Homo sapiens
  siRNA target sequence for FLJ25972 (NM_178822.3,1801-1819).
ccagatgcctctattagct

SEQ ID NO: 431472 - DNA, 19 bp, Homo sapiens
  siRNA target sequence for FLJ25972 (NM_178822.3,1809-1827).
ctctattagctgggttatt

SEQ ID NO: 431473 - DNA, 19 bp, Homo sapiens
  siRNA target sequence for FLJ25972 (NM_178822.3,1820-1838).
gggttattccaggaaacaa

SEQ ID NO: 431474 - DNA, 19 bp, Homo sapiens
  siRNA target sequence for FLJ25972 (NM_178822.3,1821-1839).
ggttattccaggaaacaat

SEQ ID NO: 431475 - DNA, 19 bp, Homo sapiens
  siRNA target sequence for FLJ25972 (NM_178822.3,1842-1860).
gctctatcagtcatcaaga

SEQ ID NO: 431476 - DNA, 19 bp, Homo sapiens
  siRNA target sequence for FLJ25972 (NM_178822.3,1851-1869).
gtcatcaagagacaagaaa

SEQ ID NO: 431477 - DNA, 19 bp, Homo sapiens
  siRNA target sequence for FLJ25972 (NM_178822.3,1853-1871).
catcaagagacaagaaagt

SEQ ID NO: 431478 - DNA, 19 bp, Homo sapiens
  siRNA target sequence for FLJ25972 (NM_178822.3,1878-1896).
caatggcacattaagaata

SEQ ID NO: 431479 - DNA, 19 bp, Homo sapiens
  siRNA target sequence for FLJ25972 (NM_178822.3,2131-2149).
cacacctcaagcacaagta

SEQ ID NO: 431480 - DNA, 19 bp, Homo sapiens
  siRNA target sequence for FLJ25972 (NM_178822.3,2154-2172).
gcacaactatcgggaatta

SEQ ID NO: 431481 - DNA, 19 bp, Homo sapiens
  siRNA target sequence for FLJ25972 (NM_178822.3,2155-2173).
cacaactatcgggaattaa

SEQ ID NO: 431482 - DNA, 19 bp, Homo sapiens
  siRNA target sequence for FLJ25972 (NM_178822.3,2157-2175).
caactatcgggaattaaca

SEQ ID NO: 431483 - DNA, 19 bp, Homo sapiens
  siRNA target sequence for FLJ25972 (NM_178822.3,2179-2197).
cagcgacgtggagattcaa

SEQ ID NO: 431484 - DNA, 19 bp, Homo sapiens
  siRNA target sequence for FLJ25972 (NM_178822.3,2181-2199).
gcgacgtggagattcaaca

SEQ ID NO: 431485 - DNA, 19 bp, Homo sapiens
  siRNA target sequence for FLJ25972 (NM_178822.3,2203-2221).
cgacgttttagggagaata

SEQ ID NO: 431486 - DNA, 19 bp, Homo sapiens
  siRNA target sequence for FLJ25972 (NM_178822.3,2206-2224).
cgttttagggagaatagga

SEQ ID NO: 431487 - DNA, 19 bp, Homo sapiens
  siRNA target sequence for FLJ25972 (NM_178822.3,2304-2322).
gccagacaagcgagaaaat

SEQ ID NO: 431488 - DNA, 19 bp, Homo sapiens
  siRNA target sequence for FLJ25972 (NM_178822.3,2349-2367).
cacccaactcccaaacata

SEQ ID NO: 431489 - DNA, 19 bp, Homo sapiens
  siRNA target sequence for FLJ25972 (NM_178822.3,2393-2411).
gcatgctcgctctacatga

SEQ ID NO: 431490 - DNA, 19 bp, Homo sapiens
  siRNA target sequence for FLJ25972 (NM_178822.3,2400-2418).
cgctctacatgaggaattt

SEQ ID NO: 431491 - DNA, 19 bp, Homo sapiens
  siRNA target sequence for FLJ25972 (NM_178822.3,2472-2490).
ctccagaacaatatctgat

SEQ ID NO: 431492 - DNA, 19 bp, Homo sapiens
  siRNA target sequence for FLJ25972 (NM_178822.3,2488-2506).
gatagtcctatgacaaaca

SEQ ID NO: 431493 - DNA, 19 bp, Homo sapiens
  siRNA target sequence for FLJ25972 (NM_178822.3,2528-2546).
ctcctgttgtgaattcaca

SEQ ID NO: 431494 - DNA, 19 bp, Homo sapiens
  siRNA target sequence for FLJ25972 (NM_178822.3,2531-2549).
ctgttgtgaattcacaaat

SEQ ID NO: 431495 - DNA, 19 bp, Homo sapiens
  siRNA target sequence for FLJ25972 (NM_178822.3,2577-2595).
caaactgtctactgctatt

SEQ ID NO: 431496 - DNA, 19 bp, Homo sapiens
  siRNA target sequence for FLJ25972 (NM_178822.3,2600-2618).
ctacagccatgtcaaagaa

SEQ ID NO: 431497 - DNA, 19 bp, Homo sapiens
  siRNA target sequence for FLJ25972 (NM_178822.3,2631-2649).
catgtcaagccaaatacaa

SEQ ID NO: 431498 - DNA, 19 bp, Homo sapiens
  siRNA target sequence for FLJ25972 (NM_178822.3,2749-2767).
caaagtagacccccaataa

SEQ ID NO: 431499 - DNA, 19 bp, Homo sapiens
  siRNA target sequence for FLJ25972 (NM_178822.3,2753-2771).
gtagacccccaataacagt

SEQ ID NO: 431500 - DNA, 19 bp, Homo sapiens
  siRNA target sequence for FLJ25972 (NM_178822.3,2791-2809).
gtcaatgtcaaaatgctta

SEQ ID NO: 431501 - DNA, 19 bp, Homo sapiens
  siRNA target sequence for FLJ25972 (NM_178822.3,2819-2837).
ccaacaaactattattaga

SEQ ID NO: 431502 - DNA, 19 bp, Homo sapiens
  siRNA target sequence for FLJ25972 (NM_178822.3,2827-2845).
ctattattagagtcagtaa

SEQ ID NO: 431503 - DNA, 19 bp, Homo sapiens
  siRNA target sequence for FLJ25972 (NM_178822.3,2892-2910).
caggcacaatcacttctat

SEQ ID NO: 431504 - DNA, 19 bp, Homo sapiens
  siRNA target sequence for FLJ25972 (NM_178822.3,2895-2913).
gcacaatcacttctattct

SEQ ID NO: 431505 - DNA, 19 bp, Homo sapiens
  siRNA target sequence for FLJ25972 (NM_178822.3,2912-2930).
ctcacactactcaaatact

SEQ ID NO: 431506 - DNA, 19 bp, Homo sapiens
  siRNA target sequence for FLJ25972 (NM_178822.3,2914-2932).
cacactactcaaatactta

SEQ ID NO: 431507 - DNA, 19 bp, Homo sapiens
  siRNA target sequence for FLJ25972 (NM_178822.3,2937-2955).
ctccacgttcccttcagat

SEQ ID NO: 431508 - DNA, 19 bp, Homo sapiens
  siRNA target sequence for FLJ25972 (NM_178822.3,2979-2997).
gtttccgatccctagaaat

SEQ ID NO: 431509 - DNA, 19 bp, Homo sapiens
  siRNA target sequence for FLJ25972 (NM_178822.3,2983-3001).
ccgatccctagaaatagta

SEQ ID NO: 431510 - DNA, 19 bp, Homo sapiens
  siRNA target sequence for FLJ25972 (NM_178822.3,2985-3003).
gatccctagaaatagtaca

SEQ ID NO: 431511 - DNA, 19 bp, Homo sapiens
  siRNA target sequence for FLJ25972 (NM_178822.3,2988-3006).
ccctagaaatagtacagtt

SEQ ID NO: 431512 - DNA, 19 bp, Homo sapiens
  siRNA target sequence for FLJ25972 (NM_178822.3,3061-3079).
cggattatcagcccatata

SEQ ID NO: 431513 - DNA, 19 bp, Homo sapiens
  siRNA target sequence for FLJ25972 (NM_178822.3,3063-3081).
gattatcagcccatataga

SEQ ID NO: 431514 - DNA, 19 bp, Homo sapiens
  siRNA target sequence for FLJ25972 (NM_178822.3,3088-3106).
gttctgcgacggcatagat

SEQ ID NO: 431515 - DNA, 19 bp, Homo sapiens
  siRNA target sequence for FLJ25972 (NM_178822.3,3091-3109).
ctgcgacggcatagataca

SEQ ID NO: 431516 - DNA, 19 bp, Homo sapiens
  siRNA target sequence for FLJ25972 (NM_178822.3,3097-3115).
cggcatagatacagcattt

SEQ ID NO: 431517 - DNA, 19 bp, Homo sapiens
  siRNA target sequence for FLJ25972 (NM_178822.3,3292-3310).
ccatcagaagagtctacaa

SEQ ID NO: 431518 - DNA, 19 bp, Homo sapiens
  siRNA target sequence for FLJ25972 (NM_178822.3,3326-3344).
cactattactacttgagaa

SEQ ID NO: 431519 - DNA, 19 bp, Homo sapiens
  siRNA target sequence for FLJ25972 (NM_178822.3,3497-3515).
ctagcaccaatgaagctaa

SEQ ID NO: 431520 - DNA, 19 bp, Homo sapiens
  siRNA target sequence for FLJ25972 (NM_178822.3,3526-3544).
gtgattacatcgtcacttt

SEQ ID NO: 431521 - DNA, 19 bp, Homo sapiens
  siRNA target sequence for FLJ25972 (NM_178822.3,3528-3546).
gattacatcgtcactttca

SEQ ID NO: 431522 - DNA, 19 bp, Homo sapiens
  siRNA target sequence for FLJ25972 (NM_178822.3,3561-3579).
gccaccaatgactattata

SEQ ID NO: 431523 - DNA, 19 bp, Homo sapiens
  siRNA target sequence for FLJ25972 (NM_178822.3,3692-3710).
cagctgtgatgcttcctaa

SEQ ID NO: 431524 - DNA, 19 bp, Homo sapiens
  siRNA target sequence for FLJ25972 (NM_178822.3,3694-3712).
gctgtgatgcttcctaaaa

SEQ ID NO: 431525 - DNA, 19 bp, Homo sapiens
  siRNA target sequence for FLJ25972 (NM_178822.3,3697-3715).
gtgatgcttcctaaaacat

SEQ ID NO: 431526 - DNA, 19 bp, Homo sapiens
  siRNA target sequence for FLJ25972 (NM_178822.3,3722-3740).
ctttacccagagacaaagt

SEQ ID NO: 431527 - DNA, 19 bp, Homo sapiens
  siRNA target sequence for FLJ25972 (NM_178822.3,3739-3757).
gtctcccctttccatttca

SEQ ID NO: 431528 - DNA, 19 bp, Homo sapiens
  siRNA target sequence for FLJ25972 (NM_178822.3,3756-3774).
caccacactttcaacaagt

SEQ ID NO: 431529 - DNA, 19 bp, Homo sapiens
  siRNA target sequence for FLJ25972 (NM_178822.3,3777-3795).
gatgcaaattccatctaat

SEQ ID NO: 431530 - DNA, 19 bp, Homo sapiens
  siRNA target sequence for FLJ25972 (NM_178822.3,3787-3805).
ccatctaataccttgacta

SEQ ID NO: 431531 - DNA, 19 bp, Homo sapiens
  siRNA target sequence for FLJ25972 (NM_178822.3,3811-3829).
caccacactacgaccaaaa

SEQ ID NO: 431532 - DNA, 19 bp, Homo sapiens
  siRNA target sequence for FLJ25972 (NM_178822.3,3813-3831).
ccacactacgaccaaaaca

SEQ ID NO: 431533 - DNA, 19 bp, Homo sapiens
  siRNA target sequence for FLJ25972 (NM_178822.3,3908-3926).
gcaaagactcaagtacaaa

SEQ ID NO: 431534 - DNA, 19 bp, Homo sapiens
  siRNA target sequence for FLJ25972 (NM_178822.3,3980-3998).
catctgtcatcacttatga

SEQ ID NO: 431535 - DNA, 19 bp, Homo sapiens
  siRNA target sequence for FLJ25972 (NM_178822.3,4011-4029).
gagatctagagcacaaaca

SEQ ID NO: 431536 - DNA, 19 bp, Homo sapiens
  siRNA target sequence for FLJ25972 (NM_178822.3,4135-4153).
ctaaccacagccgaaactt

SEQ ID NO: 431537 - DNA, 19 bp, Homo sapiens
  siRNA target sequence for FLJ25972 (NM_178822.3,4168-4186).
gtctctgcattcactcatt

SEQ ID NO: 431538 - DNA, 19 bp, Homo sapiens
  siRNA target sequence for FLJ25972 (NM_178822.3,4209-4227).
gatttcaagcacaatcagt

SEQ ID NO: 431539 - DNA, 19 bp, Homo sapiens
  siRNA target sequence for FLJ25972 (NM_178822.3,4322-4340).
ctttgtccagcaaatcaca

SEQ ID NO: 431540 - DNA, 19 bp, Homo sapiens
  siRNA target sequence for FLJ25972 (NM_178822.3,4339-4357).
caccagagtaccacaacta

SEQ ID NO: 431541 - DNA, 19 bp, Homo sapiens
  siRNA target sequence for FLJ25972 (NM_178822.3,4349-4367).
ccacaactaggaaagcaat

SEQ ID NO: 431542 - DNA, 19 bp, Homo sapiens
  siRNA target sequence for FLJ25972 (NM_178822.3,4368-4386).
cattagacactcaaccata

SEQ ID NO: 431543 - DNA, 19 bp, Homo sapiens
  siRNA target sequence for FLJ25972 (NM_178822.3,4400-4418).
gcagcagtgctactctaat

SEQ ID NO: 431544 - DNA, 19 bp, Homo sapiens
  siRNA target sequence for FLJ25972 (NM_178822.3,4477-4495).
cccatttccgggcttatga

SEQ ID NO: 431545 - DNA, 19 bp, Homo sapiens
  siRNA target sequence for FLJ25972 (NM_178822.3,4479-4497).
catttccgggcttatgaca

SEQ ID NO: 431546 - DNA, 19 bp, Homo sapiens
  siRNA target sequence for FLJ25972 (NM_178822.3,4485-4503).
cgggcttatgacaaataca

SEQ ID NO: 431547 - DNA, 19 bp, Homo sapiens
  siRNA target sequence for FLJ25972 (NM_178822.3,4609-4627).
ggaaccactcacttcatct

SEQ ID NO: 431548 - DNA, 19 bp, Homo sapiens
  siRNA target sequence for FLJ25972 (NM_178822.3,4610-4628).
gaaccactcacttcatcta

SEQ ID NO: 431549 - DNA, 19 bp, Homo sapiens
  siRNA target sequence for FLJ25972 (NM_178822.3,4616-4634).
ctcacttcatctactctaa

SEQ ID NO: 431550 - DNA, 19 bp, Homo sapiens
  siRNA target sequence for FLJ25972 (NM_178822.3,4629-4647).
ctctaatctgttacattct

SEQ ID NO: 431551 - DNA, 19 bp, Homo sapiens
  siRNA target sequence for FLJ25972 (NM_178822.3,4657-4675).
ccagcactaacaacagtta

SEQ ID NO: 431552 - DNA, 19 bp, Homo sapiens
  siRNA target sequence for FLJ25972 (NM_178822.3,4658-4676).
cagcactaacaacagttaa

SEQ ID NO: 431553 - DNA, 19 bp, Homo sapiens
  siRNA target sequence for FLJ25972 (NM_178822.3,4672-4690).
gttaaatcacagaattcta

SEQ ID NO: 431554 - DNA, 19 bp, Homo sapiens
  siRNA target sequence for FLJ25972 (NM_178822.3,4912-4930).
gactctttgtctaggtata

SEQ ID NO: 431555 - DNA, 19 bp, Homo sapiens
  siRNA target sequence for FLJ25972 (NM_178822.3,4916-4934).
ctttgtctaggtatatatt

SEQ ID NO: 431556 - DNA, 19 bp, Homo sapiens
  siRNA target sequence for FLJ25972 (NM_178822.3,4955-4973).
gaggaaaagctgcaagttt

SEQ ID NO: 431557 - DNA, 19 bp, Homo sapiens
  siRNA target sequence for FLJ25972 (NM_178822.3,4957-4975).
ggaaaagctgcaagtttta

SEQ ID NO: 431558 - DNA, 19 bp, Homo sapiens
  siRNA target sequence for FLJ25972 (NM_178822.3,5053-5071).
gtcccatcaggacttgatt

SEQ ID NO: 431559 - DNA, 19 bp, Homo sapiens
  siRNA target sequence for FLJ25972 (NM_178822.3,5060-5078).
caggacttgatttatctaa

SEQ ID NO: 431560 - DNA, 19 bp, Homo sapiens
  siRNA target sequence for FLJ25972 (NM_178822.3,5062-5080).
ggacttgatttatctaaga

SEQ ID NO: 431561 - DNA, 19 bp, Homo sapiens
  siRNA target sequence for FLJ25972 (NM_178822.3,5149-5167).
gaccgcggacagtacttgt

SEQ ID NO: 431562 - DNA, 19 bp, Homo sapiens
  siRNA target sequence for FLJ25972 (NM_178822.3,5152-5170).
cgcggacagtacttgtgtt

SEQ ID NO: 431563 - DNA, 19 bp, Homo sapiens
  siRNA target sequence for FLJ25972 (NM_178822.3,5163-5181).
cttgtgttccgcatccaat

SEQ ID NO: 431564 - DNA, 19 bp, Homo sapiens
  siRNA target sequence for FLJ25972 (NM_178822.3,5168-5186).
gttccgcatccaatctgtt

SEQ ID NO: 431565 - DNA, 19 bp, Homo sapiens
  siRNA target sequence for FLJ25972 (NM_178822.3,5241-5259).
cctggagagacgtaccaaa

SEQ ID NO: 431566 - DNA, 19 bp, Homo sapiens
  siRNA target sequence for FLJ25972 (NM_178822.3,5334-5352).
ctggattcttgcaaaccaa

SEQ ID NO: 431567 - DNA, 19 bp, Homo sapiens
  siRNA target sequence for FLJ25972 (NM_178822.3,5440-5458).
gaccgtggcttttacaaat

SEQ ID NO: 431568 - DNA, 19 bp, Homo sapiens
  siRNA target sequence for FLJ25972 (NM_178822.3,5442-5460).
ccgtggcttttacaaatgt

SEQ ID NO: 431569 - DNA, 19 bp, Homo sapiens
  siRNA target sequence for FLJ25972 (NM_178822.3,5489-5507).
cactgctggttaaaataca

SEQ ID NO: 431570 - DNA, 19 bp, Homo sapiens
  siRNA target sequence for FLJ25972 (NM_178822.3,5496-5514).
ggttaaaatacaagtcatt

SEQ ID NO: 431571 - DNA, 19 bp, Homo sapiens
  siRNA target sequence for FLJ25972 (NM_178822.3,5567-5585).
ggggtgaaagtttaaaact

SEQ ID NO: 431572 - DNA, 19 bp, Homo sapiens
  siRNA target sequence for FLJ25972 (NM_178822.3,5586-5604).
gccctgtactgcaaaagga

SEQ ID NO: 431573 - DNA, 19 bp, Homo sapiens
  siRNA target sequence for FLJ25972 (NM_178822.3,5642-5660).
gcactgaagtgaaaccatt

SEQ ID NO: 431574 - DNA, 19 bp, Homo sapiens
  siRNA target sequence for FLJ25972 (NM_178822.3,5656-5674).
ccattacagtttaccaatt

SEQ ID NO: 431575 - DNA, 19 bp, Homo sapiens
  siRNA target sequence for FLJ25972 (NM_178822.3,5731-5749).
gacaggggcacttatgaat

SEQ ID NO: 431576 - DNA, 19 bp, Homo sapiens
  siRNA target sequence for FLJ25972 (NM_178822.3,5774-5792).
cggagcgaagagtagtaat

SEQ ID NO: 431577 - DNA, 19 bp, Homo sapiens
  siRNA target sequence for FLJ25972 (NM_178822.3,5778-5796).
gcgaagagtagtaatgctt

SEQ ID NO: 431578 - DNA, 19 bp, Homo sapiens
  siRNA target sequence for FLJ25972 (NM_178822.3,5779-5797).
cgaagagtagtaatgctta

SEQ ID NO: 431579 - DNA, 19 bp, Homo sapiens
  siRNA target sequence for FLJ25972 (NM_178822.3,5783-5801).
gagtagtaatgcttacaat

SEQ ID NO: 431580 - DNA, 19 bp, Homo sapiens
  siRNA target sequence for FLJ25972 (NM_178822.3,5867-5885).
gggacaaattactactgaa

SEQ ID NO: 431581 - DNA, 19 bp, Homo sapiens
  siRNA target sequence for FLJ25972 (NM_178822.3,5979-5997).
ccacgtctaccctaatgga

SEQ ID NO: 431582 - DNA, 19 bp, Homo sapiens
  siRNA target sequence for FLJ25972 (NM_178822.3,5980-5998).
cacgtctaccctaatggat

SEQ ID NO: 431583 - DNA, 19 bp, Homo sapiens
  siRNA target sequence for FLJ25972 (NM_178822.3,5995-6013).
ggatccctgtttattggat

SEQ ID NO: 431584 - DNA, 19 bp, Homo sapiens
  siRNA target sequence for FLJ25972 (NM_178822.3,6000-6018).
cctgtttattggatcagta

SEQ ID NO: 431585 - DNA, 19 bp, Homo sapiens
  siRNA target sequence for FLJ25972 (NM_178822.3,6001-6019).
ctgtttattggatcagtaa

SEQ ID NO: 431586 - DNA, 19 bp, Homo sapiens
  siRNA target sequence for FLJ25972 (NM_178822.3,6003-6021).
gtttattggatcagtaaca

SEQ ID NO: 431587 - DNA, 19 bp, Homo sapiens
  siRNA target sequence for FLJ25972 (NM_178822.3,6068-6086).
gggatgatctgatactgat

SEQ ID NO: 431588 - DNA, 19 bp, Homo sapiens
  siRNA target sequence for FLJ25972 (NM_178822.3,6123-6141).
ccacaagcagtattttaga

SEQ ID NO: 431589 - DNA, 19 bp, Homo sapiens
  siRNA target sequence for FLJ25972 (NM_178822.3,6148-6166).
gtgctccatgggaaagatt

SEQ ID NO: 431590 - DNA, 19 bp, Homo sapiens
  siRNA target sequence for FLJ25972 (NM_178822.3,6192-6210).
ctccccagtgccagagata

SEQ ID NO: 431591 - DNA, 19 bp, Homo sapiens
  siRNA target sequence for FLJ25972 (NM_178822.3,6195-6213).
cccagtgccagagatatct

SEQ ID NO: 431592 - DNA, 19 bp, Homo sapiens
  siRNA target sequence for FLJ25972 (NM_178822.3,6281-6299).
ggagatatacccttttcaa

SEQ ID NO: 431593 - DNA, 19 bp, Homo sapiens
  siRNA target sequence for FLJ25972 (NM_178822.3,6284-6302).
gatatacccttttcaacaa

SEQ ID NO: 431594 - DNA, 19 bp, Homo sapiens
  siRNA target sequence for FLJ25972 (NM_178822.3,6390-6408).
gaaggtccacttaacagtt

SEQ ID NO: 431595 - DNA, 19 bp, Homo sapiens
  siRNA target sequence for FLJ25972 (NM_178822.3,6393-6411).
ggtccacttaacagttata

SEQ ID NO: 431596 - DNA, 19 bp, Homo sapiens
  siRNA target sequence for FLJ25972 (NM_178822.3,6394-6412).
gtccacttaacagttataa

SEQ ID NO: 431597 - DNA, 19 bp, Homo sapiens
  siRNA target sequence for FLJ25972 (NM_178822.3,6422-6440).
cccggataaggcagagtaa

SEQ ID NO: 431598 - DNA, 19 bp, Homo sapiens
  siRNA target sequence for FLJ25972 (NM_178822.3,6431-6449).
ggcagagtaacaaaaccaa

SEQ ID NO: 431599 - DNA, 19 bp, Homo sapiens
  siRNA target sequence for FLJ25972 (NM_178822.3,6499-6517).
ggggatcccaaaccaaaaa

SEQ ID NO: 431600 - DNA, 19 bp, Homo sapiens
  siRNA target sequence for FLJ25972 (NM_178822.3,6501-6519).
ggatcccaaaccaaaaata

SEQ ID NO: 431601 - DNA, 19 bp, Homo sapiens
  siRNA target sequence for FLJ25972 (NM_178822.3,6557-6575).
ccattgataggtacacatt

SEQ ID NO: 431602 - DNA, 19 bp, Homo sapiens
  siRNA target sequence for FLJ25972 (NM_178822.3,6577-6595).
catgccaatgggtctttga

SEQ ID NO: 431603 - DNA, 19 bp, Homo sapiens
  siRNA target sequence for FLJ25972 (NM_178822.3,6590-6608).
ctttgaccatcaacaaagt

SEQ ID NO: 431604 - DNA, 19 bp, Homo sapiens
  siRNA target sequence for FLJ25972 (NM_178822.3,6619-6637).
gattctggagagtacgtat

SEQ ID NO: 431605 - DNA, 19 bp, Homo sapiens
  siRNA target sequence for FLJ25972 (NM_178822.3,6623-6641).
ctggagagtacgtatgtgt

SEQ ID NO: 431606 - DNA, 19 bp, Homo sapiens
  siRNA target sequence for FLJ25972 (NM_178822.3,6684-6702).
ggatgtggtctctaaacct

SEQ ID NO: 431607 - DNA, 19 bp, Homo sapiens
  siRNA target sequence for FLJ25972 (NM_178822.3,6695-6713).
ctaaacctccattaatcaa

SEQ ID NO: 431608 - DNA, 19 bp, Homo sapiens
  siRNA target sequence for FLJ25972 (NM_178822.3,6715-6733).
ggtctgtatacaaacagaa

SEQ ID NO: 431609 - DNA, 19 bp, Homo sapiens
  siRNA target sequence for FLJ25972 (NM_178822.3,6720-6738).
gtatacaaacagaactgtt

SEQ ID NO: 431610 - DNA, 19 bp, Homo sapiens
  siRNA target sequence for FLJ25972 (NM_178822.3,6725-6743).
caaacagaactgttattaa

SEQ ID NO: 431611 - DNA, 19 bp, Homo sapiens
  siRNA target sequence for FLJ25972 (NM_178822.3,6758-6776).
gacattccaaaaaacactt

SEQ ID NO: 431612 - DNA, 19 bp, Homo sapiens
  siRNA target sequence for FLJ25972 (NM_178822.3,6818-6836).
ggatcatgccagacaatat

SEQ ID NO: 431613 - DNA, 19 bp, Homo sapiens
  siRNA target sequence for FLJ25972 (NM_178822.3,6819-6837).
gatcatgccagacaatatt

SEQ ID NO: 431614 - DNA, 19 bp, Homo sapiens
  siRNA target sequence for FLJ25972 (NM_178822.3,6903-6921).
gaatgtgaggctttcagat

SEQ ID NO: 431615 - DNA, 19 bp, Homo sapiens
  siRNA target sequence for FLJ25972 (NM_178822.3,6917-6935).
cagattcagccgactttat

SEQ ID NO: 431616 - DNA, 19 bp, Homo sapiens
  siRNA target sequence for FLJ25972 (NM_178822.3,6919-6937).
gattcagccgactttatct

SEQ ID NO: 431617 - DNA, 19 bp, Homo sapiens
  siRNA target sequence for FLJ25972 (NM_178822.3,6936-6954).
ctgtgtggcccgaaatgaa

SEQ ID NO: 431618 - DNA, 19 bp, Homo sapiens
  siRNA target sequence for FLJ25972 (NM_178822.3,6966-6984).
cgtgttggtagtacagtta

SEQ ID NO: 431619 - DNA, 19 bp, Homo sapiens
  siRNA target sequence for FLJ25972 (NM_178822.3,6999-7017).
gctgagaagaccgacattt

SEQ ID NO: 431620 - DNA, 19 bp, Homo sapiens
  siRNA target sequence for FLJ25972 (NM_178822.3,7000-7018).
ctgagaagaccgacattta

SEQ ID NO: 431621 - DNA, 19 bp, Homo sapiens
  siRNA target sequence for FLJ25972 (NM_178822.3,7009-7027).
ccgacatttagaaatccat

SEQ ID NO: 431622 - DNA, 19 bp, Homo sapiens
  siRNA target sequence for FLJ25972 (NM_178822.3,7010-7028).
cgacatttagaaatccatt

SEQ ID NO: 431623 - DNA, 19 bp, Homo sapiens
  siRNA target sequence for FLJ25972 (NM_178822.3,7088-7106).
gtaacccaccacctgaaat

SEQ ID NO: 431624 - DNA, 19 bp, Homo sapiens
  siRNA target sequence for FLJ25972 (NM_178822.3,7093-7111).
ccaccacctgaaataatct

SEQ ID NO: 431625 - DNA, 19 bp, Homo sapiens
  siRNA target sequence for FLJ25972 (NM_178822.3,7120-7138).
ccaaatggcacacgatttt

SEQ ID NO: 431626 - DNA, 19 bp, Homo sapiens
  siRNA target sequence for FLJ25972 (NM_178822.3,7140-7158).
caatggaccacaaagttat

SEQ ID NO: 431627 - DNA, 19 bp, Homo sapiens
  siRNA target sequence for FLJ25972 (NM_178822.3,7161-7179).
gtatctgatagcaagcaat

SEQ ID NO: 431628 - DNA, 19 bp, Homo sapiens
  siRNA target sequence for FLJ25972 (NM_178822.3,7175-7193).
gcaatggttcttttatcat

SEQ ID NO: 431629 - DNA, 19 bp, Homo sapiens
  siRNA target sequence for FLJ25972 (NM_178822.3,7228-7246).
cgctgtgcagctaggaata

SEQ ID NO: 431630 - DNA, 19 bp, Homo sapiens
  siRNA target sequence for FLJ25972 (NM_178822.3,7241-7259).
ggaataaagttggctatat

SEQ ID NO: 431631 - DNA, 19 bp, Homo sapiens
  siRNA target sequence for FLJ25972 (NM_178822.3,7253-7271).
gctatattgagaaattagt

SEQ ID NO: 431632 - DNA, 19 bp, Homo sapiens
  siRNA target sequence for FLJ25972 (NM_178822.3,7331-7349).
gcatcagtggagaatctct

SEQ ID NO: 431633 - DNA, 19 bp, Homo sapiens
  siRNA target sequence for FLJ25972 (NM_178822.3,7335-7353).
cagtggagaatctctatca

SEQ ID NO: 431634 - DNA, 19 bp, Homo sapiens
  siRNA target sequence for FLJ25972 (NM_178822.3,7337-7355).
gtggagaatctctatcact

SEQ ID NO: 431635 - DNA, 19 bp, Homo sapiens
  siRNA target sequence for FLJ25972 (NM_178822.3,7346-7364).
ctctatcactgcattgtgt

SEQ ID NO: 431636 - DNA, 19 bp, Homo sapiens
  siRNA target sequence for FLJ25972 (NM_178822.3,7373-7391).
gaatccctaagccaaatat

SEQ ID NO: 431637 - DNA, 19 bp, Homo sapiens
  siRNA target sequence for FLJ25972 (NM_178822.3,7398-7416).
gactatgccaagtggttat

SEQ ID NO: 431638 - DNA, 19 bp, Homo sapiens
  siRNA target sequence for FLJ25972 (NM_178822.3,7404-7422).
gccaagtggttatgtagta

SEQ ID NO: 431639 - DNA, 19 bp, Homo sapiens
  siRNA target sequence for FLJ25972 (NM_178822.3,7406-7424).
caagtggttatgtagtaga

SEQ ID NO: 431640 - DNA, 19 bp, Homo sapiens
  siRNA target sequence for FLJ25972 (NM_178822.3,7461-7479).
caatggcaccttagtcatt

SEQ ID NO: 431641 - DNA, 19 bp, Homo sapiens
  siRNA target sequence for FLJ25972 (NM_178822.3,7466-7484).
gcaccttagtcattaaaga

SEQ ID NO: 431642 - DNA, 19 bp, Homo sapiens
  siRNA target sequence for FLJ25972 (NM_178822.3,7483-7501).
gaagcaacagcttatgaca

SEQ ID NO: 431643 - DNA, 19 bp, Homo sapiens
  siRNA target sequence for FLJ25972 (NM_178822.3,7534-7552).
gttggtcatacactgatta

SEQ ID NO: 431644 - DNA, 19 bp, Homo sapiens
  siRNA target sequence for FLJ25972 (NM_178822.3,7538-7556).
gtcatacactgattactgt

SEQ ID NO: 431645 - DNA, 19 bp, Homo sapiens
  siRNA target sequence for FLJ25972 (NM_178822.3,7553-7571).
ctgttccagtaatgattgt

SEQ ID NO: 431646 - DNA, 19 bp, Homo sapiens
  siRNA target sequence for FLJ25972 (NM_178822.3,7573-7591).
gcctaccctccccgaatta

SEQ ID NO: 431647 - DNA, 19 bp, Homo sapiens
  siRNA target sequence for FLJ25972 (NM_178822.3,7575-7593).
ctaccctccccgaattaca

SEQ ID NO: 431648 - DNA, 19 bp, Homo sapiens
  siRNA target sequence for FLJ25972 (NM_178822.3,7578-7596).
ccctccccgaattacaaat

SEQ ID NO: 431649 - DNA, 19 bp, Homo sapiens
  siRNA target sequence for FLJ25972 (NM_178822.3,7598-7616).
gtccacccaggagtattgt

SEQ ID NO: 431650 - DNA, 19 bp, Homo sapiens
  siRNA target sequence for FLJ25972 (NM_178822.3,7600-7618).
ccacccaggagtattgtca

SEQ ID NO: 431651 - DNA, 19 bp, Homo sapiens
  siRNA target sequence for FLJ25972 (NM_178822.3,7762-7780).
ggtaccctagtcattcaga

SEQ ID NO: 431652 - DNA, 19 bp, Homo sapiens
  siRNA target sequence for FLJ25972 (NM_178822.3,7763-7781).
gtaccctagtcattcagaa

SEQ ID NO: 431653 - DNA, 19 bp, Homo sapiens
  siRNA target sequence for FLJ25972 (NM_178822.3,7793-7811).
ccgattctgggatatacaa

SEQ ID NO: 431654 - DNA, 19 bp, Homo sapiens
  siRNA target sequence for FLJ25972 (NM_178822.3,7794-7812).
cgattctgggatatacaaa

SEQ ID NO: 431655 - DNA, 19 bp, Homo sapiens
  siRNA target sequence for FLJ25972 (NM_178822.3,7795-7813).
gattctgggatatacaaat

SEQ ID NO: 431656 - DNA, 19 bp, Homo sapiens
  siRNA target sequence for FLJ25972 (NM_178822.3,7824-7842).
gaacccacttggtagtgat

SEQ ID NO: 431657 - DNA, 19 bp, Homo sapiens
  siRNA target sequence for FLJ25972 (NM_178822.3,7827-7845).
cccacttggtagtgattat

SEQ ID NO: 431658 - DNA, 19 bp, Homo sapiens
  siRNA target sequence for FLJ25972 (NM_178822.3,7840-7858).
gattatgcagcaacgtata

SEQ ID NO: 431659 - DNA, 19 bp, Homo sapiens
  siRNA target sequence for FLJ25972 (NM_178822.3,7847-7865).
cagcaacgtatattcaagt

SEQ ID NO: 431660 - DNA, 19 bp, Homo sapiens
  siRNA target sequence for FLJ25972 (NM_178822.3,7849-7867).
gcaacgtatattcaagtaa

SEQ ID NO: 431661 - DNA, 19 bp, Homo sapiens
  siRNA target sequence for FLJ25972 (NM_178822.3,7850-7868).
caacgtatattcaagtaat

SEQ ID NO: 431662 - DNA, 19 bp, Homo sapiens
  siRNA target sequence for C6orf165 (NM_178823.2,90-108).
caactcaggccgaaagtgt

SEQ ID NO: 431663 - DNA, 19 bp, Homo sapiens
  siRNA target sequence for C6orf165 (NM_178823.2,93-111).
ctcaggccgaaagtgttat

SEQ ID NO: 431664 - DNA, 19 bp, Homo sapiens
  siRNA target sequence for C6orf165 (NM_178823.2,95-113).
caggccgaaagtgttataa

SEQ ID NO: 431665 - DNA, 19 bp, Homo sapiens
  siRNA target sequence for C6orf165 (NM_178823.2,98-116).
gccgaaagtgttataagga

SEQ ID NO: 431666 - DNA, 19 bp, Homo sapiens
  siRNA target sequence for C6orf165 (NM_178823.2,105-123).
gtgttataaggagtattat

SEQ ID NO: 431667 - DNA, 19 bp, Homo sapiens
  siRNA target sequence for C6orf165 (NM_178823.2,114-132).
ggagtattatacgagaaat

SEQ ID NO: 431668 - DNA, 19 bp, Homo sapiens
  siRNA target sequence for C6orf165 (NM_178823.2,147-165).
cagcccatggagagattgt

SEQ ID NO: 431669 - DNA, 19 bp, Homo sapiens
  siRNA target sequence for C6orf165 (NM_178823.2,212-230).
ccaagtaatggctttaaca

SEQ ID NO: 431670 - DNA, 19 bp, Homo sapiens
  siRNA target sequence for C6orf165 (NM_178823.2,279-297).
gtatgactcggctattgga

SEQ ID NO: 431671 - DNA, 19 bp, Homo sapiens
  siRNA target sequence for C6orf165 (NM_178823.2,285-303).
ctcggctattggatactaa

SEQ ID NO: 431672 - DNA, 19 bp, Homo sapiens
  siRNA target sequence for C6orf165 (NM_178823.2,287-305).
cggctattggatactaaaa

SEQ ID NO: 431673 - DNA, 19 bp, Homo sapiens
  siRNA target sequence for C6orf165 (NM_178823.2,288-306).
ggctattggatactaaaaa

SEQ ID NO: 431674 - DNA, 19 bp, Homo sapiens
  siRNA target sequence for C6orf165 (NM_178823.2,308-326).
ccatccctggacactatta

SEQ ID NO: 431675 - DNA, 19 bp, Homo sapiens
  siRNA target sequence for C6orf165 (NM_178823.2,312-330).
ccctggacactattaagat

SEQ ID NO: 431676 - DNA, 19 bp, Homo sapiens
  siRNA target sequence for C6orf165 (NM_178823.2,332-350).
caagtctacttcgatatga

SEQ ID NO: 431677 - DNA, 19 bp, Homo sapiens
  siRNA target sequence for C6orf165 (NM_178823.2,337-355).
ctacttcgatatgaattat

SEQ ID NO: 431678 - DNA, 19 bp, Homo sapiens
  siRNA target sequence for C6orf165 (NM_178823.2,343-361).
cgatatgaattatacgaat

SEQ ID NO: 431679 - DNA, 19 bp, Homo sapiens
  siRNA target sequence for C6orf165 (NM_178823.2,357-375).
cgaatcgagtggaatttct

SEQ ID NO: 431680 - DNA, 19 bp, Homo sapiens
  siRNA target sequence for C6orf165 (NM_178823.2,389-407).
cgggtcctagagtctagat

SEQ ID NO: 431681 - DNA, 19 bp, Homo sapiens
  siRNA target sequence for C6orf165 (NM_178823.2,420-438).
cccgagaaattacagataa

SEQ ID NO: 431682 - DNA, 19 bp, Homo sapiens
  siRNA target sequence for C6orf165 (NM_178823.2,444-462).
catgtgctaaagaagaatt

SEQ ID NO: 431683 - DNA, 19 bp, Homo sapiens
  siRNA target sequence for C6orf165 (NM_178823.2,468-486).
gcctctaccggaagattat

SEQ ID NO: 431684 - DNA, 19 bp, Homo sapiens
  siRNA target sequence for C6orf165 (NM_178823.2,470-488).
ctctaccggaagattatca

SEQ ID NO: 431685 - DNA, 19 bp, Homo sapiens
  siRNA target sequence for C6orf165 (NM_178823.2,481-499).
gattatcagctatgtgtta

SEQ ID NO: 431686 - DNA, 19 bp, Homo sapiens
  siRNA target sequence for C6orf165 (NM_178823.2,555-573).
ctgctctacagagtgtttt

SEQ ID NO: 431687 - DNA, 19 bp, Homo sapiens
  siRNA target sequence for C6orf165 (NM_178823.2,584-602).
gagcttgggacatttctaa

SEQ ID NO: 431688 - DNA, 19 bp, Homo sapiens
  siRNA target sequence for C6orf165 (NM_178823.2,646-664).
catgattgttactggaatt

SEQ ID NO: 431689 - DNA, 19 bp, Homo sapiens
  siRNA target sequence for C6orf165 (NM_178823.2,649-667).
gattgttactggaattcgt

SEQ ID NO: 431690 - DNA, 19 bp, Homo sapiens
  siRNA target sequence for C6orf165 (NM_178823.2,653-671).
gttactggaattcgtttat

SEQ ID NO: 431691 - DNA, 19 bp, Homo sapiens
  siRNA target sequence for C6orf165 (NM_178823.2,659-677).
ggaattcgtttatttaaca

SEQ ID NO: 431692 - DNA, 19 bp, Homo sapiens
  siRNA target sequence for C6orf165 (NM_178823.2,720-738).
ctgttctccatgtagcaat

SEQ ID NO: 431693 - DNA, 19 bp, Homo sapiens
  siRNA target sequence for C6orf165 (NM_178823.2,744-762).
ccaccatgcagcatattga

SEQ ID NO: 431694 - DNA, 19 bp, Homo sapiens
  siRNA target sequence for C6orf165 (NM_178823.2,745-763).
caccatgcagcatattgat

SEQ ID NO: 431695 - DNA, 19 bp, Homo sapiens
  siRNA target sequence for C6orf165 (NM_178823.2,747-765).
ccatgcagcatattgatta

SEQ ID NO: 431696 - DNA, 19 bp, Homo sapiens
  siRNA target sequence for C6orf165 (NM_178823.2,777-795).
ctgcccggagccaggtata

SEQ ID NO: 431697 - DNA, 19 bp, Homo sapiens
  siRNA target sequence for C6orf165 (NM_178823.2,865-883).
gttaaaagaagcgctatat

SEQ ID NO: 431698 - DNA, 19 bp, Homo sapiens
  siRNA target sequence for C6orf165 (NM_178823.2,975-993).
gagcccatctggaacaact

SEQ ID NO: 431699 - DNA, 19 bp, Homo sapiens
  siRNA target sequence for C6orf165 (NM_178823.2,977-995).
gcccatctggaacaactaa

SEQ ID NO: 431700 - DNA, 19 bp, Homo sapiens
  siRNA target sequence for C6orf165 (NM_178823.2,1015-1033).
gatagcggtcccaacatca

SEQ ID NO: 431701 - DNA, 19 bp, Homo sapiens
  siRNA target sequence for C6orf165 (NM_178823.2,1024-1042).
cccaacatcacaagtcttt

SEQ ID NO: 431702 - DNA, 19 bp, Homo sapiens
  siRNA target sequence for C6orf165 (NM_178823.2,1077-1095).
gcttgcaagacgaaactat

SEQ ID NO: 431703 - DNA, 19 bp, Homo sapiens
  siRNA target sequence for C6orf165 (NM_178823.2,1099-1117).
ggttggtgtcctcagtaat

SEQ ID NO: 431704 - DNA, 19 bp, Homo sapiens
  siRNA target sequence for C6orf165 (NM_178823.2,1145-1163).
ggtgctcacgaactatact

SEQ ID NO: 431705 - DNA, 19 bp, Homo sapiens
  siRNA target sequence for C6orf165 (NM_178823.2,1146-1164).
gtgctcacgaactatactt

SEQ ID NO: 431706 - DNA, 19 bp, Homo sapiens
  siRNA target sequence for C6orf165 (NM_178823.2,1166-1184).
cctgagagagtgatgcaat

SEQ ID NO: 431707 - DNA, 19 bp, Homo sapiens
  siRNA target sequence for C6orf165 (NM_178823.2,1175-1193).
gtgatgcaatgtcatctta

SEQ ID NO: 431708 - DNA, 19 bp, Homo sapiens
  siRNA target sequence for C6orf165 (NM_178823.2,1177-1195).
gatgcaatgtcatcttaat

SEQ ID NO: 431709 - DNA, 19 bp, Homo sapiens
  siRNA target sequence for C6orf165 (NM_178823.2,1197-1215).
gagcgactgtgaaaactga

SEQ ID NO: 431710 - DNA, 19 bp, Homo sapiens
  siRNA target sequence for C6orf165 (NM_178823.2,1348-1366).
cacgtttgctgcaacagat

SEQ ID NO: 431711 - DNA, 19 bp, Homo sapiens
  siRNA target sequence for C6orf165 (NM_178823.2,1426-1444).
cacattcaatagtaaagat

SEQ ID NO: 431712 - DNA, 19 bp, Homo sapiens
  siRNA target sequence for C6orf165 (NM_178823.2,1577-1595).
gtaagcagggtcaatattt

SEQ ID NO: 431713 - DNA, 19 bp, Homo sapiens
  siRNA target sequence for FLJ33620 (NM_178824.3,357-375).
cattgcccagggcattcat

SEQ ID NO: 431714 - DNA, 19 bp, Homo sapiens
  siRNA target sequence for FLJ33620 (NM_178824.3,367-385).
ggcattcatgcttttgatt

SEQ ID NO: 431715 - DNA, 19 bp, Homo sapiens
  siRNA target sequence for FLJ33620 (NM_178824.3,368-386).
gcattcatgcttttgatta

SEQ ID NO: 431716 - DNA, 19 bp, Homo sapiens
  siRNA target sequence for FLJ33620 (NM_178824.3,390-408).
ctctcggctcaatttaatt

SEQ ID NO: 431717 - DNA, 19 bp, Homo sapiens
  siRNA target sequence for FLJ33620 (NM_178824.3,410-428).
caactgctggcattaacaa

SEQ ID NO: 431718 - DNA, 19 bp, Homo sapiens
  siRNA target sequence for FLJ33620 (NM_178824.3,484-502).
ggccactcagccagtgtaa

SEQ ID NO: 431719 - DNA, 19 bp, Homo sapiens
  siRNA target sequence for FLJ33620 (NM_178824.3,485-503).
gccactcagccagtgtaat

SEQ ID NO: 431720 - DNA, 19 bp, Homo sapiens
  siRNA target sequence for FLJ33620 (NM_178824.3,497-515).
gtgtaatagccgtccaatt

SEQ ID NO: 431721 - DNA, 19 bp, Homo sapiens
  siRNA target sequence for FLJ33620 (NM_178824.3,499-517).
gtaatagccgtccaattct

SEQ ID NO: 431722 - DNA, 19 bp, Homo sapiens
  siRNA target sequence for FLJ33620 (NM_178824.3,564-582).
gagactctgggatattcaa

SEQ ID NO: 431723 - DNA, 19 bp, Homo sapiens
  siRNA target sequence for FLJ33620 (NM_178824.3,611-629).
gttctttccccaaaagtca

SEQ ID NO: 431724 - DNA, 19 bp, Homo sapiens
  siRNA target sequence for FLJ33620 (NM_178824.3,664-682).
catggacgacttttcatct

SEQ ID NO: 431725 - DNA, 19 bp, Homo sapiens
  siRNA target sequence for FLJ33620 (NM_178824.3,670-688).
cgacttttcatctcgttta

SEQ ID NO: 431726 - DNA, 19 bp, Homo sapiens
  siRNA target sequence for FLJ33620 (NM_178824.3,790-808).
caggtaatcagctctgata

SEQ ID NO: 431727 - DNA, 19 bp, Homo sapiens
  siRNA target sequence for FLJ33620 (NM_178824.3,792-810).
ggtaatcagctctgataca

SEQ ID NO: 431728 - DNA, 19 bp, Homo sapiens
  siRNA target sequence for FLJ33620 (NM_178824.3,872-890).
gccacggcaacgcagaaat

SEQ ID NO: 431729 - DNA, 19 bp, Homo sapiens
  siRNA target sequence for FLJ33620 (NM_178824.3,896-914).
ctatggcccttgatgcaaa

SEQ ID NO: 431730 - DNA, 19 bp, Homo sapiens
  siRNA target sequence for FLJ33620 (NM_178824.3,980-998).
gtcaccatacactaaatgt

SEQ ID NO: 431731 - DNA, 19 bp, Homo sapiens
  siRNA target sequence for FLJ33620 (NM_178824.3,1025-1043).
cacaaatcctcattcttaa

SEQ ID NO: 431732 - DNA, 19 bp, Homo sapiens
  siRNA target sequence for FLJ33620 (NM_178824.3,1071-1089).
gagggctattactgtgttt

SEQ ID NO: 431733 - DNA, 19 bp, Homo sapiens
  siRNA target sequence for FLJ33620 (NM_178824.3,1084-1102).
gtgtttcgaccccaaaact

SEQ ID NO: 431734 - DNA, 19 bp, Homo sapiens
  siRNA target sequence for FLJ33620 (NM_178824.3,1093-1111).
ccccaaaacttcaatcaat

SEQ ID NO: 431735 - DNA, 19 bp, Homo sapiens
  siRNA target sequence for FLJ33620 (NM_178824.3,1142-1160).
gtatacagcaccatgatga

SEQ ID NO: 431736 - DNA, 19 bp, Homo sapiens
  siRNA target sequence for FLJ33620 (NM_178824.3,1164-1182).
cttgtgtgctgcgttttta

SEQ ID NO: 431737 - DNA, 19 bp, Homo sapiens
  siRNA target sequence for FLJ33620 (NM_178824.3,1225-1243).
gttctatggaacaatagca

SEQ ID NO: 431738 - DNA, 19 bp, Homo sapiens
  siRNA target sequence for FLJ33620 (NM_178824.3,1233-1251).
gaacaatagcacagagaat

SEQ ID NO: 431739 - DNA, 19 bp, Homo sapiens
  siRNA target sequence for FLJ33620 (NM_178824.3,1273-1291).
gattaccagaggttgctaa

SEQ ID NO: 431740 - DNA, 19 bp, Homo sapiens
  siRNA target sequence for FLJ33620 (NM_178824.3,1283-1301).
ggttgctaaagtcaaaatt

SEQ ID NO: 431741 - DNA, 19 bp, Homo sapiens
  siRNA target sequence for FLJ33620 (NM_178824.3,1284-1302).
gttgctaaagtcaaaatta

SEQ ID NO: 431742 - DNA, 19 bp, Homo sapiens
  siRNA target sequence for FLJ33620 (NM_178824.3,1287-1305).
gctaaagtcaaaattagat

SEQ ID NO: 431743 - DNA, 19 bp, Homo sapiens
  siRNA target sequence for FLJ33620 (NM_178824.3,1354-1372).
cccatggcagaccattcta

SEQ ID NO: 431744 - DNA, 19 bp, Homo sapiens
  siRNA target sequence for FLJ33620 (NM_178824.3,1374-1392).
cacgggagtccgcaacttt

SEQ ID NO: 431745 - DNA, 19 bp, Homo sapiens
  siRNA target sequence for FLJ33620 (NM_178824.3,1376-1394).
cgggagtccgcaactttga

SEQ ID NO: 431746 - DNA, 19 bp, Homo sapiens
  siRNA target sequence for FLJ33620 (NM_178824.3,1378-1396).
ggagtccgcaactttgaga

SEQ ID NO: 431747 - DNA, 19 bp, Homo sapiens
  siRNA target sequence for FLJ33620 (NM_178824.3,1379-1397).
gagtccgcaactttgagat

SEQ ID NO: 431748 - DNA, 19 bp, Homo sapiens
  siRNA target sequence for FLJ33620 (NM_178824.3,1401-1419).
cactgagggcaaaaatgct

SEQ ID NO: 431749 - DNA, 19 bp, Homo sapiens
  siRNA target sequence for FLJ33620 (NM_178824.3,1471-1489).
ggagctaacctggtatcat

SEQ ID NO: 431750 - DNA, 19 bp, Homo sapiens
  siRNA target sequence for FLJ33620 (NM_178824.3,1564-1582).
ggagttggatcgattatta

SEQ ID NO: 431751 - DNA, 19 bp, Homo sapiens
  siRNA target sequence for FLJ33620 (NM_178824.3,1570-1588).
ggatcgattattatgtcta

SEQ ID NO: 431752 - DNA, 19 bp, Homo sapiens
  siRNA target sequence for FLJ33620 (NM_178824.3,1654-1672).
gaggagtactgtcttaact

SEQ ID NO: 431753 - DNA, 19 bp, Homo sapiens
  siRNA target sequence for FLJ33620 (NM_178824.3,1666-1684).
cttaactccagtaagaaca

SEQ ID NO: 431754 - DNA, 19 bp, Homo sapiens
  siRNA target sequence for FLJ33620 (NM_178824.3,1692-1710).
caaggccccaactctgata

SEQ ID NO: 431755 - DNA, 19 bp, Homo sapiens
  siRNA target sequence for FLJ33620 (NM_178824.3,1695-1713).
ggccccaactctgataaga

SEQ ID NO: 431756 - DNA, 19 bp, Homo sapiens
  siRNA target sequence for FLJ33620 (NM_178824.3,1696-1714).
gccccaactctgataagat

SEQ ID NO: 431757 - DNA, 19 bp, Homo sapiens
  siRNA target sequence for FLJ33620 (NM_178824.3,1698-1716).
cccaactctgataagatca

SEQ ID NO: 431758 - DNA, 19 bp, Homo sapiens
  siRNA target sequence for FLJ33620 (NM_178824.3,1699-1717).
ccaactctgataagatcat

SEQ ID NO: 431759 - DNA, 19 bp, Homo sapiens
  siRNA target sequence for FLJ33620 (NM_178824.3,1723-1741).
cctcatgaggaccgaataa

SEQ ID NO: 431760 - DNA, 19 bp, Homo sapiens
  siRNA target sequence for FLJ33620 (NM_178824.3,1726-1744).
catgaggaccgaataagtt

SEQ ID NO: 431761 - DNA, 19 bp, Homo sapiens
  siRNA target sequence for FLJ33620 (NM_178824.3,1731-1749).
ggaccgaataagttcctta

SEQ ID NO: 431762 - DNA, 19 bp, Homo sapiens
  siRNA target sequence for FLJ33620 (NM_178824.3,1735-1753).
cgaataagttccttagaga

SEQ ID NO: 431763 - DNA, 19 bp, Homo sapiens
  siRNA target sequence for FLJ33620 (NM_178824.3,1736-1754).
gaataagttccttagagat

SEQ ID NO: 431764 - DNA, 19 bp, Homo sapiens
  siRNA target sequence for FLJ33620 (NM_178824.3,1768-1786).
ggtcagttactgattatct

SEQ ID NO: 431765 - DNA, 19 bp, Homo sapiens
  siRNA target sequence for FLJ33620 (NM_178824.3,1791-1809).
ctctgcagactgcagtatt

SEQ ID NO: 431766 - DNA, 19 bp, Homo sapiens
  siRNA target sequence for FLJ33620 (NM_178824.3,1826-1844).
gcaatgctcctgtttggat

SEQ ID NO: 431767 - DNA, 19 bp, Homo sapiens
  siRNA target sequence for FLJ33620 (NM_178824.3,1856-1874).
caaagcactggcatattga

SEQ ID NO: 431768 - DNA, 19 bp, Homo sapiens
  siRNA target sequence for FLJ33620 (NM_178824.3,1887-1905).
ccttcctaaaagagatact

SEQ ID NO: 431769 - DNA, 19 bp, Homo sapiens
  siRNA target sequence for FLJ33620 (NM_178824.3,1891-1909).
cctaaaagagatactaatt

SEQ ID NO: 431770 - DNA, 19 bp, Homo sapiens
  siRNA target sequence for FLJ33620 (NM_178824.3,1923-1941).
gattcaaaaggaaatttct

SEQ ID NO: 431771 - DNA, 19 bp, Homo sapiens
  siRNA target sequence for FLJ33620 (NM_178824.3,1978-1996).
gaacattctctacttaata

SEQ ID NO: 431772 - DNA, 19 bp, Homo sapiens
  siRNA target sequence for FLJ33620 (NM_178824.3,2011-2029).
gactcaacatacaatgtca

SEQ ID NO: 431773 - DNA, 19 bp, Homo sapiens
  siRNA target sequence for FLJ33620 (NM_178824.3,2028-2046).
cagaccatcagaagatata

SEQ ID NO: 431774 - DNA, 19 bp, Homo sapiens
  siRNA target sequence for FLJ33620 (NM_178824.3,2036-2054).
cagaagatataaatttaga

SEQ ID NO: 431775 - DNA, 19 bp, Homo sapiens
  siRNA target sequence for FLJ33620 (NM_178824.3,2101-2119).
ccttattatggtgaagtta

SEQ ID NO: 431776 - DNA, 19 bp, Homo sapiens
  siRNA target sequence for FLJ33620 (NM_178824.3,2102-2120).
cttattatggtgaagttat

SEQ ID NO: 431777 - DNA, 19 bp, Homo sapiens
  siRNA target sequence for FLJ33620 (NM_178824.3,2138-2156).
catttaggtcattaaacat

SEQ ID NO: 431778 - DNA, 19 bp, Homo sapiens
  siRNA target sequence for FLJ33620 (NM_178824.3,2203-2221).
ctagaccctgagaaatact

SEQ ID NO: 431779 - DNA, 19 bp, Homo sapiens
  siRNA target sequence for FLJ33620 (NM_178824.3,2265-2283).
cccgtcactttttaaaact

SEQ ID NO: 431780 - DNA, 19 bp, Homo sapiens
  siRNA target sequence for FLJ33620 (NM_178824.3,2338-2356).
gaacgaaaagccaagcaat

SEQ ID NO: 431781 - DNA, 19 bp, Homo sapiens
  siRNA target sequence for TMEM16D (NM_178826.2,373-391).
ctcttctggaatcactaat

SEQ ID NO: 431782 - DNA, 19 bp, Homo sapiens
  siRNA target sequence for TMEM16D (NM_178826.2,416-434).
gtggccaaggatgtcaata

SEQ ID NO: 431783 - DNA, 19 bp, Homo sapiens
  siRNA target sequence for TMEM16D (NM_178826.2,418-436).
ggccaaggatgtcaatatt

SEQ ID NO: 431784 - DNA, 19 bp, Homo sapiens
  siRNA target sequence for TMEM16D (NM_178826.2,500-518).
ggaaacctgactagtactt

SEQ ID NO: 431785 - DNA, 19 bp, Homo sapiens
  siRNA target sequence for TMEM16D (NM_178826.2,600-618).
gaaagtgtcgaattgacta

SEQ ID NO: 431786 - DNA, 19 bp, Homo sapiens
  siRNA target sequence for TMEM16D (NM_178826.2,684-702).
gagcagaaggattgcaaat

SEQ ID NO: 431787 - DNA, 19 bp, Homo sapiens
  siRNA target sequence for TMEM16D (NM_178826.2,706-724).
gaaagagtcctctctaata

SEQ ID NO: 431788 - DNA, 19 bp, Homo sapiens
  siRNA target sequence for TMEM16D (NM_178826.2,712-730).
gtcctctctaataaatagt

SEQ ID NO: 431789 - DNA, 19 bp, Homo sapiens
  siRNA target sequence for TMEM16D (NM_178826.2,714-732).
cctctctaataaatagtga

SEQ ID NO: 431790 - DNA, 19 bp, Homo sapiens
  siRNA target sequence for TMEM16D (NM_178826.2,719-737).
ctaataaatagtgacatta

SEQ ID NO: 431791 - DNA, 19 bp, Homo sapiens
  siRNA target sequence for TMEM16D (NM_178826.2,729-747).
gtgacattatctttgtgaa

SEQ ID NO: 431792 - DNA, 19 bp, Homo sapiens
  siRNA target sequence for TMEM16D (NM_178826.2,850-868).
catgagcaggatcgataaa

SEQ ID NO: 431793 - DNA, 19 bp, Homo sapiens
  siRNA target sequence for TMEM16D (NM_178826.2,853-871).
gagcaggatcgataaacaa

SEQ ID NO: 431794 - DNA, 19 bp, Homo sapiens
  siRNA target sequence for TMEM16D (NM_178826.2,991-1009).
cttcatcatacacaacaaa

SEQ ID NO: 431795 - DNA, 19 bp, Homo sapiens
  siRNA target sequence for TMEM16D (NM_178826.2,1038-1056).
gtagaatcgtgcatcacat

SEQ ID NO: 431796 - DNA, 19 bp, Homo sapiens
  siRNA target sequence for TMEM16D (NM_178826.2,1041-1059).
gaatcgtgcatcacatttt

SEQ ID NO: 431797 - DNA, 19 bp, Homo sapiens
  siRNA target sequence for TMEM16D (NM_178826.2,1045-1063).
cgtgcatcacattttacaa

SEQ ID NO: 431798 - DNA, 19 bp, Homo sapiens
  siRNA target sequence for TMEM16D (NM_178826.2,1097-1115).
ggtctgaatcgtttgctta

SEQ ID NO: 431799 - DNA, 19 bp, Homo sapiens
  siRNA target sequence for TMEM16D (NM_178826.2,1143-1161).
ccctgcatgagggaagtta

SEQ ID NO: 431800 - DNA, 19 bp, Homo sapiens
  siRNA target sequence for TMEM16D (NM_178826.2,1151-1169).
gagggaagttatagaagta

SEQ ID NO: 431801 - DNA, 19 bp, Homo sapiens
  siRNA target sequence for TMEM16D (NM_178826.2,1153-1171).
gggaagttatagaagtaaa

SEQ ID NO: 431802 - DNA, 19 bp, Homo sapiens
  siRNA target sequence for TMEM16D (NM_178826.2,1233-1251).
cctggggcgtgtggtataa

SEQ ID NO: 431803 - DNA, 19 bp, Homo sapiens
  siRNA target sequence for TMEM16D (NM_178826.2,1234-1252).
ctggggcgtgtggtataaa

SEQ ID NO: 431804 - DNA, 19 bp, Homo sapiens
  siRNA target sequence for TMEM16D (NM_178826.2,1239-1257).
gcgtgtggtataaatacca

SEQ ID NO: 431805 - DNA, 19 bp, Homo sapiens
  siRNA target sequence for TMEM16D (NM_178826.2,1240-1258).
cgtgtggtataaataccaa

SEQ ID NO: 431806 - DNA, 19 bp, Homo sapiens
  siRNA target sequence for TMEM16D (NM_178826.2,1255-1273).
ccaacctttggatcttgta

SEQ ID NO: 431807 - DNA, 19 bp, Homo sapiens
  siRNA target sequence for TMEM16D (NM_178826.2,1289-1307).
gagaagattgggttatatt

SEQ ID NO: 431808 - DNA, 19 bp, Homo sapiens
  siRNA target sequence for TMEM16D (NM_178826.2,1291-1309).
gaagattgggttatatttt

SEQ ID NO: 431809 - DNA, 19 bp, Homo sapiens
  siRNA target sequence for TMEM16D (NM_178826.2,1350-1368).
ccttcattggattgtttgt

SEQ ID NO: 431810 - DNA, 19 bp, Homo sapiens
  siRNA target sequence for TMEM16D (NM_178826.2,1418-1436).
gtctgccaagctacagata

SEQ ID NO: 431811 - DNA, 19 bp, Homo sapiens
  siRNA target sequence for TMEM16D (NM_178826.2,1422-1440).
gccaagctacagatatcat

SEQ ID NO: 431812 - DNA, 19 bp, Homo sapiens
  siRNA target sequence for TMEM16D (NM_178826.2,1424-1442).
caagctacagatatcatca

SEQ ID NO: 431813 - DNA, 19 bp, Homo sapiens
  siRNA target sequence for TMEM16D (NM_178826.2,1427-1445).
gctacagatatcatcatgt

SEQ ID NO: 431814 - DNA, 19 bp, Homo sapiens
  siRNA target sequence for TMEM16D (NM_178826.2,1598-1616).
cggcgagcagtaattgctt

SEQ ID NO: 431815 - DNA, 19 bp, Homo sapiens
  siRNA target sequence for TMEM16D (NM_178826.2,1600-1618).
gcgagcagtaattgcttat

SEQ ID NO: 431816 - DNA, 19 bp, Homo sapiens
  siRNA target sequence for TMEM16D (NM_178826.2,1602-1620).
gagcagtaattgcttatga

SEQ ID NO: 431817 - DNA, 19 bp, Homo sapiens
  siRNA target sequence for TMEM16D (NM_178826.2,1619-1637).
gactgggatttgatagact

SEQ ID NO: 431818 - DNA, 19 bp, Homo sapiens
  siRNA target sequence for TMEM16D (NM_178826.2,1694-1712).
gagcggatgaatccaattt

SEQ ID NO: 431819 - DNA, 19 bp, Homo sapiens
  siRNA target sequence for TMEM16D (NM_178826.2,1713-1731).
ctggaaagccagaacctta

SEQ ID NO: 431820 - DNA, 19 bp, Homo sapiens
  siRNA target sequence for TMEM16D (NM_178826.2,1724-1742).
gaaccttatcaagcattta

SEQ ID NO: 431821 - DNA, 19 bp, Homo sapiens
  siRNA target sequence for TMEM16D (NM_178826.2,1728-1746).
cttatcaagcatttacaga

SEQ ID NO: 431822 - DNA, 19 bp, Homo sapiens
  siRNA target sequence for TMEM16D (NM_178826.2,1814-1832).
gtgttcgggatcgtcattt

SEQ ID NO: 431823 - DNA, 19 bp, Homo sapiens
  siRNA target sequence for TMEM16D (NM_178826.2,1851-1869).
gcactttcgctgcctttaa

SEQ ID NO: 431824 - DNA, 19 bp, Homo sapiens
  siRNA target sequence for TMEM16D (NM_178826.2,1872-1890).
gggcgttaatcaggaataa

SEQ ID NO: 431825 - DNA, 19 bp, Homo sapiens
  siRNA target sequence for TMEM16D (NM_178826.2,1874-1892).
gcgttaatcaggaataact

SEQ ID NO: 431826 - DNA, 19 bp, Homo sapiens
  siRNA target sequence for TMEM16D (NM_178826.2,1948-1966).
gctgaatgtgctctatgaa

SEQ ID NO: 431827 - DNA, 19 bp, Homo sapiens
  siRNA target sequence for TMEM16D (NM_178826.2,1949-1967).
ctgaatgtgctctatgaaa

SEQ ID NO: 431828 - DNA, 19 bp, Homo sapiens
  siRNA target sequence for TMEM16D (NM_178826.2,1978-1996).
gcttctgacgaatttagaa

SEQ ID NO: 431829 - DNA, 19 bp, Homo sapiens
  siRNA target sequence for TMEM16D (NM_178826.2,2079-2097).
cattttacatcgcattctt

SEQ ID NO: 431830 - DNA, 19 bp, Homo sapiens
  siRNA target sequence for TMEM16D (NM_178826.2,2095-2113).
cttcctcggaagatttaca

SEQ ID NO: 431831 - DNA, 19 bp, Homo sapiens
  siRNA target sequence for TMEM16D (NM_178826.2,2117-2135).
cacccaggtgcctacttga

SEQ ID NO: 431832 - DNA, 19 bp, Homo sapiens
  siRNA target sequence for TMEM16D (NM_178826.2,2170-2188).
ccctagtggatgccttatt

SEQ ID NO: 431833 - DNA, 19 bp, Homo sapiens
  siRNA target sequence for TMEM16D (NM_178826.2,2196-2214).
gtatgcaaatgggtattat

SEQ ID NO: 431834 - DNA, 19 bp, Homo sapiens
  siRNA target sequence for TMEM16D (NM_178826.2,2208-2226).
gtattataatggtgctaaa

SEQ ID NO: 431835 - DNA, 19 bp, Homo sapiens
  siRNA target sequence for TMEM16D (NM_178826.2,2222-2240).
ctaaagcagacctggaata

SEQ ID NO: 431836 - DNA, 19 bp, Homo sapiens
  siRNA target sequence for TMEM16D (NM_178826.2,2255-2273).
ggctacccgttaattcaga

SEQ ID NO: 431837 - DNA, 19 bp, Homo sapiens
  siRNA target sequence for TMEM16D (NM_178826.2,2256-2274).
gctacccgttaattcagaa

SEQ ID NO: 431838 - DNA, 19 bp, Homo sapiens
  siRNA target sequence for TMEM16D (NM_178826.2,2257-2275).
ctacccgttaattcagaat

SEQ ID NO: 431839 - DNA, 19 bp, Homo sapiens
  siRNA target sequence for TMEM16D (NM_178826.2,2289-2307).
gaaaagtacgacaagaaca

SEQ ID NO: 431840 - DNA, 19 bp, Homo sapiens
  siRNA target sequence for TMEM16D (NM_178826.2,2379-2397).
gactcttcgatgaatactt

SEQ ID NO: 431841 - DNA, 19 bp, Homo sapiens
  siRNA target sequence for TMEM16D (NM_178826.2,2411-2429).
cagtttggattcacaacta

SEQ ID NO: 431842 - DNA, 19 bp, Homo sapiens
  siRNA target sequence for TMEM16D (NM_178826.2,2418-2436).
gattcacaactatctttgt

SEQ ID NO: 431843 - DNA, 19 bp, Homo sapiens
  siRNA target sequence for TMEM16D (NM_178826.2,2464-2482).
ggccttactgaataacata

SEQ ID NO: 431844 - DNA, 19 bp, Homo sapiens
  siRNA target sequence for TMEM16D (NM_178826.2,2465-2483).
gccttactgaataacataa

SEQ ID NO: 431845 - DNA, 19 bp, Homo sapiens
  siRNA target sequence for TMEM16D (NM_178826.2,2466-2484).
ccttactgaataacataat

SEQ ID NO: 431846 - DNA, 19 bp, Homo sapiens
  siRNA target sequence for TMEM16D (NM_178826.2,2467-2485).
cttactgaataacataatt

SEQ ID NO: 431847 - DNA, 19 bp, Homo sapiens
  siRNA target sequence for TMEM16D (NM_178826.2,2492-2510).
cgacttgatgcttacaaat

SEQ ID NO: 431848 - DNA, 19 bp, Homo sapiens
  siRNA target sequence for TMEM16D (NM_178826.2,2493-2511).
gacttgatgcttacaaatt

SEQ ID NO: 431849 - DNA, 19 bp, Homo sapiens
  siRNA target sequence for TMEM16D (NM_178826.2,2537-2555).
gcttcaagggccaaagaca

SEQ ID NO: 431850 - DNA, 19 bp, Homo sapiens
  siRNA target sequence for TMEM16D (NM_178826.2,2538-2556).
cttcaagggccaaagacat

SEQ ID NO: 431851 - DNA, 19 bp, Homo sapiens
  siRNA target sequence for TMEM16D (NM_178826.2,2559-2577).
gaatttggtatggaattct

SEQ ID NO: 431852 - DNA, 19 bp, Homo sapiens
  siRNA target sequence for TMEM16D (NM_178826.2,2579-2597).
gaaggcattggaattctct

SEQ ID NO: 431853 - DNA, 19 bp, Homo sapiens
  siRNA target sequence for TMEM16D (NM_178826.2,2588-2606).
ggaattctctctgttatca

SEQ ID NO: 431854 - DNA, 19 bp, Homo sapiens
  siRNA target sequence for TMEM16D (NM_178826.2,2596-2614).
ctctgttatcacaaatgca

SEQ ID NO: 431855 - DNA, 19 bp, Homo sapiens
  siRNA target sequence for TMEM16D (NM_178826.2,2624-2642).
gcgataacatctgacttta

SEQ ID NO: 431856 - DNA, 19 bp, Homo sapiens
  siRNA target sequence for TMEM16D (NM_178826.2,2625-2643).
cgataacatctgactttat

SEQ ID NO: 431857 - DNA, 19 bp, Homo sapiens
  siRNA target sequence for TMEM16D (NM_178826.2,2645-2663).
cctcgcttggtgtatgctt

SEQ ID NO: 431858 - DNA, 19 bp, Homo sapiens
  siRNA target sequence for TMEM16D (NM_178826.2,2646-2664).
ctcgcttggtgtatgctta

SEQ ID NO: 431859 - DNA, 19 bp, Homo sapiens
  siRNA target sequence for TMEM16D (NM_178826.2,2648-2666).
cgcttggtgtatgcttata

SEQ ID NO: 431860 - DNA, 19 bp, Homo sapiens
  siRNA target sequence for TMEM16D (NM_178826.2,2649-2667).
gcttggtgtatgcttataa

SEQ ID NO: 431861 - DNA, 19 bp, Homo sapiens
  siRNA target sequence for TMEM16D (NM_178826.2,2739-2757).
ctgtatttcgaatttctga

SEQ ID NO: 431862 - DNA, 19 bp, Homo sapiens
  siRNA target sequence for TMEM16D (NM_178826.2,2747-2765).
cgaatttctgactttgaga

SEQ ID NO: 431863 - DNA, 19 bp, Homo sapiens
  siRNA target sequence for TMEM16D (NM_178826.2,2748-2766).
gaatttctgactttgagaa

SEQ ID NO: 431864 - DNA, 19 bp, Homo sapiens
  siRNA target sequence for TMEM16D (NM_178826.2,2802-2820).
cggggactcctcttaagta

SEQ ID NO: 431865 - DNA, 19 bp, Homo sapiens
  siRNA target sequence for TMEM16D (NM_178826.2,2804-2822).
gggactcctcttaagtact

SEQ ID NO: 431866 - DNA, 19 bp, Homo sapiens
  siRNA target sequence for TMEM16D (NM_178826.2,2839-2857).
ccgtgacccgcctcattca

SEQ ID NO: 431867 - DNA, 19 bp, Homo sapiens
  siRNA target sequence for TMEM16D (NM_178826.2,2896-2914).
cctagctgctcgattagct

SEQ ID NO: 431868 - DNA, 19 bp, Homo sapiens
  siRNA target sequence for TMEM16D (NM_178826.2,2900-2918).
gctgctcgattagctttta

SEQ ID NO: 431869 - DNA, 19 bp, Homo sapiens
  siRNA target sequence for TMEM16D (NM_178826.2,2901-2919).
ctgctcgattagcttttat

SEQ ID NO: 431870 - DNA, 19 bp, Homo sapiens
  siRNA target sequence for TMEM16D (NM_178826.2,2903-2921).
gctcgattagcttttatca

SEQ ID NO: 431871 - DNA, 19 bp, Homo sapiens
  siRNA target sequence for TMEM16D (NM_178826.2,2904-2922).
ctcgattagcttttatcat

SEQ ID NO: 431872 - DNA, 19 bp, Homo sapiens
  siRNA target sequence for TMEM16D (NM_178826.2,2907-2925).
gattagcttttatcattgt

SEQ ID NO: 431873 - DNA, 19 bp, Homo sapiens
  siRNA target sequence for TMEM16D (NM_178826.2,2930-2948).
gagcacctcgtgttttgta

SEQ ID NO: 431874 - DNA, 19 bp, Homo sapiens
  siRNA target sequence for TMEM16D (NM_178826.2,2954-2972).
cacctcatttcatatctga

SEQ ID NO: 431875 - DNA, 19 bp, Homo sapiens
  siRNA target sequence for TMEM16D (NM_178826.2,2992-3010).
cctaagggatcgaatgaga

SEQ ID NO: 431876 - DNA, 19 bp, Homo sapiens
  siRNA target sequence for FLJ35834 (NM_178827.3,118-136).
gtatgaagctcagaatata

SEQ ID NO: 431877 - DNA, 19 bp, Homo sapiens
  siRNA target sequence for FLJ35834 (NM_178827.3,130-148).
gaatatagtcaattcaaca

SEQ ID NO: 431878 - DNA, 19 bp, Homo sapiens
  siRNA target sequence for FLJ35834 (NM_178827.3,202-220).
gcctcaagagtcagatcaa

SEQ ID NO: 431879 - DNA, 19 bp, Homo sapiens
  siRNA target sequence for FLJ35834 (NM_178827.3,229-247).
gcatgaatctggaatagaa

SEQ ID NO: 431880 - DNA, 19 bp, Homo sapiens
  siRNA target sequence for FLJ35834 (NM_178827.3,255-273).
gtgagagccatgcaataca

SEQ ID NO: 431881 - DNA, 19 bp, Homo sapiens
  siRNA target sequence for FLJ35834 (NM_178827.3,284-302).
cagagtgaccaaagctttt

SEQ ID NO: 431882 - DNA, 19 bp, Homo sapiens
  siRNA target sequence for FLJ35834 (NM_178827.3,331-349).
catggaagaggttatatca

SEQ ID NO: 431883 - DNA, 19 bp, Homo sapiens
  siRNA target sequence for FLJ35834 (NM_178827.3,340-358).
ggttatatcaccaagacaa

SEQ ID NO: 431884 - DNA, 19 bp, Homo sapiens
  siRNA target sequence for FLJ35834 (NM_178827.3,348-366).
caccaagacaagtttcata

SEQ ID NO: 431885 - DNA, 19 bp, Homo sapiens
  siRNA target sequence for FLJ35834 (NM_178827.3,350-368).
ccaagacaagtttcatata

SEQ ID NO: 431886 - DNA, 19 bp, Homo sapiens
  siRNA target sequence for FLJ35834 (NM_178827.3,363-381).
catatactccgcaacatca

SEQ ID NO: 431887 - DNA, 19 bp, Homo sapiens
  siRNA target sequence for FLJ35834 (NM_178827.3,608-626).
gtactgcagataagatact

SEQ ID NO: 431888 - DNA, 19 bp, Homo sapiens
  siRNA target sequence for FLJ35834 (NM_178827.3,697-715).
ggaaatcttttctacaaat

SEQ ID NO: 431889 - DNA, 19 bp, Homo sapiens
  siRNA target sequence for FLJ35834 (NM_178827.3,753-771).
ctgatgtctctcaaatcat

SEQ ID NO: 431890 - DNA, 19 bp, Homo sapiens
  siRNA target sequence for FLJ35834 (NM_178827.3,755-773).
gatgtctctcaaatcataa

SEQ ID NO: 431891 - DNA, 19 bp, Homo sapiens
  siRNA target sequence for FLJ35834 (NM_178827.3,808-826).
gcaggtacctgttgagatt

SEQ ID NO: 431892 - DNA, 19 bp, Homo sapiens
  siRNA target sequence for FLJ35834 (NM_178827.3,812-830).
gtacctgttgagattgtca

SEQ ID NO: 431893 - DNA, 19 bp, Homo sapiens
  siRNA target sequence for FLJ35834 (NM_178827.3,815-833).
cctgttgagattgtcaaat

SEQ ID NO: 431894 - DNA, 19 bp, Homo sapiens
  siRNA target sequence for FLJ35834 (NM_178827.3,854-872).
cttggtggattcagacata

SEQ ID NO: 431895 - DNA, 19 bp, Homo sapiens
  siRNA target sequence for FLJ35834 (NM_178827.3,860-878).
ggattcagacataaagtaa

SEQ ID NO: 431896 - DNA, 19 bp, Homo sapiens
  siRNA target sequence for FLJ35834 (NM_178827.3,879-897).
caggagtagagtatcacaa

SEQ ID NO: 431897 - DNA, 19 bp, Homo sapiens
  siRNA target sequence for FLJ35834 (NM_178827.3,929-947).
cccgaaagactcagtatat

SEQ ID NO: 431898 - DNA, 19 bp, Homo sapiens
  siRNA target sequence for FLJ35834 (NM_178827.3,930-948).
ccgaaagactcagtatatt

SEQ ID NO: 431899 - DNA, 19 bp, Homo sapiens
  siRNA target sequence for FLJ35834 (NM_178827.3,1011-1029).
ccacacagatgactaacat

SEQ ID NO: 431900 - DNA, 19 bp, Homo sapiens
  siRNA target sequence for FLJ35834 (NM_178827.3,1023-1041).
ctaacattggtgtatatgt

SEQ ID NO: 431901 - DNA, 19 bp, Homo sapiens
  siRNA target sequence for FLJ35834 (NM_178827.3,1031-1049).
ggtgtatatgtatcaaata

SEQ ID NO: 431902 - DNA, 19 bp, Homo sapiens
  siRNA target sequence for FLJ35834 (NM_178827.3,1040-1058).
gtatcaaatatgactgata

SEQ ID NO: 431903 - DNA, 19 bp, Homo sapiens
  siRNA target sequence for FLJ35834 (NM_178827.3,1127-1145).
gtgatacagacttactaca

SEQ ID NO: 431904 - DNA, 19 bp, Homo sapiens
  siRNA target sequence for FLJ35834 (NM_178827.3,1144-1162).
caggcaatggcatgctaaa

SEQ ID NO: 431905 - DNA, 19 bp, Homo sapiens
  siRNA target sequence for FLJ35834 (NM_178827.3,1148-1166).
caatggcatgctaaaatct

SEQ ID NO: 431906 - DNA, 19 bp, Homo sapiens
  siRNA target sequence for FLJ35834 (NM_178827.3,1158-1176).
ctaaaatcttcgtagagaa

SEQ ID NO: 431907 - DNA, 19 bp, Homo sapiens
  siRNA target sequence for FLJ35834 (NM_178827.3,1271-1289).
caccggaggcataatccta

SEQ ID NO: 431908 - DNA, 19 bp, Homo sapiens
  siRNA target sequence for FLJ35834 (NM_178827.3,1273-1291).
ccggaggcataatcctaaa

SEQ ID NO: 431909 - DNA, 19 bp, Homo sapiens
  siRNA target sequence for FLJ35834 (NM_178827.3,1274-1292).
cggaggcataatcctaaaa

SEQ ID NO: 431910 - DNA, 19 bp, Homo sapiens
  siRNA target sequence for FLJ35834 (NM_178827.3,1336-1354).
gcggcaagaagaacttaca

SEQ ID NO: 431911 - DNA, 19 bp, Homo sapiens
  siRNA target sequence for FLJ35834 (NM_178827.3,1343-1361).
gaagaacttacacgtatta

SEQ ID NO: 431912 - DNA, 19 bp, Homo sapiens
  siRNA target sequence for FLJ35834 (NM_178827.3,1349-1367).
cttacacgtattaaccaat

SEQ ID NO: 431913 - DNA, 19 bp, Homo sapiens
  siRNA target sequence for FLJ35834 (NM_178827.3,1353-1371).
cacgtattaaccaatcttt

SEQ ID NO: 431914 - DNA, 19 bp, Homo sapiens
  siRNA target sequence for FLJ35834 (NM_178827.3,1355-1373).
cgtattaaccaatctttta

SEQ ID NO: 431915 - DNA, 19 bp, Homo sapiens
  siRNA target sequence for FLJ35834 (NM_178827.3,1433-1451).
gcttccattgggagacata

SEQ ID NO: 431916 - DNA, 19 bp, Homo sapiens
  siRNA target sequence for FLJ35834 (NM_178827.3,1437-1455).
ccattgggagacatagata

SEQ ID NO: 431917 - DNA, 19 bp, Homo sapiens
  siRNA target sequence for FLJ35834 (NM_178827.3,1482-1500).
cagcaatacaagctttttt

SEQ ID NO: 431918 - DNA, 19 bp, Homo sapiens
  siRNA target sequence for FLJ35834 (NM_178827.3,1485-1503).
caatacaagcttttttgga

SEQ ID NO: 431919 - DNA, 19 bp, Homo sapiens
  siRNA target sequence for FLJ35834 (NM_178827.3,1507-1525).
gtgttcagctccaaaaata

SEQ ID NO: 431920 - DNA, 19 bp, Homo sapiens
  siRNA target sequence for FLJ35834 (NM_178827.3,1533-1551).
cccctaatggcaaaacaat

SEQ ID NO: 431921 - DNA, 19 bp, Homo sapiens
  siRNA target sequence for FLJ35834 (NM_178827.3,1536-1554).
ctaatggcaaaacaattga

SEQ ID NO: 431922 - DNA, 19 bp, Homo sapiens
  siRNA target sequence for FLJ35834 (NM_178827.3,1589-1607).
ctgcaaaatatctataagt

SEQ ID NO: 431923 - DNA, 19 bp, Homo sapiens
  siRNA target sequence for FLJ35834 (NM_178827.3,1608-1626).
gcattatgctgaaaaatat

SEQ ID NO: 431924 - DNA, 19 bp, Homo sapiens
  siRNA target sequence for FLJ35834 (NM_178827.3,1725-1743).
gagaggttgaccttatgat

SEQ ID NO: 431925 - DNA, 19 bp, Homo sapiens
  siRNA target sequence for FLJ35834 (NM_178827.3,1746-1764).
gaggagtcaaacatcataa

SEQ ID NO: 431926 - DNA, 19 bp, Homo sapiens
  siRNA target sequence for FLJ35834 (NM_178827.3,1749-1767).
gagtcaaacatcataacct

SEQ ID NO: 431927 - DNA, 19 bp, Homo sapiens
  siRNA target sequence for FLJ35834 (NM_178827.3,1790-1808).
gcgacactcttttttcatt

SEQ ID NO: 431928 - DNA, 19 bp, Homo sapiens
  siRNA target sequence for FLJ35834 (NM_178827.3,1791-1809).
cgacactcttttttcatta

SEQ ID NO: 431929 - DNA, 19 bp, Homo sapiens
  siRNA target sequence for FLJ35834 (NM_178827.3,1835-1853).
gaagttgcaaaatacctta

SEQ ID NO: 431930 - DNA, 19 bp, Homo sapiens
  siRNA target sequence for FLJ35834 (NM_178827.3,1869-1887).
cattgaaattttataagaa

SEQ ID NO: 431931 - DNA, 19 bp, Homo sapiens
  siRNA target sequence for FLJ35834 (NM_178827.3,1873-1891).
gaaattttataagaagatt

SEQ ID NO: 431932 - DNA, 19 bp, Homo sapiens
  siRNA target sequence for FLJ35834 (NM_178827.3,1947-1965).
ccacctcacgccgcatata

SEQ ID NO: 431933 - DNA, 19 bp, Homo sapiens
  siRNA target sequence for FLJ35834 (NM_178827.3,1967-1985).
cggtgtcgtaactgcatta

SEQ ID NO: 431934 - DNA, 19 bp, Homo sapiens
  siRNA target sequence for FLJ35834 (NM_178827.3,1968-1986).
ggtgtcgtaactgcattaa

SEQ ID NO: 431935 - DNA, 19 bp, Homo sapiens
  siRNA target sequence for FLJ35834 (NM_178827.3,1971-1989).
gtcgtaactgcattaacct

SEQ ID NO: 431936 - DNA, 19 bp, Homo sapiens
  siRNA target sequence for FLJ35834 (NM_178827.3,1980-1998).
gcattaaccttcagaatga

SEQ ID NO: 431937 - DNA, 19 bp, Homo sapiens
  siRNA target sequence for FLJ35834 (NM_178827.3,2039-2057).
cttcaacagctctactata

SEQ ID NO: 431938 - DNA, 19 bp, Homo sapiens
  siRNA target sequence for FLJ35834 (NM_178827.3,2258-2276).
gctgctcatctcaagctaa

SEQ ID NO: 431939 - DNA, 19 bp, Homo sapiens
  siRNA target sequence for FLJ35834 (NM_178827.3,2261-2279).
gctcatctcaagctaacaa

SEQ ID NO: 431940 - DNA, 19 bp, Homo sapiens
  siRNA target sequence for FLJ35834 (NM_178827.3,2264-2282).
catctcaagctaacaagta

SEQ ID NO: 431941 - DNA, 19 bp, Homo sapiens
  siRNA target sequence for FLJ35834 (NM_178827.3,2269-2287).
caagctaacaagtattgaa

SEQ ID NO: 431942 - DNA, 19 bp, Homo sapiens
  siRNA target sequence for FLJ35834 (NM_178827.3,2290-2308).
gggatatgaacgctcattt

SEQ ID NO: 431943 - DNA, 19 bp, Homo sapiens
  siRNA target sequence for FLJ35834 (NM_178827.3,2291-2309).
ggatatgaacgctcattta

SEQ ID NO: 431944 - DNA, 19 bp, Homo sapiens
  siRNA target sequence for FLJ35834 (NM_178827.3,2292-2310).
gatatgaacgctcatttat

SEQ ID NO: 431945 - DNA, 19 bp, Homo sapiens
  siRNA target sequence for FLJ35834 (NM_178827.3,2297-2315).
gaacgctcatttattcaca

SEQ ID NO: 431946 - DNA, 19 bp, Homo sapiens
  siRNA target sequence for FLJ35834 (NM_178827.3,2330-2348).
catatcctggctaagaact

SEQ ID NO: 431947 - DNA, 19 bp, Homo sapiens
  siRNA target sequence for FLJ35834 (NM_178827.3,2335-2353).
cctggctaagaactatttt

SEQ ID NO: 431948 - DNA, 19 bp, Homo sapiens
  siRNA target sequence for FLJ35834 (NM_178827.3,2363-2381).
ccagtgctggcttcattta

SEQ ID NO: 431949 - DNA, 19 bp, Homo sapiens
  siRNA target sequence for FLJ35834 (NM_178827.3,2364-2382).
cagtgctggcttcatttat

SEQ ID NO: 431950 - DNA, 19 bp, Homo sapiens
  siRNA target sequence for FLJ35834 (NM_178827.3,2371-2389).
ggcttcatttatacttgat

SEQ ID NO: 431951 - DNA, 19 bp, Homo sapiens
  siRNA target sequence for FLJ35834 (NM_178827.3,2427-2445).
cagacacaacacctaagat

SEQ ID NO: 431952 - DNA, 19 bp, Homo sapiens
  siRNA target sequence for FLJ35866 (NM_178828.3,261-279).
ctagtgctcctcttcctat

SEQ ID NO: 431953 - DNA, 19 bp, Homo sapiens
  siRNA target sequence for FLJ35866 (NM_178828.3,517-535).
ccctgggggacgtgtgtaa

SEQ ID NO: 431954 - DNA, 19 bp, Homo sapiens
  siRNA target sequence for FLJ35866 (NM_178828.3,518-536).
cctgggggacgtgtgtaaa

SEQ ID NO: 431955 - DNA, 19 bp, Homo sapiens
  siRNA target sequence for FLJ35866 (NM_178828.3,713-731).
gcccttgcttcccctaaaa

SEQ ID NO: 431956 - DNA, 19 bp, Homo sapiens
  siRNA target sequence for FLJ35866 (NM_178828.3,714-732).
cccttgcttcccctaaaat

SEQ ID NO: 431957 - DNA, 19 bp, Homo sapiens
  siRNA target sequence for FLJ35866 (NM_178828.3,746-764).
gccacatgtggtttttcct

SEQ ID NO: 431958 - DNA, 19 bp, Homo sapiens
  siRNA target sequence for FLJ35866 (NM_178828.3,939-957).
cccatctgggacctctatt

SEQ ID NO: 431959 - DNA, 19 bp, Homo sapiens
  siRNA target sequence for FLJ35866 (NM_178828.3,1194-1212).
gaccacccgcacatgacat

SEQ ID NO: 431960 - DNA, 19 bp, Homo sapiens
  siRNA target sequence for FLJ35866 (NM_178828.3,1359-1377).
gacctcccctctctcaata

SEQ ID NO: 431961 - DNA, 19 bp, Homo sapiens
  siRNA target sequence for FLJ35866 (NM_178828.3,1536-1554).
gcccagccccaacatttca

SEQ ID NO: 431962 - DNA, 19 bp, Homo sapiens
  siRNA target sequence for FLJ35866 (NM_178828.3,1717-1735).
ccactggaaaggagtatct

SEQ ID NO: 431963 - DNA, 19 bp, Homo sapiens
  siRNA target sequence for FLJ35866 (NM_178828.3,2267-2285).
gaagtaccaatcagtaagt

SEQ ID NO: 431964 - DNA, 19 bp, Homo sapiens
  siRNA target sequence for FLJ35866 (NM_178828.3,2534-2552).
gatactggaagtacatctt

SEQ ID NO: 431965 - DNA, 19 bp, Homo sapiens
  siRNA target sequence for FLJ35866 (NM_178828.3,2538-2556).
ctggaagtacatcttgtaa

SEQ ID NO: 431966 - DNA, 19 bp, Homo sapiens
  siRNA target sequence for FLJ35866 (NM_178828.3,2598-2616).
ctggagcccataaatgtct

SEQ ID NO: 431967 - DNA, 19 bp, Homo sapiens
  siRNA target sequence for FLJ35866 (NM_178828.3,2678-2696).
ggtatctcgggttgaatct

SEQ ID NO: 431968 - DNA, 19 bp, Homo sapiens
  siRNA target sequence for FLJ35866 (NM_178828.3,2711-2729).
cattttcctgggaaaacgt

SEQ ID NO: 431969 - DNA, 19 bp, Homo sapiens
  siRNA target sequence for FLJ35866 (NM_178828.3,3057-3075).
ccaggagacccctgtagta

SEQ ID NO: 431970 - DNA, 19 bp, Homo sapiens
  siRNA target sequence for FLJ35866 (NM_178828.3,3197-3215).
ggcaagttcgggaagtgtt

SEQ ID NO: 431971 - DNA, 19 bp, Homo sapiens
  siRNA target sequence for FLJ35866 (NM_178828.3,3499-3517).
gtgtgtctggtaagaacat

SEQ ID NO: 431972 - DNA, 19 bp, Homo sapiens
  siRNA target sequence for FLJ35866 (NM_178828.3,3874-3892).
gcacacggtgggaagatgt

SEQ ID NO: 431973 - DNA, 19 bp, Homo sapiens
  siRNA target sequence for FLJ35866 (NM_178828.3,3942-3960).
ggcccaccaaggcagttta

SEQ ID NO: 431974 - DNA, 19 bp, Homo sapiens
  siRNA target sequence for FLJ35866 (NM_178828.3,3943-3961).
gcccaccaaggcagtttat

SEQ ID NO: 431975 - DNA, 19 bp, Homo sapiens
  siRNA target sequence for FLJ35866 (NM_178828.3,3946-3964).
caccaaggcagtttatgga

SEQ ID NO: 431976 - DNA, 19 bp, Homo sapiens
  siRNA target sequence for C7orf34 (NM_178829.2,386-404).
cacctcagcttctgcttta

SEQ ID NO: 431977 - DNA, 19 bp, Homo sapiens
  siRNA target sequence for C7orf34 (NM_178829.2,410-428).
gccagtgtcatggttttct

SEQ ID NO: 431978 - DNA, 19 bp, Homo sapiens
  siRNA target sequence for C7orf34 (NM_178829.2,444-462).
ggcggacattcccaaatat

SEQ ID NO: 431979 - DNA, 19 bp, Homo sapiens
  siRNA target sequence for FLJ36888 (NM_178830.2,279-297).
gatctcaataaggagataa

SEQ ID NO: 431980 - DNA, 19 bp, Homo sapiens
  siRNA target sequence for FLJ36888 (NM_178830.2,282-300).
ctcaataaggagataatga

SEQ ID NO: 431981 - DNA, 19 bp, Homo sapiens
  siRNA target sequence for FLJ36888 (NM_178830.2,416-434).
cccccttgcaggcgaaatt

SEQ ID NO: 431982 - DNA, 19 bp, Homo sapiens
  siRNA target sequence for FLJ36888 (NM_178830.2,746-764).
ccataggacgtctgtgttt

SEQ ID NO: 431983 - DNA, 19 bp, Homo sapiens
  siRNA target sequence for FLJ36888 (NM_178830.2,868-886).
cttgggacagcgacaatga

SEQ ID NO: 431984 - DNA, 19 bp, Homo sapiens
  siRNA target sequence for FLJ36888 (NM_178830.2,1069-1087).
cggagtccttgtctaaagt

SEQ ID NO: 431985 - DNA, 19 bp, Homo sapiens
  siRNA target sequence for FLJ36888 (NM_178830.2,1071-1089).
gagtccttgtctaaagtca

SEQ ID NO: 431986 - DNA, 19 bp, Homo sapiens
  siRNA target sequence for FLJ36888 (NM_178830.2,1081-1099).
ctaaagtcagcatcatcaa

SEQ ID NO: 431987 - DNA, 19 bp, Homo sapiens
  siRNA target sequence for GATS (NM_178831.2,2199-2217).
cctcacccctgggcaaaat

SEQ ID NO: 431988 - DNA, 19 bp, Homo sapiens
  siRNA target sequence for GATS (NM_178831.2,2348-2366).
ggagacgtcctctctgtta

SEQ ID NO: 431989 - DNA, 19 bp, Homo sapiens
  siRNA target sequence for GATS (NM_178831.2,2382-2400).
gccaagcagatgcatacat

SEQ ID NO: 431990 - DNA, 19 bp, Homo sapiens
  siRNA target sequence for GATS (NM_178831.2,2444-2462).
gacctgcccaggatttagt

SEQ ID NO: 431991 - DNA, 19 bp, Homo sapiens
  siRNA target sequence for GATS (NM_178831.2,2526-2544).
gggcatagccctatgtact

SEQ ID NO: 431992 - DNA, 19 bp, Homo sapiens
  siRNA target sequence for LOC118812 (NM_178832.2,197-215).
cagtggggaggaatatcgt

SEQ ID NO: 431993 - DNA, 19 bp, Homo sapiens
  siRNA target sequence for LOC118812 (NM_178832.2,274-292).
gcacctacctgggtcattt

SEQ ID NO: 431994 - DNA, 19 bp, Homo sapiens
  siRNA target sequence for LOC118812 (NM_178832.2,384-402).
gtcggagtcttcattcgat

SEQ ID NO: 431995 - DNA, 19 bp, Homo sapiens
  siRNA target sequence for LOC118812 (NM_178832.2,415-433).
cctttgagggggaatttaa

SEQ ID NO: 431996 - DNA, 19 bp, Homo sapiens
  siRNA target sequence for LOC118812 (NM_178832.2,472-490).
ctgatggttctcatggaat

SEQ ID NO: 431997 - DNA, 19 bp, Homo sapiens
  siRNA target sequence for LOC118812 (NM_178832.2,494-512).
ccgcaatgaaggtctcttt

SEQ ID NO: 431998 - DNA, 19 bp, Homo sapiens
  siRNA target sequence for LOC118812 (NM_178832.2,505-523).
gtctctttgagaacaacaa

SEQ ID NO: 431999 - DNA, 19 bp, Homo sapiens
  siRNA target sequence for LOC118812 (NM_178832.2,528-546).
ctgcgacgtgagaagtgtt

SEQ ID NO: 432000 - DNA, 19 bp, Homo sapiens
  siRNA target sequence for LOC352909 (NM_178837.2,99-117).
ggggcgtcccgggatattt

SEQ ID NO: 432001 - DNA, 19 bp, Homo sapiens
  siRNA target sequence for LOC352909 (NM_178837.2,334-352).
gcaaccccgagctagatgt

SEQ ID NO: 432002 - DNA, 19 bp, Homo sapiens
  siRNA target sequence for LOC352909 (NM_178837.2,396-414).
ctgtcccgagcgaagttct

SEQ ID NO: 432003 - DNA, 19 bp, Homo sapiens
  siRNA target sequence for LOC352909 (NM_178837.2,417-435).
cctcgcaggaggttcaact

SEQ ID NO: 432004 - DNA, 19 bp, Homo sapiens
  siRNA target sequence for LOC352909 (NM_178837.2,418-436).
ctcgcaggaggttcaactt

SEQ ID NO: 432005 - DNA, 19 bp, Homo sapiens
  siRNA target sequence for LOC352909 (NM_178837.2,420-438).
cgcaggaggttcaacttct

SEQ ID NO: 432006 - DNA, 19 bp, Homo sapiens
  siRNA target sequence for LOC352909 (NM_178837.2,469-487).
cccgacacatgctgatctt

SEQ ID NO: 432007 - DNA, 19 bp, Homo sapiens
  siRNA target sequence for LOC352909 (NM_178837.2,1126-1144).
gggagatcactcaacacaa

SEQ ID NO: 432008 - DNA, 19 bp, Homo sapiens
  siRNA target sequence for LOC90768 (NM_178838.2,782-800).
gcgccaccctccactttca

SEQ ID NO: 432009 - DNA, 19 bp, Homo sapiens
  siRNA target sequence for LOC90768 (NM_178838.2,841-859).
gtactcggccgttaggaaa

SEQ ID NO: 432010 - DNA, 19 bp, Homo sapiens
  siRNA target sequence for MGC24047 (NM_178840.2,184-202).
ccacggctcacctgacttt

SEQ ID NO: 432011 - DNA, 19 bp, Homo sapiens
  siRNA target sequence for MGC24047 (NM_178840.2,185-203).
cacggctcacctgactttt

SEQ ID NO: 432012 - DNA, 19 bp, Homo sapiens
  siRNA target sequence for MGC24047 (NM_178840.2,187-205).
cggctcacctgacttttgt

SEQ ID NO: 432013 - DNA, 19 bp, Homo sapiens
  siRNA target sequence for MGC24047 (NM_178840.2,188-206).
ggctcacctgacttttgtt

SEQ ID NO: 432014 - DNA, 19 bp, Homo sapiens
  siRNA target sequence for MGC24047 (NM_178840.2,189-207).
gctcacctgacttttgtta

SEQ ID NO: 432015 - DNA, 19 bp, Homo sapiens
  siRNA target sequence for MGC2647 (NM_178841.2,687-705).
cttcaccgacacaagttct

SEQ ID NO: 432016 - DNA, 19 bp, Homo sapiens
  siRNA target sequence for OSTbeta (NM_178859.2,131-149).
ctccctggaatcattccat

SEQ ID NO: 432017 - DNA, 19 bp, Homo sapiens
  siRNA target sequence for OSTbeta (NM_178859.2,160-178).
gcagctgtggtggtcatta

SEQ ID NO: 432018 - DNA, 19 bp, Homo sapiens
  siRNA target sequence for OSTbeta (NM_178859.2,161-179).
cagctgtggtggtcattat

SEQ ID NO: 432019 - DNA, 19 bp, Homo sapiens
  siRNA target sequence for OSTbeta (NM_178859.2,163-181).
gctgtggtggtcattataa

SEQ ID NO: 432020 - DNA, 19 bp, Homo sapiens
  siRNA target sequence for OSTbeta (NM_178859.2,166-184).
gtggtggtcattataagca

SEQ ID NO: 432021 - DNA, 19 bp, Homo sapiens
  siRNA target sequence for OSTbeta (NM_178859.2,204-222).
catccaggcaagcagaaaa

SEQ ID NO: 432022 - DNA, 19 bp, Homo sapiens
  siRNA target sequence for OSTbeta (NM_178859.2,341-359).
cccaggtggaacttgagtt

SEQ ID NO: 432023 - DNA, 19 bp, Homo sapiens
  siRNA target sequence for OSTbeta (NM_178859.2,342-360).
ccaggtggaacttgagtta

SEQ ID NO: 432024 - DNA, 19 bp, Homo sapiens
  siRNA target sequence for OSTbeta (NM_178859.2,345-363).
ggtggaacttgagttaaaa

SEQ ID NO: 432025 - DNA, 19 bp, Homo sapiens
  siRNA target sequence for SEZ6 (NM_178860.2,324-342).
ggctcacggactctcttta

SEQ ID NO: 432026 - DNA, 19 bp, Homo sapiens
  siRNA target sequence for SEZ6 (NM_178860.2,489-507).
gctgcttgaggaattccta

SEQ ID NO: 432027 - DNA, 19 bp, Homo sapiens
  siRNA target sequence for SEZ6 (NM_178860.2,711-729).
gtcagagtcccctatgctt

SEQ ID NO: 432028 - DNA, 19 bp, Homo sapiens
  siRNA target sequence for SEZ6 (NM_178860.2,720-738).
ccctatgcttcgaatcaca

SEQ ID NO: 432029 - DNA, 19 bp, Homo sapiens
  siRNA target sequence for SEZ6 (NM_178860.2,1006-1024).
ggcccttgtagctggaatt

SEQ ID NO: 432030 - DNA, 19 bp, Homo sapiens
  siRNA target sequence for SEZ6 (NM_178860.2,1007-1025).
gcccttgtagctggaattt

SEQ ID NO: 432031 - DNA, 19 bp, Homo sapiens
  siRNA target sequence for SEZ6 (NM_178860.2,1317-1335).
cttccatttccattaccaa

SEQ ID NO: 432032 - DNA, 19 bp, Homo sapiens
  siRNA target sequence for SEZ6 (NM_178860.2,1362-1380).
ccgtcgtccagcttatgga

SEQ ID NO: 432033 - DNA, 19 bp, Homo sapiens
  siRNA target sequence for SEZ6 (NM_178860.2,1411-1429).
ggtagtgcccgcttccatt

SEQ ID NO: 432034 - DNA, 19 bp, Homo sapiens
  siRNA target sequence for SEZ6 (NM_178860.2,1461-1479).
gcatctcacctgtctcaat

SEQ ID NO: 432035 - DNA, 19 bp, Homo sapiens
  siRNA target sequence for SEZ6 (NM_178860.2,1727-1745).
caccagtgtatgattccta

SEQ ID NO: 432036 - DNA, 19 bp, Homo sapiens
  siRNA target sequence for SEZ6 (NM_178860.2,1878-1896).
ctatgagccctttgtcaaa

SEQ ID NO: 432037 - DNA, 19 bp, Homo sapiens
  siRNA target sequence for SEZ6 (NM_178860.2,1891-1909).
gtcaaatacggtaacttca

SEQ ID NO: 432038 - DNA, 19 bp, Homo sapiens
  siRNA target sequence for SEZ6 (NM_178860.2,2125-2143).
cgtgggcaggattgtatct

SEQ ID NO: 432039 - DNA, 19 bp, Homo sapiens
  siRNA target sequence for SEZ6 (NM_178860.2,2284-2302).
cacttcaagctctttacct

SEQ ID NO: 432040 - DNA, 19 bp, Homo sapiens
  siRNA target sequence for SEZ6 (NM_178860.2,2309-2327).
ctgatgtcaccattcagtt

SEQ ID NO: 432041 - DNA, 19 bp, Homo sapiens
  siRNA target sequence for SEZ6 (NM_178860.2,2617-2635).
cacagccgacgcctcatat

SEQ ID NO: 432042 - DNA, 19 bp, Homo sapiens
  siRNA target sequence for SEZ6 (NM_178860.2,2659-2677).
gccaccgtgcaatatatct

SEQ ID NO: 432043 - DNA, 19 bp, Homo sapiens
  siRNA target sequence for SEZ6 (NM_178860.2,2902-2920).
ggccaggccagcatcaagt

SEQ ID NO: 432044 - DNA, 19 bp, Homo sapiens
  siRNA target sequence for SEZ6 (NM_178860.2,2950-2968).
gaccccccacccatctgta

SEQ ID NO: 432045 - DNA, 19 bp, Homo sapiens
  siRNA target sequence for SEZ6 (NM_178860.2,3103-3121).
gtaggaggtgtatacttct

SEQ ID NO: 432046 - DNA, 19 bp, Homo sapiens
  siRNA target sequence for SEZ6 (NM_178860.2,3178-3196).
ccctacaaccgcattacca

SEQ ID NO: 432047 - DNA, 19 bp, Homo sapiens
  siRNA target sequence for CKLFSF8 (NM_178868.3,453-471).
gctggtatggacgcttatt

SEQ ID NO: 432048 - DNA, 19 bp, Homo sapiens
  siRNA target sequence for CKLFSF8 (NM_178868.3,456-474).
ggtatggacgcttattgct

SEQ ID NO: 432049 - DNA, 19 bp, Homo sapiens
  siRNA target sequence for CKLFSF8 (NM_178868.3,545-563).
ccgtcttcttcctcattat

SEQ ID NO: 432050 - DNA, 19 bp, Homo sapiens
  siRNA target sequence for CKLFSF8 (NM_178868.3,697-715).
gacagtcacaacttcaaca

SEQ ID NO: 432051 - DNA, 19 bp, Homo sapiens
  siRNA target sequence for CKLFSF8 (NM_178868.3,753-771).
catctgctacgctggaaat

SEQ ID NO: 432052 - DNA, 19 bp, Homo sapiens
  siRNA target sequence for CKLFSF8 (NM_178868.3,756-774).
ctgctacgctggaaataca

SEQ ID NO: 432053 - DNA, 19 bp, Homo sapiens
  siRNA target sequence for CKLFSF8 (NM_178868.3,758-776).
gctacgctggaaatacata

SEQ ID NO: 432054 - DNA, 19 bp, Homo sapiens
  siRNA target sequence for ITR (NM_180989.3,253-271).
ccaggaatggctaaagcta

SEQ ID NO: 432055 - DNA, 19 bp, Homo sapiens
  siRNA target sequence for ITR (NM_180989.3,274-292).
gcaaagcagtcatggttat

SEQ ID NO: 432056 - DNA, 19 bp, Homo sapiens
  siRNA target sequence for ITR (NM_180989.3,297-315).
gtagtgaaaaattatccaa

SEQ ID NO: 432057 - DNA, 19 bp, Homo sapiens
  siRNA target sequence for ITR (NM_180989.3,337-355).
gaaccagaccgaacataat

SEQ ID NO: 432058 - DNA, 19 bp, Homo sapiens
  siRNA target sequence for ITR (NM_180989.3,341-359).
cagaccgaacataatctga

SEQ ID NO: 432059 - DNA, 19 bp, Homo sapiens
  siRNA target sequence for ITR (NM_180989.3,485-503).
gatgccgaagggaatccat

SEQ ID NO: 432060 - DNA, 19 bp, Homo sapiens
  siRNA target sequence for ITR (NM_180989.3,489-507).
ccgaagggaatccatttga

SEQ ID NO: 432061 - DNA, 19 bp, Homo sapiens
  siRNA target sequence for ITR (NM_180989.3,490-508).
cgaagggaatccatttgat

SEQ ID NO: 432062 - DNA, 19 bp, Homo sapiens
  siRNA target sequence for ITR (NM_180989.3,528-546).
ctgggttacatgagttctt

SEQ ID NO: 432063 - DNA, 19 bp, Homo sapiens
  siRNA target sequence for ITR (NM_180989.3,574-592).
gattgcttgcatttatgct

SEQ ID NO: 432064 - DNA, 19 bp, Homo sapiens
  siRNA target sequence for ITR (NM_180989.3,597-615).
cattgtggcaggctattaa

SEQ ID NO: 432065 - DNA, 19 bp, Homo sapiens
  siRNA target sequence for ITR (NM_180989.3,621-639).
gcggacccatgcacatgat

SEQ ID NO: 432066 - DNA, 19 bp, Homo sapiens
  siRNA target sequence for ITR (NM_180989.3,622-640).
cggacccatgcacatgatt

SEQ ID NO: 432067 - DNA, 19 bp, Homo sapiens
  siRNA target sequence for ITR (NM_180989.3,626-644).
cccatgcacatgattttaa

SEQ ID NO: 432068 - DNA, 19 bp, Homo sapiens
  siRNA target sequence for ITR (NM_180989.3,677-695).
ggttcagctttagctaatt

SEQ ID NO: 432069 - DNA, 19 bp, Homo sapiens
  siRNA target sequence for ITR (NM_180989.3,678-696).
gttcagctttagctaatta

SEQ ID NO: 432070 - DNA, 19 bp, Homo sapiens
  siRNA target sequence for ITR (NM_180989.3,681-699).
cagctttagctaattacat

SEQ ID NO: 432071 - DNA, 19 bp, Homo sapiens
  siRNA target sequence for ITR (NM_180989.3,726-744).
gaataggggtaccatttat

SEQ ID NO: 432072 - DNA, 19 bp, Homo sapiens
  siRNA target sequence for ITR (NM_180989.3,785-803).
cagatgttatacttacttt

SEQ ID NO: 432073 - DNA, 19 bp, Homo sapiens
  siRNA target sequence for ITR (NM_180989.3,790-808).
gttatacttacttttgagt

SEQ ID NO: 432074 - DNA, 19 bp, Homo sapiens
  siRNA target sequence for ITR (NM_180989.3,813-831).
gcatgggttggacaatagt

SEQ ID NO: 432075 - DNA, 19 bp, Homo sapiens
  siRNA target sequence for ITR (NM_180989.3,857-875).
cctctccagtgggattcta

SEQ ID NO: 432076 - DNA, 19 bp, Homo sapiens
  siRNA target sequence for ITR (NM_180989.3,885-903).
ccactggcattgcagtatt

SEQ ID NO: 432077 - DNA, 19 bp, Homo sapiens
  siRNA target sequence for ITR (NM_180989.3,888-906).
ctggcattgcagtattcat

SEQ ID NO: 432078 - DNA, 19 bp, Homo sapiens
  siRNA target sequence for ITR (NM_180989.3,891-909).
gcattgcagtattcattgt

SEQ ID NO: 432079 - DNA, 19 bp, Homo sapiens
  siRNA target sequence for ITR (NM_180989.3,908-926).
gtcatgacacagagtgttt

SEQ ID NO: 432080 - DNA, 19 bp, Homo sapiens
  siRNA target sequence for ITR (NM_180989.3,928-946).
gctactttgggaacagttt

SEQ ID NO: 432081 - DNA, 19 bp, Homo sapiens
  siRNA target sequence for ITR (NM_180989.3,970-988).
ccattcacaccacaactta

SEQ ID NO: 432082 - DNA, 19 bp, Homo sapiens
  siRNA target sequence for ITR (NM_180989.3,993-1011).
ggatcctcctaattgttct

SEQ ID NO: 432083 - DNA, 19 bp, Homo sapiens
  siRNA target sequence for ITR (NM_180989.3,994-1012).
gatcctcctaattgttcta

SEQ ID NO: 432084 - DNA, 19 bp, Homo sapiens
  siRNA target sequence for ITR (NM_180989.3,997-1015).
cctcctaattgttctaaga

SEQ ID NO: 432085 - DNA, 19 bp, Homo sapiens
  siRNA target sequence for ITR (NM_180989.3,1041-1059).
gtggactctatcagatcat

SEQ ID NO: 432086 - DNA, 19 bp, Homo sapiens
  siRNA target sequence for ITR (NM_180989.3,1043-1061).
ggactctatcagatcatca

SEQ ID NO: 432087 - DNA, 19 bp, Homo sapiens
  siRNA target sequence for ITR (NM_180989.3,1106-1124).
gccaaaggctgtatcttgt

SEQ ID NO: 432088 - DNA, 19 bp, Homo sapiens
  siRNA target sequence for ITR (NM_180989.3,1223-1241).
gtttccatggttattctct

SEQ ID NO: 432089 - DNA, 19 bp, Homo sapiens
  siRNA target sequence for ITR (NM_180989.3,1238-1256).
ctctacagactctttctgt

SEQ ID NO: 432090 - DNA, 19 bp, Homo sapiens
  siRNA target sequence for ITR (NM_180989.3,1265-1283).
ctatactgggaagtttctt

SEQ ID NO: 432091 - DNA, 19 bp, Homo sapiens
  siRNA target sequence for WDR17 (NM_181265.1,469-487).
cacaactcagagatgcaat

SEQ ID NO: 432092 - DNA, 19 bp, Homo sapiens
  siRNA target sequence for WDR17 (NM_181265.1,474-492).
ctcagagatgcaatggata

SEQ ID NO: 432093 - DNA, 19 bp, Homo sapiens
  siRNA target sequence for WDR20 (NM_181308.1,287-305).
ggggtccgcaagagactaa

SEQ ID NO: 432094 - DNA, 19 bp, Homo sapiens
  siRNA target sequence for WDR20 (NM_181308.1,293-311).
cgcaagagactaatagaca

SEQ ID NO: 432095 - DNA, 19 bp, Homo sapiens
  siRNA target sequence for hT2R55 (NM_181429.1,38-56).
caatagcagaattcatcat

SEQ ID NO: 432096 - DNA, 19 bp, Homo sapiens
  siRNA target sequence for hT2R55 (NM_181429.1,153-171).
ggctatctccacaattgga

SEQ ID NO: 432097 - DNA, 19 bp, Homo sapiens
  siRNA target sequence for hT2R55 (NM_181429.1,170-188).
gacaactgttggtgatact

SEQ ID NO: 432098 - DNA, 19 bp, Homo sapiens
  siRNA target sequence for hT2R55 (NM_181429.1,230-248).
ccacatatagactaggaaa

SEQ ID NO: 432099 - DNA, 19 bp, Homo sapiens
  siRNA target sequence for hT2R55 (NM_181429.1,239-257).
gactaggaaaaactgttat

SEQ ID NO: 432100 - DNA, 19 bp, Homo sapiens
  siRNA target sequence for hT2R55 (NM_181429.1,245-263).
gaaaaactgttattatgct

SEQ ID NO: 432101 - DNA, 19 bp, Homo sapiens
  siRNA target sequence for hT2R55 (NM_181429.1,266-284).
ggcacatgactaatcactt

SEQ ID NO: 432102 - DNA, 19 bp, Homo sapiens
  siRNA target sequence for hT2R55 (NM_181429.1,299-317).
ccacctgcctaagcatttt

SEQ ID NO: 432103 - DNA, 19 bp, Homo sapiens
  siRNA target sequence for hT2R55 (NM_181429.1,381-399).
cggaatgattgttatgctt

SEQ ID NO: 432104 - DNA, 19 bp, Homo sapiens
  siRNA target sequence for hT2R55 (NM_181429.1,391-409).
gttatgcttcttatattgt

SEQ ID NO: 432105 - DNA, 19 bp, Homo sapiens
  siRNA target sequence for hT2R55 (NM_181429.1,457-475).
gatatctcactcaatataa

SEQ ID NO: 432106 - DNA, 19 bp, Homo sapiens
  siRNA target sequence for hT2R55 (NM_181429.1,468-486).
caatataatagataaaagt

SEQ ID NO: 432107 - DNA, 19 bp, Homo sapiens
  siRNA target sequence for hT2R55 (NM_181429.1,553-571).
ctcagcttaaccagtttta

SEQ ID NO: 432108 - DNA, 19 bp, Homo sapiens
  siRNA target sequence for hT2R55 (NM_181429.1,591-609).
gacctccttgcttttttta

SEQ ID NO: 432109 - DNA, 19 bp, Homo sapiens
  siRNA target sequence for hT2R55 (NM_181429.1,613-631).
ctgtccttggtgagacata

SEQ ID NO: 432110 - DNA, 19 bp, Homo sapiens
  siRNA target sequence for hT2R55 (NM_181429.1,615-633).
gtccttggtgagacatact

SEQ ID NO: 432111 - DNA, 19 bp, Homo sapiens
  siRNA target sequence for hT2R55 (NM_181429.1,626-644).
gacatactagaaatttgaa

SEQ ID NO: 432112 - DNA, 19 bp, Homo sapiens
  siRNA target sequence for hT2R55 (NM_181429.1,830-848).
cctcgtgccactcatttat

SEQ ID NO: 432113 - DNA, 19 bp, Homo sapiens
  siRNA target sequence for hT2R55 (NM_181429.1,901-919).
catcttaggaactatacaa

SEQ ID NO: 432114 - DNA, 19 bp, Homo sapiens
  siRNA target sequence for hT2R55 (NM_181429.1,923-941).
caccaaatgctttaccttt

SEQ ID NO: 432115 - DNA, 19 bp, Homo sapiens
  siRNA target sequence for C1QTNF3 (NM_181435.2,384-402).
gttcccagctggttgtgta

SEQ ID NO: 432116 - DNA, 19 bp, Homo sapiens
  siRNA target sequence for C1QTNF3 (NM_181435.2,409-427).
cttcacacttcaacagaaa

SEQ ID NO: 432117 - DNA, 19 bp, Homo sapiens
  siRNA target sequence for C1QTNF3 (NM_181435.2,428-446).
cgtgccaaggtgtgacatt

SEQ ID NO: 432118 - DNA, 19 bp, Homo sapiens
  siRNA target sequence for C1QTNF3 (NM_181435.2,431-449).
gccaaggtgtgacatttat

SEQ ID NO: 432119 - DNA, 19 bp, Homo sapiens
  siRNA target sequence for C1QTNF3 (NM_181435.2,436-454).
ggtgtgacatttatgaatt

SEQ ID NO: 432120 - DNA, 19 bp, Homo sapiens
  siRNA target sequence for C1QTNF3 (NM_181435.2,557-575).
gcatgcctacagccttatt

SEQ ID NO: 432121 - DNA, 19 bp, Homo sapiens
  siRNA target sequence for C1QTNF3 (NM_181435.2,788-806).
ggaggtgagcggaagaact

SEQ ID NO: 432122 - DNA, 19 bp, Homo sapiens
  siRNA target sequence for C1QTNF3 (NM_181435.2,789-807).
gaggtgagcggaagaacta

SEQ ID NO: 432123 - DNA, 19 bp, Homo sapiens
  siRNA target sequence for C1QTNF3 (NM_181435.2,791-809).
ggtgagcggaagaactaat

SEQ ID NO: 432124 - DNA, 19 bp, Homo sapiens
  siRNA target sequence for C1QTNF3 (NM_181435.2,794-812).
gagcggaagaactaataaa

SEQ ID NO: 432125 - DNA, 19 bp, Homo sapiens
  siRNA target sequence for C1QTNF3 (NM_181435.2,796-814).
gcggaagaactaataaagt

SEQ ID NO: 432126 - DNA, 19 bp, Homo sapiens
  siRNA target sequence for C1QTNF3 (NM_181435.2,880-898).
gagagcggagccatcctaa

SEQ ID NO: 432127 - DNA, 19 bp, Homo sapiens
  siRNA target sequence for C1QTNF3 (NM_181435.2,882-900).
gagcggagccatcctaaaa

SEQ ID NO: 432128 - DNA, 19 bp, Homo sapiens
  siRNA target sequence for C1QTNF3 (NM_181435.2,884-902).
gcggagccatcctaaaact

SEQ ID NO: 432129 - DNA, 19 bp, Homo sapiens
  siRNA target sequence for C1QTNF3 (NM_181435.2,901-919).
ctgggactgtggataataa

SEQ ID NO: 432130 - DNA, 19 bp, Homo sapiens
  siRNA target sequence for C1QTNF3 (NM_181435.2,911-929).
ggataataacacttctaca

SEQ ID NO: 432131 - DNA, 19 bp, Homo sapiens
  siRNA target sequence for C1QTNF3 (NM_181435.2,961-979).
cgcaccccgaggtagatga

SEQ ID NO: 432132 - DNA, 19 bp, Homo sapiens
  siRNA target sequence for C1QTNF3 (NM_181435.2,1006-1024).
gccaggtactcagaattct

SEQ ID NO: 432133 - DNA, 19 bp, Homo sapiens
  siRNA target sequence for MRPL55 (NM_181441.1,342-360).
gcaccgccaggcttatgca

SEQ ID NO: 432134 - DNA, 19 bp, Homo sapiens
  siRNA target sequence for MRPL55 (NM_181441.1,435-453).
gctggcgatgcccatagat

SEQ ID NO: 432135 - DNA, 19 bp, Homo sapiens
  siRNA target sequence for IREM2 (NM_181449.1,141-159).
gtgtggtgtcagtatgaga

SEQ ID NO: 432136 - DNA, 19 bp, Homo sapiens
  siRNA target sequence for IREM2 (NM_181449.1,343-361).
cttactggtgcaaaattca

SEQ ID NO: 432137 - DNA, 19 bp, Homo sapiens
  siRNA target sequence for IREM2 (NM_181449.1,515-533).
ggaggtgttgacccaaaat

SEQ ID NO: 432138 - DNA, 19 bp, Homo sapiens
  siRNA target sequence for ZNF445 (NM_181489.3,685-703).
gtttgggtgcagcttcata

SEQ ID NO: 432139 - DNA, 19 bp, Homo sapiens
  siRNA target sequence for ZNF445 (NM_181489.3,828-846).
cctgcgatctgcacagata

SEQ ID NO: 432140 - DNA, 19 bp, Homo sapiens
  siRNA target sequence for ZNF445 (NM_181489.3,832-850).
cgatctgcacagatatggt

SEQ ID NO: 432141 - DNA, 19 bp, Homo sapiens
  siRNA target sequence for ZNF445 (NM_181489.3,895-913).
ctggagcctccctatgaaa

SEQ ID NO: 432142 - DNA, 19 bp, Homo sapiens
  siRNA target sequence for ZNF445 (NM_181489.3,897-915).
ggagcctccctatgaaata

SEQ ID NO: 432143 - DNA, 19 bp, Homo sapiens
  siRNA target sequence for ZNF445 (NM_181489.3,900-918).
gcctccctatgaaatagaa

SEQ ID NO: 432144 - DNA, 19 bp, Homo sapiens
  siRNA target sequence for ZNF445 (NM_181489.3,1039-1057).
caggagaccatgactttca

SEQ ID NO: 432145 - DNA, 19 bp, Homo sapiens
  siRNA target sequence for ZNF445 (NM_181489.3,1280-1298).
gagatgacctccagagtaa

SEQ ID NO: 432146 - DNA, 19 bp, Homo sapiens
  siRNA target sequence for ZNF445 (NM_181489.3,1282-1300).
gatgacctccagagtaaaa

SEQ ID NO: 432147 - DNA, 19 bp, Homo sapiens
  siRNA target sequence for ZNF445 (NM_181489.3,1285-1303).
gacctccagagtaaaacaa

SEQ ID NO: 432148 - DNA, 19 bp, Homo sapiens
  siRNA target sequence for ZNF445 (NM_181489.3,1370-1388).
ctgcgacaagtgtttctga

SEQ ID NO: 432149 - DNA, 19 bp, Homo sapiens
  siRNA target sequence for ZNF445 (NM_181489.3,1450-1468).
cccatacaagtaagagtta

SEQ ID NO: 432150 - DNA, 19 bp, Homo sapiens
  siRNA target sequence for ZNF445 (NM_181489.3,1451-1469).
ccatacaagtaagagttaa

SEQ ID NO: 432151 - DNA, 19 bp, Homo sapiens
  siRNA target sequence for ZNF445 (NM_181489.3,1523-1541).
gaagtaatagtcttgactt

SEQ ID NO: 432152 - DNA, 19 bp, Homo sapiens
  siRNA target sequence for ZNF445 (NM_181489.3,1526-1544).
gtaatagtcttgacttaaa

SEQ ID NO: 432153 - DNA, 19 bp, Homo sapiens
  siRNA target sequence for ZNF445 (NM_181489.3,1574-1592).
gaaaggaatcccttaaaca

SEQ ID NO: 432154 - DNA, 19 bp, Homo sapiens
  siRNA target sequence for ZNF445 (NM_181489.3,1653-1671).
ggggctcagacacatgatt

SEQ ID NO: 432155 - DNA, 19 bp, Homo sapiens
  siRNA target sequence for ZNF445 (NM_181489.3,1789-1807).
gtgggagtgtcatttaagt

SEQ ID NO: 432156 - DNA, 19 bp, Homo sapiens
  siRNA target sequence for ZNF445 (NM_181489.3,1819-1837).
ggaaggactttcagtcata

SEQ ID NO: 432157 - DNA, 19 bp, Homo sapiens
  siRNA target sequence for ZNF445 (NM_181489.3,1839-1857).
ctcccatcttgcgtatcat

SEQ ID NO: 432158 - DNA, 19 bp, Homo sapiens
  siRNA target sequence for ZNF445 (NM_181489.3,1965-1983).
gccttataaatgcgattta

SEQ ID NO: 432159 - DNA, 19 bp, Homo sapiens
  siRNA target sequence for ZNF445 (NM_181489.3,2088-2106).
cagctcagggtttgatcat

SEQ ID NO: 432160 - DNA, 19 bp, Homo sapiens
  siRNA target sequence for ZNF445 (NM_181489.3,2156-2174).
ggaaatccttccactgtaa

SEQ ID NO: 432161 - DNA, 19 bp, Homo sapiens
  siRNA target sequence for ZNF445 (NM_181489.3,2207-2225).
cccaggagaagccctataa

SEQ ID NO: 432162 - DNA, 19 bp, Homo sapiens
  siRNA target sequence for ZNF445 (NM_181489.3,2261-2279).
caaactttactcgtcatat

SEQ ID NO: 432163 - DNA, 19 bp, Homo sapiens
  siRNA target sequence for ZNF445 (NM_181489.3,2505-2523).
ctataggtcagcctttatt

SEQ ID NO: 432164 - DNA, 19 bp, Homo sapiens
  siRNA target sequence for ZNF445 (NM_181489.3,2747-2765).
gatggagttccaatctcta

SEQ ID NO: 432165 - DNA, 19 bp, Homo sapiens
  siRNA target sequence for ZNF445 (NM_181489.3,2775-2793).
gaggattcactctcttcaa

SEQ ID NO: 432166 - DNA, 19 bp, Homo sapiens
  siRNA target sequence for ZNF445 (NM_181489.3,2782-2800).
cactctcttcaaaaacagt

SEQ ID NO: 432167 - DNA, 19 bp, Homo sapiens
  siRNA target sequence for ZNF445 (NM_181489.3,2799-2817).
gtatgattgccatgaaagt

SEQ ID NO: 432168 - DNA, 19 bp, Homo sapiens
  siRNA target sequence for ZNF445 (NM_181489.3,2828-2846).
caaatgtggagccaaaaat

SEQ ID NO: 432169 - DNA, 19 bp, Homo sapiens
  siRNA target sequence for ZNF445 (NM_181489.3,2900-2918).
gtaaaagaacccttttaga

SEQ ID NO: 432170 - DNA, 19 bp, Homo sapiens
  siRNA target sequence for ZNF445 (NM_181489.3,2906-2924).
gaacccttttagatcataa

SEQ ID NO: 432171 - DNA, 19 bp, Homo sapiens
  siRNA target sequence for ZNF445 (NM_181489.3,3058-3076).
gagttcattgggagacata

SEQ ID NO: 432172 - DNA, 19 bp, Homo sapiens
  siRNA target sequence for ZNF445 (NM_181489.3,3248-3266).
gactccaggacataagcat

SEQ ID NO: 432173 - DNA, 19 bp, Homo sapiens
  siRNA target sequence for ZNF445 (NM_181489.3,3312-3330).
caagagttcacaactcatt

SEQ ID NO: 432174 - DNA, 19 bp, Homo sapiens
  siRNA target sequence for ZNF445 (NM_181489.3,3325-3343).
ctcattagccacaagagat

SEQ ID NO: 432175 - DNA, 19 bp, Homo sapiens
  siRNA target sequence for ZNF445 (NM_181489.3,3327-3345).
cattagccacaagagattt

SEQ ID NO: 432176 - DNA, 19 bp, Homo sapiens
  siRNA target sequence for ZNF445 (NM_181489.3,3408-3426).
cctggctcggcatatgaaa

SEQ ID NO: 432177 - DNA, 19 bp, Homo sapiens
  siRNA target sequence for ZNF445 (NM_181489.3,3413-3431).
ctcggcatatgaaaaacca

SEQ ID NO: 432178 - DNA, 19 bp, Homo sapiens
  siRNA target sequence for ZNF445 (NM_181489.3,3415-3433).
cggcatatgaaaaaccata

SEQ ID NO: 432179 - DNA, 19 bp, Homo sapiens
  siRNA target sequence for ZNF445 (NM_181489.3,3417-3435).
gcatatgaaaaaccatatt

SEQ ID NO: 432180 - DNA, 19 bp, Homo sapiens
  siRNA target sequence for ZNF445 (NM_181489.3,3423-3441).
gaaaaaccatattagagat

SEQ ID NO: 432181 - DNA, 19 bp, Homo sapiens
  siRNA target sequence for ITGA1 (NM_181501.1,100-118).
ctggctcctcactgttgtt

SEQ ID NO: 432182 - DNA, 19 bp, Homo sapiens
  siRNA target sequence for ITGA1 (NM_181501.1,103-121).
gctcctcactgttgttcta

SEQ ID NO: 432183 - DNA, 19 bp, Homo sapiens
  siRNA target sequence for ITGA1 (NM_181501.1,119-137).
ctacgctgctgcgtatcat

SEQ ID NO: 432184 - DNA, 19 bp, Homo sapiens
  siRNA target sequence for ITGA1 (NM_181501.1,123-141).
gctgctgcgtatcattcaa

SEQ ID NO: 432185 - DNA, 19 bp, Homo sapiens
  siRNA target sequence for ITGA1 (NM_181501.1,124-142).
ctgctgcgtatcattcaat

SEQ ID NO: 432186 - DNA, 19 bp, Homo sapiens
  siRNA target sequence for ITGA1 (NM_181501.1,126-144).
gctgcgtatcattcaatgt

SEQ ID NO: 432187 - DNA, 19 bp, Homo sapiens
  siRNA target sequence for ITGA1 (NM_181501.1,129-147).
gcgtatcattcaatgttga

SEQ ID NO: 432188 - DNA, 19 bp, Homo sapiens
  siRNA target sequence for ITGA1 (NM_181501.1,130-148).
cgtatcattcaatgttgat

SEQ ID NO: 432189 - DNA, 19 bp, Homo sapiens
  siRNA target sequence for ITGA1 (NM_181501.1,179-197).
gtggaagacatgtttggat

SEQ ID NO: 432190 - DNA, 19 bp, Homo sapiens
  siRNA target sequence for ITGA1 (NM_181501.1,181-199).
ggaagacatgtttggatat

SEQ ID NO: 432191 - DNA, 19 bp, Homo sapiens
  siRNA target sequence for ITGA1 (NM_181501.1,187-205).
catgtttggatatactgtt

SEQ ID NO: 432192 - DNA, 19 bp, Homo sapiens
  siRNA target sequence for ITGA1 (NM_181501.1,257-275).
gttggccaacccaaaaaca

SEQ ID NO: 432193 - DNA, 19 bp, Homo sapiens
  siRNA target sequence for ITGA1 (NM_181501.1,274-292).
cagaactggagatgtctat

SEQ ID NO: 432194 - DNA, 19 bp, Homo sapiens
  siRNA target sequence for ITGA1 (NM_181501.1,302-320).
gttgggagaggtgaatcat

SEQ ID NO: 432195 - DNA, 19 bp, Homo sapiens
  siRNA target sequence for ITGA1 (NM_181501.1,314-332).
gaatcattaccttgtgtaa

SEQ ID NO: 432196 - DNA, 19 bp, Homo sapiens
  siRNA target sequence for ITGA1 (NM_181501.1,334-352).
gttggatctaccagttaat

SEQ ID NO: 432197 - DNA, 19 bp, Homo sapiens
  siRNA target sequence for ITGA1 (NM_181501.1,337-355).
ggatctaccagttaataca

SEQ ID NO: 432198 - DNA, 19 bp, Homo sapiens
  siRNA target sequence for ITGA1 (NM_181501.1,338-356).
gatctaccagttaatacat

SEQ ID NO: 432199 - DNA, 19 bp, Homo sapiens
  siRNA target sequence for ITGA1 (NM_181501.1,341-359).
ctaccagttaatacatcaa

SEQ ID NO: 432200 - DNA, 19 bp, Homo sapiens
  siRNA target sequence for ITGA1 (NM_181501.1,377-395).
gtaaaggagaacatgacat

SEQ ID NO: 432201 - DNA, 19 bp, Homo sapiens
  siRNA target sequence for ITGA1 (NM_181501.1,388-406).
catgacatttggatcaact

SEQ ID NO: 432202 - DNA, 19 bp, Homo sapiens
  siRNA target sequence for ITGA1 (NM_181501.1,391-409).
gacatttggatcaacttta

SEQ ID NO: 432203 - DNA, 19 bp, Homo sapiens
  siRNA target sequence for ITGA1 (NM_181501.1,393-411).
catttggatcaactttagt

SEQ ID NO: 432204 - DNA, 19 bp, Homo sapiens
  siRNA target sequence for ITGA1 (NM_181501.1,445-463).
gcccttatatgcctataga

SEQ ID NO: 432205 - DNA, 19 bp, Homo sapiens
  siRNA target sequence for ITGA1 (NM_181501.1,446-464).
cccttatatgcctatagat

SEQ ID NO: 432206 - DNA, 19 bp, Homo sapiens
  siRNA target sequence for ITGA1 (NM_181501.1,448-466).
cttatatgcctatagatgt

SEQ ID NO: 432207 - DNA, 19 bp, Homo sapiens
  siRNA target sequence for ITGA1 (NM_181501.1,456-474).
cctatagatgtggacattt

SEQ ID NO: 432208 - DNA, 19 bp, Homo sapiens
  siRNA target sequence for ITGA1 (NM_181501.1,532-550).
cattgcccctgtacaagaa

SEQ ID NO: 432209 - DNA, 19 bp, Homo sapiens
  siRNA target sequence for ITGA1 (NM_181501.1,555-573).
gcactcaactggacatagt

SEQ ID NO: 432210 - DNA, 19 bp, Homo sapiens
  siRNA target sequence for ITGA1 (NM_181501.1,583-601).
ggatggttccaacagtatt

SEQ ID NO: 432211 - DNA, 19 bp, Homo sapiens
  siRNA target sequence for ITGA1 (NM_181501.1,611-629).
gacagtgttacagcttttt

SEQ ID NO: 432212 - DNA, 19 bp, Homo sapiens
  siRNA target sequence for ITGA1 (NM_181501.1,613-631).
cagtgttacagctttttta

SEQ ID NO: 432213 - DNA, 19 bp, Homo sapiens
  siRNA target sequence for ITGA1 (NM_181501.1,637-655).
ccttcttgaaagaatggat

SEQ ID NO: 432214 - DNA, 19 bp, Homo sapiens
  siRNA target sequence for ITGA1 (NM_181501.1,638-656).
cttcttgaaagaatggata

SEQ ID NO: 432215 - DNA, 19 bp, Homo sapiens
  siRNA target sequence for ITGA1 (NM_181501.1,653-671).
gatattggtcctaaacaga

SEQ ID NO: 432216 - DNA, 19 bp, Homo sapiens
  siRNA target sequence for ITGA1 (NM_181501.1,715-733).
gttcaacctcaataagtat

SEQ ID NO: 432217 - DNA, 19 bp, Homo sapiens
  siRNA target sequence for ITGA1 (NM_181501.1,718-736).
caacctcaataagtattct

SEQ ID NO: 432218 - DNA, 19 bp, Homo sapiens
  siRNA target sequence for ITGA1 (NM_181501.1,852-870).
gtgcccgaagaggagttaa

SEQ ID NO: 432219 - DNA, 19 bp, Homo sapiens
  siRNA target sequence for ITGA1 (NM_181501.1,855-873).
cccgaagaggagttaaaaa

SEQ ID NO: 432220 - DNA, 19 bp, Homo sapiens
  siRNA target sequence for ITGA1 (NM_181501.1,861-879).
gaggagttaaaaaagtcat

SEQ ID NO: 432221 - DNA, 19 bp, Homo sapiens
  siRNA target sequence for ITGA1 (NM_181501.1,897-915).
gagagtctcatgacaatca

SEQ ID NO: 432222 - DNA, 19 bp, Homo sapiens
  siRNA target sequence for ITGA1 (NM_181501.1,955-973).
cattcaacggttttccata

SEQ ID NO: 432223 - DNA, 19 bp, Homo sapiens
  siRNA target sequence for ITGA1 (NM_181501.1,959-977).
caacggttttccatagcta

SEQ ID NO: 432224 - DNA, 19 bp, Homo sapiens
  siRNA target sequence for ITGA1 (NM_181501.1,963-981).
ggttttccatagctattct

SEQ ID NO: 432225 - DNA, 19 bp, Homo sapiens
  siRNA target sequence for ITGA1 (NM_181501.1,985-1003).
cagctataaccgaggaaat

SEQ ID NO: 432226 - DNA, 19 bp, Homo sapiens
  siRNA target sequence for ITGA1 (NM_181501.1,987-1005).
gctataaccgaggaaattt

SEQ ID NO: 432227 - DNA, 19 bp, Homo sapiens
  siRNA target sequence for ITGA1 (NM_181501.1,988-1006).
ctataaccgaggaaattta

SEQ ID NO: 432228 - DNA, 19 bp, Homo sapiens
  siRNA target sequence for ITGA1 (NM_181501.1,1090-1108).
ggctctagtcaccattgtt

SEQ ID NO: 432229 - DNA, 19 bp, Homo sapiens
  siRNA target sequence for ITGA1 (NM_181501.1,1091-1109).
gctctagtcaccattgtta

SEQ ID NO: 432230 - DNA, 19 bp, Homo sapiens
  siRNA target sequence for ITGA1 (NM_181501.1,1094-1112).
ctagtcaccattgttaaaa

SEQ ID NO: 432231 - DNA, 19 bp, Homo sapiens
  siRNA target sequence for ITGA1 (NM_181501.1,1158-1176).
cagcagcttcatttgaaat

SEQ ID NO: 432232 - DNA, 19 bp, Homo sapiens
  siRNA target sequence for ITGA1 (NM_181501.1,1235-1253).
gcagtaggagcctatgatt

SEQ ID NO: 432233 - DNA, 19 bp, Homo sapiens
  siRNA target sequence for ITGA1 (NM_181501.1,1274-1292).
cagaaggctagtcaaatca

SEQ ID NO: 432234 - DNA, 19 bp, Homo sapiens
  siRNA target sequence for ITGA1 (NM_181501.1,1291-1309).
cataatccctcgaaacaca

SEQ ID NO: 432235 - DNA, 19 bp, Homo sapiens
  siRNA target sequence for ITGA1 (NM_181501.1,1297-1315).
ccctcgaaacacaaccttt

SEQ ID NO: 432236 - DNA, 19 bp, Homo sapiens
  siRNA target sequence for ITGA1 (NM_181501.1,1298-1316).
cctcgaaacacaaccttta

SEQ ID NO: 432237 - DNA, 19 bp, Homo sapiens
  siRNA target sequence for ITGA1 (NM_181501.1,1299-1317).
ctcgaaacacaacctttaa

SEQ ID NO: 432238 - DNA, 19 bp, Homo sapiens
  siRNA target sequence for ITGA1 (NM_181501.1,1302-1320).
gaaacacaacctttaatgt

SEQ ID NO: 432239 - DNA, 19 bp, Homo sapiens
  siRNA target sequence for ITGA1 (NM_181501.1,1340-1358).
gaaccgcttgcttcttatt

SEQ ID NO: 432240 - DNA, 19 bp, Homo sapiens
  siRNA target sequence for ITGA1 (NM_181501.1,1392-1410).
ctggagatgtgctctatat

SEQ ID NO: 432241 - DNA, 19 bp, Homo sapiens
  siRNA target sequence for ITGA1 (NM_181501.1,1416-1434).
gacagcctcggtacaatca

SEQ ID NO: 432242 - DNA, 19 bp, Homo sapiens
  siRNA target sequence for ITGA1 (NM_181501.1,1418-1436).
cagcctcggtacaatcata

SEQ ID NO: 432243 - DNA, 19 bp, Homo sapiens
  siRNA target sequence for ITGA1 (NM_181501.1,1420-1438).
gcctcggtacaatcataca

SEQ ID NO: 432244 - DNA, 19 bp, Homo sapiens
  siRNA target sequence for ITGA1 (NM_181501.1,1515-1533).
cctactttggcagtatttt

SEQ ID NO: 432245 - DNA, 19 bp, Homo sapiens
  siRNA target sequence for ITGA1 (NM_181501.1,1516-1534).
ctactttggcagtatttta

SEQ ID NO: 432246 - DNA, 19 bp, Homo sapiens
  siRNA target sequence for ITGA1 (NM_181501.1,1536-1554).
caacaactgacattgacaa

SEQ ID NO: 432247 - DNA, 19 bp, Homo sapiens
  siRNA target sequence for ITGA1 (NM_181501.1,1544-1562).
gacattgacaaggattcta

SEQ ID NO: 432248 - DNA, 19 bp, Homo sapiens
  siRNA target sequence for ITGA1 (NM_181501.1,1580-1598).
gtcggagcccctatgtaca

SEQ ID NO: 432249 - DNA, 19 bp, Homo sapiens
  siRNA target sequence for ITGA1 (NM_181501.1,1674-1692).
gcctggaacctattaagca

SEQ ID NO: 432250 - DNA, 19 bp, Homo sapiens
  siRNA target sequence for ITGA1 (NM_181501.1,1792-1810).
cctcaatcttgatggattt

SEQ ID NO: 432251 - DNA, 19 bp, Homo sapiens
  siRNA target sequence for ITGA1 (NM_181501.1,1849-1867).
cgggggagctgtgtacatt

SEQ ID NO: 432252 - DNA, 19 bp, Homo sapiens
  siRNA target sequence for ITGA1 (NM_181501.1,1854-1872).
gagctgtgtacatttatca

SEQ ID NO: 432253 - DNA, 19 bp, Homo sapiens
  siRNA target sequence for ITGA1 (NM_181501.1,1871-1889).
catggaagtggcaagacta

SEQ ID NO: 432254 - DNA, 19 bp, Homo sapiens
  siRNA target sequence for ITGA1 (NM_181501.1,1900-1918).
gtatgcacaacgtattcca

SEQ ID NO: 432255 - DNA, 19 bp, Homo sapiens
  siRNA target sequence for ITGA1 (NM_181501.1,1917-1935).
catcaggtggggatggtaa

SEQ ID NO: 432256 - DNA, 19 bp, Homo sapiens
  siRNA target sequence for ITGA1 (NM_181501.1,1963-1981).
ccacggagaaatggattta

SEQ ID NO: 432257 - DNA, 19 bp, Homo sapiens
  siRNA target sequence for ITGA1 (NM_181501.1,1966-1984).
cggagaaatggatttaaat

SEQ ID NO: 432258 - DNA, 19 bp, Homo sapiens
  siRNA target sequence for ITGA1 (NM_181501.1,2045-2063).
cgagatgtggccgtagtta

SEQ ID NO: 432259 - DNA, 19 bp, Homo sapiens
  siRNA target sequence for ITGA1 (NM_181501.1,2046-2064).
gagatgtggccgtagttaa

SEQ ID NO: 432260 - DNA, 19 bp, Homo sapiens
  siRNA target sequence for ITGA1 (NM_181501.1,2051-2069).
gtggccgtagttaaagtga

SEQ ID NO: 432261 - DNA, 19 bp, Homo sapiens
  siRNA target sequence for ITGA1 (NM_181501.1,2116-2134).
ccatatggagggaaaggaa

SEQ ID NO: 432262 - DNA, 19 bp, Homo sapiens
  siRNA target sequence for ITGA1 (NM_181501.1,2193-2211).
cgatttatgaagctgattt

SEQ ID NO: 432263 - DNA, 19 bp, Homo sapiens
  siRNA target sequence for ITGA1 (NM_181501.1,2218-2236).
ccgtgtcaccctagattca

SEQ ID NO: 432264 - DNA, 19 bp, Homo sapiens
  siRNA target sequence for ITGA1 (NM_181501.1,2220-2238).
gtgtcaccctagattcact

SEQ ID NO: 432265 - DNA, 19 bp, Homo sapiens
  siRNA target sequence for ITGA1 (NM_181501.1,2222-2240).
gtcaccctagattcactaa

SEQ ID NO: 432266 - DNA, 19 bp, Homo sapiens
  siRNA target sequence for ITGA1 (NM_181501.1,2226-2244).
ccctagattcactaagaca

SEQ ID NO: 432267 - DNA, 19 bp, Homo sapiens
  siRNA target sequence for ITGA1 (NM_181501.1,2227-2245).
cctagattcactaagacaa

SEQ ID NO: 432268 - DNA, 19 bp, Homo sapiens
  siRNA target sequence for ITGA1 (NM_181501.1,2228-2246).
ctagattcactaagacaaa

SEQ ID NO: 432269 - DNA, 19 bp, Homo sapiens
  siRNA target sequence for ITGA1 (NM_181501.1,2231-2249).
gattcactaagacaaatat

SEQ ID NO: 432270 - DNA, 19 bp, Homo sapiens
  siRNA target sequence for ITGA1 (NM_181501.1,2241-2259).
gacaaatatcacgaagttt

SEQ ID NO: 432271 - DNA, 19 bp, Homo sapiens
  siRNA target sequence for ITGA1 (NM_181501.1,2292-2310).
ggaacatcacagttcgaaa

SEQ ID NO: 432272 - DNA, 19 bp, Homo sapiens
  siRNA target sequence for ITGA1 (NM_181501.1,2296-2314).
catcacagttcgaaaatca

SEQ ID NO: 432273 - DNA, 19 bp, Homo sapiens
  siRNA target sequence for ITGA1 (NM_181501.1,2341-2359).
gttggacaagcatgacttt

SEQ ID NO: 432274 - DNA, 19 bp, Homo sapiens
  siRNA target sequence for ITGA1 (NM_181501.1,2373-2391).
gaataacgttggactttaa

SEQ ID NO: 432275 - DNA, 19 bp, Homo sapiens
  siRNA target sequence for ITGA1 (NM_181501.1,2436-2454).
caaactcagtacatgaata

SEQ ID NO: 432276 - DNA, 19 bp, Homo sapiens
  siRNA target sequence for ITGA1 (NM_181501.1,2465-2483).
gccaaagattgtggaaata

SEQ ID NO: 432277 - DNA, 19 bp, Homo sapiens
  siRNA target sequence for ITGA1 (NM_181501.1,2546-2564).
gtccgatcccagaatgata

SEQ ID NO: 432278 - DNA, 19 bp, Homo sapiens
  siRNA target sequence for ITGA1 (NM_181501.1,2550-2568).
gatcccagaatgataagtt

SEQ ID NO: 432279 - DNA, 19 bp, Homo sapiens
  siRNA target sequence for ITGA1 (NM_181501.1,2572-2590).
cgttagcctcacagtcaaa

SEQ ID NO: 432280 - DNA, 19 bp, Homo sapiens
  siRNA target sequence for ITGA1 (NM_181501.1,2620-2638).
gacaatagtgcattattct

SEQ ID NO: 432281 - DNA, 19 bp, Homo sapiens
  siRNA target sequence for ITGA1 (NM_181501.1,2629-2647).
gcattattctccaaatcta

SEQ ID NO: 432282 - DNA, 19 bp, Homo sapiens
  siRNA target sequence for ITGA1 (NM_181501.1,2682-2700).
gttgtgaatctaatcataa

SEQ ID NO: 432283 - DNA, 19 bp, Homo sapiens
  siRNA target sequence for ITGA1 (NM_181501.1,2685-2703).
gtgaatctaatcataatat

SEQ ID NO: 432284 - DNA, 19 bp, Homo sapiens
  siRNA target sequence for ITGA1 (NM_181501.1,2704-2722).
cacatgtaaagttggatat

SEQ ID NO: 432285 - DNA, 19 bp, Homo sapiens
  siRNA target sequence for ITGA1 (NM_181501.1,2736-2754).
gaggagagatggtaacttt

SEQ ID NO: 432286 - DNA, 19 bp, Homo sapiens
  siRNA target sequence for ITGA1 (NM_181501.1,2738-2756).
ggagagatggtaactttca

SEQ ID NO: 432287 - DNA, 19 bp, Homo sapiens
  siRNA target sequence for ITGA1 (NM_181501.1,2743-2761).
gatggtaactttcaaaata

SEQ ID NO: 432288 - DNA, 19 bp, Homo sapiens
  siRNA target sequence for ITGA1 (NM_181501.1,2891-2909).
gaagttggactacagtttt

SEQ ID NO: 432289 - DNA, 19 bp, Homo sapiens
  siRNA target sequence for ITGA1 (NM_181501.1,2894-2912).
gttggactacagttttaca

SEQ ID NO: 432290 - DNA, 19 bp, Homo sapiens
  siRNA target sequence for ITGA1 (NM_181501.1,3348-3366).
ccagcttaaatcttactat

SEQ ID NO: 432291 - DNA, 19 bp, Homo sapiens
  siRNA target sequence for ITGA1 (NM_181501.1,3428-3446).
gagcttgctattcaaatat

SEQ ID NO: 432292 - DNA, 19 bp, Homo sapiens
  siRNA target sequence for ITGA1 (NM_181501.1,3461-3479).
ccgggcagagtgccattat

SEQ ID NO: 432293 - DNA, 19 bp, Homo sapiens
  siRNA target sequence for ITGA1 (NM_181501.1,3504-3522).
ccggattgttgctgttaat

SEQ ID NO: 432294 - DNA, 19 bp, Homo sapiens
  siRNA target sequence for ITGA1 (NM_181501.1,3536-3554).
gcactgtggaagattggat

SEQ ID NO: 432295 - DNA, 19 bp, Homo sapiens
  siRNA target sequence for ITGA1 (NM_181501.1,3537-3555).
cactgtggaagattggatt

SEQ ID NO: 432296 - DNA, 19 bp, Homo sapiens
  siRNA target sequence for SLRN (NM_181506.2,108-126).
gccttgcctacgactgttt

SEQ ID NO: 432297 - DNA, 19 bp, Homo sapiens
  siRNA target sequence for SLRN (NM_181506.2,110-128).
cttgcctacgactgtttct

SEQ ID NO: 432298 - DNA, 19 bp, Homo sapiens
  siRNA target sequence for SLRN (NM_181506.2,118-136).
cgactgtttctggttgtta

SEQ ID NO: 432299 - DNA, 19 bp, Homo sapiens
  siRNA target sequence for SLRN (NM_181506.2,196-214).
ctctgcactgggagacaaa

SEQ ID NO: 432300 - DNA, 19 bp, Homo sapiens
  siRNA target sequence for SLRN (NM_181506.2,200-218).
gcactgggagacaaattaa

SEQ ID NO: 432301 - DNA, 19 bp, Homo sapiens
  siRNA target sequence for SLRN (NM_181506.2,228-246).
cttaggcctttcgagtatt

SEQ ID NO: 432302 - DNA, 19 bp, Homo sapiens
  siRNA target sequence for SLRN (NM_181506.2,232-250).
ggcctttcgagtattccta

SEQ ID NO: 432303 - DNA, 19 bp, Homo sapiens
  siRNA target sequence for SLRN (NM_181506.2,239-257).
cgagtattcctaagaattt

SEQ ID NO: 432304 - DNA, 19 bp, Homo sapiens
  siRNA target sequence for SLRN (NM_181506.2,279-297).
gtatctgactgggaataat

SEQ ID NO: 432305 - DNA, 19 bp, Homo sapiens
  siRNA target sequence for SLRN (NM_181506.2,319-337).
gaattaacaggacttcatt

SEQ ID NO: 432306 - DNA, 19 bp, Homo sapiens
  siRNA target sequence for SLRN (NM_181506.2,400-418).
caattgaggcatctatatt

SEQ ID NO: 432307 - DNA, 19 bp, Homo sapiens
  siRNA target sequence for SLRN (NM_181506.2,450-468).
cttagatcctggaatattt

SEQ ID NO: 432308 - DNA, 19 bp, Homo sapiens
  siRNA target sequence for SLRN (NM_181506.2,487-505).
cgtaatttatatttacagt

SEQ ID NO: 432309 - DNA, 19 bp, Homo sapiens
  siRNA target sequence for SLRN (NM_181506.2,502-520).
cagtataatcaggtatctt

SEQ ID NO: 432310 - DNA, 19 bp, Homo sapiens
  siRNA target sequence for SLRN (NM_181506.2,504-522).
gtataatcaggtatctttt

SEQ ID NO: 432311 - DNA, 19 bp, Homo sapiens
  siRNA target sequence for SLRN (NM_181506.2,559-577).
cagtacttaaatctacaaa

SEQ ID NO: 432312 - DNA, 19 bp, Homo sapiens
  siRNA target sequence for SLRN (NM_181506.2,594-612).
ccttgggagtggtaccttt

SEQ ID NO: 432313 - DNA, 19 bp, Homo sapiens
  siRNA target sequence for SLRN (NM_181506.2,621-639).
ggttgctcttcggatactt

SEQ ID NO: 432314 - DNA, 19 bp, Homo sapiens
  siRNA target sequence for SLRN (NM_181506.2,625-643).
gctcttcggatacttgatt

SEQ ID NO: 432315 - DNA, 19 bp, Homo sapiens
  siRNA target sequence for SLRN (NM_181506.2,626-644).
ctcttcggatacttgattt

SEQ ID NO: 432316 - DNA, 19 bp, Homo sapiens
  siRNA target sequence for SLRN (NM_181506.2,628-646).
cttcggatacttgatttat

SEQ ID NO: 432317 - DNA, 19 bp, Homo sapiens
  siRNA target sequence for SLRN (NM_181506.2,631-649).
cggatacttgatttatcaa

SEQ ID NO: 432318 - DNA, 19 bp, Homo sapiens
  siRNA target sequence for SLRN (NM_181506.2,694-712).
gaaaaccttgcttgtttgt

SEQ ID NO: 432319 - DNA, 19 bp, Homo sapiens
  siRNA target sequence for SLRN (NM_181506.2,703-721).
gcttgtttgtatttaggaa

SEQ ID NO: 432320 - DNA, 19 bp, Homo sapiens
  siRNA target sequence for SLRN (NM_181506.2,770-788).
gtcttagaagactttcttt

SEQ ID NO: 432321 - DNA, 19 bp, Homo sapiens
  siRNA target sequence for SLRN (NM_181506.2,772-790).
cttagaagactttctttgt

SEQ ID NO: 432322 - DNA, 19 bp, Homo sapiens
  siRNA target sequence for SLRN (NM_181506.2,809-827).
caatacagccctttgcatt

SEQ ID NO: 432323 - DNA, 19 bp, Homo sapiens
  siRNA target sequence for SLRN (NM_181506.2,816-834).
gccctttgcatttaaagga

SEQ ID NO: 432324 - DNA, 19 bp, Homo sapiens
  siRNA target sequence for SLRN (NM_181506.2,833-851).
gacttgccaatctggaata

SEQ ID NO: 432325 - DNA, 19 bp, Homo sapiens
  siRNA target sequence for SLRN (NM_181506.2,891-909).
ggatgggtttagtggaatt

SEQ ID NO: 432326 - DNA, 19 bp, Homo sapiens
  siRNA target sequence for SLRN (NM_181506.2,892-910).
gatgggtttagtggaatta

SEQ ID NO: 432327 - DNA, 19 bp, Homo sapiens
  siRNA target sequence for SLRN (NM_181506.2,896-914).
ggtttagtggaattaataa

SEQ ID NO: 432328 - DNA, 19 bp, Homo sapiens
  siRNA target sequence for SLRN (NM_181506.2,1057-1075).
gcatctttgaagatcctta

SEQ ID NO: 432329 - DNA, 19 bp, Homo sapiens
  siRNA target sequence for SLRN (NM_181506.2,1061-1079).
ctttgaagatccttaatct

SEQ ID NO: 432330 - DNA, 19 bp, Homo sapiens
  siRNA target sequence for SLRN (NM_181506.2,1068-1086).
gatccttaatctgtcattt

SEQ ID NO: 432331 - DNA, 19 bp, Homo sapiens
  siRNA target sequence for SLRN (NM_181506.2,1114-1132).
gtccttaagccgttgtctt

SEQ ID NO: 432332 - DNA, 19 bp, Homo sapiens
  siRNA target sequence for SLRN (NM_181506.2,1117-1135).
cttaagccgttgtcttcat

SEQ ID NO: 432333 - DNA, 19 bp, Homo sapiens
  siRNA target sequence for SLRN (NM_181506.2,1157-1175).
ctaatccttgggaatgtaa

SEQ ID NO: 432334 - DNA, 19 bp, Homo sapiens
  siRNA target sequence for SLRN (NM_181506.2,1167-1185).
ggaatgtaactgcaaactt

SEQ ID NO: 432335 - DNA, 19 bp, Homo sapiens
  siRNA target sequence for SLRN (NM_181506.2,1168-1186).
gaatgtaactgcaaacttt

SEQ ID NO: 432336 - DNA, 19 bp, Homo sapiens
  siRNA target sequence for SLRN (NM_181506.2,1208-1226).
catcttcagccattactct

SEQ ID NO: 432337 - DNA, 19 bp, Homo sapiens
  siRNA target sequence for SLRN (NM_181506.2,1216-1234).
gccattactctaaacatct

SEQ ID NO: 432338 - DNA, 19 bp, Homo sapiens
  siRNA target sequence for SLRN (NM_181506.2,1254-1272).
catgcgtggcagagcatta

SEQ ID NO: 432339 - DNA, 19 bp, Homo sapiens
  siRNA target sequence for SLRN (NM_181506.2,1258-1276).
cgtggcagagcattacgtt

SEQ ID NO: 432340 - DNA, 19 bp, Homo sapiens
  siRNA target sequence for SLRN (NM_181506.2,1261-1279).
ggcagagcattacgttata

SEQ ID NO: 432341 - DNA, 19 bp, Homo sapiens
  siRNA target sequence for SLRN (NM_181506.2,1262-1280).
gcagagcattacgttatat

SEQ ID NO: 432342 - DNA, 19 bp, Homo sapiens
  siRNA target sequence for SLRN (NM_181506.2,1320-1338).
cagagcttgggctgttgta

SEQ ID NO: 432343 - DNA, 19 bp, Homo sapiens
  siRNA target sequence for SLRN (NM_181506.2,1324-1342).
gcttgggctgttgtaaaat

SEQ ID NO: 432344 - DNA, 19 bp, Homo sapiens
  siRNA target sequence for SLRN (NM_181506.2,1377-1395).
gatggcctggcataaagta

SEQ ID NO: 432345 - DNA, 19 bp, Homo sapiens
  siRNA target sequence for SLRN (NM_181506.2,1472-1490).
ctggtagattttttcaaga

SEQ ID NO: 432346 - DNA, 19 bp, Homo sapiens
  siRNA target sequence for SLRN (NM_181506.2,1491-1509).
gaatgcctttggtaatcca

SEQ ID NO: 432347 - DNA, 19 bp, Homo sapiens
  siRNA target sequence for SLRN (NM_181506.2,1496-1514).
cctttggtaatccattaga

SEQ ID NO: 432348 - DNA, 19 bp, Homo sapiens
  siRNA target sequence for SLRN (NM_181506.2,1581-1599).
cagtgctctaccgaatgat

SEQ ID NO: 432349 - DNA, 19 bp, Homo sapiens
  siRNA target sequence for SLRN (NM_181506.2,1592-1610).
cgaatgatgctgcttcaat

SEQ ID NO: 432350 - DNA, 19 bp, Homo sapiens
  siRNA target sequence for SLRN (NM_181506.2,1611-1629).
gtcagggaaaacatctcta

SEQ ID NO: 432351 - DNA, 19 bp, Homo sapiens
  siRNA target sequence for SLRN (NM_181506.2,1617-1635).
gaaaacatctctaatttgt

SEQ ID NO: 432352 - DNA, 19 bp, Homo sapiens
  siRNA target sequence for SLRN (NM_181506.2,1662-1680).
ggcttttgacattttgcta

SEQ ID NO: 432353 - DNA, 19 bp, Homo sapiens
  siRNA target sequence for SLRN (NM_181506.2,1669-1687).
gacattttgctagcttttt

SEQ ID NO: 432354 - DNA, 19 bp, Homo sapiens
  siRNA target sequence for SLRN (NM_181506.2,1783-1801).
cttgaatactacagctttt

SEQ ID NO: 432355 - DNA, 19 bp, Homo sapiens
  siRNA target sequence for SLRN (NM_181506.2,1806-1824).
gtcagcaaggtataatgta

SEQ ID NO: 432356 - DNA, 19 bp, Homo sapiens
  siRNA target sequence for SLRN (NM_181506.2,1822-1840).
gtaactgcctcaatttgta

SEQ ID NO: 432357 - DNA, 19 bp, Homo sapiens
  siRNA target sequence for SLRN (NM_181506.2,1828-1846).
gcctcaatttgtaacactt

SEQ ID NO: 432358 - DNA, 19 bp, Homo sapiens
  siRNA target sequence for SLRN (NM_181506.2,1875-1893).
ggagcagattcgacttcat

SEQ ID NO: 432359 - DNA, 19 bp, Homo sapiens
  siRNA target sequence for SLRN (NM_181506.2,1876-1894).
gagcagattcgacttcata

SEQ ID NO: 432360 - DNA, 19 bp, Homo sapiens
  siRNA target sequence for SLRN (NM_181506.2,1878-1896).
gcagattcgacttcataaa

SEQ ID NO: 432361 - DNA, 19 bp, Homo sapiens
  siRNA target sequence for SLRN (NM_181506.2,1881-1899).
gattcgacttcataaacaa

SEQ ID NO: 432362 - DNA, 19 bp, Homo sapiens
  siRNA target sequence for SLRN (NM_181506.2,1917-1935).
ggcacaggtcattcttttt

SEQ ID NO: 432363 - DNA, 19 bp, Homo sapiens
  siRNA target sequence for SLRN (NM_181506.2,1919-1937).
cacaggtcattctttttga

SEQ ID NO: 432364 - DNA, 19 bp, Homo sapiens
  siRNA target sequence for HPS5 (NM_181507.1,281-299).
ggcttttgtgccagtgata

SEQ ID NO: 432365 - DNA, 19 bp, Homo sapiens
  siRNA target sequence for HPS5 (NM_181507.1,318-336).
gttcttgcagagtttgaat

SEQ ID NO: 432366 - DNA, 19 bp, Homo sapiens
  siRNA target sequence for HPS5 (NM_181507.1,441-459).
ggactccatctcattcaga

SEQ ID NO: 432367 - DNA, 19 bp, Homo sapiens
  siRNA target sequence for HPS5 (NM_181507.1,469-487).
ggaagcacaggctttttct

SEQ ID NO: 432368 - DNA, 19 bp, Homo sapiens
  siRNA target sequence for HPS5 (NM_181507.1,606-624).
gggaaaccggaacaaatgt

SEQ ID NO: 432369 - DNA, 19 bp, Homo sapiens
  siRNA target sequence for HPS5 (NM_181507.1,607-625).
ggaaaccggaacaaatgta

SEQ ID NO: 432370 - DNA, 19 bp, Homo sapiens
  siRNA target sequence for HPS5 (NM_181507.1,608-626).
gaaaccggaacaaatgtat

SEQ ID NO: 432371 - DNA, 19 bp, Homo sapiens
  siRNA target sequence for HPS5 (NM_181507.1,612-630).
ccggaacaaatgtatgtgt

SEQ ID NO: 432372 - DNA, 19 bp, Homo sapiens
  siRNA target sequence for MRPL21 (NM_181512.1,132-150).
ctcgaaggttcaattcaca

SEQ ID NO: 432373 - DNA, 19 bp, Homo sapiens
  siRNA target sequence for MRPL21 (NM_181512.1,147-165).
cacagagcacttcatatct

SEQ ID NO: 432374 - DNA, 19 bp, Homo sapiens
  siRNA target sequence for MRPL21 (NM_181512.1,167-185).
ccaggatatgttcctaaaa

SEQ ID NO: 432375 - DNA, 19 bp, Homo sapiens
  siRNA target sequence for MRPL21 (NM_181512.1,351-369).
cctctgaagacctgatctt

SEQ ID NO: 432376 - DNA, 19 bp, Homo sapiens
  siRNA target sequence for MRPL21 (NM_181512.1,359-377).
gacctgatcttaattggaa

SEQ ID NO: 432377 - DNA, 19 bp, Homo sapiens
  siRNA target sequence for MRPL21 (NM_181512.1,394-412).
gtgtggagagagaattcga

SEQ ID NO: 432378 - DNA, 19 bp, Homo sapiens
  siRNA target sequence for MRPL21 (NM_181512.1,431-449).
gttggggcagacaacttca

SEQ ID NO: 432379 - DNA, 19 bp, Homo sapiens
  siRNA target sequence for MRPL21 (NM_181513.1,409-427).
gccactcctcggaaaggat

SEQ ID NO: 432380 - DNA, 19 bp, Homo sapiens
  siRNA target sequence for MRPL21 (NM_181513.1,415-433).
cctcggaaaggatcttgtt

SEQ ID NO: 432381 - DNA, 19 bp, Homo sapiens
  siRNA target sequence for MRPL21 (NM_181513.1,468-486).
catggccaagaatcattat

SEQ ID NO: 432382 - DNA, 19 bp, Homo sapiens
  siRNA target sequence for MRPL21 (NM_181513.1,473-491).
ccaagaatcattatgagat

SEQ ID NO: 432383 - DNA, 19 bp, Homo sapiens
  siRNA target sequence for MRPL21 (NM_181513.1,566-584).
gagattgctccgtgtttgt

SEQ ID NO: 432384 - DNA, 19 bp, Homo sapiens
  siRNA target sequence for SYT15 (NM_181519.2,1272-1290).
ggacaagcaggctactaca

SEQ ID NO: 432385 - DNA, 19 bp, Homo sapiens
  siRNA target sequence for ERAS (NM_181532.2,508-526).
gtggggactgcattctgaa

SEQ ID NO: 432386 - DNA, 19 bp, Homo sapiens
  siRNA target sequence for C14orf29 (NM_181533.3,265-283).
ggactgttgctggtatgaa

SEQ ID NO: 432387 - DNA, 19 bp, Homo sapiens
  siRNA target sequence for C14orf29 (NM_181533.3,300-318).
ggaacccaattattgttta

SEQ ID NO: 432388 - DNA, 19 bp, Homo sapiens
  siRNA target sequence for C14orf29 (NM_181533.3,301-319).
gaacccaattattgtttat

SEQ ID NO: 432389 - DNA, 19 bp, Homo sapiens
  siRNA target sequence for C14orf29 (NM_181533.3,460-478).
gactacggatgccatttgt

SEQ ID NO: 432390 - DNA, 19 bp, Homo sapiens
  siRNA target sequence for C14orf29 (NM_181533.3,462-480).
ctacggatgccatttgtgt

SEQ ID NO: 432391 - DNA, 19 bp, Homo sapiens
  siRNA target sequence for C14orf29 (NM_181533.3,543-561).
gtacaggagttgcaacaaa

SEQ ID NO: 432392 - DNA, 19 bp, Homo sapiens
  siRNA target sequence for C14orf29 (NM_181533.3,555-573).
caacaaatgctgcaaaagt

SEQ ID NO: 432393 - DNA, 19 bp, Homo sapiens
  siRNA target sequence for C14orf29 (NM_181533.3,564-582).
ctgcaaaagtgctagaaga

SEQ ID NO: 432394 - DNA, 19 bp, Homo sapiens
  siRNA target sequence for C14orf29 (NM_181533.3,588-606).
gatgcccagttgatgctat

SEQ ID NO: 432395 - DNA, 19 bp, Homo sapiens
  siRNA target sequence for C14orf29 (NM_181533.3,634-652).
gtgggttgcaagtatcaat

SEQ ID NO: 432396 - DNA, 19 bp, Homo sapiens
  siRNA target sequence for C14orf29 (NM_181533.3,636-654).
gggttgcaagtatcaatta

SEQ ID NO: 432397 - DNA, 19 bp, Homo sapiens
  siRNA target sequence for C14orf29 (NM_181533.3,637-655).
ggttgcaagtatcaattat

SEQ ID NO: 432398 - DNA, 19 bp, Homo sapiens
  siRNA target sequence for C14orf29 (NM_181533.3,674-692).
cggaacattccaggatttt

SEQ ID NO: 432399 - DNA, 19 bp, Homo sapiens
  siRNA target sequence for C14orf29 (NM_181533.3,687-705).
gatttttacgtacacttat

SEQ ID NO: 432400 - DNA, 19 bp, Homo sapiens
  siRNA target sequence for C14orf29 (NM_181533.3,870-888).
gggtcaagatggttatctt

SEQ ID NO: 432401 - DNA, 19 bp, Homo sapiens
  siRNA target sequence for C14orf29 (NM_181533.3,871-889).
ggtcaagatggttatcttt

SEQ ID NO: 432402 - DNA, 19 bp, Homo sapiens
  siRNA target sequence for KRT25A (NM_181534.2,198-216).
ctcatcgggaggaaacaca

SEQ ID NO: 432403 - DNA, 19 bp, Homo sapiens
  siRNA target sequence for KRT25A (NM_181534.2,482-500).
ccaccaccagcaatgctaa

SEQ ID NO: 432404 - DNA, 19 bp, Homo sapiens
  siRNA target sequence for KRT25A (NM_181534.2,595-613).
gatgtcaatgggttacgaa

SEQ ID NO: 432405 - DNA, 19 bp, Homo sapiens
  siRNA target sequence for KRT25A (NM_181534.2,600-618).
caatgggttacgaagagtt

SEQ ID NO: 432406 - DNA, 19 bp, Homo sapiens
  siRNA target sequence for KRT25A (NM_181534.2,644-662).
cagatctggagattcagta

SEQ ID NO: 432407 - DNA, 19 bp, Homo sapiens
  siRNA target sequence for KRT25A (NM_181534.2,928-946).
cggaatgagctgactgaaa

SEQ ID NO: 432408 - DNA, 19 bp, Homo sapiens
  siRNA target sequence for KRT25A (NM_181534.2,1197-1215).
ccttataggaggagatgat

SEQ ID NO: 432409 - DNA, 19 bp, Homo sapiens
  siRNA target sequence for KRT25A (NM_181534.2,1232-1250).
ggggttacaagtctaaaga

SEQ ID NO: 432410 - DNA, 19 bp, Homo sapiens
  siRNA target sequence for KRT25A (NM_181534.2,1234-1252).
ggttacaagtctaaagatt

SEQ ID NO: 432411 - DNA, 19 bp, Homo sapiens
  siRNA target sequence for KRT25A (NM_181534.2,1292-1310).
ccaaagccatagtggttaa

SEQ ID NO: 432412 - DNA, 19 bp, Homo sapiens
  siRNA target sequence for KRT25A (NM_181534.2,1299-1317).
catagtggttaagaaagtt

SEQ ID NO: 432413 - DNA, 19 bp, Homo sapiens
  siRNA target sequence for KRT25A (NM_181534.2,1327-1345).
gtagaccaacgcagcaaaa

SEQ ID NO: 432414 - DNA, 19 bp, Homo sapiens
  siRNA target sequence for KRT25D (NM_181535.2,42-60).
gtctctccaattttctaat

SEQ ID NO: 432415 - DNA, 19 bp, Homo sapiens
  siRNA target sequence for KRT25D (NM_181535.2,46-64).
ctccaattttctaatggat

SEQ ID NO: 432416 - DNA, 19 bp, Homo sapiens
  siRNA target sequence for KRT25D (NM_181535.2,452-470).
gcagatatcacctaacaat

SEQ ID NO: 432417 - DNA, 19 bp, Homo sapiens
  siRNA target sequence for KRT25D (NM_181535.2,453-471).
cagatatcacctaacaatt

SEQ ID NO: 432418 - DNA, 19 bp, Homo sapiens
  siRNA target sequence for KRT25D (NM_181535.2,455-473).
gatatcacctaacaattga

SEQ ID NO: 432419 - DNA, 19 bp, Homo sapiens
  siRNA target sequence for KRT25D (NM_181535.2,495-513).
ctcctccactactactaat

SEQ ID NO: 432420 - DNA, 19 bp, Homo sapiens
  siRNA target sequence for KRT25D (NM_181535.2,500-518).
ccactactactaatgctaa

SEQ ID NO: 432421 - DNA, 19 bp, Homo sapiens
  siRNA target sequence for KRT25D (NM_181535.2,588-606).
cacccttcaccaaaacgta

SEQ ID NO: 432422 - DNA, 19 bp, Homo sapiens
  siRNA target sequence for KRT25D (NM_181535.2,796-814).
gtagacctcgcggttttgt

SEQ ID NO: 432423 - DNA, 19 bp, Homo sapiens
  siRNA target sequence for KRT25D (NM_181535.2,799-817).
gacctcgcggttttgttga

SEQ ID NO: 432424 - DNA, 19 bp, Homo sapiens
  siRNA target sequence for KRT25D (NM_181535.2,802-820).
ctcgcggttttgttgaaca

SEQ ID NO: 432425 - DNA, 19 bp, Homo sapiens
  siRNA target sequence for KRT25D (NM_181535.2,1006-1024).
ctgatggccacgaaacact

SEQ ID NO: 432426 - DNA, 19 bp, Homo sapiens
  siRNA target sequence for KRT25D (NM_181535.2,1231-1249).
ggaaattcatgctccaaat

SEQ ID NO: 432427 - DNA, 19 bp, Homo sapiens
  siRNA target sequence for KRT25D (NM_181535.2,1276-1294).
gggaattcatctaaagatt

SEQ ID NO: 432428 - DNA, 19 bp, Homo sapiens
  siRNA target sequence for KRT25D (NM_181535.2,1323-1341).
ggttgaagagctagatcaa

SEQ ID NO: 432429 - DNA, 19 bp, Homo sapiens
  siRNA target sequence for KRT25D (NM_181535.2,1332-1350).
gctagatcaacgtggtaaa

SEQ ID NO: 432430 - DNA, 19 bp, Homo sapiens
  siRNA target sequence for KRT25D (NM_181535.2,1364-1382).
ggattcactccattgaaga

SEQ ID NO: 432431 - DNA, 19 bp, Homo sapiens
  siRNA target sequence for KRT25D (NM_181535.2,1369-1387).
cactccattgaagaaaaga

SEQ ID NO: 432432 - DNA, 19 bp, Homo sapiens
  siRNA target sequence for PKD1L3 (NM_181536.1,36-54).
catcagaacaagtattatt

SEQ ID NO: 432433 - DNA, 19 bp, Homo sapiens
  siRNA target sequence for PKD1L3 (NM_181536.1,79-97).
gcaccacatgggcaaaata

SEQ ID NO: 432434 - DNA, 19 bp, Homo sapiens
  siRNA target sequence for PKD1L3 (NM_181536.1,101-119).
gttaccagcttaacagatt

SEQ ID NO: 432435 - DNA, 19 bp, Homo sapiens
  siRNA target sequence for PKD1L3 (NM_181536.1,164-182).
gaggattcctagctcatat

SEQ ID NO: 432436 - DNA, 19 bp, Homo sapiens
  siRNA target sequence for PKD1L3 (NM_181536.1,166-184).
ggattcctagctcatattt

SEQ ID NO: 432437 - DNA, 19 bp, Homo sapiens
  siRNA target sequence for PKD1L3 (NM_181536.1,237-255).
gtggtggattgggcaaaat

SEQ ID NO: 432438 - DNA, 19 bp, Homo sapiens
  siRNA target sequence for PKD1L3 (NM_181536.1,242-260).
ggattgggcaaaatgtaat

SEQ ID NO: 432439 - DNA, 19 bp, Homo sapiens
  siRNA target sequence for PKD1L3 (NM_181536.1,357-375).
cattcggatctcatccaaa

SEQ ID NO: 432440 - DNA, 19 bp, Homo sapiens
  siRNA target sequence for PKD1L3 (NM_181536.1,386-404).
gcttactgaaatactattt

SEQ ID NO: 432441 - DNA, 19 bp, Homo sapiens
  siRNA target sequence for PKD1L3 (NM_181536.1,432-450).
cggagatgcccattatgaa

SEQ ID NO: 432442 - DNA, 19 bp, Homo sapiens
  siRNA target sequence for PKD1L3 (NM_181536.1,494-512).
caaaaagaggagttgcaat

SEQ ID NO: 432443 - DNA, 19 bp, Homo sapiens
  siRNA target sequence for PKD1L3 (NM_181536.1,615-633).
gtttccttcagtactatca

SEQ ID NO: 432444 - DNA, 19 bp, Homo sapiens
  siRNA target sequence for PKD1L3 (NM_181536.1,619-637).
ccttcagtactatcaagta

SEQ ID NO: 432445 - DNA, 19 bp, Homo sapiens
  siRNA target sequence for PKD1L3 (NM_181536.1,620-638).
cttcagtactatcaagtat

SEQ ID NO: 432446 - DNA, 19 bp, Homo sapiens
  siRNA target sequence for PKD1L3 (NM_181536.1,625-643).
gtactatcaagtatcacat

SEQ ID NO: 432447 - DNA, 19 bp, Homo sapiens
  siRNA target sequence for PKD1L3 (NM_181536.1,679-697).
cagcctctccctgtgataa

SEQ ID NO: 432448 - DNA, 19 bp, Homo sapiens
  siRNA target sequence for PKD1L3 (NM_181536.1,681-699).
gcctctccctgtgataaca

SEQ ID NO: 432449 - DNA, 19 bp, Homo sapiens
  siRNA target sequence for PKD1L3 (NM_181536.1,772-790).
gaaggtcatccgaatacct

SEQ ID NO: 432450 - DNA, 19 bp, Homo sapiens
  siRNA target sequence for PKD1L3 (NM_181536.1,824-842).
catctggtcaggtcataga

SEQ ID NO: 432451 - DNA, 19 bp, Homo sapiens
  siRNA target sequence for PKD1L3 (NM_181536.1,827-845).
ctggtcaggtcatagatga

SEQ ID NO: 432452 - DNA, 19 bp, Homo sapiens
  siRNA target sequence for PKD1L3 (NM_181536.1,877-895).
ggtttgcaagctcttaaca

SEQ ID NO: 432453 - DNA, 19 bp, Homo sapiens
  siRNA target sequence for PKD1L3 (NM_181536.1,878-896).
gtttgcaagctcttaacaa

SEQ ID NO: 432454 - DNA, 19 bp, Homo sapiens
  siRNA target sequence for PKD1L3 (NM_181536.1,882-900).
gcaagctcttaacaaacta

SEQ ID NO: 432455 - DNA, 19 bp, Homo sapiens
  siRNA target sequence for PKD1L3 (NM_181536.1,932-950).
cagccttaaccccaagatt

SEQ ID NO: 432456 - DNA, 19 bp, Homo sapiens
  siRNA target sequence for PKD1L3 (NM_181536.1,953-971).
ctaagccagctcaggttaa

SEQ ID NO: 432457 - DNA, 19 bp, Homo sapiens
  siRNA target sequence for PKD1L3 (NM_181536.1,994-1012).
ctgagtgaggagttactca

SEQ ID NO: 432458 - DNA, 19 bp, Homo sapiens
  siRNA target sequence for PKD1L3 (NM_181536.1,1032-1050).
caacagtctgggcttcaaa

SEQ ID NO: 432459 - DNA, 19 bp, Homo sapiens
  siRNA target sequence for PKD1L3 (NM_181536.1,1035-1053).
cagtctgggcttcaaagtt

SEQ ID NO: 432460 - DNA, 19 bp, Homo sapiens
  siRNA target sequence for PKD1L3 (NM_181536.1,1109-1127).
gaagttggctggaatccaa

SEQ ID NO: 432461 - DNA, 19 bp, Homo sapiens
  siRNA target sequence for PKD1L3 (NM_181536.1,1119-1137).
ggaatccaagcgtcatact

SEQ ID NO: 432462 - DNA, 19 bp, Homo sapiens
  siRNA target sequence for PKD1L3 (NM_181536.1,1136-1154).
ctgagccggtagaagacat

SEQ ID NO: 432463 - DNA, 19 bp, Homo sapiens
  siRNA target sequence for PKD1L3 (NM_181536.1,1181-1199).
ggaatatcggggaagcatt

SEQ ID NO: 432464 - DNA, 19 bp, Homo sapiens
  siRNA target sequence for PKD1L3 (NM_181536.1,1182-1200).
gaatatcggggaagcattt

SEQ ID NO: 432465 - DNA, 19 bp, Homo sapiens
  siRNA target sequence for PKD1L3 (NM_181536.1,1269-1287).
cagacaaaacatatcaact

SEQ ID NO: 432466 - DNA, 19 bp, Homo sapiens
  siRNA target sequence for PKD1L3 (NM_181536.1,1338-1356).
ctttccgtcggctttagct

SEQ ID NO: 432467 - DNA, 19 bp, Homo sapiens
  siRNA target sequence for PKD1L3 (NM_181536.1,1343-1361).
cgtcggctttagctttgaa

SEQ ID NO: 432468 - DNA, 19 bp, Homo sapiens
  siRNA target sequence for PKD1L3 (NM_181536.1,1384-1402).
ggagttaatgtccaaataa

SEQ ID NO: 432469 - DNA, 19 bp, Homo sapiens
  siRNA target sequence for PKD1L3 (NM_181536.1,1458-1476).
cattggaagtgtgttacta

SEQ ID NO: 432470 - DNA, 19 bp, Homo sapiens
  siRNA target sequence for PKD1L3 (NM_181536.1,1470-1488).
gttactaagcgctaatcgt

SEQ ID NO: 432471 - DNA, 19 bp, Homo sapiens
  siRNA target sequence for PKD1L3 (NM_181536.1,1474-1492).
ctaagcgctaatcgtaaat

SEQ ID NO: 432472 - DNA, 19 bp, Homo sapiens
  siRNA target sequence for PKD1L3 (NM_181536.1,1478-1496).
gcgctaatcgtaaattgct

SEQ ID NO: 432473 - DNA, 19 bp, Homo sapiens
  siRNA target sequence for PKD1L3 (NM_181536.1,1583-1601).
gcacacatcagcttacaat

SEQ ID NO: 432474 - DNA, 19 bp, Homo sapiens
  siRNA target sequence for PKD1L3 (NM_181536.1,1632-1650).
cttgatagtgagcatagat

SEQ ID NO: 432475 - DNA, 19 bp, Homo sapiens
  siRNA target sequence for PKD1L3 (NM_181536.1,1651-1669).
cctgacagtccccttttaa

SEQ ID NO: 432476 - DNA, 19 bp, Homo sapiens
  siRNA target sequence for PKD1L3 (NM_181536.1,1652-1670).
ctgacagtccccttttaat

SEQ ID NO: 432477 - DNA, 19 bp, Homo sapiens
  siRNA target sequence for PKD1L3 (NM_181536.1,1654-1672).
gacagtccccttttaatga

SEQ ID NO: 432478 - DNA, 19 bp, Homo sapiens
  siRNA target sequence for PKD1L3 (NM_181536.1,1730-1748).
cccttccaaaggataaggt

SEQ ID NO: 432479 - DNA, 19 bp, Homo sapiens
  siRNA target sequence for PKD1L3 (NM_181536.1,1740-1758).
ggataaggtgtggcaaaaa

SEQ ID NO: 432480 - DNA, 19 bp, Homo sapiens
  siRNA target sequence for PKD1L3 (NM_181536.1,1804-1822).
gggattggcacctactata

SEQ ID NO: 432481 - DNA, 19 bp, Homo sapiens
  siRNA target sequence for PKD1L3 (NM_181536.1,1805-1823).
ggattggcacctactatat

SEQ ID NO: 432482 - DNA, 19 bp, Homo sapiens
  siRNA target sequence for PKD1L3 (NM_181536.1,1806-1824).
gattggcacctactatata

SEQ ID NO: 432483 - DNA, 19 bp, Homo sapiens
  siRNA target sequence for PKD1L3 (NM_181536.1,1889-1907).
ccgccgtcactcagtgtta

SEQ ID NO: 432484 - DNA, 19 bp, Homo sapiens
  siRNA target sequence for PKD1L3 (NM_181536.1,1891-1909).
gccgtcactcagtgttact

SEQ ID NO: 432485 - DNA, 19 bp, Homo sapiens
  siRNA target sequence for PKD1L3 (NM_181536.1,1892-1910).
ccgtcactcagtgttacta

SEQ ID NO: 432486 - DNA, 19 bp, Homo sapiens
  siRNA target sequence for PKD1L3 (NM_181536.1,1894-1912).
gtcactcagtgttactact

SEQ ID NO: 432487 - DNA, 19 bp, Homo sapiens
  siRNA target sequence for PKD1L3 (NM_181536.1,1958-1976).
ggccacagagcacaattct

SEQ ID NO: 432488 - DNA, 19 bp, Homo sapiens
  siRNA target sequence for PKD1L3 (NM_181536.1,2010-2028).
ctttgccagcgacttcttt

SEQ ID NO: 432489 - DNA, 19 bp, Homo sapiens
  siRNA target sequence for PKD1L3 (NM_181536.1,2034-2052).
gcccaggaccgtgaatgtt

SEQ ID NO: 432490 - DNA, 19 bp, Homo sapiens
  siRNA target sequence for PKD1L3 (NM_181536.1,2036-2054).
ccaggaccgtgaatgttga

SEQ ID NO: 432491 - DNA, 19 bp, Homo sapiens
  siRNA target sequence for PKD1L3 (NM_181536.1,2037-2055).
caggaccgtgaatgttgaa

SEQ ID NO: 432492 - DNA, 19 bp, Homo sapiens
  siRNA target sequence for PKD1L3 (NM_181536.1,2039-2057).
ggaccgtgaatgttgaaga

SEQ ID NO: 432493 - DNA, 19 bp, Homo sapiens
  siRNA target sequence for PKD1L3 (NM_181536.1,2073-2091).
ccttcgcgtgaccaacaat

SEQ ID NO: 432494 - DNA, 19 bp, Homo sapiens
  siRNA target sequence for PKD1L3 (NM_181536.1,2148-2166).
gtgggctcggaaaaaggat

SEQ ID NO: 432495 - DNA, 19 bp, Homo sapiens
  siRNA target sequence for PKD1L3 (NM_181536.1,2215-2233).
cccagcgctcaatttcact

SEQ ID NO: 432496 - DNA, 19 bp, Homo sapiens
  siRNA target sequence for PKD1L3 (NM_181536.1,2221-2239).
gctcaatttcactacctta

SEQ ID NO: 432497 - DNA, 19 bp, Homo sapiens
  siRNA target sequence for PKD1L3 (NM_181536.1,2244-2262).
ggtctacaccggatatcga

SEQ ID NO: 432498 - DNA, 19 bp, Homo sapiens
  siRNA target sequence for PKD1L3 (NM_181536.1,2245-2263).
gtctacaccggatatcgaa

SEQ ID NO: 432499 - DNA, 19 bp, Homo sapiens
  siRNA target sequence for PKD1L3 (NM_181536.1,2430-2448).
gctctggcatgacaattct

SEQ ID NO: 432500 - DNA, 19 bp, Homo sapiens
  siRNA target sequence for PKD1L3 (NM_181536.1,2465-2483).
ggtatgtcagccaggtaat

SEQ ID NO: 432501 - DNA, 19 bp, Homo sapiens
  siRNA target sequence for PKD1L3 (NM_181536.1,2466-2484).
gtatgtcagccaggtaatt

SEQ ID NO: 432502 - DNA, 19 bp, Homo sapiens
  siRNA target sequence for PKD1L3 (NM_181536.1,2571-2589).
ggtcttcatcccagtttca

SEQ ID NO: 432503 - DNA, 19 bp, Homo sapiens
  siRNA target sequence for PKD1L3 (NM_181536.1,2683-2701).
catccctggaaccagttta

SEQ ID NO: 432504 - DNA, 19 bp, Homo sapiens
  siRNA target sequence for PKD1L3 (NM_181536.1,2686-2704).
ccctggaaccagtttacaa

SEQ ID NO: 432505 - DNA, 19 bp, Homo sapiens
  siRNA target sequence for PKD1L3 (NM_181536.1,2761-2779).
gttatgttctggaagataa

SEQ ID NO: 432506 - DNA, 19 bp, Homo sapiens
  siRNA target sequence for PKD1L3 (NM_181536.1,2805-2823).
gcaaatgcgtccatttgct

SEQ ID NO: 432507 - DNA, 19 bp, Homo sapiens
  siRNA target sequence for PKD1L3 (NM_181536.1,2874-2892).
cccaatcaatcttgtcata

SEQ ID NO: 432508 - DNA, 19 bp, Homo sapiens
  siRNA target sequence for PKD1L3 (NM_181536.1,2897-2915).
ggctcttcccgttgattga

SEQ ID NO: 432509 - DNA, 19 bp, Homo sapiens
  siRNA target sequence for PKD1L3 (NM_181536.1,2990-3008).
ctgccacaatggtagttga

SEQ ID NO: 432510 - DNA, 19 bp, Homo sapiens
  siRNA target sequence for PKD1L3 (NM_181536.1,3073-3091).
cagccgccatggagttctt

SEQ ID NO: 432511 - DNA, 19 bp, Homo sapiens
  siRNA target sequence for PKD1L3 (NM_181536.1,3086-3104).
gttcttgggacattactaa

SEQ ID NO: 432512 - DNA, 19 bp, Homo sapiens
  siRNA target sequence for PKD1L3 (NM_181536.1,3106-3124).
ctggtgaaacttttatcca

SEQ ID NO: 432513 - DNA, 19 bp, Homo sapiens
  siRNA target sequence for PKD1L3 (NM_181536.1,3185-3203).
cacgtgttgttcctgaaaa

SEQ ID NO: 432514 - DNA, 19 bp, Homo sapiens
  siRNA target sequence for PKD1L3 (NM_181536.1,3218-3236).
gctgttacctgcatagagt

SEQ ID NO: 432515 - DNA, 19 bp, Homo sapiens
  siRNA target sequence for PKD1L3 (NM_181536.1,3243-3261).
gaggctgaaatctcactta

SEQ ID NO: 432516 - DNA, 19 bp, Homo sapiens
  siRNA target sequence for PKD1L3 (NM_181536.1,3445-3463).
ctgtccaaatggttgactt

SEQ ID NO: 432517 - DNA, 19 bp, Homo sapiens
  siRNA target sequence for PKD1L3 (NM_181536.1,3470-3488).
gctggctcctcttaggttt

SEQ ID NO: 432518 - DNA, 19 bp, Homo sapiens
  siRNA target sequence for PKD1L3 (NM_181536.1,3474-3492).
gctcctcttaggtttcact

SEQ ID NO: 432519 - DNA, 19 bp, Homo sapiens
  siRNA target sequence for PKD1L3 (NM_181536.1,3496-3514).
ctggcttcagcctttttta

SEQ ID NO: 432520 - DNA, 19 bp, Homo sapiens
  siRNA target sequence for PKD1L3 (NM_181536.1,3506-3524).
ccttttttacagcacttta

SEQ ID NO: 432521 - DNA, 19 bp, Homo sapiens
  siRNA target sequence for PKD1L3 (NM_181536.1,3517-3535).
gcactttatagcttggaat

SEQ ID NO: 432522 - DNA, 19 bp, Homo sapiens
  siRNA target sequence for PKD1L3 (NM_181536.1,3554-3572).
ccagctggatgatttcaat

SEQ ID NO: 432523 - DNA, 19 bp, Homo sapiens
  siRNA target sequence for PKD1L3 (NM_181536.1,3555-3573).
cagctggatgatttcaatt

SEQ ID NO: 432524 - DNA, 19 bp, Homo sapiens
  siRNA target sequence for PKD1L3 (NM_181536.1,3613-3631).
gtaaaggtggtcttcttca

SEQ ID NO: 432525 - DNA, 19 bp, Homo sapiens
  siRNA target sequence for PKD1L3 (NM_181536.1,3660-3678).
gatgccacggcttaacaaa

SEQ ID NO: 432526 - DNA, 19 bp, Homo sapiens
  siRNA target sequence for PKD1L3 (NM_181536.1,3664-3682).
ccacggcttaacaaagaga

SEQ ID NO: 432527 - DNA, 19 bp, Homo sapiens
  siRNA target sequence for PKD1L3 (NM_181536.1,3665-3683).
cacggcttaacaaagagaa

SEQ ID NO: 432528 - DNA, 19 bp, Homo sapiens
  siRNA target sequence for PKD1L3 (NM_181536.1,3709-3727).
gcactcttggcaaaatgtt

SEQ ID NO: 432529 - DNA, 19 bp, Homo sapiens
  siRNA target sequence for PKD1L3 (NM_181536.1,3736-3754).
gtaccaggttcaagagata

SEQ ID NO: 432530 - DNA, 19 bp, Homo sapiens
  siRNA target sequence for PKD1L3 (NM_181536.1,3756-3774).
gaacaaccccgtctatgta

SEQ ID NO: 432531 - DNA, 19 bp, Homo sapiens
  siRNA target sequence for PKD1L3 (NM_181536.1,3772-3790).
gtagccccagctataaata

SEQ ID NO: 432532 - DNA, 19 bp, Homo sapiens
  siRNA target sequence for PKD1L3 (NM_181536.1,3782-3800).
ctataaatagtccaactaa

SEQ ID NO: 432533 - DNA, 19 bp, Homo sapiens
  siRNA target sequence for PKD1L3 (NM_181536.1,3837-3855).
caagctgactggagatatt

SEQ ID NO: 432534 - DNA, 19 bp, Homo sapiens
  siRNA target sequence for PKD1L3 (NM_181536.1,3893-3911).
caatctactctgcaaagaa

SEQ ID NO: 432535 - DNA, 19 bp, Homo sapiens
  siRNA target sequence for PKD1L3 (NM_181536.1,3934-3952).
caagctatctggaagacat

SEQ ID NO: 432536 - DNA, 19 bp, Homo sapiens
  siRNA target sequence for PKD1L3 (NM_181536.1,3993-4011).
ctacccctgggccaatcat

SEQ ID NO: 432537 - DNA, 19 bp, Homo sapiens
  siRNA target sequence for PKD1L3 (NM_181536.1,3999-4017).
ctgggccaatcatatcctt

SEQ ID NO: 432538 - DNA, 19 bp, Homo sapiens
  siRNA target sequence for PKD1L3 (NM_181536.1,4063-4081).
gagcccagtcattgcaaat

SEQ ID NO: 432539 - DNA, 19 bp, Homo sapiens
  siRNA target sequence for PKD1L3 (NM_181536.1,4065-4083).
gcccagtcattgcaaatgt

SEQ ID NO: 432540 - DNA, 19 bp, Homo sapiens
  siRNA target sequence for PKD1L3 (NM_181536.1,4076-4094).
gcaaatgtggggtacaatt

SEQ ID NO: 432541 - DNA, 19 bp, Homo sapiens
  siRNA target sequence for PKD1L3 (NM_181536.1,4077-4095).
caaatgtggggtacaatta

SEQ ID NO: 432542 - DNA, 19 bp, Homo sapiens
  siRNA target sequence for PKD1L3 (NM_181536.1,4111-4129).
cgtaccaagacctatgaga

SEQ ID NO: 432543 - DNA, 19 bp, Homo sapiens
  siRNA target sequence for PKD1L3 (NM_181536.1,4142-4160).
gtcagctggcgttttgtga

SEQ ID NO: 432544 - DNA, 19 bp, Homo sapiens
  siRNA target sequence for PKD1L3 (NM_181536.1,4144-4162).
cagctggcgttttgtgata

SEQ ID NO: 432545 - DNA, 19 bp, Homo sapiens
  siRNA target sequence for PKD1L3 (NM_181536.1,4191-4209).
cctattccctggacttcat

SEQ ID NO: 432546 - DNA, 19 bp, Homo sapiens
  siRNA target sequence for PKD1L3 (NM_181536.1,4364-4382).
cccttcagatgtcaaagaa

SEQ ID NO: 432547 - DNA, 19 bp, Homo sapiens
  siRNA target sequence for PKD1L3 (NM_181536.1,4385-4403).
gctgtgtctggtctatcat

SEQ ID NO: 432548 - DNA, 19 bp, Homo sapiens
  siRNA target sequence for PKD1L3 (NM_181536.1,4543-4561).
ctggggcttgacatgaaga

SEQ ID NO: 432549 - DNA, 19 bp, Homo sapiens
  siRNA target sequence for PKD1L3 (NM_181536.1,4546-4564).
gggcttgacatgaagagta

SEQ ID NO: 432550 - DNA, 19 bp, Homo sapiens
  siRNA target sequence for PKD1L3 (NM_181536.1,4547-4565).
ggcttgacatgaagagtat

SEQ ID NO: 432551 - DNA, 19 bp, Homo sapiens
  siRNA target sequence for PKD1L3 (NM_181536.1,4568-4586).
ctctacataagaaaaacat

SEQ ID NO: 432552 - DNA, 19 bp, Homo sapiens
  siRNA target sequence for PKD1L3 (NM_181536.1,4598-4616).
gcgatgaccaggacagatt

SEQ ID NO: 432553 - DNA, 19 bp, Homo sapiens
  siRNA target sequence for PKD1L3 (NM_181536.1,4603-4621).
gaccaggacagattcatca

SEQ ID NO: 432554 - DNA, 19 bp, Homo sapiens
  siRNA target sequence for PKD1L3 (NM_181536.1,4611-4629).
cagattcatcagcttctat

SEQ ID NO: 432555 - DNA, 19 bp, Homo sapiens
  siRNA target sequence for PKD1L3 (NM_181536.1,4622-4640).
gcttctatgaggcagtaaa

SEQ ID NO: 432556 - DNA, 19 bp, Homo sapiens
  siRNA target sequence for PKD1L3 (NM_181536.1,4688-4706).
caactgttcagttatggaa

SEQ ID NO: 432557 - DNA, 19 bp, Homo sapiens
  siRNA target sequence for PKD1L3 (NM_181536.1,4811-4829).
gctatgccattgcctttaa

SEQ ID NO: 432558 - DNA, 19 bp, Homo sapiens
  siRNA target sequence for PKD1L3 (NM_181536.1,4851-4869).
ctctgactaccggacattt

SEQ ID NO: 432559 - DNA, 19 bp, Homo sapiens
  siRNA target sequence for PKD1L3 (NM_181536.1,4853-4871).
ctgactaccggacattttt

SEQ ID NO: 432560 - DNA, 19 bp, Homo sapiens
  siRNA target sequence for PKD1L3 (NM_181536.1,4894-4912).
ggtctcctgatgggaattt

SEQ ID NO: 432561 - DNA, 19 bp, Homo sapiens
  siRNA target sequence for PKD1L3 (NM_181536.1,5062-5080).
gaagctgcactaatagata

SEQ ID NO: 432562 - DNA, 19 bp, Homo sapiens
  siRNA target sequence for PKD1L3 (NM_181536.1,5095-5113).
ctctcaaatttgttaggaa

SEQ ID NO: 432563 - DNA, 19 bp, Homo sapiens
  siRNA target sequence for KRT25C (NM_181537.2,512-530).
ccatgttgtcctgcaaaat

SEQ ID NO: 432564 - DNA, 19 bp, Homo sapiens
  siRNA target sequence for KRT25C (NM_181537.2,698-716).
cgcttacctcaagaagaat

SEQ ID NO: 432565 - DNA, 19 bp, Homo sapiens
  siRNA target sequence for KRT25C (NM_181537.2,998-1016).
gtccctcttagcaacgaaa

SEQ ID NO: 432566 - DNA, 19 bp, Homo sapiens
  siRNA target sequence for KRT25C (NM_181537.2,1227-1245).
gatggctcctgttctaaat

SEQ ID NO: 432567 - DNA, 19 bp, Homo sapiens
  siRNA target sequence for KRT25C (NM_181537.2,1232-1250).
ctcctgttctaaatcaaaa

SEQ ID NO: 432568 - DNA, 19 bp, Homo sapiens
  siRNA target sequence for KRT25C (NM_181537.2,1295-1313).
caccattgtcaaaacagtt

SEQ ID NO: 432569 - DNA, 19 bp, Homo sapiens
  siRNA target sequence for KRT25C (NM_181537.2,1298-1316).
cattgtcaaaacagttgtt

SEQ ID NO: 432570 - DNA, 19 bp, Homo sapiens
  siRNA target sequence for KRT25B (NM_181539.2,203-221).
ggaggaagcttctgcaata

SEQ ID NO: 432571 - DNA, 19 bp, Homo sapiens
  siRNA target sequence for KRT25B (NM_181539.2,426-444).
cccgggaacacgatcatga

SEQ ID NO: 432572 - DNA, 19 bp, Homo sapiens
  siRNA target sequence for KRT25B (NM_181539.2,429-447).
gggaacacgatcatgacta

SEQ ID NO: 432573 - DNA, 19 bp, Homo sapiens
  siRNA target sequence for KRT25B (NM_181539.2,430-448).
ggaacacgatcatgactat

SEQ ID NO: 432574 - DNA, 19 bp, Homo sapiens
  siRNA target sequence for KRT25B (NM_181539.2,464-482).
gtcatagaagatcttaaaa

SEQ ID NO: 432575 - DNA, 19 bp, Homo sapiens
  siRNA target sequence for KRT25B (NM_181539.2,513-531).
ccagcattgttctacaaaa

SEQ ID NO: 432576 - DNA, 19 bp, Homo sapiens
  siRNA target sequence for KRT25B (NM_181539.2,627-645).
gcagagtgttggatgaact

SEQ ID NO: 432577 - DNA, 19 bp, Homo sapiens
  siRNA target sequence for KRT25B (NM_181539.2,638-656).
gatgaactgaccctttgta

SEQ ID NO: 432578 - DNA, 19 bp, Homo sapiens
  siRNA target sequence for KRT25B (NM_181539.2,657-675).
caaccgacctggagataca

SEQ ID NO: 432579 - DNA, 19 bp, Homo sapiens
  siRNA target sequence for KRT25B (NM_181539.2,800-818).
ctaactgtcctgttgaaca

SEQ ID NO: 432580 - DNA, 19 bp, Homo sapiens
  siRNA target sequence for KRT25B (NM_181539.2,804-822).
ctgtcctgttgaacaacat

SEQ ID NO: 432581 - DNA, 19 bp, Homo sapiens
  siRNA target sequence for KRT25B (NM_181539.2,817-835).
caacatgagggctgagtat

SEQ ID NO: 432582 - DNA, 19 bp, Homo sapiens
  siRNA target sequence for KRT25B (NM_181539.2,891-909).
gtgcaacgctgcaacaaca

SEQ ID NO: 432583 - DNA, 19 bp, Homo sapiens
  siRNA target sequence for KRT25B (NM_181539.2,894-912).
caacgctgcaacaacagat

SEQ ID NO: 432584 - DNA, 19 bp, Homo sapiens
  siRNA target sequence for KRT25B (NM_181539.2,1000-1018).
gtccctcatggctgtgaaa

SEQ ID NO: 432585 - DNA, 19 bp, Homo sapiens
  siRNA target sequence for KRT25B (NM_181539.2,1013-1031).
gtgaaacattcctatgaat

SEQ ID NO: 432586 - DNA, 19 bp, Homo sapiens
  siRNA target sequence for KRT25B (NM_181539.2,1239-1257).
gcaaatccacatgttacaa

SEQ ID NO: 432587 - DNA, 19 bp, Homo sapiens
  siRNA target sequence for KRT25B (NM_181539.2,1426-1444).
gcaacgagtaccttctaaa

SEQ ID NO: 432588 - DNA, 19 bp, Homo sapiens
  siRNA target sequence for KRTAP13-4 (NM_181600.1,422-440).
cctggcagtcttcttgtta

SEQ ID NO: 432589 - DNA, 19 bp, Homo sapiens
  siRNA target sequence for KRTAP13-4 (NM_181600.1,450-468).
ctgtggatctcgcttctat

SEQ ID NO: 432590 - DNA, 19 bp, Homo sapiens
  siRNA target sequence for KRTAP13-4 (NM_181600.1,452-470).
gtggatctcgcttctatca

SEQ ID NO: 432591 - DNA, 19 bp, Homo sapiens
  siRNA target sequence for KRTAP13-4 (NM_181600.1,454-472).
ggatctcgcttctatcaat

SEQ ID NO: 432592 - DNA, 19 bp, Homo sapiens
  siRNA target sequence for KRTAP13-4 (NM_181600.1,455-473).
gatctcgcttctatcaatt

SEQ ID NO: 432593 - DNA, 19 bp, Homo sapiens
  siRNA target sequence for KRTAP6-1 (NM_181602.1,194-212).
ctggctctggctactatta

SEQ ID NO: 432594 - DNA, 19 bp, Homo sapiens
  siRNA target sequence for KRTAP6-2 (NM_181604.1,167-185).
gcggctctggctactacta

SEQ ID NO: 432595 - DNA, 19 bp, Homo sapiens
  siRNA target sequence for KRTAP19-2 (NM_181608.1,129-147).
cagaagatatagattcact

SEQ ID NO: 432596 - DNA, 19 bp, Homo sapiens
  siRNA target sequence for KRTAP19-3 (NM_181609.1,197-215).
gctaccgcccatcatacta

SEQ ID NO: 432597 - DNA, 19 bp, Homo sapiens
  siRNA target sequence for KRTAP19-4 (NM_181610.1,167-185).
gatatggattctcaattct

SEQ ID NO: 432598 - DNA, 19 bp, Homo sapiens
  siRNA target sequence for KRTAP19-4 (NM_181610.1,198-216).
ccctgaggacacgatatca

SEQ ID NO: 432599 - DNA, 19 bp, Homo sapiens
  siRNA target sequence for KRTAP19-4 (NM_181610.1,200-218).
ctgaggacacgatatcaga

SEQ ID NO: 432600 - DNA, 19 bp, Homo sapiens
  siRNA target sequence for KRTAP19-4 (NM_181610.1,222-240).
cataagaagatcattcaat

SEQ ID NO: 432601 - DNA, 19 bp, Homo sapiens
  siRNA target sequence for KRTAP19-4 (NM_181610.1,230-248).
gatcattcaatttaaccaa

SEQ ID NO: 432602 - DNA, 19 bp, Homo sapiens
  siRNA target sequence for KRTAP19-6 (NM_181612.1,137-155).
catcatgccgtgaaggata

SEQ ID NO: 432603 - DNA, 19 bp, Homo sapiens
  siRNA target sequence for KRTAP19-6 (NM_181612.1,143-161).
gccgtgaaggatatggatt

SEQ ID NO: 432604 - DNA, 19 bp, Homo sapiens
  siRNA target sequence for KRTAP19-7 (NM_181614.1,171-189).
ctggtcttctggattctat

SEQ ID NO: 432605 - DNA, 19 bp, Homo sapiens
  siRNA target sequence for KRTAP20-1 (NM_181615.1,3-21).
gatttactacagcaactat

SEQ ID NO: 432606 - DNA, 19 bp, Homo sapiens
  siRNA target sequence for KRTAP21-2 (NM_181617.1,57-75).
gagttccggctgtggatat

SEQ ID NO: 432607 - DNA, 19 bp, Homo sapiens
  siRNA target sequence for KRTAP21-1 (NM_181619.1,197-215).
gctaccggccattttgctt

SEQ ID NO: 432608 - DNA, 19 bp, Homo sapiens
  siRNA target sequence for KRTAP21-1 (NM_181619.1,198-216).
ctaccggccattttgcttt

SEQ ID NO: 432609 - DNA, 19 bp, Homo sapiens
  siRNA target sequence for KRTAP21-1 (NM_181619.1,202-220).
cggccattttgctttagaa

SEQ ID NO: 432610 - DNA, 19 bp, Homo sapiens
  siRNA target sequence for KRTAP22-1 (NM_181620.1,102-120).
ctgcccatggtgttatgaa

SEQ ID NO: 432611 - DNA, 19 bp, Homo sapiens
  siRNA target sequence for KRTAP22-1 (NM_181620.1,105-123).
cccatggtgttatgaaaga

SEQ ID NO: 432612 - DNA, 19 bp, Homo sapiens
  siRNA target sequence for KRTAP22-1 (NM_181620.1,106-124).
ccatggtgttatgaaagat

SEQ ID NO: 432613 - DNA, 19 bp, Homo sapiens
  siRNA target sequence for KRTAP13-2 (NM_181621.2,271-289).
ccttgcaagacgacttact

SEQ ID NO: 432614 - DNA, 19 bp, Homo sapiens
  siRNA target sequence for KRTAP13-3 (NM_181622.1,38-56).
gctcccacgggggttactt

SEQ ID NO: 432615 - DNA, 19 bp, Homo sapiens
  siRNA target sequence for KRTAP13-3 (NM_181622.1,266-284).
gcaattcttgcctgactat

SEQ ID NO: 432616 - DNA, 19 bp, Homo sapiens
  siRNA target sequence for KRTAP13-3 (NM_181622.1,292-310).
gggtctcggggttttggat

SEQ ID NO: 432617 - DNA, 19 bp, Homo sapiens
  siRNA target sequence for KRTAP13-3 (NM_181622.1,298-316).
cggggttttggatccaata

SEQ ID NO: 432618 - DNA, 19 bp, Homo sapiens
  siRNA target sequence for KRTAP13-3 (NM_181622.1,301-319).
ggttttggatccaatagct

SEQ ID NO: 432619 - DNA, 19 bp, Homo sapiens
  siRNA target sequence for KRTAP13-3 (NM_181622.1,376-394).
ggcttcagatatctgaatt

SEQ ID NO: 432620 - DNA, 19 bp, Homo sapiens
  siRNA target sequence for KRTAP13-3 (NM_181622.1,388-406).
ctgaattatagaatccata

SEQ ID NO: 432621 - DNA, 19 bp, Homo sapiens
  siRNA target sequence for KRTAP13-3 (NM_181622.1,434-452).
gattctgccatccaatcta

SEQ ID NO: 432622 - DNA, 19 bp, Homo sapiens
  siRNA target sequence for KRTAP13-3 (NM_181622.1,438-456).
ctgccatccaatctatttt

SEQ ID NO: 432623 - DNA, 19 bp, Homo sapiens
  siRNA target sequence for KRTAP13-3 (NM_181622.1,471-489).
gttccattcatcttgttat

SEQ ID NO: 432624 - DNA, 19 bp, Homo sapiens
  siRNA target sequence for KRTAP15-1 (NM_181623.1,60-78).
gtatccagtttccacttat

SEQ ID NO: 432625 - DNA, 19 bp, Homo sapiens
  siRNA target sequence for KRTAP15-1 (NM_181623.1,195-213).
cactttggccagatcctat

SEQ ID NO: 432626 - DNA, 19 bp, Homo sapiens
  siRNA target sequence for KRTAP15-1 (NM_181623.1,259-277).
cgccagactaactacataa

SEQ ID NO: 432627 - DNA, 19 bp, Homo sapiens
  siRNA target sequence for KRTAP15-1 (NM_181623.1,261-279).
ccagactaactacataaga

SEQ ID NO: 432628 - DNA, 19 bp, Homo sapiens
  siRNA target sequence for KRTAP15-1 (NM_181623.1,262-280).
cagactaactacataagat

SEQ ID NO: 432629 - DNA, 19 bp, Homo sapiens
  siRNA target sequence for LOC128344 (NM_181643.1,27-45).
ggataactacccttttgga

SEQ ID NO: 432630 - DNA, 19 bp, Homo sapiens
  siRNA target sequence for LOC128344 (NM_181643.1,50-68).
gtcaacagaggaaactttt

SEQ ID NO: 432631 - DNA, 19 bp, Homo sapiens
  siRNA target sequence for LOC128344 (NM_181643.1,78-96).
ccatcccccgaatttgatt

SEQ ID NO: 432632 - DNA, 19 bp, Homo sapiens
  siRNA target sequence for LOC128344 (NM_181643.1,146-164).
gttatttttcagatggata

SEQ ID NO: 432633 - DNA, 19 bp, Homo sapiens
  siRNA target sequence for LOC128344 (NM_181643.1,166-184).
ggcttggcatacgacttat

SEQ ID NO: 432634 - DNA, 19 bp, Homo sapiens
  siRNA target sequence for LOC128344 (NM_181643.1,168-186).
cttggcatacgacttatct

SEQ ID NO: 432635 - DNA, 19 bp, Homo sapiens
  siRNA target sequence for LOC128344 (NM_181643.1,189-207).
gatcccaaccagtataaaa

SEQ ID NO: 432636 - DNA, 19 bp, Homo sapiens
  siRNA target sequence for LOC128344 (NM_181643.1,239-257).
ggtttaagccaatacagaa

SEQ ID NO: 432637 - DNA, 19 bp, Homo sapiens
  siRNA target sequence for LOC128344 (NM_181643.1,298-316).
cctcagcaggaaaaacaca

SEQ ID NO: 432638 - DNA, 19 bp, Homo sapiens
  siRNA target sequence for LOC128344 (NM_181643.1,346-364).
gtgcctcgatttaagaact

SEQ ID NO: 432639 - DNA, 19 bp, Homo sapiens
  siRNA target sequence for LOC128344 (NM_181643.1,508-526).
ctgtccacagacaaagact

SEQ ID NO: 432640 - DNA, 19 bp, Homo sapiens
  siRNA target sequence for LOC128344 (NM_181643.1,555-573).
cctaagcctgtattataat

SEQ ID NO: 432641 - DNA, 19 bp, Homo sapiens
  siRNA target sequence for LOC128344 (NM_181643.1,556-574).
ctaagcctgtattataatt

SEQ ID NO: 432642 - DNA, 19 bp, Homo sapiens
  siRNA target sequence for DKFZp761N1114 (NM_181644.2,864-882).
ctcactgcccccaaagttt

SEQ ID NO: 432643 - DNA, 19 bp, Homo sapiens
  siRNA target sequence for DKFZp761N1114 (NM_181644.2,1203-1221).
gttcctggtgctgcttatt

SEQ ID NO: 432644 - DNA, 19 bp, Homo sapiens
  siRNA target sequence for DKFZp761N1114 (NM_181644.2,1413-1431).
ggctcagggcagctatagt

SEQ ID NO: 432645 - DNA, 19 bp, Homo sapiens
  siRNA target sequence for DKFZp761N1114 (NM_181644.2,1414-1432).
gctcagggcagctatagtt

SEQ ID NO: 432646 - DNA, 19 bp, Homo sapiens
  siRNA target sequence for DKFZp761N1114 (NM_181644.2,1415-1433).
ctcagggcagctatagttt

SEQ ID NO: 432647 - DNA, 19 bp, Homo sapiens
  siRNA target sequence for DKFZp761N1114 (NM_181644.2,1437-1455).
ggtctgtggcgtgatcttt

SEQ ID NO: 432648 - DNA, 19 bp, Homo sapiens
  siRNA target sequence for DKFZp761N1114 (NM_181644.2,1457-1475).
gttgtctggcttttacctt

SEQ ID NO: 432649 - DNA, 19 bp, Homo sapiens
  siRNA target sequence for DKFZp761N1114 (NM_181644.2,1528-1546).
cctacccaagacagatcaa

SEQ ID NO: 432650 - DNA, 19 bp, Homo sapiens
  siRNA target sequence for DKFZp761N1114 (NM_181644.2,1529-1547).
ctacccaagacagatcaat

SEQ ID NO: 432651 - DNA, 19 bp, Homo sapiens
  siRNA target sequence for FLJ25393 (NM_181645.1,105-123).
ggagacacgattagatctt

SEQ ID NO: 432652 - DNA, 19 bp, Homo sapiens
  siRNA target sequence for FLJ25393 (NM_181645.1,181-199).
gggttacttcgacagaaat

SEQ ID NO: 432653 - DNA, 19 bp, Homo sapiens
  siRNA target sequence for FLJ25393 (NM_181645.1,182-200).
ggttacttcgacagaaatt

SEQ ID NO: 432654 - DNA, 19 bp, Homo sapiens
  siRNA target sequence for FLJ25393 (NM_181645.1,237-255).
gaattatgaaggacaacta

SEQ ID NO: 432655 - DNA, 19 bp, Homo sapiens
  siRNA target sequence for FLJ25393 (NM_181645.1,267-285).
ggctcaattttccaaacta

SEQ ID NO: 432656 - DNA, 19 bp, Homo sapiens
  siRNA target sequence for FLJ25393 (NM_181645.1,330-348).
caaagttccacgaaaagaa

SEQ ID NO: 432657 - DNA, 19 bp, Homo sapiens
  siRNA target sequence for FLJ25393 (NM_181645.1,353-371).
cacaccttaaagaagaaat

SEQ ID NO: 432658 - DNA, 19 bp, Homo sapiens
  siRNA target sequence for FLJ25393 (NM_181645.1,409-427).
gaatttagagcaaagtcaa

SEQ ID NO: 432659 - DNA, 19 bp, Homo sapiens
  siRNA target sequence for FLJ25393 (NM_181645.1,436-454).
gacaagcaagagatattat

SEQ ID NO: 432660 - DNA, 19 bp, Homo sapiens
  siRNA target sequence for FLJ25393 (NM_181645.1,473-491).
ctttagatgctcaacaaaa

SEQ ID NO: 432661 - DNA, 19 bp, Homo sapiens
  siRNA target sequence for FLJ25393 (NM_181645.1,526-544).
caggcacaaagttaccaaa

SEQ ID NO: 432662 - DNA, 19 bp, Homo sapiens
  siRNA target sequence for FLJ25393 (NM_181645.1,536-554).
gttaccaaactcaactaaa

SEQ ID NO: 432663 - DNA, 19 bp, Homo sapiens
  siRNA target sequence for FLJ25393 (NM_181645.1,540-558).
ccaaactcaactaaatggt

SEQ ID NO: 432664 - DNA, 19 bp, Homo sapiens
  siRNA target sequence for FLJ25393 (NM_181645.1,550-568).
ctaaatggtaaaaaacagt

SEQ ID NO: 432665 - DNA, 19 bp, Homo sapiens
  siRNA target sequence for FLJ25393 (NM_181645.1,613-631).
ccagatcccaattgtgaaa

SEQ ID NO: 432666 - DNA, 19 bp, Homo sapiens
  siRNA target sequence for FLJ25393 (NM_181645.1,614-632).
cagatcccaattgtgaaat

SEQ ID NO: 432667 - DNA, 19 bp, Homo sapiens
  siRNA target sequence for FLJ25393 (NM_181645.1,776-794).
caggtctctcagaggtaaa

SEQ ID NO: 432668 - DNA, 19 bp, Homo sapiens
  siRNA target sequence for FLJ25393 (NM_181645.1,801-819).
gttacagtcacgtgatgat

SEQ ID NO: 432669 - DNA, 19 bp, Homo sapiens
  siRNA target sequence for FLJ25393 (NM_181645.1,811-829).
cgtgatgatctcttgagaa

SEQ ID NO: 432670 - DNA, 19 bp, Homo sapiens
  siRNA target sequence for FLJ25393 (NM_181645.1,908-926).
caagacttgaatcatctta

SEQ ID NO: 432671 - DNA, 19 bp, Homo sapiens
  siRNA target sequence for FLJ25393 (NM_181645.1,985-1003).
gatcaaccaaatcatgaaa

SEQ ID NO: 432672 - DNA, 19 bp, Homo sapiens
  siRNA target sequence for FLJ25393 (NM_181645.1,1036-1054).
caggtggaagagtaccata

SEQ ID NO: 432673 - DNA, 19 bp, Homo sapiens
  siRNA target sequence for FLJ25393 (NM_181645.1,1039-1057).
gtggaagagtaccataact

SEQ ID NO: 432674 - DNA, 19 bp, Homo sapiens
  siRNA target sequence for FLJ25393 (NM_181645.1,1041-1059).
ggaagagtaccataactct

SEQ ID NO: 432675 - DNA, 19 bp, Homo sapiens
  siRNA target sequence for FLJ32110 (NM_181646.2,717-735).
gtgacaagcagtatcacaa

SEQ ID NO: 432676 - DNA, 19 bp, Homo sapiens
  siRNA target sequence for FLJ32110 (NM_181646.2,870-888).
cacttaaacgacttcatca

SEQ ID NO: 432677 - DNA, 19 bp, Homo sapiens
  siRNA target sequence for FLJ32110 (NM_181646.2,898-916).
gttaaggcagcaatctgaa

SEQ ID NO: 432678 - DNA, 19 bp, Homo sapiens
  siRNA target sequence for FLJ32110 (NM_181646.2,903-921).
ggcagcaatctgaatgtgt

SEQ ID NO: 432679 - DNA, 19 bp, Homo sapiens
  siRNA target sequence for FLJ32110 (NM_181646.2,904-922).
gcagcaatctgaatgtgtt

SEQ ID NO: 432680 - DNA, 19 bp, Homo sapiens
  siRNA target sequence for FLJ32110 (NM_181646.2,927-945).
gaaatggaccagcatacaa

SEQ ID NO: 432681 - DNA, 19 bp, Homo sapiens
  siRNA target sequence for FLJ32110 (NM_181646.2,949-967).
ccccagggtagccatagaa

SEQ ID NO: 432682 - DNA, 19 bp, Homo sapiens
  siRNA target sequence for FLJ32110 (NM_181646.2,950-968).
cccagggtagccatagaaa

SEQ ID NO: 432683 - DNA, 19 bp, Homo sapiens
  siRNA target sequence for FLJ32110 (NM_181646.2,951-969).
ccagggtagccatagaaaa

SEQ ID NO: 432684 - DNA, 19 bp, Homo sapiens
  siRNA target sequence for FLJ32110 (NM_181646.2,1060-1078).
cagaatcatatccgataaa

SEQ ID NO: 432685 - DNA, 19 bp, Homo sapiens
  siRNA target sequence for FLJ32110 (NM_181646.2,1084-1102).
gtccaccatgccaaatcga

SEQ ID NO: 432686 - DNA, 19 bp, Homo sapiens
  siRNA target sequence for FLJ32110 (NM_181646.2,1093-1111).
gccaaatcgacaccaatta

SEQ ID NO: 432687 - DNA, 19 bp, Homo sapiens
  siRNA target sequence for FLJ32110 (NM_181646.2,1116-1134).
cagacaggcgttgtttgtt

SEQ ID NO: 432688 - DNA, 19 bp, Homo sapiens
  siRNA target sequence for FLJ32110 (NM_181646.2,1123-1141).
gcgttgtttgtttggaaat

SEQ ID NO: 432689 - DNA, 19 bp, Homo sapiens
  siRNA target sequence for FLJ32110 (NM_181646.2,1166-1184).
ctcagcaatgcaaatcaca

SEQ ID NO: 432690 - DNA, 19 bp, Homo sapiens
  siRNA target sequence for FLJ32110 (NM_181646.2,1188-1206).
caggagtatcatttacttt

SEQ ID NO: 432691 - DNA, 19 bp, Homo sapiens
  siRNA target sequence for FLJ32110 (NM_181646.2,1265-1283).
gaagaaacccatgattgta

SEQ ID NO: 432692 - DNA, 19 bp, Homo sapiens
  siRNA target sequence for FLJ32110 (NM_181646.2,1330-1348).
gtgctgcaggtttgcaaat

SEQ ID NO: 432693 - DNA, 19 bp, Homo sapiens
  siRNA target sequence for FLJ32110 (NM_181646.2,1356-1374).
cacaccttaccaaggaaaa

SEQ ID NO: 432694 - DNA, 19 bp, Homo sapiens
  siRNA target sequence for FLJ32110 (NM_181646.2,1403-1421).
gaaagtgttttacacaata

SEQ ID NO: 432695 - DNA, 19 bp, Homo sapiens
  siRNA target sequence for FLJ32110 (NM_181646.2,1453-1471).
caaacacgactctattgat

SEQ ID NO: 432696 - DNA, 19 bp, Homo sapiens
  siRNA target sequence for FLJ32110 (NM_181646.2,1499-1517).
catgcttcattctctaaat

SEQ ID NO: 432697 - DNA, 19 bp, Homo sapiens
  siRNA target sequence for FLJ32110 (NM_181646.2,1503-1521).
cttcattctctaaatctaa

SEQ ID NO: 432698 - DNA, 19 bp, Homo sapiens
  siRNA target sequence for FLJ32110 (NM_181646.2,1510-1528).
ctctaaatctaacattcat

SEQ ID NO: 432699 - DNA, 19 bp, Homo sapiens
  siRNA target sequence for FLJ32110 (NM_181646.2,1512-1530).
ctaaatctaacattcatct

SEQ ID NO: 432700 - DNA, 19 bp, Homo sapiens
  siRNA target sequence for FLJ32110 (NM_181646.2,1518-1536).
ctaacattcatctttcaga

SEQ ID NO: 432701 - DNA, 19 bp, Homo sapiens
  siRNA target sequence for FLJ32110 (NM_181646.2,1615-1633).
cccatgccaagcaaatgct

SEQ ID NO: 432702 - DNA, 19 bp, Homo sapiens
  siRNA target sequence for FLJ32110 (NM_181646.2,1641-1659).
gcccaccaaacatttacaa

SEQ ID NO: 432703 - DNA, 19 bp, Homo sapiens
  siRNA target sequence for FLJ32110 (NM_181646.2,1661-1679).
catagtgatgccaggatat

SEQ ID NO: 432704 - DNA, 19 bp, Homo sapiens
  siRNA target sequence for FLJ32110 (NM_181646.2,1687-1705).
cctggatgagttttcatca

SEQ ID NO: 432705 - DNA, 19 bp, Homo sapiens
  siRNA target sequence for FLJ32110 (NM_181646.2,1709-1727).
gagccaagtgaacaaaaga

SEQ ID NO: 432706 - DNA, 19 bp, Homo sapiens
  siRNA target sequence for FLJ32110 (NM_181646.2,1711-1729).
gccaagtgaacaaaagagt

SEQ ID NO: 432707 - DNA, 19 bp, Homo sapiens
  siRNA target sequence for FLJ32110 (NM_181646.2,1745-1763).
ccaaattccagaatagaga

SEQ ID NO: 432708 - DNA, 19 bp, Homo sapiens
  siRNA target sequence for FLJ32110 (NM_181646.2,1836-1854).
cccataatgtggcatctaa

SEQ ID NO: 432709 - DNA, 19 bp, Homo sapiens
  siRNA target sequence for FLJ32110 (NM_181646.2,1915-1933).
ggaacttctgctctttaca

SEQ ID NO: 432710 - DNA, 19 bp, Homo sapiens
  siRNA target sequence for FLJ32110 (NM_181646.2,1962-1980).
gcaacccactgtattttga

SEQ ID NO: 432711 - DNA, 19 bp, Homo sapiens
  siRNA target sequence for FLJ32110 (NM_181646.2,2012-2030).
cacaatctagaggacttaa

SEQ ID NO: 432712 - DNA, 19 bp, Homo sapiens
  siRNA target sequence for FLJ32110 (NM_181646.2,2051-2069).
cccttggaattgaagacta

SEQ ID NO: 432713 - DNA, 19 bp, Homo sapiens
  siRNA target sequence for FLJ32110 (NM_181646.2,2080-2098).
ccaagtctcaggtttaact

SEQ ID NO: 432714 - DNA, 19 bp, Homo sapiens
  siRNA target sequence for FLJ32110 (NM_181646.2,2144-2162).
ccaaagacgatgatagcta

SEQ ID NO: 432715 - DNA, 19 bp, Homo sapiens
  siRNA target sequence for FLJ32110 (NM_181646.2,2145-2163).
caaagacgatgatagctaa

SEQ ID NO: 432716 - DNA, 19 bp, Homo sapiens
  siRNA target sequence for FLJ32110 (NM_181646.2,2208-2226).
gtgattctgagccaaataa

SEQ ID NO: 432717 - DNA, 19 bp, Homo sapiens
  siRNA target sequence for FLJ32110 (NM_181646.2,2219-2237).
ccaaataagagtgaatata

SEQ ID NO: 432718 - DNA, 19 bp, Homo sapiens
  siRNA target sequence for FLJ32110 (NM_181646.2,2271-2289).
ctaaagtgcctctttacct

SEQ ID NO: 432719 - DNA, 19 bp, Homo sapiens
  siRNA target sequence for FLJ32110 (NM_181646.2,2331-2349).
gtgagaacaaacttaagga

SEQ ID NO: 432720 - DNA, 19 bp, Homo sapiens
  siRNA target sequence for FLJ32110 (NM_181646.2,2383-2401).
ggcagttctaaatgatata

SEQ ID NO: 432721 - DNA, 19 bp, Homo sapiens
  siRNA target sequence for FLJ32110 (NM_181646.2,2405-2423).
gaggacctatcttttcctt

SEQ ID NO: 432722 - DNA, 19 bp, Homo sapiens
  siRNA target sequence for FLJ32110 (NM_181646.2,2461-2479).
ctgcagtcctcatttggaa

SEQ ID NO: 432723 - DNA, 19 bp, Homo sapiens
  siRNA target sequence for FLJ32110 (NM_181646.2,2466-2484).
gtcctcatttggaatttga

SEQ ID NO: 432724 - DNA, 19 bp, Homo sapiens
  siRNA target sequence for FLJ32110 (NM_181646.2,2486-2504).
gatgaaagacaattcaact

SEQ ID NO: 432725 - DNA, 19 bp, Homo sapiens
  siRNA target sequence for FLJ32110 (NM_181646.2,2610-2628).
gtggaaaccaaagatacaa

SEQ ID NO: 432726 - DNA, 19 bp, Homo sapiens
  siRNA target sequence for FLJ32110 (NM_181646.2,2642-2660).
cagtcatgtttgagtagat

SEQ ID NO: 432727 - DNA, 19 bp, Homo sapiens
  siRNA target sequence for FLJ32110 (NM_181646.2,2695-2713).
gtctagcttgagaagtact

SEQ ID NO: 432728 - DNA, 19 bp, Homo sapiens
  siRNA target sequence for FLJ32110 (NM_181646.2,2712-2730).
cttgttcaagtcatagatt

SEQ ID NO: 432729 - DNA, 19 bp, Homo sapiens
  siRNA target sequence for FLJ32110 (NM_181646.2,2721-2739).
gtcatagattcaatggtaa

SEQ ID NO: 432730 - DNA, 19 bp, Homo sapiens
  siRNA target sequence for FLJ32110 (NM_181646.2,2723-2741).
catagattcaatggtaata

SEQ ID NO: 432731 - DNA, 19 bp, Homo sapiens
  siRNA target sequence for FLJ32110 (NM_181646.2,2735-2753).
ggtaatagcagaggtaatt

SEQ ID NO: 432732 - DNA, 19 bp, Homo sapiens
  siRNA target sequence for FLJ32110 (NM_181646.2,2736-2754).
gtaatagcagaggtaattt

SEQ ID NO: 432733 - DNA, 19 bp, Homo sapiens
  siRNA target sequence for FLJ32110 (NM_181646.2,2758-2776).
ctgcttccataaaagagaa

SEQ ID NO: 432734 - DNA, 19 bp, Homo sapiens
  siRNA target sequence for FLJ32110 (NM_181646.2,2774-2792).
gaacaccactcagttgaaa

SEQ ID NO: 432735 - DNA, 19 bp, Homo sapiens
  siRNA target sequence for FLJ32110 (NM_181646.2,2793-2811).
ggcacaaacggaaatgtct

SEQ ID NO: 432736 - DNA, 19 bp, Homo sapiens
  siRNA target sequence for FLJ32110 (NM_181646.2,2794-2812).
gcacaaacggaaatgtcta

SEQ ID NO: 432737 - DNA, 19 bp, Homo sapiens
  siRNA target sequence for FLJ32110 (NM_181646.2,2863-2881).
gcagtctgaaccacagaaa

SEQ ID NO: 432738 - DNA, 19 bp, Homo sapiens
  siRNA target sequence for FLJ32110 (NM_181646.2,2893-2911).
caaattgtgggaatcattt

SEQ ID NO: 432739 - DNA, 19 bp, Homo sapiens
  siRNA target sequence for FLJ32110 (NM_181646.2,2926-2944).
ctcaaaacgtagatattgt

SEQ ID NO: 432740 - DNA, 19 bp, Homo sapiens
  siRNA target sequence for FLJ32110 (NM_181646.2,2996-3014).
ctaaaatctacgagaatca

SEQ ID NO: 432741 - DNA, 19 bp, Homo sapiens
  siRNA target sequence for FLJ32110 (NM_181646.2,3006-3024).
cgagaatcatctattgtga

SEQ ID NO: 432742 - DNA, 19 bp, Homo sapiens
  siRNA target sequence for FLJ32110 (NM_181646.2,3043-3061).
ctgtactggaagcagtaaa

SEQ ID NO: 432743 - DNA, 19 bp, Homo sapiens
  siRNA target sequence for FLJ32110 (NM_181646.2,3081-3099).
gaactcagcacgacagatt

SEQ ID NO: 432744 - DNA, 19 bp, Homo sapiens
  siRNA target sequence for FLJ32110 (NM_181646.2,3094-3112).
cagattggactcttactca

SEQ ID NO: 432745 - DNA, 19 bp, Homo sapiens
  siRNA target sequence for FLJ32110 (NM_181646.2,3163-3181).
gggcagccctcacatttgt

SEQ ID NO: 432746 - DNA, 19 bp, Homo sapiens
  siRNA target sequence for FLJ32110 (NM_181646.2,3166-3184).
cagccctcacatttgtgat

SEQ ID NO: 432747 - DNA, 19 bp, Homo sapiens
  siRNA target sequence for FLJ32110 (NM_181646.2,3194-3212).
gtcaggcccatgaagtgta

SEQ ID NO: 432748 - DNA, 19 bp, Homo sapiens
  siRNA target sequence for FLJ32110 (NM_181646.2,3298-3316).
gacccctctaacagcaaaa

SEQ ID NO: 432749 - DNA, 19 bp, Homo sapiens
  siRNA target sequence for FLJ32110 (NM_181646.2,3300-3318).
cccctctaacagcaaaaat

SEQ ID NO: 432750 - DNA, 19 bp, Homo sapiens
  siRNA target sequence for FLJ32110 (NM_181646.2,3303-3321).
ctctaacagcaaaaatcct

SEQ ID NO: 432751 - DNA, 19 bp, Homo sapiens
  siRNA target sequence for FLJ32110 (NM_181646.2,3343-3361).
gaaatgtcaagaacaatca

SEQ ID NO: 432752 - DNA, 19 bp, Homo sapiens
  siRNA target sequence for FLJ32110 (NM_181646.2,3415-3433).
gcaagtcccatgcacaatt

SEQ ID NO: 432753 - DNA, 19 bp, Homo sapiens
  siRNA target sequence for FLJ32110 (NM_181646.2,3464-3482).
gcattgcctttgtctgaaa

SEQ ID NO: 432754 - DNA, 19 bp, Homo sapiens
  siRNA target sequence for FLJ32110 (NM_181646.2,3595-3613).
cactgattgtgataaccat

SEQ ID NO: 432755 - DNA, 19 bp, Homo sapiens
  siRNA target sequence for FLJ32110 (NM_181646.2,3599-3617).
gattgtgataaccatcttt

SEQ ID NO: 432756 - DNA, 19 bp, Homo sapiens
  siRNA target sequence for FLJ32110 (NM_181646.2,3623-3641).
ggtataattcacctagtaa

SEQ ID NO: 432757 - DNA, 19 bp, Homo sapiens
  siRNA target sequence for FLJ32110 (NM_181646.2,3644-3662).
gagtctcagtcactaaaca

SEQ ID NO: 432758 - DNA, 19 bp, Homo sapiens
  siRNA target sequence for FLJ32110 (NM_181646.2,3646-3664).
gtctcagtcactaaacata

SEQ ID NO: 432759 - DNA, 19 bp, Homo sapiens
  siRNA target sequence for FLJ32110 (NM_181646.2,3686-3704).
gaacaatcaaaacctttaa

SEQ ID NO: 432760 - DNA, 19 bp, Homo sapiens
  siRNA target sequence for FLJ32110 (NM_181646.2,3689-3707).
caatcaaaacctttaatta

SEQ ID NO: 432761 - DNA, 19 bp, Homo sapiens
  siRNA target sequence for FLJ32110 (NM_181646.2,3699-3717).
ctttaattagtgaaatcca

SEQ ID NO: 432762 - DNA, 19 bp, Homo sapiens
  siRNA target sequence for FLJ32110 (NM_181646.2,3761-3779).
ggtgcttttccgtctaata

SEQ ID NO: 432763 - DNA, 19 bp, Homo sapiens
  siRNA target sequence for FLJ32110 (NM_181646.2,3830-3848).
ctagacttacaggatgtaa

SEQ ID NO: 432764 - DNA, 19 bp, Homo sapiens
  siRNA target sequence for FLJ32110 (NM_181646.2,3839-3857).
caggatgtaagcatgcata

SEQ ID NO: 432765 - DNA, 19 bp, Homo sapiens
  siRNA target sequence for FLJ32110 (NM_181646.2,3841-3859).
ggatgtaagcatgcatata

SEQ ID NO: 432766 - DNA, 19 bp, Homo sapiens
  siRNA target sequence for FLJ32110 (NM_181646.2,3842-3860).
gatgtaagcatgcatataa

SEQ ID NO: 432767 - DNA, 19 bp, Homo sapiens
  siRNA target sequence for FLJ32110 (NM_181646.2,3866-3884).
gtagagggaaatataaact

SEQ ID NO: 432768 - DNA, 19 bp, Homo sapiens
  siRNA target sequence for FLJ32110 (NM_181646.2,3920-3938).
gtcgaagacggattagaaa

SEQ ID NO: 432769 - DNA, 19 bp, Homo sapiens
  siRNA target sequence for FLJ32110 (NM_181646.2,3923-3941).
gaagacggattagaaatgt

SEQ ID NO: 432770 - DNA, 19 bp, Homo sapiens
  siRNA target sequence for FLJ32110 (NM_181646.2,3940-3958).
gtgtcataaatctatctct

SEQ ID NO: 432771 - DNA, 19 bp, Homo sapiens
  siRNA target sequence for FLJ32110 (NM_181646.2,3957-3975).
ctccccctttaattcaaca

SEQ ID NO: 432772 - DNA, 19 bp, Homo sapiens
  siRNA target sequence for FLJ32110 (NM_181646.2,3990-4008).
ctcctgacgaaatagataa

SEQ ID NO: 432773 - DNA, 19 bp, Homo sapiens
  siRNA target sequence for FLJ32110 (NM_181646.2,3992-4010).
cctgacgaaatagataaat

SEQ ID NO: 432774 - DNA, 19 bp, Homo sapiens
  siRNA target sequence for FLJ32110 (NM_181646.2,3993-4011).
ctgacgaaatagataaata

SEQ ID NO: 432775 - DNA, 19 bp, Homo sapiens
  siRNA target sequence for FLJ32110 (NM_181646.2,4051-4069).
gcaactcctatcaaagcat

SEQ ID NO: 432776 - DNA, 19 bp, Homo sapiens
  siRNA target sequence for FLJ32110 (NM_181646.2,4062-4080).
caaagcatcttcgagtttt

SEQ ID NO: 432777 - DNA, 19 bp, Homo sapiens
  siRNA target sequence for FLJ32110 (NM_181646.2,4225-4243).
cctccctattgctcatcta

SEQ ID NO: 432778 - DNA, 19 bp, Homo sapiens
  siRNA target sequence for FLJ32110 (NM_181646.2,4228-4246).
ccctattgctcatctacat

SEQ ID NO: 432779 - DNA, 19 bp, Homo sapiens
  siRNA target sequence for FLJ32110 (NM_181646.2,4258-4276).
ggcacatttcagtcctatt

SEQ ID NO: 432780 - DNA, 19 bp, Homo sapiens
  siRNA target sequence for FLJ32110 (NM_181646.2,4285-4303).
gactctgactccaaccatt

SEQ ID NO: 432781 - DNA, 19 bp, Homo sapiens
  siRNA target sequence for FLJ32110 (NM_181646.2,4287-4305).
ctctgactccaaccattat

SEQ ID NO: 432782 - DNA, 19 bp, Homo sapiens
  siRNA target sequence for FLJ32110 (NM_181646.2,4363-4381).
cttccacccatctcacata

SEQ ID NO: 432783 - DNA, 19 bp, Homo sapiens
  siRNA target sequence for FLJ32110 (NM_181646.2,4396-4414).
gccccctacagcatttatt

SEQ ID NO: 432784 - DNA, 19 bp, Homo sapiens
  siRNA target sequence for FLJ32110 (NM_181646.2,4406-4424).
gcatttattcctacattgt

SEQ ID NO: 432785 - DNA, 19 bp, Homo sapiens
  siRNA target sequence for FLJ32110 (NM_181646.2,4443-4461).
cagccacaacttctatcat

SEQ ID NO: 432786 - DNA, 19 bp, Homo sapiens
  siRNA target sequence for FLJ32110 (NM_181646.2,4459-4477).
catccacttgaatccttta

SEQ ID NO: 432787 - DNA, 19 bp, Homo sapiens
  siRNA target sequence for FLJ32110 (NM_181646.2,4487-4505).
gtattccaaggtcaagatt

SEQ ID NO: 432788 - DNA, 19 bp, Homo sapiens
  siRNA target sequence for FLJ32110 (NM_181646.2,4528-4546).
ccagatgcaacagctaaat

SEQ ID NO: 432789 - DNA, 19 bp, Homo sapiens
  siRNA target sequence for FLJ32110 (NM_181646.2,4531-4549).
gatgcaacagctaaatgaa

SEQ ID NO: 432790 - DNA, 19 bp, Homo sapiens
  siRNA target sequence for LOC285398 (NM_181647.1,213-231).
ggaatcacctggattgcaa

SEQ ID NO: 432791 - DNA, 19 bp, Homo sapiens
  siRNA target sequence for LOC286161 (NM_181648.1,12-30).
ctgtttgttggccgtttat

SEQ ID NO: 432792 - DNA, 19 bp, Homo sapiens
  siRNA target sequence for LOC286161 (NM_181648.1,77-95).
caatcaggtgtgtgttttt

SEQ ID NO: 432793 - DNA, 19 bp, Homo sapiens
  siRNA target sequence for CPLX4 (NM_181654.1,20-38).
ggctttccttatgaaaagt

SEQ ID NO: 432794 - DNA, 19 bp, Homo sapiens
  siRNA target sequence for CPLX4 (NM_181654.1,21-39).
gctttccttatgaaaagta

SEQ ID NO: 432795 - DNA, 19 bp, Homo sapiens
  siRNA target sequence for CPLX4 (NM_181654.1,123-141).
gcagctcaagggatgacta

SEQ ID NO: 432796 - DNA, 19 bp, Homo sapiens
  siRNA target sequence for CPLX4 (NM_181654.1,193-211).
gagatgctgcatttacaca

SEQ ID NO: 432797 - DNA, 19 bp, Homo sapiens
  siRNA target sequence for CPLX4 (NM_181654.1,227-245).
ggcatgcctcagagttcat

SEQ ID NO: 432798 - DNA, 19 bp, Homo sapiens
  siRNA target sequence for CPLX4 (NM_181654.1,266-284).
cccaaagagtgaaatggat

SEQ ID NO: 432799 - DNA, 19 bp, Homo sapiens
  siRNA target sequence for CPLX4 (NM_181654.1,272-290).
gagtgaaatggatgagaat

SEQ ID NO: 432800 - DNA, 19 bp, Homo sapiens
  siRNA target sequence for CPLX4 (NM_181654.1,325-343).
ctgaagatctccggaaaat

SEQ ID NO: 432801 - DNA, 19 bp, Homo sapiens
  siRNA target sequence for CPLX4 (NM_181654.1,335-353).
ccggaaaatggtagatgaa

SEQ ID NO: 432802 - DNA, 19 bp, Homo sapiens
  siRNA target sequence for CPLX4 (NM_181654.1,382-400).
ctattcttgggcagataca

SEQ ID NO: 432803 - DNA, 19 bp, Homo sapiens
  siRNA target sequence for CPLX4 (NM_181654.1,413-431).
catggacttggataccata

SEQ ID NO: 432804 - DNA, 19 bp, Homo sapiens
  siRNA target sequence for LOC284018 (NM_181655.1,415-433).
ctatgtgaaaaggtttaat

SEQ ID NO: 432805 - DNA, 19 bp, Homo sapiens
  siRNA target sequence for LOC284018 (NM_181656.1,370-388).
cctgaatgacgctgcatat

SEQ ID NO: 432806 - DNA, 19 bp, Homo sapiens
  siRNA target sequence for LOC284018 (NM_181656.1,373-391).
gaatgacgctgcatatgta

SEQ ID NO: 432807 - DNA, 19 bp, Homo sapiens
  siRNA target sequence for LOC284018 (NM_181656.1,392-410).
ctttataccaccgtttgta

SEQ ID NO: 432808 - DNA, 19 bp, Homo sapiens
  siRNA target sequence for QSCN6L1 (NM_181701.1,455-473).
ccccaccttccggtatttt

SEQ ID NO: 432809 - DNA, 19 bp, Homo sapiens
  siRNA target sequence for QSCN6L1 (NM_181701.1,456-474).
cccaccttccggtatttta

SEQ ID NO: 432810 - DNA, 19 bp, Homo sapiens
  siRNA target sequence for QSCN6L1 (NM_181701.1,457-475).
ccaccttccggtattttaa

SEQ ID NO: 432811 - DNA, 19 bp, Homo sapiens
  siRNA target sequence for QSCN6L1 (NM_181701.1,461-479).
cttccggtattttaaagca

SEQ ID NO: 432812 - DNA, 19 bp, Homo sapiens
  siRNA target sequence for QSCN6L1 (NM_181701.1,544-562).
gacagacgatgattgactt

SEQ ID NO: 432813 - DNA, 19 bp, Homo sapiens
  siRNA target sequence for QSCN6L1 (NM_181701.1,621-639).
cagcccagtgatgttcttt

SEQ ID NO: 432814 - DNA, 19 bp, Homo sapiens
  siRNA target sequence for QSCN6L1 (NM_181701.1,668-686).
cgtggctatcgtctttgaa

SEQ ID NO: 432815 - DNA, 19 bp, Homo sapiens
  siRNA target sequence for QSCN6L1 (NM_181701.1,669-687).
gtggctatcgtctttgaaa

SEQ ID NO: 432816 - DNA, 19 bp, Homo sapiens
  siRNA target sequence for QSCN6L1 (NM_181701.1,673-691).
ctatcgtctttgaaagcaa

SEQ ID NO: 432817 - DNA, 19 bp, Homo sapiens
  siRNA target sequence for QSCN6L1 (NM_181701.1,723-741).
gacctgatcccgtatgaaa

SEQ ID NO: 432818 - DNA, 19 bp, Homo sapiens
  siRNA target sequence for QSCN6L1 (NM_181701.1,764-782).
ggacggggacaaagcattt

SEQ ID NO: 432819 - DNA, 19 bp, Homo sapiens
  siRNA target sequence for QSCN6L1 (NM_181701.1,786-804).
gagaaacttggtgtttctt

SEQ ID NO: 432820 - DNA, 19 bp, Homo sapiens
  siRNA target sequence for QSCN6L1 (NM_181701.1,837-855).
gggtcgcatggattgatta

SEQ ID NO: 432821 - DNA, 19 bp, Homo sapiens
  siRNA target sequence for QSCN6L1 (NM_181701.1,838-856).
ggtcgcatggattgattaa

SEQ ID NO: 432822 - DNA, 19 bp, Homo sapiens
  siRNA target sequence for QSCN6L1 (NM_181701.1,841-859).
cgcatggattgattaacgt

SEQ ID NO: 432823 - DNA, 19 bp, Homo sapiens
  siRNA target sequence for QSCN6L1 (NM_181701.1,886-904).
cgtcttatttgaagtcatt

SEQ ID NO: 432824 - DNA, 19 bp, Homo sapiens
  siRNA target sequence for QSCN6L1 (NM_181701.1,906-924).
ccggatgtgaggaaaaaat

SEQ ID NO: 432825 - DNA, 19 bp, Homo sapiens
  siRNA target sequence for QSCN6L1 (NM_181701.1,971-989).
cgtggtttggagagaattt

SEQ ID NO: 432826 - DNA, 19 bp, Homo sapiens
  siRNA target sequence for QSCN6L1 (NM_181701.1,975-993).
gtttggagagaatttgaca

SEQ ID NO: 432827 - DNA, 19 bp, Homo sapiens
  siRNA target sequence for QSCN6L1 (NM_181701.1,1235-1253).
caacaagatgcggatttct

SEQ ID NO: 432828 - DNA, 19 bp, Homo sapiens
  siRNA target sequence for QSCN6L1 (NM_181701.1,1241-1259).
gatgcggatttctggaata

SEQ ID NO: 432829 - DNA, 19 bp, Homo sapiens
  siRNA target sequence for QSCN6L1 (NM_181701.1,1263-1281).
cttactaatcacataaagt

SEQ ID NO: 432830 - DNA, 19 bp, Homo sapiens
  siRNA target sequence for QSCN6L1 (NM_181701.1,1388-1406).
ggttggcacaggctttgaa

SEQ ID NO: 432831 - DNA, 19 bp, Homo sapiens
  siRNA target sequence for QSCN6L1 (NM_181701.1,1546-1564).
ggctgtggaagaagcataa

SEQ ID NO: 432832 - DNA, 19 bp, Homo sapiens
  siRNA target sequence for QSCN6L1 (NM_181701.1,1548-1566).
ctgtggaagaagcataata

SEQ ID NO: 432833 - DNA, 19 bp, Homo sapiens
  siRNA target sequence for QSCN6L1 (NM_181701.1,1599-1617).
gaggatccccggtttccaa

SEQ ID NO: 432834 - DNA, 19 bp, Homo sapiens
  siRNA target sequence for QSCN6L1 (NM_181701.1,1692-1710).
ggccacgtgctcacattct

SEQ ID NO: 432835 - DNA, 19 bp, Homo sapiens
  siRNA target sequence for QSCN6L1 (NM_181701.1,1693-1711).
gccacgtgctcacattctt

SEQ ID NO: 432836 - DNA, 19 bp, Homo sapiens
  siRNA target sequence for QSCN6L1 (NM_181701.1,1728-1746).
cgcgacaacctcttagaca

SEQ ID NO: 432837 - DNA, 19 bp, Homo sapiens
  siRNA target sequence for LOC90624 (NM_181705.1,41-59).
ggacgggcagtcaaggttt

SEQ ID NO: 432838 - DNA, 19 bp, Homo sapiens
  siRNA target sequence for LOC90624 (NM_181705.1,42-60).
gacgggcagtcaaggtttt

SEQ ID NO: 432839 - DNA, 19 bp, Homo sapiens
  siRNA target sequence for LOC90624 (NM_181705.1,79-97).
gcacaggaccagacaacaa

SEQ ID NO: 432840 - DNA, 19 bp, Homo sapiens
  siRNA target sequence for LOC90624 (NM_181705.1,129-147).
cagccagaataaagataaa

SEQ ID NO: 432841 - DNA, 19 bp, Homo sapiens
  siRNA target sequence for LOC90624 (NM_181705.1,197-215).
gagctaatgaaaataggtt

SEQ ID NO: 432842 - DNA, 19 bp, Homo sapiens
  siRNA target sequence for LOC90624 (NM_181705.1,332-350).
gcaccaactcagaagcaat

SEQ ID NO: 432843 - DNA, 19 bp, Homo sapiens
  siRNA target sequence for LOC120526 (NM_181706.2,123-141).
gcagacccatctgcaaata

SEQ ID NO: 432844 - DNA, 19 bp, Homo sapiens
  siRNA target sequence for LOC120526 (NM_181706.2,186-204).
catccagataaacaaagta

SEQ ID NO: 432845 - DNA, 19 bp, Homo sapiens
  siRNA target sequence for LOC120526 (NM_181706.2,242-260).
gaagttcatcgaaattgat

SEQ ID NO: 432846 - DNA, 19 bp, Homo sapiens
  siRNA target sequence for LOC120526 (NM_181706.2,352-370).
ctcaagtatatcttgaaga

SEQ ID NO: 432847 - DNA, 19 bp, Homo sapiens
  siRNA target sequence for LOC120526 (NM_181706.2,464-482).
cctgatttcttgtgataca

SEQ ID NO: 432848 - DNA, 19 bp, Homo sapiens
  siRNA target sequence for LOC120526 (NM_181706.2,477-495).
gatacatgttcactaatta

SEQ ID NO: 432849 - DNA, 19 bp, Homo sapiens
  siRNA target sequence for LOC120526 (NM_181706.2,484-502).
gttcactaattatagaact

SEQ ID NO: 432850 - DNA, 19 bp, Homo sapiens
  siRNA target sequence for LOC120526 (NM_181706.2,498-516).
gaactccttcattataact

SEQ ID NO: 432851 - DNA, 19 bp, Homo sapiens
  siRNA target sequence for LOC124773 (NM_181707.1,457-475).
cagcttcgccgactttaca

SEQ ID NO: 432852 - DNA, 19 bp, Homo sapiens
  siRNA target sequence for LOC124773 (NM_181707.1,460-478).
cttcgccgactttacaagt

SEQ ID NO: 432853 - DNA, 19 bp, Homo sapiens
  siRNA target sequence for LOC124773 (NM_181707.1,463-481).
cgccgactttacaagtaca

SEQ ID NO: 432854 - DNA, 19 bp, Homo sapiens
  siRNA target sequence for LOC124773 (NM_181707.1,683-701).
gatcccaggaccatgtcaa

SEQ ID NO: 432855 - DNA, 19 bp, Homo sapiens
  siRNA target sequence for LOC124773 (NM_181707.1,718-736).
gagctttctcaaaaaccaa

SEQ ID NO: 432856 - DNA, 19 bp, Homo sapiens
  siRNA target sequence for LOC144233 (NM_181708.1,92-110).
cccgttcggaaattttcct

SEQ ID NO: 432857 - DNA, 19 bp, Homo sapiens
  siRNA target sequence for LOC144233 (NM_181708.1,216-234).
ctcgacgtggggtgtaact

SEQ ID NO: 432858 - DNA, 19 bp, Homo sapiens
  siRNA target sequence for LOC144233 (NM_181708.1,249-267).
gtggctctatacaaacact

SEQ ID NO: 432859 - DNA, 19 bp, Homo sapiens
  siRNA target sequence for LOC144233 (NM_181708.1,350-368).
ggtgaagcgagccgaaaaa

SEQ ID NO: 432860 - DNA, 19 bp, Homo sapiens
  siRNA target sequence for LOC144233 (NM_181708.1,356-374).
gcgagccgaaaaagaatgt

SEQ ID NO: 432861 - DNA, 19 bp, Homo sapiens
  siRNA target sequence for LOC144233 (NM_181708.1,384-402).
gatgccttgacttttatca

SEQ ID NO: 432862 - DNA, 19 bp, Homo sapiens
  siRNA target sequence for LOC144233 (NM_181708.1,458-476).
ccaatttggacgttcagtt

SEQ ID NO: 432863 - DNA, 19 bp, Homo sapiens
  siRNA target sequence for LOC144233 (NM_181708.1,459-477).
caatttggacgttcagttt

SEQ ID NO: 432864 - DNA, 19 bp, Homo sapiens
  siRNA target sequence for LOC144233 (NM_181708.1,465-483).
ggacgttcagtttttgaca

SEQ ID NO: 432865 - DNA, 19 bp, Homo sapiens
  siRNA target sequence for LOC144233 (NM_181708.1,505-523).
ccatgtggattcatctgaa

SEQ ID NO: 432866 - DNA, 19 bp, Homo sapiens
  siRNA target sequence for LOC144233 (NM_181708.1,509-527).
gtggattcatctgaatcat

SEQ ID NO: 432867 - DNA, 19 bp, Homo sapiens
  siRNA target sequence for LOC144233 (NM_181708.1,732-750).
ggcatggaattaatatgtt

SEQ ID NO: 432868 - DNA, 19 bp, Homo sapiens
  siRNA target sequence for LOC144347 (NM_181709.2,296-314).
cggaacccacgcatgagat

SEQ ID NO: 432869 - DNA, 19 bp, Homo sapiens
  siRNA target sequence for LOC144347 (NM_181709.2,320-338).
gcaactctgaggtcaagta

SEQ ID NO: 432870 - DNA, 19 bp, Homo sapiens
  siRNA target sequence for LOC148066 (NM_181710.2,72-90).
gccgtccggagcacttaat

SEQ ID NO: 432871 - DNA, 19 bp, Homo sapiens
  siRNA target sequence for LOC148066 (NM_181710.2,853-871).
ggtcgtatcagccttcttt

SEQ ID NO: 432872 - DNA, 19 bp, Homo sapiens
  siRNA target sequence for GRASP (NM_181711.1,394-412).
gctttgagatccagactta

SEQ ID NO: 432873 - DNA, 19 bp, Homo sapiens
  siRNA target sequence for GRASP (NM_181711.1,395-413).
ctttgagatccagacttat

SEQ ID NO: 432874 - DNA, 19 bp, Homo sapiens
  siRNA target sequence for GRASP (NM_181711.1,455-473).
ctttgtctgccgagttcat

SEQ ID NO: 432875 - DNA, 19 bp, Homo sapiens
  siRNA target sequence for GRASP (NM_181711.1,526-544).
gcgtcaatggcctgaatgt

SEQ ID NO: 432876 - DNA, 19 bp, Homo sapiens
  siRNA target sequence for GRASP (NM_181711.1,551-569).
catccggcatcgagagatt

SEQ ID NO: 432877 - DNA, 19 bp, Homo sapiens
  siRNA target sequence for GRASP (NM_181711.1,613-631).
ctctatatgggacatcaat

SEQ ID NO: 432878 - DNA, 19 bp, Homo sapiens
  siRNA target sequence for GRASP (NM_181711.1,657-675).
ctgcagtacctgaagcaaa

SEQ ID NO: 432879 - DNA, 19 bp, Homo sapiens
  siRNA target sequence for LOC165324 (NM_181713.3,164-182).
gacgtagataacctcaaaa

SEQ ID NO: 432880 - DNA, 19 bp, Homo sapiens
  siRNA target sequence for LOC165324 (NM_181713.3,166-184).
cgtagataacctcaaaagt

SEQ ID NO: 432881 - DNA, 19 bp, Homo sapiens
  siRNA target sequence for LOC165324 (NM_181713.3,230-248).
cttggtaataatcaacaat

SEQ ID NO: 432882 - DNA, 19 bp, Homo sapiens
  siRNA target sequence for LOC165324 (NM_181713.3,233-251).
ggtaataatcaacaatcaa

SEQ ID NO: 432883 - DNA, 19 bp, Homo sapiens
  siRNA target sequence for LOC165324 (NM_181713.3,284-302).
gaagctcagaaggttagtt

SEQ ID NO: 432884 - DNA, 19 bp, Homo sapiens
  siRNA target sequence for LOC165324 (NM_181713.3,292-310).
gaaggttagttccaaatgt

SEQ ID NO: 432885 - DNA, 19 bp, Homo sapiens
  siRNA target sequence for LOC165324 (NM_181713.3,318-336).
ccgctgaacagaagaaaca

SEQ ID NO: 432886 - DNA, 19 bp, Homo sapiens
  siRNA target sequence for LOC165324 (NM_181713.3,376-394).
cgtcaacgacgatttcaga

SEQ ID NO: 432887 - DNA, 19 bp, Homo sapiens
  siRNA target sequence for LOC165324 (NM_181713.3,377-395).
gtcaacgacgatttcagaa

SEQ ID NO: 432888 - DNA, 19 bp, Homo sapiens
  siRNA target sequence for LOC165324 (NM_181713.3,382-400).
cgacgatttcagaagttat

SEQ ID NO: 432889 - DNA, 19 bp, Homo sapiens
  siRNA target sequence for LOC165324 (NM_181713.3,383-401).
gacgatttcagaagttatt

SEQ ID NO: 432890 - DNA, 19 bp, Homo sapiens
  siRNA target sequence for LOC165324 (NM_181713.3,487-505).
ggtggacgttaaagttgaa

SEQ ID NO: 432891 - DNA, 19 bp, Homo sapiens
  siRNA target sequence for LOC165324 (NM_181713.3,647-665).
gctgttccactgaacaact

SEQ ID NO: 432892 - DNA, 19 bp, Homo sapiens
  siRNA target sequence for LOC165324 (NM_181713.3,648-666).
ctgttccactgaacaactt

SEQ ID NO: 432893 - DNA, 19 bp, Homo sapiens
  siRNA target sequence for LOC165324 (NM_181713.3,661-679).
caacttggaacccattact

SEQ ID NO: 432894 - DNA, 19 bp, Homo sapiens
  siRNA target sequence for LOC165324 (NM_181713.3,671-689).
cccattactaatatacaga

SEQ ID NO: 432895 - DNA, 19 bp, Homo sapiens
  siRNA target sequence for LOC165324 (NM_181713.3,672-690).
ccattactaatatacagat

SEQ ID NO: 432896 - DNA, 19 bp, Homo sapiens
  siRNA target sequence for LOC165324 (NM_181713.3,691-709).
ctggttggccaatggaaaa

SEQ ID NO: 432897 - DNA, 19 bp, Homo sapiens
  siRNA target sequence for LOC165324 (NM_181713.3,741-759).
gagtaagccatatcaaaga

SEQ ID NO: 432898 - DNA, 19 bp, Homo sapiens
  siRNA target sequence for LOC165324 (NM_181713.3,743-761).
gtaagccatatcaaagact

SEQ ID NO: 432899 - DNA, 19 bp, Homo sapiens
  siRNA target sequence for LOC165324 (NM_181713.3,747-765).
gccatatcaaagacttcat

SEQ ID NO: 432900 - DNA, 19 bp, Homo sapiens
  siRNA target sequence for C6orf152 (NM_181714.1,657-675).
ggcaggcaaacaccattat

SEQ ID NO: 432901 - DNA, 19 bp, Homo sapiens
  siRNA target sequence for C6orf152 (NM_181714.1,662-680).
gcaaacaccattattctta

SEQ ID NO: 432902 - DNA, 19 bp, Homo sapiens
  siRNA target sequence for C6orf152 (NM_181714.1,748-766).
gttaggagaaaaaatccta

SEQ ID NO: 432903 - DNA, 19 bp, Homo sapiens
  siRNA target sequence for C6orf152 (NM_181714.1,818-836).
gccctaagggtctaccaaa

SEQ ID NO: 432904 - DNA, 19 bp, Homo sapiens
  siRNA target sequence for C6orf152 (NM_181714.1,864-882).
ctcccagagcctcaataga

SEQ ID NO: 432905 - DNA, 19 bp, Homo sapiens
  siRNA target sequence for C6orf152 (NM_181714.1,883-901).
gagccacttcggaaagata

SEQ ID NO: 432906 - DNA, 19 bp, Homo sapiens
  siRNA target sequence for C6orf152 (NM_181714.1,893-911).
ggaaagatactgatcttgt

SEQ ID NO: 432907 - DNA, 19 bp, Homo sapiens
  siRNA target sequence for C6orf152 (NM_181714.1,898-916).
gatactgatcttgttacaa

SEQ ID NO: 432908 - DNA, 19 bp, Homo sapiens
  siRNA target sequence for C6orf152 (NM_181714.1,910-928).
gttacaaaacggattctgt

SEQ ID NO: 432909 - DNA, 19 bp, Homo sapiens
  siRNA target sequence for C6orf152 (NM_181714.1,927-945).
gtctgcaagactgctaaaa

SEQ ID NO: 432910 - DNA, 19 bp, Homo sapiens
  siRNA target sequence for C6orf152 (NM_181714.1,931-949).
gcaagactgctaaaaatca

SEQ ID NO: 432911 - DNA, 19 bp, Homo sapiens
  siRNA target sequence for C6orf152 (NM_181714.1,932-950).
caagactgctaaaaatcaa

SEQ ID NO: 432912 - DNA, 19 bp, Homo sapiens
  siRNA target sequence for C6orf152 (NM_181714.1,954-972).
gttgcagaatgaagtatct

SEQ ID NO: 432913 - DNA, 19 bp, Homo sapiens
  siRNA target sequence for C6orf152 (NM_181714.1,971-989).
ctgaactccaggtcaagtt

SEQ ID NO: 432914 - DNA, 19 bp, Homo sapiens
  siRNA target sequence for C6orf152 (NM_181714.1,1039-1057).
caggagaaagccctgaata

SEQ ID NO: 432915 - DNA, 19 bp, Homo sapiens
  siRNA target sequence for C6orf152 (NM_181714.1,1083-1101).
ctcacaacttatatttcgt

SEQ ID NO: 432916 - DNA, 19 bp, Homo sapiens
  siRNA target sequence for C6orf152 (NM_181714.1,1099-1117).
cgtcataacaatgagatta

SEQ ID NO: 432917 - DNA, 19 bp, Homo sapiens
  siRNA target sequence for C6orf152 (NM_181714.1,1123-1141).
ctcaaagaacgcttaagaa

SEQ ID NO: 432918 - DNA, 19 bp, Homo sapiens
  siRNA target sequence for C6orf152 (NM_181714.1,1125-1143).
caaagaacgcttaagaaaa

SEQ ID NO: 432919 - DNA, 19 bp, Homo sapiens
  siRNA target sequence for C6orf152 (NM_181714.1,1183-1201).
gatacagaaagtgaactat

SEQ ID NO: 432920 - DNA, 19 bp, Homo sapiens
  siRNA target sequence for C6orf152 (NM_181714.1,1208-1226).
caaaattttccttacagaa

SEQ ID NO: 432921 - DNA, 19 bp, Homo sapiens
  siRNA target sequence for C6orf152 (NM_181714.1,1285-1303).
ctagtttcagcagagttaa

SEQ ID NO: 432922 - DNA, 19 bp, Homo sapiens
  siRNA target sequence for C6orf152 (NM_181714.1,1288-1306).
gtttcagcagagttaaagt

SEQ ID NO: 432923 - DNA, 19 bp, Homo sapiens
  siRNA target sequence for C6orf152 (NM_181714.1,1292-1310).
cagcagagttaaagttaga

SEQ ID NO: 432924 - DNA, 19 bp, Homo sapiens
  siRNA target sequence for C6orf152 (NM_181714.1,1312-1330).
gacaccgagagaagaatta

SEQ ID NO: 432925 - DNA, 19 bp, Homo sapiens
  siRNA target sequence for C6orf152 (NM_181714.1,1316-1334).
ccgagagaagaattaagga

SEQ ID NO: 432926 - DNA, 19 bp, Homo sapiens
  siRNA target sequence for C6orf152 (NM_181714.1,1325-1343).
gaattaaggagctatcgaa

SEQ ID NO: 432927 - DNA, 19 bp, Homo sapiens
  siRNA target sequence for C6orf152 (NM_181714.1,1332-1350).
ggagctatcgaaaaacctt

SEQ ID NO: 432928 - DNA, 19 bp, Homo sapiens
  siRNA target sequence for C6orf152 (NM_181714.1,1348-1366).
cttgaactgagtactaaca

SEQ ID NO: 432929 - DNA, 19 bp, Homo sapiens
  siRNA target sequence for C6orf152 (NM_181714.1,1351-1369).
gaactgagtactaacagtt

SEQ ID NO: 432930 - DNA, 19 bp, Homo sapiens
  siRNA target sequence for C6orf152 (NM_181714.1,1356-1374).
gagtactaacagtttccaa

SEQ ID NO: 432931 - DNA, 19 bp, Homo sapiens
  siRNA target sequence for C6orf152 (NM_181714.1,1401-1419).
ggcatatgaggctcatgat

SEQ ID NO: 432932 - DNA, 19 bp, Homo sapiens
  siRNA target sequence for C6orf152 (NM_181714.1,1403-1421).
catatgaggctcatgatga

SEQ ID NO: 432933 - DNA, 19 bp, Homo sapiens
  siRNA target sequence for C6orf152 (NM_181714.1,1440-1458).
ggaggtacagcgactatat

SEQ ID NO: 432934 - DNA, 19 bp, Homo sapiens
  siRNA target sequence for C6orf152 (NM_181714.1,1444-1462).
gtacagcgactatatcaca

SEQ ID NO: 432935 - DNA, 19 bp, Homo sapiens
  siRNA target sequence for C6orf152 (NM_181714.1,1479-1497).
gagagaactggatataaaa

SEQ ID NO: 432936 - DNA, 19 bp, Homo sapiens
  siRNA target sequence for C6orf152 (NM_181714.1,1542-1560).
gaaagaacttgcattaaga

SEQ ID NO: 432937 - DNA, 19 bp, Homo sapiens
  siRNA target sequence for C6orf152 (NM_181714.1,1567-1585).
gctgcatgccagagtgatt

SEQ ID NO: 432938 - DNA, 19 bp, Homo sapiens
  siRNA target sequence for C6orf152 (NM_181714.1,1568-1586).
ctgcatgccagagtgattt

SEQ ID NO: 432939 - DNA, 19 bp, Homo sapiens
  siRNA target sequence for C6orf152 (NM_181714.1,1629-1647).
caagccagaagaatatcct

SEQ ID NO: 432940 - DNA, 19 bp, Homo sapiens
  siRNA target sequence for C6orf152 (NM_181714.1,1702-1720).
cttactttggacttgcaat

SEQ ID NO: 432941 - DNA, 19 bp, Homo sapiens
  siRNA target sequence for C6orf152 (NM_181714.1,1713-1731).
cttgcaatctcaaaagcaa

SEQ ID NO: 432942 - DNA, 19 bp, Homo sapiens
  siRNA target sequence for C6orf152 (NM_181714.1,1756-1774).
ctaaacccaattatggaaa

SEQ ID NO: 432943 - DNA, 19 bp, Homo sapiens
  siRNA target sequence for C6orf152 (NM_181714.1,1928-1946).
gaaggtaccaactaggaat

SEQ ID NO: 432944 - DNA, 19 bp, Homo sapiens
  siRNA target sequence for C6orf152 (NM_181714.1,1931-1949).
ggtaccaactaggaatgta

SEQ ID NO: 432945 - DNA, 19 bp, Homo sapiens
  siRNA target sequence for C6orf152 (NM_181714.1,1936-1954).
caactaggaatgtatccaa

SEQ ID NO: 432946 - DNA, 19 bp, Homo sapiens
  siRNA target sequence for C6orf152 (NM_181714.1,1943-1961).
gaatgtatccaattcagaa

SEQ ID NO: 432947 - DNA, 19 bp, Homo sapiens
  siRNA target sequence for C6orf152 (NM_181714.1,2003-2021).
gagaaatgctacttgctaa

SEQ ID NO: 432948 - DNA, 19 bp, Homo sapiens
  siRNA target sequence for C6orf152 (NM_181714.1,2010-2028).
gctacttgctaaactgaat

SEQ ID NO: 432949 - DNA, 19 bp, Homo sapiens
  siRNA target sequence for C6orf152 (NM_181714.1,2046-2064).
ccaagattctcgaaatcta

SEQ ID NO: 432950 - DNA, 19 bp, Homo sapiens
  siRNA target sequence for C6orf152 (NM_181714.1,2047-2065).
caagattctcgaaatctaa

SEQ ID NO: 432951 - DNA, 19 bp, Homo sapiens
  siRNA target sequence for C6orf152 (NM_181714.1,2050-2068).
gattctcgaaatctaaaat

SEQ ID NO: 432952 - DNA, 19 bp, Homo sapiens
  siRNA target sequence for C6orf152 (NM_181714.1,2085-2103).
gttacctgattttgaatca

SEQ ID NO: 432953 - DNA, 19 bp, Homo sapiens
  siRNA target sequence for C6orf152 (NM_181714.1,2243-2261).
gtccagcctcccctaatga

SEQ ID NO: 432954 - DNA, 19 bp, Homo sapiens
  siRNA target sequence for C6orf152 (NM_181714.1,2283-2301).
gccttcgtttgcaaaaaca

SEQ ID NO: 432955 - DNA, 19 bp, Homo sapiens
  siRNA target sequence for C6orf152 (NM_181714.1,2284-2302).
ccttcgtttgcaaaaacat

SEQ ID NO: 432956 - DNA, 19 bp, Homo sapiens
  siRNA target sequence for C6orf152 (NM_181714.1,2303-2321).
cagagaggtcaaatccatt

SEQ ID NO: 432957 - DNA, 19 bp, Homo sapiens
  siRNA target sequence for C6orf152 (NM_181714.1,2309-2327).
ggtcaaatccatttagtca

SEQ ID NO: 432958 - DNA, 19 bp, Homo sapiens
  siRNA target sequence for C6orf152 (NM_181714.1,2312-2330).
caaatccatttagtcaaaa

SEQ ID NO: 432959 - DNA, 19 bp, Homo sapiens
  siRNA target sequence for C6orf152 (NM_181714.1,2375-2393).
gtaaagatggtgtagattt

SEQ ID NO: 432960 - DNA, 19 bp, Homo sapiens
  siRNA target sequence for C6orf152 (NM_181714.1,2380-2398).
gatggtgtagatttaatta

SEQ ID NO: 432961 - DNA, 19 bp, Homo sapiens
  siRNA target sequence for C6orf152 (NM_181714.1,2424-2442).
gatggaacagttatttggt

SEQ ID NO: 432962 - DNA, 19 bp, Homo sapiens
  siRNA target sequence for C6orf152 (NM_181714.1,2507-2525).
gagacattgaccctctaaa

SEQ ID NO: 432963 - DNA, 19 bp, Homo sapiens
  siRNA target sequence for C6orf152 (NM_181714.1,2640-2658).
cgataaaccagcagtaaaa

SEQ ID NO: 432964 - DNA, 19 bp, Homo sapiens
  siRNA target sequence for LOC200186 (NM_181715.1,106-124).
cacggcctcggcttccaat

SEQ ID NO: 432965 - DNA, 19 bp, Homo sapiens
  siRNA target sequence for LOC200186 (NM_181715.1,117-135).
cttccaatccgcgcaaatt

SEQ ID NO: 432966 - DNA, 19 bp, Homo sapiens
  siRNA target sequence for LOC200186 (NM_181715.1,121-139).
caatccgcgcaaatttagt

SEQ ID NO: 432967 - DNA, 19 bp, Homo sapiens
  siRNA target sequence for LOC200186 (NM_181715.1,129-147).
gcaaatttagtgagaagat

SEQ ID NO: 432968 - DNA, 19 bp, Homo sapiens
  siRNA target sequence for LOC200186 (NM_181715.1,220-238).
ccggttacaggcccaaaaa

SEQ ID NO: 432969 - DNA, 19 bp, Homo sapiens
  siRNA target sequence for LOC200186 (NM_181715.1,222-240).
ggttacaggcccaaaaact

SEQ ID NO: 432970 - DNA, 19 bp, Homo sapiens
  siRNA target sequence for LOC200186 (NM_181715.1,239-257).
ctgcgactggcatacacaa

SEQ ID NO: 432971 - DNA, 19 bp, Homo sapiens
  siRNA target sequence for LOC200186 (NM_181715.1,253-271).
cacaaggagctctcattat

SEQ ID NO: 432972 - DNA, 19 bp, Homo sapiens
  siRNA target sequence for LOC200186 (NM_181715.1,275-293).
gggtctctgcccaatgtta

SEQ ID NO: 432973 - DNA, 19 bp, Homo sapiens
  siRNA target sequence for LOC200186 (NM_181715.1,429-447).
gatacacccgccacattga

SEQ ID NO: 432974 - DNA, 19 bp, Homo sapiens
  siRNA target sequence for LOC200186 (NM_181715.1,507-525).
cgatggcctggggcaattt

SEQ ID NO: 432975 - DNA, 19 bp, Homo sapiens
  siRNA target sequence for LOC200186 (NM_181715.1,584-602).
gactctgcccttcatacaa

SEQ ID NO: 432976 - DNA, 19 bp, Homo sapiens
  siRNA target sequence for LOC200186 (NM_181715.1,666-684).
gccgacgtgggggtattct

SEQ ID NO: 432977 - DNA, 19 bp, Homo sapiens
  siRNA target sequence for LOC200186 (NM_181715.1,711-729).
ctgctattgaggagaactt

SEQ ID NO: 432978 - DNA, 19 bp, Homo sapiens
  siRNA target sequence for LOC200186 (NM_181715.1,980-998).
ggcaacagtacctccaatt

SEQ ID NO: 432979 - DNA, 19 bp, Homo sapiens
  siRNA target sequence for LOC200186 (NM_181715.1,1058-1076).
gatgcaccaggacttcatt

SEQ ID NO: 432980 - DNA, 19 bp, Homo sapiens
  siRNA target sequence for LOC200186 (NM_181715.1,1099-1117).
gcagtcctccctaagcaat

SEQ ID NO: 432981 - DNA, 19 bp, Homo sapiens
  siRNA target sequence for LOC200186 (NM_181715.1,1484-1502).
ctggataccagtaaactgt

SEQ ID NO: 432982 - DNA, 19 bp, Homo sapiens
  siRNA target sequence for LOC200186 (NM_181715.1,1600-1618).
gccctctcagtcttgttca

SEQ ID NO: 432983 - DNA, 19 bp, Homo sapiens
  siRNA target sequence for LOC200186 (NM_181715.1,1644-1662).
caggcaggcagtctcatta

SEQ ID NO: 432984 - DNA, 19 bp, Homo sapiens
  siRNA target sequence for LOC200186 (NM_181715.1,1905-1923).
gctcagggcctaacatcat

SEQ ID NO: 432985 - DNA, 19 bp, Homo sapiens
  siRNA target sequence for p30 (NM_181716.1,468-486).
cctgctagacacctttgaa

SEQ ID NO: 432986 - DNA, 19 bp, Homo sapiens
  siRNA target sequence for p30 (NM_181716.1,554-572).
cagcagacttgcatatatt

SEQ ID NO: 432987 - DNA, 19 bp, Homo sapiens
  siRNA target sequence for p30 (NM_181716.1,557-575).
cagacttgcatatatttga

SEQ ID NO: 432988 - DNA, 19 bp, Homo sapiens
  siRNA target sequence for p30 (NM_181716.1,574-592).
gactgcaattgcagcattt

SEQ ID NO: 432989 - DNA, 19 bp, Homo sapiens
  siRNA target sequence for p30 (NM_181716.1,603-621).
gcagaatagacacttcatt

SEQ ID NO: 432990 - DNA, 19 bp, Homo sapiens
  siRNA target sequence for p30 (NM_181716.1,652-670).
ggagctgagcacataacga

SEQ ID NO: 432991 - DNA, 19 bp, Homo sapiens
  siRNA target sequence for p30 (NM_181716.1,658-676).
gagcacataacgacttaca

SEQ ID NO: 432992 - DNA, 19 bp, Homo sapiens
  siRNA target sequence for p30 (NM_181716.1,669-687).
gacttacacgttcaatact

SEQ ID NO: 432993 - DNA, 19 bp, Homo sapiens
  siRNA target sequence for p30 (NM_181716.1,695-713).
cccagcataccttctgtaa

SEQ ID NO: 432994 - DNA, 19 bp, Homo sapiens
  siRNA target sequence for p30 (NM_181716.1,721-739).
ggcgttcagagcttctata

SEQ ID NO: 432995 - DNA, 19 bp, Homo sapiens
  siRNA target sequence for p30 (NM_181716.1,723-741).
cgttcagagcttctatact

SEQ ID NO: 432996 - DNA, 19 bp, Homo sapiens
  siRNA target sequence for p30 (NM_181716.1,810-828).
ggtcactgaggaattcaat

SEQ ID NO: 432997 - DNA, 19 bp, Homo sapiens
  siRNA target sequence for p30 (NM_181716.1,867-885).
catcaagaacatgtctaaa

SEQ ID NO: 432998 - DNA, 19 bp, Homo sapiens
  siRNA target sequence for LOC253018 (NM_181717.1,378-396).
gtgactgggtgaagtgttt

SEQ ID NO: 432999 - DNA, 19 bp, Homo sapiens
  siRNA target sequence for LOC253018 (NM_181717.1,531-549).
cacacatcaccccttattt

SEQ ID NO: 433000 - DNA, 19 bp, Homo sapiens
  siRNA target sequence for LOC253982 (NM_181718.3,679-697).
ggccaggggtcctaggtat

SEQ ID NO: 433001 - DNA, 19 bp, Homo sapiens
  siRNA target sequence for LOC253982 (NM_181718.3,680-698).
gccaggggtcctaggtatt

SEQ ID NO: 433002 - DNA, 19 bp, Homo sapiens
  siRNA target sequence for LOC253982 (NM_181718.3,971-989).
gagggggcttcgaagcttt

SEQ ID NO: 433003 - DNA, 19 bp, Homo sapiens
  siRNA target sequence for LOC253982 (NM_181718.3,973-991).
gggggcttcgaagctttat

SEQ ID NO: 433004 - DNA, 19 bp, Homo sapiens
  siRNA target sequence for LOC253982 (NM_181718.3,975-993).
gggcttcgaagctttatga

SEQ ID NO: 433005 - DNA, 19 bp, Homo sapiens
  siRNA target sequence for LOC253982 (NM_181718.3,977-995).
gcttcgaagctttatgagt

SEQ ID NO: 433006 - DNA, 19 bp, Homo sapiens
  siRNA target sequence for LOC255104 (NM_181719.1,283-301).
ccttctgcacagagttcat

SEQ ID NO: 433007 - DNA, 19 bp, Homo sapiens
  siRNA target sequence for LOC255104 (NM_181719.1,584-602).
gagcctgaaggaaatcaaa

SEQ ID NO: 433008 - DNA, 19 bp, Homo sapiens
  siRNA target sequence for LOC255104 (NM_181719.1,626-644).
ggcatcccgaaagaagaaa

SEQ ID NO: 433009 - DNA, 19 bp, Homo sapiens
  siRNA target sequence for LOC255104 (NM_181719.1,655-673).
ggaaatggaagcgttatct

SEQ ID NO: 433010 - DNA, 19 bp, Homo sapiens
  siRNA target sequence for LOC255104 (NM_181719.1,750-768).
gctggagcagcgacgatta

SEQ ID NO: 433011 - DNA, 19 bp, Homo sapiens
  siRNA target sequence for LOC255104 (NM_181719.1,751-769).
ctggagcagcgacgattat

SEQ ID NO: 433012 - DNA, 19 bp, Homo sapiens
  siRNA target sequence for LOC255104 (NM_181719.1,804-822).
gccggcatagccatcatga

SEQ ID NO: 433013 - DNA, 19 bp, Homo sapiens
  siRNA target sequence for LOC255104 (NM_181719.1,847-865).
ctggcctgacaggatacaa

SEQ ID NO: 433014 - DNA, 19 bp, Homo sapiens
  siRNA target sequence for LOC255104 (NM_181719.1,849-867).
ggcctgacaggatacaaga

SEQ ID NO: 433015 - DNA, 19 bp, Homo sapiens
  siRNA target sequence for LOC255104 (NM_181719.1,850-868).
gcctgacaggatacaagat

SEQ ID NO: 433016 - DNA, 19 bp, Homo sapiens
  siRNA target sequence for LOC255104 (NM_181719.1,958-976).
ggctcgcttctggcaaata

SEQ ID NO: 433017 - DNA, 19 bp, Homo sapiens
  siRNA target sequence for LOC255104 (NM_181719.1,1452-1470).
gtgtccgggaggatcatca

SEQ ID NO: 433018 - DNA, 19 bp, Homo sapiens
  siRNA target sequence for LOC257106 (NM_181720.1,78-96).
cgcaaaggagcgggttttt

SEQ ID NO: 433019 - DNA, 19 bp, Homo sapiens
  siRNA target sequence for LOC257106 (NM_181720.1,139-157).
gtgccccaggtgctaaaga

SEQ ID NO: 433020 - DNA, 19 bp, Homo sapiens
  siRNA target sequence for LOC257106 (NM_181720.1,271-289).
gacctgcgtcgggatgttt

SEQ ID NO: 433021 - DNA, 19 bp, Homo sapiens
  siRNA target sequence for LOC257106 (NM_181720.1,347-365).
cggatcccctgctcactta

SEQ ID NO: 433022 - DNA, 19 bp, Homo sapiens
  siRNA target sequence for LOC257106 (NM_181720.1,362-380).
cttaccggctctatgacaa

SEQ ID NO: 433023 - DNA, 19 bp, Homo sapiens
  siRNA target sequence for LOC257106 (NM_181720.1,366-384).
ccggctctatgacaagttt

SEQ ID NO: 433024 - DNA, 19 bp, Homo sapiens
  siRNA target sequence for LOC257106 (NM_181720.1,392-410).
ctgtaggagtgcaattgga

SEQ ID NO: 433025 - DNA, 19 bp, Homo sapiens
  siRNA target sequence for LOC257106 (NM_181720.1,644-662).
ccatcgtcgtggagttcat

SEQ ID NO: 433026 - DNA, 19 bp, Homo sapiens
  siRNA target sequence for LOC257106 (NM_181720.1,902-920).
ggaagtggaggtctatctt

SEQ ID NO: 433027 - DNA, 19 bp, Homo sapiens
  siRNA target sequence for LOC257106 (NM_181720.1,906-924).
gtggaggtctatcttcaat

SEQ ID NO: 433028 - DNA, 19 bp, Homo sapiens
  siRNA target sequence for LOC257106 (NM_181720.1,976-994).
gacagggaggataaatcca

SEQ ID NO: 433029 - DNA, 19 bp, Homo sapiens
  siRNA target sequence for LOC257106 (NM_181720.1,1280-1298).
cagacccctacaatgtcaa

SEQ ID NO: 433030 - DNA, 19 bp, Homo sapiens
  siRNA target sequence for LOC257106 (NM_181720.1,2264-2282).
caatgtgtagcaagattca

SEQ ID NO: 433031 - DNA, 19 bp, Homo sapiens
  siRNA target sequence for LOC257106 (NM_181720.1,2594-2612).
cccggagtcgtcttagtct

SEQ ID NO: 433032 - DNA, 19 bp, Homo sapiens
  siRNA target sequence for LOC285908 (NM_181722.1,700-718).
gcccgaacaaccatagctt

SEQ ID NO: 433033 - DNA, 19 bp, Homo sapiens
  siRNA target sequence for LOC338773 (NM_181724.1,812-830).
ggaagggtctctcttgtta

SEQ ID NO: 433034 - DNA, 19 bp, Homo sapiens
  siRNA target sequence for Lrp2bp (NM_181726.1,267-285).
gtggatggtctgaagcatt

SEQ ID NO: 433035 - DNA, 19 bp, Homo sapiens
  siRNA target sequence for Lrp2bp (NM_181726.1,410-428).
caaccagcaggatgtttta

SEQ ID NO: 433036 - DNA, 19 bp, Homo sapiens
  siRNA target sequence for Lrp2bp (NM_181726.1,430-448).
gagaagctccactacacaa

SEQ ID NO: 433037 - DNA, 19 bp, Homo sapiens
  siRNA target sequence for Lrp2bp (NM_181726.1,498-516).
gatgcccaaattgatttat

SEQ ID NO: 433038 - DNA, 19 bp, Homo sapiens
  siRNA target sequence for Lrp2bp (NM_181726.1,501-519).
gcccaaattgatttatgta

SEQ ID NO: 433039 - DNA, 19 bp, Homo sapiens
  siRNA target sequence for Lrp2bp (NM_181726.1,502-520).
cccaaattgatttatgtaa

SEQ ID NO: 433040 - DNA, 19 bp, Homo sapiens
  siRNA target sequence for Lrp2bp (NM_181726.1,527-545).
cgggcaaacagctgaagat

SEQ ID NO: 433041 - DNA, 19 bp, Homo sapiens
  siRNA target sequence for Lrp2bp (NM_181726.1,572-590).
ctgtgccaagtttcttaca

SEQ ID NO: 433042 - DNA, 19 bp, Homo sapiens
  siRNA target sequence for Lrp2bp (NM_181726.1,627-645).
caccctgacaggaatgatt

SEQ ID NO: 433043 - DNA, 19 bp, Homo sapiens
  siRNA target sequence for Lrp2bp (NM_181726.1,671-689).
gagtctcggaagtgtagaa

SEQ ID NO: 433044 - DNA, 19 bp, Homo sapiens
  siRNA target sequence for Lrp2bp (NM_181726.1,673-691).
gtctcggaagtgtagaaaa

SEQ ID NO: 433045 - DNA, 19 bp, Homo sapiens
  siRNA target sequence for Lrp2bp (NM_181726.1,675-693).
ctcggaagtgtagaaaata

SEQ ID NO: 433046 - DNA, 19 bp, Homo sapiens
  siRNA target sequence for SPATA12 (NM_181727.1,698-716).
gtgggtccaccttagaaaa

SEQ ID NO: 433047 - DNA, 19 bp, Homo sapiens
  siRNA target sequence for SPATA12 (NM_181727.1,700-718).
gggtccaccttagaaaagt

SEQ ID NO: 433048 - DNA, 19 bp, Homo sapiens
  siRNA target sequence for SPATA12 (NM_181727.1,911-929).
gtgagacctgtcagagata

SEQ ID NO: 433049 - DNA, 19 bp, Homo sapiens
  siRNA target sequence for SPATA12 (NM_181727.1,915-933).
gacctgtcagagatattta

SEQ ID NO: 433050 - DNA, 19 bp, Homo sapiens
  siRNA target sequence for SPATA12 (NM_181727.1,954-972).
catcgctgtatcccaaata

SEQ ID NO: 433051 - DNA, 19 bp, Homo sapiens
  siRNA target sequence for SPATA12 (NM_181727.1,957-975).
cgctgtatcccaaataaat

SEQ ID NO: 433052 - DNA, 19 bp, Homo sapiens
  siRNA target sequence for SPATA12 (NM_181727.1,998-1016).
ctccagctctcctgataca

SEQ ID NO: 433053 - DNA, 19 bp, Homo sapiens
  siRNA target sequence for SPATA12 (NM_181727.1,1025-1043).
gttgtgagcaagttattca

SEQ ID NO: 433054 - DNA, 19 bp, Homo sapiens
  siRNA target sequence for SPATA12 (NM_181727.1,1032-1050).
gcaagttattcataactct

SEQ ID NO: 433055 - DNA, 19 bp, Homo sapiens
  siRNA target sequence for SPATA12 (NM_181727.1,1033-1051).
caagttattcataactcta

SEQ ID NO: 433056 - DNA, 19 bp, Homo sapiens
  siRNA target sequence for SPATA12 (NM_181727.1,1110-1128).
gagactgtgtgaggatata

SEQ ID NO: 433057 - DNA, 19 bp, Homo sapiens
  siRNA target sequence for SPATA12 (NM_181727.1,1112-1130).
gactgtgtgaggatataga

SEQ ID NO: 433058 - DNA, 19 bp, Homo sapiens
  siRNA target sequence for SPATA12 (NM_181727.1,1152-1170).
gtgcagccgttcaaaccaa

SEQ ID NO: 433059 - DNA, 19 bp, Homo sapiens
  siRNA target sequence for SPATA12 (NM_181727.1,1160-1178).
gttcaaaccaactgacatt

SEQ ID NO: 433060 - DNA, 19 bp, Homo sapiens
  siRNA target sequence for SPATA12 (NM_181727.1,1197-1215).
caggtccctctctacagta

SEQ ID NO: 433061 - DNA, 19 bp, Homo sapiens
  siRNA target sequence for SPATA12 (NM_181727.1,1199-1217).
ggtccctctctacagtata

SEQ ID NO: 433062 - DNA, 19 bp, Homo sapiens
  siRNA target sequence for TMEM13 (NM_181744.1,63-81).
gatggggatccttttgctt

SEQ ID NO: 433063 - DNA, 19 bp, Homo sapiens
  siRNA target sequence for TMEM13 (NM_181744.1,108-126).
gtggctggcttttacctaa

SEQ ID NO: 433064 - DNA, 19 bp, Homo sapiens
  siRNA target sequence for TMEM13 (NM_181744.1,137-155).
gattctgtccacatttgga

SEQ ID NO: 433065 - DNA, 19 bp, Homo sapiens
  siRNA target sequence for TMEM13 (NM_181744.1,159-177).
ggatatgtcctttacatgt

SEQ ID NO: 433066 - DNA, 19 bp, Homo sapiens
  siRNA target sequence for TMEM13 (NM_181744.1,178-196).
cttctagacgaaagaagaa

SEQ ID NO: 433067 - DNA, 19 bp, Homo sapiens
  siRNA target sequence for TMEM13 (NM_181744.1,198-216).
ctgagacccgctgaaataa

SEQ ID NO: 433068 - DNA, 19 bp, Homo sapiens
  siRNA target sequence for TMEM13 (NM_181744.1,204-222).
cccgctgaaataatgacta

SEQ ID NO: 433069 - DNA, 19 bp, Homo sapiens
  siRNA target sequence for TMEM13 (NM_181744.1,205-223).
ccgctgaaataatgactat

SEQ ID NO: 433070 - DNA, 19 bp, Homo sapiens
  siRNA target sequence for TMEM13 (NM_181744.1,208-226).
ctgaaataatgactatcaa

SEQ ID NO: 433071 - DNA, 19 bp, Homo sapiens
  siRNA target sequence for TMEM13 (NM_181744.1,318-336).
ggctgccgctggtatggat

SEQ ID NO: 433072 - DNA, 19 bp, Homo sapiens
  siRNA target sequence for TMEM13 (NM_181744.1,354-372).
ggctgtggaagccttatca

SEQ ID NO: 433073 - DNA, 19 bp, Homo sapiens
  siRNA target sequence for TMEM13 (NM_181744.1,384-402).
gtcagcctggatcgatatt

SEQ ID NO: 433074 - DNA, 19 bp, Homo sapiens
  siRNA target sequence for TMEM13 (NM_181744.1,388-406).
gcctggatcgatatttgaa

SEQ ID NO: 433075 - DNA, 19 bp, Homo sapiens
  siRNA target sequence for TMEM13 (NM_181744.1,389-407).
cctggatcgatatttgaaa

SEQ ID NO: 433076 - DNA, 19 bp, Homo sapiens
  siRNA target sequence for TMEM13 (NM_181744.1,390-408).
ctggatcgatatttgaaaa

SEQ ID NO: 433077 - DNA, 19 bp, Homo sapiens
  siRNA target sequence for TMEM13 (NM_181744.1,656-674).
ctcctacgtaaagatcatt

SEQ ID NO: 433078 - DNA, 19 bp, Homo sapiens
  siRNA target sequence for TMEM13 (NM_181744.1,730-748).
gcagccatgtgctggaaat

SEQ ID NO: 433079 - DNA, 19 bp, Homo sapiens
  siRNA target sequence for TMEM13 (NM_181744.1,761-779).
ggtagcgatgttgatttgt

SEQ ID NO: 433080 - DNA, 19 bp, Homo sapiens
  siRNA target sequence for TMEM13 (NM_181744.1,818-836).
gtctgtgtggtcagctttt

SEQ ID NO: 433081 - DNA, 19 bp, Homo sapiens
  siRNA target sequence for TMEM13 (NM_181744.1,875-893).
gccaaccctacttgcaaaa

SEQ ID NO: 433082 - DNA, 19 bp, Homo sapiens
  siRNA target sequence for TMEM13 (NM_181744.1,876-894).
ccaaccctacttgcaaaat

SEQ ID NO: 433083 - DNA, 19 bp, Homo sapiens
  siRNA target sequence for TMEM13 (NM_181744.1,914-932).
catcatttaccaagttatt

SEQ ID NO: 433084 - DNA, 19 bp, Homo sapiens
  siRNA target sequence for TMEM13 (NM_181744.1,917-935).
catttaccaagttattgat

SEQ ID NO: 433085 - DNA, 19 bp, Homo sapiens
  siRNA target sequence for TMEM13 (NM_181744.1,952-970).
gccaaactggtggtttgaa

SEQ ID NO: 433086 - DNA, 19 bp, Homo sapiens
  siRNA target sequence for TMEM13 (NM_181744.1,953-971).
ccaaactggtggtttgaaa

SEQ ID NO: 433087 - DNA, 19 bp, Homo sapiens
  siRNA target sequence for ZNF233 (NM_181756.1,268-286).
gggctatcaacccttcaaa

SEQ ID NO: 433088 - DNA, 19 bp, Homo sapiens
  siRNA target sequence for ZNF233 (NM_181756.1,283-301).
caaactagatgtgatatta

SEQ ID NO: 433089 - DNA, 19 bp, Homo sapiens
  siRNA target sequence for ZNF233 (NM_181756.1,287-305).
ctagatgtgatattacagt

SEQ ID NO: 433090 - DNA, 19 bp, Homo sapiens
  siRNA target sequence for ZNF233 (NM_181756.1,357-375).
ggtgttcaggacacaagaa

SEQ ID NO: 433091 - DNA, 19 bp, Homo sapiens
  siRNA target sequence for ZNF233 (NM_181756.1,385-403).
gatagatacccttcaagaa

SEQ ID NO: 433092 - DNA, 19 bp, Homo sapiens
  siRNA target sequence for ZNF233 (NM_181756.1,453-471).
gggaacaatttacaagtaa

SEQ ID NO: 433093 - DNA, 19 bp, Homo sapiens
  siRNA target sequence for ZNF233 (NM_181756.1,454-472).
ggaacaatttacaagtaaa

SEQ ID NO: 433094 - DNA, 19 bp, Homo sapiens
  siRNA target sequence for ZNF233 (NM_181756.1,477-495).
ccagtaatcaagacctaat

SEQ ID NO: 433095 - DNA, 19 bp, Homo sapiens
  siRNA target sequence for ZNF233 (NM_181756.1,478-496).
cagtaatcaagacctaata

SEQ ID NO: 433096 - DNA, 19 bp, Homo sapiens
  siRNA target sequence for ZNF233 (NM_181756.1,480-498).
gtaatcaagacctaataat

SEQ ID NO: 433097 - DNA, 19 bp, Homo sapiens
  siRNA target sequence for ZNF233 (NM_181756.1,517-535).
gtccaagttgctaaaacaa

SEQ ID NO: 433098 - DNA, 19 bp, Homo sapiens
  siRNA target sequence for ZNF233 (NM_181756.1,608-626).
ctacaaggggagagttcaa

SEQ ID NO: 433099 - DNA, 19 bp, Homo sapiens
  siRNA target sequence for ZNF233 (NM_181756.1,693-711).
gagaaccacagaattatca

SEQ ID NO: 433100 - DNA, 19 bp, Homo sapiens
  siRNA target sequence for ZNF233 (NM_181756.1,714-732).
gtaggtgtcagcaaattga

SEQ ID NO: 433101 - DNA, 19 bp, Homo sapiens
  siRNA target sequence for ZNF233 (NM_181756.1,718-736).
gtgtcagcaaattgatgta

SEQ ID NO: 433102 - DNA, 19 bp, Homo sapiens
  siRNA target sequence for ZNF233 (NM_181756.1,777-795).
gaattgctcatcaacatga

SEQ ID NO: 433103 - DNA, 19 bp, Homo sapiens
  siRNA target sequence for ZNF233 (NM_181756.1,867-885).
catcccagcatagcataat

SEQ ID NO: 433104 - DNA, 19 bp, Homo sapiens
  siRNA target sequence for ZNF233 (NM_181756.1,871-889).
ccagcatagcataatccaa

SEQ ID NO: 433105 - DNA, 19 bp, Homo sapiens
  siRNA target sequence for ZNF233 (NM_181756.1,872-890).
cagcatagcataatccaat

SEQ ID NO: 433106 - DNA, 19 bp, Homo sapiens
  siRNA target sequence for ZNF233 (NM_181756.1,930-948).
gtgttggctctaatcttga

SEQ ID NO: 433107 - DNA, 19 bp, Homo sapiens
  siRNA target sequence for ZNF233 (NM_181756.1,976-994).
caagcctcatgtaaatgtt

SEQ ID NO: 433108 - DNA, 19 bp, Homo sapiens
  siRNA target sequence for ZNF233 (NM_181756.1,1258-1276).
gggcttccatcatagctta

SEQ ID NO: 433109 - DNA, 19 bp, Homo sapiens
  siRNA target sequence for ZNF233 (NM_181756.1,1261-1279).
cttccatcatagcttagat

SEQ ID NO: 433110 - DNA, 19 bp, Homo sapiens
  siRNA target sequence for ZNF233 (NM_181756.1,1412-1430).
gaagtaagtgacaggatat

SEQ ID NO: 433111 - DNA, 19 bp, Homo sapiens
  siRNA target sequence for ARP10 (NM_181773.2,85-103).
gaaacattccgcttacagt

SEQ ID NO: 433112 - DNA, 19 bp, Homo sapiens
  siRNA target sequence for ARP10 (NM_181773.2,89-107).
cattccgcttacagtttaa

SEQ ID NO: 433113 - DNA, 19 bp, Homo sapiens
  siRNA target sequence for ARP10 (NM_181773.2,94-112).
cgcttacagtttaacaaca

SEQ ID NO: 433114 - DNA, 19 bp, Homo sapiens
  siRNA target sequence for ARP10 (NM_181773.2,119-137).
gcctcagaaggccttacta

SEQ ID NO: 433115 - DNA, 19 bp, Homo sapiens
  siRNA target sequence for ARP10 (NM_181773.2,143-161).
ggaaggccctcttgtgtta

SEQ ID NO: 433116 - DNA, 19 bp, Homo sapiens
  siRNA target sequence for ARP10 (NM_181773.2,189-207).
gcccacgagaggctacttt

SEQ ID NO: 433117 - DNA, 19 bp, Homo sapiens
  siRNA target sequence for ARP10 (NM_181773.2,191-209).
ccacgagaggctactttga

SEQ ID NO: 433118 - DNA, 19 bp, Homo sapiens
  siRNA target sequence for ARP10 (NM_181773.2,224-242).
gccatgcagaaatttgctt

SEQ ID NO: 433119 - DNA, 19 bp, Homo sapiens
  siRNA target sequence for ARP10 (NM_181773.2,225-243).
ccatgcagaaatttgcttt

SEQ ID NO: 433120 - DNA, 19 bp, Homo sapiens
  siRNA target sequence for ARP10 (NM_181773.2,332-350).
cctgggagctggttgactt

SEQ ID NO: 433121 - DNA, 19 bp, Homo sapiens
  siRNA target sequence for ARP10 (NM_181773.2,533-551).
ccttcaacccctataagat

SEQ ID NO: 433122 - DNA, 19 bp, Homo sapiens
  siRNA target sequence for ARP10 (NM_181773.2,537-555).
caacccctataagatgtta

SEQ ID NO: 433123 - DNA, 19 bp, Homo sapiens
  siRNA target sequence for ARP10 (NM_181773.2,589-607).
cgacggcttgagaggataa

SEQ ID NO: 433124 - DNA, 19 bp, Homo sapiens
  siRNA target sequence for ARP10 (NM_181773.2,590-608).
gacggcttgagaggataaa

SEQ ID NO: 433125 - DNA, 19 bp, Homo sapiens
  siRNA target sequence for ARP10 (NM_181773.2,593-611).
ggcttgagaggataaagca

SEQ ID NO: 433126 - DNA, 19 bp, Homo sapiens
  siRNA target sequence for SLC36A3 (NM_181774.1,358-376).
ggactatcgatgatgcaaa

SEQ ID NO: 433127 - DNA, 19 bp, Homo sapiens
  siRNA target sequence for SLC36A3 (NM_181774.1,645-663).
cactgtcagcttcttatta

SEQ ID NO: 433128 - DNA, 19 bp, Homo sapiens
  siRNA target sequence for SLC36A3 (NM_181774.1,649-667).
gtcagcttcttattagtca

SEQ ID NO: 433129 - DNA, 19 bp, Homo sapiens
  siRNA target sequence for SLC36A3 (NM_181774.1,742-760).
cacgtgacctccaacatct

SEQ ID NO: 433130 - DNA, 19 bp, Homo sapiens
  siRNA target sequence for SLC36A3 (NM_181774.1,790-808).
cccatcctggacattcgtt

SEQ ID NO: 433131 - DNA, 19 bp, Homo sapiens
  siRNA target sequence for SLC36A3 (NM_181774.1,791-809).
ccatcctggacattcgttt

SEQ ID NO: 433132 - DNA, 19 bp, Homo sapiens
  siRNA target sequence for SLC36A3 (NM_181774.1,796-814).
ctggacattcgtttctaca

SEQ ID NO: 433133 - DNA, 19 bp, Homo sapiens
  siRNA target sequence for SLC36A3 (NM_181774.1,805-823).
cgtttctacatgctgataa

SEQ ID NO: 433134 - DNA, 19 bp, Homo sapiens
  siRNA target sequence for SLC36A3 (NM_181774.1,1009-1027).
ggtacagccatcttcacat

SEQ ID NO: 433135 - DNA, 19 bp, Homo sapiens
  siRNA target sequence for SLC36A3 (NM_181774.1,1010-1028).
gtacagccatcttcacatt

SEQ ID NO: 433136 - DNA, 19 bp, Homo sapiens
  siRNA target sequence for SLC36A3 (NM_181774.1,1145-1163).
cactgggctacatgaagtt

SEQ ID NO: 433137 - DNA, 19 bp, Homo sapiens
  siRNA target sequence for SLC36A3 (NM_181774.1,1326-1344).
gagctgggcactgtttgta

SEQ ID NO: 433138 - DNA, 19 bp, Homo sapiens
  siRNA target sequence for SLC36A3 (NM_181774.1,1480-1498).
gagatcgtcatcttttact

SEQ ID NO: 433139 - DNA, 19 bp, Homo sapiens
  siRNA target sequence for SLC36A3 (NM_181774.1,1551-1569).
gggccttttagggtgtata

SEQ ID NO: 433140 - DNA, 19 bp, Homo sapiens
  siRNA target sequence for SLC36A3 (NM_181774.1,1552-1570).
ggccttttagggtgtatat

SEQ ID NO: 433141 - DNA, 19 bp, Homo sapiens
  siRNA target sequence for DKFZp434G0625 (NM_181775.2,479-497).
ccagaagcagcggtcattt

SEQ ID NO: 433142 - DNA, 19 bp, Homo sapiens
  siRNA target sequence for DKFZp434G0625 (NM_181775.2,576-594).
gccgtcaatcggatttaca

SEQ ID NO: 433143 - DNA, 19 bp, Homo sapiens
  siRNA target sequence for DKFZp434G0625 (NM_181775.2,577-595).
ccgtcaatcggatttacaa

SEQ ID NO: 433144 - DNA, 19 bp, Homo sapiens
  siRNA target sequence for DKFZp434G0625 (NM_181775.2,821-839).
gctgggggagccttatcat

SEQ ID NO: 433145 - DNA, 19 bp, Homo sapiens
  siRNA target sequence for DKFZp434G0625 (NM_181775.2,822-840).
ctgggggagccttatcata

SEQ ID NO: 433146 - DNA, 19 bp, Homo sapiens
  siRNA target sequence for DKFZp434G0625 (NM_181775.2,825-843).
ggggagccttatcataaga

SEQ ID NO: 433147 - DNA, 19 bp, Homo sapiens
  siRNA target sequence for DKFZp434G0625 (NM_181775.2,826-844).
gggagccttatcataagaa

SEQ ID NO: 433148 - DNA, 19 bp, Homo sapiens
  siRNA target sequence for DKFZp434G0625 (NM_181775.2,945-963).
gatgggaagcccgagtatt

SEQ ID NO: 433149 - DNA, 19 bp, Homo sapiens
  siRNA target sequence for DKFZp434G0625 (NM_181775.2,981-999).
cggaaactgaccaagaact

SEQ ID NO: 433150 - DNA, 19 bp, Homo sapiens
  siRNA target sequence for DKFZp434G0625 (NM_181775.2,1021-1039).
cgtacgtcttccatgatga

SEQ ID NO: 433151 - DNA, 19 bp, Homo sapiens
  siRNA target sequence for DKFZp434G0625 (NM_181775.2,1040-1058).
gttcgtggcctcgatgatt

SEQ ID NO: 433152 - DNA, 19 bp, Homo sapiens
  siRNA target sequence for DKFZp434G0625 (NM_181775.2,1044-1062).
gtggcctcgatgattaaga

SEQ ID NO: 433153 - DNA, 19 bp, Homo sapiens
  siRNA target sequence for DKFZp434G0625 (NM_181775.2,1482-1500).
gagcggctgcagtcttgtt

SEQ ID NO: 433154 - DNA, 19 bp, Homo sapiens
  siRNA target sequence for DKFZp434G0625 (NM_181775.2,1559-1577).
cagtgcgctcttaaccatt

SEQ ID NO: 433155 - DNA, 19 bp, Homo sapiens
  siRNA target sequence for DKFZp434G0625 (NM_181775.2,1625-1643).
cgacatggtgcgtggaatt

SEQ ID NO: 433156 - DNA, 19 bp, Homo sapiens
  siRNA target sequence for DKFZp434G0625 (NM_181775.2,1675-1693).
cgtctgtcatcgcatatgt

SEQ ID NO: 433157 - DNA, 19 bp, Homo sapiens
  siRNA target sequence for DKFZp434G0625 (NM_181775.2,1678-1696).
ctgtcatcgcatatgtcta

SEQ ID NO: 433158 - DNA, 19 bp, Homo sapiens
  siRNA target sequence for DKFZp434G0625 (NM_181775.2,1808-1826).
cccacctggggcgaacatt

SEQ ID NO: 433159 - DNA, 19 bp, Homo sapiens
  siRNA target sequence for DKFZp434G0625 (NM_181775.2,1812-1830).
cctggggcgaacattgctt

SEQ ID NO: 433160 - DNA, 19 bp, Homo sapiens
  siRNA target sequence for DKFZp434G0625 (NM_181775.2,1870-1888).
gtcacaaagcaatatcaga

SEQ ID NO: 433161 - DNA, 19 bp, Homo sapiens
  siRNA target sequence for SLC36A2 (NM_181776.1,131-149).
gggagccgttgccatcaaa

SEQ ID NO: 433162 - DNA, 19 bp, Homo sapiens
  siRNA target sequence for SLC36A2 (NM_181776.1,132-150).
ggagccgttgccatcaaat

SEQ ID NO: 433163 - DNA, 19 bp, Homo sapiens
  siRNA target sequence for SLC36A2 (NM_181776.1,133-151).
gagccgttgccatcaaatt

SEQ ID NO: 433164 - DNA, 19 bp, Homo sapiens
  siRNA target sequence for SLC36A2 (NM_181776.1,136-154).
ccgttgccatcaaattgga

SEQ ID NO: 433165 - DNA, 19 bp, Homo sapiens
  siRNA target sequence for SLC36A2 (NM_181776.1,142-160).
ccatcaaattggaccttat

SEQ ID NO: 433166 - DNA, 19 bp, Homo sapiens
  siRNA target sequence for SLC36A2 (NM_181776.1,169-187).
ctgaaagtgccaagaagtt

SEQ ID NO: 433167 - DNA, 19 bp, Homo sapiens
  siRNA target sequence for SLC36A2 (NM_181776.1,421-439).
gtgcccagcgcttctgtaa

SEQ ID NO: 433168 - DNA, 19 bp, Homo sapiens
  siRNA target sequence for SLC36A2 (NM_181776.1,423-441).
gcccagcgcttctgtaaga

SEQ ID NO: 433169 - DNA, 19 bp, Homo sapiens
  siRNA target sequence for SLC36A2 (NM_181776.1,545-563).
cgtgagcttcttccttatt

SEQ ID NO: 433170 - DNA, 19 bp, Homo sapiens
  siRNA target sequence for SLC36A2 (NM_181776.1,546-564).
gtgagcttcttccttatta

SEQ ID NO: 433171 - DNA, 19 bp, Homo sapiens
  siRNA target sequence for SLC36A2 (NM_181776.1,627-645).
gtggaagctgttaatagca

SEQ ID NO: 433172 - DNA, 19 bp, Homo sapiens
  siRNA target sequence for SLC36A2 (NM_181776.1,809-827).
cagcttggtcatcatcata

SEQ ID NO: 433173 - DNA, 19 bp, Homo sapiens
  siRNA target sequence for SLC36A2 (NM_181776.1,902-920).
cttcggaacagccattttt

SEQ ID NO: 433174 - DNA, 19 bp, Homo sapiens
  siRNA target sequence for SLC36A2 (NM_181776.1,905-923).
cggaacagccattttttct

SEQ ID NO: 433175 - DNA, 19 bp, Homo sapiens
  siRNA target sequence for SLC36A2 (NM_181776.1,1068-1086).
gacatcaaggccagcataa

SEQ ID NO: 433176 - DNA, 19 bp, Homo sapiens
  siRNA target sequence for BTLA (NM_181780.1,98-116).
catgtgatgtacagcttta

SEQ ID NO: 433177 - DNA, 19 bp, Homo sapiens
  siRNA target sequence for BTLA (NM_181780.1,152-170).
gagatccctttgaactaga

SEQ ID NO: 433178 - DNA, 19 bp, Homo sapiens
  siRNA target sequence for BTLA (NM_181780.1,154-172).
gatccctttgaactagaat

SEQ ID NO: 433179 - DNA, 19 bp, Homo sapiens
  siRNA target sequence for BTLA (NM_181780.1,166-184).
ctagaatgccctgtgaaat

SEQ ID NO: 433180 - DNA, 19 bp, Homo sapiens
  siRNA target sequence for BTLA (NM_181780.1,216-234).
caagctcaatggaacaaca

SEQ ID NO: 433181 - DNA, 19 bp, Homo sapiens
  siRNA target sequence for BTLA (NM_181780.1,233-251).
catgtgtaaaacttgaaga

SEQ ID NO: 433182 - DNA, 19 bp, Homo sapiens
  siRNA target sequence for BTLA (NM_181780.1,339-357).
ccgctgttctgcaaatttt

SEQ ID NO: 433183 - DNA, 19 bp, Homo sapiens
  siRNA target sequence for BTLA (NM_181780.1,378-396).
ccactcaacaactctttat

SEQ ID NO: 433184 - DNA, 19 bp, Homo sapiens
  siRNA target sequence for BTLA (NM_181780.1,485-503).
ggggattgcctctactcat

SEQ ID NO: 433185 - DNA, 19 bp, Homo sapiens
  siRNA target sequence for BTLA (NM_181780.1,570-588).
cacagcaggaagggaaatt

SEQ ID NO: 433186 - DNA, 19 bp, Homo sapiens
  siRNA target sequence for BTLA (NM_181780.1,628-646).
gcaagcaccaggcaaaatt

SEQ ID NO: 433187 - DNA, 19 bp, Homo sapiens
  siRNA target sequence for BTLA (NM_181780.1,709-727).
caggaagggtctgaagttt

SEQ ID NO: 433188 - DNA, 19 bp, Homo sapiens
  siRNA target sequence for BTLA (NM_181780.1,757-775).
ccaggcattgtttatgctt

SEQ ID NO: 433189 - DNA, 19 bp, Homo sapiens
  siRNA target sequence for BTLA (NM_181780.1,773-791).
cttccctgaaccattctgt

SEQ ID NO: 433190 - DNA, 19 bp, Homo sapiens
  siRNA target sequence for BTLA (NM_181780.1,777-795).
cctgaaccattctgtcatt

SEQ ID NO: 433191 - DNA, 19 bp, Homo sapiens
  siRNA target sequence for BTLA (NM_181780.1,832-850).
gcaccaacagaatatgcat

SEQ ID NO: 433192 - DNA, 19 bp, Homo sapiens
  siRNA target sequence for FLJ20403 (NM_181781.2,316-334).
gacccggaattgttgttga

SEQ ID NO: 433193 - DNA, 19 bp, Homo sapiens
  siRNA target sequence for FLJ20403 (NM_181781.2,319-337).
ccggaattgttgttgacta

SEQ ID NO: 433194 - DNA, 19 bp, Homo sapiens
  siRNA target sequence for FLJ20403 (NM_181781.2,320-338).
cggaattgttgttgactat

SEQ ID NO: 433195 - DNA, 19 bp, Homo sapiens
  siRNA target sequence for FLJ20403 (NM_181781.2,327-345).
gttgttgactatcaaaaca

SEQ ID NO: 433196 - DNA, 19 bp, Homo sapiens
  siRNA target sequence for FLJ20403 (NM_181781.2,333-351).
gactatcaaaacaaatcca

SEQ ID NO: 433197 - DNA, 19 bp, Homo sapiens
  siRNA target sequence for FLJ20403 (NM_181781.2,369-387).
gctgcaagaggaataaaga

SEQ ID NO: 433198 - DNA, 19 bp, Homo sapiens
  siRNA target sequence for FLJ20403 (NM_181781.2,415-433).
ccagtggaacctttatcaa

SEQ ID NO: 433199 - DNA, 19 bp, Homo sapiens
  siRNA target sequence for FLJ20403 (NM_181781.2,418-436).
gtggaacctttatcaagaa

SEQ ID NO: 433200 - DNA, 19 bp, Homo sapiens
  siRNA target sequence for FLJ20403 (NM_181781.2,434-452).
gaaacccaaactagcaaaa

SEQ ID NO: 433201 - DNA, 19 bp, Homo sapiens
  siRNA target sequence for FLJ20403 (NM_181781.2,439-457).
ccaaactagcaaaacctat

SEQ ID NO: 433202 - DNA, 19 bp, Homo sapiens
  siRNA target sequence for FLJ20403 (NM_181781.2,464-482).
gataagcctcagcaaatca

SEQ ID NO: 433203 - DNA, 19 bp, Homo sapiens
  siRNA target sequence for FLJ20403 (NM_181781.2,533-551).
ggctcggcgagagaaacaa

SEQ ID NO: 433204 - DNA, 19 bp, Homo sapiens
  siRNA target sequence for FLJ20403 (NM_181781.2,534-552).
gctcggcgagagaaacaaa

SEQ ID NO: 433205 - DNA, 19 bp, Homo sapiens
  siRNA target sequence for FLJ20403 (NM_181781.2,659-677).
gcatctggaaagttcttca

SEQ ID NO: 433206 - DNA, 19 bp, Homo sapiens
  siRNA target sequence for FLJ20403 (NM_181781.2,681-699).
caggaaacattagatcata

SEQ ID NO: 433207 - DNA, 19 bp, Homo sapiens
  siRNA target sequence for FLJ20403 (NM_181781.2,751-769).
gtatggtgaataaattcaa

SEQ ID NO: 433208 - DNA, 19 bp, Homo sapiens
  siRNA target sequence for FLJ20403 (NM_181781.2,853-871).
ctgtagatgatcacatgat

SEQ ID NO: 433209 - DNA, 19 bp, Homo sapiens
  siRNA target sequence for FLJ20403 (NM_181781.2,892-910).
gcagcgcttgcagtgttta

SEQ ID NO: 433210 - DNA, 19 bp, Homo sapiens
  siRNA target sequence for FLJ20403 (NM_181781.2,893-911).
cagcgcttgcagtgtttat

SEQ ID NO: 433211 - DNA, 19 bp, Homo sapiens
  siRNA target sequence for FLJ20403 (NM_181781.2,931-949).
cagttcagcagcacttaaa

SEQ ID NO: 433212 - DNA, 19 bp, Homo sapiens
  siRNA target sequence for FLJ20403 (NM_181781.2,944-962).
cttaaaatctcctgatcat

SEQ ID NO: 433213 - DNA, 19 bp, Homo sapiens
  siRNA target sequence for FLJ20403 (NM_181781.2,978-996).
gcttataaggaacaaataa

SEQ ID NO: 433214 - DNA, 19 bp, Homo sapiens
  siRNA target sequence for FLJ20403 (NM_181781.2,1013-1031).
gactgctacaagcatttta

SEQ ID NO: 433215 - DNA, 19 bp, Homo sapiens
  siRNA target sequence for FLJ20403 (NM_181781.2,1049-1067).
ggcgcgatatgaacgtttt

SEQ ID NO: 433216 - DNA, 19 bp, Homo sapiens
  siRNA target sequence for FLJ20403 (NM_181781.2,1051-1069).
cgcgatatgaacgttttgt

SEQ ID NO: 433217 - DNA, 19 bp, Homo sapiens
  siRNA target sequence for FLJ20403 (NM_181781.2,1052-1070).
gcgatatgaacgttttgtt

SEQ ID NO: 433218 - DNA, 19 bp, Homo sapiens
  siRNA target sequence for FLJ20403 (NM_181781.2,1053-1071).
cgatatgaacgttttgtta

SEQ ID NO: 433219 - DNA, 19 bp, Homo sapiens
  siRNA target sequence for FLJ20403 (NM_181781.2,1068-1086).
gttaagggtgagaatcctt

SEQ ID NO: 433220 - DNA, 19 bp, Homo sapiens
  siRNA target sequence for FLJ20403 (NM_181781.2,1145-1163).
gaagattgatgaacctatt

SEQ ID NO: 433221 - DNA, 19 bp, Homo sapiens
  siRNA target sequence for FLJ90492 (NM_181783.1,236-254).
gtggttactgcctgctatt

SEQ ID NO: 433222 - DNA, 19 bp, Homo sapiens
  siRNA target sequence for FLJ90492 (NM_181783.1,239-257).
gttactgcctgctattgga

SEQ ID NO: 433223 - DNA, 19 bp, Homo sapiens
  siRNA target sequence for FLJ90492 (NM_181783.1,297-315).
caatactggataacaaaga

SEQ ID NO: 433224 - DNA, 19 bp, Homo sapiens
  siRNA target sequence for FLJ90492 (NM_181783.1,327-345).
ctacacctttaaaaacttt

SEQ ID NO: 433225 - DNA, 19 bp, Homo sapiens
  siRNA target sequence for FLJ90492 (NM_181783.1,342-360).
ctttatttcaaaatgactt

SEQ ID NO: 433226 - DNA, 19 bp, Homo sapiens
  siRNA target sequence for FLJ90492 (NM_181783.1,397-415).
gtcttaccgtcccttaaca

SEQ ID NO: 433227 - DNA, 19 bp, Homo sapiens
  siRNA target sequence for FLJ90492 (NM_181783.1,399-417).
cttaccgtcccttaacagt

SEQ ID NO: 433228 - DNA, 19 bp, Homo sapiens
  siRNA target sequence for FLJ90492 (NM_181783.1,404-422).
cgtcccttaacagtattga

SEQ ID NO: 433229 - DNA, 19 bp, Homo sapiens
  siRNA target sequence for FLJ90492 (NM_181783.1,421-439).
gacatttcgcttaaattat

SEQ ID NO: 433230 - DNA, 19 bp, Homo sapiens
  siRNA target sequence for FLJ90492 (NM_181783.1,449-467).
gaactaaaaccaatgtcat

SEQ ID NO: 433231 - DNA, 19 bp, Homo sapiens
  siRNA target sequence for FLJ90492 (NM_181783.1,465-483).
catatcatctcctgaatat

SEQ ID NO: 433232 - DNA, 19 bp, Homo sapiens
  siRNA target sequence for FLJ90492 (NM_181783.1,494-512).
gctgtggttagtgtgatat

SEQ ID NO: 433233 - DNA, 19 bp, Homo sapiens
  siRNA target sequence for FLJ90492 (NM_181783.1,515-533).
ctcaaagtatgcaaacttt

SEQ ID NO: 433234 - DNA, 19 bp, Homo sapiens
  siRNA target sequence for FLJ90492 (NM_181783.1,634-652).
gtcatctatcttttttcta

SEQ ID NO: 433235 - DNA, 19 bp, Homo sapiens
  siRNA target sequence for FLJ90492 (NM_181783.1,664-682).
gtcatataccagatcaaaa

SEQ ID NO: 433236 - DNA, 19 bp, Homo sapiens
  siRNA target sequence for FLJ90492 (NM_181783.1,689-707).
gacaattccataatatgga

SEQ ID NO: 433237 - DNA, 19 bp, Homo sapiens
  siRNA target sequence for FLJ90492 (NM_181783.1,734-752).
gtggctgttgcaacattat

SEQ ID NO: 433238 - DNA, 19 bp, Homo sapiens
  siRNA target sequence for FLJ90492 (NM_181783.1,736-754).
ggctgttgcaacattatgt

SEQ ID NO: 433239 - DNA, 19 bp, Homo sapiens
  siRNA target sequence for FLJ90492 (NM_181783.1,737-755).
gctgttgcaacattatgta

SEQ ID NO: 433240 - DNA, 19 bp, Homo sapiens
  siRNA target sequence for FLJ90492 (NM_181783.1,738-756).
ctgttgcaacattatgtaa

SEQ ID NO: 433241 - DNA, 19 bp, Homo sapiens
  siRNA target sequence for FLJ90492 (NM_181783.1,816-834).
ggtatactttgccattact

SEQ ID NO: 433242 - DNA, 19 bp, Homo sapiens
  siRNA target sequence for FLJ90492 (NM_181783.1,817-835).
gtatactttgccattacta

SEQ ID NO: 433243 - DNA, 19 bp, Homo sapiens
  siRNA target sequence for FLJ90492 (NM_181783.1,840-858).
ctactgctggacagtttct

SEQ ID NO: 433244 - DNA, 19 bp, Homo sapiens
  siRNA target sequence for FLJ90492 (NM_181783.1,859-877).
ccgtggaaagggtagcatt

SEQ ID NO: 433245 - DNA, 19 bp, Homo sapiens
  siRNA target sequence for FLJ90492 (NM_181783.1,870-888).
gtagcattccattttctat

SEQ ID NO: 433246 - DNA, 19 bp, Homo sapiens
  siRNA target sequence for FLJ90492 (NM_181783.1,893-911).
cagacactagtaaaactca

SEQ ID NO: 433247 - DNA, 19 bp, Homo sapiens
  siRNA target sequence for FLJ90492 (NM_181783.1,899-917).
ctagtaaaactcattgtct

SEQ ID NO: 433248 - DNA, 19 bp, Homo sapiens
  siRNA target sequence for FLJ90492 (NM_181783.1,927-945).
gtacattattacttgttgt

SEQ ID NO: 433249 - DNA, 19 bp, Homo sapiens
  siRNA target sequence for FLJ90492 (NM_181783.1,930-948).
cattattacttgttgtgat

SEQ ID NO: 433250 - DNA, 19 bp, Homo sapiens
  siRNA target sequence for FLJ90492 (NM_181783.1,980-998).
gtattcaccaggtttgata

SEQ ID NO: 433251 - DNA, 19 bp, Homo sapiens
  siRNA target sequence for FLJ90492 (NM_181783.1,1022-1040).
cctacaaggcaactaactt

SEQ ID NO: 433252 - DNA, 19 bp, Homo sapiens
  siRNA target sequence for FLJ90492 (NM_181783.1,1023-1041).
ctacaaggcaactaacttt

SEQ ID NO: 433253 - DNA, 19 bp, Homo sapiens
  siRNA target sequence for FLJ90492 (NM_181783.1,1026-1044).
caaggcaactaacttttaa

SEQ ID NO: 433254 - DNA, 19 bp, Homo sapiens
  siRNA target sequence for FLJ90492 (NM_181783.1,1060-1078).
gaatgcttggttgttatta

SEQ ID NO: 433255 - DNA, 19 bp, Homo sapiens
  siRNA target sequence for FLJ90492 (NM_181783.1,1105-1123).
gaccatgggaacaatacca

SEQ ID NO: 433256 - DNA, 19 bp, Homo sapiens
  siRNA target sequence for FLJ90492 (NM_181783.1,1111-1129).
gggaacaataccacttata

SEQ ID NO: 433257 - DNA, 19 bp, Homo sapiens
  siRNA target sequence for FLJ90492 (NM_181783.1,1122-1140).
cacttatagagtcattact

SEQ ID NO: 433258 - DNA, 19 bp, Homo sapiens
  siRNA target sequence for FLJ90492 (NM_181783.1,1132-1150).
gtcattactagatattcga

SEQ ID NO: 433259 - DNA, 19 bp, Homo sapiens
  siRNA target sequence for FLJ90492 (NM_181783.1,1184-1202).
gggatgttgggagtattca

SEQ ID NO: 433260 - DNA, 19 bp, Homo sapiens
  siRNA target sequence for FLJ90492 (NM_181783.1,1193-1211).
ggagtattcagtatcagat

SEQ ID NO: 433261 - DNA, 19 bp, Homo sapiens
  siRNA target sequence for FLJ90492 (NM_181783.1,1196-1214).
gtattcagtatcagatact

SEQ ID NO: 433262 - DNA, 19 bp, Homo sapiens
  siRNA target sequence for FLJ90492 (NM_181783.1,1432-1450).
gatactcactcattcctta

SEQ ID NO: 433263 - DNA, 19 bp, Homo sapiens
  siRNA target sequence for FLJ90492 (NM_181783.1,1470-1488).
gggattgggagtctgaata

SEQ ID NO: 433264 - DNA, 19 bp, Homo sapiens
  siRNA target sequence for FLJ90492 (NM_181783.1,1503-1521).
cagccttgaaggtaaataa

SEQ ID NO: 433265 - DNA, 19 bp, Homo sapiens
  siRNA target sequence for FLJ90492 (NM_181783.1,1576-1594).
ctttgagagagctttgaaa

SEQ ID NO: 433266 - DNA, 19 bp, Homo sapiens
  siRNA target sequence for FLJ90492 (NM_181783.1,1688-1706).
gctgaagaatcttacatga

SEQ ID NO: 433267 - DNA, 19 bp, Homo sapiens
  siRNA target sequence for FLJ90492 (NM_181783.1,1720-1738).
gatgcctcaaattattcct

SEQ ID NO: 433268 - DNA, 19 bp, Homo sapiens
  siRNA target sequence for FLJ90492 (NM_181783.1,1764-1782).
cccctaaccacctaaatgt

SEQ ID NO: 433269 - DNA, 19 bp, Homo sapiens
  siRNA target sequence for FLJ90492 (NM_181783.1,1765-1783).
ccctaaccacctaaatgtt

SEQ ID NO: 433270 - DNA, 19 bp, Homo sapiens
  siRNA target sequence for FLJ90492 (NM_181783.1,1766-1784).
cctaaccacctaaatgttt

SEQ ID NO: 433271 - DNA, 19 bp, Homo sapiens
  siRNA target sequence for FLJ90492 (NM_181783.1,1767-1785).
ctaaccacctaaatgttta

SEQ ID NO: 433272 - DNA, 19 bp, Homo sapiens
  siRNA target sequence for FLJ90492 (NM_181783.1,1772-1790).
cacctaaatgtttatatca

SEQ ID NO: 433273 - DNA, 19 bp, Homo sapiens
  siRNA target sequence for FLJ90492 (NM_181783.1,1802-1820).
ctgatccgagcaaatgagt

SEQ ID NO: 433274 - DNA, 19 bp, Homo sapiens
  siRNA target sequence for FLJ90492 (NM_181783.1,1843-1861).
gctgtaccgtcaagcaata

SEQ ID NO: 433275 - DNA, 19 bp, Homo sapiens
  siRNA target sequence for FLJ90492 (NM_181783.1,1863-1881).
gcatgaggcccgacttcaa

SEQ ID NO: 433276 - DNA, 19 bp, Homo sapiens
  siRNA target sequence for FLJ90492 (NM_181783.1,1876-1894).
cttcaagcaggcttacatt

SEQ ID NO: 433277 - DNA, 19 bp, Homo sapiens
  siRNA target sequence for FLJ90492 (NM_181783.1,1959-1977).
cactagagctggacagaaa

SEQ ID NO: 433278 - DNA, 19 bp, Homo sapiens
  siRNA target sequence for FLJ90492 (NM_181783.1,2004-2022).
caattgtacatattgaact

SEQ ID NO: 433279 - DNA, 19 bp, Homo sapiens
  siRNA target sequence for FLJ90492 (NM_181783.1,2041-2059).
cctaaaaaactttaatcgt

SEQ ID NO: 433280 - DNA, 19 bp, Homo sapiens
  siRNA target sequence for FLJ90492 (NM_181783.1,2060-2078).
gctctggaactaaatccaa

SEQ ID NO: 433281 - DNA, 19 bp, Homo sapiens
  siRNA target sequence for FLJ90492 (NM_181783.1,2150-2168).
gctagaaaacgacttctaa

SEQ ID NO: 433282 - DNA, 19 bp, Homo sapiens
  siRNA target sequence for FLJ90492 (NM_181783.1,2154-2172).
gaaaacgacttctaagtta

SEQ ID NO: 433283 - DNA, 19 bp, Homo sapiens
  siRNA target sequence for FLJ90492 (NM_181783.1,2159-2177).
cgacttctaagttatataa

SEQ ID NO: 433284 - DNA, 19 bp, Homo sapiens
  siRNA target sequence for FLJ90492 (NM_181783.1,2221-2239).
gcttgccatggatgacaaa

SEQ ID NO: 433285 - DNA, 19 bp, Homo sapiens
  siRNA target sequence for FLJ90492 (NM_181783.1,2252-2270).
gcagagatttggatgaaga

SEQ ID NO: 433286 - DNA, 19 bp, Homo sapiens
  siRNA target sequence for FLJ90492 (NM_181783.1,2369-2387).
gaggagttactcagatact

SEQ ID NO: 433287 - DNA, 19 bp, Homo sapiens
  siRNA target sequence for FLJ90492 (NM_181783.1,2382-2400).
gatactaccctgatcatat

SEQ ID NO: 433288 - DNA, 19 bp, Homo sapiens
  siRNA target sequence for FLJ90492 (NM_181783.1,2396-2414).
catatcaagggcctcattt

SEQ ID NO: 433289 - DNA, 19 bp, Homo sapiens
  siRNA target sequence for FLJ90492 (NM_181783.1,2447-2465).
gatatactaggagcaaaaa

SEQ ID NO: 433290 - DNA, 19 bp, Homo sapiens
  siRNA target sequence for FLJ90492 (NM_181783.1,2587-2605).
ggcattagcaccacatgaa

SEQ ID NO: 433291 - DNA, 19 bp, Homo sapiens
  siRNA target sequence for FLJ90492 (NM_181783.1,2594-2612).
gcaccacatgaagaatata

SEQ ID NO: 433292 - DNA, 19 bp, Homo sapiens
  siRNA target sequence for FLJ90492 (NM_181783.1,2595-2613).
caccacatgaagaatatat

SEQ ID NO: 433293 - DNA, 19 bp, Homo sapiens
  siRNA target sequence for FLJ90492 (NM_181783.1,2649-2667).
cctcatctagttttataga

SEQ ID NO: 433294 - DNA, 19 bp, Homo sapiens
  siRNA target sequence for FLJ90492 (NM_181783.1,2677-2695).
cccaaccagtaagatttca

SEQ ID NO: 433295 - DNA, 19 bp, Homo sapiens
  siRNA target sequence for FLJ90492 (NM_181783.1,2751-2769).
ccagacaaacacaaatagt

SEQ ID NO: 433296 - DNA, 19 bp, Homo sapiens
  siRNA target sequence for FLJ90492 (NM_181783.1,2802-2820).
ccaacaaacaattaggaaa

SEQ ID NO: 433297 - DNA, 19 bp, Homo sapiens
  siRNA target sequence for FLJ90492 (NM_181783.1,2858-2876).
gacatcaaagaaattgaga

SEQ ID NO: 433298 - DNA, 19 bp, Homo sapiens
  siRNA target sequence for FLJ90492 (NM_181783.1,2906-2924).
gaagagattgaacgtattt

SEQ ID NO: 433299 - DNA, 19 bp, Homo sapiens
  siRNA target sequence for SPRED2 (NM_181784.1,215-233).
ccagacgatgacagctata

SEQ ID NO: 433300 - DNA, 19 bp, Homo sapiens
  siRNA target sequence for SPRED2 (NM_181784.1,312-330).
gtcgcgtcggggtctgtaa

SEQ ID NO: 433301 - DNA, 19 bp, Homo sapiens
  siRNA target sequence for SPRED2 (NM_181784.1,353-371).
ggacgaagcggctttctca

SEQ ID NO: 433302 - DNA, 19 bp, Homo sapiens
  siRNA target sequence for SPRED2 (NM_181784.1,400-418).
ggtggtattggaatgctat

SEQ ID NO: 433303 - DNA, 19 bp, Homo sapiens
  siRNA target sequence for SPRED2 (NM_181784.1,403-421).
ggtattggaatgctatgta

SEQ ID NO: 433304 - DNA, 19 bp, Homo sapiens
  siRNA target sequence for SPRED2 (NM_181784.1,442-460).
caaagccaatccaacgttt

SEQ ID NO: 433305 - DNA, 19 bp, Homo sapiens
  siRNA target sequence for SPRED2 (NM_181784.1,464-482).
cactggaaggtcgataata

SEQ ID NO: 433306 - DNA, 19 bp, Homo sapiens
  siRNA target sequence for SPRED2 (NM_181784.1,468-486).
ggaaggtcgataataggaa

SEQ ID NO: 433307 - DNA, 19 bp, Homo sapiens
  siRNA target sequence for SPRED2 (NM_181784.1,472-490).
ggtcgataataggaagttt

SEQ ID NO: 433308 - DNA, 19 bp, Homo sapiens
  siRNA target sequence for SPRED2 (NM_181784.1,549-567).
caatcgaagaccttataga

SEQ ID NO: 433309 - DNA, 19 bp, Homo sapiens
  siRNA target sequence for SPRED2 (NM_181784.1,559-577).
ccttatagaaggttcaaca

SEQ ID NO: 433310 - DNA, 19 bp, Homo sapiens
  siRNA target sequence for SPRED2 (NM_181784.1,585-603).
cttccaccatccataatga

SEQ ID NO: 433311 - DNA, 19 bp, Homo sapiens
  siRNA target sequence for SPRED2 (NM_181784.1,617-635).
gatgatgacgtttttacaa

SEQ ID NO: 433312 - DNA, 19 bp, Homo sapiens
  siRNA target sequence for SPRED2 (NM_181784.1,711-729).
gtgagcaccggaggattta

SEQ ID NO: 433313 - DNA, 19 bp, Homo sapiens
  siRNA target sequence for SPRED2 (NM_181784.1,713-731).
gagcaccggaggatttata

SEQ ID NO: 433314 - DNA, 19 bp, Homo sapiens
  siRNA target sequence for SPRED2 (NM_181784.1,974-992).
cccaagcatgactacaact

SEQ ID NO: 433315 - DNA, 19 bp, Homo sapiens
  siRNA target sequence for SPRED2 (NM_181784.1,975-993).
ccaagcatgactacaacta

SEQ ID NO: 433316 - DNA, 19 bp, Homo sapiens
  siRNA target sequence for SPRED2 (NM_181784.1,1184-1202).
cccgactccgtgagaactt

SEQ ID NO: 433317 - DNA, 19 bp, Homo sapiens
  siRNA target sequence for LOC283537 (NM_181785.1,393-411).
gcatttgctatgactttga

SEQ ID NO: 433318 - DNA, 19 bp, Homo sapiens
  siRNA target sequence for LOC283537 (NM_181785.1,420-438).
ctgacaacgcaatatgttt

SEQ ID NO: 433319 - DNA, 19 bp, Homo sapiens
  siRNA target sequence for LOC283537 (NM_181785.1,422-440).
gacaacgcaatatgtttat

SEQ ID NO: 433320 - DNA, 19 bp, Homo sapiens
  siRNA target sequence for LOC283537 (NM_181785.1,441-459).
cggagaatatgggaagaaa

SEQ ID NO: 433321 - DNA, 19 bp, Homo sapiens
  siRNA target sequence for LOC283537 (NM_181785.1,462-480).
ggcaactacactttttcat

SEQ ID NO: 433322 - DNA, 19 bp, Homo sapiens
  siRNA target sequence for LOC283537 (NM_181785.1,467-485).
ctacactttttcatctgat

SEQ ID NO: 433323 - DNA, 19 bp, Homo sapiens
  siRNA target sequence for LOC283537 (NM_181785.1,481-499).
ctgatagcaatatttctga

SEQ ID NO: 433324 - DNA, 19 bp, Homo sapiens
  siRNA target sequence for LOC283537 (NM_181785.1,551-569).
gaaaaaagtgtcacgtttt

SEQ ID NO: 433325 - DNA, 19 bp, Homo sapiens
  siRNA target sequence for LOC283537 (NM_181785.1,578-596).
gatggacataagtggatta

SEQ ID NO: 433326 - DNA, 19 bp, Homo sapiens
  siRNA target sequence for LOC283537 (NM_181785.1,581-599).
ggacataagtggattaatt

SEQ ID NO: 433327 - DNA, 19 bp, Homo sapiens
  siRNA target sequence for LOC283537 (NM_181785.1,600-618).
cctggtctagtgtctacat

SEQ ID NO: 433328 - DNA, 19 bp, Homo sapiens
  siRNA target sequence for LOC283537 (NM_181785.1,601-619).
ctggtctagtgtctacatt

SEQ ID NO: 433329 - DNA, 19 bp, Homo sapiens
  siRNA target sequence for LOC283537 (NM_181785.1,603-621).
ggtctagtgtctacattca

SEQ ID NO: 433330 - DNA, 19 bp, Homo sapiens
  siRNA target sequence for LOC283537 (NM_181785.1,604-622).
gtctagtgtctacattcat

SEQ ID NO: 433331 - DNA, 19 bp, Homo sapiens
  siRNA target sequence for LOC283537 (NM_181785.1,639-657).
gatcactacggacgaaaat

SEQ ID NO: 433332 - DNA, 19 bp, Homo sapiens
  siRNA target sequence for LOC283537 (NM_181785.1,649-667).
gacgaaaattccctatgat

SEQ ID NO: 433333 - DNA, 19 bp, Homo sapiens
  siRNA target sequence for LOC283537 (NM_181785.1,651-669).
cgaaaattccctatgattt

SEQ ID NO: 433334 - DNA, 19 bp, Homo sapiens
  siRNA target sequence for LOC283537 (NM_181785.1,694-712).
ccagcgtttggctctgttt

SEQ ID NO: 433335 - DNA, 19 bp, Homo sapiens
  siRNA target sequence for LOC283537 (NM_181785.1,703-721).
ggctctgtttgctttgcta

SEQ ID NO: 433336 - DNA, 19 bp, Homo sapiens
  siRNA target sequence for LOC283537 (NM_181785.1,718-736).
gctattttgcctttccatt

SEQ ID NO: 433337 - DNA, 19 bp, Homo sapiens
  siRNA target sequence for LOC283537 (NM_181785.1,766-784).
gtgcattttgtggcaatta

SEQ ID NO: 433338 - DNA, 19 bp, Homo sapiens
  siRNA target sequence for LOC283537 (NM_181785.1,850-868).
caattcgaatagctatcat

SEQ ID NO: 433339 - DNA, 19 bp, Homo sapiens
  siRNA target sequence for LOC283537 (NM_181785.1,855-873).
cgaatagctatcattgact

SEQ ID NO: 433340 - DNA, 19 bp, Homo sapiens
  siRNA target sequence for LOC283537 (NM_181785.1,906-924).
ctgtcatctggctatttta

SEQ ID NO: 433341 - DNA, 19 bp, Homo sapiens
  siRNA target sequence for LOC283537 (NM_181785.1,942-960).
gagtggtcgtttctaatta

SEQ ID NO: 433342 - DNA, 19 bp, Homo sapiens
  siRNA target sequence for LOC283537 (NM_181785.1,944-962).
gtggtcgtttctaattatt

SEQ ID NO: 433343 - DNA, 19 bp, Homo sapiens
  siRNA target sequence for LOC283537 (NM_181785.1,947-965).
gtcgtttctaattattgct

SEQ ID NO: 433344 - DNA, 19 bp, Homo sapiens
  siRNA target sequence for LOC283537 (NM_181785.1,964-982).
ctgtgtctcttgctgttaa

SEQ ID NO: 433345 - DNA, 19 bp, Homo sapiens
  siRNA target sequence for LOC283537 (NM_181785.1,966-984).
gtgtctcttgctgttaatt

SEQ ID NO: 433346 - DNA, 19 bp, Homo sapiens
  siRNA target sequence for LOC283537 (NM_181785.1,970-988).
ctcttgctgttaatttgat

SEQ ID NO: 433347 - DNA, 19 bp, Homo sapiens
  siRNA target sequence for LOC283537 (NM_181785.1,976-994).
ctgttaatttgatctatat

SEQ ID NO: 433348 - DNA, 19 bp, Homo sapiens
  siRNA target sequence for LOC283537 (NM_181785.1,978-996).
gttaatttgatctatattt

SEQ ID NO: 433349 - DNA, 19 bp, Homo sapiens
  siRNA target sequence for LOC283537 (NM_181785.1,1059-1077).
gaaggcttcaaaaacctat

SEQ ID NO: 433350 - DNA, 19 bp, Homo sapiens
  siRNA target sequence for LOC283537 (NM_181785.1,1074-1092).
ctattttaccgaacttaca

SEQ ID NO: 433351 - DNA, 19 bp, Homo sapiens
  siRNA target sequence for LOC283537 (NM_181785.1,1103-1121).
gaatgcttctggtaagaga

SEQ ID NO: 433352 - DNA, 19 bp, Homo sapiens
  siRNA target sequence for LOC283537 (NM_181785.1,1111-1129).
ctggtaagagacgattttt

SEQ ID NO: 433353 - DNA, 19 bp, Homo sapiens
  siRNA target sequence for LOC283537 (NM_181785.1,1114-1132).
gtaagagacgatttttgct

SEQ ID NO: 433354 - DNA, 19 bp, Homo sapiens
  siRNA target sequence for LOC283537 (NM_181785.1,1150-1168).
cagtaatcacttatttttt

SEQ ID NO: 433355 - DNA, 19 bp, Homo sapiens
  siRNA target sequence for LOC283537 (NM_181785.1,1263-1281).
ggtagtgcctcttttttga

SEQ ID NO: 433356 - DNA, 19 bp, Homo sapiens
  siRNA target sequence for LOC283537 (NM_181785.1,1269-1287).
gcctcttttttgactagtt

SEQ ID NO: 433357 - DNA, 19 bp, Homo sapiens
  siRNA target sequence for LOC283537 (NM_181785.1,1280-1298).
gactagtttcctaggaata

SEQ ID NO: 433358 - DNA, 19 bp, Homo sapiens
  siRNA target sequence for LOC283537 (NM_181785.1,1379-1397).
cgcgtttgccagtacaaca

SEQ ID NO: 433359 - DNA, 19 bp, Homo sapiens
  siRNA target sequence for LOC283537 (NM_181785.1,1390-1408).
gtacaacactgatgatgtt

SEQ ID NO: 433360 - DNA, 19 bp, Homo sapiens
  siRNA target sequence for LOC283537 (NM_181785.1,1433-1451).
cactattgtgccattctct

SEQ ID NO: 433361 - DNA, 19 bp, Homo sapiens
  siRNA target sequence for LOC283537 (NM_181785.1,1452-1470).
gttctacggtccatgttgt

SEQ ID NO: 433362 - DNA, 19 bp, Homo sapiens
  siRNA target sequence for LOC283537 (NM_181785.1,1455-1473).
ctacggtccatgttgtcaa

SEQ ID NO: 433363 - DNA, 19 bp, Homo sapiens
  siRNA target sequence for LOC283537 (NM_181785.1,1478-1496).
ggttcgttcgactgaacaa

SEQ ID NO: 433364 - DNA, 19 bp, Homo sapiens
  siRNA target sequence for LOC283537 (NM_181785.1,1498-1516).
gtaccctgtttgcttgtat

SEQ ID NO: 433365 - DNA, 19 bp, Homo sapiens
  siRNA target sequence for LOC283537 (NM_181785.1,1539-1557).
ggagtcactgcagtttcta

SEQ ID NO: 433366 - DNA, 19 bp, Homo sapiens
  siRNA target sequence for LOC283537 (NM_181785.1,1613-1631).
gctgtctgctggtctgtta

SEQ ID NO: 433367 - DNA, 19 bp, Homo sapiens
  siRNA target sequence for LOC283537 (NM_181785.1,1650-1668).
ctatgtgttgtcaagtgta

SEQ ID NO: 433368 - DNA, 19 bp, Homo sapiens
  siRNA target sequence for LOC283537 (NM_181785.1,1673-1691).
ctggaatgagggaagctat

SEQ ID NO: 433369 - DNA, 19 bp, Homo sapiens
  siRNA target sequence for LOC283537 (NM_181785.1,1682-1700).
gggaagctatgaacttctt

SEQ ID NO: 433370 - DNA, 19 bp, Homo sapiens
  siRNA target sequence for LOC283537 (NM_181785.1,1683-1701).
ggaagctatgaacttctta

SEQ ID NO: 433371 - DNA, 19 bp, Homo sapiens
  siRNA target sequence for LOC283537 (NM_181785.1,1687-1705).
gctatgaacttcttataca

SEQ ID NO: 433372 - DNA, 19 bp, Homo sapiens
  siRNA target sequence for LOC283537 (NM_181785.1,1688-1706).
ctatgaacttcttatacaa

SEQ ID NO: 433373 - DNA, 19 bp, Homo sapiens
  siRNA target sequence for LOC286148 (NM_181787.1,101-119).
gtagagctgcgccaaagaa

SEQ ID NO: 433374 - DNA, 19 bp, Homo sapiens
  siRNA target sequence for LOC286148 (NM_181787.1,218-236).
cgctttgcaaagattttca

SEQ ID NO: 433375 - DNA, 19 bp, Homo sapiens
  siRNA target sequence for LOC286148 (NM_181787.1,252-270).
cggttactagtggtatgat

SEQ ID NO: 433376 - DNA, 19 bp, Homo sapiens
  siRNA target sequence for LOC286148 (NM_181787.1,254-272).
gttactagtggtatgatgt

SEQ ID NO: 433377 - DNA, 19 bp, Homo sapiens
  siRNA target sequence for LOC286148 (NM_181787.1,268-286).
gatgtatgctctctactta

SEQ ID NO: 433378 - DNA, 19 bp, Homo sapiens
  siRNA target sequence for LOC286148 (NM_181787.1,280-298).
ctacttatcagcataccat

SEQ ID NO: 433379 - DNA, 19 bp, Homo sapiens
  siRNA target sequence for LOC286148 (NM_181787.1,299-317).
gaacggaaattctggtttt

SEQ ID NO: 433380 - DNA, 19 bp, Homo sapiens
  siRNA target sequence for LOC286148 (NM_181787.1,302-320).
cggaaattctggttttcca

SEQ ID NO: 433381 - DNA, 19 bp, Homo sapiens
  siRNA target sequence for LOC286148 (NM_181787.1,366-384).
ccatttattactcctatta

SEQ ID NO: 433382 - DNA, 19 bp, Homo sapiens
  siRNA target sequence for LOC286148 (NM_181787.1,428-446).
gaactgacacacaataaca

SEQ ID NO: 433383 - DNA, 19 bp, Homo sapiens
  siRNA target sequence for LOC286148 (NM_181787.1,439-457).
caataacaaaactgtatct

SEQ ID NO: 433384 - DNA, 19 bp, Homo sapiens
  siRNA target sequence for LOC286148 (NM_181787.1,493-511).
gtatccggaacttattgct

SEQ ID NO: 433385 - DNA, 19 bp, Homo sapiens
  siRNA target sequence for LOC286148 (NM_181787.1,499-517).
ggaacttattgctagcatt

SEQ ID NO: 433386 - DNA, 19 bp, Homo sapiens
  siRNA target sequence for LOC286148 (NM_181787.1,500-518).
gaacttattgctagcattt

SEQ ID NO: 433387 - DNA, 19 bp, Homo sapiens
  siRNA target sequence for LOC286148 (NM_181787.1,527-545).
gccactggtagcaatgaga

SEQ ID NO: 433388 - DNA, 19 bp, Homo sapiens
  siRNA target sequence for LOC286148 (NM_181787.1,528-546).
ccactggtagcaatgagat

SEQ ID NO: 433389 - DNA, 19 bp, Homo sapiens
  siRNA target sequence for LOC286148 (NM_181787.1,531-549).
ctggtagcaatgagattat

SEQ ID NO: 433390 - DNA, 19 bp, Homo sapiens
  siRNA target sequence for LOC286148 (NM_181787.1,585-603).
gattgcaaggaatatatgt

SEQ ID NO: 433391 - DNA, 19 bp, Homo sapiens
  siRNA target sequence for LOC286148 (NM_181787.1,589-607).
gcaaggaatatatgttact

SEQ ID NO: 433392 - DNA, 19 bp, Homo sapiens
  siRNA target sequence for LOC286148 (NM_181787.1,617-635).
gttacaagttggcttatga

SEQ ID NO: 433393 - DNA, 19 bp, Homo sapiens
  siRNA target sequence for LOC286148 (NM_181787.1,663-681).
ctgttgcgtggttcgttat

SEQ ID NO: 433394 - DNA, 19 bp, Homo sapiens
  siRNA target sequence for LOC286148 (NM_181787.1,665-683).
gttgcgtggttcgttatta

SEQ ID NO: 433395 - DNA, 19 bp, Homo sapiens
  siRNA target sequence for LOC286148 (NM_181787.1,668-686).
gcgtggttcgttattaaca

SEQ ID NO: 433396 - DNA, 19 bp, Homo sapiens
  siRNA target sequence for LOC286148 (NM_181787.1,677-695).
gttattaacagggtagata

SEQ ID NO: 433397 - DNA, 19 bp, Homo sapiens
  siRNA target sequence for LOC286148 (NM_181787.1,685-703).
cagggtagatacaacaaga

SEQ ID NO: 433398 - DNA, 19 bp, Homo sapiens
  siRNA target sequence for LOC286148 (NM_181787.1,687-705).
gggtagatacaacaagaat

SEQ ID NO: 433399 - DNA, 19 bp, Homo sapiens
  siRNA target sequence for LOC286148 (NM_181787.1,688-706).
ggtagatacaacaagaatt

SEQ ID NO: 433400 - DNA, 19 bp, Homo sapiens
  siRNA target sequence for LOC286148 (NM_181787.1,736-754).
ggcactaccatattttgca

SEQ ID NO: 433401 - DNA, 19 bp, Homo sapiens
  siRNA target sequence for LOC286148 (NM_181787.1,737-755).
gcactaccatattttgcat

SEQ ID NO: 433402 - DNA, 19 bp, Homo sapiens
  siRNA target sequence for LOC286148 (NM_181787.1,767-785).
gcacttacaggctatttaa

SEQ ID NO: 433403 - DNA, 19 bp, Homo sapiens
  siRNA target sequence for LOC286148 (NM_181787.1,826-844).
gttgatgagtgcttcaact

SEQ ID NO: 433404 - DNA, 19 bp, Homo sapiens
  siRNA target sequence for LOC286148 (NM_181787.1,836-854).
gcttcaacttacacattta

SEQ ID NO: 433405 - DNA, 19 bp, Homo sapiens
  siRNA target sequence for LOC286148 (NM_181787.1,840-858).
caacttacacatttatgat

SEQ ID NO: 433406 - DNA, 19 bp, Homo sapiens
  siRNA target sequence for LOC286148 (NM_181787.1,843-861).
cttacacatttatgatgat

SEQ ID NO: 433407 - DNA, 19 bp, Homo sapiens
  siRNA target sequence for LOC286148 (NM_181787.1,864-882).
gggagtatagccactatct

SEQ ID NO: 433408 - DNA, 19 bp, Homo sapiens
  siRNA target sequence for LOC286148 (NM_181787.1,883-901).
cctgtttcttcaagcaata

SEQ ID NO: 433409 - DNA, 19 bp, Homo sapiens
  siRNA target sequence for LOC286148 (NM_181787.1,1024-1042).
ggtatctcctttattaagt

SEQ ID NO: 433410 - DNA, 19 bp, Homo sapiens
  siRNA target sequence for LOC286148 (NM_181787.1,1025-1043).
gtatctcctttattaagtt

SEQ ID NO: 433411 - DNA, 19 bp, Homo sapiens
  siRNA target sequence for LOC286148 (NM_181787.1,1029-1047).
ctcctttattaagtttagt

SEQ ID NO: 433412 - DNA, 19 bp, Homo sapiens
  siRNA target sequence for LOC286148 (NM_181787.1,1041-1059).
gtttagtagcagccttaat

SEQ ID NO: 433413 - DNA, 19 bp, Homo sapiens
  siRNA target sequence for LOC286148 (NM_181787.1,1050-1068).
cagccttaatgcttgctaa

SEQ ID NO: 433414 - DNA, 19 bp, Homo sapiens
  siRNA target sequence for LOC286148 (NM_181787.1,1094-1112).
ggaagttttgtagctaaaa

SEQ ID NO: 433415 - DNA, 19 bp, Homo sapiens
  siRNA target sequence for LOC286148 (NM_181787.1,1150-1168).
gacaataacattgaatatt

SEQ ID NO: 433416 - DNA, 19 bp, Homo sapiens
  siRNA target sequence for LOC286148 (NM_181787.1,1203-1221).
ggcacatgctgaaattcct

SEQ ID NO: 433417 - DNA, 19 bp, Homo sapiens
  siRNA target sequence for LOC286148 (NM_181787.1,1204-1222).
gcacatgctgaaattcctt

SEQ ID NO: 433418 - DNA, 19 bp, Homo sapiens
  siRNA target sequence for LOC286148 (NM_181787.1,1219-1237).
ccttgaagtaaaatttgga

SEQ ID NO: 433419 - DNA, 19 bp, Homo sapiens
  siRNA target sequence for LOC286148 (NM_181787.1,1291-1309).
gcaggcaccatctcaagat

SEQ ID NO: 433420 - DNA, 19 bp, Homo sapiens
  siRNA target sequence for LOC286148 (NM_181787.1,1319-1337).
cgattgacacagtcttctt

SEQ ID NO: 433421 - DNA, 19 bp, Homo sapiens
  siRNA target sequence for LOC286148 (NM_181787.1,1324-1342).
gacacagtcttctttatta

SEQ ID NO: 433422 - DNA, 19 bp, Homo sapiens
  siRNA target sequence for LOC286148 (NM_181787.1,1335-1353).
ctttattacctttctacat

SEQ ID NO: 433423 - DNA, 19 bp, Homo sapiens
  siRNA target sequence for LOC286148 (NM_181787.1,1344-1362).
ctttctacattctagtgtt

SEQ ID NO: 433424 - DNA, 19 bp, Homo sapiens
  siRNA target sequence for LOC286148 (NM_181787.1,1380-1398).
ctatgttgcaagttatttt

SEQ ID NO: 433425 - DNA, 19 bp, Homo sapiens
  siRNA target sequence for LOC286148 (NM_181787.1,1391-1409).
gttatttttaggaggatta

SEQ ID NO: 433426 - DNA, 19 bp, Homo sapiens
  siRNA target sequence for LOC286148 (NM_181787.1,1464-1482).
gaccagaaataatttatca

SEQ ID NO: 433427 - DNA, 19 bp, Homo sapiens
  siRNA target sequence for LOC286148 (NM_181787.1,1504-1522).
gggttctcttgcaatggtt

SEQ ID NO: 433428 - DNA, 19 bp, Homo sapiens
  siRNA target sequence for LOC286148 (NM_181787.1,1505-1523).
ggttctcttgcaatggtta

SEQ ID NO: 433429 - DNA, 19 bp, Homo sapiens
  siRNA target sequence for LOC286148 (NM_181787.1,1506-1524).
gttctcttgcaatggttat

SEQ ID NO: 433430 - DNA, 19 bp, Homo sapiens
  siRNA target sequence for LOC286148 (NM_181787.1,1537-1555).
gtacatctggattccttat

SEQ ID NO: 433431 - DNA, 19 bp, Homo sapiens
  siRNA target sequence for LOC286148 (NM_181787.1,1558-1576).
gtgcatgttagcagcattt

SEQ ID NO: 433432 - DNA, 19 bp, Homo sapiens
  siRNA target sequence for LOC286148 (NM_181787.1,1568-1586).
gcagcatttggtgtatgtt

SEQ ID NO: 433433 - DNA, 19 bp, Homo sapiens
  siRNA target sequence for LOC286148 (NM_181787.1,1584-1602).
gttctcccgaactttggat

SEQ ID NO: 433434 - DNA, 19 bp, Homo sapiens
  siRNA target sequence for LOC286148 (NM_181787.1,1615-1633).
gtggcttcgattaagaact

SEQ ID NO: 433435 - DNA, 19 bp, Homo sapiens
  siRNA target sequence for LOC286148 (NM_181787.1,1618-1636).
gcttcgattaagaactgta

SEQ ID NO: 433436 - DNA, 19 bp, Homo sapiens
  siRNA target sequence for LOC286148 (NM_181787.1,1629-1647).
gaactgtacacccaatatt

SEQ ID NO: 433437 - DNA, 19 bp, Homo sapiens
  siRNA target sequence for LOC286148 (NM_181787.1,1632-1650).
ctgtacacccaatattgtt

SEQ ID NO: 433438 - DNA, 19 bp, Homo sapiens
  siRNA target sequence for LOC286148 (NM_181787.1,1641-1659).
caatattgttggctcttat

SEQ ID NO: 433439 - DNA, 19 bp, Homo sapiens
  siRNA target sequence for LOC286148 (NM_181787.1,1665-1683).
gcatggccgtgcctactat

SEQ ID NO: 433440 - DNA, 19 bp, Homo sapiens
  siRNA target sequence for LOC286148 (NM_181787.1,1666-1684).
catggccgtgcctactata

SEQ ID NO: 433441 - DNA, 19 bp, Homo sapiens
  siRNA target sequence for LOC286148 (NM_181787.1,1669-1687).
ggccgtgcctactataata

SEQ ID NO: 433442 - DNA, 19 bp, Homo sapiens
  siRNA target sequence for LOC286148 (NM_181787.1,1672-1690).
cgtgcctactataataggt

SEQ ID NO: 433443 - DNA, 19 bp, Homo sapiens
  siRNA target sequence for LOC286148 (NM_181787.1,1706-1724).
gagttttttcccagattaa

SEQ ID NO: 433444 - DNA, 19 bp, Homo sapiens
  siRNA target sequence for LOC286148 (NM_181787.1,1715-1733).
cccagattaatgacagaat

SEQ ID NO: 433445 - DNA, 19 bp, Homo sapiens
  siRNA target sequence for LOC286148 (NM_181787.1,1772-1790).
gaacttatgacctggataa

SEQ ID NO: 433446 - DNA, 19 bp, Homo sapiens
  siRNA target sequence for LOC286148 (NM_181787.1,1775-1793).
cttatgacctggataaaaa

SEQ ID NO: 433447 - DNA, 19 bp, Homo sapiens
  siRNA target sequence for LOC286148 (NM_181787.1,1820-1838).
gcagggagtccacagttaa

SEQ ID NO: 433448 - DNA, 19 bp, Homo sapiens
  siRNA target sequence for LOC286148 (NM_181787.1,1821-1839).
cagggagtccacagttaat

SEQ ID NO: 433449 - DNA, 19 bp, Homo sapiens
  siRNA target sequence for LOC286148 (NM_181787.1,1834-1852).
gttaatgggtgcgattaaa

SEQ ID NO: 433450 - DNA, 19 bp, Homo sapiens
  siRNA target sequence for LOC286148 (NM_181787.1,1841-1859).
ggtgcgattaaattatgca

SEQ ID NO: 433451 - DNA, 19 bp, Homo sapiens
  siRNA target sequence for LOC286148 (NM_181787.1,1862-1880).
ggatggatggtgacaagtt

SEQ ID NO: 433452 - DNA, 19 bp, Homo sapiens
  siRNA target sequence for LOC286148 (NM_181787.1,1863-1881).
gatggatggtgacaagttt

SEQ ID NO: 433453 - DNA, 19 bp, Homo sapiens
  siRNA target sequence for LOC286148 (NM_181787.1,1945-1963).
gcgatctgctgaggatatt

SEQ ID NO: 433454 - DNA, 19 bp, Homo sapiens
  siRNA target sequence for LOC286148 (NM_181787.1,1947-1965).
gatctgctgaggatattta

SEQ ID NO: 433455 - DNA, 19 bp, Homo sapiens
  siRNA target sequence for LOC286148 (NM_181787.1,1973-1991).
ctgacatcttacaaagcta

SEQ ID NO: 433456 - DNA, 19 bp, Homo sapiens
  siRNA target sequence for LOC286148 (NM_181787.1,1975-1993).
gacatcttacaaagctaat

SEQ ID NO: 433457 - DNA, 19 bp, Homo sapiens
  siRNA target sequence for LOC286148 (NM_181787.1,1977-1995).
catcttacaaagctaatta

SEQ ID NO: 433458 - DNA, 19 bp, Homo sapiens
  siRNA target sequence for LOC286148 (NM_181787.1,1980-1998).
cttacaaagctaattacct

SEQ ID NO: 433459 - DNA, 19 bp, Homo sapiens
  siRNA target sequence for LOC286148 (NM_181787.1,1989-2007).
ctaattacctaattgtaga

SEQ ID NO: 433460 - DNA, 19 bp, Homo sapiens
  siRNA target sequence for LOC286148 (NM_181787.1,2038-2056).
gagaggctgtagggttaaa

SEQ ID NO: 433461 - DNA, 19 bp, Homo sapiens
  siRNA target sequence for LOC286148 (NM_181787.1,2042-2060).
ggctgtagggttaaagatt

SEQ ID NO: 433462 - DNA, 19 bp, Homo sapiens
  siRNA target sequence for LOC286148 (NM_181787.1,2046-2064).
gtagggttaaagatttatt

SEQ ID NO: 433463 - DNA, 19 bp, Homo sapiens
  siRNA target sequence for LOC286148 (NM_181787.1,2049-2067).
gggttaaagatttattaga

SEQ ID NO: 433464 - DNA, 19 bp, Homo sapiens
  siRNA target sequence for LOC286148 (NM_181787.1,2080-2098).
ccacatggtttgtgaagaa

SEQ ID NO: 433465 - DNA, 19 bp, Homo sapiens
  siRNA target sequence for LOC286148 (NM_181787.1,2102-2120).
gacaagctaacctactcaa

SEQ ID NO: 433466 - DNA, 19 bp, Homo sapiens
  siRNA target sequence for LOC286148 (NM_181787.1,2104-2122).
caagctaacctactcaaaa

SEQ ID NO: 433467 - DNA, 19 bp, Homo sapiens
  siRNA target sequence for LOC286148 (NM_181787.1,2143-2161).
ggtcaaaattaactattct

SEQ ID NO: 433468 - DNA, 19 bp, Homo sapiens
  siRNA target sequence for LOC286148 (NM_181787.1,2155-2173).
ctattctccatatgtgaat

SEQ ID NO: 433469 - DNA, 19 bp, Homo sapiens
  siRNA target sequence for LOC286148 (NM_181787.1,2197-2215).
cagatcctactttgtatat

SEQ ID NO: 433470 - DNA, 19 bp, Homo sapiens
  siRNA target sequence for LOC341567 (NM_181788.1,429-447).
gctgccagcggaaaaaact

SEQ ID NO: 433471 - DNA, 19 bp, Homo sapiens
  siRNA target sequence for LOC341567 (NM_181788.1,510-528).
ggccatctccactcacaaa

SEQ ID NO: 433472 - DNA, 19 bp, Homo sapiens
  siRNA target sequence for CRG-L2 (NM_181789.1,462-480).
cggcagccaagcatgttca

SEQ ID NO: 433473 - DNA, 19 bp, Homo sapiens
  siRNA target sequence for CRG-L2 (NM_181789.1,502-520).
cttgtgccataccaaatga

SEQ ID NO: 433474 - DNA, 19 bp, Homo sapiens
  siRNA target sequence for CRG-L2 (NM_181789.1,505-523).
gtgccataccaaatgatga

SEQ ID NO: 433475 - DNA, 19 bp, Homo sapiens
  siRNA target sequence for CRG-L2 (NM_181789.1,507-525).
gccataccaaatgatgata

SEQ ID NO: 433476 - DNA, 19 bp, Homo sapiens
  siRNA target sequence for CRG-L2 (NM_181789.1,686-704).
ggtgacagagcatttttca

SEQ ID NO: 433477 - DNA, 19 bp, Homo sapiens
  siRNA target sequence for CRG-L2 (NM_181789.1,705-723).
ggcatcatggttaaggaat

SEQ ID NO: 433478 - DNA, 19 bp, Homo sapiens
  siRNA target sequence for CRG-L2 (NM_181789.1,706-724).
gcatcatggttaaggaatt

SEQ ID NO: 433479 - DNA, 19 bp, Homo sapiens
  siRNA target sequence for CRG-L2 (NM_181789.1,760-778).
cgttcatccaccttccata

SEQ ID NO: 433480 - DNA, 19 bp, Homo sapiens
  siRNA target sequence for CRG-L2 (NM_181789.1,770-788).
ccttccatactatttccat

SEQ ID NO: 433481 - DNA, 19 bp, Homo sapiens
  siRNA target sequence for CRG-L2 (NM_181789.1,828-846).
cacaaagggggttctaata

SEQ ID NO: 433482 - DNA, 19 bp, Homo sapiens
  siRNA target sequence for CRG-L2 (NM_181789.1,841-859).
ctaataccctagtgagatt

SEQ ID NO: 433483 - DNA, 19 bp, Homo sapiens
  siRNA target sequence for CRG-L2 (NM_181789.1,847-865).
ccctagtgagatttgaatt

SEQ ID NO: 433484 - DNA, 19 bp, Homo sapiens
  siRNA target sequence for CRG-L2 (NM_181789.1,904-922).
ccttgtattttgatcgaaa

SEQ ID NO: 433485 - DNA, 19 bp, Homo sapiens
  siRNA target sequence for CRG-L2 (NM_181789.1,905-923).
cttgtattttgatcgaaaa

SEQ ID NO: 433486 - DNA, 19 bp, Homo sapiens
  siRNA target sequence for CRG-L2 (NM_181789.1,918-936).
cgaaaatacctttttgcaa

SEQ ID NO: 433487 - DNA, 19 bp, Homo sapiens
  siRNA target sequence for CRG-L2 (NM_181789.1,940-958).
ccaaaacttacttcaatct

SEQ ID NO: 433488 - DNA, 19 bp, Homo sapiens
  siRNA target sequence for CRG-L2 (NM_181789.1,941-959).
caaaacttacttcaatcta

SEQ ID NO: 433489 - DNA, 19 bp, Homo sapiens
  siRNA target sequence for CRG-L2 (NM_181789.1,950-968).
cttcaatctagctgtagat

SEQ ID NO: 433490 - DNA, 19 bp, Homo sapiens
  siRNA target sequence for CRG-L2 (NM_181789.1,953-971).
caatctagctgtagatgaa

SEQ ID NO: 433491 - DNA, 19 bp, Homo sapiens
  siRNA target sequence for CRG-L2 (NM_181789.1,969-987).
gaaaagggcctttggatta

SEQ ID NO: 433492 - DNA, 19 bp, Homo sapiens
  siRNA target sequence for CRG-L2 (NM_181789.1,974-992).
gggcctttggattatctat

SEQ ID NO: 433493 - DNA, 19 bp, Homo sapiens
  siRNA target sequence for CRG-L2 (NM_181789.1,1004-1022).
ggacggctcgagcattctt

SEQ ID NO: 433494 - DNA, 19 bp, Homo sapiens
  siRNA target sequence for CRG-L2 (NM_181789.1,1007-1025).
cggctcgagcattcttgta

SEQ ID NO: 433495 - DNA, 19 bp, Homo sapiens
  siRNA target sequence for CRG-L2 (NM_181789.1,1053-1071).
gtggtgcaacacgtcaata

SEQ ID NO: 433496 - DNA, 19 bp, Homo sapiens
  siRNA target sequence for CRG-L2 (NM_181789.1,1056-1074).
gtgcaacacgtcaatacca

SEQ ID NO: 433497 - DNA, 19 bp, Homo sapiens
  siRNA target sequence for CRG-L2 (NM_181789.1,1072-1090).
ccacgtaccctaaatccaa

SEQ ID NO: 433498 - DNA, 19 bp, Homo sapiens
  siRNA target sequence for CRG-L2 (NM_181789.1,1111-1129).
cccgaggaatcctctatgt

SEQ ID NO: 433499 - DNA, 19 bp, Homo sapiens
  siRNA target sequence for CRG-L2 (NM_181789.1,1278-1296).
gatggccatttaatgcttt

SEQ ID NO: 433500 - DNA, 19 bp, Homo sapiens
  siRNA target sequence for CRG-L2 (NM_181789.1,1307-1325).
gtttttgtcaactacctta

SEQ ID NO: 433501 - DNA, 19 bp, Homo sapiens
  siRNA target sequence for GPR142 (NM_181790.1,75-93).
cctgggtacagaagcatat

SEQ ID NO: 433502 - DNA, 19 bp, Homo sapiens
  siRNA target sequence for GPR142 (NM_181790.1,76-94).
ctgggtacagaagcatata

SEQ ID NO: 433503 - DNA, 19 bp, Homo sapiens
  siRNA target sequence for GPR142 (NM_181790.1,114-132).
ggtgtcccatgcacagaaa

SEQ ID NO: 433504 - DNA, 19 bp, Homo sapiens
  siRNA target sequence for GPR142 (NM_181790.1,331-349).
ctgcggggaccctcagaaa

SEQ ID NO: 433505 - DNA, 19 bp, Homo sapiens
  siRNA target sequence for GPR142 (NM_181790.1,599-617).
cagcctcggatatcatcat

SEQ ID NO: 433506 - DNA, 19 bp, Homo sapiens
  siRNA target sequence for GPR142 (NM_181790.1,1184-1202).
ccttggatgtggccaatat

SEQ ID NO: 433507 - DNA, 19 bp, Homo sapiens
  siRNA target sequence for GPR141 (NM_181791.1,29-47).
cctcttgcgatcctatagt

SEQ ID NO: 433508 - DNA, 19 bp, Homo sapiens
  siRNA target sequence for GPR141 (NM_181791.1,364-382).
gacaaagtggaattctaca

SEQ ID NO: 433509 - DNA, 19 bp, Homo sapiens
  siRNA target sequence for GPR141 (NM_181791.1,420-438).
gacgctggtgattgtcatt

SEQ ID NO: 433510 - DNA, 19 bp, Homo sapiens
  siRNA target sequence for GPR141 (NM_181791.1,451-469).
gttgtctcccggtatggaa

SEQ ID NO: 433511 - DNA, 19 bp, Homo sapiens
  siRNA target sequence for GPR141 (NM_181791.1,456-474).
ctcccggtatggaatccat

SEQ ID NO: 433512 - DNA, 19 bp, Homo sapiens
  siRNA target sequence for GPR141 (NM_181791.1,467-485).
gaatccatgaggaatacaa

SEQ ID NO: 433513 - DNA, 19 bp, Homo sapiens
  siRNA target sequence for GPR141 (NM_181791.1,483-501).
caatgaggagcactgtttt

SEQ ID NO: 433514 - DNA, 19 bp, Homo sapiens
  siRNA target sequence for GPR141 (NM_181791.1,489-507).
ggagcactgttttaaattt

SEQ ID NO: 433515 - DNA, 19 bp, Homo sapiens
  siRNA target sequence for GPR141 (NM_181791.1,546-564).
ctatatgatagtcattttt

SEQ ID NO: 433516 - DNA, 19 bp, Homo sapiens
  siRNA target sequence for GPR141 (NM_181791.1,572-590).
ccgttgctgtgattctgtt

SEQ ID NO: 433517 - DNA, 19 bp, Homo sapiens
  siRNA target sequence for GPR141 (NM_181791.1,627-645).
gaagctacgccactcttta

SEQ ID NO: 433518 - DNA, 19 bp, Homo sapiens
  siRNA target sequence for GPR141 (NM_181791.1,630-648).
gctacgccactctttacta

SEQ ID NO: 433519 - DNA, 19 bp, Homo sapiens
  siRNA target sequence for GPR141 (NM_181791.1,631-649).
ctacgccactctttactat

SEQ ID NO: 433520 - DNA, 19 bp, Homo sapiens
  siRNA target sequence for GPR141 (NM_181791.1,666-684).
ggctcagctgaaaaaccta

SEQ ID NO: 433521 - DNA, 19 bp, Homo sapiens
  siRNA target sequence for GPR141 (NM_181791.1,670-688).
cagctgaaaaacctatttt

SEQ ID NO: 433522 - DNA, 19 bp, Homo sapiens
  siRNA target sequence for GPR141 (NM_181791.1,694-712).
ggggtcatccttgtttgtt

SEQ ID NO: 433523 - DNA, 19 bp, Homo sapiens
  siRNA target sequence for GPR141 (NM_181791.1,718-736).
ccctaccagttctttagga

SEQ ID NO: 433524 - DNA, 19 bp, Homo sapiens
  siRNA target sequence for GPR141 (NM_181791.1,719-737).
cctaccagttctttaggat

SEQ ID NO: 433525 - DNA, 19 bp, Homo sapiens
  siRNA target sequence for GPR141 (NM_181791.1,760-778).
cattccaatgcctgtaaca

SEQ ID NO: 433526 - DNA, 19 bp, Homo sapiens
  siRNA target sequence for GPR141 (NM_181791.1,773-791).
gtaacagcaaggttgcatt

SEQ ID NO: 433527 - DNA, 19 bp, Homo sapiens
  siRNA target sequence for GPR141 (NM_181791.1,777-795).
cagcaaggttgcattttat

SEQ ID NO: 433528 - DNA, 19 bp, Homo sapiens
  siRNA target sequence for GPR141 (NM_181791.1,787-805).
gcattttataacgaaatct

SEQ ID NO: 433529 - DNA, 19 bp, Homo sapiens
  siRNA target sequence for GPR141 (NM_181791.1,807-825).
cttgagtgtaacagcaatt

SEQ ID NO: 433530 - DNA, 19 bp, Homo sapiens
  siRNA target sequence for GPR141 (NM_181791.1,820-838).
gcaattagctgctatgatt

SEQ ID NO: 433531 - DNA, 19 bp, Homo sapiens
  siRNA target sequence for GPR141 (NM_181791.1,860-878).
gaagccattggtttaagca

SEQ ID NO: 433532 - DNA, 19 bp, Homo sapiens
  siRNA target sequence for NRPS998 (NM_181806.1,280-298).
gaggtgaacttgatgctaa

SEQ ID NO: 433533 - DNA, 19 bp, Homo sapiens
  siRNA target sequence for NRPS998 (NM_181806.1,344-362).
gttctgagcatgtcaatga

SEQ ID NO: 433534 - DNA, 19 bp, Homo sapiens
  siRNA target sequence for NRPS998 (NM_181806.1,404-422).
gcttagcctatgttctaca

SEQ ID NO: 433535 - DNA, 19 bp, Homo sapiens
  siRNA target sequence for NRPS998 (NM_181806.1,405-423).
cttagcctatgttctacat

SEQ ID NO: 433536 - DNA, 19 bp, Homo sapiens
  siRNA target sequence for NRPS998 (NM_181806.1,409-427).
gcctatgttctacatacat

SEQ ID NO: 433537 - DNA, 19 bp, Homo sapiens
  siRNA target sequence for NRPS998 (NM_181806.1,437-455).
cagggataccgaagattgt

SEQ ID NO: 433538 - DNA, 19 bp, Homo sapiens
  siRNA target sequence for NRPS998 (NM_181806.1,439-457).
gggataccgaagattgtca

SEQ ID NO: 433539 - DNA, 19 bp, Homo sapiens
  siRNA target sequence for NRPS998 (NM_181806.1,454-472).
gtcagagtgcctcataagt

SEQ ID NO: 433540 - DNA, 19 bp, Homo sapiens
  siRNA target sequence for NRPS998 (NM_181806.1,458-476).
gagtgcctcataagtgtat

SEQ ID NO: 433541 - DNA, 19 bp, Homo sapiens
  siRNA target sequence for NRPS998 (NM_181806.1,462-480).
gcctcataagtgtatagta

SEQ ID NO: 433542 - DNA, 19 bp, Homo sapiens
  siRNA target sequence for NRPS998 (NM_181806.1,473-491).
gtatagtaccaaatatcca

SEQ ID NO: 433543 - DNA, 19 bp, Homo sapiens
  siRNA target sequence for NRPS998 (NM_181806.1,490-508).
cagcattttcgggtacttt

SEQ ID NO: 433544 - DNA, 19 bp, Homo sapiens
  siRNA target sequence for NRPS998 (NM_181806.1,492-510).
gcattttcgggtacttttt

SEQ ID NO: 433545 - DNA, 19 bp, Homo sapiens
  siRNA target sequence for NRPS998 (NM_181806.1,513-531).
catcacacaagaagatgtt

SEQ ID NO: 433546 - DNA, 19 bp, Homo sapiens
  siRNA target sequence for NRPS998 (NM_181806.1,630-648).
caagttgctcccatcaaaa

SEQ ID NO: 433547 - DNA, 19 bp, Homo sapiens
  siRNA target sequence for NRPS998 (NM_181806.1,633-651).
gttgctcccatcaaaatta

SEQ ID NO: 433548 - DNA, 19 bp, Homo sapiens
  siRNA target sequence for NRPS998 (NM_181806.1,694-712).
gcaacaccaacattgctta

SEQ ID NO: 433549 - DNA, 19 bp, Homo sapiens
  siRNA target sequence for NRPS998 (NM_181806.1,701-719).
caacattgcttagaagatt

SEQ ID NO: 433550 - DNA, 19 bp, Homo sapiens
  siRNA target sequence for NRPS998 (NM_181806.1,721-739).
ggatctcagcttatcaagt

SEQ ID NO: 433551 - DNA, 19 bp, Homo sapiens
  siRNA target sequence for NRPS998 (NM_181806.1,729-747).
gcttatcaagtcaactgtt

SEQ ID NO: 433552 - DNA, 19 bp, Homo sapiens
  siRNA target sequence for NRPS998 (NM_181806.1,730-748).
cttatcaagtcaactgttt

SEQ ID NO: 433553 - DNA, 19 bp, Homo sapiens
  siRNA target sequence for NRPS998 (NM_181806.1,735-753).
caagtcaactgttttgtca

SEQ ID NO: 433554 - DNA, 19 bp, Homo sapiens
  siRNA target sequence for NRPS998 (NM_181806.1,745-763).
gttttgtcagccactactt

SEQ ID NO: 433555 - DNA, 19 bp, Homo sapiens
  siRNA target sequence for NRPS998 (NM_181806.1,750-768).
gtcagccactacttctctt

SEQ ID NO: 433556 - DNA, 19 bp, Homo sapiens
  siRNA target sequence for NRPS998 (NM_181806.1,784-802).
ggtggtgaagcgtttccat

SEQ ID NO: 433557 - DNA, 19 bp, Homo sapiens
  siRNA target sequence for NRPS998 (NM_181806.1,788-806).
gtgaagcgtttccatcatt

SEQ ID NO: 433558 - DNA, 19 bp, Homo sapiens
  siRNA target sequence for NRPS998 (NM_181806.1,790-808).
gaagcgtttccatcattga

SEQ ID NO: 433559 - DNA, 19 bp, Homo sapiens
  siRNA target sequence for NRPS998 (NM_181806.1,865-883).
ggtatcacagaggtatcaa

SEQ ID NO: 433560 - DNA, 19 bp, Homo sapiens
  siRNA target sequence for NRPS998 (NM_181806.1,887-905).
gggcgaccatttataggat

SEQ ID NO: 433561 - DNA, 19 bp, Homo sapiens
  siRNA target sequence for NRPS998 (NM_181806.1,888-906).
ggcgaccatttataggatt

SEQ ID NO: 433562 - DNA, 19 bp, Homo sapiens
  siRNA target sequence for NRPS998 (NM_181806.1,910-928).
gagaagactcttaactcta

SEQ ID NO: 433563 - DNA, 19 bp, Homo sapiens
  siRNA target sequence for NRPS998 (NM_181806.1,924-942).
ctctactctcaaatgtgaa

SEQ ID NO: 433564 - DNA, 19 bp, Homo sapiens
  siRNA target sequence for NRPS998 (NM_181806.1,982-1000).
gttgaagtcagagatacta

SEQ ID NO: 433565 - DNA, 19 bp, Homo sapiens
  siRNA target sequence for NRPS998 (NM_181806.1,994-1012).
gatactaatggcttcacaa

SEQ ID NO: 433566 - DNA, 19 bp, Homo sapiens
  siRNA target sequence for NRPS998 (NM_181806.1,1023-1041).
cagtggccaagtattttta

SEQ ID NO: 433567 - DNA, 19 bp, Homo sapiens
  siRNA target sequence for NRPS998 (NM_181806.1,1101-1119).
gcgagctacaggagacttt

SEQ ID NO: 433568 - DNA, 19 bp, Homo sapiens
  siRNA target sequence for NRPS998 (NM_181806.1,1105-1123).
gctacaggagactttgtga

SEQ ID NO: 433569 - DNA, 19 bp, Homo sapiens
  siRNA target sequence for NRPS998 (NM_181806.1,1178-1196).
gtcatggcaaacgtcttaa

SEQ ID NO: 433570 - DNA, 19 bp, Homo sapiens
  siRNA target sequence for NRPS998 (NM_181806.1,1180-1198).
catggcaaacgtcttaaca

SEQ ID NO: 433571 - DNA, 19 bp, Homo sapiens
  siRNA target sequence for NRPS998 (NM_181806.1,1185-1203).
caaacgtcttaacattgaa

SEQ ID NO: 433572 - DNA, 19 bp, Homo sapiens
  siRNA target sequence for NRPS998 (NM_181806.1,1239-1257).
ggagtcttgtgcagttaca

SEQ ID NO: 433573 - DNA, 19 bp, Homo sapiens
  siRNA target sequence for NRPS998 (NM_181806.1,1240-1258).
gagtcttgtgcagttacat

SEQ ID NO: 433574 - DNA, 19 bp, Homo sapiens
  siRNA target sequence for NRPS998 (NM_181806.1,1247-1265).
gtgcagttacatggtataa

SEQ ID NO: 433575 - DNA, 19 bp, Homo sapiens
  siRNA target sequence for NRPS998 (NM_181806.1,1250-1268).
cagttacatggtataatca

SEQ ID NO: 433576 - DNA, 19 bp, Homo sapiens
  siRNA target sequence for NRPS998 (NM_181806.1,1256-1274).
catggtataatcaggaaaa

SEQ ID NO: 433577 - DNA, 19 bp, Homo sapiens
  siRNA target sequence for NRPS998 (NM_181806.1,1259-1277).
ggtataatcaggaaaaatt

SEQ ID NO: 433578 - DNA, 19 bp, Homo sapiens
  siRNA target sequence for NRPS998 (NM_181806.1,1284-1302).
cttcatggtgtctaaagat

SEQ ID NO: 433579 - DNA, 19 bp, Homo sapiens
  siRNA target sequence for NRPS998 (NM_181806.1,1363-1381).
ccggatgagcttgtattga

SEQ ID NO: 433580 - DNA, 19 bp, Homo sapiens
  siRNA target sequence for NRPS998 (NM_181806.1,1364-1382).
cggatgagcttgtattgat

SEQ ID NO: 433581 - DNA, 19 bp, Homo sapiens
  siRNA target sequence for NRPS998 (NM_181806.1,1409-1427).
gcaaaattgatgtttctga

SEQ ID NO: 433582 - DNA, 19 bp, Homo sapiens
  siRNA target sequence for NRPS998 (NM_181806.1,1420-1438).
gtttctgagttaaacaaga

SEQ ID NO: 433583 - DNA, 19 bp, Homo sapiens
  siRNA target sequence for NRPS998 (NM_181806.1,1428-1446).
gttaaacaagatatattta

SEQ ID NO: 433584 - DNA, 19 bp, Homo sapiens
  siRNA target sequence for NRPS998 (NM_181806.1,1510-1528).
cagtatttgtggaagtcta

SEQ ID NO: 433585 - DNA, 19 bp, Homo sapiens
  siRNA target sequence for NRPS998 (NM_181806.1,1518-1536).
gtggaagtctactctgaat

SEQ ID NO: 433586 - DNA, 19 bp, Homo sapiens
  siRNA target sequence for NRPS998 (NM_181806.1,1564-1582).
gatgagtcactcttcttaa

SEQ ID NO: 433587 - DNA, 19 bp, Homo sapiens
  siRNA target sequence for NRPS998 (NM_181806.1,1586-1604).
gtggtggagattccttaaa

SEQ ID NO: 433588 - DNA, 19 bp, Homo sapiens
  siRNA target sequence for NRPS998 (NM_181806.1,1611-1629).
ccggctcctcagtgagatt

SEQ ID NO: 433589 - DNA, 19 bp, Homo sapiens
  siRNA target sequence for NRPS998 (NM_181806.1,1613-1631).
ggctcctcagtgagattga

SEQ ID NO: 433590 - DNA, 19 bp, Homo sapiens
  siRNA target sequence for NRPS998 (NM_181806.1,1614-1632).
gctcctcagtgagattgaa

SEQ ID NO: 433591 - DNA, 19 bp, Homo sapiens
  siRNA target sequence for NRPS998 (NM_181806.1,1615-1633).
ctcctcagtgagattgaaa

SEQ ID NO: 433592 - DNA, 19 bp, Homo sapiens
  siRNA target sequence for NRPS998 (NM_181806.1,1682-1700).
gttccattttagagattta

SEQ ID NO: 433593 - DNA, 19 bp, Homo sapiens
  siRNA target sequence for NRPS998 (NM_181806.1,1738-1756).
gtgacattcaggaagagtt

SEQ ID NO: 433594 - DNA, 19 bp, Homo sapiens
  siRNA target sequence for NRPS998 (NM_181806.1,1754-1772).
gttgtgccacaaaaaggaa

SEQ ID NO: 433595 - DNA, 19 bp, Homo sapiens
  siRNA target sequence for NRPS998 (NM_181806.1,1770-1788).
gaaactcagcgacattaat

SEQ ID NO: 433596 - DNA, 19 bp, Homo sapiens
  siRNA target sequence for NRPS998 (NM_181806.1,1795-1813).
gaagccagtggaacatctt

SEQ ID NO: 433597 - DNA, 19 bp, Homo sapiens
  siRNA target sequence for NRPS998 (NM_181806.1,1825-1843).
gccatcatgactttcactt

SEQ ID NO: 433598 - DNA, 19 bp, Homo sapiens
  siRNA target sequence for NRPS998 (NM_181806.1,1839-1857).
cacttgccacaatgagatt

SEQ ID NO: 433599 - DNA, 19 bp, Homo sapiens
  siRNA target sequence for NRPS998 (NM_181806.1,1845-1863).
ccacaatgagattaatgct

SEQ ID NO: 433600 - DNA, 19 bp, Homo sapiens
  siRNA target sequence for NRPS998 (NM_181806.1,1873-1891).
ctgagcagagggagtcaaa

SEQ ID NO: 433601 - DNA, 19 bp, Homo sapiens
  siRNA target sequence for NRPS998 (NM_181806.1,1875-1893).
gagcagagggagtcaaatt

SEQ ID NO: 433602 - DNA, 19 bp, Homo sapiens
  siRNA target sequence for NRPS998 (NM_181806.1,1877-1895).
gcagagggagtcaaatttt

SEQ ID NO: 433603 - DNA, 19 bp, Homo sapiens
  siRNA target sequence for NRPS998 (NM_181806.1,1902-1920).
gaattccactaggttttta

SEQ ID NO: 433604 - DNA, 19 bp, Homo sapiens
  siRNA target sequence for NRPS998 (NM_181806.1,2008-2026).
gttcttattgggaagtcaa

SEQ ID NO: 433605 - DNA, 19 bp, Homo sapiens
  siRNA target sequence for NRPS998 (NM_181806.1,2118-2136).
cacaggcaaatgtgtagat

SEQ ID NO: 433606 - DNA, 19 bp, Homo sapiens
  siRNA target sequence for NRPS998 (NM_181806.1,2137-2155).
gcttcaccgctggttgtaa

SEQ ID NO: 433607 - DNA, 19 bp, Homo sapiens
  siRNA target sequence for NRPS998 (NM_181806.1,2138-2156).
cttcaccgctggttgtaat

SEQ ID NO: 433608 - DNA, 19 bp, Homo sapiens
  siRNA target sequence for NRPS998 (NM_181806.1,2152-2170).
gtaatacccacttttgata

SEQ ID NO: 433609 - DNA, 19 bp, Homo sapiens
  siRNA target sequence for NRPS998 (NM_181806.1,2194-2212).
ggttcccattctcatagaa

SEQ ID NO: 433610 - DNA, 19 bp, Homo sapiens
  siRNA target sequence for NRPS998 (NM_181806.1,2195-2213).
gttcccattctcatagaat

SEQ ID NO: 433611 - DNA, 19 bp, Homo sapiens
  siRNA target sequence for NRPS998 (NM_181806.1,2198-2216).
cccattctcatagaatgaa

SEQ ID NO: 433612 - DNA, 19 bp, Homo sapiens
  siRNA target sequence for NRPS998 (NM_181806.1,2217-2235).
ggcagttgacttttactct

SEQ ID NO: 433613 - DNA, 19 bp, Homo sapiens
  siRNA target sequence for NRPS998 (NM_181806.1,2275-2293).
gaatcctcagcatgtgtat

SEQ ID NO: 433614 - DNA, 19 bp, Homo sapiens
  siRNA target sequence for NRPS998 (NM_181806.1,2319-2337).
gggctgttataatggatta

SEQ ID NO: 433615 - DNA, 19 bp, Homo sapiens
  siRNA target sequence for NRPS998 (NM_181806.1,2321-2339).
gctgttataatggattagt

SEQ ID NO: 433616 - DNA, 19 bp, Homo sapiens
  siRNA target sequence for NRPS998 (NM_181806.1,2376-2394).
gatgtttactactgaagat

SEQ ID NO: 433617 - DNA, 19 bp, Homo sapiens
  siRNA target sequence for NRPS998 (NM_181806.1,2423-2441).
caaccacaggactcattta

SEQ ID NO: 433618 - DNA, 19 bp, Homo sapiens
  siRNA target sequence for NRPS998 (NM_181806.1,2426-2444).
ccacaggactcatttacat

SEQ ID NO: 433619 - DNA, 19 bp, Homo sapiens
  siRNA target sequence for NRPS998 (NM_181806.1,2427-2445).
cacaggactcatttacatt

SEQ ID NO: 433620 - DNA, 19 bp, Homo sapiens
  siRNA target sequence for NRPS998 (NM_181806.1,2431-2449).
ggactcatttacattggat

SEQ ID NO: 433621 - DNA, 19 bp, Homo sapiens
  siRNA target sequence for NRPS998 (NM_181806.1,2455-2473).
gaccagcacgcatatgctt

SEQ ID NO: 433622 - DNA, 19 bp, Homo sapiens
  siRNA target sequence for NRPS998 (NM_181806.1,2457-2475).
ccagcacgcatatgcttta

SEQ ID NO: 433623 - DNA, 19 bp, Homo sapiens
  siRNA target sequence for NRPS998 (NM_181806.1,2461-2479).
cacgcatatgctttagata

SEQ ID NO: 433624 - DNA, 19 bp, Homo sapiens
  siRNA target sequence for NRPS998 (NM_181806.1,2463-2481).
cgcatatgctttagatatt

SEQ ID NO: 433625 - DNA, 19 bp, Homo sapiens
  siRNA target sequence for NRPS998 (NM_181806.1,2470-2488).
gctttagatatttatagaa

SEQ ID NO: 433626 - DNA, 19 bp, Homo sapiens
  siRNA target sequence for NRPS998 (NM_181806.1,2476-2494).
gatatttatagaaagaagt

SEQ ID NO: 433627 - DNA, 19 bp, Homo sapiens
  siRNA target sequence for NRPS998 (NM_181806.1,2550-2568).
gattccacatcatttgtat

SEQ ID NO: 433628 - DNA, 19 bp, Homo sapiens
  siRNA target sequence for NRPS998 (NM_181806.1,2573-2591).
ctacattgggaggactttt

SEQ ID NO: 433629 - DNA, 19 bp, Homo sapiens
  siRNA target sequence for NRPS998 (NM_181806.1,2605-2623).
cctgctactgggaacgtta

SEQ ID NO: 433630 - DNA, 19 bp, Homo sapiens
  siRNA target sequence for NRPS998 (NM_181806.1,2606-2624).
ctgctactgggaacgttat

SEQ ID NO: 433631 - DNA, 19 bp, Homo sapiens
  siRNA target sequence for NRPS998 (NM_181806.1,2665-2683).
caatgttgctcacagtata

SEQ ID NO: 433632 - DNA, 19 bp, Homo sapiens
  siRNA target sequence for NRPS998 (NM_181806.1,2753-2771).
ctaccagtggaccaatctt

SEQ ID NO: 433633 - DNA, 19 bp, Homo sapiens
  siRNA target sequence for NRPS998 (NM_181806.1,2757-2775).
cagtggaccaatcttttca

SEQ ID NO: 433634 - DNA, 19 bp, Homo sapiens
  siRNA target sequence for NRPS998 (NM_181806.1,2787-2805).
ctcaccatcagagcaaaaa

SEQ ID NO: 433635 - DNA, 19 bp, Homo sapiens
  siRNA target sequence for NRPS998 (NM_181806.1,2824-2842).
gattgctttatctactgtt

SEQ ID NO: 433636 - DNA, 19 bp, Homo sapiens
  siRNA target sequence for NRPS998 (NM_181806.1,2900-2918).
caccgtttgctttccataa

SEQ ID NO: 433637 - DNA, 19 bp, Homo sapiens
  siRNA target sequence for NRPS998 (NM_181806.1,2989-3007).
cagagtggacaattgcaaa

SEQ ID NO: 433638 - DNA, 19 bp, Homo sapiens
  siRNA target sequence for NRPS998 (NM_181806.1,2996-3014).
gacaattgcaaagtgttta

SEQ ID NO: 433639 - DNA, 19 bp, Homo sapiens
  siRNA target sequence for NRPS998 (NM_181806.1,3043-3061).
cctgtggtcctggaatcaa

SEQ ID NO: 433640 - DNA, 19 bp, Homo sapiens
  siRNA target sequence for LOC341019 (NM_181807.1,239-257).
ctatctcagtcttccttat

SEQ ID NO: 433641 - DNA, 19 bp, Homo sapiens
  siRNA target sequence for LOC341019 (NM_181807.1,278-296).
gaagtattacagcaaagta

SEQ ID NO: 433642 - DNA, 19 bp, Homo sapiens
  siRNA target sequence for LOC341019 (NM_181807.1,309-327).
ctttggatgggaatactgt

SEQ ID NO: 433643 - DNA, 19 bp, Homo sapiens
  siRNA target sequence for LOC341019 (NM_181807.1,326-344).
gtaaacccaatttacaaat

SEQ ID NO: 433644 - DNA, 19 bp, Homo sapiens
  siRNA target sequence for LOC341019 (NM_181807.1,362-380).
ccaagagagtttatgtcat

SEQ ID NO: 433645 - DNA, 19 bp, Homo sapiens
  siRNA target sequence for LOC341019 (NM_181807.1,405-423).
ctactgatgattatttgca

SEQ ID NO: 433646 - DNA, 19 bp, Homo sapiens
  siRNA target sequence for LOC341019 (NM_181807.1,488-506).
gattgctccacacatcaaa

SEQ ID NO: 433647 - DNA, 19 bp, Homo sapiens
  siRNA target sequence for LOC341019 (NM_181807.1,539-557).
gacctagatagctacaaat

SEQ ID NO: 433648 - DNA, 19 bp, Homo sapiens
  siRNA target sequence for LOC341019 (NM_181807.1,541-559).
cctagatagctacaaatca

SEQ ID NO: 433649 - DNA, 19 bp, Homo sapiens
  siRNA target sequence for LOC341019 (NM_181807.1,542-560).
ctagatagctacaaatcaa

SEQ ID NO: 433650 - DNA, 19 bp, Homo sapiens
  siRNA target sequence for LOC341019 (NM_181807.1,545-563).
gatagctacaaatcaaaca

SEQ ID NO: 433651 - DNA, 19 bp, Homo sapiens
  siRNA target sequence for LOC341019 (NM_181807.1,571-589).
caattcttgttctatatca

SEQ ID NO: 433652 - DNA, 19 bp, Homo sapiens
  siRNA target sequence for LOC341019 (NM_181807.1,671-689).
gcccggaattggcagaaat

SEQ ID NO: 433653 - DNA, 19 bp, Homo sapiens
  siRNA target sequence for LOC341019 (NM_181807.1,672-690).
cccggaattggcagaaatt

SEQ ID NO: 433654 - DNA, 19 bp, Homo sapiens
  siRNA target sequence for LOC341019 (NM_181807.1,674-692).
cggaattggcagaaattgt

SEQ ID NO: 433655 - DNA, 19 bp, Homo sapiens
  siRNA target sequence for LOC341019 (NM_181807.1,691-709).
gtctcaaagacacaaactt

SEQ ID NO: 433656 - DNA, 19 bp, Homo sapiens
  siRNA target sequence for LOC341019 (NM_181807.1,834-852).
ccgcaagacgagtgttctt

SEQ ID NO: 433657 - DNA, 19 bp, Homo sapiens
  siRNA target sequence for LOC341019 (NM_181807.1,871-889).
cctcgaacctgaagatata

SEQ ID NO: 433658 - DNA, 19 bp, Homo sapiens
  siRNA target sequence for LOC341019 (NM_181807.1,891-909).
cccatgaagccgatgttta

SEQ ID NO: 433659 - DNA, 19 bp, Homo sapiens
  siRNA target sequence for LOC341019 (NM_181807.1,915-933).
caacgggagagcccttttt

SEQ ID NO: 433660 - DNA, 19 bp, Homo sapiens
  siRNA target sequence for LOC341019 (NM_181807.1,918-936).
cgggagagccctttttaaa

SEQ ID NO: 433661 - DNA, 19 bp, Homo sapiens
  siRNA target sequence for LOC341019 (NM_181807.1,1000-1018).
gttgatgcttcctactgat

SEQ ID NO: 433662 - DNA, 19 bp, Homo sapiens
  siRNA target sequence for LOC341019 (NM_181807.1,1043-1061).
gttctttctattagaatga

SEQ ID NO: 433663 - DNA, 19 bp, Homo sapiens
  siRNA target sequence for LOC341019 (NM_181807.1,1077-1095).
ggacctcagtccgaattct

SEQ ID NO: 433664 - DNA, 19 bp, Homo sapiens
  siRNA target sequence for LOC341019 (NM_181807.1,1080-1098).
cctcagtccgaattctgtt

SEQ ID NO: 433665 - DNA, 19 bp, Homo sapiens
  siRNA target sequence for LOC341019 (NM_181807.1,1132-1150).
gattacagtgggaaaagaa

SEQ ID NO: 433666 - DNA, 19 bp, Homo sapiens
  siRNA target sequence for LOC341019 (NM_181807.1,1162-1180).
ggttttagatacttgtaca

SEQ ID NO: 433667 - DNA, 19 bp, Homo sapiens
  siRNA target sequence for LOC341019 (NM_181807.1,1163-1181).
gttttagatacttgtacaa

SEQ ID NO: 433668 - DNA, 19 bp, Homo sapiens
  siRNA target sequence for POLN (NM_181808.1,27-45).
ctttgatctctgtaataca

SEQ ID NO: 433669 - DNA, 19 bp, Homo sapiens
  siRNA target sequence for POLN (NM_181808.1,56-74).
gtgttgctcagaagattat

SEQ ID NO: 433670 - DNA, 19 bp, Homo sapiens
  siRNA target sequence for POLN (NM_181808.1,58-76).
gttgctcagaagattatgt

SEQ ID NO: 433671 - DNA, 19 bp, Homo sapiens
  siRNA target sequence for POLN (NM_181808.1,69-87).
gattatgtctgctatgcat

SEQ ID NO: 433672 - DNA, 19 bp, Homo sapiens
  siRNA target sequence for POLN (NM_181808.1,80-98).
ctatgcattcaggtgattt

SEQ ID NO: 433673 - DNA, 19 bp, Homo sapiens
  siRNA target sequence for POLN (NM_181808.1,92-110).
gtgatttagtggattctaa

SEQ ID NO: 433674 - DNA, 19 bp, Homo sapiens
  siRNA target sequence for POLN (NM_181808.1,94-112).
gatttagtggattctaaga

SEQ ID NO: 433675 - DNA, 19 bp, Homo sapiens
  siRNA target sequence for POLN (NM_181808.1,134-152).
ctatggaagtgataaacaa

SEQ ID NO: 433676 - DNA, 19 bp, Homo sapiens
  siRNA target sequence for POLN (NM_181808.1,181-199).
gaagacaggaagactcaat

SEQ ID NO: 433677 - DNA, 19 bp, Homo sapiens
  siRNA target sequence for POLN (NM_181808.1,516-534).
ggcattggaagaagatact

SEQ ID NO: 433678 - DNA, 19 bp, Homo sapiens
  siRNA target sequence for POLN (NM_181808.1,538-556).
gacgccgaaggctacctaa

SEQ ID NO: 433679 - DNA, 19 bp, Homo sapiens
  siRNA target sequence for POLN (NM_181808.1,540-558).
cgccgaaggctacctaaat

SEQ ID NO: 433680 - DNA, 19 bp, Homo sapiens
  siRNA target sequence for POLN (NM_181808.1,541-559).
gccgaaggctacctaaatt

SEQ ID NO: 433681 - DNA, 19 bp, Homo sapiens
  siRNA target sequence for POLN (NM_181808.1,543-561).
cgaaggctacctaaattct

SEQ ID NO: 433682 - DNA, 19 bp, Homo sapiens
  siRNA target sequence for POLN (NM_181808.1,626-644).
gccagctgattgaaatgct

SEQ ID NO: 433683 - DNA, 19 bp, Homo sapiens
  siRNA target sequence for POLN (NM_181808.1,666-684).
gataactgtgatgtatact

SEQ ID NO: 433684 - DNA, 19 bp, Homo sapiens
  siRNA target sequence for POLN (NM_181808.1,709-727).
gaccagacccccgtttctt

SEQ ID NO: 433685 - DNA, 19 bp, Homo sapiens
  siRNA target sequence for POLN (NM_181808.1,714-732).
gacccccgtttcttctgtt

SEQ ID NO: 433686 - DNA, 19 bp, Homo sapiens
  siRNA target sequence for POLN (NM_181808.1,717-735).
ccccgtttcttctgttaga

SEQ ID NO: 433687 - DNA, 19 bp, Homo sapiens
  siRNA target sequence for POLN (NM_181808.1,829-847).
gatgatccatgcatctaca

SEQ ID NO: 433688 - DNA, 19 bp, Homo sapiens
  siRNA target sequence for POLN (NM_181808.1,839-857).
gcatctacattcaaataga

SEQ ID NO: 433689 - DNA, 19 bp, Homo sapiens
  siRNA target sequence for POLN (NM_181808.1,885-903).
ggaggcacatcaacaattt

SEQ ID NO: 433690 - DNA, 19 bp, Homo sapiens
  siRNA target sequence for POLN (NM_181808.1,905-923).
cccggaacgtgctatttca

SEQ ID NO: 433691 - DNA, 19 bp, Homo sapiens
  siRNA target sequence for POLN (NM_181808.1,962-980).
ctaaggattttgtgagaat

SEQ ID NO: 433692 - DNA, 19 bp, Homo sapiens
  siRNA target sequence for POLN (NM_181808.1,977-995).
gaatagtgctgcagttttt

SEQ ID NO: 433693 - DNA, 19 bp, Homo sapiens
  siRNA target sequence for POLN (NM_181808.1,1017-1035).
gcatgttgctgattttata

SEQ ID NO: 433694 - DNA, 19 bp, Homo sapiens
  siRNA target sequence for POLN (NM_181808.1,1062-1080).
gcttatagatcctagtgat

SEQ ID NO: 433695 - DNA, 19 bp, Homo sapiens
  siRNA target sequence for POLN (NM_181808.1,1127-1145).
ccattacagttaaagtgaa

SEQ ID NO: 433696 - DNA, 19 bp, Homo sapiens
  siRNA target sequence for POLN (NM_181808.1,1141-1159).
gtgaacagcacatatggaa

SEQ ID NO: 433697 - DNA, 19 bp, Homo sapiens
  siRNA target sequence for POLN (NM_181808.1,1163-1181).
cctcaagaaatattgtgaa

SEQ ID NO: 433698 - DNA, 19 bp, Homo sapiens
  siRNA target sequence for POLN (NM_181808.1,1208-1226).
cactctacagacttacaat

SEQ ID NO: 433699 - DNA, 19 bp, Homo sapiens
  siRNA target sequence for POLN (NM_181808.1,1228-1246).
gacctttgctctaaactga

SEQ ID NO: 433700 - DNA, 19 bp, Homo sapiens
  siRNA target sequence for POLN (NM_181808.1,1262-1280).
ggcaactatttcgtacttt

SEQ ID NO: 433701 - DNA, 19 bp, Homo sapiens
  siRNA target sequence for POLN (NM_181808.1,1282-1300).
gagcttcctctgataccaa

SEQ ID NO: 433702 - DNA, 19 bp, Homo sapiens
  siRNA target sequence for POLN (NM_181808.1,1284-1302).
gcttcctctgataccaatt

SEQ ID NO: 433703 - DNA, 19 bp, Homo sapiens
  siRNA target sequence for POLN (NM_181808.1,1353-1371).
gaagacgtcagcacttctt

SEQ ID NO: 433704 - DNA, 19 bp, Homo sapiens
  siRNA target sequence for POLN (NM_181808.1,1376-1394).
ctcgtctcaaggaattgga

SEQ ID NO: 433705 - DNA, 19 bp, Homo sapiens
  siRNA target sequence for POLN (NM_181808.1,1417-1435).
ggagaacggtttcttataa

SEQ ID NO: 433706 - DNA, 19 bp, Homo sapiens
  siRNA target sequence for POLN (NM_181808.1,1420-1438).
gaacggtttcttataacga

SEQ ID NO: 433707 - DNA, 19 bp, Homo sapiens
  siRNA target sequence for POLN (NM_181808.1,1458-1476).
gatcctctttggcaagtta

SEQ ID NO: 433708 - DNA, 19 bp, Homo sapiens
  siRNA target sequence for POLN (NM_181808.1,1525-1543).
cagaaatacccgtctacat

SEQ ID NO: 433709 - DNA, 19 bp, Homo sapiens
  siRNA target sequence for POLN (NM_181808.1,1527-1545).
gaaatacccgtctacatca

SEQ ID NO: 433710 - DNA, 19 bp, Homo sapiens
  siRNA target sequence for POLN (NM_181808.1,1566-1584).
gcgagaccttcatccatta

SEQ ID NO: 433711 - DNA, 19 bp, Homo sapiens
  siRNA target sequence for POLN (NM_181808.1,1617-1635).
caagatcaagtcaaccttt

SEQ ID NO: 433712 - DNA, 19 bp, Homo sapiens
  siRNA target sequence for POLN (NM_181808.1,1620-1638).
gatcaagtcaacctttgta

SEQ ID NO: 433713 - DNA, 19 bp, Homo sapiens
  siRNA target sequence for POLN (NM_181808.1,1623-1641).
caagtcaacctttgtagat

SEQ ID NO: 433714 - DNA, 19 bp, Homo sapiens
  siRNA target sequence for POLN (NM_181808.1,1671-1689).
catttcctctacatggaat

SEQ ID NO: 433715 - DNA, 19 bp, Homo sapiens
  siRNA target sequence for POLN (NM_181808.1,1718-1736).
cagccaagcatcctaatat

SEQ ID NO: 433716 - DNA, 19 bp, Homo sapiens
  siRNA target sequence for POLN (NM_181808.1,1722-1740).
caagcatcctaatatccaa

SEQ ID NO: 433717 - DNA, 19 bp, Homo sapiens
  siRNA target sequence for POLN (NM_181808.1,1764-1782).
gattactacacctaagaat

SEQ ID NO: 433718 - DNA, 19 bp, Homo sapiens
  siRNA target sequence for POLN (NM_181808.1,1818-1836).
cccgagggccatgtttgtt

SEQ ID NO: 433719 - DNA, 19 bp, Homo sapiens
  siRNA target sequence for POLN (NM_181808.1,1821-1839).
gagggccatgtttgtttca

SEQ ID NO: 433720 - DNA, 19 bp, Homo sapiens
  siRNA target sequence for POLN (NM_181808.1,1878-1896).
gattgaattgcgcattctt

SEQ ID NO: 433721 - DNA, 19 bp, Homo sapiens
  siRNA target sequence for POLN (NM_181808.1,1907-1925).
ctggagatccggaacttct

SEQ ID NO: 433722 - DNA, 19 bp, Homo sapiens
  siRNA target sequence for POLN (NM_181808.1,1910-1928).
gagatccggaacttctgaa

SEQ ID NO: 433723 - DNA, 19 bp, Homo sapiens
  siRNA target sequence for POLN (NM_181808.1,2160-2178).
cttcgcccgagcagctatt

SEQ ID NO: 433724 - DNA, 19 bp, Homo sapiens
  siRNA target sequence for TRIK (NM_181840.1,190-208).
gagctctgcagaatcttga

SEQ ID NO: 433725 - DNA, 19 bp, Homo sapiens
  siRNA target sequence for TRIK (NM_181840.1,268-286).
gtgaagcctcagtggttta

SEQ ID NO: 433726 - DNA, 19 bp, Homo sapiens
  siRNA target sequence for TRIK (NM_181840.1,465-483).
ggcaaccatcttatctaca

SEQ ID NO: 433727 - DNA, 19 bp, Homo sapiens
  siRNA target sequence for TRIK (NM_181840.1,466-484).
gcaaccatcttatctacat

SEQ ID NO: 433728 - DNA, 19 bp, Homo sapiens
  siRNA target sequence for TRIK (NM_181840.1,534-552).
caagtggtgccccaaatct

SEQ ID NO: 433729 - DNA, 19 bp, Homo sapiens
  siRNA target sequence for TRIK (NM_181840.1,542-560).
gccccaaatctctcttcaa

SEQ ID NO: 433730 - DNA, 19 bp, Homo sapiens
  siRNA target sequence for TRIK (NM_181840.1,573-591).
ccccaagcccgcagatgaa

SEQ ID NO: 433731 - DNA, 19 bp, Homo sapiens
  siRNA target sequence for TRIK (NM_181840.1,736-754).
gccatggagaggagtaact

SEQ ID NO: 433732 - DNA, 19 bp, Homo sapiens
  siRNA target sequence for TRIK (NM_181840.1,849-867).
ccccatcattgcccttatt

SEQ ID NO: 433733 - DNA, 19 bp, Homo sapiens
  siRNA target sequence for TRIK (NM_181840.1,852-870).
catcattgcccttattgtt

SEQ ID NO: 433734 - DNA, 19 bp, Homo sapiens
  siRNA target sequence for TRIK (NM_181840.1,1051-1069).
gtgttcattgctttcaagt

SEQ ID NO: 433735 - DNA, 19 bp, Homo sapiens
  siRNA target sequence for TRIK (NM_181840.1,1061-1079).
ctttcaagttggtgcaaaa

SEQ ID NO: 433736 - DNA, 19 bp, Homo sapiens
  siRNA target sequence for TRIK (NM_181840.1,1075-1093).
caaaacaggctgattgaca

SEQ ID NO: 433737 - DNA, 19 bp, Homo sapiens
  siRNA target sequence for TRIK (NM_181840.1,1105-1123).
gttatgctattctttgcaa

SEQ ID NO: 433738 - DNA, 19 bp, Homo sapiens
  siRNA target sequence for TRIK (NM_181840.1,1131-1149).
gttttaccaccttgttaaa

SEQ ID NO: 433739 - DNA, 19 bp, Homo sapiens
  siRNA target sequence for TMC3 (NM_181841.1,132-150).
cttggatgacagctttagt

SEQ ID NO: 433740 - DNA, 19 bp, Homo sapiens
  siRNA target sequence for TMC3 (NM_181841.1,141-159).
cagctttagtgctgatgaa

SEQ ID NO: 433741 - DNA, 19 bp, Homo sapiens
  siRNA target sequence for TMC3 (NM_181841.1,170-188).
gcaatgatccggaacaaat

SEQ ID NO: 433742 - DNA, 19 bp, Homo sapiens
  siRNA target sequence for TMC3 (NM_181841.1,275-293).
ggcaagcgaagaacattgt

SEQ ID NO: 433743 - DNA, 19 bp, Homo sapiens
  siRNA target sequence for TMC3 (NM_181841.1,351-369).
gctctggcggaaatttgct

SEQ ID NO: 433744 - DNA, 19 bp, Homo sapiens
  siRNA target sequence for TMC3 (NM_181841.1,367-385).
gctcgtctcgcctgtaact

SEQ ID NO: 433745 - DNA, 19 bp, Homo sapiens
  siRNA target sequence for TMC3 (NM_181841.1,371-389).
gtctcgcctgtaactttgt

SEQ ID NO: 433746 - DNA, 19 bp, Homo sapiens
  siRNA target sequence for TMC3 (NM_181841.1,380-398).
gtaactttgtggtcatctt

SEQ ID NO: 433747 - DNA, 19 bp, Homo sapiens
  siRNA target sequence for TMC3 (NM_181841.1,450-468).
cgttgcctcctatttcata

SEQ ID NO: 433748 - DNA, 19 bp, Homo sapiens
  siRNA target sequence for TMC3 (NM_181841.1,658-676).
gtcctcttctacggatatt

SEQ ID NO: 433749 - DNA, 19 bp, Homo sapiens
  siRNA target sequence for TMC3 (NM_181841.1,717-735).
gcccttggcgtatttccta

SEQ ID NO: 433750 - DNA, 19 bp, Homo sapiens
  siRNA target sequence for TMC3 (NM_181841.1,817-835).
gcttccaatgaaaactata

SEQ ID NO: 433751 - DNA, 19 bp, Homo sapiens
  siRNA target sequence for TMC3 (NM_181841.1,923-941).
gcatcagggaagctatatt

SEQ ID NO: 433752 - DNA, 19 bp, Homo sapiens
  siRNA target sequence for TMC3 (NM_181841.1,983-1001).
ccatctgcctgaggattat

SEQ ID NO: 433753 - DNA, 19 bp, Homo sapiens
  siRNA target sequence for TMC3 (NM_181841.1,1025-1043).
cactggctgggagcattta

SEQ ID NO: 433754 - DNA, 19 bp, Homo sapiens
  siRNA target sequence for TMC3 (NM_181841.1,1031-1049).
ctgggagcatttatctcat

SEQ ID NO: 433755 - DNA, 19 bp, Homo sapiens
  siRNA target sequence for TMC3 (NM_181841.1,1311-1329).
ggaaatggctaccaaaaat

SEQ ID NO: 433756 - DNA, 19 bp, Homo sapiens
  siRNA target sequence for TMC3 (NM_181841.1,1317-1335).
ggctaccaaaaataacaca

SEQ ID NO: 433757 - DNA, 19 bp, Homo sapiens
  siRNA target sequence for TMC3 (NM_181841.1,1420-1438).
gggctcaggagaaacaaca

SEQ ID NO: 433758 - DNA, 19 bp, Homo sapiens
  siRNA target sequence for TMC3 (NM_181841.1,1455-1473).
gaccagcatttcagcttat

SEQ ID NO: 433759 - DNA, 19 bp, Homo sapiens
  siRNA target sequence for TMC3 (NM_181841.1,1533-1551).
gtgctgggagacatacgtt

SEQ ID NO: 433760 - DNA, 19 bp, Homo sapiens
  siRNA target sequence for TMC3 (NM_181841.1,1601-1619).
cgagcattctgctcataga

SEQ ID NO: 433761 - DNA, 19 bp, Homo sapiens
  siRNA target sequence for TMC3 (NM_181841.1,1633-1651).
cttttcgtgcggtacttaa

SEQ ID NO: 433762 - DNA, 19 bp, Homo sapiens
  siRNA target sequence for TMC3 (NM_181841.1,1687-1705).
cctgaatatggagaattca

SEQ ID NO: 433763 - DNA, 19 bp, Homo sapiens
  siRNA target sequence for TMC3 (NM_181841.1,1784-1802).
cagcgttcaacgttctcaa

SEQ ID NO: 433764 - DNA, 19 bp, Homo sapiens
  siRNA target sequence for TMC3 (NM_181841.1,1787-1805).
cgttcaacgttctcaaact

SEQ ID NO: 433765 - DNA, 19 bp, Homo sapiens
  siRNA target sequence for TMC3 (NM_181841.1,1852-1870).
gtgccccaccagcaagtat

SEQ ID NO: 433766 - DNA, 19 bp, Homo sapiens
  siRNA target sequence for TMC3 (NM_181841.1,1854-1872).
gccccaccagcaagtattt

SEQ ID NO: 433767 - DNA, 19 bp, Homo sapiens
  siRNA target sequence for TMC3 (NM_181841.1,1880-1898).
caaggtccaacaacttcta

SEQ ID NO: 433768 - DNA, 19 bp, Homo sapiens
  siRNA target sequence for TMC3 (NM_181841.1,1904-1922).
caatgctcctgtttatgct

SEQ ID NO: 433769 - DNA, 19 bp, Homo sapiens
  siRNA target sequence for TMC3 (NM_181841.1,1929-1947).
gtgcatgctgccaaccatt

SEQ ID NO: 433770 - DNA, 19 bp, Homo sapiens
  siRNA target sequence for TMC3 (NM_181841.1,1931-1949).
gcatgctgccaaccatttt

SEQ ID NO: 433771 - DNA, 19 bp, Homo sapiens
  siRNA target sequence for TMC3 (NM_181841.1,1935-1953).
gctgccaaccatttttgct

SEQ ID NO: 433772 - DNA, 19 bp, Homo sapiens
  siRNA target sequence for TMC3 (NM_181841.1,1938-1956).
gccaaccatttttgctatt

SEQ ID NO: 433773 - DNA, 19 bp, Homo sapiens
  siRNA target sequence for TMC3 (NM_181841.1,1959-1977).
ccgatacaagccatctcta

SEQ ID NO: 433774 - DNA, 19 bp, Homo sapiens
  siRNA target sequence for TMC3 (NM_181841.1,1960-1978).
cgatacaagccatctctaa

SEQ ID NO: 433775 - DNA, 19 bp, Homo sapiens
  siRNA target sequence for TMC3 (NM_181841.1,2016-2034).
cattgtgtcagaaacgatt

SEQ ID NO: 433776 - DNA, 19 bp, Homo sapiens
  siRNA target sequence for TMC3 (NM_181841.1,2102-2120).
ccgcagtactcctgctttt

SEQ ID NO: 433777 - DNA, 19 bp, Homo sapiens
  siRNA target sequence for TMC3 (NM_181841.1,2144-2162).
gcatcgcacggtctctaaa

SEQ ID NO: 433778 - DNA, 19 bp, Homo sapiens
  siRNA target sequence for TMC3 (NM_181841.1,2357-2375).
gcaccaagaagcttccaaa

SEQ ID NO: 433779 - DNA, 19 bp, Homo sapiens
  siRNA target sequence for TMC3 (NM_181841.1,2371-2389).
ccaaacgacagtgatctta

SEQ ID NO: 433780 - DNA, 19 bp, Homo sapiens
  siRNA target sequence for TMC3 (NM_181841.1,2567-2585).
ggctagagcatgaaactaa

SEQ ID NO: 433781 - DNA, 19 bp, Homo sapiens
  siRNA target sequence for TMC3 (NM_181841.1,2639-2657).
cgcgcacacctatgacatt

SEQ ID NO: 433782 - DNA, 19 bp, Homo sapiens
  siRNA target sequence for TMC3 (NM_181841.1,2640-2658).
gcgcacacctatgacattt

SEQ ID NO: 433783 - DNA, 19 bp, Homo sapiens
  siRNA target sequence for TMC3 (NM_181841.1,2641-2659).
cgcacacctatgacattta

SEQ ID NO: 433784 - DNA, 19 bp, Homo sapiens
  siRNA target sequence for TMC3 (NM_181841.1,2660-2678).
caacgcacatcgaagatgt

SEQ ID NO: 433785 - DNA, 19 bp, Homo sapiens
  siRNA target sequence for TMC3 (NM_181841.1,2663-2681).
cgcacatcgaagatgtaca

SEQ ID NO: 433786 - DNA, 19 bp, Homo sapiens
  siRNA target sequence for TMC3 (NM_181841.1,2781-2799).
ccccagatactatgtcatt

SEQ ID NO: 433787 - DNA, 19 bp, Homo sapiens
  siRNA target sequence for TMC3 (NM_181841.1,2783-2801).
ccagatactatgtcattaa

SEQ ID NO: 433788 - DNA, 19 bp, Homo sapiens
  siRNA target sequence for TMC3 (NM_181841.1,2784-2802).
cagatactatgtcattaat

SEQ ID NO: 433789 - DNA, 19 bp, Homo sapiens
  siRNA target sequence for TMC3 (NM_181841.1,2786-2804).
gatactatgtcattaatga

SEQ ID NO: 433790 - DNA, 19 bp, Homo sapiens
  siRNA target sequence for TMC3 (NM_181841.1,2843-2861).
cagaaagacatttcaagat

SEQ ID NO: 433791 - DNA, 19 bp, Homo sapiens
  siRNA target sequence for TMC3 (NM_181841.1,2894-2912).
ccaggaacgtgcgacaata

SEQ ID NO: 433792 - DNA, 19 bp, Homo sapiens
  siRNA target sequence for TMC3 (NM_181841.1,2895-2913).
caggaacgtgcgacaatat

SEQ ID NO: 433793 - DNA, 19 bp, Homo sapiens
  siRNA target sequence for TMC3 (NM_181841.1,2898-2916).
gaacgtgcgacaatatgca

SEQ ID NO: 433794 - DNA, 19 bp, Homo sapiens
  siRNA target sequence for TMC3 (NM_181841.1,2972-2990).
cgccaagcagagattggat

SEQ ID NO: 433795 - DNA, 19 bp, Homo sapiens
  siRNA target sequence for TMC3 (NM_181841.1,3027-3045).
ccgtcgggctcctcatttt

SEQ ID NO: 433796 - DNA, 19 bp, Homo sapiens
  siRNA target sequence for TMC3 (NM_181841.1,3031-3049).
cgggctcctcatttttata

SEQ ID NO: 433797 - DNA, 19 bp, Homo sapiens
  siRNA target sequence for TMC3 (NM_181841.1,3053-3071).
gggagaggtccgaaagtca

SEQ ID NO: 433798 - DNA, 19 bp, Homo sapiens
  siRNA target sequence for TMC3 (NM_181841.1,3094-3112).
gggagggtgcactacaagt

SEQ ID NO: 433799 - DNA, 19 bp, Homo sapiens
  siRNA target sequence for TMC3 (NM_181841.1,3105-3123).
ctacaagtcgtggaatgaa

SEQ ID NO: 433800 - DNA, 19 bp, Homo sapiens
  siRNA target sequence for TMC3 (NM_181841.1,3108-3126).
caagtcgtggaatgaagat

SEQ ID NO: 433801 - DNA, 19 bp, Homo sapiens
  siRNA target sequence for TMC3 (NM_181841.1,3111-3129).
gtcgtggaatgaagatttt

SEQ ID NO: 433802 - DNA, 19 bp, Homo sapiens
  siRNA target sequence for TMC3 (NM_181841.1,3113-3131).
cgtggaatgaagattttga

SEQ ID NO: 433803 - DNA, 19 bp, Homo sapiens
  siRNA target sequence for TMC3 (NM_181841.1,3170-3188).
cacgatcccggaatttcca

SEQ ID NO: 433804 - DNA, 19 bp, Homo sapiens
  siRNA target sequence for TMC3 (NM_181841.1,3405-3423).
ggatgacttgatttgttca

SEQ ID NO: 433805 - DNA, 19 bp, Homo sapiens
  siRNA target sequence for NUDT8 (NM_181843.1,322-340).
cctgctgcggcctgtgtat

SEQ ID NO: 433806 - DNA, 19 bp, Homo sapiens
  siRNA target sequence for NUDT8 (NM_181843.1,325-343).
gctgcggcctgtgtatgat

SEQ ID NO: 433807 - DNA, 19 bp, Homo sapiens
  siRNA target sequence for HKR2 (NM_181846.1,655-673).
cttggacccgcctttgtca

SEQ ID NO: 433808 - DNA, 19 bp, Homo sapiens
  siRNA target sequence for HKR2 (NM_181846.1,750-768).
gatccacttcaagaaaact

SEQ ID NO: 433809 - DNA, 19 bp, Homo sapiens
  siRNA target sequence for HKR2 (NM_181846.1,817-835).
ggtgcctcgaggaacagtt

SEQ ID NO: 433810 - DNA, 19 bp, Homo sapiens
  siRNA target sequence for HKR2 (NM_181846.1,820-838).
gcctcgaggaacagttcta

SEQ ID NO: 433811 - DNA, 19 bp, Homo sapiens
  siRNA target sequence for HKR2 (NM_181846.1,958-976).
cgcgagtgtaggaagatgt

SEQ ID NO: 433812 - DNA, 19 bp, Homo sapiens
  siRNA target sequence for CRA (NM_181873.1,671-689).
gggtccctaaccgaattct

SEQ ID NO: 433813 - DNA, 19 bp, Homo sapiens
  siRNA target sequence for CRA (NM_181873.1,1001-1019).
cacgatggctggactatgt

SEQ ID NO: 433814 - DNA, 19 bp, Homo sapiens
  siRNA target sequence for CRA (NM_181873.1,1003-1021).
cgatggctggactatgtca

SEQ ID NO: 433815 - DNA, 19 bp, Homo sapiens
  siRNA target sequence for CRA (NM_181873.1,1039-1057).
gccagtgacatttcagtat

SEQ ID NO: 433816 - DNA, 19 bp, Homo sapiens
  siRNA target sequence for CRA (NM_181873.1,1067-1085).
ccagggttcgttctgtaat

SEQ ID NO: 433817 - DNA, 19 bp, Homo sapiens
  siRNA target sequence for CRA (NM_181873.1,1097-1115).
gcggtgatcgtgatctcaa

SEQ ID NO: 433818 - DNA, 19 bp, Homo sapiens
  siRNA target sequence for CRA (NM_181873.1,1098-1116).
cggtgatcgtgatctcaat

SEQ ID NO: 433819 - DNA, 19 bp, Homo sapiens
  siRNA target sequence for CRA (NM_181873.1,1155-1173).
cgaagcccgaacactgttt

SEQ ID NO: 433820 - DNA, 19 bp, Homo sapiens
  siRNA target sequence for CRA (NM_181873.1,1382-1400).
cccttaccttcctgagaaa

SEQ ID NO: 433821 - DNA, 19 bp, Homo sapiens
  siRNA target sequence for CRA (NM_181873.1,1423-1441).
cagagcggacagttaaact

SEQ ID NO: 433822 - DNA, 19 bp, Homo sapiens
  siRNA target sequence for CRA (NM_181873.1,1429-1447).
ggacagttaaactcctata

SEQ ID NO: 433823 - DNA, 19 bp, Homo sapiens
  siRNA target sequence for CRA (NM_181873.1,1434-1452).
gttaaactcctatacacaa

SEQ ID NO: 433824 - DNA, 19 bp, Homo sapiens
  siRNA target sequence for CRA (NM_181873.1,1484-1502).
ctgggaactcttttaacct

SEQ ID NO: 433825 - DNA, 19 bp, Homo sapiens
  siRNA target sequence for CRA (NM_181873.1,1515-1533).
ctgggactgggatttacgt

SEQ ID NO: 433826 - DNA, 19 bp, Homo sapiens
  siRNA target sequence for CRA (NM_181873.1,1517-1535).
gggactgggatttacgtta

SEQ ID NO: 433827 - DNA, 19 bp, Homo sapiens
  siRNA target sequence for CRA (NM_181873.1,1518-1536).
ggactgggatttacgttat

SEQ ID NO: 433828 - DNA, 19 bp, Homo sapiens
  siRNA target sequence for CRA (NM_181873.1,1519-1537).
gactgggatttacgttata

SEQ ID NO: 433829 - DNA, 19 bp, Homo sapiens
  siRNA target sequence for CRA (NM_181873.1,1523-1541).
gggatttacgttatagcaa

SEQ ID NO: 433830 - DNA, 19 bp, Homo sapiens
  siRNA target sequence for CRA (NM_181873.1,1524-1542).
ggatttacgttatagcaat

SEQ ID NO: 433831 - DNA, 19 bp, Homo sapiens
  siRNA target sequence for CRA (NM_181873.1,1673-1691).
cattgacccccctgaatca

SEQ ID NO: 433832 - DNA, 19 bp, Homo sapiens
  siRNA target sequence for CRA (NM_181873.1,1809-1827).
gggagcttgccctttacct

SEQ ID NO: 433833 - DNA, 19 bp, Homo sapiens
  siRNA target sequence for CRA (NM_181873.1,1958-1976).
cccatcttcaggagttatt

SEQ ID NO: 433834 - DNA, 19 bp, Homo sapiens
  siRNA target sequence for CRA (NM_181873.1,1959-1977).
ccatcttcaggagttatta

SEQ ID NO: 433835 - DNA, 19 bp, Homo sapiens
  siRNA target sequence for CRA (NM_181873.1,2026-2044).
gatccacataccattctca

SEQ ID NO: 433836 - DNA, 19 bp, Homo sapiens
  siRNA target sequence for LIR9 (NM_181879.1,802-820).
cacagtcttctctagtaca

SEQ ID NO: 433837 - DNA, 19 bp, Homo sapiens
  siRNA target sequence for LIR9 (NM_181879.1,804-822).
cagtcttctctagtacaat

SEQ ID NO: 433838 - DNA, 19 bp, Homo sapiens
  siRNA target sequence for LIR9 (NM_181879.1,837-855).
caggttgtggagagcttta

SEQ ID NO: 433839 - DNA, 19 bp, Homo sapiens
  siRNA target sequence for BAGE3 (NM_182481.1,321-339).
ctctcgatgtgcattttgt

SEQ ID NO: 433840 - DNA, 19 bp, Homo sapiens
  siRNA target sequence for CPEB2 (NM_182485.1,501-519).
gtcctggggagcaatgcat

SEQ ID NO: 433841 - DNA, 19 bp, Homo sapiens
  siRNA target sequence for CPEB2 (NM_182485.1,609-627).
catagcaccaccgaaattt

SEQ ID NO: 433842 - DNA, 19 bp, Homo sapiens
  siRNA target sequence for CPEB2 (NM_182485.1,659-677).
cttggattgaagataatgt

SEQ ID NO: 433843 - DNA, 19 bp, Homo sapiens
  siRNA target sequence for CPEB2 (NM_182485.1,693-711).
caatagtaatacactctta

SEQ ID NO: 433844 - DNA, 19 bp, Homo sapiens
  siRNA target sequence for CPEB2 (NM_182485.1,712-730).
cccttacaggtgagatcta

SEQ ID NO: 433845 - DNA, 19 bp, Homo sapiens
  siRNA target sequence for CPEB2 (NM_182485.1,714-732).
cttacaggtgagatctagt

SEQ ID NO: 433846 - DNA, 19 bp, Homo sapiens
  siRNA target sequence for CPEB2 (NM_182485.1,742-760).
ccagcttggggctcagatt

SEQ ID NO: 433847 - DNA, 19 bp, Homo sapiens
  siRNA target sequence for CPEB2 (NM_182485.1,757-775).
gattcactccaagatagtt

SEQ ID NO: 433848 - DNA, 19 bp, Homo sapiens
  siRNA target sequence for CPEB2 (NM_182485.1,814-832).
cgaagtagaatgtatgaca

SEQ ID NO: 433849 - DNA, 19 bp, Homo sapiens
  siRNA target sequence for CPEB2 (NM_182485.1,818-836).
gtagaatgtatgacagttt

SEQ ID NO: 433850 - DNA, 19 bp, Homo sapiens
  siRNA target sequence for CPEB2 (NM_182485.1,853-871).
gaaaattcccttatcgata

SEQ ID NO: 433851 - DNA, 19 bp, Homo sapiens
  siRNA target sequence for CPEB2 (NM_182485.1,926-944).
gaactgacaatctgttgat

SEQ ID NO: 433852 - DNA, 19 bp, Homo sapiens
  siRNA target sequence for CPEB2 (NM_182485.1,931-949).
gacaatctgttgatgttaa

SEQ ID NO: 433853 - DNA, 19 bp, Homo sapiens
  siRNA target sequence for CPEB2 (NM_182485.1,962-980).
ccctctttccaatagatga

SEQ ID NO: 433854 - DNA, 19 bp, Homo sapiens
  siRNA target sequence for CPEB2 (NM_182485.1,963-981).
cctctttccaatagatgat

SEQ ID NO: 433855 - DNA, 19 bp, Homo sapiens
  siRNA target sequence for CPEB2 (NM_182485.1,1037-1055).
gttattcagctcaccaaaa

SEQ ID NO: 433856 - DNA, 19 bp, Homo sapiens
  siRNA target sequence for CPEB2 (NM_182485.1,1072-1090).
cgcttctctcgaaaagttt

SEQ ID NO: 433857 - DNA, 19 bp, Homo sapiens
  siRNA target sequence for CPEB2 (NM_182485.1,1153-1171).
gggcctttggtagtagatt

SEQ ID NO: 433858 - DNA, 19 bp, Homo sapiens
  siRNA target sequence for CPEB2 (NM_182485.1,1245-1263).
ctcagttcaggcactcatt

SEQ ID NO: 433859 - DNA, 19 bp, Homo sapiens
  siRNA target sequence for CPEB2 (NM_182485.1,1291-1309).
ctctatctgtgtgtttcta

SEQ ID NO: 433860 - DNA, 19 bp, Homo sapiens
  siRNA target sequence for CPEB2 (NM_182485.1,1301-1319).
gtgtttctagccctactat

SEQ ID NO: 433861 - DNA, 19 bp, Homo sapiens
  siRNA target sequence for CPEB2 (NM_182485.1,1303-1321).
gtttctagccctactatca

SEQ ID NO: 433862 - DNA, 19 bp, Homo sapiens
  siRNA target sequence for CPEB2 (NM_182485.1,1323-1341).
ggacaaaccagttcaaata

SEQ ID NO: 433863 - DNA, 19 bp, Homo sapiens
  siRNA target sequence for CPEB2 (NM_182485.1,1326-1344).
caaaccagttcaaatacgt

SEQ ID NO: 433864 - DNA, 19 bp, Homo sapiens
  siRNA target sequence for CPEB2 (NM_182485.1,1336-1354).
caaatacgtccttggaatt

SEQ ID NO: 433865 - DNA, 19 bp, Homo sapiens
  siRNA target sequence for CPEB2 (NM_182485.1,1343-1361).
gtccttggaatttaagtga

SEQ ID NO: 433866 - DNA, 19 bp, Homo sapiens
  siRNA target sequence for CPEB2 (NM_182485.1,1345-1363).
ccttggaatttaagtgata

SEQ ID NO: 433867 - DNA, 19 bp, Homo sapiens
  siRNA target sequence for CPEB2 (NM_182485.1,1400-1418).
cccgaaaaacaatttttgt

SEQ ID NO: 433868 - DNA, 19 bp, Homo sapiens
  siRNA target sequence for CPEB2 (NM_182485.1,1401-1419).
ccgaaaaacaatttttgtt

SEQ ID NO: 433869 - DNA, 19 bp, Homo sapiens
  siRNA target sequence for CPEB2 (NM_182485.1,1423-1441).
ggtgttcctaggccattaa

SEQ ID NO: 433870 - DNA, 19 bp, Homo sapiens
  siRNA target sequence for CPEB2 (NM_182485.1,1442-1460).
gggctgtggaacttgctat

SEQ ID NO: 433871 - DNA, 19 bp, Homo sapiens
  siRNA target sequence for CPEB2 (NM_182485.1,1569-1587).
ctatattgctgccattagt

SEQ ID NO: 433872 - DNA, 19 bp, Homo sapiens
  siRNA target sequence for CPEB2 (NM_182485.1,1581-1599).
cattagtgctcggtttgtt

SEQ ID NO: 433873 - DNA, 19 bp, Homo sapiens
  siRNA target sequence for CPEB2 (NM_182485.1,1689-1707).
ctgtggtggaaaatttgct

SEQ ID NO: 433874 - DNA, 19 bp, Homo sapiens
  siRNA target sequence for CPEB2 (NM_182485.1,1750-1768).
gagttttgttgggcaaata

SEQ ID NO: 433875 - DNA, 19 bp, Homo sapiens
  siRNA target sequence for CPEB2 (NM_182485.1,1791-1809).
gttccataagccattggta

SEQ ID NO: 433876 - DNA, 19 bp, Homo sapiens
  siRNA target sequence for LOC169611 (NM_182487.1,241-259).
ggcagtgtgcagaaaagct

SEQ ID NO: 433877 - DNA, 19 bp, Homo sapiens
  siRNA target sequence for LOC169611 (NM_182487.1,267-285).
cagaggcctcccaaaacct

SEQ ID NO: 433878 - DNA, 19 bp, Homo sapiens
  siRNA target sequence for LOC169611 (NM_182487.1,806-824).
gagacgacaggatctatgt

SEQ ID NO: 433879 - DNA, 19 bp, Homo sapiens
  siRNA target sequence for LOC169611 (NM_182487.1,808-826).
gacgacaggatctatgtca

SEQ ID NO: 433880 - DNA, 19 bp, Homo sapiens
  siRNA target sequence for LOC169611 (NM_182487.1,827-845).
ccaactactactatggaaa

SEQ ID NO: 433881 - DNA, 19 bp, Homo sapiens
  siRNA target sequence for LOC169611 (NM_182487.1,883-901).
caaggccgctggagtaaca

SEQ ID NO: 433882 - DNA, 19 bp, Homo sapiens
  siRNA target sequence for LOC169611 (NM_182487.1,886-904).
ggccgctggagtaacatgt

SEQ ID NO: 433883 - DNA, 19 bp, Homo sapiens
  siRNA target sequence for LOC169611 (NM_182487.1,887-905).
gccgctggagtaacatgta

SEQ ID NO: 433884 - DNA, 19 bp, Homo sapiens
  siRNA target sequence for LOC169611 (NM_182487.1,889-907).
cgctggagtaacatgtaca

SEQ ID NO: 433885 - DNA, 19 bp, Homo sapiens
  siRNA target sequence for LOC169611 (NM_182487.1,1035-1053).
gctgcccgacgtggtatat

SEQ ID NO: 433886 - DNA, 19 bp, Homo sapiens
  siRNA target sequence for LOC169611 (NM_182487.1,1079-1097).
gcggacactcggacattga

SEQ ID NO: 433887 - DNA, 19 bp, Homo sapiens
  siRNA target sequence for LOC169611 (NM_182487.1,1081-1099).
ggacactcggacattgact

SEQ ID NO: 433888 - DNA, 19 bp, Homo sapiens
  siRNA target sequence for LOC169611 (NM_182487.1,1082-1100).
gacactcggacattgactt

SEQ ID NO: 433889 - DNA, 19 bp, Homo sapiens
  siRNA target sequence for LOC346673 (NM_182489.1,50-68).
ggctgtggcagcttataat

SEQ ID NO: 433890 - DNA, 19 bp, Homo sapiens
  siRNA target sequence for LOC346673 (NM_182489.1,231-249).
ctctcagtctgatctcata

SEQ ID NO: 433891 - DNA, 19 bp, Homo sapiens
  siRNA target sequence for LOC346673 (NM_182489.1,276-294).
ggcaaagagtcatattcca

SEQ ID NO: 433892 - DNA, 19 bp, Homo sapiens
  siRNA target sequence for LOC346673 (NM_182489.1,300-318).
ggagcaaaccctggataat

SEQ ID NO: 433893 - DNA, 19 bp, Homo sapiens
  siRNA target sequence for LOC346673 (NM_182489.1,369-387).
cttagaggaggtcaagaaa

SEQ ID NO: 433894 - DNA, 19 bp, Homo sapiens
  siRNA target sequence for LOC346673 (NM_182489.1,440-458).
ccccttggtatctcaactt

SEQ ID NO: 433895 - DNA, 19 bp, Homo sapiens
  siRNA target sequence for LOC346673 (NM_182489.1,441-459).
cccttggtatctcaacttt

SEQ ID NO: 433896 - DNA, 19 bp, Homo sapiens
  siRNA target sequence for LOC346673 (NM_182489.1,443-461).
cttggtatctcaactttta

SEQ ID NO: 433897 - DNA, 19 bp, Homo sapiens
  siRNA target sequence for LOC346673 (NM_182489.1,446-464).
ggtatctcaacttttacaa

SEQ ID NO: 433898 - DNA, 19 bp, Homo sapiens
  siRNA target sequence for LOC346673 (NM_182489.1,447-465).
gtatctcaacttttacaaa

SEQ ID NO: 433899 - DNA, 19 bp, Homo sapiens
  siRNA target sequence for LOC346673 (NM_182489.1,483-501).
gactggcagcgggatcatt

SEQ ID NO: 433900 - DNA, 19 bp, Homo sapiens
  siRNA target sequence for LOC346673 (NM_182489.1,722-740).
cgcccgaggagatcctttt

SEQ ID NO: 433901 - DNA, 19 bp, Homo sapiens
  siRNA target sequence for LOC346673 (NM_182489.1,723-741).
gcccgaggagatccttttt

SEQ ID NO: 433902 - DNA, 19 bp, Homo sapiens
  siRNA target sequence for LOC346673 (NM_182489.1,888-906).
ccttagctgtgcaaacact

SEQ ID NO: 433903 - DNA, 19 bp, Homo sapiens
  siRNA target sequence for LOC346673 (NM_182489.1,894-912).
ctgtgcaaacactcaagta

SEQ ID NO: 433904 - DNA, 19 bp, Homo sapiens
  siRNA target sequence for LOC346673 (NM_182489.1,896-914).
gtgcaaacactcaagtaaa

SEQ ID NO: 433905 - DNA, 19 bp, Homo sapiens
  siRNA target sequence for LOC346673 (NM_182489.1,899-917).
caaacactcaagtaaagca

SEQ ID NO: 433906 - DNA, 19 bp, Homo sapiens
  siRNA target sequence for LOC346673 (NM_182489.1,926-944).
cctttcccgttgatgaaga

SEQ ID NO: 433907 - DNA, 19 bp, Homo sapiens
  siRNA target sequence for LOC119395 (NM_182494.1,249-267).
gctcggagtcggtgatgaa

SEQ ID NO: 433908 - DNA, 19 bp, Homo sapiens
  siRNA target sequence for LOC119395 (NM_182494.1,250-268).
ctcggagtcggtgatgaat

SEQ ID NO: 433909 - DNA, 19 bp, Homo sapiens
  siRNA target sequence for LOC119395 (NM_182494.1,334-352).
ctgcctggtgcactacaat

SEQ ID NO: 433910 - DNA, 19 bp, Homo sapiens
  siRNA target sequence for FLJ25224 (NM_182495.2,22-40).
cataggatactcactttgt

SEQ ID NO: 433911 - DNA, 19 bp, Homo sapiens
  siRNA target sequence for FLJ25224 (NM_182495.2,87-105).
cttaattttctggatcatt

SEQ ID NO: 433912 - DNA, 19 bp, Homo sapiens
  siRNA target sequence for FLJ25224 (NM_182495.2,128-146).
caaagttctcgttcaactt

SEQ ID NO: 433913 - DNA, 19 bp, Homo sapiens
  siRNA target sequence for FLJ25224 (NM_182495.2,138-156).
gttcaacttggaaaaccat

SEQ ID NO: 433914 - DNA, 19 bp, Homo sapiens
  siRNA target sequence for FLJ25224 (NM_182495.2,172-190).
gggaacatcttcaaaaaat

SEQ ID NO: 433915 - DNA, 19 bp, Homo sapiens
  siRNA target sequence for FLJ25224 (NM_182495.2,244-262).
cttagaataaaggacatta

SEQ ID NO: 433916 - DNA, 19 bp, Homo sapiens
  siRNA target sequence for FLJ25224 (NM_182495.2,716-734).
ctgaactgtgccagtacat

SEQ ID NO: 433917 - DNA, 19 bp, Homo sapiens
  siRNA target sequence for FLJ25224 (NM_182495.2,762-780).
ctgtgtgaggcctcaacat

SEQ ID NO: 433918 - DNA, 19 bp, Homo sapiens
  siRNA target sequence for FLJ25224 (NM_182495.2,764-782).
gtgtgaggcctcaacatat

SEQ ID NO: 433919 - DNA, 19 bp, Homo sapiens
  siRNA target sequence for FLJ25224 (NM_182495.2,807-825).
gaccactaggacaagaaat

SEQ ID NO: 433920 - DNA, 19 bp, Homo sapiens
  siRNA target sequence for FLJ25224 (NM_182495.2,867-885).
gtccaacataggagttgaa

SEQ ID NO: 433921 - DNA, 19 bp, Homo sapiens
  siRNA target sequence for FLJ25224 (NM_182495.2,869-887).
ccaacataggagttgaaat

SEQ ID NO: 433922 - DNA, 19 bp, Homo sapiens
  siRNA target sequence for FLJ40089 (NM_182496.1,298-316).
gaggacaggccttataaga

SEQ ID NO: 433923 - DNA, 19 bp, Homo sapiens
  siRNA target sequence for FLJ40089 (NM_182496.1,301-319).
gacaggccttataagatct

SEQ ID NO: 433924 - DNA, 19 bp, Homo sapiens
  siRNA target sequence for FLJ40089 (NM_182496.1,305-323).
ggccttataagatcttttt

SEQ ID NO: 433925 - DNA, 19 bp, Homo sapiens
  siRNA target sequence for FLJ40089 (NM_182496.1,326-344).
gagatctctttcttgtcaa

SEQ ID NO: 433926 - DNA, 19 bp, Homo sapiens
  siRNA target sequence for FLJ40089 (NM_182496.1,460-478).
gctttctaccctaaaagga

SEQ ID NO: 433927 - DNA, 19 bp, Homo sapiens
  siRNA target sequence for FLJ40089 (NM_182496.1,481-499).
ggtaggtcatttgaaaagt

SEQ ID NO: 433928 - DNA, 19 bp, Homo sapiens
  siRNA target sequence for FLJ40089 (NM_182496.1,482-500).
gtaggtcatttgaaaagtt

SEQ ID NO: 433929 - DNA, 19 bp, Homo sapiens
  siRNA target sequence for FLJ40089 (NM_182496.1,508-526).
ggtcctgctccgattccta

SEQ ID NO: 433930 - DNA, 19 bp, Homo sapiens
  siRNA target sequence for FLJ40089 (NM_182496.1,515-533).
ctccgattcctagattaat

SEQ ID NO: 433931 - DNA, 19 bp, Homo sapiens
  siRNA target sequence for FLJ40089 (NM_182496.1,518-536).
cgattcctagattaataga

SEQ ID NO: 433932 - DNA, 19 bp, Homo sapiens
  siRNA target sequence for FLJ40089 (NM_182496.1,535-553).
gaaggttccgacacaaaaa

SEQ ID NO: 433933 - DNA, 19 bp, Homo sapiens
  siRNA target sequence for FLJ40089 (NM_182496.1,538-556).
ggttccgacacaaaaagga

SEQ ID NO: 433934 - DNA, 19 bp, Homo sapiens
  siRNA target sequence for FLJ40089 (NM_182496.1,554-572).
ggactgtccatgaatttat

SEQ ID NO: 433935 - DNA, 19 bp, Homo sapiens
  siRNA target sequence for FLJ40089 (NM_182496.1,597-615).
gctcgagtatgctttgtca

SEQ ID NO: 433936 - DNA, 19 bp, Homo sapiens
  siRNA target sequence for FLJ40089 (NM_182496.1,598-616).
ctcgagtatgctttgtcaa

SEQ ID NO: 433937 - DNA, 19 bp, Homo sapiens
  siRNA target sequence for FLJ40089 (NM_182496.1,603-621).
gtatgctttgtcaaccaaa

SEQ ID NO: 433938 - DNA, 19 bp, Homo sapiens
  siRNA target sequence for FLJ40089 (NM_182496.1,768-786).
ggcagcacaggaaacaata

SEQ ID NO: 433939 - DNA, 19 bp, Homo sapiens
  siRNA target sequence for FLJ40089 (NM_182496.1,874-892).
ctcagggagtatatgaaat

SEQ ID NO: 433940 - DNA, 19 bp, Homo sapiens
  siRNA target sequence for FLJ40089 (NM_182496.1,879-897).
ggagtatatgaaatatggt

SEQ ID NO: 433941 - DNA, 19 bp, Homo sapiens
  siRNA target sequence for FLJ40089 (NM_182496.1,1129-1147).
cgcactccagagaaaaaga

SEQ ID NO: 433942 - DNA, 19 bp, Homo sapiens
  siRNA target sequence for FLJ40089 (NM_182496.1,1151-1169).
caaacctggctgaaagttt

SEQ ID NO: 433943 - DNA, 19 bp, Homo sapiens
  siRNA target sequence for FLJ40089 (NM_182496.1,1182-1200).
cagtttggaattcctttta

SEQ ID NO: 433944 - DNA, 19 bp, Homo sapiens
  siRNA target sequence for FLJ40089 (NM_182496.1,1204-1222).
gatgaaatggacgttgatt

SEQ ID NO: 433945 - DNA, 19 bp, Homo sapiens
  siRNA target sequence for FLJ40089 (NM_182496.1,1382-1400).
gcaacatagagtttctttt

SEQ ID NO: 433946 - DNA, 19 bp, Homo sapiens
  siRNA target sequence for FLJ40089 (NM_182496.1,1453-1471).
gcagaattgcaattaaagt

SEQ ID NO: 433947 - DNA, 19 bp, Homo sapiens
  siRNA target sequence for FLJ40089 (NM_182496.1,1519-1537).
ctgatagactcacttagta

SEQ ID NO: 433948 - DNA, 19 bp, Homo sapiens
  siRNA target sequence for FLJ40089 (NM_182496.1,1521-1539).
gatagactcacttagtaaa

SEQ ID NO: 433949 - DNA, 19 bp, Homo sapiens
  siRNA target sequence for FLJ40089 (NM_182496.1,1587-1605).
cggcctcaacccaattcaa

SEQ ID NO: 433950 - DNA, 19 bp, Homo sapiens
  siRNA target sequence for FLJ40089 (NM_182496.1,1588-1606).
ggcctcaacccaattcaaa

SEQ ID NO: 433951 - DNA, 19 bp, Homo sapiens
  siRNA target sequence for FLJ40089 (NM_182496.1,1589-1607).
gcctcaacccaattcaaaa

SEQ ID NO: 433952 - DNA, 19 bp, Homo sapiens
  siRNA target sequence for FLJ40089 (NM_182496.1,1643-1661).
gtgacctcatcgaatccat

SEQ ID NO: 433953 - DNA, 19 bp, Homo sapiens
  siRNA target sequence for FLJ40089 (NM_182496.1,1755-1773).
ccaacaggaaaggctaaaa

SEQ ID NO: 433954 - DNA, 19 bp, Homo sapiens
  siRNA target sequence for FLJ40089 (NM_182496.1,1857-1875).
caaacagcagctaccttta

SEQ ID NO: 433955 - DNA, 19 bp, Homo sapiens
  siRNA target sequence for FLJ40089 (NM_182496.1,1863-1881).
gcagctacctttagtcaat

SEQ ID NO: 433956 - DNA, 19 bp, Homo sapiens
  siRNA target sequence for FLJ36600 (NM_182497.1,337-355).
ctcctgccatgctacttta

SEQ ID NO: 433957 - DNA, 19 bp, Homo sapiens
  siRNA target sequence for FLJ36600 (NM_182497.1,339-357).
cctgccatgctactttact

SEQ ID NO: 433958 - DNA, 19 bp, Homo sapiens
  siRNA target sequence for FLJ36600 (NM_182497.1,563-581).
cggattatcagcgttactt

SEQ ID NO: 433959 - DNA, 19 bp, Homo sapiens
  siRNA target sequence for FLJ36600 (NM_182497.1,670-688).
gccactgatgactttaagt

SEQ ID NO: 433960 - DNA, 19 bp, Homo sapiens
  siRNA target sequence for FLJ36600 (NM_182497.1,710-728).
cccttcgccagctgttaga

SEQ ID NO: 433961 - DNA, 19 bp, Homo sapiens
  siRNA target sequence for MGC51082 (NM_182498.2,508-526).
cgagcattcctctgattca

SEQ ID NO: 433962 - DNA, 19 bp, Homo sapiens
  siRNA target sequence for MGC51082 (NM_182498.2,512-530).
cattcctctgattcagaat

SEQ ID NO: 433963 - DNA, 19 bp, Homo sapiens
  siRNA target sequence for MGC51082 (NM_182498.2,517-535).
ctctgattcagaatacact

SEQ ID NO: 433964 - DNA, 19 bp, Homo sapiens
  siRNA target sequence for MGC51082 (NM_182498.2,591-609).
ccactgacgatcctgaata

SEQ ID NO: 433965 - DNA, 19 bp, Homo sapiens
  siRNA target sequence for MGC51082 (NM_182498.2,592-610).
cactgacgatcctgaatat

SEQ ID NO: 433966 - DNA, 19 bp, Homo sapiens
  siRNA target sequence for MGC51082 (NM_182498.2,594-612).
ctgacgatcctgaatatga

SEQ ID NO: 433967 - DNA, 19 bp, Homo sapiens
  siRNA target sequence for DKFZp434M202 (NM_182499.1,505-523).
gtaccacctgggggattat

SEQ ID NO: 433968 - DNA, 19 bp, Homo sapiens
  siRNA target sequence for DKFZp434M202 (NM_182499.1,508-526).
ccacctgggggattatgga

SEQ ID NO: 433969 - DNA, 19 bp, Homo sapiens
  siRNA target sequence for FLJ25143 (NM_182500.1,558-576).
gagtttcctgaaagactat

SEQ ID NO: 433970 - DNA, 19 bp, Homo sapiens
  siRNA target sequence for FLJ25143 (NM_182500.1,560-578).
gtttcctgaaagactatga

SEQ ID NO: 433971 - DNA, 19 bp, Homo sapiens
  siRNA target sequence for MGC61716 (NM_182501.1,500-518).
ccagttacctgcaaaagct

SEQ ID NO: 433972 - DNA, 19 bp, Homo sapiens
  siRNA target sequence for MGC61716 (NM_182501.1,522-540).
gcttggagaagggaaatta

SEQ ID NO: 433973 - DNA, 19 bp, Homo sapiens
  siRNA target sequence for MGC61716 (NM_182501.1,694-712).
ggtcaactggaatacaagt

SEQ ID NO: 433974 - DNA, 19 bp, Homo sapiens
  siRNA target sequence for MGC61716 (NM_182501.1,745-763).
catccagacattgtaaaga

SEQ ID NO: 433975 - DNA, 19 bp, Homo sapiens
  siRNA target sequence for MGC61716 (NM_182501.1,820-838).
cgcctgggacggtaccaaa

SEQ ID NO: 433976 - DNA, 19 bp, Homo sapiens
  siRNA target sequence for MGC61716 (NM_182501.1,830-848).
ggtaccaaacccctgataa

SEQ ID NO: 433977 - DNA, 19 bp, Homo sapiens
  siRNA target sequence for MGC61716 (NM_182501.1,1110-1128).
cgaggcggaggacaatgat

SEQ ID NO: 433978 - DNA, 19 bp, Homo sapiens
  siRNA target sequence for DEADC1 (NM_182503.1,588-606).
ggtctacaacaatgaagtt

SEQ ID NO: 433979 - DNA, 19 bp, Homo sapiens
  siRNA target sequence for DEADC1 (NM_182503.1,733-751).
cacactgtgttgtatgtca

SEQ ID NO: 433980 - DNA, 19 bp, Homo sapiens
  siRNA target sequence for DEADC1 (NM_182503.1,754-772).
gtggagccgtgcattatgt

SEQ ID NO: 433981 - DNA, 19 bp, Homo sapiens
  siRNA target sequence for DEADC1 (NM_182503.1,756-774).
ggagccgtgcattatgtgt

SEQ ID NO: 433982 - DNA, 19 bp, Homo sapiens
  siRNA target sequence for DEADC1 (NM_182503.1,779-797).
ctgctctccgcctgatgaa

SEQ ID NO: 433983 - DNA, 19 bp, Homo sapiens
  siRNA target sequence for DEADC1 (NM_182503.1,781-799).
gctctccgcctgatgaaaa

SEQ ID NO: 433984 - DNA, 19 bp, Homo sapiens
  siRNA target sequence for DEADC1 (NM_182503.1,782-800).
ctctccgcctgatgaaaat

SEQ ID NO: 433985 - DNA, 19 bp, Homo sapiens
  siRNA target sequence for DEADC1 (NM_182503.1,818-836).
gctgtcagaatgaacgatt

SEQ ID NO: 433986 - DNA, 19 bp, Homo sapiens
  siRNA target sequence for DEADC1 (NM_182503.1,819-837).
ctgtcagaatgaacgattt

SEQ ID NO: 433987 - DNA, 19 bp, Homo sapiens
  siRNA target sequence for DEADC1 (NM_182503.1,842-860).
gttgtggctctgttctaaa

SEQ ID NO: 433988 - DNA, 19 bp, Homo sapiens
  siRNA target sequence for DEADC1 (NM_182503.1,890-908).
ggagaccatttcagtgtat

SEQ ID NO: 433989 - DNA, 19 bp, Homo sapiens
  siRNA target sequence for WBSCR28 (NM_182504.2,120-138).
ccgagatcacctctataat

SEQ ID NO: 433990 - DNA, 19 bp, Homo sapiens
  siRNA target sequence for WBSCR28 (NM_182504.2,121-139).
cgagatcacctctataatt

SEQ ID NO: 433991 - DNA, 19 bp, Homo sapiens
  siRNA target sequence for WBSCR28 (NM_182504.2,122-140).
gagatcacctctataattt

SEQ ID NO: 433992 - DNA, 19 bp, Homo sapiens
  siRNA target sequence for WBSCR28 (NM_182504.2,437-455).
gtctgcacggcctgatgtt

SEQ ID NO: 433993 - DNA, 19 bp, Homo sapiens
  siRNA target sequence for WBSCR28 (NM_182504.2,533-551).
gtaaggccttgcaagtgaa

SEQ ID NO: 433994 - DNA, 19 bp, Homo sapiens
  siRNA target sequence for WBSCR28 (NM_182504.2,577-595).
cagctgagacgtctgtatt

SEQ ID NO: 433995 - DNA, 19 bp, Homo sapiens
  siRNA target sequence for MGC61599 (NM_182505.3,462-480).
gaaggattcttatcacata

SEQ ID NO: 433996 - DNA, 19 bp, Homo sapiens
  siRNA target sequence for MGC61599 (NM_182505.3,496-514).
gcctgtgaacttgaagttt

SEQ ID NO: 433997 - DNA, 19 bp, Homo sapiens
  siRNA target sequence for MGC61599 (NM_182505.3,505-523).
cttgaagtttgcgcaaaat

SEQ ID NO: 433998 - DNA, 19 bp, Homo sapiens
  siRNA target sequence for MGC61599 (NM_182505.3,540-558).
cattgttattccgttgaat

SEQ ID NO: 433999 - DNA, 19 bp, Homo sapiens
  siRNA target sequence for FLJ32965 (NM_182506.1,300-318).
cgaggagggctggaagatt

SEQ ID NO: 434000 - DNA, 19 bp, Homo sapiens
  siRNA target sequence for FLJ32965 (NM_182506.1,301-319).
gaggagggctggaagattt

SEQ ID NO: 434001 - DNA, 19 bp, Homo sapiens
  siRNA target sequence for FLJ32965 (NM_182506.1,367-385).
ctgcctctgcttgtttgaa

SEQ ID NO: 434002 - DNA, 19 bp, Homo sapiens
  siRNA target sequence for FLJ32965 (NM_182506.1,375-393).
gcttgtttgaaggatgttt

SEQ ID NO: 434003 - DNA, 19 bp, Homo sapiens
  siRNA target sequence for FLJ32965 (NM_182506.1,524-542).
gccaatatgcacacaagat

SEQ ID NO: 434004 - DNA, 19 bp, Homo sapiens
  siRNA target sequence for FLJ32965 (NM_182506.1,526-544).
caatatgcacacaagatct

SEQ ID NO: 434005 - DNA, 19 bp, Homo sapiens
  siRNA target sequence for FLJ32965 (NM_182506.1,568-586).
gaggccctgtagatgagaa

SEQ ID NO: 434006 - DNA, 19 bp, Homo sapiens
  siRNA target sequence for FLJ32965 (NM_182506.1,647-665).
ggcagatatgctgagaaat

SEQ ID NO: 434007 - DNA, 19 bp, Homo sapiens
  siRNA target sequence for FLJ32965 (NM_182506.1,761-779).
gcctaataagcacatctat

SEQ ID NO: 434008 - DNA, 19 bp, Homo sapiens
  siRNA target sequence for FLJ32965 (NM_182506.1,763-781).
ctaataagcacatctatgt

SEQ ID NO: 434009 - DNA, 19 bp, Homo sapiens
  siRNA target sequence for FLJ32965 (NM_182506.1,937-955).
ggttatatgacggaattga

SEQ ID NO: 434010 - DNA, 19 bp, Homo sapiens
  siRNA target sequence for FLJ32965 (NM_182506.1,1141-1159).
ctcccagtgaattctcaaa

SEQ ID NO: 434011 - DNA, 19 bp, Homo sapiens
  siRNA target sequence for FLJ32965 (NM_182506.1,1243-1261).
gtgcacgttccaaggttaa

SEQ ID NO: 434012 - DNA, 19 bp, Homo sapiens
  siRNA target sequence for FLJ32965 (NM_182506.1,1245-1263).
gcacgttccaaggttaagt

SEQ ID NO: 434013 - DNA, 19 bp, Homo sapiens
  siRNA target sequence for LOC144501 (NM_182507.1,240-258).
cgacctcgggcatctctat

SEQ ID NO: 434014 - DNA, 19 bp, Homo sapiens
  siRNA target sequence for LOC144501 (NM_182507.1,482-500).
cctctttccctccagatat

SEQ ID NO: 434015 - DNA, 19 bp, Homo sapiens
  siRNA target sequence for LOC144501 (NM_182507.1,496-514).
gatatcctactctccttta

SEQ ID NO: 434016 - DNA, 19 bp, Homo sapiens
  siRNA target sequence for FLJ40919 (NM_182508.1,176-194).
gggcaacagcgctactttt

SEQ ID NO: 434017 - DNA, 19 bp, Homo sapiens
  siRNA target sequence for FLJ40919 (NM_182508.1,179-197).
caacagcgctacttttaca

SEQ ID NO: 434018 - DNA, 19 bp, Homo sapiens
  siRNA target sequence for FLJ40919 (NM_182508.1,185-203).
cgctacttttacagcatta

SEQ ID NO: 434019 - DNA, 19 bp, Homo sapiens
  siRNA target sequence for FLJ40919 (NM_182508.1,198-216).
gcattatgaggatttacaa

SEQ ID NO: 434020 - DNA, 19 bp, Homo sapiens
  siRNA target sequence for FLJ40919 (NM_182508.1,238-256).
cctgcagacccgctacatt

SEQ ID NO: 434021 - DNA, 19 bp, Homo sapiens
  siRNA target sequence for FLJ40919 (NM_182508.1,242-260).
cagacccgctacattcaca

SEQ ID NO: 434022 - DNA, 19 bp, Homo sapiens
  siRNA target sequence for FLJ40919 (NM_182508.1,275-293).
cagctgcttggctatatta

SEQ ID NO: 434023 - DNA, 19 bp, Homo sapiens
  siRNA target sequence for FLJ40919 (NM_182508.1,277-295).
gctgcttggctatattact

SEQ ID NO: 434024 - DNA, 19 bp, Homo sapiens
  siRNA target sequence for FLJ40919 (NM_182508.1,296-314).
caacgggaagccttgtctt

SEQ ID NO: 434025 - DNA, 19 bp, Homo sapiens
  siRNA target sequence for FLJ40919 (NM_182508.1,310-328).
gtcttatgctcttgtactt

SEQ ID NO: 434026 - DNA, 19 bp, Homo sapiens
  siRNA target sequence for FLJ40919 (NM_182508.1,317-335).
gctcttgtacttagagatt

SEQ ID NO: 434027 - DNA, 19 bp, Homo sapiens
  siRNA target sequence for FLJ40919 (NM_182508.1,417-435).
cagtactacctgtatctgt

SEQ ID NO: 434028 - DNA, 19 bp, Homo sapiens
  siRNA target sequence for FLJ40919 (NM_182508.1,440-458).
ctacctagggcccaaagta

SEQ ID NO: 434029 - DNA, 19 bp, Homo sapiens
  siRNA target sequence for FLJ40919 (NM_182508.1,443-461).
cctagggcccaaagtaaaa

SEQ ID NO: 434030 - DNA, 19 bp, Homo sapiens
  siRNA target sequence for FLJ32252 (NM_182510.1,791-809).
caactccagaccaatcaga

SEQ ID NO: 434031 - DNA, 19 bp, Homo sapiens
  siRNA target sequence for FLJ32252 (NM_182510.1,841-859).
gtgggacccccgatctaga

SEQ ID NO: 434032 - DNA, 19 bp, Homo sapiens
  siRNA target sequence for FLJ32252 (NM_182510.1,1133-1151).
ggatgcgctgccctaaact

SEQ ID NO: 434033 - DNA, 19 bp, Homo sapiens
  siRNA target sequence for FLJ32252 (NM_182510.1,1498-1516).
ggaggaaggacgtgtcaaa

SEQ ID NO: 434034 - DNA, 19 bp, Homo sapiens
  siRNA target sequence for FLJ32252 (NM_182510.1,1582-1600).
ggatcagcgtggtccaaaa

SEQ ID NO: 434035 - DNA, 19 bp, Homo sapiens
  siRNA target sequence for FLJ32252 (NM_182510.1,1590-1608).
gtggtccaaaaggacttat

SEQ ID NO: 434036 - DNA, 19 bp, Homo sapiens
  siRNA target sequence for FLJ32252 (NM_182510.1,1629-1647).
gaacccaaggggaagacat

SEQ ID NO: 434037 - DNA, 19 bp, Homo sapiens
  siRNA target sequence for CBLN2 (NM_182511.2,893-911).
ccgcaccatgaccatctat

SEQ ID NO: 434038 - DNA, 19 bp, Homo sapiens
  siRNA target sequence for CBLN2 (NM_182511.2,914-932).
cgaccaggtattagtaaat

SEQ ID NO: 434039 - DNA, 19 bp, Homo sapiens
  siRNA target sequence for CBLN2 (NM_182511.2,915-933).
gaccaggtattagtaaata

SEQ ID NO: 434040 - DNA, 19 bp, Homo sapiens
  siRNA target sequence for CBLN2 (NM_182511.2,948-966).
gatcttgcttccagtatat

SEQ ID NO: 434041 - DNA, 19 bp, Homo sapiens
  siRNA target sequence for CBLN2 (NM_182511.2,1004-1022).
ccacgtggtcaaagtgtat

SEQ ID NO: 434042 - DNA, 19 bp, Homo sapiens
  siRNA target sequence for CBLN2 (NM_182511.2,1005-1023).
cacgtggtcaaagtgtata

SEQ ID NO: 434043 - DNA, 19 bp, Homo sapiens
  siRNA target sequence for CBLN2 (NM_182511.2,1008-1026).
gtggtcaaagtgtataaca

SEQ ID NO: 434044 - DNA, 19 bp, Homo sapiens
  siRNA target sequence for CBLN2 (NM_182511.2,1010-1028).
ggtcaaagtgtataacaga

SEQ ID NO: 434045 - DNA, 19 bp, Homo sapiens
  siRNA target sequence for FLJ90806 (NM_182513.1,414-432).
cgtgtacgtggctcaactt

SEQ ID NO: 434046 - DNA, 19 bp, Homo sapiens
  siRNA target sequence for FLJ90806 (NM_182513.1,415-433).
gtgtacgtggctcaacttt

SEQ ID NO: 434047 - DNA, 19 bp, Homo sapiens
  siRNA target sequence for FLJ90806 (NM_182513.1,430-448).
ctttaccaccaagttagta

SEQ ID NO: 434048 - DNA, 19 bp, Homo sapiens
  siRNA target sequence for FLJ90806 (NM_182513.1,439-457).
caagttagtaaaattgagt

SEQ ID NO: 434049 - DNA, 19 bp, Homo sapiens
  siRNA target sequence for FLJ32011 (NM_182516.1,402-420).
caagcctctccaaaatgga

SEQ ID NO: 434050 - DNA, 19 bp, Homo sapiens
  siRNA target sequence for FLJ32011 (NM_182516.1,533-551).
gttgcctgttcaatctact

SEQ ID NO: 434051 - DNA, 19 bp, Homo sapiens
  siRNA target sequence for FLJ32011 (NM_182516.1,536-554).
gcctgttcaatctactgat

SEQ ID NO: 434052 - DNA, 19 bp, Homo sapiens
  siRNA target sequence for FLJ32011 (NM_182516.1,537-555).
cctgttcaatctactgatt

SEQ ID NO: 434053 - DNA, 19 bp, Homo sapiens
  siRNA target sequence for FLJ32011 (NM_182516.1,574-592).
ggtccaaggccctgactat

SEQ ID NO: 434054 - DNA, 19 bp, Homo sapiens
  siRNA target sequence for FLJ32011 (NM_182516.1,616-634).
ctctaacccggctacagaa

SEQ ID NO: 434055 - DNA, 19 bp, Homo sapiens
  siRNA target sequence for MGC52423 (NM_182517.1,318-336).
ctgtgctggtaggatttgt

SEQ ID NO: 434056 - DNA, 19 bp, Homo sapiens
  siRNA target sequence for MGC52423 (NM_182517.1,485-503).
ggcttcatcgaggacaatt

SEQ ID NO: 434057 - DNA, 19 bp, Homo sapiens
  siRNA target sequence for LOC149469 (NM_182518.1,45-63).
gggcaggtgttcctgttaa

SEQ ID NO: 434058 - DNA, 19 bp, Homo sapiens
  siRNA target sequence for LOC149469 (NM_182518.1,46-64).
ggcaggtgttcctgttaat

SEQ ID NO: 434059 - DNA, 19 bp, Homo sapiens
  siRNA target sequence for LOC149469 (NM_182518.1,115-133).
gtcatctgcaccaaactgt

SEQ ID NO: 434060 - DNA, 19 bp, Homo sapiens
  siRNA target sequence for LOC149469 (NM_182518.1,164-182).
gtctgaacaggaattggaa

SEQ ID NO: 434061 - DNA, 19 bp, Homo sapiens
  siRNA target sequence for LOC149469 (NM_182518.1,280-298).
ggcagtatcggtttgtcat

SEQ ID NO: 434062 - DNA, 19 bp, Homo sapiens
  siRNA target sequence for LOC149469 (NM_182518.1,281-299).
gcagtatcggtttgtcatt

SEQ ID NO: 434063 - DNA, 19 bp, Homo sapiens
  siRNA target sequence for LOC149469 (NM_182518.1,305-323).
ggaccttagcccatctact

SEQ ID NO: 434064 - DNA, 19 bp, Homo sapiens
  siRNA target sequence for LOC149469 (NM_182518.1,440-458).
ccagcctgagatctatgta

SEQ ID NO: 434065 - DNA, 19 bp, Homo sapiens
  siRNA target sequence for LOC149469 (NM_182518.1,443-461).
gcctgagatctatgtaact

SEQ ID NO: 434066 - DNA, 19 bp, Homo sapiens
  siRNA target sequence for LOC149469 (NM_182518.1,491-509).
gcagtcccaccagatgata

SEQ ID NO: 434067 - DNA, 19 bp, Homo sapiens
  siRNA target sequence for LOC149469 (NM_182518.1,492-510).
cagtcccaccagatgatat

SEQ ID NO: 434068 - DNA, 19 bp, Homo sapiens
  siRNA target sequence for C20orf186 (NM_182519.1,47-65).
ccttgggtgttggtgatat

SEQ ID NO: 434069 - DNA, 19 bp, Homo sapiens
  siRNA target sequence for C20orf186 (NM_182519.1,48-66).
cttgggtgttggtgatatt

SEQ ID NO: 434070 - DNA, 19 bp, Homo sapiens
  siRNA target sequence for C20orf186 (NM_182519.1,110-128).
ccaacggcaaaaaacttga

SEQ ID NO: 434071 - DNA, 19 bp, Homo sapiens
  siRNA target sequence for C20orf186 (NM_182519.1,111-129).
caacggcaaaaaacttgat

SEQ ID NO: 434072 - DNA, 19 bp, Homo sapiens
  siRNA target sequence for C20orf186 (NM_182519.1,116-134).
gcaaaaaacttgatggtat

SEQ ID NO: 434073 - DNA, 19 bp, Homo sapiens
  siRNA target sequence for C20orf186 (NM_182519.1,117-135).
caaaaaacttgatggtatt

SEQ ID NO: 434074 - DNA, 19 bp, Homo sapiens
  siRNA target sequence for C20orf186 (NM_182519.1,183-201).
gggcaaataccgatatggt

SEQ ID NO: 434075 - DNA, 19 bp, Homo sapiens
  siRNA target sequence for C20orf186 (NM_182519.1,253-271).
cgcagtgccgagaatgcat

SEQ ID NO: 434076 - DNA, 19 bp, Homo sapiens
  siRNA target sequence for C20orf186 (NM_182519.1,678-696).
cctggacatcgcagtagaa

SEQ ID NO: 434077 - DNA, 19 bp, Homo sapiens
  siRNA target sequence for C20orf186 (NM_182519.1,778-796).
ctagggggcatcaaagtca

SEQ ID NO: 434078 - DNA, 19 bp, Homo sapiens
  siRNA target sequence for C20orf186 (NM_182519.1,817-835).
cccaatctcgtggacaatt

SEQ ID NO: 434079 - DNA, 19 bp, Homo sapiens
  siRNA target sequence for C20orf186 (NM_182519.1,818-836).
ccaatctcgtggacaattt

SEQ ID NO: 434080 - DNA, 19 bp, Homo sapiens
  siRNA target sequence for C20orf186 (NM_182519.1,819-837).
caatctcgtggacaattta

SEQ ID NO: 434081 - DNA, 19 bp, Homo sapiens
  siRNA target sequence for C20orf186 (NM_182519.1,1298-1316).
ccgagtcctgcccacttat

SEQ ID NO: 434082 - DNA, 19 bp, Homo sapiens
  siRNA target sequence for C20orf186 (NM_182519.1,1430-1448).
ctaccatctgcctcattga

SEQ ID NO: 434083 - DNA, 19 bp, Homo sapiens
  siRNA target sequence for C20orf186 (NM_182519.1,1542-1560).
ctcaaacgtgggcaacttt

SEQ ID NO: 434084 - DNA, 19 bp, Homo sapiens
  siRNA target sequence for C20orf186 (NM_182519.1,1607-1625).
cattcatgcccgcaatgaa

SEQ ID NO: 434085 - DNA, 19 bp, Homo sapiens
  siRNA target sequence for C20orf186 (NM_182519.1,1663-1681).
ctcaacatcgactttagca

SEQ ID NO: 434086 - DNA, 19 bp, Homo sapiens
  siRNA target sequence for FLJ36561 (NM_182520.1,739-757).
ggcagagtagggaccatta

SEQ ID NO: 434087 - DNA, 19 bp, Homo sapiens
  siRNA target sequence for FLJ36561 (NM_182520.1,813-831).
gcctccacccgctatgagt

SEQ ID NO: 434088 - DNA, 19 bp, Homo sapiens
  siRNA target sequence for FLJ36561 (NM_182520.1,823-841).
gctatgagtccctattgga

SEQ ID NO: 434089 - DNA, 19 bp, Homo sapiens
  siRNA target sequence for FLJ36561 (NM_182520.1,1033-1051).
gagcaaagccccacttcaa

SEQ ID NO: 434090 - DNA, 19 bp, Homo sapiens
  siRNA target sequence for ZSWIM2 (NM_182521.1,52-70).
ggctataaggcctctgaaa

SEQ ID NO: 434091 - DNA, 19 bp, Homo sapiens
  siRNA target sequence for ZSWIM2 (NM_182521.1,192-210).
catggatttccgagttttt

SEQ ID NO: 434092 - DNA, 19 bp, Homo sapiens
  siRNA target sequence for ZSWIM2 (NM_182521.1,195-213).
ggatttccgagtttttcta

SEQ ID NO: 434093 - DNA, 19 bp, Homo sapiens
  siRNA target sequence for ZSWIM2 (NM_182521.1,363-381).
cttgcttcgggggatacat

SEQ ID NO: 434094 - DNA, 19 bp, Homo sapiens
  siRNA target sequence for ZSWIM2 (NM_182521.1,372-390).
ggggatacatcgagttcaa

SEQ ID NO: 434095 - DNA, 19 bp, Homo sapiens
  siRNA target sequence for ZSWIM2 (NM_182521.1,373-391).
gggatacatcgagttcaaa

SEQ ID NO: 434096 - DNA, 19 bp, Homo sapiens
  siRNA target sequence for ZSWIM2 (NM_182521.1,392-410).
ctccccaaccaggaacaaa

SEQ ID NO: 434097 - DNA, 19 bp, Homo sapiens
  siRNA target sequence for ZSWIM2 (NM_182521.1,488-506).
gtcaagagctacttttaga

SEQ ID NO: 434098 - DNA, 19 bp, Homo sapiens
  siRNA target sequence for ZSWIM2 (NM_182521.1,534-552).
gtttggctgtggcaatagt

SEQ ID NO: 434099 - DNA, 19 bp, Homo sapiens
  siRNA target sequence for ZSWIM2 (NM_182521.1,544-562).
ggcaatagtattcatataa

SEQ ID NO: 434100 - DNA, 19 bp, Homo sapiens
  siRNA target sequence for ZSWIM2 (NM_182521.1,643-661).
gcaccattaaaactgattt

SEQ ID NO: 434101 - DNA, 19 bp, Homo sapiens
  siRNA target sequence for ZSWIM2 (NM_182521.1,655-673).
ctgattttggaggaattca

SEQ ID NO: 434102 - DNA, 19 bp, Homo sapiens
  siRNA target sequence for ZSWIM2 (NM_182521.1,727-745).
cttgggattccctgtaata

SEQ ID NO: 434103 - DNA, 19 bp, Homo sapiens
  siRNA target sequence for ZSWIM2 (NM_182521.1,730-748).
gggattccctgtaataact

SEQ ID NO: 434104 - DNA, 19 bp, Homo sapiens
  siRNA target sequence for ZSWIM2 (NM_182521.1,740-758).
gtaataactgcaaacagtt

SEQ ID NO: 434105 - DNA, 19 bp, Homo sapiens
  siRNA target sequence for ZSWIM2 (NM_182521.1,761-779).
caattgaggggaagtgtta

SEQ ID NO: 434106 - DNA, 19 bp, Homo sapiens
  siRNA target sequence for ZSWIM2 (NM_182521.1,768-786).
ggggaagtgttataagtgt

SEQ ID NO: 434107 - DNA, 19 bp, Homo sapiens
  siRNA target sequence for ZSWIM2 (NM_182521.1,783-801).
gtgtaccgaatgcatagaa

SEQ ID NO: 434108 - DNA, 19 bp, Homo sapiens
  siRNA target sequence for ZSWIM2 (NM_182521.1,785-803).
gtaccgaatgcatagaata

SEQ ID NO: 434109 - DNA, 19 bp, Homo sapiens
  siRNA target sequence for ZSWIM2 (NM_182521.1,788-806).
ccgaatgcatagaatatca

SEQ ID NO: 434110 - DNA, 19 bp, Homo sapiens
  siRNA target sequence for ZSWIM2 (NM_182521.1,790-808).
gaatgcatagaatatcact

SEQ ID NO: 434111 - DNA, 19 bp, Homo sapiens
  siRNA target sequence for ZSWIM2 (NM_182521.1,838-856).
catctttcccacacgttta

SEQ ID NO: 434112 - DNA, 19 bp, Homo sapiens
  siRNA target sequence for ZSWIM2 (NM_182521.1,841-859).
ctttcccacacgtttacat

SEQ ID NO: 434113 - DNA, 19 bp, Homo sapiens
  siRNA target sequence for ZSWIM2 (NM_182521.1,846-864).
ccacacgtttacatttcgt

SEQ ID NO: 434114 - DNA, 19 bp, Homo sapiens
  siRNA target sequence for ZSWIM2 (NM_182521.1,990-1008).
cacaccaaaacacattgta

SEQ ID NO: 434115 - DNA, 19 bp, Homo sapiens
  siRNA target sequence for ZSWIM2 (NM_182521.1,1015-1033).
ctgcctctccaactgatta

SEQ ID NO: 434116 - DNA, 19 bp, Homo sapiens
  siRNA target sequence for ZSWIM2 (NM_182521.1,1017-1035).
gcctctccaactgattact

SEQ ID NO: 434117 - DNA, 19 bp, Homo sapiens
  siRNA target sequence for ZSWIM2 (NM_182521.1,1018-1036).
cctctccaactgattacta

SEQ ID NO: 434118 - DNA, 19 bp, Homo sapiens
  siRNA target sequence for ZSWIM2 (NM_182521.1,1019-1037).
ctctccaactgattactaa

SEQ ID NO: 434119 - DNA, 19 bp, Homo sapiens
  siRNA target sequence for ZSWIM2 (NM_182521.1,1021-1039).
ctccaactgattactaaga

SEQ ID NO: 434120 - DNA, 19 bp, Homo sapiens
  siRNA target sequence for ZSWIM2 (NM_182521.1,1060-1078).
ggctaccagtgtctacttt

SEQ ID NO: 434121 - DNA, 19 bp, Homo sapiens
  siRNA target sequence for ZSWIM2 (NM_182521.1,1079-1097).
gtttgaaggcatttcatct

SEQ ID NO: 434122 - DNA, 19 bp, Homo sapiens
  siRNA target sequence for ZSWIM2 (NM_182521.1,1096-1114).
cttggtcaacatacaagat

SEQ ID NO: 434123 - DNA, 19 bp, Homo sapiens
  siRNA target sequence for ZSWIM2 (NM_182521.1,1134-1152).
gtttcacaggaagtgtatt

SEQ ID NO: 434124 - DNA, 19 bp, Homo sapiens
  siRNA target sequence for ZSWIM2 (NM_182521.1,1246-1264).
caagcacatcagtctgttt

SEQ ID NO: 434125 - DNA, 19 bp, Homo sapiens
  siRNA target sequence for ZSWIM2 (NM_182521.1,1250-1268).
cacatcagtctgtttcaaa

SEQ ID NO: 434126 - DNA, 19 bp, Homo sapiens
  siRNA target sequence for ZSWIM2 (NM_182521.1,1273-1291).
gacatcattcatctatcaa

SEQ ID NO: 434127 - DNA, 19 bp, Homo sapiens
  siRNA target sequence for ZSWIM2 (NM_182521.1,1318-1336).
cctggtactggattagtct

SEQ ID NO: 434128 - DNA, 19 bp, Homo sapiens
  siRNA target sequence for ZSWIM2 (NM_182521.1,1319-1337).
ctggtactggattagtctt

SEQ ID NO: 434129 - DNA, 19 bp, Homo sapiens
  siRNA target sequence for ZSWIM2 (NM_182521.1,1321-1339).
ggtactggattagtcttaa

SEQ ID NO: 434130 - DNA, 19 bp, Homo sapiens
  siRNA target sequence for ZSWIM2 (NM_182521.1,1364-1382).
ctagcatacctcagtgtaa

SEQ ID NO: 434131 - DNA, 19 bp, Homo sapiens
  siRNA target sequence for ZSWIM2 (NM_182521.1,1367-1385).
gcatacctcagtgtaattt

SEQ ID NO: 434132 - DNA, 19 bp, Homo sapiens
  siRNA target sequence for ZSWIM2 (NM_182521.1,1441-1459).
gataatctatgctctatca

SEQ ID NO: 434133 - DNA, 19 bp, Homo sapiens
  siRNA target sequence for ZSWIM2 (NM_182521.1,1519-1537).
cccaggtatcttcaagatt

SEQ ID NO: 434134 - DNA, 19 bp, Homo sapiens
  siRNA target sequence for ZSWIM2 (NM_182521.1,1583-1601).
ctcctattgttcataagaa

SEQ ID NO: 434135 - DNA, 19 bp, Homo sapiens
  siRNA target sequence for ZSWIM2 (NM_182521.1,1585-1603).
cctattgttcataagaata

SEQ ID NO: 434136 - DNA, 19 bp, Homo sapiens
  siRNA target sequence for ZSWIM2 (NM_182521.1,1688-1706).
gtaataaccacaacctaaa

SEQ ID NO: 434137 - DNA, 19 bp, Homo sapiens
  siRNA target sequence for ZSWIM2 (NM_182521.1,1715-1733).
ctgccactaaaataagaga

SEQ ID NO: 434138 - DNA, 19 bp, Homo sapiens
  siRNA target sequence for ZSWIM2 (NM_182521.1,1759-1777).
ccagaggatttcaatctta

SEQ ID NO: 434139 - DNA, 19 bp, Homo sapiens
  siRNA target sequence for ZSWIM2 (NM_182521.1,1760-1778).
cagaggatttcaatcttat

SEQ ID NO: 434140 - DNA, 19 bp, Homo sapiens
  siRNA target sequence for ZSWIM2 (NM_182521.1,1765-1783).
gatttcaatcttattgtca

SEQ ID NO: 434141 - DNA, 19 bp, Homo sapiens
  siRNA target sequence for ZSWIM2 (NM_182521.1,1788-1806).
gagcacagctaaacttagt

SEQ ID NO: 434142 - DNA, 19 bp, Homo sapiens
  siRNA target sequence for ZSWIM2 (NM_182521.1,1790-1808).
gcacagctaaacttagttt

SEQ ID NO: 434143 - DNA, 19 bp, Homo sapiens
  siRNA target sequence for ZSWIM2 (NM_182521.1,1796-1814).
ctaaacttagtttgtctaa

SEQ ID NO: 434144 - DNA, 19 bp, Homo sapiens
  siRNA target sequence for ZSWIM2 (NM_182521.1,1801-1819).
cttagtttgtctaaaaggt

SEQ ID NO: 434145 - DNA, 19 bp, Homo sapiens
  siRNA target sequence for ZSWIM2 (NM_182521.1,1834-1852).
ggggaaattacacgaaaat

SEQ ID NO: 434146 - DNA, 19 bp, Homo sapiens
  siRNA target sequence for ZSWIM2 (NM_182521.1,1836-1854).
ggaaattacacgaaaatgt

SEQ ID NO: 434147 - DNA, 19 bp, Homo sapiens
  siRNA target sequence for ZSWIM2 (NM_182521.1,1876-1894).
gtgtctcactctgtaaata

SEQ ID NO: 434148 - DNA, 19 bp, Homo sapiens
  siRNA target sequence for ZSWIM2 (NM_182521.1,1901-1919).
gtactgagctatctttaat

SEQ ID NO: 434149 - DNA, 19 bp, Homo sapiens
  siRNA target sequence for FLJ25161 (NM_182522.2,510-528).
gtcgcactggctctttcta

SEQ ID NO: 434150 - DNA, 19 bp, Homo sapiens
  siRNA target sequence for FLJ25161 (NM_182522.2,637-655).
gtgcacaggtgctgcaata

SEQ ID NO: 434151 - DNA, 19 bp, Homo sapiens
  siRNA target sequence for FLJ25161 (NM_182522.2,651-669).
caataagaaccgcatagaa

SEQ ID NO: 434152 - DNA, 19 bp, Homo sapiens
  siRNA target sequence for FLJ25161 (NM_182522.2,729-747).
ggctcaaccttcttgtgtt

SEQ ID NO: 434153 - DNA, 19 bp, Homo sapiens
  siRNA target sequence for FLJ25161 (NM_182522.2,812-830).
gtaaagtgctgccagatta

SEQ ID NO: 434154 - DNA, 19 bp, Homo sapiens
  siRNA target sequence for FLJ25161 (NM_182522.2,848-866).
gcagtggcaataaagtcaa

SEQ ID NO: 434155 - DNA, 19 bp, Homo sapiens
  siRNA target sequence for FLJ25161 (NM_182522.2,862-880).
gtcaaaactacgaaggtaa

SEQ ID NO: 434156 - DNA, 19 bp, Homo sapiens
  siRNA target sequence for MGC61571 (NM_182523.1,195-213).
catgtcgaaaaagatgttt

SEQ ID NO: 434157 - DNA, 19 bp, Homo sapiens
  siRNA target sequence for MGC61571 (NM_182523.1,215-233).
gatccctaaaataatgaga

SEQ ID NO: 434158 - DNA, 19 bp, Homo sapiens
  siRNA target sequence for MGC61571 (NM_182523.1,248-266).
gaggtgttctgaacaagtt

SEQ ID NO: 434159 - DNA, 19 bp, Homo sapiens
  siRNA target sequence for MGC61571 (NM_182523.1,297-315).
ggagttcttatggtagtaa

SEQ ID NO: 434160 - DNA, 19 bp, Homo sapiens
  siRNA target sequence for LOC152687 (NM_182524.1,553-571).
gtttaccagtgcttgtcaa

SEQ ID NO: 434161 - DNA, 19 bp, Homo sapiens
  siRNA target sequence for LOC152687 (NM_182524.1,1459-1477).
caatcctcaactcttatat

SEQ ID NO: 434162 - DNA, 19 bp, Homo sapiens
  siRNA target sequence for LOC152687 (NM_182524.1,1463-1481).
cctcaactcttatattaca

SEQ ID NO: 434163 - DNA, 19 bp, Homo sapiens
  siRNA target sequence for LOC152687 (NM_182524.1,1471-1489).
cttatattacacaagagaa

SEQ ID NO: 434164 - DNA, 19 bp, Homo sapiens
  siRNA target sequence for FLJ32770 (NM_182525.1,253-271).
cttgtcctccgcactcaat

SEQ ID NO: 434165 - DNA, 19 bp, Homo sapiens
  siRNA target sequence for FLJ32770 (NM_182525.1,462-480).
gaactgcacagctttttga

SEQ ID NO: 434166 - DNA, 19 bp, Homo sapiens
  siRNA target sequence for FLJ33387 (NM_182526.1,326-344).
gagttcgtggtgaacttga

SEQ ID NO: 434167 - DNA, 19 bp, Homo sapiens
  siRNA target sequence for FLJ33387 (NM_182526.1,369-387).
gcgtgtgggccctcttcat

SEQ ID NO: 434168 - DNA, 19 bp, Homo sapiens
  siRNA target sequence for LOC165257 (NM_182528.1,1217-1235).
caggtacgcggcatctact

SEQ ID NO: 434169 - DNA, 19 bp, Homo sapiens
  siRNA target sequence for LOC165257 (NM_182528.1,1220-1238).
gtacgcggcatctacttct

SEQ ID NO: 434170 - DNA, 19 bp, Homo sapiens
  siRNA target sequence for LOC165257 (NM_182528.1,1370-1388).
gtggtgctgcacttggatt

SEQ ID NO: 434171 - DNA, 19 bp, Homo sapiens
  siRNA target sequence for LOC165257 (NM_182528.1,1389-1407).
caggggacgaagtgtatgt

SEQ ID NO: 434172 - DNA, 19 bp, Homo sapiens
  siRNA target sequence for LOC165257 (NM_182528.1,1391-1409).
ggggacgaagtgtatgtga

SEQ ID NO: 434173 - DNA, 19 bp, Homo sapiens
  siRNA target sequence for LOC165257 (NM_182528.1,1427-1445).
gctcacggaggcaataata

SEQ ID NO: 434174 - DNA, 19 bp, Homo sapiens
  siRNA target sequence for LOC165257 (NM_182528.1,1428-1446).
ctcacggaggcaataataa

SEQ ID NO: 434175 - DNA, 19 bp, Homo sapiens
  siRNA target sequence for LOC165257 (NM_182528.1,1430-1448).
cacggaggcaataataaca

SEQ ID NO: 434176 - DNA, 19 bp, Homo sapiens
  siRNA target sequence for LOC165257 (NM_182528.1,1433-1451).
ggaggcaataataacaagt

SEQ ID NO: 434177 - DNA, 19 bp, Homo sapiens
  siRNA target sequence for LOC165257 (NM_182528.1,1436-1454).
ggcaataataacaagtaca

SEQ ID NO: 434178 - DNA, 19 bp, Homo sapiens
  siRNA target sequence for LOC165257 (NM_182528.1,1456-1474).
cacgttctcgggctttctt

SEQ ID NO: 434179 - DNA, 19 bp, Homo sapiens
  siRNA target sequence for LOC165257 (NM_182528.1,1458-1476).
cgttctcgggctttcttct

SEQ ID NO: 434180 - DNA, 19 bp, Homo sapiens
  siRNA target sequence for FLJ25056 (NM_182530.1,237-255).
cgatagttgccctctatat

SEQ ID NO: 434181 - DNA, 19 bp, Homo sapiens
  siRNA target sequence for FLJ25056 (NM_182530.1,238-256).
gatagttgccctctatata

SEQ ID NO: 434182 - DNA, 19 bp, Homo sapiens
  siRNA target sequence for FLJ25056 (NM_182530.1,246-264).
ccctctatatacttagctt

SEQ ID NO: 434183 - DNA, 19 bp, Homo sapiens
  siRNA target sequence for FLJ25056 (NM_182530.1,247-265).
cctctatatacttagctta

SEQ ID NO: 434184 - DNA, 19 bp, Homo sapiens
  siRNA target sequence for FLJ25056 (NM_182530.1,248-266).
ctctatatacttagcttaa

SEQ ID NO: 434185 - DNA, 19 bp, Homo sapiens
  siRNA target sequence for FLJ25056 (NM_182530.1,295-313).
ccctccaagcaatatcaca

SEQ ID NO: 434186 - DNA, 19 bp, Homo sapiens
  siRNA target sequence for FLJ25056 (NM_182530.1,296-314).
cctccaagcaatatcacaa

SEQ ID NO: 434187 - DNA, 19 bp, Homo sapiens
  siRNA target sequence for FLJ25056 (NM_182530.1,381-399).
caccggcctccttacaagt

SEQ ID NO: 434188 - DNA, 19 bp, Homo sapiens
  siRNA target sequence for FLJ25056 (NM_182530.1,391-409).
cttacaagtacctgaaatt

SEQ ID NO: 434189 - DNA, 19 bp, Homo sapiens
  siRNA target sequence for FLJ25056 (NM_182530.1,451-469).
ccccatccggggaatgaaa

SEQ ID NO: 434190 - DNA, 19 bp, Homo sapiens
  siRNA target sequence for FLJ25056 (NM_182530.1,453-471).
ccatccggggaatgaaaga

SEQ ID NO: 434191 - DNA, 19 bp, Homo sapiens
  siRNA target sequence for FLJ25056 (NM_182530.1,454-472).
catccggggaatgaaagaa

SEQ ID NO: 434192 - DNA, 19 bp, Homo sapiens
  siRNA target sequence for FLJ25056 (NM_182530.1,525-543).
ggcgatggtcagaagacaa

SEQ ID NO: 434193 - DNA, 19 bp, Homo sapiens
  siRNA target sequence for FLJ25056 (NM_182530.1,605-623).
gatacaaccatcagttcta

SEQ ID NO: 434194 - DNA, 19 bp, Homo sapiens
  siRNA target sequence for FLJ25056 (NM_182530.1,612-630).
ccatcagttctattcagat

SEQ ID NO: 434195 - DNA, 19 bp, Homo sapiens
  siRNA target sequence for FLJ25056 (NM_182530.1,640-658).
ccagcaaataatagatcat

SEQ ID NO: 434196 - DNA, 19 bp, Homo sapiens
  siRNA target sequence for FLJ25056 (NM_182530.1,682-700).
gtgcggatctggaaattat

SEQ ID NO: 434197 - DNA, 19 bp, Homo sapiens
  siRNA target sequence for FLJ25056 (NM_182530.1,684-702).
gcggatctggaaattataa

SEQ ID NO: 434198 - DNA, 19 bp, Homo sapiens
  siRNA target sequence for FLJ25056 (NM_182530.1,782-800).
gtcttccagtgcaaattca

SEQ ID NO: 434199 - DNA, 19 bp, Homo sapiens
  siRNA target sequence for FLJ25056 (NM_182530.1,881-899).
cagggatatcagcacattt

SEQ ID NO: 434200 - DNA, 19 bp, Homo sapiens
  siRNA target sequence for FLJ25056 (NM_182530.1,909-927).
ctgtagccccattttctga

SEQ ID NO: 434201 - DNA, 19 bp, Homo sapiens
  siRNA target sequence for FLJ25056 (NM_182530.1,970-988).
ctgttcaactgatccttat

SEQ ID NO: 434202 - DNA, 19 bp, Homo sapiens
  siRNA target sequence for FLJ25056 (NM_182530.1,972-990).
gttcaactgatccttattt

SEQ ID NO: 434203 - DNA, 19 bp, Homo sapiens
  siRNA target sequence for FLJ25056 (NM_182530.1,1003-1021).
cttcaccgattacttcttt

SEQ ID NO: 434204 - DNA, 19 bp, Homo sapiens
  siRNA target sequence for LOC199964 (NM_182532.1,315-333).
ccaccctccgctattgcat

SEQ ID NO: 434205 - DNA, 19 bp, Homo sapiens
  siRNA target sequence for LOC199964 (NM_182532.1,791-809).
cctccacccagctatgaga

SEQ ID NO: 434206 - DNA, 19 bp, Homo sapiens
  siRNA target sequence for FLJ31031 (NM_182533.1,264-282).
gtcggacccaagacctttt

SEQ ID NO: 434207 - DNA, 19 bp, Homo sapiens
  siRNA target sequence for FLJ31031 (NM_182533.1,552-570).
gaagacgtgacgtgtcttt

SEQ ID NO: 434208 - DNA, 19 bp, Homo sapiens
  siRNA target sequence for FLJ31031 (NM_182533.1,555-573).
gacgtgacgtgtctttcat

SEQ ID NO: 434209 - DNA, 19 bp, Homo sapiens
  siRNA target sequence for FLJ23703 (NM_182534.1,72-90).
cacctgcagagttgtaaca

SEQ ID NO: 434210 - DNA, 19 bp, Homo sapiens
  siRNA target sequence for FLJ23703 (NM_182534.1,85-103).
gtaacatgcgggcatttct

SEQ ID NO: 434211 - DNA, 19 bp, Homo sapiens
  siRNA target sequence for FLJ23703 (NM_182534.1,114-132).
cgccattctggcttcttaa

SEQ ID NO: 434212 - DNA, 19 bp, Homo sapiens
  siRNA target sequence for FLJ23703 (NM_182534.1,311-329).
ggctcagacaggacaacaa

SEQ ID NO: 434213 - DNA, 19 bp, Homo sapiens
  siRNA target sequence for FLJ23703 (NM_182534.1,389-407).
cacaaattaccgtaatgca

SEQ ID NO: 434214 - DNA, 19 bp, Homo sapiens
  siRNA target sequence for GDDR (NM_182536.1,66-84).
gaccatctttgggatacaa

SEQ ID NO: 434215 - DNA, 19 bp, Homo sapiens
  siRNA target sequence for GDDR (NM_182536.1,91-109).
ggatacgaggtttttaaca

SEQ ID NO: 434216 - DNA, 19 bp, Homo sapiens
  siRNA target sequence for GDDR (NM_182536.1,149-167).
cagtgacaattgataatga

SEQ ID NO: 434217 - DNA, 19 bp, Homo sapiens
  siRNA target sequence for GDDR (NM_182536.1,209-227).
cttctaccacaatttttga

SEQ ID NO: 434218 - DNA, 19 bp, Homo sapiens
  siRNA target sequence for GDDR (NM_182536.1,212-230).
ctaccacaatttttgacta

SEQ ID NO: 434219 - DNA, 19 bp, Homo sapiens
  siRNA target sequence for GDDR (NM_182536.1,263-281).
cccgaagagcctgctttat

SEQ ID NO: 434220 - DNA, 19 bp, Homo sapiens
  siRNA target sequence for GDDR (NM_182536.1,303-321).
catccctcctctgaacaat

SEQ ID NO: 434221 - DNA, 19 bp, Homo sapiens
  siRNA target sequence for GDDR (NM_182536.1,325-343).
caatggtacatctatgaga

SEQ ID NO: 434222 - DNA, 19 bp, Homo sapiens
  siRNA target sequence for GDDR (NM_182536.1,329-347).
ggtacatctatgagaaaca

SEQ ID NO: 434223 - DNA, 19 bp, Homo sapiens
  siRNA target sequence for GDDR (NM_182536.1,436-454).
cttgggtcacccattgaga

SEQ ID NO: 434224 - DNA, 19 bp, Homo sapiens
  siRNA target sequence for GDDR (NM_182536.1,440-458).
ggtcacccattgagaaact

SEQ ID NO: 434225 - DNA, 19 bp, Homo sapiens
  siRNA target sequence for GDDR (NM_182536.1,544-562).
ctgggcatcttgggaattt

SEQ ID NO: 434226 - DNA, 19 bp, Homo sapiens
  siRNA target sequence for GDDR (NM_182536.1,567-585).
ctgtgcagacattcatgtt

SEQ ID NO: 434227 - DNA, 19 bp, Homo sapiens
  siRNA target sequence for HTR3D (NM_182537.1,245-263).
gtgaaggccacatcaaaca

SEQ ID NO: 434228 - DNA, 19 bp, Homo sapiens
  siRNA target sequence for HTR3D (NM_182537.1,251-269).
gccacatcaaacacaataa

SEQ ID NO: 434229 - DNA, 19 bp, Homo sapiens
  siRNA target sequence for HTR3D (NM_182537.1,393-411).
ccagcccctacgtggtaaa

SEQ ID NO: 434230 - DNA, 19 bp, Homo sapiens
  siRNA target sequence for HTR3D (NM_182537.1,396-414).
gcccctacgtggtaaactt

SEQ ID NO: 434231 - DNA, 19 bp, Homo sapiens
  siRNA target sequence for HTR3D (NM_182537.1,399-417).
cctacgtggtaaactttct

SEQ ID NO: 434232 - DNA, 19 bp, Homo sapiens
  siRNA target sequence for HTR3D (NM_182537.1,559-577).
cactagcacttcatcacat

SEQ ID NO: 434233 - DNA, 19 bp, Homo sapiens
  siRNA target sequence for MGC29671 (NM_182538.2,506-524).
ccttgatcctgcttatcct

SEQ ID NO: 434234 - DNA, 19 bp, Homo sapiens
  siRNA target sequence for MGC29671 (NM_182538.2,774-792).
ccccgacagcctgattttt

SEQ ID NO: 434235 - DNA, 19 bp, Homo sapiens
  siRNA target sequence for MGC29671 (NM_182538.2,1067-1085).
cggcagaggcacttcagat

SEQ ID NO: 434236 - DNA, 19 bp, Homo sapiens
  siRNA target sequence for MGC33600 (NM_182539.1,237-255).
ctctcaaagccttcaatca

SEQ ID NO: 434237 - DNA, 19 bp, Homo sapiens
  siRNA target sequence for MGC33600 (NM_182539.1,372-390).
ctctgcattcagcacatta

SEQ ID NO: 434238 - DNA, 19 bp, Homo sapiens
  siRNA target sequence for MGC33600 (NM_182539.1,673-691).
cgctctgccggaattacgt

SEQ ID NO: 434239 - DNA, 19 bp, Homo sapiens
  siRNA target sequence for MGC33600 (NM_182539.1,697-715).
gggtccacgtcgatcagtt

SEQ ID NO: 434240 - DNA, 19 bp, Homo sapiens
  siRNA target sequence for MGC33600 (NM_182539.1,875-893).
caaggactgcggcatgaat

SEQ ID NO: 434241 - DNA, 19 bp, Homo sapiens
  siRNA target sequence for MGC33600 (NM_182539.1,1008-1026).
gacaaggcacgcatcataa

SEQ ID NO: 434242 - DNA, 19 bp, Homo sapiens
  siRNA target sequence for MGC33600 (NM_182539.1,1013-1031).
ggcacgcatcataattcga

SEQ ID NO: 434243 - DNA, 19 bp, Homo sapiens
  siRNA target sequence for MGC33600 (NM_182539.1,1014-1032).
gcacgcatcataattcgaa

SEQ ID NO: 434244 - DNA, 19 bp, Homo sapiens
  siRNA target sequence for MGC33600 (NM_182539.1,1281-1299).
gccttgcagaccaacaagt

SEQ ID NO: 434245 - DNA, 19 bp, Homo sapiens
  siRNA target sequence for MGC33600 (NM_182539.1,1463-1481).
caagaccctcctggaattt

SEQ ID NO: 434246 - DNA, 19 bp, Homo sapiens
  siRNA target sequence for LOC203522 (NM_182540.1,525-543).
ctggttggaaggaaaatca

SEQ ID NO: 434247 - DNA, 19 bp, Homo sapiens
  siRNA target sequence for LOC203522 (NM_182540.1,549-567).
cattcatgagcgaactaaa

SEQ ID NO: 434248 - DNA, 19 bp, Homo sapiens
  siRNA target sequence for LOC203522 (NM_182540.1,558-576).
gcgaactaaaaaatcttca

SEQ ID NO: 434249 - DNA, 19 bp, Homo sapiens
  siRNA target sequence for LOC203522 (NM_182540.1,606-624).
ctctaagatcctcatttga

SEQ ID NO: 434250 - DNA, 19 bp, Homo sapiens
  siRNA target sequence for LOC203522 (NM_182540.1,642-660).
gattaatatctggaataga

SEQ ID NO: 434251 - DNA, 19 bp, Homo sapiens
  siRNA target sequence for LOC203522 (NM_182540.1,668-686).
ggacaggggagaaatccat

SEQ ID NO: 434252 - DNA, 19 bp, Homo sapiens
  siRNA target sequence for LOC203522 (NM_182540.1,763-781).
gctccatcttcctttgaat

SEQ ID NO: 434253 - DNA, 19 bp, Homo sapiens
  siRNA target sequence for LOC203522 (NM_182540.1,788-806).
ctgcctggaagtgaactaa

SEQ ID NO: 434254 - DNA, 19 bp, Homo sapiens
  siRNA target sequence for LOC203522 (NM_182540.1,821-839).
cgttgggatcaaaggttat

SEQ ID NO: 434255 - DNA, 19 bp, Homo sapiens
  siRNA target sequence for LOC203522 (NM_182540.1,822-840).
gttgggatcaaaggttatt

SEQ ID NO: 434256 - DNA, 19 bp, Homo sapiens
  siRNA target sequence for LOC203522 (NM_182540.1,898-916).
cgtaccaactgatgaatct

SEQ ID NO: 434257 - DNA, 19 bp, Homo sapiens
  siRNA target sequence for LOC203522 (NM_182540.1,971-989).
caaagaatgttgaatcaat

SEQ ID NO: 434258 - DNA, 19 bp, Homo sapiens
  siRNA target sequence for LOC203522 (NM_182540.1,990-1008).
gtttagaatctctagttca

SEQ ID NO: 434259 - DNA, 19 bp, Homo sapiens
  siRNA target sequence for LOC203522 (NM_182540.1,999-1017).
ctctagttcaaaaagttca

SEQ ID NO: 434260 - DNA, 19 bp, Homo sapiens
  siRNA target sequence for LOC203522 (NM_182540.1,1016-1034).
cagagtggtgtagttatta

SEQ ID NO: 434261 - DNA, 19 bp, Homo sapiens
  siRNA target sequence for LOC203522 (NM_182540.1,1099-1117).
gccaagcaattcatttgct

SEQ ID NO: 434262 - DNA, 19 bp, Homo sapiens
  siRNA target sequence for LOC203522 (NM_182540.1,1194-1212).
ggccaattccagaatcttt

SEQ ID NO: 434263 - DNA, 19 bp, Homo sapiens
  siRNA target sequence for LOC203522 (NM_182540.1,1195-1213).
gccaattccagaatctttt

SEQ ID NO: 434264 - DNA, 19 bp, Homo sapiens
  siRNA target sequence for LOC203522 (NM_182540.1,1216-1234).
gccagatcagaatttacct

SEQ ID NO: 434265 - DNA, 19 bp, Homo sapiens
  siRNA target sequence for LOC203522 (NM_182540.1,1267-1285).
gaggttctcctgtgtagat

SEQ ID NO: 434266 - DNA, 19 bp, Homo sapiens
  siRNA target sequence for LOC203522 (NM_182540.1,1270-1288).
gttctcctgtgtagattgt

SEQ ID NO: 434267 - DNA, 19 bp, Homo sapiens
  siRNA target sequence for LOC203522 (NM_182540.1,1283-1301).
gattgtgagccaatggtaa

SEQ ID NO: 434268 - DNA, 19 bp, Homo sapiens
  siRNA target sequence for LOC203522 (NM_182540.1,1289-1307).
gagccaatggtaatagaca

SEQ ID NO: 434269 - DNA, 19 bp, Homo sapiens
  siRNA target sequence for LOC203522 (NM_182540.1,1291-1309).
gccaatggtaatagacaaa

SEQ ID NO: 434270 - DNA, 19 bp, Homo sapiens
  siRNA target sequence for LOC203522 (NM_182540.1,1293-1311).
caatggtaatagacaaact

SEQ ID NO: 434271 - DNA, 19 bp, Homo sapiens
  siRNA target sequence for LOC203522 (NM_182540.1,1341-1359).
cgcccttaactcagtatat

SEQ ID NO: 434272 - DNA, 19 bp, Homo sapiens
  siRNA target sequence for LOC203522 (NM_182540.1,1343-1361).
cccttaactcagtatatct

SEQ ID NO: 434273 - DNA, 19 bp, Homo sapiens
  siRNA target sequence for LOC203522 (NM_182540.1,1344-1362).
ccttaactcagtatatctt

SEQ ID NO: 434274 - DNA, 19 bp, Homo sapiens
  siRNA target sequence for MGC39655 (NM_182541.1,212-230).
gtgagggagaacaacaact

SEQ ID NO: 434275 - DNA, 19 bp, Homo sapiens
  siRNA target sequence for MGC39655 (NM_182541.1,231-249).
caagcccaacaactctaat

SEQ ID NO: 434276 - DNA, 19 bp, Homo sapiens
  siRNA target sequence for MGC39655 (NM_182541.1,245-263).
ctaatgcacccaatgaaga

SEQ ID NO: 434277 - DNA, 19 bp, Homo sapiens
  siRNA target sequence for MGC39655 (NM_182541.1,361-379).
cgtaggacacctacaacat

SEQ ID NO: 434278 - DNA, 19 bp, Homo sapiens
  siRNA target sequence for MGC39655 (NM_182541.1,389-407).
gaacgatcaaccttcttga

SEQ ID NO: 434279 - DNA, 19 bp, Homo sapiens
  siRNA target sequence for MGC39655 (NM_182541.1,392-410).
cgatcaaccttcttgaagt

SEQ ID NO: 434280 - DNA, 19 bp, Homo sapiens
  siRNA target sequence for MGC39655 (NM_182541.1,419-437).
ggcctactgagtggatttt

SEQ ID NO: 434281 - DNA, 19 bp, Homo sapiens
  siRNA target sequence for MGC39655 (NM_182541.1,421-439).
cctactgagtggattttca

SEQ ID NO: 434282 - DNA, 19 bp, Homo sapiens
  siRNA target sequence for MGC39655 (NM_182541.1,513-531).
catatcccattgtctgaaa

SEQ ID NO: 434283 - DNA, 19 bp, Homo sapiens
  siRNA target sequence for MGC39655 (NM_182541.1,546-564).
gatcggactgcccatcata

SEQ ID NO: 434284 - DNA, 19 bp, Homo sapiens
  siRNA target sequence for FLJ32682 (NM_182542.1,261-279).
ggatactgaagtagaacta

SEQ ID NO: 434285 - DNA, 19 bp, Homo sapiens
  siRNA target sequence for FLJ32682 (NM_182542.1,657-675).
ggggaagaaatcatatcta

SEQ ID NO: 434286 - DNA, 19 bp, Homo sapiens
  siRNA target sequence for FLJ32682 (NM_182542.1,659-677).
ggaagaaatcatatctaga

SEQ ID NO: 434287 - DNA, 19 bp, Homo sapiens
  siRNA target sequence for FLJ32682 (NM_182542.1,792-810).
ggcaagttattcatcacaa

SEQ ID NO: 434288 - DNA, 19 bp, Homo sapiens
  siRNA target sequence for FLJ32682 (NM_182542.1,793-811).
gcaagttattcatcacaaa

SEQ ID NO: 434289 - DNA, 19 bp, Homo sapiens
  siRNA target sequence for FLJ32682 (NM_182542.1,898-916).
ccttctcctgtctctgaat

SEQ ID NO: 434290 - DNA, 19 bp, Homo sapiens
  siRNA target sequence for FLJ32682 (NM_182542.1,990-1008).
cgacagaactgccgtaaaa

SEQ ID NO: 434291 - DNA, 19 bp, Homo sapiens
  siRNA target sequence for FLJ32682 (NM_182542.1,991-1009).
gacagaactgccgtaaaat

SEQ ID NO: 434292 - DNA, 19 bp, Homo sapiens
  siRNA target sequence for FLJ32682 (NM_182542.1,995-1013).
gaactgccgtaaaatcttt

SEQ ID NO: 434293 - DNA, 19 bp, Homo sapiens
  siRNA target sequence for FLJ32682 (NM_182542.1,998-1016).
ctgccgtaaaatctttaaa

SEQ ID NO: 434294 - DNA, 19 bp, Homo sapiens
  siRNA target sequence for FLJ32682 (NM_182542.1,1057-1075).
gctccggaagagcatgtta

SEQ ID NO: 434295 - DNA, 19 bp, Homo sapiens
  siRNA target sequence for FLJ32682 (NM_182542.1,1058-1076).
ctccggaagagcatgttaa

SEQ ID NO: 434296 - DNA, 19 bp, Homo sapiens
  siRNA target sequence for FLJ32682 (NM_182542.1,1060-1078).
ccggaagagcatgttaaca

SEQ ID NO: 434297 - DNA, 19 bp, Homo sapiens
  siRNA target sequence for FLJ32682 (NM_182542.1,1063-1081).
gaagagcatgttaacacta

SEQ ID NO: 434298 - DNA, 19 bp, Homo sapiens
  siRNA target sequence for FLJ32682 (NM_182542.1,1110-1128).
cctggagtttgcttctaaa

SEQ ID NO: 434299 - DNA, 19 bp, Homo sapiens
  siRNA target sequence for FLJ32682 (NM_182542.1,1356-1374).
gttcaaggaaacaatctta

SEQ ID NO: 434300 - DNA, 19 bp, Homo sapiens
  siRNA target sequence for FLJ32682 (NM_182542.1,1388-1406).
gacgtgaagctcaaaagtt

SEQ ID NO: 434301 - DNA, 19 bp, Homo sapiens
  siRNA target sequence for FLJ32682 (NM_182542.1,1390-1408).
cgtgaagctcaaaagttaa

SEQ ID NO: 434302 - DNA, 19 bp, Homo sapiens
  siRNA target sequence for FLJ32682 (NM_182542.1,1416-1434).
gaccagtttcacatttcat

SEQ ID NO: 434303 - DNA, 19 bp, Homo sapiens
  siRNA target sequence for FLJ32682 (NM_182542.1,1493-1511).
gtgttgttcatcataggaa

SEQ ID NO: 434304 - DNA, 19 bp, Homo sapiens
  siRNA target sequence for FLJ32682 (NM_182542.1,1498-1516).
gttcatcataggaagaaat

SEQ ID NO: 434305 - DNA, 19 bp, Homo sapiens
  siRNA target sequence for FLJ32682 (NM_182542.1,1525-1543).
gataaggaatggatacaga

SEQ ID NO: 434306 - DNA, 19 bp, Homo sapiens
  siRNA target sequence for FLJ32682 (NM_182542.1,1593-1611).
caagaatgtctatcaaatt

SEQ ID NO: 434307 - DNA, 19 bp, Homo sapiens
  siRNA target sequence for FLJ32682 (NM_182542.1,1659-1677).
ggctatgctcatcttatat

SEQ ID NO: 434308 - DNA, 19 bp, Homo sapiens
  siRNA target sequence for FLJ32682 (NM_182542.1,1678-1696).
gcgaaaatgaaaaagttca

SEQ ID NO: 434309 - DNA, 19 bp, Homo sapiens
  siRNA target sequence for FLJ32682 (NM_182542.1,1921-1939).
gagtacatccaggtacaaa

SEQ ID NO: 434310 - DNA, 19 bp, Homo sapiens
  siRNA target sequence for FLJ32682 (NM_182542.1,1923-1941).
gtacatccaggtacaaata

SEQ ID NO: 434311 - DNA, 19 bp, Homo sapiens
  siRNA target sequence for FLJ32682 (NM_182542.1,1967-1985).
gcttcacctatgaacagaa

SEQ ID NO: 434312 - DNA, 19 bp, Homo sapiens
  siRNA target sequence for FLJ32682 (NM_182542.1,2166-2184).
catagaggccgtcagtata

SEQ ID NO: 434313 - DNA, 19 bp, Homo sapiens
  siRNA target sequence for MGC33530 (NM_182546.1,326-344).
cgttttatatgtacaacaa

SEQ ID NO: 434314 - DNA, 19 bp, Homo sapiens
  siRNA target sequence for MGC33530 (NM_182546.1,394-412).
cgaccgaggggcagaatgt

SEQ ID NO: 434315 - DNA, 19 bp, Homo sapiens
  siRNA target sequence for MGC33530 (NM_182546.1,450-468).
gtgtatctggagatccaat

SEQ ID NO: 434316 - DNA, 19 bp, Homo sapiens
  siRNA target sequence for MGC33530 (NM_182546.1,874-892).
ctcaagtggtagccaaaat

SEQ ID NO: 434317 - DNA, 19 bp, Homo sapiens
  siRNA target sequence for MGC33530 (NM_182546.1,906-924).
ccacaatcaggtatggaaa

SEQ ID NO: 434318 - DNA, 19 bp, Homo sapiens
  siRNA target sequence for MGC33530 (NM_182546.1,925-943).
cccatttcgagccttttat

SEQ ID NO: 434319 - DNA, 19 bp, Homo sapiens
  siRNA target sequence for MGC33530 (NM_182546.1,926-944).
ccatttcgagccttttatt

SEQ ID NO: 434320 - DNA, 19 bp, Homo sapiens
  siRNA target sequence for MGC33530 (NM_182546.1,953-971).
cacaaacgctccacagaaa

SEQ ID NO: 434321 - DNA, 19 bp, Homo sapiens
  siRNA target sequence for MGC33530 (NM_182546.1,966-984).
cagaaaggtcagtcgtata

SEQ ID NO: 434322 - DNA, 19 bp, Homo sapiens
  siRNA target sequence for MGC33530 (NM_182546.1,968-986).
gaaaggtcagtcgtataga

SEQ ID NO: 434323 - DNA, 19 bp, Homo sapiens
  siRNA target sequence for MGC33530 (NM_182546.1,979-997).
cgtatagagtagacagatt

SEQ ID NO: 434324 - DNA, 19 bp, Homo sapiens
  siRNA target sequence for MGC33530 (NM_182546.1,980-998).
gtatagagtagacagattt

SEQ ID NO: 434325 - DNA, 19 bp, Homo sapiens
  siRNA target sequence for HNLF (NM_182547.2,176-194).
gtcatcggcaactatcgta

SEQ ID NO: 434326 - DNA, 19 bp, Homo sapiens
  siRNA target sequence for HNLF (NM_182547.2,249-267).
gcatgcacgtggaagtgaa

SEQ ID NO: 434327 - DNA, 19 bp, Homo sapiens
  siRNA target sequence for HNLF (NM_182547.2,343-361).
cggtgaccatcaaatctgt

SEQ ID NO: 434328 - DNA, 19 bp, Homo sapiens
  siRNA target sequence for HNLF (NM_182547.2,434-452).
ggggagcatgccaacaact

SEQ ID NO: 434329 - DNA, 19 bp, Homo sapiens
  siRNA target sequence for HNLF (NM_182547.2,445-463).
caacaactaccctgagatt

SEQ ID NO: 434330 - DNA, 19 bp, Homo sapiens
  siRNA target sequence for HNLF (NM_182547.2,454-472).
ccctgagattgctgcaaaa

SEQ ID NO: 434331 - DNA, 19 bp, Homo sapiens
  siRNA target sequence for HNLF (NM_182547.2,541-559).
gcaggattaccaaaggtat

SEQ ID NO: 434332 - DNA, 19 bp, Homo sapiens
  siRNA target sequence for MGC33835 (NM_182548.2,413-431).
gatctaccataccaactat

SEQ ID NO: 434333 - DNA, 19 bp, Homo sapiens
  siRNA target sequence for MGC33835 (NM_182548.2,645-663).
ccctctagagccttcaaga

SEQ ID NO: 434334 - DNA, 19 bp, Homo sapiens
  siRNA target sequence for MGC33835 (NM_182548.2,740-758).
caacacggccacagtctat

SEQ ID NO: 434335 - DNA, 19 bp, Homo sapiens
  siRNA target sequence for MGC33835 (NM_182548.2,745-763).
cggccacagtctataagat

SEQ ID NO: 434336 - DNA, 19 bp, Homo sapiens
  siRNA target sequence for MGC33835 (NM_182548.2,747-765).
gccacagtctataagatct

SEQ ID NO: 434337 - DNA, 19 bp, Homo sapiens
  siRNA target sequence for MGC33835 (NM_182548.2,786-804).
gcggccacaggcctaatga

SEQ ID NO: 434338 - DNA, 19 bp, Homo sapiens
  siRNA target sequence for MGC33835 (NM_182548.2,787-805).
cggccacaggcctaatgat

SEQ ID NO: 434339 - DNA, 19 bp, Homo sapiens
  siRNA target sequence for MGC43690 (NM_182552.2,144-162).
ggtggctgtctaagtgata

SEQ ID NO: 434340 - DNA, 19 bp, Homo sapiens
  siRNA target sequence for MGC43690 (NM_182552.2,145-163).
gtggctgtctaagtgatat

SEQ ID NO: 434341 - DNA, 19 bp, Homo sapiens
  siRNA target sequence for MGC43690 (NM_182552.2,149-167).
ctgtctaagtgatatagtt

SEQ ID NO: 434342 - DNA, 19 bp, Homo sapiens
  siRNA target sequence for MGC43690 (NM_182552.2,151-169).
gtctaagtgatatagttat

SEQ ID NO: 434343 - DNA, 19 bp, Homo sapiens
  siRNA target sequence for MGC43690 (NM_182552.2,194-212).
ggagtctgtgtctcatgtt

SEQ ID NO: 434344 - DNA, 19 bp, Homo sapiens
  siRNA target sequence for MGC43690 (NM_182552.2,278-296).
cactaaggatccttctcat

SEQ ID NO: 434345 - DNA, 19 bp, Homo sapiens
  siRNA target sequence for MGC43690 (NM_182552.2,315-333).
ggacaccatcagccaatta

SEQ ID NO: 434346 - DNA, 19 bp, Homo sapiens
  siRNA target sequence for MGC43690 (NM_182552.2,337-355).
ctatggcttttggaaataa

SEQ ID NO: 434347 - DNA, 19 bp, Homo sapiens
  siRNA target sequence for MGC43690 (NM_182552.2,385-403).
cactggattatgttataat

SEQ ID NO: 434348 - DNA, 19 bp, Homo sapiens
  siRNA target sequence for MGC43690 (NM_182552.2,404-422).
gtggaacctggatgaatgt

SEQ ID NO: 434349 - DNA, 19 bp, Homo sapiens
  siRNA target sequence for MGC43690 (NM_182552.2,479-497).
gggaaaggtgctgtgttta

SEQ ID NO: 434350 - DNA, 19 bp, Homo sapiens
  siRNA target sequence for MGC43690 (NM_182552.2,481-499).
gaaaggtgctgtgtttaca

SEQ ID NO: 434351 - DNA, 19 bp, Homo sapiens
  siRNA target sequence for MGC43690 (NM_182552.2,503-521).
gagcctggatgatcatgtt

SEQ ID NO: 434352 - DNA, 19 bp, Homo sapiens
  siRNA target sequence for MGC43690 (NM_182552.2,506-524).
cctggatgatcatgttgtt

SEQ ID NO: 434353 - DNA, 19 bp, Homo sapiens
  siRNA target sequence for MGC43690 (NM_182552.2,558-576).
gatattgagcagcgatttt

SEQ ID NO: 434354 - DNA, 19 bp, Homo sapiens
  siRNA target sequence for MGC43690 (NM_182552.2,570-588).
cgattttctgtgacataca

SEQ ID NO: 434355 - DNA, 19 bp, Homo sapiens
  siRNA target sequence for MGC43690 (NM_182552.2,571-589).
gattttctgtgacatacat

SEQ ID NO: 434356 - DNA, 19 bp, Homo sapiens
  siRNA target sequence for MGC43690 (NM_182552.2,587-605).
catagaacgtcctgatgtt

SEQ ID NO: 434357 - DNA, 19 bp, Homo sapiens
  siRNA target sequence for MGC43690 (NM_182552.2,591-609).
gaacgtcctgatgttaata

SEQ ID NO: 434358 - DNA, 19 bp, Homo sapiens
  siRNA target sequence for MGC43690 (NM_182552.2,770-788).
ggtctgggaccattgtaca

SEQ ID NO: 434359 - DNA, 19 bp, Homo sapiens
  siRNA target sequence for MGC43690 (NM_182552.2,789-807).
ggatcattaatatacagtt

SEQ ID NO: 434360 - DNA, 19 bp, Homo sapiens
  siRNA target sequence for MGC43690 (NM_182552.2,823-841).
catatcctcttctcagttt

SEQ ID NO: 434361 - DNA, 19 bp, Homo sapiens
  siRNA target sequence for MGC43690 (NM_182552.2,883-901).
ctgacggccagctttggat

SEQ ID NO: 434362 - DNA, 19 bp, Homo sapiens
  siRNA target sequence for MGC43690 (NM_182552.2,914-932).
ggatggacaccattatcgt

SEQ ID NO: 434363 - DNA, 19 bp, Homo sapiens
  siRNA target sequence for MGC43690 (NM_182552.2,945-963).
gttgacctaaggaagaaga

SEQ ID NO: 434364 - DNA, 19 bp, Homo sapiens
  siRNA target sequence for MGC43690 (NM_182552.2,977-995).
cacaagaagggttaagtct

SEQ ID NO: 434365 - DNA, 19 bp, Homo sapiens
  siRNA target sequence for MGC43690 (NM_182552.2,1056-1074).
gagcaggttgaagtaacat

SEQ ID NO: 434366 - DNA, 19 bp, Homo sapiens
  siRNA target sequence for MGC43690 (NM_182552.2,1058-1076).
gcaggttgaagtaacattt

SEQ ID NO: 434367 - DNA, 19 bp, Homo sapiens
  siRNA target sequence for MGC43690 (NM_182552.2,1061-1079).
ggttgaagtaacatttcct

SEQ ID NO: 434368 - DNA, 19 bp, Homo sapiens
  siRNA target sequence for MGC43690 (NM_182552.2,1174-1192).
gctcagtgggcttattcgt

SEQ ID NO: 434369 - DNA, 19 bp, Homo sapiens
  siRNA target sequence for MGC43690 (NM_182552.2,1175-1193).
ctcagtgggcttattcgta

SEQ ID NO: 434370 - DNA, 19 bp, Homo sapiens
  siRNA target sequence for MGC43690 (NM_182552.2,1177-1195).
cagtgggcttattcgtatt

SEQ ID NO: 434371 - DNA, 19 bp, Homo sapiens
  siRNA target sequence for MGC43690 (NM_182552.2,1179-1197).
gtgggcttattcgtattta

SEQ ID NO: 434372 - DNA, 19 bp, Homo sapiens
  siRNA target sequence for MGC43690 (NM_182552.2,1183-1201).
gcttattcgtatttaacct

SEQ ID NO: 434373 - DNA, 19 bp, Homo sapiens
  siRNA target sequence for MGC43690 (NM_182552.2,1215-1233).
gtggaagctgctttgtatt

SEQ ID NO: 434374 - DNA, 19 bp, Homo sapiens
  siRNA target sequence for MGC43690 (NM_182552.2,1291-1309).
gcactgcggatcaaaaggt

SEQ ID NO: 434375 - DNA, 19 bp, Homo sapiens
  siRNA target sequence for MGC43690 (NM_182552.2,1328-1346).
cctctttggcgggaagatt

SEQ ID NO: 434376 - DNA, 19 bp, Homo sapiens
  siRNA target sequence for MGC43690 (NM_182552.2,1444-1462).
cgacctctccactgtatct

SEQ ID NO: 434377 - DNA, 19 bp, Homo sapiens
  siRNA target sequence for MGC43690 (NM_182552.2,1539-1557).
cgcctggttttccatagta

SEQ ID NO: 434378 - DNA, 19 bp, Homo sapiens
  siRNA target sequence for MGC43690 (NM_182552.2,1540-1558).
gcctggttttccatagtaa

SEQ ID NO: 434379 - DNA, 19 bp, Homo sapiens
  siRNA target sequence for MGC43690 (NM_182552.2,1578-1596).
gcgtcagcaccacatgtaa

SEQ ID NO: 434380 - DNA, 19 bp, Homo sapiens
  siRNA target sequence for MGC43690 (NM_182552.2,1580-1598).
gtcagcaccacatgtaact

SEQ ID NO: 434381 - DNA, 19 bp, Homo sapiens
  siRNA target sequence for MGC43690 (NM_182552.2,1584-1602).
gcaccacatgtaactatgt

SEQ ID NO: 434382 - DNA, 19 bp, Homo sapiens
  siRNA target sequence for MGC43690 (NM_182552.2,1793-1811).
gttggccaaccatctgtta

SEQ ID NO: 434383 - DNA, 19 bp, Homo sapiens
  siRNA target sequence for MGC43690 (NM_182552.2,1836-1854).
gggacacctgctgtgtttt

SEQ ID NO: 434384 - DNA, 19 bp, Homo sapiens
  siRNA target sequence for MGC43690 (NM_182552.2,2007-2025).
cagtctgcacagttctatt

SEQ ID NO: 434385 - DNA, 19 bp, Homo sapiens
  siRNA target sequence for MGC43690 (NM_182552.2,2009-2027).
gtctgcacagttctattat

SEQ ID NO: 434386 - DNA, 19 bp, Homo sapiens
  siRNA target sequence for MGC43690 (NM_182552.2,2011-2029).
ctgcacagttctattatat

SEQ ID NO: 434387 - DNA, 19 bp, Homo sapiens
  siRNA target sequence for MGC43690 (NM_182552.2,2014-2032).
cacagttctattatataga

SEQ ID NO: 434388 - DNA, 19 bp, Homo sapiens
  siRNA target sequence for MGC43690 (NM_182552.2,2034-2052).
gcctttatattgttatctt

SEQ ID NO: 434389 - DNA, 19 bp, Homo sapiens
  siRNA target sequence for MGC43690 (NM_182552.2,2036-2054).
ctttatattgttatcttct

SEQ ID NO: 434390 - DNA, 19 bp, Homo sapiens
  siRNA target sequence for MGC43690 (NM_182552.2,2067-2085).
cagctactgaggtatcaca

SEQ ID NO: 434391 - DNA, 19 bp, Homo sapiens
  siRNA target sequence for MGC43690 (NM_182552.2,2069-2087).
gctactgaggtatcacatt

SEQ ID NO: 434392 - DNA, 19 bp, Homo sapiens
  siRNA target sequence for MGC43690 (NM_182552.2,2158-2176).
cgacgggtgcagtagacat

SEQ ID NO: 434393 - DNA, 19 bp, Homo sapiens
  siRNA target sequence for MGC43690 (NM_182552.2,2188-2206).
cggcagtcaacgactttta

SEQ ID NO: 434394 - DNA, 19 bp, Homo sapiens
  siRNA target sequence for MGC43690 (NM_182552.2,2190-2208).
gcagtcaacgacttttatt

SEQ ID NO: 434395 - DNA, 19 bp, Homo sapiens
  siRNA target sequence for MGC43690 (NM_182552.2,2237-2255).
caggaccgtggaagtgttt

SEQ ID NO: 434396 - DNA, 19 bp, Homo sapiens
  siRNA target sequence for MGC43690 (NM_182552.2,2239-2257).
ggaccgtggaagtgtttga

SEQ ID NO: 434397 - DNA, 19 bp, Homo sapiens
  siRNA target sequence for MGC43690 (NM_182552.2,2302-2320).
cacggcctgtccatcaaat

SEQ ID NO: 434398 - DNA, 19 bp, Homo sapiens
  siRNA target sequence for MGC43690 (NM_182552.2,2304-2322).
cggcctgtccatcaaatct

SEQ ID NO: 434399 - DNA, 19 bp, Homo sapiens
  siRNA target sequence for MGC43690 (NM_182552.2,2324-2342).
ccaaaataaaggttcatca

SEQ ID NO: 434400 - DNA, 19 bp, Homo sapiens
  siRNA target sequence for MGC43690 (NM_182552.2,2352-2370).
caacagcctcaggcttata

SEQ ID NO: 434401 - DNA, 19 bp, Homo sapiens
  siRNA target sequence for MGC43690 (NM_182552.2,2357-2375).
gcctcaggcttataacctt

SEQ ID NO: 434402 - DNA, 19 bp, Homo sapiens
  siRNA target sequence for MGC43690 (NM_182552.2,2358-2376).
cctcaggcttataaccttt

SEQ ID NO: 434403 - DNA, 19 bp, Homo sapiens
  siRNA target sequence for MGC43690 (NM_182552.2,2359-2377).
ctcaggcttataacctttt

SEQ ID NO: 434404 - DNA, 19 bp, Homo sapiens
  siRNA target sequence for MGC43690 (NM_182552.2,2530-2548).
gacacgcttacgtgtatga

SEQ ID NO: 434405 - DNA, 19 bp, Homo sapiens
  siRNA target sequence for MGC43690 (NM_182552.2,2532-2550).
cacgcttacgtgtatgaaa

SEQ ID NO: 434406 - DNA, 19 bp, Homo sapiens
  siRNA target sequence for MGC43690 (NM_182552.2,2763-2781).
cagctaccttggatggtaa

SEQ ID NO: 434407 - DNA, 19 bp, Homo sapiens
  siRNA target sequence for MGC43690 (NM_182552.2,2778-2796).
gtaaactccagctctttct

SEQ ID NO: 434408 - DNA, 19 bp, Homo sapiens
  siRNA target sequence for MGC50896 (NM_182553.1,378-396).
gggcacgcgagcgtttaaa

SEQ ID NO: 434409 - DNA, 19 bp, Homo sapiens
  siRNA target sequence for MGC50896 (NM_182553.1,379-397).
ggcacgcgagcgtttaaaa

SEQ ID NO: 434410 - DNA, 19 bp, Homo sapiens
  siRNA target sequence for MGC50896 (NM_182553.1,380-398).
gcacgcgagcgtttaaaaa

SEQ ID NO: 434411 - DNA, 19 bp, Homo sapiens
  siRNA target sequence for MGC50896 (NM_182553.1,384-402).
gcgagcgtttaaaaaacat

SEQ ID NO: 434412 - DNA, 19 bp, Homo sapiens
  siRNA target sequence for MGC50896 (NM_182553.1,459-477).
gcctcttctgtctgatgtt

SEQ ID NO: 434413 - DNA, 19 bp, Homo sapiens
  siRNA target sequence for MGC50896 (NM_182553.1,605-623).
gctgacattctcaactact

SEQ ID NO: 434414 - DNA, 19 bp, Homo sapiens
  siRNA target sequence for MGC50896 (NM_182553.1,679-697).
cctgtacagtatggtttat

SEQ ID NO: 434415 - DNA, 19 bp, Homo sapiens
  siRNA target sequence for LOC282966 (NM_182554.1,135-153).
ggtcatcctagagaagata

SEQ ID NO: 434416 - DNA, 19 bp, Homo sapiens
  siRNA target sequence for LOC282966 (NM_182554.1,367-385).
gtattggcccagattggat

SEQ ID NO: 434417 - DNA, 19 bp, Homo sapiens
  siRNA target sequence for LOC282966 (NM_182554.1,378-396).
gattggatcatgtatccat

SEQ ID NO: 434418 - DNA, 19 bp, Homo sapiens
  siRNA target sequence for LOC282966 (NM_182554.1,383-401).
gatcatgtatccatttcca

SEQ ID NO: 434419 - DNA, 19 bp, Homo sapiens
  siRNA target sequence for LOC282966 (NM_182554.1,389-407).
gtatccatttccaaaccaa

SEQ ID NO: 434420 - DNA, 19 bp, Homo sapiens
  siRNA target sequence for BCL9L (NM_182557.1,977-995).
ggctaacaagacaaggtta

SEQ ID NO: 434421 - DNA, 19 bp, Homo sapiens
  siRNA target sequence for BCL9L (NM_182557.1,1080-1098).
cacccagaaaataaattga

SEQ ID NO: 434422 - DNA, 19 bp, Homo sapiens
  siRNA target sequence for BCL9L (NM_182557.1,1485-1503).
ggggccacccacaattgta

SEQ ID NO: 434423 - DNA, 19 bp, Homo sapiens
  siRNA target sequence for BCL9L (NM_182557.1,1486-1504).
gggccacccacaattgtaa

SEQ ID NO: 434424 - DNA, 19 bp, Homo sapiens
  siRNA target sequence for BCL9L (NM_182557.1,1487-1505).
ggccacccacaattgtaat

SEQ ID NO: 434425 - DNA, 19 bp, Homo sapiens
  siRNA target sequence for BCL9L (NM_182557.1,1490-1508).
cacccacaattgtaatgta

SEQ ID NO: 434426 - DNA, 19 bp, Homo sapiens
  siRNA target sequence for BCL9L (NM_182557.1,1668-1686).
cctccctcgcagttcgtat

SEQ ID NO: 434427 - DNA, 19 bp, Homo sapiens
  siRNA target sequence for BCL9L (NM_182557.1,1669-1687).
ctccctcgcagttcgtata

SEQ ID NO: 434428 - DNA, 19 bp, Homo sapiens
  siRNA target sequence for BCL9L (NM_182557.1,1672-1690).
cctcgcagttcgtatatgt

SEQ ID NO: 434429 - DNA, 19 bp, Homo sapiens
  siRNA target sequence for BCL9L (NM_182557.1,1675-1693).
cgcagttcgtatatgtctt

SEQ ID NO: 434430 - DNA, 19 bp, Homo sapiens
  siRNA target sequence for BCL9L (NM_182557.1,2198-2216).
ccagacgctgcgagacatt

SEQ ID NO: 434431 - DNA, 19 bp, Homo sapiens
  siRNA target sequence for BCL9L (NM_182557.1,2338-2356).
ctcccagcgggctgaagaa

SEQ ID NO: 434432 - DNA, 19 bp, Homo sapiens
  siRNA target sequence for BCL9L (NM_182557.1,2341-2359).
ccagcgggctgaagaaata

SEQ ID NO: 434433 - DNA, 19 bp, Homo sapiens
  siRNA target sequence for BCL9L (NM_182557.1,2560-2578).
ggcggaaagaggaacagat

SEQ ID NO: 434434 - DNA, 19 bp, Homo sapiens
  siRNA target sequence for BCL9L (NM_182557.1,2956-2974).
gtgaggcggagcgattcat

SEQ ID NO: 434435 - DNA, 19 bp, Homo sapiens
  siRNA target sequence for BCL9L (NM_182557.1,2958-2976).
gaggcggagcgattcatga

SEQ ID NO: 434436 - DNA, 19 bp, Homo sapiens
  siRNA target sequence for BCL9L (NM_182557.1,3268-3286).
gcaacctcaacatgaacat

SEQ ID NO: 434437 - DNA, 19 bp, Homo sapiens
  siRNA target sequence for BCL9L (NM_182557.1,3470-3488).
gctgatgccttcacagttt

SEQ ID NO: 434438 - DNA, 19 bp, Homo sapiens
  siRNA target sequence for BCL9L (NM_182557.1,3556-3574).
gcaatacccaagacatgtt

SEQ ID NO: 434439 - DNA, 19 bp, Homo sapiens
  siRNA target sequence for BCL9L (NM_182557.1,3711-3729).
gacctcaccatcagtatta

SEQ ID NO: 434440 - DNA, 19 bp, Homo sapiens
  siRNA target sequence for BCL9L (NM_182557.1,3718-3736).
ccatcagtattaatcagat

SEQ ID NO: 434441 - DNA, 19 bp, Homo sapiens
  siRNA target sequence for BCL9L (NM_182557.1,4044-4062).
cctctcaacatgaactctt

SEQ ID NO: 434442 - DNA, 19 bp, Homo sapiens
  siRNA target sequence for BCL9L (NM_182557.1,4144-4162).
ctcccagcggcctcatgaa

SEQ ID NO: 434443 - DNA, 19 bp, Homo sapiens
  siRNA target sequence for BCL9L (NM_182557.1,5026-5044).
cccctaatctgcatctcat

SEQ ID NO: 434444 - DNA, 19 bp, Homo sapiens
  siRNA target sequence for FLJ33810 (NM_182558.1,346-364).
ctgacccagatcagttgtt

SEQ ID NO: 434445 - DNA, 19 bp, Homo sapiens
  siRNA target sequence for FLJ33810 (NM_182558.1,348-366).
gacccagatcagttgttct

SEQ ID NO: 434446 - DNA, 19 bp, Homo sapiens
  siRNA target sequence for FLJ33810 (NM_182558.1,485-503).
cctgggaaatccactaaga

SEQ ID NO: 434447 - DNA, 19 bp, Homo sapiens
  siRNA target sequence for FLJ33810 (NM_182558.1,488-506).
gggaaatccactaagacta

SEQ ID NO: 434448 - DNA, 19 bp, Homo sapiens
  siRNA target sequence for FLJ33810 (NM_182558.1,544-562).
gtggacagacggctttaat

SEQ ID NO: 434449 - DNA, 19 bp, Homo sapiens
  siRNA target sequence for FLJ25773 (NM_182560.1,486-504).
ggaacaaagccgatgatca

SEQ ID NO: 434450 - DNA, 19 bp, Homo sapiens
  siRNA target sequence for FLJ25773 (NM_182560.1,557-575).
cctgcagagcctaagacat

SEQ ID NO: 434451 - DNA, 19 bp, Homo sapiens
  siRNA target sequence for FLJ25773 (NM_182560.1,736-754).
gtgctacaccaagatttaa

SEQ ID NO: 434452 - DNA, 19 bp, Homo sapiens
  siRNA target sequence for FLJ25773 (NM_182560.1,758-776).
gctgttcaaaggaactgta

SEQ ID NO: 434453 - DNA, 19 bp, Homo sapiens
  siRNA target sequence for FLJ36144 (NM_182561.1,366-384).
catacaatacgaattctca

SEQ ID NO: 434454 - DNA, 19 bp, Homo sapiens
  siRNA target sequence for FLJ36144 (NM_182561.1,1715-1733).
gaggatacgagatcagaaa

SEQ ID NO: 434455 - DNA, 19 bp, Homo sapiens
  siRNA target sequence for FLJ39743 (NM_182562.1,399-417).
gagcggctgttgggtttta

SEQ ID NO: 434456 - DNA, 19 bp, Homo sapiens
  siRNA target sequence for FLJ39743 (NM_182562.1,401-419).
gcggctgttgggttttaca

SEQ ID NO: 434457 - DNA, 19 bp, Homo sapiens
  siRNA target sequence for FLJ39743 (NM_182562.1,543-561).
gggacttctgtgagacatt

SEQ ID NO: 434458 - DNA, 19 bp, Homo sapiens
  siRNA target sequence for FLJ39743 (NM_182562.1,614-632).
caagcacacccaggaaatt

SEQ ID NO: 434459 - DNA, 19 bp, Homo sapiens
  siRNA target sequence for FLJ39743 (NM_182562.1,654-672).
cgaggacttctcagaatga

SEQ ID NO: 434460 - DNA, 19 bp, Homo sapiens
  siRNA target sequence for FLJ39743 (NM_182562.1,797-815).
ccaccaggcaagcttacaa

SEQ ID NO: 434461 - DNA, 19 bp, Homo sapiens
  siRNA target sequence for MGC21830 (NM_182563.2,508-526).
cagagcggctgcatctgtt

SEQ ID NO: 434462 - DNA, 19 bp, Homo sapiens
  siRNA target sequence for MGC21830 (NM_182563.2,777-795).
gagacagcggctgatttat

SEQ ID NO: 434463 - DNA, 19 bp, Homo sapiens
  siRNA target sequence for MGC21830 (NM_182563.2,779-797).
gacagcggctgatttatct

SEQ ID NO: 434464 - DNA, 19 bp, Homo sapiens
  siRNA target sequence for MGC21830 (NM_182563.2,781-799).
cagcggctgatttatctct

SEQ ID NO: 434465 - DNA, 19 bp, Homo sapiens
  siRNA target sequence for MGC21830 (NM_182563.2,831-849).
cgtgtcggtctgcttttat

SEQ ID NO: 434466 - DNA, 19 bp, Homo sapiens
  siRNA target sequence for MGC21830 (NM_182563.2,832-850).
gtgtcggtctgcttttatt

SEQ ID NO: 434467 - DNA, 19 bp, Homo sapiens
  siRNA target sequence for FLJ40319 (NM_182564.1,339-357).
cctaaagcaatgcactaat

SEQ ID NO: 434468 - DNA, 19 bp, Homo sapiens
  siRNA target sequence for FLJ40319 (NM_182564.1,358-376).
ccaaaattaaacgaaaaca

SEQ ID NO: 434469 - DNA, 19 bp, Homo sapiens
  siRNA target sequence for FLJ40319 (NM_182564.1,391-409).
gcaaaggagtgtgaaaaat

SEQ ID NO: 434470 - DNA, 19 bp, Homo sapiens
  siRNA target sequence for MGC29814 (NM_182565.2,447-465).
gctccccacctgcaaactt

SEQ ID NO: 434471 - DNA, 19 bp, Homo sapiens
  siRNA target sequence for FLJ34690 (NM_182567.1,138-156).
gagaaagcctcgtgaaact

SEQ ID NO: 434472 - DNA, 19 bp, Homo sapiens
  siRNA target sequence for FLJ34690 (NM_182567.1,162-180).
gcatctgcaaccacaaact

SEQ ID NO: 434473 - DNA, 19 bp, Homo sapiens
  siRNA target sequence for FLJ34690 (NM_182567.1,172-190).
ccacaaactacaaaatgta

SEQ ID NO: 434474 - DNA, 19 bp, Homo sapiens
  siRNA target sequence for FLJ34690 (NM_182567.1,256-274).
gcagagtactgcaaatgct

SEQ ID NO: 434475 - DNA, 19 bp, Homo sapiens
  siRNA target sequence for FLJ34690 (NM_182567.1,338-356).
caccatgaagggttgtcat

SEQ ID NO: 434476 - DNA, 19 bp, Homo sapiens
  siRNA target sequence for FLJ34690 (NM_182567.1,340-358).
ccatgaagggttgtcattt

SEQ ID NO: 434477 - DNA, 19 bp, Homo sapiens
  siRNA target sequence for FLJ34690 (NM_182567.1,392-410).
gtcaccagctcgtcataca

SEQ ID NO: 434478 - DNA, 19 bp, Homo sapiens
  siRNA target sequence for FLJ34690 (NM_182567.1,447-465).
ggccaaagtacatgactat

SEQ ID NO: 434479 - DNA, 19 bp, Homo sapiens
  siRNA target sequence for FLJ34690 (NM_182567.1,449-467).
ccaaagtacatgactatct

SEQ ID NO: 434480 - DNA, 19 bp, Homo sapiens
  siRNA target sequence for FLJ34690 (NM_182567.1,483-501).
gtgaaattcggacatttgt

SEQ ID NO: 434481 - DNA, 19 bp, Homo sapiens
  siRNA target sequence for FLJ25715 (NM_182570.1,405-423).
ccgaactgcagcttacact

SEQ ID NO: 434482 - DNA, 19 bp, Homo sapiens
  siRNA target sequence for FLJ30469 (NM_182573.1,334-352).
cggctgcacaactgacaaa

SEQ ID NO: 434483 - DNA, 19 bp, Homo sapiens
  siRNA target sequence for FLJ30469 (NM_182573.1,335-353).
ggctgcacaactgacaaat

SEQ ID NO: 434484 - DNA, 19 bp, Homo sapiens
  siRNA target sequence for FLJ30469 (NM_182573.1,541-559).
gacagttggcaatttctca

SEQ ID NO: 434485 - DNA, 19 bp, Homo sapiens
  siRNA target sequence for FLJ30469 (NM_182573.1,560-578).
gtccctgtgtacatcagaa

SEQ ID NO: 434486 - DNA, 19 bp, Homo sapiens
  siRNA target sequence for MGC34799 (NM_182575.1,601-619).
ctgccgaggggtgtgttat

SEQ ID NO: 434487 - DNA, 19 bp, Homo sapiens
  siRNA target sequence for MGC34799 (NM_182575.1,603-621).
gccgaggggtgtgttatat

SEQ ID NO: 434488 - DNA, 19 bp, Homo sapiens
  siRNA target sequence for MGC34799 (NM_182575.1,605-623).
cgaggggtgtgttatatgt

SEQ ID NO: 434489 - DNA, 19 bp, Homo sapiens
  siRNA target sequence for MGC34799 (NM_182575.1,633-651).
gtcgtgctggcgctaaagt

SEQ ID NO: 434490 - DNA, 19 bp, Homo sapiens
  siRNA target sequence for MGC34799 (NM_182575.1,740-758).
ccaggaactgtcgcttaat

SEQ ID NO: 434491 - DNA, 19 bp, Homo sapiens
  siRNA target sequence for MGC34799 (NM_182575.1,920-938).
ctatgttgctcgattccaa

SEQ ID NO: 434492 - DNA, 19 bp, Homo sapiens
  siRNA target sequence for MGC34799 (NM_182575.1,944-962).
ggcttattgtcccaacaaa

SEQ ID NO: 434493 - DNA, 19 bp, Homo sapiens
  siRNA target sequence for MGC34799 (NM_182575.1,945-963).
gcttattgtcccaacaaat

SEQ ID NO: 434494 - DNA, 19 bp, Homo sapiens
  siRNA target sequence for MGC34799 (NM_182575.1,984-1002).
ctgatctggtgcaagaact

SEQ ID NO: 434495 - DNA, 19 bp, Homo sapiens
  siRNA target sequence for MGC34799 (NM_182575.1,1273-1291).
cagccacgatcatcaattt

SEQ ID NO: 434496 - DNA, 19 bp, Homo sapiens
  siRNA target sequence for MGC34799 (NM_182575.1,1276-1294).
ccacgatcatcaattttca

SEQ ID NO: 434497 - DNA, 19 bp, Homo sapiens
  siRNA target sequence for MGC34799 (NM_182575.1,1332-1350).
ccttctccaaatatcgtaa

SEQ ID NO: 434498 - DNA, 19 bp, Homo sapiens
  siRNA target sequence for MGC34799 (NM_182575.1,1445-1463).
cggctccctagcactgata

SEQ ID NO: 434499 - DNA, 19 bp, Homo sapiens
  siRNA target sequence for MGC34799 (NM_182575.1,1468-1486).
gccttacctttgcgatatt

SEQ ID NO: 434500 - DNA, 19 bp, Homo sapiens
  siRNA target sequence for MGC34799 (NM_182575.1,1469-1487).
ccttacctttgcgatattt

SEQ ID NO: 434501 - DNA, 19 bp, Homo sapiens
  siRNA target sequence for MGC34799 (NM_182575.1,1491-1509).
cgaaggaaggtgatcgatt

SEQ ID NO: 434502 - DNA, 19 bp, Homo sapiens
  siRNA target sequence for MGC34799 (NM_182575.1,1500-1518).
gtgatcgatttcatcaaat

SEQ ID NO: 434503 - DNA, 19 bp, Homo sapiens
  siRNA target sequence for MGC34799 (NM_182575.1,1511-1529).
catcaaatcctcactgttt

SEQ ID NO: 434504 - DNA, 19 bp, Homo sapiens
  siRNA target sequence for FLJ40343 (NM_182579.1,251-269).
cctacagtctccatacaca

SEQ ID NO: 434505 - DNA, 19 bp, Homo sapiens
  siRNA target sequence for FLJ40343 (NM_182579.1,302-320).
ctggtttctgccccaaatt

SEQ ID NO: 434506 - DNA, 19 bp, Homo sapiens
  siRNA target sequence for FLJ40343 (NM_182579.1,449-467).
cagttgtccagggaactat

SEQ ID NO: 434507 - DNA, 19 bp, Homo sapiens
  siRNA target sequence for FLJ40343 (NM_182579.1,498-516).
cggcatcccaccttgagat

SEQ ID NO: 434508 - DNA, 19 bp, Homo sapiens
  siRNA target sequence for LOC284680 (NM_182581.1,229-247).
caccccagtaccaaagcat

SEQ ID NO: 434509 - DNA, 19 bp, Homo sapiens
  siRNA target sequence for LOC284680 (NM_182581.1,328-346).
ggcggaactgcactatcta

SEQ ID NO: 434510 - DNA, 19 bp, Homo sapiens
  siRNA target sequence for LOC284680 (NM_182581.1,374-392).
cttcgtgtgtgcagacaaa

SEQ ID NO: 434511 - DNA, 19 bp, Homo sapiens
  siRNA target sequence for LOC284680 (NM_182581.1,788-806).
ctgccaggccttcaatagt

SEQ ID NO: 434512 - DNA, 19 bp, Homo sapiens
  siRNA target sequence for LOC284680 (NM_182581.1,831-849).
ggcggtgaagcctacttat

SEQ ID NO: 434513 - DNA, 19 bp, Homo sapiens
  siRNA target sequence for LOC284680 (NM_182581.1,833-851).
cggtgaagcctacttatgt

SEQ ID NO: 434514 - DNA, 19 bp, Homo sapiens
  siRNA target sequence for MGC34919 (NM_182582.1,1366-1384).
gtatattacacacacaata

SEQ ID NO: 434515 - DNA, 19 bp, Homo sapiens
  siRNA target sequence for MGC34919 (NM_182582.1,1402-1420).
cgcacacacacacgatatt

SEQ ID NO: 434516 - DNA, 19 bp, Homo sapiens
  siRNA target sequence for MGC34919 (NM_182582.1,1414-1432).
cgatattgtgtatgtacat

SEQ ID NO: 434517 - DNA, 19 bp, Homo sapiens
  siRNA target sequence for MGC34919 (NM_182582.1,1450-1468).
cacacgattatattgtgta

SEQ ID NO: 434518 - DNA, 19 bp, Homo sapiens
  siRNA target sequence for FLJ33706 (NM_182584.1,679-697).
gttgcctgcacctttaatt

SEQ ID NO: 434519 - DNA, 19 bp, Homo sapiens
  siRNA target sequence for FLJ33706 (NM_182584.1,709-727).
gtttctctccaattcatca

SEQ ID NO: 434520 - DNA, 19 bp, Homo sapiens
  siRNA target sequence for DKFZp451M2119 (NM_182585.1,3171-3189).
cctcatgtcagctgtttga

SEQ ID NO: 434521 - DNA, 19 bp, Homo sapiens
  siRNA target sequence for DKFZp451M2119 (NM_182585.1,3266-3284).
gtgtgcatggcccatttgt

SEQ ID NO: 434522 - DNA, 19 bp, Homo sapiens
  siRNA target sequence for DKFZp451M2119 (NM_182585.1,3328-3346).
gaagttctgtaggcttata

SEQ ID NO: 434523 - DNA, 19 bp, Homo sapiens
  siRNA target sequence for DKFZp451M2119 (NM_182585.1,3331-3349).
gttctgtaggcttataaca

SEQ ID NO: 434524 - DNA, 19 bp, Homo sapiens
  siRNA target sequence for DKFZp451M2119 (NM_182585.1,3341-3359).
cttataacatacagtcatt

SEQ ID NO: 434525 - DNA, 19 bp, Homo sapiens
  siRNA target sequence for DKFZp451M2119 (NM_182585.1,3470-3488).
gtggagggatgtgtttcta

SEQ ID NO: 434526 - DNA, 19 bp, Homo sapiens
  siRNA target sequence for FLJ33534 (NM_182586.1,400-418).
ggtggccagccgaatgcat

SEQ ID NO: 434527 - DNA, 19 bp, Homo sapiens
  siRNA target sequence for FLJ33534 (NM_182586.1,401-419).
gtggccagccgaatgcatt

SEQ ID NO: 434528 - DNA, 19 bp, Homo sapiens
  siRNA target sequence for FLJ33534 (NM_182586.1,431-449).
caggtctcgtggataatat

SEQ ID NO: 434529 - DNA, 19 bp, Homo sapiens
  siRNA target sequence for FLJ33534 (NM_182586.1,433-451).
ggtctcgtggataatattt

SEQ ID NO: 434530 - DNA, 19 bp, Homo sapiens
  siRNA target sequence for FLJ33534 (NM_182586.1,639-657).
gatgtgggaagtgtgttaa

SEQ ID NO: 434531 - DNA, 19 bp, Homo sapiens
  siRNA target sequence for FLJ33496 (NM_182587.1,161-179).
gcggcaaaccagtgcattt

SEQ ID NO: 434532 - DNA, 19 bp, Homo sapiens
  siRNA target sequence for FLJ33496 (NM_182587.1,186-204).
cccaaactggggaagcaat

SEQ ID NO: 434533 - DNA, 19 bp, Homo sapiens
  siRNA target sequence for FLJ33496 (NM_182587.1,187-205).
ccaaactggggaagcaata

SEQ ID NO: 434534 - DNA, 19 bp, Homo sapiens
  siRNA target sequence for FLJ33496 (NM_182587.1,279-297).
gaagccatccagagcattt

SEQ ID NO: 434535 - DNA, 19 bp, Homo sapiens
  siRNA target sequence for FLJ33496 (NM_182587.1,451-469).
cccaggactgcaacaatga

SEQ ID NO: 434536 - DNA, 19 bp, Homo sapiens
  siRNA target sequence for FLJ33496 (NM_182587.1,782-800).
gcccatcaggaacatcatt

SEQ ID NO: 434537 - DNA, 19 bp, Homo sapiens
  siRNA target sequence for FLJ33496 (NM_182587.1,783-801).
cccatcaggaacatcatta

SEQ ID NO: 434538 - DNA, 19 bp, Homo sapiens
  siRNA target sequence for FLJ33496 (NM_182587.1,785-803).
catcaggaacatcattaca

SEQ ID NO: 434539 - DNA, 19 bp, Homo sapiens
  siRNA target sequence for FLJ33496 (NM_182587.1,831-849).
caaagccggacctgtgaat

SEQ ID NO: 434540 - DNA, 19 bp, Homo sapiens
  siRNA target sequence for FLJ33496 (NM_182587.1,839-857).
gacctgtgaatcaccaaat

SEQ ID NO: 434541 - DNA, 19 bp, Homo sapiens
  siRNA target sequence for FLJ33496 (NM_182587.1,841-859).
cctgtgaatcaccaaatca

SEQ ID NO: 434542 - DNA, 19 bp, Homo sapiens
  siRNA target sequence for FLJ33496 (NM_182587.1,950-968).
ccgaggaaactcctttgat

SEQ ID NO: 434543 - DNA, 19 bp, Homo sapiens
  siRNA target sequence for FLJ33496 (NM_182587.1,995-1013).
ggaaagaggcccatcacat

SEQ ID NO: 434544 - DNA, 19 bp, Homo sapiens
  siRNA target sequence for HTR3E (NM_182589.1,197-215).
gttagctttcattttatca

SEQ ID NO: 434545 - DNA, 19 bp, Homo sapiens
  siRNA target sequence for HTR3E (NM_182589.1,265-283).
gggttgctctccttcatct

SEQ ID NO: 434546 - DNA, 19 bp, Homo sapiens
  siRNA target sequence for HTR3E (NM_182589.1,364-382).
ccactgctctgaattcagt

SEQ ID NO: 434547 - DNA, 19 bp, Homo sapiens
  siRNA target sequence for HTR3E (NM_182589.1,483-501).
ctgcacctcttgtcatcat

SEQ ID NO: 434548 - DNA, 19 bp, Homo sapiens
  siRNA target sequence for HTR3E (NM_182589.1,564-582).
ggcatcacgaagatgagta

SEQ ID NO: 434549 - DNA, 19 bp, Homo sapiens
  siRNA target sequence for HTR3E (NM_182589.1,565-583).
gcatcacgaagatgagtat

SEQ ID NO: 434550 - DNA, 19 bp, Homo sapiens
  siRNA target sequence for HTR3E (NM_182589.1,654-672).
ggcctcacagcatatgtaa

SEQ ID NO: 434551 - DNA, 19 bp, Homo sapiens
  siRNA target sequence for HTR3E (NM_182589.1,656-674).
cctcacagcatatgtaagt

SEQ ID NO: 434552 - DNA, 19 bp, Homo sapiens
  siRNA target sequence for HTR3E (NM_182589.1,657-675).
ctcacagcatatgtaagta

SEQ ID NO: 434553 - DNA, 19 bp, Homo sapiens
  siRNA target sequence for HTR3E (NM_182589.1,659-677).
cacagcatatgtaagtaat

SEQ ID NO: 434554 - DNA, 19 bp, Homo sapiens
  siRNA target sequence for HTR3E (NM_182589.1,678-696).
gaaggtcgcatcaggtata

SEQ ID NO: 434555 - DNA, 19 bp, Homo sapiens
  siRNA target sequence for HTR3E (NM_182589.1,925-943).
ggggaggcaacctgtatga

SEQ ID NO: 434556 - DNA, 19 bp, Homo sapiens
  siRNA target sequence for HTR3E (NM_182589.1,926-944).
gggaggcaacctgtatgat

SEQ ID NO: 434557 - DNA, 19 bp, Homo sapiens
  siRNA target sequence for FLJ33651 (NM_182590.1,109-127).
ggagaaactccctcaacat

SEQ ID NO: 434558 - DNA, 19 bp, Homo sapiens
  siRNA target sequence for FLJ37673 (NM_182591.1,230-248).
gggtggtctgacctgatat

SEQ ID NO: 434559 - DNA, 19 bp, Homo sapiens
  siRNA target sequence for FLJ37673 (NM_182591.1,231-249).
ggtggtctgacctgatatt

SEQ ID NO: 434560 - DNA, 19 bp, Homo sapiens
  siRNA target sequence for FLJ37673 (NM_182591.1,253-271).
gcatagtggccacagatat

SEQ ID NO: 434561 - DNA, 19 bp, Homo sapiens
  siRNA target sequence for FLJ37673 (NM_182591.1,280-298).
cccaagaggtagtcttact

SEQ ID NO: 434562 - DNA, 19 bp, Homo sapiens
  siRNA target sequence for FLJ37673 (NM_182591.1,282-300).
caagaggtagtcttactct

SEQ ID NO: 434563 - DNA, 19 bp, Homo sapiens
  siRNA target sequence for FLJ37673 (NM_182591.1,287-305).
ggtagtcttactctttcaa

SEQ ID NO: 434564 - DNA, 19 bp, Homo sapiens
  siRNA target sequence for FLJ37673 (NM_182591.1,288-306).
gtagtcttactctttcaat

SEQ ID NO: 434565 - DNA, 19 bp, Homo sapiens
  siRNA target sequence for FLJ37673 (NM_182591.1,359-377).
ctggaggtactgttgaata

SEQ ID NO: 434566 - DNA, 19 bp, Homo sapiens
  siRNA target sequence for FLJ37673 (NM_182591.1,422-440).
gtctcaagaccagacataa

SEQ ID NO: 434567 - DNA, 19 bp, Homo sapiens
  siRNA target sequence for FLJ37673 (NM_182591.1,424-442).
ctcaagaccagacataaaa

SEQ ID NO: 434568 - DNA, 19 bp, Homo sapiens
  siRNA target sequence for FLJ37673 (NM_182591.1,452-470).
ctcaagtcactcagaatga

SEQ ID NO: 434569 - DNA, 19 bp, Homo sapiens
  siRNA target sequence for FLJ39576 (NM_182592.1,51-69).
catttactggaggatcttt

SEQ ID NO: 434570 - DNA, 19 bp, Homo sapiens
  siRNA target sequence for FLJ39576 (NM_182592.1,102-120).
gcacaatttgactctgatt

SEQ ID NO: 434571 - DNA, 19 bp, Homo sapiens
  siRNA target sequence for FLJ39576 (NM_182592.1,268-286).
cgggttacgcaggacaatt

SEQ ID NO: 434572 - DNA, 19 bp, Homo sapiens
  siRNA target sequence for FLJ39576 (NM_182592.1,269-287).
gggttacgcaggacaattt

SEQ ID NO: 434573 - DNA, 19 bp, Homo sapiens
  siRNA target sequence for FLJ39576 (NM_182592.1,270-288).
ggttacgcaggacaatttt

SEQ ID NO: 434574 - DNA, 19 bp, Homo sapiens
  siRNA target sequence for FLJ39576 (NM_182592.1,271-289).
gttacgcaggacaattttt

SEQ ID NO: 434575 - DNA, 19 bp, Homo sapiens
  siRNA target sequence for FLJ39576 (NM_182592.1,297-315).
gcatccaactcagattatt

SEQ ID NO: 434576 - DNA, 19 bp, Homo sapiens
  siRNA target sequence for FLJ39576 (NM_182592.1,298-316).
catccaactcagattatta

SEQ ID NO: 434577 - DNA, 19 bp, Homo sapiens
  siRNA target sequence for FLJ39576 (NM_182592.1,305-323).
ctcagattattattcacaa

SEQ ID NO: 434578 - DNA, 19 bp, Homo sapiens
  siRNA target sequence for FLJ39576 (NM_182592.1,321-339).
caatctccttacattgaca

SEQ ID NO: 434579 - DNA, 19 bp, Homo sapiens
  siRNA target sequence for FLJ39576 (NM_182592.1,465-483).
ctcactggacccattcttt

SEQ ID NO: 434580 - DNA, 19 bp, Homo sapiens
  siRNA target sequence for FLJ39576 (NM_182592.1,506-524).
cttgcttctggtaatgtgt

SEQ ID NO: 434581 - DNA, 19 bp, Homo sapiens
  siRNA target sequence for FLJ39576 (NM_182592.1,533-551).
gcaccagattttaatgctt

SEQ ID NO: 434582 - DNA, 19 bp, Homo sapiens
  siRNA target sequence for FLJ39576 (NM_182592.1,603-621).
gtgtcaccttacatagtga

SEQ ID NO: 434583 - DNA, 19 bp, Homo sapiens
  siRNA target sequence for FLJ39576 (NM_182592.1,605-623).
gtcaccttacatagtgaat

SEQ ID NO: 434584 - DNA, 19 bp, Homo sapiens
  siRNA target sequence for FLJ39575 (NM_182597.1,421-439).
gtggattccataaatgact

SEQ ID NO: 434585 - DNA, 19 bp, Homo sapiens
  siRNA target sequence for FLJ39575 (NM_182597.1,464-482).
ccggatcgcagcatctgtt

SEQ ID NO: 434586 - DNA, 19 bp, Homo sapiens
  siRNA target sequence for FLJ39575 (NM_182597.1,502-520).
ccagtccttggcacaaact

SEQ ID NO: 434587 - DNA, 19 bp, Homo sapiens
  siRNA target sequence for FLJ39575 (NM_182597.1,533-551).
gccggagtctgttttttgt

SEQ ID NO: 434588 - DNA, 19 bp, Homo sapiens
  siRNA target sequence for FLJ39575 (NM_182597.1,559-577).
ctaattgtgctgattgtca

SEQ ID NO: 434589 - DNA, 19 bp, Homo sapiens
  siRNA target sequence for FLJ39575 (NM_182597.1,597-615).
cgtgatatttctaatagtt

SEQ ID NO: 434590 - DNA, 19 bp, Homo sapiens
  siRNA target sequence for FLJ39575 (NM_182597.1,637-655).
gatgtgtcaagaagactaa

SEQ ID NO: 434591 - DNA, 19 bp, Homo sapiens
  siRNA target sequence for FLJ39575 (NM_182597.1,670-688).
gacatagatgatcttaaga

SEQ ID NO: 434592 - DNA, 19 bp, Homo sapiens
  siRNA target sequence for FLJ39575 (NM_182597.1,672-690).
catagatgatcttaagaga

SEQ ID NO: 434593 - DNA, 19 bp, Homo sapiens
  siRNA target sequence for FLJ39575 (NM_182597.1,682-700).
cttaagagaatcaataaca

SEQ ID NO: 434594 - DNA, 19 bp, Homo sapiens
  siRNA target sequence for FLJ36980 (NM_182598.1,168-186).
cgaccggagcactgacaat

SEQ ID NO: 434595 - DNA, 19 bp, Homo sapiens
  siRNA target sequence for FLJ36980 (NM_182598.1,343-361).
gactcacacaagaggttta

SEQ ID NO: 434596 - DNA, 19 bp, Homo sapiens
  siRNA target sequence for FLJ36980 (NM_182598.1,366-384).
gagaaggaccgcactattt

SEQ ID NO: 434597 - DNA, 19 bp, Homo sapiens
  siRNA target sequence for FLJ36980 (NM_182598.1,371-389).
ggaccgcactatttcattt

SEQ ID NO: 434598 - DNA, 19 bp, Homo sapiens
  siRNA target sequence for FLJ36980 (NM_182598.1,375-393).
cgcactatttcatttcact

SEQ ID NO: 434599 - DNA, 19 bp, Homo sapiens
  siRNA target sequence for FLJ36980 (NM_182598.1,412-430).
cgttacacattgagaaagt

SEQ ID NO: 434600 - DNA, 19 bp, Homo sapiens
  siRNA target sequence for FLJ36980 (NM_182598.1,413-431).
gttacacattgagaaagtt

SEQ ID NO: 434601 - DNA, 19 bp, Homo sapiens
  siRNA target sequence for MGC44287 (NM_182607.2,128-146).
cattttggaaggtctttct

SEQ ID NO: 434602 - DNA, 19 bp, Homo sapiens
  siRNA target sequence for MGC44287 (NM_182607.2,213-231).
cgtgactgttggatctaat

SEQ ID NO: 434603 - DNA, 19 bp, Homo sapiens
  siRNA target sequence for MGC44287 (NM_182607.2,358-376).
gtagccatcgggcaattta

SEQ ID NO: 434604 - DNA, 19 bp, Homo sapiens
  siRNA target sequence for MGC44287 (NM_182607.2,362-380).
ccatcgggcaatttaaaga

SEQ ID NO: 434605 - DNA, 19 bp, Homo sapiens
  siRNA target sequence for MGC44287 (NM_182607.2,363-381).
catcgggcaatttaaagat

SEQ ID NO: 434606 - DNA, 19 bp, Homo sapiens
  siRNA target sequence for MGC44287 (NM_182607.2,368-386).
ggcaatttaaagatcgaat

SEQ ID NO: 434607 - DNA, 19 bp, Homo sapiens
  siRNA target sequence for MGC44287 (NM_182607.2,369-387).
gcaatttaaagatcgaatt

SEQ ID NO: 434608 - DNA, 19 bp, Homo sapiens
  siRNA target sequence for MGC44287 (NM_182607.2,393-411).
gtccaacgatccaggtaat

SEQ ID NO: 434609 - DNA, 19 bp, Homo sapiens
  siRNA target sequence for MGC44287 (NM_182607.2,396-414).
caacgatccaggtaatgca

SEQ ID NO: 434610 - DNA, 19 bp, Homo sapiens
  siRNA target sequence for MGC44287 (NM_182607.2,406-424).
ggtaatgcatctatcacta

SEQ ID NO: 434611 - DNA, 19 bp, Homo sapiens
  siRNA target sequence for MGC44287 (NM_182607.2,407-425).
gtaatgcatctatcactat

SEQ ID NO: 434612 - DNA, 19 bp, Homo sapiens
  siRNA target sequence for MGC44287 (NM_182607.2,442-460).
gcagacagtggaatttaca

SEQ ID NO: 434613 - DNA, 19 bp, Homo sapiens
  siRNA target sequence for MGC44287 (NM_182607.2,486-504).
ctttctcggccaaaaccaa

SEQ ID NO: 434614 - DNA, 19 bp, Homo sapiens
  siRNA target sequence for MGC44287 (NM_182607.2,516-534).
cgtcagtgtgttagtgaaa

SEQ ID NO: 434615 - DNA, 19 bp, Homo sapiens
  siRNA target sequence for MGC44287 (NM_182607.2,569-587).
cagaaactggccacactat

SEQ ID NO: 434616 - DNA, 19 bp, Homo sapiens
  siRNA target sequence for MGC44287 (NM_182607.2,630-648).
gtactactggcataaactt

SEQ ID NO: 434617 - DNA, 19 bp, Homo sapiens
  siRNA target sequence for MGC44287 (NM_182607.2,689-707).
caaccaccgggattttggt

SEQ ID NO: 434618 - DNA, 19 bp, Homo sapiens
  siRNA target sequence for MGC44287 (NM_182607.2,745-763).
cagtgtactgccatcaaca

SEQ ID NO: 434619 - DNA, 19 bp, Homo sapiens
  siRNA target sequence for MGC44287 (NM_182607.2,759-777).
caacagacttggcaatagt

SEQ ID NO: 434620 - DNA, 19 bp, Homo sapiens
  siRNA target sequence for MGC44287 (NM_182607.2,789-807).
cgatctcacttcttcacat

SEQ ID NO: 434621 - DNA, 19 bp, Homo sapiens
  siRNA target sequence for MGC44287 (NM_182607.2,826-844).
gttggggccttgattggta

SEQ ID NO: 434622 - DNA, 19 bp, Homo sapiens
  siRNA target sequence for MGC44287 (NM_182607.2,850-868).
gtaggtgccgccatcatca

SEQ ID NO: 434623 - DNA, 19 bp, Homo sapiens
  siRNA target sequence for MGC44287 (NM_182607.2,877-895).
gtgtgcttcgcaaggaata

SEQ ID NO: 434624 - DNA, 19 bp, Homo sapiens
  siRNA target sequence for MGC44287 (NM_182607.2,971-989).
ggggagaaagcgaagcaat

SEQ ID NO: 434625 - DNA, 19 bp, Homo sapiens
  siRNA target sequence for MGC44287 (NM_182607.2,1002-1020).
cgctacccaactagaagta

SEQ ID NO: 434626 - DNA, 19 bp, Homo sapiens
  siRNA target sequence for MGC44287 (NM_182607.2,1007-1025).
cccaactagaagtaactct

SEQ ID NO: 434627 - DNA, 19 bp, Homo sapiens
  siRNA target sequence for MGC44287 (NM_182607.2,1008-1026).
ccaactagaagtaactcta

SEQ ID NO: 434628 - DNA, 19 bp, Homo sapiens
  siRNA target sequence for MGC44287 (NM_182607.2,1059-1077).
catccaagaaccagactat

SEQ ID NO: 434629 - DNA, 19 bp, Homo sapiens
  siRNA target sequence for DKFZp686O1689 (NM_182608.2,337-355).
gcgttgactgcctcataga

SEQ ID NO: 434630 - DNA, 19 bp, Homo sapiens
  siRNA target sequence for DKFZp686O1689 (NM_182608.2,338-356).
cgttgactgcctcatagat

SEQ ID NO: 434631 - DNA, 19 bp, Homo sapiens
  siRNA target sequence for DKFZp686O1689 (NM_182608.2,339-357).
gttgactgcctcatagata

SEQ ID NO: 434632 - DNA, 19 bp, Homo sapiens
  siRNA target sequence for DKFZp686O1689 (NM_182608.2,529-547).
gggcctgtgtccacaatga

SEQ ID NO: 434633 - DNA, 19 bp, Homo sapiens
  siRNA target sequence for DKFZp686O1689 (NM_182608.2,825-843).
gggctcacggcgttaatga

SEQ ID NO: 434634 - DNA, 19 bp, Homo sapiens
  siRNA target sequence for DKFZp686O1689 (NM_182608.2,826-844).
ggctcacggcgttaatgaa

SEQ ID NO: 434635 - DNA, 19 bp, Homo sapiens
  siRNA target sequence for DKFZp686O1689 (NM_182608.2,1251-1269).
gtgccagagctgttaggta

SEQ ID NO: 434636 - DNA, 19 bp, Homo sapiens
  siRNA target sequence for SAMD7 (NM_182610.1,346-364).
ctgtggacagagatgtatt

SEQ ID NO: 434637 - DNA, 19 bp, Homo sapiens
  siRNA target sequence for SAMD7 (NM_182610.1,536-554).
gattcaacggcatcatact

SEQ ID NO: 434638 - DNA, 19 bp, Homo sapiens
  siRNA target sequence for SAMD7 (NM_182610.1,709-727).
ccggtgacctgcattttca

SEQ ID NO: 434639 - DNA, 19 bp, Homo sapiens
  siRNA target sequence for SAMD7 (NM_182610.1,770-788).
ggcaactgcaccacacttt

SEQ ID NO: 434640 - DNA, 19 bp, Homo sapiens
  siRNA target sequence for SAMD7 (NM_182610.1,811-829).
gtcgtcgactcaggaaaaa

SEQ ID NO: 434641 - DNA, 19 bp, Homo sapiens
  siRNA target sequence for SAMD7 (NM_182610.1,813-831).
cgtcgactcaggaaaaata

SEQ ID NO: 434642 - DNA, 19 bp, Homo sapiens
  siRNA target sequence for SAMD7 (NM_182610.1,940-958).
caaaagacccagacattga

SEQ ID NO: 434643 - DNA, 19 bp, Homo sapiens
  siRNA target sequence for SAMD7 (NM_182610.1,974-992).
gaagtcaagtgaaacgaat

SEQ ID NO: 434644 - DNA, 19 bp, Homo sapiens
  siRNA target sequence for SAMD7 (NM_182610.1,1034-1052).
cgagcccacccataggaaa

SEQ ID NO: 434645 - DNA, 19 bp, Homo sapiens
  siRNA target sequence for SAMD7 (NM_182610.1,1069-1087).
ccactaccctgaaagcaaa

SEQ ID NO: 434646 - DNA, 19 bp, Homo sapiens
  siRNA target sequence for SAMD7 (NM_182610.1,1192-1210).
cacatgcactggttacaat

SEQ ID NO: 434647 - DNA, 19 bp, Homo sapiens
  siRNA target sequence for SAMD7 (NM_182610.1,1214-1232).
ggggaatctttctttggat

SEQ ID NO: 434648 - DNA, 19 bp, Homo sapiens
  siRNA target sequence for SAMD7 (NM_182610.1,1301-1319).
ctatgctcaggtatttaaa

SEQ ID NO: 434649 - DNA, 19 bp, Homo sapiens
  siRNA target sequence for SAMD7 (NM_182610.1,1336-1354).
gagaaactttgccattact

SEQ ID NO: 434650 - DNA, 19 bp, Homo sapiens
  siRNA target sequence for SAMD7 (NM_182610.1,1371-1389).
cgaggcactatgggattaa

SEQ ID NO: 434651 - DNA, 19 bp, Homo sapiens
  siRNA target sequence for SAMD7 (NM_182610.1,1372-1390).
gaggcactatgggattaaa

SEQ ID NO: 434652 - DNA, 19 bp, Homo sapiens
  siRNA target sequence for SAMD7 (NM_182610.1,1375-1393).
gcactatgggattaaagct

SEQ ID NO: 434653 - DNA, 19 bp, Homo sapiens
  siRNA target sequence for SAMD7 (NM_182610.1,1376-1394).
cactatgggattaaagcta

SEQ ID NO: 434654 - DNA, 19 bp, Homo sapiens
  siRNA target sequence for SAMD7 (NM_182610.1,1507-1525).
cccctcttctggatcctaa

SEQ ID NO: 434655 - DNA, 19 bp, Homo sapiens
  siRNA target sequence for SAMD7 (NM_182610.1,1508-1526).
ccctcttctggatcctaat

SEQ ID NO: 434656 - DNA, 19 bp, Homo sapiens
  siRNA target sequence for SAMD7 (NM_182610.1,1534-1552).
gtgatacaatgaacatttt

SEQ ID NO: 434657 - DNA, 19 bp, Homo sapiens
  siRNA target sequence for SAMD7 (NM_182610.1,1559-1577).
ccaggatacaataattcct

SEQ ID NO: 434658 - DNA, 19 bp, Homo sapiens
  siRNA target sequence for SAMD7 (NM_182610.1,1582-1600).
gaattgagcgaggtagtat

SEQ ID NO: 434659 - DNA, 19 bp, Homo sapiens
  siRNA target sequence for SAMD7 (NM_182610.1,1587-1605).
gagcgaggtagtatgagaa

SEQ ID NO: 434660 - DNA, 19 bp, Homo sapiens
  siRNA target sequence for SAMD7 (NM_182610.1,1590-1608).
cgaggtagtatgagaaact

SEQ ID NO: 434661 - DNA, 19 bp, Homo sapiens
  siRNA target sequence for GPR144 (NM_182611.1,160-178).
ggtggggtgtgcaagttct

SEQ ID NO: 434662 - DNA, 19 bp, Homo sapiens
  siRNA target sequence for GPR144 (NM_182611.1,1145-1163).
ccttggccaacgacattgt

SEQ ID NO: 434663 - DNA, 19 bp, Homo sapiens
  siRNA target sequence for GPR144 (NM_182611.1,1334-1352).
gggacccagagctgttgtt

SEQ ID NO: 434664 - DNA, 19 bp, Homo sapiens
  siRNA target sequence for GPR144 (NM_182611.1,1372-1390).
ctgagccaaggcgttgtat

SEQ ID NO: 434665 - DNA, 19 bp, Homo sapiens
  siRNA target sequence for GPR144 (NM_182611.1,1374-1392).
gagccaaggcgttgtatct

SEQ ID NO: 434666 - DNA, 19 bp, Homo sapiens
  siRNA target sequence for GPR144 (NM_182611.1,1501-1519).
ctgctgagcacctcaatga

SEQ ID NO: 434667 - DNA, 19 bp, Homo sapiens
  siRNA target sequence for GPR144 (NM_182611.1,1755-1773).
cgtggccatgacctttcat

SEQ ID NO: 434668 - DNA, 19 bp, Homo sapiens
  siRNA target sequence for GPR144 (NM_182611.1,1810-1828).
catcccccaagcccatata

SEQ ID NO: 434669 - DNA, 19 bp, Homo sapiens
  siRNA target sequence for GPR144 (NM_182611.1,1919-1937).
ccatcctgctgcaaatcta

SEQ ID NO: 434670 - DNA, 19 bp, Homo sapiens
  siRNA target sequence for GPR144 (NM_182611.1,2180-2198).
caatgcacttcctctttct

SEQ ID NO: 434671 - DNA, 19 bp, Homo sapiens
  siRNA target sequence for GPR144 (NM_182611.1,2372-2390).
gacattgctggctcaatgt

SEQ ID NO: 434672 - DNA, 19 bp, Homo sapiens
  siRNA target sequence for GPR144 (NM_182611.1,2382-2400).
gctcaatgtgcacacaaat

SEQ ID NO: 434673 - DNA, 19 bp, Homo sapiens
  siRNA target sequence for GPR144 (NM_182611.1,2458-2476).
ctggcccgtgtggtaatga

SEQ ID NO: 434674 - DNA, 19 bp, Homo sapiens
  siRNA target sequence for GPR144 (NM_182611.1,2461-2479).
gcccgtgtggtaatgatca

SEQ ID NO: 434675 - DNA, 19 bp, Homo sapiens
  siRNA target sequence for GPR144 (NM_182611.1,2685-2703).
gtacatcttcctggtttat

SEQ ID NO: 434676 - DNA, 19 bp, Homo sapiens
  siRNA target sequence for FLJ34283 (NM_182612.1,204-222).
cacgctgggtgcaagactt

SEQ ID NO: 434677 - DNA, 19 bp, Homo sapiens
  siRNA target sequence for FLJ33915 (NM_182613.1,1306-1324).
gagactgtatggaccatta

SEQ ID NO: 434678 - DNA, 19 bp, Homo sapiens
  siRNA target sequence for FLJ33915 (NM_182613.1,1308-1326).
gactgtatggaccattaca

SEQ ID NO: 434679 - DNA, 19 bp, Homo sapiens
  siRNA target sequence for FLJ33915 (NM_182613.1,1536-1554).
ctgtctctgcggattggaa

SEQ ID NO: 434680 - DNA, 19 bp, Homo sapiens
  siRNA target sequence for FLJ33915 (NM_182613.1,1562-1580).
ctccagcgacctaacaaat

SEQ ID NO: 434681 - DNA, 19 bp, Homo sapiens
  siRNA target sequence for FLJ33915 (NM_182613.1,1565-1583).
cagcgacctaacaaataca

SEQ ID NO: 434682 - DNA, 19 bp, Homo sapiens
  siRNA target sequence for FLJ33915 (NM_182613.1,1567-1585).
gcgacctaacaaatacata

SEQ ID NO: 434683 - DNA, 19 bp, Homo sapiens
  siRNA target sequence for FLJ33915 (NM_182613.1,1568-1586).
cgacctaacaaatacatat

SEQ ID NO: 434684 - DNA, 19 bp, Homo sapiens
  siRNA target sequence for MGC20579 (NM_182614.2,130-148).
gtgtccgtcctcatagtca

SEQ ID NO: 434685 - DNA, 19 bp, Homo sapiens
  siRNA target sequence for MGC20579 (NM_182614.2,219-237).
cggctttggatctttctta

SEQ ID NO: 434686 - DNA, 19 bp, Homo sapiens
  siRNA target sequence for MGC20579 (NM_182614.2,226-244).
ggatctttcttaggaatta

SEQ ID NO: 434687 - DNA, 19 bp, Homo sapiens
  siRNA target sequence for MGC20579 (NM_182614.2,283-301).
gtggcagcgatcgtgttta

SEQ ID NO: 434688 - DNA, 19 bp, Homo sapiens
  siRNA target sequence for MGC20579 (NM_182614.2,286-304).
gcagcgatcgtgtttatca

SEQ ID NO: 434689 - DNA, 19 bp, Homo sapiens
  siRNA target sequence for MGC20579 (NM_182614.2,289-307).
gcgatcgtgtttatcagtt

SEQ ID NO: 434690 - DNA, 19 bp, Homo sapiens
  siRNA target sequence for MGC20579 (NM_182614.2,336-354).
catcgtggacggcgtattt

SEQ ID NO: 434691 - DNA, 19 bp, Homo sapiens
  siRNA target sequence for MGC20579 (NM_182614.2,339-357).
cgtggacggcgtatttgca

SEQ ID NO: 434692 - DNA, 19 bp, Homo sapiens
  siRNA target sequence for MGC20579 (NM_182614.2,389-407).
cgggaagatgccagtttta

SEQ ID NO: 434693 - DNA, 19 bp, Homo sapiens
  siRNA target sequence for MGC20579 (NM_182614.2,422-440).
ggtacttgtacgatgtcta

SEQ ID NO: 434694 - DNA, 19 bp, Homo sapiens
  siRNA target sequence for MGC20579 (NM_182614.2,617-635).
gggcctctgcagttctgaa

SEQ ID NO: 434695 - DNA, 19 bp, Homo sapiens
  siRNA target sequence for MGC20579 (NM_182614.2,954-972).
ctacgcacccacctacttt

SEQ ID NO: 434696 - DNA, 19 bp, Homo sapiens
  siRNA target sequence for MGC40069 (NM_182615.1,144-162).
cccactgctggggatacat

SEQ ID NO: 434697 - DNA, 19 bp, Homo sapiens
  siRNA target sequence for MGC40069 (NM_182615.1,145-163).
ccactgctggggatacatt

SEQ ID NO: 434698 - DNA, 19 bp, Homo sapiens
  siRNA target sequence for MGC40069 (NM_182615.1,146-164).
cactgctggggatacattt

SEQ ID NO: 434699 - DNA, 19 bp, Homo sapiens
  siRNA target sequence for MGC40069 (NM_182615.1,261-279).
ctatggggcaacaccttat

SEQ ID NO: 434700 - DNA, 19 bp, Homo sapiens
  siRNA target sequence for MGC40069 (NM_182615.1,265-283).
ggggcaacaccttatctct

SEQ ID NO: 434701 - DNA, 19 bp, Homo sapiens
  siRNA target sequence for MGC40069 (NM_182615.1,403-421).
ggctcacgctataatgtat

SEQ ID NO: 434702 - DNA, 19 bp, Homo sapiens
  siRNA target sequence for MGC40069 (NM_182615.1,404-422).
gctcacgctataatgtatt

SEQ ID NO: 434703 - DNA, 19 bp, Homo sapiens
  siRNA target sequence for MGC40069 (NM_182615.1,405-423).
ctcacgctataatgtatta

SEQ ID NO: 434704 - DNA, 19 bp, Homo sapiens
  siRNA target sequence for MGC40069 (NM_182615.1,407-425).
cacgctataatgtattaga

SEQ ID NO: 434705 - DNA, 19 bp, Homo sapiens
  siRNA target sequence for MGC40069 (NM_182615.1,436-454).
cttctacctttgataagat

SEQ ID NO: 434706 - DNA, 19 bp, Homo sapiens
  siRNA target sequence for MGC61550 (NM_182616.1,207-225).
ggagaactgatcgatgtat

SEQ ID NO: 434707 - DNA, 19 bp, Homo sapiens
  siRNA target sequence for MGC61550 (NM_182616.1,264-282).
cgctactacgtgctgtata

SEQ ID NO: 434708 - DNA, 19 bp, Homo sapiens
  siRNA target sequence for MGC61550 (NM_182616.1,265-283).
gctactacgtgctgtatat

SEQ ID NO: 434709 - DNA, 19 bp, Homo sapiens
  siRNA target sequence for MGC61550 (NM_182616.1,314-332).
cgacgccaagggaaatgaa

SEQ ID NO: 434710 - DNA, 19 bp, Homo sapiens
  siRNA target sequence for MGC61550 (NM_182616.1,319-337).
ccaagggaaatgaaatcga

SEQ ID NO: 434711 - DNA, 19 bp, Homo sapiens
  siRNA target sequence for MGC61550 (NM_182616.1,588-606).
ggtcccttcctggattcat

SEQ ID NO: 434712 - DNA, 19 bp, Homo sapiens
  siRNA target sequence for MGC61550 (NM_182616.1,624-642).
ggaacagtgaccaagtgta

SEQ ID NO: 434713 - DNA, 19 bp, Homo sapiens
  siRNA target sequence for MGC61550 (NM_182616.1,625-643).
gaacagtgaccaagtgtaa

SEQ ID NO: 434714 - DNA, 19 bp, Homo sapiens
  siRNA target sequence for MGC61550 (NM_182616.1,628-646).
cagtgaccaagtgtaattt

SEQ ID NO: 434715 - DNA, 19 bp, Homo sapiens
  siRNA target sequence for MGC61550 (NM_182616.1,630-648).
gtgaccaagtgtaatttca

SEQ ID NO: 434716 - DNA, 19 bp, Homo sapiens
  siRNA target sequence for MGC61550 (NM_182616.1,686-704).
catcatggcccaaaagtgt

SEQ ID NO: 434717 - DNA, 19 bp, Homo sapiens
  siRNA target sequence for MGC52498 (NM_182621.1,204-222).
gcttccgcgaccacaagta

SEQ ID NO: 434718 - DNA, 19 bp, Homo sapiens
  siRNA target sequence for FLJ40869 (NM_182625.1,243-261).
ggagtggcccaatcactat

SEQ ID NO: 434719 - DNA, 19 bp, Homo sapiens
  siRNA target sequence for FLJ40869 (NM_182625.1,268-286).
gagaaattgctggtacttt

SEQ ID NO: 434720 - DNA, 19 bp, Homo sapiens
  siRNA target sequence for FLJ40869 (NM_182625.1,283-301).
cttttgacccattatgaca

SEQ ID NO: 434721 - DNA, 19 bp, Homo sapiens
  siRNA target sequence for FLJ40869 (NM_182625.1,290-308).
cccattatgacatgataga

SEQ ID NO: 434722 - DNA, 19 bp, Homo sapiens
  siRNA target sequence for FLJ40869 (NM_182625.1,320-338).
gtagcagaaactctaatca

SEQ ID NO: 434723 - DNA, 19 bp, Homo sapiens
  siRNA target sequence for FLJ40869 (NM_182625.1,323-341).
gcagaaactctaatcaact

SEQ ID NO: 434724 - DNA, 19 bp, Homo sapiens
  siRNA target sequence for FLJ40869 (NM_182625.1,324-342).
cagaaactctaatcaacta

SEQ ID NO: 434725 - DNA, 19 bp, Homo sapiens
  siRNA target sequence for FLJ40869 (NM_182625.1,337-355).
caactacagccaattcgaa

SEQ ID NO: 434726 - DNA, 19 bp, Homo sapiens
  siRNA target sequence for FLJ40869 (NM_182625.1,343-361).
cagccaattcgaattgtta

SEQ ID NO: 434727 - DNA, 19 bp, Homo sapiens
  siRNA target sequence for FLJ40869 (NM_182625.1,346-364).
ccaattcgaattgttaaga

SEQ ID NO: 434728 - DNA, 19 bp, Homo sapiens
  siRNA target sequence for FLJ40869 (NM_182625.1,358-376).
gttaagactcgaatcagaa

SEQ ID NO: 434729 - DNA, 19 bp, Homo sapiens
  siRNA target sequence for FLJ40869 (NM_182625.1,404-422).
gggaaaagcctgaacatta

SEQ ID NO: 434730 - DNA, 19 bp, Homo sapiens
  siRNA target sequence for FLJ40869 (NM_182625.1,483-501).
gtttgaagcagcatatcct

SEQ ID NO: 434731 - DNA, 19 bp, Homo sapiens
  siRNA target sequence for FLJ40869 (NM_182625.1,500-518).
ctgagatcgttgctgttta

SEQ ID NO: 434732 - DNA, 19 bp, Homo sapiens
  siRNA target sequence for FLJ40869 (NM_182625.1,504-522).
gatcgttgctgtttaccaa

SEQ ID NO: 434733 - DNA, 19 bp, Homo sapiens
  siRNA target sequence for FLJ40869 (NM_182625.1,559-577).
cgtattaagcctaaagaaa

SEQ ID NO: 434734 - DNA, 19 bp, Homo sapiens
  siRNA target sequence for FLJ40869 (NM_182625.1,698-716).
cattaccacaggaatctat

SEQ ID NO: 434735 - DNA, 19 bp, Homo sapiens
  siRNA target sequence for FLJ40869 (NM_182625.1,729-747).
gaatagcttgcttttacct

SEQ ID NO: 434736 - DNA, 19 bp, Homo sapiens
  siRNA target sequence for FLJ40869 (NM_182625.1,780-798).
gttcatgtcttctctaaga

SEQ ID NO: 434737 - DNA, 19 bp, Homo sapiens
  siRNA target sequence for FLJ40869 (NM_182625.1,823-841).
gctgtcagtaagtctctaa

SEQ ID NO: 434738 - DNA, 19 bp, Homo sapiens
  siRNA target sequence for FLJ40869 (NM_182625.1,830-848).
gtaagtctctaatttcaga

SEQ ID NO: 434739 - DNA, 19 bp, Homo sapiens
  siRNA target sequence for FLJ40869 (NM_182625.1,834-852).
gtctctaatttcagaatct

SEQ ID NO: 434740 - DNA, 19 bp, Homo sapiens
  siRNA target sequence for FLJ40869 (NM_182625.1,859-877).
cccaatacctcatctcata

SEQ ID NO: 434741 - DNA, 19 bp, Homo sapiens
  siRNA target sequence for FLJ40869 (NM_182625.1,860-878).
ccaatacctcatctcataa

SEQ ID NO: 434742 - DNA, 19 bp, Homo sapiens
  siRNA target sequence for FLJ40869 (NM_182625.1,901-919).
cacttgagcactattgact

SEQ ID NO: 434743 - DNA, 19 bp, Homo sapiens
  siRNA target sequence for FLJ40869 (NM_182625.1,1064-1082).
ggtacactgcaaacataaa

SEQ ID NO: 434744 - DNA, 19 bp, Homo sapiens
  siRNA target sequence for FLJ40869 (NM_182625.1,1156-1174).
cttcaggatttgcctttaa

SEQ ID NO: 434745 - DNA, 19 bp, Homo sapiens
  siRNA target sequence for FLJ40869 (NM_182625.1,1167-1185).
gcctttaaaggaacgaata

SEQ ID NO: 434746 - DNA, 19 bp, Homo sapiens
  siRNA target sequence for FLJ40869 (NM_182625.1,1168-1186).
cctttaaaggaacgaatat

SEQ ID NO: 434747 - DNA, 19 bp, Homo sapiens
  siRNA target sequence for FLJ40869 (NM_182625.1,1169-1187).
ctttaaaggaacgaatatt

SEQ ID NO: 434748 - DNA, 19 bp, Homo sapiens
  siRNA target sequence for FLJ40869 (NM_182625.1,1245-1263).
gtccatacttagtgtaaaa

SEQ ID NO: 434749 - DNA, 19 bp, Homo sapiens
  siRNA target sequence for FLJ40869 (NM_182625.1,1291-1309).
gattgtacatcacatcttt

SEQ ID NO: 434750 - DNA, 19 bp, Homo sapiens
  siRNA target sequence for FLJ40869 (NM_182625.1,1295-1313).
gtacatcacatctttcaaa

SEQ ID NO: 434751 - DNA, 19 bp, Homo sapiens
  siRNA target sequence for FLJ40869 (NM_182625.1,1384-1402).
caagaagactataaagtca

SEQ ID NO: 434752 - DNA, 19 bp, Homo sapiens
  siRNA target sequence for FLJ40869 (NM_182625.1,1390-1408).
gactataaagtcaatactt

SEQ ID NO: 434753 - DNA, 19 bp, Homo sapiens
  siRNA target sequence for FLJ40869 (NM_182625.1,1437-1455).
ggtaaagacctgcaatgtt

SEQ ID NO: 434754 - DNA, 19 bp, Homo sapiens
  siRNA target sequence for FLJ40869 (NM_182625.1,1438-1456).
gtaaagacctgcaatgtta

SEQ ID NO: 434755 - DNA, 19 bp, Homo sapiens
  siRNA target sequence for FLJ40869 (NM_182625.1,1471-1489).
gctttagatcatagtagaa

SEQ ID NO: 434756 - DNA, 19 bp, Homo sapiens
  siRNA target sequence for FLJ40869 (NM_182625.1,1500-1518).
gcaaaccactcggaaaatt

SEQ ID NO: 434757 - DNA, 19 bp, Homo sapiens
  siRNA target sequence for FLJ40869 (NM_182625.1,1501-1519).
caaaccactcggaaaattt

SEQ ID NO: 434758 - DNA, 19 bp, Homo sapiens
  siRNA target sequence for FLJ40869 (NM_182625.1,1510-1528).
cggaaaattttaatgaaga

SEQ ID NO: 434759 - DNA, 19 bp, Homo sapiens
  siRNA target sequence for FLJ40869 (NM_182625.1,1534-1552).
gtttgccttgacagacatt

SEQ ID NO: 434760 - DNA, 19 bp, Homo sapiens
  siRNA target sequence for FLJ40869 (NM_182625.1,1547-1565).
gacattcctctgatgaaca

SEQ ID NO: 434761 - DNA, 19 bp, Homo sapiens
  siRNA target sequence for FLJ40869 (NM_182625.1,1582-1600).
gggaaagctaagtacacaa

SEQ ID NO: 434762 - DNA, 19 bp, Homo sapiens
  siRNA target sequence for FLJ40869 (NM_182625.1,1588-1606).
gctaagtacacaactcaaa

SEQ ID NO: 434763 - DNA, 19 bp, Homo sapiens
  siRNA target sequence for FLJ40869 (NM_182625.1,1614-1632).
gcacagttctcaaaagcat

SEQ ID NO: 434764 - DNA, 19 bp, Homo sapiens
  siRNA target sequence for FLJ25102 (NM_182626.1,388-406).
ccagccttacgtcttgaaa

SEQ ID NO: 434765 - DNA, 19 bp, Homo sapiens
  siRNA target sequence for FLJ25102 (NM_182626.1,422-440).
ctgcgtgtcaggtgttact

SEQ ID NO: 434766 - DNA, 19 bp, Homo sapiens
  siRNA target sequence for FLJ25102 (NM_182626.1,465-483).
ggcagttgcagctttcagt

SEQ ID NO: 434767 - DNA, 19 bp, Homo sapiens
  siRNA target sequence for FLJ25102 (NM_182626.1,614-632).
cgaccctgtttcagaatga

SEQ ID NO: 434768 - DNA, 19 bp, Homo sapiens
  siRNA target sequence for FLJ25102 (NM_182626.1,618-636).
cctgtttcagaatgaagtt

SEQ ID NO: 434769 - DNA, 19 bp, Homo sapiens
  siRNA target sequence for FLJ25102 (NM_182626.1,681-699).
ccaagcttcagcatatcct

SEQ ID NO: 434770 - DNA, 19 bp, Homo sapiens
  siRNA target sequence for FLJ25102 (NM_182626.1,682-700).
caagcttcagcatatcctt

SEQ ID NO: 434771 - DNA, 19 bp, Homo sapiens
  siRNA target sequence for FLJ25102 (NM_182626.1,731-749).
ggtggacccaccattctca

SEQ ID NO: 434772 - DNA, 19 bp, Homo sapiens
  siRNA target sequence for MGC64882 (NM_182627.1,486-504).
gacgggtgggcattcttct

SEQ ID NO: 434773 - DNA, 19 bp, Homo sapiens
  siRNA target sequence for MGC64882 (NM_182627.1,570-588).
cacggcttggggtgaagat

SEQ ID NO: 434774 - DNA, 19 bp, Homo sapiens
  siRNA target sequence for MGC64882 (NM_182627.1,616-634).
caaggggctgatgatgtta

SEQ ID NO: 434775 - DNA, 19 bp, Homo sapiens
  siRNA target sequence for MGC64882 (NM_182627.1,631-649).
gttaccagtgtcttatttt

SEQ ID NO: 434776 - DNA, 19 bp, Homo sapiens
  siRNA target sequence for MGC64882 (NM_182627.1,709-727).
gtcaggtccctcaaagatt

SEQ ID NO: 434777 - DNA, 19 bp, Homo sapiens
  siRNA target sequence for MGC64882 (NM_182627.1,810-828).
cgactctggggcaatcaaa

SEQ ID NO: 434778 - DNA, 19 bp, Homo sapiens
  siRNA target sequence for MGC64882 (NM_182627.1,815-833).
ctggggcaatcaaaatcct

SEQ ID NO: 434779 - DNA, 19 bp, Homo sapiens
  siRNA target sequence for MGC64882 (NM_182627.1,976-994).
gcccgaccactctggatta

SEQ ID NO: 434780 - DNA, 19 bp, Homo sapiens
  siRNA target sequence for MGC64882 (NM_182627.1,978-996).
ccgaccactctggattaca

SEQ ID NO: 434781 - DNA, 19 bp, Homo sapiens
  siRNA target sequence for MGC64882 (NM_182627.1,980-998).
gaccactctggattacaaa

SEQ ID NO: 434782 - DNA, 19 bp, Homo sapiens
  siRNA target sequence for MGC64882 (NM_182627.1,982-1000).
ccactctggattacaaatt

SEQ ID NO: 434783 - DNA, 19 bp, Homo sapiens
  siRNA target sequence for MGC64882 (NM_182627.1,1063-1081).
gccctagcccattctatct

SEQ ID NO: 434784 - DNA, 19 bp, Homo sapiens
  siRNA target sequence for MGC64882 (NM_182627.1,1084-1102).
gtggcttcgtgtggtaata

SEQ ID NO: 434785 - DNA, 19 bp, Homo sapiens
  siRNA target sequence for MGC64882 (NM_182627.1,1087-1105).
gcttcgtgtggtaatattt

SEQ ID NO: 434786 - DNA, 19 bp, Homo sapiens
  siRNA target sequence for MGC64882 (NM_182627.1,1144-1162).
cgggtgatgggagttaagt

SEQ ID NO: 434787 - DNA, 19 bp, Homo sapiens
  siRNA target sequence for MGC64882 (NM_182627.1,1214-1232).
gctttctcccagaatccta

SEQ ID NO: 434788 - DNA, 19 bp, Homo sapiens
  siRNA target sequence for MGC64882 (NM_182627.1,1239-1257).
gcttactggagggaatgat

SEQ ID NO: 434789 - DNA, 19 bp, Homo sapiens
  siRNA target sequence for MGC64882 (NM_182627.1,1280-1298).
caaacagtgaagttgagaa

SEQ ID NO: 434790 - DNA, 19 bp, Homo sapiens
  siRNA target sequence for MGC64882 (NM_182627.1,1498-1516).
gtagctgatcaaactagtt

SEQ ID NO: 434791 - DNA, 19 bp, Homo sapiens
  siRNA target sequence for MGC64882 (NM_182627.1,1502-1520).
ctgatcaaactagttgtat

SEQ ID NO: 434792 - DNA, 19 bp, Homo sapiens
  siRNA target sequence for MGC64882 (NM_182627.1,1504-1522).
gatcaaactagttgtatat

SEQ ID NO: 434793 - DNA, 19 bp, Homo sapiens
  siRNA target sequence for FLJ40083 (NM_182628.1,119-137).
ctatagtctccaagaacat

SEQ ID NO: 434794 - DNA, 19 bp, Homo sapiens
  siRNA target sequence for FLJ40083 (NM_182628.1,250-268).
gcgaaccctttccacttat

SEQ ID NO: 434795 - DNA, 19 bp, Homo sapiens
  siRNA target sequence for FLJ40083 (NM_182628.1,271-289).
ggggatgtggatttcttct

SEQ ID NO: 434796 - DNA, 19 bp, Homo sapiens
  siRNA target sequence for FLJ40083 (NM_182628.1,296-314).
gagatcaggagcggaataa

SEQ ID NO: 434797 - DNA, 19 bp, Homo sapiens
  siRNA target sequence for FLJ40083 (NM_182628.1,349-367).
cgggtgcaccagaagatga

SEQ ID NO: 434798 - DNA, 19 bp, Homo sapiens
  siRNA target sequence for FLJ40083 (NM_182628.1,502-520).
ctcaccttgaccaaagaaa

SEQ ID NO: 434799 - DNA, 19 bp, Homo sapiens
  siRNA target sequence for FLJ40083 (NM_182628.1,806-824).
ccacccagattgttaatat

SEQ ID NO: 434800 - DNA, 19 bp, Homo sapiens
  siRNA target sequence for FLJ40083 (NM_182628.1,830-848).
gtgagatctccagatttga

SEQ ID NO: 434801 - DNA, 19 bp, Homo sapiens
  siRNA target sequence for FLJ40083 (NM_182628.1,850-868).
gacactctgaagcattaca

SEQ ID NO: 434802 - DNA, 19 bp, Homo sapiens
  siRNA target sequence for FLJ40083 (NM_182628.1,930-948).
gaaacactcgtttctcaaa

SEQ ID NO: 434803 - DNA, 19 bp, Homo sapiens
  siRNA target sequence for FLJ40083 (NM_182628.1,1417-1435).
gtcaccacaatgatgatgt

SEQ ID NO: 434804 - DNA, 19 bp, Homo sapiens
  siRNA target sequence for FLJ40083 (NM_182628.1,1511-1529).
gcgatcagcaggataagct

SEQ ID NO: 434805 - DNA, 19 bp, Homo sapiens
  siRNA target sequence for FLJ40083 (NM_182628.1,1914-1932).
gctgctatttttctttact

SEQ ID NO: 434806 - DNA, 19 bp, Homo sapiens
  siRNA target sequence for LOC348840 (NM_182631.1,535-553).
ggaagagacgtgttccatt

SEQ ID NO: 434807 - DNA, 19 bp, Homo sapiens
  siRNA target sequence for LOC348840 (NM_182631.1,536-554).
gaagagacgtgttccatta

SEQ ID NO: 434808 - DNA, 19 bp, Homo sapiens
  siRNA target sequence for LOC348840 (NM_182631.1,606-624).
ctgctcttcatgatggtaa

SEQ ID NO: 434809 - DNA, 19 bp, Homo sapiens
  siRNA target sequence for FLJ39963 (NM_182633.1,260-278).
ggaagaatgggtgatagaa

SEQ ID NO: 434810 - DNA, 19 bp, Homo sapiens
  siRNA target sequence for FLJ39963 (NM_182633.1,321-339).
cccgaaatcaaaaagtcaa

SEQ ID NO: 434811 - DNA, 19 bp, Homo sapiens
  siRNA target sequence for FLJ39963 (NM_182633.1,535-553).
gccttgagtgtaataaatt

SEQ ID NO: 434812 - DNA, 19 bp, Homo sapiens
  siRNA target sequence for FLJ39963 (NM_182633.1,635-653).
gggaaacagcatcaaacat

SEQ ID NO: 434813 - DNA, 19 bp, Homo sapiens
  siRNA target sequence for FLJ39963 (NM_182633.1,697-715).
ctccctatgaatatagtga

SEQ ID NO: 434814 - DNA, 19 bp, Homo sapiens
  siRNA target sequence for FLJ39963 (NM_182633.1,728-746).
cttcaatcaacatattctt

SEQ ID NO: 434815 - DNA, 19 bp, Homo sapiens
  siRNA target sequence for FLJ39963 (NM_182633.1,747-765).
cttactgatcatattcata

SEQ ID NO: 434816 - DNA, 19 bp, Homo sapiens
  siRNA target sequence for FLJ39963 (NM_182633.1,886-904).
gccagaggatacatctcat

SEQ ID NO: 434817 - DNA, 19 bp, Homo sapiens
  siRNA target sequence for FLJ39963 (NM_182633.1,887-905).
ccagaggatacatctcatt

SEQ ID NO: 434818 - DNA, 19 bp, Homo sapiens
  siRNA target sequence for FLJ39963 (NM_182633.1,1256-1274).
ccatactcgggagaaatta

SEQ ID NO: 434819 - DNA, 19 bp, Homo sapiens
  siRNA target sequence for FLJ39963 (NM_182633.1,1257-1275).
catactcgggagaaattat

SEQ ID NO: 434820 - DNA, 19 bp, Homo sapiens
  siRNA target sequence for FLJ36166 (NM_182634.1,31-49).
catatatggaacataccta

SEQ ID NO: 434821 - DNA, 19 bp, Homo sapiens
  siRNA target sequence for FLJ36166 (NM_182634.1,798-816).
cgcgtgttttagctacaaa

SEQ ID NO: 434822 - DNA, 19 bp, Homo sapiens
  siRNA target sequence for LOC349236 (NM_182635.1,707-725).
gcagacattcgctttgtct

SEQ ID NO: 434823 - DNA, 19 bp, Homo sapiens
  siRNA target sequence for MRPS9 (NM_182640.1,149-167).
cccctgagttgcaaacaaa

SEQ ID NO: 434824 - DNA, 19 bp, Homo sapiens
  siRNA target sequence for MRPS9 (NM_182640.1,225-243).
cgttcctacctcaaaacgt

SEQ ID NO: 434825 - DNA, 19 bp, Homo sapiens
  siRNA target sequence for MRPS9 (NM_182640.1,276-294).
gattgaagagttcaacata

SEQ ID NO: 434826 - DNA, 19 bp, Homo sapiens
  siRNA target sequence for MRPS9 (NM_182640.1,302-320).
gacatttagccaacatgat

SEQ ID NO: 434827 - DNA, 19 bp, Homo sapiens
  siRNA target sequence for MRPS9 (NM_182640.1,312-330).
caacatgatgggagaagat

SEQ ID NO: 434828 - DNA, 19 bp, Homo sapiens
  siRNA target sequence for MRPS9 (NM_182640.1,360-378).
cagagctattgcttacctt

SEQ ID NO: 434829 - DNA, 19 bp, Homo sapiens
  siRNA target sequence for MRPS9 (NM_182640.1,403-421).
cgagccaggccagtaatga

SEQ ID NO: 434830 - DNA, 19 bp, Homo sapiens
  siRNA target sequence for MRPS9 (NM_182640.1,427-445).
cctgaacagatttttccaa

SEQ ID NO: 434831 - DNA, 19 bp, Homo sapiens
  siRNA target sequence for MRPS9 (NM_182640.1,472-490).
gatggccgtccatttcact

SEQ ID NO: 434832 - DNA, 19 bp, Homo sapiens
  siRNA target sequence for MRPS9 (NM_182640.1,476-494).
gccgtccatttcactatct

SEQ ID NO: 434833 - DNA, 19 bp, Homo sapiens
  siRNA target sequence for MRPS9 (NM_182640.1,478-496).
cgtccatttcactatctct

SEQ ID NO: 434834 - DNA, 19 bp, Homo sapiens
  siRNA target sequence for MRPS9 (NM_182640.1,479-497).
gtccatttcactatctctt

SEQ ID NO: 434835 - DNA, 19 bp, Homo sapiens
  siRNA target sequence for MRPS9 (NM_182640.1,503-521).
ctggcaaacagtcatacta

SEQ ID NO: 434836 - DNA, 19 bp, Homo sapiens
  siRNA target sequence for MRPS9 (NM_182640.1,507-525).
caaacagtcatactattca

SEQ ID NO: 434837 - DNA, 19 bp, Homo sapiens
  siRNA target sequence for MRPS9 (NM_182640.1,538-556).
gtatatggaatgttactca

SEQ ID NO: 434838 - DNA, 19 bp, Homo sapiens
  siRNA target sequence for MRPS9 (NM_182640.1,545-563).
gaatgttactcaatttaga

SEQ ID NO: 434839 - DNA, 19 bp, Homo sapiens
  siRNA target sequence for MRPS9 (NM_182640.1,549-567).
gttactcaatttagaaaaa

SEQ ID NO: 434840 - DNA, 19 bp, Homo sapiens
  siRNA target sequence for MRPS9 (NM_182640.1,632-650).
gcagcagatggctgattaa

SEQ ID NO: 434841 - DNA, 19 bp, Homo sapiens
  siRNA target sequence for MRPS9 (NM_182640.1,686-704).
cagatctagattatatgca

SEQ ID NO: 434842 - DNA, 19 bp, Homo sapiens
  siRNA target sequence for MRPS9 (NM_182640.1,712-730).
cggctgctagaaaagttat

SEQ ID NO: 434843 - DNA, 19 bp, Homo sapiens
  siRNA target sequence for MRPS9 (NM_182640.1,713-731).
ggctgctagaaaagttatt

SEQ ID NO: 434844 - DNA, 19 bp, Homo sapiens
  siRNA target sequence for MRPS9 (NM_182640.1,718-736).
ctagaaaagttattgacat

SEQ ID NO: 434845 - DNA, 19 bp, Homo sapiens
  siRNA target sequence for MRPS9 (NM_182640.1,771-789).
gaggtttcgaagaagtgta

SEQ ID NO: 434846 - DNA, 19 bp, Homo sapiens
  siRNA target sequence for MRPS9 (NM_182640.1,774-792).
gtttcgaagaagtgtaact

SEQ ID NO: 434847 - DNA, 19 bp, Homo sapiens
  siRNA target sequence for MRPS9 (NM_182640.1,935-953).
gaattgattaccagcttta

SEQ ID NO: 434848 - DNA, 19 bp, Homo sapiens
  siRNA target sequence for MRPS9 (NM_182640.1,1062-1080).
gcaggctggagcaatacga

SEQ ID NO: 434849 - DNA, 19 bp, Homo sapiens
  siRNA target sequence for MRPS9 (NM_182640.1,1198-1216).
gagggagcccgcagaaagt

SEQ ID NO: 434850 - DNA, 19 bp, Homo sapiens
  siRNA target sequence for MRPS9 (NM_182640.1,1200-1218).
gggagcccgcagaaagttt

SEQ ID NO: 434851 - DNA, 19 bp, Homo sapiens
  siRNA target sequence for MRPS9 (NM_182640.1,1201-1219).
ggagcccgcagaaagttta

SEQ ID NO: 434852 - DNA, 19 bp, Homo sapiens
  siRNA target sequence for MRPS9 (NM_182640.1,1204-1222).
gcccgcagaaagtttacgt

SEQ ID NO: 434853 - DNA, 19 bp, Homo sapiens
  siRNA target sequence for VGLL2 (NM_182645.2,1096-1114).
ggactcagctcgtcgttat

SEQ ID NO: 434854 - DNA, 19 bp, Homo sapiens
  siRNA target sequence for VGLL2 (NM_182645.2,1097-1115).
gactcagctcgtcgttatt

SEQ ID NO: 434855 - DNA, 19 bp, Homo sapiens
  siRNA target sequence for CPEB2 (NM_182646.1,714-732).
cttacaggatcgaagtaga

SEQ ID NO: 434856 - DNA, 19 bp, Homo sapiens
  siRNA target sequence for C20orf185 (NM_182658.1,89-107).
cgctcgctcggattgacaa

SEQ ID NO: 434857 - DNA, 19 bp, Homo sapiens
  siRNA target sequence for C20orf185 (NM_182658.1,273-291).
gctctctggtctgaagatt

SEQ ID NO: 434858 - DNA, 19 bp, Homo sapiens
  siRNA target sequence for C20orf185 (NM_182658.1,461-479).
ggggcacacccatccttat

SEQ ID NO: 434859 - DNA, 19 bp, Homo sapiens
  siRNA target sequence for C20orf185 (NM_182658.1,671-689).
ctcttgggtccgtggaatt

SEQ ID NO: 434860 - DNA, 19 bp, Homo sapiens
  siRNA target sequence for C20orf185 (NM_182658.1,711-729).
catctccaaccagtacata

SEQ ID NO: 434861 - DNA, 19 bp, Homo sapiens
  siRNA target sequence for C20orf185 (NM_182658.1,716-734).
ccaaccagtacatagaact

SEQ ID NO: 434862 - DNA, 19 bp, Homo sapiens
  siRNA target sequence for C20orf185 (NM_182658.1,758-776).
gtgtagctggtgatatcat

SEQ ID NO: 434863 - DNA, 19 bp, Homo sapiens
  siRNA target sequence for C20orf185 (NM_182658.1,847-865).
ccactgtacctcttcaaca

SEQ ID NO: 434864 - DNA, 19 bp, Homo sapiens
  siRNA target sequence for C20orf185 (NM_182658.1,934-952).
gatgtcccactgacaacta

SEQ ID NO: 434865 - DNA, 19 bp, Homo sapiens
  siRNA target sequence for C20orf185 (NM_182658.1,1121-1139).
cccctgaatccctctttga

SEQ ID NO: 434866 - DNA, 19 bp, Homo sapiens
  siRNA target sequence for C20orf185 (NM_182658.1,1260-1278).
cggatcgcgtttagaagaa

SEQ ID NO: 434867 - DNA, 19 bp, Homo sapiens
  siRNA target sequence for C20orf185 (NM_182658.1,1261-1279).
ggatcgcgtttagaagaat

SEQ ID NO: 434868 - DNA, 19 bp, Homo sapiens
  siRNA target sequence for C20orf185 (NM_182658.1,1345-1363).
cccctgcctaaggttctta

SEQ ID NO: 434869 - DNA, 19 bp, Homo sapiens
  siRNA target sequence for C20orf185 (NM_182658.1,1347-1365).
cctgcctaaggttcttaat

SEQ ID NO: 434870 - DNA, 19 bp, Homo sapiens
  siRNA target sequence for C20orf185 (NM_182658.1,1348-1366).
ctgcctaaggttcttaata

SEQ ID NO: 434871 - DNA, 19 bp, Homo sapiens
  siRNA target sequence for C20orf185 (NM_182658.1,1351-1369).
cctaaggttcttaatatca

SEQ ID NO: 434872 - DNA, 19 bp, Homo sapiens
  siRNA target sequence for UPK3B (NM_182684.1,677-695).
gaccctatcgggtgaagtt

SEQ ID NO: 434873 - DNA, 19 bp, Homo sapiens
  siRNA target sequence for GPX6 (NM_182701.1,198-216).
ggcgaggagtacatccaat

SEQ ID NO: 434874 - DNA, 19 bp, Homo sapiens
  siRNA target sequence for GPX6 (NM_182701.1,199-217).
gcgaggagtacatccaatt

SEQ ID NO: 434875 - DNA, 19 bp, Homo sapiens
  siRNA target sequence for GPX6 (NM_182701.1,232-250).
gcaagcacgtcctgtttgt

SEQ ID NO: 434876 - DNA, 19 bp, Homo sapiens
  siRNA target sequence for GPX6 (NM_182701.1,236-254).
gcacgtcctgtttgtcaat

SEQ ID NO: 434877 - DNA, 19 bp, Homo sapiens
  siRNA target sequence for GPX6 (NM_182701.1,399-417).
cttggtctcaagtatgtgt

SEQ ID NO: 434878 - DNA, 19 bp, Homo sapiens
  siRNA target sequence for GPX6 (NM_182701.1,624-642).
ggagtccctgtcatgcatt

SEQ ID NO: 434879 - DNA, 19 bp, Homo sapiens
  siRNA target sequence for GPX6 (NM_182701.1,689-707).
gtacctaaagcagttcaat

SEQ ID NO: 434880 - DNA, 19 bp, Homo sapiens
  siRNA target sequence for TESSP2 (NM_182702.1,175-193).
ccactcaatctgtttacgt

SEQ ID NO: 434881 - DNA, 19 bp, Homo sapiens
  siRNA target sequence for TESSP2 (NM_182702.1,221-239).
gccgaacccctctgagaat

SEQ ID NO: 434882 - DNA, 19 bp, Homo sapiens
  siRNA target sequence for TESSP2 (NM_182702.1,396-414).
gggagatcggagtgtctat

SEQ ID NO: 434883 - DNA, 19 bp, Homo sapiens
  siRNA target sequence for TESSP2 (NM_182702.1,397-415).
ggagatcggagtgtctata

SEQ ID NO: 434884 - DNA, 19 bp, Homo sapiens
  siRNA target sequence for TESSP2 (NM_182702.1,398-416).
gagatcggagtgtctataa

SEQ ID NO: 434885 - DNA, 19 bp, Homo sapiens
  siRNA target sequence for TESSP2 (NM_182702.1,403-421).
cggagtgtctataatgaaa

SEQ ID NO: 434886 - DNA, 19 bp, Homo sapiens
  siRNA target sequence for TESSP2 (NM_182702.1,452-470).
cttttgtccaccctaagtt

SEQ ID NO: 434887 - DNA, 19 bp, Homo sapiens
  siRNA target sequence for TESSP2 (NM_182702.1,463-481).
cctaagttctcaacagtta

SEQ ID NO: 434888 - DNA, 19 bp, Homo sapiens
  siRNA target sequence for TESSP2 (NM_182702.1,476-494).
cagttacaaccattcgaaa

SEQ ID NO: 434889 - DNA, 19 bp, Homo sapiens
  siRNA target sequence for TESSP2 (NM_182702.1,557-575).
gcatccctcaggagaattt

SEQ ID NO: 434890 - DNA, 19 bp, Homo sapiens
  siRNA target sequence for TESSP2 (NM_182702.1,658-676).
caggatgtggaccaataca

SEQ ID NO: 434891 - DNA, 19 bp, Homo sapiens
  siRNA target sequence for TESSP2 (NM_182702.1,661-679).
gatgtggaccaatacatca

SEQ ID NO: 434892 - DNA, 19 bp, Homo sapiens
  siRNA target sequence for TESSP2 (NM_182702.1,664-682).
gtggaccaatacatcatgt

SEQ ID NO: 434893 - DNA, 19 bp, Homo sapiens
  siRNA target sequence for TESSP2 (NM_182702.1,681-699).
gtgctatgaggaatgtaat

SEQ ID NO: 434894 - DNA, 19 bp, Homo sapiens
  siRNA target sequence for TESSP2 (NM_182702.1,695-713).
gtaataagataatacagaa

SEQ ID NO: 434895 - DNA, 19 bp, Homo sapiens
  siRNA target sequence for TESSP2 (NM_182702.1,711-729).
gaaggccttgtcatctact

SEQ ID NO: 434896 - DNA, 19 bp, Homo sapiens
  siRNA target sequence for TESSP2 (NM_182702.1,722-740).
catctactaaggatgtaat

SEQ ID NO: 434897 - DNA, 19 bp, Homo sapiens
  siRNA target sequence for TESSP2 (NM_182702.1,750-768).
gatggtctgtggctataaa

SEQ ID NO: 434898 - DNA, 19 bp, Homo sapiens
  siRNA target sequence for TESSP2 (NM_182702.1,753-771).
ggtctgtggctataaagaa

SEQ ID NO: 434899 - DNA, 19 bp, Homo sapiens
  siRNA target sequence for TESSP2 (NM_182702.1,808-826).
cgcttggcctgtgaatata

SEQ ID NO: 434900 - DNA, 19 bp, Homo sapiens
  siRNA target sequence for TESSP2 (NM_182702.1,838-856).
gtccaggtagggattgtga

SEQ ID NO: 434901 - DNA, 19 bp, Homo sapiens
  siRNA target sequence for LOC348094 (NM_182703.2,26-44).
ggttcggccacttacgaat

SEQ ID NO: 434902 - DNA, 19 bp, Homo sapiens
  siRNA target sequence for LOC348094 (NM_182703.2,111-129).
gcactgcgcagcccaaaaa

SEQ ID NO: 434903 - DNA, 19 bp, Homo sapiens
  siRNA target sequence for LOC348094 (NM_182703.2,140-158).
ctgtgctggcgttcataat

SEQ ID NO: 434904 - DNA, 19 bp, Homo sapiens
  siRNA target sequence for LOC348094 (NM_182703.2,179-197).
ccctggaccacgtagacaa

SEQ ID NO: 434905 - DNA, 19 bp, Homo sapiens
  siRNA target sequence for LOC348094 (NM_182703.2,272-290).
gctgtgaccacaatgtcaa

SEQ ID NO: 434906 - DNA, 19 bp, Homo sapiens
  siRNA target sequence for LOC348094 (NM_182703.2,277-295).
gaccacaatgtcaaagaca

SEQ ID NO: 434907 - DNA, 19 bp, Homo sapiens
  siRNA target sequence for LOC348094 (NM_182703.2,501-519).
cctaagctgccttcactat

SEQ ID NO: 434908 - DNA, 19 bp, Homo sapiens
  siRNA target sequence for LOC348094 (NM_182703.2,576-594).
cgccaacgtggttgatcat

SEQ ID NO: 434909 - DNA, 19 bp, Homo sapiens
  siRNA target sequence for LOC348094 (NM_182703.2,578-596).
ccaacgtggttgatcatca

SEQ ID NO: 434910 - DNA, 19 bp, Homo sapiens
  siRNA target sequence for LOC348094 (NM_182703.2,841-859).
ctggtggacatgatcataa

SEQ ID NO: 434911 - DNA, 19 bp, Homo sapiens
  siRNA target sequence for LOC348094 (NM_182703.2,862-880).
gctgatcgtttctacagat

SEQ ID NO: 434912 - DNA, 19 bp, Homo sapiens
  siRNA target sequence for SELV (NM_182704.1,573-591).
ctccggagctgcctttgtt

SEQ ID NO: 434913 - DNA, 19 bp, Homo sapiens
  siRNA target sequence for SELV (NM_182704.1,816-834).
cggccatctccttacagaa

SEQ ID NO: 434914 - DNA, 19 bp, Homo sapiens
  siRNA target sequence for SELV (NM_182704.1,922-940).
ctatagccttcggtacatt

SEQ ID NO: 434915 - DNA, 19 bp, Homo sapiens
  siRNA target sequence for SELV (NM_182704.1,932-950).
cggtacattctactgaaaa

SEQ ID NO: 434916 - DNA, 19 bp, Homo sapiens
  siRNA target sequence for SELV (NM_182704.1,933-951).
ggtacattctactgaaaaa

SEQ ID NO: 434917 - DNA, 19 bp, Homo sapiens
  siRNA target sequence for SELV (NM_182704.1,952-970).
gagcctggagcagcaattt

SEQ ID NO: 434918 - DNA, 19 bp, Homo sapiens
  siRNA target sequence for SELV (NM_182704.1,972-990).
cgaatcacctactctttga

SEQ ID NO: 434919 - DNA, 19 bp, Homo sapiens
  siRNA target sequence for SELV (NM_182704.1,1041-1059).
ggagactggtccattccaa

SEQ ID NO: 434920 - DNA, 19 bp, Homo sapiens
  siRNA target sequence for SELV (NM_182704.1,1046-1064).
ctggtccattccaagaaga

SEQ ID NO: 434921 - DNA, 19 bp, Homo sapiens
  siRNA target sequence for SELV (NM_182704.1,1110-1128).
gcgttatcgatgaggaaat

SEQ ID NO: 434922 - DNA, 19 bp, Homo sapiens
  siRNA target sequence for MGC45871 (NM_182705.1,101-119).
ctcgtggacgcgaagaaga

SEQ ID NO: 434923 - DNA, 19 bp, Homo sapiens
  siRNA target sequence for MGC45871 (NM_182705.1,685-703).
cgacgacctctctgatgaa

SEQ ID NO: 434924 - DNA, 19 bp, Homo sapiens
  siRNA target sequence for MGC45871 (NM_182705.1,686-704).
gacgacctctctgatgaat

SEQ ID NO: 434925 - DNA, 19 bp, Homo sapiens
  siRNA target sequence for LOC157740 (NM_182753.1,731-749).
gtgtgttcctacgagaaaa

SEQ ID NO: 434926 - DNA, 19 bp, Homo sapiens
  siRNA target sequence for LOC157740 (NM_182753.1,774-792).
ctcccgctgcctttcttaa

SEQ ID NO: 434927 - DNA, 19 bp, Homo sapiens
  siRNA target sequence for LOC157740 (NM_182753.1,777-795).
ccgctgcctttcttaacca

SEQ ID NO: 434928 - DNA, 19 bp, Homo sapiens
  siRNA target sequence for LOC157740 (NM_182753.1,788-806).
cttaaccacctacaaatat

SEQ ID NO: 434929 - DNA, 19 bp, Homo sapiens
  siRNA target sequence for LOC157740 (NM_182753.1,852-870).
gccttcctccgcttgagta

SEQ ID NO: 434930 - DNA, 19 bp, Homo sapiens
  siRNA target sequence for LOC157740 (NM_182753.1,896-914).
gcgtggggctgctgtaaat

SEQ ID NO: 434931 - DNA, 19 bp, Homo sapiens
  siRNA target sequence for LOC157740 (NM_182753.1,901-919).
gggctgctgtaaattgtga

SEQ ID NO: 434932 - DNA, 19 bp, Homo sapiens
  siRNA target sequence for LOC157740 (NM_182753.1,916-934).
gtgataattgttatgcatt

SEQ ID NO: 434933 - DNA, 19 bp, Homo sapiens
  siRNA target sequence for LOC220929 (NM_182755.1,347-365).
cagtaccaccaaaagatga

SEQ ID NO: 434934 - DNA, 19 bp, Homo sapiens
  siRNA target sequence for LOC220929 (NM_182755.1,434-452).
ggaccattgcaccaaaaat

SEQ ID NO: 434935 - DNA, 19 bp, Homo sapiens
  siRNA target sequence for LOC220929 (NM_182755.1,552-570).
gatgtccacccagaactat

SEQ ID NO: 434936 - DNA, 19 bp, Homo sapiens
  siRNA target sequence for LOC220929 (NM_182755.1,597-615).
ggggacattttctcttgtt

SEQ ID NO: 434937 - DNA, 19 bp, Homo sapiens
  siRNA target sequence for LOC220929 (NM_182755.1,659-677).
gaatgtccctacctgaaaa

SEQ ID NO: 434938 - DNA, 19 bp, Homo sapiens
  siRNA target sequence for LOC220929 (NM_182755.1,735-753).
gaaacccatcctgatcttt

SEQ ID NO: 434939 - DNA, 19 bp, Homo sapiens
  siRNA target sequence for LOC220929 (NM_182755.1,740-758).
ccatcctgatctttcctaa

SEQ ID NO: 434940 - DNA, 19 bp, Homo sapiens
  siRNA target sequence for LOC220929 (NM_182755.1,778-796).
cctgcccaaacccaaatgt

SEQ ID NO: 434941 - DNA, 19 bp, Homo sapiens
  siRNA target sequence for LOC220929 (NM_182755.1,840-858).
gtacaaacccagtccattt

SEQ ID NO: 434942 - DNA, 19 bp, Homo sapiens
  siRNA target sequence for LOC220929 (NM_182755.1,880-898).
caagccccagccagcatta

SEQ ID NO: 434943 - DNA, 19 bp, Homo sapiens
  siRNA target sequence for LOC220929 (NM_182755.1,904-922).
gctgcgctgaccaatggaa

SEQ ID NO: 434944 - DNA, 19 bp, Homo sapiens
  siRNA target sequence for LOC220929 (NM_182755.1,1042-1060).
gggaaagcacactttgtaa

SEQ ID NO: 434945 - DNA, 19 bp, Homo sapiens
  siRNA target sequence for LOC220929 (NM_182755.1,1140-1158).
caatttatcaccaaccatt

SEQ ID NO: 434946 - DNA, 19 bp, Homo sapiens
  siRNA target sequence for LOC220929 (NM_182755.1,1264-1282).
gctaacattgcaggttttt

SEQ ID NO: 434947 - DNA, 19 bp, Homo sapiens
  siRNA target sequence for LOC220929 (NM_182755.1,1389-1407).
gcagagtgcctgtgaaagt

SEQ ID NO: 434948 - DNA, 19 bp, Homo sapiens
  siRNA target sequence for LOC220929 (NM_182755.1,1415-1433).
gtccacccaccaaacttga

SEQ ID NO: 434949 - DNA, 19 bp, Homo sapiens
  siRNA target sequence for LOC220929 (NM_182755.1,1420-1438).
cccaccaaacttgatctta

SEQ ID NO: 434950 - DNA, 19 bp, Homo sapiens
  siRNA target sequence for LOC220929 (NM_182755.1,1421-1439).
ccaccaaacttgatcttaa

SEQ ID NO: 434951 - DNA, 19 bp, Homo sapiens
  siRNA target sequence for LOC220929 (NM_182755.1,1429-1447).
cttgatcttaaccacaaaa

SEQ ID NO: 434952 - DNA, 19 bp, Homo sapiens
  siRNA target sequence for LOC220929 (NM_182755.1,1432-1450).
gatcttaaccacaaaacaa

SEQ ID NO: 434953 - DNA, 19 bp, Homo sapiens
  siRNA target sequence for LOC220929 (NM_182755.1,1542-1560).
cattaataagtgtagagat

SEQ ID NO: 434954 - DNA, 19 bp, Homo sapiens
  siRNA target sequence for LOC220929 (NM_182755.1,1634-1652).
gcattatgcccaaacctat

SEQ ID NO: 434955 - DNA, 19 bp, Homo sapiens
  siRNA target sequence for LOC220929 (NM_182755.1,1717-1735).
ggcctaggacaggatgttt

SEQ ID NO: 434956 - DNA, 19 bp, Homo sapiens
  siRNA target sequence for LOC220929 (NM_182755.1,1748-1766).
cactcactcctaaatatct

SEQ ID NO: 434957 - DNA, 19 bp, Homo sapiens
  siRNA target sequence for LOC220929 (NM_182755.1,1801-1819).
cccagctccgtgttcagaa

SEQ ID NO: 434958 - DNA, 19 bp, Homo sapiens
  siRNA target sequence for LOC220929 (NM_182755.1,1806-1824).
ctccgtgttcagaaatgga

SEQ ID NO: 434959 - DNA, 19 bp, Homo sapiens
  siRNA target sequence for LOC220929 (NM_182755.1,1808-1826).
ccgtgttcagaaatggatt

SEQ ID NO: 434960 - DNA, 19 bp, Homo sapiens
  siRNA target sequence for LOC220929 (NM_182755.1,1822-1840).
ggattctctggcattaaga

SEQ ID NO: 434961 - DNA, 19 bp, Homo sapiens
  siRNA target sequence for LOC220929 (NM_182755.1,1893-1911).
ccttcgagaccacatgaat

SEQ ID NO: 434962 - DNA, 19 bp, Homo sapiens
  siRNA target sequence for LOC220929 (NM_182755.1,1920-1938).
caacagacgcccttacagt

SEQ ID NO: 434963 - DNA, 19 bp, Homo sapiens
  siRNA target sequence for LOC220929 (NM_182755.1,1976-1994).
gcctgagcacacacatgaa

SEQ ID NO: 434964 - DNA, 19 bp, Homo sapiens
  siRNA target sequence for LOC220929 (NM_182755.1,1977-1995).
cctgagcacacacatgaaa

SEQ ID NO: 434965 - DNA, 19 bp, Homo sapiens
  siRNA target sequence for LOC220929 (NM_182755.1,1980-1998).
gagcacacacatgaaactt

SEQ ID NO: 434966 - DNA, 19 bp, Homo sapiens
  siRNA target sequence for LOC220929 (NM_182755.1,1985-2003).
cacacatgaaacttcatca

SEQ ID NO: 434967 - DNA, 19 bp, Homo sapiens
  siRNA target sequence for LOC220929 (NM_182755.1,2006-2024).
gtgagaaccgtctgaagaa

SEQ ID NO: 434968 - DNA, 19 bp, Homo sapiens
  siRNA target sequence for LOC220929 (NM_182755.1,2026-2044).
ctcatgtgttgtgagtttt

SEQ ID NO: 434969 - DNA, 19 bp, Homo sapiens
  siRNA target sequence for LOC220929 (NM_182755.1,2036-2054).
gtgagttttgtgcaaaagt

SEQ ID NO: 434970 - DNA, 19 bp, Homo sapiens
  siRNA target sequence for LOC220929 (NM_182755.1,2038-2056).
gagttttgtgcaaaagtgt

SEQ ID NO: 434971 - DNA, 19 bp, Homo sapiens
  siRNA target sequence for LOC220929 (NM_182755.1,2144-2162).
caggagacataccaaagaa

SEQ ID NO: 434972 - DNA, 19 bp, Homo sapiens
  siRNA target sequence for LOC220929 (NM_182755.1,2146-2164).
ggagacataccaaagaaca

SEQ ID NO: 434973 - DNA, 19 bp, Homo sapiens
  siRNA target sequence for LOC220929 (NM_182755.1,2180-2198).
gaggcatggagggatcatt

SEQ ID NO: 434974 - DNA, 19 bp, Homo sapiens
  siRNA target sequence for LOC220929 (NM_182755.1,2224-2242).
gaagaagacttccttctaa

SEQ ID NO: 434975 - DNA, 19 bp, Homo sapiens
  siRNA target sequence for LOC220929 (NM_182755.1,2245-2263).
caggcagacgaagtcaaat

SEQ ID NO: 434976 - DNA, 19 bp, Homo sapiens
  siRNA target sequence for LOC220929 (NM_182755.1,2247-2265).
ggcagacgaagtcaaatta

SEQ ID NO: 434977 - DNA, 19 bp, Homo sapiens
  siRNA target sequence for LOC220929 (NM_182755.1,2249-2267).
cagacgaagtcaaattaca

SEQ ID NO: 434978 - DNA, 19 bp, Homo sapiens
  siRNA target sequence for LOC220929 (NM_182755.1,2251-2269).
gacgaagtcaaattacaaa

SEQ ID NO: 434979 - DNA, 19 bp, Homo sapiens
  siRNA target sequence for LOC220929 (NM_182755.1,2289-2307).
gattactgctcagtctttt

SEQ ID NO: 434980 - DNA, 19 bp, Homo sapiens
  siRNA target sequence for LOC220929 (NM_182755.1,2419-2437).
gctagccccgactggaaaa

SEQ ID NO: 434981 - DNA, 19 bp, Homo sapiens
  siRNA target sequence for LOC220929 (NM_182755.1,2494-2512).
gcatgtccaagactgaaaa

SEQ ID NO: 434982 - DNA, 19 bp, Homo sapiens
  siRNA target sequence for LOC220929 (NM_182755.1,2715-2733).
gaagcaccagcataactgt

SEQ ID NO: 434983 - DNA, 19 bp, Homo sapiens
  siRNA target sequence for LOC220929 (NM_182755.1,2779-2797).
cagggagtgatcgaacttt

SEQ ID NO: 434984 - DNA, 19 bp, Homo sapiens
  siRNA target sequence for SPY1 (NM_182756.1,426-444).
gacgatttaattcaagatt

SEQ ID NO: 434985 - DNA, 19 bp, Homo sapiens
  siRNA target sequence for SPY1 (NM_182756.1,466-484).
gtaaaattgcagacaagta

SEQ ID NO: 434986 - DNA, 19 bp, Homo sapiens
  siRNA target sequence for SPY1 (NM_182756.1,535-553).
gtgagcataccaggataaa

SEQ ID NO: 434987 - DNA, 19 bp, Homo sapiens
  siRNA target sequence for SPY1 (NM_182756.1,537-555).
gagcataccaggataaatt

SEQ ID NO: 434988 - DNA, 19 bp, Homo sapiens
  siRNA target sequence for SPY1 (NM_182756.1,569-587).
gtatctggctaatacagtt

SEQ ID NO: 434989 - DNA, 19 bp, Homo sapiens
  siRNA target sequence for SPY1 (NM_182756.1,603-621).
gaaaccaagtacgaaattt

SEQ ID NO: 434990 - DNA, 19 bp, Homo sapiens
  siRNA target sequence for SPY1 (NM_182756.1,608-626).
caagtacgaaatttttcca

SEQ ID NO: 434991 - DNA, 19 bp, Homo sapiens
  siRNA target sequence for SPY1 (NM_182756.1,625-643).
catgggctttagggaaaaa

SEQ ID NO: 434992 - DNA, 19 bp, Homo sapiens
  siRNA target sequence for SPY1 (NM_182756.1,659-677).
ccctaatttcttaaagtta

SEQ ID NO: 434993 - DNA, 19 bp, Homo sapiens
  siRNA target sequence for SPY1 (NM_182756.1,681-699).
gaccagctctgggatagaa

SEQ ID NO: 434994 - DNA, 19 bp, Homo sapiens
  siRNA target sequence for SPY1 (NM_182756.1,687-705).
ctctgggatagaattgact

SEQ ID NO: 434995 - DNA, 19 bp, Homo sapiens
  siRNA target sequence for SPY1 (NM_182756.1,702-720).
gactatagggctattgtaa

SEQ ID NO: 434996 - DNA, 19 bp, Homo sapiens
  siRNA target sequence for SPY1 (NM_182756.1,727-745).
gatgttgtgaggaggttat

SEQ ID NO: 434997 - DNA, 19 bp, Homo sapiens
  siRNA target sequence for SPY1 (NM_182756.1,749-767).
cattgcaccaacccattat

SEQ ID NO: 434998 - DNA, 19 bp, Homo sapiens
  siRNA target sequence for SPY1 (NM_182756.1,753-771).
gcaccaacccattatatct

SEQ ID NO: 434999 - DNA, 19 bp, Homo sapiens
  siRNA target sequence for SPY1 (NM_182756.1,773-791).
gcaaagagaacgttctgtt

SEQ ID NO: 435000 - DNA, 19 bp, Homo sapiens
  siRNA target sequence for SPY1 (NM_182756.1,778-796).
gagaacgttctgttcatca

SEQ ID NO: 435001 - DNA, 19 bp, Homo sapiens
  siRNA target sequence for SPY1 (NM_182756.1,855-873).
gccacaccagtagattgtt

SEQ ID NO: 435002 - DNA, 19 bp, Homo sapiens
  siRNA target sequence for SPY1 (NM_182756.1,871-889).
gttcactctgtggtaaaaa

SEQ ID NO: 435003 - DNA, 19 bp, Homo sapiens
  siRNA target sequence for SPY1 (NM_182756.1,963-981).
cattctcaggactcataca

SEQ ID NO: 435004 - DNA, 19 bp, Homo sapiens
  siRNA target sequence for SPY1 (NM_182756.1,976-994).
catacaactcactgtcaat

SEQ ID NO: 435005 - DNA, 19 bp, Homo sapiens
  siRNA target sequence for SPY1 (NM_182756.1,985-1003).
cactgtcaatggacataat

SEQ ID NO: 435006 - DNA, 19 bp, Homo sapiens
  siRNA target sequence for SPY1 (NM_182756.1,989-1007).
gtcaatggacataataggt

SEQ ID NO: 435007 - DNA, 19 bp, Homo sapiens
  siRNA target sequence for SPY1 (NM_182756.1,1006-1024).
gtgatccttctcaagctta

SEQ ID NO: 435008 - DNA, 19 bp, Homo sapiens
  siRNA target sequence for SPY1 (NM_182756.1,1008-1026).
gatccttctcaagcttata

SEQ ID NO: 435009 - DNA, 19 bp, Homo sapiens
  siRNA target sequence for SPY1 (NM_182756.1,1041-1059).
gtcaatgaccatcaatcaa

SEQ ID NO: 435010 - DNA, 19 bp, Homo sapiens
  siRNA target sequence for IBRDC2 (NM_182757.1,202-220).
ctggtaggctccactatct

SEQ ID NO: 435011 - DNA, 19 bp, Homo sapiens
  siRNA target sequence for IBRDC2 (NM_182757.1,221-239).
cgccatgactgctgaaaat

SEQ ID NO: 435012 - DNA, 19 bp, Homo sapiens
  siRNA target sequence for IBRDC2 (NM_182757.1,355-373).
cttgcctgaaacagtacat

SEQ ID NO: 435013 - DNA, 19 bp, Homo sapiens
  siRNA target sequence for IBRDC2 (NM_182757.1,480-498).
gtggaccagtttcaacttt

SEQ ID NO: 435014 - DNA, 19 bp, Homo sapiens
  siRNA target sequence for IBRDC2 (NM_182757.1,748-766).
cagaagcccccattaagca

SEQ ID NO: 435015 - DNA, 19 bp, Homo sapiens
  siRNA target sequence for IBRDC2 (NM_182757.1,861-879).
cagaacttggataatgaca

SEQ ID NO: 435016 - DNA, 19 bp, Homo sapiens
  siRNA target sequence for IBRDC2 (NM_182757.1,876-894).
gacattttcctcagacatt

SEQ ID NO: 435017 - DNA, 19 bp, Homo sapiens
  siRNA target sequence for IBRDC2 (NM_182757.1,1057-1075).
cctgtcggggcaagaagaa

SEQ ID NO: 435018 - DNA, 19 bp, Homo sapiens
  siRNA target sequence for IBRDC2 (NM_182757.1,1058-1076).
ctgtcggggcaagaagaaa

SEQ ID NO: 435019 - DNA, 19 bp, Homo sapiens
  siRNA target sequence for FLJ38736 (NM_182758.1,124-142).
gaccagcgaacgattgtga

SEQ ID NO: 435020 - DNA, 19 bp, Homo sapiens
  siRNA target sequence for FLJ38736 (NM_182758.1,173-191).
ggaatctctcacatgaact

SEQ ID NO: 435021 - DNA, 19 bp, Homo sapiens
  siRNA target sequence for FLJ38736 (NM_182758.1,200-218).
cagcgaaagaactcctatt

SEQ ID NO: 435022 - DNA, 19 bp, Homo sapiens
  siRNA target sequence for FLJ38736 (NM_182758.1,204-222).
gaaagaactcctatttggt

SEQ ID NO: 435023 - DNA, 19 bp, Homo sapiens
  siRNA target sequence for FLJ38736 (NM_182758.1,223-241).
cattcagcttcggtaacat

SEQ ID NO: 435024 - DNA, 19 bp, Homo sapiens
  siRNA target sequence for FLJ38736 (NM_182758.1,227-245).
cagcttcggtaacatgttt

SEQ ID NO: 435025 - DNA, 19 bp, Homo sapiens
  siRNA target sequence for FLJ38736 (NM_182758.1,251-269).
gagcaagggacttctctaa

SEQ ID NO: 435026 - DNA, 19 bp, Homo sapiens
  siRNA target sequence for FLJ38736 (NM_182758.1,264-282).
ctctaaacagccctacatt

SEQ ID NO: 435027 - DNA, 19 bp, Homo sapiens
  siRNA target sequence for FLJ38736 (NM_182758.1,365-383).
ggcacactgcaatctgtta

SEQ ID NO: 435028 - DNA, 19 bp, Homo sapiens
  siRNA target sequence for FLJ38736 (NM_182758.1,366-384).
gcacactgcaatctgttat

SEQ ID NO: 435029 - DNA, 19 bp, Homo sapiens
  siRNA target sequence for FLJ38736 (NM_182758.1,367-385).
cacactgcaatctgttatt

SEQ ID NO: 435030 - DNA, 19 bp, Homo sapiens
  siRNA target sequence for FLJ38736 (NM_182758.1,371-389).
ctgcaatctgttattacca

SEQ ID NO: 435031 - DNA, 19 bp, Homo sapiens
  siRNA target sequence for FLJ38736 (NM_182758.1,412-430).
gaaggctggcttctttgtt

SEQ ID NO: 435032 - DNA, 19 bp, Homo sapiens
  siRNA target sequence for FLJ38736 (NM_182758.1,431-449).
gtggagaatatcaagatgt

SEQ ID NO: 435033 - DNA, 19 bp, Homo sapiens
  siRNA target sequence for FLJ38736 (NM_182758.1,563-581).
ctctcttggtggtatcagt

SEQ ID NO: 435034 - DNA, 19 bp, Homo sapiens
  siRNA target sequence for FLJ38736 (NM_182758.1,592-610).
ctcaaagtatgggatcttt

SEQ ID NO: 435035 - DNA, 19 bp, Homo sapiens
  siRNA target sequence for FLJ38736 (NM_182758.1,604-622).
gatctttcctcatctatca

SEQ ID NO: 435036 - DNA, 19 bp, Homo sapiens
  siRNA target sequence for FLJ38736 (NM_182758.1,633-651).
ggaaaagcaagatgtctat

SEQ ID NO: 435037 - DNA, 19 bp, Homo sapiens
  siRNA target sequence for FLJ38736 (NM_182758.1,681-699).
gaactgccagacaattcga

SEQ ID NO: 435038 - DNA, 19 bp, Homo sapiens
  siRNA target sequence for FLJ38736 (NM_182758.1,684-702).
ctgccagacaattcgattt

SEQ ID NO: 435039 - DNA, 19 bp, Homo sapiens
  siRNA target sequence for FLJ38736 (NM_182758.1,688-706).
cagacaattcgattttgca

SEQ ID NO: 435040 - DNA, 19 bp, Homo sapiens
  siRNA target sequence for FLJ38736 (NM_182758.1,783-801).
gctgactgaagttagtaga

SEQ ID NO: 435041 - DNA, 19 bp, Homo sapiens
  siRNA target sequence for FLJ38736 (NM_182758.1,784-802).
ctgactgaagttagtagaa

SEQ ID NO: 435042 - DNA, 19 bp, Homo sapiens
  siRNA target sequence for FLJ38736 (NM_182758.1,892-910).
ctgaacagtgggctttcaa

SEQ ID NO: 435043 - DNA, 19 bp, Homo sapiens
  siRNA target sequence for FLJ38736 (NM_182758.1,939-957).
gcttaaagagaccatttat

SEQ ID NO: 435044 - DNA, 19 bp, Homo sapiens
  siRNA target sequence for FLJ38736 (NM_182758.1,961-979).
catttactgtgctctactt

SEQ ID NO: 435045 - DNA, 19 bp, Homo sapiens
  siRNA target sequence for FLJ38736 (NM_182758.1,1000-1018).
cagagccgtccctttgtta

SEQ ID NO: 435046 - DNA, 19 bp, Homo sapiens
  siRNA target sequence for FLJ38736 (NM_182758.1,1095-1113).
gtggcacatccctgatgtt

SEQ ID NO: 435047 - DNA, 19 bp, Homo sapiens
  siRNA target sequence for FLJ38736 (NM_182758.1,1163-1181).
cctggactcttcaagataa

SEQ ID NO: 435048 - DNA, 19 bp, Homo sapiens
  siRNA target sequence for FLJ38736 (NM_182758.1,1164-1182).
ctggactcttcaagataat

SEQ ID NO: 435049 - DNA, 19 bp, Homo sapiens
  siRNA target sequence for FLJ38736 (NM_182758.1,1192-1210).
catgatactatgtcacaaa

SEQ ID NO: 435050 - DNA, 19 bp, Homo sapiens
  siRNA target sequence for FLJ38736 (NM_182758.1,1195-1213).
gatactatgtcacaaagta

SEQ ID NO: 435051 - DNA, 19 bp, Homo sapiens
  siRNA target sequence for FLJ38736 (NM_182758.1,1263-1281).
cacttcatcagagtatatt

SEQ ID NO: 435052 - DNA, 19 bp, Homo sapiens
  siRNA target sequence for FLJ38736 (NM_182758.1,1275-1293).
gtatattccaagtcttgat

SEQ ID NO: 435053 - DNA, 19 bp, Homo sapiens
  siRNA target sequence for FLJ38736 (NM_182758.1,1397-1415).
cccctcataaagttcttaa

SEQ ID NO: 435054 - DNA, 19 bp, Homo sapiens
  siRNA target sequence for FLJ38736 (NM_182758.1,1398-1416).
ccctcataaagttcttaaa

SEQ ID NO: 435055 - DNA, 19 bp, Homo sapiens
  siRNA target sequence for FLJ38736 (NM_182758.1,1425-1443).
ccaaagtgtcacttcatta

SEQ ID NO: 435056 - DNA, 19 bp, Homo sapiens
  siRNA target sequence for FLJ38736 (NM_182758.1,1453-1471).
catggtctctcttcgaaat

SEQ ID NO: 435057 - DNA, 19 bp, Homo sapiens
  siRNA target sequence for FLJ38736 (NM_182758.1,1513-1531).
gtgatcttgtgggatatct

SEQ ID NO: 435058 - DNA, 19 bp, Homo sapiens
  siRNA target sequence for FLJ38736 (NM_182758.1,1518-1536).
cttgtgggatatctttact

SEQ ID NO: 435059 - DNA, 19 bp, Homo sapiens
  siRNA target sequence for FLJ38736 (NM_182758.1,1563-1581).
ggaagctggtccagtaaca

SEQ ID NO: 435060 - DNA, 19 bp, Homo sapiens
  siRNA target sequence for FLJ38736 (NM_182758.1,1570-1588).
ggtccagtaacaagtcttt

SEQ ID NO: 435061 - DNA, 19 bp, Homo sapiens
  siRNA target sequence for FLJ38736 (NM_182758.1,1571-1589).
gtccagtaacaagtctttt

SEQ ID NO: 435062 - DNA, 19 bp, Homo sapiens
  siRNA target sequence for FLJ38736 (NM_182758.1,1573-1591).
ccagtaacaagtcttttga

SEQ ID NO: 435063 - DNA, 19 bp, Homo sapiens
  siRNA target sequence for FLJ38736 (NM_182758.1,1618-1636).
ggtgagcagataatttgct

SEQ ID NO: 435064 - DNA, 19 bp, Homo sapiens
  siRNA target sequence for FLJ38736 (NM_182758.1,1736-1754).
ggcacccggttgagaattt

SEQ ID NO: 435065 - DNA, 19 bp, Homo sapiens
  siRNA target sequence for FLJ38736 (NM_182758.1,1740-1758).
cccggttgagaatttttta

SEQ ID NO: 435066 - DNA, 19 bp, Homo sapiens
  siRNA target sequence for FLJ38736 (NM_182758.1,1741-1759).
ccggttgagaattttttaa

SEQ ID NO: 435067 - DNA, 19 bp, Homo sapiens
  siRNA target sequence for FLJ38736 (NM_182758.1,1832-1850).
gagaaagagcacgaattat

SEQ ID NO: 435068 - DNA, 19 bp, Homo sapiens
  siRNA target sequence for FLJ38736 (NM_182758.1,1838-1856).
gagcacgaattattcttaa

SEQ ID NO: 435069 - DNA, 19 bp, Homo sapiens
  siRNA target sequence for FLJ38736 (NM_182758.1,1840-1858).
gcacgaattattcttaatt

SEQ ID NO: 435070 - DNA, 19 bp, Homo sapiens
  siRNA target sequence for FLJ38736 (NM_182758.1,1843-1861).
cgaattattcttaattgtt

SEQ ID NO: 435071 - DNA, 19 bp, Homo sapiens
  siRNA target sequence for FLJ38736 (NM_182758.1,1875-1893).
gcttgtgaagtctgtactt

SEQ ID NO: 435072 - DNA, 19 bp, Homo sapiens
  siRNA target sequence for FLJ38736 (NM_182758.1,1908-1926).
gacacttaagcacaaaagt

SEQ ID NO: 435073 - DNA, 19 bp, Homo sapiens
  siRNA target sequence for FLJ38736 (NM_182758.1,2004-2022).
ggttactgatgccaaattt

SEQ ID NO: 435074 - DNA, 19 bp, Homo sapiens
  siRNA target sequence for FLJ38736 (NM_182758.1,2005-2023).
gttactgatgccaaatttt

SEQ ID NO: 435075 - DNA, 19 bp, Homo sapiens
  siRNA target sequence for FLJ38736 (NM_182758.1,2024-2042).
gcccaagaccttttaatgt

SEQ ID NO: 435076 - DNA, 19 bp, Homo sapiens
  siRNA target sequence for FLJ38736 (NM_182758.1,2041-2059).
gtcttgcctgtgaagacaa

SEQ ID NO: 435077 - DNA, 19 bp, Homo sapiens
  siRNA target sequence for FLJ38736 (NM_182758.1,2064-2082).
gagtaacgttggctttcat

SEQ ID NO: 435078 - DNA, 19 bp, Homo sapiens
  siRNA target sequence for FLJ38736 (NM_182758.1,2066-2084).
gtaacgttggctttcatat

SEQ ID NO: 435079 - DNA, 19 bp, Homo sapiens
  siRNA target sequence for FLJ38736 (NM_182758.1,2215-2233).
ctgacactgagaaaaagta

SEQ ID NO: 435080 - DNA, 19 bp, Homo sapiens
  siRNA target sequence for FLJ38736 (NM_182758.1,2263-2281).
gcactagccaagcctatta

SEQ ID NO: 435081 - DNA, 19 bp, Homo sapiens
  siRNA target sequence for FLJ38736 (NM_182758.1,2269-2287).
gccaagcctattactgaaa

SEQ ID NO: 435082 - DNA, 19 bp, Homo sapiens
  siRNA target sequence for FLJ38736 (NM_182758.1,2293-2311).
gcccaaggagataatacca

SEQ ID NO: 435083 - DNA, 19 bp, Homo sapiens
  siRNA target sequence for FLJ38736 (NM_182758.1,2299-2317).
ggagataataccatcaaat

SEQ ID NO: 435084 - DNA, 19 bp, Homo sapiens
  siRNA target sequence for FLJ38736 (NM_182758.1,2300-2318).
gagataataccatcaaatt

SEQ ID NO: 435085 - DNA, 19 bp, Homo sapiens
  siRNA target sequence for FLJ38736 (NM_182758.1,2302-2320).
gataataccatcaaattct

SEQ ID NO: 435086 - DNA, 19 bp, Homo sapiens
  siRNA target sequence for FLJ38736 (NM_182758.1,2414-2432).
caatagacacagcaaaatt

SEQ ID NO: 435087 - DNA, 19 bp, Homo sapiens
  siRNA target sequence for FLJ38736 (NM_182758.1,2456-2474).
ggggagtggataaagattt

SEQ ID NO: 435088 - DNA, 19 bp, Homo sapiens
  siRNA target sequence for FLJ38736 (NM_182758.1,2459-2477).
gagtggataaagatttaga

SEQ ID NO: 435089 - DNA, 19 bp, Homo sapiens
  siRNA target sequence for FLJ38736 (NM_182758.1,2511-2529).
gcttcagggtcctatttct

SEQ ID NO: 435090 - DNA, 19 bp, Homo sapiens
  siRNA target sequence for FLJ38736 (NM_182758.1,2608-2626).
gactattcaggagtaaatt

SEQ ID NO: 435091 - DNA, 19 bp, Homo sapiens
  siRNA target sequence for FLJ38736 (NM_182758.1,2641-2659).
gttttggacttgtcagata

SEQ ID NO: 435092 - DNA, 19 bp, Homo sapiens
  siRNA target sequence for FLJ38736 (NM_182758.1,2649-2667).
cttgtcagataaatacaca

SEQ ID NO: 435093 - DNA, 19 bp, Homo sapiens
  siRNA target sequence for FLJ38736 (NM_182758.1,2666-2684).
cagccactcttccaaatca

SEQ ID NO: 435094 - DNA, 19 bp, Homo sapiens
  siRNA target sequence for FLJ38736 (NM_182758.1,2727-2745).
gcgagagtcagatactata

SEQ ID NO: 435095 - DNA, 19 bp, Homo sapiens
  siRNA target sequence for FLJ38736 (NM_182758.1,2729-2747).
gagagtcagatactatagt

SEQ ID NO: 435096 - DNA, 19 bp, Homo sapiens
  siRNA target sequence for FLJ38736 (NM_182758.1,2731-2749).
gagtcagatactatagttt

SEQ ID NO: 435097 - DNA, 19 bp, Homo sapiens
  siRNA target sequence for FLJ38736 (NM_182758.1,2733-2751).
gtcagatactatagtttat

SEQ ID NO: 435098 - DNA, 19 bp, Homo sapiens
  siRNA target sequence for FLJ38736 (NM_182758.1,2754-2772).
gttgagcagactattttta

SEQ ID NO: 435099 - DNA, 19 bp, Homo sapiens
  siRNA target sequence for FLJ38736 (NM_182758.1,2759-2777).
gcagactatttttagttaa

SEQ ID NO: 435100 - DNA, 19 bp, Homo sapiens
  siRNA target sequence for FLJ38736 (NM_182758.1,2760-2778).
cagactatttttagttaat

SEQ ID NO: 435101 - DNA, 19 bp, Homo sapiens
  siRNA target sequence for FLJ38736 (NM_182758.1,2762-2780).
gactatttttagttaataa

SEQ ID NO: 435102 - DNA, 19 bp, Homo sapiens
  siRNA target sequence for FLJ38736 (NM_182758.1,2773-2791).
gttaataaattagttaaca

SEQ ID NO: 435103 - DNA, 19 bp, Homo sapiens
  siRNA target sequence for FLJ38736 (NM_182758.1,2895-2913).
ctacagttgcttacgaaat

SEQ ID NO: 435104 - DNA, 19 bp, Homo sapiens
  siRNA target sequence for FLJ38736 (NM_182758.1,2898-2916).
cagttgcttacgaaatggt

SEQ ID NO: 435105 - DNA, 19 bp, Homo sapiens
  siRNA target sequence for FLJ38736 (NM_182758.1,2900-2918).
gttgcttacgaaatggtaa

SEQ ID NO: 435106 - DNA, 19 bp, Homo sapiens
  siRNA target sequence for FLJ38736 (NM_182758.1,2903-2921).
gcttacgaaatggtaagaa

SEQ ID NO: 435107 - DNA, 19 bp, Homo sapiens
  siRNA target sequence for FLJ38736 (NM_182758.1,2904-2922).
cttacgaaatggtaagaat

SEQ ID NO: 435108 - DNA, 19 bp, Homo sapiens
  siRNA target sequence for FLJ38736 (NM_182758.1,3005-3023).
caatacaagctgttctctt

SEQ ID NO: 435109 - DNA, 19 bp, Homo sapiens
  siRNA target sequence for FLJ38736 (NM_182758.1,3060-3078).
gatacccgtcaatagtcaa

SEQ ID NO: 435110 - DNA, 19 bp, Homo sapiens
  siRNA target sequence for FLJ38736 (NM_182758.1,3090-3108).
ggcagagaatggtaactgt

SEQ ID NO: 435111 - DNA, 19 bp, Homo sapiens
  siRNA target sequence for FLJ38736 (NM_182758.1,3143-3161).
cagaagaactagagttaca

SEQ ID NO: 435112 - DNA, 19 bp, Homo sapiens
  siRNA target sequence for FLJ38736 (NM_182758.1,3151-3169).
ctagagttacagtgtgtta

SEQ ID NO: 435113 - DNA, 19 bp, Homo sapiens
  siRNA target sequence for FLJ38736 (NM_182758.1,3154-3172).
gagttacagtgtgttagaa

SEQ ID NO: 435114 - DNA, 19 bp, Homo sapiens
  siRNA target sequence for FLJ38736 (NM_182758.1,3307-3325).
catcattcatggatagcaa

SEQ ID NO: 435115 - DNA, 19 bp, Homo sapiens
  siRNA target sequence for LOC284467 (NM_182759.1,256-274).
cgctcccagacggtgaaat

SEQ ID NO: 435116 - DNA, 19 bp, Homo sapiens
  siRNA target sequence for LOC284467 (NM_182759.1,431-449).
gcagtggacacaaagtcaa

SEQ ID NO: 435117 - DNA, 19 bp, Homo sapiens
  siRNA target sequence for LOC284467 (NM_182759.1,432-450).
cagtggacacaaagtcaaa

SEQ ID NO: 435118 - DNA, 19 bp, Homo sapiens
  siRNA target sequence for SUMF1 (NM_182760.2,276-294).
ggcaactcgcgcactcaaa

SEQ ID NO: 435119 - DNA, 19 bp, Homo sapiens
  siRNA target sequence for SUMF1 (NM_182760.2,309-327).
ctgctggagtatttacaat

SEQ ID NO: 435120 - DNA, 19 bp, Homo sapiens
  siRNA target sequence for SUMF1 (NM_182760.2,368-386).
cctgcgaggagagttacta

SEQ ID NO: 435121 - DNA, 19 bp, Homo sapiens
  siRNA target sequence for SUMF1 (NM_182760.2,369-387).
ctgcgaggagagttactat

SEQ ID NO: 435122 - DNA, 19 bp, Homo sapiens
  siRNA target sequence for SUMF1 (NM_182760.2,413-431).
gaagtcagtaatactgaat

SEQ ID NO: 435123 - DNA, 19 bp, Homo sapiens
  siRNA target sequence for SUMF1 (NM_182760.2,483-501).
gcgactcctttgtctttga

SEQ ID NO: 435124 - DNA, 19 bp, Homo sapiens
  siRNA target sequence for SUMF1 (NM_182760.2,484-502).
cgactcctttgtctttgaa

SEQ ID NO: 435125 - DNA, 19 bp, Homo sapiens
  siRNA target sequence for SUMF1 (NM_182760.2,515-533).
gagcaagtgaagaccaata

SEQ ID NO: 435126 - DNA, 19 bp, Homo sapiens
  siRNA target sequence for SUMF1 (NM_182760.2,729-747).
gtcgaggaggcctgcataa

SEQ ID NO: 435127 - DNA, 19 bp, Homo sapiens
  siRNA target sequence for SUMF1 (NM_182760.2,737-755).
ggcctgcataatagacttt

SEQ ID NO: 435128 - DNA, 19 bp, Homo sapiens
  siRNA target sequence for SUMF1 (NM_182760.2,874-892).
cttccctcccaatggttat

SEQ ID NO: 435129 - DNA, 19 bp, Homo sapiens
  siRNA target sequence for SUMF1 (NM_182760.2,940-958).
gtggactgttcatcattct

SEQ ID NO: 435130 - DNA, 19 bp, Homo sapiens
  siRNA target sequence for SUMF1 (NM_182760.2,942-960).
ggactgttcatcattctgt

SEQ ID NO: 435131 - DNA, 19 bp, Homo sapiens
  siRNA target sequence for SUMF1 (NM_182760.2,1027-1045).
catgtgccataggtcttat

SEQ ID NO: 435132 - DNA, 19 bp, Homo sapiens
  siRNA target sequence for SUMF1 (NM_182760.2,1030-1048).
gtgccataggtcttattgt

SEQ ID NO: 435133 - DNA, 19 bp, Homo sapiens
  siRNA target sequence for SUMF1 (NM_182760.2,1034-1052).
cataggtcttattgttaca

SEQ ID NO: 435134 - DNA, 19 bp, Homo sapiens
  siRNA target sequence for LOC340069 (NM_182761.1,220-238).
cgacaaaagaggaaacatt

SEQ ID NO: 435135 - DNA, 19 bp, Homo sapiens
  siRNA target sequence for LOC340069 (NM_182761.1,373-391).
gtctccttgtcgtcctatt

SEQ ID NO: 435136 - DNA, 19 bp, Homo sapiens
  siRNA target sequence for LOC340069 (NM_182761.1,375-393).
ctccttgtcgtcctattca

SEQ ID NO: 435137 - DNA, 19 bp, Homo sapiens
  siRNA target sequence for LOC340069 (NM_182761.1,383-401).
cgtcctattcatcctataa

SEQ ID NO: 435138 - DNA, 19 bp, Homo sapiens
  siRNA target sequence for LOC340069 (NM_182761.1,387-405).
ctattcatcctataagact

SEQ ID NO: 435139 - DNA, 19 bp, Homo sapiens
  siRNA target sequence for LOC340069 (NM_182761.1,414-432).
ctctctgtgtgtaaacaaa

SEQ ID NO: 435140 - DNA, 19 bp, Homo sapiens
  siRNA target sequence for LOC340069 (NM_182761.1,416-434).
ctctgtgtgtaaacaaaga

SEQ ID NO: 435141 - DNA, 19 bp, Homo sapiens
  siRNA target sequence for 7A5 (NM_182762.1,3-21).
gctaatcactgaaagaaaa

SEQ ID NO: 435142 - DNA, 19 bp, Homo sapiens
  siRNA target sequence for 7A5 (NM_182762.1,54-72).
gtctgaagcaaatttgatt

SEQ ID NO: 435143 - DNA, 19 bp, Homo sapiens
  siRNA target sequence for 7A5 (NM_182762.1,56-74).
ctgaagcaaatttgattga

SEQ ID NO: 435144 - DNA, 19 bp, Homo sapiens
  siRNA target sequence for 7A5 (NM_182762.1,58-76).
gaagcaaatttgattgaca

SEQ ID NO: 435145 - DNA, 19 bp, Homo sapiens
  siRNA target sequence for 7A5 (NM_182762.1,159-177).
cacccttcgtggtaataat

SEQ ID NO: 435146 - DNA, 19 bp, Homo sapiens
  siRNA target sequence for 7A5 (NM_182762.1,162-180).
ccttcgtggtaataatgct

SEQ ID NO: 435147 - DNA, 19 bp, Homo sapiens
  siRNA target sequence for 7A5 (NM_182762.1,163-181).
cttcgtggtaataatgctt

SEQ ID NO: 435148 - DNA, 19 bp, Homo sapiens
  siRNA target sequence for 7A5 (NM_182762.1,182-200).
ccaaagttgcaaatccatt

SEQ ID NO: 435149 - DNA, 19 bp, Homo sapiens
  siRNA target sequence for 7A5 (NM_182762.1,234-252).
ggatgacataactcaacta

SEQ ID NO: 435150 - DNA, 19 bp, Homo sapiens
  siRNA target sequence for 7A5 (NM_182762.1,240-258).
cataactcaactaagaaat

SEQ ID NO: 435151 - DNA, 19 bp, Homo sapiens
  siRNA target sequence for 7A5 (NM_182762.1,285-303).
cttaaaggaagatcctttt

SEQ ID NO: 435152 - DNA, 19 bp, Homo sapiens
  siRNA target sequence for 7A5 (NM_182762.1,344-362).
cctccggtgatgaacttga

SEQ ID NO: 435153 - DNA, 19 bp, Homo sapiens
  siRNA target sequence for 7A5 (NM_182762.1,345-363).
ctccggtgatgaacttgat

SEQ ID NO: 435154 - DNA, 19 bp, Homo sapiens
  siRNA target sequence for 7A5 (NM_182762.1,347-365).
ccggtgatgaacttgatgt

SEQ ID NO: 435155 - DNA, 19 bp, Homo sapiens
  siRNA target sequence for 7A5 (NM_182762.1,458-476).
cccatcagagtatacataa

SEQ ID NO: 435156 - DNA, 19 bp, Homo sapiens
  siRNA target sequence for 7A5 (NM_182762.1,460-478).
catcagagtatacataact

SEQ ID NO: 435157 - DNA, 19 bp, Homo sapiens
  siRNA target sequence for 7A5 (NM_182762.1,490-508).
ctactacacgacttagagt

SEQ ID NO: 435158 - DNA, 19 bp, Homo sapiens
  siRNA target sequence for 7A5 (NM_182762.1,498-516).
cgacttagagtggcttaaa

SEQ ID NO: 435159 - DNA, 19 bp, Homo sapiens
  siRNA target sequence for 7A5 (NM_182762.1,575-593).
gccttgatttgaatacaat

SEQ ID NO: 435160 - DNA, 19 bp, Homo sapiens
  siRNA target sequence for 7A5 (NM_182762.1,633-651).
ggtcaccatagcttgcaaa

SEQ ID NO: 435161 - DNA, 19 bp, Homo sapiens
  siRNA target sequence for 7A5 (NM_182762.1,636-654).
caccatagcttgcaaagta

SEQ ID NO: 435162 - DNA, 19 bp, Homo sapiens
  siRNA target sequence for 7A5 (NM_182762.1,689-707).
cagacatcactgttcatgt

SEQ ID NO: 435163 - DNA, 19 bp, Homo sapiens
  siRNA target sequence for 7A5 (NM_182762.1,723-741).
ggctgtgggagaattccaa

SEQ ID NO: 435164 - DNA, 19 bp, Homo sapiens
  siRNA target sequence for 7A5 (NM_182762.1,747-765).
gtctctaagggctttcctt

SEQ ID NO: 435165 - DNA, 19 bp, Homo sapiens
  siRNA target sequence for 7A5 (NM_182762.1,766-784).
gatccgccacacatgctta

SEQ ID NO: 435166 - DNA, 19 bp, Homo sapiens
  siRNA target sequence for 7A5 (NM_182762.1,770-788).
cgccacacatgcttaacca

SEQ ID NO: 435167 - DNA, 19 bp, Homo sapiens
  siRNA target sequence for 7A5 (NM_182762.1,771-789).
gccacacatgcttaaccat

SEQ ID NO: 435168 - DNA, 19 bp, Homo sapiens
  siRNA target sequence for 7A5 (NM_182762.1,805-823).
gtgagcccgttgttggaaa

SEQ ID NO: 435169 - DNA, 19 bp, Homo sapiens
  siRNA target sequence for 7A5 (NM_182762.1,811-829).
ccgttgttggaaatcatgt

SEQ ID NO: 435170 - DNA, 19 bp, Homo sapiens
  siRNA target sequence for 7A5 (NM_182762.1,828-846).
gttaggcaacctcaataca

SEQ ID NO: 435171 - DNA, 19 bp, Homo sapiens
  siRNA target sequence for 7A5 (NM_182762.1,834-852).
caacctcaatacaatggaa

SEQ ID NO: 435172 - DNA, 19 bp, Homo sapiens
  siRNA target sequence for 7A5 (NM_182762.1,870-888).
gaaaattggggctgaagta

SEQ ID NO: 435173 - DNA, 19 bp, Homo sapiens
  siRNA target sequence for 7A5 (NM_182762.1,995-1013).
ccatccaagtcaagctaat

SEQ ID NO: 435174 - DNA, 19 bp, Homo sapiens
  siRNA target sequence for 7A5 (NM_182762.1,1017-1035).
cttgagtcaggtaatgtat

SEQ ID NO: 435175 - DNA, 19 bp, Homo sapiens
  siRNA target sequence for 7A5 (NM_182762.1,1078-1096).
gccaccatttgggattata

SEQ ID NO: 435176 - DNA, 19 bp, Homo sapiens
  siRNA target sequence for 7A5 (NM_182762.1,1079-1097).
ccaccatttgggattatat

SEQ ID NO: 435177 - DNA, 19 bp, Homo sapiens
  siRNA target sequence for 7A5 (NM_182762.1,1090-1108).
gattatatccacaaaacca

SEQ ID NO: 435178 - DNA, 19 bp, Homo sapiens
  siRNA target sequence for 7A5 (NM_182762.1,1106-1124).
ccacctcaattggaattta

SEQ ID NO: 435179 - DNA, 19 bp, Homo sapiens
  siRNA target sequence for 7A5 (NM_182762.1,1107-1125).
cacctcaattggaatttat

SEQ ID NO: 435180 - DNA, 19 bp, Homo sapiens
  siRNA target sequence for 7A5 (NM_182762.1,1118-1136).
gaatttatggacccaaata

SEQ ID NO: 435181 - DNA, 19 bp, Homo sapiens
  siRNA target sequence for 7A5 (NM_182762.1,1140-1158).
ccatcccagttttactgtt

SEQ ID NO: 435182 - DNA, 19 bp, Homo sapiens
  siRNA target sequence for 7A5 (NM_182762.1,1166-1184).
cagtttgtggacacaatta

SEQ ID NO: 435183 - DNA, 19 bp, Homo sapiens
  siRNA target sequence for 7A5 (NM_182762.1,1195-1213).
cagcttacaatttctgata

SEQ ID NO: 435184 - DNA, 19 bp, Homo sapiens
  siRNA target sequence for 7A5 (NM_182762.1,1198-1216).
cttacaatttctgatatta

SEQ ID NO: 435185 - DNA, 19 bp, Homo sapiens
  siRNA target sequence for 7A5 (NM_182762.1,1221-1239).
gggtggaaaaaacatatct

SEQ ID NO: 435186 - DNA, 19 bp, Homo sapiens
  siRNA target sequence for 7A5 (NM_182762.1,1279-1297).
cttgacaagccacaagatt

SEQ ID NO: 435187 - DNA, 19 bp, Homo sapiens
  siRNA target sequence for 7A5 (NM_182762.1,1284-1302).
caagccacaagatttaagt

SEQ ID NO: 435188 - DNA, 19 bp, Homo sapiens
  siRNA target sequence for 7A5 (NM_182762.1,1393-1411).
gtagttcatcaacaatttt

SEQ ID NO: 435189 - DNA, 19 bp, Homo sapiens
  siRNA target sequence for 7A5 (NM_182762.1,1396-1414).
gttcatcaacaatttttat

SEQ ID NO: 435190 - DNA, 19 bp, Homo sapiens
  siRNA target sequence for 7A5 (NM_182762.1,1433-1451).
gagagatgcacttgtttga

SEQ ID NO: 435191 - DNA, 19 bp, Homo sapiens
  siRNA target sequence for 7A5 (NM_182762.1,1435-1453).
gagatgcacttgtttgatt

SEQ ID NO: 435192 - DNA, 19 bp, Homo sapiens
  siRNA target sequence for 7A5 (NM_182762.1,1487-1505).
cagttgcacagttctctat

SEQ ID NO: 435193 - DNA, 19 bp, Homo sapiens
  siRNA target sequence for 7A5 (NM_182762.1,1492-1510).
gcacagttctctatcacta

SEQ ID NO: 435194 - DNA, 19 bp, Homo sapiens
  siRNA target sequence for 7A5 (NM_182762.1,1516-1534).
gatccaaccccaaacctaa

SEQ ID NO: 435195 - DNA, 19 bp, Homo sapiens
  siRNA target sequence for 7A5 (NM_182762.1,1523-1541).
ccccaaacctaaaaagact

SEQ ID NO: 435196 - DNA, 19 bp, Homo sapiens
  siRNA target sequence for 7A5 (NM_182762.1,1544-1562).
cgaatctgccaggctattt

SEQ ID NO: 435197 - DNA, 19 bp, Homo sapiens
  siRNA target sequence for 7A5 (NM_182762.1,1589-1607).
ctcctttatcaccaaaaat

SEQ ID NO: 435198 - DNA, 19 bp, Homo sapiens
  siRNA target sequence for 7A5 (NM_182762.1,1680-1698).
gctaagacaaagcaagatt

SEQ ID NO: 435199 - DNA, 19 bp, Homo sapiens
  siRNA target sequence for 7A5 (NM_182762.1,1741-1759).
ctcggggaaggtaaggtaa

SEQ ID NO: 435200 - DNA, 19 bp, Homo sapiens
  siRNA target sequence for 7A5 (NM_182762.1,1743-1761).
cggggaaggtaaggtaaaa

SEQ ID NO: 435201 - DNA, 19 bp, Homo sapiens
  siRNA target sequence for 7A5 (NM_182762.1,1747-1765).
gaaggtaaggtaaaagcta

SEQ ID NO: 435202 - DNA, 19 bp, Homo sapiens
  siRNA target sequence for 7A5 (NM_182762.1,1775-1793).
ccaaagtgaaagaatggta

SEQ ID NO: 435203 - DNA, 19 bp, Homo sapiens
  siRNA target sequence for 7A5 (NM_182762.1,2225-2243).
cagctgtcaagcttggaaa

SEQ ID NO: 435204 - DNA, 19 bp, Homo sapiens
  siRNA target sequence for 7A5 (NM_182762.1,2275-2293).
cgactcacaaagcaacaaa

SEQ ID NO: 435205 - DNA, 19 bp, Homo sapiens
  siRNA target sequence for 7A5 (NM_182762.1,2276-2294).
gactcacaaagcaacaaat

SEQ ID NO: 435206 - DNA, 19 bp, Homo sapiens
  siRNA target sequence for 7A5 (NM_182762.1,2295-2313).
ggaggcatatgaaattcct

SEQ ID NO: 435207 - DNA, 19 bp, Homo sapiens
  siRNA target sequence for 7A5 (NM_182762.1,2360-2378).
ctgcctatgattttctgta

SEQ ID NO: 435208 - DNA, 19 bp, Homo sapiens
  siRNA target sequence for 7A5 (NM_182762.1,2384-2402).
ggagtgctcactatggaaa

SEQ ID NO: 435209 - DNA, 19 bp, Homo sapiens
  siRNA target sequence for 7A5 (NM_182762.1,2385-2403).
gagtgctcactatggaaat

SEQ ID NO: 435210 - DNA, 19 bp, Homo sapiens
  siRNA target sequence for 7A5 (NM_182762.1,2514-2532).
ggaggttttgagagtaact

SEQ ID NO: 435211 - DNA, 19 bp, Homo sapiens
  siRNA target sequence for FLJ37306 (NM_182765.1,704-722).
gacgttcagaagacagtat

SEQ ID NO: 435212 - DNA, 19 bp, Homo sapiens
  siRNA target sequence for FLJ37306 (NM_182765.1,706-724).
cgttcagaagacagtatta

SEQ ID NO: 435213 - DNA, 19 bp, Homo sapiens
  siRNA target sequence for FLJ37306 (NM_182765.1,707-725).
gttcagaagacagtattaa

SEQ ID NO: 435214 - DNA, 19 bp, Homo sapiens
  siRNA target sequence for FLJ37306 (NM_182765.1,741-759).
gcctgttacgagaatggaa

SEQ ID NO: 435215 - DNA, 19 bp, Homo sapiens
  siRNA target sequence for FLJ37306 (NM_182765.1,756-774).
ggaaaggtccacgaacaaa

SEQ ID NO: 435216 - DNA, 19 bp, Homo sapiens
  siRNA target sequence for FLJ37306 (NM_182765.1,779-797).
gatcttagagcatatttta

SEQ ID NO: 435217 - DNA, 19 bp, Homo sapiens
  siRNA target sequence for FLJ37306 (NM_182765.1,812-830).
cctcagtttaataacacat

SEQ ID NO: 435218 - DNA, 19 bp, Homo sapiens
  siRNA target sequence for FLJ37306 (NM_182765.1,828-846).
catctacgtatgtcatcta

SEQ ID NO: 435219 - DNA, 19 bp, Homo sapiens
  siRNA target sequence for FLJ37306 (NM_182765.1,925-943).
ccagaagaggttcaaacaa

SEQ ID NO: 435220 - DNA, 19 bp, Homo sapiens
  siRNA target sequence for FLJ37306 (NM_182765.1,950-968).
gagagattgctgcaattta

SEQ ID NO: 435221 - DNA, 19 bp, Homo sapiens
  siRNA target sequence for FLJ37306 (NM_182765.1,1007-1025).
ccacctataacaaagtgtt

SEQ ID NO: 435222 - DNA, 19 bp, Homo sapiens
  siRNA target sequence for FLJ37306 (NM_182765.1,1052-1070).
gtgttggctttacttaata

SEQ ID NO: 435223 - DNA, 19 bp, Homo sapiens
  siRNA target sequence for FLJ37306 (NM_182765.1,1091-1109).
cctccccttattccttata

SEQ ID NO: 435224 - DNA, 19 bp, Homo sapiens
  siRNA target sequence for FLJ37306 (NM_182765.1,1096-1114).
ccttattccttatactgat

SEQ ID NO: 435225 - DNA, 19 bp, Homo sapiens
  siRNA target sequence for FLJ37306 (NM_182765.1,1117-1135).
ctataattctacattggat

SEQ ID NO: 435226 - DNA, 19 bp, Homo sapiens
  siRNA target sequence for FLJ37306 (NM_182765.1,1201-1219).
ctgtcagtacccattcgtt

SEQ ID NO: 435227 - DNA, 19 bp, Homo sapiens
  siRNA target sequence for FLJ37306 (NM_182765.1,1203-1221).
gtcagtacccattcgttat

SEQ ID NO: 435228 - DNA, 19 bp, Homo sapiens
  siRNA target sequence for FLJ37306 (NM_182765.1,1210-1228).
cccattcgttatttctgta

SEQ ID NO: 435229 - DNA, 19 bp, Homo sapiens
  siRNA target sequence for FLJ37306 (NM_182765.1,1258-1276).
ctcagagcaacagatgata

SEQ ID NO: 435230 - DNA, 19 bp, Homo sapiens
  siRNA target sequence for FLJ37306 (NM_182765.1,1314-1332).
gaagacagagacctgatat

SEQ ID NO: 435231 - DNA, 19 bp, Homo sapiens
  siRNA target sequence for FLJ37306 (NM_182765.1,1317-1335).
gacagagacctgatatgaa

SEQ ID NO: 435232 - DNA, 19 bp, Homo sapiens
  siRNA target sequence for FLJ37306 (NM_182765.1,1319-1337).
cagagacctgatatgaata

SEQ ID NO: 435233 - DNA, 19 bp, Homo sapiens
  siRNA target sequence for FLJ37306 (NM_182765.1,1323-1341).
gacctgatatgaatatatt

SEQ ID NO: 435234 - DNA, 19 bp, Homo sapiens
  siRNA target sequence for FLJ37306 (NM_182765.1,1375-1393).
ggttagcgattcacttgat

SEQ ID NO: 435235 - DNA, 19 bp, Homo sapiens
  siRNA target sequence for FLJ37306 (NM_182765.1,1403-1421).
cggaaaagagccgatttga

SEQ ID NO: 435236 - DNA, 19 bp, Homo sapiens
  siRNA target sequence for FLJ37306 (NM_182765.1,1404-1422).
ggaaaagagccgatttgaa

SEQ ID NO: 435237 - DNA, 19 bp, Homo sapiens
  siRNA target sequence for FLJ37306 (NM_182765.1,1412-1430).
gccgatttgaaaaagaagt

SEQ ID NO: 435238 - DNA, 19 bp, Homo sapiens
  siRNA target sequence for FLJ37306 (NM_182765.1,1448-1466).
ggggaagctggtttggata

SEQ ID NO: 435239 - DNA, 19 bp, Homo sapiens
  siRNA target sequence for FLJ37306 (NM_182765.1,1462-1480).
ggatatgggtggtttgact

SEQ ID NO: 435240 - DNA, 19 bp, Homo sapiens
  siRNA target sequence for FLJ37306 (NM_182765.1,1463-1481).
gatatgggtggtttgacta

SEQ ID NO: 435241 - DNA, 19 bp, Homo sapiens
  siRNA target sequence for FLJ37306 (NM_182765.1,1469-1487).
ggtggtttgactaaagaat

SEQ ID NO: 435242 - DNA, 19 bp, Homo sapiens
  siRNA target sequence for FLJ37306 (NM_182765.1,1496-1514).
cttctaattcgccaaattt

SEQ ID NO: 435243 - DNA, 19 bp, Homo sapiens
  siRNA target sequence for FLJ37306 (NM_182765.1,1562-1580).
cattggtttagcagcttta

SEQ ID NO: 435244 - DNA, 19 bp, Homo sapiens
  siRNA target sequence for FLJ37306 (NM_182765.1,1567-1585).
gtttagcagctttaaatgt

SEQ ID NO: 435245 - DNA, 19 bp, Homo sapiens
  siRNA target sequence for FLJ37306 (NM_182765.1,1584-1602).
gtgataactattctgaatt

SEQ ID NO: 435246 - DNA, 19 bp, Homo sapiens
  siRNA target sequence for FLJ37306 (NM_182765.1,1603-1621).
ccgattggttggaattctt

SEQ ID NO: 435247 - DNA, 19 bp, Homo sapiens
  siRNA target sequence for FLJ37306 (NM_182765.1,1604-1622).
cgattggttggaattctta

SEQ ID NO: 435248 - DNA, 19 bp, Homo sapiens
  siRNA target sequence for FLJ37306 (NM_182765.1,1605-1623).
gattggttggaattcttat

SEQ ID NO: 435249 - DNA, 19 bp, Homo sapiens
  siRNA target sequence for FLJ37306 (NM_182765.1,1671-1689).
cctgctgttacaagaaatt

SEQ ID NO: 435250 - DNA, 19 bp, Homo sapiens
  siRNA target sequence for FLJ37306 (NM_182765.1,1672-1690).
ctgctgttacaagaaatta

SEQ ID NO: 435251 - DNA, 19 bp, Homo sapiens
  siRNA target sequence for FLJ37306 (NM_182765.1,1730-1748).
gtaggcatctgcaatgtta

SEQ ID NO: 435252 - DNA, 19 bp, Homo sapiens
  siRNA target sequence for FLJ37306 (NM_182765.1,1745-1763).
gttaccgtggacgacttat

SEQ ID NO: 435253 - DNA, 19 bp, Homo sapiens
  siRNA target sequence for FLJ37306 (NM_182765.1,1749-1767).
ccgtggacgacttatgtca

SEQ ID NO: 435254 - DNA, 19 bp, Homo sapiens
  siRNA target sequence for FLJ37306 (NM_182765.1,1750-1768).
cgtggacgacttatgtcaa

SEQ ID NO: 435255 - DNA, 19 bp, Homo sapiens
  siRNA target sequence for FLJ37306 (NM_182765.1,1753-1771).
ggacgacttatgtcaaatt

SEQ ID NO: 435256 - DNA, 19 bp, Homo sapiens
  siRNA target sequence for FLJ37306 (NM_182765.1,1754-1772).
gacgacttatgtcaaatta

SEQ ID NO: 435257 - DNA, 19 bp, Homo sapiens
  siRNA target sequence for FLJ37306 (NM_182765.1,1776-1794).
ctgagttggcccatggatt

SEQ ID NO: 435258 - DNA, 19 bp, Homo sapiens
  siRNA target sequence for FLJ37306 (NM_182765.1,1778-1796).
gagttggcccatggattaa

SEQ ID NO: 435259 - DNA, 19 bp, Homo sapiens
  siRNA target sequence for FLJ37306 (NM_182765.1,1780-1798).
gttggcccatggattaagt

SEQ ID NO: 435260 - DNA, 19 bp, Homo sapiens
  siRNA target sequence for FLJ37306 (NM_182765.1,1829-1847).
gaagatttctattcaacat

SEQ ID NO: 435261 - DNA, 19 bp, Homo sapiens
  siRNA target sequence for FLJ37306 (NM_182765.1,1898-1916).
cccggtggtgataaaattt

SEQ ID NO: 435262 - DNA, 19 bp, Homo sapiens
  siRNA target sequence for FLJ37306 (NM_182765.1,1902-1920).
gtggtgataaaatttcagt

SEQ ID NO: 435263 - DNA, 19 bp, Homo sapiens
  siRNA target sequence for FLJ37306 (NM_182765.1,1919-1937).
gttaccaatcaaaatagaa

SEQ ID NO: 435264 - DNA, 19 bp, Homo sapiens
  siRNA target sequence for FLJ37306 (NM_182765.1,1970-1988).
ctgaacaaatccatctata

SEQ ID NO: 435265 - DNA, 19 bp, Homo sapiens
  siRNA target sequence for FLJ37306 (NM_182765.1,2054-2072).
cgtccagaagaggttgaaa

SEQ ID NO: 435266 - DNA, 19 bp, Homo sapiens
  siRNA target sequence for FLJ37306 (NM_182765.1,2055-2073).
gtccagaagaggttgaaat

SEQ ID NO: 435267 - DNA, 19 bp, Homo sapiens
  siRNA target sequence for FLJ37306 (NM_182765.1,2085-2103).
gaagtcctgacctggatat

SEQ ID NO: 435268 - DNA, 19 bp, Homo sapiens
  siRNA target sequence for FLJ37306 (NM_182765.1,2088-2106).
gtcctgacctggatatgca

SEQ ID NO: 435269 - DNA, 19 bp, Homo sapiens
  siRNA target sequence for FLJ37306 (NM_182765.1,2116-2134).
gagaagtactcagtatgat

SEQ ID NO: 435270 - DNA, 19 bp, Homo sapiens
  siRNA target sequence for FLJ37306 (NM_182765.1,2126-2144).
cagtatgatggctatgcaa

SEQ ID NO: 435271 - DNA, 19 bp, Homo sapiens
  siRNA target sequence for FLJ37306 (NM_182765.1,2148-2166).
cggacttaactataaaata

SEQ ID NO: 435272 - DNA, 19 bp, Homo sapiens
  siRNA target sequence for FLJ37306 (NM_182765.1,2172-2190).
gggatgttgtgcttggatt

SEQ ID NO: 435273 - DNA, 19 bp, Homo sapiens
  siRNA target sequence for FLJ37306 (NM_182765.1,2182-2200).
gcttggatttcctcttgat

SEQ ID NO: 435274 - DNA, 19 bp, Homo sapiens
  siRNA target sequence for FLJ37306 (NM_182765.1,2192-2210).
cctcttgatcttcaaaaga

SEQ ID NO: 435275 - DNA, 19 bp, Homo sapiens
  siRNA target sequence for FLJ37306 (NM_182765.1,2209-2227).
gaagttgctacattttact

SEQ ID NO: 435276 - DNA, 19 bp, Homo sapiens
  siRNA target sequence for FLJ37306 (NM_182765.1,2255-2273).
gggatggctgatttgaact

SEQ ID NO: 435277 - DNA, 19 bp, Homo sapiens
  siRNA target sequence for FLJ37306 (NM_182765.1,2352-2370).
cctacaagagcaaaaagga

SEQ ID NO: 435278 - DNA, 19 bp, Homo sapiens
  siRNA target sequence for FLJ37306 (NM_182765.1,2353-2371).
ctacaagagcaaaaaggat

SEQ ID NO: 435279 - DNA, 19 bp, Homo sapiens
  siRNA target sequence for FLJ37306 (NM_182765.1,2386-2404).
gatcattggaatttcaaat

SEQ ID NO: 435280 - DNA, 19 bp, Homo sapiens
  siRNA target sequence for FLJ32940 (NM_182766.1,2303-2321).
cagctaagcaaggtacatt

SEQ ID NO: 435281 - DNA, 19 bp, Homo sapiens
  siRNA target sequence for FLJ32940 (NM_182766.1,2314-2332).
ggtacattggcccaaaaat

SEQ ID NO: 435282 - DNA, 19 bp, Homo sapiens
  siRNA target sequence for FLJ32940 (NM_182766.1,2315-2333).
gtacattggcccaaaaata

SEQ ID NO: 435283 - DNA, 19 bp, Homo sapiens
  siRNA target sequence for FLJ32940 (NM_182766.1,2322-2340).
ggcccaaaaatatcttgaa

SEQ ID NO: 435284 - DNA, 19 bp, Homo sapiens
  siRNA target sequence for FLJ32940 (NM_182766.1,2399-2417).
gacaggcagaggagaagtt

SEQ ID NO: 435285 - DNA, 19 bp, Homo sapiens
  siRNA target sequence for FLJ32940 (NM_182766.1,2437-2455).
cttcatcatacccttataa

SEQ ID NO: 435286 - DNA, 19 bp, Homo sapiens
  siRNA target sequence for FLJ32940 (NM_182766.1,2470-2488).
gaggaattagtcatgacat

SEQ ID NO: 435287 - DNA, 19 bp, Homo sapiens
  siRNA target sequence for FLJ32855 (NM_182791.1,61-79).
ctgccccaggcctcattga

SEQ ID NO: 435288 - DNA, 19 bp, Homo sapiens
  siRNA target sequence for FLJ32855 (NM_182791.1,63-81).
gccccaggcctcattgaca

SEQ ID NO: 435289 - DNA, 19 bp, Homo sapiens
  siRNA target sequence for FLJ32855 (NM_182791.1,171-189).
ggagagaaccgcatactga

SEQ ID NO: 435290 - DNA, 19 bp, Homo sapiens
  siRNA target sequence for FLJ32855 (NM_182791.1,307-325).
gggacagggtgcagcattt

SEQ ID NO: 435291 - DNA, 19 bp, Homo sapiens
  siRNA target sequence for FLJ32855 (NM_182791.1,620-638).
gaacctgccggttgaactt

SEQ ID NO: 435292 - DNA, 19 bp, Homo sapiens
  siRNA target sequence for FLJ32855 (NM_182791.1,624-642).
ctgccggttgaactttact

SEQ ID NO: 435293 - DNA, 19 bp, Homo sapiens
  siRNA target sequence for FLJ32855 (NM_182791.1,848-866).
ctggtacttcagacaagtt

SEQ ID NO: 435294 - DNA, 19 bp, Homo sapiens
  siRNA target sequence for FLJ32855 (NM_182791.1,1009-1027).
ccctcgaactccatcatca

SEQ ID NO: 435295 - DNA, 19 bp, Homo sapiens
  siRNA target sequence for GDF7 (NM_182828.1,835-853).
gtgccgcaccacttcatga

SEQ ID NO: 435296 - DNA, 19 bp, Homo sapiens
  siRNA target sequence for GDF7 (NM_182828.1,1393-1411).
cgcacgcagaggaaagaga

SEQ ID NO: 435297 - DNA, 19 bp, Homo sapiens
  siRNA target sequence for GDF7 (NM_182828.1,1500-1518).
gtcgccaagggcagtcatt

SEQ ID NO: 435298 - DNA, 19 bp, Homo sapiens
  siRNA target sequence for MAMDC1 (NM_182830.2,733-751).
cagcatcaccgtcaattaa

SEQ ID NO: 435299 - DNA, 19 bp, Homo sapiens
  siRNA target sequence for MAMDC1 (NM_182830.2,736-754).
catcaccgtcaattaaact

SEQ ID NO: 435300 - DNA, 19 bp, Homo sapiens
  siRNA target sequence for MAMDC1 (NM_182830.2,739-757).
caccgtcaattaaactctt

SEQ ID NO: 435301 - DNA, 19 bp, Homo sapiens
  siRNA target sequence for MAMDC1 (NM_182830.2,755-773).
cttggtggatgatcctata

SEQ ID NO: 435302 - DNA, 19 bp, Homo sapiens
  siRNA target sequence for MAMDC1 (NM_182830.2,758-776).
ggtggatgatcctatagtt

SEQ ID NO: 435303 - DNA, 19 bp, Homo sapiens
  siRNA target sequence for MAMDC1 (NM_182830.2,761-779).
ggatgatcctatagttgta

SEQ ID NO: 435304 - DNA, 19 bp, Homo sapiens
  siRNA target sequence for MAMDC1 (NM_182830.2,784-802).
ctggagaggccataacatt

SEQ ID NO: 435305 - DNA, 19 bp, Homo sapiens
  siRNA target sequence for MAMDC1 (NM_182830.2,787-805).
gagaggccataacattagt

SEQ ID NO: 435306 - DNA, 19 bp, Homo sapiens
  siRNA target sequence for MAMDC1 (NM_182830.2,789-807).
gaggccataacattagtat

SEQ ID NO: 435307 - DNA, 19 bp, Homo sapiens
  siRNA target sequence for MAMDC1 (NM_182830.2,793-811).
ccataacattagtatgtgt

SEQ ID NO: 435308 - DNA, 19 bp, Homo sapiens
  siRNA target sequence for MAMDC1 (NM_182830.2,794-812).
cataacattagtatgtgtt

SEQ ID NO: 435309 - DNA, 19 bp, Homo sapiens
  siRNA target sequence for MAMDC1 (NM_182830.2,922-940).
cagatgatgctggtactta

SEQ ID NO: 435310 - DNA, 19 bp, Homo sapiens
  siRNA target sequence for MAMDC1 (NM_182830.2,1027-1045).
ggatcacaccagatcctta

SEQ ID NO: 435311 - DNA, 19 bp, Homo sapiens
  siRNA target sequence for MAMDC1 (NM_182830.2,1028-1046).
gatcacaccagatccttat

SEQ ID NO: 435312 - DNA, 19 bp, Homo sapiens
  siRNA target sequence for MAMDC1 (NM_182830.2,1071-1089).
ggccgtgaggtgaaaatat

SEQ ID NO: 435313 - DNA, 19 bp, Homo sapiens
  siRNA target sequence for MAMDC1 (NM_182830.2,1074-1092).
cgtgaggtgaaaatatctt

SEQ ID NO: 435314 - DNA, 19 bp, Homo sapiens
  siRNA target sequence for MAMDC1 (NM_182830.2,1111-1129).
cttctgaggagctaacatt

SEQ ID NO: 435315 - DNA, 19 bp, Homo sapiens
  siRNA target sequence for MAMDC1 (NM_182830.2,1146-1164).
ggtcgtccattaagaagtt

SEQ ID NO: 435316 - DNA, 19 bp, Homo sapiens
  siRNA target sequence for MAMDC1 (NM_182830.2,1200-1218).
gtctctccgggaacaacaa

SEQ ID NO: 435317 - DNA, 19 bp, Homo sapiens
  siRNA target sequence for MAMDC1 (NM_182830.2,1248-1266).
gattttgggacgtacacat

SEQ ID NO: 435318 - DNA, 19 bp, Homo sapiens
  siRNA target sequence for MAMDC1 (NM_182830.2,1285-1303).
gaggaggaatatctgatat

SEQ ID NO: 435319 - DNA, 19 bp, Homo sapiens
  siRNA target sequence for MAMDC1 (NM_182830.2,1287-1305).
ggaggaatatctgatatca

SEQ ID NO: 435320 - DNA, 19 bp, Homo sapiens
  siRNA target sequence for MAMDC1 (NM_182830.2,1291-1309).
gaatatctgatatcagtat

SEQ ID NO: 435321 - DNA, 19 bp, Homo sapiens
  siRNA target sequence for MAMDC1 (NM_182830.2,1299-1317).
gatatcagtatcgatgtta

SEQ ID NO: 435322 - DNA, 19 bp, Homo sapiens
  siRNA target sequence for MAMDC1 (NM_182830.2,1304-1322).
cagtatcgatgttaatata

SEQ ID NO: 435323 - DNA, 19 bp, Homo sapiens
  siRNA target sequence for MAMDC1 (NM_182830.2,1413-1431).
caagtaactggcaaaccta

SEQ ID NO: 435324 - DNA, 19 bp, Homo sapiens
  siRNA target sequence for MAMDC1 (NM_182830.2,1428-1446).
cctaaaccaatcatccttt

SEQ ID NO: 435325 - DNA, 19 bp, Homo sapiens
  siRNA target sequence for MAMDC1 (NM_182830.2,1447-1465).
ggtctagagcggataaaga

SEQ ID NO: 435326 - DNA, 19 bp, Homo sapiens
  siRNA target sequence for MAMDC1 (NM_182830.2,1475-1493).
gcctgatggatcaatgcaa

SEQ ID NO: 435327 - DNA, 19 bp, Homo sapiens
  siRNA target sequence for MAMDC1 (NM_182830.2,1476-1494).
cctgatggatcaatgcaaa

SEQ ID NO: 435328 - DNA, 19 bp, Homo sapiens
  siRNA target sequence for MAMDC1 (NM_182830.2,1509-1527).
ggaacactgaggattgtga

SEQ ID NO: 435329 - DNA, 19 bp, Homo sapiens
  siRNA target sequence for MAMDC1 (NM_182830.2,1561-1579).
gtcagaccagccaatacaa

SEQ ID NO: 435330 - DNA, 19 bp, Homo sapiens
  siRNA target sequence for MAMDC1 (NM_182830.2,1570-1588).
gccaatacaatggatttaa

SEQ ID NO: 435331 - DNA, 19 bp, Homo sapiens
  siRNA target sequence for MAMDC1 (NM_182830.2,1581-1599).
ggatttaacgtgaaaccaa

SEQ ID NO: 435332 - DNA, 19 bp, Homo sapiens
  siRNA target sequence for MAMDC1 (NM_182830.2,1639-1657).
cagtggaaccagcattctt

SEQ ID NO: 435333 - DNA, 19 bp, Homo sapiens
  siRNA target sequence for MAMDC1 (NM_182830.2,1644-1662).
gaaccagcattcttggaaa

SEQ ID NO: 435334 - DNA, 19 bp, Homo sapiens
  siRNA target sequence for MAMDC1 (NM_182830.2,1677-1695).
gatcgaagtgtcactatga

SEQ ID NO: 435335 - DNA, 19 bp, Homo sapiens
  siRNA target sequence for MAMDC1 (NM_182830.2,1704-1722).
gtactgagagcctatccaa

SEQ ID NO: 435336 - DNA, 19 bp, Homo sapiens
  siRNA target sequence for MAMDC1 (NM_182830.2,1725-1743).
cgggtgctgacctatgagt

SEQ ID NO: 435337 - DNA, 19 bp, Homo sapiens
  siRNA target sequence for MAMDC1 (NM_182830.2,1742-1760).
gtggcgcttgggcaataaa

SEQ ID NO: 435338 - DNA, 19 bp, Homo sapiens
  siRNA target sequence for MAMDC1 (NM_182830.2,1744-1762).
ggcgcttgggcaataaatt

SEQ ID NO: 435339 - DNA, 19 bp, Homo sapiens
  siRNA target sequence for MAMDC1 (NM_182830.2,1745-1763).
gcgcttgggcaataaatta

SEQ ID NO: 435340 - DNA, 19 bp, Homo sapiens
  siRNA target sequence for MAMDC1 (NM_182830.2,1746-1764).
cgcttgggcaataaattat

SEQ ID NO: 435341 - DNA, 19 bp, Homo sapiens
  siRNA target sequence for MAMDC1 (NM_182830.2,1747-1765).
gcttgggcaataaattatt

SEQ ID NO: 435342 - DNA, 19 bp, Homo sapiens
  siRNA target sequence for MAMDC1 (NM_182830.2,1767-1785).
cggacgggtcaatttgact

SEQ ID NO: 435343 - DNA, 19 bp, Homo sapiens
  siRNA target sequence for MAMDC1 (NM_182830.2,1847-1865).
ctgtagcatcataaatgaa

SEQ ID NO: 435344 - DNA, 19 bp, Homo sapiens
  siRNA target sequence for MAMDC1 (NM_182830.2,1877-1895).
gagatgcagctttcttgtt

SEQ ID NO: 435345 - DNA, 19 bp, Homo sapiens
  siRNA target sequence for MAMDC1 (NM_182830.2,1906-1924).
cctatgctccagaattcta

SEQ ID NO: 435346 - DNA, 19 bp, Homo sapiens
  siRNA target sequence for MAMDC1 (NM_182830.2,1912-1930).
ctccagaattctattatga

SEQ ID NO: 435347 - DNA, 19 bp, Homo sapiens
  siRNA target sequence for MAMDC1 (NM_182830.2,1914-1932).
ccagaattctattatgata

SEQ ID NO: 435348 - DNA, 19 bp, Homo sapiens
  siRNA target sequence for MAMDC1 (NM_182830.2,1922-1940).
ctattatgatacctacaat

SEQ ID NO: 435349 - DNA, 19 bp, Homo sapiens
  siRNA target sequence for MAMDC1 (NM_182830.2,2106-2124).
ggagaattaattacatata

SEQ ID NO: 435350 - DNA, 19 bp, Homo sapiens
  siRNA target sequence for MAMDC1 (NM_182830.2,2200-2218).
caacaattcgtgtgatcaa

SEQ ID NO: 435351 - DNA, 19 bp, Homo sapiens
  siRNA target sequence for MAMDC1 (NM_182830.2,2284-2302).
gtttgttcactcaagatga

SEQ ID NO: 435352 - DNA, 19 bp, Homo sapiens
  siRNA target sequence for MAMDC1 (NM_182830.2,2384-2402).
ccgtagtggctccaaagaa

SEQ ID NO: 435353 - DNA, 19 bp, Homo sapiens
  siRNA target sequence for MAMDC1 (NM_182830.2,2389-2407).
gtggctccaaagaaggttt

SEQ ID NO: 435354 - DNA, 19 bp, Homo sapiens
  siRNA target sequence for MAMDC1 (NM_182830.2,2400-2418).
gaaggtttttatatgtaca

SEQ ID NO: 435355 - DNA, 19 bp, Homo sapiens
  siRNA target sequence for MAMDC1 (NM_182830.2,2496-2514).
ccttatggacccacaaaca

SEQ ID NO: 435356 - DNA, 19 bp, Homo sapiens
  siRNA target sequence for MAMDC1 (NM_182830.2,2505-2523).
cccacaaacactgcatatt

SEQ ID NO: 435357 - DNA, 19 bp, Homo sapiens
  siRNA target sequence for MAMDC1 (NM_182830.2,2553-2571).
caacatataggtgtcttaa

SEQ ID NO: 435358 - DNA, 19 bp, Homo sapiens
  siRNA target sequence for MAMDC1 (NM_182830.2,2592-2610).
gggcaaacaacaatagaga

SEQ ID NO: 435359 - DNA, 19 bp, Homo sapiens
  siRNA target sequence for MAMDC1 (NM_182830.2,2593-2611).
ggcaaacaacaatagagaa

SEQ ID NO: 435360 - DNA, 19 bp, Homo sapiens
  siRNA target sequence for MAMDC1 (NM_182830.2,2594-2612).
gcaaacaacaatagagaat

SEQ ID NO: 435361 - DNA, 19 bp, Homo sapiens
  siRNA target sequence for MAMDC1 (NM_182830.2,2664-2682).
gttaatatatacccaatta

SEQ ID NO: 435362 - DNA, 19 bp, Homo sapiens
  siRNA target sequence for MAMDC1 (NM_182830.2,2711-2729).
ccgaggtcctggaatagaa

SEQ ID NO: 435363 - DNA, 19 bp, Homo sapiens
  siRNA target sequence for MAMDC1 (NM_182830.2,2739-2757).
gctattgatgatgtatcaa

SEQ ID NO: 435364 - DNA, 19 bp, Homo sapiens
  siRNA target sequence for MAMDC1 (NM_182830.2,2740-2758).
ctattgatgatgtatcaat

SEQ ID NO: 435365 - DNA, 19 bp, Homo sapiens
  siRNA target sequence for MAMDC1 (NM_182830.2,2781-2799).
caagacctagcaactaaga

SEQ ID NO: 435366 - DNA, 19 bp, Homo sapiens
  siRNA target sequence for MAMDC1 (NM_182830.2,2817-2835).
gttgggattttggttcata

SEQ ID NO: 435367 - DNA, 19 bp, Homo sapiens
  siRNA target sequence for MAMDC1 (NM_182830.2,2820-2838).
gggattttggttcatatat

SEQ ID NO: 435368 - DNA, 19 bp, Homo sapiens
  siRNA target sequence for MAMDC1 (NM_182830.2,2828-2846).
ggttcatatatggcttttt

SEQ ID NO: 435369 - DNA, 19 bp, Homo sapiens
  siRNA target sequence for MAMDC1 (NM_182830.2,2839-2857).
ggctttttcccattatcgt

SEQ ID NO: 435370 - DNA, 19 bp, Homo sapiens
  siRNA target sequence for TNT (NM_182831.1,207-225).
caaagggcagccttatata

SEQ ID NO: 435371 - DNA, 19 bp, Homo sapiens
  siRNA target sequence for TNT (NM_182831.1,438-456).
ctcaggagcccctgaaagt

SEQ ID NO: 435372 - DNA, 19 bp, Homo sapiens
  siRNA target sequence for TNT (NM_182831.1,440-458).
caggagcccctgaaagtgt

SEQ ID NO: 435373 - DNA, 19 bp, Homo sapiens
  siRNA target sequence for TNT (NM_182831.1,484-502).
gagcagcgagagtcatgtt

SEQ ID NO: 435374 - DNA, 19 bp, Homo sapiens
  siRNA target sequence for PLAC4 (NM_182832.1,176-194).
cgccgctagggtgtctttt

SEQ ID NO: 435375 - DNA, 19 bp, Homo sapiens
  siRNA target sequence for PLAC4 (NM_182832.1,177-195).
gccgctagggtgtctttta

SEQ ID NO: 435376 - DNA, 19 bp, Homo sapiens
  siRNA target sequence for PLAC4 (NM_182832.1,178-196).
ccgctagggtgtcttttaa

SEQ ID NO: 435377 - DNA, 19 bp, Homo sapiens
  siRNA target sequence for PLAC4 (NM_182832.1,181-199).
ctagggtgtcttttaagct

SEQ ID NO: 435378 - DNA, 19 bp, Homo sapiens
  siRNA target sequence for PLAC4 (NM_182832.1,296-314).
ggcctaaacatggttctat

SEQ ID NO: 435379 - DNA, 19 bp, Homo sapiens
  siRNA target sequence for PLAC4 (NM_182832.1,297-315).
gcctaaacatggttctata

SEQ ID NO: 435380 - DNA, 19 bp, Homo sapiens
  siRNA target sequence for PLAC4 (NM_182832.1,298-316).
cctaaacatggttctatat

SEQ ID NO: 435381 - DNA, 19 bp, Homo sapiens
  siRNA target sequence for PLAC4 (NM_182832.1,308-326).
gttctatatactatagtga

SEQ ID NO: 435382 - DNA, 19 bp, Homo sapiens
  siRNA target sequence for PLAC4 (NM_182832.1,318-336).
ctatagtgatattttacga

SEQ ID NO: 435383 - DNA, 19 bp, Homo sapiens
  siRNA target sequence for PLAC4 (NM_182832.1,368-386).
gggaagagatcccttatgt

SEQ ID NO: 435384 - DNA, 19 bp, Homo sapiens
  siRNA target sequence for PLAC4 (NM_182832.1,369-387).
ggaagagatcccttatgta

SEQ ID NO: 435385 - DNA, 19 bp, Homo sapiens
  siRNA target sequence for PLAC4 (NM_182832.1,391-409).
gcttttatggctctatact

SEQ ID NO: 435386 - DNA, 19 bp, Homo sapiens
  siRNA target sequence for PLAC4 (NM_182832.1,429-447).
cattagaatgccatgcata

SEQ ID NO: 435387 - DNA, 19 bp, Homo sapiens
  siRNA target sequence for PLAC4 (NM_182832.1,460-478).
ctagctgctccccatagaa

SEQ ID NO: 435388 - DNA, 19 bp, Homo sapiens
  siRNA target sequence for PLAC4 (NM_182832.1,466-484).
gctccccatagaaagttca

SEQ ID NO: 435389 - DNA, 19 bp, Homo sapiens
  siRNA target sequence for PLAC4 (NM_182832.1,467-485).
ctccccatagaaagttcat

SEQ ID NO: 435390 - DNA, 19 bp, Homo sapiens
  siRNA target sequence for LOC220032 (NM_182833.1,257-275).
gctgttcctgtggatagaa

SEQ ID NO: 435391 - DNA, 19 bp, Homo sapiens
  siRNA target sequence for LOC220032 (NM_182833.1,258-276).
ctgttcctgtggatagaaa

SEQ ID NO: 435392 - DNA, 19 bp, Homo sapiens
  siRNA target sequence for LOC220032 (NM_182833.1,273-291).
gaaacatccagtgaatact

SEQ ID NO: 435393 - DNA, 19 bp, Homo sapiens
  siRNA target sequence for LOC220032 (NM_182833.1,277-295).
catccagtgaatactttaa

SEQ ID NO: 435394 - DNA, 19 bp, Homo sapiens
  siRNA target sequence for LOC220032 (NM_182833.1,281-299).
cagtgaatactttaacttt

SEQ ID NO: 435395 - DNA, 19 bp, Homo sapiens
  siRNA target sequence for LOC220032 (NM_182833.1,283-301).
gtgaatactttaactttga

SEQ ID NO: 435396 - DNA, 19 bp, Homo sapiens
  siRNA target sequence for LOC220032 (NM_182833.1,318-336).
ggaacaggatactggtttt

SEQ ID NO: 435397 - DNA, 19 bp, Homo sapiens
  siRNA target sequence for LOC220032 (NM_182833.1,372-390).
ctgactgcctactcttcat

SEQ ID NO: 435398 - DNA, 19 bp, Homo sapiens
  siRNA target sequence for LOC220032 (NM_182833.1,441-459).
ctgcacttgtgtcataaga

SEQ ID NO: 435399 - DNA, 19 bp, Homo sapiens
  siRNA target sequence for LOC220032 (NM_182833.1,451-469).
gtcataagatcctgattct

SEQ ID NO: 435400 - DNA, 19 bp, Homo sapiens
  siRNA target sequence for LOC220032 (NM_182833.1,461-479).
cctgattctgctagtgatt

SEQ ID NO: 435401 - DNA, 19 bp, Homo sapiens
  siRNA target sequence for LOC220032 (NM_182833.1,545-563).
gctgtcaatgcagatcttt

SEQ ID NO: 435402 - DNA, 19 bp, Homo sapiens
  siRNA target sequence for LOC220032 (NM_182833.1,586-604).
gcataactgtgatggttat

SEQ ID NO: 435403 - DNA, 19 bp, Homo sapiens
  siRNA target sequence for LOC220032 (NM_182833.1,592-610).
ctgtgatggttatcctttt

SEQ ID NO: 435404 - DNA, 19 bp, Homo sapiens
  siRNA target sequence for LOC220032 (NM_182833.1,594-612).
gtgatggttatccttttct

SEQ ID NO: 435405 - DNA, 19 bp, Homo sapiens
  siRNA target sequence for LOC220032 (NM_182833.1,626-644).
ctacgtggcatgtttggaa

SEQ ID NO: 435406 - DNA, 19 bp, Homo sapiens
  siRNA target sequence for LOC220032 (NM_182833.1,694-712).
gactcaagcaatgtaatgt

SEQ ID NO: 435407 - DNA, 19 bp, Homo sapiens
  siRNA target sequence for LOC220032 (NM_182833.1,696-714).
ctcaagcaatgtaatgtaa

SEQ ID NO: 435408 - DNA, 19 bp, Homo sapiens
  siRNA target sequence for LOC220032 (NM_182833.1,836-854).
gcccaagccaaccatcttt

SEQ ID NO: 435409 - DNA, 19 bp, Homo sapiens
  siRNA target sequence for LOC220032 (NM_182833.1,930-948).
catggattggagactgata

SEQ ID NO: 435410 - DNA, 19 bp, Homo sapiens
  siRNA target sequence for LOC220032 (NM_182833.1,934-952).
gattggagactgatataca

SEQ ID NO: 435411 - DNA, 19 bp, Homo sapiens
  siRNA target sequence for LOC220032 (NM_182833.1,939-957).
gagactgatatacacttaa

SEQ ID NO: 435412 - DNA, 19 bp, Homo sapiens
  siRNA target sequence for LOC220032 (NM_182833.1,943-961).
ctgatatacacttaagtta

SEQ ID NO: 435413 - DNA, 19 bp, Homo sapiens
  siRNA target sequence for LOC220032 (NM_182833.1,984-1002).
catgactttgacctgaaaa

SEQ ID NO: 435414 - DNA, 19 bp, Homo sapiens
  siRNA target sequence for LOC220032 (NM_182833.1,1009-1027).
ccaatattggggaagttca

SEQ ID NO: 435415 - DNA, 19 bp, Homo sapiens
  siRNA target sequence for LOC220032 (NM_182833.1,1058-1076).
cttcaactgggatttccta

SEQ ID NO: 435416 - DNA, 19 bp, Homo sapiens
  siRNA target sequence for LOC220032 (NM_182833.1,1083-1101).
ctgaatgcaggcaaatggt

SEQ ID NO: 435417 - DNA, 19 bp, Homo sapiens
  siRNA target sequence for LOC220032 (NM_182833.1,1185-1203).
ccaacactagctgatttat

SEQ ID NO: 435418 - DNA, 19 bp, Homo sapiens
  siRNA target sequence for LOC220032 (NM_182833.1,1186-1204).
caacactagctgatttatt

SEQ ID NO: 435419 - DNA, 19 bp, Homo sapiens
  siRNA target sequence for LOC220032 (NM_182833.1,1282-1300).
catttgtccgccaagtagt

SEQ ID NO: 435420 - DNA, 19 bp, Homo sapiens
  siRNA target sequence for LOC220032 (NM_182833.1,1304-1322).
cgtgatccttgcctctaaa

SEQ ID NO: 435421 - DNA, 19 bp, Homo sapiens
  siRNA target sequence for LOC220032 (NM_182833.1,1318-1336).
ctaaaatcgagcaacatct

SEQ ID NO: 435422 - DNA, 19 bp, Homo sapiens
  siRNA target sequence for LOC220032 (NM_182833.1,1354-1372).
ctcatgataggcaatacgt

SEQ ID NO: 435423 - DNA, 19 bp, Homo sapiens
  siRNA target sequence for LOC220032 (NM_182833.1,1398-1416).
catgtgggccgtttagtat

SEQ ID NO: 435424 - DNA, 19 bp, Homo sapiens
  siRNA target sequence for LOC220032 (NM_182833.1,1403-1421).
gggccgtttagtatccatt

SEQ ID NO: 435425 - DNA, 19 bp, Homo sapiens
  siRNA target sequence for LOC220032 (NM_182833.1,1406-1424).
ccgtttagtatccattgaa

SEQ ID NO: 435426 - DNA, 19 bp, Homo sapiens
  siRNA target sequence for LOC220032 (NM_182833.1,1407-1425).
cgtttagtatccattgaaa

SEQ ID NO: 435427 - DNA, 19 bp, Homo sapiens
  siRNA target sequence for LOC220032 (NM_182833.1,1417-1435).
ccattgaaacccttgctaa

SEQ ID NO: 435428 - DNA, 19 bp, Homo sapiens
  siRNA target sequence for LOC220032 (NM_182833.1,1428-1446).
cttgctaaaaacaatatca

SEQ ID NO: 435429 - DNA, 19 bp, Homo sapiens
  siRNA target sequence for LOC220032 (NM_182833.1,1475-1493).
gttccctaatgggttaaga

SEQ ID NO: 435430 - DNA, 19 bp, Homo sapiens
  siRNA target sequence for LOC220032 (NM_182833.1,1478-1496).
ccctaatgggttaagagat

SEQ ID NO: 435431 - DNA, 19 bp, Homo sapiens
  siRNA target sequence for LOC220032 (NM_182833.1,1565-1583).
gtgctccaggattaactca

SEQ ID NO: 435432 - DNA, 19 bp, Homo sapiens
  siRNA target sequence for LOC220032 (NM_182833.1,1645-1663).
caaagttctatgtgttcat

SEQ ID NO: 435433 - DNA, 19 bp, Homo sapiens
  siRNA target sequence for LOC220032 (NM_182833.1,1724-1742).
gcggagagagactgaaaaa

SEQ ID NO: 435434 - DNA, 19 bp, Homo sapiens
  siRNA target sequence for LOC220032 (NM_182833.1,1763-1781).
cagcactcgcacagatact

SEQ ID NO: 435435 - DNA, 19 bp, Homo sapiens
  siRNA target sequence for LOC220032 (NM_182833.1,1765-1783).
gcactcgcacagatactca

SEQ ID NO: 435436 - DNA, 19 bp, Homo sapiens
  siRNA target sequence for SLIC1 (NM_182854.1,855-873).
ggagggccatcgctactat

SEQ ID NO: 435437 - DNA, 19 bp, Homo sapiens
  siRNA target sequence for DKFZp761H079 (NM_182896.1,330-348).
ggcgggagcctgtcagaaa

SEQ ID NO: 435438 - DNA, 19 bp, Homo sapiens
  siRNA target sequence for DKFZp761H079 (NM_182896.1,341-359).
gtcagaaaggtgactcttt

SEQ ID NO: 435439 - DNA, 19 bp, Homo sapiens
  siRNA target sequence for DKFZp761H079 (NM_182896.1,361-379).
gatggtgggacttgataat

SEQ ID NO: 435440 - DNA, 19 bp, Homo sapiens
  siRNA target sequence for DKFZp761H079 (NM_182896.1,463-481).
ccttagacaaggaaagttt

SEQ ID NO: 435441 - DNA, 19 bp, Homo sapiens
  siRNA target sequence for DKFZp761H079 (NM_182896.1,478-496).
gtttgaagtcaccatcttt

SEQ ID NO: 435442 - DNA, 19 bp, Homo sapiens
  siRNA target sequence for DKFZp761H079 (NM_182896.1,499-517).
cttgggaggtggaataaga

SEQ ID NO: 435443 - DNA, 19 bp, Homo sapiens
  siRNA target sequence for DKFZp761H079 (NM_182896.1,553-571).
ctatggggtaatatttgtt

SEQ ID NO: 435444 - DNA, 19 bp, Homo sapiens
  siRNA target sequence for DKFZp761H079 (NM_182896.1,604-622).
gacaaaagaggctatgtca

SEQ ID NO: 435445 - DNA, 19 bp, Homo sapiens
  siRNA target sequence for DKFZp761H079 (NM_182896.1,628-646).
gctaagacatcctaggata

SEQ ID NO: 435446 - DNA, 19 bp, Homo sapiens
  siRNA target sequence for DKFZp761H079 (NM_182896.1,629-647).
ctaagacatcctaggatat

SEQ ID NO: 435447 - DNA, 19 bp, Homo sapiens
  siRNA target sequence for C21orf69 (NM_182900.1,857-875).
ggaggaatgtggataacaa

SEQ ID NO: 435448 - DNA, 19 bp, Homo sapiens
  siRNA target sequence for C-P4H{alpha}(III) (NM_182904.2,227-245).
ctgcgggacctgactagat

SEQ ID NO: 435449 - DNA, 19 bp, Homo sapiens
  siRNA target sequence for C-P4H{alpha}(III) (NM_182904.2,230-248).
cgggacctgactagattct

SEQ ID NO: 435450 - DNA, 19 bp, Homo sapiens
  siRNA target sequence for C-P4H{alpha}(III) (NM_182904.2,231-249).
gggacctgactagattcta

SEQ ID NO: 435451 - DNA, 19 bp, Homo sapiens
  siRNA target sequence for C-P4H{alpha}(III) (NM_182904.2,247-265).
ctacgacaaggtactttct

SEQ ID NO: 435452 - DNA, 19 bp, Homo sapiens
  siRNA target sequence for C-P4H{alpha}(III) (NM_182904.2,343-361).
gaggaatgtggtacatagt

SEQ ID NO: 435453 - DNA, 19 bp, Homo sapiens
  siRNA target sequence for C-P4H{alpha}(III) (NM_182904.2,345-363).
ggaatgtggtacatagtct

SEQ ID NO: 435454 - DNA, 19 bp, Homo sapiens
  siRNA target sequence for C-P4H{alpha}(III) (NM_182904.2,479-497).
gtgtacatgctcaatgtga

SEQ ID NO: 435455 - DNA, 19 bp, Homo sapiens
  siRNA target sequence for C-P4H{alpha}(III) (NM_182904.2,481-499).
gtacatgctcaatgtgaaa

SEQ ID NO: 435456 - DNA, 19 bp, Homo sapiens
  siRNA target sequence for C-P4H{alpha}(III) (NM_182904.2,561-579).
ccaaacggctcttttctct

SEQ ID NO: 435457 - DNA, 19 bp, Homo sapiens
  siRNA target sequence for C-P4H{alpha}(III) (NM_182904.2,669-687).
gtctcttccgaggatctta

SEQ ID NO: 435458 - DNA, 19 bp, Homo sapiens
  siRNA target sequence for C-P4H{alpha}(III) (NM_182904.2,828-846).
ggatggccaggaatgtctt

SEQ ID NO: 435459 - DNA, 19 bp, Homo sapiens
  siRNA target sequence for C-P4H{alpha}(III) (NM_182904.2,834-852).
ccaggaatgtcttgaaata

SEQ ID NO: 435460 - DNA, 19 bp, Homo sapiens
  siRNA target sequence for C-P4H{alpha}(III) (NM_182904.2,942-960).
cctacgaggggctatgtca

SEQ ID NO: 435461 - DNA, 19 bp, Homo sapiens
  siRNA target sequence for C-P4H{alpha}(III) (NM_182904.2,1001-1019).
ctctactgttcctatgaga

SEQ ID NO: 435462 - DNA, 19 bp, Homo sapiens
  siRNA target sequence for C-P4H{alpha}(III) (NM_182904.2,1199-1217).
gagtaccgcatcagcaaaa

SEQ ID NO: 435463 - DNA, 19 bp, Homo sapiens
  siRNA target sequence for C-P4H{alpha}(III) (NM_182904.2,1201-1219).
gtaccgcatcagcaaaagt

SEQ ID NO: 435464 - DNA, 19 bp, Homo sapiens
  siRNA target sequence for C-P4H{alpha}(III) (NM_182904.2,1278-1296).
ccctcacaggccttgatgt

SEQ ID NO: 435465 - DNA, 19 bp, Homo sapiens
  siRNA target sequence for C-P4H{alpha}(III) (NM_182904.2,1300-1318).
gcctccctatgcagagtat

SEQ ID NO: 435466 - DNA, 19 bp, Homo sapiens
  siRNA target sequence for C-P4H{alpha}(III) (NM_182904.2,1391-1409).
cccctctacagaatgaagt

SEQ ID NO: 435467 - DNA, 19 bp, Homo sapiens
  siRNA target sequence for C-P4H{alpha}(III) (NM_182904.2,1413-1431).
gaaaccgagttgcaacatt

SEQ ID NO: 435468 - DNA, 19 bp, Homo sapiens
  siRNA target sequence for C-P4H{alpha}(III) (NM_182904.2,1418-1436).
cgagttgcaacatttatga

SEQ ID NO: 435469 - DNA, 19 bp, Homo sapiens
  siRNA target sequence for C-P4H{alpha}(III) (NM_182904.2,1419-1437).
gagttgcaacatttatgat

SEQ ID NO: 435470 - DNA, 19 bp, Homo sapiens
  siRNA target sequence for C-P4H{alpha}(III) (NM_182904.2,1494-1512).
gcgtgcctgtggttaggaa

SEQ ID NO: 435471 - DNA, 19 bp, Homo sapiens
  siRNA target sequence for C-P4H{alpha}(III) (NM_182904.2,1495-1513).
cgtgcctgtggttaggaat

SEQ ID NO: 435472 - DNA, 19 bp, Homo sapiens
  siRNA target sequence for C-P4H{alpha}(III) (NM_182904.2,1609-1627).
ggccaacaagtggatacat

SEQ ID NO: 435473 - DNA, 19 bp, Homo sapiens
  siRNA target sequence for C-P4H{alpha}(III) (NM_182904.2,1611-1629).
ccaacaagtggatacatga

SEQ ID NO: 435474 - DNA, 19 bp, Homo sapiens
  siRNA target sequence for SYNE2 (NM_182910.1,1493-1511).
gcgctctgatgtgttgttt

SEQ ID NO: 435475 - DNA, 19 bp, Homo sapiens
  siRNA target sequence for SYNE2 (NM_182913.1,314-332).
cagcgcactgtcagatgta

SEQ ID NO: 435476 - DNA, 19 bp, Homo sapiens
  siRNA target sequence for SYNE2 (NM_182913.1,348-366).
cctgaggcatatcttaaaa

SEQ ID NO: 435477 - DNA, 19 bp, Homo sapiens
  siRNA target sequence for SYNE2 (NM_182913.1,349-367).
ctgaggcatatcttaaaat

SEQ ID NO: 435478 - DNA, 19 bp, Homo sapiens
  siRNA target sequence for SYNE2 (NM_182913.1,383-401).
gaaagcgtcttctggtaaa

SEQ ID NO: 435479 - DNA, 19 bp, Homo sapiens
  siRNA target sequence for SYNE2 (NM_182913.1,387-405).
gcgtcttctggtaaatcca

SEQ ID NO: 435480 - DNA, 19 bp, Homo sapiens
  siRNA target sequence for SYNE2 (NM_182913.1,388-406).
cgtcttctggtaaatccat

SEQ ID NO: 435481 - DNA, 19 bp, Homo sapiens
  siRNA target sequence for SYNE2 (NM_182913.1,389-407).
gtcttctggtaaatccatt

SEQ ID NO: 435482 - DNA, 19 bp, Homo sapiens
  siRNA target sequence for SYNE2 (NM_182914.1,948-966).
ggattccaagtgttttaga

SEQ ID NO: 435483 - DNA, 19 bp, Homo sapiens
  siRNA target sequence for SYNE2 (NM_182914.1,968-986).
gtggaccaagaccaaatat

SEQ ID NO: 435484 - DNA, 19 bp, Homo sapiens
  siRNA target sequence for SYNE2 (NM_182914.1,974-992).
caagaccaaatatttatgt

SEQ ID NO: 435485 - DNA, 19 bp, Homo sapiens
  siRNA target sequence for FLJ23471 (NM_182924.1,267-285).
cccgacctcataaacttca

SEQ ID NO: 435486 - DNA, 19 bp, Homo sapiens
  siRNA target sequence for FLJ23471 (NM_182924.1,405-423).
gaccggctgagcatcttga

SEQ ID NO: 435487 - DNA, 19 bp, Homo sapiens
  siRNA target sequence for FLJ23471 (NM_182924.1,575-593).
ccggaagcctccactatct

SEQ ID NO: 435488 - DNA, 19 bp, Homo sapiens
  siRNA target sequence for GEFT (NM_182947.1,498-516).
cccgtgtgatccgaaaagt

SEQ ID NO: 435489 - DNA, 19 bp, Homo sapiens
  siRNA target sequence for GEFT (NM_182947.1,509-527).
cgaaaagtgctggcaaaat

SEQ ID NO: 435490 - DNA, 19 bp, Homo sapiens
  siRNA target sequence for GEFT (NM_182947.1,551-569).
ggacgtgaatcctattcca

SEQ ID NO: 435491 - DNA, 19 bp, Homo sapiens
  siRNA target sequence for GEFT (NM_182947.1,552-570).
gacgtgaatcctattccat

SEQ ID NO: 435492 - DNA, 19 bp, Homo sapiens
  siRNA target sequence for GEFT (NM_182947.1,706-724).
ggatcattccaaacattgt

SEQ ID NO: 435493 - DNA, 19 bp, Homo sapiens
  siRNA target sequence for MGC21644 (NM_182960.1,132-150).
cccaaccccatggataaaa

SEQ ID NO: 435494 - DNA, 19 bp, Homo sapiens
  siRNA target sequence for MGC21644 (NM_182960.1,133-151).
ccaaccccatggataaaaa

SEQ ID NO: 435495 - DNA, 19 bp, Homo sapiens
  siRNA target sequence for MGC21644 (NM_182960.1,269-287).
cactctggtgattctttgt

SEQ ID NO: 435496 - DNA, 19 bp, Homo sapiens
  siRNA target sequence for RIMS4 (NM_182970.2,223-241).
ggctcagagggcaacctta

SEQ ID NO: 435497 - DNA, 19 bp, Homo sapiens
  siRNA target sequence for RIMS4 (NM_182970.2,224-242).
gctcagagggcaaccttaa

SEQ ID NO: 435498 - DNA, 19 bp, Homo sapiens
  siRNA target sequence for RIMS4 (NM_182970.2,465-483).
ggcctacctgctagagaat

SEQ ID NO: 435499 - DNA, 19 bp, Homo sapiens
  siRNA target sequence for RIMS4 (NM_182970.2,525-543).
gtcgctggacccactgtat

SEQ ID NO: 435500 - DNA, 19 bp, Homo sapiens
  siRNA target sequence for RIMS4 (NM_182970.2,527-545).
cgctggacccactgtataa

SEQ ID NO: 435501 - DNA, 19 bp, Homo sapiens
  siRNA target sequence for COX8-3 (NM_182971.1,217-235).
ggacttgtggtgtttttta

SEQ ID NO: 435502 - DNA, 19 bp, Homo sapiens
  siRNA target sequence for COX8-3 (NM_182971.1,228-246).
gttttttacgaccttctta

SEQ ID NO: 435503 - DNA, 19 bp, Homo sapiens
  siRNA target sequence for COX8-3 (NM_182971.1,243-261).
cttaacaccagctgcatat

SEQ ID NO: 435504 - DNA, 19 bp, Homo sapiens
  siRNA target sequence for IRF2BP2 (NM_182972.1,1060-1078).
ggccaacgggtctaaagca

SEQ ID NO: 435505 - DNA, 19 bp, Homo sapiens
  siRNA target sequence for IRF2BP2 (NM_182972.1,1315-1333).
gatcttagtagcagacaat

SEQ ID NO: 435506 - DNA, 19 bp, Homo sapiens
  siRNA target sequence for IRF2BP2 (NM_182972.1,1339-1357).
gggcagtcatgcctcaaaa

SEQ ID NO: 435507 - DNA, 19 bp, Homo sapiens
  siRNA target sequence for IRF2BP2 (NM_182972.1,1412-1430).
ccgtcctctatgaaccaaa

SEQ ID NO: 435508 - DNA, 19 bp, Homo sapiens
  siRNA target sequence for IRF2BP2 (NM_182972.1,1599-1617).
ccgtcccttcgcacaagtt

SEQ ID NO: 435509 - DNA, 19 bp, Homo sapiens
  siRNA target sequence for IRF2BP2 (NM_182972.1,1630-1648).
ctccagacaaagcatcaaa

SEQ ID NO: 435510 - DNA, 19 bp, Homo sapiens
  siRNA target sequence for IRF2BP2 (NM_182972.1,1632-1650).
ccagacaaagcatcaaaca

SEQ ID NO: 435511 - DNA, 19 bp, Homo sapiens
  siRNA target sequence for LOC360200 (NM_182973.1,221-239).
gggagacctcggactatca

SEQ ID NO: 435512 - DNA, 19 bp, Homo sapiens
  siRNA target sequence for LOC360200 (NM_182973.1,375-393).
ggctgcctatggcacaatt

SEQ ID NO: 435513 - DNA, 19 bp, Homo sapiens
  siRNA target sequence for LOC360200 (NM_182973.1,377-395).
ctgcctatggcacaattgt

SEQ ID NO: 435514 - DNA, 19 bp, Homo sapiens
  siRNA target sequence for LOC360200 (NM_182973.1,379-397).
gcctatggcacaattgtgt

SEQ ID NO: 435515 - DNA, 19 bp, Homo sapiens
  siRNA target sequence for LOC360200 (NM_182973.1,724-742).
gctcactgcttcaatgagt

SEQ ID NO: 435516 - DNA, 19 bp, Homo sapiens
  siRNA target sequence for LOC360200 (NM_182973.1,857-875).
cggacacggccgactttga

SEQ ID NO: 435517 - DNA, 19 bp, Homo sapiens
  siRNA target sequence for LOC360200 (NM_182973.1,1079-1097).
gcttgtacggccattcact

SEQ ID NO: 435518 - DNA, 19 bp, Homo sapiens
  siRNA target sequence for LOC360200 (NM_182973.1,1400-1418).
gcacccccaccaaatcgat

SEQ ID NO: 435519 - DNA, 19 bp, Homo sapiens
  siRNA target sequence for LOC360200 (NM_182973.1,1449-1467).
ggtcaccgttcctaagcta

SEQ ID NO: 435520 - DNA, 19 bp, Homo sapiens
  siRNA target sequence for LOC360200 (NM_182973.1,1454-1472).
ccgttcctaagctacaaga

SEQ ID NO: 435521 - DNA, 19 bp, Homo sapiens
  siRNA target sequence for LOC360200 (NM_182973.1,1841-1859).
ccctggccatccagaagtt

SEQ ID NO: 435522 - DNA, 19 bp, Homo sapiens
  siRNA target sequence for LOC360200 (NM_182973.1,1941-1959).
ggcgtccgtgggcatcata

SEQ ID NO: 435523 - DNA, 19 bp, Homo sapiens
  siRNA target sequence for LOC360200 (NM_182973.1,1943-1961).
cgtccgtgggcatcataga

SEQ ID NO: 435524 - DNA, 19 bp, Homo sapiens
  siRNA target sequence for LOC360200 (NM_182973.1,1951-1969).
ggcatcatagaccagaaaa

SEQ ID NO: 435525 - DNA, 19 bp, Homo sapiens
  siRNA target sequence for LOC360200 (NM_182973.1,1973-1991).
gtagtgtgctctacaactt

SEQ ID NO: 435526 - DNA, 19 bp, Homo sapiens
  siRNA target sequence for LOC360200 (NM_182973.1,2085-2103).
ggcccctggcgtgttttat

SEQ ID NO: 435527 - DNA, 19 bp, Homo sapiens
  siRNA target sequence for LOC360200 (NM_182973.1,2087-2105).
cccctggcgtgttttatct

SEQ ID NO: 435528 - DNA, 19 bp, Homo sapiens
  siRNA target sequence for LOC360200 (NM_182973.1,2350-2368).
cctgccaactcaaccttat

SEQ ID NO: 435529 - DNA, 19 bp, Homo sapiens
  siRNA target sequence for LOC360200 (NM_182973.1,2391-2409).
gggacagacgccatttcca

SEQ ID NO: 435530 - DNA, 19 bp, Homo sapiens
  siRNA target sequence for GLTDC1 (NM_182974.1,373-391).
gaaaacgccctgatgttat

SEQ ID NO: 435531 - DNA, 19 bp, Homo sapiens
  siRNA target sequence for GLTDC1 (NM_182974.1,378-396).
cgccctgatgttataacga

SEQ ID NO: 435532 - DNA, 19 bp, Homo sapiens
  siRNA target sequence for GLTDC1 (NM_182974.1,379-397).
gccctgatgttataacgaa

SEQ ID NO: 435533 - DNA, 19 bp, Homo sapiens
  siRNA target sequence for GLTDC1 (NM_182974.1,380-398).
ccctgatgttataacgaaa

SEQ ID NO: 435534 - DNA, 19 bp, Homo sapiens
  siRNA target sequence for GLTDC1 (NM_182974.1,464-482).
cagaaggcggaatatcact

SEQ ID NO: 435535 - DNA, 19 bp, Homo sapiens
  siRNA target sequence for GLTDC1 (NM_182974.1,547-565).
ccgcaaataagcacttcat

SEQ ID NO: 435536 - DNA, 19 bp, Homo sapiens
  siRNA target sequence for GLTDC1 (NM_182974.1,570-588).
ggctaccgagtgatcttct

SEQ ID NO: 435537 - DNA, 19 bp, Homo sapiens
  siRNA target sequence for GLTDC1 (NM_182974.1,571-589).
gctaccgagtgatcttcta

SEQ ID NO: 435538 - DNA, 19 bp, Homo sapiens
  siRNA target sequence for GLTDC1 (NM_182974.1,576-594).
cgagtgatcttctacatca

SEQ ID NO: 435539 - DNA, 19 bp, Homo sapiens
  siRNA target sequence for GLTDC1 (NM_182974.1,577-595).
gagtgatcttctacatcat

SEQ ID NO: 435540 - DNA, 19 bp, Homo sapiens
  siRNA target sequence for GLTDC1 (NM_182974.1,642-660).
cgaacgttcaaagcattta

SEQ ID NO: 435541 - DNA, 19 bp, Homo sapiens
  siRNA target sequence for GLTDC1 (NM_182974.1,643-661).
gaacgttcaaagcatttaa

SEQ ID NO: 435542 - DNA, 19 bp, Homo sapiens
  siRNA target sequence for GLTDC1 (NM_182974.1,910-928).
cgtttggacagggagattt

SEQ ID NO: 435543 - DNA, 19 bp, Homo sapiens
  siRNA target sequence for GLTDC1 (NM_182974.1,916-934).
gacagggagatttctatta

SEQ ID NO: 435544 - DNA, 19 bp, Homo sapiens
  siRNA target sequence for GLTDC1 (NM_182974.1,951-969).
ggtggcacaccccataata

SEQ ID NO: 435545 - DNA, 19 bp, Homo sapiens
  siRNA target sequence for GLTDC1 (NM_182974.1,960-978).
ccccataatattttagact

SEQ ID NO: 435546 - DNA, 19 bp, Homo sapiens
  siRNA target sequence for GLTDC1 (NM_182974.1,1013-1031).
catcaaaaatggactcaat

SEQ ID NO: 435547 - DNA, 19 bp, Homo sapiens
  siRNA target sequence for GLTDC1 (NM_182974.1,1024-1042).
gactcaatagcacttatga

SEQ ID NO: 435548 - DNA, 19 bp, Homo sapiens
  siRNA target sequence for GLTDC1 (NM_182974.1,1126-1144).
ctcctccacagatccaata

SEQ ID NO: 435549 - DNA, 19 bp, Homo sapiens
  siRNA target sequence for GLTDC1 (NM_182974.1,1129-1147).
ctccacagatccaatacgt

SEQ ID NO: 435550 - DNA, 19 bp, Homo sapiens
  siRNA target sequence for GLTDC1 (NM_182974.1,1145-1163).
cgtcaaggtcgcacatgat

SEQ ID NO: 435551 - DNA, 19 bp, Homo sapiens
  siRNA target sequence for GLTDC1 (NM_182974.1,1146-1164).
gtcaaggtcgcacatgatt

SEQ ID NO: 435552 - DNA, 19 bp, Homo sapiens
  siRNA target sequence for GLTDC1 (NM_182974.1,1161-1179).
gattcccagaggaaattat

SEQ ID NO: 435553 - DNA, 19 bp, Homo sapiens
  siRNA target sequence for FLJ20403 (NM_182975.1,140-158).
gacttcgaggacgattaca

SEQ ID NO: 435554 - DNA, 19 bp, Homo sapiens
  siRNA target sequence for FLJ20403 (NM_182975.1,142-160).
cttcgaggacgattacaca

SEQ ID NO: 435555 - DNA, 19 bp, Homo sapiens
  siRNA target sequence for FLJ20403 (NM_182975.1,161-179).
cactccgcctgcaggaata

SEQ ID NO: 435556 - DNA, 19 bp, Homo sapiens
  siRNA target sequence for FLJ20403 (NM_182975.1,166-184).
cgcctgcaggaatacttat

SEQ ID NO: 435557 - DNA, 19 bp, Homo sapiens
  siRNA target sequence for FLJ20403 (NM_182975.1,168-186).
cctgcaggaatacttatca

SEQ ID NO: 435558 - DNA, 19 bp, Homo sapiens
  siRNA target sequence for FLJ20403 (NM_182975.1,288-306).
cctacctaaaccagtcata

SEQ ID NO: 435559 - DNA, 19 bp, Homo sapiens
  siRNA target sequence for FLJ20403 (NM_182975.1,289-307).
ctacctaaaccagtcatat

SEQ ID NO: 435560 - DNA, 19 bp, Homo sapiens
  siRNA target sequence for FLJ20403 (NM_182975.1,303-321).
catatggcatggacaatca

SEQ ID NO: 435561 - DNA, 19 bp, Homo sapiens
  siRNA target sequence for FLJ20403 (NM_182976.1,343-361).
gcaggtttggaccttatga

SEQ ID NO: 435562 - DNA, 19 bp, Homo sapiens
  siRNA target sequence for FLJ20403 (NM_182976.1,390-408).
gggcgagatctgtacagat

SEQ ID NO: 435563 - DNA, 19 bp, Homo sapiens
  siRNA target sequence for FLJ20403 (NM_182976.1,440-458).
ccgcttcggaggtagttat

SEQ ID NO: 435564 - DNA, 19 bp, Homo sapiens
  siRNA target sequence for FLJ20403 (NM_182976.1,454-472).
gttatggtggtcgatttga

SEQ ID NO: 435565 - DNA, 19 bp, Homo sapiens
  siRNA target sequence for FLJ20403 (NM_182976.1,484-502).
ggaatagccttgactcttt

SEQ ID NO: 435566 - DNA, 19 bp, Homo sapiens
  siRNA target sequence for FLJ20403 (NM_182976.1,538-556).
caccttactcccgttcaaa

SEQ ID NO: 435567 - DNA, 19 bp, Homo sapiens
  siRNA target sequence for FLJ20403 (NM_182976.1,540-558).
ccttactcccgttcaaaat

SEQ ID NO: 435568 - DNA, 19 bp, Homo sapiens
  siRNA target sequence for FLJ20403 (NM_182976.1,541-559).
cttactcccgttcaaaatt

SEQ ID NO: 435569 - DNA, 19 bp, Homo sapiens
  siRNA target sequence for FLJ20403 (NM_182976.1,668-686).
gcctgcttatcctgaaagt

SEQ ID NO: 435570 - DNA, 19 bp, Homo sapiens
  siRNA target sequence for FLJ20403 (NM_182976.1,678-696).
cctgaaagtacgtttggaa

SEQ ID NO: 435571 - DNA, 19 bp, Homo sapiens
  siRNA target sequence for FLJ20403 (NM_182976.1,739-757).
gccgaggccgaggacatat

SEQ ID NO: 435572 - DNA, 19 bp, Homo sapiens
  siRNA target sequence for DTNBP1 (NM_183040.1,977-995).
ccttaggtagggttgacaa

SEQ ID NO: 435573 - DNA, 19 bp, Homo sapiens
  siRNA target sequence for DTNBP1 (NM_183040.1,978-996).
cttaggtagggttgacaaa

SEQ ID NO: 435574 - DNA, 19 bp, Homo sapiens
  siRNA target sequence for DTNBP1 (NM_183040.1,986-1004).
gggttgacaaacttgcatt

SEQ ID NO: 435575 - DNA, 19 bp, Homo sapiens
  siRNA target sequence for DTNBP1 (NM_183040.1,987-1005).
ggttgacaaacttgcatta

SEQ ID NO: 435576 - DNA, 19 bp, Homo sapiens
  siRNA target sequence for DTNBP1 (NM_183040.1,1009-1027).
gaaccagggcagtatcgat

SEQ ID NO: 435577 - DNA, 19 bp, Homo sapiens
  siRNA target sequence for C1orf36 (NM_183059.1,1304-1322).
gcagcaatgcggtcagaaa

SEQ ID NO: 435578 - DNA, 19 bp, Homo sapiens
  siRNA target sequence for C1orf36 (NM_183059.1,1425-1443).
gatccacccatcctattgt

SEQ ID NO: 435579 - DNA, 19 bp, Homo sapiens
  siRNA target sequence for MPN2 (NM_183062.2,260-278).
gctccatcctcaatgagta

SEQ ID NO: 435580 - DNA, 19 bp, Homo sapiens
  siRNA target sequence for MPN2 (NM_183062.2,303-321).
ctttcacagggacaagaat

SEQ ID NO: 435581 - DNA, 19 bp, Homo sapiens
  siRNA target sequence for MPN2 (NM_183062.2,307-325).
cacagggacaagaatatca

SEQ ID NO: 435582 - DNA, 19 bp, Homo sapiens
  siRNA target sequence for MPN2 (NM_183062.2,405-423).
gatcctgcaccccacatat

SEQ ID NO: 435583 - DNA, 19 bp, Homo sapiens
  siRNA target sequence for MPN2 (NM_183062.2,409-427).
ctgcaccccacatatgaga

SEQ ID NO: 435584 - DNA, 19 bp, Homo sapiens
  siRNA target sequence for MPN2 (NM_183062.2,468-486).
gaagacccgcattgtgttt

SEQ ID NO: 435585 - DNA, 19 bp, Homo sapiens
  siRNA target sequence for MPN2 (NM_183062.2,532-550).
cttaccagtgccaattgct

SEQ ID NO: 435586 - DNA, 19 bp, Homo sapiens
  siRNA target sequence for MPN2 (NM_183062.2,560-578).
gatggggactagtctcaaa

SEQ ID NO: 435587 - DNA, 19 bp, Homo sapiens
  siRNA target sequence for MPN2 (NM_183062.2,563-581).
ggggactagtctcaaaaca

SEQ ID NO: 435588 - DNA, 19 bp, Homo sapiens
  siRNA target sequence for MPN2 (NM_183062.2,837-855).
cagtgtttcctatttctca

SEQ ID NO: 435589 - DNA, 19 bp, Homo sapiens
  siRNA target sequence for MPN2 (NM_183062.2,846-864).
ctatttctcaaaatggata

SEQ ID NO: 435590 - DNA, 19 bp, Homo sapiens
  siRNA target sequence for MPN2 (NM_183062.2,852-870).
ctcaaaatggatatgtgat

SEQ ID NO: 435591 - DNA, 19 bp, Homo sapiens
  siRNA target sequence for MPN2 (NM_183062.2,860-878).
ggatatgtgataacataga

SEQ ID NO: 435592 - DNA, 19 bp, Homo sapiens
  siRNA target sequence for LOC113612 (NM_183075.1,376-394).
gtgtacggcagcatcttca

SEQ ID NO: 435593 - DNA, 19 bp, Homo sapiens
  siRNA target sequence for LOC113612 (NM_183075.1,553-571).
cccgtctggagacaacaaa

SEQ ID NO: 435594 - DNA, 19 bp, Homo sapiens
  siRNA target sequence for LOC113612 (NM_183075.1,620-638).
gcttggagcccaagattat

SEQ ID NO: 435595 - DNA, 19 bp, Homo sapiens
  siRNA target sequence for LOC113612 (NM_183075.1,640-658).
gaggagttcaaatatgtga

SEQ ID NO: 435596 - DNA, 19 bp, Homo sapiens
  siRNA target sequence for LOC113612 (NM_183075.1,713-731).
gcaatgccgtctctaacat

SEQ ID NO: 435597 - DNA, 19 bp, Homo sapiens
  siRNA target sequence for LOC113612 (NM_183075.1,718-736).
gccgtctctaacatcattt

SEQ ID NO: 435598 - DNA, 19 bp, Homo sapiens
  siRNA target sequence for LOC113612 (NM_183075.1,721-739).
gtctctaacatcatttgct

SEQ ID NO: 435599 - DNA, 19 bp, Homo sapiens
  siRNA target sequence for LOC113612 (NM_183075.1,751-769).
ggccagcgctttgattaca

SEQ ID NO: 435600 - DNA, 19 bp, Homo sapiens
  siRNA target sequence for LOC113612 (NM_183075.1,753-771).
ccagcgctttgattacact

SEQ ID NO: 435601 - DNA, 19 bp, Homo sapiens
  siRNA target sequence for LOC113612 (NM_183075.1,754-772).
cagcgctttgattacacta

SEQ ID NO: 435602 - DNA, 19 bp, Homo sapiens
  siRNA target sequence for LOC113612 (NM_183075.1,756-774).
gcgctttgattacactaat

SEQ ID NO: 435603 - DNA, 19 bp, Homo sapiens
  siRNA target sequence for LOC113612 (NM_183075.1,757-775).
cgctttgattacactaata

SEQ ID NO: 435604 - DNA, 19 bp, Homo sapiens
  siRNA target sequence for LOC113612 (NM_183075.1,770-788).
ctaatagtgagttcaagaa

SEQ ID NO: 435605 - DNA, 19 bp, Homo sapiens
  siRNA target sequence for LOC113612 (NM_183075.1,852-870).
catatgcccttggctttat

SEQ ID NO: 435606 - DNA, 19 bp, Homo sapiens
  siRNA target sequence for LOC113612 (NM_183075.1,874-892).
cttccctttggaccattta

SEQ ID NO: 435607 - DNA, 19 bp, Homo sapiens
  siRNA target sequence for LOC113612 (NM_183075.1,878-896).
cctttggaccatttaagga

SEQ ID NO: 435608 - DNA, 19 bp, Homo sapiens
  siRNA target sequence for LOC113612 (NM_183075.1,879-897).
ctttggaccatttaaggaa

SEQ ID NO: 435609 - DNA, 19 bp, Homo sapiens
  siRNA target sequence for LOC113612 (NM_183075.1,883-901).
ggaccatttaaggaattaa

SEQ ID NO: 435610 - DNA, 19 bp, Homo sapiens
  siRNA target sequence for LOC113612 (NM_183075.1,916-934).
gatataaccagtttcctta

SEQ ID NO: 435611 - DNA, 19 bp, Homo sapiens
  siRNA target sequence for LOC113612 (NM_183075.1,1037-1055).
gtaacagcagttttgatga

SEQ ID NO: 435612 - DNA, 19 bp, Homo sapiens
  siRNA target sequence for LOC113612 (NM_183075.1,1102-1120).
gataccacaactaactctt

SEQ ID NO: 435613 - DNA, 19 bp, Homo sapiens
  siRNA target sequence for LOC113612 (NM_183075.1,1145-1163).
cgctgaaccccgatgtaca

SEQ ID NO: 435614 - DNA, 19 bp, Homo sapiens
  siRNA target sequence for LOC113612 (NM_183075.1,1146-1164).
gctgaaccccgatgtacaa

SEQ ID NO: 435615 - DNA, 19 bp, Homo sapiens
  siRNA target sequence for LOC113612 (NM_183075.1,1149-1167).
gaaccccgatgtacaagaa

SEQ ID NO: 435616 - DNA, 19 bp, Homo sapiens
  siRNA target sequence for LOC113612 (NM_183075.1,1155-1173).
cgatgtacaagaaaaggtt

SEQ ID NO: 435617 - DNA, 19 bp, Homo sapiens
  siRNA target sequence for LOC113612 (NM_183075.1,1292-1310).
cgcttgccattcctcatat

SEQ ID NO: 435618 - DNA, 19 bp, Homo sapiens
  siRNA target sequence for LOC113612 (NM_183075.1,1327-1345).
gtgctccaagggtatacca

SEQ ID NO: 435619 - DNA, 19 bp, Homo sapiens
  siRNA target sequence for LOC113612 (NM_183075.1,1329-1347).
gctccaagggtataccatt

SEQ ID NO: 435620 - DNA, 19 bp, Homo sapiens
  siRNA target sequence for LOC113612 (NM_183075.1,1419-1437).
ggatttctaccctaatcga

SEQ ID NO: 435621 - DNA, 19 bp, Homo sapiens
  siRNA target sequence for LOC113612 (NM_183075.1,1420-1438).
gatttctaccctaatcgat

SEQ ID NO: 435622 - DNA, 19 bp, Homo sapiens
  siRNA target sequence for LOC113612 (NM_183075.1,1444-1462).
gatgaccaaggacaactaa

SEQ ID NO: 435623 - DNA, 19 bp, Homo sapiens
  siRNA target sequence for LOC113612 (NM_183075.1,1522-1540).
ctggcaaagatggaattat

SEQ ID NO: 435624 - DNA, 19 bp, Homo sapiens
  siRNA target sequence for LOC113612 (NM_183075.1,1564-1582).
cagagtttcgcatttgctt

SEQ ID NO: 435625 - DNA, 19 bp, Homo sapiens
  siRNA target sequence for LOC113612 (NM_183075.1,1566-1584).
gagtttcgcatttgcttta

SEQ ID NO: 435626 - DNA, 19 bp, Homo sapiens
  siRNA target sequence for LOC113612 (NM_183075.1,1579-1597).
gctttacctgaggattcta

SEQ ID NO: 435627 - DNA, 19 bp, Homo sapiens
  siRNA target sequence for LOC113612 (NM_183075.1,1580-1598).
ctttacctgaggattctaa

SEQ ID NO: 435628 - DNA, 19 bp, Homo sapiens
  siRNA target sequence for LOC113612 (NM_183075.1,1608-1626).
cctgactggaagatttggt

SEQ ID NO: 435629 - DNA, 19 bp, Homo sapiens
  siRNA target sequence for LOC113612 (NM_183075.1,1615-1633).
ggaagatttggtctaactt

SEQ ID NO: 435630 - DNA, 19 bp, Homo sapiens
  siRNA target sequence for LOC113612 (NM_183075.1,1616-1634).
gaagatttggtctaacttt

SEQ ID NO: 435631 - DNA, 19 bp, Homo sapiens
  siRNA target sequence for LOC113612 (NM_183075.1,1636-1654).
gccccacatccatttaata

SEQ ID NO: 435632 - DNA, 19 bp, Homo sapiens
  siRNA target sequence for LOC113612 (NM_183075.1,1637-1655).
ccccacatccatttaatat

SEQ ID NO: 435633 - DNA, 19 bp, Homo sapiens
  siRNA target sequence for LOC113612 (NM_183075.1,1639-1657).
ccacatccatttaatataa

SEQ ID NO: 435634 - DNA, 19 bp, Homo sapiens
  siRNA target sequence for PR1 (NM_183240.1,56-74).
ggtccttctttgaatcctt

SEQ ID NO: 435635 - DNA, 19 bp, Homo sapiens
  siRNA target sequence for PR1 (NM_183240.1,120-138).
gtcctcggtctccatttgt

SEQ ID NO: 435636 - DNA, 19 bp, Homo sapiens
  siRNA target sequence for PR1 (NM_183240.1,122-140).
cctcggtctccatttgtga

SEQ ID NO: 435637 - DNA, 19 bp, Homo sapiens
  siRNA target sequence for PR1 (NM_183240.1,123-141).
ctcggtctccatttgtgat

SEQ ID NO: 435638 - DNA, 19 bp, Homo sapiens
  siRNA target sequence for PR1 (NM_183240.1,474-492).
cggcttcaccctaatgttt

SEQ ID NO: 435639 - DNA, 19 bp, Homo sapiens
  siRNA target sequence for PR1 (NM_183240.1,475-493).
ggcttcaccctaatgtttt

SEQ ID NO: 435640 - DNA, 19 bp, Homo sapiens
  siRNA target sequence for PR1 (NM_183240.1,489-507).
gttttggtgcgaattcact

SEQ ID NO: 435641 - DNA, 19 bp, Homo sapiens
  siRNA target sequence for LOC286257 (NM_183241.1,568-586).
caggagagtcgctcatcaa

SEQ ID NO: 435642 - DNA, 19 bp, Homo sapiens
  siRNA target sequence for LOC286257 (NM_183241.1,590-608).
cgggttcaagagtaagaaa

SEQ ID NO: 435643 - DNA, 19 bp, Homo sapiens
  siRNA target sequence for LOC284697 (NM_183242.1,430-448).
gtgggttgtactttgttca

SEQ ID NO: 435644 - DNA, 19 bp, Homo sapiens
  siRNA target sequence for LOC284697 (NM_183242.1,484-502).
gacttctattttcatacta

SEQ ID NO: 435645 - DNA, 19 bp, Homo sapiens
  siRNA target sequence for LOC284697 (NM_183242.1,500-518).
ctattggacagacatcaaa

SEQ ID NO: 435646 - DNA, 19 bp, Homo sapiens
  siRNA target sequence for LOC284697 (NM_183242.1,586-604).
cagattatatattcatcaa

SEQ ID NO: 435647 - DNA, 19 bp, Homo sapiens
  siRNA target sequence for LOC284697 (NM_183242.1,679-697).
cttgacatcagttttccaa

SEQ ID NO: 435648 - DNA, 19 bp, Homo sapiens
  siRNA target sequence for LOC284697 (NM_183242.1,699-717).
gtgtgaaaactcatctgat

SEQ ID NO: 435649 - DNA, 19 bp, Homo sapiens
  siRNA target sequence for LOC284697 (NM_183242.1,703-721).
gaaaactcatctgattgtt

SEQ ID NO: 435650 - DNA, 19 bp, Homo sapiens
  siRNA target sequence for LOC284697 (NM_183242.1,769-787).
gatttcatttccaatgata

SEQ ID NO: 435651 - DNA, 19 bp, Homo sapiens
  siRNA target sequence for LOC284697 (NM_183242.1,912-930).
gagtgccagatctagttat

SEQ ID NO: 435652 - DNA, 19 bp, Homo sapiens
  siRNA target sequence for LOC284697 (NM_183242.1,914-932).
gtgccagatctagttattt

SEQ ID NO: 435653 - DNA, 19 bp, Homo sapiens
  siRNA target sequence for LOC284697 (NM_183242.1,918-936).
cagatctagttattttgct

SEQ ID NO: 435654 - DNA, 19 bp, Homo sapiens
  siRNA target sequence for LOC284697 (NM_183242.1,968-986).
cccaagagtacgttactct

SEQ ID NO: 435655 - DNA, 19 bp, Homo sapiens
  siRNA target sequence for LOC284697 (NM_183242.1,969-987).
ccaagagtacgttactctt

SEQ ID NO: 435656 - DNA, 19 bp, Homo sapiens
  siRNA target sequence for LOC284697 (NM_183242.1,979-997).
gttactcttcaaggtataa

SEQ ID NO: 435657 - DNA, 19 bp, Homo sapiens
  siRNA target sequence for LOC284697 (NM_183242.1,992-1010).
gtataagccatgtagaact

SEQ ID NO: 435658 - DNA, 19 bp, Homo sapiens
  siRNA target sequence for LOC284697 (NM_183242.1,1069-1087).
gttggtcagatactcaata

SEQ ID NO: 435659 - DNA, 19 bp, Homo sapiens
  siRNA target sequence for LOC284697 (NM_183242.1,1112-1130).
gattaaaagaagtagcaat

SEQ ID NO: 435660 - DNA, 19 bp, Homo sapiens
  siRNA target sequence for LOC284697 (NM_183242.1,1145-1163).
gagattactgtaatttctt

SEQ ID NO: 435661 - DNA, 19 bp, Homo sapiens
  siRNA target sequence for LOC284697 (NM_183242.1,1181-1199).
gaacattgacgtctatact

SEQ ID NO: 435662 - DNA, 19 bp, Homo sapiens
  siRNA target sequence for LOC284697 (NM_183242.1,1184-1202).
cattgacgtctatactaga

SEQ ID NO: 435663 - DNA, 19 bp, Homo sapiens
  siRNA target sequence for LOC284697 (NM_183242.1,1225-1243).
gttggagtggaaagtcttt

SEQ ID NO: 435664 - DNA, 19 bp, Homo sapiens
  siRNA target sequence for LOC284697 (NM_183242.1,1253-1271).
gcatgaagtggattgtaaa

SEQ ID NO: 435665 - DNA, 19 bp, Homo sapiens
  siRNA target sequence for LOC284697 (NM_183242.1,1347-1365).
gttgattcagtccttagta

SEQ ID NO: 435666 - DNA, 19 bp, Homo sapiens
  siRNA target sequence for LOC200030 (NM_183372.1,3571-3589).
ggactcactggatgttatt

SEQ ID NO: 435667 - DNA, 19 bp, Homo sapiens
  siRNA target sequence for C6orf145 (NM_183373.1,50-68).
gcacgtcgctcgtgaacat

SEQ ID NO: 435668 - DNA, 19 bp, Homo sapiens
  siRNA target sequence for C6orf145 (NM_183373.1,53-71).
cgtcgctcgtgaacatgtt

SEQ ID NO: 435669 - DNA, 19 bp, Homo sapiens
  siRNA target sequence for C6orf145 (NM_183373.1,125-143).
gcgacgaagaggagttctt

SEQ ID NO: 435670 - DNA, 19 bp, Homo sapiens
  siRNA target sequence for C6orf145 (NM_183373.1,301-319).
gaagcccacgacatagaga

SEQ ID NO: 435671 - DNA, 19 bp, Homo sapiens
  siRNA target sequence for C6orf145 (NM_183373.1,342-360).
gctgctgaagacgatcata

SEQ ID NO: 435672 - DNA, 19 bp, Homo sapiens
  siRNA target sequence for C6orf145 (NM_183373.1,363-381).
catgccctgtaaatattct

SEQ ID NO: 435673 - DNA, 19 bp, Homo sapiens
  siRNA target sequence for C6orf145 (NM_183373.1,397-415).
ctcaccttcttcgaaagat

SEQ ID NO: 435674 - DNA, 19 bp, Homo sapiens
  siRNA target sequence for C6orf145 (NM_183373.1,399-417).
caccttcttcgaaagatct

SEQ ID NO: 435675 - DNA, 19 bp, Homo sapiens
  siRNA target sequence for C6orf145 (NM_183373.1,418-436).
cctctggatcaggtgttaa

SEQ ID NO: 435676 - DNA, 19 bp, Homo sapiens
  siRNA target sequence for C6orf145 (NM_183373.1,421-439).
ctggatcaggtgttaaaaa

SEQ ID NO: 435677 - DNA, 19 bp, Homo sapiens
  siRNA target sequence for C6orf145 (NM_183373.1,507-525).
caatggattttgtttagca

SEQ ID NO: 435678 - DNA, 19 bp, Homo sapiens
  siRNA target sequence for C6orf145 (NM_183373.1,511-529).
ggattttgtttagcaaata

SEQ ID NO: 435679 - DNA, 19 bp, Homo sapiens
  siRNA target sequence for C6orf145 (NM_183373.1,524-542).
caaataccgaaacaatagt

SEQ ID NO: 435680 - DNA, 19 bp, Homo sapiens
  siRNA target sequence for C6orf145 (NM_183373.1,530-548).
ccgaaacaatagttattga

SEQ ID NO: 435681 - DNA, 19 bp, Homo sapiens
  siRNA target sequence for C6orf145 (NM_183373.1,588-606).
ggacccaacagagcattta

SEQ ID NO: 435682 - DNA, 19 bp, Homo sapiens
  siRNA target sequence for C6orf145 (NM_183373.1,589-607).
gacccaacagagcatttat

SEQ ID NO: 435683 - DNA, 19 bp, Homo sapiens
  siRNA target sequence for C6orf145 (NM_183373.1,593-611).
caacagagcatttatttga

SEQ ID NO: 435684 - DNA, 19 bp, Homo sapiens
  siRNA target sequence for C6orf145 (NM_183373.1,666-684).
cgtcaccaacctgtcatat

SEQ ID NO: 435685 - DNA, 19 bp, Homo sapiens
  siRNA target sequence for C6orf145 (NM_183373.1,667-685).
gtcaccaacctgtcatatt

SEQ ID NO: 435686 - DNA, 19 bp, Homo sapiens
  siRNA target sequence for C6orf145 (NM_183373.1,697-715).
cccttcgagacagacattt

SEQ ID NO: 435687 - DNA, 19 bp, Homo sapiens
  siRNA target sequence for CYP26C1 (NM_183374.1,185-203).
cgctgcactggttagttca

SEQ ID NO: 435688 - DNA, 19 bp, Homo sapiens
  siRNA target sequence for CYP26C1 (NM_183374.1,791-809).
gtgatgccctcgacctaat

SEQ ID NO: 435689 - DNA, 19 bp, Homo sapiens
  siRNA target sequence for CYP26C1 (NM_183374.1,793-811).
gatgccctcgacctaatca

SEQ ID NO: 435690 - DNA, 19 bp, Homo sapiens
  siRNA target sequence for CYP26C1 (NM_183374.1,797-815).
ccctcgacctaatcattca

SEQ ID NO: 435691 - DNA, 19 bp, Homo sapiens
  siRNA target sequence for CYP26C1 (NM_183374.1,799-817).
ctcgacctaatcattcaca

SEQ ID NO: 435692 - DNA, 19 bp, Homo sapiens
  siRNA target sequence for CYP26C1 (NM_183374.1,1209-1227).
gggctggagcgtgatgtat

SEQ ID NO: 435693 - DNA, 19 bp, Homo sapiens
  siRNA target sequence for CYP26C1 (NM_183374.1,1504-1522).
gacgggctgcggctctttt

SEQ ID NO: 435694 - DNA, 19 bp, Homo sapiens
  siRNA target sequence for CYP26C1 (NM_183374.1,1508-1526).
ggctgcggctctttttcca

SEQ ID NO: 435695 - DNA, 19 bp, Homo sapiens
  siRNA target sequence for ESSPL (NM_183375.1,55-73).
cactcttttcccaaaaaga

SEQ ID NO: 435696 - DNA, 19 bp, Homo sapiens
  siRNA target sequence for ESSPL (NM_183375.1,247-265).
caaccgacctggactactt

SEQ ID NO: 435697 - DNA, 19 bp, Homo sapiens
  siRNA target sequence for ESSPL (NM_183375.1,277-295).
gtgtggctaggatcgatta

SEQ ID NO: 435698 - DNA, 19 bp, Homo sapiens
  siRNA target sequence for ESSPL (NM_183375.1,279-297).
gtggctaggatcgattaca

SEQ ID NO: 435699 - DNA, 19 bp, Homo sapiens
  siRNA target sequence for ESSPL (NM_183375.1,281-299).
ggctaggatcgattacagt

SEQ ID NO: 435700 - DNA, 19 bp, Homo sapiens
  siRNA target sequence for ESSPL (NM_183375.1,282-300).
gctaggatcgattacagta

SEQ ID NO: 435701 - DNA, 19 bp, Homo sapiens
  siRNA target sequence for ESSPL (NM_183375.1,311-329).
ggaaacgtgtgaagtacta

SEQ ID NO: 435702 - DNA, 19 bp, Homo sapiens
  siRNA target sequence for ESSPL (NM_183375.1,349-367).
catcccaagtaccaagata

SEQ ID NO: 435703 - DNA, 19 bp, Homo sapiens
  siRNA target sequence for ESSPL (NM_183375.1,373-391).
gcagacgtcgccttgttga

SEQ ID NO: 435704 - DNA, 19 bp, Homo sapiens
  siRNA target sequence for ESSPL (NM_183375.1,374-392).
cagacgtcgccttgttgaa

SEQ ID NO: 435705 - DNA, 19 bp, Homo sapiens
  siRNA target sequence for ESSPL (NM_183375.1,379-397).
gtcgccttgttgaaactgt

SEQ ID NO: 435706 - DNA, 19 bp, Homo sapiens
  siRNA target sequence for ESSPL (NM_183375.1,421-439).
gccatcctgcctatttgct

SEQ ID NO: 435707 - DNA, 19 bp, Homo sapiens
  siRNA target sequence for ESSPL (NM_183375.1,463-481).
gcaattccacccttttgtt

SEQ ID NO: 435708 - DNA, 19 bp, Homo sapiens
  siRNA target sequence for ESSPL (NM_183375.1,621-639).
caaggaagacaagatttgt

SEQ ID NO: 435709 - DNA, 19 bp, Homo sapiens
  siRNA target sequence for ESSPL (NM_183375.1,633-651).
gatttgtgctggtgatact

SEQ ID NO: 435710 - DNA, 19 bp, Homo sapiens
  siRNA target sequence for ESSPL (NM_183375.1,638-656).
gtgctggtgatactcaaaa

SEQ ID NO: 435711 - DNA, 19 bp, Homo sapiens
  siRNA target sequence for ESSPL (NM_183375.1,644-662).
gtgatactcaaaacatgaa

SEQ ID NO: 435712 - DNA, 19 bp, Homo sapiens
  siRNA target sequence for ESSPL (NM_183375.1,690-708).
gcctctgtcgtgtcacatt

SEQ ID NO: 435713 - DNA, 19 bp, Homo sapiens
  siRNA target sequence for ESSPL (NM_183375.1,692-710).
ctctgtcgtgtcacattga

SEQ ID NO: 435714 - DNA, 19 bp, Homo sapiens
  siRNA target sequence for ESSPL (NM_183375.1,736-754).
gtaagctggggattagaat

SEQ ID NO: 435715 - DNA, 19 bp, Homo sapiens
  siRNA target sequence for ESSPL (NM_183375.1,775-793).
gtctacaccaatgtaatct

SEQ ID NO: 435716 - DNA, 19 bp, Homo sapiens
  siRNA target sequence for ESSPL (NM_183375.1,807-825).
gattaatgccactatttca

SEQ ID NO: 435717 - DNA, 19 bp, Homo sapiens
  siRNA target sequence for ESSPL (NM_183375.1,904-922).
gcctttggacctaacacta

SEQ ID NO: 435718 - DNA, 19 bp, Homo sapiens
  siRNA target sequence for ESSPL (NM_183375.1,905-923).
cctttggacctaacactat

SEQ ID NO: 435719 - DNA, 19 bp, Homo sapiens
  siRNA target sequence for ESSPL (NM_183375.1,906-924).
ctttggacctaacactata

SEQ ID NO: 435720 - DNA, 19 bp, Homo sapiens
  siRNA target sequence for ESSPL (NM_183375.1,978-996).
gaatgcatggagatttagt

SEQ ID NO: 435721 - DNA, 19 bp, Homo sapiens
  siRNA target sequence for LOC91947 (NM_183376.1,228-246).
gagcgcaagggctgctatt

SEQ ID NO: 435722 - DNA, 19 bp, Homo sapiens
  siRNA target sequence for LOC91947 (NM_183376.1,231-249).
cgcaagggctgctattcca

SEQ ID NO: 435723 - DNA, 19 bp, Homo sapiens
  siRNA target sequence for LOC91947 (NM_183376.1,454-472).
ccggtgaaggcatcatttt

SEQ ID NO: 435724 - DNA, 19 bp, Homo sapiens
  siRNA target sequence for LOC91947 (NM_183376.1,455-473).
cggtgaaggcatcatttta

SEQ ID NO: 435725 - DNA, 19 bp, Homo sapiens
  siRNA target sequence for LOC91947 (NM_183376.1,539-557).
gtttactgggaaatatgga

SEQ ID NO: 435726 - DNA, 19 bp, Homo sapiens
  siRNA target sequence for LOC91947 (NM_183376.1,600-618).
gtacctgatcagagtgtaa

SEQ ID NO: 435727 - DNA, 19 bp, Homo sapiens
  siRNA target sequence for LOC91947 (NM_183376.1,621-639).
cgggaactccaggttgtta

SEQ ID NO: 435728 - DNA, 19 bp, Homo sapiens
  siRNA target sequence for LOC91947 (NM_183376.1,623-641).
ggaactccaggttgttagt

SEQ ID NO: 435729 - DNA, 19 bp, Homo sapiens
  siRNA target sequence for LOC91947 (NM_183376.1,651-669).
gtcaacacaccagcattat

SEQ ID NO: 435730 - DNA, 19 bp, Homo sapiens
  siRNA target sequence for LOC91947 (NM_183376.1,653-671).
caacacaccagcattatta

SEQ ID NO: 435731 - DNA, 19 bp, Homo sapiens
  siRNA target sequence for LOC91947 (NM_183376.1,664-682).
cattattaacccctgtatt

SEQ ID NO: 435732 - DNA, 19 bp, Homo sapiens
  siRNA target sequence for LOC91947 (NM_183376.1,753-771).
gaaagaaagggatactgta

SEQ ID NO: 435733 - DNA, 19 bp, Homo sapiens
  siRNA target sequence for LOC91947 (NM_183376.1,775-793).
gagaagctattccaatcta

SEQ ID NO: 435734 - DNA, 19 bp, Homo sapiens
  siRNA target sequence for LOC91947 (NM_183376.1,811-829).
gttcctctcgtctgattgt

SEQ ID NO: 435735 - DNA, 19 bp, Homo sapiens
  siRNA target sequence for OVCH1 (NM_183378.1,77-95).
gaattcgcatggtcaacat

SEQ ID NO: 435736 - DNA, 19 bp, Homo sapiens
  siRNA target sequence for OVCH1 (NM_183378.1,82-100).
cgcatggtcaacatgaaaa

SEQ ID NO: 435737 - DNA, 19 bp, Homo sapiens
  siRNA target sequence for OVCH1 (NM_183378.1,84-102).
catggtcaacatgaaaagt

SEQ ID NO: 435738 - DNA, 19 bp, Homo sapiens
  siRNA target sequence for OVCH1 (NM_183378.1,109-127).
cctgccgtgggatctagat

SEQ ID NO: 435739 - DNA, 19 bp, Homo sapiens
  siRNA target sequence for OVCH1 (NM_183378.1,110-128).
ctgccgtgggatctagatt

SEQ ID NO: 435740 - DNA, 19 bp, Homo sapiens
  siRNA target sequence for OVCH1 (NM_183378.1,112-130).
gccgtgggatctagattct

SEQ ID NO: 435741 - DNA, 19 bp, Homo sapiens
  siRNA target sequence for OVCH1 (NM_183378.1,113-131).
ccgtgggatctagattctt

SEQ ID NO: 435742 - DNA, 19 bp, Homo sapiens
  siRNA target sequence for OVCH1 (NM_183378.1,118-136).
ggatctagattcttctcta

SEQ ID NO: 435743 - DNA, 19 bp, Homo sapiens
  siRNA target sequence for OVCH1 (NM_183378.1,129-147).
cttctctagaattagtagt

SEQ ID NO: 435744 - DNA, 19 bp, Homo sapiens
  siRNA target sequence for OVCH1 (NM_183378.1,180-198).
gcaggtctccctaaaatca

SEQ ID NO: 435745 - DNA, 19 bp, Homo sapiens
  siRNA target sequence for OVCH1 (NM_183378.1,232-250).
caagaagatcgggttgtta

SEQ ID NO: 435746 - DNA, 19 bp, Homo sapiens
  siRNA target sequence for OVCH1 (NM_183378.1,336-354).
ggataagcaagaacagaat

SEQ ID NO: 435747 - DNA, 19 bp, Homo sapiens
  siRNA target sequence for OVCH1 (NM_183378.1,342-360).
gcaagaacagaatattcct

SEQ ID NO: 435748 - DNA, 19 bp, Homo sapiens
  siRNA target sequence for OVCH1 (NM_183378.1,393-411).
cagccgtgaatatatgagt

SEQ ID NO: 435749 - DNA, 19 bp, Homo sapiens
  siRNA target sequence for OVCH1 (NM_183378.1,499-517).
gttgaaccaggaattcttt

SEQ ID NO: 435750 - DNA, 19 bp, Homo sapiens
  siRNA target sequence for OVCH1 (NM_183378.1,535-553).
ggcaagatttccaaaacat

SEQ ID NO: 435751 - DNA, 19 bp, Homo sapiens
  siRNA target sequence for OVCH1 (NM_183378.1,551-569).
catcagaatattcaaatgt

SEQ ID NO: 435752 - DNA, 19 bp, Homo sapiens
  siRNA target sequence for OVCH1 (NM_183378.1,597-615).
ggatgacagagcgtgtaat

SEQ ID NO: 435753 - DNA, 19 bp, Homo sapiens
  siRNA target sequence for OVCH1 (NM_183378.1,598-616).
gatgacagagcgtgtaata

SEQ ID NO: 435754 - DNA, 19 bp, Homo sapiens
  siRNA target sequence for OVCH1 (NM_183378.1,715-733).
ggaccactggtttgtagaa

SEQ ID NO: 435755 - DNA, 19 bp, Homo sapiens
  siRNA target sequence for OVCH1 (NM_183378.1,793-811).
ggttcagttcccgtaagaa

SEQ ID NO: 435756 - DNA, 19 bp, Homo sapiens
  siRNA target sequence for OVCH1 (NM_183378.1,794-812).
gttcagttcccgtaagaaa

SEQ ID NO: 435757 - DNA, 19 bp, Homo sapiens
  siRNA target sequence for OVCH1 (NM_183378.1,797-815).
cagttcccgtaagaaacaa

SEQ ID NO: 435758 - DNA, 19 bp, Homo sapiens
  siRNA target sequence for OVCH1 (NM_183378.1,826-844).
gcatcacttggcattttct

SEQ ID NO: 435759 - DNA, 19 bp, Homo sapiens
  siRNA target sequence for OVCH1 (NM_183378.1,858-876).
gttgatggattttatcact

SEQ ID NO: 435760 - DNA, 19 bp, Homo sapiens
  siRNA target sequence for OVCH1 (NM_183378.1,905-923).
gccaacccctctcaaaagt

SEQ ID NO: 435761 - DNA, 19 bp, Homo sapiens
  siRNA target sequence for OVCH1 (NM_183378.1,922-940).
gtgggctcaaggtatataa

SEQ ID NO: 435762 - DNA, 19 bp, Homo sapiens
  siRNA target sequence for OVCH1 (NM_183378.1,924-942).
gggctcaaggtatataaca

SEQ ID NO: 435763 - DNA, 19 bp, Homo sapiens
  siRNA target sequence for OVCH1 (NM_183378.1,925-943).
ggctcaaggtatataacaa

SEQ ID NO: 435764 - DNA, 19 bp, Homo sapiens
  siRNA target sequence for OVCH1 (NM_183378.1,926-944).
gctcaaggtatataacaaa

SEQ ID NO: 435765 - DNA, 19 bp, Homo sapiens
  siRNA target sequence for OVCH1 (NM_183378.1,953-971).
gttctgtccaagaagtgaa

SEQ ID NO: 435766 - DNA, 19 bp, Homo sapiens
  siRNA target sequence for OVCH1 (NM_183378.1,1024-1042).
gatcatgactatgtatctt

SEQ ID NO: 435767 - DNA, 19 bp, Homo sapiens
  siRNA target sequence for OVCH1 (NM_183378.1,1030-1048).
gactatgtatctttacgat

SEQ ID NO: 435768 - DNA, 19 bp, Homo sapiens
  siRNA target sequence for OVCH1 (NM_183378.1,1259-1277).
ggagtctggctatattggt

SEQ ID NO: 435769 - DNA, 19 bp, Homo sapiens
  siRNA target sequence for OVCH1 (NM_183378.1,1260-1278).
gagtctggctatattggta

SEQ ID NO: 435770 - DNA, 19 bp, Homo sapiens
  siRNA target sequence for OVCH1 (NM_183378.1,1312-1330).
gatttgtatcccagtaaca

SEQ ID NO: 435771 - DNA, 19 bp, Homo sapiens
  siRNA target sequence for OVCH1 (NM_183378.1,1387-1405).
gaggactttgctgtcaaat

SEQ ID NO: 435772 - DNA, 19 bp, Homo sapiens
  siRNA target sequence for OVCH1 (NM_183378.1,1401-1419).
caaatttagtccaaactgt

SEQ ID NO: 435773 - DNA, 19 bp, Homo sapiens
  siRNA target sequence for OVCH1 (NM_183378.1,1456-1474).
gaaaagcacaagttagcta

SEQ ID NO: 435774 - DNA, 19 bp, Homo sapiens
  siRNA target sequence for OVCH1 (NM_183378.1,1494-1512).
catcacttcaatattcagt

SEQ ID NO: 435775 - DNA, 19 bp, Homo sapiens
  siRNA target sequence for OVCH1 (NM_183378.1,1521-1539).
catgacggtgatatacttt

SEQ ID NO: 435776 - DNA, 19 bp, Homo sapiens
  siRNA target sequence for OVCH1 (NM_183378.1,1524-1542).
gacggtgatatactttaaa

SEQ ID NO: 435777 - DNA, 19 bp, Homo sapiens
  siRNA target sequence for OVCH1 (NM_183378.1,1544-1562).
gtgatggtaaaaatcgttt

SEQ ID NO: 435778 - DNA, 19 bp, Homo sapiens
  siRNA target sequence for OVCH1 (NM_183378.1,1611-1629).
caaatttgaaccaaagtta

SEQ ID NO: 435779 - DNA, 19 bp, Homo sapiens
  siRNA target sequence for OVCH1 (NM_183378.1,1626-1644).
gttacctccccaaaacaat

SEQ ID NO: 435780 - DNA, 19 bp, Homo sapiens
  siRNA target sequence for OVCH1 (NM_183378.1,1648-1666).
gtatctaccgtaaaagcta

SEQ ID NO: 435781 - DNA, 19 bp, Homo sapiens
  siRNA target sequence for OVCH1 (NM_183378.1,1652-1670).
ctaccgtaaaagctattct

SEQ ID NO: 435782 - DNA, 19 bp, Homo sapiens
  siRNA target sequence for OVCH1 (NM_183378.1,1767-1785).
ggtgggtctgaggtttcta

SEQ ID NO: 435783 - DNA, 19 bp, Homo sapiens
  siRNA target sequence for OVCH1 (NM_183378.1,1778-1796).
ggtttctaggcgattacca

SEQ ID NO: 435784 - DNA, 19 bp, Homo sapiens
  siRNA target sequence for OVCH1 (NM_183378.1,1779-1797).
gtttctaggcgattaccaa

SEQ ID NO: 435785 - DNA, 19 bp, Homo sapiens
  siRNA target sequence for OVCH1 (NM_183378.1,1799-1817).
gtggaggtgccatcatcaa

SEQ ID NO: 435786 - DNA, 19 bp, Homo sapiens
  siRNA target sequence for OVCH1 (NM_183378.1,1840-1858).
gcccactgtgtgcaattga

SEQ ID NO: 435787 - DNA, 19 bp, Homo sapiens
  siRNA target sequence for OVCH1 (NM_183378.1,1851-1869).
gcaattgaagaataatcca

SEQ ID NO: 435788 - DNA, 19 bp, Homo sapiens
  siRNA target sequence for OVCH1 (NM_183378.1,1868-1886).
cactctcctggactattat

SEQ ID NO: 435789 - DNA, 19 bp, Homo sapiens
  siRNA target sequence for OVCH1 (NM_183378.1,1934-1952).
gaagggccaaacacataat

SEQ ID NO: 435790 - DNA, 19 bp, Homo sapiens
  siRNA target sequence for OVCH1 (NM_183378.1,1937-1955).
gggccaaacacataatagt

SEQ ID NO: 435791 - DNA, 19 bp, Homo sapiens
  siRNA target sequence for OVCH1 (NM_183378.1,1954-1972).
gtgcatgaagactttaaca

SEQ ID NO: 435792 - DNA, 19 bp, Homo sapiens
  siRNA target sequence for OVCH1 (NM_183378.1,1960-1978).
gaagactttaacacactaa

SEQ ID NO: 435793 - DNA, 19 bp, Homo sapiens
  siRNA target sequence for OVCH1 (NM_183378.1,1963-1981).
gactttaacacactaagtt

SEQ ID NO: 435794 - DNA, 19 bp, Homo sapiens
  siRNA target sequence for OVCH1 (NM_183378.1,1988-2006).
ctgacattgccctaataca

SEQ ID NO: 435795 - DNA, 19 bp, Homo sapiens
  siRNA target sequence for OVCH1 (NM_183378.1,1992-2010).
cattgccctaatacaacta

SEQ ID NO: 435796 - DNA, 19 bp, Homo sapiens
  siRNA target sequence for OVCH1 (NM_183378.1,2034-2052).
ggtggtgaggccagtatgt

SEQ ID NO: 435797 - DNA, 19 bp, Homo sapiens
  siRNA target sequence for OVCH1 (NM_183378.1,2061-2079).
cagcgcagagcctctattt

SEQ ID NO: 435798 - DNA, 19 bp, Homo sapiens
  siRNA target sequence for OVCH1 (NM_183378.1,2141-2159).
gtcgcctacagcagattca

SEQ ID NO: 435799 - DNA, 19 bp, Homo sapiens
  siRNA target sequence for OVCH1 (NM_183378.1,2290-2308).
ggtgggccactagtatgta

SEQ ID NO: 435800 - DNA, 19 bp, Homo sapiens
  siRNA target sequence for OVCH1 (NM_183378.1,2295-2313).
gccactagtatgtagacat

SEQ ID NO: 435801 - DNA, 19 bp, Homo sapiens
  siRNA target sequence for OVCH1 (NM_183378.1,2372-2390).
catggaagccgggtgtatt

SEQ ID NO: 435802 - DNA, 19 bp, Homo sapiens
  siRNA target sequence for OVCH1 (NM_183378.1,2417-2435).
ggatccaatcaaaaatcaa

SEQ ID NO: 435803 - DNA, 19 bp, Homo sapiens
  siRNA target sequence for OVCH1 (NM_183378.1,2418-2436).
gatccaatcaaaaatcaat

SEQ ID NO: 435804 - DNA, 19 bp, Homo sapiens
  siRNA target sequence for OVCH1 (NM_183378.1,2447-2465).
cacttcagacaaataataa

SEQ ID NO: 435805 - DNA, 19 bp, Homo sapiens
  siRNA target sequence for OVCH1 (NM_183378.1,2576-2594).
ccacaccacggtatctact

SEQ ID NO: 435806 - DNA, 19 bp, Homo sapiens
  siRNA target sequence for OVCH1 (NM_183378.1,2582-2600).
cacggtatctactggatta

SEQ ID NO: 435807 - DNA, 19 bp, Homo sapiens
  siRNA target sequence for OVCH1 (NM_183378.1,2654-2672).
caaaatttaccattgagta

SEQ ID NO: 435808 - DNA, 19 bp, Homo sapiens
  siRNA target sequence for OVCH1 (NM_183378.1,2748-2766).
gacggcaggtggattacat

SEQ ID NO: 435809 - DNA, 19 bp, Homo sapiens
  siRNA target sequence for OVCH1 (NM_183378.1,2832-2850).
ccttgtacgaggtgcattt

SEQ ID NO: 435810 - DNA, 19 bp, Homo sapiens
  siRNA target sequence for OVCH1 (NM_183378.1,2836-2854).
gtacgaggtgcatttggta

SEQ ID NO: 435811 - DNA, 19 bp, Homo sapiens
  siRNA target sequence for OVCH1 (NM_183378.1,2839-2857).
cgaggtgcatttggtataa

SEQ ID NO: 435812 - DNA, 19 bp, Homo sapiens
  siRNA target sequence for OVCH1 (NM_183378.1,2842-2860).
ggtgcatttggtataagct

SEQ ID NO: 435813 - DNA, 19 bp, Homo sapiens
  siRNA target sequence for OVCH1 (NM_183378.1,2845-2863).
gcatttggtataagctata

SEQ ID NO: 435814 - DNA, 19 bp, Homo sapiens
  siRNA target sequence for OVCH1 (NM_183378.1,2979-2997).
catgcagatcccaagaaat

SEQ ID NO: 435815 - DNA, 19 bp, Homo sapiens
  siRNA target sequence for OVCH1 (NM_183378.1,3015-3033).
ggggtgccaatggagatta

SEQ ID NO: 435816 - DNA, 19 bp, Homo sapiens
  siRNA target sequence for OVCH1 (NM_183378.1,3017-3035).
ggtgccaatggagattagt

SEQ ID NO: 435817 - DNA, 19 bp, Homo sapiens
  siRNA target sequence for OVCH1 (NM_183378.1,3018-3036).
gtgccaatggagattagta

SEQ ID NO: 435818 - DNA, 19 bp, Homo sapiens
  siRNA target sequence for OVCH1 (NM_183378.1,3029-3047).
gattagtagcccctttaaa

SEQ ID NO: 435819 - DNA, 19 bp, Homo sapiens
  siRNA target sequence for OVCH1 (NM_183378.1,3078-3096).
cccgatgaagccaacaact

SEQ ID NO: 435820 - DNA, 19 bp, Homo sapiens
  siRNA target sequence for OVCH1 (NM_183378.1,3167-3185).
ctggaactctggcaatgat

SEQ ID NO: 435821 - DNA, 19 bp, Homo sapiens
  siRNA target sequence for OVCH1 (NM_183378.1,3310-3328).
gcatcaaatttaagttata

SEQ ID NO: 435822 - DNA, 19 bp, Homo sapiens
  siRNA target sequence for OVCH1 (NM_183378.1,3314-3332).
caaatttaagttatagtat

SEQ ID NO: 435823 - DNA, 19 bp, Homo sapiens
  siRNA target sequence for TESSP1 (NM_183379.1,135-153).
ctgcggccaccgggaaatt

SEQ ID NO: 435824 - DNA, 19 bp, Homo sapiens
  siRNA target sequence for TESSP1 (NM_183379.1,137-155).
gcggccaccgggaaattca

SEQ ID NO: 435825 - DNA, 19 bp, Homo sapiens
  siRNA target sequence for TESSP1 (NM_183379.1,371-389).
cctacagcagtcgttacaa

SEQ ID NO: 435826 - DNA, 19 bp, Homo sapiens
  siRNA target sequence for TESSP1 (NM_183379.1,424-442).
ggggttttacgcaatgaca

SEQ ID NO: 435827 - DNA, 19 bp, Homo sapiens
  siRNA target sequence for TESSP1 (NM_183379.1,641-659).
ggtgtaattacctgtttga

SEQ ID NO: 435828 - DNA, 19 bp, Homo sapiens
  siRNA target sequence for TESSP1 (NM_183379.1,642-660).
gtgtaattacctgtttgaa

SEQ ID NO: 435829 - DNA, 19 bp, Homo sapiens
  siRNA target sequence for TESSP1 (NM_183379.1,664-682).
ccctctagccgtagtatga

SEQ ID NO: 435830 - DNA, 19 bp, Homo sapiens
  siRNA target sequence for TESSP1 (NM_183379.1,665-683).
cctctagccgtagtatgat

SEQ ID NO: 435831 - DNA, 19 bp, Homo sapiens
  siRNA target sequence for TESSP1 (NM_183379.1,677-695).
gtatgatctgggattccat

SEQ ID NO: 435832 - DNA, 19 bp, Homo sapiens
  siRNA target sequence for TESSP1 (NM_183379.1,848-866).
ccaacatcagtgtgtactt

SEQ ID NO: 435833 - DNA, 19 bp, Homo sapiens
  siRNA target sequence for EML5 (NM_183387.1,281-299).
cggccaaggagatcgtata

SEQ ID NO: 435834 - DNA, 19 bp, Homo sapiens
  siRNA target sequence for EML5 (NM_183387.1,283-301).
gccaaggagatcgtatact

SEQ ID NO: 435835 - DNA, 19 bp, Homo sapiens
  siRNA target sequence for EML5 (NM_183387.1,284-302).
ccaaggagatcgtatactt

SEQ ID NO: 435836 - DNA, 19 bp, Homo sapiens
  siRNA target sequence for EML5 (NM_183387.1,432-450).
gaaagagccttatatttgt

SEQ ID NO: 435837 - DNA, 19 bp, Homo sapiens
  siRNA target sequence for EML5 (NM_183387.1,467-485).
ctgtgcagaccatatcagt

SEQ ID NO: 435838 - DNA, 19 bp, Homo sapiens
  siRNA target sequence for EML5 (NM_183387.1,469-487).
gtgcagaccatatcagttt

SEQ ID NO: 435839 - DNA, 19 bp, Homo sapiens
  siRNA target sequence for EML5 (NM_183387.1,471-489).
gcagaccatatcagtttta

SEQ ID NO: 435840 - DNA, 19 bp, Homo sapiens
  siRNA target sequence for EML5 (NM_183387.1,472-490).
cagaccatatcagttttaa

SEQ ID NO: 435841 - DNA, 19 bp, Homo sapiens
  siRNA target sequence for EML5 (NM_183387.1,484-502).
gttttaaaggatgttcata

SEQ ID NO: 435842 - DNA, 19 bp, Homo sapiens
  siRNA target sequence for EML5 (NM_183387.1,514-532).
gcttgcttggcgtttgact

SEQ ID NO: 435843 - DNA, 19 bp, Homo sapiens
  siRNA target sequence for EML5 (NM_183387.1,515-533).
cttgcttggcgtttgactt

SEQ ID NO: 435844 - DNA, 19 bp, Homo sapiens
  siRNA target sequence for EML5 (NM_183387.1,518-536).
gcttggcgtttgacttaga

SEQ ID NO: 435845 - DNA, 19 bp, Homo sapiens
  siRNA target sequence for EML5 (NM_183387.1,519-537).
cttggcgtttgacttagat

SEQ ID NO: 435846 - DNA, 19 bp, Homo sapiens
  siRNA target sequence for EML5 (NM_183387.1,535-553).
gatggacagcgcttggttt

SEQ ID NO: 435847 - DNA, 19 bp, Homo sapiens
  siRNA target sequence for EML5 (NM_183387.1,539-557).
gacagcgcttggtttcagt

SEQ ID NO: 435848 - DNA, 19 bp, Homo sapiens
  siRNA target sequence for EML5 (NM_183387.1,549-567).
ggtttcagttggacttgat

SEQ ID NO: 435849 - DNA, 19 bp, Homo sapiens
  siRNA target sequence for EML5 (NM_183387.1,556-574).
gttggacttgattcaaaga

SEQ ID NO: 435850 - DNA, 19 bp, Homo sapiens
  siRNA target sequence for EML5 (NM_183387.1,625-643).
cctggtcatacagatagaa

SEQ ID NO: 435851 - DNA, 19 bp, Homo sapiens
  siRNA target sequence for EML5 (NM_183387.1,626-644).
ctggtcatacagatagaat

SEQ ID NO: 435852 - DNA, 19 bp, Homo sapiens
  siRNA target sequence for EML5 (NM_183387.1,692-710).
gtggtgtaaaacatatcaa

SEQ ID NO: 435853 - DNA, 19 bp, Homo sapiens
  siRNA target sequence for EML5 (NM_183387.1,694-712).
ggtgtaaaacatatcaagt

SEQ ID NO: 435854 - DNA, 19 bp, Homo sapiens
  siRNA target sequence for EML5 (NM_183387.1,741-759).
cccaaaacgaggtgtcttt

SEQ ID NO: 435855 - DNA, 19 bp, Homo sapiens
  siRNA target sequence for EML5 (NM_183387.1,767-785).
cgggtgaccttcagacaat

SEQ ID NO: 435856 - DNA, 19 bp, Homo sapiens
  siRNA target sequence for EML5 (NM_183387.1,796-814).
gcctgtgcaagggatgaat

SEQ ID NO: 435857 - DNA, 19 bp, Homo sapiens
  siRNA target sequence for EML5 (NM_183387.1,797-815).
cctgtgcaagggatgaatt

SEQ ID NO: 435858 - DNA, 19 bp, Homo sapiens
  siRNA target sequence for EML5 (NM_183387.1,798-816).
ctgtgcaagggatgaatta

SEQ ID NO: 435859 - DNA, 19 bp, Homo sapiens
  siRNA target sequence for EML5 (NM_183387.1,807-825).
ggatgaattaacatattct

SEQ ID NO: 435860 - DNA, 19 bp, Homo sapiens
  siRNA target sequence for EML5 (NM_183387.1,829-847).
gcactcaatggggatatat

SEQ ID NO: 435861 - DNA, 19 bp, Homo sapiens
  siRNA target sequence for EML5 (NM_183387.1,855-873).
gaaaggaatcaatcttata

SEQ ID NO: 435862 - DNA, 19 bp, Homo sapiens
  siRNA target sequence for EML5 (NM_183387.1,859-877).
ggaatcaatcttatacgaa

SEQ ID NO: 435863 - DNA, 19 bp, Homo sapiens
  siRNA target sequence for EML5 (NM_183387.1,864-882).
caatcttatacgaacaata

SEQ ID NO: 435864 - DNA, 19 bp, Homo sapiens
  siRNA target sequence for EML5 (NM_183387.1,964-982).
cgtctttgggatttaactt

SEQ ID NO: 435865 - DNA, 19 bp, Homo sapiens
  siRNA target sequence for EML5 (NM_183387.1,989-1007).
caattactgtgattgatct

SEQ ID NO: 435866 - DNA, 19 bp, Homo sapiens
  siRNA target sequence for EML5 (NM_183387.1,1023-1041).
gggatacaaaggtttgtct

SEQ ID NO: 435867 - DNA, 19 bp, Homo sapiens
  siRNA target sequence for EML5 (NM_183387.1,1061-1079).
gaggtgaccacattctagt

SEQ ID NO: 435868 - DNA, 19 bp, Homo sapiens
  siRNA target sequence for EML5 (NM_183387.1,1152-1170).
gcattgtgaaggtgaactt

SEQ ID NO: 435869 - DNA, 19 bp, Homo sapiens
  siRNA target sequence for EML5 (NM_183387.1,1153-1171).
cattgtgaaggtgaacttt

SEQ ID NO: 435870 - DNA, 19 bp, Homo sapiens
  siRNA target sequence for EML5 (NM_183387.1,1183-1201).
gtccatcctactaaacctt

SEQ ID NO: 435871 - DNA, 19 bp, Homo sapiens
  siRNA target sequence for EML5 (NM_183387.1,1222-1240).
gatcgttcggtcaggatat

SEQ ID NO: 435872 - DNA, 19 bp, Homo sapiens
  siRNA target sequence for EML5 (NM_183387.1,1225-1243).
cgttcggtcaggatatgga

SEQ ID NO: 435873 - DNA, 19 bp, Homo sapiens
  siRNA target sequence for EML5 (NM_183387.1,1235-1253).
ggatatggagcctagtaga

SEQ ID NO: 435874 - DNA, 19 bp, Homo sapiens
  siRNA target sequence for EML5 (NM_183387.1,1244-1262).
gcctagtagatcatgcatt

SEQ ID NO: 435875 - DNA, 19 bp, Homo sapiens
  siRNA target sequence for EML5 (NM_183387.1,1246-1264).
ctagtagatcatgcattaa

SEQ ID NO: 435876 - DNA, 19 bp, Homo sapiens
  siRNA target sequence for EML5 (NM_183387.1,1252-1270).
gatcatgcattaatagcaa

SEQ ID NO: 435877 - DNA, 19 bp, Homo sapiens
  siRNA target sequence for EML5 (NM_183387.1,1363-1381).
cttagagtaagagatatga

SEQ ID NO: 435878 - DNA, 19 bp, Homo sapiens
  siRNA target sequence for EML5 (NM_183387.1,1373-1391).
gagatatgacggaagttgt

SEQ ID NO: 435879 - DNA, 19 bp, Homo sapiens
  siRNA target sequence for EML5 (NM_183387.1,1382-1400).
cggaagttgtacatattaa

SEQ ID NO: 435880 - DNA, 19 bp, Homo sapiens
  siRNA target sequence for EML5 (NM_183387.1,1406-1424).
ggaaggaggcaattcatga

SEQ ID NO: 435881 - DNA, 19 bp, Homo sapiens
  siRNA target sequence for EML5 (NM_183387.1,1411-1429).
gaggcaattcatgagttaa

SEQ ID NO: 435882 - DNA, 19 bp, Homo sapiens
  siRNA target sequence for EML5 (NM_183387.1,1414-1432).
gcaattcatgagttaaaat

SEQ ID NO: 435883 - DNA, 19 bp, Homo sapiens
  siRNA target sequence for EML5 (NM_183387.1,1471-1489).
gacagctcggttgatattt

SEQ ID NO: 435884 - DNA, 19 bp, Homo sapiens
  siRNA target sequence for EML5 (NM_183387.1,1473-1491).
cagctcggttgatatttat

SEQ ID NO: 435885 - DNA, 19 bp, Homo sapiens
  siRNA target sequence for EML5 (NM_183387.1,1492-1510).
ggagttgctcagcgttata

SEQ ID NO: 435886 - DNA, 19 bp, Homo sapiens
  siRNA target sequence for EML5 (NM_183387.1,1493-1511).
gagttgctcagcgttataa

SEQ ID NO: 435887 - DNA, 19 bp, Homo sapiens
  siRNA target sequence for EML5 (NM_183387.1,1495-1513).
gttgctcagcgttataaaa

SEQ ID NO: 435888 - DNA, 19 bp, Homo sapiens
  siRNA target sequence for EML5 (NM_183387.1,1562-1580).
ggtcttcagacagtagata

SEQ ID NO: 435889 - DNA, 19 bp, Homo sapiens
  siRNA target sequence for EML5 (NM_183387.1,1563-1581).
gtcttcagacagtagatat

SEQ ID NO: 435890 - DNA, 19 bp, Homo sapiens
  siRNA target sequence for EML5 (NM_183387.1,1565-1583).
cttcagacagtagatattt

SEQ ID NO: 435891 - DNA, 19 bp, Homo sapiens
  siRNA target sequence for EML5 (NM_183387.1,1568-1586).
cagacagtagatatttgca

SEQ ID NO: 435892 - DNA, 19 bp, Homo sapiens
  siRNA target sequence for EML5 (NM_183387.1,1714-1732).
ggaatttggcccaagtatt

SEQ ID NO: 435893 - DNA, 19 bp, Homo sapiens
  siRNA target sequence for EML5 (NM_183387.1,1721-1739).
ggcccaagtattcagatat

SEQ ID NO: 435894 - DNA, 19 bp, Homo sapiens
  siRNA target sequence for EML5 (NM_183387.1,1740-1758).
caacgatataaattcagta

SEQ ID NO: 435895 - DNA, 19 bp, Homo sapiens
  siRNA target sequence for EML5 (NM_183387.1,1754-1772).
cagtagatggaaattatat

SEQ ID NO: 435896 - DNA, 19 bp, Homo sapiens
  siRNA target sequence for EML5 (NM_183387.1,1790-1808).
cagctgatgactatggaat

SEQ ID NO: 435897 - DNA, 19 bp, Homo sapiens
  siRNA target sequence for EML5 (NM_183387.1,1821-1839).
ccgatatccatgtttaaga

SEQ ID NO: 435898 - DNA, 19 bp, Homo sapiens
  siRNA target sequence for EML5 (NM_183387.1,1822-1840).
cgatatccatgtttaagaa

SEQ ID NO: 435899 - DNA, 19 bp, Homo sapiens
  siRNA target sequence for EML5 (NM_183387.1,1845-1863).
ggccaagtttagaaaatat

SEQ ID NO: 435900 - DNA, 19 bp, Homo sapiens
  siRNA target sequence for EML5 (NM_183387.1,1846-1864).
gccaagtttagaaaatata

SEQ ID NO: 435901 - DNA, 19 bp, Homo sapiens
  siRNA target sequence for EML5 (NM_183387.1,1870-1888).
cattcagctcacgtaacta

SEQ ID NO: 435902 - DNA, 19 bp, Homo sapiens
  siRNA target sequence for EML5 (NM_183387.1,1874-1892).
cagctcacgtaactaatgt

SEQ ID NO: 435903 - DNA, 19 bp, Homo sapiens
  siRNA target sequence for EML5 (NM_183387.1,1876-1894).
gctcacgtaactaatgtca

SEQ ID NO: 435904 - DNA, 19 bp, Homo sapiens
  siRNA target sequence for EML5 (NM_183387.1,1906-1924).
gattatcagtgggttattt

SEQ ID NO: 435905 - DNA, 19 bp, Homo sapiens
  siRNA target sequence for EML5 (NM_183387.1,1914-1932).
gtgggttatttctattggt

SEQ ID NO: 435906 - DNA, 19 bp, Homo sapiens
  siRNA target sequence for EML5 (NM_183387.1,1937-1955).
cagatcactctgtctttca

SEQ ID NO: 435907 - DNA, 19 bp, Homo sapiens
  siRNA target sequence for EML5 (NM_183387.1,1983-2001).
gaaagatgctgttcacata

SEQ ID NO: 435908 - DNA, 19 bp, Homo sapiens
  siRNA target sequence for EML5 (NM_183387.1,2027-2045).
ctcatagtgatgaatcaga

SEQ ID NO: 435909 - DNA, 19 bp, Homo sapiens
  siRNA target sequence for EML5 (NM_183387.1,2029-2047).
catagtgatgaatcagatt

SEQ ID NO: 435910 - DNA, 19 bp, Homo sapiens
  siRNA target sequence for EML5 (NM_183387.1,2105-2123).
cctaccgtcgacaggttta

SEQ ID NO: 435911 - DNA, 19 bp, Homo sapiens
  siRNA target sequence for EML5 (NM_183387.1,2109-2127).
ccgtcgacaggtttacaaa

SEQ ID NO: 435912 - DNA, 19 bp, Homo sapiens
  siRNA target sequence for EML5 (NM_183387.1,2111-2129).
gtcgacaggtttacaaaga

SEQ ID NO: 435913 - DNA, 19 bp, Homo sapiens
  siRNA target sequence for EML5 (NM_183387.1,2194-2212).
gagcgggctccaggaaata

SEQ ID NO: 435914 - DNA, 19 bp, Homo sapiens
  siRNA target sequence for EML5 (NM_183387.1,2196-2214).
gcgggctccaggaaatagt

SEQ ID NO: 435915 - DNA, 19 bp, Homo sapiens
  siRNA target sequence for EML5 (NM_183387.1,2197-2215).
cgggctccaggaaatagta

SEQ ID NO: 435916 - DNA, 19 bp, Homo sapiens
  siRNA target sequence for EML5 (NM_183387.1,2198-2216).
gggctccaggaaatagtat

SEQ ID NO: 435917 - DNA, 19 bp, Homo sapiens
  siRNA target sequence for EML5 (NM_183387.1,2199-2217).
ggctccaggaaatagtatt

SEQ ID NO: 435918 - DNA, 19 bp, Homo sapiens
  siRNA target sequence for EML5 (NM_183387.1,2203-2221).
ccaggaaatagtattcgat

SEQ ID NO: 435919 - DNA, 19 bp, Homo sapiens
  siRNA target sequence for EML5 (NM_183387.1,2204-2222).
caggaaatagtattcgatt

SEQ ID NO: 435920 - DNA, 19 bp, Homo sapiens
  siRNA target sequence for EML5 (NM_183387.1,2213-2231).
gtattcgattacactttgt

SEQ ID NO: 435921 - DNA, 19 bp, Homo sapiens
  siRNA target sequence for EML5 (NM_183387.1,2226-2244).
ctttgttcacggttacaga

SEQ ID NO: 435922 - DNA, 19 bp, Homo sapiens
  siRNA target sequence for EML5 (NM_183387.1,2246-2264).
gttatgactgtcgaagtaa

SEQ ID NO: 435923 - DNA, 19 bp, Homo sapiens
  siRNA target sequence for EML5 (NM_183387.1,2251-2269).
gactgtcgaagtaatctgt

SEQ ID NO: 435924 - DNA, 19 bp, Homo sapiens
  siRNA target sequence for EML5 (NM_183387.1,2253-2271).
ctgtcgaagtaatctgttt

SEQ ID NO: 435925 - DNA, 19 bp, Homo sapiens
  siRNA target sequence for EML5 (NM_183387.1,2255-2273).
gtcgaagtaatctgtttta

SEQ ID NO: 435926 - DNA, 19 bp, Homo sapiens
  siRNA target sequence for EML5 (NM_183387.1,2276-2294).
ctcaaattggtgaaattgt

SEQ ID NO: 435927 - DNA, 19 bp, Homo sapiens
  siRNA target sequence for EML5 (NM_183387.1,2305-2323).
gcagcagtgggtgtcattt

SEQ ID NO: 435928 - DNA, 19 bp, Homo sapiens
  siRNA target sequence for EML5 (NM_183387.1,2371-2389).
gatattctctgcctaacta

SEQ ID NO: 435929 - DNA, 19 bp, Homo sapiens
  siRNA target sequence for EML5 (NM_183387.1,2381-2399).
gcctaactattcatccttt

SEQ ID NO: 435930 - DNA, 19 bp, Homo sapiens
  siRNA target sequence for EML5 (NM_183387.1,2387-2405).
ctattcatcctttgaaaga

SEQ ID NO: 435931 - DNA, 19 bp, Homo sapiens
  siRNA target sequence for EML5 (NM_183387.1,2429-2447).
gtagagatccctcaattca

SEQ ID NO: 435932 - DNA, 19 bp, Homo sapiens
  siRNA target sequence for EML5 (NM_183387.1,2496-2514).
ccaccagtatggtgttagt

SEQ ID NO: 435933 - DNA, 19 bp, Homo sapiens
  siRNA target sequence for EML5 (NM_183387.1,2506-2524).
ggtgttagtgccgttgatt

SEQ ID NO: 435934 - DNA, 19 bp, Homo sapiens
  siRNA target sequence for EML5 (NM_183387.1,2507-2525).
gtgttagtgccgttgattt

SEQ ID NO: 435935 - DNA, 19 bp, Homo sapiens
  siRNA target sequence for EML5 (NM_183387.1,2509-2527).
gttagtgccgttgatttct

SEQ ID NO: 435936 - DNA, 19 bp, Homo sapiens
  siRNA target sequence for EML5 (NM_183387.1,2528-2546).
cagcggatgggaaacgttt

SEQ ID NO: 435937 - DNA, 19 bp, Homo sapiens
  siRNA target sequence for EML5 (NM_183387.1,2547-2565).
ggcatcagttggcatagat

SEQ ID NO: 435938 - DNA, 19 bp, Homo sapiens
  siRNA target sequence for EML5 (NM_183387.1,2549-2567).
catcagttggcatagatga

SEQ ID NO: 435939 - DNA, 19 bp, Homo sapiens
  siRNA target sequence for EML5 (NM_183387.1,2615-2633).
caatagcaagaggaagtaa

SEQ ID NO: 435940 - DNA, 19 bp, Homo sapiens
  siRNA target sequence for EML5 (NM_183387.1,2664-2682).
ctatgtgcctgataaacta

SEQ ID NO: 435941 - DNA, 19 bp, Homo sapiens
  siRNA target sequence for EML5 (NM_183387.1,2668-2686).
gtgcctgataaactaatta

SEQ ID NO: 435942 - DNA, 19 bp, Homo sapiens
  siRNA target sequence for EML5 (NM_183387.1,2670-2688).
gcctgataaactaattaca

SEQ ID NO: 435943 - DNA, 19 bp, Homo sapiens
  siRNA target sequence for EML5 (NM_183387.1,2680-2698).
ctaattacagctggaatta

SEQ ID NO: 435944 - DNA, 19 bp, Homo sapiens
  siRNA target sequence for EML5 (NM_183387.1,2855-2873).
ggagagacatctttcttgt

SEQ ID NO: 435945 - DNA, 19 bp, Homo sapiens
  siRNA target sequence for EML5 (NM_183387.1,2856-2874).
gagagacatctttcttgta

SEQ ID NO: 435946 - DNA, 19 bp, Homo sapiens
  siRNA target sequence for EML5 (NM_183387.1,2942-2960).
gaggaaaagatggtatagt

SEQ ID NO: 435947 - DNA, 19 bp, Homo sapiens
  siRNA target sequence for EML5 (NM_183387.1,2990-3008).
gtctcaagacctatgctat

SEQ ID NO: 435948 - DNA, 19 bp, Homo sapiens
  siRNA target sequence for EML5 (NM_183387.1,2994-3012).
caagacctatgctataaaa

SEQ ID NO: 435949 - DNA, 19 bp, Homo sapiens
  siRNA target sequence for EML5 (NM_183387.1,3020-3038).
cattggccccaggatctaa

SEQ ID NO: 435950 - DNA, 19 bp, Homo sapiens
  siRNA target sequence for EML5 (NM_183387.1,3065-3083).
ctatacgtgccatatcatt

SEQ ID NO: 435951 - DNA, 19 bp, Homo sapiens
  siRNA target sequence for EML5 (NM_183387.1,3184-3202).
gaggtgtggggtttagcta

SEQ ID NO: 435952 - DNA, 19 bp, Homo sapiens
  siRNA target sequence for EML5 (NM_183387.1,3216-3234).
gcccatctgtgctactgta

SEQ ID NO: 435953 - DNA, 19 bp, Homo sapiens
  siRNA target sequence for EML5 (NM_183387.1,3226-3244).
gctactgtaagcgatgata

SEQ ID NO: 435954 - DNA, 19 bp, Homo sapiens
  siRNA target sequence for EML5 (NM_183387.1,3227-3245).
ctactgtaagcgatgataa

SEQ ID NO: 435955 - DNA, 19 bp, Homo sapiens
  siRNA target sequence for EML5 (NM_183387.1,3237-3255).
cgatgataaaaccttaaga

SEQ ID NO: 435956 - DNA, 19 bp, Homo sapiens
  siRNA target sequence for EML5 (NM_183387.1,3262-3280).
gatctctcacctagtcatt

SEQ ID NO: 435957 - DNA, 19 bp, Homo sapiens
  siRNA target sequence for EML5 (NM_183387.1,3269-3287).
cacctagtcattgtatgtt

SEQ ID NO: 435958 - DNA, 19 bp, Homo sapiens
  siRNA target sequence for EML5 (NM_183387.1,3384-3402).
ggcaaatgcggatactcta

SEQ ID NO: 435959 - DNA, 19 bp, Homo sapiens
  siRNA target sequence for EML5 (NM_183387.1,3405-3423).
ggatcttgtgtcttttcat

SEQ ID NO: 435960 - DNA, 19 bp, Homo sapiens
  siRNA target sequence for EML5 (NM_183387.1,3488-3506).
catcccatgacagctttat

SEQ ID NO: 435961 - DNA, 19 bp, Homo sapiens
  siRNA target sequence for EML5 (NM_183387.1,3491-3509).
cccatgacagctttataga

SEQ ID NO: 435962 - DNA, 19 bp, Homo sapiens
  siRNA target sequence for EML5 (NM_183387.1,3501-3519).
ctttatagatatatacaat

SEQ ID NO: 435963 - DNA, 19 bp, Homo sapiens
  siRNA target sequence for EML5 (NM_183387.1,3516-3534).
caatgtaatgagtagtaaa

SEQ ID NO: 435964 - DNA, 19 bp, Homo sapiens
  siRNA target sequence for EML5 (NM_183387.1,3553-3571).
ggagctaccagttacataa

SEQ ID NO: 435965 - DNA, 19 bp, Homo sapiens
  siRNA target sequence for EML5 (NM_183387.1,3561-3579).
cagttacataacccatatt

SEQ ID NO: 435966 - DNA, 19 bp, Homo sapiens
  siRNA target sequence for EML5 (NM_183387.1,3563-3581).
gttacataacccatattga

SEQ ID NO: 435967 - DNA, 19 bp, Homo sapiens
  siRNA target sequence for EML5 (NM_183387.1,3574-3592).
catattgattgggatatta

SEQ ID NO: 435968 - DNA, 19 bp, Homo sapiens
  siRNA target sequence for EML5 (NM_183387.1,3619-3637).
ggtgctaaggaacaattat

SEQ ID NO: 435969 - DNA, 19 bp, Homo sapiens
  siRNA target sequence for EML5 (NM_183387.1,3622-3640).
gctaaggaacaattattct

SEQ ID NO: 435970 - DNA, 19 bp, Homo sapiens
  siRNA target sequence for EML5 (NM_183387.1,3711-3729).
gacaagtgtacttggttta

SEQ ID NO: 435971 - DNA, 19 bp, Homo sapiens
  siRNA target sequence for EML5 (NM_183387.1,3748-3766).
ccagtaattggagaagtta

SEQ ID NO: 435972 - DNA, 19 bp, Homo sapiens
  siRNA target sequence for EML5 (NM_183387.1,3950-3968).
ccctaggcggtacagatat

SEQ ID NO: 435973 - DNA, 19 bp, Homo sapiens
  siRNA target sequence for EML5 (NM_183387.1,3952-3970).
ctaggcggtacagatatgt

SEQ ID NO: 435974 - DNA, 19 bp, Homo sapiens
  siRNA target sequence for EML5 (NM_183387.1,3955-3973).
ggcggtacagatatgtctt

SEQ ID NO: 435975 - DNA, 19 bp, Homo sapiens
  siRNA target sequence for EML5 (NM_183387.1,3956-3974).
gcggtacagatatgtcttt

SEQ ID NO: 435976 - DNA, 19 bp, Homo sapiens
  siRNA target sequence for EML5 (NM_183387.1,3957-3975).
cggtacagatatgtcttta

SEQ ID NO: 435977 - DNA, 19 bp, Homo sapiens
  siRNA target sequence for EML5 (NM_183387.1,3958-3976).
ggtacagatatgtctttaa

SEQ ID NO: 435978 - DNA, 19 bp, Homo sapiens
  siRNA target sequence for EML5 (NM_183387.1,3959-3977).
gtacagatatgtctttaat

SEQ ID NO: 435979 - DNA, 19 bp, Homo sapiens
  siRNA target sequence for EML5 (NM_183387.1,4030-4048).
gaagaatccgacattgatt

SEQ ID NO: 435980 - DNA, 19 bp, Homo sapiens
  siRNA target sequence for EML5 (NM_183387.1,4104-4122).
caccatcagagccttatca

SEQ ID NO: 435981 - DNA, 19 bp, Homo sapiens
  siRNA target sequence for EML5 (NM_183387.1,4107-4125).
catcagagccttatcaaca

SEQ ID NO: 435982 - DNA, 19 bp, Homo sapiens
  siRNA target sequence for EML5 (NM_183387.1,4112-4130).
gagccttatcaacaaatat

SEQ ID NO: 435983 - DNA, 19 bp, Homo sapiens
  siRNA target sequence for EML5 (NM_183387.1,4124-4142).
caaatattcgcccaatgtt

SEQ ID NO: 435984 - DNA, 19 bp, Homo sapiens
  siRNA target sequence for EML5 (NM_183387.1,4133-4151).
gcccaatgttaggaatcaa

SEQ ID NO: 435985 - DNA, 19 bp, Homo sapiens
  siRNA target sequence for EML5 (NM_183387.1,4145-4163).
gaatcaagcctcatttaca

SEQ ID NO: 435986 - DNA, 19 bp, Homo sapiens
  siRNA target sequence for EML5 (NM_183387.1,4248-4266).
gaaactccagacaaacaat

SEQ ID NO: 435987 - DNA, 19 bp, Homo sapiens
  siRNA target sequence for EML5 (NM_183387.1,4272-4290).
caagaaaaagagacctata

SEQ ID NO: 435988 - DNA, 19 bp, Homo sapiens
  siRNA target sequence for EML5 (NM_183387.1,4297-4315).
cttgtgttggagctcattt

SEQ ID NO: 435989 - DNA, 19 bp, Homo sapiens
  siRNA target sequence for EML5 (NM_183387.1,4305-4323).
ggagctcatttttggttat

SEQ ID NO: 435990 - DNA, 19 bp, Homo sapiens
  siRNA target sequence for EML5 (NM_183387.1,4308-4326).
gctcatttttggttatcga

SEQ ID NO: 435991 - DNA, 19 bp, Homo sapiens
  siRNA target sequence for EML5 (NM_183387.1,4337-4355).
gtaggaataatgttcacta

SEQ ID NO: 435992 - DNA, 19 bp, Homo sapiens
  siRNA target sequence for EML5 (NM_183387.1,4578-4596).
gaacaagcagactttatct

SEQ ID NO: 435993 - DNA, 19 bp, Homo sapiens
  siRNA target sequence for EML5 (NM_183387.1,4600-4618).
ctaagatgctaccattcaa

SEQ ID NO: 435994 - DNA, 19 bp, Homo sapiens
  siRNA target sequence for EML5 (NM_183387.1,4611-4629).
ccattcaaagggagtatgt

SEQ ID NO: 435995 - DNA, 19 bp, Homo sapiens
  siRNA target sequence for EML5 (NM_183387.1,4643-4661).
gtgctactggcaaactatt

SEQ ID NO: 435996 - DNA, 19 bp, Homo sapiens
  siRNA target sequence for EML5 (NM_183387.1,4646-4664).
ctactggcaaactattgct

SEQ ID NO: 435997 - DNA, 19 bp, Homo sapiens
  siRNA target sequence for EML5 (NM_183387.1,4671-4689).
gggactagacccagaacat

SEQ ID NO: 435998 - DNA, 19 bp, Homo sapiens
  siRNA target sequence for EML5 (NM_183387.1,4672-4690).
ggactagacccagaacata

SEQ ID NO: 435999 - DNA, 19 bp, Homo sapiens
  siRNA target sequence for EML5 (NM_183387.1,4675-4693).
ctagacccagaacatacta

SEQ ID NO: 436000 - DNA, 19 bp, Homo sapiens
  siRNA target sequence for EML5 (NM_183387.1,4678-4696).
gacccagaacatactatta

SEQ ID NO: 436001 - DNA, 19 bp, Homo sapiens
  siRNA target sequence for EML5 (NM_183387.1,4681-4699).
ccagaacatactattacca

SEQ ID NO: 436002 - DNA, 19 bp, Homo sapiens
  siRNA target sequence for EML5 (NM_183387.1,4684-4702).
gaacatactattaccattt

SEQ ID NO: 436003 - DNA, 19 bp, Homo sapiens
  siRNA target sequence for EML5 (NM_183387.1,4687-4705).
catactattaccatttgga

SEQ ID NO: 436004 - DNA, 19 bp, Homo sapiens
  siRNA target sequence for EML5 (NM_183387.1,4739-4757).
ctggtcacaatcaacgtat

SEQ ID NO: 436005 - DNA, 19 bp, Homo sapiens
  siRNA target sequence for EML5 (NM_183387.1,4741-4759).
ggtcacaatcaacgtattt

SEQ ID NO: 436006 - DNA, 19 bp, Homo sapiens
  siRNA target sequence for EML5 (NM_183387.1,4742-4760).
gtcacaatcaacgtatttt

SEQ ID NO: 436007 - DNA, 19 bp, Homo sapiens
  siRNA target sequence for EML5 (NM_183387.1,4899-4917).
gaccatgctcgctattgca

SEQ ID NO: 436008 - DNA, 19 bp, Homo sapiens
  siRNA target sequence for EML5 (NM_183387.1,4901-4919).
ccatgctcgctattgcatt

SEQ ID NO: 436009 - DNA, 19 bp, Homo sapiens
  siRNA target sequence for EML5 (NM_183387.1,4902-4920).
catgctcgctattgcattt

SEQ ID NO: 436010 - DNA, 19 bp, Homo sapiens
  siRNA target sequence for EML5 (NM_183387.1,4905-4923).
gctcgctattgcatttggt

SEQ ID NO: 436011 - DNA, 19 bp, Homo sapiens
  siRNA target sequence for EML5 (NM_183387.1,4978-4996).
gatcacatattgtgtagaa

SEQ ID NO: 436012 - DNA, 19 bp, Homo sapiens
  siRNA target sequence for EML5 (NM_183387.1,5042-5060).
ccctgcgagatggacttat

SEQ ID NO: 436013 - DNA, 19 bp, Homo sapiens
  siRNA target sequence for EML5 (NM_183387.1,5076-5094).
ggaaaggccgtcaaaagaa

SEQ ID NO: 436014 - DNA, 19 bp, Homo sapiens
  siRNA target sequence for EML5 (NM_183387.1,5260-5278).
gcttgtaatattttagtta

SEQ ID NO: 436015 - DNA, 19 bp, Homo sapiens
  siRNA target sequence for EML5 (NM_183387.1,5301-5319).
ctggggactagcaacacat

SEQ ID NO: 436016 - DNA, 19 bp, Homo sapiens
  siRNA target sequence for EML5 (NM_183387.1,5420-5438).
ctgctcgtactgtgtgtta

SEQ ID NO: 436017 - DNA, 19 bp, Homo sapiens
  siRNA target sequence for EML5 (NM_183387.1,5422-5440).
gctcgtactgtgtgttaca

SEQ ID NO: 436018 - DNA, 19 bp, Homo sapiens
  siRNA target sequence for EML5 (NM_183387.1,5457-5475).
ggtggctattggaatgaaa

SEQ ID NO: 436019 - DNA, 19 bp, Homo sapiens
  siRNA target sequence for EML5 (NM_183387.1,5460-5478).
ggctattggaatgaaaaat

SEQ ID NO: 436020 - DNA, 19 bp, Homo sapiens
  siRNA target sequence for EML5 (NM_183387.1,5535-5553).
caggagatgtgcaatccat

SEQ ID NO: 436021 - DNA, 19 bp, Homo sapiens
  siRNA target sequence for EML5 (NM_183387.1,5550-5568).
ccatgatatcagatttagt

SEQ ID NO: 436022 - DNA, 19 bp, Homo sapiens
  siRNA target sequence for EML5 (NM_183387.1,5602-5620).
gagaactcagtggattttt

SEQ ID NO: 436023 - DNA, 19 bp, Homo sapiens
  siRNA target sequence for EML5 (NM_183387.1,5700-5718).
ctctgcagatagcagttat

SEQ ID NO: 436024 - DNA, 19 bp, Homo sapiens
  siRNA target sequence for EML5 (NM_183387.1,5727-5745).
ctctagtggctgctataaa

SEQ ID NO: 436025 - DNA, 19 bp, Homo sapiens
  siRNA target sequence for EML5 (NM_183387.1,5738-5756).
gctataaacggcatgtcta

SEQ ID NO: 436026 - DNA, 19 bp, Homo sapiens
  siRNA target sequence for EML5 (NM_183387.1,5739-5757).
ctataaacggcatgtctat

SEQ ID NO: 436027 - DNA, 19 bp, Homo sapiens
  siRNA target sequence for EML5 (NM_183387.1,5791-5809).
gccgctattgacagaatta

SEQ ID NO: 436028 - DNA, 19 bp, Homo sapiens
  siRNA target sequence for EML5 (NM_183387.1,5793-5811).
cgctattgacagaattact

SEQ ID NO: 436029 - DNA, 19 bp, Homo sapiens
  siRNA target sequence for EML5 (NM_183387.1,5814-5832).
ggctacatggactagtatt

SEQ ID NO: 436030 - DNA, 19 bp, Homo sapiens
  siRNA target sequence for EML5 (NM_183387.1,5816-5834).
ctacatggactagtattct

SEQ ID NO: 436031 - DNA, 19 bp, Homo sapiens
  siRNA target sequence for EML5 (NM_183387.1,5859-5877).
gtccagacatgctgagaaa

SEQ ID NO: 436032 - DNA, 19 bp, Homo sapiens
  siRNA target sequence for EML5 (NM_183387.1,5935-5953).
gactttggcatggttaagt

SEQ ID NO: 436033 - DNA, 19 bp, Homo sapiens
  siRNA target sequence for EML5 (NM_183387.1,6011-6029).
cgccccatgtgacaaatat

SEQ ID NO: 436034 - DNA, 19 bp, Homo sapiens
  siRNA target sequence for EML5 (NM_183387.1,6012-6030).
gccccatgtgacaaatatt

SEQ ID NO: 436035 - DNA, 19 bp, Homo sapiens
  siRNA target sequence for EML5 (NM_183387.1,6016-6034).
catgtgacaaatattcgat

SEQ ID NO: 436036 - DNA, 19 bp, Homo sapiens
  siRNA target sequence for EML5 (NM_183387.1,6019-6037).
gtgacaaatattcgattta

SEQ ID NO: 436037 - DNA, 19 bp, Homo sapiens
  siRNA target sequence for EML5 (NM_183387.1,6041-6059).
gtggtgatcgacatgttgt

SEQ ID NO: 436038 - DNA, 19 bp, Homo sapiens
  siRNA target sequence for EML5 (NM_183387.1,6071-6089).
gtgatgactgcagcttatt

SEQ ID NO: 436039 - DNA, 19 bp, Homo sapiens
  siRNA target sequence for FBXO25 (NM_183421.1,1253-1271).
ggactaccatcttgcttta

SEQ ID NO: 436040 - DNA, 19 bp, Homo sapiens
  siRNA target sequence for FBXO25 (NM_183421.1,1256-1274).
ctaccatcttgctttacta

SEQ ID NO: 436041 - DNA, 19 bp, Homo sapiens
  siRNA target sequence for CREB3L2 (NM_194071.1,451-469).
cacgcacttctcagaactt

SEQ ID NO: 436042 - DNA, 19 bp, Homo sapiens
  siRNA target sequence for CREB3L2 (NM_194071.1,453-471).
cgcacttctcagaacttct

SEQ ID NO: 436043 - DNA, 19 bp, Homo sapiens
  siRNA target sequence for CREB3L2 (NM_194071.1,525-543).
cagagaagagtgtgtcaat

SEQ ID NO: 436044 - DNA, 19 bp, Homo sapiens
  siRNA target sequence for CREB3L2 (NM_194071.1,852-870).
cctcgtgccagaccattat

SEQ ID NO: 436045 - DNA, 19 bp, Homo sapiens
  siRNA target sequence for CREB3L2 (NM_194071.1,856-874).
gtgccagaccattattcct

SEQ ID NO: 436046 - DNA, 19 bp, Homo sapiens
  siRNA target sequence for CREB3L2 (NM_194071.1,858-876).
gccagaccattattcctaa

SEQ ID NO: 436047 - DNA, 19 bp, Homo sapiens
  siRNA target sequence for CREB3L2 (NM_194071.1,860-878).
cagaccattattcctaaaa

SEQ ID NO: 436048 - DNA, 19 bp, Homo sapiens
  siRNA target sequence for CREB3L2 (NM_194071.1,862-880).
gaccattattcctaaaatt

SEQ ID NO: 436049 - DNA, 19 bp, Homo sapiens
  siRNA target sequence for CREB3L2 (NM_194071.1,1102-1120).
cctcacggctcctcataaa

SEQ ID NO: 436050 - DNA, 19 bp, Homo sapiens
  siRNA target sequence for CREB3L2 (NM_194071.1,1197-1215).
ccaaattgcccctgtcaaa

SEQ ID NO: 436051 - DNA, 19 bp, Homo sapiens
  siRNA target sequence for CREB3L2 (NM_194071.1,1373-1391).
gttctagagaacactaata

SEQ ID NO: 436052 - DNA, 19 bp, Homo sapiens
  siRNA target sequence for CREB3L2 (NM_194071.1,1376-1394).
ctagagaacactaatagga

SEQ ID NO: 436053 - DNA, 19 bp, Homo sapiens
  siRNA target sequence for CREB3L2 (NM_194071.1,1518-1536).
cattcggcagcttctttca

SEQ ID NO: 436054 - DNA, 19 bp, Homo sapiens
  siRNA target sequence for CREB3L2 (NM_194071.1,1637-1655).
ctgatctacgaggaacatt

SEQ ID NO: 436055 - DNA, 19 bp, Homo sapiens
  siRNA target sequence for CREB3L2 (NM_194071.1,1762-1780).
ggatcttccccatttcatt

SEQ ID NO: 436056 - DNA, 19 bp, Homo sapiens
  siRNA target sequence for CREB3L2 (NM_194071.1,1763-1781).
gatcttccccatttcatta

SEQ ID NO: 436057 - DNA, 19 bp, Homo sapiens
  siRNA target sequence for CREB3L2 (NM_194071.1,1855-1873).
ggggaatgaaacactaaaa

SEQ ID NO: 436058 - DNA, 19 bp, Homo sapiens
  siRNA target sequence for CREB3L2 (NM_194071.1,1866-1884).
cactaaaagttgtagaact

SEQ ID NO: 436059 - DNA, 19 bp, Homo sapiens
  siRNA target sequence for HILS1 (NM_194072.1,271-289).
cgtccttgatcctctttct

SEQ ID NO: 436060 - DNA, 19 bp, Homo sapiens
  siRNA target sequence for HILS1 (NM_194072.1,333-351).
ccatcagtgctgttgaact

SEQ ID NO: 436061 - DNA, 19 bp, Homo sapiens
  siRNA target sequence for HILS1 (NM_194072.1,337-355).
cagtgctgttgaactcaaa

SEQ ID NO: 436062 - DNA, 19 bp, Homo sapiens
  siRNA target sequence for HILS1 (NM_194072.1,481-499).
caaggggacctgcaagtat

SEQ ID NO: 436063 - DNA, 19 bp, Homo sapiens
  siRNA target sequence for HILS1 (NM_194072.1,551-569).
gcccgaaatgcctatcact

SEQ ID NO: 436064 - DNA, 19 bp, Homo sapiens
  siRNA target sequence for HILS1 (NM_194072.1,552-570).
cccgaaatgcctatcactt

SEQ ID NO: 436065 - DNA, 19 bp, Homo sapiens
  siRNA target sequence for LOC91752 (NM_194250.1,640-658).
ggacactttcgcaacatca

SEQ ID NO: 436066 - DNA, 19 bp, Homo sapiens
  siRNA target sequence for LOC91752 (NM_194250.1,641-659).
gacactttcgcaacatcaa

SEQ ID NO: 436067 - DNA, 19 bp, Homo sapiens
  siRNA target sequence for LOC91752 (NM_194250.1,650-668).
gcaacatcaagggagtttt

SEQ ID NO: 436068 - DNA, 19 bp, Homo sapiens
  siRNA target sequence for LOC91752 (NM_194250.1,713-731).
ctgagaaggaaaataccat

SEQ ID NO: 436069 - DNA, 19 bp, Homo sapiens
  siRNA target sequence for LOC91752 (NM_194250.1,734-752).
caaaagctctggaagatct

SEQ ID NO: 436070 - DNA, 19 bp, Homo sapiens
  siRNA target sequence for LOC91752 (NM_194250.1,996-1014).
ccccatgttcaaatcaaca

SEQ ID NO: 436071 - DNA, 19 bp, Homo sapiens
  siRNA target sequence for LOC91752 (NM_194250.1,999-1017).
catgttcaaatcaacaact

SEQ ID NO: 436072 - DNA, 19 bp, Homo sapiens
  siRNA target sequence for LOC91752 (NM_194250.1,1002-1020).
gttcaaatcaacaactgtt

SEQ ID NO: 436073 - DNA, 19 bp, Homo sapiens
  siRNA target sequence for LOC91752 (NM_194250.1,1081-1099).
cagcaagatttcaaatata

SEQ ID NO: 436074 - DNA, 19 bp, Homo sapiens
  siRNA target sequence for LOC91752 (NM_194250.1,1083-1101).
gcaagatttcaaatatact

SEQ ID NO: 436075 - DNA, 19 bp, Homo sapiens
  siRNA target sequence for LOC91752 (NM_194250.1,1156-1174).
gaaagtgcaaataattata

SEQ ID NO: 436076 - DNA, 19 bp, Homo sapiens
  siRNA target sequence for LOC91752 (NM_194250.1,1209-1227).
ggggattcacagacacaaa

SEQ ID NO: 436077 - DNA, 19 bp, Homo sapiens
  siRNA target sequence for LOC91752 (NM_194250.1,1293-1311).
ctctgaatacagtgatgat

SEQ ID NO: 436078 - DNA, 19 bp, Homo sapiens
  siRNA target sequence for LOC91752 (NM_194250.1,1384-1402).
ccaacagatgtgcttttga

SEQ ID NO: 436079 - DNA, 19 bp, Homo sapiens
  siRNA target sequence for LOC91752 (NM_194250.1,1401-1419).
gagttctgaggagaaaact

SEQ ID NO: 436080 - DNA, 19 bp, Homo sapiens
  siRNA target sequence for LOC91752 (NM_194250.1,1440-1458).
ggcaatgtgcagagacaaa

SEQ ID NO: 436081 - DNA, 19 bp, Homo sapiens
  siRNA target sequence for LOC91752 (NM_194250.1,1529-1547).
gcaagtttcaacttcagtt

SEQ ID NO: 436082 - DNA, 19 bp, Homo sapiens
  siRNA target sequence for LOC91752 (NM_194250.1,1579-1597).
gtcccattagcagatcaaa

SEQ ID NO: 436083 - DNA, 19 bp, Homo sapiens
  siRNA target sequence for LOC91752 (NM_194250.1,1581-1599).
cccattagcagatcaaata

SEQ ID NO: 436084 - DNA, 19 bp, Homo sapiens
  siRNA target sequence for LOC91752 (NM_194250.1,1608-1626).
gagtgttgttattaatgaa

SEQ ID NO: 436085 - DNA, 19 bp, Homo sapiens
  siRNA target sequence for LOC91752 (NM_194250.1,1633-1651).
cctgttagtggtaacagtt

SEQ ID NO: 436086 - DNA, 19 bp, Homo sapiens
  siRNA target sequence for LOC91752 (NM_194250.1,1634-1652).
ctgttagtggtaacagttt

SEQ ID NO: 436087 - DNA, 19 bp, Homo sapiens
  siRNA target sequence for LOC91752 (NM_194250.1,1640-1658).
gtggtaacagttttgagtt

SEQ ID NO: 436088 - DNA, 19 bp, Homo sapiens
  siRNA target sequence for LOC91752 (NM_194250.1,1676-1694).
cagttcttgacatgtctaa

SEQ ID NO: 436089 - DNA, 19 bp, Homo sapiens
  siRNA target sequence for LOC91752 (NM_194250.1,1686-1704).
catgtctaatgattgcata

SEQ ID NO: 436090 - DNA, 19 bp, Homo sapiens
  siRNA target sequence for LOC91752 (NM_194250.1,1691-1709).
ctaatgattgcatatctgt

SEQ ID NO: 436091 - DNA, 19 bp, Homo sapiens
  siRNA target sequence for LOC91752 (NM_194250.1,1791-1809).
ggccccttcaaatactgaa

SEQ ID NO: 436092 - DNA, 19 bp, Homo sapiens
  siRNA target sequence for LOC91752 (NM_194250.1,1812-1830).
ggttaacataactatacat

SEQ ID NO: 436093 - DNA, 19 bp, Homo sapiens
  siRNA target sequence for LOC91752 (NM_194250.1,1853-1871).
gacaatgtgagccatttgt

SEQ ID NO: 436094 - DNA, 19 bp, Homo sapiens
  siRNA target sequence for LOC91752 (NM_194250.1,1865-1883).
catttgtacctgtccttaa

SEQ ID NO: 436095 - DNA, 19 bp, Homo sapiens
  siRNA target sequence for LOC91752 (NM_194250.1,1873-1891).
cctgtccttaacaaacaca

SEQ ID NO: 436096 - DNA, 19 bp, Homo sapiens
  siRNA target sequence for LOC91752 (NM_194250.1,1879-1897).
cttaacaaacacagatcta

SEQ ID NO: 436097 - DNA, 19 bp, Homo sapiens
  siRNA target sequence for LOC91752 (NM_194250.1,1884-1902).
caaacacagatctacagtt

SEQ ID NO: 436098 - DNA, 19 bp, Homo sapiens
  siRNA target sequence for LOC91752 (NM_194250.1,1926-1944).
ggtttatacaactacgaaa

SEQ ID NO: 436099 - DNA, 19 bp, Homo sapiens
  siRNA target sequence for LOC91752 (NM_194250.1,1940-1958).
cgaaaccatcaatttccta

SEQ ID NO: 436100 - DNA, 19 bp, Homo sapiens
  siRNA target sequence for LOC91752 (NM_194250.1,1961-1979).
gctgtaatcctctatgttt

SEQ ID NO: 436101 - DNA, 19 bp, Homo sapiens
  siRNA target sequence for LOC91752 (NM_194250.1,1962-1980).
ctgtaatcctctatgtttt

SEQ ID NO: 436102 - DNA, 19 bp, Homo sapiens
  siRNA target sequence for LOC91752 (NM_194250.1,2025-2043).
gccagacttaaaagatctt

SEQ ID NO: 436103 - DNA, 19 bp, Homo sapiens
  siRNA target sequence for LOC91752 (NM_194250.1,2072-2090).
gcatgggaccactttcaga

SEQ ID NO: 436104 - DNA, 19 bp, Homo sapiens
  siRNA target sequence for LOC91752 (NM_194250.1,2113-2131).
ggactcactgattatgaaa

SEQ ID NO: 436105 - DNA, 19 bp, Homo sapiens
  siRNA target sequence for LOC91752 (NM_194250.1,2167-2185).
cctcttttggctgatgata

SEQ ID NO: 436106 - DNA, 19 bp, Homo sapiens
  siRNA target sequence for LOC91752 (NM_194250.1,2168-2186).
ctcttttggctgatgatat

SEQ ID NO: 436107 - DNA, 19 bp, Homo sapiens
  siRNA target sequence for LOC91752 (NM_194250.1,2225-2243).
caggtcagaggtataaaaa

SEQ ID NO: 436108 - DNA, 19 bp, Homo sapiens
  siRNA target sequence for LOC91752 (NM_194250.1,2228-2246).
gtcagaggtataaaaacat

SEQ ID NO: 436109 - DNA, 19 bp, Homo sapiens
  siRNA target sequence for LOC91752 (NM_194250.1,2304-2322).
ggacactctagatgaaaaa

SEQ ID NO: 436110 - DNA, 19 bp, Homo sapiens
  siRNA target sequence for LOC91752 (NM_194250.1,2325-2343).
caacaaaataaggttgaaa

SEQ ID NO: 436111 - DNA, 19 bp, Homo sapiens
  siRNA target sequence for LOC91752 (NM_194250.1,2353-2371).
gaatactggttccataaaa

SEQ ID NO: 436112 - DNA, 19 bp, Homo sapiens
  siRNA target sequence for LOC91752 (NM_194250.1,2358-2376).
ctggttccataaaagtaga

SEQ ID NO: 436113 - DNA, 19 bp, Homo sapiens
  siRNA target sequence for LOC91752 (NM_194250.1,2483-2501).
ctgggaaatatctattgga

SEQ ID NO: 436114 - DNA, 19 bp, Homo sapiens
  siRNA target sequence for LOC91752 (NM_194250.1,2530-2548).
gcagagcaattattagact

SEQ ID NO: 436115 - DNA, 19 bp, Homo sapiens
  siRNA target sequence for LOC91752 (NM_194250.1,2613-2631).
gtgtaaaacatggaatact

SEQ ID NO: 436116 - DNA, 19 bp, Homo sapiens
  siRNA target sequence for LOC91752 (NM_194250.1,2640-2658).
cacttatgatactatcagt

SEQ ID NO: 436117 - DNA, 19 bp, Homo sapiens
  siRNA target sequence for LOC91752 (NM_194250.1,2657-2675).
gttctaaaaaccactgtaa

SEQ ID NO: 436118 - DNA, 19 bp, Homo sapiens
  siRNA target sequence for LOC91752 (NM_194250.1,2672-2690).
gtaaaaagaacacaatact

SEQ ID NO: 436119 - DNA, 19 bp, Homo sapiens
  siRNA target sequence for LOC91752 (NM_194250.1,2699-2717).
gacaatcaaatgcaacaat

SEQ ID NO: 436120 - DNA, 19 bp, Homo sapiens
  siRNA target sequence for LOC91752 (NM_194250.1,2718-2736).
gatacattctgggaaacat

SEQ ID NO: 436121 - DNA, 19 bp, Homo sapiens
  siRNA target sequence for LOC91752 (NM_194250.1,2842-2860).
cagaatcaggctgttaaaa

SEQ ID NO: 436122 - DNA, 19 bp, Homo sapiens
  siRNA target sequence for LOC91752 (NM_194250.1,2852-2870).
ctgttaaaagaggttacaa

SEQ ID NO: 436123 - DNA, 19 bp, Homo sapiens
  siRNA target sequence for LOC91752 (NM_194250.1,2854-2872).
gttaaaagaggttacaatt

SEQ ID NO: 436124 - DNA, 19 bp, Homo sapiens
  siRNA target sequence for LOC91752 (NM_194250.1,2898-2916).
ctatcgaaaacgtagacaa

SEQ ID NO: 436125 - DNA, 19 bp, Homo sapiens
  siRNA target sequence for LOC91752 (NM_194250.1,2902-2920).
cgaaaacgtagacaacatt

SEQ ID NO: 436126 - DNA, 19 bp, Homo sapiens
  siRNA target sequence for LOC91752 (NM_194250.1,2908-2926).
cgtagacaacattcacatt

SEQ ID NO: 436127 - DNA, 19 bp, Homo sapiens
  siRNA target sequence for LOC91752 (NM_194250.1,2912-2930).
gacaacattcacattctta

SEQ ID NO: 436128 - DNA, 19 bp, Homo sapiens
  siRNA target sequence for LOC91752 (NM_194250.1,2985-3003).
gccaccaagtacttcagtt

SEQ ID NO: 436129 - DNA, 19 bp, Homo sapiens
  siRNA target sequence for LOC91752 (NM_194250.1,3004-3022).
gctccctgcaagcctaaaa

SEQ ID NO: 436130 - DNA, 19 bp, Homo sapiens
  siRNA target sequence for LOC91752 (NM_194250.1,3007-3025).
ccctgcaagcctaaaaaga

SEQ ID NO: 436131 - DNA, 19 bp, Homo sapiens
  siRNA target sequence for LOC91752 (NM_194250.1,3008-3026).
cctgcaagcctaaaaagaa

SEQ ID NO: 436132 - DNA, 19 bp, Homo sapiens
  siRNA target sequence for LOC91752 (NM_194250.1,3047-3065).
gattccaccccggatttga

SEQ ID NO: 436133 - DNA, 19 bp, Homo sapiens
  siRNA target sequence for LOC91752 (NM_194250.1,3051-3069).
ccaccccggatttgaaact

SEQ ID NO: 436134 - DNA, 19 bp, Homo sapiens
  siRNA target sequence for LOC91752 (NM_194250.1,3089-3107).
cagattatcccgtgaaaga

SEQ ID NO: 436135 - DNA, 19 bp, Homo sapiens
  siRNA target sequence for LOC91752 (NM_194250.1,3097-3115).
cccgtgaaagacaattctt

SEQ ID NO: 436136 - DNA, 19 bp, Homo sapiens
  siRNA target sequence for LOC91752 (NM_194250.1,3124-3142).
cctctggataggttaataa

SEQ ID NO: 436137 - DNA, 19 bp, Homo sapiens
  siRNA target sequence for LOC91752 (NM_194250.1,3129-3147).
ggataggttaataagtgaa

SEQ ID NO: 436138 - DNA, 19 bp, Homo sapiens
  siRNA target sequence for LOC91752 (NM_194250.1,3134-3152).
ggttaataagtgaagacaa

SEQ ID NO: 436139 - DNA, 19 bp, Homo sapiens
  siRNA target sequence for LOC91752 (NM_194250.1,3135-3153).
gttaataagtgaagacaaa

SEQ ID NO: 436140 - DNA, 19 bp, Homo sapiens
  siRNA target sequence for LOC91752 (NM_194250.1,3231-3249).
gtctttccaccctaacaat

SEQ ID NO: 436141 - DNA, 19 bp, Homo sapiens
  siRNA target sequence for LOC91752 (NM_194250.1,3233-3251).
ctttccaccctaacaatct

SEQ ID NO: 436142 - DNA, 19 bp, Homo sapiens
  siRNA target sequence for LOC91752 (NM_194250.1,3307-3325).
ggtgaattgtcagatgttt

SEQ ID NO: 436143 - DNA, 19 bp, Homo sapiens
  siRNA target sequence for LOC91752 (NM_194250.1,3390-3408).
cctgcttgaacacaaagaa

SEQ ID NO: 436144 - DNA, 19 bp, Homo sapiens
  siRNA target sequence for LOC91752 (NM_194250.1,3445-3463).
ccttttcaggtgcctaata

SEQ ID NO: 436145 - DNA, 19 bp, Homo sapiens
  siRNA target sequence for LOC91752 (NM_194250.1,3446-3464).
cttttcaggtgcctaatat

SEQ ID NO: 436146 - DNA, 19 bp, Homo sapiens
  siRNA target sequence for LOC91752 (NM_194250.1,3451-3469).
caggtgcctaatattgaaa

SEQ ID NO: 436147 - DNA, 19 bp, Homo sapiens
  siRNA target sequence for LOC91752 (NM_194250.1,3483-3501).
gtcacagcctaaatcctat

SEQ ID NO: 436148 - DNA, 19 bp, Homo sapiens
  siRNA target sequence for LOC91752 (NM_194250.1,3497-3515).
cctatctttgccattatga

SEQ ID NO: 436149 - DNA, 19 bp, Homo sapiens
  siRNA target sequence for LOC91752 (NM_194250.1,3562-3580).
gagtggctgcgttataatt

SEQ ID NO: 436150 - DNA, 19 bp, Homo sapiens
  siRNA target sequence for LOC91752 (NM_194250.1,3564-3582).
gtggctgcgttataattca

SEQ ID NO: 436151 - DNA, 19 bp, Homo sapiens
  siRNA target sequence for LOC91752 (NM_194250.1,3602-3620).
caccattaccattcaaaga

SEQ ID NO: 436152 - DNA, 19 bp, Homo sapiens
  siRNA target sequence for LOC91752 (NM_194250.1,3625-3643).
catgtcagtggtcatactt

SEQ ID NO: 436153 - DNA, 19 bp, Homo sapiens
  siRNA target sequence for LOC91752 (NM_194250.1,3657-3675).
gcaaatcctggctccatta

SEQ ID NO: 436154 - DNA, 19 bp, Homo sapiens
  siRNA target sequence for LOC91752 (NM_194250.1,3663-3681).
cctggctccattagcttta

SEQ ID NO: 436155 - DNA, 19 bp, Homo sapiens
  siRNA target sequence for LOC91752 (NM_194250.1,3666-3684).
ggctccattagctttacca

SEQ ID NO: 436156 - DNA, 19 bp, Homo sapiens
  siRNA target sequence for LOC91752 (NM_194250.1,3682-3700).
ccagagcaagcattattga

SEQ ID NO: 436157 - DNA, 19 bp, Homo sapiens
  siRNA target sequence for LOC91752 (NM_194250.1,3683-3701).
cagagcaagcattattgat

SEQ ID NO: 436158 - DNA, 19 bp, Homo sapiens
  siRNA target sequence for LOC91752 (NM_194250.1,3884-3902).
ctatccatcacactgtttt

SEQ ID NO: 436159 - DNA, 19 bp, Homo sapiens
  siRNA target sequence for LOC91752 (NM_194250.1,3947-3965).
ctgcaggaacctttaaagt

SEQ ID NO: 436160 - DNA, 19 bp, Homo sapiens
  siRNA target sequence for MOPT (NM_194270.1,345-363).
cagtatatgaaggacaatt

SEQ ID NO: 436161 - DNA, 19 bp, Homo sapiens
  siRNA target sequence for MOPT (NM_194270.1,353-371).
gaaggacaatttaaggata

SEQ ID NO: 436162 - DNA, 19 bp, Homo sapiens
  siRNA target sequence for MOPT (NM_194270.1,403-421).
cccaaatggggcaaagtat

SEQ ID NO: 436163 - DNA, 19 bp, Homo sapiens
  siRNA target sequence for MOPT (NM_194270.1,404-422).
ccaaatggggcaaagtata

SEQ ID NO: 436164 - DNA, 19 bp, Homo sapiens
  siRNA target sequence for MOPT (NM_194270.1,412-430).
ggcaaagtatactggaaat

SEQ ID NO: 436165 - DNA, 19 bp, Homo sapiens
  siRNA target sequence for MOPT (NM_194270.1,413-431).
gcaaagtatactggaaatt

SEQ ID NO: 436166 - DNA, 19 bp, Homo sapiens
  siRNA target sequence for MOPT (NM_194270.1,453-471).
gtgaaggggaatatactga

SEQ ID NO: 436167 - DNA, 19 bp, Homo sapiens
  siRNA target sequence for MOPT (NM_194270.1,455-473).
gaaggggaatatactgata

SEQ ID NO: 436168 - DNA, 19 bp, Homo sapiens
  siRNA target sequence for MOPT (NM_194270.1,459-477).
gggaatatactgatatcca

SEQ ID NO: 436169 - DNA, 19 bp, Homo sapiens
  siRNA target sequence for MOPT (NM_194270.1,460-478).
ggaatatactgatatccaa

SEQ ID NO: 436170 - DNA, 19 bp, Homo sapiens
  siRNA target sequence for MOPT (NM_194270.1,515-533).
gctccagacctgaaattaa

SEQ ID NO: 436171 - DNA, 19 bp, Homo sapiens
  siRNA target sequence for MOPT (NM_194270.1,516-534).
ctccagacctgaaattaaa

SEQ ID NO: 436172 - DNA, 19 bp, Homo sapiens
  siRNA target sequence for RBPMS2 (NM_194272.1,363-381).
cctccctgtggacattaaa

SEQ ID NO: 436173 - DNA, 19 bp, Homo sapiens
  siRNA target sequence for RBPMS2 (NM_194272.1,408-426).
gccgttcaaggggtatgaa

SEQ ID NO: 436174 - DNA, 19 bp, Homo sapiens
  siRNA target sequence for RBPMS2 (NM_194272.1,516-534).
gaacggtattcgctttgat

SEQ ID NO: 436175 - DNA, 19 bp, Homo sapiens
  siRNA target sequence for RBPMS2 (NM_194272.1,528-546).
ctttgatcccgaaaatcca

SEQ ID NO: 436176 - DNA, 19 bp, Homo sapiens
  siRNA target sequence for FLJ20209 (NM_194276.1,1138-1156).
ccactcagaccccatctta

SEQ ID NO: 436177 - DNA, 19 bp, Homo sapiens
  siRNA target sequence for FLJ20209 (NM_194276.1,1238-1256).
ccacgctgacgatgttctt

SEQ ID NO: 436178 - DNA, 19 bp, Homo sapiens
  siRNA target sequence for LOC90167 (NM_194277.1,243-261).
catccgggaaggcattgtt

SEQ ID NO: 436179 - DNA, 19 bp, Homo sapiens
  siRNA target sequence for LOC90167 (NM_194277.1,246-264).
ccgggaaggcattgtttaa

SEQ ID NO: 436180 - DNA, 19 bp, Homo sapiens
  siRNA target sequence for LOC90167 (NM_194277.1,266-284).
ctgagttgcagccatctaa

SEQ ID NO: 436181 - DNA, 19 bp, Homo sapiens
  siRNA target sequence for LOC90167 (NM_194277.1,268-286).
gagttgcagccatctaaat

SEQ ID NO: 436182 - DNA, 19 bp, Homo sapiens
  siRNA target sequence for LOC90167 (NM_194277.1,270-288).
gttgcagccatctaaatct

SEQ ID NO: 436183 - DNA, 19 bp, Homo sapiens
  siRNA target sequence for LOC90167 (NM_194277.1,363-381).
ccataacaaagcaggtaaa

SEQ ID NO: 436184 - DNA, 19 bp, Homo sapiens
  siRNA target sequence for LOC90167 (NM_194277.1,448-466).
ggaagaacttacaaggtat

SEQ ID NO: 436185 - DNA, 19 bp, Homo sapiens
  siRNA target sequence for LOC90167 (NM_194277.1,512-530).
ccatgcagtgacaactgta

SEQ ID NO: 436186 - DNA, 19 bp, Homo sapiens
  siRNA target sequence for LOC90167 (NM_194277.1,531-549).
cagcgttgatggtatctca

SEQ ID NO: 436187 - DNA, 19 bp, Homo sapiens
  siRNA target sequence for LOC90167 (NM_194277.1,538-556).
gatggtatctcacatctta

SEQ ID NO: 436188 - DNA, 19 bp, Homo sapiens
  siRNA target sequence for LOC90167 (NM_194277.1,541-559).
ggtatctcacatcttacaa

SEQ ID NO: 436189 - DNA, 19 bp, Homo sapiens
  siRNA target sequence for LOC90167 (NM_194277.1,546-564).
ctcacatcttacaatcaga

SEQ ID NO: 436190 - DNA, 19 bp, Homo sapiens
  siRNA target sequence for LOC90167 (NM_194277.1,595-613).
gaagcatctggcacaaact

SEQ ID NO: 436191 - DNA, 19 bp, Homo sapiens
  siRNA target sequence for LOC90167 (NM_194277.1,604-622).
ggcacaaactcggtactta

SEQ ID NO: 436192 - DNA, 19 bp, Homo sapiens
  siRNA target sequence for LOC90167 (NM_194277.1,608-626).
caaactcggtacttaccaa

SEQ ID NO: 436193 - DNA, 19 bp, Homo sapiens
  siRNA target sequence for LOC90167 (NM_194277.1,624-642).
caaaccaagactgtttaga

SEQ ID NO: 436194 - DNA, 19 bp, Homo sapiens
  siRNA target sequence for LOC90167 (NM_194277.1,645-663).
gcaagatcatgcactttca

SEQ ID NO: 436195 - DNA, 19 bp, Homo sapiens
  siRNA target sequence for LOC90167 (NM_194277.1,646-664).
caagatcatgcactttcat

SEQ ID NO: 436196 - DNA, 19 bp, Homo sapiens
  siRNA target sequence for LOC90167 (NM_194277.1,679-697).
caggagcccagctgaatct

SEQ ID NO: 436197 - DNA, 19 bp, Homo sapiens
  siRNA target sequence for LOC90167 (NM_194277.1,812-830).
ctggtgttacggggaaata

SEQ ID NO: 436198 - DNA, 19 bp, Homo sapiens
  siRNA target sequence for LOC90167 (NM_194277.1,814-832).
ggtgttacggggaaataca

SEQ ID NO: 436199 - DNA, 19 bp, Homo sapiens
  siRNA target sequence for LOC90167 (NM_194277.1,815-833).
gtgttacggggaaatacaa

SEQ ID NO: 436200 - DNA, 19 bp, Homo sapiens
  siRNA target sequence for LOC90167 (NM_194277.1,843-861).
cttttaactgggctaaaat

SEQ ID NO: 436201 - DNA, 19 bp, Homo sapiens
  siRNA target sequence for LOC90167 (NM_194277.1,985-1003).
gacttgtgtggaataccat

SEQ ID NO: 436202 - DNA, 19 bp, Homo sapiens
  siRNA target sequence for LOC90167 (NM_194277.1,1020-1038).
cggaagagcccaaatcaaa

SEQ ID NO: 436203 - DNA, 19 bp, Homo sapiens
  siRNA target sequence for LOC90167 (NM_194277.1,1137-1155).
gcttgccatttgaaaggaa

SEQ ID NO: 436204 - DNA, 19 bp, Homo sapiens
  siRNA target sequence for LOC90167 (NM_194277.1,1257-1275).
gtggctactaccaaaatgt

SEQ ID NO: 436205 - DNA, 19 bp, Homo sapiens
  siRNA target sequence for LOC90167 (NM_194277.1,1326-1344).
ctgcattggaggtgacatt

SEQ ID NO: 436206 - DNA, 19 bp, Homo sapiens
  siRNA target sequence for LOC90167 (NM_194277.1,1375-1393).
ggcggatcccacattgcta

SEQ ID NO: 436207 - DNA, 19 bp, Homo sapiens
  siRNA target sequence for LOC90167 (NM_194277.1,1435-1453).
ggaccctgtctttaacact

SEQ ID NO: 436208 - DNA, 19 bp, Homo sapiens
  siRNA target sequence for LOC90167 (NM_194277.1,1470-1488).
ctgatcccagagacatttt

SEQ ID NO: 436209 - DNA, 19 bp, Homo sapiens
  siRNA target sequence for LOC90167 (NM_194277.1,1505-1523).
ctaagctccttccaaacaa

SEQ ID NO: 436210 - DNA, 19 bp, Homo sapiens
  siRNA target sequence for LOC90167 (NM_194277.1,1516-1534).
ccaaacaagctgtaagttt

SEQ ID NO: 436211 - DNA, 19 bp, Homo sapiens
  siRNA target sequence for LOC90167 (NM_194277.1,1527-1545).
gtaagttttctggtaatca

SEQ ID NO: 436212 - DNA, 19 bp, Homo sapiens
  siRNA target sequence for LOC90167 (NM_194277.1,1538-1556).
ggtaatcacatgagcatat

SEQ ID NO: 436213 - DNA, 19 bp, Homo sapiens
  siRNA target sequence for LOC90167 (NM_194277.1,1586-1604).
gcaaagcagctaacttaca

SEQ ID NO: 436214 - DNA, 19 bp, Homo sapiens
  siRNA target sequence for LOC90167 (NM_194277.1,1612-1630).
gccctatattccttgtaca

SEQ ID NO: 436215 - DNA, 19 bp, Homo sapiens
  siRNA target sequence for LOC90167 (NM_194277.1,1629-1647).
caggtcagcaggttggtat

SEQ ID NO: 436216 - DNA, 19 bp, Homo sapiens
  siRNA target sequence for LOC90167 (NM_194277.1,1631-1649).
ggtcagcaggttggtatta

SEQ ID NO: 436217 - DNA, 19 bp, Homo sapiens
  siRNA target sequence for LOC90167 (NM_194277.1,1696-1714).
cagatggtccccaattaga

SEQ ID NO: 436218 - DNA, 19 bp, Homo sapiens
  siRNA target sequence for LOC90167 (NM_194277.1,1726-1744).
gacaagtccacatagctat

SEQ ID NO: 436219 - DNA, 19 bp, Homo sapiens
  siRNA target sequence for LOC90167 (NM_194277.1,1731-1749).
gtccacatagctatgtaga

SEQ ID NO: 436220 - DNA, 19 bp, Homo sapiens
  siRNA target sequence for LOC90167 (NM_194277.1,1851-1869).
gcggtaggagcaacatcaa

SEQ ID NO: 436221 - DNA, 19 bp, Homo sapiens
  siRNA target sequence for LOC90167 (NM_194277.1,1852-1870).
cggtaggagcaacatcaat

SEQ ID NO: 436222 - DNA, 19 bp, Homo sapiens
  siRNA target sequence for LOC90167 (NM_194277.1,1864-1882).
catcaatgtaggtctagaa

SEQ ID NO: 436223 - DNA, 19 bp, Homo sapiens
  siRNA target sequence for LOC90167 (NM_194277.1,1885-1903).
ggaagacccaaatttggaa

SEQ ID NO: 436224 - DNA, 19 bp, Homo sapiens
  siRNA target sequence for LOC90167 (NM_194277.1,1928-1946).
gagcaaacccctaaaaggt

SEQ ID NO: 436225 - DNA, 19 bp, Homo sapiens
  siRNA target sequence for LOC90167 (NM_194277.1,1961-1979).
gacatgaaaactattcgtt

SEQ ID NO: 436226 - DNA, 19 bp, Homo sapiens
  siRNA target sequence for LOC90167 (NM_194277.1,1982-2000).
ccttttgggtcagaattta

SEQ ID NO: 436227 - DNA, 19 bp, Homo sapiens
  siRNA target sequence for LOC90167 (NM_194277.1,1990-2008).
gtcagaatttagaccttta

SEQ ID NO: 436228 - DNA, 19 bp, Homo sapiens
  siRNA target sequence for LOC90167 (NM_194277.1,2016-2034).
gtcctgctctcagtcataa

SEQ ID NO: 436229 - DNA, 19 bp, Homo sapiens
  siRNA target sequence for LOC90167 (NM_194277.1,2030-2048).
cataaagcagacctgttta

SEQ ID NO: 436230 - DNA, 19 bp, Homo sapiens
  siRNA target sequence for LOC90167 (NM_194277.1,2039-2057).
gacctgtttacggatatgt

SEQ ID NO: 436231 - DNA, 19 bp, Homo sapiens
  siRNA target sequence for LOC90167 (NM_194277.1,2074-2092).
gccagcagttctaatggat

SEQ ID NO: 436232 - DNA, 19 bp, Homo sapiens
  siRNA target sequence for LOC90167 (NM_194277.1,2078-2096).
gcagttctaatggatcaaa

SEQ ID NO: 436233 - DNA, 19 bp, Homo sapiens
  siRNA target sequence for LOC90167 (NM_194277.1,2081-2099).
gttctaatggatcaaagta

SEQ ID NO: 436234 - DNA, 19 bp, Homo sapiens
  siRNA target sequence for LOC90167 (NM_194277.1,2223-2241).
gtagtctacagttagatga

SEQ ID NO: 436235 - DNA, 19 bp, Homo sapiens
  siRNA target sequence for LOC90167 (NM_194277.1,2284-2302).
caggacttcactaaaacca

SEQ ID NO: 436236 - DNA, 19 bp, Homo sapiens
  siRNA target sequence for LOC124446 (NM_194280.1,534-552).
ggacaactggtccttatca

SEQ ID NO: 436237 - DNA, 19 bp, Homo sapiens
  siRNA target sequence for LOC124446 (NM_194280.1,691-709).
gtgaggaatgtgttagtgt

SEQ ID NO: 436238 - DNA, 19 bp, Homo sapiens
  siRNA target sequence for LOC125476 (NM_194281.1,165-183).
ggctatggcgccagtaaga

SEQ ID NO: 436239 - DNA, 19 bp, Homo sapiens
  siRNA target sequence for LOC125476 (NM_194281.1,166-184).
gctatggcgccagtaagaa

SEQ ID NO: 436240 - DNA, 19 bp, Homo sapiens
  siRNA target sequence for DKFZp686L1814 (NM_194282.1,429-447).
ggacactggtataacttta

SEQ ID NO: 436241 - DNA, 19 bp, Homo sapiens
  siRNA target sequence for DKFZp686L1814 (NM_194282.1,585-603).
cagtaaccacactaaccaa

SEQ ID NO: 436242 - DNA, 19 bp, Homo sapiens
  siRNA target sequence for DKFZp686L1814 (NM_194282.1,607-625).
gcagtgaataccacaatta

SEQ ID NO: 436243 - DNA, 19 bp, Homo sapiens
  siRNA target sequence for DKFZp686L1814 (NM_194282.1,649-667).
gtgaaaccagcttttccaa

SEQ ID NO: 436244 - DNA, 19 bp, Homo sapiens
  siRNA target sequence for DKFZp686L1814 (NM_194282.1,693-711).
gactcctgtgactatatca

SEQ ID NO: 436245 - DNA, 19 bp, Homo sapiens
  siRNA target sequence for DKFZp686L1814 (NM_194282.1,819-837).
gtctggttcaccaattgtt

SEQ ID NO: 436246 - DNA, 19 bp, Homo sapiens
  siRNA target sequence for DKFZp686L1814 (NM_194282.1,894-912).
gtcaggagatgctaagtta

SEQ ID NO: 436247 - DNA, 19 bp, Homo sapiens
  siRNA target sequence for DKFZp686L1814 (NM_194282.1,909-927).
gttaccaccgcagcaaatt

SEQ ID NO: 436248 - DNA, 19 bp, Homo sapiens
  siRNA target sequence for DKFZp686L1814 (NM_194282.1,914-932).
caccgcagcaaattaaagt

SEQ ID NO: 436249 - DNA, 19 bp, Homo sapiens
  siRNA target sequence for DKFZp686L1814 (NM_194282.1,917-935).
cgcagcaaattaaagtagt

SEQ ID NO: 436250 - DNA, 19 bp, Homo sapiens
  siRNA target sequence for DKFZp686L1814 (NM_194282.1,918-936).
gcagcaaattaaagtagtt

SEQ ID NO: 436251 - DNA, 19 bp, Homo sapiens
  siRNA target sequence for DKFZp686L1814 (NM_194282.1,1000-1018).
caactgattaatactacaa

SEQ ID NO: 436252 - DNA, 19 bp, Homo sapiens
  siRNA target sequence for DKFZp686L1814 (NM_194282.1,1055-1073).
cagtacagattgctaagaa

SEQ ID NO: 436253 - DNA, 19 bp, Homo sapiens
  siRNA target sequence for DKFZp686L1814 (NM_194282.1,1106-1124).
cgaagctgatctttgcaaa

SEQ ID NO: 436254 - DNA, 19 bp, Homo sapiens
  siRNA target sequence for DKFZp686L1814 (NM_194282.1,1113-1131).
gatctttgcaaaaccaatt

SEQ ID NO: 436255 - DNA, 19 bp, Homo sapiens
  siRNA target sequence for DKFZp686L1814 (NM_194282.1,1120-1138).
gcaaaaccaattaatagta

SEQ ID NO: 436256 - DNA, 19 bp, Homo sapiens
  siRNA target sequence for DKFZp686L1814 (NM_194282.1,1121-1139).
caaaaccaattaatagtaa

SEQ ID NO: 436257 - DNA, 19 bp, Homo sapiens
  siRNA target sequence for DKFZp686L1814 (NM_194282.1,1184-1202).
caggtagggttctttcaca

SEQ ID NO: 436258 - DNA, 19 bp, Homo sapiens
  siRNA target sequence for DKFZp686L1814 (NM_194282.1,1208-1226).
ctcccggaactccatcaaa

SEQ ID NO: 436259 - DNA, 19 bp, Homo sapiens
  siRNA target sequence for DKFZp686L1814 (NM_194282.1,1227-1245).
gaccataacaatatctgaa

SEQ ID NO: 436260 - DNA, 19 bp, Homo sapiens
  siRNA target sequence for DKFZp686L1814 (NM_194282.1,1249-1267).
ggtgttattggatcaactt

SEQ ID NO: 436261 - DNA, 19 bp, Homo sapiens
  siRNA target sequence for DKFZp686L1814 (NM_194282.1,1258-1276).
ggatcaactttaaattcta

SEQ ID NO: 436262 - DNA, 19 bp, Homo sapiens
  siRNA target sequence for DKFZp686L1814 (NM_194282.1,1309-1327).
cctttgaaatcgccaaata

SEQ ID NO: 436263 - DNA, 19 bp, Homo sapiens
  siRNA target sequence for DKFZp686L1814 (NM_194282.1,1493-1511).
caacccagccagttagtca

SEQ ID NO: 436264 - DNA, 19 bp, Homo sapiens
  siRNA target sequence for DKFZp686L1814 (NM_194282.1,1497-1515).
ccagccagttagtcagaat

SEQ ID NO: 436265 - DNA, 19 bp, Homo sapiens
  siRNA target sequence for DKFZp686L1814 (NM_194282.1,1512-1530).
gaatcccagtacaaacact

SEQ ID NO: 436266 - DNA, 19 bp, Homo sapiens
  siRNA target sequence for DKFZp686L1814 (NM_194282.1,1552-1570).
ccagtggttgttaatacaa

SEQ ID NO: 436267 - DNA, 19 bp, Homo sapiens
  siRNA target sequence for DKFZp686L1814 (NM_194282.1,1578-1596).
gcggatgtcagttccaatt

SEQ ID NO: 436268 - DNA, 19 bp, Homo sapiens
  siRNA target sequence for DKFZp686L1814 (NM_194282.1,1608-1626).
ggctgtcaaacaagttgtt

SEQ ID NO: 436269 - DNA, 19 bp, Homo sapiens
  siRNA target sequence for DKFZp686L1814 (NM_194282.1,1673-1691).
cacagcaacggcttatcat

SEQ ID NO: 436270 - DNA, 19 bp, Homo sapiens
  siRNA target sequence for DKFZp686L1814 (NM_194282.1,1795-1813).
cttccagctcagtatgtta

SEQ ID NO: 436271 - DNA, 19 bp, Homo sapiens
  siRNA target sequence for DKFZp686L1814 (NM_194282.1,1846-1864).
gcaagcaactctaccttta

SEQ ID NO: 436272 - DNA, 19 bp, Homo sapiens
  siRNA target sequence for DKFZp686L1814 (NM_194282.1,1890-1908).
ggcacggcttccattcaat

SEQ ID NO: 436273 - DNA, 19 bp, Homo sapiens
  siRNA target sequence for DKFZp686L1814 (NM_194282.1,1941-1959).
ccgaaagccctgtaattgt

SEQ ID NO: 436274 - DNA, 19 bp, Homo sapiens
  siRNA target sequence for DKFZp686L1814 (NM_194282.1,1942-1960).
cgaaagccctgtaattgta

SEQ ID NO: 436275 - DNA, 19 bp, Homo sapiens
  siRNA target sequence for DKFZp686L1814 (NM_194282.1,1947-1965).
gccctgtaattgtacaaaa

SEQ ID NO: 436276 - DNA, 19 bp, Homo sapiens
  siRNA target sequence for DKFZp686L1814 (NM_194282.1,1952-1970).
gtaattgtacaaaatcact

SEQ ID NO: 436277 - DNA, 19 bp, Homo sapiens
  siRNA target sequence for DKFZp686L1814 (NM_194282.1,1961-1979).
caaaatcactgtgtttgaa

SEQ ID NO: 436278 - DNA, 19 bp, Homo sapiens
  siRNA target sequence for DKFZp686L1814 (NM_194282.1,1994-2012).
gctttgcaaatggtgaatt

SEQ ID NO: 436279 - DNA, 19 bp, Homo sapiens
  siRNA target sequence for DKFZp686L1814 (NM_194282.1,2033-2051).
ctaattgttacaacaattt

SEQ ID NO: 436280 - DNA, 19 bp, Homo sapiens
  siRNA target sequence for DKFZp686L1814 (NM_194282.1,2099-2117).
gaaatccagaagcctttaa

SEQ ID NO: 436281 - DNA, 19 bp, Homo sapiens
  siRNA target sequence for DKFZp686L1814 (NM_194282.1,2150-2168).
ctgatcgacgtcatagcaa

SEQ ID NO: 436282 - DNA, 19 bp, Homo sapiens
  siRNA target sequence for DKFZp686L1814 (NM_194282.1,2161-2179).
catagcaaagggtgtaatt

SEQ ID NO: 436283 - DNA, 19 bp, Homo sapiens
  siRNA target sequence for DKFZp686L1814 (NM_194282.1,2165-2183).
gcaaagggtgtaattgcaa

SEQ ID NO: 436284 - DNA, 19 bp, Homo sapiens
  siRNA target sequence for DKFZp686L1814 (NM_194282.1,2166-2184).
caaagggtgtaattgcaaa

SEQ ID NO: 436285 - DNA, 19 bp, Homo sapiens
  siRNA target sequence for DKFZp686L1814 (NM_194282.1,2170-2188).
gggtgtaattgcaaacgat

SEQ ID NO: 436286 - DNA, 19 bp, Homo sapiens
  siRNA target sequence for DKFZp686L1814 (NM_194282.1,2181-2199).
caaacgatcaggatgtctt

SEQ ID NO: 436287 - DNA, 19 bp, Homo sapiens
  siRNA target sequence for DKFZp686L1814 (NM_194282.1,2185-2203).
cgatcaggatgtcttaaaa

SEQ ID NO: 436288 - DNA, 19 bp, Homo sapiens
  siRNA target sequence for DKFZp686L1814 (NM_194282.1,2191-2209).
ggatgtcttaaaaactact

SEQ ID NO: 436289 - DNA, 19 bp, Homo sapiens
  siRNA target sequence for DKFZp686L1814 (NM_194282.1,2357-2375).
cgaagttatcctctcaaat

SEQ ID NO: 436290 - DNA, 19 bp, Homo sapiens
  siRNA target sequence for DKFZp686L1814 (NM_194282.1,2371-2389).
caaatttcagacttgctta

SEQ ID NO: 436291 - DNA, 19 bp, Homo sapiens
  siRNA target sequence for DKFZp686L1814 (NM_194282.1,2394-2412).
gccaacaccagctttaaat

SEQ ID NO: 436292 - DNA, 19 bp, Homo sapiens
  siRNA target sequence for DKFZp686L1814 (NM_194282.1,2419-2437).
ggcggaaaattgccattta

SEQ ID NO: 436293 - DNA, 19 bp, Homo sapiens
  siRNA target sequence for LOC134218 (NM_194283.1,94-112).
cggtagtccatcctttcta

SEQ ID NO: 436294 - DNA, 19 bp, Homo sapiens
  siRNA target sequence for LOC134218 (NM_194283.1,102-120).
catcctttctacgcttatt

SEQ ID NO: 436295 - DNA, 19 bp, Homo sapiens
  siRNA target sequence for LOC134218 (NM_194283.1,268-286).
gtcagctggtagctttcat

SEQ ID NO: 436296 - DNA, 19 bp, Homo sapiens
  siRNA target sequence for LOC134218 (NM_194283.1,276-294).
gtagctttcattcgtaaaa

SEQ ID NO: 436297 - DNA, 19 bp, Homo sapiens
  siRNA target sequence for LOC134218 (NM_194283.1,304-322).
gagtgcaggcgcatcgaaa

SEQ ID NO: 436298 - DNA, 19 bp, Homo sapiens
  siRNA target sequence for LOC134218 (NM_194283.1,308-326).
gcaggcgcatcgaaaactt

SEQ ID NO: 436299 - DNA, 19 bp, Homo sapiens
  siRNA target sequence for LOC134218 (NM_194283.1,352-370).
cgaggaaagccgaagagat

SEQ ID NO: 436300 - DNA, 19 bp, Homo sapiens
  siRNA target sequence for LOC134218 (NM_194283.1,607-625).
cagcatgtgacaaatcgtt

SEQ ID NO: 436301 - DNA, 19 bp, Homo sapiens
  siRNA target sequence for LOC134218 (NM_194283.1,789-807).
ccaaaacaaaagctttcta

SEQ ID NO: 436302 - DNA, 19 bp, Homo sapiens
  siRNA target sequence for LOC134218 (NM_194283.1,850-868).
ctggcaaagattcatatct

SEQ ID NO: 436303 - DNA, 19 bp, Homo sapiens
  siRNA target sequence for LOC134218 (NM_194283.1,930-948).
ggagagagcgagcacaaat

SEQ ID NO: 436304 - DNA, 19 bp, Homo sapiens
  siRNA target sequence for LOC134218 (NM_194283.1,1058-1076).
cagtgccaaagaattggaa

SEQ ID NO: 436305 - DNA, 19 bp, Homo sapiens
  siRNA target sequence for LOC134218 (NM_194283.1,1099-1117).
gtgtcacagagatcattaa

SEQ ID NO: 436306 - DNA, 19 bp, Homo sapiens
  siRNA target sequence for LOC134218 (NM_194283.1,1109-1127).
gatcattaaaccatgtgat

SEQ ID NO: 436307 - DNA, 19 bp, Homo sapiens
  siRNA target sequence for LOC134218 (NM_194283.1,1112-1130).
cattaaaccatgtgatgat

SEQ ID NO: 436308 - DNA, 19 bp, Homo sapiens
  siRNA target sequence for LOC134218 (NM_194283.1,1209-1227).
gctgaaccacaaacaatga

SEQ ID NO: 436309 - DNA, 19 bp, Homo sapiens
  siRNA target sequence for LOC134218 (NM_194283.1,1230-1248).
gttcttatcagctgtacaa

SEQ ID NO: 436310 - DNA, 19 bp, Homo sapiens
  siRNA target sequence for LOC134218 (NM_194283.1,1243-1261).
gtacaacctgccatagtga

SEQ ID NO: 436311 - DNA, 19 bp, Homo sapiens
  siRNA target sequence for LOC134218 (NM_194283.1,1246-1264).
caacctgccatagtgaatt

SEQ ID NO: 436312 - DNA, 19 bp, Homo sapiens
  siRNA target sequence for LOC134218 (NM_194283.1,1266-1284).
ccatctcggaataaacttt

SEQ ID NO: 436313 - DNA, 19 bp, Homo sapiens
  siRNA target sequence for LOC134218 (NM_194283.1,1340-1358).
cagcgcaacaagtagtcaa

SEQ ID NO: 436314 - DNA, 19 bp, Homo sapiens
  siRNA target sequence for FLJ39441 (NM_194285.1,152-170).
gggacaaggtgtcaacaat

SEQ ID NO: 436315 - DNA, 19 bp, Homo sapiens
  siRNA target sequence for FLJ39441 (NM_194285.1,154-172).
gacaaggtgtcaacaatgt

SEQ ID NO: 436316 - DNA, 19 bp, Homo sapiens
  siRNA target sequence for FLJ39441 (NM_194285.1,167-185).
caatgtgccgaaaaggtat

SEQ ID NO: 436317 - DNA, 19 bp, Homo sapiens
  siRNA target sequence for FLJ39441 (NM_194285.1,171-189).
gtgccgaaaaggtatagtt

SEQ ID NO: 436318 - DNA, 19 bp, Homo sapiens
  siRNA target sequence for FLJ39441 (NM_194285.1,242-260).
cagctgtacaagcttttct

SEQ ID NO: 436319 - DNA, 19 bp, Homo sapiens
  siRNA target sequence for FLJ39441 (NM_194285.1,244-262).
gctgtacaagcttttctta

SEQ ID NO: 436320 - DNA, 19 bp, Homo sapiens
  siRNA target sequence for FLJ39441 (NM_194285.1,400-418).
ggttacaatgggattccta

SEQ ID NO: 436321 - DNA, 19 bp, Homo sapiens
  siRNA target sequence for FLJ39441 (NM_194285.1,401-419).
gttacaatgggattcctat

SEQ ID NO: 436322 - DNA, 19 bp, Homo sapiens
  siRNA target sequence for FLJ39441 (NM_194285.1,583-601).
ccaaaggtcccccttaaaa

SEQ ID NO: 436323 - DNA, 19 bp, Homo sapiens
  siRNA target sequence for FLJ39441 (NM_194285.1,607-625).
ccaccacccatgaacttca

SEQ ID NO: 436324 - DNA, 19 bp, Homo sapiens
  siRNA target sequence for FLJ39441 (NM_194285.1,788-806).
ctccaactgtgtccaaaaa

SEQ ID NO: 436325 - DNA, 19 bp, Homo sapiens
  siRNA target sequence for FLJ39441 (NM_194285.1,861-879).
caggcatccttcttccaaa

SEQ ID NO: 436326 - DNA, 19 bp, Homo sapiens
  siRNA target sequence for FLJ39441 (NM_194285.1,933-951).
gaaacacctcgctttgtct

SEQ ID NO: 436327 - DNA, 19 bp, Homo sapiens
  siRNA target sequence for FLJ39441 (NM_194285.1,937-955).
cacctcgctttgtcttcat

SEQ ID NO: 436328 - DNA, 19 bp, Homo sapiens
  siRNA target sequence for FLJ39441 (NM_194285.1,943-961).
gctttgtcttcatccaaat

SEQ ID NO: 436329 - DNA, 19 bp, Homo sapiens
  siRNA target sequence for FLJ39441 (NM_194285.1,985-1003).
gcaggatctggcaatagct

SEQ ID NO: 436330 - DNA, 19 bp, Homo sapiens
  siRNA target sequence for FLJ39441 (NM_194285.1,1025-1043).
gccacgacaaacctgtttt

SEQ ID NO: 436331 - DNA, 19 bp, Homo sapiens
  siRNA target sequence for FLJ39441 (NM_194285.1,1026-1044).
ccacgacaaacctgttttt

SEQ ID NO: 436332 - DNA, 19 bp, Homo sapiens
  siRNA target sequence for FLJ39441 (NM_194285.1,1027-1045).
cacgacaaacctgttttta

SEQ ID NO: 436333 - DNA, 19 bp, Homo sapiens
  siRNA target sequence for FLJ39441 (NM_194285.1,1029-1047).
cgacaaacctgtttttaat

SEQ ID NO: 436334 - DNA, 19 bp, Homo sapiens
  siRNA target sequence for FLJ39441 (NM_194285.1,1182-1200).
catggtcaccccacacaat

SEQ ID NO: 436335 - DNA, 19 bp, Homo sapiens
  siRNA target sequence for FLJ39441 (NM_194285.1,1276-1294).
gctcgacccacagttagtt

SEQ ID NO: 436336 - DNA, 19 bp, Homo sapiens
  siRNA target sequence for FLJ39441 (NM_194285.1,1334-1352).
caggacctgagcgatcaat

SEQ ID NO: 436337 - DNA, 19 bp, Homo sapiens
  siRNA target sequence for FLJ39441 (NM_194285.1,1368-1386).
gccaaccaatgactcaaat

SEQ ID NO: 436338 - DNA, 19 bp, Homo sapiens
  siRNA target sequence for FLJ39441 (NM_194285.1,1461-1479).
catcagtggttcagttagt

SEQ ID NO: 436339 - DNA, 19 bp, Homo sapiens
  siRNA target sequence for FLJ39441 (NM_194285.1,1590-1608).
ccctgggagatccataagt

SEQ ID NO: 436340 - DNA, 19 bp, Homo sapiens
  siRNA target sequence for FLJ39441 (NM_194285.1,1622-1640).
ctggacggactgtcagtaa

SEQ ID NO: 436341 - DNA, 19 bp, Homo sapiens
  siRNA target sequence for FLJ39441 (NM_194285.1,1624-1642).
ggacggactgtcagtaatt

SEQ ID NO: 436342 - DNA, 19 bp, Homo sapiens
  siRNA target sequence for FLJ39441 (NM_194285.1,1628-1646).
ggactgtcagtaattcagt

SEQ ID NO: 436343 - DNA, 19 bp, Homo sapiens
  siRNA target sequence for FLJ39441 (NM_194285.1,1672-1690).
ggacctgggcaaacagtta

SEQ ID NO: 436344 - DNA, 19 bp, Homo sapiens
  siRNA target sequence for FLJ39441 (NM_194285.1,1675-1693).
cctgggcaaacagttagta

SEQ ID NO: 436345 - DNA, 19 bp, Homo sapiens
  siRNA target sequence for FLJ39441 (NM_194285.1,1694-1712).
gctcaggtcccactataaa

SEQ ID NO: 436346 - DNA, 19 bp, Homo sapiens
  siRNA target sequence for FLJ39441 (NM_194285.1,1726-1744).
gttgtctccgaaacaattt

SEQ ID NO: 436347 - DNA, 19 bp, Homo sapiens
  siRNA target sequence for FLJ39441 (NM_194285.1,1729-1747).
gtctccgaaacaatttctt

SEQ ID NO: 436348 - DNA, 19 bp, Homo sapiens
  siRNA target sequence for FLJ39441 (NM_194285.1,1860-1878).
caaaaggcagcgagaatat

SEQ ID NO: 436349 - DNA, 19 bp, Homo sapiens
  siRNA target sequence for FLJ39441 (NM_194285.1,1865-1883).
ggcagcgagaatatgaaga

SEQ ID NO: 436350 - DNA, 19 bp, Homo sapiens
  siRNA target sequence for FLJ39441 (NM_194285.1,2018-2036).
gtgattatgccttacgtta

SEQ ID NO: 436351 - DNA, 19 bp, Homo sapiens
  siRNA target sequence for FLJ39441 (NM_194285.1,2026-2044).
gccttacgttacatggaaa

SEQ ID NO: 436352 - DNA, 19 bp, Homo sapiens
  siRNA target sequence for FLJ39441 (NM_194285.1,2037-2055).
catggaaagtagttggaaa

SEQ ID NO: 436353 - DNA, 19 bp, Homo sapiens
  siRNA target sequence for FLJ39441 (NM_194285.1,2082-2100).
cttaagactgggtatgcaa

SEQ ID NO: 436354 - DNA, 19 bp, Homo sapiens
  siRNA target sequence for LOC144747 (NM_194286.1,234-252).
ctgtccactgccttgcaat

SEQ ID NO: 436355 - DNA, 19 bp, Homo sapiens
  siRNA target sequence for LOC144747 (NM_194286.1,360-378).
ccctttcctgggtgaagtt

SEQ ID NO: 436356 - DNA, 19 bp, Homo sapiens
  siRNA target sequence for LOC144747 (NM_194286.1,362-380).
ctttcctgggtgaagttta

SEQ ID NO: 436357 - DNA, 19 bp, Homo sapiens
  siRNA target sequence for LOC144747 (NM_194286.1,401-419).
ctgcttcggggaaatctct

SEQ ID NO: 436358 - DNA, 19 bp, Homo sapiens
  siRNA target sequence for LOC144747 (NM_194286.1,484-502).
ctctcagtgtatttctcta

SEQ ID NO: 436359 - DNA, 19 bp, Homo sapiens
  siRNA target sequence for LOC144747 (NM_194286.1,634-652).
gcttccaaggaatatgaca

SEQ ID NO: 436360 - DNA, 19 bp, Homo sapiens
  siRNA target sequence for LOC144747 (NM_194286.1,666-684).
ctgctcgtcgtgaggattt

SEQ ID NO: 436361 - DNA, 19 bp, Homo sapiens
  siRNA target sequence for LOC144747 (NM_194286.1,668-686).
gctcgtcgtgaggatttat

SEQ ID NO: 436362 - DNA, 19 bp, Homo sapiens
  siRNA target sequence for LOC144747 (NM_194286.1,672-690).
gtcgtgaggatttatctca

SEQ ID NO: 436363 - DNA, 19 bp, Homo sapiens
  siRNA target sequence for LOC144747 (NM_194286.1,674-692).
cgtgaggatttatctcaaa

SEQ ID NO: 436364 - DNA, 19 bp, Homo sapiens
  siRNA target sequence for LOC145497 (NM_194287.1,697-715).
gggtaccaaggctattgct

SEQ ID NO: 436365 - DNA, 19 bp, Homo sapiens
  siRNA target sequence for LOC145497 (NM_194287.1,698-716).
ggtaccaaggctattgcta

SEQ ID NO: 436366 - DNA, 19 bp, Homo sapiens
  siRNA target sequence for LOC145497 (NM_194287.1,824-842).
ctccaggagatgaatattt

SEQ ID NO: 436367 - DNA, 19 bp, Homo sapiens
  siRNA target sequence for LOC145497 (NM_194287.1,843-861).
ccaacaatcaccttggttt

SEQ ID NO: 436368 - DNA, 19 bp, Homo sapiens
  siRNA target sequence for LOC145497 (NM_194287.1,893-911).
gagagaaacagttcttcta

SEQ ID NO: 436369 - DNA, 19 bp, Homo sapiens
  siRNA target sequence for LOC145497 (NM_194287.1,971-989).
caagccctgtcgaccaatt

SEQ ID NO: 436370 - DNA, 19 bp, Homo sapiens
  siRNA target sequence for LOC145497 (NM_194287.1,981-999).
cgaccaattaccaaattaa

SEQ ID NO: 436371 - DNA, 19 bp, Homo sapiens
  siRNA target sequence for LOC145497 (NM_194287.1,984-1002).
ccaattaccaaattaaaaa

SEQ ID NO: 436372 - DNA, 19 bp, Homo sapiens
  siRNA target sequence for LOC145497 (NM_194287.1,1007-1025).
gatctcagtcacaaccaat

SEQ ID NO: 436373 - DNA, 19 bp, Homo sapiens
  siRNA target sequence for LOC145497 (NM_194287.1,1018-1036).
caaccaattctctgatgta

SEQ ID NO: 436374 - DNA, 19 bp, Homo sapiens
  siRNA target sequence for LOC145497 (NM_194287.1,1189-1207).
gatatcggtggcaatgaca

SEQ ID NO: 436375 - DNA, 19 bp, Homo sapiens
  siRNA target sequence for LOC145497 (NM_194287.1,1235-1253).
gcaaaggactggaatccaa

SEQ ID NO: 436376 - DNA, 19 bp, Homo sapiens
  siRNA target sequence for LOC146712 (NM_194288.1,1230-1248).
cgtctatgttggttgtgaa

SEQ ID NO: 436377 - DNA, 19 bp, Homo sapiens
  siRNA target sequence for LOC146712 (NM_194288.1,1283-1301).
ggcgtgtgcgtgaacacat

SEQ ID NO: 436378 - DNA, 19 bp, Homo sapiens
  siRNA target sequence for LOC146712 (NM_194288.1,1302-1320).
ccctaaaccatagtctaat

SEQ ID NO: 436379 - DNA, 19 bp, Homo sapiens
  siRNA target sequence for LOC146712 (NM_194288.1,1309-1327).
ccatagtctaatttatcct

SEQ ID NO: 436380 - DNA, 19 bp, Homo sapiens
  siRNA target sequence for LOC146712 (NM_194288.1,1552-1570).
ctgcctcgggtctaatcct

SEQ ID NO: 436381 - DNA, 19 bp, Homo sapiens
  siRNA target sequence for LOC146712 (NM_194288.1,1785-1803).
cctctctggcggtgtttct

SEQ ID NO: 436382 - DNA, 19 bp, Homo sapiens
  siRNA target sequence for LOC152195 (NM_194289.1,446-464).
ccacttctatgccaaatct

SEQ ID NO: 436383 - DNA, 19 bp, Homo sapiens
  siRNA target sequence for LOC153684 (NM_194290.1,553-571).
gactagcagttgacacaaa

SEQ ID NO: 436384 - DNA, 19 bp, Homo sapiens
  siRNA target sequence for LOC153684 (NM_194290.1,555-573).
ctagcagttgacacaaaca

SEQ ID NO: 436385 - DNA, 19 bp, Homo sapiens
  siRNA target sequence for LOC157378 (NM_194291.1,831-849).
gccattgcccaagaaaaat

SEQ ID NO: 436386 - DNA, 19 bp, Homo sapiens
  siRNA target sequence for LOC157378 (NM_194291.1,873-891).
ggacagctgagatatgtat

SEQ ID NO: 436387 - DNA, 19 bp, Homo sapiens
  siRNA target sequence for LOC157378 (NM_194291.1,899-917).
caatgcgatacctttcata

SEQ ID NO: 436388 - DNA, 19 bp, Homo sapiens
  siRNA target sequence for LOC157378 (NM_194291.1,918-936).
gggtttggctttttggata

SEQ ID NO: 436389 - DNA, 19 bp, Homo sapiens
  siRNA target sequence for LOC157378 (NM_194291.1,925-943).
gctttttggataatgcaat

SEQ ID NO: 436390 - DNA, 19 bp, Homo sapiens
  siRNA target sequence for LOC157378 (NM_194291.1,932-950).
ggataatgcaattatgatt

SEQ ID NO: 436391 - DNA, 19 bp, Homo sapiens
  siRNA target sequence for LOC157378 (NM_194291.1,961-979).
cccatattgaaatgtctat

SEQ ID NO: 436392 - DNA, 19 bp, Homo sapiens
  siRNA target sequence for LOC157378 (NM_194291.1,962-980).
ccatattgaaatgtctatt

SEQ ID NO: 436393 - DNA, 19 bp, Homo sapiens
  siRNA target sequence for LOC157378 (NM_194291.1,1060-1078).
caggctacgttgaagcatt

SEQ ID NO: 436394 - DNA, 19 bp, Homo sapiens
  siRNA target sequence for LOC157378 (NM_194291.1,1084-1102).
ccaggttaggcctgtcaat

SEQ ID NO: 436395 - DNA, 19 bp, Homo sapiens
  siRNA target sequence for LOC157378 (NM_194291.1,1085-1103).
caggttaggcctgtcaatt

SEQ ID NO: 436396 - DNA, 19 bp, Homo sapiens
  siRNA target sequence for LOC157378 (NM_194291.1,1136-1154).
gcaaacacgtcttagtaca

SEQ ID NO: 436397 - DNA, 19 bp, Homo sapiens
  siRNA target sequence for LOC157378 (NM_194291.1,1178-1196).
gactattggctgcattcta

SEQ ID NO: 436398 - DNA, 19 bp, Homo sapiens
  siRNA target sequence for DKFZp761A078 (NM_194292.1,172-190).
ccgttgcaggtgaaatgca

SEQ ID NO: 436399 - DNA, 19 bp, Homo sapiens
  siRNA target sequence for DKFZp761A078 (NM_194292.1,221-239).
gaatgagcattgaactaca

SEQ ID NO: 436400 - DNA, 19 bp, Homo sapiens
  siRNA target sequence for DKFZp761A078 (NM_194292.1,225-243).
gagcattgaactacaatca

SEQ ID NO: 436401 - DNA, 19 bp, Homo sapiens
  siRNA target sequence for DKFZp761A078 (NM_194292.1,227-245).
gcattgaactacaatcagt

SEQ ID NO: 436402 - DNA, 19 bp, Homo sapiens
  siRNA target sequence for DKFZp761A078 (NM_194292.1,228-246).
cattgaactacaatcagtt

SEQ ID NO: 436403 - DNA, 19 bp, Homo sapiens
  siRNA target sequence for DKFZp761A078 (NM_194292.1,232-250).
gaactacaatcagtttcta

SEQ ID NO: 436404 - DNA, 19 bp, Homo sapiens
  siRNA target sequence for DKFZp761A078 (NM_194292.1,259-277).
cacagaaaggacttagtta

SEQ ID NO: 436405 - DNA, 19 bp, Homo sapiens
  siRNA target sequence for DKFZp761A078 (NM_194292.1,287-305).
ctgatgacacggatccatt

SEQ ID NO: 436406 - DNA, 19 bp, Homo sapiens
  siRNA target sequence for DKFZp761A078 (NM_194292.1,289-307).
gatgacacggatccatttt

SEQ ID NO: 436407 - DNA, 19 bp, Homo sapiens
  siRNA target sequence for DKFZp761A078 (NM_194292.1,333-351).
ggaagattttcaaagttta

SEQ ID NO: 436408 - DNA, 19 bp, Homo sapiens
  siRNA target sequence for DKFZp761A078 (NM_194292.1,452-470).
ggtttttgctacagttagt

SEQ ID NO: 436409 - DNA, 19 bp, Homo sapiens
  siRNA target sequence for DKFZp761A078 (NM_194292.1,469-487).
gtttctccagcagctattt

SEQ ID NO: 436410 - DNA, 19 bp, Homo sapiens
  siRNA target sequence for DKFZp761A078 (NM_194292.1,514-532).
gtggtagagacaaatcctt

SEQ ID NO: 436411 - DNA, 19 bp, Homo sapiens
  siRNA target sequence for DKFZp761A078 (NM_194292.1,522-540).
gacaaatccttttaagcat

SEQ ID NO: 436412 - DNA, 19 bp, Homo sapiens
  siRNA target sequence for DKFZp761A078 (NM_194292.1,598-616).
ctcgcaggctgtttgaaat

SEQ ID NO: 436413 - DNA, 19 bp, Homo sapiens
  siRNA target sequence for DKFZp761A078 (NM_194292.1,600-618).
cgcaggctgtttgaaatgt

SEQ ID NO: 436414 - DNA, 19 bp, Homo sapiens
  siRNA target sequence for DKFZp761A078 (NM_194292.1,601-619).
gcaggctgtttgaaatgta

SEQ ID NO: 436415 - DNA, 19 bp, Homo sapiens
  siRNA target sequence for DKFZp761A078 (NM_194292.1,642-660).
gatgcaatcactagatgat

SEQ ID NO: 436416 - DNA, 19 bp, Homo sapiens
  siRNA target sequence for DKFZp761A078 (NM_194292.1,650-668).
cactagatgatgctactaa

SEQ ID NO: 436417 - DNA, 19 bp, Homo sapiens
  siRNA target sequence for DKFZp761A078 (NM_194292.1,675-693).
ggactttacacgaaagaca

SEQ ID NO: 436418 - DNA, 19 bp, Homo sapiens
  siRNA target sequence for DKFZp761A078 (NM_194292.1,676-694).
gactttacacgaaagacat

SEQ ID NO: 436419 - DNA, 19 bp, Homo sapiens
  siRNA target sequence for DKFZp761A078 (NM_194292.1,678-696).
ctttacacgaaagacatta

SEQ ID NO: 436420 - DNA, 19 bp, Homo sapiens
  siRNA target sequence for DKFZp761A078 (NM_194292.1,718-736).
gataagttacggaatgaat

SEQ ID NO: 436421 - DNA, 19 bp, Homo sapiens
  siRNA target sequence for DKFZp761A078 (NM_194292.1,754-772).
gccttgacaaacaagcatt

SEQ ID NO: 436422 - DNA, 19 bp, Homo sapiens
  siRNA target sequence for DKFZp761A078 (NM_194292.1,907-925).
gagttagaagcggctaata

SEQ ID NO: 436423 - DNA, 19 bp, Homo sapiens
  siRNA target sequence for DKFZp761A078 (NM_194292.1,928-946).
gacttaaccgaaagaaaat

SEQ ID NO: 436424 - DNA, 19 bp, Homo sapiens
  siRNA target sequence for DKFZp761A078 (NM_194292.1,968-986).
gagaacttaaagcaaaact

SEQ ID NO: 436425 - DNA, 19 bp, Homo sapiens
  siRNA target sequence for DKFZp761A078 (NM_194292.1,1032-1050).
ctctttgcgaagagagaat

SEQ ID NO: 436426 - DNA, 19 bp, Homo sapiens
  siRNA target sequence for DKFZp761A078 (NM_194292.1,1038-1056).
gcgaagagagaattctaca

SEQ ID NO: 436427 - DNA, 19 bp, Homo sapiens
  siRNA target sequence for DKFZp761A078 (NM_194292.1,1087-1105).
cacgttaatcagctacaaa

SEQ ID NO: 436428 - DNA, 19 bp, Homo sapiens
  siRNA target sequence for DKFZp761A078 (NM_194292.1,1106-1124).
caaaagtggcagttttaga

SEQ ID NO: 436429 - DNA, 19 bp, Homo sapiens
  siRNA target sequence for DKFZp761A078 (NM_194292.1,1143-1161).
ggaccagcttgttttaaga

SEQ ID NO: 436430 - DNA, 19 bp, Homo sapiens
  siRNA target sequence for DKFZp761A078 (NM_194292.1,1160-1178).
gaacaaaagaggcatttga

SEQ ID NO: 436431 - DNA, 19 bp, Homo sapiens
  siRNA target sequence for DKFZp761A078 (NM_194292.1,1308-1326).
gttacaaggggatctgaaa

SEQ ID NO: 436432 - DNA, 19 bp, Homo sapiens
  siRNA target sequence for DKFZp761A078 (NM_194292.1,1316-1334).
gggatctgaaaactttaat

SEQ ID NO: 436433 - DNA, 19 bp, Homo sapiens
  siRNA target sequence for DKFZp761A078 (NM_194292.1,1328-1346).
ctttaatgggtaagttgaa

SEQ ID NO: 436434 - DNA, 19 bp, Homo sapiens
  siRNA target sequence for DKFZp761A078 (NM_194292.1,1364-1382).
ctattcagcaagaaaaact

SEQ ID NO: 436435 - DNA, 19 bp, Homo sapiens
  siRNA target sequence for DKFZp761A078 (NM_194292.1,1438-1456).
ggacagtctcttcgaatta

SEQ ID NO: 436436 - DNA, 19 bp, Homo sapiens
  siRNA target sequence for DKFZp761A078 (NM_194292.1,1486-1504).
caattagaagctacagtta

SEQ ID NO: 436437 - DNA, 19 bp, Homo sapiens
  siRNA target sequence for DKFZp761A078 (NM_194292.1,1548-1566).
gttaatcacgtggttaaat

SEQ ID NO: 436438 - DNA, 19 bp, Homo sapiens
  siRNA target sequence for DKFZp761A078 (NM_194292.1,1554-1572).
cacgtggttaaataaagaa

SEQ ID NO: 436439 - DNA, 19 bp, Homo sapiens
  siRNA target sequence for DKFZp761A078 (NM_194292.1,1556-1574).
cgtggttaaataaagaact

SEQ ID NO: 436440 - DNA, 19 bp, Homo sapiens
  siRNA target sequence for DKFZp761A078 (NM_194292.1,1650-1668).
cacaatcagaagtggaatt

SEQ ID NO: 436441 - DNA, 19 bp, Homo sapiens
  siRNA target sequence for DKFZp761A078 (NM_194292.1,1709-1727).
caacctgtgggattggtta

SEQ ID NO: 436442 - DNA, 19 bp, Homo sapiens
  siRNA target sequence for DKFZp761A078 (NM_194292.1,1713-1731).
ctgtgggattggttatcct

SEQ ID NO: 436443 - DNA, 19 bp, Homo sapiens
  siRNA target sequence for DKFZp761A078 (NM_194292.1,1741-1759).
gcatttgcattccagaata

SEQ ID NO: 436444 - DNA, 19 bp, Homo sapiens
  siRNA target sequence for DKFZp761A078 (NM_194292.1,1928-1946).
ggttggaatccaaatacct

SEQ ID NO: 436445 - DNA, 19 bp, Homo sapiens
  siRNA target sequence for DKFZp761A078 (NM_194292.1,1978-1996).
ggactcagccagaacctat

SEQ ID NO: 436446 - DNA, 19 bp, Homo sapiens
  siRNA target sequence for DKFZp761A078 (NM_194292.1,1981-1999).
ctcagccagaacctattta

SEQ ID NO: 436447 - DNA, 19 bp, Homo sapiens
  siRNA target sequence for DKFZp761A078 (NM_194292.1,1983-2001).
cagccagaacctatttagt

SEQ ID NO: 436448 - DNA, 19 bp, Homo sapiens
  siRNA target sequence for DKFZp761A078 (NM_194292.1,1985-2003).
gccagaacctatttagtaa

SEQ ID NO: 436449 - DNA, 19 bp, Homo sapiens
  siRNA target sequence for DKFZp761A078 (NM_194292.1,1989-2007).
gaacctatttagtaattca

SEQ ID NO: 436450 - DNA, 19 bp, Homo sapiens
  siRNA target sequence for DKFZp761A078 (NM_194292.1,2016-2034).
gagagatggcactttagga

SEQ ID NO: 436451 - DNA, 19 bp, Homo sapiens
  siRNA target sequence for DKFZp761A078 (NM_194292.1,2024-2042).
gcactttaggagcattaca

SEQ ID NO: 436452 - DNA, 19 bp, Homo sapiens
  siRNA target sequence for DKFZp761A078 (NM_194292.1,2025-2043).
cactttaggagcattacat

SEQ ID NO: 436453 - DNA, 19 bp, Homo sapiens
  siRNA target sequence for DKFZp761A078 (NM_194292.1,2032-2050).
ggagcattacatacatctt

SEQ ID NO: 436454 - DNA, 19 bp, Homo sapiens
  siRNA target sequence for CMYA1 (NM_194293.2,593-611).
ggccacctcccgcaagttt

SEQ ID NO: 436455 - DNA, 19 bp, Homo sapiens
  siRNA target sequence for CMYA1 (NM_194293.2,685-703).
cagcccgctggctatttga

SEQ ID NO: 436456 - DNA, 19 bp, Homo sapiens
  siRNA target sequence for CMYA1 (NM_194293.2,1865-1883).
cacagctcggtggcttttt

SEQ ID NO: 436457 - DNA, 19 bp, Homo sapiens
  siRNA target sequence for CMYA1 (NM_194293.2,1867-1885).
cagctcggtggctttttga

SEQ ID NO: 436458 - DNA, 19 bp, Homo sapiens
  siRNA target sequence for CMYA1 (NM_194293.2,2015-2033).
cgagacttgcccaatgagt

SEQ ID NO: 436459 - DNA, 19 bp, Homo sapiens
  siRNA target sequence for CMYA1 (NM_194293.2,2032-2050).
gtgagttggccgaaaagca

SEQ ID NO: 436460 - DNA, 19 bp, Homo sapiens
  siRNA target sequence for CMYA1 (NM_194293.2,2194-2212).
cagacagacacgtctttga

SEQ ID NO: 436461 - DNA, 19 bp, Homo sapiens
  siRNA target sequence for CMYA1 (NM_194293.2,2196-2214).
gacagacacgtctttgaga

SEQ ID NO: 436462 - DNA, 19 bp, Homo sapiens
  siRNA target sequence for CMYA1 (NM_194293.2,2248-2266).
gaagacggcctgtgagata

SEQ ID NO: 436463 - DNA, 19 bp, Homo sapiens
  siRNA target sequence for CMYA1 (NM_194293.2,2294-2312).
gcaggtgtctcgtcagaaa

SEQ ID NO: 436464 - DNA, 19 bp, Homo sapiens
  siRNA target sequence for CMYA1 (NM_194293.2,2386-2404).
cgggttctgtccacaagtt

SEQ ID NO: 436465 - DNA, 19 bp, Homo sapiens
  siRNA target sequence for CMYA1 (NM_194293.2,2388-2406).
ggttctgtccacaagttca

SEQ ID NO: 436466 - DNA, 19 bp, Homo sapiens
  siRNA target sequence for CMYA1 (NM_194293.2,2653-2671).
ggcaggggcacccttatat

SEQ ID NO: 436467 - DNA, 19 bp, Homo sapiens
  siRNA target sequence for CMYA1 (NM_194293.2,2654-2672).
gcaggggcacccttatata

SEQ ID NO: 436468 - DNA, 19 bp, Homo sapiens
  siRNA target sequence for CMYA1 (NM_194293.2,2657-2675).
ggggcacccttatatacga

SEQ ID NO: 436469 - DNA, 19 bp, Homo sapiens
  siRNA target sequence for CMYA1 (NM_194293.2,2659-2677).
ggcacccttatatacgaaa

SEQ ID NO: 436470 - DNA, 19 bp, Homo sapiens
  siRNA target sequence for CMYA1 (NM_194293.2,2684-2702).
gctggtgtcaggtgaactt

SEQ ID NO: 436471 - DNA, 19 bp, Homo sapiens
  siRNA target sequence for CMYA1 (NM_194293.2,2821-2839).
gcagtgggaatattgaaga

SEQ ID NO: 436472 - DNA, 19 bp, Homo sapiens
  siRNA target sequence for CMYA1 (NM_194293.2,2824-2842).
gtgggaatattgaagacat

SEQ ID NO: 436473 - DNA, 19 bp, Homo sapiens
  siRNA target sequence for CMYA1 (NM_194293.2,3202-3220).
ctcctcaggccattggaaa

SEQ ID NO: 436474 - DNA, 19 bp, Homo sapiens
  siRNA target sequence for CMYA1 (NM_194293.2,3252-3270).
ccagcccaattgcaaaaca

SEQ ID NO: 436475 - DNA, 19 bp, Homo sapiens
  siRNA target sequence for CMYA1 (NM_194293.2,3512-3530).
ggctacccaaagcaacata

SEQ ID NO: 436476 - DNA, 19 bp, Homo sapiens
  siRNA target sequence for CMYA1 (NM_194293.2,3513-3531).
gctacccaaagcaacataa

SEQ ID NO: 436477 - DNA, 19 bp, Homo sapiens
  siRNA target sequence for CMYA1 (NM_194293.2,3685-3703).
ggggtgtccagctttctca

SEQ ID NO: 436478 - DNA, 19 bp, Homo sapiens
  siRNA target sequence for CMYA1 (NM_194293.2,3965-3983).
cccccataatgcctttgtt

SEQ ID NO: 436479 - DNA, 19 bp, Homo sapiens
  siRNA target sequence for CMYA1 (NM_194293.2,4132-4150).
ctggagggtcacagacaaa

SEQ ID NO: 436480 - DNA, 19 bp, Homo sapiens
  siRNA target sequence for CMYA1 (NM_194293.2,4250-4268).
caagcccttgcctctatct

SEQ ID NO: 436481 - DNA, 19 bp, Homo sapiens
  siRNA target sequence for CMYA1 (NM_194293.2,4343-4361).
caaggttcccactactgta

SEQ ID NO: 436482 - DNA, 19 bp, Homo sapiens
  siRNA target sequence for CMYA1 (NM_194293.2,4406-4424).
ccagcccagcttacaacat

SEQ ID NO: 436483 - DNA, 19 bp, Homo sapiens
  siRNA target sequence for CMYA1 (NM_194293.2,4822-4840).
cggaagttgctcaactgaa

SEQ ID NO: 436484 - DNA, 19 bp, Homo sapiens
  siRNA target sequence for CMYA1 (NM_194293.2,5024-5042).
ggaggtcggaggtcaaact

SEQ ID NO: 436485 - DNA, 19 bp, Homo sapiens
  siRNA target sequence for CMYA1 (NM_194293.2,5085-5103).
cagagtcaagtcaagatca

SEQ ID NO: 436486 - DNA, 19 bp, Homo sapiens
  siRNA target sequence for CMYA1 (NM_194293.2,5094-5112).
gtcaagatcagaaatcaca

SEQ ID NO: 436487 - DNA, 19 bp, Homo sapiens
  siRNA target sequence for CMYA1 (NM_194293.2,5162-5180).
ggagacatcaagagagtat

SEQ ID NO: 436488 - DNA, 19 bp, Homo sapiens
  siRNA target sequence for CMYA1 (NM_194293.2,5183-5201).
gtgccctcctcgggtttta

SEQ ID NO: 436489 - DNA, 19 bp, Homo sapiens
  siRNA target sequence for CMYA1 (NM_194293.2,5187-5205).
cctcctcgggttttacctt

SEQ ID NO: 436490 - DNA, 19 bp, Homo sapiens
  siRNA target sequence for CMYA1 (NM_194293.2,5294-5312).
ccctgatgtctcagtgaaa

SEQ ID NO: 436491 - DNA, 19 bp, Homo sapiens
  siRNA target sequence for CMYA1 (NM_194293.2,5447-5465).
cagagggtggcaaaagagt

SEQ ID NO: 436492 - DNA, 19 bp, Homo sapiens
  siRNA target sequence for CMYA1 (NM_194293.2,5488-5506).
cagggagctcacaacacta

SEQ ID NO: 436493 - DNA, 19 bp, Homo sapiens
  siRNA target sequence for LOC169355 (NM_194294.1,289-307).
cccacagaccgaatgtgaa

SEQ ID NO: 436494 - DNA, 19 bp, Homo sapiens
  siRNA target sequence for LOC169355 (NM_194294.1,325-343).
ctttggaaagctatcacat

SEQ ID NO: 436495 - DNA, 19 bp, Homo sapiens
  siRNA target sequence for LOC169355 (NM_194294.1,421-439).
ccaacaaacttcctcaatt

SEQ ID NO: 436496 - DNA, 19 bp, Homo sapiens
  siRNA target sequence for LOC169355 (NM_194294.1,607-625).
ggaatcttgcccttccatt

SEQ ID NO: 436497 - DNA, 19 bp, Homo sapiens
  siRNA target sequence for LOC169355 (NM_194294.1,608-626).
gaatcttgcccttccattt

SEQ ID NO: 436498 - DNA, 19 bp, Homo sapiens
  siRNA target sequence for LOC169355 (NM_194294.1,684-702).
ctgacgaactggaccaaaa

SEQ ID NO: 436499 - DNA, 19 bp, Homo sapiens
  siRNA target sequence for LOC169355 (NM_194294.1,686-704).
gacgaactggaccaaaaaa

SEQ ID NO: 436500 - DNA, 19 bp, Homo sapiens
  siRNA target sequence for LOC169355 (NM_194294.1,688-706).
cgaactggaccaaaaaaga

SEQ ID NO: 436501 - DNA, 19 bp, Homo sapiens
  siRNA target sequence for DKFZp434I1020 (NM_194295.1,213-231).
gagtgagaaatgttagtgt

SEQ ID NO: 436502 - DNA, 19 bp, Homo sapiens
  siRNA target sequence for C10orf36 (NM_194298.1,144-162).
gctgggtgattgtgtttgt

SEQ ID NO: 436503 - DNA, 19 bp, Homo sapiens
  siRNA target sequence for C10orf36 (NM_194298.1,209-227).
ggagtcctgtacatagaat

SEQ ID NO: 436504 - DNA, 19 bp, Homo sapiens
  siRNA target sequence for C10orf36 (NM_194298.1,342-360).
caagacctgtcacaatctt

SEQ ID NO: 436505 - DNA, 19 bp, Homo sapiens
  siRNA target sequence for C10orf36 (NM_194298.1,377-395).
gctggaggcctgatgttga

SEQ ID NO: 436506 - DNA, 19 bp, Homo sapiens
  siRNA target sequence for C10orf36 (NM_194298.1,388-406).
gatgttgagcagttttgct

SEQ ID NO: 436507 - DNA, 19 bp, Homo sapiens
  siRNA target sequence for C10orf36 (NM_194298.1,396-414).
gcagttttgctcccaatat

SEQ ID NO: 436508 - DNA, 19 bp, Homo sapiens
  siRNA target sequence for C10orf36 (NM_194298.1,450-468).
gtcttggatgtggtttatt

SEQ ID NO: 436509 - DNA, 19 bp, Homo sapiens
  siRNA target sequence for C10orf36 (NM_194298.1,476-494).
gcaacagtgaccattacgt

SEQ ID NO: 436510 - DNA, 19 bp, Homo sapiens
  siRNA target sequence for C10orf36 (NM_194298.1,486-504).
ccattacgtgccagtattt

SEQ ID NO: 436511 - DNA, 19 bp, Homo sapiens
  siRNA target sequence for C10orf36 (NM_194298.1,521-539).
ctagcgcttggcctgattt

SEQ ID NO: 436512 - DNA, 19 bp, Homo sapiens
  siRNA target sequence for C10orf36 (NM_194298.1,524-542).
gcgcttggcctgatttcaa

SEQ ID NO: 436513 - DNA, 19 bp, Homo sapiens
  siRNA target sequence for C10orf36 (NM_194298.1,526-544).
gcttggcctgatttcaaca

SEQ ID NO: 436514 - DNA, 19 bp, Homo sapiens
  siRNA target sequence for C10orf36 (NM_194298.1,549-567).
caagcgttggccttttcat

SEQ ID NO: 436515 - DNA, 19 bp, Homo sapiens
  siRNA target sequence for C10orf36 (NM_194298.1,585-603).
ggatgctggttgagttcta

SEQ ID NO: 436516 - DNA, 19 bp, Homo sapiens
  siRNA target sequence for C10orf36 (NM_194298.1,586-604).
gatgctggttgagttctat

SEQ ID NO: 436517 - DNA, 19 bp, Homo sapiens
  siRNA target sequence for C10orf36 (NM_194298.1,622-640).
gctgattgtgggtgcttta

SEQ ID NO: 436518 - DNA, 19 bp, Homo sapiens
  siRNA target sequence for C10orf36 (NM_194298.1,625-643).
gattgtgggtgctttagct

SEQ ID NO: 436519 - DNA, 19 bp, Homo sapiens
  siRNA target sequence for C10orf36 (NM_194298.1,629-647).
gtgggtgctttagctttaa

SEQ ID NO: 436520 - DNA, 19 bp, Homo sapiens
  siRNA target sequence for C10orf36 (NM_194298.1,631-649).
gggtgctttagctttaaat

SEQ ID NO: 436521 - DNA, 19 bp, Homo sapiens
  siRNA target sequence for C10orf36 (NM_194298.1,692-710).
gattgtcctttgcctaaaa

SEQ ID NO: 436522 - DNA, 19 bp, Homo sapiens
  siRNA target sequence for C10orf36 (NM_194298.1,720-738).
cagaagatctaccagataa

SEQ ID NO: 436523 - DNA, 19 bp, Homo sapiens
  siRNA target sequence for C10orf36 (NM_194298.1,732-750).
cagataaatactccattta

SEQ ID NO: 436524 - DNA, 19 bp, Homo sapiens
  siRNA target sequence for C10orf36 (NM_194298.1,801-819).
gctacagtagtgaggaaaa

SEQ ID NO: 436525 - DNA, 19 bp, Homo sapiens
  siRNA target sequence for C10orf36 (NM_194298.1,802-820).
ctacagtagtgaggaaaaa

SEQ ID NO: 436526 - DNA, 19 bp, Homo sapiens
  siRNA target sequence for C10orf36 (NM_194298.1,857-875).
gacagcctacttcataaaa

SEQ ID NO: 436527 - DNA, 19 bp, Homo sapiens
  siRNA target sequence for C10orf36 (NM_194298.1,894-912).
caaaagagcctgaaacgta

SEQ ID NO: 436528 - DNA, 19 bp, Homo sapiens
  siRNA target sequence for C10orf36 (NM_194298.1,902-920).
cctgaaacgtacaaaaaga

SEQ ID NO: 436529 - DNA, 19 bp, Homo sapiens
  siRNA target sequence for C10orf36 (NM_194298.1,969-987).
ggcagttatataaaaacta

SEQ ID NO: 436530 - DNA, 19 bp, Homo sapiens
  siRNA target sequence for C10orf36 (NM_194298.1,1043-1061).
gctatcttactctttgaca

SEQ ID NO: 436531 - DNA, 19 bp, Homo sapiens
  siRNA target sequence for C10orf36 (NM_194298.1,1074-1092).
caccttcattacttatgga

SEQ ID NO: 436532 - DNA, 19 bp, Homo sapiens
  siRNA target sequence for C10orf36 (NM_194298.1,1090-1108).
ggaagatgtagcaagaagt

SEQ ID NO: 436533 - DNA, 19 bp, Homo sapiens
  siRNA target sequence for C10orf36 (NM_194298.1,1091-1109).
gaagatgtagcaagaagtt

SEQ ID NO: 436534 - DNA, 19 bp, Homo sapiens
  siRNA target sequence for C10orf36 (NM_194298.1,1094-1112).
gatgtagcaagaagttcaa

SEQ ID NO: 436535 - DNA, 19 bp, Homo sapiens
  siRNA target sequence for C10orf36 (NM_194298.1,1107-1125).
gttcaaacgtgaaagaaga

SEQ ID NO: 436536 - DNA, 19 bp, Homo sapiens
  siRNA target sequence for C10orf36 (NM_194298.1,1199-1217).
gctgacttcaagtggatta

SEQ ID NO: 436537 - DNA, 19 bp, Homo sapiens
  siRNA target sequence for C10orf36 (NM_194298.1,1200-1218).
ctgacttcaagtggattaa

SEQ ID NO: 436538 - DNA, 19 bp, Homo sapiens
  siRNA target sequence for C10orf36 (NM_194298.1,1229-1247).
ctttatgttgctaccttaa

SEQ ID NO: 436539 - DNA, 19 bp, Homo sapiens
  siRNA target sequence for C10orf36 (NM_194298.1,1235-1253).
gttgctaccttaatcatca

SEQ ID NO: 436540 - DNA, 19 bp, Homo sapiens
  siRNA target sequence for C10orf36 (NM_194298.1,1258-1276).
cctagccttgtgtgcaatt

SEQ ID NO: 436541 - DNA, 19 bp, Homo sapiens
  siRNA target sequence for C10orf36 (NM_194298.1,1295-1313).
gtcacattggcgttgcttt

SEQ ID NO: 436542 - DNA, 19 bp, Homo sapiens
  siRNA target sequence for C10orf36 (NM_194298.1,1316-1334).
gggatcctagggtttctta

SEQ ID NO: 436543 - DNA, 19 bp, Homo sapiens
  siRNA target sequence for C10orf36 (NM_194298.1,1318-1336).
gatcctagggtttcttact

SEQ ID NO: 436544 - DNA, 19 bp, Homo sapiens
  siRNA target sequence for C10orf36 (NM_194298.1,1368-1386).
cgaagactgtgggaattga

SEQ ID NO: 436545 - DNA, 19 bp, Homo sapiens
  siRNA target sequence for C10orf36 (NM_194298.1,1372-1390).
gactgtgggaattgaaaaa

SEQ ID NO: 436546 - DNA, 19 bp, Homo sapiens
  siRNA target sequence for C10orf36 (NM_194298.1,1400-1418).
gcctatgggatattaatgt

SEQ ID NO: 436547 - DNA, 19 bp, Homo sapiens
  siRNA target sequence for C10orf36 (NM_194298.1,1401-1419).
cctatgggatattaatgtt

SEQ ID NO: 436548 - DNA, 19 bp, Homo sapiens
  siRNA target sequence for C10orf36 (NM_194298.1,1452-1470).
ccatcgttggttggtttta

SEQ ID NO: 436549 - DNA, 19 bp, Homo sapiens
  siRNA target sequence for C10orf36 (NM_194298.1,1453-1471).
catcgttggttggttttat

SEQ ID NO: 436550 - DNA, 19 bp, Homo sapiens
  siRNA target sequence for C10orf36 (NM_194298.1,1457-1475).
gttggttggttttatgact

SEQ ID NO: 436551 - DNA, 19 bp, Homo sapiens
  siRNA target sequence for C10orf36 (NM_194298.1,1476-1494).
ggacccagacctatgatat

SEQ ID NO: 436552 - DNA, 19 bp, Homo sapiens
  siRNA target sequence for C10orf36 (NM_194298.1,1480-1498).
ccagacctatgatattgca

SEQ ID NO: 436553 - DNA, 19 bp, Homo sapiens
  siRNA target sequence for C10orf36 (NM_194298.1,1519-1537).
cgtcctgctgggaggtttt

SEQ ID NO: 436554 - DNA, 19 bp, Homo sapiens
  siRNA target sequence for C10orf36 (NM_194298.1,1520-1538).
gtcctgctgggaggtttta

SEQ ID NO: 436555 - DNA, 19 bp, Homo sapiens
  siRNA target sequence for C10orf36 (NM_194298.1,1595-1613).
ccagctccaacaactttct

SEQ ID NO: 436556 - DNA, 19 bp, Homo sapiens
  siRNA target sequence for C10orf36 (NM_194298.1,1599-1617).
ctccaacaactttcttgta

SEQ ID NO: 436557 - DNA, 19 bp, Homo sapiens
  siRNA target sequence for LOC221711 (NM_194299.1,299-317).
gcaagcgaaaaacaaagat

SEQ ID NO: 436558 - DNA, 19 bp, Homo sapiens
  siRNA target sequence for LOC221711 (NM_194299.1,304-322).
cgaaaaacaaagatgcttt

SEQ ID NO: 436559 - DNA, 19 bp, Homo sapiens
  siRNA target sequence for LOC221711 (NM_194299.1,315-333).
gatgctttgcagcctatta

SEQ ID NO: 436560 - DNA, 19 bp, Homo sapiens
  siRNA target sequence for LOC221711 (NM_194299.1,319-337).
ctttgcagcctattaagga

SEQ ID NO: 436561 - DNA, 19 bp, Homo sapiens
  siRNA target sequence for LOC221711 (NM_194299.1,371-389).
ctggcttcaatcacttatt

SEQ ID NO: 436562 - DNA, 19 bp, Homo sapiens
  siRNA target sequence for LOC221711 (NM_194299.1,382-400).
cacttattacggatgcatt

SEQ ID NO: 436563 - DNA, 19 bp, Homo sapiens
  siRNA target sequence for LOC221711 (NM_194299.1,488-506).
ccgtcttgacagatcaata

SEQ ID NO: 436564 - DNA, 19 bp, Homo sapiens
  siRNA target sequence for LOC221711 (NM_194299.1,489-507).
cgtcttgacagatcaataa

SEQ ID NO: 436565 - DNA, 19 bp, Homo sapiens
  siRNA target sequence for LOC221711 (NM_194299.1,490-508).
gtcttgacagatcaataaa

SEQ ID NO: 436566 - DNA, 19 bp, Homo sapiens
  siRNA target sequence for LOC221711 (NM_194299.1,497-515).
cagatcaataaataaggaa

SEQ ID NO: 436567 - DNA, 19 bp, Homo sapiens
  siRNA target sequence for LOC221711 (NM_194299.1,617-635).
gggactgatcccaaagcta

SEQ ID NO: 436568 - DNA, 19 bp, Homo sapiens
  siRNA target sequence for LOC221711 (NM_194299.1,692-710).
cacgtcgctgatttgtgtt

SEQ ID NO: 436569 - DNA, 19 bp, Homo sapiens
  siRNA target sequence for LOC221711 (NM_194299.1,694-712).
cgtcgctgatttgtgttat

SEQ ID NO: 436570 - DNA, 19 bp, Homo sapiens
  siRNA target sequence for LOC221711 (NM_194299.1,695-713).
gtcgctgatttgtgttata

SEQ ID NO: 436571 - DNA, 19 bp, Homo sapiens
  siRNA target sequence for LOC221711 (NM_194299.1,697-715).
cgctgatttgtgttataga

SEQ ID NO: 436572 - DNA, 19 bp, Homo sapiens
  siRNA target sequence for LOC221711 (NM_194299.1,751-769).
gtagtagtgaagggaaaat

SEQ ID NO: 436573 - DNA, 19 bp, Homo sapiens
  siRNA target sequence for LOC221711 (NM_194299.1,840-858).
caacaggagggcttgaaga

SEQ ID NO: 436574 - DNA, 19 bp, Homo sapiens
  siRNA target sequence for LOC221711 (NM_194299.1,849-867).
ggcttgaagacttttaact

SEQ ID NO: 436575 - DNA, 19 bp, Homo sapiens
  siRNA target sequence for LOC221711 (NM_194299.1,918-936).
gaaggcatgtgtcatctta

SEQ ID NO: 436576 - DNA, 19 bp, Homo sapiens
  siRNA target sequence for LOC221711 (NM_194299.1,921-939).
ggcatgtgtcatcttatga

SEQ ID NO: 436577 - DNA, 19 bp, Homo sapiens
  siRNA target sequence for LOC221711 (NM_194299.1,922-940).
gcatgtgtcatcttatgaa

SEQ ID NO: 436578 - DNA, 19 bp, Homo sapiens
  siRNA target sequence for LOC221711 (NM_194299.1,923-941).
catgtgtcatcttatgaaa

SEQ ID NO: 436579 - DNA, 19 bp, Homo sapiens
  siRNA target sequence for LOC221711 (NM_194299.1,978-996).
gaccagcaggttgctattt

SEQ ID NO: 436580 - DNA, 19 bp, Homo sapiens
  siRNA target sequence for LOC221711 (NM_194299.1,983-1001).
gcaggttgctatttctgaa

SEQ ID NO: 436581 - DNA, 19 bp, Homo sapiens
  siRNA target sequence for LOC221711 (NM_194299.1,1007-1025).
gtgtagactgacgattaaa

SEQ ID NO: 436582 - DNA, 19 bp, Homo sapiens
  siRNA target sequence for LOC221711 (NM_194299.1,1112-1130).
gacggacagtagacgtttt

SEQ ID NO: 436583 - DNA, 19 bp, Homo sapiens
  siRNA target sequence for LOC221711 (NM_194299.1,1114-1132).
cggacagtagacgttttct

SEQ ID NO: 436584 - DNA, 19 bp, Homo sapiens
  siRNA target sequence for LOC221711 (NM_194299.1,1116-1134).
gacagtagacgttttctca

SEQ ID NO: 436585 - DNA, 19 bp, Homo sapiens
  siRNA target sequence for LOC221711 (NM_194299.1,1118-1136).
cagtagacgttttctcaat

SEQ ID NO: 436586 - DNA, 19 bp, Homo sapiens
  siRNA target sequence for LOC221711 (NM_194299.1,1120-1138).
gtagacgttttctcaatca

SEQ ID NO: 436587 - DNA, 19 bp, Homo sapiens
  siRNA target sequence for LOC223075 (NM_194300.1,1163-1181).
ccaagcaagaaagtattca

SEQ ID NO: 436588 - DNA, 19 bp, Homo sapiens
  siRNA target sequence for LOC223075 (NM_194300.1,1264-1282).
caagggatggttcaaatga

SEQ ID NO: 436589 - DNA, 19 bp, Homo sapiens
  siRNA target sequence for LOC223075 (NM_194300.1,1293-1311).
ctacatgagatctttgcat

SEQ ID NO: 436590 - DNA, 19 bp, Homo sapiens
  siRNA target sequence for LOC223075 (NM_194300.1,1299-1317).
gagatctttgcatcagttt

SEQ ID NO: 436591 - DNA, 19 bp, Homo sapiens
  siRNA target sequence for LOC223075 (NM_194300.1,1304-1322).
ctttgcatcagttttcaga

SEQ ID NO: 436592 - DNA, 19 bp, Homo sapiens
  siRNA target sequence for LOC223075 (NM_194300.1,1347-1365).
cagtttcaactcttgctat

SEQ ID NO: 436593 - DNA, 19 bp, Homo sapiens
  siRNA target sequence for LOC223075 (NM_194300.1,1353-1371).
caactcttgctattctact

SEQ ID NO: 436594 - DNA, 19 bp, Homo sapiens
  siRNA target sequence for LOC223075 (NM_194300.1,1393-1411).
cctgaatggctggaatttt

SEQ ID NO: 436595 - DNA, 19 bp, Homo sapiens
  siRNA target sequence for LOC223075 (NM_194300.1,1404-1422).
ggaattttgggagatagat

SEQ ID NO: 436596 - DNA, 19 bp, Homo sapiens
  siRNA target sequence for LOC223075 (NM_194300.1,1523-1541).
gaatcaacatccgtgtttt

SEQ ID NO: 436597 - DNA, 19 bp, Homo sapiens
  siRNA target sequence for LOC223075 (NM_194300.1,1527-1545).
caacatccgtgtttttctt

SEQ ID NO: 436598 - DNA, 19 bp, Homo sapiens
  siRNA target sequence for LOC223075 (NM_194300.1,1558-1576).
cagcgaatggacattgaga

SEQ ID NO: 436599 - DNA, 19 bp, Homo sapiens
  siRNA target sequence for LOC223075 (NM_194300.1,1595-1613).
gtttccgacagctggaaat

SEQ ID NO: 436600 - DNA, 19 bp, Homo sapiens
  siRNA target sequence for LOC223075 (NM_194300.1,1712-1730).
gaacctcagtccaaagctt

SEQ ID NO: 436601 - DNA, 19 bp, Homo sapiens
  siRNA target sequence for LOC223075 (NM_194300.1,1742-1760).
ctggtaatcctcttgacat

SEQ ID NO: 436602 - DNA, 19 bp, Homo sapiens
  siRNA target sequence for LOC223075 (NM_194300.1,1786-1804).
gtggacagagcaaatagct

SEQ ID NO: 436603 - DNA, 19 bp, Homo sapiens
  siRNA target sequence for LOC223075 (NM_194300.1,1923-1941).
gagccacagcttagtatca

SEQ ID NO: 436604 - DNA, 19 bp, Homo sapiens
  siRNA target sequence for LOC223075 (NM_194300.1,1964-1982).
cggatgggccagattccaa

SEQ ID NO: 436605 - DNA, 19 bp, Homo sapiens
  siRNA target sequence for LOC223075 (NM_194300.1,1966-1984).
gatgggccagattccaaaa

SEQ ID NO: 436606 - DNA, 19 bp, Homo sapiens
  siRNA target sequence for LOC223075 (NM_194300.1,1969-1987).
gggccagattccaaaagta

SEQ ID NO: 436607 - DNA, 19 bp, Homo sapiens
  siRNA target sequence for LOC223075 (NM_194300.1,1985-2003).
gtagggcgagcatgtcttt

SEQ ID NO: 436608 - DNA, 19 bp, Homo sapiens
  siRNA target sequence for LOC223075 (NM_194300.1,1989-2007).
ggcgagcatgtctttttca

SEQ ID NO: 436609 - DNA, 19 bp, Homo sapiens
  siRNA target sequence for LOC223075 (NM_194300.1,2086-2104).
gggccaccagagctgtata

SEQ ID NO: 436610 - DNA, 19 bp, Homo sapiens
  siRNA target sequence for LOC223075 (NM_194300.1,2257-2275).
gtaacccacgtcacagaaa

SEQ ID NO: 436611 - DNA, 19 bp, Homo sapiens
  siRNA target sequence for LOC223075 (NM_194300.1,2491-2509).
gaaatcacaccttatgcaa

SEQ ID NO: 436612 - DNA, 19 bp, Homo sapiens
  siRNA target sequence for LOC223075 (NM_194300.1,2538-2556).
cattccccacctccataaa

SEQ ID NO: 436613 - DNA, 19 bp, Homo sapiens
  siRNA target sequence for LOC223075 (NM_194300.1,2594-2612).
gtactttgggtcagatact

SEQ ID NO: 436614 - DNA, 19 bp, Homo sapiens
  siRNA target sequence for LOC223075 (NM_194300.1,2635-2653).
gaaaaccttcctctaaata

SEQ ID NO: 436615 - DNA, 19 bp, Homo sapiens
  siRNA target sequence for LOC223075 (NM_194300.1,2734-2752).
ggtcccagaggaacatctt

SEQ ID NO: 436616 - DNA, 19 bp, Homo sapiens
  siRNA target sequence for LOC223075 (NM_194300.1,2739-2757).
cagaggaacatctttagaa

SEQ ID NO: 436617 - DNA, 19 bp, Homo sapiens
  siRNA target sequence for LOC223075 (NM_194300.1,2817-2835).
gttaaatgatgcttccatt

SEQ ID NO: 436618 - DNA, 19 bp, Homo sapiens
  siRNA target sequence for LOC223075 (NM_194300.1,2902-2920).
ctagactcaggcttctcta

SEQ ID NO: 436619 - DNA, 19 bp, Homo sapiens
  siRNA target sequence for LOC223075 (NM_194300.1,2905-2923).
gactcaggcttctctagta

SEQ ID NO: 436620 - DNA, 19 bp, Homo sapiens
  siRNA target sequence for LOC223075 (NM_194300.1,2934-2952).
gggcacctgccatgctata

SEQ ID NO: 436621 - DNA, 19 bp, Homo sapiens
  siRNA target sequence for LOC223075 (NM_194300.1,3042-3060).
ctgcctgtgttcactaact

SEQ ID NO: 436622 - DNA, 19 bp, Homo sapiens
  siRNA target sequence for LOC223075 (NM_194300.1,3131-3149).
cctgcacagtccatgagat

SEQ ID NO: 436623 - DNA, 19 bp, Homo sapiens
  siRNA target sequence for LOC223075 (NM_194300.1,3172-3190).
caaagtttccgggagtatt

SEQ ID NO: 436624 - DNA, 19 bp, Homo sapiens
  siRNA target sequence for LOC223075 (NM_194300.1,3217-3235).
ggacagcaggccctctttt

SEQ ID NO: 436625 - DNA, 19 bp, Homo sapiens
  siRNA target sequence for LOC223075 (NM_194300.1,3269-3287).
ccgagcaactgcaaacgtt

SEQ ID NO: 436626 - DNA, 19 bp, Homo sapiens
  siRNA target sequence for LOC223075 (NM_194300.1,3270-3288).
cgagcaactgcaaacgtta

SEQ ID NO: 436627 - DNA, 19 bp, Homo sapiens
  siRNA target sequence for LOC223075 (NM_194300.1,3335-3353).
gagaccgggctcagcaaat

SEQ ID NO: 436628 - DNA, 19 bp, Homo sapiens
  siRNA target sequence for LOC223075 (NM_194300.1,3337-3355).
gaccgggctcagcaaatca

SEQ ID NO: 436629 - DNA, 19 bp, Homo sapiens
  siRNA target sequence for LOC223075 (NM_194300.1,3394-3412).
gagccacctgaacactatt

SEQ ID NO: 436630 - DNA, 19 bp, Homo sapiens
  siRNA target sequence for LOC223075 (NM_194300.1,3397-3415).
ccacctgaacactattcaa

SEQ ID NO: 436631 - DNA, 19 bp, Homo sapiens
  siRNA target sequence for LOC223075 (NM_194300.1,3605-3623).
catcagcttgggcaaagtt

SEQ ID NO: 436632 - DNA, 19 bp, Homo sapiens
  siRNA target sequence for LOC223075 (NM_194300.1,3625-3643).
ggtccaacccctttgtcaa

SEQ ID NO: 436633 - DNA, 19 bp, Homo sapiens
  siRNA target sequence for LOC223075 (NM_194300.1,3626-3644).
gtccaacccctttgtcaaa

SEQ ID NO: 436634 - DNA, 19 bp, Homo sapiens
  siRNA target sequence for DKFZp434O0527 (NM_194302.1,91-109).
cgaagccttcgccatctat

SEQ ID NO: 436635 - DNA, 19 bp, Homo sapiens
  siRNA target sequence for DKFZp434O0527 (NM_194302.1,92-110).
gaagccttcgccatctata

SEQ ID NO: 436636 - DNA, 19 bp, Homo sapiens
  siRNA target sequence for DKFZp434O0527 (NM_194302.1,96-114).
ccttcgccatctataaggt

SEQ ID NO: 436637 - DNA, 19 bp, Homo sapiens
  siRNA target sequence for DKFZp434O0527 (NM_194302.1,113-131).
gtcctgcagagctacagta

SEQ ID NO: 436638 - DNA, 19 bp, Homo sapiens
  siRNA target sequence for DKFZp434O0527 (NM_194302.1,116-134).
ctgcagagctacagtaata

SEQ ID NO: 436639 - DNA, 19 bp, Homo sapiens
  siRNA target sequence for DKFZp434O0527 (NM_194302.1,225-243).
cccagtattccctagatgt

SEQ ID NO: 436640 - DNA, 19 bp, Homo sapiens
  siRNA target sequence for DKFZp434O0527 (NM_194302.1,236-254).
ctagatgtccccaagctat

SEQ ID NO: 436641 - DNA, 19 bp, Homo sapiens
  siRNA target sequence for DKFZp434O0527 (NM_194302.1,687-705).
cctccagggggctaatcca

SEQ ID NO: 436642 - DNA, 19 bp, Homo sapiens
  siRNA target sequence for DKFZp434O0527 (NM_194302.1,704-722).
cagcccaacgagagactta

SEQ ID NO: 436643 - DNA, 19 bp, Homo sapiens
  siRNA target sequence for DKFZp434O0527 (NM_194302.1,960-978).
gcaactgcaccctctatta

SEQ ID NO: 436644 - DNA, 19 bp, Homo sapiens
  siRNA target sequence for DKFZp434O0527 (NM_194302.1,1145-1163).
ctcctttcccacagagata

SEQ ID NO: 436645 - DNA, 19 bp, Homo sapiens
  siRNA target sequence for DKFZp434O0527 (NM_194302.1,1208-1226).
gccgtgtaccccttgcttt

SEQ ID NO: 436646 - DNA, 19 bp, Homo sapiens
  siRNA target sequence for DKFZp434O0527 (NM_194302.1,1391-1409).
cccgtcctcacccctttaa

SEQ ID NO: 436647 - DNA, 19 bp, Homo sapiens
  siRNA target sequence for DKFZp434O0527 (NM_194302.1,1401-1419).
cccctttaaggcttgactt

SEQ ID NO: 436648 - DNA, 19 bp, Homo sapiens
  siRNA target sequence for DKFZp434O0527 (NM_194302.1,1404-1422).
ctttaaggcttgacttcaa

SEQ ID NO: 436649 - DNA, 19 bp, Homo sapiens
  siRNA target sequence for DKFZp434O0527 (NM_194302.1,1449-1467).
caccttccgtggtattcct

SEQ ID NO: 436650 - DNA, 19 bp, Homo sapiens
  siRNA target sequence for DKFZp434O0527 (NM_194302.1,1684-1702).
cctgttcatcggtactgat

SEQ ID NO: 436651 - DNA, 19 bp, Homo sapiens
  siRNA target sequence for DKFZp434O0527 (NM_194302.1,1790-1808).
gtgcacttcacctctacta

SEQ ID NO: 436652 - DNA, 19 bp, Homo sapiens
  siRNA target sequence for DKFZp434O0527 (NM_194302.1,1844-1862).
ctacccccacggcagattt

SEQ ID NO: 436653 - DNA, 19 bp, Homo sapiens
  siRNA target sequence for DKFZp434O0527 (NM_194302.1,1848-1866).
ccccacggcagatttatga

SEQ ID NO: 436654 - DNA, 19 bp, Homo sapiens
  siRNA target sequence for DKFZp434O0527 (NM_194302.1,1881-1899).
gctcagtgcccgtgacata

SEQ ID NO: 436655 - DNA, 19 bp, Homo sapiens
  siRNA target sequence for DKFZp434O0527 (NM_194302.1,1882-1900).
ctcagtgcccgtgacatat

SEQ ID NO: 436656 - DNA, 19 bp, Homo sapiens
  siRNA target sequence for DKFZp434O0527 (NM_194302.1,1884-1902).
cagtgcccgtgacatatga

SEQ ID NO: 436657 - DNA, 19 bp, Homo sapiens
  siRNA target sequence for DKFZp434O0527 (NM_194302.1,2006-2024).
cgggtcttgtggatcttct

SEQ ID NO: 436658 - DNA, 19 bp, Homo sapiens
  siRNA target sequence for DKFZp434O0527 (NM_194302.1,2111-2129).
ggctacaacccccatatga

SEQ ID NO: 436659 - DNA, 19 bp, Homo sapiens
  siRNA target sequence for DKFZp434O0527 (NM_194302.1,2164-2182).
gtgggacaacagttccata

SEQ ID NO: 436660 - DNA, 19 bp, Homo sapiens
  siRNA target sequence for DKFZp434O0527 (NM_194302.1,2168-2186).
gacaacagttccatacact

SEQ ID NO: 436661 - DNA, 19 bp, Homo sapiens
  siRNA target sequence for DKFZp434O0527 (NM_194302.1,2326-2344).
gcagccaagtcctctagat

SEQ ID NO: 436662 - DNA, 19 bp, Homo sapiens
  siRNA target sequence for DKFZp434O0527 (NM_194302.1,2327-2345).
cagccaagtcctctagatt

SEQ ID NO: 436663 - DNA, 19 bp, Homo sapiens
  siRNA target sequence for DKFZp434O0527 (NM_194302.1,2329-2347).
gccaagtcctctagatttt

SEQ ID NO: 436664 - DNA, 19 bp, Homo sapiens
  siRNA target sequence for DKFZp434O0527 (NM_194302.1,2356-2374).
gtctgtgagtcccatgata

SEQ ID NO: 436665 - DNA, 19 bp, Homo sapiens
  siRNA target sequence for DKFZp434O0527 (NM_194302.1,2429-2447).
gtgcatgccagcttctaca

SEQ ID NO: 436666 - DNA, 19 bp, Homo sapiens
  siRNA target sequence for DKFZp434O0527 (NM_194302.1,2448-2466).
gtgcagacctggtatgcaa

SEQ ID NO: 436667 - DNA, 19 bp, Homo sapiens
  siRNA target sequence for DKFZp434O0527 (NM_194302.1,2483-2501).
ctcatgaggcagtatcaca

SEQ ID NO: 436668 - DNA, 19 bp, Homo sapiens
  siRNA target sequence for DKFZp434O0527 (NM_194302.1,2622-2640).
cactgcctcccatcaagaa

SEQ ID NO: 436669 - DNA, 19 bp, Homo sapiens
  siRNA target sequence for DKFZp434O0527 (NM_194302.1,2761-2779).
ccatgccaccgactacttt

SEQ ID NO: 436670 - DNA, 19 bp, Homo sapiens
  siRNA target sequence for DKFZp434O0527 (NM_194302.1,3014-3032).
ccgtacttccgccaattct

SEQ ID NO: 436671 - DNA, 19 bp, Homo sapiens
  siRNA target sequence for DKFZp434O0527 (NM_194302.1,3038-3056).
gagcagtcaactaagttca

SEQ ID NO: 436672 - DNA, 19 bp, Homo sapiens
  siRNA target sequence for DKFZp434O0527 (NM_194302.1,3064-3082).
gaaaaacagcctgtactta

SEQ ID NO: 436673 - DNA, 19 bp, Homo sapiens
  siRNA target sequence for C10orf39 (NM_194303.1,100-118).
ggacgcagagcgagaagtt

SEQ ID NO: 436674 - DNA, 19 bp, Homo sapiens
  siRNA target sequence for C10orf39 (NM_194303.1,101-119).
gacgcagagcgagaagtta

SEQ ID NO: 436675 - DNA, 19 bp, Homo sapiens
  siRNA target sequence for C10orf39 (NM_194303.1,232-250).
ggcactgtaccggagaaat

SEQ ID NO: 436676 - DNA, 19 bp, Homo sapiens
  siRNA target sequence for C10orf39 (NM_194303.1,928-946).
ggctcagcagagaattaaa

SEQ ID NO: 436677 - DNA, 19 bp, Homo sapiens
  siRNA target sequence for LOC283031 (NM_194304.1,450-468).
caccatggatggcctatta

SEQ ID NO: 436678 - DNA, 19 bp, Homo sapiens
  siRNA target sequence for C21orf125 (NM_194309.1,97-115).
cctcgggacacattaggaa

SEQ ID NO: 436679 - DNA, 19 bp, Homo sapiens
  siRNA target sequence for C21orf125 (NM_194309.1,98-116).
ctcgggacacattaggaat

SEQ ID NO: 436680 - DNA, 19 bp, Homo sapiens
  siRNA target sequence for C21orf125 (NM_194309.1,101-119).
gggacacattaggaatgaa

SEQ ID NO: 436681 - DNA, 19 bp, Homo sapiens
  siRNA target sequence for C21orf125 (NM_194309.1,189-207).
gaccttccggctgaacaaa

SEQ ID NO: 436682 - DNA, 19 bp, Homo sapiens
  siRNA target sequence for C21orf125 (NM_194309.1,329-347).
cgtcttcttgggctctatt

SEQ ID NO: 436683 - DNA, 19 bp, Homo sapiens
  siRNA target sequence for C21orf125 (NM_194309.1,335-353).
cttgggctctattttgaaa

SEQ ID NO: 436684 - DNA, 19 bp, Homo sapiens
  siRNA target sequence for C21orf125 (NM_194309.1,371-389).
ggctttgacaagaatcgat

SEQ ID NO: 436685 - DNA, 19 bp, Homo sapiens
  siRNA target sequence for C21orf125 (NM_194309.1,372-390).
gctttgacaagaatcgatt

SEQ ID NO: 436686 - DNA, 19 bp, Homo sapiens
  siRNA target sequence for C21orf125 (NM_194309.1,477-495).
gcccacgtgggcaaaagca

SEQ ID NO: 436687 - DNA, 19 bp, Homo sapiens
  siRNA target sequence for C21orf125 (NM_194309.1,478-496).
cccacgtgggcaaaagcat

SEQ ID NO: 436688 - DNA, 19 bp, Homo sapiens
  siRNA target sequence for LOC284837 (NM_194310.1,385-403).
cacaccgggcaaatctgaa

SEQ ID NO: 436689 - DNA, 19 bp, Homo sapiens
  siRNA target sequence for LOC284837 (NM_194310.1,390-408).
cgggcaaatctgaaaccat

SEQ ID NO: 436690 - DNA, 19 bp, Homo sapiens
  siRNA target sequence for LOC284837 (NM_194310.1,711-729).
ggcacaatcctctcacttt

SEQ ID NO: 436691 - DNA, 19 bp, Homo sapiens
  siRNA target sequence for LOC339768 (NM_194312.1,699-717).
gtctggctggtcacattca

SEQ ID NO: 436692 - DNA, 19 bp, Homo sapiens
  siRNA target sequence for LOC339768 (NM_194312.1,926-944).
ctccctgcgggatgaagat

SEQ ID NO: 436693 - DNA, 19 bp, Homo sapiens
  siRNA target sequence for LOC339768 (NM_194312.1,2244-2262).
cgcaaggagcgcatcatca

SEQ ID NO: 436694 - DNA, 19 bp, Homo sapiens
  siRNA target sequence for LOC339768 (NM_194312.1,2590-2608).
gcctctcactggatctctt

SEQ ID NO: 436695 - DNA, 19 bp, Homo sapiens
  siRNA target sequence for LOC339768 (NM_194312.1,3024-3042).
gaagctgagatgttcaact

SEQ ID NO: 436696 - DNA, 19 bp, Homo sapiens
  siRNA target sequence for C9orf48 (NM_194313.1,193-211).
cctctccaaaacgaattca

SEQ ID NO: 436697 - DNA, 19 bp, Homo sapiens
  siRNA target sequence for C9orf48 (NM_194313.1,336-354).
cacccacccaacattcctt

SEQ ID NO: 436698 - DNA, 19 bp, Homo sapiens
  siRNA target sequence for C9orf48 (NM_194313.1,366-384).
cctaaggtctctggtaaaa

SEQ ID NO: 436699 - DNA, 19 bp, Homo sapiens
  siRNA target sequence for C9orf48 (NM_194313.1,429-447).
gctagccctgtgaaaggaa

SEQ ID NO: 436700 - DNA, 19 bp, Homo sapiens
  siRNA target sequence for C9orf48 (NM_194313.1,517-535).
gaatgggcaacaaaactgt

SEQ ID NO: 436701 - DNA, 19 bp, Homo sapiens
  siRNA target sequence for C9orf48 (NM_194313.1,595-613).
ccaccaagtgcaagaaagt

SEQ ID NO: 436702 - DNA, 19 bp, Homo sapiens
  siRNA target sequence for C9orf48 (NM_194313.1,779-797).
ggaacatctgcgtttctat

SEQ ID NO: 436703 - DNA, 19 bp, Homo sapiens
  siRNA target sequence for C9orf48 (NM_194313.1,817-835).
cacctctcctccaacagaa

SEQ ID NO: 436704 - DNA, 19 bp, Homo sapiens
  siRNA target sequence for C9orf48 (NM_194313.1,820-838).
ctctcctccaacagaagtt

SEQ ID NO: 436705 - DNA, 19 bp, Homo sapiens
  siRNA target sequence for C9orf48 (NM_194313.1,822-840).
ctcctccaacagaagttaa

SEQ ID NO: 436706 - DNA, 19 bp, Homo sapiens
  siRNA target sequence for C9orf48 (NM_194313.1,950-968).
ccaagtagaggaacttgat

SEQ ID NO: 436707 - DNA, 19 bp, Homo sapiens
  siRNA target sequence for C9orf48 (NM_194313.1,982-1000).
gtgaagattctttttcaca

SEQ ID NO: 436708 - DNA, 19 bp, Homo sapiens
  siRNA target sequence for C9orf48 (NM_194313.1,1146-1164).
gacaagaaagatctaacta

SEQ ID NO: 436709 - DNA, 19 bp, Homo sapiens
  siRNA target sequence for C9orf48 (NM_194313.1,1318-1336).
gttcacaggtagatttcat

SEQ ID NO: 436710 - DNA, 19 bp, Homo sapiens
  siRNA target sequence for C9orf48 (NM_194313.1,1321-1339).
cacaggtagatttcatata

SEQ ID NO: 436711 - DNA, 19 bp, Homo sapiens
  siRNA target sequence for C9orf48 (NM_194313.1,1325-1343).
ggtagatttcatatataga

SEQ ID NO: 436712 - DNA, 19 bp, Homo sapiens
  siRNA target sequence for C9orf48 (NM_194313.1,1440-1458).
gaagatggtttcactatct

SEQ ID NO: 436713 - DNA, 19 bp, Homo sapiens
  siRNA target sequence for C9orf48 (NM_194313.1,1443-1461).
gatggtttcactatctcat

SEQ ID NO: 436714 - DNA, 19 bp, Homo sapiens
  siRNA target sequence for C9orf48 (NM_194313.1,1446-1464).
ggtttcactatctcattgt

SEQ ID NO: 436715 - DNA, 19 bp, Homo sapiens
  siRNA target sequence for C9orf48 (NM_194313.1,2068-2086).
ccttcaccaccatacatat

SEQ ID NO: 436716 - DNA, 19 bp, Homo sapiens
  siRNA target sequence for C9orf48 (NM_194313.1,2117-2135).
cccacgaacaggaagtagt

SEQ ID NO: 436717 - DNA, 19 bp, Homo sapiens
  siRNA target sequence for C9orf48 (NM_194313.1,2228-2246).
gccctgcaacagtgaaaat

SEQ ID NO: 436718 - DNA, 19 bp, Homo sapiens
  siRNA target sequence for C9orf48 (NM_194313.1,2444-2462).
gagccagctggcttctaat

SEQ ID NO: 436719 - DNA, 19 bp, Homo sapiens
  siRNA target sequence for C9orf48 (NM_194313.1,2446-2464).
gccagctggcttctaatga

SEQ ID NO: 436720 - DNA, 19 bp, Homo sapiens
  siRNA target sequence for C9orf48 (NM_194313.1,2450-2468).
gctggcttctaatgatttt

SEQ ID NO: 436721 - DNA, 19 bp, Homo sapiens
  siRNA target sequence for C9orf48 (NM_194313.1,2478-2496).
gtgacccagctggatgaaa

SEQ ID NO: 436722 - DNA, 19 bp, Homo sapiens
  siRNA target sequence for C9orf48 (NM_194313.1,2502-2520).
gttctgaaatccaagtgta

SEQ ID NO: 436723 - DNA, 19 bp, Homo sapiens
  siRNA target sequence for FRBZ1 (NM_194314.1,228-246).
gagaaagcttttaagttct

SEQ ID NO: 436724 - DNA, 19 bp, Homo sapiens
  siRNA target sequence for FRBZ1 (NM_194314.1,242-260).
gttctttgcagtataataa

SEQ ID NO: 436725 - DNA, 19 bp, Homo sapiens
  siRNA target sequence for FRBZ1 (NM_194314.1,252-270).
gtataataagaatttgcta

SEQ ID NO: 436726 - DNA, 19 bp, Homo sapiens
  siRNA target sequence for FRBZ1 (NM_194314.1,291-309).
gcagaagcaaccatctttt

SEQ ID NO: 436727 - DNA, 19 bp, Homo sapiens
  siRNA target sequence for FRBZ1 (NM_194314.1,297-315).
gcaaccatctttttgtgat

SEQ ID NO: 436728 - DNA, 19 bp, Homo sapiens
  siRNA target sequence for FRBZ1 (NM_194314.1,311-329).
gtgatttacttatcatagt

SEQ ID NO: 436729 - DNA, 19 bp, Homo sapiens
  siRNA target sequence for FRBZ1 (NM_194314.1,367-385).
gctgtcggcagtagttatt

SEQ ID NO: 436730 - DNA, 19 bp, Homo sapiens
  siRNA target sequence for FRBZ1 (NM_194314.1,368-386).
ctgtcggcagtagttattt

SEQ ID NO: 436731 - DNA, 19 bp, Homo sapiens
  siRNA target sequence for FRBZ1 (NM_194314.1,372-390).
cggcagtagttattttcat

SEQ ID NO: 436732 - DNA, 19 bp, Homo sapiens
  siRNA target sequence for FRBZ1 (NM_194314.1,393-411).
gtgtttgagcaaaaatcca

SEQ ID NO: 436733 - DNA, 19 bp, Homo sapiens
  siRNA target sequence for FRBZ1 (NM_194314.1,428-446).
ccctggatcacgtaacaca

SEQ ID NO: 436734 - DNA, 19 bp, Homo sapiens
  siRNA target sequence for FRBZ1 (NM_194314.1,429-447).
cctggatcacgtaacacat

SEQ ID NO: 436735 - DNA, 19 bp, Homo sapiens
  siRNA target sequence for FRBZ1 (NM_194314.1,430-448).
ctggatcacgtaacacatt

SEQ ID NO: 436736 - DNA, 19 bp, Homo sapiens
  siRNA target sequence for FRBZ1 (NM_194314.1,432-450).
ggatcacgtaacacattca

SEQ ID NO: 436737 - DNA, 19 bp, Homo sapiens
  siRNA target sequence for FRBZ1 (NM_194314.1,438-456).
cgtaacacattcagttttt

SEQ ID NO: 436738 - DNA, 19 bp, Homo sapiens
  siRNA target sequence for FRBZ1 (NM_194314.1,449-467).
cagtttttcagcatttgct

SEQ ID NO: 436739 - DNA, 19 bp, Homo sapiens
  siRNA target sequence for FRBZ1 (NM_194314.1,485-503).
cagaattttttgtgtacaa

SEQ ID NO: 436740 - DNA, 19 bp, Homo sapiens
  siRNA target sequence for FRBZ1 (NM_194314.1,553-571).
gatgcagtgaagttgttaa

SEQ ID NO: 436741 - DNA, 19 bp, Homo sapiens
  siRNA target sequence for FRBZ1 (NM_194314.1,561-579).
gaagttgttaaataacgaa

SEQ ID NO: 436742 - DNA, 19 bp, Homo sapiens
  siRNA target sequence for FRBZ1 (NM_194314.1,640-658).
gaattaactggaagactat

SEQ ID NO: 436743 - DNA, 19 bp, Homo sapiens
  siRNA target sequence for FRBZ1 (NM_194314.1,653-671).
gactatcaaataatcatca

SEQ ID NO: 436744 - DNA, 19 bp, Homo sapiens
  siRNA target sequence for FRBZ1 (NM_194314.1,667-685).
catcagtgcaaattctgta

SEQ ID NO: 436745 - DNA, 19 bp, Homo sapiens
  siRNA target sequence for FRBZ1 (NM_194314.1,681-699).
ctgtagtagacatttttgt

SEQ ID NO: 436746 - DNA, 19 bp, Homo sapiens
  siRNA target sequence for FRBZ1 (NM_194314.1,683-701).
gtagtagacatttttgtta

SEQ ID NO: 436747 - DNA, 19 bp, Homo sapiens
  siRNA target sequence for FRBZ1 (NM_194314.1,735-753).
ccataggtcccttttatta

SEQ ID NO: 436748 - DNA, 19 bp, Homo sapiens
  siRNA target sequence for FRBZ1 (NM_194314.1,817-835).
cggaagtgccctgttaagt

SEQ ID NO: 436749 - DNA, 19 bp, Homo sapiens
  siRNA target sequence for FRBZ1 (NM_194314.1,819-837).
gaagtgccctgttaagttt

SEQ ID NO: 436750 - DNA, 19 bp, Homo sapiens
  siRNA target sequence for FRBZ1 (NM_194314.1,868-886).
ggtgatgggtcagacaatt

SEQ ID NO: 436751 - DNA, 19 bp, Homo sapiens
  siRNA target sequence for FRBZ1 (NM_194314.1,869-887).
gtgatgggtcagacaattt

SEQ ID NO: 436752 - DNA, 19 bp, Homo sapiens
  siRNA target sequence for FRBZ1 (NM_194314.1,878-896).
cagacaatttgaatcaaga

SEQ ID NO: 436753 - DNA, 19 bp, Homo sapiens
  siRNA target sequence for FRBZ1 (NM_194314.1,937-955).
gaccctggaagtgaatata

SEQ ID NO: 436754 - DNA, 19 bp, Homo sapiens
  siRNA target sequence for FRBZ1 (NM_194314.1,939-957).
ccctggaagtgaatataat

SEQ ID NO: 436755 - DNA, 19 bp, Homo sapiens
  siRNA target sequence for FRBZ1 (NM_194314.1,996-1014).
gtactctgacattgaagaa

SEQ ID NO: 436756 - DNA, 19 bp, Homo sapiens
  siRNA target sequence for FRBZ1 (NM_194314.1,1132-1150).
cagtgtcctaaatgtgata

SEQ ID NO: 436757 - DNA, 19 bp, Homo sapiens
  siRNA target sequence for FRBZ1 (NM_194314.1,1231-1249).
caccagcgctattcaacaa

SEQ ID NO: 436758 - DNA, 19 bp, Homo sapiens
  siRNA target sequence for FRBZ1 (NM_194314.1,1234-1252).
cagcgctattcaacaaagt

SEQ ID NO: 436759 - DNA, 19 bp, Homo sapiens
  siRNA target sequence for FRBZ1 (NM_194314.1,1236-1254).
gcgctattcaacaaagtct

SEQ ID NO: 436760 - DNA, 19 bp, Homo sapiens
  siRNA target sequence for FRBZ1 (NM_194314.1,1237-1255).
cgctattcaacaaagtcta

SEQ ID NO: 436761 - DNA, 19 bp, Homo sapiens
  siRNA target sequence for FRBZ1 (NM_194314.1,1247-1265).
caaagtctaacctaactgt

SEQ ID NO: 436762 - DNA, 19 bp, Homo sapiens
  siRNA target sequence for FRBZ1 (NM_194314.1,1309-1327).
gagcacaagtgcccttatt

SEQ ID NO: 436763 - DNA, 19 bp, Homo sapiens
  siRNA target sequence for FRBZ1 (NM_194314.1,1312-1330).
cacaagtgcccttattgta

SEQ ID NO: 436764 - DNA, 19 bp, Homo sapiens
  siRNA target sequence for FRBZ1 (NM_194314.1,1322-1340).
cttattgtaataaacttca

SEQ ID NO: 436765 - DNA, 19 bp, Homo sapiens
  siRNA target sequence for FRBZ1 (NM_194314.1,1339-1357).
catgcaagcaagaagactt

SEQ ID NO: 436766 - DNA, 19 bp, Homo sapiens
  siRNA target sequence for FRBZ1 (NM_194314.1,1355-1373).
ctttagccaagcatgttaa

SEQ ID NO: 436767 - DNA, 19 bp, Homo sapiens
  siRNA target sequence for FRBZ1 (NM_194314.1,1361-1379).
ccaagcatgttaagagatt

SEQ ID NO: 436768 - DNA, 19 bp, Homo sapiens
  siRNA target sequence for FRBZ1 (NM_194314.1,1362-1380).
caagcatgttaagagattt

SEQ ID NO: 436769 - DNA, 19 bp, Homo sapiens
  siRNA target sequence for FRBZ1 (NM_194314.1,1365-1383).
gcatgttaagagatttcat

SEQ ID NO: 436770 - DNA, 19 bp, Homo sapiens
  siRNA target sequence for FRBZ1 (NM_194314.1,1384-1402).
cctgaaaatgcacaagaat

SEQ ID NO: 436771 - DNA, 19 bp, Homo sapiens
  siRNA target sequence for FRBZ1 (NM_194314.1,1410-1428).
cattaagaagactaagagt

SEQ ID NO: 436772 - DNA, 19 bp, Homo sapiens
  siRNA target sequence for FRBZ1 (NM_194314.1,1553-1571).
cacggtttgctcggttaaa

SEQ ID NO: 436773 - DNA, 19 bp, Homo sapiens
  siRNA target sequence for FRBZ1 (NM_194314.1,1556-1574).
ggtttgctcggttaaagca

SEQ ID NO: 436774 - DNA, 19 bp, Homo sapiens
  siRNA target sequence for FRBZ1 (NM_194314.1,1557-1575).
gtttgctcggttaaagcat

SEQ ID NO: 436775 - DNA, 19 bp, Homo sapiens
  siRNA target sequence for FRBZ1 (NM_194314.1,1562-1580).
ctcggttaaagcatcaaga

SEQ ID NO: 436776 - DNA, 19 bp, Homo sapiens
  siRNA target sequence for FRBZ1 (NM_194314.1,1564-1582).
cggttaaagcatcaagaaa

SEQ ID NO: 436777 - DNA, 19 bp, Homo sapiens
  siRNA target sequence for FRBZ1 (NM_194314.1,1616-1634).
gtggtcgccagtttaacga

SEQ ID NO: 436778 - DNA, 19 bp, Homo sapiens
  siRNA target sequence for FRBZ1 (NM_194314.1,1717-1735).
cgagaaagaactactttga

SEQ ID NO: 436779 - DNA, 19 bp, Homo sapiens
  siRNA target sequence for FRBZ1 (NM_194314.1,1767-1785).
gcctcacctttgtagtatt

SEQ ID NO: 436780 - DNA, 19 bp, Homo sapiens
  siRNA target sequence for FRBZ1 (NM_194314.1,1811-1829).
gttcgtatagacttcactt

SEQ ID NO: 436781 - DNA, 19 bp, Homo sapiens
  siRNA target sequence for FRBZ1 (NM_194314.1,1827-1845).
cttacgagtacatcatgat

SEQ ID NO: 436782 - DNA, 19 bp, Homo sapiens
  siRNA target sequence for FRBZ1 (NM_194314.1,1834-1852).
gtacatcatgatgataaaa

SEQ ID NO: 436783 - DNA, 19 bp, Homo sapiens
  siRNA target sequence for FRBZ1 (NM_194314.1,1837-1855).
catcatgatgataaaagat

SEQ ID NO: 436784 - DNA, 19 bp, Homo sapiens
  siRNA target sequence for FRBZ1 (NM_194314.1,1888-1906).
cgtcatgatcaccttacaa

SEQ ID NO: 436785 - DNA, 19 bp, Homo sapiens
  siRNA target sequence for FRBZ1 (NM_194314.1,1889-1907).
gtcatgatcaccttacaaa

SEQ ID NO: 436786 - DNA, 19 bp, Homo sapiens
  siRNA target sequence for MGC52057 (NM_194317.1,354-372).
gctggcggattgtctgaaa

SEQ ID NO: 436787 - DNA, 19 bp, Homo sapiens
  siRNA target sequence for MGC52057 (NM_194317.1,472-490).
gcagcagacaattatgagt

SEQ ID NO: 436788 - DNA, 19 bp, Homo sapiens
  siRNA target sequence for MGC52057 (NM_194317.1,497-515).
gatgggctccagacatcta

SEQ ID NO: 436789 - DNA, 19 bp, Homo sapiens
  siRNA target sequence for MGC52057 (NM_194317.1,520-538).
cctcgagagaccagatact

SEQ ID NO: 436790 - DNA, 19 bp, Homo sapiens
  siRNA target sequence for MGC52057 (NM_194317.1,539-557).
gctacactcagcacacaat

SEQ ID NO: 436791 - DNA, 19 bp, Homo sapiens
  siRNA target sequence for MGC52057 (NM_194317.1,562-580).
gtcacaggaaacagtatct

SEQ ID NO: 436792 - DNA, 19 bp, Homo sapiens
  siRNA target sequence for MGC52057 (NM_194317.1,652-670).
cacaaggtctgcacttctt

SEQ ID NO: 436793 - DNA, 19 bp, Homo sapiens
  siRNA target sequence for MGC52057 (NM_194317.1,654-672).
caaggtctgcacttcttgt

SEQ ID NO: 436794 - DNA, 19 bp, Homo sapiens
  siRNA target sequence for MGC52057 (NM_194317.1,657-675).
ggtctgcacttcttgttgt

SEQ ID NO: 436795 - DNA, 19 bp, Homo sapiens
  siRNA target sequence for MGC52057 (NM_194317.1,660-678).
ctgcacttcttgttgtgaa

SEQ ID NO: 436796 - DNA, 19 bp, Homo sapiens
  siRNA target sequence for MGC52057 (NM_194317.1,702-720).
gccccgaaatgaaactgat

SEQ ID NO: 436797 - DNA, 19 bp, Homo sapiens
  siRNA target sequence for MGC52057 (NM_194317.1,734-752).
cgacgtcacctataaatca

SEQ ID NO: 436798 - DNA, 19 bp, Homo sapiens
  siRNA target sequence for MGC52057 (NM_194317.1,760-778).
gggcacccacgctgtatgt

SEQ ID NO: 436799 - DNA, 19 bp, Homo sapiens
  siRNA target sequence for MGC52057 (NM_194317.1,762-780).
gcacccacgctgtatgtca

SEQ ID NO: 436800 - DNA, 19 bp, Homo sapiens
  siRNA target sequence for MGC52057 (NM_194317.1,804-822).
gtggttagggctcatgtta

SEQ ID NO: 436801 - DNA, 19 bp, Homo sapiens
  siRNA target sequence for B3GTL (NM_194318.1,76-94).
ggtttggcttctgaagata

SEQ ID NO: 436802 - DNA, 19 bp, Homo sapiens
  siRNA target sequence for B3GTL (NM_194318.1,183-201).
catccagagtcaaagtaat

SEQ ID NO: 436803 - DNA, 19 bp, Homo sapiens
  siRNA target sequence for B3GTL (NM_194318.1,324-342).
gaccatacttccgttgtta

SEQ ID NO: 436804 - DNA, 19 bp, Homo sapiens
  siRNA target sequence for B3GTL (NM_194318.1,407-425).
gaatacagattccaaaact

SEQ ID NO: 436805 - DNA, 19 bp, Homo sapiens
  siRNA target sequence for B3GTL (NM_194318.1,451-469).
ccctctaaggaatggtttt

SEQ ID NO: 436806 - DNA, 19 bp, Homo sapiens
  siRNA target sequence for B3GTL (NM_194318.1,452-470).
cctctaaggaatggttttt

SEQ ID NO: 436807 - DNA, 19 bp, Homo sapiens
  siRNA target sequence for B3GTL (NM_194318.1,524-542).
ccgagaatcctacagtttt

SEQ ID NO: 436808 - DNA, 19 bp, Homo sapiens
  siRNA target sequence for B3GTL (NM_194318.1,563-581).
caggctgggccttaagtat

SEQ ID NO: 436809 - DNA, 19 bp, Homo sapiens
  siRNA target sequence for B3GTL (NM_194318.1,624-642).
cttgaaatccgactttaca

SEQ ID NO: 436810 - DNA, 19 bp, Homo sapiens
  siRNA target sequence for B3GTL (NM_194318.1,627-645).
gaaatccgactttacaata

SEQ ID NO: 436811 - DNA, 19 bp, Homo sapiens
  siRNA target sequence for B3GTL (NM_194318.1,632-650).
ccgactttacaatagattt

SEQ ID NO: 436812 - DNA, 19 bp, Homo sapiens
  siRNA target sequence for B3GTL (NM_194318.1,633-651).
cgactttacaatagattta

SEQ ID NO: 436813 - DNA, 19 bp, Homo sapiens
  siRNA target sequence for B3GTL (NM_194318.1,658-676).
gagattgccctctacatct

SEQ ID NO: 436814 - DNA, 19 bp, Homo sapiens
  siRNA target sequence for B3GTL (NM_194318.1,725-743).
ccaatgacgtggacttcta

SEQ ID NO: 436815 - DNA, 19 bp, Homo sapiens
  siRNA target sequence for B3GTL (NM_194318.1,838-856).
catggtgacagaataccta

SEQ ID NO: 436816 - DNA, 19 bp, Homo sapiens
  siRNA target sequence for B3GTL (NM_194318.1,842-860).
gtgacagaatacctattgt

SEQ ID NO: 436817 - DNA, 19 bp, Homo sapiens
  siRNA target sequence for B3GTL (NM_194318.1,878-896).
gccaggcaagtctcattga

SEQ ID NO: 436818 - DNA, 19 bp, Homo sapiens
  siRNA target sequence for B3GTL (NM_194318.1,880-898).
caggcaagtctcattgaat

SEQ ID NO: 436819 - DNA, 19 bp, Homo sapiens
  siRNA target sequence for B3GTL (NM_194318.1,884-902).
caagtctcattgaatacta

SEQ ID NO: 436820 - DNA, 19 bp, Homo sapiens
  siRNA target sequence for B3GTL (NM_194318.1,895-913).
gaatactatagtgactata

SEQ ID NO: 436821 - DNA, 19 bp, Homo sapiens
  siRNA target sequence for B3GTL (NM_194318.1,900-918).
ctatagtgactatactgaa

SEQ ID NO: 436822 - DNA, 19 bp, Homo sapiens
  siRNA target sequence for B3GTL (NM_194318.1,909-927).
ctatactgaaaattccatt

SEQ ID NO: 436823 - DNA, 19 bp, Homo sapiens
  siRNA target sequence for B3GTL (NM_194318.1,942-960).
gggaattcctaatacagat

SEQ ID NO: 436824 - DNA, 19 bp, Homo sapiens
  siRNA target sequence for B3GTL (NM_194318.1,994-1012).
gaaagatttctgaatcgta

SEQ ID NO: 436825 - DNA, 19 bp, Homo sapiens
  siRNA target sequence for B3GTL (NM_194318.1,1017-1035).
ggacaaaacagcatggtta

SEQ ID NO: 436826 - DNA, 19 bp, Homo sapiens
  siRNA target sequence for B3GTL (NM_194318.1,1044-1062).
ggatgatgatacattaata

SEQ ID NO: 436827 - DNA, 19 bp, Homo sapiens
  siRNA target sequence for B3GTL (NM_194318.1,1080-1098).
gcacttgcttagctgttat

SEQ ID NO: 436828 - DNA, 19 bp, Homo sapiens
  siRNA target sequence for B3GTL (NM_194318.1,1212-1230).
gagacttctcgccagtaaa

SEQ ID NO: 436829 - DNA, 19 bp, Homo sapiens
  siRNA target sequence for B3GTL (NM_194318.1,1269-1287).
cctgggaatgtgctttagt

SEQ ID NO: 436830 - DNA, 19 bp, Homo sapiens
  siRNA target sequence for B3GTL (NM_194318.1,1356-1374).
ctacctttctcatcaagtt

SEQ ID NO: 436831 - DNA, 19 bp, Homo sapiens
  siRNA target sequence for B3GTL (NM_194318.1,1366-1384).
catcaagttcccatatcgt

SEQ ID NO: 436832 - DNA, 19 bp, Homo sapiens
  siRNA target sequence for B3GTL (NM_194318.1,1411-1429).
gtgaaggtgtatttcacat

SEQ ID NO: 436833 - DNA, 19 bp, Homo sapiens
  siRNA target sequence for B3GTL (NM_194318.1,1436-1454).
cacccagtgacgaagacaa

SEQ ID NO: 436834 - DNA, 19 bp, Homo sapiens
  siRNA target sequence for B3GTL (NM_194318.1,1477-1495).
ggttttcgagaggagttat

SEQ ID NO: 436835 - DNA, 19 bp, Homo sapiens
  siRNA target sequence for DKFZp686B2197 (NM_194319.1,913-931).
ctacacatacgagagaaaa

SEQ ID NO: 436836 - DNA, 19 bp, Homo sapiens
  siRNA target sequence for DKFZp686B2197 (NM_194319.1,968-986).
ccgtgtctcagctcttata

SEQ ID NO: 436837 - DNA, 19 bp, Homo sapiens
  siRNA target sequence for DKFZp686B2197 (NM_194319.1,970-988).
gtgtctcagctcttataga

SEQ ID NO: 436838 - DNA, 19 bp, Homo sapiens
  siRNA target sequence for DKFZp686B2197 (NM_194319.1,1305-1323).
gcccattcttctcttgtta

SEQ ID NO: 436839 - DNA, 19 bp, Homo sapiens
  siRNA target sequence for DKFZp686B2197 (NM_194319.1,1480-1498).
ccacactttgtcaacataa

SEQ ID NO: 436840 - DNA, 19 bp, Homo sapiens
  siRNA target sequence for DKFZp686B2197 (NM_194319.1,1481-1499).
cacactttgtcaacataat

SEQ ID NO: 436841 - DNA, 19 bp, Homo sapiens
  siRNA target sequence for DKFZp686B2197 (NM_194319.1,1575-1593).
cgacactgtagaatgtgta

SEQ ID NO: 436842 - DNA, 19 bp, Homo sapiens
  siRNA target sequence for ZNF169 (NM_194320.1,138-156).
gagtggaagctattgagtt

SEQ ID NO: 436843 - DNA, 19 bp, Homo sapiens
  siRNA target sequence for ZNF169 (NM_194320.1,371-389).
gcagctcctcagacaatat

SEQ ID NO: 436844 - DNA, 19 bp, Homo sapiens
  siRNA target sequence for ZNF169 (NM_194320.1,505-523).
ccgacagctcattaagaaa

SEQ ID NO: 436845 - DNA, 19 bp, Homo sapiens
  siRNA target sequence for ZNF169 (NM_194320.1,643-661).
gggggtcagacacaatgtt

SEQ ID NO: 436846 - DNA, 19 bp, Homo sapiens
  siRNA target sequence for ZNF169 (NM_194320.1,691-709).
cagtcatacgtggaaacta

SEQ ID NO: 436847 - DNA, 19 bp, Homo sapiens
  siRNA target sequence for ZNF169 (NM_194320.1,693-711).
gtcatacgtggaaactata

SEQ ID NO: 436848 - DNA, 19 bp, Homo sapiens
  siRNA target sequence for ZNF169 (NM_194320.1,695-713).
catacgtggaaactataga

SEQ ID NO: 436849 - DNA, 19 bp, Homo sapiens
  siRNA target sequence for ZNF169 (NM_194320.1,717-735).
ggacttagcaaaaagtcaa

SEQ ID NO: 436850 - DNA, 19 bp, Homo sapiens
  siRNA target sequence for ZNF169 (NM_194320.1,945-963).
gggcgacacttcaggtata

SEQ ID NO: 436851 - DNA, 19 bp, Homo sapiens
  siRNA target sequence for ZNF169 (NM_194320.1,947-965).
gcgacacttcaggtataca

SEQ ID NO: 436852 - DNA, 19 bp, Homo sapiens
  siRNA target sequence for ZNF169 (NM_194320.1,948-966).
cgacacttcaggtatacat

SEQ ID NO: 436853 - DNA, 19 bp, Homo sapiens
  siRNA target sequence for ZNF169 (NM_194320.1,964-982).
catcctctctcactaatca

SEQ ID NO: 436854 - DNA, 19 bp, Homo sapiens
  siRNA target sequence for ZNF169 (NM_194320.1,1526-1544).
caagtgtgggcgtgcattt

SEQ ID NO: 436855 - DNA, 19 bp, Homo sapiens
  siRNA target sequence for ZNF169 (NM_194320.1,1534-1552).
ggcgtgcatttggctttaa

SEQ ID NO: 436856 - DNA, 19 bp, Homo sapiens
  siRNA target sequence for ZNF169 (NM_194320.1,1536-1554).
cgtgcatttggctttaagt

SEQ ID NO: 436857 - DNA, 19 bp, Homo sapiens
  siRNA target sequence for ZNF169 (NM_194320.1,1585-1603).
cagaggaggagctttacgt

SEQ ID NO: 436858 - DNA, 19 bp, Homo sapiens
  siRNA target sequence for ZNF169 (NM_194320.1,1634-1652).
gaagtcacaccttatctct

SEQ ID NO: 436859 - DNA, 19 bp, Homo sapiens
  siRNA target sequence for ZNF169 (NM_194320.1,1680-1698).
ccctgcatttgcgatgaat

SEQ ID NO: 436860 - DNA, 19 bp, Homo sapiens
  siRNA target sequence for ZNF169 (NM_194320.1,1682-1700).
ctgcatttgcgatgaatgt

SEQ ID NO: 436861 - DNA, 19 bp, Homo sapiens
  siRNA target sequence for DKFZp686N19164 (NM_194325.1,642-660).
gcagttggaagatgataca

SEQ ID NO: 436862 - DNA, 19 bp, Homo sapiens
  siRNA target sequence for DKFZp686N19164 (NM_194325.1,706-724).
gctctacatcagaaaataa

SEQ ID NO: 436863 - DNA, 19 bp, Homo sapiens
  siRNA target sequence for DKFZp686N19164 (NM_194325.1,987-1005).
gccactcaaatgtaagcaa

SEQ ID NO: 436864 - DNA, 19 bp, Homo sapiens
  siRNA target sequence for DKFZp686N19164 (NM_194325.1,1025-1043).
gtagctatcaacttacagt

SEQ ID NO: 436865 - DNA, 19 bp, Homo sapiens
  siRNA target sequence for DKFZp686N19164 (NM_194325.1,1095-1113).
gaaagcttttctagtatat

SEQ ID NO: 436866 - DNA, 19 bp, Homo sapiens
  siRNA target sequence for DKFZp686N19164 (NM_194325.1,1179-1197).
gaaggccttcagtaccttt

SEQ ID NO: 436867 - DNA, 19 bp, Homo sapiens
  siRNA target sequence for DKFZp686N19164 (NM_194325.1,1470-1488).
gcgaattcatgcagagata

SEQ ID NO: 436868 - DNA, 19 bp, Homo sapiens
  siRNA target sequence for DKFZp686N19164 (NM_194325.1,1471-1489).
cgaattcatgcagagataa

SEQ ID NO: 436869 - DNA, 19 bp, Homo sapiens
  siRNA target sequence for DKFZp686N19164 (NM_194325.1,1868-1886).
cctcgtaccttgtacaaca

SEQ ID NO: 436870 - DNA, 19 bp, Homo sapiens
  siRNA target sequence for DKFZp686N19164 (NM_194325.1,2018-2036).
ggaaagcctttactgttta

SEQ ID NO: 436871 - DNA, 19 bp, Homo sapiens
  siRNA target sequence for DKFZp686N19164 (NM_194325.1,2030-2048).
ctgtttatggacaacttat

SEQ ID NO: 436872 - DNA, 19 bp, Homo sapiens
  siRNA target sequence for DKFZp686N19164 (NM_194325.1,2187-2205).
gaagacctttagatacagt

SEQ ID NO: 436873 - DNA, 19 bp, Homo sapiens
  siRNA target sequence for MGC52010 (NM_194326.1,225-243).
cagagtaaacctgaagttt

SEQ ID NO: 436874 - DNA, 19 bp, Homo sapiens
  siRNA target sequence for GALIG (NM_194327.1,401-419).
caatttttcggtaagtgtt

SEQ ID NO: 436875 - DNA, 19 bp, Homo sapiens
  siRNA target sequence for GALIG (NM_194327.1,415-433).
gtgttttatgcctgtttct

SEQ ID NO: 436876 - DNA, 19 bp, Homo sapiens
  siRNA target sequence for GALIG (NM_194327.1,482-500).
ccatgactttcccttttca

SEQ ID NO: 436877 - DNA, 19 bp, Homo sapiens
  siRNA target sequence for GALIG (NM_194327.1,516-534).
gcttcccctggactcattt

SEQ ID NO: 436878 - DNA, 19 bp, Homo sapiens
  siRNA target sequence for RNF38 (NM_194329.1,194-212).
ggcttgtaagagtgaagat

SEQ ID NO: 436879 - DNA, 19 bp, Homo sapiens
  siRNA target sequence for LOC285498 (NM_194439.1,102-120).
gccaactgggtgttctgta

SEQ ID NO: 436880 - DNA, 19 bp, Homo sapiens
  siRNA target sequence for LOC285498 (NM_194439.1,103-121).
ccaactgggtgttctgtaa

SEQ ID NO: 436881 - DNA, 19 bp, Homo sapiens
  siRNA target sequence for LOC285498 (NM_194439.1,215-233).
gaatgaatgcttgatttgt

SEQ ID NO: 436882 - DNA, 19 bp, Homo sapiens
  siRNA target sequence for LOC285498 (NM_194439.1,237-255).
gctccttgtcgtacagttt

SEQ ID NO: 436883 - DNA, 19 bp, Homo sapiens
  siRNA target sequence for LOC285498 (NM_194439.1,238-256).
ctccttgtcgtacagtttt

SEQ ID NO: 436884 - DNA, 19 bp, Homo sapiens
  siRNA target sequence for LOC285498 (NM_194439.1,301-319).
gcatagacagtctgtgtaa

SEQ ID NO: 436885 - DNA, 19 bp, Homo sapiens
  siRNA target sequence for LOC285498 (NM_194439.1,338-356).
ctcccagattttagaattt

SEQ ID NO: 436886 - DNA, 19 bp, Homo sapiens
  siRNA target sequence for LOC285498 (NM_194439.1,374-392).
gagattgttagccttctat

SEQ ID NO: 436887 - DNA, 19 bp, Homo sapiens
  siRNA target sequence for LOC285498 (NM_194439.1,380-398).
gttagccttctatagagaa

SEQ ID NO: 436888 - DNA, 19 bp, Homo sapiens
  siRNA target sequence for LOC285498 (NM_194439.1,431-449).
gtcagtgctgcagatagaa

SEQ ID NO: 436889 - DNA, 19 bp, Homo sapiens
  siRNA target sequence for LOC285498 (NM_194439.1,433-451).
cagtgctgcagatagaaca

SEQ ID NO: 436890 - DNA, 19 bp, Homo sapiens
  siRNA target sequence for LOC285498 (NM_194439.1,443-461).
gatagaacaactacaaagt

SEQ ID NO: 436891 - DNA, 19 bp, Homo sapiens
  siRNA target sequence for LOC285498 (NM_194439.1,566-584).
ggagtcgatggaagttgat

SEQ ID NO: 436892 - DNA, 19 bp, Homo sapiens
  siRNA target sequence for LOC285498 (NM_194439.1,589-607).
ctccttctccgattagaaa

SEQ ID NO: 436893 - DNA, 19 bp, Homo sapiens
  siRNA target sequence for LOC285498 (NM_194439.1,591-609).
ccttctccgattagaaaat

SEQ ID NO: 436894 - DNA, 19 bp, Homo sapiens
  siRNA target sequence for LOC285498 (NM_194439.1,595-613).
ctccgattagaaaatctga

SEQ ID NO: 436895 - DNA, 19 bp, Homo sapiens
  siRNA target sequence for LOC285498 (NM_194439.1,630-648).
gcgagaatctccatgatta

SEQ ID NO: 436896 - DNA, 19 bp, Homo sapiens
  siRNA target sequence for LOC285498 (NM_194439.1,632-650).
gagaatctccatgattagt

SEQ ID NO: 436897 - DNA, 19 bp, Homo sapiens
  siRNA target sequence for LOC285498 (NM_194439.1,681-699).
gcccggagagtgtgtcatt

SEQ ID NO: 436898 - DNA, 19 bp, Homo sapiens
  siRNA target sequence for LOC285498 (NM_194439.1,701-719).
ccagaggttcaccatgttt

SEQ ID NO: 436899 - DNA, 19 bp, Homo sapiens
  siRNA target sequence for RNF121 (NM_194452.1,253-271).
cccacgctcctacaatgat

SEQ ID NO: 436900 - DNA, 19 bp, Homo sapiens
  siRNA target sequence for RNF121 (NM_194452.1,257-275).
cgctcctacaatgatcaaa

SEQ ID NO: 436901 - DNA, 19 bp, Homo sapiens
  siRNA target sequence for LOC345667 (NM_197941.1,151-169).
gaagctacaggatttaagt

SEQ ID NO: 436902 - DNA, 19 bp, Homo sapiens
  siRNA target sequence for LOC345667 (NM_197941.1,247-265).
caggaggtggtctgtaaaa

SEQ ID NO: 436903 - DNA, 19 bp, Homo sapiens
  siRNA target sequence for LOC345667 (NM_197941.1,250-268).
gaggtggtctgtaaaaggt

SEQ ID NO: 436904 - DNA, 19 bp, Homo sapiens
  siRNA target sequence for LOC345667 (NM_197941.1,312-330).
cagtaagccacctgaaaat

SEQ ID NO: 436905 - DNA, 19 bp, Homo sapiens
  siRNA target sequence for LOC345667 (NM_197941.1,314-332).
gtaagccacctgaaaatca

SEQ ID NO: 436906 - DNA, 19 bp, Homo sapiens
  siRNA target sequence for LOC345667 (NM_197941.1,357-375).
cccacctgagtggttcatt

SEQ ID NO: 436907 - DNA, 19 bp, Homo sapiens
  siRNA target sequence for LOC345667 (NM_197941.1,368-386).
ggttcattggggattggtt

SEQ ID NO: 436908 - DNA, 19 bp, Homo sapiens
  siRNA target sequence for LOC345667 (NM_197941.1,494-512).
cacaccggcctgtcgaaaa

SEQ ID NO: 436909 - DNA, 19 bp, Homo sapiens
  siRNA target sequence for LOC345667 (NM_197941.1,564-582).
gtctgagtgtactccaaaa

SEQ ID NO: 436910 - DNA, 19 bp, Homo sapiens
  siRNA target sequence for LOC345667 (NM_197941.1,804-822).
caccggacaggcatctagt

SEQ ID NO: 436911 - DNA, 19 bp, Homo sapiens
  siRNA target sequence for LOC345667 (NM_197941.1,836-854).
ctgttcggcctccatcaat

SEQ ID NO: 436912 - DNA, 19 bp, Homo sapiens
  siRNA target sequence for LOC345667 (NM_197941.1,879-897).
cagtacccccatttctaat

SEQ ID NO: 436913 - DNA, 19 bp, Homo sapiens
  siRNA target sequence for LOC345667 (NM_197941.1,884-902).
cccccatttctaatactga

SEQ ID NO: 436914 - DNA, 19 bp, Homo sapiens
  siRNA target sequence for DKFZp762G199 (NM_197956.1,388-406).
cccccatgcaacaacgtat

SEQ ID NO: 436915 - DNA, 19 bp, Homo sapiens
  siRNA target sequence for DKFZp762G199 (NM_197956.1,873-891).
gtcctccggcctatgatca

SEQ ID NO: 436916 - DNA, 19 bp, Homo sapiens
  siRNA target sequence for DKFZp762G199 (NM_197956.1,875-893).
cctccggcctatgatcaaa

SEQ ID NO: 436917 - DNA, 19 bp, Homo sapiens
  siRNA target sequence for DKFZp762G199 (NM_197956.1,878-896).
ccggcctatgatcaaagat

SEQ ID NO: 436918 - DNA, 19 bp, Homo sapiens
  siRNA target sequence for DKFZp762G199 (NM_197956.1,879-897).
cggcctatgatcaaagatt

SEQ ID NO: 436919 - DNA, 19 bp, Homo sapiens
  siRNA target sequence for HSPC268 (NM_197964.1,157-175).
cctatcggtaccttgtgaa

SEQ ID NO: 436920 - DNA, 19 bp, Homo sapiens
  siRNA target sequence for HSPC268 (NM_197964.1,189-207).
catcgggtcaccagtgaaa

SEQ ID NO: 436921 - DNA, 19 bp, Homo sapiens
  siRNA target sequence for HSPC268 (NM_197964.1,192-210).
cgggtcaccagtgaaaagt

SEQ ID NO: 436922 - DNA, 19 bp, Homo sapiens
  siRNA target sequence for HSPC268 (NM_197964.1,240-258).
caagctgccacctatctct

SEQ ID NO: 436923 - DNA, 19 bp, Homo sapiens
  siRNA target sequence for HSPC268 (NM_197964.1,266-284).
gcgtagcatccggaaacat

SEQ ID NO: 436924 - DNA, 19 bp, Homo sapiens
  siRNA target sequence for HSPC268 (NM_197964.1,289-307).
ccctacatcaggaatttca

SEQ ID NO: 436925 - DNA, 19 bp, Homo sapiens
  siRNA target sequence for HSPC268 (NM_197964.1,343-361).
gcttggtgggtctcaagtt

SEQ ID NO: 436926 - DNA, 19 bp, Homo sapiens
  siRNA target sequence for SOAT (NM_197965.1,279-297).
gccagtccaagctattgct

SEQ ID NO: 436927 - DNA, 19 bp, Homo sapiens
  siRNA target sequence for SOAT (NM_197965.1,325-343).
ggcaccatctctaacattt

SEQ ID NO: 436928 - DNA, 19 bp, Homo sapiens
  siRNA target sequence for SOAT (NM_197965.1,472-490).
ctcaccattccttatcaga

SEQ ID NO: 436929 - DNA, 19 bp, Homo sapiens
  siRNA target sequence for SOAT (NM_197965.1,535-553).
ggtgtctatgtgaattaca

SEQ ID NO: 436930 - DNA, 19 bp, Homo sapiens
  siRNA target sequence for SOAT (NM_197965.1,538-556).
gtctatgtgaattacagat

SEQ ID NO: 436931 - DNA, 19 bp, Homo sapiens
  siRNA target sequence for SOAT (NM_197965.1,565-583).
caatccaaaatcattctca

SEQ ID NO: 436932 - DNA, 19 bp, Homo sapiens
  siRNA target sequence for SOAT (NM_197965.1,645-663).
ggcgaaaggatcttggaat

SEQ ID NO: 436933 - DNA, 19 bp, Homo sapiens
  siRNA target sequence for SOAT (NM_197965.1,648-666).
gaaaggatcttggaattca

SEQ ID NO: 436934 - DNA, 19 bp, Homo sapiens
  siRNA target sequence for SOAT (NM_197965.1,722-740).
gttttctgctggcactttt

SEQ ID NO: 436935 - DNA, 19 bp, Homo sapiens
  siRNA target sequence for SOAT (NM_197965.1,762-780).
gtgcaggacaatttcctta

SEQ ID NO: 436936 - DNA, 19 bp, Homo sapiens
  siRNA target sequence for SOAT (NM_197965.1,813-831).
caccatgctccagttatct

SEQ ID NO: 436937 - DNA, 19 bp, Homo sapiens
  siRNA target sequence for SOAT (NM_197965.1,815-833).
ccatgctccagttatcttt

SEQ ID NO: 436938 - DNA, 19 bp, Homo sapiens
  siRNA target sequence for SOAT (NM_197965.1,844-862).
cacttggtccagatgttga

SEQ ID NO: 436939 - DNA, 19 bp, Homo sapiens
  siRNA target sequence for SOAT (NM_197965.1,891-909).
gctgatagatggatttctt

SEQ ID NO: 436940 - DNA, 19 bp, Homo sapiens
  siRNA target sequence for SOAT (NM_197965.1,919-937).
gcatatcagacgtacaaga

SEQ ID NO: 436941 - DNA, 19 bp, Homo sapiens
  siRNA target sequence for ZDHHC16 (NM_198043.1,866-884).
ctgccattgagacttatca

SEQ ID NO: 436942 - DNA, 19 bp, Homo sapiens
  siRNA target sequence for ZDHHC16 (NM_198045.1,425-443).
gagtgggcaggaatgatat

SEQ ID NO: 436943 - DNA, 19 bp, Homo sapiens
  siRNA target sequence for GNPNAT1 (NM_198066.1,89-107).
caagtctactcaaagaagt

SEQ ID NO: 436944 - DNA, 19 bp, Homo sapiens
  siRNA target sequence for GNPNAT1 (NM_198066.1,108-126).
ggactggagtcagaataca

SEQ ID NO: 436945 - DNA, 19 bp, Homo sapiens
  siRNA target sequence for GNPNAT1 (NM_198066.1,174-192).
ggttttgaggcctctttgt

SEQ ID NO: 436946 - DNA, 19 bp, Homo sapiens
  siRNA target sequence for GNPNAT1 (NM_198066.1,175-193).
gttttgaggcctctttgta

SEQ ID NO: 436947 - DNA, 19 bp, Homo sapiens
  siRNA target sequence for GNPNAT1 (NM_198066.1,187-205).
ctttgtactgctgacttaa

SEQ ID NO: 436948 - DNA, 19 bp, Homo sapiens
  siRNA target sequence for GNPNAT1 (NM_198066.1,262-280).
gaacaatttatgaaatctt

SEQ ID NO: 436949 - DNA, 19 bp, Homo sapiens
  siRNA target sequence for GNPNAT1 (NM_198066.1,410-428).
gagtagaagatgttgttgt

SEQ ID NO: 436950 - DNA, 19 bp, Homo sapiens
  siRNA target sequence for GNPNAT1 (NM_198066.1,421-439).
gttgttgttagtgatgaat

SEQ ID NO: 436951 - DNA, 19 bp, Homo sapiens
  siRNA target sequence for GNPNAT1 (NM_198066.1,450-468).
gcagcttggcaaattgtta

SEQ ID NO: 436952 - DNA, 19 bp, Homo sapiens
  siRNA target sequence for GNPNAT1 (NM_198066.1,491-509).
gcaagaaactgaactgtta

SEQ ID NO: 436953 - DNA, 19 bp, Homo sapiens
  siRNA target sequence for GNPNAT1 (NM_198066.1,499-517).
ctgaactgttacaagatta

SEQ ID NO: 436954 - DNA, 19 bp, Homo sapiens
  siRNA target sequence for GNPNAT1 (NM_198066.1,513-531).
gattacccttgaatgtcta

SEQ ID NO: 436955 - DNA, 19 bp, Homo sapiens
  siRNA target sequence for GNPNAT1 (NM_198066.1,588-606).
catgtgtcggaggtttcta

SEQ ID NO: 436956 - DNA, 19 bp, Homo sapiens
  siRNA target sequence for OR2C3 (NM_198074.1,57-75).
cacacgaccctcactagaa

SEQ ID NO: 436957 - DNA, 19 bp, Homo sapiens
  siRNA target sequence for OR2C3 (NM_198074.1,62-80).
gaccctcactagaaactgt

SEQ ID NO: 436958 - DNA, 19 bp, Homo sapiens
  siRNA target sequence for OR2C3 (NM_198074.1,101-119).
gtttttacatggtatcgat

SEQ ID NO: 436959 - DNA, 19 bp, Homo sapiens
  siRNA target sequence for OR2C3 (NM_198074.1,260-278).
ggggaccacagaaaaccat

SEQ ID NO: 436960 - DNA, 19 bp, Homo sapiens
  siRNA target sequence for OR2C3 (NM_198074.1,261-279).
gggaccacagaaaaccata

SEQ ID NO: 436961 - DNA, 19 bp, Homo sapiens
  siRNA target sequence for OR2C3 (NM_198074.1,291-309).
gtgtgtggtccagttctat

SEQ ID NO: 436962 - DNA, 19 bp, Homo sapiens
  siRNA target sequence for OR2C3 (NM_198074.1,295-313).
gtggtccagttctatatct

SEQ ID NO: 436963 - DNA, 19 bp, Homo sapiens
  siRNA target sequence for OR2C3 (NM_198074.1,384-402).
caggccactccattacact

SEQ ID NO: 436964 - DNA, 19 bp, Homo sapiens
  siRNA target sequence for OR2C3 (NM_198074.1,502-520).
ccgctgtgtgggaacaatt

SEQ ID NO: 436965 - DNA, 19 bp, Homo sapiens
  siRNA target sequence for OR2C3 (NM_198074.1,543-561).
gatgcccctcattatgcaa

SEQ ID NO: 436966 - DNA, 19 bp, Homo sapiens
  siRNA target sequence for OR2C3 (NM_198074.1,703-721).
cggagaaaggcattcaaca

SEQ ID NO: 436967 - DNA, 19 bp, Homo sapiens
  siRNA target sequence for OR2C3 (NM_198074.1,851-869).
ctgcgctgaacccacttat

SEQ ID NO: 436968 - DNA, 19 bp, Homo sapiens
  siRNA target sequence for OR2C3 (NM_198074.1,853-871).
gcgctgaacccacttattt

SEQ ID NO: 436969 - DNA, 19 bp, Homo sapiens
  siRNA target sequence for OR2C3 (NM_198074.1,901-919).
gccctccggcacatggtat

SEQ ID NO: 436970 - DNA, 19 bp, Homo sapiens
  siRNA target sequence for OR2C3 (NM_198074.1,907-925).
cggcacatggtattagaga

SEQ ID NO: 436971 - DNA, 19 bp, Homo sapiens
  siRNA target sequence for DKFZp761L1518 (NM_198075.1,1116-1134).
gtgcccaggggctacaact

SEQ ID NO: 436972 - DNA, 19 bp, Homo sapiens
  siRNA target sequence for DKFZp761L1518 (NM_198075.1,1856-1874).
cccaaggccacgagattct

SEQ ID NO: 436973 - DNA, 19 bp, Homo sapiens
  siRNA target sequence for gm117 (NM_198077.1,27-45).
ggaccctctgagctatttt

SEQ ID NO: 436974 - DNA, 19 bp, Homo sapiens
  siRNA target sequence for gm117 (NM_198077.1,74-92).
cctcggacgaggaggataa

SEQ ID NO: 436975 - DNA, 19 bp, Homo sapiens
  siRNA target sequence for gm117 (NM_198077.1,181-199).
ggacctgacgagctgttta

SEQ ID NO: 436976 - DNA, 19 bp, Homo sapiens
  siRNA target sequence for gm117 (NM_198077.1,184-202).
cctgacgagctgtttagga

SEQ ID NO: 436977 - DNA, 19 bp, Homo sapiens
  siRNA target sequence for gm117 (NM_198077.1,225-243).
ctacaatccgctcaacaaa

SEQ ID NO: 436978 - DNA, 19 bp, Homo sapiens
  siRNA target sequence for gm117 (NM_198077.1,233-251).
cgctcaacaaacagataga

SEQ ID NO: 436979 - DNA, 19 bp, Homo sapiens
  siRNA target sequence for gm117 (NM_198077.1,285-303).
gcctccaaaggaattcaaa

SEQ ID NO: 436980 - DNA, 19 bp, Homo sapiens
  siRNA target sequence for gm117 (NM_198077.1,370-388).
gagcttgacatggcaataa

SEQ ID NO: 436981 - DNA, 19 bp, Homo sapiens
  siRNA target sequence for gm117 (NM_198077.1,421-439).
gatgctccacagaatgcta

SEQ ID NO: 436982 - DNA, 19 bp, Homo sapiens
  siRNA target sequence for gm117 (NM_198077.1,471-489).
gacgttggaatcagatgat

SEQ ID NO: 436983 - DNA, 19 bp, Homo sapiens
  siRNA target sequence for gm117 (NM_198077.1,473-491).
cgttggaatcagatgatga

SEQ ID NO: 436984 - DNA, 19 bp, Homo sapiens
  siRNA target sequence for gm117 (NM_198077.1,496-514).
gatgagcatacttctaaaa

SEQ ID NO: 436985 - DNA, 19 bp, Homo sapiens
  siRNA target sequence for C21orf121 (NM_198078.1,341-359).
gtgtcccaaacgagtttgt

SEQ ID NO: 436986 - DNA, 19 bp, Homo sapiens
  siRNA target sequence for C21orf121 (NM_198078.1,510-528).
gatactgacttgagatctt

SEQ ID NO: 436987 - DNA, 19 bp, Homo sapiens
  siRNA target sequence for LOC253827 (NM_198080.1,157-175).
cgggtcgtgtagggataaa

SEQ ID NO: 436988 - DNA, 19 bp, Homo sapiens
  siRNA target sequence for LOC253827 (NM_198080.1,162-180).
cgtgtagggataaaaagaa

SEQ ID NO: 436989 - DNA, 19 bp, Homo sapiens
  siRNA target sequence for LOC253827 (NM_198080.1,384-402).
cattccacgatgtgatcaa

SEQ ID NO: 436990 - DNA, 19 bp, Homo sapiens
  siRNA target sequence for LOC253827 (NM_198080.1,484-502).
ccttgggcacatttttgat

SEQ ID NO: 436991 - DNA, 19 bp, Homo sapiens
  siRNA target sequence for LOC253827 (NM_198080.1,512-530).
cgtccaactgggaaaagat

SEQ ID NO: 436992 - DNA, 19 bp, Homo sapiens
  siRNA target sequence for LOC253827 (NM_198080.1,544-562).
ggctgccttgtcttttaca

SEQ ID NO: 436993 - DNA, 19 bp, Homo sapiens
  siRNA target sequence for SCML4 (NM_198081.1,302-320).
cagtctgcctctacatcaa

SEQ ID NO: 436994 - DNA, 19 bp, Homo sapiens
  siRNA target sequence for SCML4 (NM_198081.1,501-519).
gtcagtctcggcttccttt

SEQ ID NO: 436995 - DNA, 19 bp, Homo sapiens
  siRNA target sequence for SCML4 (NM_198081.1,707-725).
cagtcaccaccgaagagta

SEQ ID NO: 436996 - DNA, 19 bp, Homo sapiens
  siRNA target sequence for SCML4 (NM_198081.1,889-907).
cgcactagccccatgtctt

SEQ ID NO: 436997 - DNA, 19 bp, Homo sapiens
  siRNA target sequence for LOC284001 (NM_198082.1,628-646).
ggtgagcgagctcaagata

SEQ ID NO: 436998 - DNA, 19 bp, Homo sapiens
  siRNA target sequence for LOC284001 (NM_198082.1,784-802).
ccaccaccgggaacagtat

SEQ ID NO: 436999 - DNA, 19 bp, Homo sapiens
  siRNA target sequence for LOC284001 (NM_198082.1,881-899).
ctggagtttgaatcgaaaa

SEQ ID NO: 437000 - DNA, 19 bp, Homo sapiens
  siRNA target sequence for LOC284001 (NM_198082.1,954-972).
ccttgtcccgggagcttaa

SEQ ID NO: 437001 - DNA, 19 bp, Homo sapiens
  siRNA target sequence for LOC284001 (NM_198082.1,960-978).
cccgggagcttaaggttaa

SEQ ID NO: 437002 - DNA, 19 bp, Homo sapiens
  siRNA target sequence for LOC284001 (NM_198082.1,961-979).
ccgggagcttaaggttaaa

SEQ ID NO: 437003 - DNA, 19 bp, Homo sapiens
  siRNA target sequence for LOC284001 (NM_198082.1,963-981).
gggagcttaaggttaaact

SEQ ID NO: 437004 - DNA, 19 bp, Homo sapiens
  siRNA target sequence for LOC284001 (NM_198082.1,964-982).
ggagcttaaggttaaacta

SEQ ID NO: 437005 - DNA, 19 bp, Homo sapiens
  siRNA target sequence for LOC284001 (NM_198082.1,1437-1455).
ctgcctgggatgctcaaat

SEQ ID NO: 437006 - DNA, 19 bp, Homo sapiens
  siRNA target sequence for LOC284001 (NM_198082.1,1441-1459).
ctgggatgctcaaattgct

SEQ ID NO: 437007 - DNA, 19 bp, Homo sapiens
  siRNA target sequence for LOC284001 (NM_198082.1,1451-1469).
caaattgctcaactatcta

SEQ ID NO: 437008 - DNA, 19 bp, Homo sapiens
  siRNA target sequence for LOC284001 (NM_198082.1,2073-2091).
ccgccactcctgattatgt

SEQ ID NO: 437009 - DNA, 19 bp, Homo sapiens
  siRNA target sequence for LOC284001 (NM_198082.1,2114-2132).
cgaactctaaagcataagt

SEQ ID NO: 437010 - DNA, 19 bp, Homo sapiens
  siRNA target sequence for LOC284001 (NM_198082.1,2159-2177).
gatgtgttggatcctttaa

SEQ ID NO: 437011 - DNA, 19 bp, Homo sapiens
  siRNA target sequence for LOC284001 (NM_198082.1,2162-2180).
gtgttggatcctttaaaga

SEQ ID NO: 437012 - DNA, 19 bp, Homo sapiens
  siRNA target sequence for RNF148 (NM_198085.1,238-256).
cccttcgacgcatagttct

SEQ ID NO: 437013 - DNA, 19 bp, Homo sapiens
  siRNA target sequence for RNF148 (NM_198085.1,266-284).
ggacttttgaggcttagta

SEQ ID NO: 437014 - DNA, 19 bp, Homo sapiens
  siRNA target sequence for RNF148 (NM_198085.1,267-285).
gacttttgaggcttagtat

SEQ ID NO: 437015 - DNA, 19 bp, Homo sapiens
  siRNA target sequence for RNF148 (NM_198085.1,269-287).
cttttgaggcttagtatct

SEQ ID NO: 437016 - DNA, 19 bp, Homo sapiens
  siRNA target sequence for RNF148 (NM_198085.1,274-292).
gaggcttagtatctttcta

SEQ ID NO: 437017 - DNA, 19 bp, Homo sapiens
  siRNA target sequence for RNF148 (NM_198085.1,286-304).
ctttctactacttagcttt

SEQ ID NO: 437018 - DNA, 19 bp, Homo sapiens
  siRNA target sequence for RNF148 (NM_198085.1,335-353).
gctcacctgaatataacat

SEQ ID NO: 437019 - DNA, 19 bp, Homo sapiens
  siRNA target sequence for RNF148 (NM_198085.1,336-354).
ctcacctgaatataacatt

SEQ ID NO: 437020 - DNA, 19 bp, Homo sapiens
  siRNA target sequence for RNF148 (NM_198085.1,668-686).
gtcgcggtgatgataagca

SEQ ID NO: 437021 - DNA, 19 bp, Homo sapiens
  siRNA target sequence for RNF148 (NM_198085.1,885-903).
ggaggcgaagtcaaataaa

SEQ ID NO: 437022 - DNA, 19 bp, Homo sapiens
  siRNA target sequence for RNF148 (NM_198085.1,921-939).
ctattgaccagcttcaact

SEQ ID NO: 437023 - DNA, 19 bp, Homo sapiens
  siRNA target sequence for RNF148 (NM_198085.1,1008-1026).
catacaaaccccaagatgt

SEQ ID NO: 437024 - DNA, 19 bp, Homo sapiens
  siRNA target sequence for RNF148 (NM_198085.1,1022-1040).
gatgtagtacgcattttaa

SEQ ID NO: 437025 - DNA, 19 bp, Homo sapiens
  siRNA target sequence for RNF148 (NM_198085.1,1025-1043).
gtagtacgcattttaactt

SEQ ID NO: 437026 - DNA, 19 bp, Homo sapiens
  siRNA target sequence for C7orf28B (NM_198097.1,512-530).
gcgtcaagcttctgaaaga

SEQ ID NO: 437027 - DNA, 19 bp, Homo sapiens
  siRNA target sequence for C7orf28B (NM_198097.1,1372-1390).
cgggagctctatgttattt

SEQ ID NO: 437028 - DNA, 19 bp, Homo sapiens
  siRNA target sequence for CSMD3 (NM_198123.1,180-198).
ggaaagccgagcaaaggaa

SEQ ID NO: 437029 - DNA, 19 bp, Homo sapiens
  siRNA target sequence for CSMD3 (NM_198123.1,181-199).
gaaagccgagcaaaggaat

SEQ ID NO: 437030 - DNA, 19 bp, Homo sapiens
  siRNA target sequence for CSMD3 (NM_198123.1,222-240).
gcgaagatgcgctaaatgt

SEQ ID NO: 437031 - DNA, 19 bp, Homo sapiens
  siRNA target sequence for CSMD3 (NM_198123.1,1180-1198).
ccctatcaaggttcttcta

SEQ ID NO: 437032 - DNA, 19 bp, Homo sapiens
  siRNA target sequence for CSMD3 (NM_198123.1,1182-1200).
ctatcaaggttcttctaca

SEQ ID NO: 437033 - DNA, 19 bp, Homo sapiens
  siRNA target sequence for CSMD3 (NM_198123.1,1186-1204).
caaggttcttctacattga

SEQ ID NO: 437034 - DNA, 19 bp, Homo sapiens
  siRNA target sequence for CSMD3 (NM_198123.1,1223-1241).
gtgagttagaggagcataa

SEQ ID NO: 437035 - DNA, 19 bp, Homo sapiens
  siRNA target sequence for CSMD3 (NM_198123.1,1245-1263).
gactaccactggtgctatt

SEQ ID NO: 437036 - DNA, 19 bp, Homo sapiens
  siRNA target sequence for CSMD3 (NM_198123.1,1288-1306).
gttactgtatccagtgtta

SEQ ID NO: 437037 - DNA, 19 bp, Homo sapiens
  siRNA target sequence for CSMD3 (NM_198123.1,1351-1369).
gttacgagtctcagaaatt

SEQ ID NO: 437038 - DNA, 19 bp, Homo sapiens
  siRNA target sequence for CSMD3 (NM_198123.1,1411-1429).
catccagcagatacacaaa

SEQ ID NO: 437039 - DNA, 19 bp, Homo sapiens
  siRNA target sequence for CSMD3 (NM_198123.1,1479-1497).
gcttgcagttgttactcat

SEQ ID NO: 437040 - DNA, 19 bp, Homo sapiens
  siRNA target sequence for CSMD3 (NM_198123.1,1480-1498).
cttgcagttgttactcata

SEQ ID NO: 437041 - DNA, 19 bp, Homo sapiens
  siRNA target sequence for CSMD3 (NM_198123.1,8221-8239).
cgctgtgttgttgttacat

SEQ ID NO: 437042 - DNA, 19 bp, Homo sapiens
  siRNA target sequence for CSMD3 (NM_198123.1,8223-8241).
ctgtgttgttgttacatgt

SEQ ID NO: 437043 - DNA, 19 bp, Homo sapiens
  siRNA target sequence for CSMD3 (NM_198123.1,8242-8260).
ccaagcatcaattccttta

SEQ ID NO: 437044 - DNA, 19 bp, Homo sapiens
  siRNA target sequence for CSMD3 (NM_198123.1,8246-8264).
gcatcaattcctttatctt

SEQ ID NO: 437045 - DNA, 19 bp, Homo sapiens
  siRNA target sequence for CSMD3 (NM_198123.1,8272-8290).
ggaagatggcgaattgtga

SEQ ID NO: 437046 - DNA, 19 bp, Homo sapiens
  siRNA target sequence for CSMD3 (NM_198123.1,8299-8317).
cattatgaatacaaaacca

SEQ ID NO: 437047 - DNA, 19 bp, Homo sapiens
  siRNA target sequence for CSMD3 (NM_198123.1,8356-8374).
ggtcctgcctccatcgaat

SEQ ID NO: 437048 - DNA, 19 bp, Homo sapiens
  siRNA target sequence for CSMD3 (NM_198123.1,8360-8378).
ctgcctccatcgaatgtct

SEQ ID NO: 437049 - DNA, 19 bp, Homo sapiens
  siRNA target sequence for CSMD3 (NM_198123.1,8366-8384).
ccatcgaatgtcttcctaa

SEQ ID NO: 437050 - DNA, 19 bp, Homo sapiens
  siRNA target sequence for CSMD3 (NM_198123.1,8367-8385).
catcgaatgtcttcctaat

SEQ ID NO: 437051 - DNA, 19 bp, Homo sapiens
  siRNA target sequence for CSMD3 (NM_198123.1,8413-8431).
ccatattgccaaattattt

SEQ ID NO: 437052 - DNA, 19 bp, Homo sapiens
  siRNA target sequence for GANC (NM_198141.1,289-307).
cagtggctttccaagaagt

SEQ ID NO: 437053 - DNA, 19 bp, Homo sapiens
  siRNA target sequence for GANC (NM_198141.1,397-415).
ctggctgaaatttatggta

SEQ ID NO: 437054 - DNA, 19 bp, Homo sapiens
  siRNA target sequence for GANC (NM_198141.1,535-553).
gacacaggcagtctgatat

SEQ ID NO: 437055 - DNA, 19 bp, Homo sapiens
  siRNA target sequence for GANC (NM_198141.1,620-638).
ctgaagaagaggttgtgat

SEQ ID NO: 437056 - DNA, 19 bp, Homo sapiens
  siRNA target sequence for GANC (NM_198141.1,811-829).
ggcccttcttctattggtt

SEQ ID NO: 437057 - DNA, 19 bp, Homo sapiens
  siRNA target sequence for GANC (NM_198141.1,812-830).
gcccttcttctattggttt

SEQ ID NO: 437058 - DNA, 19 bp, Homo sapiens
  siRNA target sequence for GANC (NM_198141.1,880-898).
gcagaatcacaccaactta

SEQ ID NO: 437059 - DNA, 19 bp, Homo sapiens
  siRNA target sequence for GANC (NM_198141.1,881-899).
cagaatcacaccaacttaa

SEQ ID NO: 437060 - DNA, 19 bp, Homo sapiens
  siRNA target sequence for GANC (NM_198141.1,883-901).
gaatcacaccaacttaaaa

SEQ ID NO: 437061 - DNA, 19 bp, Homo sapiens
  siRNA target sequence for GANC (NM_198141.1,914-932).
gagatgcttaccgtcttta

SEQ ID NO: 437062 - DNA, 19 bp, Homo sapiens
  siRNA target sequence for GANC (NM_198141.1,916-934).
gatgcttaccgtctttata

SEQ ID NO: 437063 - DNA, 19 bp, Homo sapiens
  siRNA target sequence for GANC (NM_198141.1,939-957).
ggatgtctatggataccaa

SEQ ID NO: 437064 - DNA, 19 bp, Homo sapiens
  siRNA target sequence for GANC (NM_198141.1,940-958).
gatgtctatggataccaaa

SEQ ID NO: 437065 - DNA, 19 bp, Homo sapiens
  siRNA target sequence for GANC (NM_198141.1,943-961).
gtctatggataccaaatat

SEQ ID NO: 437066 - DNA, 19 bp, Homo sapiens
  siRNA target sequence for GANC (NM_198141.1,972-990).
gggcatttatggttcagta

SEQ ID NO: 437067 - DNA, 19 bp, Homo sapiens
  siRNA target sequence for GANC (NM_198141.1,1008-1026).
caaactgggcagaactata

SEQ ID NO: 437068 - DNA, 19 bp, Homo sapiens
  siRNA target sequence for GANC (NM_198141.1,1107-1125).
gggcccagttgctgctaaa

SEQ ID NO: 437069 - DNA, 19 bp, Homo sapiens
  siRNA target sequence for GANC (NM_198141.1,1167-1185).
gagtggcatcattgatgtt

SEQ ID NO: 437070 - DNA, 19 bp, Homo sapiens
  siRNA target sequence for GANC (NM_198141.1,1284-1302).
ccagtgccgctggaactat

SEQ ID NO: 437071 - DNA, 19 bp, Homo sapiens
  siRNA target sequence for GANC (NM_198141.1,1287-1305).
gtgccgctggaactatgaa

SEQ ID NO: 437072 - DNA, 19 bp, Homo sapiens
  siRNA target sequence for GANC (NM_198141.1,1289-1307).
gccgctggaactatgaaga

SEQ ID NO: 437073 - DNA, 19 bp, Homo sapiens
  siRNA target sequence for GANC (NM_198141.1,1290-1308).
ccgctggaactatgaagat

SEQ ID NO: 437074 - DNA, 19 bp, Homo sapiens
  siRNA target sequence for GANC (NM_198141.1,1337-1355).
ggtttgatgagcatgacat

SEQ ID NO: 437075 - DNA, 19 bp, Homo sapiens
  siRNA target sequence for GANC (NM_198141.1,1347-1365).
gcatgacattccttatgat

SEQ ID NO: 437076 - DNA, 19 bp, Homo sapiens
  siRNA target sequence for GANC (NM_198141.1,1393-1411).
gagggcaagaggtacttca

SEQ ID NO: 437077 - DNA, 19 bp, Homo sapiens
  siRNA target sequence for GANC (NM_198141.1,1464-1482).
gagcaaaaagcgtaagctt

SEQ ID NO: 437078 - DNA, 19 bp, Homo sapiens
  siRNA target sequence for GANC (NM_198141.1,1517-1535).
ctgactactcagtatatgt

SEQ ID NO: 437079 - DNA, 19 bp, Homo sapiens
  siRNA target sequence for GANC (NM_198141.1,1648-1666).
gagtggtattcaagtcttt

SEQ ID NO: 437080 - DNA, 19 bp, Homo sapiens
  siRNA target sequence for GANC (NM_198141.1,1653-1671).
gtattcaagtctttttgct

SEQ ID NO: 437081 - DNA, 19 bp, Homo sapiens
  siRNA target sequence for GANC (NM_198141.1,1761-1779).
gcagaagaatgccattcat

SEQ ID NO: 437082 - DNA, 19 bp, Homo sapiens
  siRNA target sequence for GANC (NM_198141.1,1809-1827).
caacatctacggtttttat

SEQ ID NO: 437083 - DNA, 19 bp, Homo sapiens
  siRNA target sequence for GANC (NM_198141.1,1846-1864).
gaaggactgataaaacgat

SEQ ID NO: 437084 - DNA, 19 bp, Homo sapiens
  siRNA target sequence for GANC (NM_198141.1,1850-1868).
gactgataaaacgatctaa

SEQ ID NO: 437085 - DNA, 19 bp, Homo sapiens
  siRNA target sequence for GANC (NM_198141.1,1888-1906).
gttcttacacgttctttct

SEQ ID NO: 437086 - DNA, 19 bp, Homo sapiens
  siRNA target sequence for GANC (NM_198141.1,2003-2021).
gcattactgggatctcttt

SEQ ID NO: 437087 - DNA, 19 bp, Homo sapiens
  siRNA target sequence for GANC (NM_198141.1,2210-2228).
gcctcctgccatattggta

SEQ ID NO: 437088 - DNA, 19 bp, Homo sapiens
  siRNA target sequence for GANC (NM_198141.1,2214-2232).
cctgccatattggtattct

SEQ ID NO: 437089 - DNA, 19 bp, Homo sapiens
  siRNA target sequence for GANC (NM_198141.1,2273-2291).
ggcctctgtgggtagagtt

SEQ ID NO: 437090 - DNA, 19 bp, Homo sapiens
  siRNA target sequence for GANC (NM_198141.1,2331-2349).
catgctggggagtgcatta

SEQ ID NO: 437091 - DNA, 19 bp, Homo sapiens
  siRNA target sequence for GANC (NM_198141.1,2337-2355).
ggggagtgcattattggtt

SEQ ID NO: 437092 - DNA, 19 bp, Homo sapiens
  siRNA target sequence for GANC (NM_198141.1,2452-2470).
ggagggtgtactgtaaaga

SEQ ID NO: 437093 - DNA, 19 bp, Homo sapiens
  siRNA target sequence for GANC (NM_198141.1,2474-2492).
cagtagccttggacactat

SEQ ID NO: 437094 - DNA, 19 bp, Homo sapiens
  siRNA target sequence for GANC (NM_198141.1,2484-2502).
ggacactattccagtgttt

SEQ ID NO: 437095 - DNA, 19 bp, Homo sapiens
  siRNA target sequence for GANC (NM_198141.1,2505-2523).
gcgaggtggaagtgtgata

SEQ ID NO: 437096 - DNA, 19 bp, Homo sapiens
  siRNA target sequence for GANC (NM_198141.1,2512-2530).
ggaagtgtgataccaataa

SEQ ID NO: 437097 - DNA, 19 bp, Homo sapiens
  siRNA target sequence for GANC (NM_198141.1,2513-2531).
gaagtgtgataccaataaa

SEQ ID NO: 437098 - DNA, 19 bp, Homo sapiens
  siRNA target sequence for GANC (NM_198141.1,2609-2627).
cttcagtgggtgagttata

SEQ ID NO: 437099 - DNA, 19 bp, Homo sapiens
  siRNA target sequence for GANC (NM_198141.1,2612-2630).
cagtgggtgagttatatct

SEQ ID NO: 437100 - DNA, 19 bp, Homo sapiens
  siRNA target sequence for GANC (NM_198141.1,2616-2634).
gggtgagttatatcttgat

SEQ ID NO: 437101 - DNA, 19 bp, Homo sapiens
  siRNA target sequence for GANC (NM_198141.1,2635-2653).
gatggccattcattccaat

SEQ ID NO: 437102 - DNA, 19 bp, Homo sapiens
  siRNA target sequence for GANC (NM_198141.1,2655-2673).
cctccaccagaagcaattt

SEQ ID NO: 437103 - DNA, 19 bp, Homo sapiens
  siRNA target sequence for GANC (NM_198141.1,2656-2674).
ctccaccagaagcaatttt

SEQ ID NO: 437104 - DNA, 19 bp, Homo sapiens
  siRNA target sequence for GANC (NM_198141.1,2702-2720).
gtgttctgatcaatagttt

SEQ ID NO: 437105 - DNA, 19 bp, Homo sapiens
  siRNA target sequence for GANC (NM_198141.1,2805-2823).
gactacccactcatctgat

SEQ ID NO: 437106 - DNA, 19 bp, Homo sapiens
  siRNA target sequence for GANC (NM_198141.1,2835-2853).
gcctgtggcttttacgtat

SEQ ID NO: 437107 - DNA, 19 bp, Homo sapiens
  siRNA target sequence for GANC (NM_198141.1,2836-2854).
cctgtggcttttacgtatt

SEQ ID NO: 437108 - DNA, 19 bp, Homo sapiens
  siRNA target sequence for GANC (NM_198141.1,2910-2928).
ctgggaggtccgcatcata

SEQ ID NO: 437109 - DNA, 19 bp, Homo sapiens
  siRNA target sequence for LOC116236 (NM_198147.1,266-284).
ggagggtgcagccttgttt

SEQ ID NO: 437110 - DNA, 19 bp, Homo sapiens
  siRNA target sequence for LOC116236 (NM_198147.1,481-499).
ggtggtaggaccttgtgtt

SEQ ID NO: 437111 - DNA, 19 bp, Homo sapiens
  siRNA target sequence for LOC116236 (NM_198147.1,999-1017).
gttcccttcgagagtttga

SEQ ID NO: 437112 - DNA, 19 bp, Homo sapiens
  siRNA target sequence for LOC116236 (NM_198147.1,1165-1183).
ccacactctgacaactgaa

SEQ ID NO: 437113 - DNA, 19 bp, Homo sapiens
  siRNA target sequence for LOC116236 (NM_198147.1,1322-1340).
cgaacggaggagaggatta

SEQ ID NO: 437114 - DNA, 19 bp, Homo sapiens
  siRNA target sequence for LOC116236 (NM_198147.1,1323-1341).
gaacggaggagaggattaa

SEQ ID NO: 437115 - DNA, 19 bp, Homo sapiens
  siRNA target sequence for LOC149345 (NM_198149.1,210-228).
cctggcatccggggtttaa

SEQ ID NO: 437116 - DNA, 19 bp, Homo sapiens
  siRNA target sequence for LOC149345 (NM_198149.1,636-654).
cagctcctcctccctatat

SEQ ID NO: 437117 - DNA, 19 bp, Homo sapiens
  siRNA target sequence for LOC253012 (NM_198151.1,70-88).
ctcaaggtcttcacaactt

SEQ ID NO: 437118 - DNA, 19 bp, Homo sapiens
  siRNA target sequence for LOC253012 (NM_198151.1,76-94).
gtcttcacaactttccttt

SEQ ID NO: 437119 - DNA, 19 bp, Homo sapiens
  siRNA target sequence for LOC253012 (NM_198151.1,219-237).
ccagatcatatggctattt

SEQ ID NO: 437120 - DNA, 19 bp, Homo sapiens
  siRNA target sequence for LOC253012 (NM_198151.1,245-263).
cccacacaatgcccaaata

SEQ ID NO: 437121 - DNA, 19 bp, Homo sapiens
  siRNA target sequence for LOC253012 (NM_198151.1,247-265).
cacacaatgcccaaatact

SEQ ID NO: 437122 - DNA, 19 bp, Homo sapiens
  siRNA target sequence for LOC253012 (NM_198151.1,249-267).
cacaatgcccaaatactta

SEQ ID NO: 437123 - DNA, 19 bp, Homo sapiens
  siRNA target sequence for LOC253012 (NM_198151.1,270-288).
gggctctgtgaataagtct

SEQ ID NO: 437124 - DNA, 19 bp, Homo sapiens
  siRNA target sequence for LOC253012 (NM_198151.1,406-424).
cagggaaatggaactctat

SEQ ID NO: 437125 - DNA, 19 bp, Homo sapiens
  siRNA target sequence for LOC253012 (NM_198151.1,408-426).
gggaaatggaactctatct

SEQ ID NO: 437126 - DNA, 19 bp, Homo sapiens
  siRNA target sequence for LOC253012 (NM_198151.1,425-443).
ctgccagtcagaagataca

SEQ ID NO: 437127 - DNA, 19 bp, Homo sapiens
  siRNA target sequence for LOC253012 (NM_198151.1,552-570).
cactcggctagcttaccaa

SEQ ID NO: 437128 - DNA, 19 bp, Homo sapiens
  siRNA target sequence for LOC253012 (NM_198151.1,630-648).
caatacccttcatattgct

SEQ ID NO: 437129 - DNA, 19 bp, Homo sapiens
  siRNA target sequence for LOC253012 (NM_198151.1,650-668).
cagtaaccaaggaagacat

SEQ ID NO: 437130 - DNA, 19 bp, Homo sapiens
  siRNA target sequence for LOC253012 (NM_198151.1,723-741).
cattatgcccatcatatat

SEQ ID NO: 437131 - DNA, 19 bp, Homo sapiens
  siRNA target sequence for LOC253012 (NM_198151.1,755-773).
gacttcaagtgaattctga

SEQ ID NO: 437132 - DNA, 19 bp, Homo sapiens
  siRNA target sequence for LOC253012 (NM_198151.1,770-788).
ctgataaagggctaaaagt

SEQ ID NO: 437133 - DNA, 19 bp, Homo sapiens
  siRNA target sequence for LOC253012 (NM_198151.1,811-829).
cttggagaggccatcctat

SEQ ID NO: 437134 - DNA, 19 bp, Homo sapiens
  siRNA target sequence for LOC253012 (NM_198151.1,881-899).
ggactgacaatactacata

SEQ ID NO: 437135 - DNA, 19 bp, Homo sapiens
  siRNA target sequence for LOC253012 (NM_198151.1,882-900).
gactgacaatactacatat

SEQ ID NO: 437136 - DNA, 19 bp, Homo sapiens
  siRNA target sequence for LOC253012 (NM_198151.1,884-902).
ctgacaatactacatatat

SEQ ID NO: 437137 - DNA, 19 bp, Homo sapiens
  siRNA target sequence for LOC253012 (NM_198151.1,996-1014).
caggcaagatgaaactcat

SEQ ID NO: 437138 - DNA, 19 bp, Homo sapiens
  siRNA target sequence for LOC253012 (NM_198151.1,998-1016).
ggcaagatgaaactcattt

SEQ ID NO: 437139 - DNA, 19 bp, Homo sapiens
  siRNA target sequence for LOC253012 (NM_198151.1,1074-1092).
gtcacctttagcaagtata

SEQ ID NO: 437140 - DNA, 19 bp, Homo sapiens
  siRNA target sequence for LOC253012 (NM_198151.1,1084-1102).
gcaagtataactggaatat

SEQ ID NO: 437141 - DNA, 19 bp, Homo sapiens
  siRNA target sequence for LOC253012 (NM_198151.1,1088-1106).
gtataactggaatatcact

SEQ ID NO: 437142 - DNA, 19 bp, Homo sapiens
  siRNA target sequence for LOC253012 (NM_198151.1,1096-1114).
ggaatatcactatttttga

SEQ ID NO: 437143 - DNA, 19 bp, Homo sapiens
  siRNA target sequence for LOC253012 (NM_198151.1,1153-1171).
caaccctacaaagttataa

SEQ ID NO: 437144 - DNA, 19 bp, Homo sapiens
  siRNA target sequence for LOC253012 (NM_198151.1,1243-1261).
ctggatgacttcggaatat

SEQ ID NO: 437145 - DNA, 19 bp, Homo sapiens
  siRNA target sequence for LOC253012 (NM_198151.1,1245-1263).
ggatgacttcggaatatat

SEQ ID NO: 437146 - DNA, 19 bp, Homo sapiens
  siRNA target sequence for LOC253012 (NM_198151.1,1249-1267).
gacttcggaatatatgaat

SEQ ID NO: 437147 - DNA, 19 bp, Homo sapiens
  siRNA target sequence for LOC253012 (NM_198151.1,1251-1269).
cttcggaatatatgaattt

SEQ ID NO: 437148 - DNA, 19 bp, Homo sapiens
  siRNA target sequence for LOC253012 (NM_198151.1,1321-1339).
ccagcctctgattgtgtat

SEQ ID NO: 437149 - DNA, 19 bp, Homo sapiens
  siRNA target sequence for LOC253012 (NM_198151.1,1334-1352).
gtgtatcggggcaagattt

SEQ ID NO: 437150 - DNA, 19 bp, Homo sapiens
  siRNA target sequence for LOC253012 (NM_198151.1,1356-1374).
cagtacagtgtatgaagtt

SEQ ID NO: 437151 - DNA, 19 bp, Homo sapiens
  siRNA target sequence for LOC253012 (NM_198151.1,1358-1376).
gtacagtgtatgaagttat

SEQ ID NO: 437152 - DNA, 19 bp, Homo sapiens
  siRNA target sequence for URP (NM_198152.1,83-101).
ggactcctaactttgttat

SEQ ID NO: 437153 - DNA, 19 bp, Homo sapiens
  siRNA target sequence for URP (NM_198152.1,249-267).
ctgacctagccttacctaa

SEQ ID NO: 437154 - DNA, 19 bp, Homo sapiens
  siRNA target sequence for URP (NM_198152.1,334-352).
gacgtcctatgctgtagat

SEQ ID NO: 437155 - DNA, 19 bp, Homo sapiens
  siRNA target sequence for URP (NM_198152.1,347-365).
gtagatggtctattctctt

SEQ ID NO: 437156 - DNA, 19 bp, Homo sapiens
  siRNA target sequence for URP (NM_198152.1,361-379).
ctcttctcatcctagcaaa

SEQ ID NO: 437157 - DNA, 19 bp, Homo sapiens
  siRNA target sequence for LOC285852 (NM_198153.1,249-267).
ccctatcagcccaaatcct

SEQ ID NO: 437158 - DNA, 19 bp, Homo sapiens
  siRNA target sequence for LOC285852 (NM_198153.1,447-465).
gcttccgaaaacatcatca

SEQ ID NO: 437159 - DNA, 19 bp, Homo sapiens
  siRNA target sequence for LOC285852 (NM_198153.1,461-479).
catcactgttcttagaaat

SEQ ID NO: 437160 - DNA, 19 bp, Homo sapiens
  siRNA target sequence for LOC285852 (NM_198153.1,541-559).
caacaagcacagttctgat

SEQ ID NO: 437161 - DNA, 19 bp, Homo sapiens
  siRNA target sequence for LOC339168 (NM_198154.1,180-198).
ctcggcctttgccttagat

SEQ ID NO: 437162 - DNA, 19 bp, Homo sapiens
  siRNA target sequence for GPR103 (NM_198179.1,185-203).
gcaatgctctggtgttcta

SEQ ID NO: 437163 - DNA, 19 bp, Homo sapiens
  siRNA target sequence for GPR103 (NM_198179.1,333-351).
gctggggggtgctttcatt

SEQ ID NO: 437164 - DNA, 19 bp, Homo sapiens
  siRNA target sequence for GPR103 (NM_198179.1,334-352).
ctggggggtgctttcattt

SEQ ID NO: 437165 - DNA, 19 bp, Homo sapiens
  siRNA target sequence for GPR103 (NM_198179.1,435-453).
gggacttgtgcatcctttt

SEQ ID NO: 437166 - DNA, 19 bp, Homo sapiens
  siRNA target sequence for GPR103 (NM_198179.1,437-455).
gacttgtgcatccttttaa

SEQ ID NO: 437167 - DNA, 19 bp, Homo sapiens
  siRNA target sequence for GPR103 (NM_198179.1,540-558).
gtggcacgtgcaacaactt

SEQ ID NO: 437168 - DNA, 19 bp, Homo sapiens
  siRNA target sequence for GPR103 (NM_198179.1,542-560).
ggcacgtgcaacaacttga

SEQ ID NO: 437169 - DNA, 19 bp, Homo sapiens
  siRNA target sequence for GPR103 (NM_198179.1,549-567).
gcaacaacttgagatcaaa

SEQ ID NO: 437170 - DNA, 19 bp, Homo sapiens
  siRNA target sequence for GPR103 (NM_198179.1,620-638).
gccctgtgcaccagaagat

SEQ ID NO: 437171 - DNA, 19 bp, Homo sapiens
  siRNA target sequence for GPR103 (NM_198179.1,752-770).
cagtgcttcgaactattca

SEQ ID NO: 437172 - DNA, 19 bp, Homo sapiens
  siRNA target sequence for GPR103 (NM_198179.1,801-819).
gaagaaacgagctgtcatt

SEQ ID NO: 437173 - DNA, 19 bp, Homo sapiens
  siRNA target sequence for GPR103 (NM_198179.1,863-881).
cattccatgttgtccatat

SEQ ID NO: 437174 - DNA, 19 bp, Homo sapiens
  siRNA target sequence for GPR103 (NM_198179.1,868-886).
catgttgtccatatgatga

SEQ ID NO: 437175 - DNA, 19 bp, Homo sapiens
  siRNA target sequence for GPR103 (NM_198179.1,978-996).
ctgtaatcccattgtctat

SEQ ID NO: 437176 - DNA, 19 bp, Homo sapiens
  siRNA target sequence for GPR103 (NM_198179.1,1111-1129).
cggaagaaagcaaagtttt

SEQ ID NO: 437177 - DNA, 19 bp, Homo sapiens
  siRNA target sequence for GPR103 (NM_198179.1,1180-1198).
ggcaacattgaagtcaaat

SEQ ID NO: 437178 - DNA, 19 bp, Homo sapiens
  siRNA target sequence for P518 (NM_198180.1,8-26).
ggccttaccccctgatcta

SEQ ID NO: 437179 - DNA, 19 bp, Homo sapiens
  siRNA target sequence for P518 (NM_198180.1,10-28).
ccttaccccctgatctact

SEQ ID NO: 437180 - DNA, 19 bp, Homo sapiens
  siRNA target sequence for P518 (NM_198180.1,11-29).
cttaccccctgatctactt

SEQ ID NO: 437181 - DNA, 19 bp, Homo sapiens
  siRNA target sequence for LOC344901 (NM_198184.1,73-91).
gtcctctcagtagatgtaa

SEQ ID NO: 437182 - DNA, 19 bp, Homo sapiens
  siRNA target sequence for LOC344901 (NM_198184.1,75-93).
cctctcagtagatgtaaca

SEQ ID NO: 437183 - DNA, 19 bp, Homo sapiens
  siRNA target sequence for LOC344901 (NM_198184.1,76-94).
ctctcagtagatgtaacaa

SEQ ID NO: 437184 - DNA, 19 bp, Homo sapiens
  siRNA target sequence for LOC344901 (NM_198184.1,105-123).
ctttgattctggagtcata

SEQ ID NO: 437185 - DNA, 19 bp, Homo sapiens
  siRNA target sequence for LOC344901 (NM_198184.1,167-185).
ctgacctgacagcaaaact

SEQ ID NO: 437186 - DNA, 19 bp, Homo sapiens
  siRNA target sequence for LOC344901 (NM_198184.1,199-217).
gaattggtgtccctagaaa

SEQ ID NO: 437187 - DNA, 19 bp, Homo sapiens
  siRNA target sequence for LOC344901 (NM_198184.1,204-222).
ggtgtccctagaaaatgat

SEQ ID NO: 437188 - DNA, 19 bp, Homo sapiens
  siRNA target sequence for LOC344901 (NM_198184.1,209-227).
ccctagaaaatgatgtgat

SEQ ID NO: 437189 - DNA, 19 bp, Homo sapiens
  siRNA target sequence for LOC344901 (NM_198184.1,315-333).
gaggaaagtagtagatcat

SEQ ID NO: 437190 - DNA, 19 bp, Homo sapiens
  siRNA target sequence for LOC344901 (NM_198184.1,334-352).
ccaaaaaggcgatttggta

SEQ ID NO: 437191 - DNA, 19 bp, Homo sapiens
  siRNA target sequence for LOC344901 (NM_198184.1,335-353).
caaaaaggcgatttggtat

SEQ ID NO: 437192 - DNA, 19 bp, Homo sapiens
  siRNA target sequence for LOC344901 (NM_198184.1,370-388).
ggtagaaaccggctttcaa

SEQ ID NO: 437193 - DNA, 19 bp, Homo sapiens
  siRNA target sequence for OVTN (NM_198185.1,18-36).
caagctgattttactacta

SEQ ID NO: 437194 - DNA, 19 bp, Homo sapiens
  siRNA target sequence for OVTN (NM_198185.1,24-42).
gattttactactaggaata

SEQ ID NO: 437195 - DNA, 19 bp, Homo sapiens
  siRNA target sequence for OVTN (NM_198185.1,45-63).
cttttttgaacgaggtaaa

SEQ ID NO: 437196 - DNA, 19 bp, Homo sapiens
  siRNA target sequence for OVTN (NM_198185.1,194-212).
ggcaggtatctctgaaaca

SEQ ID NO: 437197 - DNA, 19 bp, Homo sapiens
  siRNA target sequence for OVTN (NM_198185.1,195-213).
gcaggtatctctgaaacaa

SEQ ID NO: 437198 - DNA, 19 bp, Homo sapiens
  siRNA target sequence for OVTN (NM_198185.1,274-292).
cactgcattgcaaacagaa

SEQ ID NO: 437199 - DNA, 19 bp, Homo sapiens
  siRNA target sequence for OVTN (NM_198185.1,357-375).
gcaaactctcactattgaa

SEQ ID NO: 437200 - DNA, 19 bp, Homo sapiens
  siRNA target sequence for OVTN (NM_198185.1,358-376).
caaactctcactattgaaa

SEQ ID NO: 437201 - DNA, 19 bp, Homo sapiens
  siRNA target sequence for OVTN (NM_198185.1,444-462).
ggctggagccttccaattt

SEQ ID NO: 437202 - DNA, 19 bp, Homo sapiens
  siRNA target sequence for OVTN (NM_198185.1,513-531).
ggctggttttatttgtaca

SEQ ID NO: 437203 - DNA, 19 bp, Homo sapiens
  siRNA target sequence for OVTN (NM_198185.1,563-581).
gcgtcctctcacaagtctt

SEQ ID NO: 437204 - DNA, 19 bp, Homo sapiens
  siRNA target sequence for OVTN (NM_198185.1,624-642).
ggcagctctgttaacacta

SEQ ID NO: 437205 - DNA, 19 bp, Homo sapiens
  siRNA target sequence for OVTN (NM_198185.1,628-646).
gctctgttaacactaaaga

SEQ ID NO: 437206 - DNA, 19 bp, Homo sapiens
  siRNA target sequence for OVTN (NM_198185.1,728-746).
cactcatgtgccggaataa

SEQ ID NO: 437207 - DNA, 19 bp, Homo sapiens
  siRNA target sequence for OVTN (NM_198185.1,730-748).
ctcatgtgccggaataaga

SEQ ID NO: 437208 - DNA, 19 bp, Homo sapiens
  siRNA target sequence for OVTN (NM_198185.1,796-814).
ggtcgaggctggagaaaca

SEQ ID NO: 437209 - DNA, 19 bp, Homo sapiens
  siRNA target sequence for OVTN (NM_198185.1,846-864).
gatcttcacagacattagt

SEQ ID NO: 437210 - DNA, 19 bp, Homo sapiens
  siRNA target sequence for OVTN (NM_198185.1,849-867).
cttcacagacattagtaaa

SEQ ID NO: 437211 - DNA, 19 bp, Homo sapiens
  siRNA target sequence for OVTN (NM_198185.1,875-893).
cctggatccacgaacacat

SEQ ID NO: 437212 - DNA, 19 bp, Homo sapiens
  siRNA target sequence for OVTN (NM_198185.1,983-1001).
cagaaagcctccacctata

SEQ ID NO: 437213 - DNA, 19 bp, Homo sapiens
  siRNA target sequence for OVTN (NM_198185.1,985-1003).
gaaagcctccacctatatt

SEQ ID NO: 437214 - DNA, 19 bp, Homo sapiens
  siRNA target sequence for OVTN (NM_198185.1,989-1007).
gcctccacctatattatga

SEQ ID NO: 437215 - DNA, 19 bp, Homo sapiens
  siRNA target sequence for OVTN (NM_198185.1,991-1009).
ctccacctatattatgaga

SEQ ID NO: 437216 - DNA, 19 bp, Homo sapiens
  siRNA target sequence for OVTN (NM_198185.1,1099-1117).
cacagttacctgtcaatgt

SEQ ID NO: 437217 - DNA, 19 bp, Homo sapiens
  siRNA target sequence for OVTN (NM_198185.1,1101-1119).
cagttacctgtcaatgtat

SEQ ID NO: 437218 - DNA, 19 bp, Homo sapiens
  siRNA target sequence for OVTN (NM_198185.1,1110-1128).
gtcaatgtattctttagaa

SEQ ID NO: 437219 - DNA, 19 bp, Homo sapiens
  siRNA target sequence for OVTN (NM_198185.1,1129-1147).
gacagacccattggaaaat

SEQ ID NO: 437220 - DNA, 19 bp, Homo sapiens
  siRNA target sequence for OVTN (NM_198185.1,1173-1191).
cattcttattggctctaat

SEQ ID NO: 437221 - DNA, 19 bp, Homo sapiens
  siRNA target sequence for OVTN (NM_198185.1,1235-1253).
ctgggtttaatcttaccta

SEQ ID NO: 437222 - DNA, 19 bp, Homo sapiens
  siRNA target sequence for OVTN (NM_198185.1,1237-1255).
gggtttaatcttacctata

SEQ ID NO: 437223 - DNA, 19 bp, Homo sapiens
  siRNA target sequence for OVTN (NM_198185.1,1239-1257).
gtttaatcttacctataaa

SEQ ID NO: 437224 - DNA, 19 bp, Homo sapiens
  siRNA target sequence for OVTN (NM_198185.1,1321-1339).
ggtctcatacagagtctaa

SEQ ID NO: 437225 - DNA, 19 bp, Homo sapiens
  siRNA target sequence for OVTN (NM_198185.1,1322-1340).
gtctcatacagagtctaaa

SEQ ID NO: 437226 - DNA, 19 bp, Homo sapiens
  siRNA target sequence for OVTN (NM_198185.1,1326-1344).
catacagagtctaaactat

SEQ ID NO: 437227 - DNA, 19 bp, Homo sapiens
  siRNA target sequence for OVTN (NM_198185.1,1366-1384).
gctaactgtgactggattt

SEQ ID NO: 437228 - DNA, 19 bp, Homo sapiens
  siRNA target sequence for OVTN (NM_198185.1,1367-1385).
ctaactgtgactggatttt

SEQ ID NO: 437229 - DNA, 19 bp, Homo sapiens
  siRNA target sequence for OVTN (NM_198185.1,1391-1409).
cctccaaacatcacctaat

SEQ ID NO: 437230 - DNA, 19 bp, Homo sapiens
  siRNA target sequence for OVTN (NM_198185.1,1392-1410).
ctccaaacatcacctaatt

SEQ ID NO: 437231 - DNA, 19 bp, Homo sapiens
  siRNA target sequence for OVTN (NM_198185.1,1394-1412).
ccaaacatcacctaattaa

SEQ ID NO: 437232 - DNA, 19 bp, Homo sapiens
  siRNA target sequence for OVTN (NM_198185.1,1404-1422).
cctaattaagctttcattt

SEQ ID NO: 437233 - DNA, 19 bp, Homo sapiens
  siRNA target sequence for OVTN (NM_198185.1,1472-1490).
cagtgcacagcgatgtaga

SEQ ID NO: 437234 - DNA, 19 bp, Homo sapiens
  siRNA target sequence for OVTN (NM_198185.1,1474-1492).
gtgcacagcgatgtagaaa

SEQ ID NO: 437235 - DNA, 19 bp, Homo sapiens
  siRNA target sequence for OVTN (NM_198185.1,1571-1589).
gcttccaatcagatgaaaa

SEQ ID NO: 437236 - DNA, 19 bp, Homo sapiens
  siRNA target sequence for OVTN (NM_198185.1,1631-1649).
ctaaagcaggtaagaagat

SEQ ID NO: 437237 - DNA, 19 bp, Homo sapiens
  siRNA target sequence for OVTN (NM_198185.1,1636-1654).
gcaggtaagaagatagagt

SEQ ID NO: 437238 - DNA, 19 bp, Homo sapiens
  siRNA target sequence for OVTN (NM_198185.1,1647-1665).
gatagagttaccaactctt

SEQ ID NO: 437239 - DNA, 19 bp, Homo sapiens
  siRNA target sequence for OVTN (NM_198185.1,1667-1685).
ggttcccagttctaatcct

SEQ ID NO: 437240 - DNA, 19 bp, Homo sapiens
  siRNA target sequence for OVTN (NM_198185.1,1668-1686).
gttcccagttctaatcctt

SEQ ID NO: 437241 - DNA, 19 bp, Homo sapiens
  siRNA target sequence for ASTN2 (NM_198188.1,1347-1365).
ggcccgaaacacatattat

SEQ ID NO: 437242 - DNA, 19 bp, Homo sapiens
  siRNA target sequence for ASTN2 (NM_198188.1,1348-1366).
gcccgaaacacatattatt

SEQ ID NO: 437243 - DNA, 19 bp, Homo sapiens
  siRNA target sequence for ASTN2 (NM_198188.1,1349-1367).
cccgaaacacatattattt

SEQ ID NO: 437244 - DNA, 19 bp, Homo sapiens
  siRNA target sequence for POP5 (NM_198201.1,296-314).
cccgtgcaccgttttttgt

SEQ ID NO: 437245 - DNA, 19 bp, Homo sapiens
  siRNA target sequence for POP5 (NM_198201.1,297-315).
ccgtgcaccgttttttgta

SEQ ID NO: 437246 - DNA, 19 bp, Homo sapiens
  siRNA target sequence for POP5 (NM_198201.1,298-316).
cgtgcaccgttttttgtaa

SEQ ID NO: 437247 - DNA, 19 bp, Homo sapiens
  siRNA target sequence for POP5 (NM_198201.1,301-319).
gcaccgttttttgtaagtt

SEQ ID NO: 437248 - DNA, 19 bp, Homo sapiens
  siRNA target sequence for POP5 (NM_198201.1,306-324).
gttttttgtaagttcgata

SEQ ID NO: 437249 - DNA, 19 bp, Homo sapiens
  siRNA target sequence for POP5 (NM_198201.1,313-331).
gtaagttcgatatctcaat

SEQ ID NO: 437250 - DNA, 19 bp, Homo sapiens
  siRNA target sequence for POP5 (NM_198202.1,189-207).
cggcttcgcgggtacaata

SEQ ID NO: 437251 - DNA, 19 bp, Homo sapiens
  siRNA target sequence for POP5 (NM_198202.1,192-210).
cttcgcgggtacaataaga

SEQ ID NO: 437252 - DNA, 19 bp, Homo sapiens
  siRNA target sequence for POP5 (NM_198202.1,195-213).
cgcgggtacaataagaaca

SEQ ID NO: 437253 - DNA, 19 bp, Homo sapiens
  siRNA target sequence for FAM13C1 (NM_198215.1,109-127).
gtttcagccttcaggataa

SEQ ID NO: 437254 - DNA, 19 bp, Homo sapiens
  siRNA target sequence for FAM13C1 (NM_198215.1,115-133).
gccttcaggataattcctt

SEQ ID NO: 437255 - DNA, 19 bp, Homo sapiens
  siRNA target sequence for FAM13C1 (NM_198215.1,286-304).
cgcagcagcagaatgtaga

SEQ ID NO: 437256 - DNA, 19 bp, Homo sapiens
  siRNA target sequence for FAM13C1 (NM_198215.1,365-383).
gcccaagtccatcttcaaa

SEQ ID NO: 437257 - DNA, 19 bp, Homo sapiens
  siRNA target sequence for FAM13C1 (NM_198215.1,500-518).
cttcaagtgccaagaaaca

SEQ ID NO: 437258 - DNA, 19 bp, Homo sapiens
  siRNA target sequence for FAM13C1 (NM_198215.1,576-594).
gaaactcggcaggacttaa

SEQ ID NO: 437259 - DNA, 19 bp, Homo sapiens
  siRNA target sequence for FAM13C1 (NM_198215.1,660-678).
cttgccgatgggacagatt

SEQ ID NO: 437260 - DNA, 19 bp, Homo sapiens
  siRNA target sequence for FAM13C1 (NM_198215.1,877-895).
gcactcagcagtttatgat

SEQ ID NO: 437261 - DNA, 19 bp, Homo sapiens
  siRNA target sequence for FAM13C1 (NM_198215.1,974-992).
gagcctcaagcggaaaatt

SEQ ID NO: 437262 - DNA, 19 bp, Homo sapiens
  siRNA target sequence for FAM13C1 (NM_198215.1,983-1001).
gcggaaaattcggaaattt

SEQ ID NO: 437263 - DNA, 19 bp, Homo sapiens
  siRNA target sequence for FAM13C1 (NM_198215.1,985-1003).
ggaaaattcggaaatttga

SEQ ID NO: 437264 - DNA, 19 bp, Homo sapiens
  siRNA target sequence for FAM13C1 (NM_198215.1,1041-1059).
catggtgacaagacttcta

SEQ ID NO: 437265 - DNA, 19 bp, Homo sapiens
  siRNA target sequence for FAM13C1 (NM_198215.1,1063-1081).
ctgaagtcctgaaatggat

SEQ ID NO: 437266 - DNA, 19 bp, Homo sapiens
  siRNA target sequence for FAM13C1 (NM_198215.1,1109-1127).
gctcaaagaactaaagcta

SEQ ID NO: 437267 - DNA, 19 bp, Homo sapiens
  siRNA target sequence for FAM13C1 (NM_198215.1,1263-1281).
ccagatgctgccttgacat

SEQ ID NO: 437268 - DNA, 19 bp, Homo sapiens
  siRNA target sequence for FAM13C1 (NM_198215.1,1309-1327).
ctccccaggaggattctaa

SEQ ID NO: 437269 - DNA, 19 bp, Homo sapiens
  siRNA target sequence for FAM13C1 (NM_198215.1,1314-1332).
caggaggattctaaggtaa

SEQ ID NO: 437270 - DNA, 19 bp, Homo sapiens
  siRNA target sequence for FAM13C1 (NM_198215.1,1317-1335).
gaggattctaaggtaacta

SEQ ID NO: 437271 - DNA, 19 bp, Homo sapiens
  siRNA target sequence for FAM13C1 (NM_198215.1,1349-1367).
cctcataaagccgctttat

SEQ ID NO: 437272 - DNA, 19 bp, Homo sapiens
  siRNA target sequence for FAM13C1 (NM_198215.1,1361-1379).
gctttatgaccgatacaga

SEQ ID NO: 437273 - DNA, 19 bp, Homo sapiens
  siRNA target sequence for FAM13C1 (NM_198215.1,1408-1426).
cccttattccaacaattca

SEQ ID NO: 437274 - DNA, 19 bp, Homo sapiens
  siRNA target sequence for FAM13C1 (NM_198215.1,1518-1536).
ctcacctactctaatgaga

SEQ ID NO: 437275 - DNA, 19 bp, Homo sapiens
  siRNA target sequence for FAM13C1 (NM_198215.1,1541-1559).
gcctgttagggccctttta

SEQ ID NO: 437276 - DNA, 19 bp, Homo sapiens
  siRNA target sequence for FAM13C1 (NM_198215.1,1616-1634).
ggctaccatgcctgtactt

SEQ ID NO: 437277 - DNA, 19 bp, Homo sapiens
  siRNA target sequence for FAM13C1 (NM_198215.1,1638-1656).
gaccatctccgagaaacta

SEQ ID NO: 437278 - DNA, 19 bp, Homo sapiens
  siRNA target sequence for FAM13C1 (NM_198215.1,1732-1750).
cacaaaaggaagataggat

SEQ ID NO: 437279 - DNA, 19 bp, Homo sapiens
  siRNA target sequence for FAM13C1 (NM_198215.1,1757-1775).
ggcagatgagtattatgaa

SEQ ID NO: 437280 - DNA, 19 bp, Homo sapiens
  siRNA target sequence for FLJ11021 (NM_198261.1,434-452).
ccaacttcttcttaaaaca

SEQ ID NO: 437281 - DNA, 19 bp, Homo sapiens
  siRNA target sequence for NHS (NM_198270.2,928-946).
gtaagctgagtgtgtacta

SEQ ID NO: 437282 - DNA, 19 bp, Homo sapiens
  siRNA target sequence for NHS (NM_198270.2,1151-1169).
ccagaggaggcgtgagttt

SEQ ID NO: 437283 - DNA, 19 bp, Homo sapiens
  siRNA target sequence for NHS (NM_198270.2,1152-1170).
cagaggaggcgtgagttta

SEQ ID NO: 437284 - DNA, 19 bp, Homo sapiens
  siRNA target sequence for NHS (NM_198270.2,1156-1174).
ggaggcgtgagtttaagga

SEQ ID NO: 437285 - DNA, 19 bp, Homo sapiens
  siRNA target sequence for NHS (NM_198270.2,1166-1184).
gtttaaggaccgtcacttt

SEQ ID NO: 437286 - DNA, 19 bp, Homo sapiens
  siRNA target sequence for NHS (NM_198270.2,1173-1191).
gaccgtcactttttaacgt

SEQ ID NO: 437287 - DNA, 19 bp, Homo sapiens
  siRNA target sequence for NHS (NM_198270.2,1197-1215).
cccccagaggatgaagata

SEQ ID NO: 437288 - DNA, 19 bp, Homo sapiens
  siRNA target sequence for NHS (NM_198270.2,1237-1255).
ggccgaaaaacccaataca

SEQ ID NO: 437289 - DNA, 19 bp, Homo sapiens
  siRNA target sequence for NHS (NM_198270.2,1239-1257).
ccgaaaaacccaatacaca

SEQ ID NO: 437290 - DNA, 19 bp, Homo sapiens
  siRNA target sequence for NHS (NM_198270.2,1361-1379).
cattattcccatcaatgtt

SEQ ID NO: 437291 - DNA, 19 bp, Homo sapiens
  siRNA target sequence for NHS (NM_198270.2,1413-1431).
cgctgctctctggttcatt

SEQ ID NO: 437292 - DNA, 19 bp, Homo sapiens
  siRNA target sequence for NHS (NM_198270.2,1415-1433).
ctgctctctggttcattca

SEQ ID NO: 437293 - DNA, 19 bp, Homo sapiens
  siRNA target sequence for NHS (NM_198270.2,1417-1435).
gctctctggttcattcaca

SEQ ID NO: 437294 - DNA, 19 bp, Homo sapiens
  siRNA target sequence for NHS (NM_198270.2,1443-1461).
ctacagcggagacgaaaat

SEQ ID NO: 437295 - DNA, 19 bp, Homo sapiens
  siRNA target sequence for NHS (NM_198270.2,1537-1555).
ccagggaaaggaatgtgat

SEQ ID NO: 437296 - DNA, 19 bp, Homo sapiens
  siRNA target sequence for NHS (NM_198270.2,1575-1593).
ccctccaacactgtcaata

SEQ ID NO: 437297 - DNA, 19 bp, Homo sapiens
  siRNA target sequence for NHS (NM_198270.2,1619-1637).
gtgccaaaccgaggatatt

SEQ ID NO: 437298 - DNA, 19 bp, Homo sapiens
  siRNA target sequence for NHS (NM_198270.2,1621-1639).
gccaaaccgaggatattct

SEQ ID NO: 437299 - DNA, 19 bp, Homo sapiens
  siRNA target sequence for NHS (NM_198270.2,1623-1641).
caaaccgaggatattctga

SEQ ID NO: 437300 - DNA, 19 bp, Homo sapiens
  siRNA target sequence for NHS (NM_198270.2,1672-1690).
ctcaaaggggtcaaagcat

SEQ ID NO: 437301 - DNA, 19 bp, Homo sapiens
  siRNA target sequence for NHS (NM_198270.2,1890-1908).
gaaagaacccctaatgatt

SEQ ID NO: 437302 - DNA, 19 bp, Homo sapiens
  siRNA target sequence for NHS (NM_198270.2,1988-2006).
cccccagcacaaattaagt

SEQ ID NO: 437303 - DNA, 19 bp, Homo sapiens
  siRNA target sequence for NHS (NM_198270.2,1990-2008).
cccagcacaaattaagtga

SEQ ID NO: 437304 - DNA, 19 bp, Homo sapiens
  siRNA target sequence for NHS (NM_198270.2,2265-2283).
gactcggagttgtcactaa

SEQ ID NO: 437305 - DNA, 19 bp, Homo sapiens
  siRNA target sequence for NHS (NM_198270.2,2321-2339).
cgtgacagagcaatacaat

SEQ ID NO: 437306 - DNA, 19 bp, Homo sapiens
  siRNA target sequence for NHS (NM_198270.2,2435-2453).
cagtgagtggaattaccta

SEQ ID NO: 437307 - DNA, 19 bp, Homo sapiens
  siRNA target sequence for NHS (NM_198270.2,2474-2492).
ctgccgccaggattttagt

SEQ ID NO: 437308 - DNA, 19 bp, Homo sapiens
  siRNA target sequence for NHS (NM_198270.2,2593-2611).
ctagctctcacttttcagt

SEQ ID NO: 437309 - DNA, 19 bp, Homo sapiens
  siRNA target sequence for NHS (NM_198270.2,2613-2631).
gacacggaaggatactata

SEQ ID NO: 437310 - DNA, 19 bp, Homo sapiens
  siRNA target sequence for NHS (NM_198270.2,2646-2664).
gactgtggtctcaaaggta

SEQ ID NO: 437311 - DNA, 19 bp, Homo sapiens
  siRNA target sequence for NHS (NM_198270.2,2661-2679).
ggtaataagagctatgtct

SEQ ID NO: 437312 - DNA, 19 bp, Homo sapiens
  siRNA target sequence for NHS (NM_198270.2,2669-2687).
gagctatgtctgtcactat

SEQ ID NO: 437313 - DNA, 19 bp, Homo sapiens
  siRNA target sequence for NHS (NM_198270.2,2729-2747).
ccctggtcttccagattgt

SEQ ID NO: 437314 - DNA, 19 bp, Homo sapiens
  siRNA target sequence for NHS (NM_198270.2,2781-2799).
ggaagaccaagcatctctt

SEQ ID NO: 437315 - DNA, 19 bp, Homo sapiens
  siRNA target sequence for NHS (NM_198270.2,2819-2837).
gccgaccccacctaaacgt

SEQ ID NO: 437316 - DNA, 19 bp, Homo sapiens
  siRNA target sequence for NHS (NM_198270.2,2820-2838).
ccgaccccacctaaacgta

SEQ ID NO: 437317 - DNA, 19 bp, Homo sapiens
  siRNA target sequence for NHS (NM_198270.2,2963-2981).
cacgccttctcgaatggaa

SEQ ID NO: 437318 - DNA, 19 bp, Homo sapiens
  siRNA target sequence for NHS (NM_198270.2,2965-2983).
cgccttctcgaatggaaaa

SEQ ID NO: 437319 - DNA, 19 bp, Homo sapiens
  siRNA target sequence for NHS (NM_198270.2,3002-3020).
gcaggaaccttcttggata

SEQ ID NO: 437320 - DNA, 19 bp, Homo sapiens
  siRNA target sequence for NHS (NM_198270.2,3053-3071).
gttagatgcttcggatatt

SEQ ID NO: 437321 - DNA, 19 bp, Homo sapiens
  siRNA target sequence for NHS (NM_198270.2,3064-3082).
cggatattccaccattcaa

SEQ ID NO: 437322 - DNA, 19 bp, Homo sapiens
  siRNA target sequence for NHS (NM_198270.2,3112-3130).
cagacctctggctcctaaa

SEQ ID NO: 437323 - DNA, 19 bp, Homo sapiens
  siRNA target sequence for NHS (NM_198270.2,3122-3140).
gctcctaaatgacttgaaa

SEQ ID NO: 437324 - DNA, 19 bp, Homo sapiens
  siRNA target sequence for NHS (NM_198270.2,3151-3169).
cttatagatctctatctaa

SEQ ID NO: 437325 - DNA, 19 bp, Homo sapiens
  siRNA target sequence for NHS (NM_198270.2,3185-3203).
gggtaccacagtcattgaa

SEQ ID NO: 437326 - DNA, 19 bp, Homo sapiens
  siRNA target sequence for NHS (NM_198270.2,3197-3215).
cattgaatgcatcaaatct

SEQ ID NO: 437327 - DNA, 19 bp, Homo sapiens
  siRNA target sequence for NHS (NM_198270.2,3234-3252).
caaacatcacaatcagaat

SEQ ID NO: 437328 - DNA, 19 bp, Homo sapiens
  siRNA target sequence for NHS (NM_198270.2,3276-3294).
ccttctgttgacaatgagt

SEQ ID NO: 437329 - DNA, 19 bp, Homo sapiens
  siRNA target sequence for NHS (NM_198270.2,3277-3295).
cttctgttgacaatgagtt

SEQ ID NO: 437330 - DNA, 19 bp, Homo sapiens
  siRNA target sequence for NHS (NM_198270.2,3336-3354).
ccatcaagtggctattcaa

SEQ ID NO: 437331 - DNA, 19 bp, Homo sapiens
  siRNA target sequence for NHS (NM_198270.2,3383-3401).
ccctacagctttcttttca

SEQ ID NO: 437332 - DNA, 19 bp, Homo sapiens
  siRNA target sequence for NHS (NM_198270.2,3414-3432).
cccggaggtagcaaaagaa

SEQ ID NO: 437333 - DNA, 19 bp, Homo sapiens
  siRNA target sequence for NHS (NM_198270.2,3415-3433).
ccggaggtagcaaaagaaa

SEQ ID NO: 437334 - DNA, 19 bp, Homo sapiens
  siRNA target sequence for NHS (NM_198270.2,3462-3480).
ctacagcaaccctctttaa

SEQ ID NO: 437335 - DNA, 19 bp, Homo sapiens
  siRNA target sequence for NHS (NM_198270.2,3507-3525).
gaccttgaacttccaatta

SEQ ID NO: 437336 - DNA, 19 bp, Homo sapiens
  siRNA target sequence for NHS (NM_198270.2,3531-3549).
cctacccatcttgatctaa

SEQ ID NO: 437337 - DNA, 19 bp, Homo sapiens
  siRNA target sequence for NHS (NM_198270.2,3543-3561).
gatctaagtgctcttcata

SEQ ID NO: 437338 - DNA, 19 bp, Homo sapiens
  siRNA target sequence for NHS (NM_198270.2,3655-3673).
ctccaccgtcccttgcaat

SEQ ID NO: 437339 - DNA, 19 bp, Homo sapiens
  siRNA target sequence for NHS (NM_198270.2,3679-3697).
caacgatcctgaaatctgt

SEQ ID NO: 437340 - DNA, 19 bp, Homo sapiens
  siRNA target sequence for NHS (NM_198270.2,3682-3700).
cgatcctgaaatctgttaa

SEQ ID NO: 437341 - DNA, 19 bp, Homo sapiens
  siRNA target sequence for NHS (NM_198270.2,3702-3720).
cttaggtccatcaacaagt

SEQ ID NO: 437342 - DNA, 19 bp, Homo sapiens
  siRNA target sequence for NHS (NM_198270.2,3795-3813).
gccttgtctccaagtaaga

SEQ ID NO: 437343 - DNA, 19 bp, Homo sapiens
  siRNA target sequence for NHS (NM_198270.2,3817-3835).
ggccgcatacagcaaataa

SEQ ID NO: 437344 - DNA, 19 bp, Homo sapiens
  siRNA target sequence for NHS (NM_198270.2,3818-3836).
gccgcatacagcaaataaa

SEQ ID NO: 437345 - DNA, 19 bp, Homo sapiens
  siRNA target sequence for NHS (NM_198270.2,3819-3837).
ccgcatacagcaaataaat

SEQ ID NO: 437346 - DNA, 19 bp, Homo sapiens
  siRNA target sequence for NHS (NM_198270.2,3821-3839).
gcatacagcaaataaatca

SEQ ID NO: 437347 - DNA, 19 bp, Homo sapiens
  siRNA target sequence for NHS (NM_198270.2,3868-3886).
ccatactgtcctttttaga

SEQ ID NO: 437348 - DNA, 19 bp, Homo sapiens
  siRNA target sequence for NHS (NM_198270.2,3902-3920).
gatgggaccagataaacta

SEQ ID NO: 437349 - DNA, 19 bp, Homo sapiens
  siRNA target sequence for NHS (NM_198270.2,3905-3923).
gggaccagataaactacat

SEQ ID NO: 437350 - DNA, 19 bp, Homo sapiens
  siRNA target sequence for NHS (NM_198270.2,3958-3976).
gctgcgatccagaaaccat

SEQ ID NO: 437351 - DNA, 19 bp, Homo sapiens
  siRNA target sequence for NHS (NM_198270.2,3959-3977).
ctgcgatccagaaaccata

SEQ ID NO: 437352 - DNA, 19 bp, Homo sapiens
  siRNA target sequence for NHS (NM_198270.2,3985-4003).
ctggtagcagtcttctaga

SEQ ID NO: 437353 - DNA, 19 bp, Homo sapiens
  siRNA target sequence for NHS (NM_198270.2,3991-4009).
gcagtcttctagattcaaa

SEQ ID NO: 437354 - DNA, 19 bp, Homo sapiens
  siRNA target sequence for NHS (NM_198270.2,3994-4012).
gtcttctagattcaaatgt

SEQ ID NO: 437355 - DNA, 19 bp, Homo sapiens
  siRNA target sequence for NHS (NM_198270.2,4058-4076).
cacgccaaccaaaaactgt

SEQ ID NO: 437356 - DNA, 19 bp, Homo sapiens
  siRNA target sequence for NHS (NM_198270.2,4156-4174).
ctggtccagacgaaactct

SEQ ID NO: 437357 - DNA, 19 bp, Homo sapiens
  siRNA target sequence for NHS (NM_198270.2,4171-4189).
ctctagaacaggtacagaa

SEQ ID NO: 437358 - DNA, 19 bp, Homo sapiens
  siRNA target sequence for NHS (NM_198270.2,4349-4367).
ctatgaatcggagataaca

SEQ ID NO: 437359 - DNA, 19 bp, Homo sapiens
  siRNA target sequence for NHS (NM_198270.2,4428-4446).
gccaaaagtgcctctgata

SEQ ID NO: 437360 - DNA, 19 bp, Homo sapiens
  siRNA target sequence for NHS (NM_198270.2,4429-4447).
ccaaaagtgcctctgataa

SEQ ID NO: 437361 - DNA, 19 bp, Homo sapiens
  siRNA target sequence for NHS (NM_198270.2,4478-4496).
ggatgaggcttcattgaaa

SEQ ID NO: 437362 - DNA, 19 bp, Homo sapiens
  siRNA target sequence for NHS (NM_198270.2,4508-4526).
gagtgatgactccatcatt

SEQ ID NO: 437363 - DNA, 19 bp, Homo sapiens
  siRNA target sequence for NHS (NM_198270.2,4520-4538).
catcatttcaccacttagt

SEQ ID NO: 437364 - DNA, 19 bp, Homo sapiens
  siRNA target sequence for NHS (NM_198270.2,4624-4642).
gatccaagaggaaagtact

SEQ ID NO: 437365 - DNA, 19 bp, Homo sapiens
  siRNA target sequence for NHS (NM_198270.2,4664-4682).
catgtctgttcgaagcaaa

SEQ ID NO: 437366 - DNA, 19 bp, Homo sapiens
  siRNA target sequence for NHS (NM_198270.2,4766-4784).
gaggtctcctggtctcata

SEQ ID NO: 437367 - DNA, 19 bp, Homo sapiens
  siRNA target sequence for NHS (NM_198270.2,4768-4786).
ggtctcctggtctcatata

SEQ ID NO: 437368 - DNA, 19 bp, Homo sapiens
  siRNA target sequence for NHS (NM_198270.2,4802-4820).
gtccaacacatccaatgaa

SEQ ID NO: 437369 - DNA, 19 bp, Homo sapiens
  siRNA target sequence for NHS (NM_198270.2,4813-4831).
ccaatgaagagtttaagct

SEQ ID NO: 437370 - DNA, 19 bp, Homo sapiens
  siRNA target sequence for NHS (NM_198270.2,4848-4866).
ggcagtcgctcagattcta

SEQ ID NO: 437371 - DNA, 19 bp, Homo sapiens
  siRNA target sequence for NHS (NM_198270.2,4850-4868).
cagtcgctcagattctagt

SEQ ID NO: 437372 - DNA, 19 bp, Homo sapiens
  siRNA target sequence for NHS (NM_198270.2,4852-4870).
gtcgctcagattctagtta

SEQ ID NO: 437373 - DNA, 19 bp, Homo sapiens
  siRNA target sequence for NHS (NM_198270.2,5008-5026).
catgctccccacgagttaa

SEQ ID NO: 437374 - DNA, 19 bp, Homo sapiens
  siRNA target sequence for NHS (NM_198270.2,5012-5030).
ctccccacgagttaatgca

SEQ ID NO: 437375 - DNA, 19 bp, Homo sapiens
  siRNA target sequence for NHS (NM_198270.2,5126-5144).
ccgctgccggctgtacaat

SEQ ID NO: 437376 - DNA, 19 bp, Homo sapiens
  siRNA target sequence for NHS (NM_198270.2,5127-5145).
cgctgccggctgtacaata

SEQ ID NO: 437377 - DNA, 19 bp, Homo sapiens
  siRNA target sequence for NHS (NM_198270.2,5208-5226).
cgttcctcccagagttcaa

SEQ ID NO: 437378 - DNA, 19 bp, Homo sapiens
  siRNA target sequence for LMOD3 (NM_198271.1,92-110).
ccgaagaaaagctcaataa

SEQ ID NO: 437379 - DNA, 19 bp, Homo sapiens
  siRNA target sequence for LMOD3 (NM_198271.1,93-111).
cgaagaaaagctcaataat

SEQ ID NO: 437380 - DNA, 19 bp, Homo sapiens
  siRNA target sequence for LMOD3 (NM_198271.1,343-361).
ccagaggcccaagaacaaa

SEQ ID NO: 437381 - DNA, 19 bp, Homo sapiens
  siRNA target sequence for LMOD3 (NM_198271.1,362-380).
gtgagaaaaaaatatcgaa

SEQ ID NO: 437382 - DNA, 19 bp, Homo sapiens
  siRNA target sequence for LMOD3 (NM_198271.1,377-395).
cgaaattagatcctaagaa

SEQ ID NO: 437383 - DNA, 19 bp, Homo sapiens
  siRNA target sequence for LMOD3 (NM_198271.1,403-421).
ctagacaccagctttttga

SEQ ID NO: 437384 - DNA, 19 bp, Homo sapiens
  siRNA target sequence for LMOD3 (NM_198271.1,531-549).
catccccaaagaaatgtta

SEQ ID NO: 437385 - DNA, 19 bp, Homo sapiens
  siRNA target sequence for LMOD3 (NM_198271.1,546-564).
gttactggactttgtcaat

SEQ ID NO: 437386 - DNA, 19 bp, Homo sapiens
  siRNA target sequence for LMOD3 (NM_198271.1,632-650).
catttgccttggctaacat

SEQ ID NO: 437387 - DNA, 19 bp, Homo sapiens
  siRNA target sequence for LMOD3 (NM_198271.1,648-666).
catgttgcgtgaaaataga

SEQ ID NO: 437388 - DNA, 19 bp, Homo sapiens
  siRNA target sequence for LMOD3 (NM_198271.1,679-697).
ctcaacatcgagtccaatt

SEQ ID NO: 437389 - DNA, 19 bp, Homo sapiens
  siRNA target sequence for LMOD3 (NM_198271.1,763-781).
cttcggtttcacaatcaga

SEQ ID NO: 437390 - DNA, 19 bp, Homo sapiens
  siRNA target sequence for LMOD3 (NM_198271.1,794-812).
gtcaccatgctgaaatgga

SEQ ID NO: 437391 - DNA, 19 bp, Homo sapiens
  siRNA target sequence for LMOD3 (NM_198271.1,798-816).
ccatgctgaaatggaaata

SEQ ID NO: 437392 - DNA, 19 bp, Homo sapiens
  siRNA target sequence for LMOD3 (NM_198271.1,881-899).
ccagaatggtggtcactaa

SEQ ID NO: 437393 - DNA, 19 bp, Homo sapiens
  siRNA target sequence for LMOD3 (NM_198271.1,882-900).
cagaatggtggtcactaat

SEQ ID NO: 437394 - DNA, 19 bp, Homo sapiens
  siRNA target sequence for LMOD3 (NM_198271.1,884-902).
gaatggtggtcactaatct

SEQ ID NO: 437395 - DNA, 19 bp, Homo sapiens
  siRNA target sequence for LMOD3 (NM_198271.1,908-926).
ccaggaatcaggataaaca

SEQ ID NO: 437396 - DNA, 19 bp, Homo sapiens
  siRNA target sequence for LMOD3 (NM_198271.1,909-927).
caggaatcaggataaacaa

SEQ ID NO: 437397 - DNA, 19 bp, Homo sapiens
  siRNA target sequence for LMOD3 (NM_198271.1,978-996).
gaagctgatagccatgtta

SEQ ID NO: 437398 - DNA, 19 bp, Homo sapiens
  siRNA target sequence for LMOD3 (NM_198271.1,982-1000).
ctgatagccatgttagaga

SEQ ID NO: 437399 - DNA, 19 bp, Homo sapiens
  siRNA target sequence for DKFZP566G1424 (NM_198272.1,637-655).
ggaagatgcacctcactaa

SEQ ID NO: 437400 - DNA, 19 bp, Homo sapiens
  siRNA target sequence for DKFZP566G1424 (NM_198272.1,665-683).
cttagcaaagccacaaaca

SEQ ID NO: 437401 - DNA, 19 bp, Homo sapiens
  siRNA target sequence for DKFZP566G1424 (NM_198272.1,702-720).
cctacgtttccacctaaaa

SEQ ID NO: 437402 - DNA, 19 bp, Homo sapiens
  siRNA target sequence for DKFZP566G1424 (NM_198272.1,703-721).
ctacgtttccacctaaaaa

SEQ ID NO: 437403 - DNA, 19 bp, Homo sapiens
  siRNA target sequence for DKFZP566G1424 (NM_198272.1,787-805).
ggcccatatgcctcaatta

SEQ ID NO: 437404 - DNA, 19 bp, Homo sapiens
  siRNA target sequence for DKFZP566G1424 (NM_198272.1,788-806).
gcccatatgcctcaattat

SEQ ID NO: 437405 - DNA, 19 bp, Homo sapiens
  siRNA target sequence for DKFZP566G1424 (NM_198272.1,830-848).
cagaagagagacctcttat

SEQ ID NO: 437406 - DNA, 19 bp, Homo sapiens
  siRNA target sequence for LOC196264 (NM_198275.1,115-133).
cccatgtccgaggttatgt

SEQ ID NO: 437407 - DNA, 19 bp, Homo sapiens
  siRNA target sequence for LOC196264 (NM_198275.1,116-134).
ccatgtccgaggttatgtt

SEQ ID NO: 437408 - DNA, 19 bp, Homo sapiens
  siRNA target sequence for LOC196264 (NM_198275.1,226-244).
gcagccacacagtatcaat

SEQ ID NO: 437409 - DNA, 19 bp, Homo sapiens
  siRNA target sequence for LOC196264 (NM_198275.1,227-245).
cagccacacagtatcaata

SEQ ID NO: 437410 - DNA, 19 bp, Homo sapiens
  siRNA target sequence for LOC196264 (NM_198275.1,229-247).
gccacacagtatcaatatt

SEQ ID NO: 437411 - DNA, 19 bp, Homo sapiens
  siRNA target sequence for LOC196264 (NM_198275.1,230-248).
ccacacagtatcaatattt

SEQ ID NO: 437412 - DNA, 19 bp, Homo sapiens
  siRNA target sequence for LOC196264 (NM_198275.1,327-345).
ggggatgcatctataagta

SEQ ID NO: 437413 - DNA, 19 bp, Homo sapiens
  siRNA target sequence for LOC196264 (NM_198275.1,328-346).
gggatgcatctataagtat

SEQ ID NO: 437414 - DNA, 19 bp, Homo sapiens
  siRNA target sequence for LOC196264 (NM_198275.1,330-348).
gatgcatctataagtataa

SEQ ID NO: 437415 - DNA, 19 bp, Homo sapiens
  siRNA target sequence for LOC196264 (NM_198275.1,349-367).
gcaaccctaccataaagga

SEQ ID NO: 437416 - DNA, 19 bp, Homo sapiens
  siRNA target sequence for LOC196264 (NM_198275.1,424-442).
ccatgacagagctaacagt

SEQ ID NO: 437417 - DNA, 19 bp, Homo sapiens
  siRNA target sequence for LOC196264 (NM_198275.1,453-471).
ggttttggcaccatgcttt

SEQ ID NO: 437418 - DNA, 19 bp, Homo sapiens
  siRNA target sequence for LOC196264 (NM_198275.1,586-604).
gctataagaagtcatctat

SEQ ID NO: 437419 - DNA, 19 bp, Homo sapiens
  siRNA target sequence for LOC196264 (NM_198275.1,646-664).
gtatggcgaggctttgtgt

SEQ ID NO: 437420 - DNA, 19 bp, Homo sapiens
  siRNA target sequence for LOC196264 (NM_198275.1,673-691).
ctgagtgcctggattcaga

SEQ ID NO: 437421 - DNA, 19 bp, Homo sapiens
  siRNA target sequence for FLJ34583 (NM_198276.1,262-280).
ccgtgttcagtgattccaa

SEQ ID NO: 437422 - DNA, 19 bp, Homo sapiens
  siRNA target sequence for FLJ34583 (NM_198276.1,263-281).
cgtgttcagtgattccaat

SEQ ID NO: 437423 - DNA, 19 bp, Homo sapiens
  siRNA target sequence for FLJ34583 (NM_198276.1,299-317).
caatgagggtccggaaaat

SEQ ID NO: 437424 - DNA, 19 bp, Homo sapiens
  siRNA target sequence for FLJ34583 (NM_198276.1,307-325).
gtccggaaaatgaaatggt

SEQ ID NO: 437425 - DNA, 19 bp, Homo sapiens
  siRNA target sequence for FLJ34583 (NM_198276.1,339-357).
ctgcagatgtcactttatt

SEQ ID NO: 437426 - DNA, 19 bp, Homo sapiens
  siRNA target sequence for FLJ34583 (NM_198276.1,467-485).
cctaataaccttaattgaa

SEQ ID NO: 437427 - DNA, 19 bp, Homo sapiens
  siRNA target sequence for FLJ34583 (NM_198276.1,503-521).
gggctacgtgggtaaccta

SEQ ID NO: 437428 - DNA, 19 bp, Homo sapiens
  siRNA target sequence for FLJ34583 (NM_198276.1,553-571).
ggcttttgagccttctatt

SEQ ID NO: 437429 - DNA, 19 bp, Homo sapiens
  siRNA target sequence for FLJ34583 (NM_198276.1,564-582).
cttctattgcagttacctt

SEQ ID NO: 437430 - DNA, 19 bp, Homo sapiens
  siRNA target sequence for FLJ34583 (NM_198276.1,567-585).
ctattgcagttacctttaa

SEQ ID NO: 437431 - DNA, 19 bp, Homo sapiens
  siRNA target sequence for FLJ34583 (NM_198276.1,626-644).
cttggaaaaagcgatacat

SEQ ID NO: 437432 - DNA, 19 bp, Homo sapiens
  siRNA target sequence for FLJ34583 (NM_198276.1,630-648).
gaaaaagcgatacatatca

SEQ ID NO: 437433 - DNA, 19 bp, Homo sapiens
  siRNA target sequence for FLJ34583 (NM_198276.1,636-654).
gcgatacatatcatcttca

SEQ ID NO: 437434 - DNA, 19 bp, Homo sapiens
  siRNA target sequence for FLJ34583 (NM_198276.1,675-693).
gttgttgcagcatttctta

SEQ ID NO: 437435 - DNA, 19 bp, Homo sapiens
  siRNA target sequence for FLJ34583 (NM_198276.1,694-712).
ccttaaggaaaatggttaa

SEQ ID NO: 437436 - DNA, 19 bp, Homo sapiens
  siRNA target sequence for FLJ34583 (NM_198276.1,787-805).
ggtcatgtatagaagagat

SEQ ID NO: 437437 - DNA, 19 bp, Homo sapiens
  siRNA target sequence for SLC37A2 (NM_198277.1,146-164).
gtccaggaagcctatcagt

SEQ ID NO: 437438 - DNA, 19 bp, Homo sapiens
  siRNA target sequence for SLC37A2 (NM_198277.1,206-224).
caaacccatcaatgatact

SEQ ID NO: 437439 - DNA, 19 bp, Homo sapiens
  siRNA target sequence for SLC37A2 (NM_198277.1,275-293).
caactataaggagttacta

SEQ ID NO: 437440 - DNA, 19 bp, Homo sapiens
  siRNA target sequence for SLC37A2 (NM_198277.1,364-382).
ggcttccgctccgttacta

SEQ ID NO: 437441 - DNA, 19 bp, Homo sapiens
  siRNA target sequence for SLC37A2 (NM_198277.1,473-491).
ggtcatccaggtctgtaat

SEQ ID NO: 437442 - DNA, 19 bp, Homo sapiens
  siRNA target sequence for SLC37A2 (NM_198277.1,998-1016).
cgccaatgtggctcacttt

SEQ ID NO: 437443 - DNA, 19 bp, Homo sapiens
  siRNA target sequence for SLC37A2 (NM_198277.1,999-1017).
gccaatgtggctcacttta

SEQ ID NO: 437444 - DNA, 19 bp, Homo sapiens
  siRNA target sequence for SLC37A2 (NM_198277.1,1001-1019).
caatgtggctcactttagt

SEQ ID NO: 437445 - DNA, 19 bp, Homo sapiens
  siRNA target sequence for SLC37A2 (NM_198277.1,1052-1070).
cgatgttggtggcatcata

SEQ ID NO: 437446 - DNA, 19 bp, Homo sapiens
  siRNA target sequence for SLC37A2 (NM_198277.1,1160-1178).
gttcctgtacaactacatt

SEQ ID NO: 437447 - DNA, 19 bp, Homo sapiens
  siRNA target sequence for SLC37A2 (NM_198277.1,1397-1415).
ccccacgggctggaacaat

SEQ ID NO: 437448 - DNA, 19 bp, Homo sapiens
  siRNA target sequence for SLC37A2 (NM_198277.1,1399-1417).
ccacgggctggaacaatgt

SEQ ID NO: 437449 - DNA, 19 bp, Homo sapiens
  siRNA target sequence for SLC37A2 (NM_198277.1,1402-1420).
cgggctggaacaatgtctt

SEQ ID NO: 437450 - DNA, 19 bp, Homo sapiens
  siRNA target sequence for SLC37A2 (NM_198277.1,1408-1426).
ggaacaatgtcttctacat

SEQ ID NO: 437451 - DNA, 19 bp, Homo sapiens
  siRNA target sequence for SLC37A2 (NM_198277.1,1457-1475).
gctcctttgccggttagta

SEQ ID NO: 437452 - DNA, 19 bp, Homo sapiens
  siRNA target sequence for SLC37A2 (NM_198277.1,1458-1476).
ctcctttgccggttagtat

SEQ ID NO: 437453 - DNA, 19 bp, Homo sapiens
  siRNA target sequence for SLC37A2 (NM_198277.1,1461-1479).
ctttgccggttagtataca

SEQ ID NO: 437454 - DNA, 19 bp, Homo sapiens
  siRNA target sequence for SLC37A2 (NM_198277.1,1465-1483).
gccggttagtatacaaaga

SEQ ID NO: 437455 - DNA, 19 bp, Homo sapiens
  siRNA target sequence for SLC37A2 (NM_198277.1,1467-1485).
cggttagtatacaaagaga

SEQ ID NO: 437456 - DNA, 19 bp, Homo sapiens
  siRNA target sequence for SLC37A2 (NM_198277.1,1468-1486).
ggttagtatacaaagagat

SEQ ID NO: 437457 - DNA, 19 bp, Homo sapiens
  siRNA target sequence for LOC255743 (NM_198278.1,273-291).
ggtggcccaggcaaatagt

SEQ ID NO: 437458 - DNA, 19 bp, Homo sapiens
  siRNA target sequence for LOC255743 (NM_198278.1,283-301).
gcaaatagtgtcatcgatt

SEQ ID NO: 437459 - DNA, 19 bp, Homo sapiens
  siRNA target sequence for LOC255743 (NM_198278.1,298-316).
gattggcctatgtcgttat

SEQ ID NO: 437460 - DNA, 19 bp, Homo sapiens
  siRNA target sequence for LOC255743 (NM_198278.1,379-397).
gtgccaaccacgatgcaaa

SEQ ID NO: 437461 - DNA, 19 bp, Homo sapiens
  siRNA target sequence for LOC255743 (NM_198278.1,382-400).
ccaaccacgatgcaaacat

SEQ ID NO: 437462 - DNA, 19 bp, Homo sapiens
  siRNA target sequence for LOC255743 (NM_198278.1,456-474).
cctgtaatcaagatctaaa

SEQ ID NO: 437463 - DNA, 19 bp, Homo sapiens
  siRNA target sequence for LOC255743 (NM_198278.1,459-477).
gtaatcaagatctaaatga

SEQ ID NO: 437464 - DNA, 19 bp, Homo sapiens
  siRNA target sequence for LOC255743 (NM_198278.1,546-564).
gtctcaacggatatatgct

SEQ ID NO: 437465 - DNA, 19 bp, Homo sapiens
  siRNA target sequence for LOC255743 (NM_198278.1,619-637).
gtatggctgtgatgttgtt

SEQ ID NO: 437466 - DNA, 19 bp, Homo sapiens
  siRNA target sequence for LOC255743 (NM_198278.1,694-712).
gaggacctgtgtagatgtt

SEQ ID NO: 437467 - DNA, 19 bp, Homo sapiens
  siRNA target sequence for LOC255743 (NM_198278.1,696-714).
ggacctgtgtagatgttga

SEQ ID NO: 437468 - DNA, 19 bp, Homo sapiens
  siRNA target sequence for LOC255743 (NM_198278.1,744-762).
ctagatttaggcaatgtgt

SEQ ID NO: 437469 - DNA, 19 bp, Homo sapiens
  siRNA target sequence for LOC255743 (NM_198278.1,800-818).
ggcttcgatctcatgtata

SEQ ID NO: 437470 - DNA, 19 bp, Homo sapiens
  siRNA target sequence for LOC255743 (NM_198278.1,801-819).
gcttcgatctcatgtatat

SEQ ID NO: 437471 - DNA, 19 bp, Homo sapiens
  siRNA target sequence for LOC255743 (NM_198278.1,802-820).
cttcgatctcatgtatatt

SEQ ID NO: 437472 - DNA, 19 bp, Homo sapiens
  siRNA target sequence for LOC255743 (NM_198278.1,805-823).
cgatctcatgtatattgga

SEQ ID NO: 437473 - DNA, 19 bp, Homo sapiens
  siRNA target sequence for LOC255743 (NM_198278.1,879-897).
gcagctttgctcgatgtta

SEQ ID NO: 437474 - DNA, 19 bp, Homo sapiens
  siRNA target sequence for LOC255743 (NM_198278.1,880-898).
cagctttgctcgatgttat

SEQ ID NO: 437475 - DNA, 19 bp, Homo sapiens
  siRNA target sequence for LOC255743 (NM_198278.1,910-928).
gtcctacaagtgcaaatgt

SEQ ID NO: 437476 - DNA, 19 bp, Homo sapiens
  siRNA target sequence for LOC255743 (NM_198278.1,912-930).
cctacaagtgcaaatgtaa

SEQ ID NO: 437477 - DNA, 19 bp, Homo sapiens
  siRNA target sequence for LOC255743 (NM_198278.1,913-931).
ctacaagtgcaaatgtaaa

SEQ ID NO: 437478 - DNA, 19 bp, Homo sapiens
  siRNA target sequence for LOC255743 (NM_198278.1,950-968).
ggactgacttgtgtgtata

SEQ ID NO: 437479 - DNA, 19 bp, Homo sapiens
  siRNA target sequence for LOC255743 (NM_198278.1,990-1008).
cttcaggtccaattcatgt

SEQ ID NO: 437480 - DNA, 19 bp, Homo sapiens
  siRNA target sequence for LOC255743 (NM_198278.1,1007-1025).
gtaccaaagggaaatggta

SEQ ID NO: 437481 - DNA, 19 bp, Homo sapiens
  siRNA target sequence for LOC255743 (NM_198278.1,1037-1055).
ggtgacacaggaaataata

SEQ ID NO: 437482 - DNA, 19 bp, Homo sapiens
  siRNA target sequence for LOC255743 (NM_198278.1,1064-1082).
cctgatgttggaagtactt

SEQ ID NO: 437483 - DNA, 19 bp, Homo sapiens
  siRNA target sequence for LOC255743 (NM_198278.1,1089-1107).
ctccgaagacaccatatat

SEQ ID NO: 437484 - DNA, 19 bp, Homo sapiens
  siRNA target sequence for LOC255743 (NM_198278.1,1101-1119).
catatattcctcctatcat

SEQ ID NO: 437485 - DNA, 19 bp, Homo sapiens
  siRNA target sequence for LOC255743 (NM_198278.1,1122-1140).
ccaacaggcctacttctaa

SEQ ID NO: 437486 - DNA, 19 bp, Homo sapiens
  siRNA target sequence for LOC255743 (NM_198278.1,1254-1272).
ccaccggactgacaactat

SEQ ID NO: 437487 - DNA, 19 bp, Homo sapiens
  siRNA target sequence for LOC255743 (NM_198278.1,1255-1273).
caccggactgacaactata

SEQ ID NO: 437488 - DNA, 19 bp, Homo sapiens
  siRNA target sequence for LOC255743 (NM_198278.1,1258-1276).
cggactgacaactatagca

SEQ ID NO: 437489 - DNA, 19 bp, Homo sapiens
  siRNA target sequence for LOC255743 (NM_198278.1,1293-1311).
ctccaggagggattacagt

SEQ ID NO: 437490 - DNA, 19 bp, Homo sapiens
  siRNA target sequence for LOC255743 (NM_198278.1,1299-1317).
gagggattacagttgacaa

SEQ ID NO: 437491 - DNA, 19 bp, Homo sapiens
  siRNA target sequence for LOC255743 (NM_198278.1,1364-1382).
gttctggtacacagttgta

SEQ ID NO: 437492 - DNA, 19 bp, Homo sapiens
  siRNA target sequence for LOC255743 (NM_198278.1,1457-1475).
gcaggtggacaatatctga

SEQ ID NO: 437493 - DNA, 19 bp, Homo sapiens
  siRNA target sequence for LOC255743 (NM_198278.1,1599-1617).
gcacactccaggtgtttgt

SEQ ID NO: 437494 - DNA, 19 bp, Homo sapiens
  siRNA target sequence for LOC255743 (NM_198278.1,1606-1624).
ccaggtgtttgtgagaaaa

SEQ ID NO: 437495 - DNA, 19 bp, Homo sapiens
  siRNA target sequence for LOC255743 (NM_198278.1,1697-1715).
cgaggggctgacatcaaga

SEQ ID NO: 437496 - DNA, 19 bp, Homo sapiens
  siRNA target sequence for LOC255743 (NM_198278.1,1711-1729).
caagagcgaatcacaaaga

SEQ ID NO: 437497 - DNA, 19 bp, Homo sapiens
  siRNA target sequence for LOC256643 (NM_198279.1,941-959).
ctgttggcaggaaaagtga

SEQ ID NO: 437498 - DNA, 19 bp, Homo sapiens
  siRNA target sequence for LOC256643 (NM_198279.1,947-965).
gcaggaaaagtgagaactt

SEQ ID NO: 437499 - DNA, 19 bp, Homo sapiens
  siRNA target sequence for LOC256643 (NM_198279.1,985-1003).
cttgactcaactcagaata

SEQ ID NO: 437500 - DNA, 19 bp, Homo sapiens
  siRNA target sequence for LOC256643 (NM_198279.1,990-1008).
ctcaactcagaatactgaa

SEQ ID NO: 437501 - DNA, 19 bp, Homo sapiens
  siRNA target sequence for LOC256643 (NM_198279.1,1046-1064).
caataatccatcaagttaa

SEQ ID NO: 437502 - DNA, 19 bp, Homo sapiens
  siRNA target sequence for LOC256643 (NM_198279.1,1053-1071).
ccatcaagttaaagcaaat

SEQ ID NO: 437503 - DNA, 19 bp, Homo sapiens
  siRNA target sequence for LOC256643 (NM_198279.1,1054-1072).
catcaagttaaagcaaatt

SEQ ID NO: 437504 - DNA, 19 bp, Homo sapiens
  siRNA target sequence for LOC256643 (NM_198279.1,1078-1096).
ccatcacctggcattactt

SEQ ID NO: 437505 - DNA, 19 bp, Homo sapiens
  siRNA target sequence for LOC256643 (NM_198279.1,1079-1097).
catcacctggcattacttt

SEQ ID NO: 437506 - DNA, 19 bp, Homo sapiens
  siRNA target sequence for LOC256643 (NM_198279.1,1085-1103).
ctggcattactttacatga

SEQ ID NO: 437507 - DNA, 19 bp, Homo sapiens
  siRNA target sequence for LOC256643 (NM_198279.1,1099-1117).
catgagcgtttctcaacaa

SEQ ID NO: 437508 - DNA, 19 bp, Homo sapiens
  siRNA target sequence for LOC256643 (NM_198279.1,1179-1197).
caggagaatagatatgtct

SEQ ID NO: 437509 - DNA, 19 bp, Homo sapiens
  siRNA target sequence for LOC256643 (NM_198279.1,1181-1199).
ggagaatagatatgtcttt

SEQ ID NO: 437510 - DNA, 19 bp, Homo sapiens
  siRNA target sequence for LOC256643 (NM_198279.1,1200-1218).
ggccgagcttcagagtaaa

SEQ ID NO: 437511 - DNA, 19 bp, Homo sapiens
  siRNA target sequence for LOC256643 (NM_198279.1,1219-1237).
caagctgtgatctatgaat

SEQ ID NO: 437512 - DNA, 19 bp, Homo sapiens
  siRNA target sequence for LOC256643 (NM_198279.1,1239-1257).
ggaacagactctgatcaaa

SEQ ID NO: 437513 - DNA, 19 bp, Homo sapiens
  siRNA target sequence for LOC256643 (NM_198279.1,1247-1265).
ctctgatcaaaataataga

SEQ ID NO: 437514 - DNA, 19 bp, Homo sapiens
  siRNA target sequence for LOC256643 (NM_198279.1,1275-1293).
cctacgacatgacattgaa

SEQ ID NO: 437515 - DNA, 19 bp, Homo sapiens
  siRNA target sequence for LOC256643 (NM_198279.1,1276-1294).
ctacgacatgacattgaaa

SEQ ID NO: 437516 - DNA, 19 bp, Homo sapiens
  siRNA target sequence for LOC256643 (NM_198279.1,1301-1319).
gaaaagaacggttacagaa

SEQ ID NO: 437517 - DNA, 19 bp, Homo sapiens
  siRNA target sequence for LOC256643 (NM_198279.1,1357-1375).
gagagggatgatcagaatt

SEQ ID NO: 437518 - DNA, 19 bp, Homo sapiens
  siRNA target sequence for LOC256643 (NM_198279.1,1402-1420).
catactgatggattccaaa

SEQ ID NO: 437519 - DNA, 19 bp, Homo sapiens
  siRNA target sequence for LOC256643 (NM_198279.1,1417-1435).
caaaaacccacacatttta

SEQ ID NO: 437520 - DNA, 19 bp, Homo sapiens
  siRNA target sequence for LOC256643 (NM_198279.1,1468-1486).
ccttacatgaattatacta

SEQ ID NO: 437521 - DNA, 19 bp, Homo sapiens
  siRNA target sequence for LOC256643 (NM_198279.1,1487-1505).
cgcagagaaaagacataat

SEQ ID NO: 437522 - DNA, 19 bp, Homo sapiens
  siRNA target sequence for LOC256643 (NM_198279.1,1493-1511).
gaaaagacataattactca

SEQ ID NO: 437523 - DNA, 19 bp, Homo sapiens
  siRNA target sequence for LOC256643 (NM_198279.1,1530-1548).
gggaaaccaccgaaacaca

SEQ ID NO: 437524 - DNA, 19 bp, Homo sapiens
  siRNA target sequence for LOC256643 (NM_198279.1,1536-1554).
ccaccgaaacacaagagta

SEQ ID NO: 437525 - DNA, 19 bp, Homo sapiens
  siRNA target sequence for LOC256643 (NM_198279.1,1615-1633).
gtacagaagagcttgtaca

SEQ ID NO: 437526 - DNA, 19 bp, Homo sapiens
  siRNA target sequence for LOC256643 (NM_198279.1,1629-1647).
gtacattcaggctaagtat

SEQ ID NO: 437527 - DNA, 19 bp, Homo sapiens
  siRNA target sequence for LOC256643 (NM_198279.1,1664-1682).
ctggcccaaggggatttat

SEQ ID NO: 437528 - DNA, 19 bp, Homo sapiens
  siRNA target sequence for LOC256643 (NM_198279.1,1668-1686).
cccaaggggatttatcact

SEQ ID NO: 437529 - DNA, 19 bp, Homo sapiens
  siRNA target sequence for LOC256643 (NM_198279.1,1675-1693).
ggatttatcactcataagt

SEQ ID NO: 437530 - DNA, 19 bp, Homo sapiens
  siRNA target sequence for LOC284612 (NM_198280.1,129-147).
ggatggatgggcccatttt

SEQ ID NO: 437531 - DNA, 19 bp, Homo sapiens
  siRNA target sequence for LOC284612 (NM_198280.1,130-148).
gatggatgggcccattttt

SEQ ID NO: 437532 - DNA, 19 bp, Homo sapiens
  siRNA target sequence for LOC284612 (NM_198280.1,185-203).
ctctagtccttctttcata

SEQ ID NO: 437533 - DNA, 19 bp, Homo sapiens
  siRNA target sequence for LOC284612 (NM_198280.1,305-323).
cagggcaggccgatgctat

SEQ ID NO: 437534 - DNA, 19 bp, Homo sapiens
  siRNA target sequence for LOC284612 (NM_198280.1,309-327).
gcaggccgatgctattggt

SEQ ID NO: 437535 - DNA, 19 bp, Homo sapiens
  siRNA target sequence for LOC284612 (NM_198280.1,343-361).
gacccagttccatatttgt

SEQ ID NO: 437536 - DNA, 19 bp, Homo sapiens
  siRNA target sequence for LOC285513 (NM_198281.1,321-339).
cctctgagatcagctaaaa

SEQ ID NO: 437537 - DNA, 19 bp, Homo sapiens
  siRNA target sequence for LOC285513 (NM_198281.1,324-342).
ctgagatcagctaaaactt

SEQ ID NO: 437538 - DNA, 19 bp, Homo sapiens
  siRNA target sequence for LOC285513 (NM_198281.1,411-429).
ccagctctcctgtgtaaga

SEQ ID NO: 437539 - DNA, 19 bp, Homo sapiens
  siRNA target sequence for LOC285513 (NM_198281.1,412-430).
cagctctcctgtgtaagaa

SEQ ID NO: 437540 - DNA, 19 bp, Homo sapiens
  siRNA target sequence for LOC285513 (NM_198281.1,493-511).
ccctgatgcaggtttgtga

SEQ ID NO: 437541 - DNA, 19 bp, Homo sapiens
  siRNA target sequence for LOC285513 (NM_198281.1,521-539).
cacccaaccagatatgtct

SEQ ID NO: 437542 - DNA, 19 bp, Homo sapiens
  siRNA target sequence for LOC285513 (NM_198281.1,649-667).
cagcaggaagggatcttat

SEQ ID NO: 437543 - DNA, 19 bp, Homo sapiens
  siRNA target sequence for LOC285513 (NM_198281.1,1001-1019).
gtcctgtaaacctctaact

SEQ ID NO: 437544 - DNA, 19 bp, Homo sapiens
  siRNA target sequence for LOC285513 (NM_198281.1,1004-1022).
ctgtaaacctctaactaga

SEQ ID NO: 437545 - DNA, 19 bp, Homo sapiens
  siRNA target sequence for LOC285513 (NM_198281.1,1164-1182).
gcacagcgtcagatgtcaa

SEQ ID NO: 437546 - DNA, 19 bp, Homo sapiens
  siRNA target sequence for LOC285513 (NM_198281.1,1342-1360).
gccgtgctcctgagcattt

SEQ ID NO: 437547 - DNA, 19 bp, Homo sapiens
  siRNA target sequence for LOC285513 (NM_198281.1,1542-1560).
ccaggtggggtccttaaaa

SEQ ID NO: 437548 - DNA, 19 bp, Homo sapiens
  siRNA target sequence for LOC285513 (NM_198281.1,1551-1569).
gtccttaaaacctcatcaa

SEQ ID NO: 437549 - DNA, 19 bp, Homo sapiens
  siRNA target sequence for LOC285513 (NM_198281.1,1571-1589).
caatttggtctccagtaat

SEQ ID NO: 437550 - DNA, 19 bp, Homo sapiens
  siRNA target sequence for LOC285513 (NM_198281.1,1591-1609).
cccagcatacgtgtaaaga

SEQ ID NO: 437551 - DNA, 19 bp, Homo sapiens
  siRNA target sequence for LOC285513 (NM_198281.1,1592-1610).
ccagcatacgtgtaaagaa

SEQ ID NO: 437552 - DNA, 19 bp, Homo sapiens
  siRNA target sequence for LOC285513 (NM_198281.1,1664-1682).
gctcgcaggtactaattct

SEQ ID NO: 437553 - DNA, 19 bp, Homo sapiens
  siRNA target sequence for LOC285513 (NM_198281.1,1700-1718).
cgccattgaccagatttct

SEQ ID NO: 437554 - DNA, 19 bp, Homo sapiens
  siRNA target sequence for LOC285513 (NM_198281.1,1732-1750).
gtcaagctgaaacaagtta

SEQ ID NO: 437555 - DNA, 19 bp, Homo sapiens
  siRNA target sequence for LOC285513 (NM_198281.1,1747-1765).
gttatggattggggaaatt

SEQ ID NO: 437556 - DNA, 19 bp, Homo sapiens
  siRNA target sequence for LOC285513 (NM_198281.1,1782-1800).
gagtttgcagagaaaacga

SEQ ID NO: 437557 - DNA, 19 bp, Homo sapiens
  siRNA target sequence for LOC285513 (NM_198281.1,1799-1817).
gacaaacggccacaaaaca

SEQ ID NO: 437558 - DNA, 19 bp, Homo sapiens
  siRNA target sequence for LOC285513 (NM_198281.1,1818-1836).
gacccagattgcaaactat

SEQ ID NO: 437559 - DNA, 19 bp, Homo sapiens
  siRNA target sequence for LOC285513 (NM_198281.1,1820-1838).
cccagattgcaaactatct

SEQ ID NO: 437560 - DNA, 19 bp, Homo sapiens
  siRNA target sequence for LOC285513 (NM_198281.1,1856-1874).
cagcaaagctgatcattct

SEQ ID NO: 437561 - DNA, 19 bp, Homo sapiens
  siRNA target sequence for LOC285513 (NM_198281.1,1877-1895).
gagcttggatcccactaat

SEQ ID NO: 437562 - DNA, 19 bp, Homo sapiens
  siRNA target sequence for LOC285513 (NM_198281.1,1924-1942).
catctcctcaggtagtaaa

SEQ ID NO: 437563 - DNA, 19 bp, Homo sapiens
  siRNA target sequence for LOC285513 (NM_198281.1,1950-1968).
gagtctactggcactgata

SEQ ID NO: 437564 - DNA, 19 bp, Homo sapiens
  siRNA target sequence for LOC285513 (NM_198281.1,1984-2002).
ccctactgctcaatcctaa

SEQ ID NO: 437565 - DNA, 19 bp, Homo sapiens
  siRNA target sequence for LOC285513 (NM_198281.1,1986-2004).
ctactgctcaatcctaaat

SEQ ID NO: 437566 - DNA, 19 bp, Homo sapiens
  siRNA target sequence for LOC285513 (NM_198281.1,2040-2058).
cctacaccctccccaatta

SEQ ID NO: 437567 - DNA, 19 bp, Homo sapiens
  siRNA target sequence for LOC285513 (NM_198281.1,2044-2062).
caccctccccaattaggaa

SEQ ID NO: 437568 - DNA, 19 bp, Homo sapiens
  siRNA target sequence for LOC285513 (NM_198281.1,2114-2132).
cctgagcctgccatctgat

SEQ ID NO: 437569 - DNA, 19 bp, Homo sapiens
  siRNA target sequence for LOC285513 (NM_198281.1,2490-2508).
cagacccggagatccattt

SEQ ID NO: 437570 - DNA, 19 bp, Homo sapiens
  siRNA target sequence for LOC285513 (NM_198281.1,2612-2630).
cccgtcttctgtgttagat

SEQ ID NO: 437571 - DNA, 19 bp, Homo sapiens
  siRNA target sequence for LOC285513 (NM_198281.1,2613-2631).
ccgtcttctgtgttagatt

SEQ ID NO: 437572 - DNA, 19 bp, Homo sapiens
  siRNA target sequence for LOC340061 (NM_198282.1,552-570).
ctgtccatctatttctact

SEQ ID NO: 437573 - DNA, 19 bp, Homo sapiens
  siRNA target sequence for LOC340061 (NM_198282.1,726-744).
ctggcatggtcatattaca

SEQ ID NO: 437574 - DNA, 19 bp, Homo sapiens
  siRNA target sequence for LOC340061 (NM_198282.1,736-754).
catattacatcggatatct

SEQ ID NO: 437575 - DNA, 19 bp, Homo sapiens
  siRNA target sequence for LOC340061 (NM_198282.1,782-800).
ccggattcgaacttacaat

SEQ ID NO: 437576 - DNA, 19 bp, Homo sapiens
  siRNA target sequence for LOC340061 (NM_198282.1,784-802).
ggattcgaacttacaatca

SEQ ID NO: 437577 - DNA, 19 bp, Homo sapiens
  siRNA target sequence for LOC340061 (NM_198282.1,831-849).
gtgagccagcggctgtata

SEQ ID NO: 437578 - DNA, 19 bp, Homo sapiens
  siRNA target sequence for LOC340061 (NM_198282.1,833-851).
gagccagcggctgtatatt

SEQ ID NO: 437579 - DNA, 19 bp, Homo sapiens
  siRNA target sequence for LOC340061 (NM_198282.1,835-853).
gccagcggctgtatattct

SEQ ID NO: 437580 - DNA, 19 bp, Homo sapiens
  siRNA target sequence for LOC340061 (NM_198282.1,905-923).
cattcgcttcctggataaa

SEQ ID NO: 437581 - DNA, 19 bp, Homo sapiens
  siRNA target sequence for LOC340061 (NM_198282.1,1039-1057).
cccccttgcagactttgtt

SEQ ID NO: 437582 - DNA, 19 bp, Homo sapiens
  siRNA target sequence for LOC340061 (NM_198282.1,1040-1058).
ccccttgcagactttgttt

SEQ ID NO: 437583 - DNA, 19 bp, Homo sapiens
  siRNA target sequence for LOC340061 (NM_198282.1,1104-1122).
cttgagcaggccaaactct

SEQ ID NO: 437584 - DNA, 19 bp, Homo sapiens
  siRNA target sequence for LOC340061 (NM_198282.1,1156-1174).
cccctgagtctcagaacaa

SEQ ID NO: 437585 - DNA, 19 bp, Homo sapiens
  siRNA target sequence for LOC340061 (NM_198282.1,1341-1359).
ctcatcagtggaatggaaa

SEQ ID NO: 437586 - DNA, 19 bp, Homo sapiens
  siRNA target sequence for LOC340061 (NM_198282.1,1368-1386).
cctctccgcacggatttct

SEQ ID NO: 437587 - DNA, 19 bp, Homo sapiens
  siRNA target sequence for EGFL11 (NM_198283.1,434-452).
gtttttcacagctctttca

SEQ ID NO: 437588 - DNA, 19 bp, Homo sapiens
  siRNA target sequence for EGFL11 (NM_198283.1,442-460).
cagctctttcataaatgga

SEQ ID NO: 437589 - DNA, 19 bp, Homo sapiens
  siRNA target sequence for EGFL11 (NM_198283.1,465-483).
catgtagacggcaattggt

SEQ ID NO: 437590 - DNA, 19 bp, Homo sapiens
  siRNA target sequence for EGFL11 (NM_198283.1,473-491).
cggcaattggtggaagaat

SEQ ID NO: 437591 - DNA, 19 bp, Homo sapiens
  siRNA target sequence for EGFL11 (NM_198283.1,494-512).
catccacaaccctcatcat

SEQ ID NO: 437592 - DNA, 19 bp, Homo sapiens
  siRNA target sequence for EGFL11 (NM_198283.1,498-516).
cacaaccctcatcatatgt

SEQ ID NO: 437593 - DNA, 19 bp, Homo sapiens
  siRNA target sequence for EGFL11 (NM_198283.1,515-533).
gtggtaaattggacactaa

SEQ ID NO: 437594 - DNA, 19 bp, Homo sapiens
  siRNA target sequence for EGFL11 (NM_198283.1,517-535).
ggtaaattggacactaaca

SEQ ID NO: 437595 - DNA, 19 bp, Homo sapiens
  siRNA target sequence for EGFL11 (NM_198283.1,525-543).
ggacactaacagaaaacat

SEQ ID NO: 437596 - DNA, 19 bp, Homo sapiens
  siRNA target sequence for EGFL11 (NM_198283.1,571-589).
gtttttgggtgtaaacact

SEQ ID NO: 437597 - DNA, 19 bp, Homo sapiens
  siRNA target sequence for EGFL11 (NM_198283.1,577-595).
gggtgtaaacactaaaata

SEQ ID NO: 437598 - DNA, 19 bp, Homo sapiens
  siRNA target sequence for EGFL11 (NM_198283.1,622-640).
ccagatttgccctttgcaa

SEQ ID NO: 437599 - DNA, 19 bp, Homo sapiens
  siRNA target sequence for EGFL11 (NM_198283.1,650-668).
ggagatatccttgtaattt

SEQ ID NO: 437600 - DNA, 19 bp, Homo sapiens
  siRNA target sequence for EGFL11 (NM_198283.1,731-749).
gttggctgtgtgcaaaata

SEQ ID NO: 437601 - DNA, 19 bp, Homo sapiens
  siRNA target sequence for EGFL11 (NM_198283.1,734-752).
ggctgtgtgcaaaatacca

SEQ ID NO: 437602 - DNA, 19 bp, Homo sapiens
  siRNA target sequence for EGFL11 (NM_198283.1,750-768).
ccacaacggaagatcagtt

SEQ ID NO: 437603 - DNA, 19 bp, Homo sapiens
  siRNA target sequence for EGFL11 (NM_198283.1,751-769).
cacaacggaagatcagtta

SEQ ID NO: 437604 - DNA, 19 bp, Homo sapiens
  siRNA target sequence for EGFL11 (NM_198283.1,756-774).
cggaagatcagttactttt

SEQ ID NO: 437605 - DNA, 19 bp, Homo sapiens
  siRNA target sequence for EGFL11 (NM_198283.1,757-775).
ggaagatcagttacttttt

SEQ ID NO: 437606 - DNA, 19 bp, Homo sapiens
  siRNA target sequence for EGFL11 (NM_198283.1,770-788).
ctttttggctgcagactaa

SEQ ID NO: 437607 - DNA, 19 bp, Homo sapiens
  siRNA target sequence for EGFL11 (NM_198283.1,777-795).
gctgcagactaaaaggaat

SEQ ID NO: 437608 - DNA, 19 bp, Homo sapiens
  siRNA target sequence for EGFL11 (NM_198283.1,820-838).
gagtgttgggacacattat

SEQ ID NO: 437609 - DNA, 19 bp, Homo sapiens
  siRNA target sequence for EGFL11 (NM_198283.1,822-840).
gtgttgggacacattattt

SEQ ID NO: 437610 - DNA, 19 bp, Homo sapiens
  siRNA target sequence for EGFL11 (NM_198283.1,824-842).
gttgggacacattatttta

SEQ ID NO: 437611 - DNA, 19 bp, Homo sapiens
  siRNA target sequence for EGFL11 (NM_198283.1,827-845).
gggacacattattttatca

SEQ ID NO: 437612 - DNA, 19 bp, Homo sapiens
  siRNA target sequence for EGFL11 (NM_198283.1,881-899).
ggacttcgactaaatgtga

SEQ ID NO: 437613 - DNA, 19 bp, Homo sapiens
  siRNA target sequence for EGFL11 (NM_198283.1,948-966).
ctggtcatggtaaatgtct

SEQ ID NO: 437614 - DNA, 19 bp, Homo sapiens
  siRNA target sequence for EGFL11 (NM_198283.1,950-968).
ggtcatggtaaatgtctta

SEQ ID NO: 437615 - DNA, 19 bp, Homo sapiens
  siRNA target sequence for EGFL11 (NM_198283.1,974-992).
gcttggagcaagacatata

SEQ ID NO: 437616 - DNA, 19 bp, Homo sapiens
  siRNA target sequence for EGFL11 (NM_198283.1,1034-1052).
gaacttgatgcatgttctt

SEQ ID NO: 437617 - DNA, 19 bp, Homo sapiens
  siRNA target sequence for EGFL11 (NM_198283.1,1101-1119).
gggatgagcaagcatatga

SEQ ID NO: 437618 - DNA, 19 bp, Homo sapiens
  siRNA target sequence for EGFL11 (NM_198283.1,1103-1121).
gatgagcaagcatatgaat

SEQ ID NO: 437619 - DNA, 19 bp, Homo sapiens
  siRNA target sequence for EGFL11 (NM_198283.1,1124-1142).
gtctgtcacccaccattta

SEQ ID NO: 437620 - DNA, 19 bp, Homo sapiens
  siRNA target sequence for EGFL11 (NM_198283.1,1126-1144).
ctgtcacccaccatttaca

SEQ ID NO: 437621 - DNA, 19 bp, Homo sapiens
  siRNA target sequence for EGFL11 (NM_198283.1,1276-1294).
gtcagcaaaaccttgtgtt

SEQ ID NO: 437622 - DNA, 19 bp, Homo sapiens
  siRNA target sequence for EGFL11 (NM_198283.1,1281-1299).
caaaaccttgtgtttctct

SEQ ID NO: 437623 - DNA, 19 bp, Homo sapiens
  siRNA target sequence for EGFL11 (NM_198283.1,1332-1350).
gcagttctgcttatactta

SEQ ID NO: 437624 - DNA, 19 bp, Homo sapiens
  siRNA target sequence for EGFL11 (NM_198283.1,1335-1353).
gttctgcttatacttatga

SEQ ID NO: 437625 - DNA, 19 bp, Homo sapiens
  siRNA target sequence for EGFL11 (NM_198283.1,1427-1445).
ggtactgactgcatcaaaa

SEQ ID NO: 437626 - DNA, 19 bp, Homo sapiens
  siRNA target sequence for EGFL11 (NM_198283.1,1437-1455).
gcatcaaaatatcaaatga

SEQ ID NO: 437627 - DNA, 19 bp, Homo sapiens
  siRNA target sequence for EGFL11 (NM_198283.1,1454-1472).
gatgttatgtgcatctgtt

SEQ ID NO: 437628 - DNA, 19 bp, Homo sapiens
  siRNA target sequence for EGFL11 (NM_198283.1,1493-1511).
ctttgtaagagcattcaaa

SEQ ID NO: 437629 - DNA, 19 bp, Homo sapiens
  siRNA target sequence for EGFL11 (NM_198283.1,1534-1552).
gaggaataatgctacatgt

SEQ ID NO: 437630 - DNA, 19 bp, Homo sapiens
  siRNA target sequence for EGFL11 (NM_198283.1,1536-1554).
ggaataatgctacatgtaa

SEQ ID NO: 437631 - DNA, 19 bp, Homo sapiens
  siRNA target sequence for EGFL11 (NM_198283.1,1582-1600).
ctgtatatcaggatttact

SEQ ID NO: 437632 - DNA, 19 bp, Homo sapiens
  siRNA target sequence for EGFL11 (NM_198283.1,1584-1602).
gtatatcaggatttactga

SEQ ID NO: 437633 - DNA, 19 bp, Homo sapiens
  siRNA target sequence for EGFL11 (NM_198283.1,1669-1687).
gtgtttcaatataattgga

SEQ ID NO: 437634 - DNA, 19 bp, Homo sapiens
  siRNA target sequence for EGFL11 (NM_198283.1,1705-1723).
cattccagggtgcacaaaa

SEQ ID NO: 437635 - DNA, 19 bp, Homo sapiens
  siRNA target sequence for EGFL11 (NM_198283.1,1731-1749).
gttggtttttgaagaatgt

SEQ ID NO: 437636 - DNA, 19 bp, Homo sapiens
  siRNA target sequence for EGFL11 (NM_198283.1,1741-1759).
gaagaatgtttacctaatt

SEQ ID NO: 437637 - DNA, 19 bp, Homo sapiens
  siRNA target sequence for EGFL11 (NM_198283.1,1744-1762).
gaatgtttacctaattcat

SEQ ID NO: 437638 - DNA, 19 bp, Homo sapiens
  siRNA target sequence for EGFL11 (NM_198283.1,1856-1874).
ggatctgaaggcgaaaagt

SEQ ID NO: 437639 - DNA, 19 bp, Homo sapiens
  siRNA target sequence for EGFL11 (NM_198283.1,1937-1955).
gtgaacgatcctgaagata

SEQ ID NO: 437640 - DNA, 19 bp, Homo sapiens
  siRNA target sequence for EGFL11 (NM_198283.1,1939-1957).
gaacgatcctgaagataat

SEQ ID NO: 437641 - DNA, 19 bp, Homo sapiens
  siRNA target sequence for EGFL11 (NM_198283.1,2014-2032).
cagttgtttgagtgaagaa

SEQ ID NO: 437642 - DNA, 19 bp, Homo sapiens
  siRNA target sequence for EGFL11 (NM_198283.1,2039-2057).
caggaatatcggtatctat

SEQ ID NO: 437643 - DNA, 19 bp, Homo sapiens
  siRNA target sequence for EGFL11 (NM_198283.1,2041-2059).
ggaatatcggtatctatgt

SEQ ID NO: 437644 - DNA, 19 bp, Homo sapiens
  siRNA target sequence for EGFL11 (NM_198283.1,2042-2060).
gaatatcggtatctatgtt

SEQ ID NO: 437645 - DNA, 19 bp, Homo sapiens
  siRNA target sequence for EGFL11 (NM_198283.1,2048-2066).
cggtatctatgttttctca

SEQ ID NO: 437646 - DNA, 19 bp, Homo sapiens
  siRNA target sequence for EGFL11 (NM_198283.1,2157-2175).
gacccaggtatttatgtat

SEQ ID NO: 437647 - DNA, 19 bp, Homo sapiens
  siRNA target sequence for LOC349136 (NM_198285.1,703-721).
cacacattcatcatcaact

SEQ ID NO: 437648 - DNA, 19 bp, Homo sapiens
  siRNA target sequence for LOC349136 (NM_198285.1,1033-1051).
gcaggcgtctggtttttct

SEQ ID NO: 437649 - DNA, 19 bp, Homo sapiens
  siRNA target sequence for TTC8 (NM_198310.1,502-520).
gctgggaacggctttgttt

SEQ ID NO: 437650 - DNA, 19 bp, Homo sapiens
  siRNA target sequence for HTR3E (NM_198313.1,182-200).
gcgtccccacccaagtcaa

SEQ ID NO: 437651 - DNA, 19 bp, Homo sapiens
  siRNA target sequence for HTR3E (NM_198313.1,187-205).
cccacccaagtcaacatct

SEQ ID NO: 437652 - DNA, 19 bp, Homo sapiens
  siRNA target sequence for LOC339451 (NM_198317.1,462-480).
gccatgttcacaaatgaga

SEQ ID NO: 437653 - DNA, 19 bp, Homo sapiens
  siRNA target sequence for LOC339451 (NM_198317.1,644-662).
cgcttgctgcaagtttcta

SEQ ID NO: 437654 - DNA, 19 bp, Homo sapiens
  siRNA target sequence for LOC339451 (NM_198317.1,646-664).
cttgctgcaagtttctact

SEQ ID NO: 437655 - DNA, 19 bp, Homo sapiens
  siRNA target sequence for LOC339451 (NM_198317.1,780-798).
gccaagaccgaggagttta

SEQ ID NO: 437656 - DNA, 19 bp, Homo sapiens
  siRNA target sequence for LOC339451 (NM_198317.1,781-799).
ccaagaccgaggagtttat

SEQ ID NO: 437657 - DNA, 19 bp, Homo sapiens
  siRNA target sequence for LOC339451 (NM_198317.1,927-945).
gtcccacggctcatgaagt

SEQ ID NO: 437658 - DNA, 19 bp, Homo sapiens
  siRNA target sequence for LOC339451 (NM_198317.1,1330-1348).
cctacgaccccgtgactaa

SEQ ID NO: 437659 - DNA, 19 bp, Homo sapiens
  siRNA target sequence for LOC339451 (NM_198317.1,1742-1760).
ctcggtagagagatacagt

SEQ ID NO: 437660 - DNA, 19 bp, Homo sapiens
  siRNA target sequence for GALNT10 (NM_198321.2,293-311).
gctcacacagtcgacaaaa

SEQ ID NO: 437661 - DNA, 19 bp, Homo sapiens
  siRNA target sequence for GALNT10 (NM_198321.2,302-320).
gtcgacaaaagaaaacgtt

SEQ ID NO: 437662 - DNA, 19 bp, Homo sapiens
  siRNA target sequence for GALNT10 (NM_198321.2,304-322).
cgacaaaagaaaacgtttt

SEQ ID NO: 437663 - DNA, 19 bp, Homo sapiens
  siRNA target sequence for GALNT10 (NM_198321.2,381-399).
cgctcagcgcgtaggaaat

SEQ ID NO: 437664 - DNA, 19 bp, Homo sapiens
  siRNA target sequence for GALNT10 (NM_198321.2,450-468).
ggcataccgagaaaatgga

SEQ ID NO: 437665 - DNA, 19 bp, Homo sapiens
  siRNA target sequence for GALNT10 (NM_198321.2,452-470).
cataccgagaaaatggatt

SEQ ID NO: 437666 - DNA, 19 bp, Homo sapiens
  siRNA target sequence for GALNT10 (NM_198321.2,474-492).
catctacgtcagtgataaa

SEQ ID NO: 437667 - DNA, 19 bp, Homo sapiens
  siRNA target sequence for GALNT10 (NM_198321.2,556-574).
gagacacttcccaacacaa

SEQ ID NO: 437668 - DNA, 19 bp, Homo sapiens
  siRNA target sequence for GALNT10 (NM_198321.2,566-584).
ccaacacaagcatcatcat

SEQ ID NO: 437669 - DNA, 19 bp, Homo sapiens
  siRNA target sequence for GALNT10 (NM_198321.2,657-675).
gctggtcgccgagattgta

SEQ ID NO: 437670 - DNA, 19 bp, Homo sapiens
  siRNA target sequence for GALNT10 (NM_198321.2,741-759).
ccccagtgtgaggattctt

SEQ ID NO: 437671 - DNA, 19 bp, Homo sapiens
  siRNA target sequence for GALNT10 (NM_198321.2,821-839).
gggatgtcatcacattctt

SEQ ID NO: 437672 - DNA, 19 bp, Homo sapiens
  siRNA target sequence for GALNT10 (NM_198321.2,912-930).
cattgtgtgcccgatgatt

SEQ ID NO: 437673 - DNA, 19 bp, Homo sapiens
  siRNA target sequence for GALNT10 (NM_198321.2,921-939).
cccgatgattgatgtaatt

SEQ ID NO: 437674 - DNA, 19 bp, Homo sapiens
  siRNA target sequence for GALNT10 (NM_198321.2,992-1010).
cctttgactgggagatgta

SEQ ID NO: 437675 - DNA, 19 bp, Homo sapiens
  siRNA target sequence for GALNT10 (NM_198321.2,1054-1072).
cccagcgacccatttgagt

SEQ ID NO: 437676 - DNA, 19 bp, Homo sapiens
  siRNA target sequence for GALNT10 (NM_198321.2,1159-1177).
ggaggggagcagtatgaaa

SEQ ID NO: 437677 - DNA, 19 bp, Homo sapiens
  siRNA target sequence for GALNT10 (NM_198321.2,1162-1180).
ggggagcagtatgaaatct

SEQ ID NO: 437678 - DNA, 19 bp, Homo sapiens
  siRNA target sequence for INPP5F (NM_198330.1,324-342).
ctactacgtggcctaatga

SEQ ID NO: 437679 - DNA, 19 bp, Homo sapiens
  siRNA target sequence for INPP5F (NM_198330.1,330-348).
cgtggcctaatgatgatga

SEQ ID NO: 437680 - DNA, 19 bp, Homo sapiens
  siRNA target sequence for KCTD8 (NM_198353.1,327-345).
cccattagcgagatggttt

SEQ ID NO: 437681 - DNA, 19 bp, Homo sapiens
  siRNA target sequence for KCTD8 (NM_198353.1,604-622).
ggtacgtgctggattatct

SEQ ID NO: 437682 - DNA, 19 bp, Homo sapiens
  siRNA target sequence for KCTD8 (NM_198353.1,1062-1080).
cggcagccggagaagtaca

SEQ ID NO: 437683 - DNA, 19 bp, Homo sapiens
  siRNA target sequence for KCTD8 (NM_198353.1,1109-1127).
cttggagcaggcctttgat

SEQ ID NO: 437684 - DNA, 19 bp, Homo sapiens
  siRNA target sequence for KCTD8 (NM_198353.1,1241-1259).
cttccgaccacctcagaaa

SEQ ID NO: 437685 - DNA, 19 bp, Homo sapiens
  siRNA target sequence for KCTD8 (NM_198353.1,1248-1266).
ccacctcagaaaatagtat

SEQ ID NO: 437686 - DNA, 19 bp, Homo sapiens
  siRNA target sequence for KCTD8 (NM_198353.1,1327-1345).
gtgggacttcctgtaatga

SEQ ID NO: 437687 - DNA, 19 bp, Homo sapiens
  siRNA target sequence for KCTD8 (NM_198353.1,1420-1438).
caacagctcaccaacctaa

SEQ ID NO: 437688 - DNA, 19 bp, Homo sapiens
  siRNA target sequence for KCTD8 (NM_198353.1,1425-1443).
gctcaccaacctaacactt

SEQ ID NO: 437689 - DNA, 19 bp, Homo sapiens
  siRNA target sequence for KCTD8 (NM_198353.1,1430-1448).
ccaacctaacactttaaca

SEQ ID NO: 437690 - DNA, 19 bp, Homo sapiens
  siRNA target sequence for KCTD8 (NM_198353.1,1431-1449).
caacctaacactttaacat

SEQ ID NO: 437691 - DNA, 19 bp, Homo sapiens
  siRNA target sequence for KCTD8 (NM_198353.1,1451-1469).
ggatcgcccctctaaaaaa

SEQ ID NO: 437692 - DNA, 19 bp, Homo sapiens
  siRNA target sequence for KCTD8 (NM_198353.1,1494-1512).
ccagacaaacgcagaaaca

SEQ ID NO: 437693 - DNA, 19 bp, Homo sapiens
  siRNA target sequence for KCTD8 (NM_198353.1,1537-1555).
gcaagtcccgggaaacaaa

SEQ ID NO: 437694 - DNA, 19 bp, Homo sapiens
  siRNA target sequence for KCTD8 (NM_198353.1,1678-1696).
ctgaactgttgcagaagta

SEQ ID NO: 437695 - DNA, 19 bp, Homo sapiens
  siRNA target sequence for CMIP (NM_198390.1,78-96).
gggctcttctgctttgcaa

SEQ ID NO: 437696 - DNA, 19 bp, Homo sapiens
  siRNA target sequence for LOC157567 (NM_198401.1,184-202).
cgtatgtttttgtaaatga

SEQ ID NO: 437697 - DNA, 19 bp, Homo sapiens
  siRNA target sequence for LOC157567 (NM_198401.1,247-265).
gggactttaattattccaa

SEQ ID NO: 437698 - DNA, 19 bp, Homo sapiens
  siRNA target sequence for LOC157567 (NM_198401.1,284-302).
ctttgacccaaatattcgt

SEQ ID NO: 437699 - DNA, 19 bp, Homo sapiens
  siRNA target sequence for LOC157567 (NM_198401.1,337-355).
cagctcgagggaatgtaga

SEQ ID NO: 437700 - DNA, 19 bp, Homo sapiens
  siRNA target sequence for LOC157567 (NM_198401.1,340-358).
ctcgagggaatgtagacat

SEQ ID NO: 437701 - DNA, 19 bp, Homo sapiens
  siRNA target sequence for LOC157567 (NM_198401.1,433-451).
gtggccatgtggatactat

SEQ ID NO: 437702 - DNA, 19 bp, Homo sapiens
  siRNA target sequence for LOC157567 (NM_198401.1,437-455).
ccatgtggatactatccaa

SEQ ID NO: 437703 - DNA, 19 bp, Homo sapiens
  siRNA target sequence for LOC157567 (NM_198401.1,438-456).
catgtggatactatccaat

SEQ ID NO: 437704 - DNA, 19 bp, Homo sapiens
  siRNA target sequence for LOC157567 (NM_198401.1,467-485).
caatggactcaaaattgat

SEQ ID NO: 437705 - DNA, 19 bp, Homo sapiens
  siRNA target sequence for LOC157567 (NM_198401.1,502-520).
gtgctacccctttagttct

SEQ ID NO: 437706 - DNA, 19 bp, Homo sapiens
  siRNA target sequence for LOC157567 (NM_198401.1,527-545).
gcgcagaggagtaaataaa

SEQ ID NO: 437707 - DNA, 19 bp, Homo sapiens
  siRNA target sequence for LOC157567 (NM_198401.1,751-769).
gcttctggagagtattgct

SEQ ID NO: 437708 - DNA, 19 bp, Homo sapiens
  siRNA target sequence for LOC157567 (NM_198401.1,794-812).
gtctcttggcattgcttat

SEQ ID NO: 437709 - DNA, 19 bp, Homo sapiens
  siRNA target sequence for PTPLB (NM_198402.1,168-186).
cggcgtacctggtcatcta

SEQ ID NO: 437710 - DNA, 19 bp, Homo sapiens
  siRNA target sequence for PTPLB (NM_198402.1,248-266).
gctaagggtagctaccata

SEQ ID NO: 437711 - DNA, 19 bp, Homo sapiens
  siRNA target sequence for PTPLB (NM_198402.1,258-276).
gctaccatagcctttatta

SEQ ID NO: 437712 - DNA, 19 bp, Homo sapiens
  siRNA target sequence for PTPLB (NM_198402.1,385-403).
gatgtcaagagtttttcta

SEQ ID NO: 437713 - DNA, 19 bp, Homo sapiens
  siRNA target sequence for PTPLB (NM_198402.1,388-406).
gtcaagagtttttctaata

SEQ ID NO: 437714 - DNA, 19 bp, Homo sapiens
  siRNA target sequence for PTPLB (NM_198402.1,454-472).
cctcctgtttgttattgca

SEQ ID NO: 437715 - DNA, 19 bp, Homo sapiens
  siRNA target sequence for PTPLB (NM_198402.1,530-548).
ctgccttacctcatcaaat

SEQ ID NO: 437716 - DNA, 19 bp, Homo sapiens
  siRNA target sequence for PTPLB (NM_198402.1,549-567).
gggccaggtacacactttt

SEQ ID NO: 437717 - DNA, 19 bp, Homo sapiens
  siRNA target sequence for PTPLB (NM_198402.1,594-612).
caggagaactgctcacaat

SEQ ID NO: 437718 - DNA, 19 bp, Homo sapiens
  siRNA target sequence for PTPLB (NM_198402.1,596-614).
ggagaactgctcacaatat

SEQ ID NO: 437719 - DNA, 19 bp, Homo sapiens
  siRNA target sequence for PTPLB (NM_198402.1,634-652).
cagacaagctggcctatat

SEQ ID NO: 437720 - DNA, 19 bp, Homo sapiens
  siRNA target sequence for PTPLB (NM_198402.1,638-656).
caagctggcctatattcca

SEQ ID NO: 437721 - DNA, 19 bp, Homo sapiens
  siRNA target sequence for PTPLB (NM_198402.1,644-662).
ggcctatattccatcagtt

SEQ ID NO: 437722 - DNA, 19 bp, Homo sapiens
  siRNA target sequence for PTPLB (NM_198402.1,645-663).
gcctatattccatcagttt

SEQ ID NO: 437723 - DNA, 19 bp, Homo sapiens
  siRNA target sequence for PTPLB (NM_198402.1,646-664).
cctatattccatcagttta

SEQ ID NO: 437724 - DNA, 19 bp, Homo sapiens
  siRNA target sequence for PTPLB (NM_198402.1,660-678).
gtttacccaacaaatacaa

SEQ ID NO: 437725 - DNA, 19 bp, Homo sapiens
  siRNA target sequence for PTPLB (NM_198402.1,704-722).
ctgattctaataatgatct

SEQ ID NO: 437726 - DNA, 19 bp, Homo sapiens
  siRNA target sequence for PTPLB (NM_198402.1,718-736).
gatctcctacattccaatt

SEQ ID NO: 437727 - DNA, 19 bp, Homo sapiens
  siRNA target sequence for PTPLB (NM_198402.1,745-763).
gttatacttccacatgata

SEQ ID NO: 437728 - DNA, 19 bp, Homo sapiens
  siRNA target sequence for PTPLB (NM_198402.1,786-804).
ctcatactgaagaacacaa

SEQ ID NO: 437729 - DNA, 19 bp, Homo sapiens
  siRNA target sequence for PTPLB (NM_198402.1,797-815).
gaacacaagaaatttgaat

SEQ ID NO: 437730 - DNA, 19 bp, Homo sapiens
  siRNA target sequence for KCTD4 (NM_198404.1,258-276).
cctcaacgttggtggatat

SEQ ID NO: 437731 - DNA, 19 bp, Homo sapiens
  siRNA target sequence for KCTD4 (NM_198404.1,259-277).
ctcaacgttggtggatatt

SEQ ID NO: 437732 - DNA, 19 bp, Homo sapiens
  siRNA target sequence for KCTD4 (NM_198404.1,272-290).
gatatttatacattactca

SEQ ID NO: 437733 - DNA, 19 bp, Homo sapiens
  siRNA target sequence for KCTD4 (NM_198404.1,305-323).
ccaagtacccagacacttt

SEQ ID NO: 437734 - DNA, 19 bp, Homo sapiens
  siRNA target sequence for KCTD4 (NM_198404.1,309-327).
gtacccagacactttcctt

SEQ ID NO: 437735 - DNA, 19 bp, Homo sapiens
  siRNA target sequence for KCTD4 (NM_198404.1,318-336).
cactttccttgaaggtata

SEQ ID NO: 437736 - DNA, 19 bp, Homo sapiens
  siRNA target sequence for KCTD4 (NM_198404.1,324-342).
ccttgaaggtatagtaaat

SEQ ID NO: 437737 - DNA, 19 bp, Homo sapiens
  siRNA target sequence for KCTD4 (NM_198404.1,367-385).
gctgatggtcattatttca

SEQ ID NO: 437738 - DNA, 19 bp, Homo sapiens
  siRNA target sequence for KCTD4 (NM_198404.1,417-435).
cctaaacttcctacgaaat

SEQ ID NO: 437739 - DNA, 19 bp, Homo sapiens
  siRNA target sequence for KCTD4 (NM_198404.1,426-444).
cctacgaaatggagaactt

SEQ ID NO: 437740 - DNA, 19 bp, Homo sapiens
  siRNA target sequence for KCTD4 (NM_198404.1,430-448).
cgaaatggagaacttctat

SEQ ID NO: 437741 - DNA, 19 bp, Homo sapiens
  siRNA target sequence for KCTD4 (NM_198404.1,458-476).
ggtttcgagaaaatcaact

SEQ ID NO: 437742 - DNA, 19 bp, Homo sapiens
  siRNA target sequence for KCTD4 (NM_198404.1,559-577).
cccagagagactactttct

SEQ ID NO: 437743 - DNA, 19 bp, Homo sapiens
  siRNA target sequence for KCTD4 (NM_198404.1,565-583).
gagactactttcttggaaa

SEQ ID NO: 437744 - DNA, 19 bp, Homo sapiens
  siRNA target sequence for KCTD4 (NM_198404.1,567-585).
gactactttcttggaaata

SEQ ID NO: 437745 - DNA, 19 bp, Homo sapiens
  siRNA target sequence for KCTD4 (NM_198404.1,597-615).
cgatcgttcacaaggatta

SEQ ID NO: 437746 - DNA, 19 bp, Homo sapiens
  siRNA target sequence for KCTD4 (NM_198404.1,598-616).
gatcgttcacaaggattaa

SEQ ID NO: 437747 - DNA, 19 bp, Homo sapiens
  siRNA target sequence for KCTD4 (NM_198404.1,601-619).
cgttcacaaggattaagaa

SEQ ID NO: 437748 - DNA, 19 bp, Homo sapiens
  siRNA target sequence for KCTD4 (NM_198404.1,610-628).
ggattaagaatcttctgta

SEQ ID NO: 437749 - DNA, 19 bp, Homo sapiens
  siRNA target sequence for KCTD4 (NM_198404.1,611-629).
gattaagaatcttctgtaa

SEQ ID NO: 437750 - DNA, 19 bp, Homo sapiens
  siRNA target sequence for KCTD4 (NM_198404.1,631-649).
gctcctgatttcatatcaa

SEQ ID NO: 437751 - DNA, 19 bp, Homo sapiens
  siRNA target sequence for KCTD4 (NM_198404.1,700-718).
ccagaggagttttcaatat

SEQ ID NO: 437752 - DNA, 19 bp, Homo sapiens
  siRNA target sequence for KCTD4 (NM_198404.1,708-726).
gttttcaatatcgtcaaat

SEQ ID NO: 437753 - DNA, 19 bp, Homo sapiens
  siRNA target sequence for KCTD4 (NM_198404.1,713-731).
caatatcgtcaaatatcat

SEQ ID NO: 437754 - DNA, 19 bp, Homo sapiens
  siRNA target sequence for KCTD4 (NM_198404.1,763-781).
ggcactcgacttgtactaa

SEQ ID NO: 437755 - DNA, 19 bp, Homo sapiens
  siRNA target sequence for KCTD4 (NM_198404.1,764-782).
gcactcgacttgtactaaa

SEQ ID NO: 437756 - DNA, 19 bp, Homo sapiens
  siRNA target sequence for KCTD4 (NM_198404.1,801-819).
ctgtaccttggaaactctt

SEQ ID NO: 437757 - DNA, 19 bp, Homo sapiens
  siRNA target sequence for KCTD4 (NM_198404.1,865-883).
ctgaccagcctggattgtt

SEQ ID NO: 437758 - DNA, 19 bp, Homo sapiens
  siRNA target sequence for KCTD4 (NM_198404.1,881-899).
gttccaaagggtcaattgt

SEQ ID NO: 437759 - DNA, 19 bp, Homo sapiens
  siRNA target sequence for KCTD4 (NM_198404.1,884-902).
ccaaagggtcaattgttca

SEQ ID NO: 437760 - DNA, 19 bp, Homo sapiens
  siRNA target sequence for FLJ43842 (NM_198440.1,564-582).
cgctgtctccagcttagta

SEQ ID NO: 437761 - DNA, 19 bp, Homo sapiens
  siRNA target sequence for FLJ43842 (NM_198440.1,565-583).
gctgtctccagcttagtat

SEQ ID NO: 437762 - DNA, 19 bp, Homo sapiens
  siRNA target sequence for FLJ43842 (NM_198440.1,570-588).
ctccagcttagtatgtgtt

SEQ ID NO: 437763 - DNA, 19 bp, Homo sapiens
  siRNA target sequence for FLJ43842 (NM_198440.1,615-633).
ggggtcagggctagatctt

SEQ ID NO: 437764 - DNA, 19 bp, Homo sapiens
  siRNA target sequence for FLJ43842 (NM_198440.1,636-654).
gtgctgtatgcaaaataca

SEQ ID NO: 437765 - DNA, 19 bp, Homo sapiens
  siRNA target sequence for FLJ43842 (NM_198440.1,755-773).
gcggtgggccatatctact

SEQ ID NO: 437766 - DNA, 19 bp, Homo sapiens
  siRNA target sequence for FLJ43842 (NM_198440.1,756-774).
cggtgggccatatctacta

SEQ ID NO: 437767 - DNA, 19 bp, Homo sapiens
  siRNA target sequence for FLJ43842 (NM_198440.1,962-980).
ctgcagaagaccccaatta

SEQ ID NO: 437768 - DNA, 19 bp, Homo sapiens
  siRNA target sequence for FLJ40296 (NM_198441.1,265-283).
gctccatggcccctaatca

SEQ ID NO: 437769 - DNA, 19 bp, Homo sapiens
  siRNA target sequence for FLJ40296 (NM_198441.1,266-284).
ctccatggcccctaatcaa

SEQ ID NO: 437770 - DNA, 19 bp, Homo sapiens
  siRNA target sequence for FLJ40296 (NM_198441.1,606-624).
cagggggaaccggaaatca

SEQ ID NO: 437771 - DNA, 19 bp, Homo sapiens
  siRNA target sequence for FLJ40296 (NM_198441.1,811-829).
gtgactcagcggttttaca

SEQ ID NO: 437772 - DNA, 19 bp, Homo sapiens
  siRNA target sequence for FLJ40296 (NM_198441.1,817-835).
cagcggttttacaagtcat

SEQ ID NO: 437773 - DNA, 19 bp, Homo sapiens
  siRNA target sequence for FLJ45651 (NM_198442.1,507-525).
ctacatcaccggtctatca

SEQ ID NO: 437774 - DNA, 19 bp, Homo sapiens
  siRNA target sequence for FLJ45651 (NM_198442.1,756-774).
cgagagaaatgaatgcaaa

SEQ ID NO: 437775 - DNA, 19 bp, Homo sapiens
  siRNA target sequence for FLJ45651 (NM_198442.1,837-855).
caatgtcaaggatgatgta

SEQ ID NO: 437776 - DNA, 19 bp, Homo sapiens
  siRNA target sequence for FLJ45651 (NM_198442.1,1066-1084).
cacacctcggaggagtttt

SEQ ID NO: 437777 - DNA, 19 bp, Homo sapiens
  siRNA target sequence for FLJ45651 (NM_198442.1,1070-1088).
cctcggaggagtttttcca

SEQ ID NO: 437778 - DNA, 19 bp, Homo sapiens
  siRNA target sequence for FLJ45651 (NM_198442.1,1192-1210).
gggtcatggctgtccaatt

SEQ ID NO: 437779 - DNA, 19 bp, Homo sapiens
  siRNA target sequence for FLJ45651 (NM_198442.1,1194-1212).
gtcatggctgtccaattct

SEQ ID NO: 437780 - DNA, 19 bp, Homo sapiens
  siRNA target sequence for FLJ45651 (NM_198442.1,1383-1401).
gctggacactgcgttcttt

SEQ ID NO: 437781 - DNA, 19 bp, Homo sapiens
  siRNA target sequence for FLJ45651 (NM_198442.1,1472-1490).
gtgctgggtcccagacaaa

SEQ ID NO: 437782 - DNA, 19 bp, Homo sapiens
  siRNA target sequence for FLJ45651 (NM_198442.1,1485-1503).
gacaaagcccctgaaacaa

SEQ ID NO: 437783 - DNA, 19 bp, Homo sapiens
  siRNA target sequence for FLJ45651 (NM_198442.1,1548-1566).
cgagctgccagatgagaat

SEQ ID NO: 437784 - DNA, 19 bp, Homo sapiens
  siRNA target sequence for FLJ45651 (NM_198442.1,1615-1633).
gcccccatcgtgactttct

SEQ ID NO: 437785 - DNA, 19 bp, Homo sapiens
  siRNA target sequence for FLJ45651 (NM_198442.1,1637-1655).
cactcatcaatgacacttt

SEQ ID NO: 437786 - DNA, 19 bp, Homo sapiens
  siRNA target sequence for FLJ45651 (NM_198442.1,1648-1666).
gacactttccgaaaataca

SEQ ID NO: 437787 - DNA, 19 bp, Homo sapiens
  siRNA target sequence for FLJ45651 (NM_198442.1,1707-1725).
gggccaggtggacatttat

SEQ ID NO: 437788 - DNA, 19 bp, Homo sapiens
  siRNA target sequence for FLJ45651 (NM_198442.1,1710-1728).
ccaggtggacatttatggt

SEQ ID NO: 437789 - DNA, 19 bp, Homo sapiens
  siRNA target sequence for FLJ45651 (NM_198442.1,1719-1737).
catttatggtcccaaaact

SEQ ID NO: 437790 - DNA, 19 bp, Homo sapiens
  siRNA target sequence for FLJ45651 (NM_198442.1,1766-1784).
cagaggccacctttgacaa

SEQ ID NO: 437791 - DNA, 19 bp, Homo sapiens
  siRNA target sequence for UNQ2446 (NM_198443.1,95-113).
gctgcccctcgtcctttta

SEQ ID NO: 437792 - DNA, 19 bp, Homo sapiens
  siRNA target sequence for UNQ2446 (NM_198443.1,148-166).
gatgtgacaccatatacca

SEQ ID NO: 437793 - DNA, 19 bp, Homo sapiens
  siRNA target sequence for UNQ2446 (NM_198443.1,400-418).
gcacaggctccgaaaccaa

SEQ ID NO: 437794 - DNA, 19 bp, Homo sapiens
  siRNA target sequence for UNQ9366 (NM_198444.1,381-399).
caatgccaacccacttgat

SEQ ID NO: 437795 - DNA, 19 bp, Homo sapiens
  siRNA target sequence for UNQ9366 (NM_198444.1,552-570).
cactaaggacgtcaacatt

SEQ ID NO: 437796 - DNA, 19 bp, Homo sapiens
  siRNA target sequence for UNQ9366 (NM_198444.1,672-690).
ggactcagggacttaccaa

SEQ ID NO: 437797 - DNA, 19 bp, Homo sapiens
  siRNA target sequence for UNQ9366 (NM_198444.1,673-691).
gactcagggacttaccaat

SEQ ID NO: 437798 - DNA, 19 bp, Homo sapiens
  siRNA target sequence for UNQ9366 (NM_198444.1,754-772).
ggtcctgatcctgttgaaa

SEQ ID NO: 437799 - DNA, 19 bp, Homo sapiens
  siRNA target sequence for UNQ9366 (NM_198444.1,760-778).
gatcctgttgaaatcaaat

SEQ ID NO: 437800 - DNA, 19 bp, Homo sapiens
  siRNA target sequence for UNQ9366 (NM_198444.1,836-854).
ccttcttagcggaaacaaa

SEQ ID NO: 437801 - DNA, 19 bp, Homo sapiens
  siRNA target sequence for UNQ9366 (NM_198444.1,867-885).
ctgtgcctatacttggttt

SEQ ID NO: 437802 - DNA, 19 bp, Homo sapiens
  siRNA target sequence for UNQ9366 (NM_198444.1,1014-1032).
gaaggtccgagtacttgaa

SEQ ID NO: 437803 - DNA, 19 bp, Homo sapiens
  siRNA target sequence for UNQ9366 (NM_198444.1,1017-1035).
ggtccgagtacttgaaaca

SEQ ID NO: 437804 - DNA, 19 bp, Homo sapiens
  siRNA target sequence for UNQ9366 (NM_198444.1,1103-1121).
cctgccaaaccgtcaatca

SEQ ID NO: 437805 - DNA, 19 bp, Homo sapiens
  siRNA target sequence for UNQ9366 (NM_198444.1,1216-1234).
ggcctccagcggaatgaca

SEQ ID NO: 437806 - DNA, 19 bp, Homo sapiens
  siRNA target sequence for UNQ9366 (NM_198444.1,1431-1449).
gtatcgctggactcttgaa

SEQ ID NO: 437807 - DNA, 19 bp, Homo sapiens
  siRNA target sequence for UNQ9366 (NM_198444.1,1471-1489).
ggtgagcagctgattatca

SEQ ID NO: 437808 - DNA, 19 bp, Homo sapiens
  siRNA target sequence for UNQ9366 (NM_198444.1,1504-1522).
gaacacgacgggatctaca

SEQ ID NO: 437809 - DNA, 19 bp, Homo sapiens
  siRNA target sequence for UNQ9366 (NM_198444.1,1507-1525).
cacgacgggatctacaact

SEQ ID NO: 437810 - DNA, 19 bp, Homo sapiens
  siRNA target sequence for UNQ9366 (NM_198444.1,1838-1856).
ggatcagagtcgaactgat

SEQ ID NO: 437811 - DNA, 19 bp, Homo sapiens
  siRNA target sequence for UNQ9366 (NM_198444.1,1910-1928).
gccgtagaggcaattcttt

SEQ ID NO: 437812 - DNA, 19 bp, Homo sapiens
  siRNA target sequence for UNQ9366 (NM_198444.1,1912-1930).
cgtagaggcaattctttca

SEQ ID NO: 437813 - DNA, 19 bp, Homo sapiens
  siRNA target sequence for FLJ45909 (NM_198445.1,534-552).
cagggaaggtgctttccat

SEQ ID NO: 437814 - DNA, 19 bp, Homo sapiens
  siRNA target sequence for FLJ45909 (NM_198445.1,893-911).
gtgcgcatcgcctcagatt

SEQ ID NO: 437815 - DNA, 19 bp, Homo sapiens
  siRNA target sequence for FLJ45909 (NM_198445.1,895-913).
gcgcatcgcctcagattct

SEQ ID NO: 437816 - DNA, 19 bp, Homo sapiens
  siRNA target sequence for FLJ45909 (NM_198445.1,1462-1480).
gcagctggacgtagagttt

SEQ ID NO: 437817 - DNA, 19 bp, Homo sapiens
  siRNA target sequence for FLJ45909 (NM_198445.1,1465-1483).
gctggacgtagagtttctt

SEQ ID NO: 437818 - DNA, 19 bp, Homo sapiens
  siRNA target sequence for FLJ45909 (NM_198445.1,1466-1484).
ctggacgtagagtttctta

SEQ ID NO: 437819 - DNA, 19 bp, Homo sapiens
  siRNA target sequence for FLJ45909 (NM_198445.1,1647-1665).
ggcggacgctgcacagaaa

SEQ ID NO: 437820 - DNA, 19 bp, Homo sapiens
  siRNA target sequence for FLJ45459 (NM_198446.1,392-410).
ccagaggcggctttccaaa

SEQ ID NO: 437821 - DNA, 19 bp, Homo sapiens
  siRNA target sequence for FLJ42654 (NM_198447.1,198-216).
caccgaatggcagaagatt

SEQ ID NO: 437822 - DNA, 19 bp, Homo sapiens
  siRNA target sequence for FLJ42654 (NM_198447.1,260-278).
gaacactcctgtactttga

SEQ ID NO: 437823 - DNA, 19 bp, Homo sapiens
  siRNA target sequence for FLJ42654 (NM_198447.1,454-472).
gaaacctacggattcttca

SEQ ID NO: 437824 - DNA, 19 bp, Homo sapiens
  siRNA target sequence for FLJ42654 (NM_198447.1,546-564).
gctgttccggagacttcaa

SEQ ID NO: 437825 - DNA, 19 bp, Homo sapiens
  siRNA target sequence for MGC71745 (NM_198449.1,383-401).
ccttggagagtcataacat

SEQ ID NO: 437826 - DNA, 19 bp, Homo sapiens
  siRNA target sequence for MGC71745 (NM_198449.1,384-402).
cttggagagtcataacata

SEQ ID NO: 437827 - DNA, 19 bp, Homo sapiens
  siRNA target sequence for MGC71745 (NM_198449.1,399-417).
catatcactgactgaacat

SEQ ID NO: 437828 - DNA, 19 bp, Homo sapiens
  siRNA target sequence for MGC71745 (NM_198449.1,406-424).
ctgactgaacattctagta

SEQ ID NO: 437829 - DNA, 19 bp, Homo sapiens
  siRNA target sequence for UNQ8193 (NM_198450.1,22-40).
ccatcaggatgggaaaact

SEQ ID NO: 437830 - DNA, 19 bp, Homo sapiens
  siRNA target sequence for UNQ8193 (NM_198450.1,47-65).
catgcctgcaggtctgata

SEQ ID NO: 437831 - DNA, 19 bp, Homo sapiens
  siRNA target sequence for UNQ8193 (NM_198450.1,54-72).
gcaggtctgatatatgcat

SEQ ID NO: 437832 - DNA, 19 bp, Homo sapiens
  siRNA target sequence for UNQ8193 (NM_198450.1,62-80).
gatatatgcatctgtaagt

SEQ ID NO: 437833 - DNA, 19 bp, Homo sapiens
  siRNA target sequence for UNQ8193 (NM_198450.1,91-109).
ccaaacaagaggaatccaa

SEQ ID NO: 437834 - DNA, 19 bp, Homo sapiens
  siRNA target sequence for UNQ8193 (NM_198450.1,127-145).
cagagcagctccccatata

SEQ ID NO: 437835 - DNA, 19 bp, Homo sapiens
  siRNA target sequence for UNQ8193 (NM_198450.1,129-147).
gagcagctccccatatata

SEQ ID NO: 437836 - DNA, 19 bp, Homo sapiens
  siRNA target sequence for UNQ8193 (NM_198450.1,131-149).
gcagctccccatatatact

SEQ ID NO: 437837 - DNA, 19 bp, Homo sapiens
  siRNA target sequence for UNQ8193 (NM_198450.1,157-175).
cgctccagtctaaatatgt

SEQ ID NO: 437838 - DNA, 19 bp, Homo sapiens
  siRNA target sequence for UNQ8193 (NM_198450.1,158-176).
gctccagtctaaatatgtt

SEQ ID NO: 437839 - DNA, 19 bp, Homo sapiens
  siRNA target sequence for UNQ8193 (NM_198450.1,182-200).
gcagcctggtcatttacaa

SEQ ID NO: 437840 - DNA, 19 bp, Homo sapiens
  siRNA target sequence for UNQ8193 (NM_198450.1,220-238).
gcactgcaactggttgtta

SEQ ID NO: 437841 - DNA, 19 bp, Homo sapiens
  siRNA target sequence for UNQ8193 (NM_198450.1,223-241).
ctgcaactggttgttacat

SEQ ID NO: 437842 - DNA, 19 bp, Homo sapiens
  siRNA target sequence for UNQ8193 (NM_198450.1,244-262).
gctggtgcaagggtgttta

SEQ ID NO: 437843 - DNA, 19 bp, Homo sapiens
  siRNA target sequence for UNQ8193 (NM_198450.1,245-263).
ctggtgcaagggtgtttat

SEQ ID NO: 437844 - DNA, 19 bp, Homo sapiens
  siRNA target sequence for UNQ8193 (NM_198450.1,247-265).
ggtgcaagggtgtttatgt

SEQ ID NO: 437845 - DNA, 19 bp, Homo sapiens
  siRNA target sequence for UNQ8193 (NM_198450.1,303-321).
ggaaaagatgcttatgtct

SEQ ID NO: 437846 - DNA, 19 bp, Homo sapiens
  siRNA target sequence for UNQ8193 (NM_198450.1,309-327).
gatgcttatgtctatctga

SEQ ID NO: 437847 - DNA, 19 bp, Homo sapiens
  siRNA target sequence for UNQ8193 (NM_198450.1,473-491).
cccagttcagtccgtaata

SEQ ID NO: 437848 - DNA, 19 bp, Homo sapiens
  siRNA target sequence for UNQ8193 (NM_198450.1,474-492).
ccagttcagtccgtaataa

SEQ ID NO: 437849 - DNA, 19 bp, Homo sapiens
  siRNA target sequence for UNQ8193 (NM_198450.1,475-493).
cagttcagtccgtaataat

SEQ ID NO: 437850 - DNA, 19 bp, Homo sapiens
  siRNA target sequence for UNQ8193 (NM_198450.1,480-498).
cagtccgtaataattgcta

SEQ ID NO: 437851 - DNA, 19 bp, Homo sapiens
  siRNA target sequence for UNQ8193 (NM_198450.1,582-600).
gagtcactccctaaaccta

SEQ ID NO: 437852 - DNA, 19 bp, Homo sapiens
  siRNA target sequence for UNQ8193 (NM_198450.1,584-602).
gtcactccctaaacctaaa

SEQ ID NO: 437853 - DNA, 19 bp, Homo sapiens
  siRNA target sequence for UNQ8193 (NM_198450.1,586-604).
cactccctaaacctaaaga

SEQ ID NO: 437854 - DNA, 19 bp, Homo sapiens
  siRNA target sequence for UNQ8193 (NM_198450.1,619-637).
gatcctcttccgaaataga

SEQ ID NO: 437855 - DNA, 19 bp, Homo sapiens
  siRNA target sequence for UNQ8193 (NM_198450.1,622-640).
cctcttccgaaatagaagt

SEQ ID NO: 437856 - DNA, 19 bp, Homo sapiens
  siRNA target sequence for UNQ8193 (NM_198450.1,623-641).
ctcttccgaaatagaagta

SEQ ID NO: 437857 - DNA, 19 bp, Homo sapiens
  siRNA target sequence for UNQ8193 (NM_198450.1,779-797).
gtcccacccagaagatata

SEQ ID NO: 437858 - DNA, 19 bp, Homo sapiens
  siRNA target sequence for UNQ8193 (NM_198450.1,789-807).
gaagatatagatatgtaca

SEQ ID NO: 437859 - DNA, 19 bp, Homo sapiens
  siRNA target sequence for UNQ8193 (NM_198450.1,798-816).
gatatgtacagcactagaa

SEQ ID NO: 437860 - DNA, 19 bp, Homo sapiens
  siRNA target sequence for MGC21658 (NM_198451.1,398-416).
ggacatgaggaatgagtta

SEQ ID NO: 437861 - DNA, 19 bp, Homo sapiens
  siRNA target sequence for MGC21658 (NM_198451.1,401-419).
catgaggaatgagttattt

SEQ ID NO: 437862 - DNA, 19 bp, Homo sapiens
  siRNA target sequence for MGC21658 (NM_198451.1,442-460).
gctctttagctgagcaaat

SEQ ID NO: 437863 - DNA, 19 bp, Homo sapiens
  siRNA target sequence for MGC21658 (NM_198451.1,543-561).
ccctgtgaacccaatctgt

SEQ ID NO: 437864 - DNA, 19 bp, Homo sapiens
  siRNA target sequence for MGC21658 (NM_198451.1,825-843).
ctccagtcccctgaaatga

SEQ ID NO: 437865 - DNA, 19 bp, Homo sapiens
  siRNA target sequence for MGC21658 (NM_198451.1,911-929).
caattgtagccaccttatt

SEQ ID NO: 437866 - DNA, 19 bp, Homo sapiens
  siRNA target sequence for MGC21658 (NM_198451.1,1031-1049).
ctggaagagcaccattcat

SEQ ID NO: 437867 - DNA, 19 bp, Homo sapiens
  siRNA target sequence for MGC21658 (NM_198451.1,1033-1051).
ggaagagcaccattcatta

SEQ ID NO: 437868 - DNA, 19 bp, Homo sapiens
  siRNA target sequence for MGC21658 (NM_198451.1,1093-1111).
gccttaaggatgaagataa

SEQ ID NO: 437869 - DNA, 19 bp, Homo sapiens
  siRNA target sequence for MGC21658 (NM_198451.1,1169-1187).
ggaggagactcgtgtctta

SEQ ID NO: 437870 - DNA, 19 bp, Homo sapiens
  siRNA target sequence for KR-ZNF1 (NM_198457.1,1296-1314).
ctcagctggcaagacataa

SEQ ID NO: 437871 - DNA, 19 bp, Homo sapiens
  siRNA target sequence for KR-ZNF1 (NM_198457.1,1466-1484).
cacctggtaagacatacta

SEQ ID NO: 437872 - DNA, 19 bp, Homo sapiens
  siRNA target sequence for ZNF497 (NM_198458.1,872-890).
gctggaactccaatttcct

SEQ ID NO: 437873 - DNA, 19 bp, Homo sapiens
  siRNA target sequence for ZNF497 (NM_198458.1,1546-1564).
cgcaagtcggagctcttaa

SEQ ID NO: 437874 - DNA, 19 bp, Homo sapiens
  siRNA target sequence for FLJ37099 (NM_198459.1,465-483).
ggaaggaagggctaatggt

SEQ ID NO: 437875 - DNA, 19 bp, Homo sapiens
  siRNA target sequence for FLJ37099 (NM_198459.1,466-484).
gaaggaagggctaatggta

SEQ ID NO: 437876 - DNA, 19 bp, Homo sapiens
  siRNA target sequence for FLJ37099 (NM_198459.1,469-487).
ggaagggctaatggtatat

SEQ ID NO: 437877 - DNA, 19 bp, Homo sapiens
  siRNA target sequence for FLJ37099 (NM_198459.1,513-531).
ggactttggagtgagatat

SEQ ID NO: 437878 - DNA, 19 bp, Homo sapiens
  siRNA target sequence for FLJ37099 (NM_198459.1,546-564).
gatccgtcttaagaaaaat

SEQ ID NO: 437879 - DNA, 19 bp, Homo sapiens
  siRNA target sequence for FLJ37099 (NM_198459.1,550-568).
cgtcttaagaaaaatccta

SEQ ID NO: 437880 - DNA, 19 bp, Homo sapiens
  siRNA target sequence for FLJ37099 (NM_198459.1,551-569).
gtcttaagaaaaatcctat

SEQ ID NO: 437881 - DNA, 19 bp, Homo sapiens
  siRNA target sequence for FLJ37099 (NM_198459.1,565-583).
cctatagctgagagaaaga

SEQ ID NO: 437882 - DNA, 19 bp, Homo sapiens
  siRNA target sequence for FLJ37099 (NM_198459.1,610-628).
gaaaatgtgggtctagata

SEQ ID NO: 437883 - DNA, 19 bp, Homo sapiens
  siRNA target sequence for FLJ37099 (NM_198459.1,618-636).
gggtctagatataaatgaa

SEQ ID NO: 437884 - DNA, 19 bp, Homo sapiens
  siRNA target sequence for FLJ37099 (NM_198459.1,690-708).
cgatacacacttctttaaa

SEQ ID NO: 437885 - DNA, 19 bp, Homo sapiens
  siRNA target sequence for FLJ37099 (NM_198459.1,734-752).
gttctcgggtcaaagaaat

SEQ ID NO: 437886 - DNA, 19 bp, Homo sapiens
  siRNA target sequence for FLJ37099 (NM_198459.1,850-868).
cccccagataaactcttaa

SEQ ID NO: 437887 - DNA, 19 bp, Homo sapiens
  siRNA target sequence for FLJ37099 (NM_198459.1,915-933).
cagagttctggatagttca

SEQ ID NO: 437888 - DNA, 19 bp, Homo sapiens
  siRNA target sequence for FLJ37099 (NM_198459.1,917-935).
gagttctggatagttcata

SEQ ID NO: 437889 - DNA, 19 bp, Homo sapiens
  siRNA target sequence for FLJ37099 (NM_198459.1,929-947).
gttcatacggaataaccaa

SEQ ID NO: 437890 - DNA, 19 bp, Homo sapiens
  siRNA target sequence for FLJ37099 (NM_198459.1,985-1003).
gaatgtggaccttccataa

SEQ ID NO: 437891 - DNA, 19 bp, Homo sapiens
  siRNA target sequence for FLJ37099 (NM_198459.1,1018-1036).
cctcgtaggacattcagat

SEQ ID NO: 437892 - DNA, 19 bp, Homo sapiens
  siRNA target sequence for FLJ37099 (NM_198459.1,1049-1067).
ctggtgttacgccgtataa

SEQ ID NO: 437893 - DNA, 19 bp, Homo sapiens
  siRNA target sequence for FLJ37099 (NM_198459.1,1054-1072).
gttacgccgtataaagaaa

SEQ ID NO: 437894 - DNA, 19 bp, Homo sapiens
  siRNA target sequence for FLJ37099 (NM_198459.1,1106-1124).
cttgtgcacaatcttcttt

SEQ ID NO: 437895 - DNA, 19 bp, Homo sapiens
  siRNA target sequence for DKFZp686G0786 (NM_198460.1,159-177).
ggtgaaccagcaagctata

SEQ ID NO: 437896 - DNA, 19 bp, Homo sapiens
  siRNA target sequence for DKFZp686G0786 (NM_198460.1,165-183).
ccagcaagctatacagatt

SEQ ID NO: 437897 - DNA, 19 bp, Homo sapiens
  siRNA target sequence for DKFZp686G0786 (NM_198460.1,528-546).
gacggagctcacagaacta

SEQ ID NO: 437898 - DNA, 19 bp, Homo sapiens
  siRNA target sequence for DKFZp686G0786 (NM_198460.1,530-548).
cggagctcacagaactaat

SEQ ID NO: 437899 - DNA, 19 bp, Homo sapiens
  siRNA target sequence for DKFZp686G0786 (NM_198460.1,532-550).
gagctcacagaactaatta

SEQ ID NO: 437900 - DNA, 19 bp, Homo sapiens
  siRNA target sequence for DKFZp686G0786 (NM_198460.1,586-604).
gattccacagagtttgtga

SEQ ID NO: 437901 - DNA, 19 bp, Homo sapiens
  siRNA target sequence for DKFZp686G0786 (NM_198460.1,627-645).
gacagtacgggatttcact

SEQ ID NO: 437902 - DNA, 19 bp, Homo sapiens
  siRNA target sequence for DKFZp686G0786 (NM_198460.1,660-678).
gaacggtcaccctatcaca

SEQ ID NO: 437903 - DNA, 19 bp, Homo sapiens
  siRNA target sequence for DKFZp686G0786 (NM_198460.1,971-989).
gaactctggcagtgactta

SEQ ID NO: 437904 - DNA, 19 bp, Homo sapiens
  siRNA target sequence for DKFZp686G0786 (NM_198460.1,1284-1302).
gaatgaagagtcatctgtt

SEQ ID NO: 437905 - DNA, 19 bp, Homo sapiens
  siRNA target sequence for DKFZp686G0786 (NM_198460.1,1288-1306).
gaagagtcatctgttcaat

SEQ ID NO: 437906 - DNA, 19 bp, Homo sapiens
  siRNA target sequence for DKFZp686G0786 (NM_198460.1,1308-1326).
ctgccaggctaaactcaat

SEQ ID NO: 437907 - DNA, 19 bp, Homo sapiens
  siRNA target sequence for DKFZp686G0786 (NM_198460.1,1339-1357).
ggactaatggaaagtatct

SEQ ID NO: 437908 - DNA, 19 bp, Homo sapiens
  siRNA target sequence for DKFZp686G0786 (NM_198460.1,1352-1370).
gtatctcagcaggaagttt

SEQ ID NO: 437909 - DNA, 19 bp, Homo sapiens
  siRNA target sequence for DKFZp686G0786 (NM_198460.1,1382-1400).
gagggcacaagctctacat

SEQ ID NO: 437910 - DNA, 19 bp, Homo sapiens
  siRNA target sequence for DKFZp686G0786 (NM_198460.1,1401-1419).
ggaaacaaaggaaaggatt

SEQ ID NO: 437911 - DNA, 19 bp, Homo sapiens
  siRNA target sequence for DKFZp686G0786 (NM_198460.1,1525-1543).
gataaagccctcactgata

SEQ ID NO: 437912 - DNA, 19 bp, Homo sapiens
  siRNA target sequence for DKFZp686G0786 (NM_198460.1,1656-1674).
gagtcgcaaggaaaacata

SEQ ID NO: 437913 - DNA, 19 bp, Homo sapiens
  siRNA target sequence for DKFZp686G0786 (NM_198460.1,1815-1833).
gataagtcaatttaaacgt

SEQ ID NO: 437914 - DNA, 19 bp, Homo sapiens
  siRNA target sequence for DKFZp686G0786 (NM_198460.1,1820-1838).
gtcaatttaaacgtatgat

SEQ ID NO: 437915 - DNA, 19 bp, Homo sapiens
  siRNA target sequence for DKFZp686G0786 (NM_198460.1,1831-1849).
cgtatgattgatactacaa

SEQ ID NO: 437916 - DNA, 19 bp, Homo sapiens
  siRNA target sequence for DKFZp686G0786 (NM_198460.1,1832-1850).
gtatgattgatactacaaa

SEQ ID NO: 437917 - DNA, 19 bp, Homo sapiens
  siRNA target sequence for DKFZp686G0786 (NM_198460.1,1896-1914).
cgatgagctaactgcaata

SEQ ID NO: 437918 - DNA, 19 bp, Homo sapiens
  siRNA target sequence for DKFZp686G0786 (NM_198460.1,1897-1915).
gatgagctaactgcaatat

SEQ ID NO: 437919 - DNA, 19 bp, Homo sapiens
  siRNA target sequence for FLJ45273 (NM_198461.1,106-124).
gtgcagcttgtcagaatga

SEQ ID NO: 437920 - DNA, 19 bp, Homo sapiens
  siRNA target sequence for FLJ45273 (NM_198461.1,131-149).
cttgattaagggacatcaa

SEQ ID NO: 437921 - DNA, 19 bp, Homo sapiens
  siRNA target sequence for FLJ45273 (NM_198461.1,181-199).
gaagtaaggaagtgttaaa

SEQ ID NO: 437922 - DNA, 19 bp, Homo sapiens
  siRNA target sequence for FLJ45273 (NM_198461.1,209-227).
ctactgccttgctctgaat

SEQ ID NO: 437923 - DNA, 19 bp, Homo sapiens
  siRNA target sequence for FLJ45273 (NM_198461.1,224-242).
gaatcctgaatgtaactct

SEQ ID NO: 437924 - DNA, 19 bp, Homo sapiens
  siRNA target sequence for FLJ45273 (NM_198461.1,252-270).
gaagcacagaaggtaatgt

SEQ ID NO: 437925 - DNA, 19 bp, Homo sapiens
  siRNA target sequence for FLJ45273 (NM_198461.1,300-318).
gtgcatgaaaatttaacat

SEQ ID NO: 437926 - DNA, 19 bp, Homo sapiens
  siRNA target sequence for FLJ45273 (NM_198461.1,426-444).
gatatgcttggaaatacca

SEQ ID NO: 437927 - DNA, 19 bp, Homo sapiens
  siRNA target sequence for FLJ45273 (NM_198461.1,443-461).
caattcttcagttttgtat

SEQ ID NO: 437928 - DNA, 19 bp, Homo sapiens
  siRNA target sequence for FLJ45273 (NM_198461.1,488-506).
ggataaaaaggcgttagaa

SEQ ID NO: 437929 - DNA, 19 bp, Homo sapiens
  siRNA target sequence for FLJ45273 (NM_198461.1,489-507).
gataaaaaggcgttagaaa

SEQ ID NO: 437930 - DNA, 19 bp, Homo sapiens
  siRNA target sequence for FLJ45273 (NM_198461.1,581-599).
gaacgcccctggaaaaatt

SEQ ID NO: 437931 - DNA, 19 bp, Homo sapiens
  siRNA target sequence for FLJ45273 (NM_198461.1,656-674).
ggggctctcgcttgatgta

SEQ ID NO: 437932 - DNA, 19 bp, Homo sapiens
  siRNA target sequence for FLJ45273 (NM_198461.1,657-675).
gggctctcgcttgatgtaa

SEQ ID NO: 437933 - DNA, 19 bp, Homo sapiens
  siRNA target sequence for FLJ45273 (NM_198461.1,659-677).
gctctcgcttgatgtaact

SEQ ID NO: 437934 - DNA, 19 bp, Homo sapiens
  siRNA target sequence for FLJ45273 (NM_198461.1,669-687).
gatgtaactgactttgagt

SEQ ID NO: 437935 - DNA, 19 bp, Homo sapiens
  siRNA target sequence for FLJ45273 (NM_198461.1,688-706).
gtgccctctgcatgagatt

SEQ ID NO: 437936 - DNA, 19 bp, Homo sapiens
  siRNA target sequence for FLJ45273 (NM_198461.1,697-715).
gcatgagattgctctttga

SEQ ID NO: 437937 - DNA, 19 bp, Homo sapiens
  siRNA target sequence for FLJ45273 (NM_198461.1,790-808).
gtcctttgtgcaaagacaa

SEQ ID NO: 437938 - DNA, 19 bp, Homo sapiens
  siRNA target sequence for FLJ45273 (NM_198461.1,804-822).
gacaaactttcggaattat

SEQ ID NO: 437939 - DNA, 19 bp, Homo sapiens
  siRNA target sequence for FLJ45273 (NM_198461.1,826-844).
caagcagaaactttaacat

SEQ ID NO: 437940 - DNA, 19 bp, Homo sapiens
  siRNA target sequence for FLJ45273 (NM_198461.1,857-875).
cgaagaattaatatttcga

SEQ ID NO: 437941 - DNA, 19 bp, Homo sapiens
  siRNA target sequence for FLJ45273 (NM_198461.1,873-891).
cgatatttgccggatgaat

SEQ ID NO: 437942 - DNA, 19 bp, Homo sapiens
  siRNA target sequence for FLJ45273 (NM_198461.1,874-892).
gatatttgccggatgaatt

SEQ ID NO: 437943 - DNA, 19 bp, Homo sapiens
  siRNA target sequence for FLJ45273 (NM_198461.1,882-900).
ccggatgaattgtctgata

SEQ ID NO: 437944 - DNA, 19 bp, Homo sapiens
  siRNA target sequence for FLJ45273 (NM_198461.1,951-969).
gacgtccccatctttgtgt

SEQ ID NO: 437945 - DNA, 19 bp, Homo sapiens
  siRNA target sequence for FLJ45273 (NM_198461.1,997-1015).
gtccactccacgtttttga

SEQ ID NO: 437946 - DNA, 19 bp, Homo sapiens
  siRNA target sequence for FLJ45273 (NM_198461.1,1019-1037).
ccgctatcggcttatgata

SEQ ID NO: 437947 - DNA, 19 bp, Homo sapiens
  siRNA target sequence for FLJ45273 (NM_198461.1,1020-1038).
cgctatcggcttatgataa

SEQ ID NO: 437948 - DNA, 19 bp, Homo sapiens
  siRNA target sequence for FLJ45273 (NM_198461.1,1022-1040).
ctatcggcttatgataaga

SEQ ID NO: 437949 - DNA, 19 bp, Homo sapiens
  siRNA target sequence for FLJ45273 (NM_198461.1,1064-1082).
gcggtttggcatgtgttta

SEQ ID NO: 437950 - DNA, 19 bp, Homo sapiens
  siRNA target sequence for FLJ45273 (NM_198461.1,1065-1083).
cggtttggcatgtgtttat

SEQ ID NO: 437951 - DNA, 19 bp, Homo sapiens
  siRNA target sequence for FLJ45273 (NM_198461.1,1098-1116).
gggctttcagagtatggat

SEQ ID NO: 437952 - DNA, 19 bp, Homo sapiens
  siRNA target sequence for FLJ45273 (NM_198461.1,1212-1230).
cacagagatggctataaca

SEQ ID NO: 437953 - DNA, 19 bp, Homo sapiens
  siRNA target sequence for FLJ45273 (NM_198461.1,1308-1326).
gtgcatcaacagtctgttt

SEQ ID NO: 437954 - DNA, 19 bp, Homo sapiens
  siRNA target sequence for FLJ45273 (NM_198461.1,1359-1377).
gaacaaattttaagtcatt

SEQ ID NO: 437955 - DNA, 19 bp, Homo sapiens
  siRNA target sequence for FLJ45273 (NM_198461.1,1525-1543).
ccatccgacggatattagt

SEQ ID NO: 437956 - DNA, 19 bp, Homo sapiens
  siRNA target sequence for FLJ45273 (NM_198461.1,1531-1549).
gacggatattagtcatcat

SEQ ID NO: 437957 - DNA, 19 bp, Homo sapiens
  siRNA target sequence for FLJ45273 (NM_198461.1,1533-1551).
cggatattagtcatcatca

SEQ ID NO: 437958 - DNA, 19 bp, Homo sapiens
  siRNA target sequence for FLJ45273 (NM_198461.1,1547-1565).
catcacgcgtaagatgaat

SEQ ID NO: 437959 - DNA, 19 bp, Homo sapiens
  siRNA target sequence for FLJ45273 (NM_198461.1,1550-1568).
cacgcgtaagatgaatagt

SEQ ID NO: 437960 - DNA, 19 bp, Homo sapiens
  siRNA target sequence for FLJ46154 (NM_198462.1,1446-1464).
gaaacccatctgtaagaca

SEQ ID NO: 437961 - DNA, 19 bp, Homo sapiens
  siRNA target sequence for FLJ46154 (NM_198462.1,1524-1542).
cagatccgttactatcctt

SEQ ID NO: 437962 - DNA, 19 bp, Homo sapiens
  siRNA target sequence for FLJ46154 (NM_198462.1,1535-1553).
ctatccttggtccagatat

SEQ ID NO: 437963 - DNA, 19 bp, Homo sapiens
  siRNA target sequence for FLJ46154 (NM_198462.1,1539-1557).
ccttggtccagatatctca

SEQ ID NO: 437964 - DNA, 19 bp, Homo sapiens
  siRNA target sequence for FLJ46154 (NM_198462.1,1571-1589).
cgcagtgcactgagatttt

SEQ ID NO: 437965 - DNA, 19 bp, Homo sapiens
  siRNA target sequence for FLJ46154 (NM_198462.1,1573-1591).
cagtgcactgagattttaa

SEQ ID NO: 437966 - DNA, 19 bp, Homo sapiens
  siRNA target sequence for FLJ46154 (NM_198462.1,1575-1593).
gtgcactgagattttaaat

SEQ ID NO: 437967 - DNA, 19 bp, Homo sapiens
  siRNA target sequence for FLJ46154 (NM_198462.1,1601-1619).
ctgcagctcggagattgta

SEQ ID NO: 437968 - DNA, 19 bp, Homo sapiens
  siRNA target sequence for FLJ46154 (NM_198462.1,1603-1621).
gcagctcggagattgtaca

SEQ ID NO: 437969 - DNA, 19 bp, Homo sapiens
  siRNA target sequence for FLJ46154 (NM_198462.1,1604-1622).
cagctcggagattgtacaa

SEQ ID NO: 437970 - DNA, 19 bp, Homo sapiens
  siRNA target sequence for FLJ46154 (NM_198462.1,1607-1625).
ctcggagattgtacaatga

SEQ ID NO: 437971 - DNA, 19 bp, Homo sapiens
  siRNA target sequence for FLJ46154 (NM_198462.1,1609-1627).
cggagattgtacaatgaaa

SEQ ID NO: 437972 - DNA, 19 bp, Homo sapiens
  siRNA target sequence for FLJ46154 (NM_198462.1,1669-1687).
gaactggtgtatgtttcat

SEQ ID NO: 437973 - DNA, 19 bp, Homo sapiens
  siRNA target sequence for FLJ46154 (NM_198462.1,1746-1764).
cctgaggaacctagaatca

SEQ ID NO: 437974 - DNA, 19 bp, Homo sapiens
  siRNA target sequence for FLJ46154 (NM_198462.1,1765-1783).
gacattgccaaaattcaaa

SEQ ID NO: 437975 - DNA, 19 bp, Homo sapiens
  siRNA target sequence for FLJ46154 (NM_198462.1,1785-1803).
cttctgcagcacacataaa

SEQ ID NO: 437976 - DNA, 19 bp, Homo sapiens
  siRNA target sequence for FLJ46154 (NM_198462.1,1827-1845).
ccaaagtgacattgtatct

SEQ ID NO: 437977 - DNA, 19 bp, Homo sapiens
  siRNA target sequence for FLJ46154 (NM_198462.1,1850-1868).
gcaagcttgctgtgcataa

SEQ ID NO: 437978 - DNA, 19 bp, Homo sapiens
  siRNA target sequence for FLJ46154 (NM_198462.1,1854-1872).
gcttgctgtgcataaacct

SEQ ID NO: 437979 - DNA, 19 bp, Homo sapiens
  siRNA target sequence for FLJ46154 (NM_198462.1,1863-1881).
gcataaacctgtagcaatt

SEQ ID NO: 437980 - DNA, 19 bp, Homo sapiens
  siRNA target sequence for FLJ46154 (NM_198462.1,1900-1918).
gttacagaaccggaagaaa

SEQ ID NO: 437981 - DNA, 19 bp, Homo sapiens
  siRNA target sequence for FLJ46154 (NM_198462.1,1939-1957).
ctaacaacggaaaatgctt

SEQ ID NO: 437982 - DNA, 19 bp, Homo sapiens
  siRNA target sequence for FLJ46154 (NM_198462.1,1985-2003).
gagctcatcttcgaatgaa

SEQ ID NO: 437983 - DNA, 19 bp, Homo sapiens
  siRNA target sequence for FLJ46154 (NM_198462.1,2127-2145).
cagctgttcaccaaagcat

SEQ ID NO: 437984 - DNA, 19 bp, Homo sapiens
  siRNA target sequence for FLJ46154 (NM_198462.1,2132-2150).
gttcaccaaagcatagtaa

SEQ ID NO: 437985 - DNA, 19 bp, Homo sapiens
  siRNA target sequence for FLJ46154 (NM_198462.1,2165-2183).
gtcatcagcagttcgaata

SEQ ID NO: 437986 - DNA, 19 bp, Homo sapiens
  siRNA target sequence for FLJ46154 (NM_198462.1,2210-2228).
ctgctcctcagctagtctt

SEQ ID NO: 437987 - DNA, 19 bp, Homo sapiens
  siRNA target sequence for FLJ46154 (NM_198462.1,2362-2380).
gtgctggcagtgtctatga

SEQ ID NO: 437988 - DNA, 19 bp, Homo sapiens
  siRNA target sequence for FLJ46154 (NM_198462.1,2375-2393).
ctatgaccaagactagaaa

SEQ ID NO: 437989 - DNA, 19 bp, Homo sapiens
  siRNA target sequence for FLJ46154 (NM_198462.1,2379-2397).
gaccaagactagaaatgaa

SEQ ID NO: 437990 - DNA, 19 bp, Homo sapiens
  siRNA target sequence for FLJ46154 (NM_198462.1,2410-2428).
ccagttattgttcagaaat

SEQ ID NO: 437991 - DNA, 19 bp, Homo sapiens
  siRNA target sequence for FLJ46154 (NM_198462.1,2458-2476).
caaaagtggcattacatga

SEQ ID NO: 437992 - DNA, 19 bp, Homo sapiens
  siRNA target sequence for FLJ46154 (NM_198462.1,2488-2506).
gcacttgtggcctttcata

SEQ ID NO: 437993 - DNA, 19 bp, Homo sapiens
  siRNA target sequence for FLJ46154 (NM_198462.1,2553-2571).
ctgtacatcatctgtgatt

SEQ ID NO: 437994 - DNA, 19 bp, Homo sapiens
  siRNA target sequence for FLJ46154 (NM_198462.1,2593-2611).
ccaggatactgttatctct

SEQ ID NO: 437995 - DNA, 19 bp, Homo sapiens
  siRNA target sequence for FLJ46154 (NM_198462.1,2771-2789).
gtgtggctgaggttgattt

SEQ ID NO: 437996 - DNA, 19 bp, Homo sapiens
  siRNA target sequence for FLJ46154 (NM_198462.1,2773-2791).
gtggctgaggttgatttgt

SEQ ID NO: 437997 - DNA, 19 bp, Homo sapiens
  siRNA target sequence for FLJ46154 (NM_198462.1,2806-2824).
gaaaaaactctaagttact

SEQ ID NO: 437998 - DNA, 19 bp, Homo sapiens
  siRNA target sequence for FLJ46154 (NM_198462.1,2827-2845).
caagcacgtctattgtctt

SEQ ID NO: 437999 - DNA, 19 bp, Homo sapiens
  siRNA target sequence for FLJ46154 (NM_198462.1,2909-2927).
cagtgaaaataattgcata

SEQ ID NO: 438000 - DNA, 19 bp, Homo sapiens
  siRNA target sequence for FLJ46154 (NM_198462.1,2943-2961).
gtatcgtaatgggaagtta

SEQ ID NO: 438001 - DNA, 19 bp, Homo sapiens
  siRNA target sequence for FLJ46154 (NM_198462.1,3023-3041).
gagcagcctccaaagtata

SEQ ID NO: 438002 - DNA, 19 bp, Homo sapiens
  siRNA target sequence for FLJ46154 (NM_198462.1,3025-3043).
gcagcctccaaagtatata

SEQ ID NO: 438003 - DNA, 19 bp, Homo sapiens
  siRNA target sequence for FLJ46154 (NM_198462.1,3049-3067).
gatggaaccccaatcttta

SEQ ID NO: 438004 - DNA, 19 bp, Homo sapiens
  siRNA target sequence for FLJ46154 (NM_198462.1,3053-3071).
gaaccccaatctttacctt

SEQ ID NO: 438005 - DNA, 19 bp, Homo sapiens
  siRNA target sequence for FLJ46154 (NM_198462.1,3081-3099).
ggttttatgggctctagat

SEQ ID NO: 438006 - DNA, 19 bp, Homo sapiens
  siRNA target sequence for FLJ46154 (NM_198462.1,3090-3108).
ggctctagatgaatccttt

SEQ ID NO: 438007 - DNA, 19 bp, Homo sapiens
  siRNA target sequence for FLJ46154 (NM_198462.1,3221-3239).
ctgtgacatccgatagttt

SEQ ID NO: 438008 - DNA, 19 bp, Homo sapiens
  siRNA target sequence for FLJ46154 (NM_198462.1,3230-3248).
ccgatagtttggatggtat

SEQ ID NO: 438009 - DNA, 19 bp, Homo sapiens
  siRNA target sequence for FLJ46154 (NM_198462.1,3231-3249).
cgatagtttggatggtata

SEQ ID NO: 438010 - DNA, 19 bp, Homo sapiens
  siRNA target sequence for FLJ46154 (NM_198462.1,3300-3318).
gtcttgtggtgaaccattt

SEQ ID NO: 438011 - DNA, 19 bp, Homo sapiens
  siRNA target sequence for FLJ46154 (NM_198462.1,3302-3320).
cttgtggtgaaccatttct

SEQ ID NO: 438012 - DNA, 19 bp, Homo sapiens
  siRNA target sequence for FLJ42117 (NM_198463.1,434-452).
gcaatctatgcattgactt

SEQ ID NO: 438013 - DNA, 19 bp, Homo sapiens
  siRNA target sequence for FLJ42117 (NM_198463.1,443-461).
gcattgacttagtagcatt

SEQ ID NO: 438014 - DNA, 19 bp, Homo sapiens
  siRNA target sequence for FLJ42117 (NM_198463.1,492-510).
ccagtcattggatggaatt

SEQ ID NO: 438015 - DNA, 19 bp, Homo sapiens
  siRNA target sequence for FLJ42117 (NM_198463.1,495-513).
gtcattggatggaattgtt

SEQ ID NO: 438016 - DNA, 19 bp, Homo sapiens
  siRNA target sequence for FLJ42117 (NM_198463.1,511-529).
gttgtctcagctaactgta

SEQ ID NO: 438017 - DNA, 19 bp, Homo sapiens
  siRNA target sequence for FLJ42117 (NM_198463.1,527-545).
gtaagctacggaagatctt

SEQ ID NO: 438018 - DNA, 19 bp, Homo sapiens
  siRNA target sequence for FLJ42117 (NM_198463.1,535-553).
cggaagatcttcaccttaa

SEQ ID NO: 438019 - DNA, 19 bp, Homo sapiens
  siRNA target sequence for FLJ42117 (NM_198463.1,536-554).
ggaagatcttcaccttaaa

SEQ ID NO: 438020 - DNA, 19 bp, Homo sapiens
  siRNA target sequence for FLJ42117 (NM_198463.1,540-558).
gatcttcaccttaaaatca

SEQ ID NO: 438021 - DNA, 19 bp, Homo sapiens
  siRNA target sequence for FLJ42117 (NM_198463.1,618-636).
gcctacagatattatacca

SEQ ID NO: 438022 - DNA, 19 bp, Homo sapiens
  siRNA target sequence for FLJ42117 (NM_198463.1,635-653).
cacgaagctgtcaactaat

SEQ ID NO: 438023 - DNA, 19 bp, Homo sapiens
  siRNA target sequence for FLJ42117 (NM_198463.1,637-655).
cgaagctgtcaactaatga

SEQ ID NO: 438024 - DNA, 19 bp, Homo sapiens
  siRNA target sequence for FLJ42117 (NM_198463.1,681-699).
gctaaacatgactaaactt

SEQ ID NO: 438025 - DNA, 19 bp, Homo sapiens
  siRNA target sequence for FLJ42117 (NM_198463.1,697-715).
cttcgccaaactgaaataa

SEQ ID NO: 438026 - DNA, 19 bp, Homo sapiens
  siRNA target sequence for FLJ42117 (NM_198463.1,743-761).
cagaatcagatcagttcat

SEQ ID NO: 438027 - DNA, 19 bp, Homo sapiens
  siRNA target sequence for FLJ42117 (NM_198463.1,745-763).
gaatcagatcagttcatta

SEQ ID NO: 438028 - DNA, 19 bp, Homo sapiens
  siRNA target sequence for FLJ42117 (NM_198463.1,776-794).
gtattacacggaacagtaa

SEQ ID NO: 438029 - DNA, 19 bp, Homo sapiens
  siRNA target sequence for FLJ42117 (NM_198463.1,782-800).
cacggaacagtaaaaatca

SEQ ID NO: 438030 - DNA, 19 bp, Homo sapiens
  siRNA target sequence for FLJ42117 (NM_198463.1,818-836).
catttggatccaaagttct

SEQ ID NO: 438031 - DNA, 19 bp, Homo sapiens
  siRNA target sequence for FLJ42117 (NM_198463.1,896-914).
gatccgttgggtccaaaaa

SEQ ID NO: 438032 - DNA, 19 bp, Homo sapiens
  siRNA target sequence for FLJ42117 (NM_198463.1,938-956).
ctgtagagaagtgtgttaa

SEQ ID NO: 438033 - DNA, 19 bp, Homo sapiens
  siRNA target sequence for FLJ42117 (NM_198463.1,943-961).
gagaagtgtgttaatggta

SEQ ID NO: 438034 - DNA, 19 bp, Homo sapiens
  siRNA target sequence for FLJ42117 (NM_198463.1,952-970).
gttaatggtacagaaatgt

SEQ ID NO: 438035 - DNA, 19 bp, Homo sapiens
  siRNA target sequence for FLJ42117 (NM_198463.1,1032-1050).
gcagactgtacctattcat

SEQ ID NO: 438036 - DNA, 19 bp, Homo sapiens
  siRNA target sequence for FLJ42117 (NM_198463.1,1051-1069).
gcagccaatctacatatta

SEQ ID NO: 438037 - DNA, 19 bp, Homo sapiens
  siRNA target sequence for FLJ42117 (NM_198463.1,1055-1073).
ccaatctacatattatgca

SEQ ID NO: 438038 - DNA, 19 bp, Homo sapiens
  siRNA target sequence for FLJ42117 (NM_198463.1,1056-1074).
caatctacatattatgcat

SEQ ID NO: 438039 - DNA, 19 bp, Homo sapiens
  siRNA target sequence for FLJ42117 (NM_198463.1,1170-1188).
cggtagctcttcaggaaat

SEQ ID NO: 438040 - DNA, 19 bp, Homo sapiens
  siRNA target sequence for FLJ42117 (NM_198463.1,1171-1189).
ggtagctcttcaggaaata

SEQ ID NO: 438041 - DNA, 19 bp, Homo sapiens
  siRNA target sequence for FLJ42117 (NM_198463.1,1273-1291).
ccccagtctcctgatcaat

SEQ ID NO: 438042 - DNA, 19 bp, Homo sapiens
  siRNA target sequence for FLJ42117 (NM_198463.1,1344-1362).
cagcagacagtctctactt

SEQ ID NO: 438043 - DNA, 19 bp, Homo sapiens
  siRNA target sequence for FLJ42117 (NM_198463.1,1346-1364).
gcagacagtctctacttct

SEQ ID NO: 438044 - DNA, 19 bp, Homo sapiens
  siRNA target sequence for FLJ42117 (NM_198463.1,1504-1522).
ggaaagactcagactatgt

SEQ ID NO: 438045 - DNA, 19 bp, Homo sapiens
  siRNA target sequence for FLJ42117 (NM_198463.1,1654-1672).
ccaagccagatgagtgaat

SEQ ID NO: 438046 - DNA, 19 bp, Homo sapiens
  siRNA target sequence for FLJ42117 (NM_198463.1,1667-1685).
gtgaatccgagttacagat

SEQ ID NO: 438047 - DNA, 19 bp, Homo sapiens
  siRNA target sequence for FLJ42117 (NM_198463.1,1694-1712).
gcctacggtggcaacaaaa

SEQ ID NO: 438048 - DNA, 19 bp, Homo sapiens
  siRNA target sequence for FLJ42117 (NM_198463.1,1695-1713).
cctacggtggcaacaaaat

SEQ ID NO: 438049 - DNA, 19 bp, Homo sapiens
  siRNA target sequence for FLJ42117 (NM_198463.1,1757-1775).
cccaggtggacaactgtaa

SEQ ID NO: 438050 - DNA, 19 bp, Homo sapiens
  siRNA target sequence for FLJ42117 (NM_198463.1,1758-1776).
ccaggtggacaactgtaat

SEQ ID NO: 438051 - DNA, 19 bp, Homo sapiens
  siRNA target sequence for FLJ42117 (NM_198463.1,1770-1788).
ctgtaatgtcagcataagt

SEQ ID NO: 438052 - DNA, 19 bp, Homo sapiens
  siRNA target sequence for FLJ42117 (NM_198463.1,1843-1861).
cagggtcgccactatcaga

SEQ ID NO: 438053 - DNA, 19 bp, Homo sapiens
  siRNA target sequence for FLJ42117 (NM_198463.1,1845-1863).
gggtcgccactatcagaaa

SEQ ID NO: 438054 - DNA, 19 bp, Homo sapiens
  siRNA target sequence for FLJ42117 (NM_198463.1,1894-1912).
cgggactggttaaatatgt

SEQ ID NO: 438055 - DNA, 19 bp, Homo sapiens
  siRNA target sequence for FLJ42117 (NM_198463.1,1897-1915).
gactggttaaatatgttga

SEQ ID NO: 438056 - DNA, 19 bp, Homo sapiens
  siRNA target sequence for FLJ42117 (NM_198463.1,1911-1929).
gttgagcccaccaatcgtt

SEQ ID NO: 438057 - DNA, 19 bp, Homo sapiens
  siRNA target sequence for FLJ42117 (NM_198463.1,1957-1975).
cgtccagattcctgtgaaa

SEQ ID NO: 438058 - DNA, 19 bp, Homo sapiens
  siRNA target sequence for FLJ42117 (NM_198463.1,2020-2038).
gaggaagtactgactttgt

SEQ ID NO: 438059 - DNA, 19 bp, Homo sapiens
  siRNA target sequence for FLJ42117 (NM_198463.1,2048-2066).
cttgtctgaactgttactt

SEQ ID NO: 438060 - DNA, 19 bp, Homo sapiens
  siRNA target sequence for FLJ42117 (NM_198463.1,2051-2069).
gtctgaactgttactttga

SEQ ID NO: 438061 - DNA, 19 bp, Homo sapiens
  siRNA target sequence for FLJ42117 (NM_198463.1,2072-2090).
cccaaacagggaaatacta

SEQ ID NO: 438062 - DNA, 19 bp, Homo sapiens
  siRNA target sequence for FLJ42117 (NM_198463.1,2073-2091).
ccaaacagggaaatactat

SEQ ID NO: 438063 - DNA, 19 bp, Homo sapiens
  siRNA target sequence for FLJ42117 (NM_198463.1,2078-2096).
cagggaaatactatgagtt

SEQ ID NO: 438064 - DNA, 19 bp, Homo sapiens
  siRNA target sequence for UNQ9391 (NM_198464.1,93-111).
ggctggagtggctatccta

SEQ ID NO: 438065 - DNA, 19 bp, Homo sapiens
  siRNA target sequence for UNQ9391 (NM_198464.1,169-187).
gaatgtggtgacagatcta

SEQ ID NO: 438066 - DNA, 19 bp, Homo sapiens
  siRNA target sequence for UNQ9391 (NM_198464.1,173-191).
gtggtgacagatctatttt

SEQ ID NO: 438067 - DNA, 19 bp, Homo sapiens
  siRNA target sequence for UNQ9391 (NM_198464.1,176-194).
gtgacagatctattttcga

SEQ ID NO: 438068 - DNA, 19 bp, Homo sapiens
  siRNA target sequence for UNQ9391 (NM_198464.1,329-347).
ctgcggctcactgcttata

SEQ ID NO: 438069 - DNA, 19 bp, Homo sapiens
  siRNA target sequence for UNQ9391 (NM_198464.1,331-349).
gcggctcactgcttatatt

SEQ ID NO: 438070 - DNA, 19 bp, Homo sapiens
  siRNA target sequence for UNQ9391 (NM_198464.1,387-405).
ggggaccaacgacttaact

SEQ ID NO: 438071 - DNA, 19 bp, Homo sapiens
  siRNA target sequence for UNQ9391 (NM_198464.1,388-406).
gggaccaacgacttaacta

SEQ ID NO: 438072 - DNA, 19 bp, Homo sapiens
  siRNA target sequence for UNQ9391 (NM_198464.1,468-486).
caacatggacaatgacatt

SEQ ID NO: 438073 - DNA, 19 bp, Homo sapiens
  siRNA target sequence for UNQ9391 (NM_198464.1,603-621).
gaccaatgctgctgacaaa

SEQ ID NO: 438074 - DNA, 19 bp, Homo sapiens
  siRNA target sequence for UNQ9391 (NM_198464.1,667-685).
gactgggaggagtgttcaa

SEQ ID NO: 438075 - DNA, 19 bp, Homo sapiens
  siRNA target sequence for UNQ9391 (NM_198464.1,671-689).
gggaggagtgttcaaagat

SEQ ID NO: 438076 - DNA, 19 bp, Homo sapiens
  siRNA target sequence for UNQ9391 (NM_198464.1,673-691).
gaggagtgttcaaagatgt

SEQ ID NO: 438077 - DNA, 19 bp, Homo sapiens
  siRNA target sequence for UNQ9391 (NM_198464.1,675-693).
ggagtgttcaaagatgttt

SEQ ID NO: 438078 - DNA, 19 bp, Homo sapiens
  siRNA target sequence for UNQ9391 (NM_198464.1,715-733).
ctgtgtgccggatacaaga

SEQ ID NO: 438079 - DNA, 19 bp, Homo sapiens
  siRNA target sequence for UNQ9391 (NM_198464.1,717-735).
gtgtgccggatacaagaat

SEQ ID NO: 438080 - DNA, 19 bp, Homo sapiens
  siRNA target sequence for UNQ9391 (NM_198464.1,719-737).
gtgccggatacaagaatga

SEQ ID NO: 438081 - DNA, 19 bp, Homo sapiens
  siRNA target sequence for UNQ9391 (NM_198464.1,721-739).
gccggatacaagaatgaga

SEQ ID NO: 438082 - DNA, 19 bp, Homo sapiens
  siRNA target sequence for UNQ9391 (NM_198464.1,872-890).
cctcgttggtgaactacaa

SEQ ID NO: 438083 - DNA, 19 bp, Homo sapiens
  siRNA target sequence for UNQ9391 (NM_198464.1,947-965).
ggaggacttctgtcaaaca

SEQ ID NO: 438084 - DNA, 19 bp, Homo sapiens
  siRNA target sequence for UNQ9391 (NM_198464.1,956-974).
ctgtcaaacagaaacctat

SEQ ID NO: 438085 - DNA, 19 bp, Homo sapiens
  siRNA target sequence for UNQ9391 (NM_198464.1,1039-1057).
ctgtcccatgtgttgttca

SEQ ID NO: 438086 - DNA, 19 bp, Homo sapiens
  siRNA target sequence for DKFZp686A17109 (NM_198465.1,359-377).
gccggatccaactggaata

SEQ ID NO: 438087 - DNA, 19 bp, Homo sapiens
  siRNA target sequence for DKFZp686A17109 (NM_198465.1,360-378).
ccggatccaactggaatat

SEQ ID NO: 438088 - DNA, 19 bp, Homo sapiens
  siRNA target sequence for DKFZp686A17109 (NM_198465.1,372-390).
ggaatattctcactagata

SEQ ID NO: 438089 - DNA, 19 bp, Homo sapiens
  siRNA target sequence for DKFZp686A17109 (NM_198465.1,373-391).
gaatattctcactagataa

SEQ ID NO: 438090 - DNA, 19 bp, Homo sapiens
  siRNA target sequence for DKFZp686A17109 (NM_198465.1,380-398).
ctcactagataaaaccatt

SEQ ID NO: 438091 - DNA, 19 bp, Homo sapiens
  siRNA target sequence for DKFZp686A17109 (NM_198465.1,405-423).
ggtacttatggcagaatct

SEQ ID NO: 438092 - DNA, 19 bp, Homo sapiens
  siRNA target sequence for DKFZp686A17109 (NM_198465.1,406-424).
gtacttatggcagaatcta

SEQ ID NO: 438093 - DNA, 19 bp, Homo sapiens
  siRNA target sequence for DKFZp686A17109 (NM_198465.1,438-456).
gagaagactggtgcattta

SEQ ID NO: 438094 - DNA, 19 bp, Homo sapiens
  siRNA target sequence for DKFZp686A17109 (NM_198465.1,440-458).
gaagactggtgcatttaca

SEQ ID NO: 438095 - DNA, 19 bp, Homo sapiens
  siRNA target sequence for DKFZp686A17109 (NM_198465.1,485-503).
gacccctttacctgaaata

SEQ ID NO: 438096 - DNA, 19 bp, Homo sapiens
  siRNA target sequence for DKFZp686A17109 (NM_198465.1,488-506).
ccctttacctgaaatagga

SEQ ID NO: 438097 - DNA, 19 bp, Homo sapiens
  siRNA target sequence for DKFZp686A17109 (NM_198465.1,508-526).
ggcgagtgagagtgaataa

SEQ ID NO: 438098 - DNA, 19 bp, Homo sapiens
  siRNA target sequence for DKFZp686A17109 (NM_198465.1,509-527).
gcgagtgagagtgaataaa

SEQ ID NO: 438099 - DNA, 19 bp, Homo sapiens
  siRNA target sequence for DKFZp686A17109 (NM_198465.1,626-644).
gtccttctatggagcattt

SEQ ID NO: 438100 - DNA, 19 bp, Homo sapiens
  siRNA target sequence for DKFZp686A17109 (NM_198465.1,663-681).
ggtcagcggcaccaacttt

SEQ ID NO: 438101 - DNA, 19 bp, Homo sapiens
  siRNA target sequence for DKFZp686A17109 (NM_198465.1,709-727).
gttcggtcactgatgtagt

SEQ ID NO: 438102 - DNA, 19 bp, Homo sapiens
  siRNA target sequence for DKFZp686A17109 (NM_198465.1,769-787).
cttatatctgccgagaaat

SEQ ID NO: 438103 - DNA, 19 bp, Homo sapiens
  siRNA target sequence for DKFZp686A17109 (NM_198465.1,903-921).
gcccaggtgagcagaacta

SEQ ID NO: 438104 - DNA, 19 bp, Homo sapiens
  siRNA target sequence for DKFZp686A17109 (NM_198465.1,963-981).
gcacctgaggtgattgact

SEQ ID NO: 438105 - DNA, 19 bp, Homo sapiens
  siRNA target sequence for DKFZp686A17109 (NM_198465.1,992-1010).
cccaagacgctcctatgat

SEQ ID NO: 438106 - DNA, 19 bp, Homo sapiens
  siRNA target sequence for DKFZp686A17109 (NM_198465.1,993-1011).
ccaagacgctcctatgatt

SEQ ID NO: 438107 - DNA, 19 bp, Homo sapiens
  siRNA target sequence for DKFZp686A17109 (NM_198465.1,994-1012).
caagacgctcctatgatta

SEQ ID NO: 438108 - DNA, 19 bp, Homo sapiens
  siRNA target sequence for DKFZp686A17109 (NM_198465.1,999-1017).
cgctcctatgattacagaa

SEQ ID NO: 438109 - DNA, 19 bp, Homo sapiens
  siRNA target sequence for DKFZp686A17109 (NM_198465.1,1094-1112).
ggaagctctcttcgttatt

SEQ ID NO: 438110 - DNA, 19 bp, Homo sapiens
  siRNA target sequence for DKFZp686A17109 (NM_198465.1,1095-1113).
gaagctctcttcgttattt

SEQ ID NO: 438111 - DNA, 19 bp, Homo sapiens
  siRNA target sequence for DKFZp686A17109 (NM_198465.1,1144-1162).
gcggatggtcccgtaagtt

SEQ ID NO: 438112 - DNA, 19 bp, Homo sapiens
  siRNA target sequence for DKFZp686A17109 (NM_198465.1,1153-1171).
cccgtaagttccacaattt

SEQ ID NO: 438113 - DNA, 19 bp, Homo sapiens
  siRNA target sequence for DKFZp686A17109 (NM_198465.1,1172-1190).
catggaaaagtgtacgata

SEQ ID NO: 438114 - DNA, 19 bp, Homo sapiens
  siRNA target sequence for DKFZp686A17109 (NM_198465.1,1183-1201).
gtacgataaaaaatttcct

SEQ ID NO: 438115 - DNA, 19 bp, Homo sapiens
  siRNA target sequence for DKFZp686A17109 (NM_198465.1,1199-1217).
cctgtttcgtcctacttct

SEQ ID NO: 438116 - DNA, 19 bp, Homo sapiens
  siRNA target sequence for DKFZp686A17109 (NM_198465.1,1235-1253).
cccatttgttcgggatata

SEQ ID NO: 438117 - DNA, 19 bp, Homo sapiens
  siRNA target sequence for DKFZp686A17109 (NM_198465.1,1236-1254).
ccatttgttcgggatataa

SEQ ID NO: 438118 - DNA, 19 bp, Homo sapiens
  siRNA target sequence for DKFZp686A17109 (NM_198465.1,1264-1282).
gacatgttgttgagtcatt

SEQ ID NO: 438119 - DNA, 19 bp, Homo sapiens
  siRNA target sequence for DKFZp686A17109 (NM_198465.1,1266-1284).
catgttgttgagtcattaa

SEQ ID NO: 438120 - DNA, 19 bp, Homo sapiens
  siRNA target sequence for DKFZp686A17109 (NM_198465.1,1269-1287).
gttgttgagtcattaacaa

SEQ ID NO: 438121 - DNA, 19 bp, Homo sapiens
  siRNA target sequence for DKFZp686A17109 (NM_198465.1,1368-1386).
cagtacaccgtgagaagat

SEQ ID NO: 438122 - DNA, 19 bp, Homo sapiens
  siRNA target sequence for DKFZp686A17109 (NM_198465.1,1405-1423).
ctcacgagcttctgagatt

SEQ ID NO: 438123 - DNA, 19 bp, Homo sapiens
  siRNA target sequence for DKFZp686A17109 (NM_198465.1,1536-1554).
ggagcagccagggtattca

SEQ ID NO: 438124 - DNA, 19 bp, Homo sapiens
  siRNA target sequence for DKFZp686A17109 (NM_198465.1,1576-1594).
gtgcacctaagcctctaaa

SEQ ID NO: 438125 - DNA, 19 bp, Homo sapiens
  siRNA target sequence for DKFZp686A17109 (NM_198465.1,1607-1625).
ggcacctcaacgactacaa

SEQ ID NO: 438126 - DNA, 19 bp, Homo sapiens
  siRNA target sequence for DKFZp686A17109 (NM_198465.1,1627-1645).
gggcagctcgggtgttcat

SEQ ID NO: 438127 - DNA, 19 bp, Homo sapiens
  siRNA target sequence for DKFZp686A17109 (NM_198465.1,1674-1692).
gcctctaaacctctacaaa

SEQ ID NO: 438128 - DNA, 19 bp, Homo sapiens
  siRNA target sequence for DKFZp686A17109 (NM_198465.1,1678-1696).
ctaaacctctacaaatgca

SEQ ID NO: 438129 - DNA, 19 bp, Homo sapiens
  siRNA target sequence for DKFZp686A17109 (NM_198465.1,1789-1807).
cccaggtatccaaaaagca

SEQ ID NO: 438130 - DNA, 19 bp, Homo sapiens
  siRNA target sequence for DKFZp686A17109 (NM_198465.1,2033-2051).
ggaacctgagtcattacga

SEQ ID NO: 438131 - DNA, 19 bp, Homo sapiens
  siRNA target sequence for DKFZp686A17109 (NM_198465.1,2038-2056).
ctgagtcattacgagtaaa

SEQ ID NO: 438132 - DNA, 19 bp, Homo sapiens
  siRNA target sequence for DKFZp686A17109 (NM_198465.1,2050-2068).
gagtaaatgcccaggtatt

SEQ ID NO: 438133 - DNA, 19 bp, Homo sapiens
  siRNA target sequence for DKFZp686A17109 (NM_198465.1,2072-2090).
gcccctgctatcacaagat

SEQ ID NO: 438134 - DNA, 19 bp, Homo sapiens
  siRNA target sequence for DKFZp686A17109 (NM_198465.1,2074-2092).
ccctgctatcacaagatca

SEQ ID NO: 438135 - DNA, 19 bp, Homo sapiens
  siRNA target sequence for DKFZp686A17109 (NM_198465.1,2097-2115).
gtgctgttgccactacatt

SEQ ID NO: 438136 - DNA, 19 bp, Homo sapiens
  siRNA target sequence for DKFZp686A17109 (NM_198465.1,2137-2155).
cagtagaggggcaaactga

SEQ ID NO: 438137 - DNA, 19 bp, Homo sapiens
  siRNA target sequence for DKFZp686A17109 (NM_198465.1,2207-2225).
ctcagttcaagcactgata

SEQ ID NO: 438138 - DNA, 19 bp, Homo sapiens
  siRNA target sequence for DKFZp686A17109 (NM_198465.1,2209-2227).
cagttcaagcactgataga

SEQ ID NO: 438139 - DNA, 19 bp, Homo sapiens
  siRNA target sequence for DKFZp686A17109 (NM_198465.1,2220-2238).
ctgatagagggactatcaa

SEQ ID NO: 438140 - DNA, 19 bp, Homo sapiens
  siRNA target sequence for DKFZp686A17109 (NM_198465.1,2222-2240).
gatagagggactatcaaga

SEQ ID NO: 438141 - DNA, 19 bp, Homo sapiens
  siRNA target sequence for DKFZp686A17109 (NM_198465.1,2277-2295).
ccacttggtccgttgcaaa

SEQ ID NO: 438142 - DNA, 19 bp, Homo sapiens
  siRNA target sequence for DKFZp686A17109 (NM_198465.1,2310-2328).
ctgtcatcaaataggtttt

SEQ ID NO: 438143 - DNA, 19 bp, Homo sapiens
  siRNA target sequence for DKFZp686A17109 (NM_198465.1,2447-2465).
gcttgaactctcggattta

SEQ ID NO: 438144 - DNA, 19 bp, Homo sapiens
  siRNA target sequence for DKFZp686A17109 (NM_198465.1,2526-2544).
gaattgagacaagttgata

SEQ ID NO: 438145 - DNA, 19 bp, Homo sapiens
  siRNA target sequence for DKFZp686A17109 (NM_198465.1,2533-2551).
gacaagttgataaagacaa

SEQ ID NO: 438146 - DNA, 19 bp, Homo sapiens
  siRNA target sequence for DKFZp686A17109 (NM_198465.1,2615-2633).
gccattgaagccatacatt

SEQ ID NO: 438147 - DNA, 19 bp, Homo sapiens
  siRNA target sequence for DKFZp686A17109 (NM_198465.1,2668-2686).
ctccttctgtgcctaacaa

SEQ ID NO: 438148 - DNA, 19 bp, Homo sapiens
  siRNA target sequence for DKFZp686A17109 (NM_198465.1,2687-2705).
ccaggatcatgcacatcat

SEQ ID NO: 438149 - DNA, 19 bp, Homo sapiens
  siRNA target sequence for DKFZp686A17109 (NM_198465.1,2697-2715).
gcacatcatgtcaagttct

SEQ ID NO: 438150 - DNA, 19 bp, Homo sapiens
  siRNA target sequence for DKFZp686A17109 (NM_198465.1,2724-2742).
gttcctcagcggtctcttt

SEQ ID NO: 438151 - DNA, 19 bp, Homo sapiens
  siRNA target sequence for DKFZp686A17109 (NM_198465.1,2760-2778).
cccattgacatcagacaaa

SEQ ID NO: 438152 - DNA, 19 bp, Homo sapiens
  siRNA target sequence for DKFZp686A17109 (NM_198465.1,2782-2800).
gttcgcaaaatcgtcaaaa

SEQ ID NO: 438153 - DNA, 19 bp, Homo sapiens
  siRNA target sequence for DKFZp686A17109 (NM_198465.1,2872-2890).
caccttattctactattga

SEQ ID NO: 438154 - DNA, 19 bp, Homo sapiens
  siRNA target sequence for DKFZp686A17109 (NM_198465.1,2881-2899).
ctactattgatcagaagtt

SEQ ID NO: 438155 - DNA, 19 bp, Homo sapiens
  siRNA target sequence for DKFZp686A17109 (NM_198465.1,2913-2931).
catgttccagatggattta

SEQ ID NO: 438156 - DNA, 19 bp, Homo sapiens
  siRNA target sequence for DKFZp686A17109 (NM_198465.1,2949-2967).
ccccctgtatacttgacaa

SEQ ID NO: 438157 - DNA, 19 bp, Homo sapiens
  siRNA target sequence for DKFZp686A17109 (NM_198465.1,2950-2968).
cccctgtatacttgacaaa

SEQ ID NO: 438158 - DNA, 19 bp, Homo sapiens
  siRNA target sequence for DKFZp686A17109 (NM_198465.1,2955-2973).
gtatacttgacaaacgaat

SEQ ID NO: 438159 - DNA, 19 bp, Homo sapiens
  siRNA target sequence for DKFZp686A17109 (NM_198465.1,2969-2987).
cgaatgggtaggctataat

SEQ ID NO: 438160 - DNA, 19 bp, Homo sapiens
  siRNA target sequence for DKFZp686A17109 (NM_198465.1,3002-3020).
cttccggaatgattggtta

SEQ ID NO: 438161 - DNA, 19 bp, Homo sapiens
  siRNA target sequence for DKFZp686A17109 (NM_198465.1,3005-3023).
ccggaatgattggttaact

SEQ ID NO: 438162 - DNA, 19 bp, Homo sapiens
  siRNA target sequence for DKFZp686A17109 (NM_198465.1,3053-3071).
ggatggtgattatgttgaa

SEQ ID NO: 438163 - DNA, 19 bp, Homo sapiens
  siRNA target sequence for DKFZp686A17109 (NM_198465.1,3179-3197).
ggttgatcaggctaatgat

SEQ ID NO: 438164 - DNA, 19 bp, Homo sapiens
  siRNA target sequence for DKFZp686A17109 (NM_198465.1,3304-3322).
gctgcaagcaagatggtta

SEQ ID NO: 438165 - DNA, 19 bp, Homo sapiens
  siRNA target sequence for DKFZp686A17109 (NM_198465.1,3305-3323).
ctgcaagcaagatggttat

SEQ ID NO: 438166 - DNA, 19 bp, Homo sapiens
  siRNA target sequence for DKFZp686A17109 (NM_198465.1,3307-3325).
gcaagcaagatggttatga

SEQ ID NO: 438167 - DNA, 19 bp, Homo sapiens
  siRNA target sequence for DKFZp686A17109 (NM_198465.1,3308-3326).
caagcaagatggttatgat

SEQ ID NO: 438168 - DNA, 19 bp, Homo sapiens
  siRNA target sequence for DKFZp686A17109 (NM_198465.1,3562-3580).
cagatggtccaggattgaa

SEQ ID NO: 438169 - DNA, 19 bp, Homo sapiens
  siRNA target sequence for DKFZp686A17109 (NM_198465.1,3564-3582).
gatggtccaggattgaaga

SEQ ID NO: 438170 - DNA, 19 bp, Homo sapiens
  siRNA target sequence for DKFZp686A17109 (NM_198465.1,3586-3604).
ctgcgtctcaggactttga

SEQ ID NO: 438171 - DNA, 19 bp, Homo sapiens
  siRNA target sequence for DKFZp686A17109 (NM_198465.1,3588-3606).
gcgtctcaggactttgaat

SEQ ID NO: 438172 - DNA, 19 bp, Homo sapiens
  siRNA target sequence for DKFZp686A17109 (NM_198465.1,3729-3747).
gatttttctgccaatcact

SEQ ID NO: 438173 - DNA, 19 bp, Homo sapiens
  siRNA target sequence for DKFZp686A17109 (NM_198465.1,3803-3821).
cttatacgctggattcgta

SEQ ID NO: 438174 - DNA, 19 bp, Homo sapiens
  siRNA target sequence for DKFZp686A17109 (NM_198465.1,3809-3827).
cgctggattcgtagaagta

SEQ ID NO: 438175 - DNA, 19 bp, Homo sapiens
  siRNA target sequence for DKFZp686A17109 (NM_198465.1,3901-3919).
cactaatccacatgtatga

SEQ ID NO: 438176 - DNA, 19 bp, Homo sapiens
  siRNA target sequence for DKFZp686A17109 (NM_198465.1,3952-3970).
ctttgtggggagtcaattt

SEQ ID NO: 438177 - DNA, 19 bp, Homo sapiens
  siRNA target sequence for DKFZp686A17109 (NM_198465.1,3974-3992).
gttgggaacccgatctaat

SEQ ID NO: 438178 - DNA, 19 bp, Homo sapiens
  siRNA target sequence for DKFZp686A17109 (NM_198465.1,3977-3995).
gggaacccgatctaatcta

SEQ ID NO: 438179 - DNA, 19 bp, Homo sapiens
  siRNA target sequence for DKFZp686A17109 (NM_198465.1,3978-3996).
ggaacccgatctaatctat

SEQ ID NO: 438180 - DNA, 19 bp, Homo sapiens
  siRNA target sequence for DKFZp686A17109 (NM_198465.1,3979-3997).
gaacccgatctaatctata

SEQ ID NO: 438181 - DNA, 19 bp, Homo sapiens
  siRNA target sequence for DKFZp686A17109 (NM_198465.1,3982-4000).
cccgatctaatctatatct

SEQ ID NO: 438182 - DNA, 19 bp, Homo sapiens
  siRNA target sequence for DKFZp686A17109 (NM_198465.1,3984-4002).
cgatctaatctatatctga

SEQ ID NO: 438183 - DNA, 19 bp, Homo sapiens
  siRNA target sequence for DKFZp686A17109 (NM_198465.1,4023-4041).
gacattactaaacttataa

SEQ ID NO: 438184 - DNA, 19 bp, Homo sapiens
  siRNA target sequence for DKFZp686A17109 (NM_198465.1,4048-4066).
gaccattccgccagattca

SEQ ID NO: 438185 - DNA, 19 bp, Homo sapiens
  siRNA target sequence for DKFZp686A17109 (NM_198465.1,4051-4069).
cattccgccagattcaagt

SEQ ID NO: 438186 - DNA, 19 bp, Homo sapiens
  siRNA target sequence for DKFZp686A17109 (NM_198465.1,4055-4073).
ccgccagattcaagtctta

SEQ ID NO: 438187 - DNA, 19 bp, Homo sapiens
  siRNA target sequence for DKFZp686A17109 (NM_198465.1,4077-4095).
ccactcaatttgctgatta

SEQ ID NO: 438188 - DNA, 19 bp, Homo sapiens
  siRNA target sequence for DKFZp686A17109 (NM_198465.1,4115-4133).
cagacttcgggtgtatcat

SEQ ID NO: 438189 - DNA, 19 bp, Homo sapiens
  siRNA target sequence for DKFZp686A17109 (NM_198465.1,4215-4233).
gcctgcaaagctattgata

SEQ ID NO: 438190 - DNA, 19 bp, Homo sapiens
  siRNA target sequence for DKFZp686A17109 (NM_198465.1,4328-4346).
ggcaccaaagtcctttgat

SEQ ID NO: 438191 - DNA, 19 bp, Homo sapiens
  siRNA target sequence for DKFZp686A17109 (NM_198465.1,4406-4424).
gtcctatcaagcctatata

SEQ ID NO: 438192 - DNA, 19 bp, Homo sapiens
  siRNA target sequence for DKFZp686A17109 (NM_198465.1,4409-4427).
ctatcaagcctatatacga

SEQ ID NO: 438193 - DNA, 19 bp, Homo sapiens
  siRNA target sequence for DKFZp686A17109 (NM_198465.1,4426-4444).
gaatactggcaaaaataca

SEQ ID NO: 438194 - DNA, 19 bp, Homo sapiens
  siRNA target sequence for DKFZp686A17109 (NM_198465.1,4455-4473).
ccagtgaaccggtttaaga

SEQ ID NO: 438195 - DNA, 19 bp, Homo sapiens
  siRNA target sequence for DKFZp686A17109 (NM_198465.1,4542-4560).
gttgacctggctattggtt

SEQ ID NO: 438196 - DNA, 19 bp, Homo sapiens
  siRNA target sequence for DKFZp686A17109 (NM_198465.1,4550-4568).
ggctattggttctgaaaaa

SEQ ID NO: 438197 - DNA, 19 bp, Homo sapiens
  siRNA target sequence for DKFZp686A17109 (NM_198465.1,4588-4606).
gctcagcagatggatatca

SEQ ID NO: 438198 - DNA, 19 bp, Homo sapiens
  siRNA target sequence for DKFZp686A17109 (NM_198465.1,4655-4673).
gaatcccctggaaatcatt

SEQ ID NO: 438199 - DNA, 19 bp, Homo sapiens
  siRNA target sequence for DKFZp686A17109 (NM_198465.1,4745-4763).
cctctctgtggaagcaaat

SEQ ID NO: 438200 - DNA, 19 bp, Homo sapiens
  siRNA target sequence for DKFZp686A17109 (NM_198465.1,4866-4884).
gaagtgcgctctttgcaat

SEQ ID NO: 438201 - DNA, 19 bp, Homo sapiens
  siRNA target sequence for DKFZp686A17109 (NM_198465.1,4904-4922).
gctgaagcgcaggtcaatt

SEQ ID NO: 438202 - DNA, 19 bp, Homo sapiens
  siRNA target sequence for DKFZp686A17109 (NM_198465.1,4905-4923).
ctgaagcgcaggtcaatta

SEQ ID NO: 438203 - DNA, 19 bp, Homo sapiens
  siRNA target sequence for DKFZp686A17109 (NM_198465.1,4918-4936).
caattaagaagctgagatt

SEQ ID NO: 438204 - DNA, 19 bp, Homo sapiens
  siRNA target sequence for DKFZp686A17109 (NM_198465.1,4950-4968).
ggtgacaagctgttcttta

SEQ ID NO: 438205 - DNA, 19 bp, Homo sapiens
  siRNA target sequence for DKFZp686A17109 (NM_198465.1,4986-5004).
caccacagccgggtttact

SEQ ID NO: 438206 - DNA, 19 bp, Homo sapiens
  siRNA target sequence for DKFZp686A17109 (NM_198465.1,4989-5007).
cacagccgggtttacttca

SEQ ID NO: 438207 - DNA, 19 bp, Homo sapiens
  siRNA target sequence for DKFZp686A17109 (NM_198465.1,5030-5048).
gctccaaagcaattatgat

SEQ ID NO: 438208 - DNA, 19 bp, Homo sapiens
  siRNA target sequence for FLJ42526 (NM_198467.1,80-98).
ccaccgtctcggagaaaga

SEQ ID NO: 438209 - DNA, 19 bp, Homo sapiens
  siRNA target sequence for FLJ42526 (NM_198467.1,601-619).
ccgctgccccgagataaaa

SEQ ID NO: 438210 - DNA, 19 bp, Homo sapiens
  siRNA target sequence for FLJ42526 (NM_198467.1,602-620).
cgctgccccgagataaaat

SEQ ID NO: 438211 - DNA, 19 bp, Homo sapiens
  siRNA target sequence for FLJ42526 (NM_198467.1,604-622).
ctgccccgagataaaatca

SEQ ID NO: 438212 - DNA, 19 bp, Homo sapiens
  siRNA target sequence for FLJ42526 (NM_198467.1,608-626).
cccgagataaaatcaaaga

SEQ ID NO: 438213 - DNA, 19 bp, Homo sapiens
  siRNA target sequence for FLJ42526 (NM_198467.1,765-783).
cttacaaattaaaaaggta

SEQ ID NO: 438214 - DNA, 19 bp, Homo sapiens
  siRNA target sequence for FLJ42526 (NM_198467.1,824-842).
ggaagcgtccgaaaatgta

SEQ ID NO: 438215 - DNA, 19 bp, Homo sapiens
  siRNA target sequence for FLJ42526 (NM_198467.1,876-894).
gctaactgatgttgaagat

SEQ ID NO: 438216 - DNA, 19 bp, Homo sapiens
  siRNA target sequence for FLJ42526 (NM_198467.1,902-920).
ccaaaggcatcctaaatga

SEQ ID NO: 438217 - DNA, 19 bp, Homo sapiens
  siRNA target sequence for FLJ42526 (NM_198467.1,931-949).
gattacgttgggaagaatt

SEQ ID NO: 438218 - DNA, 19 bp, Homo sapiens
  siRNA target sequence for FLJ42526 (NM_198467.1,936-954).
cgttgggaagaatttggat

SEQ ID NO: 438219 - DNA, 19 bp, Homo sapiens
  siRNA target sequence for FLJ42526 (NM_198467.1,941-959).
ggaagaatttggataccaa

SEQ ID NO: 438220 - DNA, 19 bp, Homo sapiens
  siRNA target sequence for FLJ42526 (NM_198467.1,952-970).
gataccaagaactatgatt

SEQ ID NO: 438221 - DNA, 19 bp, Homo sapiens
  siRNA target sequence for FLJ42526 (NM_198467.1,960-978).
gaactatgattccaaaatt

SEQ ID NO: 438222 - DNA, 19 bp, Homo sapiens
  siRNA target sequence for FLJ42526 (NM_198467.1,963-981).
ctatgattccaaaattcca

SEQ ID NO: 438223 - DNA, 19 bp, Homo sapiens
  siRNA target sequence for FLJ42526 (NM_198467.1,998-1016).
catttgtctcattaaagga

SEQ ID NO: 438224 - DNA, 19 bp, Homo sapiens
  siRNA target sequence for FLJ42526 (NM_198467.1,1015-1033).
gagccacgagttcagaata

SEQ ID NO: 438225 - DNA, 19 bp, Homo sapiens
  siRNA target sequence for FLJ42526 (NM_198467.1,1019-1037).
cacgagttcagaataacct

SEQ ID NO: 438226 - DNA, 19 bp, Homo sapiens
  siRNA target sequence for FLJ42526 (NM_198467.1,1027-1045).
cagaataacctcaaaaggt

SEQ ID NO: 438227 - DNA, 19 bp, Homo sapiens
  siRNA target sequence for FLJ42526 (NM_198467.1,1043-1061).
ggttggacactttggaatt

SEQ ID NO: 438228 - DNA, 19 bp, Homo sapiens
  siRNA target sequence for FLJ42526 (NM_198467.1,1044-1062).
gttggacactttggaattt

SEQ ID NO: 438229 - DNA, 19 bp, Homo sapiens
  siRNA target sequence for FLJ42526 (NM_198467.1,1097-1115).
gaggtgcatcggttatcca

SEQ ID NO: 438230 - DNA, 19 bp, Homo sapiens
  siRNA target sequence for FLJ42526 (NM_198467.1,1108-1126).
gttatccatgcctacagta

SEQ ID NO: 438231 - DNA, 19 bp, Homo sapiens
  siRNA target sequence for FLJ42526 (NM_198467.1,1113-1131).
ccatgcctacagtaacgaa

SEQ ID NO: 438232 - DNA, 19 bp, Homo sapiens
  siRNA target sequence for FLJ42526 (NM_198467.1,1221-1239).
ctacgtgatgggtattgtt

SEQ ID NO: 438233 - DNA, 19 bp, Homo sapiens
  siRNA target sequence for FLJ42526 (NM_198467.1,1224-1242).
cgtgatgggtattgttcat

SEQ ID NO: 438234 - DNA, 19 bp, Homo sapiens
  siRNA target sequence for FLJ42526 (NM_198467.1,1331-1349).
caacgactatgtccaattt

SEQ ID NO: 438235 - DNA, 19 bp, Homo sapiens
  siRNA target sequence for FLJ42526 (NM_198467.1,1334-1352).
cgactatgtccaattttca

SEQ ID NO: 438236 - DNA, 19 bp, Homo sapiens
  siRNA target sequence for FLJ42526 (NM_198467.1,1335-1353).
gactatgtccaattttcat

SEQ ID NO: 438237 - DNA, 19 bp, Homo sapiens
  siRNA target sequence for FLJ42526 (NM_198467.1,1357-1375).
caggtaaaaagaacgtatt

SEQ ID NO: 438238 - DNA, 19 bp, Homo sapiens
  siRNA target sequence for FLJ42526 (NM_198467.1,1359-1377).
ggtaaaaagaacgtattct

SEQ ID NO: 438239 - DNA, 19 bp, Homo sapiens
  siRNA target sequence for FLJ42526 (NM_198467.1,1370-1388).
cgtattctcatggtactta

SEQ ID NO: 438240 - DNA, 19 bp, Homo sapiens
  siRNA target sequence for FLJ42526 (NM_198467.1,1389-1407).
cagagctggcccaatgaga

SEQ ID NO: 438241 - DNA, 19 bp, Homo sapiens
  siRNA target sequence for FLJ42526 (NM_198467.1,1396-1414).
ggcccaatgagacaaataa

SEQ ID NO: 438242 - DNA, 19 bp, Homo sapiens
  siRNA target sequence for FLJ42526 (NM_198467.1,1399-1417).
ccaatgagacaaataagct

SEQ ID NO: 438243 - DNA, 19 bp, Homo sapiens
  siRNA target sequence for FLJ42526 (NM_198467.1,1416-1434).
cttggtgggagcagttgat

SEQ ID NO: 438244 - DNA, 19 bp, Homo sapiens
  siRNA target sequence for FLJ42526 (NM_198467.1,1507-1525).
ccatgggggacgctatcta

SEQ ID NO: 438245 - DNA, 19 bp, Homo sapiens
  siRNA target sequence for FLJ42526 (NM_198467.1,1512-1530).
ggggacgctatctagtcta

SEQ ID NO: 438246 - DNA, 19 bp, Homo sapiens
  siRNA target sequence for FLJ42526 (NM_198467.1,1513-1531).
gggacgctatctagtctaa

SEQ ID NO: 438247 - DNA, 19 bp, Homo sapiens
  siRNA target sequence for FLJ42526 (NM_198467.1,1514-1532).
ggacgctatctagtctaaa

SEQ ID NO: 438248 - DNA, 19 bp, Homo sapiens
  siRNA target sequence for FLJ42526 (NM_198467.1,1515-1533).
gacgctatctagtctaaaa

SEQ ID NO: 438249 - DNA, 19 bp, Homo sapiens
  siRNA target sequence for FLJ42526 (NM_198467.1,1517-1535).
cgctatctagtctaaaatt

SEQ ID NO: 438250 - DNA, 19 bp, Homo sapiens
  siRNA target sequence for FLJ42526 (NM_198467.1,1539-1557).
gagtcgaaaagatagtgat

SEQ ID NO: 438251 - DNA, 19 bp, Homo sapiens
  siRNA target sequence for FLJ42526 (NM_198467.1,1691-1709).
cccgtgagatgctctttga

SEQ ID NO: 438252 - DNA, 19 bp, Homo sapiens
  siRNA target sequence for FLJ42526 (NM_198467.1,1692-1710).
ccgtgagatgctctttgaa

SEQ ID NO: 438253 - DNA, 19 bp, Homo sapiens
  siRNA target sequence for FLJ42526 (NM_198467.1,1810-1828).
cctgatcaaccccgtataa

SEQ ID NO: 438254 - DNA, 19 bp, Homo sapiens
  siRNA target sequence for FLJ42526 (NM_198467.1,1813-1831).
gatcaaccccgtataacca

SEQ ID NO: 438255 - DNA, 19 bp, Homo sapiens
  siRNA target sequence for FLJ42526 (NM_198467.1,1876-1894).
caacgaatgcagttagatt

SEQ ID NO: 438256 - DNA, 19 bp, Homo sapiens
  siRNA target sequence for FLJ42526 (NM_198467.1,1880-1898).
gaatgcagttagatttaca

SEQ ID NO: 438257 - DNA, 19 bp, Homo sapiens
  siRNA target sequence for FLJ42526 (NM_198467.1,1884-1902).
gcagttagatttacatgaa

SEQ ID NO: 438258 - DNA, 19 bp, Homo sapiens
  siRNA target sequence for FLJ42526 (NM_198467.1,1982-2000).
ggattcagctatatgataa

SEQ ID NO: 438259 - DNA, 19 bp, Homo sapiens
  siRNA target sequence for FLJ42526 (NM_198467.1,1983-2001).
gattcagctatatgataat

SEQ ID NO: 438260 - DNA, 19 bp, Homo sapiens
  siRNA target sequence for FLJ42526 (NM_198467.1,2026-2044).
gttgttcatcagttcaaga

SEQ ID NO: 438261 - DNA, 19 bp, Homo sapiens
  siRNA target sequence for FLJ42526 (NM_198467.1,2053-2071).
gctgtatgcagtttagcat

SEQ ID NO: 438262 - DNA, 19 bp, Homo sapiens
  siRNA target sequence for FLJ42526 (NM_198467.1,2072-2090).
ggcatattcggctcaaatt

SEQ ID NO: 438263 - DNA, 19 bp, Homo sapiens
  siRNA target sequence for FLJ42526 (NM_198467.1,2073-2091).
gcatattcggctcaaatta

SEQ ID NO: 438264 - DNA, 19 bp, Homo sapiens
  siRNA target sequence for FLJ42526 (NM_198467.1,2074-2092).
catattcggctcaaattat

SEQ ID NO: 438265 - DNA, 19 bp, Homo sapiens
  siRNA target sequence for FLJ42526 (NM_198467.1,2106-2124).
ggacacttctcagaataca

SEQ ID NO: 438266 - DNA, 19 bp, Homo sapiens
  siRNA target sequence for FLJ42526 (NM_198467.1,2118-2136).
gaatacagctactcatgaa

SEQ ID NO: 438267 - DNA, 19 bp, Homo sapiens
  siRNA target sequence for FLJ42526 (NM_198467.1,2193-2211).
gatttgtgctgtaagcaaa

SEQ ID NO: 438268 - DNA, 19 bp, Homo sapiens
  siRNA target sequence for FLJ42526 (NM_198467.1,2268-2286).
gattaaacatgaacctatt

SEQ ID NO: 438269 - DNA, 19 bp, Homo sapiens
  siRNA target sequence for FLJ42526 (NM_198467.1,2278-2296).
gaacctattgcatctgtaa

SEQ ID NO: 438270 - DNA, 19 bp, Homo sapiens
  siRNA target sequence for FLJ42526 (NM_198467.1,2337-2355).
gactacagcactgaataat

SEQ ID NO: 438271 - DNA, 19 bp, Homo sapiens
  siRNA target sequence for FLJ42526 (NM_198467.1,2342-2360).
cagcactgaataatatgga

SEQ ID NO: 438272 - DNA, 19 bp, Homo sapiens
  siRNA target sequence for FLJ42526 (NM_198467.1,2385-2403).
ggatcatgttcaatttgca

SEQ ID NO: 438273 - DNA, 19 bp, Homo sapiens
  siRNA target sequence for FLJ42526 (NM_198467.1,2401-2419).
gcagaatttaagattgaca

SEQ ID NO: 438274 - DNA, 19 bp, Homo sapiens
  siRNA target sequence for FLJ42526 (NM_198467.1,2418-2436).
catggattctaaatttgaa

SEQ ID NO: 438275 - DNA, 19 bp, Homo sapiens
  siRNA target sequence for FLJ42526 (NM_198467.1,2466-2484).
gtgccctggaaatctaagt

SEQ ID NO: 438276 - DNA, 19 bp, Homo sapiens
  siRNA target sequence for FLJ42526 (NM_198467.1,2468-2486).
gccctggaaatctaagtct

SEQ ID NO: 438277 - DNA, 19 bp, Homo sapiens
  siRNA target sequence for FLJ42526 (NM_198467.1,2469-2487).
ccctggaaatctaagtcta

SEQ ID NO: 438278 - DNA, 19 bp, Homo sapiens
  siRNA target sequence for FLJ42526 (NM_198467.1,2474-2492).
gaaatctaagtctagttga

SEQ ID NO: 438279 - DNA, 19 bp, Homo sapiens
  siRNA target sequence for FLJ42526 (NM_198467.1,2479-2497).
ctaagtctagttgatacaa

SEQ ID NO: 438280 - DNA, 19 bp, Homo sapiens
  siRNA target sequence for C6orf167 (NM_198468.1,335-353).
gtgcaaacctccttacttt

SEQ ID NO: 438281 - DNA, 19 bp, Homo sapiens
  siRNA target sequence for C6orf167 (NM_198468.1,418-436).
gagcccttaagcgattgat

SEQ ID NO: 438282 - DNA, 19 bp, Homo sapiens
  siRNA target sequence for C6orf167 (NM_198468.1,420-438).
gcccttaagcgattgattt

SEQ ID NO: 438283 - DNA, 19 bp, Homo sapiens
  siRNA target sequence for C6orf167 (NM_198468.1,421-439).
cccttaagcgattgatttt

SEQ ID NO: 438284 - DNA, 19 bp, Homo sapiens
  siRNA target sequence for C6orf167 (NM_198468.1,423-441).
cttaagcgattgattttga

SEQ ID NO: 438285 - DNA, 19 bp, Homo sapiens
  siRNA target sequence for C6orf167 (NM_198468.1,428-446).
gcgattgattttgaatctt

SEQ ID NO: 438286 - DNA, 19 bp, Homo sapiens
  siRNA target sequence for C6orf167 (NM_198468.1,516-534).
gcattagtgaattcatcta

SEQ ID NO: 438287 - DNA, 19 bp, Homo sapiens
  siRNA target sequence for C6orf167 (NM_198468.1,556-574).
ggcaacaactgtacaactt

SEQ ID NO: 438288 - DNA, 19 bp, Homo sapiens
  siRNA target sequence for C6orf167 (NM_198468.1,624-642).
cactgcaaagcagacaata

SEQ ID NO: 438289 - DNA, 19 bp, Homo sapiens
  siRNA target sequence for C6orf167 (NM_198468.1,710-728).
gaatgctgagagtcatgtt

SEQ ID NO: 438290 - DNA, 19 bp, Homo sapiens
  siRNA target sequence for C6orf167 (NM_198468.1,761-779).
gcttccctcagtgttgatt

SEQ ID NO: 438291 - DNA, 19 bp, Homo sapiens
  siRNA target sequence for C6orf167 (NM_198468.1,783-801).
gagcttcatggattactct

SEQ ID NO: 438292 - DNA, 19 bp, Homo sapiens
  siRNA target sequence for C6orf167 (NM_198468.1,858-876).
caaaaccagattaagcttt

SEQ ID NO: 438293 - DNA, 19 bp, Homo sapiens
  siRNA target sequence for C6orf167 (NM_198468.1,879-897).
ccaccgtcatggcatttat

SEQ ID NO: 438294 - DNA, 19 bp, Homo sapiens
  siRNA target sequence for C6orf167 (NM_198468.1,880-898).
caccgtcatggcatttatt

SEQ ID NO: 438295 - DNA, 19 bp, Homo sapiens
  siRNA target sequence for C6orf167 (NM_198468.1,903-921).
ctccacttggatatacatt

SEQ ID NO: 438296 - DNA, 19 bp, Homo sapiens
  siRNA target sequence for C6orf167 (NM_198468.1,918-936).
cattggctggtgctagaaa

SEQ ID NO: 438297 - DNA, 19 bp, Homo sapiens
  siRNA target sequence for C6orf167 (NM_198468.1,922-940).
ggctggtgctagaaattct

SEQ ID NO: 438298 - DNA, 19 bp, Homo sapiens
  siRNA target sequence for C6orf167 (NM_198468.1,924-942).
ctggtgctagaaattcttt

SEQ ID NO: 438299 - DNA, 19 bp, Homo sapiens
  siRNA target sequence for C6orf167 (NM_198468.1,972-990).
gtatatggtcatcagttta

SEQ ID NO: 438300 - DNA, 19 bp, Homo sapiens
  siRNA target sequence for C6orf167 (NM_198468.1,996-1014).
ctggcaagtgacaatttaa

SEQ ID NO: 438301 - DNA, 19 bp, Homo sapiens
  siRNA target sequence for C6orf167 (NM_198468.1,1019-1037).
catcagcctatttgaagaa

SEQ ID NO: 438302 - DNA, 19 bp, Homo sapiens
  siRNA target sequence for C6orf167 (NM_198468.1,1025-1043).
cctatttgaagaacattgt

SEQ ID NO: 438303 - DNA, 19 bp, Homo sapiens
  siRNA target sequence for C6orf167 (NM_198468.1,1042-1060).
gtgaaactctcctttgtga

SEQ ID NO: 438304 - DNA, 19 bp, Homo sapiens
  siRNA target sequence for C6orf167 (NM_198468.1,1094-1112).
ggttaggtcttctgaatca

SEQ ID NO: 438305 - DNA, 19 bp, Homo sapiens
  siRNA target sequence for C6orf167 (NM_198468.1,1095-1113).
gttaggtcttctgaatcat

SEQ ID NO: 438306 - DNA, 19 bp, Homo sapiens
  siRNA target sequence for C6orf167 (NM_198468.1,1099-1117).
ggtcttctgaatcattaat

SEQ ID NO: 438307 - DNA, 19 bp, Homo sapiens
  siRNA target sequence for C6orf167 (NM_198468.1,1120-1138).
gtgaccagtgtccatgttt

SEQ ID NO: 438308 - DNA, 19 bp, Homo sapiens
  siRNA target sequence for C6orf167 (NM_198468.1,1157-1175).
ggttctacttattcatctt

SEQ ID NO: 438309 - DNA, 19 bp, Homo sapiens
  siRNA target sequence for C6orf167 (NM_198468.1,1179-1197).
gaccacagaagtaaatggt

SEQ ID NO: 438310 - DNA, 19 bp, Homo sapiens
  siRNA target sequence for C6orf167 (NM_198468.1,1195-1213).
ggtttgtctcggaatcatt

SEQ ID NO: 438311 - DNA, 19 bp, Homo sapiens
  siRNA target sequence for C6orf167 (NM_198468.1,1276-1294).
cctctatgcctgtaatcca

SEQ ID NO: 438312 - DNA, 19 bp, Homo sapiens
  siRNA target sequence for C6orf167 (NM_198468.1,1292-1310).
ccagtccagggatccatta

SEQ ID NO: 438313 - DNA, 19 bp, Homo sapiens
  siRNA target sequence for C6orf167 (NM_198468.1,1301-1319).
ggatccattaggttttagt

SEQ ID NO: 438314 - DNA, 19 bp, Homo sapiens
  siRNA target sequence for C6orf167 (NM_198468.1,1302-1320).
gatccattaggttttagtt

SEQ ID NO: 438315 - DNA, 19 bp, Homo sapiens
  siRNA target sequence for C6orf167 (NM_198468.1,1311-1329).
ggttttagttggtggatta

SEQ ID NO: 438316 - DNA, 19 bp, Homo sapiens
  siRNA target sequence for C6orf167 (NM_198468.1,1312-1330).
gttttagttggtggattat

SEQ ID NO: 438317 - DNA, 19 bp, Homo sapiens
  siRNA target sequence for C6orf167 (NM_198468.1,1318-1336).
gttggtggattattactca

SEQ ID NO: 438318 - DNA, 19 bp, Homo sapiens
  siRNA target sequence for C6orf167 (NM_198468.1,1322-1340).
gtggattattactcatgta

SEQ ID NO: 438319 - DNA, 19 bp, Homo sapiens
  siRNA target sequence for C6orf167 (NM_198468.1,1333-1351).
ctcatgtagcatcatttta

SEQ ID NO: 438320 - DNA, 19 bp, Homo sapiens
  siRNA target sequence for C6orf167 (NM_198468.1,1365-1383).
catggagtaccagatgaaa

SEQ ID NO: 438321 - DNA, 19 bp, Homo sapiens
  siRNA target sequence for C6orf167 (NM_198468.1,1439-1457).
cagtgttcagggtgtcatt

SEQ ID NO: 438322 - DNA, 19 bp, Homo sapiens
  siRNA target sequence for C6orf167 (NM_198468.1,1513-1531).
gggagccaaacattgcaat

SEQ ID NO: 438323 - DNA, 19 bp, Homo sapiens
  siRNA target sequence for C6orf167 (NM_198468.1,1514-1532).
ggagccaaacattgcaatt

SEQ ID NO: 438324 - DNA, 19 bp, Homo sapiens
  siRNA target sequence for C6orf167 (NM_198468.1,1537-1555).
ccattttatgggaatatta

SEQ ID NO: 438325 - DNA, 19 bp, Homo sapiens
  siRNA target sequence for C6orf167 (NM_198468.1,1568-1586).
gaatagttccttcagtatt

SEQ ID NO: 438326 - DNA, 19 bp, Homo sapiens
  siRNA target sequence for C6orf167 (NM_198468.1,1608-1626).
cttgctaataccatgaagt

SEQ ID NO: 438327 - DNA, 19 bp, Homo sapiens
  siRNA target sequence for C6orf167 (NM_198468.1,1629-1647).
cccttgtctatgcttgaaa

SEQ ID NO: 438328 - DNA, 19 bp, Homo sapiens
  siRNA target sequence for C6orf167 (NM_198468.1,1630-1648).
ccttgtctatgcttgaaat

SEQ ID NO: 438329 - DNA, 19 bp, Homo sapiens
  siRNA target sequence for C6orf167 (NM_198468.1,1655-1673).
gacttgctgttgcgataaa

SEQ ID NO: 438330 - DNA, 19 bp, Homo sapiens
  siRNA target sequence for C6orf167 (NM_198468.1,1657-1675).
cttgctgttgcgataaaca

SEQ ID NO: 438331 - DNA, 19 bp, Homo sapiens
  siRNA target sequence for C6orf167 (NM_198468.1,1661-1679).
ctgttgcgataaacaagat

SEQ ID NO: 438332 - DNA, 19 bp, Homo sapiens
  siRNA target sequence for C6orf167 (NM_198468.1,1677-1695).
gatcaggaactatataaat

SEQ ID NO: 438333 - DNA, 19 bp, Homo sapiens
  siRNA target sequence for C6orf167 (NM_198468.1,1696-1714).
ccagcagtagttatactat

SEQ ID NO: 438334 - DNA, 19 bp, Homo sapiens
  siRNA target sequence for C6orf167 (NM_198468.1,1728-1746).
ctggcaaaagttgttaaaa

SEQ ID NO: 438335 - DNA, 19 bp, Homo sapiens
  siRNA target sequence for C6orf167 (NM_198468.1,1768-1786).
ctcatccttggaaacaagt

SEQ ID NO: 438336 - DNA, 19 bp, Homo sapiens
  siRNA target sequence for C6orf167 (NM_198468.1,1885-1903).
ctgttgcagaggtagaaga

SEQ ID NO: 438337 - DNA, 19 bp, Homo sapiens
  siRNA target sequence for C6orf167 (NM_198468.1,1902-1920).
gatgttgcaagtcatgttt

SEQ ID NO: 438338 - DNA, 19 bp, Homo sapiens
  siRNA target sequence for C6orf167 (NM_198468.1,1991-2009).
ggccttcctcttgatgtat

SEQ ID NO: 438339 - DNA, 19 bp, Homo sapiens
  siRNA target sequence for C6orf167 (NM_198468.1,2032-2050).
gtgttttggctgagaaatt

SEQ ID NO: 438340 - DNA, 19 bp, Homo sapiens
  siRNA target sequence for C6orf167 (NM_198468.1,2058-2076).
gctttccgggagaaagcaa

SEQ ID NO: 438341 - DNA, 19 bp, Homo sapiens
  siRNA target sequence for C6orf167 (NM_198468.1,2059-2077).
ctttccgggagaaagcaaa

SEQ ID NO: 438342 - DNA, 19 bp, Homo sapiens
  siRNA target sequence for C6orf167 (NM_198468.1,2064-2082).
cgggagaaagcaaaggaat

SEQ ID NO: 438343 - DNA, 19 bp, Homo sapiens
  siRNA target sequence for C6orf167 (NM_198468.1,2079-2097).
gaattcttggtgtctaaga

SEQ ID NO: 438344 - DNA, 19 bp, Homo sapiens
  siRNA target sequence for C6orf167 (NM_198468.1,2166-2184).
gtgtttgagaccagctatt

SEQ ID NO: 438345 - DNA, 19 bp, Homo sapiens
  siRNA target sequence for C6orf167 (NM_198468.1,2174-2192).
gaccagctattgcttgtat

SEQ ID NO: 438346 - DNA, 19 bp, Homo sapiens
  siRNA target sequence for C6orf167 (NM_198468.1,2210-2228).
gcttaatgatggatttagt

SEQ ID NO: 438347 - DNA, 19 bp, Homo sapiens
  siRNA target sequence for C6orf167 (NM_198468.1,2211-2229).
cttaatgatggatttagta

SEQ ID NO: 438348 - DNA, 19 bp, Homo sapiens
  siRNA target sequence for C6orf167 (NM_198468.1,2237-2255).
gcgagcatgtcgagaatct

SEQ ID NO: 438349 - DNA, 19 bp, Homo sapiens
  siRNA target sequence for C6orf167 (NM_198468.1,2256-2274).
gaacttaggacagtattga

SEQ ID NO: 438350 - DNA, 19 bp, Homo sapiens
  siRNA target sequence for C6orf167 (NM_198468.1,2341-2359).
gggacaatgtggacctatt

SEQ ID NO: 438351 - DNA, 19 bp, Homo sapiens
  siRNA target sequence for C6orf167 (NM_198468.1,2345-2363).
caatgtggacctatttgta

SEQ ID NO: 438352 - DNA, 19 bp, Homo sapiens
  siRNA target sequence for C6orf167 (NM_198468.1,2368-2386).
cttcattatcggctaaaga

SEQ ID NO: 438353 - DNA, 19 bp, Homo sapiens
  siRNA target sequence for C6orf167 (NM_198468.1,2417-2435).
gtggagacatttcttttca

SEQ ID NO: 438354 - DNA, 19 bp, Homo sapiens
  siRNA target sequence for C6orf167 (NM_198468.1,2490-2508).
gcagctgcagactttactt

SEQ ID NO: 438355 - DNA, 19 bp, Homo sapiens
  siRNA target sequence for C6orf167 (NM_198468.1,2491-2509).
cagctgcagactttacttt

SEQ ID NO: 438356 - DNA, 19 bp, Homo sapiens
  siRNA target sequence for C6orf167 (NM_198468.1,2556-2574).
cagccagttatatcaatta

SEQ ID NO: 438357 - DNA, 19 bp, Homo sapiens
  siRNA target sequence for C6orf167 (NM_198468.1,2558-2576).
gccagttatatcaattatt

SEQ ID NO: 438358 - DNA, 19 bp, Homo sapiens
  siRNA target sequence for C6orf167 (NM_198468.1,2586-2604).
ggttgggatgatatcatct

SEQ ID NO: 438359 - DNA, 19 bp, Homo sapiens
  siRNA target sequence for C6orf167 (NM_198468.1,2694-2712).
caagccttaaccgtaagat

SEQ ID NO: 438360 - DNA, 19 bp, Homo sapiens
  siRNA target sequence for C6orf167 (NM_198468.1,2697-2715).
gccttaaccgtaagatcat

SEQ ID NO: 438361 - DNA, 19 bp, Homo sapiens
  siRNA target sequence for C6orf167 (NM_198468.1,2706-2724).
gtaagatcatggattcgtt

SEQ ID NO: 438362 - DNA, 19 bp, Homo sapiens
  siRNA target sequence for C6orf167 (NM_198468.1,2716-2734).
ggattcgttgtgttttgca

SEQ ID NO: 438363 - DNA, 19 bp, Homo sapiens
  siRNA target sequence for C6orf167 (NM_198468.1,2717-2735).
gattcgttgtgttttgcaa

SEQ ID NO: 438364 - DNA, 19 bp, Homo sapiens
  siRNA target sequence for C6orf167 (NM_198468.1,2763-2781).
gatgatttgctcatagata

SEQ ID NO: 438365 - DNA, 19 bp, Homo sapiens
  siRNA target sequence for C6orf167 (NM_198468.1,2825-2843).
ggtcaaactgacaagatta

SEQ ID NO: 438366 - DNA, 19 bp, Homo sapiens
  siRNA target sequence for C6orf167 (NM_198468.1,2828-2846).
caaactgacaagattacta

SEQ ID NO: 438367 - DNA, 19 bp, Homo sapiens
  siRNA target sequence for C6orf167 (NM_198468.1,2855-2873).
ctcagaagtaaagagtatt

SEQ ID NO: 438368 - DNA, 19 bp, Homo sapiens
  siRNA target sequence for C6orf167 (NM_198468.1,2943-2961).
gaggctgttggtgtaactt

SEQ ID NO: 438369 - DNA, 19 bp, Homo sapiens
  siRNA target sequence for C6orf167 (NM_198468.1,2970-2988).
gtccagacactttctgata

SEQ ID NO: 438370 - DNA, 19 bp, Homo sapiens
  siRNA target sequence for C6orf167 (NM_198468.1,2972-2990).
ccagacactttctgataaa

SEQ ID NO: 438371 - DNA, 19 bp, Homo sapiens
  siRNA target sequence for C6orf167 (NM_198468.1,2975-2993).
gacactttctgataaatct

SEQ ID NO: 438372 - DNA, 19 bp, Homo sapiens
  siRNA target sequence for C6orf167 (NM_198468.1,3004-3022).
caaagtccttggaatacct

SEQ ID NO: 438373 - DNA, 19 bp, Homo sapiens
  siRNA target sequence for C6orf167 (NM_198468.1,3167-3185).
ccggatcatagattgttta

SEQ ID NO: 438374 - DNA, 19 bp, Homo sapiens
  siRNA target sequence for C6orf167 (NM_198468.1,3169-3187).
ggatcatagattgtttact

SEQ ID NO: 438375 - DNA, 19 bp, Homo sapiens
  siRNA target sequence for C6orf167 (NM_198468.1,3222-3240).
ctgcctgcacctatgttgt

SEQ ID NO: 438376 - DNA, 19 bp, Homo sapiens
  siRNA target sequence for C6orf167 (NM_198468.1,3281-3299).
gtgtatcgtgtgttgtcaa

SEQ ID NO: 438377 - DNA, 19 bp, Homo sapiens
  siRNA target sequence for C6orf167 (NM_198468.1,3287-3305).
cgtgtgttgtcaatctcaa

SEQ ID NO: 438378 - DNA, 19 bp, Homo sapiens
  siRNA target sequence for C6orf167 (NM_198468.1,3288-3306).
gtgtgttgtcaatctcaaa

SEQ ID NO: 438379 - DNA, 19 bp, Homo sapiens
  siRNA target sequence for C6orf167 (NM_198468.1,3327-3345).
caattgctagggaatgtta

SEQ ID NO: 438380 - DNA, 19 bp, Homo sapiens
  siRNA target sequence for C6orf167 (NM_198468.1,3353-3371).
gtatattgggcgatttctt

SEQ ID NO: 438381 - DNA, 19 bp, Homo sapiens
  siRNA target sequence for C6orf167 (NM_198468.1,3638-3656).
cagtgaaccacaagttaaa

SEQ ID NO: 438382 - DNA, 19 bp, Homo sapiens
  siRNA target sequence for C6orf167 (NM_198468.1,3667-3685).
cagagaacctgcaatacat

SEQ ID NO: 438383 - DNA, 19 bp, Homo sapiens
  siRNA target sequence for C6orf167 (NM_198468.1,3834-3852).
gtcatccacttgatttcta

SEQ ID NO: 438384 - DNA, 19 bp, Homo sapiens
  siRNA target sequence for C6orf167 (NM_198468.1,3889-3907).
ggggccttggcaggaatat

SEQ ID NO: 438385 - DNA, 19 bp, Homo sapiens
  siRNA target sequence for C6orf167 (NM_198468.1,3893-3911).
ccttggcaggaatatagca

SEQ ID NO: 438386 - DNA, 19 bp, Homo sapiens
  siRNA target sequence for C6orf167 (NM_198468.1,3917-3935).
ggaagcctatagcaaactt

SEQ ID NO: 438387 - DNA, 19 bp, Homo sapiens
  siRNA target sequence for C6orf167 (NM_198468.1,3918-3936).
gaagcctatagcaaacttt

SEQ ID NO: 438388 - DNA, 19 bp, Homo sapiens
  siRNA target sequence for C6orf167 (NM_198468.1,3921-3939).
gcctatagcaaacttttgt

SEQ ID NO: 438389 - DNA, 19 bp, Homo sapiens
  siRNA target sequence for C6orf167 (NM_198468.1,3923-3941).
ctatagcaaacttttgtct

SEQ ID NO: 438390 - DNA, 19 bp, Homo sapiens
  siRNA target sequence for FLJ46909 (NM_198469.1,66-84).
gagtacacagggagcaaat

SEQ ID NO: 438391 - DNA, 19 bp, Homo sapiens
  siRNA target sequence for FLJ46909 (NM_198469.1,68-86).
gtacacagggagcaaatat

SEQ ID NO: 438392 - DNA, 19 bp, Homo sapiens
  siRNA target sequence for FLJ46909 (NM_198469.1,134-152).
cctccctaccgaaacaata

SEQ ID NO: 438393 - DNA, 19 bp, Homo sapiens
  siRNA target sequence for FLJ46909 (NM_198469.1,135-153).
ctccctaccgaaacaatat

SEQ ID NO: 438394 - DNA, 19 bp, Homo sapiens
  siRNA target sequence for FLJ46909 (NM_198469.1,137-155).
ccctaccgaaacaatatat

SEQ ID NO: 438395 - DNA, 19 bp, Homo sapiens
  siRNA target sequence for FLJ46909 (NM_198469.1,139-157).
ctaccgaaacaatatatgt

SEQ ID NO: 438396 - DNA, 19 bp, Homo sapiens
  siRNA target sequence for FLJ46909 (NM_198469.1,208-226).
ccagcggaagccaatacga

SEQ ID NO: 438397 - DNA, 19 bp, Homo sapiens
  siRNA target sequence for FLJ46909 (NM_198469.1,249-267).
gccataaagggcacatata

SEQ ID NO: 438398 - DNA, 19 bp, Homo sapiens
  siRNA target sequence for FLJ46909 (NM_198469.1,294-312).
gagaaaaactggcattact

SEQ ID NO: 438399 - DNA, 19 bp, Homo sapiens
  siRNA target sequence for FLJ46909 (NM_198469.1,376-394).
ctcaactcaccaatatgga

SEQ ID NO: 438400 - DNA, 19 bp, Homo sapiens
  siRNA target sequence for FLJ46909 (NM_198469.1,410-428).
ccccaagggctattacgat

SEQ ID NO: 438401 - DNA, 19 bp, Homo sapiens
  siRNA target sequence for FLJ46909 (NM_198469.1,411-429).
cccaagggctattacgatt

SEQ ID NO: 438402 - DNA, 19 bp, Homo sapiens
  siRNA target sequence for FLJ46909 (NM_198469.1,430-448).
gtggagacggcttctataa

SEQ ID NO: 438403 - DNA, 19 bp, Homo sapiens
  siRNA target sequence for FLJ46909 (NM_198469.1,462-480).
gtagtcaaggactatagga

SEQ ID NO: 438404 - DNA, 19 bp, Homo sapiens
  siRNA target sequence for FLJ26016 (NM_198472.1,103-121).
gttcttgcggacttgaact

SEQ ID NO: 438405 - DNA, 19 bp, Homo sapiens
  siRNA target sequence for FLJ26016 (NM_198472.1,357-375).
gatagagaggtttgagttt

SEQ ID NO: 438406 - DNA, 19 bp, Homo sapiens
  siRNA target sequence for FLJ46111 (NM_198473.1,958-976).
ggcatgcatcagatcaagt

SEQ ID NO: 438407 - DNA, 19 bp, Homo sapiens
  siRNA target sequence for FLJ46111 (NM_198473.1,1035-1053).
ggagatctctgagattaat

SEQ ID NO: 438408 - DNA, 19 bp, Homo sapiens
  siRNA target sequence for UNQ564 (NM_198474.1,236-254).
gagcaagggctggaaaaat

SEQ ID NO: 438409 - DNA, 19 bp, Homo sapiens
  siRNA target sequence for UNQ564 (NM_198474.1,264-282).
caacgagggcatacattca

SEQ ID NO: 438410 - DNA, 19 bp, Homo sapiens
  siRNA target sequence for UNQ564 (NM_198474.1,267-285).
cgagggcatacattcaaga

SEQ ID NO: 438411 - DNA, 19 bp, Homo sapiens
  siRNA target sequence for UNQ564 (NM_198474.1,270-288).
gggcatacattcaagaatt

SEQ ID NO: 438412 - DNA, 19 bp, Homo sapiens
  siRNA target sequence for UNQ564 (NM_198474.1,273-291).
catacattcaagaattcca

SEQ ID NO: 438413 - DNA, 19 bp, Homo sapiens
  siRNA target sequence for UNQ564 (NM_198474.1,390-408).
gtgcccaacgggagattga

SEQ ID NO: 438414 - DNA, 19 bp, Homo sapiens
  siRNA target sequence for UNQ564 (NM_198474.1,392-410).
gcccaacgggagattgact

SEQ ID NO: 438415 - DNA, 19 bp, Homo sapiens
  siRNA target sequence for UNQ564 (NM_198474.1,393-411).
cccaacgggagattgacta

SEQ ID NO: 438416 - DNA, 19 bp, Homo sapiens
  siRNA target sequence for UNQ564 (NM_198474.1,547-565).
gggcataaagtctttgaaa

SEQ ID NO: 438417 - DNA, 19 bp, Homo sapiens
  siRNA target sequence for UNQ564 (NM_198474.1,631-649).
ggtgtacttattaattgga

SEQ ID NO: 438418 - DNA, 19 bp, Homo sapiens
  siRNA target sequence for UNQ564 (NM_198474.1,632-650).
gtgtacttattaattggat

SEQ ID NO: 438419 - DNA, 19 bp, Homo sapiens
  siRNA target sequence for UNQ564 (NM_198474.1,687-705).
gggcattcatggaggataa

SEQ ID NO: 438420 - DNA, 19 bp, Homo sapiens
  siRNA target sequence for UNQ564 (NM_198474.1,719-737).
ccccggaagcaaatcctaa

SEQ ID NO: 438421 - DNA, 19 bp, Homo sapiens
  siRNA target sequence for UNQ564 (NM_198474.1,756-774).
caggccaagtgatctacaa

SEQ ID NO: 438422 - DNA, 19 bp, Homo sapiens
  siRNA target sequence for UNQ564 (NM_198474.1,766-784).
gatctacaaaggttttcta

SEQ ID NO: 438423 - DNA, 19 bp, Homo sapiens
  siRNA target sequence for UNQ564 (NM_198474.1,791-809).
cataaccaagcaacttcta

SEQ ID NO: 438424 - DNA, 19 bp, Homo sapiens
  siRNA target sequence for UNQ564 (NM_198474.1,797-815).
caagcaacttctaatgaga

SEQ ID NO: 438425 - DNA, 19 bp, Homo sapiens
  siRNA target sequence for UNQ564 (NM_198474.1,874-892).
ggtaggccgagcattggtt

SEQ ID NO: 438426 - DNA, 19 bp, Homo sapiens
  siRNA target sequence for UNQ564 (NM_198474.1,875-893).
gtaggccgagcattggttt

SEQ ID NO: 438427 - DNA, 19 bp, Homo sapiens
  siRNA target sequence for UNQ564 (NM_198474.1,879-897).
gccgagcattggtttacca

SEQ ID NO: 438428 - DNA, 19 bp, Homo sapiens
  siRNA target sequence for UNQ564 (NM_198474.1,896-914).
cagcactccccctcaactt

SEQ ID NO: 438429 - DNA, 19 bp, Homo sapiens
  siRNA target sequence for UNQ564 (NM_198474.1,899-917).
cactccccctcaacttaca

SEQ ID NO: 438430 - DNA, 19 bp, Homo sapiens
  siRNA target sequence for UNQ564 (NM_198474.1,901-919).
ctccccctcaacttacatt

SEQ ID NO: 438431 - DNA, 19 bp, Homo sapiens
  siRNA target sequence for UNQ564 (NM_198474.1,903-921).
ccccctcaacttacattga

SEQ ID NO: 438432 - DNA, 19 bp, Homo sapiens
  siRNA target sequence for UNQ564 (NM_198474.1,978-996).
gccatttggttctcacaaa

SEQ ID NO: 438433 - DNA, 19 bp, Homo sapiens
  siRNA target sequence for UNQ564 (NM_198474.1,1075-1093).
cttgtgtggggttctctat

SEQ ID NO: 438434 - DNA, 19 bp, Homo sapiens
  siRNA target sequence for UNQ564 (NM_198474.1,1145-1163).
gatccactgggcactatca

SEQ ID NO: 438435 - DNA, 19 bp, Homo sapiens
  siRNA target sequence for UNQ564 (NM_198474.1,1169-1187).
gaggacttgcccaacttgt

SEQ ID NO: 438436 - DNA, 19 bp, Homo sapiens
  siRNA target sequence for UNQ564 (NM_198474.1,1172-1190).
gacttgcccaacttgttct

SEQ ID NO: 438437 - DNA, 19 bp, Homo sapiens
  siRNA target sequence for FLJ41131 (NM_198476.1,517-535).
cggcccagggagagatgtt

SEQ ID NO: 438438 - DNA, 19 bp, Homo sapiens
  siRNA target sequence for FLJ41131 (NM_198476.1,888-906).
gcaagagttggcactatca

SEQ ID NO: 438439 - DNA, 19 bp, Homo sapiens
  siRNA target sequence for UNQ473 (NM_198477.1,301-319).
gtgagtgcaaagattggtt

SEQ ID NO: 438440 - DNA, 19 bp, Homo sapiens
  siRNA target sequence for UNQ473 (NM_198477.1,323-341).
gagagccccgagaagaaaa

SEQ ID NO: 438441 - DNA, 19 bp, Homo sapiens
  siRNA target sequence for UNQ473 (NM_198477.1,325-343).
gagccccgagaagaaaatt

SEQ ID NO: 438442 - DNA, 19 bp, Homo sapiens
  siRNA target sequence for UNQ473 (NM_198477.1,328-346).
ccccgagaagaaaattcat

SEQ ID NO: 438443 - DNA, 19 bp, Homo sapiens
  siRNA target sequence for UNQ473 (NM_198477.1,371-389).
gcagtgcccctgtgatcat

SEQ ID NO: 438444 - DNA, 19 bp, Homo sapiens
  siRNA target sequence for UNQ473 (NM_198477.1,456-474).
gcctgccagcaatttctca

SEQ ID NO: 438445 - DNA, 19 bp, Homo sapiens
  siRNA target sequence for UNQ473 (NM_198477.1,461-479).
ccagcaatttctcaaacaa

SEQ ID NO: 438446 - DNA, 19 bp, Homo sapiens
  siRNA target sequence for UNQ473 (NM_198477.1,464-482).
gcaatttctcaaacaatgt

SEQ ID NO: 438447 - DNA, 19 bp, Homo sapiens
  siRNA target sequence for FLJ33600 (NM_198478.1,150-168).
ggaacgtgcagttcctttt

SEQ ID NO: 438448 - DNA, 19 bp, Homo sapiens
  siRNA target sequence for FLJ33600 (NM_198478.1,533-551).
ggcaagcacctgttcgtaa

SEQ ID NO: 438449 - DNA, 19 bp, Homo sapiens
  siRNA target sequence for FLJ33600 (NM_198478.1,548-566).
gtaagccagcgcaagaaga

SEQ ID NO: 438450 - DNA, 19 bp, Homo sapiens
  siRNA target sequence for FLJ33600 (NM_198478.1,573-591).
ggctggtgtcgcgtgaaaa

SEQ ID NO: 438451 - DNA, 19 bp, Homo sapiens
  siRNA target sequence for FLJ33600 (NM_198478.1,575-593).
ctggtgtcgcgtgaaaagt

SEQ ID NO: 438452 - DNA, 19 bp, Homo sapiens
  siRNA target sequence for FLJ33600 (NM_198478.1,975-993).
gccgcgacgacctgttgta

SEQ ID NO: 438453 - DNA, 19 bp, Homo sapiens
  siRNA target sequence for FLJ33600 (NM_198478.1,1523-1541).
gcccacaggggcaagctat

SEQ ID NO: 438454 - DNA, 19 bp, Homo sapiens
  siRNA target sequence for FLJ40321 (NM_198479.1,404-422).
cccactccctggctcaatt

SEQ ID NO: 438455 - DNA, 19 bp, Homo sapiens
  siRNA target sequence for FLJ40321 (NM_198479.1,850-868).
caggcccaggcccaattat

SEQ ID NO: 438456 - DNA, 19 bp, Homo sapiens
  siRNA target sequence for FLJ40321 (NM_198479.1,918-936).
ggcccaggtcccatcttaa

SEQ ID NO: 438457 - DNA, 19 bp, Homo sapiens
  siRNA target sequence for FLJ40321 (NM_198479.1,920-938).
cccaggtcccatcttaagt

SEQ ID NO: 438458 - DNA, 19 bp, Homo sapiens
  siRNA target sequence for FLJ40321 (NM_198479.1,1084-1102).
ccgatgcctccgacttctt

SEQ ID NO: 438459 - DNA, 19 bp, Homo sapiens
  siRNA target sequence for FLJ40321 (NM_198479.1,1253-1271).
gggtggctctgtgaatgaa

SEQ ID NO: 438460 - DNA, 19 bp, Homo sapiens
  siRNA target sequence for FLJ40321 (NM_198479.1,1254-1272).
ggtggctctgtgaatgaaa

SEQ ID NO: 438461 - DNA, 19 bp, Homo sapiens
  siRNA target sequence for FLJ40321 (NM_198479.1,1279-1297).
caggccccaggttattact

SEQ ID NO: 438462 - DNA, 19 bp, Homo sapiens
  siRNA target sequence for FLJ33710 (NM_198480.1,43-61).
ctgtctcatggtacatcaa

SEQ ID NO: 438463 - DNA, 19 bp, Homo sapiens
  siRNA target sequence for FLJ33710 (NM_198480.1,178-196).
caccgaatgtcgaaaaggt

SEQ ID NO: 438464 - DNA, 19 bp, Homo sapiens
  siRNA target sequence for FLJ33710 (NM_198480.1,208-226).
gagtgacctcattgtacat

SEQ ID NO: 438465 - DNA, 19 bp, Homo sapiens
  siRNA target sequence for FLJ33710 (NM_198480.1,460-478).
gagtcatctcaatgtacat

SEQ ID NO: 438466 - DNA, 19 bp, Homo sapiens
  siRNA target sequence for FLJ33710 (NM_198480.1,628-646).
gagtactctcagtatacat

SEQ ID NO: 438467 - DNA, 19 bp, Homo sapiens
  siRNA target sequence for FLJ33710 (NM_198480.1,784-802).
ctctttgcgcaaaaatgat

SEQ ID NO: 438468 - DNA, 19 bp, Homo sapiens
  siRNA target sequence for FLJ33710 (NM_198480.1,786-804).
ctttgcgcaaaaatgatct

SEQ ID NO: 438469 - DNA, 19 bp, Homo sapiens
  siRNA target sequence for FLJ33710 (NM_198480.1,882-900).
cagggctcaatgttcatca

SEQ ID NO: 438470 - DNA, 19 bp, Homo sapiens
  siRNA target sequence for FLJ33710 (NM_198480.1,884-902).
gggctcaatgttcatcaaa

SEQ ID NO: 438471 - DNA, 19 bp, Homo sapiens
  siRNA target sequence for FLJ33710 (NM_198480.1,950-968).
gcttttgcgcacttgtcta

SEQ ID NO: 438472 - DNA, 19 bp, Homo sapiens
  siRNA target sequence for UNQ3033 (NM_198481.1,226-244).
gtctgggctacgaagatga

SEQ ID NO: 438473 - DNA, 19 bp, Homo sapiens
  siRNA target sequence for UNQ3033 (NM_198481.1,401-419).
gagctcggcagaaaacgaa

SEQ ID NO: 438474 - DNA, 19 bp, Homo sapiens
  siRNA target sequence for UNQ3033 (NM_198481.1,452-470).
ggatgctgggaggtacttt

SEQ ID NO: 438475 - DNA, 19 bp, Homo sapiens
  siRNA target sequence for UNQ3033 (NM_198481.1,731-749).
ggctgccgaggcagattta

SEQ ID NO: 438476 - DNA, 19 bp, Homo sapiens
  siRNA target sequence for UNQ3033 (NM_198481.1,732-750).
gctgccgaggcagatttat

SEQ ID NO: 438477 - DNA, 19 bp, Homo sapiens
  siRNA target sequence for UNQ3033 (NM_198481.1,736-754).
ccgaggcagatttatccaa

SEQ ID NO: 438478 - DNA, 19 bp, Homo sapiens
  siRNA target sequence for UNQ3033 (NM_198481.1,737-755).
cgaggcagatttatccaat

SEQ ID NO: 438479 - DNA, 19 bp, Homo sapiens
  siRNA target sequence for UNQ3033 (NM_198481.1,738-756).
gaggcagatttatccaata

SEQ ID NO: 438480 - DNA, 19 bp, Homo sapiens
  siRNA target sequence for UNQ3033 (NM_198481.1,742-760).
cagatttatccaatatgga

SEQ ID NO: 438481 - DNA, 19 bp, Homo sapiens
  siRNA target sequence for UNQ3033 (NM_198481.1,857-875).
gcccccaggatctcatgaa

SEQ ID NO: 438482 - DNA, 19 bp, Homo sapiens
  siRNA target sequence for UNQ3033 (NM_198481.1,858-876).
cccccaggatctcatgaat

SEQ ID NO: 438483 - DNA, 19 bp, Homo sapiens
  siRNA target sequence for LOC284948 (NM_198482.1,239-257).
cccaccccagctcaataat

SEQ ID NO: 438484 - DNA, 19 bp, Homo sapiens
  siRNA target sequence for LOC284948 (NM_198482.1,241-259).
caccccagctcaataatct

SEQ ID NO: 438485 - DNA, 19 bp, Homo sapiens
  siRNA target sequence for LOC284948 (NM_198482.1,393-411).
gccctgctccacttacaaa

SEQ ID NO: 438486 - DNA, 19 bp, Homo sapiens
  siRNA target sequence for FLJ46536 (NM_198483.1,1925-1943).
gatcccagccgcatatgga

SEQ ID NO: 438487 - DNA, 19 bp, Homo sapiens
  siRNA target sequence for FLJ46536 (NM_198483.1,1936-1954).
catatggagggcctgaaaa

SEQ ID NO: 438488 - DNA, 19 bp, Homo sapiens
  siRNA target sequence for FLJ46536 (NM_198483.1,2089-2107).
gttccaggaaacataggta

SEQ ID NO: 438489 - DNA, 19 bp, Homo sapiens
  siRNA target sequence for FLJ46536 (NM_198483.1,2806-2824).
ggcgggtgttggaactgat

SEQ ID NO: 438490 - DNA, 19 bp, Homo sapiens
  siRNA target sequence for FLJ46536 (NM_198483.1,2891-2909).
ggcctgtagcaagatcttt

SEQ ID NO: 438491 - DNA, 19 bp, Homo sapiens
  siRNA target sequence for FLJ46536 (NM_198483.1,2903-2921).
gatctttggccgattttct

SEQ ID NO: 438492 - DNA, 19 bp, Homo sapiens
  siRNA target sequence for FLJ46536 (NM_198483.1,2961-2979).
catgcttgctccatggatt

SEQ ID NO: 438493 - DNA, 19 bp, Homo sapiens
  siRNA target sequence for FLJ46536 (NM_198483.1,2964-2982).
gcttgctccatggattaca

SEQ ID NO: 438494 - DNA, 19 bp, Homo sapiens
  siRNA target sequence for FLJ46536 (NM_198483.1,2965-2983).
cttgctccatggattacaa

SEQ ID NO: 438495 - DNA, 19 bp, Homo sapiens
  siRNA target sequence for FLJ46536 (NM_198483.1,2968-2986).
gctccatggattacaagaa

SEQ ID NO: 438496 - DNA, 19 bp, Homo sapiens
  siRNA target sequence for FLJ45246 (NM_198484.1,569-587).
ggacttctcaggaacgttt

SEQ ID NO: 438497 - DNA, 19 bp, Homo sapiens
  siRNA target sequence for FLJ45246 (NM_198484.1,583-601).
cgtttctcagcactttgat

SEQ ID NO: 438498 - DNA, 19 bp, Homo sapiens
  siRNA target sequence for FLJ45246 (NM_198484.1,615-633).
cactgaagcagactttcaa

SEQ ID NO: 438499 - DNA, 19 bp, Homo sapiens
  siRNA target sequence for FLJ45246 (NM_198484.1,653-671).
cttcgaggtggaatgaagt

SEQ ID NO: 438500 - DNA, 19 bp, Homo sapiens
  siRNA target sequence for FLJ45246 (NM_198484.1,703-721).
ccgatataactcaaagctt

SEQ ID NO: 438501 - DNA, 19 bp, Homo sapiens
  siRNA target sequence for FLJ45246 (NM_198484.1,704-722).
cgatataactcaaagctta

SEQ ID NO: 438502 - DNA, 19 bp, Homo sapiens
  siRNA target sequence for FLJ45246 (NM_198484.1,705-723).
gatataactcaaagcttat

SEQ ID NO: 438503 - DNA, 19 bp, Homo sapiens
  siRNA target sequence for FLJ45246 (NM_198484.1,787-805).
caagtccagctatgattgt

SEQ ID NO: 438504 - DNA, 19 bp, Homo sapiens
  siRNA target sequence for FLJ45246 (NM_198484.1,792-810).
ccagctatgattgtattgt

SEQ ID NO: 438505 - DNA, 19 bp, Homo sapiens
  siRNA target sequence for FLJ45246 (NM_198484.1,1044-1062).
gtaggtcactttttattgt

SEQ ID NO: 438506 - DNA, 19 bp, Homo sapiens
  siRNA target sequence for FLJ45246 (NM_198484.1,1221-1239).
gttttgttcagcatcagaa

SEQ ID NO: 438507 - DNA, 19 bp, Homo sapiens
  siRNA target sequence for FLJ45246 (NM_198484.1,1429-1447).
gcctacatctggaatacct

SEQ ID NO: 438508 - DNA, 19 bp, Homo sapiens
  siRNA target sequence for FLJ45246 (NM_198484.1,1430-1448).
cctacatctggaatacctt

SEQ ID NO: 438509 - DNA, 19 bp, Homo sapiens
  siRNA target sequence for FLJ41238 (NM_198485.1,273-291).
cccgatgccaagacagatt

SEQ ID NO: 438510 - DNA, 19 bp, Homo sapiens
  siRNA target sequence for FLJ41238 (NM_198485.1,274-292).
ccgatgccaagacagattt

SEQ ID NO: 438511 - DNA, 19 bp, Homo sapiens
  siRNA target sequence for FLJ41238 (NM_198485.1,307-325).
gtgaccgaatcaactcttt

SEQ ID NO: 438512 - DNA, 19 bp, Homo sapiens
  siRNA target sequence for FLJ41238 (NM_198485.1,320-338).
ctctttaccccaatcctta

SEQ ID NO: 438513 - DNA, 19 bp, Homo sapiens
  siRNA target sequence for FLJ41238 (NM_198485.1,456-474).
ctggctcttgacaaagata

SEQ ID NO: 438514 - DNA, 19 bp, Homo sapiens
  siRNA target sequence for FLJ41238 (NM_198485.1,458-476).
ggctcttgacaaagataga

SEQ ID NO: 438515 - DNA, 19 bp, Homo sapiens
  siRNA target sequence for FLJ41238 (NM_198485.1,471-489).
gatagaccactggaacaat

SEQ ID NO: 438516 - DNA, 19 bp, Homo sapiens
  siRNA target sequence for FLJ41238 (NM_198485.1,658-676).
gaaggccttaggatctact

SEQ ID NO: 438517 - DNA, 19 bp, Homo sapiens
  siRNA target sequence for FLJ41238 (NM_198485.1,717-735).
cccatggtccactgaagtt

SEQ ID NO: 438518 - DNA, 19 bp, Homo sapiens
  siRNA target sequence for FLJ41238 (NM_198485.1,726-744).
cactgaagttccttatgct

SEQ ID NO: 438519 - DNA, 19 bp, Homo sapiens
  siRNA target sequence for FLJ41238 (NM_198485.1,771-789).
caccagtgagaaattcctt

SEQ ID NO: 438520 - DNA, 19 bp, Homo sapiens
  siRNA target sequence for FLJ41238 (NM_198485.1,787-805).
cttgaaatttgcaagttgt

SEQ ID NO: 438521 - DNA, 19 bp, Homo sapiens
  siRNA target sequence for FLJ41238 (NM_198485.1,837-855).
ccagaatgcccacaagaat

SEQ ID NO: 438522 - DNA, 19 bp, Homo sapiens
  siRNA target sequence for FLJ41238 (NM_198485.1,898-916).
gaacccattttgattgaga

SEQ ID NO: 438523 - DNA, 19 bp, Homo sapiens
  siRNA target sequence for FLJ41238 (NM_198485.1,923-941).
cagggctgatgtcattcat

SEQ ID NO: 438524 - DNA, 19 bp, Homo sapiens
  siRNA target sequence for FLJ41238 (NM_198485.1,928-946).
ctgatgtcattcattggaa

SEQ ID NO: 438525 - DNA, 19 bp, Homo sapiens
  siRNA target sequence for FLJ41238 (NM_198485.1,973-991).
gcccgtgggagtattggtt

SEQ ID NO: 438526 - DNA, 19 bp, Homo sapiens
  siRNA target sequence for FLJ41238 (NM_198485.1,974-992).
cccgtgggagtattggttt

SEQ ID NO: 438527 - DNA, 19 bp, Homo sapiens
  siRNA target sequence for FLJ41238 (NM_198485.1,975-993).
ccgtgggagtattggtttt

SEQ ID NO: 438528 - DNA, 19 bp, Homo sapiens
  siRNA target sequence for FLJ46072 (NM_198488.1,137-155).
cttctccttccctaaacga

SEQ ID NO: 438529 - DNA, 19 bp, Homo sapiens
  siRNA target sequence for FLJ46072 (NM_198488.1,924-942).
cgtttggcctcctacttga

SEQ ID NO: 438530 - DNA, 19 bp, Homo sapiens
  siRNA target sequence for FLJ46072 (NM_198488.1,1757-1775).
gcaccaggtgctccataat

SEQ ID NO: 438531 - DNA, 19 bp, Homo sapiens
  siRNA target sequence for FLJ46072 (NM_198488.1,1824-1842).
cccacgcctgggttttcca

SEQ ID NO: 438532 - DNA, 19 bp, Homo sapiens
  siRNA target sequence for FLJ46072 (NM_198488.1,1855-1873).
gtccaactacaggatttat

SEQ ID NO: 438533 - DNA, 19 bp, Homo sapiens
  siRNA target sequence for FLJ46072 (NM_198488.1,1858-1876).
caactacaggatttatcga

SEQ ID NO: 438534 - DNA, 19 bp, Homo sapiens
  siRNA target sequence for FLJ46072 (NM_198488.1,2690-2708).
gatcctgggcacgttcaaa

SEQ ID NO: 438535 - DNA, 19 bp, Homo sapiens
  siRNA target sequence for DLNB14 (NM_198489.1,416-434).
ggtcactccccaggattat

SEQ ID NO: 438536 - DNA, 19 bp, Homo sapiens
  siRNA target sequence for DLNB14 (NM_198489.1,429-447).
gattatgcgcgattcaaga

SEQ ID NO: 438537 - DNA, 19 bp, Homo sapiens
  siRNA target sequence for DLNB14 (NM_198489.1,435-453).
gcgcgattcaagaaatcca

SEQ ID NO: 438538 - DNA, 19 bp, Homo sapiens
  siRNA target sequence for DLNB14 (NM_198489.1,436-454).
cgcgattcaagaaatccat

SEQ ID NO: 438539 - DNA, 19 bp, Homo sapiens
  siRNA target sequence for DLNB14 (NM_198489.1,458-476).
gaaaggtttggattcctat

SEQ ID NO: 438540 - DNA, 19 bp, Homo sapiens
  siRNA target sequence for DLNB14 (NM_198489.1,548-566).
ggtggttcggtctgtctta

SEQ ID NO: 438541 - DNA, 19 bp, Homo sapiens
  siRNA target sequence for DLNB14 (NM_198489.1,728-746).
cattggccatcaggatata

SEQ ID NO: 438542 - DNA, 19 bp, Homo sapiens
  siRNA target sequence for DLNB14 (NM_198489.1,831-849).
ggaccatcctatgaagaat

SEQ ID NO: 438543 - DNA, 19 bp, Homo sapiens
  siRNA target sequence for DLNB14 (NM_198489.1,832-850).
gaccatcctatgaagaatt

SEQ ID NO: 438544 - DNA, 19 bp, Homo sapiens
  siRNA target sequence for DLNB14 (NM_198489.1,896-914).
ccgagttggggccaacttt

SEQ ID NO: 438545 - DNA, 19 bp, Homo sapiens
  siRNA target sequence for DLNB14 (NM_198489.1,987-1005).
cagtccagacatcaattca

SEQ ID NO: 438546 - DNA, 19 bp, Homo sapiens
  siRNA target sequence for DLNB14 (NM_198489.1,1009-1027).
ctgaagctgcagcaatgaa

SEQ ID NO: 438547 - DNA, 19 bp, Homo sapiens
  siRNA target sequence for FLJ44299 (NM_198491.1,507-525).
ccaaaatcatgagatcaaa

SEQ ID NO: 438548 - DNA, 19 bp, Homo sapiens
  siRNA target sequence for FLJ44299 (NM_198491.1,560-578).
caccctcggatcagcaaat

SEQ ID NO: 438549 - DNA, 19 bp, Homo sapiens
  siRNA target sequence for FLJ44299 (NM_198491.1,562-580).
ccctcggatcagcaaatga

SEQ ID NO: 438550 - DNA, 19 bp, Homo sapiens
  siRNA target sequence for FLJ44299 (NM_198491.1,742-760).
gcggtggaggtgtattcta

SEQ ID NO: 438551 - DNA, 19 bp, Homo sapiens
  siRNA target sequence for FLJ44299 (NM_198491.1,795-813).
gagggatctactggatttt

SEQ ID NO: 438552 - DNA, 19 bp, Homo sapiens
  siRNA target sequence for FLJ44299 (NM_198491.1,830-848).
gagtttatgggcattatga

SEQ ID NO: 438553 - DNA, 19 bp, Homo sapiens
  siRNA target sequence for FLJ44299 (NM_198491.1,832-850).
gtttatgggcattatgaca

SEQ ID NO: 438554 - DNA, 19 bp, Homo sapiens
  siRNA target sequence for FLJ44299 (NM_198491.1,927-945).
gctgagtagggcaaatgaa

SEQ ID NO: 438555 - DNA, 19 bp, Homo sapiens
  siRNA target sequence for FLJ44299 (NM_198491.1,966-984).
caatcatggcaggtttagt

SEQ ID NO: 438556 - DNA, 19 bp, Homo sapiens
  siRNA target sequence for FLJ45235 (NM_198493.1,258-276).
ccatgcagcttctcttaga

SEQ ID NO: 438557 - DNA, 19 bp, Homo sapiens
  siRNA target sequence for FLJ45235 (NM_198493.1,262-280).
gcagcttctcttagaagaa

SEQ ID NO: 438558 - DNA, 19 bp, Homo sapiens
  siRNA target sequence for FLJ45235 (NM_198493.1,323-341).
gggcaaagtgacgtgatta

SEQ ID NO: 438559 - DNA, 19 bp, Homo sapiens
  siRNA target sequence for FLJ45235 (NM_198493.1,325-343).
gcaaagtgacgtgattaga

SEQ ID NO: 438560 - DNA, 19 bp, Homo sapiens
  siRNA target sequence for FLJ45235 (NM_198493.1,359-377).
ggtgtgaatctgaatgaaa

SEQ ID NO: 438561 - DNA, 19 bp, Homo sapiens
  siRNA target sequence for FLJ45235 (NM_198493.1,385-403).
cagagggtacacactctta

SEQ ID NO: 438562 - DNA, 19 bp, Homo sapiens
  siRNA target sequence for FLJ45235 (NM_198493.1,387-405).
gagggtacacactcttaca

SEQ ID NO: 438563 - DNA, 19 bp, Homo sapiens
  siRNA target sequence for FLJ45235 (NM_198493.1,389-407).
gggtacacactcttacatt

SEQ ID NO: 438564 - DNA, 19 bp, Homo sapiens
  siRNA target sequence for FLJ45235 (NM_198493.1,391-409).
gtacacactcttacattgt

SEQ ID NO: 438565 - DNA, 19 bp, Homo sapiens
  siRNA target sequence for FLJ45235 (NM_198493.1,420-438).
ggggtcgtttggaaacttt

SEQ ID NO: 438566 - DNA, 19 bp, Homo sapiens
  siRNA target sequence for FLJ45235 (NM_198493.1,501-519).
gagatgttgctgctagata

SEQ ID NO: 438567 - DNA, 19 bp, Homo sapiens
  siRNA target sequence for FLJ45235 (NM_198493.1,503-521).
gatgttgctgctagatatt

SEQ ID NO: 438568 - DNA, 19 bp, Homo sapiens
  siRNA target sequence for FLJ45235 (NM_198493.1,602-620).
gctgttactgacacagaaa

SEQ ID NO: 438569 - DNA, 19 bp, Homo sapiens
  siRNA target sequence for FLJ45235 (NM_198493.1,638-656).
cttaaggaagacaagaata

SEQ ID NO: 438570 - DNA, 19 bp, Homo sapiens
  siRNA target sequence for FLJ45235 (NM_198493.1,664-682).
cagtgcatgccgtgcaaaa

SEQ ID NO: 438571 - DNA, 19 bp, Homo sapiens
  siRNA target sequence for FLJ45235 (NM_198493.1,701-719).
catacagaagcttccatta

SEQ ID NO: 438572 - DNA, 19 bp, Homo sapiens
  siRNA target sequence for FLJ45235 (NM_198493.1,743-761).
caactggaagatattgtga

SEQ ID NO: 438573 - DNA, 19 bp, Homo sapiens
  siRNA target sequence for FLJ45235 (NM_198493.1,758-776).
gtgactcctatcttcacaa

SEQ ID NO: 438574 - DNA, 19 bp, Homo sapiens
  siRNA target sequence for FLJ45235 (NM_198493.1,762-780).
ctcctatcttcacaaaaat

SEQ ID NO: 438575 - DNA, 19 bp, Homo sapiens
  siRNA target sequence for FLJ16030 (NM_198494.1,633-651).
gtcagtgggatatcaactt

SEQ ID NO: 438576 - DNA, 19 bp, Homo sapiens
  siRNA target sequence for FLJ16030 (NM_198494.1,763-781).
gagtcaactgcaaagagta

SEQ ID NO: 438577 - DNA, 19 bp, Homo sapiens
  siRNA target sequence for FLJ16030 (NM_198494.1,773-791).
caaagagtaccatttcaca

SEQ ID NO: 438578 - DNA, 19 bp, Homo sapiens
  siRNA target sequence for FLJ16030 (NM_198494.1,788-806).
cacaggagcgcttatatca

SEQ ID NO: 438579 - DNA, 19 bp, Homo sapiens
  siRNA target sequence for FLJ16030 (NM_198494.1,824-842).
gtttcatgagggatgatat

SEQ ID NO: 438580 - DNA, 19 bp, Homo sapiens
  siRNA target sequence for FLJ16030 (NM_198494.1,897-915).
ccaggaaacttgtatgaga

SEQ ID NO: 438581 - DNA, 19 bp, Homo sapiens
  siRNA target sequence for FLJ16030 (NM_198494.1,945-963).
gaagagagtccaagaaact

SEQ ID NO: 438582 - DNA, 19 bp, Homo sapiens
  siRNA target sequence for FLJ16030 (NM_198494.1,1036-1054).
cctacaaagcggaacacat

SEQ ID NO: 438583 - DNA, 19 bp, Homo sapiens
  siRNA target sequence for FLJ16030 (NM_198494.1,1037-1055).
ctacaaagcggaacacata

SEQ ID NO: 438584 - DNA, 19 bp, Homo sapiens
  siRNA target sequence for FLJ16030 (NM_198494.1,1040-1058).
caaagcggaacacatacaa

SEQ ID NO: 438585 - DNA, 19 bp, Homo sapiens
  siRNA target sequence for FLJ16030 (NM_198494.1,1068-1086).
gattaatcatccaacaagt

SEQ ID NO: 438586 - DNA, 19 bp, Homo sapiens
  siRNA target sequence for FLJ16030 (NM_198494.1,1302-1320).
cagacatcgctcatcactt

SEQ ID NO: 438587 - DNA, 19 bp, Homo sapiens
  siRNA target sequence for FLJ16030 (NM_198494.1,1304-1322).
gacatcgctcatcacttaa

SEQ ID NO: 438588 - DNA, 19 bp, Homo sapiens
  siRNA target sequence for FLJ16030 (NM_198494.1,1381-1399).
gctttcagccagaacatta

SEQ ID NO: 438589 - DNA, 19 bp, Homo sapiens
  siRNA target sequence for FLJ16030 (NM_198494.1,1408-1426).
caacatttgaggactcatt

SEQ ID NO: 438590 - DNA, 19 bp, Homo sapiens
  siRNA target sequence for FLJ16030 (NM_198494.1,1466-1484).
cctttagacagattagaca

SEQ ID NO: 438591 - DNA, 19 bp, Homo sapiens
  siRNA target sequence for FLJ16030 (NM_198494.1,1481-1499).
gacaccttagtgaacatat

SEQ ID NO: 438592 - DNA, 19 bp, Homo sapiens
  siRNA target sequence for FLJ16030 (NM_198494.1,1659-1677).
caaccataaaactgttcat

SEQ ID NO: 438593 - DNA, 19 bp, Homo sapiens
  siRNA target sequence for FLJ16030 (NM_198494.1,1662-1680).
ccataaaactgttcataca

SEQ ID NO: 438594 - DNA, 19 bp, Homo sapiens
  siRNA target sequence for FLJ16030 (NM_198494.1,1725-1743).
gcatgattcatcctttaaa

SEQ ID NO: 438595 - DNA, 19 bp, Homo sapiens
  siRNA target sequence for AMACO (NM_198496.1,415-433).
gaaaccatcgggaagattt

SEQ ID NO: 438596 - DNA, 19 bp, Homo sapiens
  siRNA target sequence for AMACO (NM_198496.1,436-454).
gctgccagcaaaatgatgt

SEQ ID NO: 438597 - DNA, 19 bp, Homo sapiens
  siRNA target sequence for AMACO (NM_198496.1,461-479).
cggctgcagtggacatcat

SEQ ID NO: 438598 - DNA, 19 bp, Homo sapiens
  siRNA target sequence for AMACO (NM_198496.1,484-502).
ctgttagatgggtctaaca

SEQ ID NO: 438599 - DNA, 19 bp, Homo sapiens
  siRNA target sequence for AMACO (NM_198496.1,507-525).
cgggaaagggagctttgaa

SEQ ID NO: 438600 - DNA, 19 bp, Homo sapiens
  siRNA target sequence for AMACO (NM_198496.1,592-610).
ggagcattccagttcagtt

SEQ ID NO: 438601 - DNA, 19 bp, Homo sapiens
  siRNA target sequence for AMACO (NM_198496.1,708-726).
gacggaacttgctctgaaa

SEQ ID NO: 438602 - DNA, 19 bp, Homo sapiens
  siRNA target sequence for AMACO (NM_198496.1,710-728).
cggaacttgctctgaaata

SEQ ID NO: 438603 - DNA, 19 bp, Homo sapiens
  siRNA target sequence for AMACO (NM_198496.1,1655-1673).
cacgtagagtggtggtttt

SEQ ID NO: 438604 - DNA, 19 bp, Homo sapiens
  siRNA target sequence for AMACO (NM_198496.1,1823-1841).
cggatcctcaggatctgtt

SEQ ID NO: 438605 - DNA, 19 bp, Homo sapiens
  siRNA target sequence for MGC50104 (NM_198498.1,161-179).
cggtcacgtcaggttacta

SEQ ID NO: 438606 - DNA, 19 bp, Homo sapiens
  siRNA target sequence for MGC50104 (NM_198498.1,177-195).
ctacggtgtcagaagatct

SEQ ID NO: 438607 - DNA, 19 bp, Homo sapiens
  siRNA target sequence for MGC50104 (NM_198498.1,222-240).
cagtaaacagttttcaaat

SEQ ID NO: 438608 - DNA, 19 bp, Homo sapiens
  siRNA target sequence for MGC50104 (NM_198498.1,439-457).
ccagctcacttcctattta

SEQ ID NO: 438609 - DNA, 19 bp, Homo sapiens
  siRNA target sequence for MGC50104 (NM_198498.1,616-634).
gctggggctcagtcatact

SEQ ID NO: 438610 - DNA, 19 bp, Homo sapiens
  siRNA target sequence for MGC50104 (NM_198498.1,704-722).
ctttcatgacggtgtcaaa

SEQ ID NO: 438611 - DNA, 19 bp, Homo sapiens
  siRNA target sequence for MGC50104 (NM_198498.1,838-856).
gaatgccgcagagcttatt

SEQ ID NO: 438612 - DNA, 19 bp, Homo sapiens
  siRNA target sequence for FLJ46156 (NM_198499.1,258-276).
gtgcaatggcttatcttat

SEQ ID NO: 438613 - DNA, 19 bp, Homo sapiens
  siRNA target sequence for FLJ46156 (NM_198499.1,260-278).
gcaatggcttatcttatga

SEQ ID NO: 438614 - DNA, 19 bp, Homo sapiens
  siRNA target sequence for FLJ46156 (NM_198499.1,327-345).
cttagggtatcctcgtata

SEQ ID NO: 438615 - DNA, 19 bp, Homo sapiens
  siRNA target sequence for FLJ46156 (NM_198499.1,337-355).
cctcgtatagttggattat

SEQ ID NO: 438616 - DNA, 19 bp, Homo sapiens
  siRNA target sequence for FLJ46156 (NM_198499.1,340-358).
cgtatagttggattatcat

SEQ ID NO: 438617 - DNA, 19 bp, Homo sapiens
  siRNA target sequence for FLJ46156 (NM_198499.1,364-382).
cctaatttaacgagtctta

SEQ ID NO: 438618 - DNA, 19 bp, Homo sapiens
  siRNA target sequence for FLJ46156 (NM_198499.1,383-401).
ccattgttgctcaagatat

SEQ ID NO: 438619 - DNA, 19 bp, Homo sapiens
  siRNA target sequence for FLJ46156 (NM_198499.1,416-434).
ggttagagccttgtttaca

SEQ ID NO: 438620 - DNA, 19 bp, Homo sapiens
  siRNA target sequence for FLJ46156 (NM_198499.1,421-439).
gagccttgtttacaactta

SEQ ID NO: 438621 - DNA, 19 bp, Homo sapiens
  siRNA target sequence for FLJ46156 (NM_198499.1,581-599).
ggctgaaccacaatacaat

SEQ ID NO: 438622 - DNA, 19 bp, Homo sapiens
  siRNA target sequence for FLJ46156 (NM_198499.1,585-603).
gaaccacaatacaattaaa

SEQ ID NO: 438623 - DNA, 19 bp, Homo sapiens
  siRNA target sequence for FLJ46156 (NM_198499.1,645-663).
caaccttgctggaaatcta

SEQ ID NO: 438624 - DNA, 19 bp, Homo sapiens
  siRNA target sequence for FLJ46156 (NM_198499.1,652-670).
gctggaaatctaataaata

SEQ ID NO: 438625 - DNA, 19 bp, Homo sapiens
  siRNA target sequence for FLJ46156 (NM_198499.1,656-674).
gaaatctaataaatagcat

SEQ ID NO: 438626 - DNA, 19 bp, Homo sapiens
  siRNA target sequence for FLJ46156 (NM_198499.1,703-721).
ctggaaagattaaaccttt

SEQ ID NO: 438627 - DNA, 19 bp, Homo sapiens
  siRNA target sequence for FLJ46156 (NM_198499.1,717-735).
cctttctggtaaccaaata

SEQ ID NO: 438628 - DNA, 19 bp, Homo sapiens
  siRNA target sequence for FLJ46156 (NM_198499.1,718-736).
ctttctggtaaccaaatat

SEQ ID NO: 438629 - DNA, 19 bp, Homo sapiens
  siRNA target sequence for FLJ46156 (NM_198499.1,724-742).
ggtaaccaaatatgttctt

SEQ ID NO: 438630 - DNA, 19 bp, Homo sapiens
  siRNA target sequence for FLJ46156 (NM_198499.1,744-762).
caaggaactcacgaactta

SEQ ID NO: 438631 - DNA, 19 bp, Homo sapiens
  siRNA target sequence for FLJ46156 (NM_198499.1,748-766).
gaactcacgaacttaacca

SEQ ID NO: 438632 - DNA, 19 bp, Homo sapiens
  siRNA target sequence for FLJ46156 (NM_198499.1,768-786).
gctgccttgcttaaaggat

SEQ ID NO: 438633 - DNA, 19 bp, Homo sapiens
  siRNA target sequence for FLJ46156 (NM_198499.1,769-787).
ctgccttgcttaaaggatt

SEQ ID NO: 438634 - DNA, 19 bp, Homo sapiens
  siRNA target sequence for FLJ46156 (NM_198499.1,771-789).
gccttgcttaaaggattta

SEQ ID NO: 438635 - DNA, 19 bp, Homo sapiens
  siRNA target sequence for FLJ46156 (NM_198499.1,776-794).
gcttaaaggatttatgtct

SEQ ID NO: 438636 - DNA, 19 bp, Homo sapiens
  siRNA target sequence for FLJ46156 (NM_198499.1,801-819).
ccctcaatatacaaccaat

SEQ ID NO: 438637 - DNA, 19 bp, Homo sapiens
  siRNA target sequence for FLJ46156 (NM_198499.1,812-830).
caaccaatccagtttgtct

SEQ ID NO: 438638 - DNA, 19 bp, Homo sapiens
  siRNA target sequence for FLJ46156 (NM_198499.1,846-864).
cacacatgtattatatcat

SEQ ID NO: 438639 - DNA, 19 bp, Homo sapiens
  siRNA target sequence for FLJ46156 (NM_198499.1,928-946).
gataccacagcaatgaaaa

SEQ ID NO: 438640 - DNA, 19 bp, Homo sapiens
  siRNA target sequence for FLJ46156 (NM_198499.1,1045-1063).
ccagaagaacgagtaaaat

SEQ ID NO: 438641 - DNA, 19 bp, Homo sapiens
  siRNA target sequence for FLJ46156 (NM_198499.1,1135-1153).
gatggatccaataacagta

SEQ ID NO: 438642 - DNA, 19 bp, Homo sapiens
  siRNA target sequence for FLJ46156 (NM_198499.1,1139-1157).
gatccaataacagtaaagt

SEQ ID NO: 438643 - DNA, 19 bp, Homo sapiens
  siRNA target sequence for FLJ46156 (NM_198499.1,1254-1272).
ggtaacattctggaacaaa

SEQ ID NO: 438644 - DNA, 19 bp, Homo sapiens
  siRNA target sequence for FLJ46156 (NM_198499.1,1368-1386).
gactgtgggaaatttccat

SEQ ID NO: 438645 - DNA, 19 bp, Homo sapiens
  siRNA target sequence for FLJ46156 (NM_198499.1,1402-1420).
cgatctgatgactggttta

SEQ ID NO: 438646 - DNA, 19 bp, Homo sapiens
  siRNA target sequence for FLJ46156 (NM_198499.1,1467-1485).
cagaacatacggtattaca

SEQ ID NO: 438647 - DNA, 19 bp, Homo sapiens
  siRNA target sequence for FLJ46156 (NM_198499.1,1476-1494).
cggtattacaggagtaaaa

SEQ ID NO: 438648 - DNA, 19 bp, Homo sapiens
  siRNA target sequence for FLJ46156 (NM_198499.1,1501-1519).
cgcatcattaaagttaaca

SEQ ID NO: 438649 - DNA, 19 bp, Homo sapiens
  siRNA target sequence for FLJ46156 (NM_198499.1,1513-1531).
gttaacaaccgtattctga

SEQ ID NO: 438650 - DNA, 19 bp, Homo sapiens
  siRNA target sequence for FLJ46156 (NM_198499.1,1738-1756).
gtttctaacagtctaagta

SEQ ID NO: 438651 - DNA, 19 bp, Homo sapiens
  siRNA target sequence for FLJ46156 (NM_198499.1,1843-1861).
ggcatcctcctcattacaa

SEQ ID NO: 438652 - DNA, 19 bp, Homo sapiens
  siRNA target sequence for FLJ46156 (NM_198499.1,1905-1923).
catcagtcaatccaactat

SEQ ID NO: 438653 - DNA, 19 bp, Homo sapiens
  siRNA target sequence for FLJ46156 (NM_198499.1,1910-1928).
gtcaatccaactatccaat

SEQ ID NO: 438654 - DNA, 19 bp, Homo sapiens
  siRNA target sequence for FLJ46156 (NM_198499.1,1916-1934).
ccaactatccaatggttaa

SEQ ID NO: 438655 - DNA, 19 bp, Homo sapiens
  siRNA target sequence for FLJ46156 (NM_198499.1,1917-1935).
caactatccaatggttaat

SEQ ID NO: 438656 - DNA, 19 bp, Homo sapiens
  siRNA target sequence for FLJ46156 (NM_198499.1,1920-1938).
ctatccaatggttaattca

SEQ ID NO: 438657 - DNA, 19 bp, Homo sapiens
  siRNA target sequence for FLJ46156 (NM_198499.1,1941-1959).
gttcattcctcggaaatat

SEQ ID NO: 438658 - DNA, 19 bp, Homo sapiens
  siRNA target sequence for FLJ46156 (NM_198499.1,1948-1966).
cctcggaaatatttactaa

SEQ ID NO: 438659 - DNA, 19 bp, Homo sapiens
  siRNA target sequence for FLJ46156 (NM_198499.1,2013-2031).
caagtggtttgtctttgat

SEQ ID NO: 438660 - DNA, 19 bp, Homo sapiens
  siRNA target sequence for FLJ46156 (NM_198499.1,2018-2036).
ggtttgtctttgatcatga

SEQ ID NO: 438661 - DNA, 19 bp, Homo sapiens
  siRNA target sequence for FLJ46156 (NM_198499.1,2037-2055).
ccttgttttgccggaatat

SEQ ID NO: 438662 - DNA, 19 bp, Homo sapiens
  siRNA target sequence for FLJ46156 (NM_198499.1,2046-2064).
gccggaatatgttgttgaa

SEQ ID NO: 438663 - DNA, 19 bp, Homo sapiens
  siRNA target sequence for FLJ46156 (NM_198499.1,2047-2065).
ccggaatatgttgttgaat

SEQ ID NO: 438664 - DNA, 19 bp, Homo sapiens
  siRNA target sequence for FLJ46156 (NM_198499.1,2056-2074).
gttgttgaatttgagtata

SEQ ID NO: 438665 - DNA, 19 bp, Homo sapiens
  siRNA target sequence for FLJ46156 (NM_198499.1,2112-2130).
caacaatgttattctagaa

SEQ ID NO: 438666 - DNA, 19 bp, Homo sapiens
  siRNA target sequence for FLJ46156 (NM_198499.1,2145-2163).
cccagaagtatcagtattt

SEQ ID NO: 438667 - DNA, 19 bp, Homo sapiens
  siRNA target sequence for FLJ46156 (NM_198499.1,2217-2235).
ggcccgaccaaaactgatt

SEQ ID NO: 438668 - DNA, 19 bp, Homo sapiens
  siRNA target sequence for FLJ46156 (NM_198499.1,2218-2236).
gcccgaccaaaactgatta

SEQ ID NO: 438669 - DNA, 19 bp, Homo sapiens
  siRNA target sequence for FLJ46156 (NM_198499.1,2220-2238).
ccgaccaaaactgattagt

SEQ ID NO: 438670 - DNA, 19 bp, Homo sapiens
  siRNA target sequence for FLJ46156 (NM_198499.1,2252-2270).
caatactttcccttgcaaa

SEQ ID NO: 438671 - DNA, 19 bp, Homo sapiens
  siRNA target sequence for FLJ46156 (NM_198499.1,2273-2291).
ctagcgtttacagtcatat

SEQ ID NO: 438672 - DNA, 19 bp, Homo sapiens
  siRNA target sequence for FLJ46156 (NM_198499.1,2276-2294).
gcgtttacagtcatattgt

SEQ ID NO: 438673 - DNA, 19 bp, Homo sapiens
  siRNA target sequence for FLJ46156 (NM_198499.1,2278-2296).
gtttacagtcatattgtga

SEQ ID NO: 438674 - DNA, 19 bp, Homo sapiens
  siRNA target sequence for FLJ46156 (NM_198499.1,2308-2326).
catggaaacagcttgagta

SEQ ID NO: 438675 - DNA, 19 bp, Homo sapiens
  siRNA target sequence for FLJ46156 (NM_198499.1,2311-2329).
ggaaacagcttgagtaaat

SEQ ID NO: 438676 - DNA, 19 bp, Homo sapiens
  siRNA target sequence for FLJ46156 (NM_198499.1,2331-2349).
gagagatctctccaagtta

SEQ ID NO: 438677 - DNA, 19 bp, Homo sapiens
  siRNA target sequence for FLJ46156 (NM_198499.1,2346-2364).
gttaacaggacttcgaaaa

SEQ ID NO: 438678 - DNA, 19 bp, Homo sapiens
  siRNA target sequence for FLJ46156 (NM_198499.1,2351-2369).
caggacttcgaaaactaaa

SEQ ID NO: 438679 - DNA, 19 bp, Homo sapiens
  siRNA target sequence for FLJ46156 (NM_198499.1,2356-2374).
cttcgaaaactaaacatta

SEQ ID NO: 438680 - DNA, 19 bp, Homo sapiens
  siRNA target sequence for FLJ46156 (NM_198499.1,2359-2377).
cgaaaactaaacattagct

SEQ ID NO: 438681 - DNA, 19 bp, Homo sapiens
  siRNA target sequence for FLJ46156 (NM_198499.1,2360-2378).
gaaaactaaacattagctt

SEQ ID NO: 438682 - DNA, 19 bp, Homo sapiens
  siRNA target sequence for FLJ46156 (NM_198499.1,2401-2419).
gatgtataccacttgtata

SEQ ID NO: 438683 - DNA, 19 bp, Homo sapiens
  siRNA target sequence for FLJ46156 (NM_198499.1,2433-2451).
ggatgcaagccataaccat

SEQ ID NO: 438684 - DNA, 19 bp, Homo sapiens
  siRNA target sequence for FLJ46156 (NM_198499.1,2438-2456).
caagccataaccatgtgat

SEQ ID NO: 438685 - DNA, 19 bp, Homo sapiens
  siRNA target sequence for FLJ46156 (NM_198499.1,2474-2492).
gaggtctgatgaaactgaa

SEQ ID NO: 438686 - DNA, 19 bp, Homo sapiens
  siRNA target sequence for FLJ46156 (NM_198499.1,2505-2523).
gagctggaatcaactgaaa

SEQ ID NO: 438687 - DNA, 19 bp, Homo sapiens
  siRNA target sequence for FLJ46156 (NM_198499.1,2520-2538).
gaaaaaatctggcaatgaa

SEQ ID NO: 438688 - DNA, 19 bp, Homo sapiens
  siRNA target sequence for FLJ46156 (NM_198499.1,2567-2585).
gccttctcactcttgatat

SEQ ID NO: 438689 - DNA, 19 bp, Homo sapiens
  siRNA target sequence for FLJ46156 (NM_198499.1,2568-2586).
ccttctcactcttgatatt

SEQ ID NO: 438690 - DNA, 19 bp, Homo sapiens
  siRNA target sequence for FLJ46156 (NM_198499.1,2574-2592).
cactcttgatattcaacat

SEQ ID NO: 438691 - DNA, 19 bp, Homo sapiens
  siRNA target sequence for FLJ46156 (NM_198499.1,2602-2620).
caaaagccagccacattga

SEQ ID NO: 438692 - DNA, 19 bp, Homo sapiens
  siRNA target sequence for FLJ46156 (NM_198499.1,2615-2633).
cattgaggctgagtgttat

SEQ ID NO: 438693 - DNA, 19 bp, Homo sapiens
  siRNA target sequence for FLJ46156 (NM_198499.1,2625-2643).
gagtgttattggcagatta

SEQ ID NO: 438694 - DNA, 19 bp, Homo sapiens
  siRNA target sequence for FLJ46156 (NM_198499.1,2627-2645).
gtgttattggcagattaaa

SEQ ID NO: 438695 - DNA, 19 bp, Homo sapiens
  siRNA target sequence for FLJ46156 (NM_198499.1,2693-2711).
cagcagctatgaaatttat

SEQ ID NO: 438696 - DNA, 19 bp, Homo sapiens
  siRNA target sequence for FLJ46156 (NM_198499.1,2714-2732).
caggaacaaggattactca

SEQ ID NO: 438697 - DNA, 19 bp, Homo sapiens
  siRNA target sequence for FLJ46156 (NM_198499.1,2740-2758).
ctcttacggcattctagta

SEQ ID NO: 438698 - DNA, 19 bp, Homo sapiens
  siRNA target sequence for FLJ46156 (NM_198499.1,2742-2760).
cttacggcattctagtact

SEQ ID NO: 438699 - DNA, 19 bp, Homo sapiens
  siRNA target sequence for FLJ46156 (NM_198499.1,2747-2765).
ggcattctagtactaaaga

SEQ ID NO: 438700 - DNA, 19 bp, Homo sapiens
  siRNA target sequence for FLJ46156 (NM_198499.1,2766-2784).
ggagagaccacggatactt

SEQ ID NO: 438701 - DNA, 19 bp, Homo sapiens
  siRNA target sequence for FLJ46156 (NM_198499.1,2767-2785).
gagagaccacggatactta

SEQ ID NO: 438702 - DNA, 19 bp, Homo sapiens
  siRNA target sequence for FLJ46156 (NM_198499.1,2771-2789).
gaccacggatacttagtat

SEQ ID NO: 438703 - DNA, 19 bp, Homo sapiens
  siRNA target sequence for FLJ46156 (NM_198499.1,2773-2791).
ccacggatacttagtatat

SEQ ID NO: 438704 - DNA, 19 bp, Homo sapiens
  siRNA target sequence for FLJ46156 (NM_198499.1,2792-2810).
ggccttctgccaaaattct

SEQ ID NO: 438705 - DNA, 19 bp, Homo sapiens
  siRNA target sequence for FLJ46156 (NM_198499.1,2809-2827).
ctgacgcaggtttcaaagt

SEQ ID NO: 438706 - DNA, 19 bp, Homo sapiens
  siRNA target sequence for FLJ46156 (NM_198499.1,2811-2829).
gacgcaggtttcaaagtta

SEQ ID NO: 438707 - DNA, 19 bp, Homo sapiens
  siRNA target sequence for FLJ46156 (NM_198499.1,2822-2840).
caaagttaggacctcattt

SEQ ID NO: 438708 - DNA, 19 bp, Homo sapiens
  siRNA target sequence for FLJ46156 (NM_198499.1,2826-2844).
gttaggacctcatttacat

SEQ ID NO: 438709 - DNA, 19 bp, Homo sapiens
  siRNA target sequence for FLJ46156 (NM_198499.1,2851-2869).
ggaaactgctacttgaaga

SEQ ID NO: 438710 - DNA, 19 bp, Homo sapiens
  siRNA target sequence for FLJ46156 (NM_198499.1,2856-2874).
ctgctacttgaagataact

SEQ ID NO: 438711 - DNA, 19 bp, Homo sapiens
  siRNA target sequence for FLJ46156 (NM_198499.1,2948-2966).
cattcagcaataataatct

SEQ ID NO: 438712 - DNA, 19 bp, Homo sapiens
  siRNA target sequence for FLJ46156 (NM_198499.1,2954-2972).
gcaataataatctcactaa

SEQ ID NO: 438713 - DNA, 19 bp, Homo sapiens
  siRNA target sequence for FLJ46156 (NM_198499.1,2955-2973).
caataataatctcactaaa

SEQ ID NO: 438714 - DNA, 19 bp, Homo sapiens
  siRNA target sequence for FLJ46156 (NM_198499.1,2980-2998).
ggtctggaatcctgtatta

SEQ ID NO: 438715 - DNA, 19 bp, Homo sapiens
  siRNA target sequence for FLJ46156 (NM_198499.1,3003-3021).
ggaagagctcacattagat

SEQ ID NO: 438716 - DNA, 19 bp, Homo sapiens
  siRNA target sequence for FLJ46156 (NM_198499.1,3054-3072).
caagatgactaaattaact

SEQ ID NO: 438717 - DNA, 19 bp, Homo sapiens
  siRNA target sequence for FLJ46156 (NM_198499.1,3071-3089).
ctcgcctcagcataaataa

SEQ ID NO: 438718 - DNA, 19 bp, Homo sapiens
  siRNA target sequence for FLJ46156 (NM_198499.1,3073-3091).
cgcctcagcataaataata

SEQ ID NO: 438719 - DNA, 19 bp, Homo sapiens
  siRNA target sequence for FLJ46156 (NM_198499.1,3074-3092).
gcctcagcataaataataa

SEQ ID NO: 438720 - DNA, 19 bp, Homo sapiens
  siRNA target sequence for FLJ46156 (NM_198499.1,3075-3093).
cctcagcataaataataat

SEQ ID NO: 438721 - DNA, 19 bp, Homo sapiens
  siRNA target sequence for FLJ46156 (NM_198499.1,3080-3098).
gcataaataataatcttct

SEQ ID NO: 438722 - DNA, 19 bp, Homo sapiens
  siRNA target sequence for FLJ46156 (NM_198499.1,3104-3122).
gttgggaagagcatacctt

SEQ ID NO: 438723 - DNA, 19 bp, Homo sapiens
  siRNA target sequence for FLJ46156 (NM_198499.1,3157-3175).
gagaacaacagaatcactt

SEQ ID NO: 438724 - DNA, 19 bp, Homo sapiens
  siRNA target sequence for FLJ46156 (NM_198499.1,3208-3226).
gttgagttatacataagca

SEQ ID NO: 438725 - DNA, 19 bp, Homo sapiens
  siRNA target sequence for FLJ46156 (NM_198499.1,3219-3237).
cataagcaataactatatt

SEQ ID NO: 438726 - DNA, 19 bp, Homo sapiens
  siRNA target sequence for FLJ46156 (NM_198499.1,3256-3274).
cacaatttaaagggtttat

SEQ ID NO: 438727 - DNA, 19 bp, Homo sapiens
  siRNA target sequence for FLJ46156 (NM_198499.1,3275-3293).
gcaacttggtcattctaga

SEQ ID NO: 438728 - DNA, 19 bp, Homo sapiens
  siRNA target sequence for FLJ46156 (NM_198499.1,3297-3315).
gtgtgggaacatcattata

SEQ ID NO: 438729 - DNA, 19 bp, Homo sapiens
  siRNA target sequence for FLJ46156 (NM_198499.1,3309-3327).
cattatatggaatcaagaa

SEQ ID NO: 438730 - DNA, 19 bp, Homo sapiens
  siRNA target sequence for FLJ46156 (NM_198499.1,3330-3348).
ctaccggttgtttgtaata

SEQ ID NO: 438731 - DNA, 19 bp, Homo sapiens
  siRNA target sequence for FLJ46156 (NM_198499.1,3333-3351).
ccggttgtttgtaatattt

SEQ ID NO: 438732 - DNA, 19 bp, Homo sapiens
  siRNA target sequence for FLJ46156 (NM_198499.1,3375-3393).
ggatgggataccaattgaa

SEQ ID NO: 438733 - DNA, 19 bp, Homo sapiens
  siRNA target sequence for FLJ46156 (NM_198499.1,3423-3441).
gtttggtggtagacttact

SEQ ID NO: 438734 - DNA, 19 bp, Homo sapiens
  siRNA target sequence for FLJ46156 (NM_198499.1,3434-3452).
gacttacttctgacatgat

SEQ ID NO: 438735 - DNA, 19 bp, Homo sapiens
  siRNA target sequence for FLJ46156 (NM_198499.1,3463-3481).
caaggacattccaacttca

SEQ ID NO: 438736 - DNA, 19 bp, Homo sapiens
  siRNA target sequence for FLJ42461 (NM_198501.1,196-214).
cgatggaccccctgagatt

SEQ ID NO: 438737 - DNA, 19 bp, Homo sapiens
  siRNA target sequence for FLJ42461 (NM_198501.1,207-225).
ctgagattgcccaaaactt

SEQ ID NO: 438738 - DNA, 19 bp, Homo sapiens
  siRNA target sequence for FLJ42461 (NM_198501.1,209-227).
gagattgcccaaaacttct

SEQ ID NO: 438739 - DNA, 19 bp, Homo sapiens
  siRNA target sequence for FLJ42461 (NM_198501.1,420-438).
ccagtcctagcgagaagaa

SEQ ID NO: 438740 - DNA, 19 bp, Homo sapiens
  siRNA target sequence for FLJ42461 (NM_198501.1,425-443).
cctagcgagaagaattcct

SEQ ID NO: 438741 - DNA, 19 bp, Homo sapiens
  siRNA target sequence for FLJ42461 (NM_198501.1,488-506).
gcaagcaaacacagcaata

SEQ ID NO: 438742 - DNA, 19 bp, Homo sapiens
  siRNA target sequence for FLJ42461 (NM_198501.1,547-565).
gcagccgccagccataact

SEQ ID NO: 438743 - DNA, 19 bp, Homo sapiens
  siRNA target sequence for PAQR9 (NM_198504.1,503-521).
gcacggtggcctactacta

SEQ ID NO: 438744 - DNA, 19 bp, Homo sapiens
  siRNA target sequence for PAQR9 (NM_198504.1,557-575).
gagtcatgactccatactt

SEQ ID NO: 438745 - DNA, 19 bp, Homo sapiens
  siRNA target sequence for PAQR9 (NM_198504.1,815-833).
cactcttcgtgcacttcta

SEQ ID NO: 438746 - DNA, 19 bp, Homo sapiens
  siRNA target sequence for PAQR9 (NM_198504.1,901-919).
ccgggtcttttcgacatta

SEQ ID NO: 438747 - DNA, 19 bp, Homo sapiens
  siRNA target sequence for PAQR9 (NM_198504.1,1087-1105).
gtaatcaggaagttcctaa

SEQ ID NO: 438748 - DNA, 19 bp, Homo sapiens
  siRNA target sequence for PAQR9 (NM_198504.1,1110-1128).
ctccgaattctgcagtaaa

SEQ ID NO: 438749 - DNA, 19 bp, Homo sapiens
  siRNA target sequence for FLJ44691 (NM_198506.1,804-822).
ggtctacaggacaatcctt

SEQ ID NO: 438750 - DNA, 19 bp, Homo sapiens
  siRNA target sequence for FLJ44691 (NM_198506.1,835-853).
gtcatatttccaaaatgat

SEQ ID NO: 438751 - DNA, 19 bp, Homo sapiens
  siRNA target sequence for FLJ44691 (NM_198506.1,866-884).
ggtcgttgaccctgctata

SEQ ID NO: 438752 - DNA, 19 bp, Homo sapiens
  siRNA target sequence for FLJ44691 (NM_198506.1,891-909).
ctggatccactgatgactt

SEQ ID NO: 438753 - DNA, 19 bp, Homo sapiens
  siRNA target sequence for FLJ44691 (NM_198506.1,921-939).
gagcgcctcacaggaattt

SEQ ID NO: 438754 - DNA, 19 bp, Homo sapiens
  siRNA target sequence for FLJ44691 (NM_198506.1,924-942).
cgcctcacaggaattttgt

SEQ ID NO: 438755 - DNA, 19 bp, Homo sapiens
  siRNA target sequence for FLJ44691 (NM_198506.1,925-943).
gcctcacaggaattttgtt

SEQ ID NO: 438756 - DNA, 19 bp, Homo sapiens
  siRNA target sequence for FLJ44691 (NM_198506.1,1012-1030).
ctctgggcagtaatgttct

SEQ ID NO: 438757 - DNA, 19 bp, Homo sapiens
  siRNA target sequence for FLJ44691 (NM_198506.1,1084-1102).
ctgacagctcgccagttaa

SEQ ID NO: 438758 - DNA, 19 bp, Homo sapiens
  siRNA target sequence for FLJ44691 (NM_198506.1,1086-1104).
gacagctcgccagttaatt

SEQ ID NO: 438759 - DNA, 19 bp, Homo sapiens
  siRNA target sequence for FLJ44691 (NM_198506.1,1088-1106).
cagctcgccagttaattat

SEQ ID NO: 438760 - DNA, 19 bp, Homo sapiens
  siRNA target sequence for FLJ44691 (NM_198506.1,1091-1109).
ctcgccagttaattataca

SEQ ID NO: 438761 - DNA, 19 bp, Homo sapiens
  siRNA target sequence for FLJ44691 (NM_198506.1,1093-1111).
cgccagttaattatacagt

SEQ ID NO: 438762 - DNA, 19 bp, Homo sapiens
  siRNA target sequence for FLJ44691 (NM_198506.1,1095-1113).
ccagttaattatacagtaa

SEQ ID NO: 438763 - DNA, 19 bp, Homo sapiens
  siRNA target sequence for FLJ44691 (NM_198506.1,1134-1152).
ggagtcagatggtccataa

SEQ ID NO: 438764 - DNA, 19 bp, Homo sapiens
  siRNA target sequence for FLJ44691 (NM_198506.1,1135-1153).
gagtcagatggtccataat

SEQ ID NO: 438765 - DNA, 19 bp, Homo sapiens
  siRNA target sequence for FLJ44691 (NM_198506.1,1137-1155).
gtcagatggtccataatga

SEQ ID NO: 438766 - DNA, 19 bp, Homo sapiens
  siRNA target sequence for FLJ44691 (NM_198506.1,1179-1197).
gacgctggggattacaaat

SEQ ID NO: 438767 - DNA, 19 bp, Homo sapiens
  siRNA target sequence for FLJ44691 (NM_198506.1,1181-1199).
cgctggggattacaaatgt

SEQ ID NO: 438768 - DNA, 19 bp, Homo sapiens
  siRNA target sequence for FLJ44691 (NM_198506.1,1225-1243).
cagaagctgtggttactgt

SEQ ID NO: 438769 - DNA, 19 bp, Homo sapiens
  siRNA target sequence for FLJ44691 (NM_198506.1,1328-1346).
gggatctggaagatctaca

SEQ ID NO: 438770 - DNA, 19 bp, Homo sapiens
  siRNA target sequence for FLJ44691 (NM_198506.1,1350-1368).
gtatctagcgcatcatcat

SEQ ID NO: 438771 - DNA, 19 bp, Homo sapiens
  siRNA target sequence for FLJ44691 (NM_198506.1,1354-1372).
ctagcgcatcatcatatct

SEQ ID NO: 438772 - DNA, 19 bp, Homo sapiens
  siRNA target sequence for FLJ44691 (NM_198506.1,1600-1618).
ctccagccagcacaagtaa

SEQ ID NO: 438773 - DNA, 19 bp, Homo sapiens
  siRNA target sequence for FLJ44691 (NM_198506.1,1602-1620).
ccagccagcacaagtaaga

SEQ ID NO: 438774 - DNA, 19 bp, Homo sapiens
  siRNA target sequence for FLJ44691 (NM_198506.1,1633-1651).
cattgttggatcaaacaat

SEQ ID NO: 438775 - DNA, 19 bp, Homo sapiens
  siRNA target sequence for FLJ44691 (NM_198506.1,1637-1655).
gttggatcaaacaatgctt

SEQ ID NO: 438776 - DNA, 19 bp, Homo sapiens
  siRNA target sequence for FLJ44691 (NM_198506.1,1661-1679).
gacaaatgccgcaatagaa

SEQ ID NO: 438777 - DNA, 19 bp, Homo sapiens
  siRNA target sequence for FLJ44691 (NM_198506.1,1688-1706).
ggtggtcagtgagactaaa

SEQ ID NO: 438778 - DNA, 19 bp, Homo sapiens
  siRNA target sequence for FLJ44691 (NM_198506.1,1713-1731).
gtgacattgacgtggaata

SEQ ID NO: 438779 - DNA, 19 bp, Homo sapiens
  siRNA target sequence for FLJ44691 (NM_198506.1,1736-1754).
caacaccacacataactct

SEQ ID NO: 438780 - DNA, 19 bp, Homo sapiens
  siRNA target sequence for FLJ44691 (NM_198506.1,1758-1776).
gtgactgtgttgtattcca

SEQ ID NO: 438781 - DNA, 19 bp, Homo sapiens
  siRNA target sequence for FLJ44691 (NM_198506.1,1848-1866).
gaacccggtgggcaataca

SEQ ID NO: 438782 - DNA, 19 bp, Homo sapiens
  siRNA target sequence for FLJ44691 (NM_198506.1,1907-1925).
ccaatgcatcaccttttct

SEQ ID NO: 438783 - DNA, 19 bp, Homo sapiens
  siRNA target sequence for FLJ44691 (NM_198506.1,1938-1956).
gaaggagatgattctcaat

SEQ ID NO: 438784 - DNA, 19 bp, Homo sapiens
  siRNA target sequence for FLJ44691 (NM_198506.1,2036-2054).
caaactgcaatgtaaatca

SEQ ID NO: 438785 - DNA, 19 bp, Homo sapiens
  siRNA target sequence for FLJ44691 (NM_198506.1,2080-2098).
caaaggagacttatatcca

SEQ ID NO: 438786 - DNA, 19 bp, Homo sapiens
  siRNA target sequence for FLJ44691 (NM_198506.1,2191-2209).
ggtcaagtgtggaatctca

SEQ ID NO: 438787 - DNA, 19 bp, Homo sapiens
  siRNA target sequence for FLJ44691 (NM_198506.1,2229-2247).
ggttccagaccagagtatt

SEQ ID NO: 438788 - DNA, 19 bp, Homo sapiens
  siRNA target sequence for FLJ44691 (NM_198506.1,2230-2248).
gttccagaccagagtatta

SEQ ID NO: 438789 - DNA, 19 bp, Homo sapiens
  siRNA target sequence for UNQ1912 (NM_198507.1,181-199).
ctgttgctgcctgaactaa

SEQ ID NO: 438790 - DNA, 19 bp, Homo sapiens
  siRNA target sequence for UNQ1912 (NM_198507.1,261-279).
ccctagaccacggacatta

SEQ ID NO: 438791 - DNA, 19 bp, Homo sapiens
  siRNA target sequence for UNQ1912 (NM_198507.1,578-596).
ctaggagatatggagtttt

SEQ ID NO: 438792 - DNA, 19 bp, Homo sapiens
  siRNA target sequence for UNQ1912 (NM_198507.1,597-615).
ggacactaacatagaaaat

SEQ ID NO: 438793 - DNA, 19 bp, Homo sapiens
  siRNA target sequence for UNQ1912 (NM_198507.1,598-616).
gacactaacatagaaaata

SEQ ID NO: 438794 - DNA, 19 bp, Homo sapiens
  siRNA target sequence for UNQ1912 (NM_198507.1,663-681).
gttgtttgatgccaatcat

SEQ ID NO: 438795 - DNA, 19 bp, Homo sapiens
  siRNA target sequence for FLJ44186 (NM_198508.1,975-993).
gaggagcactgttactact

SEQ ID NO: 438796 - DNA, 19 bp, Homo sapiens
  siRNA target sequence for FLJ44186 (NM_198508.1,1198-1216).
gcgaggacaatctggatat

SEQ ID NO: 438797 - DNA, 19 bp, Homo sapiens
  siRNA target sequence for UNQ6369 (NM_198510.1,69-87).
gctgaccattcttcttgaa

SEQ ID NO: 438798 - DNA, 19 bp, Homo sapiens
  siRNA target sequence for UNQ6369 (NM_198510.1,115-133).
gcttcatcaagcacaaagt

SEQ ID NO: 438799 - DNA, 19 bp, Homo sapiens
  siRNA target sequence for UNQ6369 (NM_198510.1,119-137).
catcaagcacaaagttgtt

SEQ ID NO: 438800 - DNA, 19 bp, Homo sapiens
  siRNA target sequence for UNQ6369 (NM_198510.1,122-140).
caagcacaaagttgttaat

SEQ ID NO: 438801 - DNA, 19 bp, Homo sapiens
  siRNA target sequence for UNQ6369 (NM_198510.1,135-153).
gttaatgacaagctattct

SEQ ID NO: 438802 - DNA, 19 bp, Homo sapiens
  siRNA target sequence for UNQ6369 (NM_198510.1,284-302).
ctatgaccatcaacaataa

SEQ ID NO: 438803 - DNA, 19 bp, Homo sapiens
  siRNA target sequence for UNQ6369 (NM_198510.1,708-726).
ctactgcccgacattgcaa

SEQ ID NO: 438804 - DNA, 19 bp, Homo sapiens
  siRNA target sequence for UNQ6369 (NM_198510.1,806-824).
gagacgtgcagatttacga

SEQ ID NO: 438805 - DNA, 19 bp, Homo sapiens
  siRNA target sequence for UNQ6369 (NM_198510.1,813-831).
gcagatttacgatgactat

SEQ ID NO: 438806 - DNA, 19 bp, Homo sapiens
  siRNA target sequence for UNQ6369 (NM_198510.1,814-832).
cagatttacgatgactatt

SEQ ID NO: 438807 - DNA, 19 bp, Homo sapiens
  siRNA target sequence for UNQ6369 (NM_198510.1,933-951).
gactaaaacggccatgaat

SEQ ID NO: 438808 - DNA, 19 bp, Homo sapiens
  siRNA target sequence for UNQ6369 (NM_198510.1,935-953).
ctaaaacggccatgaatgt

SEQ ID NO: 438809 - DNA, 19 bp, Homo sapiens
  siRNA target sequence for UNQ6369 (NM_198510.1,964-982).
gaccttcaagccaatgact

SEQ ID NO: 438810 - DNA, 19 bp, Homo sapiens
  siRNA target sequence for UNQ6369 (NM_198510.1,1142-1160).
cagtgctgaaccatagcaa

SEQ ID NO: 438811 - DNA, 19 bp, Homo sapiens
  siRNA target sequence for UNQ6369 (NM_198510.1,1190-1208).
ggaggatccctcttatcat

SEQ ID NO: 438812 - DNA, 19 bp, Homo sapiens
  siRNA target sequence for UNQ6369 (NM_198510.1,1288-1306).
cacagggtatcccttttca

SEQ ID NO: 438813 - DNA, 19 bp, Homo sapiens
  siRNA target sequence for UNQ6369 (NM_198510.1,1506-1524).
cgttttccccaactacttt

SEQ ID NO: 438814 - DNA, 19 bp, Homo sapiens
  siRNA target sequence for UNQ6369 (NM_198510.1,1807-1825).
ctcaacctgtcccttgaat

SEQ ID NO: 438815 - DNA, 19 bp, Homo sapiens
  siRNA target sequence for UNQ6369 (NM_198510.1,1817-1835).
cccttgaatacaactttgt

SEQ ID NO: 438816 - DNA, 19 bp, Homo sapiens
  siRNA target sequence for UNQ6369 (NM_198510.1,2026-2044).
ccaaagttctacttatcct

SEQ ID NO: 438817 - DNA, 19 bp, Homo sapiens
  siRNA target sequence for UNQ6369 (NM_198510.1,2034-2052).
ctacttatcctcaactact

SEQ ID NO: 438818 - DNA, 19 bp, Homo sapiens
  siRNA target sequence for UNQ6369 (NM_198510.1,2108-2126).
gccctcataccctgtcaat

SEQ ID NO: 438819 - DNA, 19 bp, Homo sapiens
  siRNA target sequence for UNQ6369 (NM_198510.1,2196-2214).
gacaaaacctaccattctt

SEQ ID NO: 438820 - DNA, 19 bp, Homo sapiens
  siRNA target sequence for UNQ6369 (NM_198510.1,2521-2539).
cccaagacccgaaacaaca

SEQ ID NO: 438821 - DNA, 19 bp, Homo sapiens
  siRNA target sequence for UNQ6369 (NM_198510.1,2522-2540).
ccaagacccgaaacaacat

SEQ ID NO: 438822 - DNA, 19 bp, Homo sapiens
  siRNA target sequence for UNQ6369 (NM_198510.1,2574-2592).
gacccctaaaatcttatta

SEQ ID NO: 438823 - DNA, 19 bp, Homo sapiens
  siRNA target sequence for UNQ6369 (NM_198510.1,2619-2637).
ccaaatttccacaagcata

SEQ ID NO: 438824 - DNA, 19 bp, Homo sapiens
  siRNA target sequence for UNQ6369 (NM_198510.1,2620-2638).
caaatttccacaagcatat

SEQ ID NO: 438825 - DNA, 19 bp, Homo sapiens
  siRNA target sequence for UNQ6369 (NM_198510.1,2731-2749).
ctaagcacattcccaaata

SEQ ID NO: 438826 - DNA, 19 bp, Homo sapiens
  siRNA target sequence for UNQ6369 (NM_198510.1,2846-2864).
ggttctggcatcagtatga

SEQ ID NO: 438827 - DNA, 19 bp, Homo sapiens
  siRNA target sequence for UNQ6369 (NM_198510.1,2912-2930).
ggccaggagttccaacaat

SEQ ID NO: 438828 - DNA, 19 bp, Homo sapiens
  siRNA target sequence for UNQ6369 (NM_198510.1,2914-2932).
ccaggagttccaacaatga

SEQ ID NO: 438829 - DNA, 19 bp, Homo sapiens
  siRNA target sequence for UNQ6369 (NM_198510.1,2924-2942).
caacaatgagcctactcaa

SEQ ID NO: 438830 - DNA, 19 bp, Homo sapiens
  siRNA target sequence for UNQ6369 (NM_198510.1,3212-3230).
gttctgtggggttagcaaa

SEQ ID NO: 438831 - DNA, 19 bp, Homo sapiens
  siRNA target sequence for UNQ6369 (NM_198510.1,3275-3293).
gggacccccactttgtgat

SEQ ID NO: 438832 - DNA, 19 bp, Homo sapiens
  siRNA target sequence for UNQ6369 (NM_198510.1,3465-3483).
cacagtcactacagacaaa

SEQ ID NO: 438833 - DNA, 19 bp, Homo sapiens
  siRNA target sequence for UNQ6369 (NM_198510.1,3503-3521).
ccatcagccgcagttctat

SEQ ID NO: 438834 - DNA, 19 bp, Homo sapiens
  siRNA target sequence for UNQ6369 (NM_198510.1,3504-3522).
catcagccgcagttctata

SEQ ID NO: 438835 - DNA, 19 bp, Homo sapiens
  siRNA target sequence for UNQ6369 (NM_198510.1,3912-3930).
ggtgaagcgctctcatgta

SEQ ID NO: 438836 - DNA, 19 bp, Homo sapiens
  siRNA target sequence for FLJ42925 (NM_198511.1,325-343).
ccaatcgcttcgatgacta

SEQ ID NO: 438837 - DNA, 19 bp, Homo sapiens
  siRNA target sequence for FLJ42925 (NM_198511.1,511-529).
ccggagtggcgtatatgct

SEQ ID NO: 438838 - DNA, 19 bp, Homo sapiens
  siRNA target sequence for FLJ42925 (NM_198511.1,888-906).
gcacagatcaagtcaattt

SEQ ID NO: 438839 - DNA, 19 bp, Homo sapiens
  siRNA target sequence for FLJ42925 (NM_198511.1,901-919).
caatttgtcaggcaattct

SEQ ID NO: 438840 - DNA, 19 bp, Homo sapiens
  siRNA target sequence for FLJ42925 (NM_198511.1,928-946).
ggaagcagtatgccataaa

SEQ ID NO: 438841 - DNA, 19 bp, Homo sapiens
  siRNA target sequence for FLJ42925 (NM_198511.1,957-975).
ccattccccctgatgtatt

SEQ ID NO: 438842 - DNA, 19 bp, Homo sapiens
  siRNA target sequence for FLJ42925 (NM_198511.1,1010-1028).
cggcttgtcgtctattctt

SEQ ID NO: 438843 - DNA, 19 bp, Homo sapiens
  siRNA target sequence for FLJ42925 (NM_198511.1,1084-1102).
ggcagagcgtggactttct

SEQ ID NO: 438844 - DNA, 19 bp, Homo sapiens
  siRNA target sequence for FLJ42925 (NM_198511.1,1150-1168).
ccatcgagagagagaatga

SEQ ID NO: 438845 - DNA, 19 bp, Homo sapiens
  siRNA target sequence for FLJ42925 (NM_198511.1,1184-1202).
ccatggcgctccaggaatt

SEQ ID NO: 438846 - DNA, 19 bp, Homo sapiens
  siRNA target sequence for FLJ42925 (NM_198511.1,1194-1212).
ccaggaattgcctatctgt

SEQ ID NO: 438847 - DNA, 19 bp, Homo sapiens
  siRNA target sequence for FLJ42925 (NM_198511.1,1195-1213).
caggaattgcctatctgtt

SEQ ID NO: 438848 - DNA, 19 bp, Homo sapiens
  siRNA target sequence for FLJ42925 (NM_198511.1,1247-1265).
gtacctggacacatgtatt

SEQ ID NO: 438849 - DNA, 19 bp, Homo sapiens
  siRNA target sequence for FLJ42925 (NM_198511.1,1367-1385).
gctcacgggaaactctaaa

SEQ ID NO: 438850 - DNA, 19 bp, Homo sapiens
  siRNA target sequence for FLJ42925 (NM_198511.1,1368-1386).
ctcacgggaaactctaaat

SEQ ID NO: 438851 - DNA, 19 bp, Homo sapiens
  siRNA target sequence for FLJ42925 (NM_198511.1,1372-1390).
cgggaaactctaaatacat

SEQ ID NO: 438852 - DNA, 19 bp, Homo sapiens
  siRNA target sequence for FLJ42925 (NM_198511.1,1375-1393).
gaaactctaaatacatcta

SEQ ID NO: 438853 - DNA, 19 bp, Homo sapiens
  siRNA target sequence for FLJ42925 (NM_198511.1,1388-1406).
catctaccgagctcaaagt

SEQ ID NO: 438854 - DNA, 19 bp, Homo sapiens
  siRNA target sequence for FLJ42925 (NM_198511.1,1405-1423).
gttcattccctgtaaactt

SEQ ID NO: 438855 - DNA, 19 bp, Homo sapiens
  siRNA target sequence for FLJ42925 (NM_198511.1,1408-1426).
cattccctgtaaacttgat

SEQ ID NO: 438856 - DNA, 19 bp, Homo sapiens
  siRNA target sequence for FLJ42925 (NM_198511.1,1413-1431).
cctgtaaacttgataaaga

SEQ ID NO: 438857 - DNA, 19 bp, Homo sapiens
  siRNA target sequence for FLJ42925 (NM_198511.1,1414-1432).
ctgtaaacttgataaagat

SEQ ID NO: 438858 - DNA, 19 bp, Homo sapiens
  siRNA target sequence for FLJ25989 (NM_198512.1,154-172).
gcaatggatcccagtctat

SEQ ID NO: 438859 - DNA, 19 bp, Homo sapiens
  siRNA target sequence for FLJ25989 (NM_198512.1,208-226).
ctactttctgttattcagt

SEQ ID NO: 438860 - DNA, 19 bp, Homo sapiens
  siRNA target sequence for FLJ25989 (NM_198512.1,257-275).
gcctggctcacctatgatt

SEQ ID NO: 438861 - DNA, 19 bp, Homo sapiens
  siRNA target sequence for FLJ25989 (NM_198512.1,261-279).
ggctcacctatgattggaa

SEQ ID NO: 438862 - DNA, 19 bp, Homo sapiens
  siRNA target sequence for FLJ25989 (NM_198512.1,322-340).
ctggaccctatggaagtat

SEQ ID NO: 438863 - DNA, 19 bp, Homo sapiens
  siRNA target sequence for FLJ25989 (NM_198512.1,324-342).
ggaccctatggaagtattt

SEQ ID NO: 438864 - DNA, 19 bp, Homo sapiens
  siRNA target sequence for FLJ25989 (NM_198512.1,387-405).
ctcccaaacacaactacat

SEQ ID NO: 438865 - DNA, 19 bp, Homo sapiens
  siRNA target sequence for FLJ25989 (NM_198512.1,390-408).
ccaaacacaactacatcat

SEQ ID NO: 438866 - DNA, 19 bp, Homo sapiens
  siRNA target sequence for FLJ25989 (NM_198512.1,512-530).
gggaccttagaaaggatat

SEQ ID NO: 438867 - DNA, 19 bp, Homo sapiens
  siRNA target sequence for FLJ25989 (NM_198512.1,538-556).
cccaattgtgcgagaatat

SEQ ID NO: 438868 - DNA, 19 bp, Homo sapiens
  siRNA target sequence for FLJ25989 (NM_198512.1,548-566).
cgagaatatgtgatgtcaa

SEQ ID NO: 438869 - DNA, 19 bp, Homo sapiens
  siRNA target sequence for FLJ25989 (NM_198512.1,624-642).
caggcaatgccgtggttat

SEQ ID NO: 438870 - DNA, 19 bp, Homo sapiens
  siRNA target sequence for FLJ25989 (NM_198512.1,627-645).
gcaatgccgtggttattgt

SEQ ID NO: 438871 - DNA, 19 bp, Homo sapiens
  siRNA target sequence for FLJ25989 (NM_198512.1,700-718).
cctcaagcagcgtaaaggt

SEQ ID NO: 438872 - DNA, 19 bp, Homo sapiens
  siRNA target sequence for FLJ25989 (NM_198512.1,701-719).
ctcaagcagcgtaaaggtt

SEQ ID NO: 438873 - DNA, 19 bp, Homo sapiens
  siRNA target sequence for FLJ25989 (NM_198512.1,703-721).
caagcagcgtaaaggtttt

SEQ ID NO: 438874 - DNA, 19 bp, Homo sapiens
  siRNA target sequence for FLJ25989 (NM_198512.1,736-754).
gcaaacaggggcatacctt

SEQ ID NO: 438875 - DNA, 19 bp, Homo sapiens
  siRNA target sequence for FLJ25989 (NM_198512.1,747-765).
cataccttgtcccttcata

SEQ ID NO: 438876 - DNA, 19 bp, Homo sapiens
  siRNA target sequence for FLJ25989 (NM_198512.1,773-791).
ggtgagaacgaagttttca

SEQ ID NO: 438877 - DNA, 19 bp, Homo sapiens
  siRNA target sequence for FLJ25989 (NM_198512.1,774-792).
gtgagaacgaagttttcaa

SEQ ID NO: 438878 - DNA, 19 bp, Homo sapiens
  siRNA target sequence for FLJ25989 (NM_198512.1,806-824).
cctgagggcacgtggttaa

SEQ ID NO: 438879 - DNA, 19 bp, Homo sapiens
  siRNA target sequence for FLJ25989 (NM_198512.1,809-827).
gagggcacgtggttaaggt

SEQ ID NO: 438880 - DNA, 19 bp, Homo sapiens
  siRNA target sequence for FLJ25989 (NM_198512.1,819-837).
ggttaaggttgttccaaaa

SEQ ID NO: 438881 - DNA, 19 bp, Homo sapiens
  siRNA target sequence for FLJ25989 (NM_198512.1,1000-1018).
gaagacagtagacaagtat

SEQ ID NO: 438882 - DNA, 19 bp, Homo sapiens
  siRNA target sequence for FLJ25989 (NM_198512.1,1048-1066).
gctctttgaccaacacaaa

SEQ ID NO: 438883 - DNA, 19 bp, Homo sapiens
  siRNA target sequence for FLJ25989 (NM_198512.1,1055-1073).
gaccaacacaaagttgaat

SEQ ID NO: 438884 - DNA, 19 bp, Homo sapiens
  siRNA target sequence for FLJ25989 (NM_198512.1,1057-1075).
ccaacacaaagttgaatat

SEQ ID NO: 438885 - DNA, 19 bp, Homo sapiens
  siRNA target sequence for FLJ25621 (NM_198514.1,240-258).
cactgaaaaccaccttata

SEQ ID NO: 438886 - DNA, 19 bp, Homo sapiens
  siRNA target sequence for FLJ25621 (NM_198514.1,249-267).
ccaccttataagaaagatt

SEQ ID NO: 438887 - DNA, 19 bp, Homo sapiens
  siRNA target sequence for FLJ25621 (NM_198514.1,288-306).
gagcactgtagctggtatt

SEQ ID NO: 438888 - DNA, 19 bp, Homo sapiens
  siRNA target sequence for FLJ25621 (NM_198514.1,293-311).
ctgtagctggtattggaat

SEQ ID NO: 438889 - DNA, 19 bp, Homo sapiens
  siRNA target sequence for FLJ25621 (NM_198514.1,346-364).
gaacaacaacccattagtt

SEQ ID NO: 438890 - DNA, 19 bp, Homo sapiens
  siRNA target sequence for FLJ25621 (NM_198514.1,362-380).
gttccccttgggatgtagt

SEQ ID NO: 438891 - DNA, 19 bp, Homo sapiens
  siRNA target sequence for FLJ25621 (NM_198514.1,435-453).
ggcagggactcatcagata

SEQ ID NO: 438892 - DNA, 19 bp, Homo sapiens
  siRNA target sequence for FLJ25621 (NM_198514.1,436-454).
gcagggactcatcagatat

SEQ ID NO: 438893 - DNA, 19 bp, Homo sapiens
  siRNA target sequence for FLJ25621 (NM_198514.1,621-639).
ctggagctgcttgtttgta

SEQ ID NO: 438894 - DNA, 19 bp, Homo sapiens
  siRNA target sequence for FLJ25621 (NM_198514.1,630-648).
cttgtttgtagcagatagt

SEQ ID NO: 438895 - DNA, 19 bp, Homo sapiens
  siRNA target sequence for FLJ25621 (NM_198514.1,665-683).
gaaccgtttcactgaaaga

SEQ ID NO: 438896 - DNA, 19 bp, Homo sapiens
  siRNA target sequence for FLJ25621 (NM_198514.1,836-854).
cctacaatcacaagattaa

SEQ ID NO: 438897 - DNA, 19 bp, Homo sapiens
  siRNA target sequence for FLJ25621 (NM_198514.1,840-858).
caatcacaagattaaagtt

SEQ ID NO: 438898 - DNA, 19 bp, Homo sapiens
  siRNA target sequence for FLJ25621 (NM_198514.1,856-874).
gttgtggatccaaaaacaa

SEQ ID NO: 438899 - DNA, 19 bp, Homo sapiens
  siRNA target sequence for FLJ25621 (NM_198514.1,872-890).
caaaaaactgtacaacatt

SEQ ID NO: 438900 - DNA, 19 bp, Homo sapiens
  siRNA target sequence for FLJ25621 (NM_198514.1,929-947).
gttttacagagtcaacttt

SEQ ID NO: 438901 - DNA, 19 bp, Homo sapiens
  siRNA target sequence for FLJ25621 (NM_198514.1,1001-1019).
cagacaccaataatcatca

SEQ ID NO: 438902 - DNA, 19 bp, Homo sapiens
  siRNA target sequence for FLJ25621 (NM_198514.1,1003-1021).
gacaccaataatcatcaaa

SEQ ID NO: 438903 - DNA, 19 bp, Homo sapiens
  siRNA target sequence for FLJ25621 (NM_198514.1,1096-1114).
ggcccgttcctagtagaaa

SEQ ID NO: 438904 - DNA, 19 bp, Homo sapiens
  siRNA target sequence for FLJ25621 (NM_198514.1,1097-1115).
gcccgttcctagtagaaaa

SEQ ID NO: 438905 - DNA, 19 bp, Homo sapiens
  siRNA target sequence for FLJ25621 (NM_198514.1,1119-1137).
gaagacattacccaaacta

SEQ ID NO: 438906 - DNA, 19 bp, Homo sapiens
  siRNA target sequence for FLJ25621 (NM_198514.1,1187-1205).
gccagactcttcagttcaa

SEQ ID NO: 438907 - DNA, 19 bp, Homo sapiens
  siRNA target sequence for FLJ25621 (NM_198514.1,1222-1240).
ccatcaggatcaaagctaa

SEQ ID NO: 438908 - DNA, 19 bp, Homo sapiens
  siRNA target sequence for FLJ25621 (NM_198514.1,1290-1308).
gctacttcaaggacagata

SEQ ID NO: 438909 - DNA, 19 bp, Homo sapiens
  siRNA target sequence for FLJ25621 (NM_198514.1,1309-1327).
gcagctggagatatagaga

SEQ ID NO: 438910 - DNA, 19 bp, Homo sapiens
  siRNA target sequence for FLJ25621 (NM_198514.1,1427-1445).
cagacagcagtgcttgtat

SEQ ID NO: 438911 - DNA, 19 bp, Homo sapiens
  siRNA target sequence for FLJ25621 (NM_198514.1,1433-1451).
gcagtgcttgtatgatgaa

SEQ ID NO: 438912 - DNA, 19 bp, Homo sapiens
  siRNA target sequence for FLJ25621 (NM_198514.1,1513-1531).
gtagagctcaggtatgtat

SEQ ID NO: 438913 - DNA, 19 bp, Homo sapiens
  siRNA target sequence for MGC35062 (NM_198515.1,314-332).
ccgtttgatgcgagaagta

SEQ ID NO: 438914 - DNA, 19 bp, Homo sapiens
  siRNA target sequence for MGC35062 (NM_198515.1,315-333).
cgtttgatgcgagaagtaa

SEQ ID NO: 438915 - DNA, 19 bp, Homo sapiens
  siRNA target sequence for MGC35062 (NM_198515.1,327-345).
gaagtaaggtcggaaataa

SEQ ID NO: 438916 - DNA, 19 bp, Homo sapiens
  siRNA target sequence for MGC35062 (NM_198515.1,330-348).
gtaaggtcggaaataacca

SEQ ID NO: 438917 - DNA, 19 bp, Homo sapiens
  siRNA target sequence for MGC35062 (NM_198515.1,401-419).
caagctggaatctaaggtt

SEQ ID NO: 438918 - DNA, 19 bp, Homo sapiens
  siRNA target sequence for MGC35062 (NM_198515.1,560-578).
ggaggaagacaaatttatt

SEQ ID NO: 438919 - DNA, 19 bp, Homo sapiens
  siRNA target sequence for MGC35062 (NM_198515.1,704-722).
gaagtcaatggaacatgat

SEQ ID NO: 438920 - DNA, 19 bp, Homo sapiens
  siRNA target sequence for MGC35062 (NM_198515.1,724-742).
gtagccagttaaatgaact

SEQ ID NO: 438921 - DNA, 19 bp, Homo sapiens
  siRNA target sequence for MGC35062 (NM_198515.1,729-747).
cagttaaatgaacttcaaa

SEQ ID NO: 438922 - DNA, 19 bp, Homo sapiens
  siRNA target sequence for MGC35062 (NM_198515.1,826-844).
ccatttgtactaccaaata

SEQ ID NO: 438923 - DNA, 19 bp, Homo sapiens
  siRNA target sequence for MGC35062 (NM_198515.1,827-845).
catttgtactaccaaatat

SEQ ID NO: 438924 - DNA, 19 bp, Homo sapiens
  siRNA target sequence for MGC35062 (NM_198515.1,963-981).
ctccaaacagaaatagaat

SEQ ID NO: 438925 - DNA, 19 bp, Homo sapiens
  siRNA target sequence for MGC71806 (NM_198516.1,461-479).
ctgagcggcatgactaaca

SEQ ID NO: 438926 - DNA, 19 bp, Homo sapiens
  siRNA target sequence for MGC71806 (NM_198516.1,465-483).
gcggcatgactaacatcat

SEQ ID NO: 438927 - DNA, 19 bp, Homo sapiens
  siRNA target sequence for MGC71806 (NM_198516.1,582-600).
gggacactctgaagattat

SEQ ID NO: 438928 - DNA, 19 bp, Homo sapiens
  siRNA target sequence for MGC71806 (NM_198516.1,628-646).
catcaagcagcacattcaa

SEQ ID NO: 438929 - DNA, 19 bp, Homo sapiens
  siRNA target sequence for MGC71806 (NM_198516.1,743-761).
cgcgtggccctgaagcaat

SEQ ID NO: 438930 - DNA, 19 bp, Homo sapiens
  siRNA target sequence for MGC71806 (NM_198516.1,744-762).
gcgtggccctgaagcaatt

SEQ ID NO: 438931 - DNA, 19 bp, Homo sapiens
  siRNA target sequence for MGC71806 (NM_198516.1,840-858).
ggtgccgtaacctctcatt

SEQ ID NO: 438932 - DNA, 19 bp, Homo sapiens
  siRNA target sequence for MGC71806 (NM_198516.1,841-859).
gtgccgtaacctctcattt

SEQ ID NO: 438933 - DNA, 19 bp, Homo sapiens
  siRNA target sequence for MGC71806 (NM_198516.1,889-907).
gttcatcttcgtcaatgaa

SEQ ID NO: 438934 - DNA, 19 bp, Homo sapiens
  siRNA target sequence for MGC71806 (NM_198516.1,999-1017).
gcagtaacgaggaactgaa

SEQ ID NO: 438935 - DNA, 19 bp, Homo sapiens
  siRNA target sequence for MGC71806 (NM_198516.1,1234-1252).
gatcatctcgccatccttt

SEQ ID NO: 438936 - DNA, 19 bp, Homo sapiens
  siRNA target sequence for MGC71806 (NM_198516.1,1237-1255).
catctcgccatcctttgat

SEQ ID NO: 438937 - DNA, 19 bp, Homo sapiens
  siRNA target sequence for MGC71806 (NM_198516.1,1242-1260).
cgccatcctttgataacat

SEQ ID NO: 438938 - DNA, 19 bp, Homo sapiens
  siRNA target sequence for MGC71806 (NM_198516.1,1245-1263).
catcctttgataacatcaa

SEQ ID NO: 438939 - DNA, 19 bp, Homo sapiens
  siRNA target sequence for MGC71806 (NM_198516.1,1322-1340).
ctgtggtgccgctacctaa

SEQ ID NO: 438940 - DNA, 19 bp, Homo sapiens
  siRNA target sequence for MGC71806 (NM_198516.1,1324-1342).
gtggtgccgctacctaaat

SEQ ID NO: 438941 - DNA, 19 bp, Homo sapiens
  siRNA target sequence for MGC71806 (NM_198516.1,1787-1805).
ccagagatgaggatgtact

SEQ ID NO: 438942 - DNA, 19 bp, Homo sapiens
  siRNA target sequence for MGC71806 (NM_198516.1,1797-1815).
ggatgtactccgacatcat

SEQ ID NO: 438943 - DNA, 19 bp, Homo sapiens
  siRNA target sequence for MGC71806 (NM_198516.1,1798-1816).
gatgtactccgacatcatt

SEQ ID NO: 438944 - DNA, 19 bp, Homo sapiens
  siRNA target sequence for MGC71806 (NM_198516.1,1824-1842).
gagtgctgcagaattctct

SEQ ID NO: 438945 - DNA, 19 bp, Homo sapiens
  siRNA target sequence for MGC71806 (NM_198516.1,1917-1935).
cgcctcagaacgtgtacta

SEQ ID NO: 438946 - DNA, 19 bp, Homo sapiens
  siRNA target sequence for MGC71806 (NM_198516.1,1919-1937).
cctcagaacgtgtactaca

SEQ ID NO: 438947 - DNA, 19 bp, Homo sapiens
  siRNA target sequence for FLJ00332 (NM_198517.1,118-136).
caggccgaccgctatggat

SEQ ID NO: 438948 - DNA, 19 bp, Homo sapiens
  siRNA target sequence for FLJ00332 (NM_198517.1,123-141).
cgaccgctatggattcatt

SEQ ID NO: 438949 - DNA, 19 bp, Homo sapiens
  siRNA target sequence for FLJ00332 (NM_198517.1,193-211).
cgccaacgggagatgaagt

SEQ ID NO: 438950 - DNA, 19 bp, Homo sapiens
  siRNA target sequence for FLJ00332 (NM_198517.1,227-245).
cgcactgggagaaaaccat

SEQ ID NO: 438951 - DNA, 19 bp, Homo sapiens
  siRNA target sequence for FLJ00332 (NM_198517.1,982-1000).
caggaggaggccttcatgt

SEQ ID NO: 438952 - DNA, 19 bp, Homo sapiens
  siRNA target sequence for MGC12965 (NM_198519.1,1118-1136).
gaagttttatgctgaaagt

SEQ ID NO: 438953 - DNA, 19 bp, Homo sapiens
  siRNA target sequence for MGC12965 (NM_198519.1,1191-1209).
gatcttgatcgtgtattga

SEQ ID NO: 438954 - DNA, 19 bp, Homo sapiens
  siRNA target sequence for MGC12965 (NM_198519.1,1197-1215).
gatcgtgtattgaaagagt

SEQ ID NO: 438955 - DNA, 19 bp, Homo sapiens
  siRNA target sequence for MGC12965 (NM_198519.1,1234-1252).
gtgaacacatgccacttaa

SEQ ID NO: 438956 - DNA, 19 bp, Homo sapiens
  siRNA target sequence for MGC12965 (NM_198519.1,1255-1273).
gtatgctgatcatgaaaca

SEQ ID NO: 438957 - DNA, 19 bp, Homo sapiens
  siRNA target sequence for MGC12965 (NM_198519.1,1467-1485).
gaaggattcagtatgtcaa

SEQ ID NO: 438958 - DNA, 19 bp, Homo sapiens
  siRNA target sequence for MGC12965 (NM_198519.1,1563-1581).
gaggatatcaaagatgttt

SEQ ID NO: 438959 - DNA, 19 bp, Homo sapiens
  siRNA target sequence for MGC12965 (NM_198519.1,1602-1620).
ccagttgttcattcattgt

SEQ ID NO: 438960 - DNA, 19 bp, Homo sapiens
  siRNA target sequence for MGC12965 (NM_198519.1,1619-1637).
gtccaatggtgaagtaaca

SEQ ID NO: 438961 - DNA, 19 bp, Homo sapiens
  siRNA target sequence for MGC12965 (NM_198519.1,1622-1640).
caatggtgaagtaacaaaa

SEQ ID NO: 438962 - DNA, 19 bp, Homo sapiens
  siRNA target sequence for MGC12965 (NM_198519.1,1710-1728).
cctatagacgacatggtaa

SEQ ID NO: 438963 - DNA, 19 bp, Homo sapiens
  siRNA target sequence for MGC12965 (NM_198519.1,1711-1729).
ctatagacgacatggtaaa

SEQ ID NO: 438964 - DNA, 19 bp, Homo sapiens
  siRNA target sequence for MGC12965 (NM_198519.1,1716-1734).
gacgacatggtaaaaatgt

SEQ ID NO: 438965 - DNA, 19 bp, Homo sapiens
  siRNA target sequence for MGC12965 (NM_198519.1,1808-1826).
caaagagagacttctaaga

SEQ ID NO: 438966 - DNA, 19 bp, Homo sapiens
  siRNA target sequence for MGC12965 (NM_198519.1,1818-1836).
cttctaagacaaaaagcat

SEQ ID NO: 438967 - DNA, 19 bp, Homo sapiens
  siRNA target sequence for MGC12965 (NM_198519.1,1878-1896).
gccatccagaggaatgctt

SEQ ID NO: 438968 - DNA, 19 bp, Homo sapiens
  siRNA target sequence for MGC12965 (NM_198519.1,1944-1962).
gcttcttctcacctaaaaa

SEQ ID NO: 438969 - DNA, 19 bp, Homo sapiens
  siRNA target sequence for FLJ44112 (NM_198520.1,96-114).
gtccaagacacaaacagtt

SEQ ID NO: 438970 - DNA, 19 bp, Homo sapiens
  siRNA target sequence for FLJ44112 (NM_198520.1,157-175).
gaccgaggagcaaatttgt

SEQ ID NO: 438971 - DNA, 19 bp, Homo sapiens
  siRNA target sequence for FLJ44112 (NM_198520.1,159-177).
ccgaggagcaaatttgtgt

SEQ ID NO: 438972 - DNA, 19 bp, Homo sapiens
  siRNA target sequence for FLJ44112 (NM_198520.1,174-192).
gtgtgtaatggatcatttt

SEQ ID NO: 438973 - DNA, 19 bp, Homo sapiens
  siRNA target sequence for FLJ44112 (NM_198520.1,178-196).
gtaatggatcattttatga

SEQ ID NO: 438974 - DNA, 19 bp, Homo sapiens
  siRNA target sequence for FLJ44112 (NM_198520.1,235-253).
catcgtggtggctattgga

SEQ ID NO: 438975 - DNA, 19 bp, Homo sapiens
  siRNA target sequence for FLJ44112 (NM_198520.1,269-287).
gctgtcgggccttatggaa

SEQ ID NO: 438976 - DNA, 19 bp, Homo sapiens
  siRNA target sequence for FLJ44112 (NM_198520.1,319-337).
caggcagtggatcttgata

SEQ ID NO: 438977 - DNA, 19 bp, Homo sapiens
  siRNA target sequence for FLJ44112 (NM_198520.1,325-343).
gtggatcttgataaaacat

SEQ ID NO: 438978 - DNA, 19 bp, Homo sapiens
  siRNA target sequence for FLJ44112 (NM_198520.1,347-365).
ctattagccaagatggttt

SEQ ID NO: 438979 - DNA, 19 bp, Homo sapiens
  siRNA target sequence for FLJ44112 (NM_198520.1,374-392).
cctctgttttaccattcta

SEQ ID NO: 438980 - DNA, 19 bp, Homo sapiens
  siRNA target sequence for FLJ44112 (NM_198520.1,375-393).
ctctgttttaccattctat

SEQ ID NO: 438981 - DNA, 19 bp, Homo sapiens
  siRNA target sequence for FLJ44112 (NM_198520.1,401-419).
cagaattacttattgacat

SEQ ID NO: 438982 - DNA, 19 bp, Homo sapiens
  siRNA target sequence for FLJ44112 (NM_198520.1,443-461).
gttctattaagcctattga

SEQ ID NO: 438983 - DNA, 19 bp, Homo sapiens
  siRNA target sequence for FLJ44112 (NM_198520.1,485-503).
caagctgttatgggaatat

SEQ ID NO: 438984 - DNA, 19 bp, Homo sapiens
  siRNA target sequence for FLJ44112 (NM_198520.1,496-514).
gggaatattaaaaatgaca

SEQ ID NO: 438985 - DNA, 19 bp, Homo sapiens
  siRNA target sequence for FLJ44112 (NM_198520.1,513-531).
caacggtggttctagtctt

SEQ ID NO: 438986 - DNA, 19 bp, Homo sapiens
  siRNA target sequence for FLJ44112 (NM_198520.1,518-536).
gtggttctagtcttacctt

SEQ ID NO: 438987 - DNA, 19 bp, Homo sapiens
  siRNA target sequence for FLJ44112 (NM_198520.1,534-552).
ctttgagcatcctttggat

SEQ ID NO: 438988 - DNA, 19 bp, Homo sapiens
  siRNA target sequence for FLJ44112 (NM_198520.1,553-571).
gatgtaaatgtggttgatt

SEQ ID NO: 438989 - DNA, 19 bp, Homo sapiens
  siRNA target sequence for FLJ44112 (NM_198520.1,578-596).
ggatccacgactttgtatt

SEQ ID NO: 438990 - DNA, 19 bp, Homo sapiens
  siRNA target sequence for FLJ44112 (NM_198520.1,579-597).
gatccacgactttgtatta

SEQ ID NO: 438991 - DNA, 19 bp, Homo sapiens
  siRNA target sequence for FLJ44112 (NM_198520.1,583-601).
cacgactttgtattaaaat

SEQ ID NO: 438992 - DNA, 19 bp, Homo sapiens
  siRNA target sequence for FLJ44112 (NM_198520.1,585-603).
cgactttgtattaaaatct

SEQ ID NO: 438993 - DNA, 19 bp, Homo sapiens
  siRNA target sequence for FLJ44112 (NM_198520.1,643-661).
gtatctcttgccattcagt

SEQ ID NO: 438994 - DNA, 19 bp, Homo sapiens
  siRNA target sequence for FLJ44112 (NM_198520.1,670-688).
gtttcacatgagaggtata

SEQ ID NO: 438995 - DNA, 19 bp, Homo sapiens
  siRNA target sequence for FLJ44112 (NM_198520.1,674-692).
cacatgagaggtatacaga

SEQ ID NO: 438996 - DNA, 19 bp, Homo sapiens
  siRNA target sequence for FLJ44112 (NM_198520.1,785-803).
caaggtatgaggctgaata

SEQ ID NO: 438997 - DNA, 19 bp, Homo sapiens
  siRNA target sequence for FLJ44112 (NM_198520.1,835-853).
gggaagcagcttaagatta

SEQ ID NO: 438998 - DNA, 19 bp, Homo sapiens
  siRNA target sequence for FLJ44112 (NM_198520.1,836-854).
ggaagcagcttaagattaa

SEQ ID NO: 438999 - DNA, 19 bp, Homo sapiens
  siRNA target sequence for FLJ44112 (NM_198520.1,837-855).
gaagcagcttaagattaat

SEQ ID NO: 439000 - DNA, 19 bp, Homo sapiens
  siRNA target sequence for FLJ44112 (NM_198520.1,878-896).
gcaactgcacagatttgct

SEQ ID NO: 439001 - DNA, 19 bp, Homo sapiens
  siRNA target sequence for FLJ44112 (NM_198520.1,882-900).
ctgcacagatttgctaaaa

SEQ ID NO: 439002 - DNA, 19 bp, Homo sapiens
  siRNA target sequence for FLJ44112 (NM_198520.1,964-982).
gacaccttgaggtgtttta

SEQ ID NO: 439003 - DNA, 19 bp, Homo sapiens
  siRNA target sequence for FLJ44112 (NM_198520.1,966-984).
caccttgaggtgttttaga

SEQ ID NO: 439004 - DNA, 19 bp, Homo sapiens
  siRNA target sequence for FLJ44112 (NM_198520.1,968-986).
ccttgaggtgttttagaga

SEQ ID NO: 439005 - DNA, 19 bp, Homo sapiens
  siRNA target sequence for FLJ44112 (NM_198520.1,994-1012).
gaaaaatccaaataccata

SEQ ID NO: 439006 - DNA, 19 bp, Homo sapiens
  siRNA target sequence for FLJ44112 (NM_198520.1,1178-1196).
gtcaagctcttgatgacat

SEQ ID NO: 439007 - DNA, 19 bp, Homo sapiens
  siRNA target sequence for FLJ44112 (NM_198520.1,1186-1204).
cttgatgacatattcagaa

SEQ ID NO: 439008 - DNA, 19 bp, Homo sapiens
  siRNA target sequence for FLJ44112 (NM_198520.1,1273-1291).
cctccgggtttcaaagact

SEQ ID NO: 439009 - DNA, 19 bp, Homo sapiens
  siRNA target sequence for FLJ44112 (NM_198520.1,1274-1292).
ctccgggtttcaaagacta

SEQ ID NO: 439010 - DNA, 19 bp, Homo sapiens
  siRNA target sequence for FLJ44112 (NM_198520.1,1352-1370).
cagcaaagatagcacaatt

SEQ ID NO: 439011 - DNA, 19 bp, Homo sapiens
  siRNA target sequence for FLJ44112 (NM_198520.1,1354-1372).
gcaaagatagcacaattta

SEQ ID NO: 439012 - DNA, 19 bp, Homo sapiens
  siRNA target sequence for FLJ44112 (NM_198520.1,1464-1482).
caaagctgaacgttgctat

SEQ ID NO: 439013 - DNA, 19 bp, Homo sapiens
  siRNA target sequence for FLJ44112 (NM_198520.1,1478-1496).
gctatgctcaatatgaaat

SEQ ID NO: 439014 - DNA, 19 bp, Homo sapiens
  siRNA target sequence for FLJ44112 (NM_198520.1,1503-1521).
gcttctcccaggcattgaa

SEQ ID NO: 439015 - DNA, 19 bp, Homo sapiens
  siRNA target sequence for FLJ44112 (NM_198520.1,1522-1540).
ctcttctcagatagataca

SEQ ID NO: 439016 - DNA, 19 bp, Homo sapiens
  siRNA target sequence for FLJ44112 (NM_198520.1,1564-1582).
gcaagtctgtattacatta

SEQ ID NO: 439017 - DNA, 19 bp, Homo sapiens
  siRNA target sequence for FLJ44112 (NM_198520.1,1585-1603).
cgtgaactgcactttgtta

SEQ ID NO: 439018 - DNA, 19 bp, Homo sapiens
  siRNA target sequence for FLJ44112 (NM_198520.1,1623-1641).
gcctctccttgcattgtat

SEQ ID NO: 439019 - DNA, 19 bp, Homo sapiens
  siRNA target sequence for FLJ44112 (NM_198520.1,1625-1643).
ctctccttgcattgtatca

SEQ ID NO: 439020 - DNA, 19 bp, Homo sapiens
  siRNA target sequence for FLJ44112 (NM_198520.1,1627-1645).
ctccttgcattgtatcaat

SEQ ID NO: 439021 - DNA, 19 bp, Homo sapiens
  siRNA target sequence for FLJ44112 (NM_198520.1,1629-1647).
ccttgcattgtatcaatat

SEQ ID NO: 439022 - DNA, 19 bp, Homo sapiens
  siRNA target sequence for FLJ44112 (NM_198520.1,1657-1675).
ggaatttgtcaagacataa

SEQ ID NO: 439023 - DNA, 19 bp, Homo sapiens
  siRNA target sequence for FLJ44112 (NM_198520.1,1704-1722).
gatagaagtccttatagat

SEQ ID NO: 439024 - DNA, 19 bp, Homo sapiens
  siRNA target sequence for FLJ44112 (NM_198520.1,1711-1729).
gtccttatagatttgagat

SEQ ID NO: 439025 - DNA, 19 bp, Homo sapiens
  siRNA target sequence for FLJ44112 (NM_198520.1,1714-1732).
cttatagatttgagattct

SEQ ID NO: 439026 - DNA, 19 bp, Homo sapiens
  siRNA target sequence for FLJ44112 (NM_198520.1,1750-1768).
gagatatcccaaattttct

SEQ ID NO: 439027 - DNA, 19 bp, Homo sapiens
  siRNA target sequence for FLJ44112 (NM_198520.1,1752-1770).
gatatcccaaattttctat

SEQ ID NO: 439028 - DNA, 19 bp, Homo sapiens
  siRNA target sequence for FLJ44112 (NM_198520.1,1759-1777).
caaattttctatggaaaaa

SEQ ID NO: 439029 - DNA, 19 bp, Homo sapiens
  siRNA target sequence for FLJ44112 (NM_198520.1,1779-1797).
catgccttgtccaatacct

SEQ ID NO: 439030 - DNA, 19 bp, Homo sapiens
  siRNA target sequence for FLJ44112 (NM_198520.1,1790-1808).
caatacctgcaggctataa

SEQ ID NO: 439031 - DNA, 19 bp, Homo sapiens
  siRNA target sequence for FLJ44112 (NM_198520.1,1803-1821).
ctataaagccactggaaaa

SEQ ID NO: 439032 - DNA, 19 bp, Homo sapiens
  siRNA target sequence for FLJ44112 (NM_198520.1,1912-1930).
cctgcagttctggttacaa

SEQ ID NO: 439033 - DNA, 19 bp, Homo sapiens
  siRNA target sequence for FLJ44112 (NM_198520.1,1933-1951).
ggccaaccacatctcttaa

SEQ ID NO: 439034 - DNA, 19 bp, Homo sapiens
  siRNA target sequence for FLJ44112 (NM_198520.1,1939-1957).
ccacatctcttaaataagt

SEQ ID NO: 439035 - DNA, 19 bp, Homo sapiens
  siRNA target sequence for FLJ44112 (NM_198520.1,1990-2008).
gtggctgcgacaataaatt

SEQ ID NO: 439036 - DNA, 19 bp, Homo sapiens
  siRNA target sequence for FLJ44112 (NM_198520.1,1992-2010).
ggctgcgacaataaattgt

SEQ ID NO: 439037 - DNA, 19 bp, Homo sapiens
  siRNA target sequence for FLJ44112 (NM_198520.1,1994-2012).
ctgcgacaataaattgtgt

SEQ ID NO: 439038 - DNA, 19 bp, Homo sapiens
  siRNA target sequence for FLJ44112 (NM_198520.1,2120-2138).
caaaacttaaagatgagat

SEQ ID NO: 439039 - DNA, 19 bp, Homo sapiens
  siRNA target sequence for FLJ44112 (NM_198520.1,2148-2166).
catgctaaagtcgatgtta

SEQ ID NO: 439040 - DNA, 19 bp, Homo sapiens
  siRNA target sequence for FLJ44112 (NM_198520.1,2176-2194).
gctgaggacaggctaaact

SEQ ID NO: 439041 - DNA, 19 bp, Homo sapiens
  siRNA target sequence for FLJ44112 (NM_198520.1,2240-2258).
ctggcgagctggagattgt

SEQ ID NO: 439042 - DNA, 19 bp, Homo sapiens
  siRNA target sequence for FLJ44112 (NM_198520.1,2310-2328).
ggcatacagtgctgcaata

SEQ ID NO: 439043 - DNA, 19 bp, Homo sapiens
  siRNA target sequence for FLJ44112 (NM_198520.1,2416-2434).
ggaacttctgtcactgaaa

SEQ ID NO: 439044 - DNA, 19 bp, Homo sapiens
  siRNA target sequence for FLJ44112 (NM_198520.1,2417-2435).
gaacttctgtcactgaaaa

SEQ ID NO: 439045 - DNA, 19 bp, Homo sapiens
  siRNA target sequence for FLJ44112 (NM_198520.1,2468-2486).
ccctaaatgcccgagaata

SEQ ID NO: 439046 - DNA, 19 bp, Homo sapiens
  siRNA target sequence for FLJ44112 (NM_198520.1,2470-2488).
ctaaatgcccgagaatatt

SEQ ID NO: 439047 - DNA, 19 bp, Homo sapiens
  siRNA target sequence for FLJ44112 (NM_198520.1,2551-2569).
catggcattggaattgtga

SEQ ID NO: 439048 - DNA, 19 bp, Homo sapiens
  siRNA target sequence for FLJ44112 (NM_198520.1,2555-2573).
gcattggaattgtgaaaga

SEQ ID NO: 439049 - DNA, 19 bp, Homo sapiens
  siRNA target sequence for FLJ44112 (NM_198520.1,2647-2665).
ctgcaggctgaattcttga

SEQ ID NO: 439050 - DNA, 19 bp, Homo sapiens
  siRNA target sequence for FLJ44112 (NM_198520.1,2661-2679).
cttgacgcaagctgtaatt

SEQ ID NO: 439051 - DNA, 19 bp, Homo sapiens
  siRNA target sequence for FLJ44112 (NM_198520.1,2664-2682).
gacgcaagctgtaattctt

SEQ ID NO: 439052 - DNA, 19 bp, Homo sapiens
  siRNA target sequence for FLJ44112 (NM_198520.1,2685-2703).
cctacaagaaaagcattta

SEQ ID NO: 439053 - DNA, 19 bp, Homo sapiens
  siRNA target sequence for FLJ44112 (NM_198520.1,2720-2738).
caaaccttcaggatataat

SEQ ID NO: 439054 - DNA, 19 bp, Homo sapiens
  siRNA target sequence for FLJ44112 (NM_198520.1,2788-2806).
ctggcaagaagcctagttt

SEQ ID NO: 439055 - DNA, 19 bp, Homo sapiens
  siRNA target sequence for FLJ44112 (NM_198520.1,2841-2859).
ggaatctccctcttcaaaa

SEQ ID NO: 439056 - DNA, 19 bp, Homo sapiens
  siRNA target sequence for FLJ44112 (NM_198520.1,2884-2902).
cgggctcatagcattctaa

SEQ ID NO: 439057 - DNA, 19 bp, Homo sapiens
  siRNA target sequence for FLJ44112 (NM_198520.1,2886-2904).
ggctcatagcattctaact

SEQ ID NO: 439058 - DNA, 19 bp, Homo sapiens
  siRNA target sequence for FLJ44112 (NM_198520.1,2894-2912).
gcattctaactgaacagat

SEQ ID NO: 439059 - DNA, 19 bp, Homo sapiens
  siRNA target sequence for FLJ44112 (NM_198520.1,2913-2931).
gctagcttttggagaaaca

SEQ ID NO: 439060 - DNA, 19 bp, Homo sapiens
  siRNA target sequence for FLJ44112 (NM_198520.1,2914-2932).
ctagcttttggagaaacaa

SEQ ID NO: 439061 - DNA, 19 bp, Homo sapiens
  siRNA target sequence for FLJ44112 (NM_198520.1,2935-2953).
gaatttcgttcatcaaaca

SEQ ID NO: 439062 - DNA, 19 bp, Homo sapiens
  siRNA target sequence for FLJ44112 (NM_198520.1,3015-3033).
ggccaaaataaaaatgaga

SEQ ID NO: 439063 - DNA, 19 bp, Homo sapiens
  siRNA target sequence for FLJ44112 (NM_198520.1,3044-3062).
cagtggccaagcaagtata

SEQ ID NO: 439064 - DNA, 19 bp, Homo sapiens
  siRNA target sequence for FLJ44112 (NM_198520.1,3046-3064).
gtggccaagcaagtatatt

SEQ ID NO: 439065 - DNA, 19 bp, Homo sapiens
  siRNA target sequence for FLJ44112 (NM_198520.1,3049-3067).
gccaagcaagtatattaca

SEQ ID NO: 439066 - DNA, 19 bp, Homo sapiens
  siRNA target sequence for FLJ44112 (NM_198520.1,3124-3142).
gcactgaagctctgtagaa

SEQ ID NO: 439067 - DNA, 19 bp, Homo sapiens
  siRNA target sequence for FLJ44112 (NM_198520.1,3127-3145).
ctgaagctctgtagaacaa

SEQ ID NO: 439068 - DNA, 19 bp, Homo sapiens
  siRNA target sequence for FLJ44112 (NM_198520.1,3249-3267).
gagtttatatgaagctata

SEQ ID NO: 439069 - DNA, 19 bp, Homo sapiens
  siRNA target sequence for FLJ44112 (NM_198520.1,3371-3389).
caggatcaccattaacact

SEQ ID NO: 439070 - DNA, 19 bp, Homo sapiens
  siRNA target sequence for FLJ44112 (NM_198520.1,3534-3552).
gaagaatactagaatgcat

SEQ ID NO: 439071 - DNA, 19 bp, Homo sapiens
  siRNA target sequence for FLJ44112 (NM_198520.1,3542-3560).
ctagaatgcataaagttaa

SEQ ID NO: 439072 - DNA, 19 bp, Homo sapiens
  siRNA target sequence for FLJ44112 (NM_198520.1,3545-3563).
gaatgcataaagttaacca

SEQ ID NO: 439073 - DNA, 19 bp, Homo sapiens
  siRNA target sequence for FLJ44112 (NM_198520.1,3562-3580).
caagtggcattaccaaata

SEQ ID NO: 439074 - DNA, 19 bp, Homo sapiens
  siRNA target sequence for FLJ44112 (NM_198520.1,3592-3610).
gctgctctggatcttttgt

SEQ ID NO: 439075 - DNA, 19 bp, Homo sapiens
  siRNA target sequence for FLJ44112 (NM_198520.1,3600-3618).
ggatcttttgtcttcgtat

SEQ ID NO: 439076 - DNA, 19 bp, Homo sapiens
  siRNA target sequence for FLJ44112 (NM_198520.1,3601-3619).
gatcttttgtcttcgtata

SEQ ID NO: 439077 - DNA, 19 bp, Homo sapiens
  siRNA target sequence for FLJ44112 (NM_198520.1,3620-3638).
cagattatttgcttggtat

SEQ ID NO: 439078 - DNA, 19 bp, Homo sapiens
  siRNA target sequence for FLJ44112 (NM_198520.1,3644-3662).
gatgtctacatattatgca

SEQ ID NO: 439079 - DNA, 19 bp, Homo sapiens
  siRNA target sequence for FLJ25323 (NM_198521.1,93-111).
ctacagtgatatgtatgaa

SEQ ID NO: 439080 - DNA, 19 bp, Homo sapiens
  siRNA target sequence for FLJ25323 (NM_198521.1,138-156).
ccatcagaccttttgcaaa

SEQ ID NO: 439081 - DNA, 19 bp, Homo sapiens
  siRNA target sequence for FLJ25323 (NM_198521.1,163-181).
gcagaaatccccttgctat

SEQ ID NO: 439082 - DNA, 19 bp, Homo sapiens
  siRNA target sequence for FLJ25323 (NM_198521.1,164-182).
cagaaatccccttgctata

SEQ ID NO: 439083 - DNA, 19 bp, Homo sapiens
  siRNA target sequence for FLJ25323 (NM_198521.1,166-184).
gaaatccccttgctatatt

SEQ ID NO: 439084 - DNA, 19 bp, Homo sapiens
  siRNA target sequence for FLJ25323 (NM_198521.1,200-218).
gccaccctgtgggatagaa

SEQ ID NO: 439085 - DNA, 19 bp, Homo sapiens
  siRNA target sequence for FLJ25323 (NM_198521.1,238-256).
catcccttgttatgaaaga

SEQ ID NO: 439086 - DNA, 19 bp, Homo sapiens
  siRNA target sequence for FLJ25323 (NM_198521.1,270-288).
gctccagattcattaatca

SEQ ID NO: 439087 - DNA, 19 bp, Homo sapiens
  siRNA target sequence for FLJ25323 (NM_198521.1,305-323).
gaatctcctaaatttcgta

SEQ ID NO: 439088 - DNA, 19 bp, Homo sapiens
  siRNA target sequence for FLJ25323 (NM_198521.1,372-390).
caatggcgtgtaaaagact

SEQ ID NO: 439089 - DNA, 19 bp, Homo sapiens
  siRNA target sequence for FLJ25323 (NM_198521.1,376-394).
ggcgtgtaaaagactactt

SEQ ID NO: 439090 - DNA, 19 bp, Homo sapiens
  siRNA target sequence for FLJ25323 (NM_198521.1,378-396).
cgtgtaaaagactacttca

SEQ ID NO: 439091 - DNA, 19 bp, Homo sapiens
  siRNA target sequence for FLJ25323 (NM_198521.1,498-516).
ctgatgaggccccattgat

SEQ ID NO: 439092 - DNA, 19 bp, Homo sapiens
  siRNA target sequence for FLJ25323 (NM_198521.1,500-518).
gatgaggccccattgattt

SEQ ID NO: 439093 - DNA, 19 bp, Homo sapiens
  siRNA target sequence for FLJ25323 (NM_198521.1,503-521).
gaggccccattgattttta

SEQ ID NO: 439094 - DNA, 19 bp, Homo sapiens
  siRNA target sequence for FLJ25323 (NM_198521.1,566-584).
caggcttggaacagttcat

SEQ ID NO: 439095 - DNA, 19 bp, Homo sapiens
  siRNA target sequence for FLJ25323 (NM_198521.1,568-586).
ggcttggaacagttcattt

SEQ ID NO: 439096 - DNA, 19 bp, Homo sapiens
  siRNA target sequence for FLJ25323 (NM_198521.1,613-631).
ctgggcacactcagtaaat

SEQ ID NO: 439097 - DNA, 19 bp, Homo sapiens
  siRNA target sequence for FLJ25323 (NM_198521.1,644-662).
gaggctcagggcatacaca

SEQ ID NO: 439098 - DNA, 19 bp, Homo sapiens
  siRNA target sequence for FLJ25323 (NM_198521.1,650-668).
cagggcatacacatcagta

SEQ ID NO: 439099 - DNA, 19 bp, Homo sapiens
  siRNA target sequence for FLJ25323 (NM_198521.1,697-715).
gagcagtcccaagaaaaat

SEQ ID NO: 439100 - DNA, 19 bp, Homo sapiens
  siRNA target sequence for FLJ25323 (NM_198521.1,857-875).
caccccgacgacatccaaa

SEQ ID NO: 439101 - DNA, 19 bp, Homo sapiens
  siRNA target sequence for FLJ25323 (NM_198521.1,1054-1072).
cccctccaagaggttaata

SEQ ID NO: 439102 - DNA, 19 bp, Homo sapiens
  siRNA target sequence for FLJ25323 (NM_198521.1,1059-1077).
ccaagaggttaataaaggt

SEQ ID NO: 439103 - DNA, 19 bp, Homo sapiens
  siRNA target sequence for FLJ25323 (NM_198521.1,1109-1127).
cgtttccatacggtttgtt

SEQ ID NO: 439104 - DNA, 19 bp, Homo sapiens
  siRNA target sequence for FLJ25323 (NM_198521.1,1147-1165).
ggtggtgaatgctcactta

SEQ ID NO: 439105 - DNA, 19 bp, Homo sapiens
  siRNA target sequence for FLJ25323 (NM_198521.1,1150-1168).
ggtgaatgctcacttacat

SEQ ID NO: 439106 - DNA, 19 bp, Homo sapiens
  siRNA target sequence for FLJ25323 (NM_198521.1,1151-1169).
gtgaatgctcacttacatt

SEQ ID NO: 439107 - DNA, 19 bp, Homo sapiens
  siRNA target sequence for LOC161577 (NM_198524.1,154-172).
cagctgacgtggttcaaca

SEQ ID NO: 439108 - DNA, 19 bp, Homo sapiens
  siRNA target sequence for LOC161577 (NM_198524.1,171-189).
caagctaaggaaataataa

SEQ ID NO: 439109 - DNA, 19 bp, Homo sapiens
  siRNA target sequence for LOC161577 (NM_198524.1,207-225).
cgatctaggcctgtttcaa

SEQ ID NO: 439110 - DNA, 19 bp, Homo sapiens
  siRNA target sequence for LOC161577 (NM_198524.1,238-256).
catgtgatgacgaagatga

SEQ ID NO: 439111 - DNA, 19 bp, Homo sapiens
  siRNA target sequence for LOC161577 (NM_198524.1,520-538).
gcttacctgaatatataga

SEQ ID NO: 439112 - DNA, 19 bp, Homo sapiens
  siRNA target sequence for LOC161577 (NM_198524.1,521-539).
cttacctgaatatatagat

SEQ ID NO: 439113 - DNA, 19 bp, Homo sapiens
  siRNA target sequence for LOC161577 (NM_198524.1,601-619).
ccaaactccatgttatgca

SEQ ID NO: 439114 - DNA, 19 bp, Homo sapiens
  siRNA target sequence for LOC161577 (NM_198524.1,620-638).
ggaggaattggataatgtt

SEQ ID NO: 439115 - DNA, 19 bp, Homo sapiens
  siRNA target sequence for LOC161577 (NM_198524.1,623-641).
ggaattggataatgttgta

SEQ ID NO: 439116 - DNA, 19 bp, Homo sapiens
  siRNA target sequence for LOC161577 (NM_198524.1,716-734).
gagacagcagcgaacaatt

SEQ ID NO: 439117 - DNA, 19 bp, Homo sapiens
  siRNA target sequence for LOC161577 (NM_198524.1,718-736).
gacagcagcgaacaattaa

SEQ ID NO: 439118 - DNA, 19 bp, Homo sapiens
  siRNA target sequence for LOC161577 (NM_198524.1,725-743).
gcgaacaattaatatgcaa

SEQ ID NO: 439119 - DNA, 19 bp, Homo sapiens
  siRNA target sequence for LOC161577 (NM_198524.1,740-758).
gcaacagtctcaagtagaa

SEQ ID NO: 439120 - DNA, 19 bp, Homo sapiens
  siRNA target sequence for LOC161577 (NM_198524.1,744-762).
cagtctcaagtagaaaaat

SEQ ID NO: 439121 - DNA, 19 bp, Homo sapiens
  siRNA target sequence for LOC161577 (NM_198524.1,809-827).
gcaacagttgtcttcagta

SEQ ID NO: 439122 - DNA, 19 bp, Homo sapiens
  siRNA target sequence for LOC161577 (NM_198524.1,864-882).
caggctgcaagtagtcaaa

SEQ ID NO: 439123 - DNA, 19 bp, Homo sapiens
  siRNA target sequence for LOC161577 (NM_198524.1,887-905).
cacagaggttcgcttgaat

SEQ ID NO: 439124 - DNA, 19 bp, Homo sapiens
  siRNA target sequence for LOC161577 (NM_198524.1,902-920).
gaatagagctctagaagaa

SEQ ID NO: 439125 - DNA, 19 bp, Homo sapiens
  siRNA target sequence for LOC161577 (NM_198524.1,929-947).
gtataaactggagttaagt

SEQ ID NO: 439126 - DNA, 19 bp, Homo sapiens
  siRNA target sequence for LOC161577 (NM_198524.1,936-954).
ctggagttaagtaaattaa

SEQ ID NO: 439127 - DNA, 19 bp, Homo sapiens
  siRNA target sequence for LOC161577 (NM_198524.1,1096-1114).
ggcaaaagatgcatattga

SEQ ID NO: 439128 - DNA, 19 bp, Homo sapiens
  siRNA target sequence for LOC161577 (NM_198524.1,1119-1137).
gccaagatgctatctttca

SEQ ID NO: 439129 - DNA, 19 bp, Homo sapiens
  siRNA target sequence for LOC374654 (NM_198525.1,554-572).
cttacacctgcgcagaaat

SEQ ID NO: 439130 - DNA, 19 bp, Homo sapiens
  siRNA target sequence for LOC374654 (NM_198525.1,777-795).
cgggagctggctatcaaca

SEQ ID NO: 439131 - DNA, 19 bp, Homo sapiens
  siRNA target sequence for LOC374654 (NM_198525.1,778-796).
gggagctggctatcaacat

SEQ ID NO: 439132 - DNA, 19 bp, Homo sapiens
  siRNA target sequence for LOC374654 (NM_198525.1,1807-1825).
ctgccattgagtataagaa

SEQ ID NO: 439133 - DNA, 19 bp, Homo sapiens
  siRNA target sequence for LOC374654 (NM_198525.1,2238-2256).
ggccgttacatgtggataa

SEQ ID NO: 439134 - DNA, 19 bp, Homo sapiens
  siRNA target sequence for LOC374654 (NM_198525.1,2239-2257).
gccgttacatgtggataaa

SEQ ID NO: 439135 - DNA, 19 bp, Homo sapiens
  siRNA target sequence for LOC374654 (NM_198525.1,2344-2362).
gacaggctcctggaaatga

SEQ ID NO: 439136 - DNA, 19 bp, Homo sapiens
  siRNA target sequence for MGC45386 (NM_198527.1,111-129).
gaggggaccccctacatca

SEQ ID NO: 439137 - DNA, 19 bp, Homo sapiens
  siRNA target sequence for MGC45386 (NM_198527.1,167-185).
ggcgggaatcactgacatt

SEQ ID NO: 439138 - DNA, 19 bp, Homo sapiens
  siRNA target sequence for MGC45386 (NM_198527.1,389-407).
ggcagacaagctgtacaat

SEQ ID NO: 439139 - DNA, 19 bp, Homo sapiens
  siRNA target sequence for MGC45386 (NM_198527.1,393-411).
gacaagctgtacaatctga

SEQ ID NO: 439140 - DNA, 19 bp, Homo sapiens
  siRNA target sequence for MGC45386 (NM_198527.1,424-442).
gctgcaccccagaggtaaa

SEQ ID NO: 439141 - DNA, 19 bp, Homo sapiens
  siRNA target sequence for MGC45386 (NM_198527.1,430-448).
ccccagaggtaaaaataca

SEQ ID NO: 439142 - DNA, 19 bp, Homo sapiens
  siRNA target sequence for FLJ46247 (NM_198529.1,120-138).
ccagaggttgatgaaagaa

SEQ ID NO: 439143 - DNA, 19 bp, Homo sapiens
  siRNA target sequence for FLJ46247 (NM_198529.1,143-161).
cagaagacctgaagatata

SEQ ID NO: 439144 - DNA, 19 bp, Homo sapiens
  siRNA target sequence for FLJ46247 (NM_198529.1,201-219).
ggagaatgttaaacagaat

SEQ ID NO: 439145 - DNA, 19 bp, Homo sapiens
  siRNA target sequence for FLJ46247 (NM_198529.1,286-304).
caggagcaattcgatgaat

SEQ ID NO: 439146 - DNA, 19 bp, Homo sapiens
  siRNA target sequence for FLJ46247 (NM_198529.1,291-309).
gcaattcgatgaatggatt

SEQ ID NO: 439147 - DNA, 19 bp, Homo sapiens
  siRNA target sequence for FLJ46247 (NM_198529.1,306-324).
gattctagaccctaaagga

SEQ ID NO: 439148 - DNA, 19 bp, Homo sapiens
  siRNA target sequence for FLJ46247 (NM_198529.1,399-417).
ctgcaaacaactggatatt

SEQ ID NO: 439149 - DNA, 19 bp, Homo sapiens
  siRNA target sequence for FLJ46247 (NM_198529.1,425-443).
caacagaaccaagattgaa

SEQ ID NO: 439150 - DNA, 19 bp, Homo sapiens
  siRNA target sequence for FLJ46247 (NM_198529.1,475-493).
catattaaagacttgaaga

SEQ ID NO: 439151 - DNA, 19 bp, Homo sapiens
  siRNA target sequence for FLJ46247 (NM_198529.1,484-502).
gacttgaagagtgaaatgt

SEQ ID NO: 439152 - DNA, 19 bp, Homo sapiens
  siRNA target sequence for FLJ46247 (NM_198529.1,486-504).
cttgaagagtgaaatgttt

SEQ ID NO: 439153 - DNA, 19 bp, Homo sapiens
  siRNA target sequence for FLJ46247 (NM_198529.1,527-545).
gccactctgcagatgaatt

SEQ ID NO: 439154 - DNA, 19 bp, Homo sapiens
  siRNA target sequence for FLJ46247 (NM_198529.1,663-681).
gttctatgaccatagttca

SEQ ID NO: 439155 - DNA, 19 bp, Homo sapiens
  siRNA target sequence for FLJ46247 (NM_198529.1,673-691).
catagttcacaaatgctta

SEQ ID NO: 439156 - DNA, 19 bp, Homo sapiens
  siRNA target sequence for FLJ46247 (NM_198529.1,710-728).
cacgacaatggccattcat

SEQ ID NO: 439157 - DNA, 19 bp, Homo sapiens
  siRNA target sequence for FLJ46247 (NM_198529.1,759-777).
gtggggagacatggataat

SEQ ID NO: 439158 - DNA, 19 bp, Homo sapiens
  siRNA target sequence for FLJ46247 (NM_198529.1,761-779).
ggggagacatggataatca

SEQ ID NO: 439159 - DNA, 19 bp, Homo sapiens
  siRNA target sequence for FLJ46247 (NM_198529.1,878-896).
gtccagatcaacctaaact

SEQ ID NO: 439160 - DNA, 19 bp, Homo sapiens
  siRNA target sequence for FLJ46247 (NM_198529.1,900-918).
cgaacagagaacatcaaca

SEQ ID NO: 439161 - DNA, 19 bp, Homo sapiens
  siRNA target sequence for FLJ46247 (NM_198529.1,968-986).
gaccacaaagaatttcaat

SEQ ID NO: 439162 - DNA, 19 bp, Homo sapiens
  siRNA target sequence for FLJ46247 (NM_198529.1,1030-1048).
ctgtacatagaatcagtaa

SEQ ID NO: 439163 - DNA, 19 bp, Homo sapiens
  siRNA target sequence for FLJ46247 (NM_198529.1,1032-1050).
gtacatagaatcagtaata

SEQ ID NO: 439164 - DNA, 19 bp, Homo sapiens
  siRNA target sequence for FLJ46247 (NM_198529.1,1065-1083).
cacagagtcaactctagaa

SEQ ID NO: 439165 - DNA, 19 bp, Homo sapiens
  siRNA target sequence for FLJ46247 (NM_198529.1,1078-1096).
ctagaacaagggtcaagta

SEQ ID NO: 439166 - DNA, 19 bp, Homo sapiens
  siRNA target sequence for FLJ46247 (NM_198529.1,1101-1119).
gttactgacagaacaagaa

SEQ ID NO: 439167 - DNA, 19 bp, Homo sapiens
  siRNA target sequence for FLJ46247 (NM_198529.1,1238-1256).
ggtcacgcagagagtctat

SEQ ID NO: 439168 - DNA, 19 bp, Homo sapiens
  siRNA target sequence for FLJ46247 (NM_198529.1,1239-1257).
gtcacgcagagagtctatt

SEQ ID NO: 439169 - DNA, 19 bp, Homo sapiens
  siRNA target sequence for FLJ46247 (NM_198529.1,1251-1269).
gtctattgcagaacaagat

SEQ ID NO: 439170 - DNA, 19 bp, Homo sapiens
  siRNA target sequence for FLJ46247 (NM_198529.1,1378-1396).
ggaccttatggagagataa

SEQ ID NO: 439171 - DNA, 19 bp, Homo sapiens
  siRNA target sequence for FLJ46247 (NM_198529.1,1416-1434).
cataggctcaacttcacaa

SEQ ID NO: 439172 - DNA, 19 bp, Homo sapiens
  siRNA target sequence for FLJ46247 (NM_198529.1,1422-1440).
ctcaacttcacaatcaaga

SEQ ID NO: 439173 - DNA, 19 bp, Homo sapiens
  siRNA target sequence for FLJ46247 (NM_198529.1,1436-1454).
caagaaaagatagtatctt

SEQ ID NO: 439174 - DNA, 19 bp, Homo sapiens
  siRNA target sequence for FLJ46247 (NM_198529.1,1478-1496).
ctataacctctgagtacat

SEQ ID NO: 439175 - DNA, 19 bp, Homo sapiens
  siRNA target sequence for FLJ46247 (NM_198529.1,1518-1536).
gaggtcttgggaacaaaca

SEQ ID NO: 439176 - DNA, 19 bp, Homo sapiens
  siRNA target sequence for FLJ46247 (NM_198529.1,1600-1618).
gatcactttccagaaacta

SEQ ID NO: 439177 - DNA, 19 bp, Homo sapiens
  siRNA target sequence for FLJ46247 (NM_198529.1,1603-1621).
cactttccagaaactacaa

SEQ ID NO: 439178 - DNA, 19 bp, Homo sapiens
  siRNA target sequence for FLJ46247 (NM_198529.1,1655-1673).
ccaagtcccaaaaaataga

SEQ ID NO: 439179 - DNA, 19 bp, Homo sapiens
  siRNA target sequence for FLJ46247 (NM_198529.1,1690-1708).
ggtgaattttttacttgta

SEQ ID NO: 439180 - DNA, 19 bp, Homo sapiens
  siRNA target sequence for FLJ46247 (NM_198529.1,1706-1724).
gtaactggaaaatgaagta

SEQ ID NO: 439181 - DNA, 19 bp, Homo sapiens
  siRNA target sequence for FLJ46247 (NM_198529.1,1751-1769).
caaacttaatctatggtaa

SEQ ID NO: 439182 - DNA, 19 bp, Homo sapiens
  siRNA target sequence for FLJ46247 (NM_198529.1,1772-1790).
ccaggttcacagctaaact

SEQ ID NO: 439183 - DNA, 19 bp, Homo sapiens
  siRNA target sequence for FLJ46247 (NM_198529.1,1783-1801).
gctaaactacacatccaat

SEQ ID NO: 439184 - DNA, 19 bp, Homo sapiens
  siRNA target sequence for FLJ46247 (NM_198529.1,1784-1802).
ctaaactacacatccaatt

SEQ ID NO: 439185 - DNA, 19 bp, Homo sapiens
  siRNA target sequence for FLJ46247 (NM_198529.1,1822-1840).
cacgaagtgagattgtctt

SEQ ID NO: 439186 - DNA, 19 bp, Homo sapiens
  siRNA target sequence for FLJ46247 (NM_198529.1,1854-1872).
gaattacatagaattggtt

SEQ ID NO: 439187 - DNA, 19 bp, Homo sapiens
  siRNA target sequence for FLJ46247 (NM_198529.1,1889-1907).
gcaatgaagaccaagttct

SEQ ID NO: 439188 - DNA, 19 bp, Homo sapiens
  siRNA target sequence for FLJ46247 (NM_198529.1,1982-2000).
ggaaatggctgcaccaaat

SEQ ID NO: 439189 - DNA, 19 bp, Homo sapiens
  siRNA target sequence for FLJ46247 (NM_198529.1,2031-2049).
cctagagccggtgtatagt

SEQ ID NO: 439190 - DNA, 19 bp, Homo sapiens
  siRNA target sequence for FLJ46247 (NM_198529.1,2041-2059).
gtgtatagtgagaccttta

SEQ ID NO: 439191 - DNA, 19 bp, Homo sapiens
  siRNA target sequence for FLJ46247 (NM_198529.1,2117-2135).
ccctcttagaagaaaacct

SEQ ID NO: 439192 - DNA, 19 bp, Homo sapiens
  siRNA target sequence for FLJ46247 (NM_198529.1,2169-2187).
gaatgtggcttgtacctta

SEQ ID NO: 439193 - DNA, 19 bp, Homo sapiens
  siRNA target sequence for FLJ46247 (NM_198529.1,2175-2193).
ggcttgtaccttagatgat

SEQ ID NO: 439194 - DNA, 19 bp, Homo sapiens
  siRNA target sequence for FLJ46247 (NM_198529.1,2217-2235).
gctctacagggacatgaaa

SEQ ID NO: 439195 - DNA, 19 bp, Homo sapiens
  siRNA target sequence for FLJ46247 (NM_198529.1,2319-2337).
ccagtcccgtaataagcat

SEQ ID NO: 439196 - DNA, 19 bp, Homo sapiens
  siRNA target sequence for FLJ46247 (NM_198529.1,2325-2343).
ccgtaataagcatgattat

SEQ ID NO: 439197 - DNA, 19 bp, Homo sapiens
  siRNA target sequence for FLJ46247 (NM_198529.1,2326-2344).
cgtaataagcatgattata

SEQ ID NO: 439198 - DNA, 19 bp, Homo sapiens
  siRNA target sequence for FLJ46247 (NM_198529.1,2327-2345).
gtaataagcatgattataa

SEQ ID NO: 439199 - DNA, 19 bp, Homo sapiens
  siRNA target sequence for FLJ46247 (NM_198529.1,2364-2382).
gcctcttcaagatgcatat

SEQ ID NO: 439200 - DNA, 19 bp, Homo sapiens
  siRNA target sequence for FLJ46247 (NM_198529.1,2395-2413).
ggggtcttggctgttgata

SEQ ID NO: 439201 - DNA, 19 bp, Homo sapiens
  siRNA target sequence for FLJ46247 (NM_198529.1,2420-2438).
gagatccccacgaaataaa

SEQ ID NO: 439202 - DNA, 19 bp, Homo sapiens
  siRNA target sequence for FLJ46247 (NM_198529.1,2425-2443).
ccccacgaaataaacatct

SEQ ID NO: 439203 - DNA, 19 bp, Homo sapiens
  siRNA target sequence for FLJ46247 (NM_198529.1,2470-2488).
cagggtgttgctaatgtct

SEQ ID NO: 439204 - DNA, 19 bp, Homo sapiens
  siRNA target sequence for FLJ46247 (NM_198529.1,2476-2494).
gttgctaatgtctttagca

SEQ ID NO: 439205 - DNA, 19 bp, Homo sapiens
  siRNA target sequence for FLJ46247 (NM_198529.1,2519-2537).
gggagcacattctgcatat

SEQ ID NO: 439206 - DNA, 19 bp, Homo sapiens
  siRNA target sequence for FLJ46247 (NM_198529.1,2549-2567).
gcataggctggctttatga

SEQ ID NO: 439207 - DNA, 19 bp, Homo sapiens
  siRNA target sequence for FLJ46247 (NM_198529.1,2586-2604).
ctccatcactacgtacttt

SEQ ID NO: 439208 - DNA, 19 bp, Homo sapiens
  siRNA target sequence for FLJ46247 (NM_198529.1,2622-2640).
ccaggattcagactatgtt

SEQ ID NO: 439209 - DNA, 19 bp, Homo sapiens
  siRNA target sequence for FLJ46247 (NM_198529.1,2625-2643).
ggattcagactatgtttta

SEQ ID NO: 439210 - DNA, 19 bp, Homo sapiens
  siRNA target sequence for FLJ46247 (NM_198529.1,2783-2801).
gtggagaaacgcatatagt

SEQ ID NO: 439211 - DNA, 19 bp, Homo sapiens
  siRNA target sequence for FLJ46247 (NM_198529.1,2786-2804).
gagaaacgcatatagtagt

SEQ ID NO: 439212 - DNA, 19 bp, Homo sapiens
  siRNA target sequence for FLJ46247 (NM_198529.1,2833-2851).
ctgggagtcctcgatttta

SEQ ID NO: 439213 - DNA, 19 bp, Homo sapiens
  siRNA target sequence for FLJ46247 (NM_198529.1,2836-2854).
ggagtcctcgattttaaca

SEQ ID NO: 439214 - DNA, 19 bp, Homo sapiens
  siRNA target sequence for FLJ46247 (NM_198529.1,2874-2892).
gttgtgtcaagaatataaa

SEQ ID NO: 439215 - DNA, 19 bp, Homo sapiens
  siRNA target sequence for FLJ46247 (NM_198529.1,2879-2897).
gtcaagaatataaagatct

SEQ ID NO: 439216 - DNA, 19 bp, Homo sapiens
  siRNA target sequence for FLJ46247 (NM_198529.1,2893-2911).
gatctacagaaaatgatga

SEQ ID NO: 439217 - DNA, 19 bp, Homo sapiens
  siRNA target sequence for FLJ46247 (NM_198529.1,2919-2937).
ccaagtggcctgctatgaa

SEQ ID NO: 439218 - DNA, 19 bp, Homo sapiens
  siRNA target sequence for FLJ46247 (NM_198529.1,2920-2938).
caagtggcctgctatgaaa

SEQ ID NO: 439219 - DNA, 19 bp, Homo sapiens
  siRNA target sequence for FLJ46247 (NM_198529.1,3099-3117).
gctctatgaccatactctt

SEQ ID NO: 439220 - DNA, 19 bp, Homo sapiens
  siRNA target sequence for FLJ46247 (NM_198529.1,3102-3120).
ctatgaccatactcttgta

SEQ ID NO: 439221 - DNA, 19 bp, Homo sapiens
  siRNA target sequence for FLJ46247 (NM_198529.1,3137-3155).
ctcaagacagcaaatctat

SEQ ID NO: 439222 - DNA, 19 bp, Homo sapiens
  siRNA target sequence for FLJ46247 (NM_198529.1,3162-3180).
ggaagccaacgtgaaacta

SEQ ID NO: 439223 - DNA, 19 bp, Homo sapiens
  siRNA target sequence for FLJ46247 (NM_198529.1,3193-3211).
ctgaaggcggttatcttgt

SEQ ID NO: 439224 - DNA, 19 bp, Homo sapiens
  siRNA target sequence for FLJ46247 (NM_198529.1,3247-3265).
ggaagttgggataagtgta

SEQ ID NO: 439225 - DNA, 19 bp, Homo sapiens
  siRNA target sequence for FLJ46247 (NM_198529.1,3248-3266).
gaagttgggataagtgtaa

SEQ ID NO: 439226 - DNA, 19 bp, Homo sapiens
  siRNA target sequence for FLJ46247 (NM_198529.1,3251-3269).
gttgggataagtgtaaatt

SEQ ID NO: 439227 - DNA, 19 bp, Homo sapiens
  siRNA target sequence for FLJ46247 (NM_198529.1,3324-3342).
gcatgtggaagttaatgta

SEQ ID NO: 439228 - DNA, 19 bp, Homo sapiens
  siRNA target sequence for FLJ46247 (NM_198529.1,3370-3388).
cattcccgaactgaagtat

SEQ ID NO: 439229 - DNA, 19 bp, Homo sapiens
  siRNA target sequence for FLJ46247 (NM_198529.1,3375-3393).
ccgaactgaagtatggaaa

SEQ ID NO: 439230 - DNA, 19 bp, Homo sapiens
  siRNA target sequence for FLJ46247 (NM_198529.1,3398-3416).
gtaatgttgtcattgaaca

SEQ ID NO: 439231 - DNA, 19 bp, Homo sapiens
  siRNA target sequence for FLJ46247 (NM_198529.1,3403-3421).
gttgtcattgaacatctat

SEQ ID NO: 439232 - DNA, 19 bp, Homo sapiens
  siRNA target sequence for FLJ46247 (NM_198529.1,3498-3516).
ctccaagactgacaattat

SEQ ID NO: 439233 - DNA, 19 bp, Homo sapiens
  siRNA target sequence for FLJ46247 (NM_198529.1,3500-3518).
ccaagactgacaattatat

SEQ ID NO: 439234 - DNA, 19 bp, Homo sapiens
  siRNA target sequence for FLJ46603 (NM_198530.1,1858-1876).
ctttggcccatcgtttgta

SEQ ID NO: 439235 - DNA, 19 bp, Homo sapiens
  siRNA target sequence for ATP9B (NM_198531.2,165-183).
gatgaaatgccactaatga

SEQ ID NO: 439236 - DNA, 19 bp, Homo sapiens
  siRNA target sequence for ATP9B (NM_198531.2,232-250).
cacgagccaggataatgca

SEQ ID NO: 439237 - DNA, 19 bp, Homo sapiens
  siRNA target sequence for ATP9B (NM_198531.2,315-333).
ggttggctgataaatattt

SEQ ID NO: 439238 - DNA, 19 bp, Homo sapiens
  siRNA target sequence for ATP9B (NM_198531.2,351-369).
ctgaaagctcgcacagtat

SEQ ID NO: 439239 - DNA, 19 bp, Homo sapiens
  siRNA target sequence for ATP9B (NM_198531.2,370-388).
ggcttggatgtcctgaaaa

SEQ ID NO: 439240 - DNA, 19 bp, Homo sapiens
  siRNA target sequence for ATP9B (NM_198531.2,396-414).
gaaaaacatcccaggaatt

SEQ ID NO: 439241 - DNA, 19 bp, Homo sapiens
  siRNA target sequence for ATP9B (NM_198531.2,459-477).
gttttgtatgaacaattca

SEQ ID NO: 439242 - DNA, 19 bp, Homo sapiens
  siRNA target sequence for ATP9B (NM_198531.2,592-610).
ctatgacacgggaagcaat

SEQ ID NO: 439243 - DNA, 19 bp, Homo sapiens
  siRNA target sequence for ATP9B (NM_198531.2,596-614).
gacacgggaagcaattgat

SEQ ID NO: 439244 - DNA, 19 bp, Homo sapiens
  siRNA target sequence for ATP9B (NM_198531.2,633-651).
cgtgacaaggaagtgaatt

SEQ ID NO: 439245 - DNA, 19 bp, Homo sapiens
  siRNA target sequence for ATP9B (NM_198531.2,654-672).
caactatatagcaagctta

SEQ ID NO: 439246 - DNA, 19 bp, Homo sapiens
  siRNA target sequence for ATP9B (NM_198531.2,679-697).
gaggtaaagtgcaagttaa

SEQ ID NO: 439247 - DNA, 19 bp, Homo sapiens
  siRNA target sequence for ATP9B (NM_198531.2,681-699).
ggtaaagtgcaagttaaga

SEQ ID NO: 439248 - DNA, 19 bp, Homo sapiens
  siRNA target sequence for ATP9B (NM_198531.2,698-716).
gagttcagacatacaagtt

SEQ ID NO: 439249 - DNA, 19 bp, Homo sapiens
  siRNA target sequence for ATP9B (NM_198531.2,723-741).
ctcatcatagtggaaaaga

SEQ ID NO: 439250 - DNA, 19 bp, Homo sapiens
  siRNA target sequence for ATP9B (NM_198531.2,754-772).
catcggacatggtgtttct

SEQ ID NO: 439251 - DNA, 19 bp, Homo sapiens
  siRNA target sequence for ATP9B (NM_198531.2,803-821).
ctatcagtgcttatgttta

SEQ ID NO: 439252 - DNA, 19 bp, Homo sapiens
  siRNA target sequence for ATP9B (NM_198531.2,824-842).
ctcagaaaccacaaatgga

SEQ ID NO: 439253 - DNA, 19 bp, Homo sapiens
  siRNA target sequence for ATP9B (NM_198531.2,849-867).
cagtttcgaaggcacattt

SEQ ID NO: 439254 - DNA, 19 bp, Homo sapiens
  siRNA target sequence for FLJ45778 (NM_198532.1,153-171).
ctcagcccacgtatagcaa

SEQ ID NO: 439255 - DNA, 19 bp, Homo sapiens
  siRNA target sequence for FLJ45778 (NM_198532.1,327-345).
ccagctccatccaagtaca

SEQ ID NO: 439256 - DNA, 19 bp, Homo sapiens
  siRNA target sequence for FLJ45778 (NM_198532.1,526-544).
gggcctccgtaccatctat

SEQ ID NO: 439257 - DNA, 19 bp, Homo sapiens
  siRNA target sequence for FLJ45778 (NM_198532.1,639-657).
gcggggacgccctgtatta

SEQ ID NO: 439258 - DNA, 19 bp, Homo sapiens
  siRNA target sequence for FLJ45778 (NM_198532.1,1443-1461).
ggctgtgttgcgaatacct

SEQ ID NO: 439259 - DNA, 19 bp, Homo sapiens
  siRNA target sequence for SCDR10 (NM_198533.1,282-300).
ccctgttcttcgcctatta

SEQ ID NO: 439260 - DNA, 19 bp, Homo sapiens
  siRNA target sequence for SCDR10 (NM_198533.1,283-301).
cctgttcttcgcctattat

SEQ ID NO: 439261 - DNA, 19 bp, Homo sapiens
  siRNA target sequence for SCDR10 (NM_198533.1,284-302).
ctgttcttcgcctattatt

SEQ ID NO: 439262 - DNA, 19 bp, Homo sapiens
  siRNA target sequence for SCDR10 (NM_198533.1,1044-1062).
ggccacagcccaagatgaa

SEQ ID NO: 439263 - DNA, 19 bp, Homo sapiens
  siRNA target sequence for SCDR10 (NM_198533.1,1049-1067).
cagcccaagatgaagtcat

SEQ ID NO: 439264 - DNA, 19 bp, Homo sapiens
  siRNA target sequence for SCDR10 (NM_198533.1,1052-1070).
cccaagatgaagtcatcaa

SEQ ID NO: 439265 - DNA, 19 bp, Homo sapiens
  siRNA target sequence for SCDR10 (NM_198533.1,1080-1098).
gcaaaaccgagaaaaacga

SEQ ID NO: 439266 - DNA, 19 bp, Homo sapiens
  siRNA target sequence for SCDR10 (NM_198533.1,1178-1196).
cacctgtttggccatgatt

SEQ ID NO: 439267 - DNA, 19 bp, Homo sapiens
  siRNA target sequence for FLJ35784 (NM_198534.1,577-595).
ctggcgaccgcgacaagtt

SEQ ID NO: 439268 - DNA, 19 bp, Homo sapiens
  siRNA target sequence for FLJ35784 (NM_198534.1,701-719).
ggactacacgagacaagat

SEQ ID NO: 439269 - DNA, 19 bp, Homo sapiens
  siRNA target sequence for FLJ35784 (NM_198534.1,717-735).
gatgggacttcctaccaaa

SEQ ID NO: 439270 - DNA, 19 bp, Homo sapiens
  siRNA target sequence for FLJ35784 (NM_198534.1,721-739).
ggacttcctaccaaagaca

SEQ ID NO: 439271 - DNA, 19 bp, Homo sapiens
  siRNA target sequence for FLJ35784 (NM_198534.1,762-780).
cctgccttgaggtgtaaga

SEQ ID NO: 439272 - DNA, 19 bp, Homo sapiens
  siRNA target sequence for FLJ35784 (NM_198534.1,832-850).
cgtgttcggagcagaaaca

SEQ ID NO: 439273 - DNA, 19 bp, Homo sapiens
  siRNA target sequence for FLJ35784 (NM_198534.1,863-881).
ccaggatctgcctgaagat

SEQ ID NO: 439274 - DNA, 19 bp, Homo sapiens
  siRNA target sequence for FLJ35784 (NM_198534.1,864-882).
caggatctgcctgaagata

SEQ ID NO: 439275 - DNA, 19 bp, Homo sapiens
  siRNA target sequence for FLJ35784 (NM_198534.1,873-891).
cctgaagataggtatgaca

SEQ ID NO: 439276 - DNA, 19 bp, Homo sapiens
  siRNA target sequence for FLJ35784 (NM_198534.1,874-892).
ctgaagataggtatgacaa

SEQ ID NO: 439277 - DNA, 19 bp, Homo sapiens
  siRNA target sequence for FLJ35784 (NM_198534.1,989-1007).
ggagccagagccttttgtt

SEQ ID NO: 439278 - DNA, 19 bp, Homo sapiens
  siRNA target sequence for FLJ35784 (NM_198534.1,1081-1099).
ccttcatgcagtacttcta

SEQ ID NO: 439279 - DNA, 19 bp, Homo sapiens
  siRNA target sequence for FLJ35784 (NM_198534.1,1136-1154).
ccacgtgcctcatgagaaa

SEQ ID NO: 439280 - DNA, 19 bp, Homo sapiens
  siRNA target sequence for FLJ35784 (NM_198534.1,1137-1155).
cacgtgcctcatgagaaat

SEQ ID NO: 439281 - DNA, 19 bp, Homo sapiens
  siRNA target sequence for FLJ35784 (NM_198534.1,1172-1190).
cctaggggagccaaagcta

SEQ ID NO: 439282 - DNA, 19 bp, Homo sapiens
  siRNA target sequence for FLJ35784 (NM_198534.1,1178-1196).
ggagccaaagctactcaaa

SEQ ID NO: 439283 - DNA, 19 bp, Homo sapiens
  siRNA target sequence for FLJ35784 (NM_198534.1,1191-1209).
ctcaaacgcttcttcaaga

SEQ ID NO: 439284 - DNA, 19 bp, Homo sapiens
  siRNA target sequence for FLJ35784 (NM_198534.1,1298-1316).
gggcacgggcgaattcgat

SEQ ID NO: 439285 - DNA, 19 bp, Homo sapiens
  siRNA target sequence for FLJ35784 (NM_198534.1,1299-1317).
ggcacgggcgaattcgatt

SEQ ID NO: 439286 - DNA, 19 bp, Homo sapiens
  siRNA target sequence for FLJ35784 (NM_198534.1,1300-1318).
gcacgggcgaattcgattt

SEQ ID NO: 439287 - DNA, 19 bp, Homo sapiens
  siRNA target sequence for FLJ35784 (NM_198534.1,1301-1319).
cacgggcgaattcgatttt

SEQ ID NO: 439288 - DNA, 19 bp, Homo sapiens
  siRNA target sequence for FLJ35784 (NM_198534.1,1303-1321).
cgggcgaattcgatttttt

SEQ ID NO: 439289 - DNA, 19 bp, Homo sapiens
  siRNA target sequence for FLJ35784 (NM_198534.1,1304-1322).
gggcgaattcgatttttta

SEQ ID NO: 439290 - DNA, 19 bp, Homo sapiens
  siRNA target sequence for FLJ35784 (NM_198534.1,1305-1323).
ggcgaattcgattttttaa

SEQ ID NO: 439291 - DNA, 19 bp, Homo sapiens
  siRNA target sequence for FLJ35784 (NM_198534.1,1428-1446).
ggactgcgcttcttctcaa

SEQ ID NO: 439292 - DNA, 19 bp, Homo sapiens
  siRNA target sequence for FLJ35784 (NM_198534.1,1433-1451).
gcgcttcttctcaacacaa

SEQ ID NO: 439293 - DNA, 19 bp, Homo sapiens
  siRNA target sequence for FLJ35784 (NM_198534.1,1458-1476).
gacgagtttcctttcaagt

SEQ ID NO: 439294 - DNA, 19 bp, Homo sapiens
  siRNA target sequence for FLJ35784 (NM_198534.1,1552-1570).
gctgcagggagaagataga

SEQ ID NO: 439295 - DNA, 19 bp, Homo sapiens
  siRNA target sequence for FLJ44968 (NM_198537.1,1842-1860).
ctcaggcggagaataaaca

SEQ ID NO: 439296 - DNA, 19 bp, Homo sapiens
  siRNA target sequence for FLJ44968 (NM_198537.1,1884-1902).
gtggctggatgcacgtttt

SEQ ID NO: 439297 - DNA, 19 bp, Homo sapiens
  siRNA target sequence for UNQ698 (NM_198538.1,144-162).
gcgatgaccccattgagaa

SEQ ID NO: 439298 - DNA, 19 bp, Homo sapiens
  siRNA target sequence for UNQ698 (NM_198538.1,619-637).
gctgcagaatgctcataat

SEQ ID NO: 439299 - DNA, 19 bp, Homo sapiens
  siRNA target sequence for UNQ698 (NM_198538.1,752-770).
gtcaacacgcctttcatca

SEQ ID NO: 439300 - DNA, 19 bp, Homo sapiens
  siRNA target sequence for DKFZp686B0797 (NM_198539.1,529-547).
gaggcactgtccagaagtt

SEQ ID NO: 439301 - DNA, 19 bp, Homo sapiens
  siRNA target sequence for DKFZp686B0797 (NM_198539.1,631-649).
ggaaaaagtcattgaatgt

SEQ ID NO: 439302 - DNA, 19 bp, Homo sapiens
  siRNA target sequence for DKFZp686B0797 (NM_198539.1,685-703).
cattgttacttcaagacaa

SEQ ID NO: 439303 - DNA, 19 bp, Homo sapiens
  siRNA target sequence for DKFZp686B0797 (NM_198539.1,728-746).
gataagggtttggaacata

SEQ ID NO: 439304 - DNA, 19 bp, Homo sapiens
  siRNA target sequence for DKFZp686B0797 (NM_198539.1,774-792).
gctgtgtaagagagaaaca

SEQ ID NO: 439305 - DNA, 19 bp, Homo sapiens
  siRNA target sequence for DKFZp686B0797 (NM_198539.1,787-805).
gaaacagagtaatgagttt

SEQ ID NO: 439306 - DNA, 19 bp, Homo sapiens
  siRNA target sequence for DKFZp686B0797 (NM_198539.1,1308-1326).
catctgttacgctacatat

SEQ ID NO: 439307 - DNA, 19 bp, Homo sapiens
  siRNA target sequence for DKFZp686B0797 (NM_198539.1,1313-1331).
gttacgctacatatgagaa

SEQ ID NO: 439308 - DNA, 19 bp, Homo sapiens
  siRNA target sequence for BGALT15 (NM_198540.1,1138-1156).
ccagctgctcagatactga

SEQ ID NO: 439309 - DNA, 19 bp, Homo sapiens
  siRNA target sequence for BGALT15 (NM_198540.1,1424-1442).
ctgccccaccgtgagtttt

SEQ ID NO: 439310 - DNA, 19 bp, Homo sapiens
  siRNA target sequence for BGALT15 (NM_198540.1,1426-1444).
gccccaccgtgagttttgt

SEQ ID NO: 439311 - DNA, 19 bp, Homo sapiens
  siRNA target sequence for BGALT15 (NM_198540.1,1428-1446).
cccaccgtgagttttgtct

SEQ ID NO: 439312 - DNA, 19 bp, Homo sapiens
  siRNA target sequence for BGALT15 (NM_198540.1,1429-1447).
ccaccgtgagttttgtctt

SEQ ID NO: 439313 - DNA, 19 bp, Homo sapiens
  siRNA target sequence for BGALT15 (NM_198540.1,1617-1635).
ggctacccagcctatgcaa

SEQ ID NO: 439314 - DNA, 19 bp, Homo sapiens
  siRNA target sequence for BGALT15 (NM_198540.1,1868-1886).
cattcggctctggaaacaa

SEQ ID NO: 439315 - DNA, 19 bp, Homo sapiens
  siRNA target sequence for MGC4728 (NM_198542.1,168-186).
gctcagcagggctatgtga

SEQ ID NO: 439316 - DNA, 19 bp, Homo sapiens
  siRNA target sequence for LOC148872 (NM_198543.1,288-306).
ccgcttccctgctcagatt

SEQ ID NO: 439317 - DNA, 19 bp, Homo sapiens
  siRNA target sequence for MGC32686 (NM_198544.1,441-459).
gagcagcagcgattctctt

SEQ ID NO: 439318 - DNA, 19 bp, Homo sapiens
  siRNA target sequence for MGC32686 (NM_198544.1,446-464).
gcagcgattctcttaccaa

SEQ ID NO: 439319 - DNA, 19 bp, Homo sapiens
  siRNA target sequence for MGC32686 (NM_198544.1,476-494).
ggcagcagttcactatact

SEQ ID NO: 439320 - DNA, 19 bp, Homo sapiens
  siRNA target sequence for MGC32686 (NM_198544.1,562-580).
ccatttcggagctgacttt

SEQ ID NO: 439321 - DNA, 19 bp, Homo sapiens
  siRNA target sequence for MGC32686 (NM_198544.1,577-595).
ctttccgacagtgtgaaaa

SEQ ID NO: 439322 - DNA, 19 bp, Homo sapiens
  siRNA target sequence for MGC32686 (NM_198544.1,581-599).
ccgacagtgtgaaaatttt

SEQ ID NO: 439323 - DNA, 19 bp, Homo sapiens
  siRNA target sequence for MGC32686 (NM_198544.1,630-648).
gcgaaaagaaccacaatta

SEQ ID NO: 439324 - DNA, 19 bp, Homo sapiens
  siRNA target sequence for MGC32686 (NM_198544.1,668-686).
cttagccaggaggagtaat

SEQ ID NO: 439325 - DNA, 19 bp, Homo sapiens
  siRNA target sequence for MGC32686 (NM_198544.1,673-691).
ccaggaggagtaattcact

SEQ ID NO: 439326 - DNA, 19 bp, Homo sapiens
  siRNA target sequence for LOC374946 (NM_198545.2,605-623).
gtcccagctccctgatgaa

SEQ ID NO: 439327 - DNA, 19 bp, Homo sapiens
  siRNA target sequence for LOC374946 (NM_198545.2,831-849).
gttcgactggaccgattat

SEQ ID NO: 439328 - DNA, 19 bp, Homo sapiens
  siRNA target sequence for LOC374946 (NM_198545.2,834-852).
cgactggaccgattatgaa

SEQ ID NO: 439329 - DNA, 19 bp, Homo sapiens
  siRNA target sequence for LOC374946 (NM_198545.2,839-857).
ggaccgattatgaagactt

SEQ ID NO: 439330 - DNA, 19 bp, Homo sapiens
  siRNA target sequence for LOC374946 (NM_198545.2,840-858).
gaccgattatgaagactta

SEQ ID NO: 439331 - DNA, 19 bp, Homo sapiens
  siRNA target sequence for LOC374946 (NM_198545.2,843-861).
cgattatgaagacttaaaa

SEQ ID NO: 439332 - DNA, 19 bp, Homo sapiens
  siRNA target sequence for LOC374946 (NM_198545.2,912-930).
ctccagtgatggtaacgaa

SEQ ID NO: 439333 - DNA, 19 bp, Homo sapiens
  siRNA target sequence for LOC374946 (NM_198545.2,1026-1044).
ccgaggcctcaacaacaaa

SEQ ID NO: 439334 - DNA, 19 bp, Homo sapiens
  siRNA target sequence for LOC374946 (NM_198545.2,1027-1045).
cgaggcctcaacaacaaat

SEQ ID NO: 439335 - DNA, 19 bp, Homo sapiens
  siRNA target sequence for LOC374955 (NM_198546.1,549-567).
cacgcctggacctaaaaaa

SEQ ID NO: 439336 - DNA, 19 bp, Homo sapiens
  siRNA target sequence for LOC374955 (NM_198546.1,553-571).
cctggacctaaaaaagcaa

SEQ ID NO: 439337 - DNA, 19 bp, Homo sapiens
  siRNA target sequence for LOC374955 (NM_198546.1,727-745).
cggcagggcttcatgaagt

SEQ ID NO: 439338 - DNA, 19 bp, Homo sapiens
  siRNA target sequence for LOC374955 (NM_198546.1,1167-1185).
ctactttgagatcttcaat

SEQ ID NO: 439339 - DNA, 19 bp, Homo sapiens
  siRNA target sequence for LOC374955 (NM_198546.1,1275-1293).
gatgagtgctgatgtcaat

SEQ ID NO: 439340 - DNA, 19 bp, Homo sapiens
  siRNA target sequence for LOC374955 (NM_198546.1,1301-1319).
gtcgtgtggacttcaaaga

SEQ ID NO: 439341 - DNA, 19 bp, Homo sapiens
  siRNA target sequence for LOC374955 (NM_198546.1,1452-1470).
cttaccagaggcagtctta

SEQ ID NO: 439342 - DNA, 19 bp, Homo sapiens
  siRNA target sequence for LOC374955 (NM_198546.1,1462-1480).
gcagtcttagaggaaatca

SEQ ID NO: 439343 - DNA, 19 bp, Homo sapiens
  siRNA target sequence for FLJ46354 (NM_198547.1,416-434).
gctcaggtgcctatgttga

SEQ ID NO: 439344 - DNA, 19 bp, Homo sapiens
  siRNA target sequence for FLJ46354 (NM_198547.1,468-486).
cagatcttaatgattcttt

SEQ ID NO: 439345 - DNA, 19 bp, Homo sapiens
  siRNA target sequence for FLJ46354 (NM_198547.1,470-488).
gatcttaatgattctttga

SEQ ID NO: 439346 - DNA, 19 bp, Homo sapiens
  siRNA target sequence for FLJ46354 (NM_198547.1,574-592).
ccagatcaccagttcttgt

SEQ ID NO: 439347 - DNA, 19 bp, Homo sapiens
  siRNA target sequence for FLJ46354 (NM_198547.1,717-735).
ggaaccaccctcagtcaaa

SEQ ID NO: 439348 - DNA, 19 bp, Homo sapiens
  siRNA target sequence for FLJ46354 (NM_198547.1,724-742).
ccctcagtcaaattctgaa

SEQ ID NO: 439349 - DNA, 19 bp, Homo sapiens
  siRNA target sequence for FLJ46354 (NM_198547.1,754-772).
gtgcctctcaagtaagatt

SEQ ID NO: 439350 - DNA, 19 bp, Homo sapiens
  siRNA target sequence for FLJ46354 (NM_198547.1,758-776).
ctctcaagtaagattttca

SEQ ID NO: 439351 - DNA, 19 bp, Homo sapiens
  siRNA target sequence for FLJ46354 (NM_198547.1,799-817).
cccttctaggcatgaatta

SEQ ID NO: 439352 - DNA, 19 bp, Homo sapiens
  siRNA target sequence for FLJ46354 (NM_198547.1,933-951).
ccaatccattgctcaacat

SEQ ID NO: 439353 - DNA, 19 bp, Homo sapiens
  siRNA target sequence for FLJ46354 (NM_198547.1,1008-1026).
ccctaatcccagacacaaa

SEQ ID NO: 439354 - DNA, 19 bp, Homo sapiens
  siRNA target sequence for FLJ46354 (NM_198547.1,1042-1060).
ggcttcacataatatctct

SEQ ID NO: 439355 - DNA, 19 bp, Homo sapiens
  siRNA target sequence for FLJ46354 (NM_198547.1,1092-1110).
cctggagcacaagttcaaa

SEQ ID NO: 439356 - DNA, 19 bp, Homo sapiens
  siRNA target sequence for FLJ46354 (NM_198547.1,1196-1214).
cctggctccagctatggta

SEQ ID NO: 439357 - DNA, 19 bp, Homo sapiens
  siRNA target sequence for FLJ46354 (NM_198547.1,1197-1215).
ctggctccagctatggtat

SEQ ID NO: 439358 - DNA, 19 bp, Homo sapiens
  siRNA target sequence for FLJ46354 (NM_198547.1,1884-1902).
ccatccaggctctttacca

SEQ ID NO: 439359 - DNA, 19 bp, Homo sapiens
  siRNA target sequence for FLJ46354 (NM_198547.1,2222-2240).
caaaaacgagccagagata

SEQ ID NO: 439360 - DNA, 19 bp, Homo sapiens
  siRNA target sequence for FLJ46354 (NM_198547.1,2250-2268).
ccaacaaaaaggagctata

SEQ ID NO: 439361 - DNA, 19 bp, Homo sapiens
  siRNA target sequence for FLJ46354 (NM_198547.1,2251-2269).
caacaaaaaggagctatat

SEQ ID NO: 439362 - DNA, 19 bp, Homo sapiens
  siRNA target sequence for FLJ46354 (NM_198547.1,2308-2326).
gagcccgtgccagaacatt

SEQ ID NO: 439363 - DNA, 19 bp, Homo sapiens
  siRNA target sequence for FLJ46354 (NM_198547.1,2332-2350).
ggtgatcgaggaatttgga

SEQ ID NO: 439364 - DNA, 19 bp, Homo sapiens
  siRNA target sequence for FLJ46354 (NM_198547.1,2609-2627).
ctggctagctccttcatga

SEQ ID NO: 439365 - DNA, 19 bp, Homo sapiens
  siRNA target sequence for FLJ46354 (NM_198547.1,3039-3057).
ggatgggctgctcttatga

SEQ ID NO: 439366 - DNA, 19 bp, Homo sapiens
  siRNA target sequence for FLJ46354 (NM_198547.1,3265-3283).
cgaagaaggaattgtgata

SEQ ID NO: 439367 - DNA, 19 bp, Homo sapiens
  siRNA target sequence for FLJ35093 (NM_198549.1,99-117).
ggcctggagctccagatta

SEQ ID NO: 439368 - DNA, 19 bp, Homo sapiens
  siRNA target sequence for FLJ35093 (NM_198549.1,101-119).
cctggagctccagattaga

SEQ ID NO: 439369 - DNA, 19 bp, Homo sapiens
  siRNA target sequence for FLJ35093 (NM_198549.1,102-120).
ctggagctccagattagaa

SEQ ID NO: 439370 - DNA, 19 bp, Homo sapiens
  siRNA target sequence for FLJ35093 (NM_198549.1,148-166).
gtgaatcacagttttcctt

SEQ ID NO: 439371 - DNA, 19 bp, Homo sapiens
  siRNA target sequence for FLJ35093 (NM_198549.1,178-196).
cgctaagagtgtttgatct

SEQ ID NO: 439372 - DNA, 19 bp, Homo sapiens
  siRNA target sequence for FLJ35093 (NM_198549.1,198-216).
cctctgacttggtactatt

SEQ ID NO: 439373 - DNA, 19 bp, Homo sapiens
  siRNA target sequence for FLJ35093 (NM_198549.1,238-256).
ctccggtggctaaaaagtt

SEQ ID NO: 439374 - DNA, 19 bp, Homo sapiens
  siRNA target sequence for FLJ35093 (NM_198549.1,240-258).
ccggtggctaaaaagttgt

SEQ ID NO: 439375 - DNA, 19 bp, Homo sapiens
  siRNA target sequence for FLJ35093 (NM_198549.1,241-259).
cggtggctaaaaagttgtt

SEQ ID NO: 439376 - DNA, 19 bp, Homo sapiens
  siRNA target sequence for FLJ35093 (NM_198549.1,242-260).
ggtggctaaaaagttgttt

SEQ ID NO: 439377 - DNA, 19 bp, Homo sapiens
  siRNA target sequence for FLJ35093 (NM_198549.1,271-289).
cagtgagtgctatatctgt

SEQ ID NO: 439378 - DNA, 19 bp, Homo sapiens
  siRNA target sequence for FLJ35093 (NM_198549.1,273-291).
gtgagtgctatatctgtaa

SEQ ID NO: 439379 - DNA, 19 bp, Homo sapiens
  siRNA target sequence for FLJ35093 (NM_198549.1,275-293).
gagtgctatatctgtaatt

SEQ ID NO: 439380 - DNA, 19 bp, Homo sapiens
  siRNA target sequence for FLJ35093 (NM_198549.1,360-378).
gagcacctcatacttgaat

SEQ ID NO: 439381 - DNA, 19 bp, Homo sapiens
  siRNA target sequence for FLJ35093 (NM_198549.1,363-381).
cacctcatacttgaataca

SEQ ID NO: 439382 - DNA, 19 bp, Homo sapiens
  siRNA target sequence for FLJ35093 (NM_198549.1,365-383).
cctcatacttgaatacact

SEQ ID NO: 439383 - DNA, 19 bp, Homo sapiens
  siRNA target sequence for FLJ35093 (NM_198549.1,366-384).
ctcatacttgaatacacta

SEQ ID NO: 439384 - DNA, 19 bp, Homo sapiens
  siRNA target sequence for FLJ35093 (NM_198549.1,424-442).
gcagacagaatttgacatt

SEQ ID NO: 439385 - DNA, 19 bp, Homo sapiens
  siRNA target sequence for FLJ35093 (NM_198549.1,458-476).
caaagacaaaggatctcaa

SEQ ID NO: 439386 - DNA, 19 bp, Homo sapiens
  siRNA target sequence for FLJ35093 (NM_198549.1,464-482).
caaaggatctcaagtttgt

SEQ ID NO: 439387 - DNA, 19 bp, Homo sapiens
  siRNA target sequence for FLJ35093 (NM_198549.1,517-535).
caggttctgcacagagttt

SEQ ID NO: 439388 - DNA, 19 bp, Homo sapiens
  siRNA target sequence for FLJ35093 (NM_198549.1,571-589).
gcgcttgtggcaattctaa

SEQ ID NO: 439389 - DNA, 19 bp, Homo sapiens
  siRNA target sequence for FLJ35093 (NM_198549.1,572-590).
cgcttgtggcaattctaat

SEQ ID NO: 439390 - DNA, 19 bp, Homo sapiens
  siRNA target sequence for FLJ35093 (NM_198549.1,573-591).
gcttgtggcaattctaatt

SEQ ID NO: 439391 - DNA, 19 bp, Homo sapiens
  siRNA target sequence for FLJ35093 (NM_198549.1,643-661).
ctactccagagaacttata

SEQ ID NO: 439392 - DNA, 19 bp, Homo sapiens
  siRNA target sequence for FLJ35093 (NM_198549.1,748-766).
cctgtggttccattaaact

SEQ ID NO: 439393 - DNA, 19 bp, Homo sapiens
  siRNA target sequence for FLJ35093 (NM_198549.1,814-832).
gtactgaatttatccataa

SEQ ID NO: 439394 - DNA, 19 bp, Homo sapiens
  siRNA target sequence for FLJ35093 (NM_198549.1,817-835).
ctgaatttatccataaact

SEQ ID NO: 439395 - DNA, 19 bp, Homo sapiens
  siRNA target sequence for FLJ35093 (NM_198549.1,891-909).
ggggcatctgatcctaatt

SEQ ID NO: 439396 - DNA, 19 bp, Homo sapiens
  siRNA target sequence for FLJ35093 (NM_198549.1,1042-1060).
gagaagtacggcataccta

SEQ ID NO: 439397 - DNA, 19 bp, Homo sapiens
  siRNA target sequence for FLJ35093 (NM_198549.1,1063-1081).
gcctggagtccctttgtca

SEQ ID NO: 439398 - DNA, 19 bp, Homo sapiens
  siRNA target sequence for FLJ35093 (NM_198549.1,1103-1121).
catgcatttagttgaagaa

SEQ ID NO: 439399 - DNA, 19 bp, Homo sapiens
  siRNA target sequence for FLJ35093 (NM_198549.1,1140-1158).
gtactgagaactgaaatgt

SEQ ID NO: 439400 - DNA, 19 bp, Homo sapiens
  siRNA target sequence for FLJ35093 (NM_198549.1,1190-1208).
caaacttcactgtattcga

SEQ ID NO: 439401 - DNA, 19 bp, Homo sapiens
  siRNA target sequence for FLJ35093 (NM_198549.1,1265-1283).
cggaaggaaaattttatca

SEQ ID NO: 439402 - DNA, 19 bp, Homo sapiens
  siRNA target sequence for FLJ35093 (NM_198549.1,1364-1382).
cgatcactggggtagtact

SEQ ID NO: 439403 - DNA, 19 bp, Homo sapiens
  siRNA target sequence for FLJ35093 (NM_198549.1,1372-1390).
ggggtagtactgaaatgga

SEQ ID NO: 439404 - DNA, 19 bp, Homo sapiens
  siRNA target sequence for FLJ35093 (NM_198549.1,1405-1423).
gggtgaaaaatctaaattt

SEQ ID NO: 439405 - DNA, 19 bp, Homo sapiens
  siRNA target sequence for FLJ35093 (NM_198549.1,1592-1610).
gaagatcccagatggattt

SEQ ID NO: 439406 - DNA, 19 bp, Homo sapiens
  siRNA target sequence for FLJ35093 (NM_198549.1,1678-1696).
gaaattctctgtatgattt

SEQ ID NO: 439407 - DNA, 19 bp, Homo sapiens
  siRNA target sequence for FLJ35093 (NM_198549.1,1703-1721).
cttttttaagaatcaagtt

SEQ ID NO: 439408 - DNA, 19 bp, Homo sapiens
  siRNA target sequence for FLJ35093 (NM_198549.1,1752-1770).
gagaaggtgcgctattcaa

SEQ ID NO: 439409 - DNA, 19 bp, Homo sapiens
  siRNA target sequence for FLJ35093 (NM_198549.1,1754-1772).
gaaggtgcgctattcaagt

SEQ ID NO: 439410 - DNA, 19 bp, Homo sapiens
  siRNA target sequence for FLJ35093 (NM_198549.1,1757-1775).
ggtgcgctattcaagtaca

SEQ ID NO: 439411 - DNA, 19 bp, Homo sapiens
  siRNA target sequence for FLJ35093 (NM_198549.1,1791-1809).
gacctcatgcagttactca

SEQ ID NO: 439412 - DNA, 19 bp, Homo sapiens
  siRNA target sequence for FLJ35093 (NM_198549.1,1793-1811).
cctcatgcagttactcatt

SEQ ID NO: 439413 - DNA, 19 bp, Homo sapiens
  siRNA target sequence for FLJ35093 (NM_198549.1,1812-1830).
cgccgcactgagcttttaa

SEQ ID NO: 439414 - DNA, 19 bp, Homo sapiens
  siRNA target sequence for FLJ35093 (NM_198549.1,1813-1831).
gccgcactgagcttttaat

SEQ ID NO: 439415 - DNA, 19 bp, Homo sapiens
  siRNA target sequence for FLJ35093 (NM_198549.1,1823-1841).
gcttttaatggcctatctt

SEQ ID NO: 439416 - DNA, 19 bp, Homo sapiens
  siRNA target sequence for FLJ35093 (NM_198549.1,1851-1869).
gccctgaggcatacaagta

SEQ ID NO: 439417 - DNA, 19 bp, Homo sapiens
  siRNA target sequence for FLJ35093 (NM_198549.1,1859-1877).
gcatacaagtagttgtcta

SEQ ID NO: 439418 - DNA, 19 bp, Homo sapiens
  siRNA target sequence for FLJ35093 (NM_198549.1,1879-1897).
gcagtcatggtcatgttat

SEQ ID NO: 439419 - DNA, 19 bp, Homo sapiens
  siRNA target sequence for FLJ35093 (NM_198549.1,1907-1925).
gctactggaagccaaagta

SEQ ID NO: 439420 - DNA, 19 bp, Homo sapiens
  siRNA target sequence for FLJ36760 (NM_198550.1,240-258).
ggtgttaatttcaaaccaa

SEQ ID NO: 439421 - DNA, 19 bp, Homo sapiens
  siRNA target sequence for FLJ36760 (NM_198550.1,271-289).
gattgatggcttggtatta

SEQ ID NO: 439422 - DNA, 19 bp, Homo sapiens
  siRNA target sequence for FLJ36760 (NM_198550.1,346-364).
cagatctggttacattgat

SEQ ID NO: 439423 - DNA, 19 bp, Homo sapiens
  siRNA target sequence for FLJ36760 (NM_198550.1,384-402).
ctagatatacagttaagga

SEQ ID NO: 439424 - DNA, 19 bp, Homo sapiens
  siRNA target sequence for FLJ36760 (NM_198550.1,441-459).
ccaaatcggataactatca

SEQ ID NO: 439425 - DNA, 19 bp, Homo sapiens
  siRNA target sequence for FLJ36760 (NM_198550.1,518-536).
ggctcaactaggatgcatt

SEQ ID NO: 439426 - DNA, 19 bp, Homo sapiens
  siRNA target sequence for FLJ36760 (NM_198550.1,533-551).
cattcccatacaagatttt

SEQ ID NO: 439427 - DNA, 19 bp, Homo sapiens
  siRNA target sequence for FLJ36760 (NM_198550.1,585-603).
catggctcccgaattacaa

SEQ ID NO: 439428 - DNA, 19 bp, Homo sapiens
  siRNA target sequence for FLJ36760 (NM_198550.1,601-619).
caagatggttgtcagattt

SEQ ID NO: 439429 - DNA, 19 bp, Homo sapiens
  siRNA target sequence for FLJ36760 (NM_198550.1,624-642).
gctgctcaagaaaagaagt

SEQ ID NO: 439430 - DNA, 19 bp, Homo sapiens
  siRNA target sequence for FLJ36760 (NM_198550.1,646-664).
ctgtactattgaatagttt

SEQ ID NO: 439431 - DNA, 19 bp, Homo sapiens
  siRNA target sequence for FLJ36760 (NM_198550.1,762-780).
gtaaatgctggtttgactt

SEQ ID NO: 439432 - DNA, 19 bp, Homo sapiens
  siRNA target sequence for FLJ36760 (NM_198550.1,807-825).
gcaagggaacttgaattga

SEQ ID NO: 439433 - DNA, 19 bp, Homo sapiens
  siRNA target sequence for FLJ36760 (NM_198550.1,808-826).
caagggaacttgaattgat

SEQ ID NO: 439434 - DNA, 19 bp, Homo sapiens
  siRNA target sequence for FLJ36760 (NM_198550.1,811-829).
gggaacttgaattgatttt

SEQ ID NO: 439435 - DNA, 19 bp, Homo sapiens
  siRNA target sequence for FLJ36760 (NM_198550.1,845-863).
ctttggaacccagataaaa

SEQ ID NO: 439436 - DNA, 19 bp, Homo sapiens
  siRNA target sequence for FLJ36760 (NM_198550.1,868-886).
ctgtgatgtatctaccaaa

SEQ ID NO: 439437 - DNA, 19 bp, Homo sapiens
  siRNA target sequence for FLJ36760 (NM_198550.1,870-888).
gtgatgtatctaccaaaat

SEQ ID NO: 439438 - DNA, 19 bp, Homo sapiens
  siRNA target sequence for FLJ36760 (NM_198550.1,902-920).
ggaacagattacaagatat

SEQ ID NO: 439439 - DNA, 19 bp, Homo sapiens
  siRNA target sequence for FLJ36760 (NM_198550.1,908-926).
gattacaagatatagtgat

SEQ ID NO: 439440 - DNA, 19 bp, Homo sapiens
  siRNA target sequence for FLJ36760 (NM_198550.1,922-940).
gtgatacgacggcagaaat

SEQ ID NO: 439441 - DNA, 19 bp, Homo sapiens
  siRNA target sequence for FLJ36760 (NM_198550.1,924-942).
gatacgacggcagaaatat

SEQ ID NO: 439442 - DNA, 19 bp, Homo sapiens
  siRNA target sequence for FLJ36760 (NM_198550.1,928-946).
cgacggcagaaatattagt

SEQ ID NO: 439443 - DNA, 19 bp, Homo sapiens
  siRNA target sequence for FLJ36760 (NM_198550.1,988-1006).
gaacagcatcggattctca

SEQ ID NO: 439444 - DNA, 19 bp, Homo sapiens
  siRNA target sequence for FLJ36760 (NM_198550.1,994-1012).
catcggattctcactatgt

SEQ ID NO: 439445 - DNA, 19 bp, Homo sapiens
  siRNA target sequence for FLJ36760 (NM_198550.1,1003-1021).
ctcactatgttaccttaat

SEQ ID NO: 439446 - DNA, 19 bp, Homo sapiens
  siRNA target sequence for FLJ36760 (NM_198550.1,1005-1023).
cactatgttaccttaatca

SEQ ID NO: 439447 - DNA, 19 bp, Homo sapiens
  siRNA target sequence for FLJ36760 (NM_198550.1,1027-1045).
gtgacgcagataatcaagt

SEQ ID NO: 439448 - DNA, 19 bp, Homo sapiens
  siRNA target sequence for FLJ36760 (NM_198550.1,1058-1076).
caagattacggattctgtt

SEQ ID NO: 439449 - DNA, 19 bp, Homo sapiens
  siRNA target sequence for FLJ36760 (NM_198550.1,1066-1084).
cggattctgttttgctaaa

SEQ ID NO: 439450 - DNA, 19 bp, Homo sapiens
  siRNA target sequence for FLJ36760 (NM_198550.1,1090-1108).
gaagttgggctaaaaagat

SEQ ID NO: 439451 - DNA, 19 bp, Homo sapiens
  siRNA target sequence for FLJ36760 (NM_198550.1,1113-1131).
gtgaaaagagctcttaaat

SEQ ID NO: 439452 - DNA, 19 bp, Homo sapiens
  siRNA target sequence for FLJ36760 (NM_198550.1,1187-1205).
gcagaaacttacagtcttt

SEQ ID NO: 439453 - DNA, 19 bp, Homo sapiens
  siRNA target sequence for FLJ36760 (NM_198550.1,1261-1279).
cacagatttcccattctaa

SEQ ID NO: 439454 - DNA, 19 bp, Homo sapiens
  siRNA target sequence for FLJ36760 (NM_198550.1,1297-1315).
caatagcaggacctaataa

SEQ ID NO: 439455 - DNA, 19 bp, Homo sapiens
  siRNA target sequence for FLJ36760 (NM_198550.1,1343-1361).
gaaccgagaatgcaatcat

SEQ ID NO: 439456 - DNA, 19 bp, Homo sapiens
  siRNA target sequence for FLJ36760 (NM_198550.1,1486-1504).
catctgttcctccagttaa

SEQ ID NO: 439457 - DNA, 19 bp, Homo sapiens
  siRNA target sequence for FLJ36760 (NM_198550.1,1498-1516).
cagttaaacgtctgaagat

SEQ ID NO: 439458 - DNA, 19 bp, Homo sapiens
  siRNA target sequence for FLJ36760 (NM_198550.1,1520-1538).
gatgaataaatctcaaagt

SEQ ID NO: 439459 - DNA, 19 bp, Homo sapiens
  siRNA target sequence for FLJ36760 (NM_198550.1,1823-1841).
catgagatgtcggatattt

SEQ ID NO: 439460 - DNA, 19 bp, Homo sapiens
  siRNA target sequence for FLJ36760 (NM_198550.1,1828-1846).
gatgtcggatatttcttta

SEQ ID NO: 439461 - DNA, 19 bp, Homo sapiens
  siRNA target sequence for FLJ36760 (NM_198550.1,1831-1849).
gtcggatatttctttatca

SEQ ID NO: 439462 - DNA, 19 bp, Homo sapiens
  siRNA target sequence for MGC15887 (NM_198552.1,345-363).
ccttgctctgccaactgta

SEQ ID NO: 439463 - DNA, 19 bp, Homo sapiens
  siRNA target sequence for FLJ30851 (NM_198553.1,124-142).
ctattcaatcaatattata

SEQ ID NO: 439464 - DNA, 19 bp, Homo sapiens
  siRNA target sequence for FLJ30851 (NM_198553.1,183-201).
cattatgatccaaaagagt

SEQ ID NO: 439465 - DNA, 19 bp, Homo sapiens
  siRNA target sequence for FLJ30851 (NM_198553.1,231-249).
cccaattttctgaaggtta

SEQ ID NO: 439466 - DNA, 19 bp, Homo sapiens
  siRNA target sequence for FLJ30851 (NM_198553.1,323-341).
gtgtgagactggcaaaata

SEQ ID NO: 439467 - DNA, 19 bp, Homo sapiens
  siRNA target sequence for FLJ30851 (NM_198553.1,325-343).
gtgagactggcaaaatata

SEQ ID NO: 439468 - DNA, 19 bp, Homo sapiens
  siRNA target sequence for FLJ30851 (NM_198553.1,329-347).
gactggcaaaatatattca

SEQ ID NO: 439469 - DNA, 19 bp, Homo sapiens
  siRNA target sequence for FLJ30851 (NM_198553.1,331-349).
ctggcaaaatatattcaat

SEQ ID NO: 439470 - DNA, 19 bp, Homo sapiens
  siRNA target sequence for FLJ30851 (NM_198553.1,430-448).
caaacgagtggctgaaact

SEQ ID NO: 439471 - DNA, 19 bp, Homo sapiens
  siRNA target sequence for FLJ30851 (NM_198553.1,440-458).
gctgaaactgcctacaaga

SEQ ID NO: 439472 - DNA, 19 bp, Homo sapiens
  siRNA target sequence for FLJ30851 (NM_198553.1,494-512).
caaagggtcatcctttcta

SEQ ID NO: 439473 - DNA, 19 bp, Homo sapiens
  siRNA target sequence for FLJ30851 (NM_198553.1,498-516).
gggtcatcctttctagaaa

SEQ ID NO: 439474 - DNA, 19 bp, Homo sapiens
  siRNA target sequence for FLJ30851 (NM_198553.1,565-583).
ccatctctgaagggtattt

SEQ ID NO: 439475 - DNA, 19 bp, Homo sapiens
  siRNA target sequence for FLJ30851 (NM_198553.1,618-636).
gaccaggatgggtcttgtt

SEQ ID NO: 439476 - DNA, 19 bp, Homo sapiens
  siRNA target sequence for FLJ30851 (NM_198553.1,620-638).
ccaggatgggtcttgttct

SEQ ID NO: 439477 - DNA, 19 bp, Homo sapiens
  siRNA target sequence for FLJ30851 (NM_198553.1,644-662).
ccagctggagtggatacaa

SEQ ID NO: 439478 - DNA, 19 bp, Homo sapiens
  siRNA target sequence for FLJ45645 (NM_198557.1,212-230).
cctttttagtgatcaatta

SEQ ID NO: 439479 - DNA, 19 bp, Homo sapiens
  siRNA target sequence for FLJ45645 (NM_198557.1,213-231).
ctttttagtgatcaattat

SEQ ID NO: 439480 - DNA, 19 bp, Homo sapiens
  siRNA target sequence for FLJ45645 (NM_198557.1,252-270).
cacttccaagacattaaga

SEQ ID NO: 439481 - DNA, 19 bp, Homo sapiens
  siRNA target sequence for FLJ45645 (NM_198557.1,269-287).
gaatgagggcggagatgtt

SEQ ID NO: 439482 - DNA, 19 bp, Homo sapiens
  siRNA target sequence for FLJ45645 (NM_198557.1,294-312).
gtgatatatccgacaagaa

SEQ ID NO: 439483 - DNA, 19 bp, Homo sapiens
  siRNA target sequence for FLJ45645 (NM_198557.1,310-328).
gaaccaagggagttgcata

SEQ ID NO: 439484 - DNA, 19 bp, Homo sapiens
  siRNA target sequence for FLJ45645 (NM_198557.1,313-331).
ccaagggagttgcatatgt

SEQ ID NO: 439485 - DNA, 19 bp, Homo sapiens
  siRNA target sequence for FLJ45645 (NM_198557.1,317-335).
gggagttgcatatgtaata

SEQ ID NO: 439486 - DNA, 19 bp, Homo sapiens
  siRNA target sequence for FLJ45645 (NM_198557.1,318-336).
ggagttgcatatgtaatat

SEQ ID NO: 439487 - DNA, 19 bp, Homo sapiens
  siRNA target sequence for FLJ45645 (NM_198557.1,587-605).
ctccgtggaaggatcattt

SEQ ID NO: 439488 - DNA, 19 bp, Homo sapiens
  siRNA target sequence for FLJ45645 (NM_198557.1,589-607).
ccgtggaaggatcatttct

SEQ ID NO: 439489 - DNA, 19 bp, Homo sapiens
  siRNA target sequence for FLJ45645 (NM_198557.1,612-630).
gtcaagaggctcagagaat

SEQ ID NO: 439490 - DNA, 19 bp, Homo sapiens
  siRNA target sequence for FLJ45645 (NM_198557.1,635-653).
gctagcaagagcatgttct

SEQ ID NO: 439491 - DNA, 19 bp, Homo sapiens
  siRNA target sequence for FLJ45645 (NM_198557.1,643-661).
gagcatgttctctcttaga

SEQ ID NO: 439492 - DNA, 19 bp, Homo sapiens
  siRNA target sequence for FLJ45645 (NM_198557.1,726-744).
cagagaagtaataactctt

SEQ ID NO: 439493 - DNA, 19 bp, Homo sapiens
  siRNA target sequence for FLJ45645 (NM_198557.1,778-796).
ctagaagtggagaaatgct

SEQ ID NO: 439494 - DNA, 19 bp, Homo sapiens
  siRNA target sequence for FLJ45645 (NM_198557.1,944-962).
gccaaacaatgcaaaacat

SEQ ID NO: 439495 - DNA, 19 bp, Homo sapiens
  siRNA target sequence for FLJ45645 (NM_198557.1,988-1006).
cacatgctctttacttaaa

SEQ ID NO: 439496 - DNA, 19 bp, Homo sapiens
  siRNA target sequence for FLJ45645 (NM_198557.1,993-1011).
gctctttacttaaagctta

SEQ ID NO: 439497 - DNA, 19 bp, Homo sapiens
  siRNA target sequence for FLJ45645 (NM_198557.1,1007-1025).
gcttagaaaagagacattt

SEQ ID NO: 439498 - DNA, 19 bp, Homo sapiens
  siRNA target sequence for FLJ45645 (NM_198557.1,1070-1088).
ggcatgtgaacaattaagt

SEQ ID NO: 439499 - DNA, 19 bp, Homo sapiens
  siRNA target sequence for FLJ45645 (NM_198557.1,1087-1105).
gttcgagataccttgaagt

SEQ ID NO: 439500 - DNA, 19 bp, Homo sapiens
  siRNA target sequence for FLJ45645 (NM_198557.1,1104-1122).
gtcctgattaacctttata

SEQ ID NO: 439501 - DNA, 19 bp, Homo sapiens
  siRNA target sequence for FLJ45645 (NM_198557.1,1107-1125).
ctgattaacctttatagga

SEQ ID NO: 439502 - DNA, 19 bp, Homo sapiens
  siRNA target sequence for FLJ45645 (NM_198557.1,1134-1152).
gacattataggatcttctt

SEQ ID NO: 439503 - DNA, 19 bp, Homo sapiens
  siRNA target sequence for FLJ45645 (NM_198557.1,1136-1154).
cattataggatcttcttct

SEQ ID NO: 439504 - DNA, 19 bp, Homo sapiens
  siRNA target sequence for FLJ45645 (NM_198557.1,1144-1162).
gatcttcttctgacactta

SEQ ID NO: 439505 - DNA, 19 bp, Homo sapiens
  siRNA target sequence for MGC50811 (NM_198559.1,264-282).
ctcggcatgctgacatact

SEQ ID NO: 439506 - DNA, 19 bp, Homo sapiens
  siRNA target sequence for MGC50811 (NM_198559.1,307-325).
gaggcttcttggacaaaat

SEQ ID NO: 439507 - DNA, 19 bp, Homo sapiens
  siRNA target sequence for MGC50811 (NM_198559.1,627-645).
gacaccgagggcaaactct

SEQ ID NO: 439508 - DNA, 19 bp, Homo sapiens
  siRNA target sequence for MGC50811 (NM_198559.1,644-662).
ctgctatttgacctatcaa

SEQ ID NO: 439509 - DNA, 19 bp, Homo sapiens
  siRNA target sequence for MGC50811 (NM_198559.1,646-664).
gctatttgacctatcaaaa

SEQ ID NO: 439510 - DNA, 19 bp, Homo sapiens
  siRNA target sequence for MGC50811 (NM_198559.1,751-769).
ccatgtcctgccagtacta

SEQ ID NO: 439511 - DNA, 19 bp, Homo sapiens
  siRNA target sequence for MGC50811 (NM_198559.1,873-891).
ccacgcccagtgtttgaga

SEQ ID NO: 439512 - DNA, 19 bp, Homo sapiens
  siRNA target sequence for MGC50811 (NM_198559.1,874-892).
cacgcccagtgtttgagaa

SEQ ID NO: 439513 - DNA, 19 bp, Homo sapiens
  siRNA target sequence for MGC50811 (NM_198559.1,915-933).
gatatggagctctattcga

SEQ ID NO: 439514 - DNA, 19 bp, Homo sapiens
  siRNA target sequence for LOC375323 (NM_198560.1,608-626).
ggctgcatcacctgctttt

SEQ ID NO: 439515 - DNA, 19 bp, Homo sapiens
  siRNA target sequence for LOC375323 (NM_198560.1,648-666).
cggctacggtctacaagat

SEQ ID NO: 439516 - DNA, 19 bp, Homo sapiens
  siRNA target sequence for LOC375323 (NM_198560.1,650-668).
gctacggtctacaagatct

SEQ ID NO: 439517 - DNA, 19 bp, Homo sapiens
  siRNA target sequence for LOC375323 (NM_198560.1,767-785).
gccaagacggggaagtact

SEQ ID NO: 439518 - DNA, 19 bp, Homo sapiens
  siRNA target sequence for FLJ43654 (NM_198562.1,162-180).
gacatggtcgcttttagga

SEQ ID NO: 439519 - DNA, 19 bp, Homo sapiens
  siRNA target sequence for FLJ43654 (NM_198562.1,393-411).
cccatgtgctcctgagaat

SEQ ID NO: 439520 - DNA, 19 bp, Homo sapiens
  siRNA target sequence for FLJ43654 (NM_198562.1,464-482).
ctctgtgccccgagagaaa

SEQ ID NO: 439521 - DNA, 19 bp, Homo sapiens
  siRNA target sequence for FLJ43654 (NM_198562.1,484-502).
cctctaaccagcaaggaaa

SEQ ID NO: 439522 - DNA, 19 bp, Homo sapiens
  siRNA target sequence for FLJ43654 (NM_198562.1,485-503).
ctctaaccagcaaggaaaa

SEQ ID NO: 439523 - DNA, 19 bp, Homo sapiens
  siRNA target sequence for FLJ43654 (NM_198562.1,556-574).
gcaggagagggggaaaact

SEQ ID NO: 439524 - DNA, 19 bp, Homo sapiens
  siRNA target sequence for FLJ43654 (NM_198562.1,626-644).
caaacatgccactcaacaa

SEQ ID NO: 439525 - DNA, 19 bp, Homo sapiens
  siRNA target sequence for FLJ43654 (NM_198562.1,666-684).
ggatctgcttgatatgatt

SEQ ID NO: 439526 - DNA, 19 bp, Homo sapiens
  siRNA target sequence for FLJ43654 (NM_198562.1,692-710).
caagcatccgaactattga

SEQ ID NO: 439527 - DNA, 19 bp, Homo sapiens
  siRNA target sequence for FLJ43654 (NM_198562.1,915-933).
caatgtgatgacgtctttt

SEQ ID NO: 439528 - DNA, 19 bp, Homo sapiens
  siRNA target sequence for FLJ43654 (NM_198562.1,924-942).
gacgtcttttaaataccaa

SEQ ID NO: 439529 - DNA, 19 bp, Homo sapiens
  siRNA target sequence for FLJ43654 (NM_198562.1,927-945).
gtcttttaaataccaaatt

SEQ ID NO: 439530 - DNA, 19 bp, Homo sapiens
  siRNA target sequence for MGC52022 (NM_198563.1,224-242).
ccttcagcacgttaatgct

SEQ ID NO: 439531 - DNA, 19 bp, Homo sapiens
  siRNA target sequence for MGC52022 (NM_198563.1,274-292).
cgtccgtggaggatatggt

SEQ ID NO: 439532 - DNA, 19 bp, Homo sapiens
  siRNA target sequence for MGC52022 (NM_198563.1,275-293).
gtccgtggaggatatggtt

SEQ ID NO: 439533 - DNA, 19 bp, Homo sapiens
  siRNA target sequence for MGC52022 (NM_198563.1,277-295).
ccgtggaggatatggtttt

SEQ ID NO: 439534 - DNA, 19 bp, Homo sapiens
  siRNA target sequence for MGC52022 (NM_198563.1,327-345).
gttcatccactttgcaaat

SEQ ID NO: 439535 - DNA, 19 bp, Homo sapiens
  siRNA target sequence for MGC52022 (NM_198563.1,330-348).
catccactttgcaaatgta

SEQ ID NO: 439536 - DNA, 19 bp, Homo sapiens
  siRNA target sequence for MGC52022 (NM_198563.1,380-398).
gttcactgtacctcatcaa

SEQ ID NO: 439537 - DNA, 19 bp, Homo sapiens
  siRNA target sequence for MGC52022 (NM_198563.1,489-507).
cctgcgcttcggcgaatat

SEQ ID NO: 439538 - DNA, 19 bp, Homo sapiens
  siRNA target sequence for MGC52022 (NM_198563.1,492-510).
gcgcttcggcgaatatgga

SEQ ID NO: 439539 - DNA, 19 bp, Homo sapiens
  siRNA target sequence for MGC52022 (NM_198563.1,538-556).
gggcagtgcgctctttaca

SEQ ID NO: 439540 - DNA, 19 bp, Homo sapiens
  siRNA target sequence for MGC52022 (NM_198563.1,539-557).
ggcagtgcgctctttacat

SEQ ID NO: 439541 - DNA, 19 bp, Homo sapiens
  siRNA target sequence for MGC52022 (NM_198563.1,558-576).
cgtgatcatgatttttgaa

SEQ ID NO: 439542 - DNA, 19 bp, Homo sapiens
  siRNA target sequence for MGC52022 (NM_198563.1,591-609).
catcgtcctcctaatactt

SEQ ID NO: 439543 - DNA, 19 bp, Homo sapiens
  siRNA target sequence for MGC52022 (NM_198563.1,627-645).
cctgttgaatcccattgaa

SEQ ID NO: 439544 - DNA, 19 bp, Homo sapiens
  siRNA target sequence for MGC52022 (NM_198563.1,628-646).
ctgttgaatcccattgaaa

SEQ ID NO: 439545 - DNA, 19 bp, Homo sapiens
  siRNA target sequence for MGC52022 (NM_198563.1,675-693).
gctgatcgtccccttcttt

SEQ ID NO: 439546 - DNA, 19 bp, Homo sapiens
  siRNA target sequence for MGC52022 (NM_198563.1,713-731).
gggtagtggacaatttcct

SEQ ID NO: 439547 - DNA, 19 bp, Homo sapiens
  siRNA target sequence for MGC52022 (NM_198563.1,749-767).
cgaaagctaagctagaaga

SEQ ID NO: 439548 - DNA, 19 bp, Homo sapiens
  siRNA target sequence for FLJ44290 (NM_198564.1,248-266).
gtccatctcccagaaaaca

SEQ ID NO: 439549 - DNA, 19 bp, Homo sapiens
  siRNA target sequence for FLJ44290 (NM_198564.1,287-305).
caaagtaagctgctaaaat

SEQ ID NO: 439550 - DNA, 19 bp, Homo sapiens
  siRNA target sequence for FLJ44290 (NM_198564.1,331-349).
gaaaattaatcagttagta

SEQ ID NO: 439551 - DNA, 19 bp, Homo sapiens
  siRNA target sequence for FLJ44290 (NM_198564.1,414-432).
ctgattatcctcaaactat

SEQ ID NO: 439552 - DNA, 19 bp, Homo sapiens
  siRNA target sequence for FLJ44290 (NM_198564.1,425-443).
caaactatgaccagtgaaa

SEQ ID NO: 439553 - DNA, 19 bp, Homo sapiens
  siRNA target sequence for FLJ44290 (NM_198564.1,478-496).
gcaatgtgtagaaagtagt

SEQ ID NO: 439554 - DNA, 19 bp, Homo sapiens
  siRNA target sequence for FLJ44290 (NM_198564.1,492-510).
gtagtcctttagtacctat

SEQ ID NO: 439555 - DNA, 19 bp, Homo sapiens
  siRNA target sequence for FLJ44290 (NM_198564.1,540-558).
ggctgatacctgagtcttt

SEQ ID NO: 439556 - DNA, 19 bp, Homo sapiens
  siRNA target sequence for FLJ44290 (NM_198564.1,623-641).
gaaaacagcatgaagagat

SEQ ID NO: 439557 - DNA, 19 bp, Homo sapiens
  siRNA target sequence for FLJ44290 (NM_198564.1,649-667).
gcagagcgttcttgtgaaa

SEQ ID NO: 439558 - DNA, 19 bp, Homo sapiens
  siRNA target sequence for FLJ44290 (NM_198564.1,714-732).
ctcctgtaggcctagatta

SEQ ID NO: 439559 - DNA, 19 bp, Homo sapiens
  siRNA target sequence for FLJ44290 (NM_198564.1,719-737).
gtaggcctagattattcta

SEQ ID NO: 439560 - DNA, 19 bp, Homo sapiens
  siRNA target sequence for FLJ44290 (NM_198564.1,724-742).
cctagattattctaatcct

SEQ ID NO: 439561 - DNA, 19 bp, Homo sapiens
  siRNA target sequence for FLJ44290 (NM_198564.1,753-771).
gctatgtgcaggcaagaaa

SEQ ID NO: 439562 - DNA, 19 bp, Homo sapiens
  siRNA target sequence for FLJ44290 (NM_198564.1,754-772).
ctatgtgcaggcaagaaat

SEQ ID NO: 439563 - DNA, 19 bp, Homo sapiens
  siRNA target sequence for FLJ44290 (NM_198564.1,804-822).
caactatgaaaatgttact

SEQ ID NO: 439564 - DNA, 19 bp, Homo sapiens
  siRNA target sequence for FLJ44290 (NM_198564.1,821-839).
ctggaccttggttatacaa

SEQ ID NO: 439565 - DNA, 19 bp, Homo sapiens
  siRNA target sequence for FLJ44290 (NM_198564.1,826-844).
ccttggttatacaacattt

SEQ ID NO: 439566 - DNA, 19 bp, Homo sapiens
  siRNA target sequence for FLJ44290 (NM_198564.1,862-880).
ggacttcacaggaattaga

SEQ ID NO: 439567 - DNA, 19 bp, Homo sapiens
  siRNA target sequence for FLJ44290 (NM_198564.1,881-899).
gctaaaggtccaattgact

SEQ ID NO: 439568 - DNA, 19 bp, Homo sapiens
  siRNA target sequence for FLJ44290 (NM_198564.1,887-905).
ggtccaattgactgtgaat

SEQ ID NO: 439569 - DNA, 19 bp, Homo sapiens
  siRNA target sequence for FLJ44290 (NM_198564.1,891-909).
caattgactgtgaatcact

SEQ ID NO: 439570 - DNA, 19 bp, Homo sapiens
  siRNA target sequence for FLJ44290 (NM_198564.1,917-935).
gatctatcaatacaaacta

SEQ ID NO: 439571 - DNA, 19 bp, Homo sapiens
  siRNA target sequence for FLJ44290 (NM_198564.1,936-954).
gaaacgcagaagagaagat

SEQ ID NO: 439572 - DNA, 19 bp, Homo sapiens
  siRNA target sequence for FLJ44290 (NM_198564.1,952-970).
gataatgaatacatggtat

SEQ ID NO: 439573 - DNA, 19 bp, Homo sapiens
  siRNA target sequence for FLJ44290 (NM_198564.1,963-981).
catggtatccaaaggttat

SEQ ID NO: 439574 - DNA, 19 bp, Homo sapiens
  siRNA target sequence for FLJ44290 (NM_198564.1,1003-1021).
ggcactagaaggtgttaaa

SEQ ID NO: 439575 - DNA, 19 bp, Homo sapiens
  siRNA target sequence for FLJ44290 (NM_198564.1,1052-1070).
gtttccacacttatgtcaa

SEQ ID NO: 439576 - DNA, 19 bp, Homo sapiens
  siRNA target sequence for FLJ44290 (NM_198564.1,1056-1074).
ccacacttatgtcaaatca

SEQ ID NO: 439577 - DNA, 19 bp, Homo sapiens
  siRNA target sequence for FLJ44290 (NM_198564.1,1073-1091).
cagctaaaggatctattaa

SEQ ID NO: 439578 - DNA, 19 bp, Homo sapiens
  siRNA target sequence for FLJ44290 (NM_198564.1,1076-1094).
ctaaaggatctattaagga

SEQ ID NO: 439579 - DNA, 19 bp, Homo sapiens
  siRNA target sequence for FLJ44290 (NM_198564.1,1120-1138).
ctttgacccaaaagatcaa

SEQ ID NO: 439580 - DNA, 19 bp, Homo sapiens
  siRNA target sequence for FLJ44290 (NM_198564.1,1144-1162).
gctgccaatatttaagata

SEQ ID NO: 439581 - DNA, 19 bp, Homo sapiens
  siRNA target sequence for FLJ44290 (NM_198564.1,1200-1218).
ctacctttcaagatttgga

SEQ ID NO: 439582 - DNA, 19 bp, Homo sapiens
  siRNA target sequence for FLJ44290 (NM_198564.1,1231-1249).
gagtttggtggaacgaata

SEQ ID NO: 439583 - DNA, 19 bp, Homo sapiens
  siRNA target sequence for FLJ44290 (NM_198564.1,1288-1306).
gctatcaggaacttcaaca

SEQ ID NO: 439584 - DNA, 19 bp, Homo sapiens
  siRNA target sequence for FLJ44290 (NM_198564.1,1296-1314).
gaacttcaacaccagtaaa

SEQ ID NO: 439585 - DNA, 19 bp, Homo sapiens
  siRNA target sequence for FLJ44290 (NM_198564.1,1331-1349).
cctgaacacgtgttacact

SEQ ID NO: 439586 - DNA, 19 bp, Homo sapiens
  siRNA target sequence for FLJ44290 (NM_198564.1,1342-1360).
gttacactgggctgttgat

SEQ ID NO: 439587 - DNA, 19 bp, Homo sapiens
  siRNA target sequence for FLJ44290 (NM_198564.1,1374-1392).
cagtacatcggaacttaga

SEQ ID NO: 439588 - DNA, 19 bp, Homo sapiens
  siRNA target sequence for FLJ44290 (NM_198564.1,1391-1409).
gaaggtgcaagaaagcatt

SEQ ID NO: 439589 - DNA, 19 bp, Homo sapiens
  siRNA target sequence for FLJ44290 (NM_198564.1,1395-1413).
gtgcaagaaagcattatga

SEQ ID NO: 439590 - DNA, 19 bp, Homo sapiens
  siRNA target sequence for FLJ44290 (NM_198564.1,1397-1415).
gcaagaaagcattatgaga

SEQ ID NO: 439591 - DNA, 19 bp, Homo sapiens
  siRNA target sequence for FLJ44290 (NM_198564.1,1414-1432).
gacatatgttgaaaaatat

SEQ ID NO: 439592 - DNA, 19 bp, Homo sapiens
  siRNA target sequence for FLJ44290 (NM_198564.1,1449-1467).
ggactgcagttgagaatat

SEQ ID NO: 439593 - DNA, 19 bp, Homo sapiens
  siRNA target sequence for FLJ44290 (NM_198564.1,1450-1468).
gactgcagttgagaatata

SEQ ID NO: 439594 - DNA, 19 bp, Homo sapiens
  siRNA target sequence for FLJ44290 (NM_198564.1,1487-1505).
gatcatacttttgatgaat

SEQ ID NO: 439595 - DNA, 19 bp, Homo sapiens
  siRNA target sequence for UNQ3030 (NM_198565.1,1192-1210).
gcctgatgacgcttcacat

SEQ ID NO: 439596 - DNA, 19 bp, Homo sapiens
  siRNA target sequence for UNQ3030 (NM_198565.1,1193-1211).
cctgatgacgcttcacatt

SEQ ID NO: 439597 - DNA, 19 bp, Homo sapiens
  siRNA target sequence for UNQ3030 (NM_198565.1,1362-1380).
ggcctcttcgccaatgcta

SEQ ID NO: 439598 - DNA, 19 bp, Homo sapiens
  siRNA target sequence for UNQ3030 (NM_198565.1,1407-1425).
cacaatcagatctcacttt

SEQ ID NO: 439599 - DNA, 19 bp, Homo sapiens
  siRNA target sequence for UNQ3030 (NM_198565.1,1409-1427).
caatcagatctcactttgt

SEQ ID NO: 439600 - DNA, 19 bp, Homo sapiens
  siRNA target sequence for UNQ3030 (NM_198565.1,1459-1477).
cccctagctgtgtggattt

SEQ ID NO: 439601 - DNA, 19 bp, Homo sapiens
  siRNA target sequence for UNQ3030 (NM_198565.1,1461-1479).
cctagctgtgtggatttca

SEQ ID NO: 439602 - DNA, 19 bp, Homo sapiens
  siRNA target sequence for UNQ3030 (NM_198565.1,1535-1553).
gccagactgcccattccaa

SEQ ID NO: 439603 - DNA, 19 bp, Homo sapiens
  siRNA target sequence for UNQ3030 (NM_198565.1,1558-1576).
cctccctgacctacttaga

SEQ ID NO: 439604 - DNA, 19 bp, Homo sapiens
  siRNA target sequence for UNQ3030 (NM_198565.1,1712-1730).
gaatctcagggacttagat

SEQ ID NO: 439605 - DNA, 19 bp, Homo sapiens
  siRNA target sequence for UNQ3030 (NM_198565.1,1728-1746).
gatctgtcggggaattgct

SEQ ID NO: 439606 - DNA, 19 bp, Homo sapiens
  siRNA target sequence for UNQ3030 (NM_198565.1,1789-1807).
ccctggatctccgtagaaa

SEQ ID NO: 439607 - DNA, 19 bp, Homo sapiens
  siRNA target sequence for UNQ3030 (NM_198565.1,1791-1809).
ctggatctccgtagaaact

SEQ ID NO: 439608 - DNA, 19 bp, Homo sapiens
  siRNA target sequence for UNQ3030 (NM_198565.1,1868-1886).
catctacctcagtcagaat

SEQ ID NO: 439609 - DNA, 19 bp, Homo sapiens
  siRNA target sequence for UNQ3030 (NM_198565.1,1874-1892).
cctcagtcagaatccatat

SEQ ID NO: 439610 - DNA, 19 bp, Homo sapiens
  siRNA target sequence for UNQ3030 (NM_198565.1,2109-2127).
gtcatcgtcctcactttta

SEQ ID NO: 439611 - DNA, 19 bp, Homo sapiens
  siRNA target sequence for FLJ32363 (NM_198566.1,332-350).
gcgaatgatactttatgaa

SEQ ID NO: 439612 - DNA, 19 bp, Homo sapiens
  siRNA target sequence for FLJ32363 (NM_198566.1,381-399).
ggttccacattgcaacttt

SEQ ID NO: 439613 - DNA, 19 bp, Homo sapiens
  siRNA target sequence for FLJ32363 (NM_198566.1,519-537).
ctacagcgagccctagatt

SEQ ID NO: 439614 - DNA, 19 bp, Homo sapiens
  siRNA target sequence for FLJ32363 (NM_198566.1,524-542).
gcgagccctagattttcga

SEQ ID NO: 439615 - DNA, 19 bp, Homo sapiens
  siRNA target sequence for FLJ32363 (NM_198566.1,525-543).
cgagccctagattttcgaa

SEQ ID NO: 439616 - DNA, 19 bp, Homo sapiens
  siRNA target sequence for FLJ32363 (NM_198566.1,530-548).
cctagattttcgaaactct

SEQ ID NO: 439617 - DNA, 19 bp, Homo sapiens
  siRNA target sequence for FLJ32363 (NM_198566.1,531-549).
ctagattttcgaaactctt

SEQ ID NO: 439618 - DNA, 19 bp, Homo sapiens
  siRNA target sequence for FLJ32363 (NM_198566.1,552-570).
gctacttgcccttttttat

SEQ ID NO: 439619 - DNA, 19 bp, Homo sapiens
  siRNA target sequence for FLJ32363 (NM_198566.1,602-620).
gcatatcttcattgacata

SEQ ID NO: 439620 - DNA, 19 bp, Homo sapiens
  siRNA target sequence for FLJ32363 (NM_198566.1,651-669).
gatggtaccatgatatata

SEQ ID NO: 439621 - DNA, 19 bp, Homo sapiens
  siRNA target sequence for FLJ32363 (NM_198566.1,674-692).
gagtggcattgtgaagata

SEQ ID NO: 439622 - DNA, 19 bp, Homo sapiens
  siRNA target sequence for FLJ32363 (NM_198566.1,678-696).
ggcattgtgaagataacat

SEQ ID NO: 439623 - DNA, 19 bp, Homo sapiens
  siRNA target sequence for FLJ32363 (NM_198566.1,686-704).
gaagataacatctttagat

SEQ ID NO: 439624 - DNA, 19 bp, Homo sapiens
  siRNA target sequence for FLJ32363 (NM_198566.1,697-715).
ctttagatggtcatgcata

SEQ ID NO: 439625 - DNA, 19 bp, Homo sapiens
  siRNA target sequence for FLJ32363 (NM_198566.1,737-755).
gcatgaatttacagtacat

SEQ ID NO: 439626 - DNA, 19 bp, Homo sapiens
  siRNA target sequence for FLJ32363 (NM_198566.1,920-938).
gatcatgaaatccaaagaa

SEQ ID NO: 439627 - DNA, 19 bp, Homo sapiens
  siRNA target sequence for FLJ32363 (NM_198566.1,950-968).
gatgagttgtgtaaatgga

SEQ ID NO: 439628 - DNA, 19 bp, Homo sapiens
  siRNA target sequence for FLJ32363 (NM_198566.1,1003-1021).
caaagcacacatgtgtata

SEQ ID NO: 439629 - DNA, 19 bp, Homo sapiens
  siRNA target sequence for FLJ32363 (NM_198566.1,1082-1100).
gtctttagcacttcatttt

SEQ ID NO: 439630 - DNA, 19 bp, Homo sapiens
  siRNA target sequence for FLJ32363 (NM_198566.1,1137-1155).
catataactcagagtagat

SEQ ID NO: 439631 - DNA, 19 bp, Homo sapiens
  siRNA target sequence for FLJ32363 (NM_198566.1,1183-1201).
gaggaaaagtggtttctgt

SEQ ID NO: 439632 - DNA, 19 bp, Homo sapiens
  siRNA target sequence for FLJ32363 (NM_198566.1,1239-1257).
cacctacacaggtggaatt

SEQ ID NO: 439633 - DNA, 19 bp, Homo sapiens
  siRNA target sequence for FLJ32363 (NM_198566.1,1241-1259).
cctacacaggtggaatttt

SEQ ID NO: 439634 - DNA, 19 bp, Homo sapiens
  siRNA target sequence for FLJ32363 (NM_198566.1,1275-1293).
cagagacaatctgatgaat

SEQ ID NO: 439635 - DNA, 19 bp, Homo sapiens
  siRNA target sequence for FLJ32363 (NM_198566.1,1277-1295).
gagacaatctgatgaatat

SEQ ID NO: 439636 - DNA, 19 bp, Homo sapiens
  siRNA target sequence for FLJ32363 (NM_198566.1,1297-1315).
cctatcctgaactagtgaa

SEQ ID NO: 439637 - DNA, 19 bp, Homo sapiens
  siRNA target sequence for FLJ32363 (NM_198566.1,1305-1323).
gaactagtgaaaatggttt

SEQ ID NO: 439638 - DNA, 19 bp, Homo sapiens
  siRNA target sequence for FLJ32363 (NM_198566.1,1324-1342).
ggtacaaaggtgttacata

SEQ ID NO: 439639 - DNA, 19 bp, Homo sapiens
  siRNA target sequence for FLJ32363 (NM_198566.1,1325-1343).
gtacaaaggtgttacatat

SEQ ID NO: 439640 - DNA, 19 bp, Homo sapiens
  siRNA target sequence for FLJ32363 (NM_198566.1,1328-1346).
caaaggtgttacatataga

SEQ ID NO: 439641 - DNA, 19 bp, Homo sapiens
  siRNA target sequence for FLJ32363 (NM_198566.1,1347-1365).
cttacccatcaaaatatga

SEQ ID NO: 439642 - DNA, 19 bp, Homo sapiens
  siRNA target sequence for FLJ32363 (NM_198566.1,1438-1456).
cttattattctattcaaga

SEQ ID NO: 439643 - DNA, 19 bp, Homo sapiens
  siRNA target sequence for FLJ32363 (NM_198566.1,1476-1494).
gagaaaacttactcagtaa

SEQ ID NO: 439644 - DNA, 19 bp, Homo sapiens
  siRNA target sequence for FLJ32363 (NM_198566.1,1531-1549).
ctgtcggttctctaattaa

SEQ ID NO: 439645 - DNA, 19 bp, Homo sapiens
  siRNA target sequence for FLJ32363 (NM_198566.1,1569-1587).
caacattgtgtgaagatga

SEQ ID NO: 439646 - DNA, 19 bp, Homo sapiens
  siRNA target sequence for FLJ32363 (NM_198566.1,1602-1620).
cataactatcgtatatgct

SEQ ID NO: 439647 - DNA, 19 bp, Homo sapiens
  siRNA target sequence for FLJ32363 (NM_198566.1,1711-1729).
cctactctgatgacaaagt

SEQ ID NO: 439648 - DNA, 19 bp, Homo sapiens
  siRNA target sequence for FLJ32363 (NM_198566.1,1756-1774).
ctctaaccctaaattggaa

SEQ ID NO: 439649 - DNA, 19 bp, Homo sapiens
  siRNA target sequence for FLJ32363 (NM_198566.1,1758-1776).
ctaaccctaaattggaatt

SEQ ID NO: 439650 - DNA, 19 bp, Homo sapiens
  siRNA target sequence for FLJ32363 (NM_198566.1,1803-1821).
gtaaatcaaggtcttaact

SEQ ID NO: 439651 - DNA, 19 bp, Homo sapiens
  siRNA target sequence for FLJ32363 (NM_198566.1,1824-1842).
ggttggtgtaagttaactt

SEQ ID NO: 439652 - DNA, 19 bp, Homo sapiens
  siRNA target sequence for FLJ32363 (NM_198566.1,1825-1843).
gttggtgtaagttaacttt

SEQ ID NO: 439653 - DNA, 19 bp, Homo sapiens
  siRNA target sequence for FLJ32363 (NM_198566.1,1848-1866).
gatggacaagagcagttaa

SEQ ID NO: 439654 - DNA, 19 bp, Homo sapiens
  siRNA target sequence for FLJ32363 (NM_198566.1,1852-1870).
gacaagagcagttaattca

SEQ ID NO: 439655 - DNA, 19 bp, Homo sapiens
  siRNA target sequence for FLJ32363 (NM_198566.1,1878-1896).
caccctgaaccatatgaaa

SEQ ID NO: 439656 - DNA, 19 bp, Homo sapiens
  siRNA target sequence for FLJ32363 (NM_198566.1,1887-1905).
ccatatgaaagatatgtga

SEQ ID NO: 439657 - DNA, 19 bp, Homo sapiens
  siRNA target sequence for FLJ32363 (NM_198566.1,1959-1977).
cccactcattcgtcatctt

SEQ ID NO: 439658 - DNA, 19 bp, Homo sapiens
  siRNA target sequence for FLJ32363 (NM_198566.1,2001-2019).
gttgcttctgaacttgaaa

SEQ ID NO: 439659 - DNA, 19 bp, Homo sapiens
  siRNA target sequence for FLJ32363 (NM_198566.1,2008-2026).
ctgaacttgaaaagataca

SEQ ID NO: 439660 - DNA, 19 bp, Homo sapiens
  siRNA target sequence for FLJ32363 (NM_198566.1,2030-2048).
gtttaacttgctactagaa

SEQ ID NO: 439661 - DNA, 19 bp, Homo sapiens
  siRNA target sequence for FLJ32363 (NM_198566.1,2036-2054).
cttgctactagaaaatagt

SEQ ID NO: 439662 - DNA, 19 bp, Homo sapiens
  siRNA target sequence for FLJ32363 (NM_198566.1,2046-2064).
gaaaatagtggtatcctaa

SEQ ID NO: 439663 - DNA, 19 bp, Homo sapiens
  siRNA target sequence for FLJ32363 (NM_198566.1,2055-2073).
ggtatcctaaaccagattt

SEQ ID NO: 439664 - DNA, 19 bp, Homo sapiens
  siRNA target sequence for FLJ32363 (NM_198566.1,2132-2150).
cttgctaggagaagttaat

SEQ ID NO: 439665 - DNA, 19 bp, Homo sapiens
  siRNA target sequence for FLJ32363 (NM_198566.1,2198-2216).
cgatattgactgtcttcta

SEQ ID NO: 439666 - DNA, 19 bp, Homo sapiens
  siRNA target sequence for FLJ32363 (NM_198566.1,2207-2225).
ctgtcttctatcaaactct

SEQ ID NO: 439667 - DNA, 19 bp, Homo sapiens
  siRNA target sequence for FLJ44216 (NM_198567.1,481-499).
gggagcaggacttcattga

SEQ ID NO: 439668 - DNA, 19 bp, Homo sapiens
  siRNA target sequence for FLJ44216 (NM_198567.1,489-507).
gacttcattgacttaacta

SEQ ID NO: 439669 - DNA, 19 bp, Homo sapiens
  siRNA target sequence for FLJ44216 (NM_198567.1,534-552).
cgcagtggactgtatgtga

SEQ ID NO: 439670 - DNA, 19 bp, Homo sapiens
  siRNA target sequence for FLJ44216 (NM_198567.1,535-553).
gcagtggactgtatgtgat

SEQ ID NO: 439671 - DNA, 19 bp, Homo sapiens
  siRNA target sequence for FLJ44216 (NM_198567.1,2238-2256).
cacaatgtcagggatgtta

SEQ ID NO: 439672 - DNA, 19 bp, Homo sapiens
  siRNA target sequence for FLJ44216 (NM_198567.1,2264-2282).
gctggtcaaagcagtaact

SEQ ID NO: 439673 - DNA, 19 bp, Homo sapiens
  siRNA target sequence for FLJ44216 (NM_198567.1,2326-2344).
caggaacaggaatcttgaa

SEQ ID NO: 439674 - DNA, 19 bp, Homo sapiens
  siRNA target sequence for FLJ44216 (NM_198567.1,2458-2476).
ccacctgcagctccaataa

SEQ ID NO: 439675 - DNA, 19 bp, Homo sapiens
  siRNA target sequence for FLJ44216 (NM_198567.1,2461-2479).
cctgcagctccaataaaat

SEQ ID NO: 439676 - DNA, 19 bp, Homo sapiens
  siRNA target sequence for FLJ44216 (NM_198567.1,2526-2544).
cagagagaaatgttcttta

SEQ ID NO: 439677 - DNA, 19 bp, Homo sapiens
  siRNA target sequence for FLJ44216 (NM_198567.1,2567-2585).
gcgctgcaaagtgttagaa

SEQ ID NO: 439678 - DNA, 19 bp, Homo sapiens
  siRNA target sequence for FLJ44216 (NM_198567.1,2568-2586).
cgctgcaaagtgttagaaa

SEQ ID NO: 439679 - DNA, 19 bp, Homo sapiens
  siRNA target sequence for FLJ44216 (NM_198567.1,2643-2661).
gccctctactttctgaata

SEQ ID NO: 439680 - DNA, 19 bp, Homo sapiens
  siRNA target sequence for FLJ44216 (NM_198567.1,2644-2662).
ccctctactttctgaataa

SEQ ID NO: 439681 - DNA, 19 bp, Homo sapiens
  siRNA target sequence for FLJ44216 (NM_198567.1,2676-2694).
ctcaagtgtcagtcagata

SEQ ID NO: 439682 - DNA, 19 bp, Homo sapiens
  siRNA target sequence for FLJ44216 (NM_198567.1,2708-2726).
gacttgggacgaattggtt

SEQ ID NO: 439683 - DNA, 19 bp, Homo sapiens
  siRNA target sequence for FLJ44216 (NM_198567.1,2744-2762).
gctgtccagttatcaacat

SEQ ID NO: 439684 - DNA, 19 bp, Homo sapiens
  siRNA target sequence for FLJ44216 (NM_198567.1,2747-2765).
gtccagttatcaacatgtt

SEQ ID NO: 439685 - DNA, 19 bp, Homo sapiens
  siRNA target sequence for FLJ44216 (NM_198567.1,2750-2768).
cagttatcaacatgtttta

SEQ ID NO: 439686 - DNA, 19 bp, Homo sapiens
  siRNA target sequence for FLJ44216 (NM_198567.1,2795-2813).
cgaccgaaaggacttaata

SEQ ID NO: 439687 - DNA, 19 bp, Homo sapiens
  siRNA target sequence for FLJ44216 (NM_198567.1,2796-2814).
gaccgaaaggacttaataa

SEQ ID NO: 439688 - DNA, 19 bp, Homo sapiens
  siRNA target sequence for FLJ44216 (NM_198567.1,2960-2978).
gaagctcctgctcttctat

SEQ ID NO: 439689 - DNA, 19 bp, Homo sapiens
  siRNA target sequence for FLJ44216 (NM_198567.1,2997-3015).
gatgcagagccctttcaaa

SEQ ID NO: 439690 - DNA, 19 bp, Homo sapiens
  siRNA target sequence for GJB7 (NM_198568.1,371-389).
ctcctgagtggagtaaata

SEQ ID NO: 439691 - DNA, 19 bp, Homo sapiens
  siRNA target sequence for GJB7 (NM_198568.1,494-512).
gagtttgagtgcaacagta

SEQ ID NO: 439692 - DNA, 19 bp, Homo sapiens
  siRNA target sequence for GJB7 (NM_198568.1,513-531).
gacagcccggttgcaaaaa

SEQ ID NO: 439693 - DNA, 19 bp, Homo sapiens
  siRNA target sequence for GJB7 (NM_198568.1,570-588).
gactttgggccttacaact

SEQ ID NO: 439694 - DNA, 19 bp, Homo sapiens
  siRNA target sequence for GJB7 (NM_198568.1,579-597).
ccttacaactgataatggt

SEQ ID NO: 439695 - DNA, 19 bp, Homo sapiens
  siRNA target sequence for GJB7 (NM_198568.1,702-720).
gcctatggtacgcttatct

SEQ ID NO: 439696 - DNA, 19 bp, Homo sapiens
  siRNA target sequence for GJB7 (NM_198568.1,703-721).
cctatggtacgcttatctt

SEQ ID NO: 439697 - DNA, 19 bp, Homo sapiens
  siRNA target sequence for GJB7 (NM_198568.1,704-722).
ctatggtacgcttatctta

SEQ ID NO: 439698 - DNA, 19 bp, Homo sapiens
  siRNA target sequence for GJB7 (NM_198568.1,795-813).
gtgttccctaccttataaa

SEQ ID NO: 439699 - DNA, 19 bp, Homo sapiens
  siRNA target sequence for GJB7 (NM_198568.1,806-824).
cttataaagtgtgatttga

SEQ ID NO: 439700 - DNA, 19 bp, Homo sapiens
  siRNA target sequence for GJB7 (NM_198568.1,901-919).
cacctcatgcttgtgtatt

SEQ ID NO: 439701 - DNA, 19 bp, Homo sapiens
  siRNA target sequence for GJB7 (NM_198568.1,949-967).
ggttctcaagtgctttatt

SEQ ID NO: 439702 - DNA, 19 bp, Homo sapiens
  siRNA target sequence for GJB7 (NM_198568.1,953-971).
ctcaagtgctttattaagt

SEQ ID NO: 439703 - DNA, 19 bp, Homo sapiens
  siRNA target sequence for UNQ739 (NM_198570.1,1473-1491).
ccatatgccactgtactta

SEQ ID NO: 439704 - DNA, 19 bp, Homo sapiens
  siRNA target sequence for UNQ739 (NM_198570.1,1525-1543).
catgtgcacgagacatgaa

SEQ ID NO: 439705 - DNA, 19 bp, Homo sapiens
  siRNA target sequence for FLJ39237 (NM_198571.1,279-297).
gtccctaagccggaaaaga

SEQ ID NO: 439706 - DNA, 19 bp, Homo sapiens
  siRNA target sequence for FLJ39237 (NM_198571.1,282-300).
cctaagccggaaaagaaga

SEQ ID NO: 439707 - DNA, 19 bp, Homo sapiens
  siRNA target sequence for FLJ39237 (NM_198571.1,1113-1131).
ggcacttggcgctatctca

SEQ ID NO: 439708 - DNA, 19 bp, Homo sapiens
  siRNA target sequence for FLJ39237 (NM_198571.1,1114-1132).
gcacttggcgctatctcaa

SEQ ID NO: 439709 - DNA, 19 bp, Homo sapiens
  siRNA target sequence for FLJ39237 (NM_198571.1,1117-1135).
cttggcgctatctcaacat

SEQ ID NO: 439710 - DNA, 19 bp, Homo sapiens
  siRNA target sequence for FLJ39237 (NM_198571.1,1299-1317).
gagctggtgaagggttata

SEQ ID NO: 439711 - DNA, 19 bp, Homo sapiens
  siRNA target sequence for FLJ39237 (NM_198571.1,1304-1322).
ggtgaagggttatactgaa

SEQ ID NO: 439712 - DNA, 19 bp, Homo sapiens
  siRNA target sequence for MGC61633 (NM_198572.1,1167-1185).
cccccttcccgaatgcata

SEQ ID NO: 439713 - DNA, 19 bp, Homo sapiens
  siRNA target sequence for MGC61633 (NM_198572.1,1168-1186).
ccccttcccgaatgcataa

SEQ ID NO: 439714 - DNA, 19 bp, Homo sapiens
  siRNA target sequence for MGC61633 (NM_198572.1,1169-1187).
cccttcccgaatgcataat

SEQ ID NO: 439715 - DNA, 19 bp, Homo sapiens
  siRNA target sequence for MGC61633 (NM_198572.1,1170-1188).
ccttcccgaatgcataatt

SEQ ID NO: 439716 - DNA, 19 bp, Homo sapiens
  siRNA target sequence for MGC61633 (NM_198572.1,1575-1593).
ctcacacagcgctatgtga

SEQ ID NO: 439717 - DNA, 19 bp, Homo sapiens
  siRNA target sequence for UNQ470 (NM_198573.1,273-291).
gttgactctctctctgaat

SEQ ID NO: 439718 - DNA, 19 bp, Homo sapiens
  siRNA target sequence for FLJ46361 (NM_198577.1,1914-1932).
cccacacctccagattctt

SEQ ID NO: 439719 - DNA, 19 bp, Homo sapiens
  siRNA target sequence for FLJ46361 (NM_198577.1,2016-2034).
ccacagtatccagaaaact

SEQ ID NO: 439720 - DNA, 19 bp, Homo sapiens
  siRNA target sequence for FLJ46361 (NM_198577.1,2017-2035).
cacagtatccagaaaacta

SEQ ID NO: 439721 - DNA, 19 bp, Homo sapiens
  siRNA target sequence for FLJ46361 (NM_198577.1,2074-2092).
gtgcaaaatttcacataga

SEQ ID NO: 439722 - DNA, 19 bp, Homo sapiens
  siRNA target sequence for FLJ46361 (NM_198577.1,2087-2105).
catagaactcataattcca

SEQ ID NO: 439723 - DNA, 19 bp, Homo sapiens
  siRNA target sequence for FLJ46361 (NM_198577.1,2094-2112).
ctcataattccaagtttga

SEQ ID NO: 439724 - DNA, 19 bp, Homo sapiens
  siRNA target sequence for FLJ46361 (NM_198577.1,2104-2122).
caagtttgaaggttataca

SEQ ID NO: 439725 - DNA, 19 bp, Homo sapiens
  siRNA target sequence for SLC27A1 (NM_198580.1,574-592).
gcgctaaggccctgatctt

SEQ ID NO: 439726 - DNA, 19 bp, Homo sapiens
  siRNA target sequence for SLC27A1 (NM_198580.1,575-593).
cgctaaggccctgatcttt

SEQ ID NO: 439727 - DNA, 19 bp, Homo sapiens
  siRNA target sequence for SLC27A1 (NM_198580.1,639-657).
gggaaaagtttgatcaagt

SEQ ID NO: 439728 - DNA, 19 bp, Homo sapiens
  siRNA target sequence for SLC27A1 (NM_198580.1,766-784).
gcatggacgatcgtctttt

SEQ ID NO: 439729 - DNA, 19 bp, Homo sapiens
  siRNA target sequence for SLC27A1 (NM_198580.1,774-792).
gatcgtcttttctacatct

SEQ ID NO: 439730 - DNA, 19 bp, Homo sapiens
  siRNA target sequence for SLC27A1 (NM_198580.1,777-795).
cgtcttttctacatctaca

SEQ ID NO: 439731 - DNA, 19 bp, Homo sapiens
  siRNA target sequence for SLC27A1 (NM_198580.1,892-910).
cggctgacgtgctctatga

SEQ ID NO: 439732 - DNA, 19 bp, Homo sapiens
  siRNA target sequence for SLC27A1 (NM_198580.1,894-912).
gctgacgtgctctatgact

SEQ ID NO: 439733 - DNA, 19 bp, Homo sapiens
  siRNA target sequence for SLC27A1 (NM_198580.1,981-999).
gtcgtcctccgcaagaaat

SEQ ID NO: 439734 - DNA, 19 bp, Homo sapiens
  siRNA target sequence for SLC27A1 (NM_198580.1,984-1002).
gtcctccgcaagaaattct

SEQ ID NO: 439735 - DNA, 19 bp, Homo sapiens
  siRNA target sequence for SLC27A1 (NM_198580.1,1042-1060).
gcacggtggttcagtacat

SEQ ID NO: 439736 - DNA, 19 bp, Homo sapiens
  siRNA target sequence for SLC27A1 (NM_198580.1,1192-1210).
gccaaatcggggagttcta

SEQ ID NO: 439737 - DNA, 19 bp, Homo sapiens
  siRNA target sequence for SLC27A1 (NM_198580.1,1519-1537).
caggtgacgtgctagtgat

SEQ ID NO: 439738 - DNA, 19 bp, Homo sapiens
  siRNA target sequence for SLC27A1 (NM_198580.1,1927-1945).
gccactacctgcccttaaa

SEQ ID NO: 439739 - DNA, 19 bp, Homo sapiens
  siRNA target sequence for SLC27A1 (NM_198580.1,1928-1946).
ccactacctgcccttaaat

SEQ ID NO: 439740 - DNA, 19 bp, Homo sapiens
  siRNA target sequence for FLJ41410 (NM_198581.1,65-83).
gagttcagcaaggtattga

SEQ ID NO: 439741 - DNA, 19 bp, Homo sapiens
  siRNA target sequence for FLJ41410 (NM_198581.1,82-100).
gaacagagagttaaaagtt

SEQ ID NO: 439742 - DNA, 19 bp, Homo sapiens
  siRNA target sequence for FLJ41410 (NM_198581.1,118-136).
cgtggcttgccgaagaaaa

SEQ ID NO: 439743 - DNA, 19 bp, Homo sapiens
  siRNA target sequence for FLJ41410 (NM_198581.1,119-137).
gtggcttgccgaagaaaat

SEQ ID NO: 439744 - DNA, 19 bp, Homo sapiens
  siRNA target sequence for FLJ41410 (NM_198581.1,121-139).
ggcttgccgaagaaaatca

SEQ ID NO: 439745 - DNA, 19 bp, Homo sapiens
  siRNA target sequence for FLJ41410 (NM_198581.1,122-140).
gcttgccgaagaaaatcaa

SEQ ID NO: 439746 - DNA, 19 bp, Homo sapiens
  siRNA target sequence for FLJ41410 (NM_198581.1,127-145).
ccgaagaaaatcaaacgaa

SEQ ID NO: 439747 - DNA, 19 bp, Homo sapiens
  siRNA target sequence for FLJ41410 (NM_198581.1,151-169).
cgtgggggaagaaccaata

SEQ ID NO: 439748 - DNA, 19 bp, Homo sapiens
  siRNA target sequence for FLJ41410 (NM_198581.1,152-170).
gtgggggaagaaccaataa

SEQ ID NO: 439749 - DNA, 19 bp, Homo sapiens
  siRNA target sequence for FLJ41410 (NM_198581.1,164-182).
ccaataaagggcctaatgt

SEQ ID NO: 439750 - DNA, 19 bp, Homo sapiens
  siRNA target sequence for FLJ41410 (NM_198581.1,173-191).
ggcctaatgtgttttcagt

SEQ ID NO: 439751 - DNA, 19 bp, Homo sapiens
  siRNA target sequence for FLJ41410 (NM_198581.1,174-192).
gcctaatgtgttttcagta

SEQ ID NO: 439752 - DNA, 19 bp, Homo sapiens
  siRNA target sequence for FLJ41410 (NM_198581.1,201-219).
ctttcaagagtataataaa

SEQ ID NO: 439753 - DNA, 19 bp, Homo sapiens
  siRNA target sequence for FLJ41410 (NM_198581.1,420-438).
gaactgcatttatatgcat

SEQ ID NO: 439754 - DNA, 19 bp, Homo sapiens
  siRNA target sequence for FLJ41410 (NM_198581.1,694-712).
cctgaagacgattttcaga

SEQ ID NO: 439755 - DNA, 19 bp, Homo sapiens
  siRNA target sequence for FLJ41410 (NM_198581.1,775-793).
gtggatttagcgcataaaa

SEQ ID NO: 439756 - DNA, 19 bp, Homo sapiens
  siRNA target sequence for FLJ41410 (NM_198581.1,777-795).
ggatttagcgcataaaatt

SEQ ID NO: 439757 - DNA, 19 bp, Homo sapiens
  siRNA target sequence for FLJ41410 (NM_198581.1,801-819).
gaagccaccagcattttat

SEQ ID NO: 439758 - DNA, 19 bp, Homo sapiens
  siRNA target sequence for FLJ41410 (NM_198581.1,805-823).
ccaccagcattttatacca

SEQ ID NO: 439759 - DNA, 19 bp, Homo sapiens
  siRNA target sequence for FLJ41410 (NM_198581.1,830-848).
caccaccaggaccacaatt

SEQ ID NO: 439760 - DNA, 19 bp, Homo sapiens
  siRNA target sequence for FLJ41410 (NM_198581.1,862-880).
ccacaccctcaacatatct

SEQ ID NO: 439761 - DNA, 19 bp, Homo sapiens
  siRNA target sequence for FLJ41410 (NM_198581.1,863-881).
cacaccctcaacatatcta

SEQ ID NO: 439762 - DNA, 19 bp, Homo sapiens
  siRNA target sequence for FLJ41410 (NM_198581.1,865-883).
caccctcaacatatctata

SEQ ID NO: 439763 - DNA, 19 bp, Homo sapiens
  siRNA target sequence for FLJ41410 (NM_198581.1,867-885).
ccctcaacatatctatagt

SEQ ID NO: 439764 - DNA, 19 bp, Homo sapiens
  siRNA target sequence for FLJ41410 (NM_198581.1,868-886).
cctcaacatatctatagtt

SEQ ID NO: 439765 - DNA, 19 bp, Homo sapiens
  siRNA target sequence for FLJ41410 (NM_198581.1,899-917).
caggtcctggacctaacat

SEQ ID NO: 439766 - DNA, 19 bp, Homo sapiens
  siRNA target sequence for FLJ41410 (NM_198581.1,901-919).
ggtcctggacctaacatgt

SEQ ID NO: 439767 - DNA, 19 bp, Homo sapiens
  siRNA target sequence for FLJ41410 (NM_198581.1,1072-1090).
caaccagacacatctttga

SEQ ID NO: 439768 - DNA, 19 bp, Homo sapiens
  siRNA target sequence for FLJ41410 (NM_198581.1,1085-1103).
ctttgacaccaccaagtat

SEQ ID NO: 439769 - DNA, 19 bp, Homo sapiens
  siRNA target sequence for FLJ41410 (NM_198581.1,1133-1151).
caggacatgtgatgaaagt

SEQ ID NO: 439770 - DNA, 19 bp, Homo sapiens
  siRNA target sequence for FLJ41410 (NM_198581.1,1213-1231).
ctcaacaccaattatgagt

SEQ ID NO: 439771 - DNA, 19 bp, Homo sapiens
  siRNA target sequence for FLJ41410 (NM_198581.1,1242-1260).
cccagctgagttttacgat

SEQ ID NO: 439772 - DNA, 19 bp, Homo sapiens
  siRNA target sequence for FLJ41410 (NM_198581.1,1243-1261).
ccagctgagttttacgata

SEQ ID NO: 439773 - DNA, 19 bp, Homo sapiens
  siRNA target sequence for FLJ41410 (NM_198581.1,1249-1267).
gagttttacgataattact

SEQ ID NO: 439774 - DNA, 19 bp, Homo sapiens
  siRNA target sequence for FLJ41410 (NM_198581.1,1251-1269).
gttttacgataattactat

SEQ ID NO: 439775 - DNA, 19 bp, Homo sapiens
  siRNA target sequence for FLJ41410 (NM_198581.1,1266-1284).
ctatgcacagcattctata

SEQ ID NO: 439776 - DNA, 19 bp, Homo sapiens
  siRNA target sequence for FLJ41410 (NM_198581.1,1270-1288).
gcacagcattctatacata

SEQ ID NO: 439777 - DNA, 19 bp, Homo sapiens
  siRNA target sequence for FLJ41410 (NM_198581.1,1271-1289).
cacagcattctatacataa

SEQ ID NO: 439778 - DNA, 19 bp, Homo sapiens
  siRNA target sequence for FLJ41410 (NM_198581.1,1320-1338).
gatgtggcatggtgaattt

SEQ ID NO: 439779 - DNA, 19 bp, Homo sapiens
  siRNA target sequence for FLJ41410 (NM_198581.1,1460-1478).
gagctctttttgtaagact

SEQ ID NO: 439780 - DNA, 19 bp, Homo sapiens
  siRNA target sequence for FLJ41410 (NM_198581.1,1552-1570).
gatacagttaactggtatt

SEQ ID NO: 439781 - DNA, 19 bp, Homo sapiens
  siRNA target sequence for FLJ41410 (NM_198581.1,1563-1581).
ctggtattccagtagtgaa

SEQ ID NO: 439782 - DNA, 19 bp, Homo sapiens
  siRNA target sequence for FLJ41410 (NM_198581.1,1748-1766).
ctatcccaaggcaagacat

SEQ ID NO: 439783 - DNA, 19 bp, Homo sapiens
  siRNA target sequence for FLJ41410 (NM_198581.1,1752-1770).
cccaaggcaagacattaga

SEQ ID NO: 439784 - DNA, 19 bp, Homo sapiens
  siRNA target sequence for FLJ41410 (NM_198581.1,1753-1771).
ccaaggcaagacattagaa

SEQ ID NO: 439785 - DNA, 19 bp, Homo sapiens
  siRNA target sequence for FLJ41410 (NM_198581.1,1807-1825).
gcgtgggatcccaggaaat

SEQ ID NO: 439786 - DNA, 19 bp, Homo sapiens
  siRNA target sequence for FLJ41410 (NM_198581.1,1859-1877).
ctgttggtggagcaaagtt

SEQ ID NO: 439787 - DNA, 19 bp, Homo sapiens
  siRNA target sequence for FLJ41410 (NM_198581.1,1900-1918).
ggcactaatgtcaaacaca

SEQ ID NO: 439788 - DNA, 19 bp, Homo sapiens
  siRNA target sequence for FLJ41410 (NM_198581.1,1901-1919).
gcactaatgtcaaacacaa

SEQ ID NO: 439789 - DNA, 19 bp, Homo sapiens
  siRNA target sequence for FLJ41410 (NM_198581.1,1902-1920).
cactaatgtcaaacacaaa

SEQ ID NO: 439790 - DNA, 19 bp, Homo sapiens
  siRNA target sequence for FLJ41410 (NM_198581.1,2099-2117).
gggctcccgaagacttact

SEQ ID NO: 439791 - DNA, 19 bp, Homo sapiens
  siRNA target sequence for FLJ41410 (NM_198581.1,2100-2118).
ggctcccgaagacttactt

SEQ ID NO: 439792 - DNA, 19 bp, Homo sapiens
  siRNA target sequence for FLJ41410 (NM_198581.1,2116-2134).
cttccagtacctttaccta

SEQ ID NO: 439793 - DNA, 19 bp, Homo sapiens
  siRNA target sequence for FLJ41410 (NM_198581.1,2143-2161).
ccagtgtcttcaatcaatt

SEQ ID NO: 439794 - DNA, 19 bp, Homo sapiens
  siRNA target sequence for FLJ41410 (NM_198581.1,2144-2162).
cagtgtcttcaatcaattt

SEQ ID NO: 439795 - DNA, 19 bp, Homo sapiens
  siRNA target sequence for FLJ41410 (NM_198581.1,2193-2211).
gctaaatagattatggaat

SEQ ID NO: 439796 - DNA, 19 bp, Homo sapiens
  siRNA target sequence for FLJ41410 (NM_198581.1,2213-2231).
caaaaagtgatcttcatca

SEQ ID NO: 439797 - DNA, 19 bp, Homo sapiens
  siRNA target sequence for FLJ41410 (NM_198581.1,2237-2255).
cagtgtccattgatccaaa

SEQ ID NO: 439798 - DNA, 19 bp, Homo sapiens
  siRNA target sequence for FLJ41410 (NM_198581.1,2239-2257).
gtgtccattgatccaaaat

SEQ ID NO: 439799 - DNA, 19 bp, Homo sapiens
  siRNA target sequence for FLJ41410 (NM_198581.1,2241-2259).
gtccattgatccaaaatta

SEQ ID NO: 439800 - DNA, 19 bp, Homo sapiens
  siRNA target sequence for FLJ41410 (NM_198581.1,2244-2262).
cattgatccaaaattagca

SEQ ID NO: 439801 - DNA, 19 bp, Homo sapiens
  siRNA target sequence for FLJ41410 (NM_198581.1,2298-2316).
ctacctagaacaatttgga

SEQ ID NO: 439802 - DNA, 19 bp, Homo sapiens
  siRNA target sequence for FLJ41410 (NM_198581.1,2344-2362).
ggagatcctagactacaaa

SEQ ID NO: 439803 - DNA, 19 bp, Homo sapiens
  siRNA target sequence for FLJ41410 (NM_198581.1,2345-2363).
gagatcctagactacaaaa

SEQ ID NO: 439804 - DNA, 19 bp, Homo sapiens
  siRNA target sequence for FLJ41410 (NM_198581.1,2347-2365).
gatcctagactacaaaaaa

SEQ ID NO: 439805 - DNA, 19 bp, Homo sapiens
  siRNA target sequence for FLJ41410 (NM_198581.1,2405-2423).
ctcatcaagtggttatgaa

SEQ ID NO: 439806 - DNA, 19 bp, Homo sapiens
  siRNA target sequence for FLJ41410 (NM_198581.1,2415-2433).
ggttatgaaggattcacat

SEQ ID NO: 439807 - DNA, 19 bp, Homo sapiens
  siRNA target sequence for FLJ41410 (NM_198581.1,2450-2468).
ctcacttacccagatcaaa

SEQ ID NO: 439808 - DNA, 19 bp, Homo sapiens
  siRNA target sequence for FLJ41410 (NM_198581.1,2491-2509).
ggggcaggaactagcaatt

SEQ ID NO: 439809 - DNA, 19 bp, Homo sapiens
  siRNA target sequence for FLJ41410 (NM_198581.1,2528-2546).
ctccatatgcccctaaact

SEQ ID NO: 439810 - DNA, 19 bp, Homo sapiens
  siRNA target sequence for FLJ41410 (NM_198581.1,2571-2589).
gggaacttccacttcagtt

SEQ ID NO: 439811 - DNA, 19 bp, Homo sapiens
  siRNA target sequence for FLJ41410 (NM_198581.1,2587-2605).
gttcttagtggtattagtt

SEQ ID NO: 439812 - DNA, 19 bp, Homo sapiens
  siRNA target sequence for FLJ41410 (NM_198581.1,2646-2664).
gctagcaacagcttcttca

SEQ ID NO: 439813 - DNA, 19 bp, Homo sapiens
  siRNA target sequence for FLJ43374 (NM_198582.1,907-925).
gacttccccgactatcaca

SEQ ID NO: 439814 - DNA, 19 bp, Homo sapiens
  siRNA target sequence for MGC59868 (NM_198584.1,78-96).
cgagcacaacggtcctatt

SEQ ID NO: 439815 - DNA, 19 bp, Homo sapiens
  siRNA target sequence for MGC59868 (NM_198584.1,82-100).
cacaacggtcctattcact

SEQ ID NO: 439816 - DNA, 19 bp, Homo sapiens
  siRNA target sequence for MGC59868 (NM_198584.1,91-109).
cctattcactggaaggaat

SEQ ID NO: 439817 - DNA, 19 bp, Homo sapiens
  siRNA target sequence for MGC59868 (NM_198584.1,92-110).
ctattcactggaaggaatt

SEQ ID NO: 439818 - DNA, 19 bp, Homo sapiens
  siRNA target sequence for MGC59868 (NM_198584.1,133-151).
cagcaatctccaattgaga

SEQ ID NO: 439819 - DNA, 19 bp, Homo sapiens
  siRNA target sequence for MGC59868 (NM_198584.1,135-153).
gcaatctccaattgagatt

SEQ ID NO: 439820 - DNA, 19 bp, Homo sapiens
  siRNA target sequence for MGC59868 (NM_198584.1,182-200).
ccctccgaccacttagtat

SEQ ID NO: 439821 - DNA, 19 bp, Homo sapiens
  siRNA target sequence for MGC59868 (NM_198584.1,184-202).
ctccgaccacttagtatca

SEQ ID NO: 439822 - DNA, 19 bp, Homo sapiens
  siRNA target sequence for MGC59868 (NM_198584.1,187-205).
cgaccacttagtatcaagt

SEQ ID NO: 439823 - DNA, 19 bp, Homo sapiens
  siRNA target sequence for MGC59868 (NM_198584.1,188-206).
gaccacttagtatcaagta

SEQ ID NO: 439824 - DNA, 19 bp, Homo sapiens
  siRNA target sequence for MGC59868 (NM_198584.1,191-209).
cacttagtatcaagtatga

SEQ ID NO: 439825 - DNA, 19 bp, Homo sapiens
  siRNA target sequence for MGC59868 (NM_198584.1,208-226).
gacccaagctcagctaaaa

SEQ ID NO: 439826 - DNA, 19 bp, Homo sapiens
  siRNA target sequence for MGC59868 (NM_198584.1,212-230).
caagctcagctaaaatcat

SEQ ID NO: 439827 - DNA, 19 bp, Homo sapiens
  siRNA target sequence for MGC59868 (NM_198584.1,233-251).
gcaacagcggccattcctt

SEQ ID NO: 439828 - DNA, 19 bp, Homo sapiens
  siRNA target sequence for MGC59868 (NM_198584.1,237-255).
cagcggccattccttcaat

SEQ ID NO: 439829 - DNA, 19 bp, Homo sapiens
  siRNA target sequence for MGC59868 (NM_198584.1,365-383).
gctccgagcacatagtaga

SEQ ID NO: 439830 - DNA, 19 bp, Homo sapiens
  siRNA target sequence for MGC59868 (NM_198584.1,499-517).
cagattggtgaacctaatt

SEQ ID NO: 439831 - DNA, 19 bp, Homo sapiens
  siRNA target sequence for MGC59868 (NM_198584.1,531-549).
gattactgacactttggat

SEQ ID NO: 439832 - DNA, 19 bp, Homo sapiens
  siRNA target sequence for MGC59868 (NM_198584.1,571-589).
caaactcgattcacaaatt

SEQ ID NO: 439833 - DNA, 19 bp, Homo sapiens
  siRNA target sequence for MGC59868 (NM_198584.1,621-639).
ggactactggacatatcct

SEQ ID NO: 439834 - DNA, 19 bp, Homo sapiens
  siRNA target sequence for MGC59868 (NM_198584.1,713-731).
ctcaacagctggccaaatt

SEQ ID NO: 439835 - DNA, 19 bp, Homo sapiens
  siRNA target sequence for MGC59868 (NM_198584.1,820-838).
gtgagagcctctttccatt

SEQ ID NO: 439836 - DNA, 19 bp, Homo sapiens
  siRNA target sequence for UNQ2492 (NM_198585.1,246-264).
gcctcacggcactcattct

SEQ ID NO: 439837 - DNA, 19 bp, Homo sapiens
  siRNA target sequence for UNQ2492 (NM_198585.1,310-328).
gtttgggatcgtgtttgat

SEQ ID NO: 439838 - DNA, 19 bp, Homo sapiens
  siRNA target sequence for UNQ2492 (NM_198585.1,345-363).
cgtccctcttcctgtatca

SEQ ID NO: 439839 - DNA, 19 bp, Homo sapiens
  siRNA target sequence for UNQ2492 (NM_198585.1,434-452).
ggaatctcctcctacactt

SEQ ID NO: 439840 - DNA, 19 bp, Homo sapiens
  siRNA target sequence for UNQ2492 (NM_198585.1,442-460).
ctcctacacttctaatgct

SEQ ID NO: 439841 - DNA, 19 bp, Homo sapiens
  siRNA target sequence for UNQ2492 (NM_198585.1,638-656).
cggtctcccgtggactttt

SEQ ID NO: 439842 - DNA, 19 bp, Homo sapiens
  siRNA target sequence for UNQ2492 (NM_198585.1,699-717).
gttggatcactgtcaacta

SEQ ID NO: 439843 - DNA, 19 bp, Homo sapiens
  siRNA target sequence for UNQ2492 (NM_198585.1,725-743).
gggacgctggtcaagtact

SEQ ID NO: 439844 - DNA, 19 bp, Homo sapiens
  siRNA target sequence for UNQ2492 (NM_198585.1,856-874).
gagcacccaggccgatttt

SEQ ID NO: 439845 - DNA, 19 bp, Homo sapiens
  siRNA target sequence for UNQ2492 (NM_198585.1,1137-1155).
cagccatccgggaactttt

SEQ ID NO: 439846 - DNA, 19 bp, Homo sapiens
  siRNA target sequence for UNQ2492 (NM_198585.1,1145-1163).
cgggaacttttcaacttct

SEQ ID NO: 439847 - DNA, 19 bp, Homo sapiens
  siRNA target sequence for UNQ2492 (NM_198585.1,1281-1299).
gtgcctcaggcctgtacat

SEQ ID NO: 439848 - DNA, 19 bp, Homo sapiens
  siRNA target sequence for NHLRC1 (NM_198586.2,454-472).
gcaggaggcgtgtcaagat

SEQ ID NO: 439849 - DNA, 19 bp, Homo sapiens
  siRNA target sequence for NHLRC1 (NM_198586.2,460-478).
ggcgtgtcaagatttttga

SEQ ID NO: 439850 - DNA, 19 bp, Homo sapiens
  siRNA target sequence for NHLRC1 (NM_198586.2,487-505).
gaggatgcgcgcatcagtt

SEQ ID NO: 439851 - DNA, 19 bp, Homo sapiens
  siRNA target sequence for NHLRC1 (NM_198586.2,517-535).
gggacgctgcccaagacat

SEQ ID NO: 439852 - DNA, 19 bp, Homo sapiens
  siRNA target sequence for NHLRC1 (NM_198586.2,523-541).
ctgcccaagacattaggta

SEQ ID NO: 439853 - DNA, 19 bp, Homo sapiens
  siRNA target sequence for NHLRC1 (NM_198586.2,595-613).
gcgatcgctccatcaaagt

SEQ ID NO: 439854 - DNA, 19 bp, Homo sapiens
  siRNA target sequence for NHLRC1 (NM_198586.2,597-615).
gatcgctccatcaaagtgt

SEQ ID NO: 439855 - DNA, 19 bp, Homo sapiens
  siRNA target sequence for NHLRC1 (NM_198586.2,601-619).
gctccatcaaagtgtttga

SEQ ID NO: 439856 - DNA, 19 bp, Homo sapiens
  siRNA target sequence for NHLRC1 (NM_198586.2,602-620).
ctccatcaaagtgtttgat

SEQ ID NO: 439857 - DNA, 19 bp, Homo sapiens
  siRNA target sequence for NHLRC1 (NM_198586.2,604-622).
ccatcaaagtgtttgattt

SEQ ID NO: 439858 - DNA, 19 bp, Homo sapiens
  siRNA target sequence for NHLRC1 (NM_198586.2,642-660).
gtcattggaggccaattct

SEQ ID NO: 439859 - DNA, 19 bp, Homo sapiens
  siRNA target sequence for NHLRC1 (NM_198586.2,761-779).
ggtccttcggagaactgaa

SEQ ID NO: 439860 - DNA, 19 bp, Homo sapiens
  siRNA target sequence for NHLRC1 (NM_198586.2,926-944).
cggccaagtggataccttt

SEQ ID NO: 439861 - DNA, 19 bp, Homo sapiens
  siRNA target sequence for NHLRC1 (NM_198586.2,980-998).
ctccgctgtgacctttgat

SEQ ID NO: 439862 - DNA, 19 bp, Homo sapiens
  siRNA target sequence for NHLRC1 (NM_198586.2,982-1000).
ccgctgtgacctttgatca

SEQ ID NO: 439863 - DNA, 19 bp, Homo sapiens
  siRNA target sequence for NHLRC1 (NM_198586.2,1013-1031).
gattgttgcagatacatct

SEQ ID NO: 439864 - DNA, 19 bp, Homo sapiens
  siRNA target sequence for NHLRC1 (NM_198586.2,1038-1056).
gctatcctttgcttaggaa

SEQ ID NO: 439865 - DNA, 19 bp, Homo sapiens
  siRNA target sequence for NHLRC1 (NM_198586.2,1152-1170).
ctggacacagcatctcatt

SEQ ID NO: 439866 - DNA, 19 bp, Homo sapiens
  siRNA target sequence for NHLRC1 (NM_198586.2,1157-1175).
cacagcatctcattctata

SEQ ID NO: 439867 - DNA, 19 bp, Homo sapiens
  siRNA target sequence for NHLRC1 (NM_198586.2,1167-1185).
cattctataaaagtctata

SEQ ID NO: 439868 - DNA, 19 bp, Homo sapiens
  siRNA target sequence for RAB15 (NM_198686.1,121-139).
caccatcggtgttgacttt

SEQ ID NO: 439869 - DNA, 19 bp, Homo sapiens
  siRNA target sequence for RAB15 (NM_198686.1,219-237).
ccatcacaaagcagtacta

SEQ ID NO: 439870 - DNA, 19 bp, Homo sapiens
  siRNA target sequence for RAB15 (NM_198686.1,472-490).
ggcgtccagaagatcctta

SEQ ID NO: 439871 - DNA, 19 bp, Homo sapiens
  siRNA target sequence for RAB15 (NM_198686.1,474-492).
cgtccagaagatccttatt

SEQ ID NO: 439872 - DNA, 19 bp, Homo sapiens
  siRNA target sequence for RAB15 (NM_198686.1,561-579).
gtatggcatggacttctat

SEQ ID NO: 439873 - DNA, 19 bp, Homo sapiens
  siRNA target sequence for RAB15 (NM_198686.1,565-583).
ggcatggacttctatgaaa

SEQ ID NO: 439874 - DNA, 19 bp, Homo sapiens
  siRNA target sequence for RAB15 (NM_198686.1,570-588).
ggacttctatgaaacaagt

SEQ ID NO: 439875 - DNA, 19 bp, Homo sapiens
  siRNA target sequence for RAB15 (NM_198686.1,590-608).
cctgcaccaacctcaacat

SEQ ID NO: 439876 - DNA, 19 bp, Homo sapiens
  siRNA target sequence for RAB15 (NM_198686.1,593-611).
gcaccaacctcaacattaa

SEQ ID NO: 439877 - DNA, 19 bp, Homo sapiens
  siRNA target sequence for KRTAP18-8 (NM_198695.1,39-57).
gcaccaggacgtatgtgat

SEQ ID NO: 439878 - DNA, 19 bp, Homo sapiens
  siRNA target sequence for KRTAP18-8 (NM_198695.1,40-58).
caccaggacgtatgtgatt

SEQ ID NO: 439879 - DNA, 19 bp, Homo sapiens
  siRNA target sequence for KRTAP12-3 (NM_198697.1,224-242).
gctgcaggcccatcatata

SEQ ID NO: 439880 - DNA, 19 bp, Homo sapiens
  siRNA target sequence for KRTAP12-3 (NM_198697.1,225-243).
ctgcaggcccatcatatat

SEQ ID NO: 439881 - DNA, 19 bp, Homo sapiens
  siRNA target sequence for AMIGO3 (NM_198722.1,558-576).
gaggctgctcgatctatca

SEQ ID NO: 439882 - DNA, 19 bp, Homo sapiens
  siRNA target sequence for AMIGO3 (NM_198722.1,561-579).
gctgctcgatctatcatct

SEQ ID NO: 439883 - DNA, 19 bp, Homo sapiens
  siRNA target sequence for AMIGO3 (NM_198722.1,565-583).
ctcgatctatcatctaaca

SEQ ID NO: 439884 - DNA, 19 bp, Homo sapiens
  siRNA target sequence for AMIGO3 (NM_198722.1,1105-1123).
cggtccctgaggctttact

SEQ ID NO: 439885 - DNA, 19 bp, Homo sapiens
  siRNA target sequence for AMIGO3 (NM_198722.1,1575-1593).
ccacaagcacgtagtcttt

SEQ ID NO: 439886 - DNA, 19 bp, Homo sapiens
  siRNA target sequence for LOC375449 (NM_198828.1,399-417).
ctcctcgggctcagaaact

SEQ ID NO: 439887 - DNA, 19 bp, Homo sapiens
  siRNA target sequence for LOC375449 (NM_198828.1,634-652).
gaggagcttgaccacatat

SEQ ID NO: 439888 - DNA, 19 bp, Homo sapiens
  siRNA target sequence for LOC375449 (NM_198828.1,636-654).
ggagcttgaccacatatta

SEQ ID NO: 439889 - DNA, 19 bp, Homo sapiens
  siRNA target sequence for LOC375449 (NM_198828.1,936-954).
cagaagaggaagtttgata

SEQ ID NO: 439890 - DNA, 19 bp, Homo sapiens
  siRNA target sequence for LOC375449 (NM_198828.1,938-956).
gaagaggaagtttgataga

SEQ ID NO: 439891 - DNA, 19 bp, Homo sapiens
  siRNA target sequence for C9orf10OS (NM_198841.1,1548-1566).
ccatactcccggtgaaaaa

SEQ ID NO: 439892 - DNA, 19 bp, Homo sapiens
  siRNA target sequence for C9orf10OS (NM_198841.1,1622-1640).
ccaacactaagatcattct

SEQ ID NO: 439893 - DNA, 19 bp, Homo sapiens
  siRNA target sequence for ZPBP2 (NM_198844.1,181-199).
cctcacaggagacaaaata

SEQ ID NO: 439894 - DNA, 19 bp, Homo sapiens
  siRNA target sequence for ZPBP2 (NM_198844.1,235-253).
ctgtatggattttaagctt

SEQ ID NO: 439895 - DNA, 19 bp, Homo sapiens
  siRNA target sequence for ZPBP2 (NM_198844.1,269-287).
gtggaccccacctacttat

SEQ ID NO: 439896 - DNA, 19 bp, Homo sapiens
  siRNA target sequence for ZPBP2 (NM_198844.1,288-306).
ggattgggcctaatgaaaa

SEQ ID NO: 439897 - DNA, 19 bp, Homo sapiens
  siRNA target sequence for ZPBP2 (NM_198844.1,310-328).
gttaacaggaaataataga

SEQ ID NO: 439898 - DNA, 19 bp, Homo sapiens
  siRNA target sequence for ZPBP2 (NM_198844.1,394-412).
cacatgtactctttcttat

SEQ ID NO: 439899 - DNA, 19 bp, Homo sapiens
  siRNA target sequence for ZPBP2 (NM_198844.1,449-467).
gtcaaaaagagatatgact

SEQ ID NO: 439900 - DNA, 19 bp, Homo sapiens
  siRNA target sequence for ZPBP2 (NM_198844.1,480-498).
cctatcgggaacctgatta

SEQ ID NO: 439901 - DNA, 19 bp, Homo sapiens
  siRNA target sequence for ZPBP2 (NM_198844.1,481-499).
ctatcgggaacctgattat

SEQ ID NO: 439902 - DNA, 19 bp, Homo sapiens
  siRNA target sequence for ZPBP2 (NM_198844.1,491-509).
cctgattattcatatcaga

SEQ ID NO: 439903 - DNA, 19 bp, Homo sapiens
  siRNA target sequence for ZPBP2 (NM_198844.1,492-510).
ctgattattcatatcagat

SEQ ID NO: 439904 - DNA, 19 bp, Homo sapiens
  siRNA target sequence for ZPBP2 (NM_198844.1,506-524).
cagatggctgtacgtttta

SEQ ID NO: 439905 - DNA, 19 bp, Homo sapiens
  siRNA target sequence for ZPBP2 (NM_198844.1,534-552).
cttgtatagggagatacaa

SEQ ID NO: 439906 - DNA, 19 bp, Homo sapiens
  siRNA target sequence for ZPBP2 (NM_198844.1,537-555).
gtatagggagatacaatga

SEQ ID NO: 439907 - DNA, 19 bp, Homo sapiens
  siRNA target sequence for ZPBP2 (NM_198844.1,543-561).
ggagatacaatgatgtatt

SEQ ID NO: 439908 - DNA, 19 bp, Homo sapiens
  siRNA target sequence for ZPBP2 (NM_198844.1,617-635).
gtcatagagccatcatata

SEQ ID NO: 439909 - DNA, 19 bp, Homo sapiens
  siRNA target sequence for ZPBP2 (NM_198844.1,630-648).
catataaatgccattctgt

SEQ ID NO: 439910 - DNA, 19 bp, Homo sapiens
  siRNA target sequence for ZPBP2 (NM_198844.1,666-684).
gcctcatacatgagctatt

SEQ ID NO: 439911 - DNA, 19 bp, Homo sapiens
  siRNA target sequence for ZPBP2 (NM_198844.1,674-692).
catgagctatttatagcat

SEQ ID NO: 439912 - DNA, 19 bp, Homo sapiens
  siRNA target sequence for ZPBP2 (NM_198844.1,718-736).
gtggaaaggtgcttgcaat

SEQ ID NO: 439913 - DNA, 19 bp, Homo sapiens
  siRNA target sequence for ZPBP2 (NM_198844.1,748-766).
ctgtgaagataccactaat

SEQ ID NO: 439914 - DNA, 19 bp, Homo sapiens
  siRNA target sequence for ZPBP2 (NM_198844.1,750-768).
gtgaagataccactaatca

SEQ ID NO: 439915 - DNA, 19 bp, Homo sapiens
  siRNA target sequence for ZPBP2 (NM_198844.1,755-773).
gataccactaatcataata

SEQ ID NO: 439916 - DNA, 19 bp, Homo sapiens
  siRNA target sequence for ZPBP2 (NM_198844.1,778-796).
ccaggcaagagatcgaata

SEQ ID NO: 439917 - DNA, 19 bp, Homo sapiens
  siRNA target sequence for ZPBP2 (NM_198844.1,783-801).
caagagatcgaatagaaga

SEQ ID NO: 439918 - DNA, 19 bp, Homo sapiens
  siRNA target sequence for ZPBP2 (NM_198844.1,810-828).
ggagccaagcatatatttt

SEQ ID NO: 439919 - DNA, 19 bp, Homo sapiens
  siRNA target sequence for ZPBP2 (NM_198844.1,813-831).
gccaagcatatattttcta

SEQ ID NO: 439920 - DNA, 19 bp, Homo sapiens
  siRNA target sequence for ZPBP2 (NM_198844.1,849-867).
ctctaccagcaatgcattt

SEQ ID NO: 439921 - DNA, 19 bp, Homo sapiens
  siRNA target sequence for ZPBP2 (NM_198844.1,908-926).
cgaccaggctttggaaaaa

SEQ ID NO: 439922 - DNA, 19 bp, Homo sapiens
  siRNA target sequence for ZPBP2 (NM_198844.1,929-947).
gaacgtctacacagtaatt

SEQ ID NO: 439923 - DNA, 19 bp, Homo sapiens
  siRNA target sequence for ZPBP2 (NM_198844.1,1017-1035).
gcgtttccgtccttaccta

SEQ ID NO: 439924 - DNA, 19 bp, Homo sapiens
  siRNA target sequence for ZPBP2 (NM_198844.1,1018-1036).
cgtttccgtccttacctat

SEQ ID NO: 439925 - DNA, 19 bp, Homo sapiens
  siRNA target sequence for ZPBP2 (NM_198844.1,1027-1045).
ccttacctatggagctaaa

SEQ ID NO: 439926 - DNA, 19 bp, Homo sapiens
  siRNA target sequence for LOC283514 (NM_198849.1,369-387).
cacctgcggcagatccata

SEQ ID NO: 439927 - DNA, 19 bp, Homo sapiens
  siRNA target sequence for LOC283514 (NM_198849.1,451-469).
cggctgattggatcatcat

SEQ ID NO: 439928 - DNA, 19 bp, Homo sapiens
  siRNA target sequence for LOC284345 (NM_198850.1,289-307).
gctacgcctccgatagcta

SEQ ID NO: 439929 - DNA, 19 bp, Homo sapiens
  siRNA target sequence for LOC284345 (NM_198850.1,290-308).
ctacgcctccgatagctat

SEQ ID NO: 439930 - DNA, 19 bp, Homo sapiens
  siRNA target sequence for LOC348645 (NM_198851.1,593-611).
gcagcacgtgggtccaata

SEQ ID NO: 439931 - DNA, 19 bp, Homo sapiens
  siRNA target sequence for LOC348645 (NM_198851.1,597-615).
cacgtgggtccaatacaga

SEQ ID NO: 439932 - DNA, 19 bp, Homo sapiens
  siRNA target sequence for LOC348645 (NM_198851.1,939-957).
ccacctggggcgtgacaat

SEQ ID NO: 439933 - DNA, 19 bp, Homo sapiens
  siRNA target sequence for LOC348645 (NM_198851.1,943-961).
ctggggcgtgacaatgcat

SEQ ID NO: 439934 - DNA, 19 bp, Homo sapiens
  siRNA target sequence for LOC348645 (NM_198851.1,947-965).
ggcgtgacaatgcatttga

SEQ ID NO: 439935 - DNA, 19 bp, Homo sapiens
  siRNA target sequence for LOC348645 (NM_198851.1,948-966).
gcgtgacaatgcatttgat

SEQ ID NO: 439936 - DNA, 19 bp, Homo sapiens
  siRNA target sequence for LOC348645 (NM_198851.1,949-967).
cgtgacaatgcatttgatt

SEQ ID NO: 439937 - DNA, 19 bp, Homo sapiens
  siRNA target sequence for FLJ40411 (NM_198852.1,104-122).
gccgatttaaggtctcatt

SEQ ID NO: 439938 - DNA, 19 bp, Homo sapiens
  siRNA target sequence for FLJ40411 (NM_198852.1,105-123).
ccgatttaaggtctcattt

SEQ ID NO: 439939 - DNA, 19 bp, Homo sapiens
  siRNA target sequence for FLJ40411 (NM_198852.1,124-142).
ccaaaaataccaagtttct

SEQ ID NO: 439940 - DNA, 19 bp, Homo sapiens
  siRNA target sequence for FLJ40411 (NM_198852.1,310-328).
ctccaaaaatgggaataga

SEQ ID NO: 439941 - DNA, 19 bp, Homo sapiens
  siRNA target sequence for FLJ40411 (NM_198852.1,322-340).
gaatagaattagttcgaat

SEQ ID NO: 439942 - DNA, 19 bp, Homo sapiens
  siRNA target sequence for FLJ40411 (NM_198852.1,327-345).
gaattagttcgaataattt

SEQ ID NO: 439943 - DNA, 19 bp, Homo sapiens
  siRNA target sequence for FLJ40411 (NM_198852.1,333-351).
gttcgaataatttagagaa

SEQ ID NO: 439944 - DNA, 19 bp, Homo sapiens
  siRNA target sequence for FLJ40411 (NM_198852.1,377-395).
gaattctccatttctagat

SEQ ID NO: 439945 - DNA, 19 bp, Homo sapiens
  siRNA target sequence for FLJ40411 (NM_198852.1,453-471).
ccgaccagggtgtcaagaa

SEQ ID NO: 439946 - DNA, 19 bp, Homo sapiens
  siRNA target sequence for FLJ40411 (NM_198852.1,460-478).
gggtgtcaagaagaattgt

SEQ ID NO: 439947 - DNA, 19 bp, Homo sapiens
  siRNA target sequence for FLJ40411 (NM_198852.1,461-479).
ggtgtcaagaagaattgta

SEQ ID NO: 439948 - DNA, 19 bp, Homo sapiens
  siRNA target sequence for FLJ40411 (NM_198852.1,472-490).
gaattgtaagcagattgaa

SEQ ID NO: 439949 - DNA, 19 bp, Homo sapiens
  siRNA target sequence for FLJ40411 (NM_198852.1,507-525).
ctgatacacccgttcaatt

SEQ ID NO: 439950 - DNA, 19 bp, Homo sapiens
  siRNA target sequence for FLJ40411 (NM_198852.1,509-527).
gatacacccgttcaattca

SEQ ID NO: 439951 - DNA, 19 bp, Homo sapiens
  siRNA target sequence for FLJ40411 (NM_198852.1,521-539).
caattcatacctccaaata

SEQ ID NO: 439952 - DNA, 19 bp, Homo sapiens
  siRNA target sequence for FLJ40411 (NM_198852.1,599-617).
gtcagcagagaccatatta

SEQ ID NO: 439953 - DNA, 19 bp, Homo sapiens
  siRNA target sequence for FLJ40411 (NM_198852.1,601-619).
cagcagagaccatattata

SEQ ID NO: 439954 - DNA, 19 bp, Homo sapiens
  siRNA target sequence for FLJ40411 (NM_198852.1,604-622).
cagagaccatattataaat

SEQ ID NO: 439955 - DNA, 19 bp, Homo sapiens
  siRNA target sequence for FLJ40411 (NM_198852.1,624-642).
cacttcaggaagtgagaat

SEQ ID NO: 439956 - DNA, 19 bp, Homo sapiens
  siRNA target sequence for FLJ40411 (NM_198852.1,665-683).
ggcttatctattactacta

SEQ ID NO: 439957 - DNA, 19 bp, Homo sapiens
  siRNA target sequence for PRICKLE2 (NM_198859.1,622-640).
ccatcagcaaactcatgtt

SEQ ID NO: 439958 - DNA, 19 bp, Homo sapiens
  siRNA target sequence for PRICKLE2 (NM_198859.1,623-641).
catcagcaaactcatgttt

SEQ ID NO: 439959 - DNA, 19 bp, Homo sapiens
  siRNA target sequence for PRICKLE2 (NM_198859.1,729-747).
caggtacaccagtactata

SEQ ID NO: 439960 - DNA, 19 bp, Homo sapiens
  siRNA target sequence for PRICKLE2 (NM_198859.1,732-750).
gtacaccagtactatagct

SEQ ID NO: 439961 - DNA, 19 bp, Homo sapiens
  siRNA target sequence for PRICKLE2 (NM_198859.1,762-780).
gagaaagtcccttatgtca

SEQ ID NO: 439962 - DNA, 19 bp, Homo sapiens
  siRNA target sequence for PRICKLE2 (NM_198859.1,824-842).
gctgccgccacatgacaat

SEQ ID NO: 439963 - DNA, 19 bp, Homo sapiens
  siRNA target sequence for PRICKLE2 (NM_198859.1,959-977).
catgacaggagctatttgt

SEQ ID NO: 439964 - DNA, 19 bp, Homo sapiens
  siRNA target sequence for PRICKLE2 (NM_198859.1,1094-1112).
ggtggatctgatctacttt

SEQ ID NO: 439965 - DNA, 19 bp, Homo sapiens
  siRNA target sequence for PRICKLE2 (NM_198859.1,1116-1134).
caagatgggaagatatact

SEQ ID NO: 439966 - DNA, 19 bp, Homo sapiens
  siRNA target sequence for PRICKLE2 (NM_198859.1,1279-1297).
gccagcgctacatcatgaa

SEQ ID NO: 439967 - DNA, 19 bp, Homo sapiens
  siRNA target sequence for PRICKLE2 (NM_198859.1,1299-1317).
gagggaagaccctactgtt

SEQ ID NO: 439968 - DNA, 19 bp, Homo sapiens
  siRNA target sequence for PRICKLE2 (NM_198859.1,1360-1378).
gtgcccaacatataggtat

SEQ ID NO: 439969 - DNA, 19 bp, Homo sapiens
  siRNA target sequence for PRICKLE2 (NM_198859.1,1375-1393).
gtatcgaccaaggtcaaat

SEQ ID NO: 439970 - DNA, 19 bp, Homo sapiens
  siRNA target sequence for PRICKLE2 (NM_198859.1,1419-1437).
gccactgagacctgtttct

SEQ ID NO: 439971 - DNA, 19 bp, Homo sapiens
  siRNA target sequence for PRICKLE2 (NM_198859.1,1482-1500).
ccgaagcagggccagatat

SEQ ID NO: 439972 - DNA, 19 bp, Homo sapiens
  siRNA target sequence for PRICKLE2 (NM_198859.1,1524-1542).
ggggaagaccccaatggtt

SEQ ID NO: 439973 - DNA, 19 bp, Homo sapiens
  siRNA target sequence for PRICKLE2 (NM_198859.1,1656-1674).
cagctgcaagtgagttcta

SEQ ID NO: 439974 - DNA, 19 bp, Homo sapiens
  siRNA target sequence for PRICKLE2 (NM_198859.1,1776-1794).
cgggaagagccctaccatt

SEQ ID NO: 439975 - DNA, 19 bp, Homo sapiens
  siRNA target sequence for PRICKLE2 (NM_198859.1,1777-1795).
gggaagagccctaccatta

SEQ ID NO: 439976 - DNA, 19 bp, Homo sapiens
  siRNA target sequence for PRICKLE2 (NM_198859.1,1778-1796).
ggaagagccctaccattat

SEQ ID NO: 439977 - DNA, 19 bp, Homo sapiens
  siRNA target sequence for PRICKLE2 (NM_198859.1,1848-1866).
cagtgcaacatcagaactt

SEQ ID NO: 439978 - DNA, 19 bp, Homo sapiens
  siRNA target sequence for PRICKLE2 (NM_198859.1,2025-2043).
caggagagctacagtgata

SEQ ID NO: 439979 - DNA, 19 bp, Homo sapiens
  siRNA target sequence for PRICKLE2 (NM_198859.1,2028-2046).
gagagctacagtgatatgt

SEQ ID NO: 439980 - DNA, 19 bp, Homo sapiens
  siRNA target sequence for PRICKLE2 (NM_198859.1,2030-2048).
gagctacagtgatatgtct

SEQ ID NO: 439981 - DNA, 19 bp, Homo sapiens
  siRNA target sequence for PRICKLE2 (NM_198859.1,2225-2243).
cctggccctgtctaatgca

SEQ ID NO: 439982 - DNA, 19 bp, Homo sapiens
  siRNA target sequence for PRICKLE2 (NM_198859.1,2226-2244).
ctggccctgtctaatgcaa

SEQ ID NO: 439983 - DNA, 19 bp, Homo sapiens
  siRNA target sequence for PRICKLE2 (NM_198859.1,2280-2298).
gagcacctatcccgatttt

SEQ ID NO: 439984 - DNA, 19 bp, Homo sapiens
  siRNA target sequence for PRICKLE2 (NM_198859.1,2350-2368).
gcaacatgggcactcttaa

SEQ ID NO: 439985 - DNA, 19 bp, Homo sapiens
  siRNA target sequence for PRICKLE2 (NM_198859.1,2594-2612).
ccggagaagagctacttca

SEQ ID NO: 439986 - DNA, 19 bp, Homo sapiens
  siRNA target sequence for PRICKLE2 (NM_198859.1,2705-2723).
ggccatctcccggttaaaa

SEQ ID NO: 439987 - DNA, 19 bp, Homo sapiens
  siRNA target sequence for PRICKLE2 (NM_198859.1,2708-2726).
catctcccggttaaaagat

SEQ ID NO: 439988 - DNA, 19 bp, Homo sapiens
  siRNA target sequence for PRICKLE2 (NM_198859.1,2740-2758).
gagccagggaggactatga

SEQ ID NO: 439989 - DNA, 19 bp, Homo sapiens
  siRNA target sequence for PRICKLE2 (NM_198859.1,2887-2905).
cctacttcgccgagtatga

SEQ ID NO: 439990 - DNA, 19 bp, Homo sapiens
  siRNA target sequence for PRICKLE2 (NM_198859.1,2888-2906).
ctacttcgccgagtatgat

SEQ ID NO: 439991 - DNA, 19 bp, Homo sapiens
  siRNA target sequence for PRICKLE2 (NM_198859.1,2942-2960).
caacgagggctatttccta

SEQ ID NO: 439992 - DNA, 19 bp, Homo sapiens
  siRNA target sequence for PRICKLE2 (NM_198859.1,3032-3050).
ctacggcctccccaaatct

SEQ ID NO: 439993 - DNA, 19 bp, Homo sapiens
  siRNA target sequence for PRICKLE2 (NM_198859.1,3044-3062).
caaatcttccacattaggt

SEQ ID NO: 439994 - DNA, 19 bp, Homo sapiens
  siRNA target sequence for MRGD (NM_198923.1,109-127).
gtggagtcagccctaaact

SEQ ID NO: 439995 - DNA, 19 bp, Homo sapiens
  siRNA target sequence for MRGD (NM_198923.1,111-129).
ggagtcagccctaaactat

SEQ ID NO: 439996 - DNA, 19 bp, Homo sapiens
  siRNA target sequence for MRGD (NM_198923.1,112-130).
gagtcagccctaaactatt

SEQ ID NO: 439997 - DNA, 19 bp, Homo sapiens
  siRNA target sequence for MRGD (NM_198923.1,631-649).
ctcatcatgggggtcttaa

SEQ ID NO: 439998 - DNA, 19 bp, Homo sapiens
  siRNA target sequence for MRGD (NM_198923.1,1016-1034).
ccgtgggcaccaatgagat

SEQ ID NO: 439999 - DNA, 19 bp, Homo sapiens
  siRNA target sequence for MGC45477 (NM_198924.1,174-192).
cggagcgcacaaaacatga

SEQ ID NO: 440000 - DNA, 19 bp, Homo sapiens
  siRNA target sequence for MGC45477 (NM_198924.1,175-193).
ggagcgcacaaaacatgat

SEQ ID NO: 440001 - DNA, 19 bp, Homo sapiens
  siRNA target sequence for ALS2CR17 (NM_198945.1,152-170).
ctcttttgcctcagctaat

SEQ ID NO: 440002 - DNA, 19 bp, Homo sapiens
  siRNA target sequence for ALS2CR17 (NM_198945.1,154-172).
cttttgcctcagctaatgt

SEQ ID NO: 440003 - DNA, 19 bp, Homo sapiens
  siRNA target sequence for ALS2CR17 (NM_198945.1,198-216).
gatagacactctttagact

SEQ ID NO: 440004 - DNA, 19 bp, Homo sapiens
  siRNA target sequence for ALS2CR17 (NM_198945.1,202-220).
gacactctttagactcaaa

SEQ ID NO: 440005 - DNA, 19 bp, Homo sapiens
  siRNA target sequence for ALS2CR17 (NM_198945.1,204-222).
cactctttagactcaaaca

SEQ ID NO: 440006 - DNA, 19 bp, Homo sapiens
  siRNA target sequence for ALS2CR17 (NM_198945.1,206-224).
ctctttagactcaaacaca

SEQ ID NO: 440007 - DNA, 19 bp, Homo sapiens
  siRNA target sequence for ALS2CR17 (NM_198945.1,213-231).
gactcaaacacaccattat

SEQ ID NO: 440008 - DNA, 19 bp, Homo sapiens
  siRNA target sequence for ALS2CR17 (NM_198945.1,282-300).
gaggaattctggcatagta

SEQ ID NO: 440009 - DNA, 19 bp, Homo sapiens
  siRNA target sequence for ALS2CR17 (NM_198945.1,294-312).
catagtaacccttcacatt

SEQ ID NO: 440010 - DNA, 19 bp, Homo sapiens
  siRNA target sequence for ALS2CR17 (NM_198945.1,302-320).
cccttcacatttgagttta

SEQ ID NO: 440011 - DNA, 19 bp, Homo sapiens
  siRNA target sequence for ALS2CR17 (NM_198945.1,397-415).
ccccagtagagtctactaa

SEQ ID NO: 440012 - DNA, 19 bp, Homo sapiens
  siRNA target sequence for ALS2CR17 (NM_198945.1,398-416).
cccagtagagtctactaaa

SEQ ID NO: 440013 - DNA, 19 bp, Homo sapiens
  siRNA target sequence for ALS2CR17 (NM_198945.1,402-420).
gtagagtctactaaatcgt

SEQ ID NO: 440014 - DNA, 19 bp, Homo sapiens
  siRNA target sequence for ALS2CR17 (NM_198945.1,405-423).
gagtctactaaatcgtttt

SEQ ID NO: 440015 - DNA, 19 bp, Homo sapiens
  siRNA target sequence for ALS2CR17 (NM_198945.1,407-425).
gtctactaaatcgttttct

SEQ ID NO: 440016 - DNA, 19 bp, Homo sapiens
  siRNA target sequence for ALS2CR17 (NM_198945.1,409-427).
ctactaaatcgttttctgt

SEQ ID NO: 440017 - DNA, 19 bp, Homo sapiens
  siRNA target sequence for ALS2CR17 (NM_198945.1,439-457).
gagaaagcagcatcacaaa

SEQ ID NO: 440018 - DNA, 19 bp, Homo sapiens
  siRNA target sequence for ALS2CR17 (NM_198945.1,516-534).
gagcttcttcaattactga

SEQ ID NO: 440019 - DNA, 19 bp, Homo sapiens
  siRNA target sequence for ALS2CR17 (NM_198945.1,525-543).
caattactgacacatattt

SEQ ID NO: 440020 - DNA, 19 bp, Homo sapiens
  siRNA target sequence for ALS2CR17 (NM_198945.1,609-627).
gtgttttcagcactaagta

SEQ ID NO: 440021 - DNA, 19 bp, Homo sapiens
  siRNA target sequence for ALS2CR17 (NM_198945.1,651-669).
cttcgaccatcagatgaaa

SEQ ID NO: 440022 - DNA, 19 bp, Homo sapiens
  siRNA target sequence for ALS2CR17 (NM_198945.1,675-693).
ctaactttgctacaaaaga

SEQ ID NO: 440023 - DNA, 19 bp, Homo sapiens
  siRNA target sequence for ALS2CR17 (NM_198945.1,761-779).
ccgactagtgctgatcata

SEQ ID NO: 440024 - DNA, 19 bp, Homo sapiens
  siRNA target sequence for ALS2CR17 (NM_198945.1,794-812).
gtcagagggactagttaat

SEQ ID NO: 440025 - DNA, 19 bp, Homo sapiens
  siRNA target sequence for ALS2CR17 (NM_198945.1,798-816).
gagggactagttaattcaa

SEQ ID NO: 440026 - DNA, 19 bp, Homo sapiens
  siRNA target sequence for ALS2CR17 (NM_198945.1,821-839).
gtggaccgagaagctttta

SEQ ID NO: 440027 - DNA, 19 bp, Homo sapiens
  siRNA target sequence for ALS2CR17 (NM_198945.1,823-841).
ggaccgagaagcttttaga

SEQ ID NO: 440028 - DNA, 19 bp, Homo sapiens
  siRNA target sequence for ALS2CR17 (NM_198945.1,889-907).
gtccagtatgggtaaaact

SEQ ID NO: 440029 - DNA, 19 bp, Homo sapiens
  siRNA target sequence for ALS2CR17 (NM_198945.1,926-944).
gttgcttctaggattcatt

SEQ ID NO: 440030 - DNA, 19 bp, Homo sapiens
  siRNA target sequence for ALS2CR17 (NM_198945.1,974-992).
ggcatcagctaagctaaat

SEQ ID NO: 440031 - DNA, 19 bp, Homo sapiens
  siRNA target sequence for ALS2CR17 (NM_198945.1,975-993).
gcatcagctaagctaaata

SEQ ID NO: 440032 - DNA, 19 bp, Homo sapiens
  siRNA target sequence for ALS2CR17 (NM_198945.1,1059-1077).
catgttctaagtcaatcaa

SEQ ID NO: 440033 - DNA, 19 bp, Homo sapiens
  siRNA target sequence for ALS2CR17 (NM_198945.1,1122-1140).
cgtaccctggtttccaaaa

SEQ ID NO: 440034 - DNA, 19 bp, Homo sapiens
  siRNA target sequence for ALS2CR17 (NM_198945.1,1123-1141).
gtaccctggtttccaaaat

SEQ ID NO: 440035 - DNA, 19 bp, Homo sapiens
  siRNA target sequence for ALS2CR17 (NM_198945.1,1163-1181).
cttgcacctaccttcttta

SEQ ID NO: 440036 - DNA, 19 bp, Homo sapiens
  siRNA target sequence for ALS2CR17 (NM_198945.1,1166-1184).
gcacctaccttctttacct

SEQ ID NO: 440037 - DNA, 19 bp, Homo sapiens
  siRNA target sequence for ALS2CR17 (NM_198945.1,1286-1304).
gcagtatgaagctcataca

SEQ ID NO: 440038 - DNA, 19 bp, Homo sapiens
  siRNA target sequence for ALS2CR17 (NM_198945.1,1329-1347).
gcactttattggaaggatt

SEQ ID NO: 440039 - DNA, 19 bp, Homo sapiens
  siRNA target sequence for ALS2CR17 (NM_198945.1,1332-1350).
ctttattggaaggattgtt

SEQ ID NO: 440040 - DNA, 19 bp, Homo sapiens
  siRNA target sequence for ALS2CR17 (NM_198945.1,1348-1366).
gttatgaagctttaatggt

SEQ ID NO: 440041 - DNA, 19 bp, Homo sapiens
  siRNA target sequence for ALS2CR17 (NM_198945.1,1364-1382).
ggtaaatatgcataaacga

SEQ ID NO: 440042 - DNA, 19 bp, Homo sapiens
  siRNA target sequence for ALS2CR17 (NM_198945.1,1422-1440).
ctgtttgtggagccattta

SEQ ID NO: 440043 - DNA, 19 bp, Homo sapiens
  siRNA target sequence for ALS2CR17 (NM_198945.1,1428-1446).
gtggagccatttaatcgaa

SEQ ID NO: 440044 - DNA, 19 bp, Homo sapiens
  siRNA target sequence for ALS2CR17 (NM_198945.1,1430-1448).
ggagccatttaatcgaaaa

SEQ ID NO: 440045 - DNA, 19 bp, Homo sapiens
  siRNA target sequence for ALS2CR17 (NM_198945.1,1458-1476).
gagaacctgaggtataata

SEQ ID NO: 440046 - DNA, 19 bp, Homo sapiens
  siRNA target sequence for ALS2CR17 (NM_198945.1,1460-1478).
gaacctgaggtataataat

SEQ ID NO: 440047 - DNA, 19 bp, Homo sapiens
  siRNA target sequence for ALS2CR17 (NM_198945.1,1500-1518).
caacagttagccactctta

SEQ ID NO: 440048 - DNA, 19 bp, Homo sapiens
  siRNA target sequence for ALS2CR17 (NM_198945.1,1567-1585).
gggctaaaaggaaacagaa

SEQ ID NO: 440049 - DNA, 19 bp, Homo sapiens
  siRNA target sequence for ALS2CR17 (NM_198945.1,1595-1613).
ctggaagctagctaatgta

SEQ ID NO: 440050 - DNA, 19 bp, Homo sapiens
  siRNA target sequence for ALS2CR17 (NM_198945.1,1597-1615).
ggaagctagctaatgtaga

SEQ ID NO: 440051 - DNA, 19 bp, Homo sapiens
  siRNA target sequence for ALS2CR17 (NM_198945.1,1601-1619).
gctagctaatgtagagaat

SEQ ID NO: 440052 - DNA, 19 bp, Homo sapiens
  siRNA target sequence for ALS2CR17 (NM_198945.1,1624-1642).
cccgcatgagacttaagct

SEQ ID NO: 440053 - DNA, 19 bp, Homo sapiens
  siRNA target sequence for ALS2CR17 (NM_198945.1,1640-1658).
gctggtaccgaattataat

SEQ ID NO: 440054 - DNA, 19 bp, Homo sapiens
  siRNA target sequence for ALS2CR17 (NM_198945.1,1641-1659).
ctggtaccgaattataatt

SEQ ID NO: 440055 - DNA, 19 bp, Homo sapiens
  siRNA target sequence for ALS2CR17 (NM_198945.1,1677-1695).
gctagtgccttgagagata

SEQ ID NO: 440056 - DNA, 19 bp, Homo sapiens
  siRNA target sequence for ALS2CR17 (NM_198945.1,1678-1696).
ctagtgccttgagagataa

SEQ ID NO: 440057 - DNA, 19 bp, Homo sapiens
  siRNA target sequence for ALS2CR17 (NM_198945.1,1681-1699).
gtgccttgagagataatct

SEQ ID NO: 440058 - DNA, 19 bp, Homo sapiens
  siRNA target sequence for ALS2CR17 (NM_198945.1,1723-1741).
ccagtgatacattgctttt

SEQ ID NO: 440059 - DNA, 19 bp, Homo sapiens
  siRNA target sequence for ALS2CR17 (NM_198945.1,1726-1744).
gtgatacattgcttttgga

SEQ ID NO: 440060 - DNA, 19 bp, Homo sapiens
  siRNA target sequence for ALS2CR17 (NM_198945.1,1743-1761).
gaagtagtgaaacaagtaa

SEQ ID NO: 440061 - DNA, 19 bp, Homo sapiens
  siRNA target sequence for ALS2CR17 (NM_198945.1,1751-1769).
gaaacaagtaaaagttagt

SEQ ID NO: 440062 - DNA, 19 bp, Homo sapiens
  siRNA target sequence for ALS2CR17 (NM_198945.1,1770-1788).
gatatggtggaggataaat

SEQ ID NO: 440063 - DNA, 19 bp, Homo sapiens
  siRNA target sequence for ALS2CR17 (NM_198945.1,1805-1823).
ggatataacagctagagta

SEQ ID NO: 440064 - DNA, 19 bp, Homo sapiens
  siRNA target sequence for ALS2CR17 (NM_198945.1,1806-1824).
gatataacagctagagtaa

SEQ ID NO: 440065 - DNA, 19 bp, Homo sapiens
  siRNA target sequence for ALS2CR17 (NM_198945.1,1911-1929).
cctggcagattagaaatca

SEQ ID NO: 440066 - DNA, 19 bp, Homo sapiens
  siRNA target sequence for ALS2CR17 (NM_198945.1,1978-1996).
gagtaggctttgatttcaa

SEQ ID NO: 440067 - DNA, 19 bp, Homo sapiens
  siRNA target sequence for ALS2CR17 (NM_198945.1,1994-2012).
caagtggcctcattctcaa

SEQ ID NO: 440068 - DNA, 19 bp, Homo sapiens
  siRNA target sequence for ALS2CR17 (NM_198945.1,2000-2018).
gcctcattctcaaattcga

SEQ ID NO: 440069 - DNA, 19 bp, Homo sapiens
  siRNA target sequence for ALS2CR17 (NM_198945.1,2025-2043).
catctccggcgttacaatt

SEQ ID NO: 440070 - DNA, 19 bp, Homo sapiens
  siRNA target sequence for ALS2CR17 (NM_198945.1,2028-2046).
ctccggcgttacaatttaa

SEQ ID NO: 440071 - DNA, 19 bp, Homo sapiens
  siRNA target sequence for ALS2CR17 (NM_198945.1,2030-2048).
ccggcgttacaatttaaga

SEQ ID NO: 440072 - DNA, 19 bp, Homo sapiens
  siRNA target sequence for ALS2CR17 (NM_198945.1,2031-2049).
cggcgttacaatttaagaa

SEQ ID NO: 440073 - DNA, 19 bp, Homo sapiens
  siRNA target sequence for ALS2CR17 (NM_198945.1,2056-2074).
cccttgagatttttcatgt

SEQ ID NO: 440074 - DNA, 19 bp, Homo sapiens
  siRNA target sequence for ALS2CR17 (NM_198945.1,2073-2091).
gttgaccaatccaactact

SEQ ID NO: 440075 - DNA, 19 bp, Homo sapiens
  siRNA target sequence for ALS2CR17 (NM_198945.1,2079-2097).
caatccaactactttctca

SEQ ID NO: 440076 - DNA, 19 bp, Homo sapiens
  siRNA target sequence for ALS2CR17 (NM_198945.1,2153-2171).
cccaaatagttattatgga

SEQ ID NO: 440077 - DNA, 19 bp, Homo sapiens
  siRNA target sequence for ALS2CR17 (NM_198945.1,2179-2197).
caccacaggagttattcaa

SEQ ID NO: 440078 - DNA, 19 bp, Homo sapiens
  siRNA target sequence for ALS2CR17 (NM_198945.1,2222-2240).
ggtaaacagagagatatca

SEQ ID NO: 440079 - DNA, 19 bp, Homo sapiens
  siRNA target sequence for ALS2CR17 (NM_198945.1,2317-2335).
cctggattttacaagatta

SEQ ID NO: 440080 - DNA, 19 bp, Homo sapiens
  siRNA target sequence for ALS2CR17 (NM_198945.1,2318-2336).
ctggattttacaagattat

SEQ ID NO: 440081 - DNA, 19 bp, Homo sapiens
  siRNA target sequence for ALS2CR17 (NM_198945.1,2321-2339).
gattttacaagattatact

SEQ ID NO: 440082 - DNA, 19 bp, Homo sapiens
  siRNA target sequence for ALS2CR17 (NM_198945.1,2341-2359).
cggaagagttggaccttaa

SEQ ID NO: 440083 - DNA, 19 bp, Homo sapiens
  siRNA target sequence for ALS2CR17 (NM_198945.1,2343-2361).
gaagagttggaccttaata

SEQ ID NO: 440084 - DNA, 19 bp, Homo sapiens
  siRNA target sequence for ALS2CR17 (NM_198945.1,2367-2385).
gctgtatttcgagatcttt

SEQ ID NO: 440085 - DNA, 19 bp, Homo sapiens
  siRNA target sequence for ALS2CR17 (NM_198945.1,2462-2480).
gggaactattgataagttt

SEQ ID NO: 440086 - DNA, 19 bp, Homo sapiens
  siRNA target sequence for ALS2CR17 (NM_198945.1,2487-2505).
ggtactcactattcaaatt

SEQ ID NO: 440087 - DNA, 19 bp, Homo sapiens
  siRNA target sequence for ALS2CR17 (NM_198945.1,2511-2529).
ggggtcatgcactatctca

SEQ ID NO: 440088 - DNA, 19 bp, Homo sapiens
  siRNA target sequence for ALS2CR17 (NM_198945.1,2512-2530).
gggtcatgcactatctcat

SEQ ID NO: 440089 - DNA, 19 bp, Homo sapiens
  siRNA target sequence for ALS2CR17 (NM_198945.1,2513-2531).
ggtcatgcactatctcatt

SEQ ID NO: 440090 - DNA, 19 bp, Homo sapiens
  siRNA target sequence for ALS2CR17 (NM_198945.1,2522-2540).
ctatctcattcgtgtagaa

SEQ ID NO: 440091 - DNA, 19 bp, Homo sapiens
  siRNA target sequence for ALS2CR17 (NM_198945.1,2568-2586).
cagagtggaaggtttgact

SEQ ID NO: 440092 - DNA, 19 bp, Homo sapiens
  siRNA target sequence for ALS2CR17 (NM_198945.1,2628-2646).
gctcttatggataatccat

SEQ ID NO: 440093 - DNA, 19 bp, Homo sapiens
  siRNA target sequence for ALS2CR17 (NM_198945.1,2629-2647).
ctcttatggataatccata

SEQ ID NO: 440094 - DNA, 19 bp, Homo sapiens
  siRNA target sequence for ALS2CR17 (NM_198945.1,2636-2654).
ggataatccatatgatgtt

SEQ ID NO: 440095 - DNA, 19 bp, Homo sapiens
  siRNA target sequence for ALS2CR17 (NM_198945.1,2717-2735).
cttgggtcgtctacagatt

SEQ ID NO: 440096 - DNA, 19 bp, Homo sapiens
  siRNA target sequence for ALS2CR17 (NM_198945.1,2721-2739).
ggtcgtctacagatttcca

SEQ ID NO: 440097 - DNA, 19 bp, Homo sapiens
  siRNA target sequence for ALS2CR17 (NM_198945.1,2722-2740).
gtcgtctacagatttccaa

SEQ ID NO: 440098 - DNA, 19 bp, Homo sapiens
  siRNA target sequence for ALS2CR17 (NM_198945.1,2763-2781).
ctcccgaaatgggctaaat

SEQ ID NO: 440099 - DNA, 19 bp, Homo sapiens
  siRNA target sequence for ALS2CR17 (NM_198945.1,2765-2783).
cccgaaatgggctaaatca

SEQ ID NO: 440100 - DNA, 19 bp, Homo sapiens
  siRNA target sequence for ALS2CR17 (NM_198945.1,2784-2802).
gctgaagatttcatctata

SEQ ID NO: 440101 - DNA, 19 bp, Homo sapiens
  siRNA target sequence for ALS2CR17 (NM_198945.1,2819-2837).
ggagtctgaatatgtttca

SEQ ID NO: 440102 - DNA, 19 bp, Homo sapiens
  siRNA target sequence for ALS2CR17 (NM_198945.1,2901-2919).
gaggcactcaacgttttct

SEQ ID NO: 440103 - DNA, 19 bp, Homo sapiens
  siRNA target sequence for ALS2CR17 (NM_198945.1,2903-2921).
ggcactcaacgttttctat

SEQ ID NO: 440104 - DNA, 19 bp, Homo sapiens
  siRNA target sequence for ALS2CR17 (NM_198945.1,2904-2922).
gcactcaacgttttctatt

SEQ ID NO: 440105 - DNA, 19 bp, Homo sapiens
  siRNA target sequence for ALS2CR17 (NM_198945.1,2905-2923).
cactcaacgttttctatta

SEQ ID NO: 440106 - DNA, 19 bp, Homo sapiens
  siRNA target sequence for ALS2CR17 (NM_198945.1,2945-2963).
ggatctggatgccttaaca

SEQ ID NO: 440107 - DNA, 19 bp, Homo sapiens
  siRNA target sequence for ALS2CR17 (NM_198945.1,2982-3000).
gccttagaagggatgatta

SEQ ID NO: 440108 - DNA, 19 bp, Homo sapiens
  siRNA target sequence for ALS2CR17 (NM_198945.1,2984-3002).
cttagaagggatgattaat

SEQ ID NO: 440109 - DNA, 19 bp, Homo sapiens
  siRNA target sequence for ALS2CR17 (NM_198945.1,2988-3006).
gaagggatgattaataatt

SEQ ID NO: 440110 - DNA, 19 bp, Homo sapiens
  siRNA target sequence for ALS2CR17 (NM_198945.1,3011-3029).
gcaaacaccctgtcaatta

SEQ ID NO: 440111 - DNA, 19 bp, Homo sapiens
  siRNA target sequence for ALS2CR17 (NM_198945.1,3100-3118).
ctaattactttacattcat

SEQ ID NO: 440112 - DNA, 19 bp, Homo sapiens
  siRNA target sequence for ALS2CR17 (NM_198945.1,3180-3198).
gggctagagatcacttcta

SEQ ID NO: 440113 - DNA, 19 bp, Homo sapiens
  siRNA target sequence for ALS2CR17 (NM_198945.1,3181-3199).
ggctagagatcacttctaa

SEQ ID NO: 440114 - DNA, 19 bp, Homo sapiens
  siRNA target sequence for ALS2CR17 (NM_198945.1,3200-3218).
gctatttgtagtatcacat

SEQ ID NO: 440115 - DNA, 19 bp, Homo sapiens
  siRNA target sequence for ALS2CR17 (NM_198945.1,3243-3261).
ggatactgggataatagca

SEQ ID NO: 440116 - DNA, 19 bp, Homo sapiens
  siRNA target sequence for ALS2CR17 (NM_198945.1,3250-3268).
gggataatagcattcaagt

SEQ ID NO: 440117 - DNA, 19 bp, Homo sapiens
  siRNA target sequence for ALS2CR17 (NM_198945.1,3302-3320).
catcatccggcatatggat

SEQ ID NO: 440118 - DNA, 19 bp, Homo sapiens
  siRNA target sequence for ALS2CR17 (NM_198945.1,3305-3323).
catccggcatatggatatt

SEQ ID NO: 440119 - DNA, 19 bp, Homo sapiens
  siRNA target sequence for ALS2CR17 (NM_198945.1,3309-3327).
cggcatatggatattgtga

SEQ ID NO: 440120 - DNA, 19 bp, Homo sapiens
  siRNA target sequence for ALS2CR17 (NM_198945.1,3317-3335).
ggatattgtgacttgctta

SEQ ID NO: 440121 - DNA, 19 bp, Homo sapiens
  siRNA target sequence for ALS2CR17 (NM_198945.1,3326-3344).
gacttgcttagctacagat

SEQ ID NO: 440122 - DNA, 19 bp, Homo sapiens
  siRNA target sequence for ALS2CR17 (NM_198945.1,3328-3346).
cttgcttagctacagatta

SEQ ID NO: 440123 - DNA, 19 bp, Homo sapiens
  siRNA target sequence for ALS2CR17 (NM_198945.1,3332-3350).
cttagctacagattactgt

SEQ ID NO: 440124 - DNA, 19 bp, Homo sapiens
  siRNA target sequence for ALS2CR17 (NM_198945.1,3369-3387).
ggttccagagatactacat

SEQ ID NO: 440125 - DNA, 19 bp, Homo sapiens
  siRNA target sequence for ALS2CR17 (NM_198945.1,3428-3446).
gggcttagcatctaaacct

SEQ ID NO: 440126 - DNA, 19 bp, Homo sapiens
  siRNA target sequence for ALS2CR17 (NM_198945.1,3429-3447).
ggcttagcatctaaacctt

SEQ ID NO: 440127 - DNA, 19 bp, Homo sapiens
  siRNA target sequence for ALS2CR17 (NM_198945.1,3529-3547).
gggatggaacggtgattat

SEQ ID NO: 440128 - DNA, 19 bp, Homo sapiens
  siRNA target sequence for ALS2CR17 (NM_198945.1,3538-3556).
cggtgattatacataccat

SEQ ID NO: 440129 - DNA, 19 bp, Homo sapiens
  siRNA target sequence for ALS2CR17 (NM_198945.1,3539-3557).
ggtgattatacataccatt

SEQ ID NO: 440130 - DNA, 19 bp, Homo sapiens
  siRNA target sequence for ALS2CR17 (NM_198945.1,3574-3592).
cttgggaaggacatattgt

SEQ ID NO: 440131 - DNA, 19 bp, Homo sapiens
  siRNA target sequence for ALS2CR17 (NM_198945.1,3577-3595).
gggaaggacatattgttgt

SEQ ID NO: 440132 - DNA, 19 bp, Homo sapiens
  siRNA target sequence for ALS2CR17 (NM_198945.1,3655-3673).
ctataaatggcaagtatct

SEQ ID NO: 440133 - DNA, 19 bp, Homo sapiens
  siRNA target sequence for ALS2CR17 (NM_198945.1,3696-3714).
caagtatcagatatatgta

SEQ ID NO: 440134 - DNA, 19 bp, Homo sapiens
  siRNA target sequence for ALS2CR17 (NM_198945.1,3712-3730).
gtataatcggagaacacat

SEQ ID NO: 440135 - DNA, 19 bp, Homo sapiens
  siRNA target sequence for ALS2CR17 (NM_198945.1,3736-3754).
caggcagcatacaaggatt

SEQ ID NO: 440136 - DNA, 19 bp, Homo sapiens
  siRNA target sequence for ALS2CR17 (NM_198945.1,3815-3833).
gcctatccattgtgtttgt

SEQ ID NO: 440137 - DNA, 19 bp, Homo sapiens
  siRNA target sequence for ALS2CR17 (NM_198945.1,3828-3846).
gtttgtgtcaccaaagaat

SEQ ID NO: 440138 - DNA, 19 bp, Homo sapiens
  siRNA target sequence for ALS2CR17 (NM_198945.1,3850-3868).
gccatattcttgtaggttt

SEQ ID NO: 440139 - DNA, 19 bp, Homo sapiens
  siRNA target sequence for ALS2CR17 (NM_198945.1,3851-3869).
ccatattcttgtaggttta

SEQ ID NO: 440140 - DNA, 19 bp, Homo sapiens
  siRNA target sequence for ALS2CR17 (NM_198945.1,3927-3945).
cagctttctcgaaaatttt

SEQ ID NO: 440141 - DNA, 19 bp, Homo sapiens
  siRNA target sequence for ALS2CR17 (NM_198945.1,3959-3977).
gcggctcagccagatttca

SEQ ID NO: 440142 - DNA, 19 bp, Homo sapiens
  siRNA target sequence for LCN6 (NM_198946.1,297-315).
gtgtcatggacctgataaa

SEQ ID NO: 440143 - DNA, 19 bp, Homo sapiens
  siRNA target sequence for LCN6 (NM_198946.1,325-343).
cggatgggtgtttgagaat

SEQ ID NO: 440144 - DNA, 19 bp, Homo sapiens
  siRNA target sequence for LCN6 (NM_198946.1,379-397).
caccaacttcagagactat

SEQ ID NO: 440145 - DNA, 19 bp, Homo sapiens
  siRNA target sequence for CANP (NM_198947.1,222-240).
gtcatttagcgctatggaa

SEQ ID NO: 440146 - DNA, 19 bp, Homo sapiens
  siRNA target sequence for CANP (NM_198947.1,269-287).
caaaggatactgtcatgaa

SEQ ID NO: 440147 - DNA, 19 bp, Homo sapiens
  siRNA target sequence for CANP (NM_198947.1,299-317).
ctgacacacctgttgatca

SEQ ID NO: 440148 - DNA, 19 bp, Homo sapiens
  siRNA target sequence for CANP (NM_198947.1,320-338).
gtctatctggcataagaaa

SEQ ID NO: 440149 - DNA, 19 bp, Homo sapiens
  siRNA target sequence for CANP (NM_198947.1,322-340).
ctatctggcataagaaagt

SEQ ID NO: 440150 - DNA, 19 bp, Homo sapiens
  siRNA target sequence for CANP (NM_198947.1,341-359).
gtagcagcacctttaagct

SEQ ID NO: 440151 - DNA, 19 bp, Homo sapiens
  siRNA target sequence for CANP (NM_198947.1,348-366).
cacctttaagcttaaaagt

SEQ ID NO: 440152 - DNA, 19 bp, Homo sapiens
  siRNA target sequence for CANP (NM_198947.1,494-512).
gtaaacccagcgagagtat

SEQ ID NO: 440153 - DNA, 19 bp, Homo sapiens
  siRNA target sequence for CANP (NM_198947.1,518-536).
cagccctgagtgctaatga

SEQ ID NO: 440154 - DNA, 19 bp, Homo sapiens
  siRNA target sequence for CANP (NM_198947.1,520-538).
gccctgagtgctaatgact

SEQ ID NO: 440155 - DNA, 19 bp, Homo sapiens
  siRNA target sequence for CANP (NM_198947.1,521-539).
ccctgagtgctaatgacta

SEQ ID NO: 440156 - DNA, 19 bp, Homo sapiens
  siRNA target sequence for CANP (NM_198947.1,523-541).
ctgagtgctaatgactatt

SEQ ID NO: 440157 - DNA, 19 bp, Homo sapiens
  siRNA target sequence for CANP (NM_198947.1,597-615).
gacaatagatggacatata

SEQ ID NO: 440158 - DNA, 19 bp, Homo sapiens
  siRNA target sequence for CANP (NM_198947.1,638-656).
gcctgcctagtgattctca

SEQ ID NO: 440159 - DNA, 19 bp, Homo sapiens
  siRNA target sequence for CANP (NM_198947.1,639-657).
cctgcctagtgattctcat

SEQ ID NO: 440160 - DNA, 19 bp, Homo sapiens
  siRNA target sequence for CANP (NM_198947.1,640-658).
ctgcctagtgattctcatt

SEQ ID NO: 440161 - DNA, 19 bp, Homo sapiens
  siRNA target sequence for CANP (NM_198947.1,705-723).
catattacgccaatgtgaa

SEQ ID NO: 440162 - DNA, 19 bp, Homo sapiens
  siRNA target sequence for CANP (NM_198947.1,751-769).
catgttgttgctataggaa

SEQ ID NO: 440163 - DNA, 19 bp, Homo sapiens
  siRNA target sequence for CANP (NM_198947.1,798-816).
cgaacttcatgaaaaagga

SEQ ID NO: 440164 - DNA, 19 bp, Homo sapiens
  siRNA target sequence for CANP (NM_198947.1,837-855).
cttgaagggtgagactatt

SEQ ID NO: 440165 - DNA, 19 bp, Homo sapiens
  siRNA target sequence for CANP (NM_198947.1,840-858).
gaagggtgagactattgaa

SEQ ID NO: 440166 - DNA, 19 bp, Homo sapiens
  siRNA target sequence for CANP (NM_198947.1,879-897).
ccgttttcggtctgacata

SEQ ID NO: 440167 - DNA, 19 bp, Homo sapiens
  siRNA target sequence for CANP (NM_198947.1,916-934).
ctaaaggaaggtcataaga

SEQ ID NO: 440168 - DNA, 19 bp, Homo sapiens
  siRNA target sequence for CANP (NM_198947.1,1082-1100).
gtctgatacagtctaagaa

SEQ ID NO: 440169 - DNA, 19 bp, Homo sapiens
  siRNA target sequence for CANP (NM_198947.1,1174-1192).
caggatctaagccattata

SEQ ID NO: 440170 - DNA, 19 bp, Homo sapiens
  siRNA target sequence for CANP (NM_198947.1,1176-1194).
ggatctaagccattatatt

SEQ ID NO: 440171 - DNA, 19 bp, Homo sapiens
  siRNA target sequence for CANP (NM_198947.1,1177-1195).
gatctaagccattatatta

SEQ ID NO: 440172 - DNA, 19 bp, Homo sapiens
  siRNA target sequence for CANP (NM_198947.1,1184-1202).
gccattatattaaagataa

SEQ ID NO: 440173 - DNA, 19 bp, Homo sapiens
  siRNA target sequence for CANP (NM_198947.1,1220-1238).
ccaggattagaaattatta

SEQ ID NO: 440174 - DNA, 19 bp, Homo sapiens
  siRNA target sequence for CANP (NM_198947.1,1244-1262).
gtagtttgccccgaaaata

SEQ ID NO: 440175 - DNA, 19 bp, Homo sapiens
  siRNA target sequence for CANP (NM_198947.1,1300-1318).
ctgggtaggcggtatgcta

SEQ ID NO: 440176 - DNA, 19 bp, Homo sapiens
  siRNA target sequence for CANP (NM_198947.1,1302-1320).
gggtaggcggtatgctatt

SEQ ID NO: 440177 - DNA, 19 bp, Homo sapiens
  siRNA target sequence for CANP (NM_198947.1,1303-1321).
ggtaggcggtatgctatta

SEQ ID NO: 440178 - DNA, 19 bp, Homo sapiens
  siRNA target sequence for CANP (NM_198947.1,1307-1325).
ggcggtatgctattaatct

SEQ ID NO: 440179 - DNA, 19 bp, Homo sapiens
  siRNA target sequence for CANP (NM_198947.1,1338-1356).
ggaggcaattaatctctta

SEQ ID NO: 440180 - DNA, 19 bp, Homo sapiens
  siRNA target sequence for CANP (NM_198947.1,1342-1360).
gcaattaatctcttaaaga

SEQ ID NO: 440181 - DNA, 19 bp, Homo sapiens
  siRNA target sequence for CANP (NM_198947.1,1359-1377).
gaattatcaaacgttgaat

SEQ ID NO: 440182 - DNA, 19 bp, Homo sapiens
  siRNA target sequence for CANP (NM_198947.1,1370-1388).
cgttgaatgaagccataat

SEQ ID NO: 440183 - DNA, 19 bp, Homo sapiens
  siRNA target sequence for CANP (NM_198947.1,1389-1407).
gcatcagtatccgaatttt

SEQ ID NO: 440184 - DNA, 19 bp, Homo sapiens
  siRNA target sequence for CANP (NM_198947.1,1469-1487).
caccagctaagcaattcaa

SEQ ID NO: 440185 - DNA, 19 bp, Homo sapiens
  siRNA target sequence for CANP (NM_198947.1,1472-1490).
cagctaagcaattcaacat

SEQ ID NO: 440186 - DNA, 19 bp, Homo sapiens
  siRNA target sequence for CANP (NM_198947.1,1474-1492).
gctaagcaattcaacatat

SEQ ID NO: 440187 - DNA, 19 bp, Homo sapiens
  siRNA target sequence for CANP (NM_198947.1,1506-1524).
cggaaaaatgactgcaaat

SEQ ID NO: 440188 - DNA, 19 bp, Homo sapiens
  siRNA target sequence for CANP (NM_198947.1,1544-1562).
gcgaacagcttacatatta

SEQ ID NO: 440189 - DNA, 19 bp, Homo sapiens
  siRNA target sequence for CANP (NM_198947.1,1545-1563).
cgaacagcttacatattat

SEQ ID NO: 440190 - DNA, 19 bp, Homo sapiens
  siRNA target sequence for CANP (NM_198947.1,1627-1645).
gtcttcaatggtggttata

SEQ ID NO: 440191 - DNA, 19 bp, Homo sapiens
  siRNA target sequence for CANP (NM_198947.1,1629-1647).
cttcaatggtggttatatt

SEQ ID NO: 440192 - DNA, 19 bp, Homo sapiens
  siRNA target sequence for CANP (NM_198947.1,1655-1673).
gtcgacatgttgtacatct

SEQ ID NO: 440193 - DNA, 19 bp, Homo sapiens
  siRNA target sequence for CANP (NM_198947.1,1657-1675).
cgacatgttgtacatctta

SEQ ID NO: 440194 - DNA, 19 bp, Homo sapiens
  siRNA target sequence for CANP (NM_198947.1,1672-1690).
cttatggtgggtaaaaaca

SEQ ID NO: 440195 - DNA, 19 bp, Homo sapiens
  siRNA target sequence for CANP (NM_198947.1,1697-1715).
caagtttgtggccagatat

SEQ ID NO: 440196 - DNA, 19 bp, Homo sapiens
  siRNA target sequence for CANP (NM_198947.1,1700-1718).
gtttgtggccagatataat

SEQ ID NO: 440197 - DNA, 19 bp, Homo sapiens
  siRNA target sequence for CANP (NM_198947.1,1706-1724).
ggccagatataattagcaa

SEQ ID NO: 440198 - DNA, 19 bp, Homo sapiens
  siRNA target sequence for CANP (NM_198947.1,1729-1747).
gcgaaggtaaccttcactt

SEQ ID NO: 440199 - DNA, 19 bp, Homo sapiens
  siRNA target sequence for CANP (NM_198947.1,1730-1748).
cgaaggtaaccttcactta

SEQ ID NO: 440200 - DNA, 19 bp, Homo sapiens
  siRNA target sequence for CANP (NM_198947.1,1734-1752).
ggtaaccttcacttataca

SEQ ID NO: 440201 - DNA, 19 bp, Homo sapiens
  siRNA target sequence for CANP (NM_198947.1,1758-1776).
ctgccctactcctgacaat

SEQ ID NO: 440202 - DNA, 19 bp, Homo sapiens
  siRNA target sequence for CANP (NM_198947.1,1769-1787).
ctgacaattggttttccat

SEQ ID NO: 440203 - DNA, 19 bp, Homo sapiens
  siRNA target sequence for CANP (NM_198947.1,1785-1803).
cattgagccatggcttaaa

SEQ ID NO: 440204 - DNA, 19 bp, Homo sapiens
  siRNA target sequence for CANP (NM_198947.1,1797-1815).
gcttaaagtgtccaatgaa

SEQ ID NO: 440205 - DNA, 19 bp, Homo sapiens
  siRNA target sequence for CANP (NM_198947.1,1806-1824).
gtccaatgaaaatctagat

SEQ ID NO: 440206 - DNA, 19 bp, Homo sapiens
  siRNA target sequence for CANP (NM_198947.1,1870-1888).
ggactatggcgacagattt

SEQ ID NO: 440207 - DNA, 19 bp, Homo sapiens
  siRNA target sequence for CANP (NM_198947.1,1898-1916).
catctactggtttgattta

SEQ ID NO: 440208 - DNA, 19 bp, Homo sapiens
  siRNA target sequence for CANP (NM_198947.1,1964-1982).
ctgtgattcctctaaacga

SEQ ID NO: 440209 - DNA, 19 bp, Homo sapiens
  siRNA target sequence for CANP (NM_198947.1,1973-1991).
ctctaaacgaacgattgaa

SEQ ID NO: 440210 - DNA, 19 bp, Homo sapiens
  siRNA target sequence for CANP (NM_198947.1,1975-1993).
ctaaacgaacgattgaaaa

SEQ ID NO: 440211 - DNA, 19 bp, Homo sapiens
  siRNA target sequence for CANP (NM_198947.1,2018-2036).
ggttggtagatctctatga

SEQ ID NO: 440212 - DNA, 19 bp, Homo sapiens
  siRNA target sequence for CANP (NM_198947.1,2019-2037).
gttggtagatctctatgat

SEQ ID NO: 440213 - DNA, 19 bp, Homo sapiens
  siRNA target sequence for CANP (NM_198947.1,2099-2117).
cacacacgcttagttatga

SEQ ID NO: 440214 - DNA, 19 bp, Homo sapiens
  siRNA target sequence for CANP (NM_198947.1,2101-2119).
cacacgcttagttatgata

SEQ ID NO: 440215 - DNA, 19 bp, Homo sapiens
  siRNA target sequence for CANP (NM_198947.1,2141-2159).
caggctccccagtgtttaa

SEQ ID NO: 440216 - DNA, 19 bp, Homo sapiens
  siRNA target sequence for CANP (NM_198947.1,2145-2163).
ctccccagtgtttaatgca

SEQ ID NO: 440217 - DNA, 19 bp, Homo sapiens
  siRNA target sequence for CANP (NM_198947.1,2169-2187).
caaattggttgctttgcat

SEQ ID NO: 440218 - DNA, 19 bp, Homo sapiens
  siRNA target sequence for CANP (NM_198947.1,2221-2239).
gtgcatgcccttattgaat

SEQ ID NO: 440219 - DNA, 19 bp, Homo sapiens
  siRNA target sequence for CANP (NM_198947.1,2227-2245).
gcccttattgaatttggtt

SEQ ID NO: 440220 - DNA, 19 bp, Homo sapiens
  siRNA target sequence for CANP (NM_198947.1,2228-2246).
cccttattgaatttggtta

SEQ ID NO: 440221 - DNA, 19 bp, Homo sapiens
  siRNA target sequence for CANP (NM_198947.1,2229-2247).
ccttattgaatttggttat

SEQ ID NO: 440222 - DNA, 19 bp, Homo sapiens
  siRNA target sequence for CANP (NM_198947.1,2230-2248).
cttattgaatttggttatt

SEQ ID NO: 440223 - DNA, 19 bp, Homo sapiens
  siRNA target sequence for CANP (NM_198947.1,2280-2298).
gacaaatgagagcttgtat

SEQ ID NO: 440224 - DNA, 19 bp, Homo sapiens
  siRNA target sequence for CANP (NM_198947.1,2325-2343).
gacctacgatgaagagaaa

SEQ ID NO: 440225 - DNA, 19 bp, Homo sapiens
  siRNA target sequence for GnT-IX (NM_198955.1,107-125).
cactcattcgtaaaacatt

SEQ ID NO: 440226 - DNA, 19 bp, Homo sapiens
  siRNA target sequence for DHX57 (NM_198963.1,180-198).
gagtcacgccagtaaatct

SEQ ID NO: 440227 - DNA, 19 bp, Homo sapiens
  siRNA target sequence for DHX57 (NM_198963.1,251-269).
gaaaggcctccagtagaat

SEQ ID NO: 440228 - DNA, 19 bp, Homo sapiens
  siRNA target sequence for DHX57 (NM_198963.1,277-295).
gatggagatgacttttgta

SEQ ID NO: 440229 - DNA, 19 bp, Homo sapiens
  siRNA target sequence for DHX57 (NM_198963.1,325-343).
cctagcaacagtaacataa

SEQ ID NO: 440230 - DNA, 19 bp, Homo sapiens
  siRNA target sequence for DHX57 (NM_198963.1,349-367).
ggagagtcacgcccaaaat

SEQ ID NO: 440231 - DNA, 19 bp, Homo sapiens
  siRNA target sequence for DHX57 (NM_198963.1,389-407).
cccttcagactctacatat

SEQ ID NO: 440232 - DNA, 19 bp, Homo sapiens
  siRNA target sequence for DHX57 (NM_198963.1,391-409).
cttcagactctacatatga

SEQ ID NO: 440233 - DNA, 19 bp, Homo sapiens
  siRNA target sequence for DHX57 (NM_198963.1,1930-1948).
gaacgcgttgctaaagaaa

SEQ ID NO: 440234 - DNA, 19 bp, Homo sapiens
  siRNA target sequence for DHX57 (NM_198963.1,2007-2025).
ctcagccaccagactgtta

SEQ ID NO: 440235 - DNA, 19 bp, Homo sapiens
  siRNA target sequence for DHX57 (NM_198963.1,2009-2027).
cagccaccagactgttata

SEQ ID NO: 440236 - DNA, 19 bp, Homo sapiens
  siRNA target sequence for DHX57 (NM_198963.1,2011-2029).
gccaccagactgttatact

SEQ ID NO: 440237 - DNA, 19 bp, Homo sapiens
  siRNA target sequence for DHX57 (NM_198963.1,2081-2099).
gagtttcccatatcattgt

SEQ ID NO: 440238 - DNA, 19 bp, Homo sapiens
  siRNA target sequence for DHX57 (NM_198963.1,2087-2105).
cccatatcattgttgatga

SEQ ID NO: 440239 - DNA, 19 bp, Homo sapiens
  siRNA target sequence for DHX57 (NM_198963.1,2204-2222).
ctctaaacgctgagctttt

SEQ ID NO: 440240 - DNA, 19 bp, Homo sapiens
  siRNA target sequence for DHX57 (NM_198963.1,2240-2258).
cctgccccgttattactat

SEQ ID NO: 440241 - DNA, 19 bp, Homo sapiens
  siRNA target sequence for DHX57 (NM_198963.1,2241-2259).
ctgccccgttattactata

SEQ ID NO: 440242 - DNA, 19 bp, Homo sapiens
  siRNA target sequence for DHX57 (NM_198963.1,2244-2262).
ccccgttattactatacca

SEQ ID NO: 440243 - DNA, 19 bp, Homo sapiens
  siRNA target sequence for DHX57 (NM_198963.1,2255-2273).
ctataccaggtcgtacatt

SEQ ID NO: 440244 - DNA, 19 bp, Homo sapiens
  siRNA target sequence for DHX57 (NM_198963.1,2270-2288).
catttcctgttgatcaatt

SEQ ID NO: 440245 - DNA, 19 bp, Homo sapiens
  siRNA target sequence for DHX57 (NM_198963.1,2350-2368).
cggtccatgaaacagattt

SEQ ID NO: 440246 - DNA, 19 bp, Homo sapiens
  siRNA target sequence for DHX57 (NM_198963.1,2391-2409).
gcggaacagaactgcattt

SEQ ID NO: 440247 - DNA, 19 bp, Homo sapiens
  siRNA target sequence for DHX57 (NM_198963.1,2474-2492).
cagtgccagatcaacagtt

SEQ ID NO: 440248 - DNA, 19 bp, Homo sapiens
  siRNA target sequence for DHX57 (NM_198963.1,2478-2496).
gccagatcaacagttagat

SEQ ID NO: 440249 - DNA, 19 bp, Homo sapiens
  siRNA target sequence for DHX57 (NM_198963.1,2480-2498).
cagatcaacagttagattt

SEQ ID NO: 440250 - DNA, 19 bp, Homo sapiens
  siRNA target sequence for DHX57 (NM_198963.1,2516-2534).
gctataaaggggttagcaa

SEQ ID NO: 440251 - DNA, 19 bp, Homo sapiens
  siRNA target sequence for DHX57 (NM_198963.1,2549-2567).
caatgtccatcatggattt

SEQ ID NO: 440252 - DNA, 19 bp, Homo sapiens
  siRNA target sequence for DHX57 (NM_198963.1,2574-2592).
ggtgaatcttgaattaata

SEQ ID NO: 440253 - DNA, 19 bp, Homo sapiens
  siRNA target sequence for DHX57 (NM_198963.1,2634-2652).
ccctccaggtgctatactt

SEQ ID NO: 440254 - DNA, 19 bp, Homo sapiens
  siRNA target sequence for DHX57 (NM_198963.1,2666-2684).
gactagcagaaatcaaaat

SEQ ID NO: 440255 - DNA, 19 bp, Homo sapiens
  siRNA target sequence for DHX57 (NM_198963.1,2721-2739).
caacagacgtagtaatcga

SEQ ID NO: 440256 - DNA, 19 bp, Homo sapiens
  siRNA target sequence for DHX57 (NM_198963.1,2728-2746).
cgtagtaatcgatgtgtta

SEQ ID NO: 440257 - DNA, 19 bp, Homo sapiens
  siRNA target sequence for DHX57 (NM_198963.1,2729-2747).
gtagtaatcgatgtgttat

SEQ ID NO: 440258 - DNA, 19 bp, Homo sapiens
  siRNA target sequence for DHX57 (NM_198963.1,2732-2750).
gtaatcgatgtgttattca

SEQ ID NO: 440259 - DNA, 19 bp, Homo sapiens
  siRNA target sequence for DHX57 (NM_198963.1,2810-2828).
caggagtaactaagattat

SEQ ID NO: 440260 - DNA, 19 bp, Homo sapiens
  siRNA target sequence for DHX57 (NM_198963.1,2861-2879).
ccatcgatgatgttgtcta

SEQ ID NO: 440261 - DNA, 19 bp, Homo sapiens
  siRNA target sequence for DHX57 (NM_198963.1,2951-2969).
cctttgtatctcaagctaa

SEQ ID NO: 440262 - DNA, 19 bp, Homo sapiens
  siRNA target sequence for DHX57 (NM_198963.1,2962-2980).
caagctaatgctctacaaa

SEQ ID NO: 440263 - DNA, 19 bp, Homo sapiens
  siRNA target sequence for DHX57 (NM_198963.1,3010-3028).
ggggtctgcttccatttat

SEQ ID NO: 440264 - DNA, 19 bp, Homo sapiens
  siRNA target sequence for DHX57 (NM_198963.1,3129-3147).
gatgtttagtgctcataat

SEQ ID NO: 440265 - DNA, 19 bp, Homo sapiens
  siRNA target sequence for DHX57 (NM_198963.1,3159-3177).
gttctctcggctcattgaa

SEQ ID NO: 440266 - DNA, 19 bp, Homo sapiens
  siRNA target sequence for DHX57 (NM_198963.1,3179-3197).
ctccacacaccgattctct

SEQ ID NO: 440267 - DNA, 19 bp, Homo sapiens
  siRNA target sequence for DHX57 (NM_198963.1,3199-3217).
cgtgcctcaaaaatacgat

SEQ ID NO: 440268 - DNA, 19 bp, Homo sapiens
  siRNA target sequence for DHX57 (NM_198963.1,3204-3222).
ctcaaaaatacgattacga

SEQ ID NO: 440269 - DNA, 19 bp, Homo sapiens
  siRNA target sequence for DHX57 (NM_198963.1,3220-3238).
cgagacttaggagcattaa

SEQ ID NO: 440270 - DNA, 19 bp, Homo sapiens
  siRNA target sequence for DHX57 (NM_198963.1,3232-3250).
gcattaactccagatgaaa

SEQ ID NO: 440271 - DNA, 19 bp, Homo sapiens
  siRNA target sequence for DHX57 (NM_198963.1,3255-3273).
gacccctcttgggtatcat

SEQ ID NO: 440272 - DNA, 19 bp, Homo sapiens
  siRNA target sequence for DHX57 (NM_198963.1,3285-3303).
gcccgtggatgtgagaatt

SEQ ID NO: 440273 - DNA, 19 bp, Homo sapiens
  siRNA target sequence for DHX57 (NM_198963.1,3299-3317).
gaattggcaaactaatgtt

SEQ ID NO: 440274 - DNA, 19 bp, Homo sapiens
  siRNA target sequence for DHX57 (NM_198963.1,3391-3409).
gtatctccctgggataaaa

SEQ ID NO: 440275 - DNA, 19 bp, Homo sapiens
  siRNA target sequence for DHX57 (NM_198963.1,3467-3485).
cccttctacaagcgtataa

SEQ ID NO: 440276 - DNA, 19 bp, Homo sapiens
  siRNA target sequence for DHX57 (NM_198963.1,3486-3504).
gggatggcagctaagtaca

SEQ ID NO: 440277 - DNA, 19 bp, Homo sapiens
  siRNA target sequence for DHX57 (NM_198963.1,3487-3505).
ggatggcagctaagtacaa

SEQ ID NO: 440278 - DNA, 19 bp, Homo sapiens
  siRNA target sequence for DHX57 (NM_198963.1,3511-3529).
ggcgtgcgtgcaagttata

SEQ ID NO: 440279 - DNA, 19 bp, Homo sapiens
  siRNA target sequence for DHX57 (NM_198963.1,3512-3530).
gcgtgcgtgcaagttataa

SEQ ID NO: 440280 - DNA, 19 bp, Homo sapiens
  siRNA target sequence for DHX57 (NM_198963.1,3513-3531).
cgtgcgtgcaagttataat

SEQ ID NO: 440281 - DNA, 19 bp, Homo sapiens
  siRNA target sequence for DHX57 (NM_198963.1,3514-3532).
gtgcgtgcaagttataatt

SEQ ID NO: 440282 - DNA, 19 bp, Homo sapiens
  siRNA target sequence for DHX57 (NM_198963.1,3517-3535).
cgtgcaagttataattact

SEQ ID NO: 440283 - DNA, 19 bp, Homo sapiens
  siRNA target sequence for DHX57 (NM_198963.1,3590-3608).
gacaattcacggaactgtt

SEQ ID NO: 440284 - DNA, 19 bp, Homo sapiens
  siRNA target sequence for DHX57 (NM_198963.1,3592-3610).
caattcacggaactgttat

SEQ ID NO: 440285 - DNA, 19 bp, Homo sapiens
  siRNA target sequence for DHX57 (NM_198963.1,3600-3618).
ggaactgttatcggatata

SEQ ID NO: 440286 - DNA, 19 bp, Homo sapiens
  siRNA target sequence for DHX57 (NM_198963.1,3721-3739).
gagaaccccaagctgatat

SEQ ID NO: 440287 - DNA, 19 bp, Homo sapiens
  siRNA target sequence for DHX57 (NM_198963.1,3758-3776).
ctttgtatccaaatgtagt

SEQ ID NO: 440288 - DNA, 19 bp, Homo sapiens
  siRNA target sequence for DHX57 (NM_198963.1,3815-3833).
gtactggagctgtcagaat

SEQ ID NO: 440289 - DNA, 19 bp, Homo sapiens
  siRNA target sequence for DHX57 (NM_198963.1,3845-3863).
cagctgagttgaagtttgt

SEQ ID NO: 440290 - DNA, 19 bp, Homo sapiens
  siRNA target sequence for DHX57 (NM_198963.1,3864-3882).
caccaagaacgatggatat

SEQ ID NO: 440291 - DNA, 19 bp, Homo sapiens
  siRNA target sequence for DHX57 (NM_198963.1,3866-3884).
ccaagaacgatggatatgt

SEQ ID NO: 440292 - DNA, 19 bp, Homo sapiens
  siRNA target sequence for DHX57 (NM_198963.1,3896-3914).
cttcatcagtgaactatca

SEQ ID NO: 440293 - DNA, 19 bp, Homo sapiens
  siRNA target sequence for DHX57 (NM_198963.1,3945-3963).
gtaccacgagaagataaaa

SEQ ID NO: 440294 - DNA, 19 bp, Homo sapiens
  siRNA target sequence for DHX57 (NM_198963.1,3948-3966).
ccacgagaagataaaaact

SEQ ID NO: 440295 - DNA, 19 bp, Homo sapiens
  siRNA target sequence for DHX57 (NM_198963.1,3949-3967).
cacgagaagataaaaacta

SEQ ID NO: 440296 - DNA, 19 bp, Homo sapiens
  siRNA target sequence for DHX57 (NM_198963.1,3951-3969).
cgagaagataaaaactagt

SEQ ID NO: 440297 - DNA, 19 bp, Homo sapiens
  siRNA target sequence for DHX57 (NM_198963.1,4005-4023).
gtacccgctggtcttgttt

SEQ ID NO: 440298 - DNA, 19 bp, Homo sapiens
  siRNA target sequence for DHX57 (NM_198963.1,4137-4155).
gcttcgttgcgaacttgat

SEQ ID NO: 440299 - DNA, 19 bp, Homo sapiens
  siRNA target sequence for DHX57 (NM_198963.1,4158-4176).
gcttctccaggataaaatt

SEQ ID NO: 440300 - DNA, 19 bp, Homo sapiens
  siRNA target sequence for DHX57 (NM_198963.1,4210-4228).
cgaggatcccggatcatca

SEQ ID NO: 440301 - DNA, 19 bp, Homo sapiens
  siRNA target sequence for DHX57 (NM_198963.1,4218-4236).
ccggatcatcagcacaatt

SEQ ID NO: 440302 - DNA, 19 bp, Homo sapiens
  siRNA target sequence for DHX57 (NM_198963.1,4220-4238).
ggatcatcagcacaattgt

SEQ ID NO: 440303 - DNA, 19 bp, Homo sapiens
  siRNA target sequence for DHX57 (NM_198963.1,4229-4247).
gcacaattgtgaaacttgt

SEQ ID NO: 440304 - DNA, 19 bp, Homo sapiens
  siRNA target sequence for LENG9 (NM_198988.1,1302-1320).
ccccctcggctgagcttta

SEQ ID NO: 440305 - DNA, 19 bp, Homo sapiens
  siRNA target sequence for LENG9 (NM_198988.1,1415-1433).
cgaggggctgagtacacta

SEQ ID NO: 440306 - DNA, 19 bp, Homo sapiens
  siRNA target sequence for DLEU7 (NM_198989.1,319-337).
cctccatcagccaccaaat

SEQ ID NO: 440307 - DNA, 19 bp, Homo sapiens
  siRNA target sequence for DLEU7 (NM_198989.1,756-774).
caactcctggctaatgagt

SEQ ID NO: 440308 - DNA, 19 bp, Homo sapiens
  siRNA target sequence for NAPE-PLD (NM_198990.1,59-77).
cagtaagaaaacgtcaaaa

SEQ ID NO: 440309 - DNA, 19 bp, Homo sapiens
  siRNA target sequence for NAPE-PLD (NM_198990.1,87-105).
gaattccggagcaagtgat

SEQ ID NO: 440310 - DNA, 19 bp, Homo sapiens
  siRNA target sequence for NAPE-PLD (NM_198990.1,129-147).
cttcaaactggattataga

SEQ ID NO: 440311 - DNA, 19 bp, Homo sapiens
  siRNA target sequence for NAPE-PLD (NM_198990.1,222-240).
cccctctattccaaatgtt

SEQ ID NO: 440312 - DNA, 19 bp, Homo sapiens
  siRNA target sequence for NAPE-PLD (NM_198990.1,275-293).
gtgttccaagttctaaaga

SEQ ID NO: 440313 - DNA, 19 bp, Homo sapiens
  siRNA target sequence for NAPE-PLD (NM_198990.1,313-331).
ccagtgcttaagccatatt

SEQ ID NO: 440314 - DNA, 19 bp, Homo sapiens
  siRNA target sequence for NAPE-PLD (NM_198990.1,314-332).
cagtgcttaagccatattt

SEQ ID NO: 440315 - DNA, 19 bp, Homo sapiens
  siRNA target sequence for NAPE-PLD (NM_198990.1,319-337).
cttaagccatattttatca

SEQ ID NO: 440316 - DNA, 19 bp, Homo sapiens
  siRNA target sequence for NAPE-PLD (NM_198990.1,360-378).
gagggaagctggcttaaga

SEQ ID NO: 440317 - DNA, 19 bp, Homo sapiens
  siRNA target sequence for NAPE-PLD (NM_198990.1,392-410).
gacatgccacggtaatggt

SEQ ID NO: 440318 - DNA, 19 bp, Homo sapiens
  siRNA target sequence for NAPE-PLD (NM_198990.1,398-416).
ccacggtaatggtggaaat

SEQ ID NO: 440319 - DNA, 19 bp, Homo sapiens
  siRNA target sequence for NAPE-PLD (NM_198990.1,401-419).
cggtaatggtggaaatgga

SEQ ID NO: 440320 - DNA, 19 bp, Homo sapiens
  siRNA target sequence for NAPE-PLD (NM_198990.1,433-451).
ctcacggatcccatcttta

SEQ ID NO: 440321 - DNA, 19 bp, Homo sapiens
  siRNA target sequence for NAPE-PLD (NM_198990.1,480-498).
gggtccaaagcgatttcgt

SEQ ID NO: 440322 - DNA, 19 bp, Homo sapiens
  siRNA target sequence for NAPE-PLD (NM_198990.1,499-517).
cgttccccgtgcacaataa

SEQ ID NO: 440323 - DNA, 19 bp, Homo sapiens
  siRNA target sequence for NAPE-PLD (NM_198990.1,503-521).
ccccgtgcacaataagtga

SEQ ID NO: 440324 - DNA, 19 bp, Homo sapiens
  siRNA target sequence for NAPE-PLD (NM_198990.1,504-522).
cccgtgcacaataagtgaa

SEQ ID NO: 440325 - DNA, 19 bp, Homo sapiens
  siRNA target sequence for NAPE-PLD (NM_198990.1,518-536).
gtgaactccctccaataga

SEQ ID NO: 440326 - DNA, 19 bp, Homo sapiens
  siRNA target sequence for NAPE-PLD (NM_198990.1,530-548).
caatagatgcggtccttat

SEQ ID NO: 440327 - DNA, 19 bp, Homo sapiens
  siRNA target sequence for NAPE-PLD (NM_198990.1,597-615).
gaatgagcgatttggtaat

SEQ ID NO: 440328 - DNA, 19 bp, Homo sapiens
  siRNA target sequence for NAPE-PLD (NM_198990.1,601-619).
gagcgatttggtaatgagt

SEQ ID NO: 440329 - DNA, 19 bp, Homo sapiens
  siRNA target sequence for NAPE-PLD (NM_198990.1,695-713).
ggtgggaggagaattgtgt

SEQ ID NO: 440330 - DNA, 19 bp, Homo sapiens
  siRNA target sequence for NAPE-PLD (NM_198990.1,761-779).
ggtgtaaaaggactctaat

SEQ ID NO: 440331 - DNA, 19 bp, Homo sapiens
  siRNA target sequence for NAPE-PLD (NM_198990.1,843-861).
cgcaggagatactggttat

SEQ ID NO: 440332 - DNA, 19 bp, Homo sapiens
  siRNA target sequence for NAPE-PLD (NM_198990.1,864-882).
ccctgcttttgaagagata

SEQ ID NO: 440333 - DNA, 19 bp, Homo sapiens
  siRNA target sequence for NAPE-PLD (NM_198990.1,934-952).
gaaccgaggtggtttatga

SEQ ID NO: 440334 - DNA, 19 bp, Homo sapiens
  siRNA target sequence for NAPE-PLD (NM_198990.1,937-955).
ccgaggtggtttatgaaat

SEQ ID NO: 440335 - DNA, 19 bp, Homo sapiens
  siRNA target sequence for NAPE-PLD (NM_198990.1,941-959).
ggtggtttatgaaatacca

SEQ ID NO: 440336 - DNA, 19 bp, Homo sapiens
  siRNA target sequence for NAPE-PLD (NM_198990.1,991-1009).
cacactgatgtccaaacaa

SEQ ID NO: 440337 - DNA, 19 bp, Homo sapiens
  siRNA target sequence for NAPE-PLD (NM_198990.1,1034-1052).
gaacttttgccttagcaaa

SEQ ID NO: 440338 - DNA, 19 bp, Homo sapiens
  siRNA target sequence for NAPE-PLD (NM_198990.1,1049-1067).
caaatgagcattacttaga

SEQ ID NO: 440339 - DNA, 19 bp, Homo sapiens
  siRNA target sequence for NAPE-PLD (NM_198990.1,1104-1122).
cggacttaacgctgaagat

SEQ ID NO: 440340 - DNA, 19 bp, Homo sapiens
  siRNA target sequence for NAPE-PLD (NM_198990.1,1105-1123).
ggacttaacgctgaagatt

SEQ ID NO: 440341 - DNA, 19 bp, Homo sapiens
  siRNA target sequence for NAPE-PLD (NM_198990.1,1106-1124).
gacttaacgctgaagattt

SEQ ID NO: 440342 - DNA, 19 bp, Homo sapiens
  siRNA target sequence for NAPE-PLD (NM_198990.1,1108-1126).
cttaacgctgaagattttt

SEQ ID NO: 440343 - DNA, 19 bp, Homo sapiens
  siRNA target sequence for NAPE-PLD (NM_198990.1,1141-1159).
ggagaatcaagatacctaa

SEQ ID NO: 440344 - DNA, 19 bp, Homo sapiens
  siRNA target sequence for NAPE-PLD (NM_198990.1,1142-1160).
gagaatcaagatacctaaa

SEQ ID NO: 440345 - DNA, 19 bp, Homo sapiens
  siRNA target sequence for NAPE-PLD (NM_198990.1,1151-1169).
gatacctaaataatgatga

SEQ ID NO: 440346 - DNA, 19 bp, Homo sapiens
  siRNA target sequence for KCTD1 (NM_198991.1,663-681).
cgacgtgatgtgtaactct

SEQ ID NO: 440347 - DNA, 19 bp, Homo sapiens
  siRNA target sequence for KCTD1 (NM_198991.1,669-687).
gatgtgtaactctgtcaat

SEQ ID NO: 440348 - DNA, 19 bp, Homo sapiens
  siRNA target sequence for KCTD1 (NM_198991.1,884-902).
cctccgtcatccggataaa

SEQ ID NO: 440349 - DNA, 19 bp, Homo sapiens
  siRNA target sequence for KCTD1 (NM_198991.1,887-905).
ccgtcatccggataaagca

SEQ ID NO: 440350 - DNA, 19 bp, Homo sapiens
  siRNA target sequence for KCTD1 (NM_198991.1,888-906).
cgtcatccggataaagcaa

SEQ ID NO: 440351 - DNA, 19 bp, Homo sapiens
  siRNA target sequence for SYT10 (NM_198992.1,563-581).
gtgacttccaacatcacta

SEQ ID NO: 440352 - DNA, 19 bp, Homo sapiens
  siRNA target sequence for SYT10 (NM_198992.1,584-602).
cttccacagagcatttcaa

SEQ ID NO: 440353 - DNA, 19 bp, Homo sapiens
  siRNA target sequence for SYT10 (NM_198992.1,603-621).
gtgctcctactgaagtttt

SEQ ID NO: 440354 - DNA, 19 bp, Homo sapiens
  siRNA target sequence for SYT10 (NM_198992.1,661-679).
gccagccgtaaaagctatt

SEQ ID NO: 440355 - DNA, 19 bp, Homo sapiens
  siRNA target sequence for SYT10 (NM_198992.1,675-693).
ctattgagcctgcaataaa

SEQ ID NO: 440356 - DNA, 19 bp, Homo sapiens
  siRNA target sequence for SYT10 (NM_198992.1,767-785).
cgtgtgcaaagacaaatta

SEQ ID NO: 440357 - DNA, 19 bp, Homo sapiens
  siRNA target sequence for SYT10 (NM_198992.1,871-889).
gggcacagaacctgtttta

SEQ ID NO: 440358 - DNA, 19 bp, Homo sapiens
  siRNA target sequence for SYT10 (NM_198992.1,921-939).
ggataaagccagaactcta

SEQ ID NO: 440359 - DNA, 19 bp, Homo sapiens
  siRNA target sequence for SYT10 (NM_198992.1,976-994).
cgaagatgtcaaaatctgt

SEQ ID NO: 440360 - DNA, 19 bp, Homo sapiens
  siRNA target sequence for SYT10 (NM_198992.1,1012-1030).
cctccagtatgattatgaa

SEQ ID NO: 440361 - DNA, 19 bp, Homo sapiens
  siRNA target sequence for SYT10 (NM_198992.1,1013-1031).
ctccagtatgattatgaaa

SEQ ID NO: 440362 - DNA, 19 bp, Homo sapiens
  siRNA target sequence for SYT10 (NM_198992.1,1067-1085).
gatctccctgctaaagact

SEQ ID NO: 440363 - DNA, 19 bp, Homo sapiens
  siRNA target sequence for SYT10 (NM_198992.1,1153-1171).
ccgcgtgcacagaaagact

SEQ ID NO: 440364 - DNA, 19 bp, Homo sapiens
  siRNA target sequence for SYT10 (NM_198992.1,1154-1172).
cgcgtgcacagaaagactt

SEQ ID NO: 440365 - DNA, 19 bp, Homo sapiens
  siRNA target sequence for SYT10 (NM_198992.1,1212-1230).
catatgatcaactaagcaa

SEQ ID NO: 440366 - DNA, 19 bp, Homo sapiens
  siRNA target sequence for SYT10 (NM_198992.1,1227-1245).
gcaaccgaaaactacattt

SEQ ID NO: 440367 - DNA, 19 bp, Homo sapiens
  siRNA target sequence for SYT10 (NM_198992.1,1285-1303).
gattggggaagtgattctt

SEQ ID NO: 440368 - DNA, 19 bp, Homo sapiens
  siRNA target sequence for SYT10 (NM_198992.1,1340-1358).
gccacagtatggaaagata

SEQ ID NO: 440369 - DNA, 19 bp, Homo sapiens
  siRNA target sequence for SYT10 (NM_198992.1,1363-1381).
ctgtgctaccacagaaagt

SEQ ID NO: 440370 - DNA, 19 bp, Homo sapiens
  siRNA target sequence for SYT10 (NM_198992.1,1385-1403).
gacctgggtgaaatcatgt

SEQ ID NO: 440371 - DNA, 19 bp, Homo sapiens
  siRNA target sequence for SYT10 (NM_198992.1,1387-1405).
cctgggtgaaatcatgttt

SEQ ID NO: 440372 - DNA, 19 bp, Homo sapiens
  siRNA target sequence for SYT10 (NM_198992.1,1388-1406).
ctgggtgaaatcatgtttt

SEQ ID NO: 440373 - DNA, 19 bp, Homo sapiens
  siRNA target sequence for SYT10 (NM_198992.1,1425-1443).
cggctgggcgtatgacatt

SEQ ID NO: 440374 - DNA, 19 bp, Homo sapiens
  siRNA target sequence for SYT10 (NM_198992.1,1466-1484).
ctgaaggcgatggatatta

SEQ ID NO: 440375 - DNA, 19 bp, Homo sapiens
  siRNA target sequence for SYT10 (NM_198992.1,1522-1540).
gtgtgaaggtcgaagatta

SEQ ID NO: 440376 - DNA, 19 bp, Homo sapiens
  siRNA target sequence for SYT10 (NM_198992.1,1524-1542).
gtgaaggtcgaagattaaa

SEQ ID NO: 440377 - DNA, 19 bp, Homo sapiens
  siRNA target sequence for SYT10 (NM_198992.1,1644-1662).
ccattgcggtcatggatta

SEQ ID NO: 440378 - DNA, 19 bp, Homo sapiens
  siRNA target sequence for SYT10 (NM_198992.1,1649-1667).
gcggtcatggattacgata

SEQ ID NO: 440379 - DNA, 19 bp, Homo sapiens
  siRNA target sequence for SYT10 (NM_198992.1,1663-1681).
cgatagggtaggacacaat

SEQ ID NO: 440380 - DNA, 19 bp, Homo sapiens
  siRNA target sequence for SYT10 (NM_198992.1,1750-1768).
gctggcctatcatcgaaaa

SEQ ID NO: 440381 - DNA, 19 bp, Homo sapiens
  siRNA target sequence for SYT10 (NM_198992.1,1753-1771).
ggcctatcatcgaaaacca

SEQ ID NO: 440382 - DNA, 19 bp, Homo sapiens
  siRNA target sequence for SYT10 (NM_198992.1,1755-1773).
cctatcatcgaaaaccaat

SEQ ID NO: 440383 - DNA, 19 bp, Homo sapiens
  siRNA target sequence for SYT10 (NM_198992.1,1810-1828).
ggcgaccagttttgatagt

SEQ ID NO: 440384 - DNA, 19 bp, Homo sapiens
  siRNA target sequence for SYT10 (NM_198992.1,1813-1831).
gaccagttttgatagtcaa

SEQ ID NO: 440385 - DNA, 19 bp, Homo sapiens
  siRNA target sequence for 24b2/STAC2 (NM_198993.1,304-322).
ccaagctccagcgattcaa

SEQ ID NO: 440386 - DNA, 19 bp, Homo sapiens
  siRNA target sequence for 24b2/STAC2 (NM_198993.1,627-645).
cagggcttgcgatgtaaga

SEQ ID NO: 440387 - DNA, 19 bp, Homo sapiens
  siRNA target sequence for 24b2/STAC2 (NM_198993.1,630-648).
ggcttgcgatgtaagatgt

SEQ ID NO: 440388 - DNA, 19 bp, Homo sapiens
  siRNA target sequence for 24b2/STAC2 (NM_198993.1,1105-1123).
cctacgttgcactctacaa

SEQ ID NO: 440389 - DNA, 19 bp, Homo sapiens
  siRNA target sequence for 24b2/STAC2 (NM_198993.1,1109-1127).
cgttgcactctacaagttt

SEQ ID NO: 440390 - DNA, 19 bp, Homo sapiens
  siRNA target sequence for 24b2/STAC2 (NM_198993.1,1265-1283).
gaggccaggcgagaatgtt

SEQ ID NO: 440391 - DNA, 19 bp, Homo sapiens
  siRNA target sequence for TGM6 (NM_198994.1,442-460).
gaggctgggcgagtttgtt

SEQ ID NO: 440392 - DNA, 19 bp, Homo sapiens
  siRNA target sequence for TGM6 (NM_198994.1,483-501).
cagaggacgatgtgtttct

SEQ ID NO: 440393 - DNA, 19 bp, Homo sapiens
  siRNA target sequence for TGM6 (NM_198994.1,938-956).
cgggtcgtgtccaacttca

SEQ ID NO: 440394 - DNA, 19 bp, Homo sapiens
  siRNA target sequence for TGM6 (NM_198994.1,939-957).
gggtcgtgtccaacttcaa

SEQ ID NO: 440395 - DNA, 19 bp, Homo sapiens
  siRNA target sequence for TGM6 (NM_198994.1,1244-1262).
gtcaacgccgactacatca

SEQ ID NO: 440396 - DNA, 19 bp, Homo sapiens
  siRNA target sequence for TGM6 (NM_198994.1,1288-1306).
ccgggagcgtgtatactca

SEQ ID NO: 440397 - DNA, 19 bp, Homo sapiens
  siRNA target sequence for TGM6 (NM_198994.1,1289-1307).
cgggagcgtgtatactcaa

SEQ ID NO: 440398 - DNA, 19 bp, Homo sapiens
  siRNA target sequence for TGM6 (NM_198994.1,1290-1308).
gggagcgtgtatactcaaa

SEQ ID NO: 440399 - DNA, 19 bp, Homo sapiens
  siRNA target sequence for TGM6 (NM_198994.1,1292-1310).
gagcgtgtatactcaaaca

SEQ ID NO: 440400 - DNA, 19 bp, Homo sapiens
  siRNA target sequence for TGM6 (NM_198994.1,1372-1390).
cactgacctctacaagtat

SEQ ID NO: 440401 - DNA, 19 bp, Homo sapiens
  siRNA target sequence for TGM6 (NM_198994.1,1542-1560).
gcatcgctggcaagttcaa

SEQ ID NO: 440402 - DNA, 19 bp, Homo sapiens
  siRNA target sequence for TGM6 (NM_198994.1,1758-1776).
caatatcttactctaagta

SEQ ID NO: 440403 - DNA, 19 bp, Homo sapiens
  siRNA target sequence for TGM6 (NM_198994.1,1852-1870).
ggtggagaaggacattact

SEQ ID NO: 440404 - DNA, 19 bp, Homo sapiens
  siRNA target sequence for TGM6 (NM_198994.1,1946-1964).
gtcaaccccctcatagaga

SEQ ID NO: 440405 - DNA, 19 bp, Homo sapiens
  siRNA target sequence for TGM6 (NM_198994.1,2055-2073).
gggcctcagtccagtttga

SEQ ID NO: 440406 - DNA, 19 bp, Homo sapiens
  siRNA target sequence for TGM6 (NM_198994.1,2057-2075).
gcctcagtccagtttgaca

SEQ ID NO: 440407 - DNA, 19 bp, Homo sapiens
  siRNA target sequence for LOC374864 (NM_198995.1,240-258).
cttccactagagatgatca

SEQ ID NO: 440408 - DNA, 19 bp, Homo sapiens
  siRNA target sequence for LOC374864 (NM_198995.1,249-267).
gagatgatcaaaccaatat

SEQ ID NO: 440409 - DNA, 19 bp, Homo sapiens
  siRNA target sequence for LOC374864 (NM_198995.1,254-272).
gatcaaaccaatataggtt

SEQ ID NO: 440410 - DNA, 19 bp, Homo sapiens
  siRNA target sequence for LOC374864 (NM_198995.1,257-275).
caaaccaatataggtttaa

SEQ ID NO: 440411 - DNA, 19 bp, Homo sapiens
  siRNA target sequence for LOC374864 (NM_198995.1,307-325).
ggcatggtcaaggacaaat

SEQ ID NO: 440412 - DNA, 19 bp, Homo sapiens
  siRNA target sequence for LOC374864 (NM_198995.1,329-347).
ggcaatgccatgtctcaaa

SEQ ID NO: 440413 - DNA, 19 bp, Homo sapiens
  siRNA target sequence for LOC374864 (NM_198995.1,331-349).
caatgccatgtctcaaagt

SEQ ID NO: 440414 - DNA, 19 bp, Homo sapiens
  siRNA target sequence for LOC374864 (NM_198995.1,420-438).
gggtgaataaaggcattta

SEQ ID NO: 440415 - DNA, 19 bp, Homo sapiens
  siRNA target sequence for LOC374864 (NM_198995.1,461-479).
cacagctgtgccgtagtaa

SEQ ID NO: 440416 - DNA, 19 bp, Homo sapiens
  siRNA target sequence for LOC374864 (NM_198995.1,463-481).
cagctgtgccgtagtaaat

SEQ ID NO: 440417 - DNA, 19 bp, Homo sapiens
  siRNA target sequence for LOC374864 (NM_198995.1,465-483).
gctgtgccgtagtaaatat

SEQ ID NO: 440418 - DNA, 19 bp, Homo sapiens
  siRNA target sequence for LOC374864 (NM_198995.1,466-484).
ctgtgccgtagtaaatatt

SEQ ID NO: 440419 - DNA, 19 bp, Homo sapiens
  siRNA target sequence for LOC374864 (NM_198995.1,486-504).
cagcaccttgtgtcaacaa

SEQ ID NO: 440420 - DNA, 19 bp, Homo sapiens
  siRNA target sequence for LOC374864 (NM_198995.1,534-552).
ccaaaatacaggagcattt

SEQ ID NO: 440421 - DNA, 19 bp, Homo sapiens
  siRNA target sequence for LOC374864 (NM_198995.1,588-606).
gaacttcttccacaaaaga

SEQ ID NO: 440422 - DNA, 19 bp, Homo sapiens
  siRNA target sequence for LOC374864 (NM_198995.1,718-736).
ggccattcgtctcattaaa

SEQ ID NO: 440423 - DNA, 19 bp, Homo sapiens
  siRNA target sequence for LOC374864 (NM_198995.1,730-748).
cattaaaagtctagaaact

SEQ ID NO: 440424 - DNA, 19 bp, Homo sapiens
  siRNA target sequence for LOC374864 (NM_198995.1,828-846).
cagtctggaaacttcaaga

SEQ ID NO: 440425 - DNA, 19 bp, Homo sapiens
  siRNA target sequence for LOC374864 (NM_198995.1,877-895).
ggcctatttgagtgatgtt

SEQ ID NO: 440426 - DNA, 19 bp, Homo sapiens
  siRNA target sequence for LOC374864 (NM_198995.1,878-896).
gcctatttgagtgatgtta

SEQ ID NO: 440427 - DNA, 19 bp, Homo sapiens
  siRNA target sequence for LOC374864 (NM_198995.1,879-897).
cctatttgagtgatgttat

SEQ ID NO: 440428 - DNA, 19 bp, Homo sapiens
  siRNA target sequence for LOC374864 (NM_198995.1,880-898).
ctatttgagtgatgttata

SEQ ID NO: 440429 - DNA, 19 bp, Homo sapiens
  siRNA target sequence for LOC374864 (NM_198995.1,932-950).
caactacaacattttgaaa

SEQ ID NO: 440430 - DNA, 19 bp, Homo sapiens
  siRNA target sequence for LOC374864 (NM_198995.1,992-1010).
gcagacatagactacatga

SEQ ID NO: 440431 - DNA, 19 bp, Homo sapiens
  siRNA target sequence for LOC374864 (NM_198995.1,1020-1038).
gccctctactggactctaa

SEQ ID NO: 440432 - DNA, 19 bp, Homo sapiens
  siRNA target sequence for LOC374864 (NM_198995.1,1099-1117).
cctacacagaaaagttaat

SEQ ID NO: 440433 - DNA, 19 bp, Homo sapiens
  siRNA target sequence for LOC374864 (NM_198995.1,1225-1243).
ggcctacaagagagagata

SEQ ID NO: 440434 - DNA, 19 bp, Homo sapiens
  siRNA target sequence for LOC374864 (NM_198995.1,1226-1244).
gcctacaagagagagatat

SEQ ID NO: 440435 - DNA, 19 bp, Homo sapiens
  siRNA target sequence for LOC374864 (NM_198995.1,1236-1254).
gagagatatatcaacttaa

SEQ ID NO: 440436 - DNA, 19 bp, Homo sapiens
  siRNA target sequence for LOC374864 (NM_198995.1,1238-1256).
gagatatatcaacttaaca

SEQ ID NO: 440437 - DNA, 19 bp, Homo sapiens
  siRNA target sequence for LOC374864 (NM_198995.1,1275-1293).
cttcatcagtgataaatgt

SEQ ID NO: 440438 - DNA, 19 bp, Homo sapiens
  siRNA target sequence for LOC374864 (NM_198995.1,1331-1349).
gaagcaataagggaaacaa

SEQ ID NO: 440439 - DNA, 19 bp, Homo sapiens
  siRNA target sequence for LOC374864 (NM_198995.1,1494-1512).
gggatattgagctttctga

SEQ ID NO: 440440 - DNA, 19 bp, Homo sapiens
  siRNA target sequence for LOC374864 (NM_198995.1,1495-1513).
ggatattgagctttctgat

SEQ ID NO: 440441 - DNA, 19 bp, Homo sapiens
  siRNA target sequence for LOC374864 (NM_198995.1,1556-1574).
ctgacggaagacaataaaa

SEQ ID NO: 440442 - DNA, 19 bp, Homo sapiens
  siRNA target sequence for LOC374864 (NM_198995.1,1635-1653).
caaaatacgaatctgaaat

SEQ ID NO: 440443 - DNA, 19 bp, Homo sapiens
  siRNA target sequence for LOC374864 (NM_198995.1,1712-1730).
gaggcttatcgcattggta

SEQ ID NO: 440444 - DNA, 19 bp, Homo sapiens
  siRNA target sequence for LOC374864 (NM_198995.1,1851-1869).
ctggaatggtgcttcagaa

SEQ ID NO: 440445 - DNA, 19 bp, Homo sapiens
  siRNA target sequence for LOC374864 (NM_198995.1,1859-1877).
gtgcttcagaaaaaactat

SEQ ID NO: 440446 - DNA, 19 bp, Homo sapiens
  siRNA target sequence for LOC374864 (NM_198995.1,1942-1960).
catgtcactggcagaacta

SEQ ID NO: 440447 - DNA, 19 bp, Homo sapiens
  siRNA target sequence for LOC374864 (NM_198995.1,1963-1981).
ggaacctctgcttcaacta

SEQ ID NO: 440448 - DNA, 19 bp, Homo sapiens
  siRNA target sequence for LOC374864 (NM_198995.1,1968-1986).
ctctgcttcaactagaaga

SEQ ID NO: 440449 - DNA, 19 bp, Homo sapiens
  siRNA target sequence for LOC374864 (NM_198995.1,2014-2032).
caaagaacattctgttagt

SEQ ID NO: 440450 - DNA, 19 bp, Homo sapiens
  siRNA target sequence for LOC374864 (NM_198995.1,2031-2049).
gtaaacgctcagcaatttt

SEQ ID NO: 440451 - DNA, 19 bp, Homo sapiens
  siRNA target sequence for LOC374864 (NM_198995.1,2067-2085).
ctaaaagtaagacaatgat

SEQ ID NO: 440452 - DNA, 19 bp, Homo sapiens
  siRNA target sequence for LOC374864 (NM_198995.1,2179-2197).
caaatttataactatgaga

SEQ ID NO: 440453 - DNA, 19 bp, Homo sapiens
  siRNA target sequence for LOC374864 (NM_198995.1,2252-2270).
gactgtgaagagagaatct

SEQ ID NO: 440454 - DNA, 19 bp, Homo sapiens
  siRNA target sequence for LOC374864 (NM_198995.1,2265-2283).
gaatctttgaggaagatca

SEQ ID NO: 440455 - DNA, 19 bp, Homo sapiens
  siRNA target sequence for LOC374864 (NM_198995.1,2273-2291).
gaggaagatcagagattta

SEQ ID NO: 440456 - DNA, 19 bp, Homo sapiens
  siRNA target sequence for LOC374864 (NM_198995.1,2368-2386).
gcgtttagctcaagagtat

SEQ ID NO: 440457 - DNA, 19 bp, Homo sapiens
  siRNA target sequence for LOC374864 (NM_198995.1,2370-2388).
gtttagctcaagagtatca

SEQ ID NO: 440458 - DNA, 19 bp, Homo sapiens
  siRNA target sequence for LOC374864 (NM_198995.1,2449-2467).
gctatcacttgatacttca

SEQ ID NO: 440459 - DNA, 19 bp, Homo sapiens
  siRNA target sequence for LOC374864 (NM_198995.1,2450-2468).
ctatcacttgatacttcaa

SEQ ID NO: 440460 - DNA, 19 bp, Homo sapiens
  siRNA target sequence for LOC374864 (NM_198995.1,2459-2477).
gatacttcaattagagata

SEQ ID NO: 440461 - DNA, 19 bp, Homo sapiens
  siRNA target sequence for LOC374864 (NM_198995.1,2591-2609).
gagagtattcagaaaatat

SEQ ID NO: 440462 - DNA, 19 bp, Homo sapiens
  siRNA target sequence for LOC375108 (NM_198996.1,37-55).
cttgtgccaaaaatatagt

SEQ ID NO: 440463 - DNA, 19 bp, Homo sapiens
  siRNA target sequence for LOC375108 (NM_198996.1,149-167).
cagctaagtgtaaaggatt

SEQ ID NO: 440464 - DNA, 19 bp, Homo sapiens
  siRNA target sequence for LOC375108 (NM_198996.1,163-181).
ggattccttcagagattta

SEQ ID NO: 440465 - DNA, 19 bp, Homo sapiens
  siRNA target sequence for LOC375108 (NM_198996.1,192-210).
gaatagagaccattctgat

SEQ ID NO: 440466 - DNA, 19 bp, Homo sapiens
  siRNA target sequence for LOC375108 (NM_198996.1,197-215).
gagaccattctgatgatgt

SEQ ID NO: 440467 - DNA, 19 bp, Homo sapiens
  siRNA target sequence for LOC375108 (NM_198996.1,250-268).
gtttgaacaaaataactca

SEQ ID NO: 440468 - DNA, 19 bp, Homo sapiens
  siRNA target sequence for LOC375108 (NM_198996.1,307-325).
gcttattcacggatacaga

SEQ ID NO: 440469 - DNA, 19 bp, Homo sapiens
  siRNA target sequence for LOC375108 (NM_198996.1,329-347).
gtaggctccatcccattat

SEQ ID NO: 440470 - DNA, 19 bp, Homo sapiens
  siRNA target sequence for LOC375108 (NM_198996.1,366-384).
ggattttgctgaatgaaga

SEQ ID NO: 440471 - DNA, 19 bp, Homo sapiens
  siRNA target sequence for LOC375108 (NM_198996.1,417-435).
ggggtgctacaacttttat

SEQ ID NO: 440472 - DNA, 19 bp, Homo sapiens
  siRNA target sequence for LOC375108 (NM_198996.1,418-436).
gggtgctacaacttttatt

SEQ ID NO: 440473 - DNA, 19 bp, Homo sapiens
  siRNA target sequence for LOC375108 (NM_198996.1,420-438).
gtgctacaacttttattta

SEQ ID NO: 440474 - DNA, 19 bp, Homo sapiens
  siRNA target sequence for LOC375108 (NM_198996.1,477-495).
gtttgagtgtgcacattaa

SEQ ID NO: 440475 - DNA, 19 bp, Homo sapiens
  siRNA target sequence for LOC375108 (NM_198996.1,483-501).
gtgtgcacattaaaaatct

SEQ ID NO: 440476 - DNA, 19 bp, Homo sapiens
  siRNA target sequence for LOC375108 (NM_198996.1,556-574).
ggctcatatcagtggattt

SEQ ID NO: 440477 - DNA, 19 bp, Homo sapiens
  siRNA target sequence for LOC375108 (NM_198996.1,651-669).
caccatatagcagattaga

SEQ ID NO: 440478 - DNA, 19 bp, Homo sapiens
  siRNA target sequence for LOC375108 (NM_198996.1,653-671).
ccatatagcagattagatt

SEQ ID NO: 440479 - DNA, 19 bp, Homo sapiens
  siRNA target sequence for LOC375108 (NM_198996.1,654-672).
catatagcagattagatta

SEQ ID NO: 440480 - DNA, 19 bp, Homo sapiens
  siRNA target sequence for LOC375108 (NM_198996.1,712-730).
caatggtttaggcattcaa

SEQ ID NO: 440481 - DNA, 19 bp, Homo sapiens
  siRNA target sequence for LOC375108 (NM_198996.1,733-751).
gcccttgggacatatagat

SEQ ID NO: 440482 - DNA, 19 bp, Homo sapiens
  siRNA target sequence for LOC375108 (NM_198996.1,739-757).
gggacatatagatttttat

SEQ ID NO: 440483 - DNA, 19 bp, Homo sapiens
  siRNA target sequence for LOC375108 (NM_198996.1,779-797).
cctggctgtcctaaatcaa

SEQ ID NO: 440484 - DNA, 19 bp, Homo sapiens
  siRNA target sequence for LOC375108 (NM_198996.1,780-798).
ctggctgtcctaaatcaat

SEQ ID NO: 440485 - DNA, 19 bp, Homo sapiens
  siRNA target sequence for LOC375108 (NM_198996.1,783-801).
gctgtcctaaatcaatttt

SEQ ID NO: 440486 - DNA, 19 bp, Homo sapiens
  siRNA target sequence for LOC375108 (NM_198996.1,795-813).
caattttctcaggaattca

SEQ ID NO: 440487 - DNA, 19 bp, Homo sapiens
  siRNA target sequence for LOC375108 (NM_198996.1,847-865).
cttgttcatggcatcttta

SEQ ID NO: 440488 - DNA, 19 bp, Homo sapiens
  siRNA target sequence for LOC375108 (NM_198996.1,894-912).
cttgtcgttcatacaaaga

SEQ ID NO: 440489 - DNA, 19 bp, Homo sapiens
  siRNA target sequence for LOC375108 (NM_198996.1,897-915).
gtcgttcatacaaagatta

SEQ ID NO: 440490 - DNA, 19 bp, Homo sapiens
  siRNA target sequence for LOC375108 (NM_198996.1,899-917).
cgttcatacaaagattaca

SEQ ID NO: 440491 - DNA, 19 bp, Homo sapiens
  siRNA target sequence for LOC375108 (NM_198996.1,900-918).
gttcatacaaagattacaa

SEQ ID NO: 440492 - DNA, 19 bp, Homo sapiens
  siRNA target sequence for LOC375108 (NM_198996.1,911-929).
gattacaagactagcttat

SEQ ID NO: 440493 - DNA, 19 bp, Homo sapiens
  siRNA target sequence for LOC375108 (NM_198996.1,930-948).
gtgtggactgtgactgttt

SEQ ID NO: 440494 - DNA, 19 bp, Homo sapiens
  siRNA target sequence for LOC375108 (NM_198996.1,963-981).
gtcctcggctgggttatca

SEQ ID NO: 440495 - DNA, 19 bp, Homo sapiens
  siRNA target sequence for LOC375108 (NM_198996.1,975-993).
gttatcaagccaagctatt

SEQ ID NO: 440496 - DNA, 19 bp, Homo sapiens
  siRNA target sequence for LOC375108 (NM_198996.1,1051-1069).
ggatacaagtggtacatat

SEQ ID NO: 440497 - DNA, 19 bp, Homo sapiens
  siRNA target sequence for LOC375108 (NM_198996.1,1098-1116).
gtataattgttccagataa

SEQ ID NO: 440498 - DNA, 19 bp, Homo sapiens
  siRNA target sequence for LOC375108 (NM_198996.1,1123-1141).
gatggatggctcgttttca

SEQ ID NO: 440499 - DNA, 19 bp, Homo sapiens
  siRNA target sequence for LOC375108 (NM_198996.1,1126-1144).
ggatggctcgttttcattt

SEQ ID NO: 440500 - DNA, 19 bp, Homo sapiens
  siRNA target sequence for LOC375108 (NM_198996.1,1127-1145).
gatggctcgttttcattta

SEQ ID NO: 440501 - DNA, 19 bp, Homo sapiens
  siRNA target sequence for LOC375108 (NM_198996.1,1235-1253).
gctcaattttataatgact

SEQ ID NO: 440502 - DNA, 19 bp, Homo sapiens
  siRNA target sequence for LOC375108 (NM_198996.1,1327-1345).
gatccagagactcatgtta

SEQ ID NO: 440503 - DNA, 19 bp, Homo sapiens
  siRNA target sequence for LOC375108 (NM_198996.1,1335-1353).
gactcatgttaaaatcact

SEQ ID NO: 440504 - DNA, 19 bp, Homo sapiens
  siRNA target sequence for LOC375108 (NM_198996.1,1383-1401).
ggtataatattgtacttaa

SEQ ID NO: 440505 - DNA, 19 bp, Homo sapiens
  siRNA target sequence for AQP12 (NM_198998.1,85-103).
gtgtccctctccttcttct

SEQ ID NO: 440506 - DNA, 19 bp, Homo sapiens
  siRNA target sequence for PRES (NM_198999.1,271-289).
caacccagaggtactatgt

SEQ ID NO: 440507 - DNA, 19 bp, Homo sapiens
  siRNA target sequence for PRES (NM_198999.1,313-331).
cggtcctccaggaaagact

SEQ ID NO: 440508 - DNA, 19 bp, Homo sapiens
  siRNA target sequence for PRES (NM_198999.1,314-332).
ggtcctccaggaaagacta

SEQ ID NO: 440509 - DNA, 19 bp, Homo sapiens
  siRNA target sequence for PRES (NM_198999.1,386-404).
cacatgtactcctaaaaaa

SEQ ID NO: 440510 - DNA, 19 bp, Homo sapiens
  siRNA target sequence for PRES (NM_198999.1,388-406).
catgtactcctaaaaaaat

SEQ ID NO: 440511 - DNA, 19 bp, Homo sapiens
  siRNA target sequence for PRES (NM_198999.1,425-443).
gttcctacccataactaaa

SEQ ID NO: 440512 - DNA, 19 bp, Homo sapiens
  siRNA target sequence for PRES (NM_198999.1,525-543).
caaggcttagcctttgcaa

SEQ ID NO: 440513 - DNA, 19 bp, Homo sapiens
  siRNA target sequence for PRES (NM_198999.1,548-566).
ggcagctgtgcctccaata

SEQ ID NO: 440514 - DNA, 19 bp, Homo sapiens
  siRNA target sequence for PRES (NM_198999.1,550-568).
cagctgtgcctccaatatt

SEQ ID NO: 440515 - DNA, 19 bp, Homo sapiens
  siRNA target sequence for PRES (NM_198999.1,570-588).
ggcctgtactcttcatttt

SEQ ID NO: 440516 - DNA, 19 bp, Homo sapiens
  siRNA target sequence for PRES (NM_198999.1,571-589).
gcctgtactcttcatttta

SEQ ID NO: 440517 - DNA, 19 bp, Homo sapiens
  siRNA target sequence for PRES (NM_198999.1,590-608).
ccctgttatcatgtattgt

SEQ ID NO: 440518 - DNA, 19 bp, Homo sapiens
  siRNA target sequence for PRES (NM_198999.1,591-609).
cctgttatcatgtattgtt

SEQ ID NO: 440519 - DNA, 19 bp, Homo sapiens
  siRNA target sequence for PRES (NM_198999.1,649-667).
ctgttattagcctgatgat

SEQ ID NO: 440520 - DNA, 19 bp, Homo sapiens
  siRNA target sequence for PRES (NM_198999.1,670-688).
gtggtgtagctgttcgatt

SEQ ID NO: 440521 - DNA, 19 bp, Homo sapiens
  siRNA target sequence for PRES (NM_198999.1,673-691).
gtgtagctgttcgattagt

SEQ ID NO: 440522 - DNA, 19 bp, Homo sapiens
  siRNA target sequence for PRES (NM_198999.1,684-702).
cgattagtaccagatgata

SEQ ID NO: 440523 - DNA, 19 bp, Homo sapiens
  siRNA target sequence for PRES (NM_198999.1,685-703).
gattagtaccagatgatat

SEQ ID NO: 440524 - DNA, 19 bp, Homo sapiens
  siRNA target sequence for PRES (NM_198999.1,690-708).
gtaccagatgatatagtca

SEQ ID NO: 440525 - DNA, 19 bp, Homo sapiens
  siRNA target sequence for PRES (NM_198999.1,776-794).
gtctgtgaccttactttca

SEQ ID NO: 440526 - DNA, 19 bp, Homo sapiens
  siRNA target sequence for PRES (NM_198999.1,784-802).
ccttactttcaggaatcat

SEQ ID NO: 440527 - DNA, 19 bp, Homo sapiens
  siRNA target sequence for PRES (NM_198999.1,812-830).
cctaggtgtctgtaggttt

SEQ ID NO: 440528 - DNA, 19 bp, Homo sapiens
  siRNA target sequence for PRES (NM_198999.1,816-834).
ggtgtctgtaggtttggat

SEQ ID NO: 440529 - DNA, 19 bp, Homo sapiens
  siRNA target sequence for PRES (NM_198999.1,861-879).
ctggtccgtgggtttacca

SEQ ID NO: 440530 - DNA, 19 bp, Homo sapiens
  siRNA target sequence for PRES (NM_198999.1,902-920).
cacctccatgttaaaatat

SEQ ID NO: 440531 - DNA, 19 bp, Homo sapiens
  siRNA target sequence for PRES (NM_198999.1,941-959).
gcggtacagtggaatcttt

SEQ ID NO: 440532 - DNA, 19 bp, Homo sapiens
  siRNA target sequence for PRES (NM_198999.1,942-960).
cggtacagtggaatctttt

SEQ ID NO: 440533 - DNA, 19 bp, Homo sapiens
  siRNA target sequence for PRES (NM_198999.1,956-974).
cttttccgtggtgtatagt

SEQ ID NO: 440534 - DNA, 19 bp, Homo sapiens
  siRNA target sequence for PRES (NM_198999.1,962-980).
cgtggtgtatagtacagtt

SEQ ID NO: 440535 - DNA, 19 bp, Homo sapiens
  siRNA target sequence for PRES (NM_198999.1,1023-1041).
ggcgtcgggctgatggttt

SEQ ID NO: 440536 - DNA, 19 bp, Homo sapiens
  siRNA target sequence for PRES (NM_198999.1,1024-1042).
gcgtcgggctgatggtttt

SEQ ID NO: 440537 - DNA, 19 bp, Homo sapiens
  siRNA target sequence for PRES (NM_198999.1,1025-1043).
cgtcgggctgatggttttt

SEQ ID NO: 440538 - DNA, 19 bp, Homo sapiens
  siRNA target sequence for PRES (NM_198999.1,1028-1046).
cgggctgatggtttttggt

SEQ ID NO: 440539 - DNA, 19 bp, Homo sapiens
  siRNA target sequence for PRES (NM_198999.1,1102-1120).
ctattcctttagagttctt

SEQ ID NO: 440540 - DNA, 19 bp, Homo sapiens
  siRNA target sequence for PRES (NM_198999.1,1181-1199).
ggatgtcgttggaacactt

SEQ ID NO: 440541 - DNA, 19 bp, Homo sapiens
  siRNA target sequence for PRES (NM_198999.1,1270-1288).
ccatagccatcgttggatt

SEQ ID NO: 440542 - DNA, 19 bp, Homo sapiens
  siRNA target sequence for PRES (NM_198999.1,1308-1326).
gccaagaccttagcaaata

SEQ ID NO: 440543 - DNA, 19 bp, Homo sapiens
  siRNA target sequence for PRES (NM_198999.1,1309-1327).
ccaagaccttagcaaataa

SEQ ID NO: 440544 - DNA, 19 bp, Homo sapiens
  siRNA target sequence for PRES (NM_198999.1,1465-1483).
cacagcttgcaggttgttt

SEQ ID NO: 440545 - DNA, 19 bp, Homo sapiens
  siRNA target sequence for PRES (NM_198999.1,1480-1498).
gtttggcctcattaatgat

SEQ ID NO: 440546 - DNA, 19 bp, Homo sapiens
  siRNA target sequence for PRES (NM_198999.1,1516-1534).
caactggattcctctttga

SEQ ID NO: 440547 - DNA, 19 bp, Homo sapiens
  siRNA target sequence for PRES (NM_198999.1,1521-1539).
ggattcctctttgaatcat

SEQ ID NO: 440548 - DNA, 19 bp, Homo sapiens
  siRNA target sequence for PRES (NM_198999.1,1551-1569).
gtgctgtcggccattgtga

SEQ ID NO: 440549 - DNA, 19 bp, Homo sapiens
  siRNA target sequence for PRES (NM_198999.1,1553-1571).
gctgtcggccattgtgatt

SEQ ID NO: 440550 - DNA, 19 bp, Homo sapiens
  siRNA target sequence for PRES (NM_198999.1,1558-1576).
cggccattgtgattgtcaa

SEQ ID NO: 440551 - DNA, 19 bp, Homo sapiens
  siRNA target sequence for PRES (NM_198999.1,1680-1698).
ctgggattggactatggtt

SEQ ID NO: 440552 - DNA, 19 bp, Homo sapiens
  siRNA target sequence for PRES (NM_198999.1,1684-1702).
gattggactatggtttgat

SEQ ID NO: 440553 - DNA, 19 bp, Homo sapiens
  siRNA target sequence for PRES (NM_198999.1,1719-1737).
gctctgctgactgtgattt

SEQ ID NO: 440554 - DNA, 19 bp, Homo sapiens
  siRNA target sequence for PRES (NM_198999.1,1722-1740).
ctgctgactgtgatttaca

SEQ ID NO: 440555 - DNA, 19 bp, Homo sapiens
  siRNA target sequence for PRES (NM_198999.1,1760-1778).
caaagtccttggaaagctt

SEQ ID NO: 440556 - DNA, 19 bp, Homo sapiens
  siRNA target sequence for PRES (NM_198999.1,1817-1835).
ggaggtgaaagaaattcct

SEQ ID NO: 440557 - DNA, 19 bp, Homo sapiens
  siRNA target sequence for PRES (NM_198999.1,1860-1878).
gcaccaatttactatgcaa

SEQ ID NO: 440558 - DNA, 19 bp, Homo sapiens
  siRNA target sequence for PRES (NM_198999.1,1861-1879).
caccaatttactatgcaaa

SEQ ID NO: 440559 - DNA, 19 bp, Homo sapiens
  siRNA target sequence for PRES (NM_198999.1,1884-1902).
gacttgtatagcaatgcat

SEQ ID NO: 440560 - DNA, 19 bp, Homo sapiens
  siRNA target sequence for PRES (NM_198999.1,1886-1904).
cttgtatagcaatgcatta

SEQ ID NO: 440561 - DNA, 19 bp, Homo sapiens
  siRNA target sequence for PRES (NM_198999.1,1889-1907).
gtatagcaatgcattaaaa

SEQ ID NO: 440562 - DNA, 19 bp, Homo sapiens
  siRNA target sequence for PRES (NM_198999.1,1961-1979).
gcggaagtacgctaaggaa

SEQ ID NO: 440563 - DNA, 19 bp, Homo sapiens
  siRNA target sequence for PRES (NM_198999.1,1999-2017).
ccaacgcaactgttgtcaa

SEQ ID NO: 440564 - DNA, 19 bp, Homo sapiens
  siRNA target sequence for PRES (NM_198999.1,2000-2018).
caacgcaactgttgtcaaa

SEQ ID NO: 440565 - DNA, 19 bp, Homo sapiens
  siRNA target sequence for PRES (NM_198999.1,2096-2114).
gatcaaaagcacatttcct

SEQ ID NO: 440566 - DNA, 19 bp, Homo sapiens
  siRNA target sequence for PRES (NM_198999.1,2169-2187).
gatttcactcaagtcaatt

SEQ ID NO: 440567 - DNA, 19 bp, Homo sapiens
  siRNA target sequence for PRES (NM_198999.1,2178-2196).
caagtcaattttattgatt

SEQ ID NO: 440568 - DNA, 19 bp, Homo sapiens
  siRNA target sequence for PRES (NM_198999.1,2193-2211).
gattctgttggagtgaaaa

SEQ ID NO: 440569 - DNA, 19 bp, Homo sapiens
  siRNA target sequence for PRES (NM_198999.1,2197-2215).
ctgttggagtgaaaactct

SEQ ID NO: 440570 - DNA, 19 bp, Homo sapiens
  siRNA target sequence for PRES (NM_198999.1,2239-2257).
gagacgtcggtatatatgt

SEQ ID NO: 440571 - DNA, 19 bp, Homo sapiens
  siRNA target sequence for PRES (NM_198999.1,2241-2259).
gacgtcggtatatatgtat

SEQ ID NO: 440572 - DNA, 19 bp, Homo sapiens
  siRNA target sequence for PRES (NM_198999.1,2244-2262).
gtcggtatatatgtatact

SEQ ID NO: 440573 - DNA, 19 bp, Homo sapiens
  siRNA target sequence for PRES (NM_198999.1,2269-2287).
gatgcagtgcacaagttgt

SEQ ID NO: 440574 - DNA, 19 bp, Homo sapiens
  siRNA target sequence for PRES (NM_198999.1,2272-2290).
gcagtgcacaagttgtgaa

SEQ ID NO: 440575 - DNA, 19 bp, Homo sapiens
  siRNA target sequence for PRES (NM_198999.1,2275-2293).
gtgcacaagttgtgaatga

SEQ ID NO: 440576 - DNA, 19 bp, Homo sapiens
  siRNA target sequence for PRES (NM_198999.1,2292-2310).
gacctcactcggaatagat

SEQ ID NO: 440577 - DNA, 19 bp, Homo sapiens
  siRNA target sequence for PRES (NM_198999.1,2301-2319).
cggaatagattttttgaaa

SEQ ID NO: 440578 - DNA, 19 bp, Homo sapiens
  siRNA target sequence for PRES (NM_198999.1,2342-2360).
gttccacagcattcatgat

SEQ ID NO: 440579 - DNA, 19 bp, Homo sapiens
  siRNA target sequence for LHFPL3 (NM_199000.1,193-211).
gctgtaccacaccaactat

SEQ ID NO: 440580 - DNA, 19 bp, Homo sapiens
  siRNA target sequence for LHFPL3 (NM_199000.1,485-503).
gcctgcatcatttgcttta

SEQ ID NO: 440581 - DNA, 19 bp, Homo sapiens
  siRNA target sequence for LHFPL3 (NM_199000.1,525-543).
cggccactgtgtacaagat

SEQ ID NO: 440582 - DNA, 19 bp, Homo sapiens
  siRNA target sequence for LHFPL3 (NM_199000.1,526-544).
ggccactgtgtacaagata

SEQ ID NO: 440583 - DNA, 19 bp, Homo sapiens
  siRNA target sequence for LHFPL3 (NM_199000.1,527-545).
gccactgtgtacaagatat

SEQ ID NO: 440584 - DNA, 19 bp, Homo sapiens
  siRNA target sequence for LHFPL3 (NM_199000.1,529-547).
cactgtgtacaagatatgt

SEQ ID NO: 440585 - DNA, 19 bp, Homo sapiens
  siRNA target sequence for LHFPL3 (NM_199000.1,578-596).
cttgtgcttggctgtatga

SEQ ID NO: 440586 - DNA, 19 bp, Homo sapiens
  siRNA target sequence for LHFPL3 (NM_199000.1,612-630).
gggactcagatgaagtaaa

SEQ ID NO: 440587 - DNA, 19 bp, Homo sapiens
  siRNA target sequence for LHFPL3 (NM_199000.1,694-712).
catcctggctattattgga

SEQ ID NO: 440588 - DNA, 19 bp, Homo sapiens
  siRNA target sequence for LHFPL3 (NM_199000.1,697-715).
cctggctattattggaatt

SEQ ID NO: 440589 - DNA, 19 bp, Homo sapiens
  siRNA target sequence for LHFPL3 (NM_199000.1,702-720).
ctattattggaattttgga

SEQ ID NO: 440590 - DNA, 19 bp, Homo sapiens
  siRNA target sequence for LHFPL3 (NM_199000.1,806-824).
gttctgctaagccaatatt

SEQ ID NO: 440591 - DNA, 19 bp, Homo sapiens
  siRNA target sequence for MGC22960 (NM_199044.2,176-194).
cggagacatcgatataaga

SEQ ID NO: 440592 - DNA, 19 bp, Homo sapiens
  siRNA target sequence for MGC22960 (NM_199044.2,233-251).
cgactggctttgcagaatt

SEQ ID NO: 440593 - DNA, 19 bp, Homo sapiens
  siRNA target sequence for MGC22960 (NM_199044.2,279-297).
gagatctttggccatcaat

SEQ ID NO: 440594 - DNA, 19 bp, Homo sapiens
  siRNA target sequence for MGC22960 (NM_199044.2,310-328).
cctctcagagcagaagtat

SEQ ID NO: 440595 - DNA, 19 bp, Homo sapiens
  siRNA target sequence for MGC22960 (NM_199044.2,329-347).
ggtgcactggtcaataact

SEQ ID NO: 440596 - DNA, 19 bp, Homo sapiens
  siRNA target sequence for MGC22960 (NM_199044.2,497-515).
cgatgcttcacttttgaca

SEQ ID NO: 440597 - DNA, 19 bp, Homo sapiens
  siRNA target sequence for MGC22960 (NM_199044.2,940-958).
gaagaaggagcgacagata

SEQ ID NO: 440598 - DNA, 19 bp, Homo sapiens
  siRNA target sequence for MGC22960 (NM_199044.2,1136-1154).
cacttccgaagggttttca

SEQ ID NO: 440599 - DNA, 19 bp, Homo sapiens
  siRNA target sequence for TEPP (NM_199046.1,43-61).
cattgtctgtgcacaatgt

SEQ ID NO: 440600 - DNA, 19 bp, Homo sapiens
  siRNA target sequence for TEPP (NM_199046.1,51-69).
gtgcacaatgttcctttat

SEQ ID NO: 440601 - DNA, 19 bp, Homo sapiens
  siRNA target sequence for TEPP (NM_199046.1,71-89).
ctgctgctgtccataataa

SEQ ID NO: 440602 - DNA, 19 bp, Homo sapiens
  siRNA target sequence for TEPP (NM_199046.1,166-184).
gggcctgggccctacagat

SEQ ID NO: 440603 - DNA, 19 bp, Homo sapiens
  siRNA target sequence for TEPP (NM_199046.1,167-185).
ggcctgggccctacagata

SEQ ID NO: 440604 - DNA, 19 bp, Homo sapiens
  siRNA target sequence for TEPP (NM_199046.1,168-186).
gcctgggccctacagataa

SEQ ID NO: 440605 - DNA, 19 bp, Homo sapiens
  siRNA target sequence for TEPP (NM_199046.1,411-429).
cctactgccgcaaagatga

SEQ ID NO: 440606 - DNA, 19 bp, Homo sapiens
  siRNA target sequence for TEPP (NM_199046.1,412-430).
ctactgccgcaaagatgaa

SEQ ID NO: 440607 - DNA, 19 bp, Homo sapiens
  siRNA target sequence for TEPP (NM_199046.1,897-915).
gctacagtcgtgtcaacta

SEQ ID NO: 440608 - DNA, 19 bp, Homo sapiens
  siRNA target sequence for TRF3 (NM_199047.1,177-195).
cctgttcagcccagttgta

SEQ ID NO: 440609 - DNA, 19 bp, Homo sapiens
  siRNA target sequence for TRF3 (NM_199047.1,183-201).
cagcccagttgtaccttat

SEQ ID NO: 440610 - DNA, 19 bp, Homo sapiens
  siRNA target sequence for TRF3 (NM_199047.1,185-203).
gcccagttgtaccttatga

SEQ ID NO: 440611 - DNA, 19 bp, Homo sapiens
  siRNA target sequence for TRF3 (NM_199047.1,187-205).
ccagttgtaccttatgata

SEQ ID NO: 440612 - DNA, 19 bp, Homo sapiens
  siRNA target sequence for TRF3 (NM_199047.1,188-206).
cagttgtaccttatgatat

SEQ ID NO: 440613 - DNA, 19 bp, Homo sapiens
  siRNA target sequence for TRF3 (NM_199047.1,193-211).
gtaccttatgatatgtaca

SEQ ID NO: 440614 - DNA, 19 bp, Homo sapiens
  siRNA target sequence for TRF3 (NM_199047.1,225-243).
caatccggatactgcattt

SEQ ID NO: 440615 - DNA, 19 bp, Homo sapiens
  siRNA target sequence for TRF3 (NM_199047.1,229-247).
ccggatactgcatttaatt

SEQ ID NO: 440616 - DNA, 19 bp, Homo sapiens
  siRNA target sequence for TRF3 (NM_199047.1,248-266).
cgaaccctgaagtcaaaga

SEQ ID NO: 440617 - DNA, 19 bp, Homo sapiens
  siRNA target sequence for TRF3 (NM_199047.1,299-317).
gcttcctaccagatgaagt

SEQ ID NO: 440618 - DNA, 19 bp, Homo sapiens
  siRNA target sequence for TRF3 (NM_199047.1,336-354).
ccagcctgtcattagcaaa

SEQ ID NO: 440619 - DNA, 19 bp, Homo sapiens
  siRNA target sequence for TRF3 (NM_199047.1,531-549).
cttgtctctggcatccata

SEQ ID NO: 440620 - DNA, 19 bp, Homo sapiens
  siRNA target sequence for TRF3 (NM_199047.1,563-581).
caatgacccctatttcaga

SEQ ID NO: 440621 - DNA, 19 bp, Homo sapiens
  siRNA target sequence for TRF3 (NM_199047.1,646-664).
gatctgaagaaaatagctt

SEQ ID NO: 440622 - DNA, 19 bp, Homo sapiens
  siRNA target sequence for TRF3 (NM_199047.1,696-714).
gaggtttgctgctgtcata

SEQ ID NO: 440623 - DNA, 19 bp, Homo sapiens
  siRNA target sequence for TRF3 (NM_199047.1,732-750).
caggacaacagcccttata

SEQ ID NO: 440624 - DNA, 19 bp, Homo sapiens
  siRNA target sequence for TRF3 (NM_199047.1,735-753).
gacaacagcccttatattt

SEQ ID NO: 440625 - DNA, 19 bp, Homo sapiens
  siRNA target sequence for TRF3 (NM_199047.1,771-789).
ctgcacgggagccaaaagt

SEQ ID NO: 440626 - DNA, 19 bp, Homo sapiens
  siRNA target sequence for TRF3 (NM_199047.1,800-818).
ctcgacttgcagcaagaaa

SEQ ID NO: 440627 - DNA, 19 bp, Homo sapiens
  siRNA target sequence for TRF3 (NM_199047.1,997-1015).
gtaaaaccacgaattgtgt

SEQ ID NO: 440628 - DNA, 19 bp, Homo sapiens
  siRNA target sequence for TRF3 (NM_199047.1,1003-1021).
ccacgaattgtgttgctta

SEQ ID NO: 440629 - DNA, 19 bp, Homo sapiens
  siRNA target sequence for TRF3 (NM_199047.1,1004-1022).
cacgaattgtgttgcttat

SEQ ID NO: 440630 - DNA, 19 bp, Homo sapiens
  siRNA target sequence for TRF3 (NM_199047.1,1006-1024).
cgaattgtgttgcttatct

SEQ ID NO: 440631 - DNA, 19 bp, Homo sapiens
  siRNA target sequence for TRF3 (NM_199047.1,1044-1062).
gttgacaggtgccaaagaa

SEQ ID NO: 440632 - DNA, 19 bp, Homo sapiens
  siRNA target sequence for TRF3 (NM_199047.1,1095-1113).
ctatcctattctaaaaggt

SEQ ID NO: 440633 - DNA, 19 bp, Homo sapiens
  siRNA target sequence for C21orf25 (NM_199050.1,275-293).
gccggaaatggccgttaat

SEQ ID NO: 440634 - DNA, 19 bp, Homo sapiens
  siRNA target sequence for C21orf25 (NM_199050.1,276-294).
ccggaaatggccgttaata

SEQ ID NO: 440635 - DNA, 19 bp, Homo sapiens
  siRNA target sequence for C21orf25 (NM_199050.1,277-295).
cggaaatggccgttaatat

SEQ ID NO: 440636 - DNA, 19 bp, Homo sapiens
  siRNA target sequence for C21orf25 (NM_199050.1,340-358).
cgatgtctgacgttctcaa

SEQ ID NO: 440637 - DNA, 19 bp, Homo sapiens
  siRNA target sequence for C21orf25 (NM_199050.1,393-411).
ccatcagtggttctgatta

SEQ ID NO: 440638 - DNA, 19 bp, Homo sapiens
  siRNA target sequence for C21orf25 (NM_199050.1,397-415).
cagtggttctgattaccaa

SEQ ID NO: 440639 - DNA, 19 bp, Homo sapiens
  siRNA target sequence for C21orf25 (NM_199050.1,556-574).
gtgcctcaggccacattaa

SEQ ID NO: 440640 - DNA, 19 bp, Homo sapiens
  siRNA target sequence for C21orf25 (NM_199050.1,560-578).
ctcaggccacattaatgca

SEQ ID NO: 440641 - DNA, 19 bp, Homo sapiens
  siRNA target sequence for C21orf25 (NM_199050.1,619-637).
ccagcaccctgacgaaaaa

SEQ ID NO: 440642 - DNA, 19 bp, Homo sapiens
  siRNA target sequence for C21orf25 (NM_199050.1,623-641).
caccctgacgaaaaacact

SEQ ID NO: 440643 - DNA, 19 bp, Homo sapiens
  siRNA target sequence for C21orf25 (NM_199050.1,685-703).
ccaagtcgaaggagttaca

SEQ ID NO: 440644 - DNA, 19 bp, Homo sapiens
  siRNA target sequence for C21orf25 (NM_199050.1,759-777).
gttcctctggacttattta

SEQ ID NO: 440645 - DNA, 19 bp, Homo sapiens
  siRNA target sequence for C21orf25 (NM_199050.1,856-874).
cggcagagttctcttacat

SEQ ID NO: 440646 - DNA, 19 bp, Homo sapiens
  siRNA target sequence for C21orf25 (NM_199050.1,876-894).
gaacctggtgaattgaaat

SEQ ID NO: 440647 - DNA, 19 bp, Homo sapiens
  siRNA target sequence for C21orf25 (NM_199050.1,879-897).
cctggtgaattgaaatcct

SEQ ID NO: 440648 - DNA, 19 bp, Homo sapiens
  siRNA target sequence for C21orf25 (NM_199050.1,1127-1145).
caaaacactctcttcttca

SEQ ID NO: 440649 - DNA, 19 bp, Homo sapiens
  siRNA target sequence for C21orf25 (NM_199050.1,1150-1168).
cagaattgttggtgttgaa

SEQ ID NO: 440650 - DNA, 19 bp, Homo sapiens
  siRNA target sequence for C21orf25 (NM_199050.1,1200-1218).
cgacagctcagtgaatctt

SEQ ID NO: 440651 - DNA, 19 bp, Homo sapiens
  siRNA target sequence for C21orf25 (NM_199050.1,1232-1250).
caagtcgccacggaagaaa

SEQ ID NO: 440652 - DNA, 19 bp, Homo sapiens
  siRNA target sequence for C21orf25 (NM_199050.1,1247-1265).
gaaaagcactattatcata

SEQ ID NO: 440653 - DNA, 19 bp, Homo sapiens
  siRNA target sequence for C21orf25 (NM_199050.1,1274-1292).
ctccaagacctcactatct

SEQ ID NO: 440654 - DNA, 19 bp, Homo sapiens
  siRNA target sequence for C21orf25 (NM_199050.1,1276-1294).
ccaagacctcactatctca

SEQ ID NO: 440655 - DNA, 19 bp, Homo sapiens
  siRNA target sequence for C21orf25 (NM_199050.1,1571-1589).
cactgccaaaaagcataaa

SEQ ID NO: 440656 - DNA, 19 bp, Homo sapiens
  siRNA target sequence for C21orf25 (NM_199050.1,1583-1601).
gcataaaggaggaattcta

SEQ ID NO: 440657 - DNA, 19 bp, Homo sapiens
  siRNA target sequence for C21orf25 (NM_199050.1,1655-1673).
catgagtcagtcacacaat

SEQ ID NO: 440658 - DNA, 19 bp, Homo sapiens
  siRNA target sequence for DBCCR1L (NM_199051.1,249-267).
gagctggtgctgaattgtt

SEQ ID NO: 440659 - DNA, 19 bp, Homo sapiens
  siRNA target sequence for DBCCR1L (NM_199051.1,395-413).
catcgctcacaggaataca

SEQ ID NO: 440660 - DNA, 19 bp, Homo sapiens
  siRNA target sequence for DBCCR1L (NM_199051.1,440-458).
ggatttagcacaagataca

SEQ ID NO: 440661 - DNA, 19 bp, Homo sapiens
  siRNA target sequence for DBCCR1L (NM_199051.1,472-490).
gtttggccgctggaaagta

SEQ ID NO: 440662 - DNA, 19 bp, Homo sapiens
  siRNA target sequence for DBCCR1L (NM_199051.1,536-554).
cctcttgcccctgaattct

SEQ ID NO: 440663 - DNA, 19 bp, Homo sapiens
  siRNA target sequence for DBCCR1L (NM_199051.1,548-566).
gaattcttccgcaacataa

SEQ ID NO: 440664 - DNA, 19 bp, Homo sapiens
  siRNA target sequence for DBCCR1L (NM_199051.1,582-600).
gacctacccttcagcaaat

SEQ ID NO: 440665 - DNA, 19 bp, Homo sapiens
  siRNA target sequence for DBCCR1L (NM_199051.1,584-602).
cctacccttcagcaaatca

SEQ ID NO: 440666 - DNA, 19 bp, Homo sapiens
  siRNA target sequence for DBCCR1L (NM_199051.1,603-621).
cagaaaaccttatcaagaa

SEQ ID NO: 440667 - DNA, 19 bp, Homo sapiens
  siRNA target sequence for DBCCR1L (NM_199051.1,750-768).
ctctggagacgctacatca

SEQ ID NO: 440668 - DNA, 19 bp, Homo sapiens
  siRNA target sequence for DBCCR1L (NM_199051.1,767-785).
cagctagccgcttcttatt

SEQ ID NO: 440669 - DNA, 19 bp, Homo sapiens
  siRNA target sequence for DBCCR1L (NM_199051.1,774-792).
ccgcttcttatttcattga

SEQ ID NO: 440670 - DNA, 19 bp, Homo sapiens
  siRNA target sequence for DBCCR1L (NM_199051.1,811-829).
gagacttcaccacattcaa

SEQ ID NO: 440671 - DNA, 19 bp, Homo sapiens
  siRNA target sequence for DBCCR1L (NM_199051.1,889-907).
ctatgacaacctagattct

SEQ ID NO: 440672 - DNA, 19 bp, Homo sapiens
  siRNA target sequence for DBCCR1L (NM_199051.1,928-946).
gagtcctgagaataagatt

SEQ ID NO: 440673 - DNA, 19 bp, Homo sapiens
  siRNA target sequence for DBCCR1L (NM_199051.1,930-948).
gtcctgagaataagattca

SEQ ID NO: 440674 - DNA, 19 bp, Homo sapiens
  siRNA target sequence for DBCCR1L (NM_199051.1,952-970).
gcaagggcttcaagtactt

SEQ ID NO: 440675 - DNA, 19 bp, Homo sapiens
  siRNA target sequence for DBCCR1L (NM_199051.1,979-997).
ctatcttcaggaacgtttt

SEQ ID NO: 440676 - DNA, 19 bp, Homo sapiens
  siRNA target sequence for DBCCR1L (NM_199051.1,1007-1025).
gctttgagctacattgctt

SEQ ID NO: 440677 - DNA, 19 bp, Homo sapiens
  siRNA target sequence for DBCCR1L (NM_199051.1,1012-1030).
gagctacattgcttgcaat

SEQ ID NO: 440678 - DNA, 19 bp, Homo sapiens
  siRNA target sequence for DBCCR1L (NM_199051.1,1015-1033).
ctacattgcttgcaattca

SEQ ID NO: 440679 - DNA, 19 bp, Homo sapiens
  siRNA target sequence for DBCCR1L (NM_199051.1,1027-1045).
caattcagagggagagttt

SEQ ID NO: 440680 - DNA, 19 bp, Homo sapiens
  siRNA target sequence for DBCCR1L (NM_199051.1,1071-1089).
gtcactgtggtcccaaatt

SEQ ID NO: 440681 - DNA, 19 bp, Homo sapiens
  siRNA target sequence for DBCCR1L (NM_199051.1,1083-1101).
ccaaatttccagaatgcaa

SEQ ID NO: 440682 - DNA, 19 bp, Homo sapiens
  siRNA target sequence for DBCCR1L (NM_199051.1,1105-1123).
cccctccatggacattcaa

SEQ ID NO: 440683 - DNA, 19 bp, Homo sapiens
  siRNA target sequence for DBCCR1L (NM_199051.1,1133-1151).
gagaatcttcttcgaataa

SEQ ID NO: 440684 - DNA, 19 bp, Homo sapiens
  siRNA target sequence for DBCCR1L (NM_199051.1,1139-1157).
cttcttcgaataactgaaa

SEQ ID NO: 440685 - DNA, 19 bp, Homo sapiens
  siRNA target sequence for DBCCR1L (NM_199051.1,1176-1194).
gtgactttgaggaatcaga

SEQ ID NO: 440686 - DNA, 19 bp, Homo sapiens
  siRNA target sequence for DBCCR1L (NM_199051.1,1237-1255).
cctcaacacatctactata

SEQ ID NO: 440687 - DNA, 19 bp, Homo sapiens
  siRNA target sequence for DBCCR1L (NM_199051.1,1238-1256).
ctcaacacatctactataa

SEQ ID NO: 440688 - DNA, 19 bp, Homo sapiens
  siRNA target sequence for DBCCR1L (NM_199051.1,1259-1277).
catttgtggacaatggatt

SEQ ID NO: 440689 - DNA, 19 bp, Homo sapiens
  siRNA target sequence for DBCCR1L (NM_199051.1,1314-1332).
gcatgaaacaacttttcct

SEQ ID NO: 440690 - DNA, 19 bp, Homo sapiens
  siRNA target sequence for DBCCR1L (NM_199051.1,1367-1385).
cttagcaagaggtgtcata

SEQ ID NO: 440691 - DNA, 19 bp, Homo sapiens
  siRNA target sequence for DBCCR1L (NM_199051.1,1668-1686).
ccgagtccaccgatcacta

SEQ ID NO: 440692 - DNA, 19 bp, Homo sapiens
  siRNA target sequence for DBCCR1L (NM_199051.1,1669-1687).
cgagtccaccgatcactat

SEQ ID NO: 440693 - DNA, 19 bp, Homo sapiens
  siRNA target sequence for DBCCR1L (NM_199051.1,1670-1688).
gagtccaccgatcactata

SEQ ID NO: 440694 - DNA, 19 bp, Homo sapiens
  siRNA target sequence for DBCCR1L (NM_199051.1,1672-1690).
gtccaccgatcactatatt

SEQ ID NO: 440695 - DNA, 19 bp, Homo sapiens
  siRNA target sequence for DBCCR1L (NM_199051.1,1709-1727).
caagatctcgagatgaaat

SEQ ID NO: 440696 - DNA, 19 bp, Homo sapiens
  siRNA target sequence for DBCCR1L (NM_199051.1,1743-1761).
cggacagacgaatagaagt

SEQ ID NO: 440697 - DNA, 19 bp, Homo sapiens
  siRNA target sequence for DBCCR1L (NM_199051.1,1784-1802).
gacatgcgcctcaatagct

SEQ ID NO: 440698 - DNA, 19 bp, Homo sapiens
  siRNA target sequence for DBCCR1L (NM_199051.1,1863-1881).
caagtctggtccatatgat

SEQ ID NO: 440699 - DNA, 19 bp, Homo sapiens
  siRNA target sequence for DBCCR1L (NM_199051.1,1866-1884).
gtctggtccatatgatttt

SEQ ID NO: 440700 - DNA, 19 bp, Homo sapiens
  siRNA target sequence for DBCCR1L (NM_199051.1,2015-2033).
gactgggagcggactaagt

SEQ ID NO: 440701 - DNA, 19 bp, Homo sapiens
  siRNA target sequence for DBCCR1L (NM_199051.1,2038-2056).
cctacccctgcagtgttat

SEQ ID NO: 440702 - DNA, 19 bp, Homo sapiens
  siRNA target sequence for DBCCR1L (NM_199051.1,2039-2057).
ctacccctgcagtgttata

SEQ ID NO: 440703 - DNA, 19 bp, Homo sapiens
  siRNA target sequence for DBCCR1L (NM_199051.1,2117-2135).
ctgagaagtcgcatcaagt

SEQ ID NO: 440704 - DNA, 19 bp, Homo sapiens
  siRNA target sequence for DBCCR1L (NM_199051.1,2136-2154).
ccaatggtcccaatggtaa

SEQ ID NO: 440705 - DNA, 19 bp, Homo sapiens
  siRNA target sequence for DBCCR1L (NM_199051.1,2137-2155).
caatggtcccaatggtaat

SEQ ID NO: 440706 - DNA, 19 bp, Homo sapiens
  siRNA target sequence for DBCCR1L (NM_199051.1,2141-2159).
ggtcccaatggtaatgaga

SEQ ID NO: 440707 - DNA, 19 bp, Homo sapiens
  siRNA target sequence for DBCCR1L (NM_199051.1,2150-2168).
ggtaatgagagcatttact

SEQ ID NO: 440708 - DNA, 19 bp, Homo sapiens
  siRNA target sequence for DBCCR1L (NM_199051.1,2196-2214).
cccggaacctgggctatat

SEQ ID NO: 440709 - DNA, 19 bp, Homo sapiens
  siRNA target sequence for DBCCR1L (NM_199051.1,2206-2224).
gggctatatgaaaatcaat

SEQ ID NO: 440710 - DNA, 19 bp, Homo sapiens
  siRNA target sequence for DBCCR1L (NM_199051.1,2254-2272).
ctttgaccctgaagcaatt

SEQ ID NO: 440711 - DNA, 19 bp, Homo sapiens
  siRNA target sequence for DBCCR1L (NM_199051.1,2328-2346).
cacttttgcaactactaga

SEQ ID NO: 440712 - DNA, 19 bp, Homo sapiens
  siRNA target sequence for DBCCR1L (NM_199051.1,2347-2365).
gatcagagaccgtgtaaat

SEQ ID NO: 440713 - DNA, 19 bp, Homo sapiens
  siRNA target sequence for DBCCR1L (NM_199051.1,2352-2370).
gagaccgtgtaaataaact

SEQ ID NO: 440714 - DNA, 19 bp, Homo sapiens
  siRNA target sequence for DBCCR1L (NM_199051.1,2354-2372).
gaccgtgtaaataaactct

SEQ ID NO: 440715 - DNA, 19 bp, Homo sapiens
  siRNA target sequence for DBCCR1L (NM_199051.1,2387-2405).
cgtcgtctagatcttttct

SEQ ID NO: 440716 - DNA, 19 bp, Homo sapiens
  siRNA target sequence for DBCCR1L (NM_199051.1,2444-2462).
gaggtggtgaggatccaat

SEQ ID NO: 440717 - DNA, 19 bp, Homo sapiens
  siRNA target sequence for DBCCR1L (NM_199051.1,2463-2481).
ctgctctgcaggcgtttaa

SEQ ID NO: 440718 - DNA, 19 bp, Homo sapiens
  siRNA target sequence for DBCCR1L (NM_199051.1,2504-2522).
gattatgacacgaccaaat

SEQ ID NO: 440719 - DNA, 19 bp, Homo sapiens
  siRNA target sequence for DBCCR1L (NM_199051.1,2510-2528).
gacacgaccaaattatgta

SEQ ID NO: 440720 - DNA, 19 bp, Homo sapiens
  siRNA target sequence for DBCCR1L (NM_199051.1,2512-2530).
cacgaccaaattatgtagt

SEQ ID NO: 440721 - DNA, 19 bp, Homo sapiens
  siRNA target sequence for C20orf7 (NM_199052.1,801-819).
caaaagtccagaatgttga

SEQ ID NO: 440722 - DNA, 19 bp, Homo sapiens
  siRNA target sequence for HIC (NM_199072.2,400-418).
gccggaggctcgctaactt

SEQ ID NO: 440723 - DNA, 19 bp, Homo sapiens
  siRNA target sequence for HIC (NM_199072.2,401-419).
ccggaggctcgctaacttt

SEQ ID NO: 440724 - DNA, 19 bp, Homo sapiens
  siRNA target sequence for HIC (NM_199072.2,784-802).
cttcggatggtgaactcat

SEQ ID NO: 440725 - DNA, 19 bp, Homo sapiens
  siRNA target sequence for HIC (NM_199072.2,788-806).
ggatggtgaactcattaga

SEQ ID NO: 440726 - DNA, 19 bp, Homo sapiens
  siRNA target sequence for HIC (NM_199072.2,789-807).
gatggtgaactcattagaa

SEQ ID NO: 440727 - DNA, 19 bp, Homo sapiens
  siRNA target sequence for HIC (NM_199072.2,892-910).
caggtctgagcaatggaaa

SEQ ID NO: 440728 - DNA, 19 bp, Homo sapiens
  siRNA target sequence for HIC (NM_199072.2,941-959).
cgcagataatcgcaaactt

SEQ ID NO: 440729 - DNA, 19 bp, Homo sapiens
  siRNA target sequence for HIC (NM_199072.2,942-960).
gcagataatcgcaaacttt

SEQ ID NO: 440730 - DNA, 19 bp, Homo sapiens
  siRNA target sequence for HIC (NM_199072.2,1127-1145).
cctgaccctttgcaacatt

SEQ ID NO: 440731 - DNA, 19 bp, Homo sapiens
  siRNA target sequence for HIC (NM_199072.2,1208-1226).
cgagatgggggatgattgt

SEQ ID NO: 440732 - DNA, 19 bp, Homo sapiens
  siRNA target sequence for HIC (NM_199072.2,1209-1227).
gagatgggggatgattgta

SEQ ID NO: 440733 - DNA, 19 bp, Homo sapiens
  siRNA target sequence for HIC (NM_199072.2,1281-1299).
gactgcttggaaatctgta

SEQ ID NO: 440734 - DNA, 19 bp, Homo sapiens
  siRNA target sequence for CIR (NM_199075.1,575-593).
cagatgctgtgttacaaat

SEQ ID NO: 440735 - DNA, 19 bp, Homo sapiens
  siRNA target sequence for FLJ23554 (NM_199124.1,1150-1168).
catccagaacaggtcattt

SEQ ID NO: 440736 - DNA, 19 bp, Homo sapiens
  siRNA target sequence for FLJ23554 (NM_199124.1,1181-1199).
ctctcccacgtgatggatt

SEQ ID NO: 440737 - DNA, 19 bp, Homo sapiens
  siRNA target sequence for FLJ23554 (NM_199124.1,1185-1203).
cccacgtgatggattcaaa

SEQ ID NO: 440738 - DNA, 19 bp, Homo sapiens
  siRNA target sequence for FLJ23554 (NM_199124.1,1186-1204).
ccacgtgatggattcaaaa

SEQ ID NO: 440739 - DNA, 19 bp, Homo sapiens
  siRNA target sequence for FLJ23554 (NM_199124.1,1189-1207).
cgtgatggattcaaaacct

SEQ ID NO: 440740 - DNA, 19 bp, Homo sapiens
  siRNA target sequence for Kua (NM_199129.1,132-150).
gaggacgaggcgtcttgtt

SEQ ID NO: 440741 - DNA, 19 bp, Homo sapiens
  siRNA target sequence for Kua (NM_199129.1,311-329).
cgtcatactcggtgttgtt

SEQ ID NO: 440742 - DNA, 19 bp, Homo sapiens
  siRNA target sequence for Kua (NM_199129.1,772-790).
ccacaggctggctcaacta

SEQ ID NO: 440743 - DNA, 19 bp, Homo sapiens
  siRNA target sequence for Kua (NM_199129.1,861-879).
cgggcagatgacatgaaat

SEQ ID NO: 440744 - DNA, 19 bp, Homo sapiens
  siRNA target sequence for VAX1 (NM_199131.1,411-429).
gctgaggattgtaacaaaa

SEQ ID NO: 440745 - DNA, 19 bp, Homo sapiens
  siRNA target sequence for VAX1 (NM_199131.1,444-462).
gcagcggacccggattact

SEQ ID NO: 440746 - DNA, 19 bp, Homo sapiens
  siRNA target sequence for VAX1 (NM_199131.1,493-511).
ggtccatccgagagatcat

SEQ ID NO: 440747 - DNA, 19 bp, Homo sapiens
  siRNA target sequence for VAX1 (NM_199131.1,662-680).
cgagacccaggcaaatagt

SEQ ID NO: 440748 - DNA, 19 bp, Homo sapiens
  siRNA target sequence for VAX1 (NM_199131.1,665-683).
gacccaggcaaatagtgaa

SEQ ID NO: 440749 - DNA, 19 bp, Homo sapiens
  siRNA target sequence for VAX1 (NM_199131.1,697-715).
gattcaaacgcgggataaa

SEQ ID NO: 440750 - DNA, 19 bp, Homo sapiens
  siRNA target sequence for LOC134145 (NM_199133.1,21-39).
gtatacccctagaaacact

SEQ ID NO: 440751 - DNA, 19 bp, Homo sapiens
  siRNA target sequence for LOC134145 (NM_199133.1,51-69).
gtcagtcaagacatgttct

SEQ ID NO: 440752 - DNA, 19 bp, Homo sapiens
  siRNA target sequence for LOC134145 (NM_199133.1,105-123).
gcaactgggggttcttact

SEQ ID NO: 440753 - DNA, 19 bp, Homo sapiens
  siRNA target sequence for LOC134145 (NM_199133.1,164-182).
gtagccacgccgtttgtaa

SEQ ID NO: 440754 - DNA, 19 bp, Homo sapiens
  siRNA target sequence for LOC134145 (NM_199133.1,183-201).
cgccagcccttcgaaaagt

SEQ ID NO: 440755 - DNA, 19 bp, Homo sapiens
  siRNA target sequence for LOC134145 (NM_199133.1,296-314).
ggggacggacgcattgtca

SEQ ID NO: 440756 - DNA, 19 bp, Homo sapiens
  siRNA target sequence for LOC134145 (NM_199133.1,297-315).
gggacggacgcattgtcat

SEQ ID NO: 440757 - DNA, 19 bp, Homo sapiens
  siRNA target sequence for LOC134145 (NM_199133.1,298-316).
ggacggacgcattgtcata

SEQ ID NO: 440758 - DNA, 19 bp, Homo sapiens
  siRNA target sequence for LOC134145 (NM_199133.1,339-357).
cagcagttggttatgaatt

SEQ ID NO: 440759 - DNA, 19 bp, Homo sapiens
  siRNA target sequence for LOC134145 (NM_199133.1,341-359).
gcagttggttatgaattaa

SEQ ID NO: 440760 - DNA, 19 bp, Homo sapiens
  siRNA target sequence for LOC134145 (NM_199133.1,361-379).
cccatggctagtttggtat

SEQ ID NO: 440761 - DNA, 19 bp, Homo sapiens
  siRNA target sequence for LOC134145 (NM_199133.1,413-431).
ggatctgccaaattttata

SEQ ID NO: 440762 - DNA, 19 bp, Homo sapiens
  siRNA target sequence for LOC134145 (NM_199133.1,461-479).
cagtactcgaacgttgtta

SEQ ID NO: 440763 - DNA, 19 bp, Homo sapiens
  siRNA target sequence for LOC134145 (NM_199133.1,463-481).
gtactcgaacgttgttatt

SEQ ID NO: 440764 - DNA, 19 bp, Homo sapiens
  siRNA target sequence for LOC134145 (NM_199133.1,517-535).
gaaacttgaacgtgaactt

SEQ ID NO: 440765 - DNA, 19 bp, Homo sapiens
  siRNA target sequence for LOC134145 (NM_199133.1,538-556).
ggatgatgcacgagttatt

SEQ ID NO: 440766 - DNA, 19 bp, Homo sapiens
  siRNA target sequence for LOC134145 (NM_199133.1,542-560).
gatgcacgagttattgctt

SEQ ID NO: 440767 - DNA, 19 bp, Homo sapiens
  siRNA target sequence for LOC134145 (NM_199133.1,666-684).
cctgtacatcgatgcattt

SEQ ID NO: 440768 - DNA, 19 bp, Homo sapiens
  siRNA target sequence for LOC134145 (NM_199133.1,669-687).
gtacatcgatgcatttcca

SEQ ID NO: 440769 - DNA, 19 bp, Homo sapiens
  siRNA target sequence for LOC340277 (NM_199136.1,163-181).
gcgcttacaaaacagatta

SEQ ID NO: 440770 - DNA, 19 bp, Homo sapiens
  siRNA target sequence for LOC340277 (NM_199136.1,164-182).
cgcttacaaaacagattat

SEQ ID NO: 440771 - DNA, 19 bp, Homo sapiens
  siRNA target sequence for LOC340277 (NM_199136.1,165-183).
gcttacaaaacagattatt

SEQ ID NO: 440772 - DNA, 19 bp, Homo sapiens
  siRNA target sequence for LOC340277 (NM_199136.1,207-225).
ggatggattgtaaacttgt

SEQ ID NO: 440773 - DNA, 19 bp, Homo sapiens
  siRNA target sequence for LOC340277 (NM_199136.1,249-267).
gtacacataggtataaaca

SEQ ID NO: 440774 - DNA, 19 bp, Homo sapiens
  siRNA target sequence for LOC340277 (NM_199136.1,337-355).
ccagtgcagggcttacctt

SEQ ID NO: 440775 - DNA, 19 bp, Homo sapiens
  siRNA target sequence for LOC340277 (NM_199136.1,342-360).
gcagggcttacctttatgt

SEQ ID NO: 440776 - DNA, 19 bp, Homo sapiens
  siRNA target sequence for LOC340277 (NM_199136.1,352-370).
cctttatgtccccttgaat

SEQ ID NO: 440777 - DNA, 19 bp, Homo sapiens
  siRNA target sequence for LOC340277 (NM_199136.1,422-440).
gctgcgcctggctttacat

SEQ ID NO: 440778 - DNA, 19 bp, Homo sapiens
  siRNA target sequence for LOC340277 (NM_199136.1,428-446).
cctggctttacatgcaata

SEQ ID NO: 440779 - DNA, 19 bp, Homo sapiens
  siRNA target sequence for LOC340277 (NM_199136.1,431-449).
ggctttacatgcaatacat

SEQ ID NO: 440780 - DNA, 19 bp, Homo sapiens
  siRNA target sequence for LOC340277 (NM_199136.1,563-581).
gtgggacaggacattcctt

SEQ ID NO: 440781 - DNA, 19 bp, Homo sapiens
  siRNA target sequence for LOC340277 (NM_199136.1,565-583).
gggacaggacattccttat

SEQ ID NO: 440782 - DNA, 19 bp, Homo sapiens
  siRNA target sequence for LOC340277 (NM_199136.1,584-602).
gcagccatgggaggattaa

SEQ ID NO: 440783 - DNA, 19 bp, Homo sapiens
  siRNA target sequence for LOC340277 (NM_199136.1,627-645).
gctacatgcggttagatga

SEQ ID NO: 440784 - DNA, 19 bp, Homo sapiens
  siRNA target sequence for LOC340277 (NM_199136.1,656-674).
ggtgtaccttcagttgaat

SEQ ID NO: 440785 - DNA, 19 bp, Homo sapiens
  siRNA target sequence for LOC340277 (NM_199136.1,657-675).
gtgtaccttcagttgaatt

SEQ ID NO: 440786 - DNA, 19 bp, Homo sapiens
  siRNA target sequence for LOC340277 (NM_199136.1,719-737).
gcatttcaagcatcatcta

SEQ ID NO: 440787 - DNA, 19 bp, Homo sapiens
  siRNA target sequence for LOC340277 (NM_199136.1,738-756).
gttcttctccagaaacgtt

SEQ ID NO: 440788 - DNA, 19 bp, Homo sapiens
  siRNA target sequence for LOC340277 (NM_199136.1,808-826).
ggatgatatggctttcttt

SEQ ID NO: 440789 - DNA, 19 bp, Homo sapiens
  siRNA target sequence for LOC340277 (NM_199136.1,812-830).
gatatggctttctttgaaa

SEQ ID NO: 440790 - DNA, 19 bp, Homo sapiens
  siRNA target sequence for LOC340277 (NM_199136.1,888-906).
cattgccatcagctacaaa

SEQ ID NO: 440791 - DNA, 19 bp, Homo sapiens
  siRNA target sequence for HSXIAPAF1 (NM_199139.1,402-420).
caccagcaggccaatgagt

SEQ ID NO: 440792 - DNA, 19 bp, Homo sapiens
  siRNA target sequence for CARM1 (NM_199141.1,460-478).
gccacacccaacgatttct

SEQ ID NO: 440793 - DNA, 19 bp, Homo sapiens
  siRNA target sequence for CARM1 (NM_199141.1,462-480).
cacacccaacgatttctgt

SEQ ID NO: 440794 - DNA, 19 bp, Homo sapiens
  siRNA target sequence for CARM1 (NM_199141.1,678-696).
ggacaagatcgttcttgat

SEQ ID NO: 440795 - DNA, 19 bp, Homo sapiens
  siRNA target sequence for CARM1 (NM_199141.1,681-699).
caagatcgttcttgatgtt

SEQ ID NO: 440796 - DNA, 19 bp, Homo sapiens
  siRNA target sequence for CARM1 (NM_199141.1,710-728).
ctgggatcctgtcgttttt

SEQ ID NO: 440797 - DNA, 19 bp, Homo sapiens
  siRNA target sequence for CARM1 (NM_199141.1,739-757).
gctggagcacggaaaatct

SEQ ID NO: 440798 - DNA, 19 bp, Homo sapiens
  siRNA target sequence for CARM1 (NM_199141.1,740-758).
ctggagcacggaaaatcta

SEQ ID NO: 440799 - DNA, 19 bp, Homo sapiens
  siRNA target sequence for CARM1 (NM_199141.1,1010-1028).
cacccttcacggatgaaca

SEQ ID NO: 440800 - DNA, 19 bp, Homo sapiens
  siRNA target sequence for CARM1 (NM_199141.1,1188-1206).
gtacacggtgaacttctta

SEQ ID NO: 440801 - DNA, 19 bp, Homo sapiens
  siRNA target sequence for CARM1 (NM_199141.1,1233-1251).
gatagaaatcccattcaaa

SEQ ID NO: 440802 - DNA, 19 bp, Homo sapiens
  siRNA target sequence for CARM1 (NM_199141.1,1306-1324).
gctttcatcggctccataa

SEQ ID NO: 440803 - DNA, 19 bp, Homo sapiens
  siRNA target sequence for CARM1 (NM_199141.1,1307-1325).
ctttcatcggctccataat

SEQ ID NO: 440804 - DNA, 19 bp, Homo sapiens
  siRNA target sequence for CARM1 (NM_199141.1,1441-1459).
ctgcttattgccaacaaaa

SEQ ID NO: 440805 - DNA, 19 bp, Homo sapiens
  siRNA target sequence for CARM1 (NM_199141.1,1443-1461).
gcttattgccaacaaaaga

SEQ ID NO: 440806 - DNA, 19 bp, Homo sapiens
  siRNA target sequence for CARM1 (NM_199141.1,1533-1551).
gaaaaaccccttctttaga

SEQ ID NO: 440807 - DNA, 19 bp, Homo sapiens
  siRNA target sequence for CARM1 (NM_199141.1,1595-1613).
catctccctcggaaaacat

SEQ ID NO: 440808 - DNA, 19 bp, Homo sapiens
  siRNA target sequence for CARM1 (NM_199141.1,1720-1738).
cacaacaacctgattcctt

SEQ ID NO: 440809 - DNA, 19 bp, Homo sapiens
  siRNA target sequence for LHX6 (NM_199160.1,1012-1030).
cattgagagtcatcctttt

SEQ ID NO: 440810 - DNA, 19 bp, Homo sapiens
  siRNA target sequence for ADSSL1 (NM_199165.1,236-254).
gaggagccacgggtcaaat

SEQ ID NO: 440811 - DNA, 19 bp, Homo sapiens
  siRNA target sequence for ADSSL1 (NM_199165.1,239-257).
gagccacgggtcaaatgca

SEQ ID NO: 440812 - DNA, 19 bp, Homo sapiens
  siRNA target sequence for ADSSL1 (NM_199165.1,288-306).
gcaggagccggatccttaa

SEQ ID NO: 440813 - DNA, 19 bp, Homo sapiens
  siRNA target sequence for C21orf123 (NM_199175.1,363-381).
cctggcttctgccatctat

SEQ ID NO: 440814 - DNA, 19 bp, Homo sapiens
  siRNA target sequence for C21orf123 (NM_199175.1,368-386).
cttctgccatctattctgt

SEQ ID NO: 440815 - DNA, 19 bp, Homo sapiens
  siRNA target sequence for C21orf123 (NM_199175.1,460-478).
ctgcaggagtgagcaattt

SEQ ID NO: 440816 - DNA, 19 bp, Homo sapiens
  siRNA target sequence for C21orf123 (NM_199175.1,486-504).
ggaaggccgaggttttcca

SEQ ID NO: 440817 - DNA, 19 bp, Homo sapiens
  siRNA target sequence for C21orf123 (NM_199175.1,487-505).
gaaggccgaggttttccaa

SEQ ID NO: 440818 - DNA, 19 bp, Homo sapiens
  siRNA target sequence for C21orf123 (NM_199175.1,491-509).
gccgaggttttccaatcta

SEQ ID NO: 440819 - DNA, 19 bp, Homo sapiens
  siRNA target sequence for MRRF (NM_199176.1,572-590).
gagactatgaagcaaataa

SEQ ID NO: 440820 - DNA, 19 bp, Homo sapiens
  siRNA target sequence for KIRREL2 (NM_199180.1,2105-2123).
cccctaccttctatgactt

SEQ ID NO: 440821 - DNA, 19 bp, Homo sapiens
  siRNA target sequence for KIRREL2 (NM_199180.1,2108-2126).
ctaccttctatgacttcaa

SEQ ID NO: 440822 - DNA, 19 bp, Homo sapiens
  siRNA target sequence for KIRREL2 (NM_199180.1,2203-2221).
gctttcaccagctacatca

SEQ ID NO: 440823 - DNA, 19 bp, Homo sapiens
  siRNA target sequence for KIRREL2 (NM_199180.1,2204-2222).
ctttcaccagctacatcaa

SEQ ID NO: 440824 - DNA, 19 bp, Homo sapiens
  siRNA target sequence for FLJ44670 (NM_199181.1,334-352).
gagatgcgggacgtctata

SEQ ID NO: 440825 - DNA, 19 bp, Homo sapiens
  siRNA target sequence for FLJ44670 (NM_199181.1,810-828).
caagaagctcactaagctt

SEQ ID NO: 440826 - DNA, 19 bp, Homo sapiens
  siRNA target sequence for FLJ44670 (NM_199181.1,1284-1302).
gtcggaggacagttgttct

SEQ ID NO: 440827 - DNA, 19 bp, Homo sapiens
  siRNA target sequence for FLJ44670 (NM_199181.1,1871-1889).
gctcccaggggctctctaa

SEQ ID NO: 440828 - DNA, 19 bp, Homo sapiens
  siRNA target sequence for FLJ44670 (NM_199181.1,2038-2056).
cgagctgaagacaatgatt

SEQ ID NO: 440829 - DNA, 19 bp, Homo sapiens
  siRNA target sequence for FLJ44670 (NM_199181.1,2161-2179).
gaggaggccgacaatttca

SEQ ID NO: 440830 - DNA, 19 bp, Homo sapiens
  siRNA target sequence for FLJ44670 (NM_199181.1,2381-2399).
ggcggcagggcaaggtttt

SEQ ID NO: 440831 - DNA, 19 bp, Homo sapiens
  siRNA target sequence for FLJ44670 (NM_199181.1,2531-2549).
cgcccaatgagtacatcaa

SEQ ID NO: 440832 - DNA, 19 bp, Homo sapiens
  siRNA target sequence for FLJ44670 (NM_199181.1,2621-2639).
cggagcttcagcaacagtt

SEQ ID NO: 440833 - DNA, 19 bp, Homo sapiens
  siRNA target sequence for FLJ44670 (NM_199181.1,3072-3090).
gcttggaggaaatggttta

SEQ ID NO: 440834 - DNA, 19 bp, Homo sapiens
  siRNA target sequence for IMAA (NM_199182.1,607-625).
ccactccgtgcaactgata

SEQ ID NO: 440835 - DNA, 19 bp, Homo sapiens
  siRNA target sequence for TESSP5 (NM_199183.1,186-204).
ccctgtgagggacatcatt

SEQ ID NO: 440836 - DNA, 19 bp, Homo sapiens
  siRNA target sequence for TESSP5 (NM_199183.1,188-206).
ctgtgagggacatcattat

SEQ ID NO: 440837 - DNA, 19 bp, Homo sapiens
  siRNA target sequence for TESSP5 (NM_199183.1,356-374).
ctggctggagccaggttaa

SEQ ID NO: 440838 - DNA, 19 bp, Homo sapiens
  siRNA target sequence for TESSP5 (NM_199183.1,369-387).
ggttaagcagcgcttttca

SEQ ID NO: 440839 - DNA, 19 bp, Homo sapiens
  siRNA target sequence for TESSP5 (NM_199183.1,449-467).
ggtgtgaccggcattacaa

SEQ ID NO: 440840 - DNA, 19 bp, Homo sapiens
  siRNA target sequence for TESSP5 (NM_199183.1,513-531).
gatctgtgccaccaattat

SEQ ID NO: 440841 - DNA, 19 bp, Homo sapiens
  siRNA target sequence for TESSP5 (NM_199183.1,564-582).
gccattggcttgtgaagtt

SEQ ID NO: 440842 - DNA, 19 bp, Homo sapiens
  siRNA target sequence for LOC113251 (NM_199188.1,318-336).
ctttaatacaggtaatgca

SEQ ID NO: 440843 - DNA, 19 bp, Homo sapiens
  siRNA target sequence for HCRP1 (NM_199220.1,347-365).
ctctccgcaccgttaatct

SEQ ID NO: 440844 - DNA, 19 bp, Homo sapiens
  siRNA target sequence for MAP1D (NM_199227.1,104-122).
gtccgcagaggttctcata

SEQ ID NO: 440845 - DNA, 19 bp, Homo sapiens
  siRNA target sequence for MAP1D (NM_199227.1,106-124).
ccgcagaggttctcataga

SEQ ID NO: 440846 - DNA, 19 bp, Homo sapiens
  siRNA target sequence for MAP1D (NM_199227.1,107-125).
cgcagaggttctcatagaa

SEQ ID NO: 440847 - DNA, 19 bp, Homo sapiens
  siRNA target sequence for MAP1D (NM_199227.1,111-129).
gaggttctcatagaatttt

SEQ ID NO: 440848 - DNA, 19 bp, Homo sapiens
  siRNA target sequence for MAP1D (NM_199227.1,113-131).
ggttctcatagaattttct

SEQ ID NO: 440849 - DNA, 19 bp, Homo sapiens
  siRNA target sequence for MAP1D (NM_199227.1,132-150).
cttcaccactcaatcatat

SEQ ID NO: 440850 - DNA, 19 bp, Homo sapiens
  siRNA target sequence for MAP1D (NM_199227.1,137-155).
ccactcaatcatatctact

SEQ ID NO: 440851 - DNA, 19 bp, Homo sapiens
  siRNA target sequence for MAP1D (NM_199227.1,138-156).
cactcaatcatatctactt

SEQ ID NO: 440852 - DNA, 19 bp, Homo sapiens
  siRNA target sequence for MAP1D (NM_199227.1,163-181).
gcagtcaagcagtcaacaa

SEQ ID NO: 440853 - DNA, 19 bp, Homo sapiens
  siRNA target sequence for MAP1D (NM_199227.1,210-228).
gagatatttcacacagtat

SEQ ID NO: 440854 - DNA, 19 bp, Homo sapiens
  siRNA target sequence for MAP1D (NM_199227.1,260-278).
ccggttcctaagcacataa

SEQ ID NO: 440855 - DNA, 19 bp, Homo sapiens
  siRNA target sequence for MAP1D (NM_199227.1,261-279).
cggttcctaagcacataaa

SEQ ID NO: 440856 - DNA, 19 bp, Homo sapiens
  siRNA target sequence for MAP1D (NM_199227.1,263-281).
gttcctaagcacataaaga

SEQ ID NO: 440857 - DNA, 19 bp, Homo sapiens
  siRNA target sequence for MAP1D (NM_199227.1,316-334).
ctggggagacagcatagaa

SEQ ID NO: 440858 - DNA, 19 bp, Homo sapiens
  siRNA target sequence for MAP1D (NM_199227.1,319-337).
gggagacagcatagaagtt

SEQ ID NO: 440859 - DNA, 19 bp, Homo sapiens
  siRNA target sequence for MAP1D (NM_199227.1,325-343).
cagcatagaagttaagaat

SEQ ID NO: 440860 - DNA, 19 bp, Homo sapiens
  siRNA target sequence for MAP1D (NM_199227.1,427-445).
catgacaactgaagagata

SEQ ID NO: 440861 - DNA, 19 bp, Homo sapiens
  siRNA target sequence for MAP1D (NM_199227.1,430-448).
gacaactgaagagatagat

SEQ ID NO: 440862 - DNA, 19 bp, Homo sapiens
  siRNA target sequence for MAP1D (NM_199227.1,455-473).
gttcatcgggaaatcatca

SEQ ID NO: 440863 - DNA, 19 bp, Homo sapiens
  siRNA target sequence for MAP1D (NM_199227.1,461-479).
cgggaaatcatcagtcata

SEQ ID NO: 440864 - DNA, 19 bp, Homo sapiens
  siRNA target sequence for MAP1D (NM_199227.1,462-480).
gggaaatcatcagtcataa

SEQ ID NO: 440865 - DNA, 19 bp, Homo sapiens
  siRNA target sequence for MAP1D (NM_199227.1,524-542).
gtttgtacctctgtaaaca

SEQ ID NO: 440866 - DNA, 19 bp, Homo sapiens
  siRNA target sequence for MAP1D (NM_199227.1,544-562).
cgtgctctgtcatggtatt

SEQ ID NO: 440867 - DNA, 19 bp, Homo sapiens
  siRNA target sequence for MAP1D (NM_199227.1,547-565).
gctctgtcatggtattcct

SEQ ID NO: 440868 - DNA, 19 bp, Homo sapiens
  siRNA target sequence for MAP1D (NM_199227.1,605-623).
gatgtcacagtctattaca

SEQ ID NO: 440869 - DNA, 19 bp, Homo sapiens
  siRNA target sequence for MAP1D (NM_199227.1,635-653).
ggagacacctctgaaacat

SEQ ID NO: 440870 - DNA, 19 bp, Homo sapiens
  siRNA target sequence for MAP1D (NM_199227.1,638-656).
gacacctctgaaacatttt

SEQ ID NO: 440871 - DNA, 19 bp, Homo sapiens
  siRNA target sequence for MAP1D (NM_199227.1,708-726).
ggtgtagagatgaagcaat

SEQ ID NO: 440872 - DNA, 19 bp, Homo sapiens
  siRNA target sequence for MAP1D (NM_199227.1,750-768).
ccttctctgtaattggaaa

SEQ ID NO: 440873 - DNA, 19 bp, Homo sapiens
  siRNA target sequence for MAP1D (NM_199227.1,769-787).
cacaatcagccacataact

SEQ ID NO: 440874 - DNA, 19 bp, Homo sapiens
  siRNA target sequence for MAP1D (NM_199227.1,825-843).
gacatggaataggatctta

SEQ ID NO: 440875 - DNA, 19 bp, Homo sapiens
  siRNA target sequence for MAP1D (NM_199227.1,827-845).
catggaataggatcttact

SEQ ID NO: 440876 - DNA, 19 bp, Homo sapiens
  siRNA target sequence for MAP1D (NM_199227.1,831-849).
gaataggatcttactttca

SEQ ID NO: 440877 - DNA, 19 bp, Homo sapiens
  siRNA target sequence for MAP1D (NM_199227.1,901-919).
ggagggcatggcattcact

SEQ ID NO: 440878 - DNA, 19 bp, Homo sapiens
  siRNA target sequence for MAP1D (NM_199227.1,902-920).
gagggcatggcattcacta

SEQ ID NO: 440879 - DNA, 19 bp, Homo sapiens
  siRNA target sequence for MAP1D (NM_199227.1,904-922).
gggcatggcattcactata

SEQ ID NO: 440880 - DNA, 19 bp, Homo sapiens
  siRNA target sequence for MAP1D (NM_199227.1,938-956).
gagggatcccctgaattta

SEQ ID NO: 440881 - DNA, 19 bp, Homo sapiens
  siRNA target sequence for COLEC11 (NM_199235.1,395-413).
gtgcacctcgtcctttgta

SEQ ID NO: 440882 - DNA, 19 bp, Homo sapiens
  siRNA target sequence for COLEC11 (NM_199235.1,397-415).
gcacctcgtcctttgtaga

SEQ ID NO: 440883 - DNA, 19 bp, Homo sapiens
  siRNA target sequence for COLEC11 (NM_199235.1,400-418).
cctcgtcctttgtagaaat

SEQ ID NO: 440884 - DNA, 19 bp, Homo sapiens
  siRNA target sequence for LOC285601 (NM_199243.1,1026-1044).
ggccaacagcgctctcaat

SEQ ID NO: 440885 - DNA, 19 bp, Homo sapiens
  siRNA target sequence for LOC285601 (NM_199243.1,1191-1209).
ctggccccaccctcattat

SEQ ID NO: 440886 - DNA, 19 bp, Homo sapiens
  siRNA target sequence for CACNB1 (NM_199247.1,770-788).
cccctgccagtggtaatga

SEQ ID NO: 440887 - DNA, 19 bp, Homo sapiens
  siRNA target sequence for CACNB1 (NM_199247.1,777-795).
cagtggtaatgaaatgact

SEQ ID NO: 440888 - DNA, 19 bp, Homo sapiens
  siRNA target sequence for CACNB1 (NM_199247.1,779-797).
gtggtaatgaaatgactaa

SEQ ID NO: 440889 - DNA, 19 bp, Homo sapiens
  siRNA target sequence for CACNB1 (NM_199247.1,781-799).
ggtaatgaaatgactaact

SEQ ID NO: 440890 - DNA, 19 bp, Homo sapiens
  siRNA target sequence for CACNB1 (NM_199247.1,794-812).
ctaacttagcctttgaact

SEQ ID NO: 440891 - DNA, 19 bp, Homo sapiens
  siRNA target sequence for CACNB1 (NM_199247.1,912-930).
caaacgcatccccttcttt

SEQ ID NO: 440892 - DNA, 19 bp, Homo sapiens
  siRNA target sequence for CACNB1 (NM_199247.1,916-934).
cgcatccccttctttaaga

SEQ ID NO: 440893 - DNA, 19 bp, Homo sapiens
  siRNA target sequence for TPIP (NM_199255.1,324-342).
gtaaaagatggacacattt

SEQ ID NO: 440894 - DNA, 19 bp, Homo sapiens
  siRNA target sequence for TPIP (NM_199255.1,1184-1202).
ctgatgggtgggagcaata

SEQ ID NO: 440895 - DNA, 19 bp, Homo sapiens
  siRNA target sequence for THSD3 (NM_199265.1,1010-1028).
gcaggcgctctggttcaat

SEQ ID NO: 440896 - DNA, 19 bp, Homo sapiens
  siRNA target sequence for THSD3 (NM_199265.1,1014-1032).
gcgctctggttcaatggaa

SEQ ID NO: 440897 - DNA, 19 bp, Homo sapiens
  siRNA target sequence for THSD3 (NM_199265.1,1019-1037).
ctggttcaatggaactaca

SEQ ID NO: 440898 - DNA, 19 bp, Homo sapiens
  siRNA target sequence for THSD3 (NM_199265.1,1357-1375).
gcaagagcgacttcctaat

SEQ ID NO: 440899 - DNA, 19 bp, Homo sapiens
  siRNA target sequence for THSD3 (NM_199265.1,1363-1381).
gcgacttcctaatcaagta

SEQ ID NO: 440900 - DNA, 19 bp, Homo sapiens
  siRNA target sequence for THSD3 (NM_199265.1,1513-1531).
gcgagcgcctggacatcta

SEQ ID NO: 440901 - DNA, 19 bp, Homo sapiens
  siRNA target sequence for THSD3 (NM_199265.1,1681-1699).
cacctaagctgcacttcaa

SEQ ID NO: 440902 - DNA, 19 bp, Homo sapiens
  siRNA target sequence for THSD3 (NM_199265.1,1683-1701).
cctaagctgcacttcaagt

SEQ ID NO: 440903 - DNA, 19 bp, Homo sapiens
  siRNA target sequence for THSD3 (NM_199265.1,1684-1702).
ctaagctgcacttcaagtt

SEQ ID NO: 440904 - DNA, 19 bp, Homo sapiens
  siRNA target sequence for LOC165186 (NM_199280.1,390-408).
gagtccttcgccaagatga

SEQ ID NO: 440905 - DNA, 19 bp, Homo sapiens
  siRNA target sequence for LOC165186 (NM_199280.1,658-676).
catctcctggcagatttct

SEQ ID NO: 440906 - DNA, 19 bp, Homo sapiens
  siRNA target sequence for LOC165186 (NM_199280.1,702-720).
cattcacccagttatctta

SEQ ID NO: 440907 - DNA, 19 bp, Homo sapiens
  siRNA target sequence for LOC165186 (NM_199280.1,712-730).
gttatcttagacctgaaat

SEQ ID NO: 440908 - DNA, 19 bp, Homo sapiens
  siRNA target sequence for LOC201176 (NM_199282.1,679-697).
cccacgggaagccatactt

SEQ ID NO: 440909 - DNA, 19 bp, Homo sapiens
  siRNA target sequence for LOC201176 (NM_199282.1,753-771).
gcccctcgaagcatccata

SEQ ID NO: 440910 - DNA, 19 bp, Homo sapiens
  siRNA target sequence for LOC201176 (NM_199282.1,754-772).
cccctcgaagcatccataa

SEQ ID NO: 440911 - DNA, 19 bp, Homo sapiens
  siRNA target sequence for LOC201176 (NM_199282.1,997-1015).
gtggcgtcctgacattctt

SEQ ID NO: 440912 - DNA, 19 bp, Homo sapiens
  siRNA target sequence for LOC201176 (NM_199282.1,1000-1018).
gcgtcctgacattcttcaa

SEQ ID NO: 440913 - DNA, 19 bp, Homo sapiens
  siRNA target sequence for LOC201176 (NM_199282.1,1049-1067).
gaggcagccttccaagttt

SEQ ID NO: 440914 - DNA, 19 bp, Homo sapiens
  siRNA target sequence for LOC201176 (NM_199282.1,1194-1212).
gactcggaggccatcatca

SEQ ID NO: 440915 - DNA, 19 bp, Homo sapiens
  siRNA target sequence for LOC201176 (NM_199282.1,1768-1786).
cgcacttccgccagttcat

SEQ ID NO: 440916 - DNA, 19 bp, Homo sapiens
  siRNA target sequence for LOC201176 (NM_199282.1,1941-1959).
cagagcgtggccattgtgt

SEQ ID NO: 440917 - DNA, 19 bp, Homo sapiens
  siRNA target sequence for LOC283846 (NM_199284.2,400-418).
gttaaacaattggatatct

SEQ ID NO: 440918 - DNA, 19 bp, Homo sapiens
  siRNA target sequence for MGC70924 (NM_199285.1,470-488).
gtccgtcgtcggaagacta

SEQ ID NO: 440919 - DNA, 19 bp, Homo sapiens
  siRNA target sequence for MGC70924 (NM_199285.1,486-504).
ctaggcgggaacgtaacaa

SEQ ID NO: 440920 - DNA, 19 bp, Homo sapiens
  siRNA target sequence for MGC70924 (NM_199285.1,652-670).
ggtgaaatccctagatgtt

SEQ ID NO: 440921 - DNA, 19 bp, Homo sapiens
  siRNA target sequence for MGC70924 (NM_199285.1,767-785).
cggtccagggacaaagaga

SEQ ID NO: 440922 - DNA, 19 bp, Homo sapiens
  siRNA target sequence for MGC16597 (NM_199287.1,144-162).
gggcttcgcagcaaagaga

SEQ ID NO: 440923 - DNA, 19 bp, Homo sapiens
  siRNA target sequence for MGC16597 (NM_199287.1,195-213).
gacgaacaggagattcctt

SEQ ID NO: 440924 - DNA, 19 bp, Homo sapiens
  siRNA target sequence for MGC16597 (NM_199287.1,216-234).
cggctccgggagattatga

SEQ ID NO: 440925 - DNA, 19 bp, Homo sapiens
  siRNA target sequence for MGC16597 (NM_199287.1,235-253).
ggagccgccaagagatgaa

SEQ ID NO: 440926 - DNA, 19 bp, Homo sapiens
  siRNA target sequence for MGC16597 (NM_199287.1,236-254).
gagccgccaagagatgaaa

SEQ ID NO: 440927 - DNA, 19 bp, Homo sapiens
  siRNA target sequence for MGC16597 (NM_199287.1,347-365).
cgcagtccccaagttcaaa

SEQ ID NO: 440928 - DNA, 19 bp, Homo sapiens
  siRNA target sequence for MGC16597 (NM_199287.1,349-367).
cagtccccaagttcaaaca

SEQ ID NO: 440929 - DNA, 19 bp, Homo sapiens
  siRNA target sequence for MGC16597 (NM_199287.1,521-539).
ccagaagcggcgactagat

SEQ ID NO: 440930 - DNA, 19 bp, Homo sapiens
  siRNA target sequence for MGC16597 (NM_199287.1,522-540).
cagaagcggcgactagata

SEQ ID NO: 440931 - DNA, 19 bp, Homo sapiens
  siRNA target sequence for MGC16597 (NM_199287.1,524-542).
gaagcggcgactagataaa

SEQ ID NO: 440932 - DNA, 19 bp, Homo sapiens
  siRNA target sequence for MGC16597 (NM_199287.1,596-614).
ccgagacacggtgaagttt

SEQ ID NO: 440933 - DNA, 19 bp, Homo sapiens
  siRNA target sequence for TH (NM_199292.1,85-103).
gcagaggccatcatggtaa

SEQ ID NO: 440934 - DNA, 19 bp, Homo sapiens
  siRNA target sequence for THY28 (NM_199297.1,647-665).
ggtccatgaagagtttgat

SEQ ID NO: 440935 - DNA, 19 bp, Homo sapiens
  siRNA target sequence for JADE1 (NM_199320.1,1502-1520).
gggttcggaacctcactta

SEQ ID NO: 440936 - DNA, 19 bp, Homo sapiens
  siRNA target sequence for JADE1 (NM_199320.1,1504-1522).
gttcggaacctcacttaca

SEQ ID NO: 440937 - DNA, 19 bp, Homo sapiens
  siRNA target sequence for JADE1 (NM_199320.1,1527-1545).
gacccgcagggaaaagatt

SEQ ID NO: 440938 - DNA, 19 bp, Homo sapiens
  siRNA target sequence for JADE1 (NM_199320.1,1529-1547).
cccgcagggaaaagattaa

SEQ ID NO: 440939 - DNA, 19 bp, Homo sapiens
  siRNA target sequence for JADE1 (NM_199320.1,1569-1587).
ggaacagatattcaatctt

SEQ ID NO: 440940 - DNA, 19 bp, Homo sapiens
  siRNA target sequence for JADE1 (NM_199320.1,1570-1588).
gaacagatattcaatcttt

SEQ ID NO: 440941 - DNA, 19 bp, Homo sapiens
  siRNA target sequence for JADE1 (NM_199320.1,1573-1591).
cagatattcaatctttaca

SEQ ID NO: 440942 - DNA, 19 bp, Homo sapiens
  siRNA target sequence for JADE1 (NM_199320.1,1581-1599).
caatctttacactaagctt

SEQ ID NO: 440943 - DNA, 19 bp, Homo sapiens
  siRNA target sequence for JADE1 (NM_199320.1,1668-1686).
gtttaacagtccttctgtt

SEQ ID NO: 440944 - DNA, 19 bp, Homo sapiens
  siRNA target sequence for JADE1 (NM_199320.1,1691-1709).
ctgatgctcccaagataga

SEQ ID NO: 440945 - DNA, 19 bp, Homo sapiens
  siRNA target sequence for JADE1 (NM_199320.1,1781-1799).
cccataagcgagatccttt

SEQ ID NO: 440946 - DNA, 19 bp, Homo sapiens
  siRNA target sequence for JADE1 (NM_199320.1,1789-1807).
cgagatcctttgcagaata

SEQ ID NO: 440947 - DNA, 19 bp, Homo sapiens
  siRNA target sequence for JADE1 (NM_199320.1,1912-1930).
gcagaagcacgtctcatat

SEQ ID NO: 440948 - DNA, 19 bp, Homo sapiens
  siRNA target sequence for JADE1 (NM_199320.1,1959-1977).
gccagaccatgggaaaaga

SEQ ID NO: 440949 - DNA, 19 bp, Homo sapiens
  siRNA target sequence for JADE1 (NM_199320.1,1988-2006).
gttttcattgtgatctcat

SEQ ID NO: 440950 - DNA, 19 bp, Homo sapiens
  siRNA target sequence for JADE1 (NM_199320.1,2011-2029).
ggagacttaaaggacaaat

SEQ ID NO: 440951 - DNA, 19 bp, Homo sapiens
  siRNA target sequence for JADE1 (NM_199320.1,2162-2180).
gcaatggctccctaatcaa

SEQ ID NO: 440952 - DNA, 19 bp, Homo sapiens
  siRNA target sequence for JADE1 (NM_199320.1,2163-2181).
caatggctccctaatcaaa

SEQ ID NO: 440953 - DNA, 19 bp, Homo sapiens
  siRNA target sequence for JADE1 (NM_199320.1,2167-2185).
ggctccctaatcaaagtaa

SEQ ID NO: 440954 - DNA, 19 bp, Homo sapiens
  siRNA target sequence for JADE1 (NM_199320.1,2173-2191).
ctaatcaaagtaaactata

SEQ ID NO: 440955 - DNA, 19 bp, Homo sapiens
  siRNA target sequence for JADE1 (NM_199320.1,2410-2428).
gtccccgatgtggaaatga

SEQ ID NO: 440956 - DNA, 19 bp, Homo sapiens
  siRNA target sequence for JADE1 (NM_199320.1,2412-2430).
ccccgatgtggaaatgagt

SEQ ID NO: 440957 - DNA, 19 bp, Homo sapiens
  siRNA target sequence for JADE1 (NM_199320.1,2486-2504).
gcagaaggacagacattat

SEQ ID NO: 440958 - DNA, 19 bp, Homo sapiens
  siRNA target sequence for ZPBP2 (NM_199321.1,198-216).
cgcgttttaccttattcaa

SEQ ID NO: 440959 - DNA, 19 bp, Homo sapiens
  siRNA target sequence for ZPBP2 (NM_199321.1,199-217).
gcgttttaccttattcaat

SEQ ID NO: 440960 - DNA, 19 bp, Homo sapiens
  siRNA target sequence for ZPBP2 (NM_199321.1,246-264).
gacagccagacaaaatata

SEQ ID NO: 440961 - DNA, 19 bp, Homo sapiens
  siRNA target sequence for HSHIN1 (NM_199324.1,494-512).
ctgatgtgaatggatttaa

SEQ ID NO: 440962 - DNA, 19 bp, Homo sapiens
  siRNA target sequence for HSHIN1 (NM_199324.1,499-517).
gtgaatggatttaaacctt

SEQ ID NO: 440963 - DNA, 19 bp, Homo sapiens
  siRNA target sequence for HSHIN1 (NM_199324.1,589-607).
ctcaatcctgcagtctata

SEQ ID NO: 440964 - DNA, 19 bp, Homo sapiens
  siRNA target sequence for HSHIN1 (NM_199324.1,591-609).
caatcctgcagtctataga

SEQ ID NO: 440965 - DNA, 19 bp, Homo sapiens
  siRNA target sequence for HSHIN1 (NM_199324.1,674-692).
ctgctggcttacaatatga

SEQ ID NO: 440966 - DNA, 19 bp, Homo sapiens
  siRNA target sequence for HSHIN1 (NM_199324.1,697-715).
ggagacaaatgtcaagtta

SEQ ID NO: 440967 - DNA, 19 bp, Homo sapiens
  siRNA target sequence for HSHIN1 (NM_199324.1,776-794).
gaccagttttggttgaaga

SEQ ID NO: 440968 - DNA, 19 bp, Homo sapiens
  siRNA target sequence for HSHIN1 (NM_199324.1,1031-1049).
ggtcacagtctcagaaatt

SEQ ID NO: 440969 - DNA, 19 bp, Homo sapiens
  siRNA target sequence for HSHIN1 (NM_199324.1,1050-1068).
ctccagtgagcacaaaaat

SEQ ID NO: 440970 - DNA, 19 bp, Homo sapiens
  siRNA target sequence for HSHIN1 (NM_199324.1,1052-1070).
ccagtgagcacaaaaatct

SEQ ID NO: 440971 - DNA, 19 bp, Homo sapiens
  siRNA target sequence for HSHIN1 (NM_199324.1,1053-1071).
cagtgagcacaaaaatctt

SEQ ID NO: 440972 - DNA, 19 bp, Homo sapiens
  siRNA target sequence for HSHIN1 (NM_199324.1,1076-1094).
ggacaccttcacagatcat

SEQ ID NO: 440973 - DNA, 19 bp, Homo sapiens
  siRNA target sequence for HSHIN1 (NM_199324.1,1077-1095).
gacaccttcacagatcata

SEQ ID NO: 440974 - DNA, 19 bp, Homo sapiens
  siRNA target sequence for HSHIN1 (NM_199324.1,1139-1157).
gtcgagaatctaactattt

SEQ ID NO: 440975 - DNA, 19 bp, Homo sapiens
  siRNA target sequence for HSHIN1 (NM_199324.1,1181-1199).
gagagaagcaagctataga

SEQ ID NO: 440976 - DNA, 19 bp, Homo sapiens
  siRNA target sequence for HSHIN1 (NM_199324.1,1198-1216).
gaagaatcccgtttactct

SEQ ID NO: 440977 - DNA, 19 bp, Homo sapiens
  siRNA target sequence for HSHIN1 (NM_199324.1,1206-1224).
ccgtttactctatgagatt

SEQ ID NO: 440978 - DNA, 19 bp, Homo sapiens
  siRNA target sequence for HSHIN1 (NM_199324.1,1208-1226).
gtttactctatgagattca

SEQ ID NO: 440979 - DNA, 19 bp, Homo sapiens
  siRNA target sequence for HSHIN1 (NM_199324.1,1350-1368).
gcggagaatggatacagaa

SEQ ID NO: 440980 - DNA, 19 bp, Homo sapiens
  siRNA target sequence for HSHIN1 (NM_199324.1,1386-1404).
ctctattcatggacatagt

SEQ ID NO: 440981 - DNA, 19 bp, Homo sapiens
  siRNA target sequence for HSHIN1 (NM_199324.1,1388-1406).
ctattcatggacatagtca

SEQ ID NO: 440982 - DNA, 19 bp, Homo sapiens
  siRNA target sequence for HSHIN1 (NM_199324.1,1396-1414).
ggacatagtcagttggata

SEQ ID NO: 440983 - DNA, 19 bp, Homo sapiens
  siRNA target sequence for HSHIN1 (NM_199324.1,1397-1415).
gacatagtcagttggataa

SEQ ID NO: 440984 - DNA, 19 bp, Homo sapiens
  siRNA target sequence for HSHIN1 (NM_199324.1,1426-1444).
ccaagcacattggagaata

SEQ ID NO: 440985 - DNA, 19 bp, Homo sapiens
  siRNA target sequence for HSHIN1 (NM_199324.1,1427-1445).
caagcacattggagaatat

SEQ ID NO: 440986 - DNA, 19 bp, Homo sapiens
  siRNA target sequence for HSHIN1 (NM_199324.1,1431-1449).
cacattggagaatattact

SEQ ID NO: 440987 - DNA, 19 bp, Homo sapiens
  siRNA target sequence for HSHIN1 (NM_199324.1,1669-1687).
gctccaattcccgttttgt

SEQ ID NO: 440988 - DNA, 19 bp, Homo sapiens
  siRNA target sequence for HSHIN1 (NM_199324.1,1860-1878).
gggagatcgagccattgta

SEQ ID NO: 440989 - DNA, 19 bp, Homo sapiens
  siRNA target sequence for HSHIN1 (NM_199324.1,1870-1888).
gccattgtaccaccttatt

SEQ ID NO: 440990 - DNA, 19 bp, Homo sapiens
  siRNA target sequence for HSHIN1 (NM_199324.1,1901-1919).
ctggggaggacctacctaa

SEQ ID NO: 440991 - DNA, 19 bp, Homo sapiens
  siRNA target sequence for HSHIN1 (NM_199324.1,1905-1923).
ggaggacctacctaaagat

SEQ ID NO: 440992 - DNA, 19 bp, Homo sapiens
  siRNA target sequence for HSHIN1 (NM_199324.1,1906-1924).
gaggacctacctaaagata

SEQ ID NO: 440993 - DNA, 19 bp, Homo sapiens
  siRNA target sequence for HSHIN1 (NM_199324.1,1909-1927).
gacctacctaaagataaga

SEQ ID NO: 440994 - DNA, 19 bp, Homo sapiens
  siRNA target sequence for HSHIN1 (NM_199324.1,1911-1929).
cctacctaaagataagaat

SEQ ID NO: 440995 - DNA, 19 bp, Homo sapiens
  siRNA target sequence for HSHIN1 (NM_199324.1,1912-1930).
ctacctaaagataagaata

SEQ ID NO: 440996 - DNA, 19 bp, Homo sapiens
  siRNA target sequence for HSHIN1 (NM_199324.1,1916-1934).
ctaaagataagaatattct

SEQ ID NO: 440997 - DNA, 19 bp, Homo sapiens
  siRNA target sequence for HSHIN1 (NM_199324.1,2049-2067).
ggtccctgtccctgtttat

SEQ ID NO: 440998 - DNA, 19 bp, Homo sapiens
  siRNA target sequence for HSHIN1 (NM_199324.1,2101-2119).
gctcagaatgaaagtgatt

SEQ ID NO: 440999 - DNA, 19 bp, Homo sapiens
  siRNA target sequence for HSHIN1 (NM_199324.1,2104-2122).
cagaatgaaagtgattgta

SEQ ID NO: 441000 - DNA, 19 bp, Homo sapiens
  siRNA target sequence for HSHIN1 (NM_199324.1,2151-2169).
gactgaggccagtgttaat

SEQ ID NO: 441001 - DNA, 19 bp, Homo sapiens
  siRNA target sequence for HSHIN1 (NM_199324.1,2190-2208).
gattggaccgccgacattt

SEQ ID NO: 441002 - DNA, 19 bp, Homo sapiens
  siRNA target sequence for HSHIN1 (NM_199324.1,2194-2212).
ggaccgccgacattttctt

SEQ ID NO: 441003 - DNA, 19 bp, Homo sapiens
  siRNA target sequence for HSHIN1 (NM_199324.1,2249-2267).
gtcatggacaattgtctta

SEQ ID NO: 441004 - DNA, 19 bp, Homo sapiens
  siRNA target sequence for LOC374395 (NM_199337.1,104-122).
ctccttcagtggtagatgt

SEQ ID NO: 441005 - DNA, 19 bp, Homo sapiens
  siRNA target sequence for LOC374395 (NM_199337.1,184-202).
catccctgtgctactttgt

SEQ ID NO: 441006 - DNA, 19 bp, Homo sapiens
  siRNA target sequence for LOC374395 (NM_199337.1,355-373).
ctgcctgtatccttcgatt

SEQ ID NO: 441007 - DNA, 19 bp, Homo sapiens
  siRNA target sequence for LOC374395 (NM_199337.1,508-526).
cttcttgggtgaatttggt

SEQ ID NO: 441008 - DNA, 19 bp, Homo sapiens
  siRNA target sequence for LOC374395 (NM_199337.1,511-529).
cttgggtgaatttggtatt

SEQ ID NO: 441009 - DNA, 19 bp, Homo sapiens
  siRNA target sequence for LOC374768 (NM_199339.1,557-575).
gaagctcccaagtcatcat

SEQ ID NO: 441010 - DNA, 19 bp, Homo sapiens
  siRNA target sequence for LOC374768 (NM_199339.1,976-994).
gaggtacctcactgtaaca

SEQ ID NO: 441011 - DNA, 19 bp, Homo sapiens
  siRNA target sequence for LOC374920 (NM_199341.1,474-492).
gtgcgcaccaccaacaaga

SEQ ID NO: 441012 - DNA, 19 bp, Homo sapiens
  siRNA target sequence for LOC374920 (NM_199341.1,1144-1162).
ccgccttcgtggactactt

SEQ ID NO: 441013 - DNA, 19 bp, Homo sapiens
  siRNA target sequence for LOC374920 (NM_199341.1,1463-1481).
gggaggggctccgaaagaa

SEQ ID NO: 441014 - DNA, 19 bp, Homo sapiens
  siRNA target sequence for LOC374920 (NM_199341.1,1471-1489).
ctccgaaagaaggaagtat

SEQ ID NO: 441015 - DNA, 19 bp, Homo sapiens
  siRNA target sequence for LOC374920 (NM_199341.1,1581-1599).
gcactgcagatcagagatt

SEQ ID NO: 441016 - DNA, 19 bp, Homo sapiens
  siRNA target sequence for LOC374920 (NM_199341.1,1606-1624).
ggggtcggttggagaatca

SEQ ID NO: 441017 - DNA, 19 bp, Homo sapiens
  siRNA target sequence for LOC374920 (NM_199341.1,1608-1626).
ggtcggttggagaatcaga

SEQ ID NO: 441018 - DNA, 19 bp, Homo sapiens
  siRNA target sequence for LOC374920 (NM_199341.1,1609-1627).
gtcggttggagaatcagaa

SEQ ID NO: 441019 - DNA, 19 bp, Homo sapiens
  siRNA target sequence for LOC374920 (NM_199341.1,1652-1670).
cttgagagggtcgaagtta

SEQ ID NO: 441020 - DNA, 19 bp, Homo sapiens
  siRNA target sequence for LOC374920 (NM_199341.1,1685-1703).
gagagggccagagattaga

SEQ ID NO: 441021 - DNA, 19 bp, Homo sapiens
  siRNA target sequence for LOC374920 (NM_199341.1,1743-1761).
ggactggaaggttatgtct

SEQ ID NO: 441022 - DNA, 19 bp, Homo sapiens
  siRNA target sequence for LOC374920 (NM_199341.1,1797-1815).
ggattggaagggtatacct

SEQ ID NO: 441023 - DNA, 19 bp, Homo sapiens
  siRNA target sequence for LOC374920 (NM_199341.1,1862-1880).
ggggacccagtttgactat

SEQ ID NO: 441024 - DNA, 19 bp, Homo sapiens
  siRNA target sequence for LOC374969 (NM_199342.1,102-120).
ggatccacctgcacgtaaa

SEQ ID NO: 441025 - DNA, 19 bp, Homo sapiens
  siRNA target sequence for LOC374969 (NM_199342.1,106-124).
ccacctgcacgtaaagaaa

SEQ ID NO: 441026 - DNA, 19 bp, Homo sapiens
  siRNA target sequence for LOC374969 (NM_199342.1,200-218).
gacaaagagcagagatcta

SEQ ID NO: 441027 - DNA, 19 bp, Homo sapiens
  siRNA target sequence for FLJ90637 (NM_199343.1,34-52).
ggcgttttcaaaagcatat

SEQ ID NO: 441028 - DNA, 19 bp, Homo sapiens
  siRNA target sequence for FLJ90637 (NM_199343.1,35-53).
gcgttttcaaaagcatata

SEQ ID NO: 441029 - DNA, 19 bp, Homo sapiens
  siRNA target sequence for FLJ90637 (NM_199343.1,76-94).
gaccgatcagaaaggattt

SEQ ID NO: 441030 - DNA, 19 bp, Homo sapiens
  siRNA target sequence for FLJ90637 (NM_199343.1,83-101).
cagaaaggatttcttaact

SEQ ID NO: 441031 - DNA, 19 bp, Homo sapiens
  siRNA target sequence for FLJ90637 (NM_199343.1,145-163).
gggggacggcactgaactt

SEQ ID NO: 441032 - DNA, 19 bp, Homo sapiens
  siRNA target sequence for FLJ90637 (NM_199343.1,238-256).
ggaacgcacccgaaactca

SEQ ID NO: 441033 - DNA, 19 bp, Homo sapiens
  siRNA target sequence for FLJ90637 (NM_199343.1,599-617).
gaccggcgaaggtacttct

SEQ ID NO: 441034 - DNA, 19 bp, Homo sapiens
  siRNA target sequence for FLJ90637 (NM_199343.1,601-619).
ccggcgaaggtacttcttt

SEQ ID NO: 441035 - DNA, 19 bp, Homo sapiens
  siRNA target sequence for LOC375035 (NM_199344.1,136-154).
gttgttgaggcatcttcat

SEQ ID NO: 441036 - DNA, 19 bp, Homo sapiens
  siRNA target sequence for LOC375035 (NM_199344.1,139-157).
gttgaggcatcttcattaa

SEQ ID NO: 441037 - DNA, 19 bp, Homo sapiens
  siRNA target sequence for LOC375035 (NM_199344.1,183-201).
cattgcgtgttttgctata

SEQ ID NO: 441038 - DNA, 19 bp, Homo sapiens
  siRNA target sequence for LOC375035 (NM_199344.1,188-206).
cgtgttttgctataggaat

SEQ ID NO: 441039 - DNA, 19 bp, Homo sapiens
  siRNA target sequence for LOC375035 (NM_199344.1,189-207).
gtgttttgctataggaatt

SEQ ID NO: 441040 - DNA, 19 bp, Homo sapiens
  siRNA target sequence for LOC375035 (NM_199344.1,267-285).
cgcagtgttttataccttt

SEQ ID NO: 441041 - DNA, 19 bp, Homo sapiens
  siRNA target sequence for LOC375035 (NM_199344.1,358-376).
cctactcgtttgattgcaa

SEQ ID NO: 441042 - DNA, 19 bp, Homo sapiens
  siRNA target sequence for LOC375035 (NM_199344.1,362-380).
ctcgtttgattgcaactat

SEQ ID NO: 441043 - DNA, 19 bp, Homo sapiens
  siRNA target sequence for LOC375035 (NM_199344.1,364-382).
cgtttgattgcaactatca

SEQ ID NO: 441044 - DNA, 19 bp, Homo sapiens
  siRNA target sequence for LOC375035 (NM_199344.1,365-383).
gtttgattgcaactatcat

SEQ ID NO: 441045 - DNA, 19 bp, Homo sapiens
  siRNA target sequence for LOC375035 (NM_199344.1,418-436).
gccttttggtggcataaca

SEQ ID NO: 441046 - DNA, 19 bp, Homo sapiens
  siRNA target sequence for LOC375035 (NM_199344.1,419-437).
ccttttggtggcataacaa

SEQ ID NO: 441047 - DNA, 19 bp, Homo sapiens
  siRNA target sequence for LOC375035 (NM_199344.1,439-457).
ggacttgcacttatcttct

SEQ ID NO: 441048 - DNA, 19 bp, Homo sapiens
  siRNA target sequence for LOC375189 (NM_199346.1,181-199).
gccatttgcagagcttatt

SEQ ID NO: 441049 - DNA, 19 bp, Homo sapiens
  siRNA target sequence for LOC375189 (NM_199346.1,183-201).
catttgcagagcttattgt

SEQ ID NO: 441050 - DNA, 19 bp, Homo sapiens
  siRNA target sequence for LOC375189 (NM_199346.1,312-330).
cgaacactggtgaatggat

SEQ ID NO: 441051 - DNA, 19 bp, Homo sapiens
  siRNA target sequence for LOC375189 (NM_199346.1,313-331).
gaacactggtgaatggatt

SEQ ID NO: 441052 - DNA, 19 bp, Homo sapiens
  siRNA target sequence for LOC375189 (NM_199346.1,353-371).
ccgaagagaaggactgtat

SEQ ID NO: 441053 - DNA, 19 bp, Homo sapiens
  siRNA target sequence for LOC375189 (NM_199346.1,394-412).
gtgtccgggcagatgaata

SEQ ID NO: 441054 - DNA, 19 bp, Homo sapiens
  siRNA target sequence for LOC375189 (NM_199346.1,396-414).
gtccgggcagatgaatatt

SEQ ID NO: 441055 - DNA, 19 bp, Homo sapiens
  siRNA target sequence for LOC375189 (NM_199346.1,398-416).
ccgggcagatgaatattct

SEQ ID NO: 441056 - DNA, 19 bp, Homo sapiens
  siRNA target sequence for LOC375189 (NM_199346.1,452-470).
cgtgaagacccatctgtat

SEQ ID NO: 441057 - DNA, 19 bp, Homo sapiens
  siRNA target sequence for LOC375189 (NM_199346.1,471-489).
cttctggtagcaacttaca

SEQ ID NO: 441058 - DNA, 19 bp, Homo sapiens
  siRNA target sequence for LOC375189 (NM_199346.1,536-554).
gggagactacctaagaaaa

SEQ ID NO: 441059 - DNA, 19 bp, Homo sapiens
  siRNA target sequence for LOC375418 (NM_199348.1,547-565).
cctctgcccagttgttcaa

SEQ ID NO: 441060 - DNA, 19 bp, Homo sapiens
  siRNA target sequence for LOC375418 (NM_199348.1,829-847).
gcgtcaacgacgtgaatga

SEQ ID NO: 441061 - DNA, 19 bp, Homo sapiens
  siRNA target sequence for LOC375418 (NM_199348.1,1597-1615).
caattcacgtgctctttct

SEQ ID NO: 441062 - DNA, 19 bp, Homo sapiens
  siRNA target sequence for LOC375418 (NM_199348.1,1816-1834).
ccccaggggtatttttcct

SEQ ID NO: 441063 - DNA, 19 bp, Homo sapiens
  siRNA target sequence for LOC375418 (NM_199348.1,1817-1835).
cccaggggtatttttcctt

SEQ ID NO: 441064 - DNA, 19 bp, Homo sapiens
  siRNA target sequence for LOC375418 (NM_199348.1,1818-1836).
ccaggggtatttttccttt

SEQ ID NO: 441065 - DNA, 19 bp, Homo sapiens
  siRNA target sequence for LOC375418 (NM_199348.1,1864-1882).
gccgcgatctgtatgagtt

SEQ ID NO: 441066 - DNA, 19 bp, Homo sapiens
  siRNA target sequence for LOC375418 (NM_199348.1,1865-1883).
ccgcgatctgtatgagtta

SEQ ID NO: 441067 - DNA, 19 bp, Homo sapiens
  siRNA target sequence for LOC375418 (NM_199348.1,1868-1886).
cgatctgtatgagttacta

SEQ ID NO: 441068 - DNA, 19 bp, Homo sapiens
  siRNA target sequence for LOC375418 (NM_199348.1,1945-1963).
gggtcgctgacctcaatga

SEQ ID NO: 441069 - DNA, 19 bp, Homo sapiens
  siRNA target sequence for LOC375418 (NM_199348.1,2020-2038).
cccctggcactgtagtcat

SEQ ID NO: 441070 - DNA, 19 bp, Homo sapiens
  siRNA target sequence for LOC375418 (NM_199348.1,2309-2327).
gagcatcaccgtagatgat

SEQ ID NO: 441071 - DNA, 19 bp, Homo sapiens
  siRNA target sequence for LOC375418 (NM_199348.1,2315-2333).
caccgtagatgatgtgaat

SEQ ID NO: 441072 - DNA, 19 bp, Homo sapiens
  siRNA target sequence for LOC375418 (NM_199348.1,2317-2335).
ccgtagatgatgtgaatga

SEQ ID NO: 441073 - DNA, 19 bp, Homo sapiens
  siRNA target sequence for LOC375418 (NM_199348.1,2440-2458).
gactctatggctttattga

SEQ ID NO: 441074 - DNA, 19 bp, Homo sapiens
  siRNA target sequence for LOC375418 (NM_199348.1,2507-2525).
ccggatcgaccctcatgat

SEQ ID NO: 441075 - DNA, 19 bp, Homo sapiens
  siRNA target sequence for LOC375418 (NM_199348.1,2536-2554).
gtgtttctcaagatatcga

SEQ ID NO: 441076 - DNA, 19 bp, Homo sapiens
  siRNA target sequence for LOC375418 (NM_199348.1,2648-2666).
ggacgtgaatgataatcat

SEQ ID NO: 441077 - DNA, 19 bp, Homo sapiens
  siRNA target sequence for LOC375418 (NM_199348.1,2672-2690).
gtttaacccatcaacctat

SEQ ID NO: 441078 - DNA, 19 bp, Homo sapiens
  siRNA target sequence for LOC375418 (NM_199348.1,2719-2737).
caggcaccgagatcatcaa

SEQ ID NO: 441079 - DNA, 19 bp, Homo sapiens
  siRNA target sequence for LOC375418 (NM_199348.1,2725-2743).
ccgagatcatcaatgttct

SEQ ID NO: 441080 - DNA, 19 bp, Homo sapiens
  siRNA target sequence for LOC375418 (NM_199348.1,2805-2823).
gtgtcgtccctttttacca

SEQ ID NO: 441081 - DNA, 19 bp, Homo sapiens
  siRNA target sequence for LOC375418 (NM_199348.1,2830-2848).
ccaccacaggaattattta

SEQ ID NO: 441082 - DNA, 19 bp, Homo sapiens
  siRNA target sequence for LOC375418 (NM_199348.1,2834-2852).
cacaggaattatttactta

SEQ ID NO: 441083 - DNA, 19 bp, Homo sapiens
  siRNA target sequence for LOC375418 (NM_199348.1,2849-2867).
cttaacattacctcttagt

SEQ ID NO: 441084 - DNA, 19 bp, Homo sapiens
  siRNA target sequence for LOC375418 (NM_199348.1,2920-2938).
ggctcacagctgtcattaa

SEQ ID NO: 441085 - DNA, 19 bp, Homo sapiens
  siRNA target sequence for LOC375418 (NM_199348.1,2921-2939).
gctcacagctgtcattaat

SEQ ID NO: 441086 - DNA, 19 bp, Homo sapiens
  siRNA target sequence for LOC375418 (NM_199348.1,2940-2958).
gccgatgtcaccatacaca

SEQ ID NO: 441087 - DNA, 19 bp, Homo sapiens
  siRNA target sequence for LOC375418 (NM_199348.1,2991-3009).
gaaaggcctaagtacactt

SEQ ID NO: 441088 - DNA, 19 bp, Homo sapiens
  siRNA target sequence for LOC375418 (NM_199348.1,3002-3020).
gtacactttcttagtttat

SEQ ID NO: 441089 - DNA, 19 bp, Homo sapiens
  siRNA target sequence for LOC375418 (NM_199348.1,3112-3130).
gtgatctcggcggaaagtt

SEQ ID NO: 441090 - DNA, 19 bp, Homo sapiens
  siRNA target sequence for LOC375418 (NM_199348.1,3114-3132).
gatctcggcggaaagttct

SEQ ID NO: 441091 - DNA, 19 bp, Homo sapiens
  siRNA target sequence for LOC375418 (NM_199348.1,3308-3326).
ctcggatgagattagaata

SEQ ID NO: 441092 - DNA, 19 bp, Homo sapiens
  siRNA target sequence for LOC375418 (NM_199348.1,3607-3625).
ggactttcgaacatttggt

SEQ ID NO: 441093 - DNA, 19 bp, Homo sapiens
  siRNA target sequence for LOC375418 (NM_199348.1,3614-3632).
cgaacatttggtctatcaa

SEQ ID NO: 441094 - DNA, 19 bp, Homo sapiens
  siRNA target sequence for LOC375418 (NM_199348.1,3651-3669).
ctctcaccgatgacacaaa

SEQ ID NO: 441095 - DNA, 19 bp, Homo sapiens
  siRNA target sequence for LOC375418 (NM_199348.1,3655-3673).
caccgatgacacaaatgct

SEQ ID NO: 441096 - DNA, 19 bp, Homo sapiens
  siRNA target sequence for LOC375418 (NM_199348.1,3709-3727).
cagcctcgcctcttaggta

SEQ ID NO: 441097 - DNA, 19 bp, Homo sapiens
  siRNA target sequence for LOC375418 (NM_199348.1,3743-3761).
cgtagactctgctatgttt

SEQ ID NO: 441098 - DNA, 19 bp, Homo sapiens
  siRNA target sequence for LOC375418 (NM_199348.1,3747-3765).
gactctgctatgtttggaa

SEQ ID NO: 441099 - DNA, 19 bp, Homo sapiens
  siRNA target sequence for LOC375418 (NM_199348.1,3771-3789).
ccttacacgggctggattt

SEQ ID NO: 441100 - DNA, 19 bp, Homo sapiens
  siRNA target sequence for LOC375418 (NM_199348.1,3772-3790).
cttacacgggctggattta

SEQ ID NO: 441101 - DNA, 19 bp, Homo sapiens
  siRNA target sequence for LOC375418 (NM_199348.1,3796-3814).
ggcgacagtttgactatga

SEQ ID NO: 441102 - DNA, 19 bp, Homo sapiens
  siRNA target sequence for LOC375418 (NM_199348.1,3797-3815).
gcgacagtttgactatgaa

SEQ ID NO: 441103 - DNA, 19 bp, Homo sapiens
  siRNA target sequence for LOC375418 (NM_199348.1,3798-3816).
cgacagtttgactatgaat

SEQ ID NO: 441104 - DNA, 19 bp, Homo sapiens
  siRNA target sequence for LOC375418 (NM_199348.1,3858-3876).
gaggacggattcttgcaaa

SEQ ID NO: 441105 - DNA, 19 bp, Homo sapiens
  siRNA target sequence for LOC375418 (NM_199348.1,3860-3878).
ggacggattcttgcaaaat

SEQ ID NO: 441106 - DNA, 19 bp, Homo sapiens
  siRNA target sequence for LOC375418 (NM_199348.1,4073-4091).
caagatgaatcctaataca

SEQ ID NO: 441107 - DNA, 19 bp, Homo sapiens
  siRNA target sequence for LOC375418 (NM_199348.1,4083-4101).
cctaatacaggagagttaa

SEQ ID NO: 441108 - DNA, 19 bp, Homo sapiens
  siRNA target sequence for LOC375418 (NM_199348.1,4189-4207).
ccaccatggcggtttacgt

SEQ ID NO: 441109 - DNA, 19 bp, Homo sapiens
  siRNA target sequence for LOC375418 (NM_199348.1,4197-4215).
gcggtttacgtctcagtta

SEQ ID NO: 441110 - DNA, 19 bp, Homo sapiens
  siRNA target sequence for LOC375418 (NM_199348.1,4199-4217).
ggtttacgtctcagttact

SEQ ID NO: 441111 - DNA, 19 bp, Homo sapiens
  siRNA target sequence for LOC375418 (NM_199348.1,4287-4305).
gaaggtcaaccagtaaata

SEQ ID NO: 441112 - DNA, 19 bp, Homo sapiens
  siRNA target sequence for LOC375418 (NM_199348.1,4416-4434).
gggaagcagtcgtgcaaaa

SEQ ID NO: 441113 - DNA, 19 bp, Homo sapiens
  siRNA target sequence for LOC375418 (NM_199348.1,4418-4436).
gaagcagtcgtgcaaaaaa

SEQ ID NO: 441114 - DNA, 19 bp, Homo sapiens
  siRNA target sequence for LOC375616 (NM_199349.1,527-545).
ctggaaggtaccatcactt

SEQ ID NO: 441115 - DNA, 19 bp, Homo sapiens
  siRNA target sequence for LOC375616 (NM_199349.1,591-609).
catgctgcccgcactgtaa

SEQ ID NO: 441116 - DNA, 19 bp, Homo sapiens
  siRNA target sequence for LOC375616 (NM_199349.1,889-907).
gtgccgccagcgagaatgt

SEQ ID NO: 441117 - DNA, 19 bp, Homo sapiens
  siRNA target sequence for LOC375616 (NM_199349.1,961-979).
gtgtgatggctgtttccta

SEQ ID NO: 441118 - DNA, 19 bp, Homo sapiens
  siRNA target sequence for LOC375616 (NM_199349.1,1033-1051).
gcactgccgctgtgctaat

SEQ ID NO: 441119 - DNA, 19 bp, Homo sapiens
  siRNA target sequence for LOC375616 (NM_199349.1,1378-1396).
cgcctgcgtctgtcaagat

SEQ ID NO: 441120 - DNA, 19 bp, Homo sapiens
  siRNA target sequence for LOC375616 (NM_199349.1,1844-1862).
gcctttggcgggaaagagt

SEQ ID NO: 441121 - DNA, 19 bp, Homo sapiens
  siRNA target sequence for LOC375616 (NM_199349.1,1845-1863).
cctttggcgggaaagagta

SEQ ID NO: 441122 - DNA, 19 bp, Homo sapiens
  siRNA target sequence for LOC375616 (NM_199349.1,2431-2449).
gctgggtcagaataatctt

SEQ ID NO: 441123 - DNA, 19 bp, Homo sapiens
  siRNA target sequence for LOC375616 (NM_199349.1,2454-2472).
gccctagggtggatctaaa

SEQ ID NO: 441124 - DNA, 19 bp, Homo sapiens
  siRNA target sequence for LOC375616 (NM_199349.1,2456-2474).
cctagggtggatctaaaat

SEQ ID NO: 441125 - DNA, 19 bp, Homo sapiens
  siRNA target sequence for LOC375616 (NM_199349.1,2457-2475).
ctagggtggatctaaaata

SEQ ID NO: 441126 - DNA, 19 bp, Homo sapiens
  siRNA target sequence for LOC375616 (NM_199349.1,2460-2478).
gggtggatctaaaatattt

SEQ ID NO: 441127 - DNA, 19 bp, Homo sapiens
  siRNA target sequence for LOC375616 (NM_199349.1,2461-2479).
ggtggatctaaaatattta

SEQ ID NO: 441128 - DNA, 19 bp, Homo sapiens
  siRNA target sequence for LOC375759 (NM_199350.1,764-782).
ccgcggtgtcccaactgtt

SEQ ID NO: 441129 - DNA, 19 bp, Homo sapiens
  siRNA target sequence for LOC375759 (NM_199350.1,767-785).
cggtgtcccaactgttcat

SEQ ID NO: 441130 - DNA, 19 bp, Homo sapiens
  siRNA target sequence for LOC375759 (NM_199350.1,768-786).
ggtgtcccaactgttcatt

SEQ ID NO: 441131 - DNA, 19 bp, Homo sapiens
  siRNA target sequence for LOC375759 (NM_199350.1,813-831).
cgcacctccaggatagtct

SEQ ID NO: 441132 - DNA, 19 bp, Homo sapiens
  siRNA target sequence for LOC375759 (NM_199350.1,814-832).
gcacctccaggatagtctt

SEQ ID NO: 441133 - DNA, 19 bp, Homo sapiens
  siRNA target sequence for LOC375759 (NM_199350.1,815-833).
cacctccaggatagtctta

SEQ ID NO: 441134 - DNA, 19 bp, Homo sapiens
  siRNA target sequence for LOC375759 (NM_199350.1,823-841).
ggatagtcttacgaagatt

SEQ ID NO: 441135 - DNA, 19 bp, Homo sapiens
  siRNA target sequence for LOC375759 (NM_199350.1,824-842).
gatagtcttacgaagattt

SEQ ID NO: 441136 - DNA, 19 bp, Homo sapiens
  siRNA target sequence for LOC375759 (NM_199350.1,878-896).
ggtgatcactcacaattca

SEQ ID NO: 441137 - DNA, 19 bp, Homo sapiens
  siRNA target sequence for LOC375759 (NM_199350.1,1085-1103).
caacagagcgtcattgtga

SEQ ID NO: 441138 - DNA, 19 bp, Homo sapiens
  siRNA target sequence for LOC375759 (NM_199350.1,1155-1173).
gaaaacggctggagagttt

SEQ ID NO: 441139 - DNA, 19 bp, Homo sapiens
  siRNA target sequence for LOC375759 (NM_199350.1,1260-1278).
cacagggctacctttctga

SEQ ID NO: 441140 - DNA, 19 bp, Homo sapiens
  siRNA target sequence for C1orf32 (NM_199351.1,177-195).
cgctgccacttctcaacat

SEQ ID NO: 441141 - DNA, 19 bp, Homo sapiens
  siRNA target sequence for C1orf32 (NM_199351.1,347-365).
gaggactgttcgagtagta

SEQ ID NO: 441142 - DNA, 19 bp, Homo sapiens
  siRNA target sequence for C1orf32 (NM_199351.1,358-376).
gagtagtagcttcaaaaca

SEQ ID NO: 441143 - DNA, 19 bp, Homo sapiens
  siRNA target sequence for C1orf32 (NM_199351.1,413-431).
cagagagatcacgattgtt

SEQ ID NO: 441144 - DNA, 19 bp, Homo sapiens
  siRNA target sequence for C1orf32 (NM_199351.1,415-433).
gagagatcacgattgttca

SEQ ID NO: 441145 - DNA, 19 bp, Homo sapiens
  siRNA target sequence for C1orf32 (NM_199351.1,419-437).
gatcacgattgttcatgat

SEQ ID NO: 441146 - DNA, 19 bp, Homo sapiens
  siRNA target sequence for C1orf32 (NM_199351.1,467-485).
gggagacagcggactctat

SEQ ID NO: 441147 - DNA, 19 bp, Homo sapiens
  siRNA target sequence for C1orf32 (NM_199351.1,468-486).
ggagacagcggactctatt

SEQ ID NO: 441148 - DNA, 19 bp, Homo sapiens
  siRNA target sequence for C1orf32 (NM_199351.1,471-489).
gacagcggactctattact

SEQ ID NO: 441149 - DNA, 19 bp, Homo sapiens
  siRNA target sequence for C1orf32 (NM_199351.1,473-491).
cagcggactctattactgt

SEQ ID NO: 441150 - DNA, 19 bp, Homo sapiens
  siRNA target sequence for C1orf32 (NM_199351.1,475-493).
gcggactctattactgtat

SEQ ID NO: 441151 - DNA, 19 bp, Homo sapiens
  siRNA target sequence for C1orf32 (NM_199351.1,476-494).
cggactctattactgtatt

SEQ ID NO: 441152 - DNA, 19 bp, Homo sapiens
  siRNA target sequence for C1orf32 (NM_199351.1,477-495).
ggactctattactgtatta

SEQ ID NO: 441153 - DNA, 19 bp, Homo sapiens
  siRNA target sequence for C1orf32 (NM_199351.1,478-496).
gactctattactgtattat

SEQ ID NO: 441154 - DNA, 19 bp, Homo sapiens
  siRNA target sequence for C1orf32 (NM_199351.1,480-498).
ctctattactgtattatca

SEQ ID NO: 441155 - DNA, 19 bp, Homo sapiens
  siRNA target sequence for C1orf32 (NM_199351.1,589-607).
gttttgctgtggagattat

SEQ ID NO: 441156 - DNA, 19 bp, Homo sapiens
  siRNA target sequence for C1orf32 (NM_199351.1,930-948).
cacagtgttcgcaaaggtt

SEQ ID NO: 441157 - DNA, 19 bp, Homo sapiens
  siRNA target sequence for C1orf32 (NM_199351.1,983-1001).
gaaggtcctgtactatgtt

SEQ ID NO: 441158 - DNA, 19 bp, Homo sapiens
  siRNA target sequence for C1orf32 (NM_199351.1,1007-1025).
ggagctggctcagtttgat

SEQ ID NO: 441159 - DNA, 19 bp, Homo sapiens
  siRNA target sequence for C1orf32 (NM_199351.1,1036-1054).
ggatgagaggcagatataa

SEQ ID NO: 441160 - DNA, 19 bp, Homo sapiens
  siRNA target sequence for C1orf32 (NM_199351.1,1096-1114).
gcaatttccgccagtcttt

SEQ ID NO: 441161 - DNA, 19 bp, Homo sapiens
  siRNA target sequence for C1orf32 (NM_199351.1,1157-1175).
ggagagcaatcctgactat

SEQ ID NO: 441162 - DNA, 19 bp, Homo sapiens
  siRNA target sequence for C1orf32 (NM_199351.1,1222-1240).
cagccatggagtataacaa

SEQ ID NO: 441163 - DNA, 19 bp, Homo sapiens
  siRNA target sequence for C1orf32 (NM_199351.1,1609-1627).
caggcaccgcacccaaata

SEQ ID NO: 441164 - DNA, 19 bp, Homo sapiens
  siRNA target sequence for C1orf32 (NM_199351.1,1612-1630).
gcaccgcacccaaatacga

SEQ ID NO: 441165 - DNA, 19 bp, Homo sapiens
  siRNA target sequence for LOC387601 (NM_199352.1,346-364).
ggtgggaggcaacctatat

SEQ ID NO: 441166 - DNA, 19 bp, Homo sapiens
  siRNA target sequence for LOC387601 (NM_199352.1,453-471).
ctcccaccatcctcgtata

SEQ ID NO: 441167 - DNA, 19 bp, Homo sapiens
  siRNA target sequence for LOC387601 (NM_199352.1,455-473).
cccaccatcctcgtatact

SEQ ID NO: 441168 - DNA, 19 bp, Homo sapiens
  siRNA target sequence for LOC387601 (NM_199352.1,490-508).
ggctggggctgctacattt

SEQ ID NO: 441169 - DNA, 19 bp, Homo sapiens
  siRNA target sequence for LOC387601 (NM_199352.1,491-509).
gctggggctgctacattta

SEQ ID NO: 441170 - DNA, 19 bp, Homo sapiens
  siRNA target sequence for LOC387601 (NM_199352.1,562-580).
ctgtgccatggcattgaca

SEQ ID NO: 441171 - DNA, 19 bp, Homo sapiens
  siRNA target sequence for LOC387601 (NM_199352.1,594-612).
ctgctagtattggacatat

SEQ ID NO: 441172 - DNA, 19 bp, Homo sapiens
  siRNA target sequence for LOC387601 (NM_199352.1,596-614).
gctagtattggacatataa

SEQ ID NO: 441173 - DNA, 19 bp, Homo sapiens
  siRNA target sequence for LOC387601 (NM_199352.1,675-693).
caccatgctttgtcttctt

SEQ ID NO: 441174 - DNA, 19 bp, Homo sapiens
  siRNA target sequence for LOC387601 (NM_199352.1,1043-1061).
ctctggaagcttcatttta

SEQ ID NO: 441175 - DNA, 19 bp, Homo sapiens
  siRNA target sequence for ADAMTS18 (NM_199355.1,3671-3689).
ccagggaaagctgataact

SEQ ID NO: 441176 - DNA, 19 bp, Homo sapiens
  siRNA target sequence for ADAMTS18 (NM_199355.1,3696-3714).
gagcgaagatgccgtaata

SEQ ID NO: 441177 - DNA, 19 bp, Homo sapiens
  siRNA target sequence for ADAMTS18 (NM_199355.1,3698-3716).
gcgaagatgccgtaatatt

SEQ ID NO: 441178 - DNA, 19 bp, Homo sapiens
  siRNA target sequence for ADAMTS18 (NM_199355.1,3703-3721).
gatgccgtaatattaagaa

SEQ ID NO: 441179 - DNA, 19 bp, Homo sapiens
  siRNA target sequence for ADAMTS18 (NM_199355.1,3708-3726).
cgtaatattaagaaaccaa

SEQ ID NO: 441180 - DNA, 19 bp, Homo sapiens
  siRNA target sequence for ADAMTS18 (NM_199355.1,3766-3784).
cagcccatccagtgtacaa

SEQ ID NO: 441181 - DNA, 19 bp, Homo sapiens
  siRNA target sequence for ADAMTS18 (NM_199355.1,3785-3803).
catggtagctggatggtat

SEQ ID NO: 441182 - DNA, 19 bp, Homo sapiens
  siRNA target sequence for ADAMTS18 (NM_199355.1,3788-3806).
ggtagctggatggtattca

SEQ ID NO: 441183 - DNA, 19 bp, Homo sapiens
  siRNA target sequence for ADAMTS18 (NM_199355.1,3789-3807).
gtagctggatggtattcat

SEQ ID NO: 441184 - DNA, 19 bp, Homo sapiens
  siRNA target sequence for ADAMTS18 (NM_199355.1,3923-3941).
gctacgagcctgtaataca

SEQ ID NO: 441185 - DNA, 19 bp, Homo sapiens
  siRNA target sequence for ADAMTS18 (NM_199355.1,3924-3942).
ctacgagcctgtaatacaa

SEQ ID NO: 441186 - DNA, 19 bp, Homo sapiens
  siRNA target sequence for ADAMTS18 (NM_199355.1,3927-3945).
cgagcctgtaatacaaact

SEQ ID NO: 441187 - DNA, 19 bp, Homo sapiens
  siRNA target sequence for ADAMTS18 (NM_199355.1,3928-3946).
gagcctgtaatacaaactt

SEQ ID NO: 441188 - DNA, 19 bp, Homo sapiens
  siRNA target sequence for ADAMTS18 (NM_199355.1,3972-3990).
gatccatcctgcgtagatt

SEQ ID NO: 441189 - DNA, 19 bp, Homo sapiens
  siRNA target sequence for ADAMTS18 (NM_199355.1,3975-3993).
ccatcctgcgtagatttct

SEQ ID NO: 441190 - DNA, 19 bp, Homo sapiens
  siRNA target sequence for ADAMTS18 (NM_199355.1,3979-3997).
cctgcgtagatttcttcaa

SEQ ID NO: 441191 - DNA, 19 bp, Homo sapiens
  siRNA target sequence for ADAMTS18 (NM_199355.1,4024-4042).
gtgtctgcaaccacaagtt

SEQ ID NO: 441192 - DNA, 19 bp, Homo sapiens
  siRNA target sequence for ADAMTS18 (NM_199355.1,4037-4055).
caagttttacggaaaacaa

SEQ ID NO: 441193 - DNA, 19 bp, Homo sapiens
  siRNA target sequence for TPD52L2 (NM_199360.1,605-623).
gggctcatccattttcaca

SEQ ID NO: 441194 - DNA, 19 bp, Homo sapiens
  siRNA target sequence for TPD52L2 (NM_199360.1,639-657).
ctccatccgccactcaata

SEQ ID NO: 441195 - DNA, 19 bp, Homo sapiens
  siRNA target sequence for TPD52L2 (NM_199360.1,642-660).
catccgccactcaataagt

SEQ ID NO: 441196 - DNA, 19 bp, Homo sapiens
  siRNA target sequence for PRC1 (NM_199413.1,1898-1916).
gagtttgcgcgagaacttt

SEQ ID NO: 441197 - DNA, 19 bp, Homo sapiens
  siRNA target sequence for PRC1 (NM_199413.1,1900-1918).
gtttgcgcgagaactttca

SEQ ID NO: 441198 - DNA, 19 bp, Homo sapiens
  siRNA target sequence for PRCC (NM_199416.1,1359-1377).
ggtgcttattatcagttta

SEQ ID NO: 441199 - DNA, 19 bp, Homo sapiens
  siRNA target sequence for PRCP (NM_199418.1,475-493).
gtaataacacggttcatgt

SEQ ID NO: 441200 - DNA, 19 bp, Homo sapiens
  siRNA target sequence for VSX1 (NM_199425.1,707-725).
cgtgtcattcccacattca

SEQ ID NO: 441201 - DNA, 19 bp, Homo sapiens
  siRNA target sequence for ZFP64 (NM_199427.1,1232-1250).
ggagagaggacgttcaact

SEQ ID NO: 441202 - DNA, 19 bp, Homo sapiens
  siRNA target sequence for ZFP64 (NM_199427.1,1235-1253).
gagaggacgttcaactgtt

SEQ ID NO: 441203 - DNA, 19 bp, Homo sapiens
  siRNA target sequence for ZFP64 (NM_199427.1,1278-1296).
ctgtccatggcatgaaaga

SEQ ID NO: 441204 - DNA, 19 bp, Homo sapiens
  siRNA target sequence for ZFP64 (NM_199427.1,1280-1298).
gtccatggcatgaaagact

SEQ ID NO: 441205 - DNA, 19 bp, Homo sapiens
  siRNA target sequence for ZFP64 (NM_199427.1,1705-1723).
catgaaggcgaatctcaaa

SEQ ID NO: 441206 - DNA, 19 bp, Homo sapiens
  siRNA target sequence for ZNF365 (NM_199450.1,374-392).
gaccataccagatttagaa

SEQ ID NO: 441207 - DNA, 19 bp, Homo sapiens
  siRNA target sequence for ZNF365 (NM_199450.1,512-530).
ctcctgaaaccgggaaaat

SEQ ID NO: 441208 - DNA, 19 bp, Homo sapiens
  siRNA target sequence for ZNF365 (NM_199450.1,540-558).
gtggcaacgtggtaaagca

SEQ ID NO: 441209 - DNA, 19 bp, Homo sapiens
  siRNA target sequence for ZNF365 (NM_199450.1,557-575).
cagaaaccgagctatgtta

SEQ ID NO: 441210 - DNA, 19 bp, Homo sapiens
  siRNA target sequence for ZNF365 (NM_199450.1,563-581).
ccgagctatgttaacttgt

SEQ ID NO: 441211 - DNA, 19 bp, Homo sapiens
  siRNA target sequence for ZNF365 (NM_199450.1,577-595).
cttgtacagcatttcacat

SEQ ID NO: 441212 - DNA, 19 bp, Homo sapiens
  siRNA target sequence for ZNF365 (NM_199450.1,799-817).
gaccattgagaagagaatt

SEQ ID NO: 441213 - DNA, 19 bp, Homo sapiens
  siRNA target sequence for ZNF365 (NM_199450.1,946-964).
cgtggccgtggaaatgata

SEQ ID NO: 441214 - DNA, 19 bp, Homo sapiens
  siRNA target sequence for ZNF365 (NM_199450.1,997-1015).
ggaggagcttcttaggaaa

SEQ ID NO: 441215 - DNA, 19 bp, Homo sapiens
  siRNA target sequence for ZNF365 (NM_199450.1,1088-1106).
ctccaggactttattgaga

SEQ ID NO: 441216 - DNA, 19 bp, Homo sapiens
  siRNA target sequence for ZNF365 (NM_199450.1,1096-1114).
ctttattgagaatctgtta

SEQ ID NO: 441217 - DNA, 19 bp, Homo sapiens
  siRNA target sequence for ZNF365 (NM_199450.1,1236-1254).
gccaaaatgacctggaatt

SEQ ID NO: 441218 - DNA, 19 bp, Homo sapiens
  siRNA target sequence for ZNF365 (NM_199451.1,1255-1273).
ggagatttttggccatata

SEQ ID NO: 441219 - DNA, 19 bp, Homo sapiens
  siRNA target sequence for ZNF365 (NM_199451.1,1279-1297).
ccatctttcggggttgaaa

SEQ ID NO: 441220 - DNA, 19 bp, Homo sapiens
  siRNA target sequence for ZNF365 (NM_199451.1,1283-1301).
ctttcggggttgaaagatt

SEQ ID NO: 441221 - DNA, 19 bp, Homo sapiens
  siRNA target sequence for ZNF365 (NM_199451.1,1287-1305).
cggggttgaaagattctca

SEQ ID NO: 441222 - DNA, 19 bp, Homo sapiens
  siRNA target sequence for ZNF365 (NM_199451.1,1413-1431).
gccaaatttgggtgctatt

SEQ ID NO: 441223 - DNA, 19 bp, Homo sapiens
  siRNA target sequence for ZNF365 (NM_199451.1,1443-1461).
gagggacttttcatcacaa

SEQ ID NO: 441224 - DNA, 19 bp, Homo sapiens
  siRNA target sequence for ZNF365 (NM_199451.1,1525-1543).
gaatatcagccttcttaca

SEQ ID NO: 441225 - DNA, 19 bp, Homo sapiens
  siRNA target sequence for ZNF365 (NM_199451.1,1616-1634).
gtaaggcacggtgtcatat

SEQ ID NO: 441226 - DNA, 19 bp, Homo sapiens
  siRNA target sequence for ZNF365 (NM_199451.1,1621-1639).
gcacggtgtcatatgcttt

SEQ ID NO: 441227 - DNA, 19 bp, Homo sapiens
  siRNA target sequence for ZNF365 (NM_199451.1,1625-1643).
ggtgtcatatgctttcctt

SEQ ID NO: 441228 - DNA, 19 bp, Homo sapiens
  siRNA target sequence for ZNF365 (NM_199452.1,337-355).
gtctgcgctgggtcagata

SEQ ID NO: 441229 - DNA, 19 bp, Homo sapiens
  siRNA target sequence for ZNF365 (NM_199452.1,341-359).
gcgctgggtcagataacca

SEQ ID NO: 441230 - DNA, 19 bp, Homo sapiens
  siRNA target sequence for ZNF365 (NM_199452.1,342-360).
cgctgggtcagataaccat

SEQ ID NO: 441231 - DNA, 19 bp, Homo sapiens
  siRNA target sequence for ZNF365 (NM_199452.1,386-404).
gagaggaaccaaacagata

SEQ ID NO: 441232 - DNA, 19 bp, Homo sapiens
  siRNA target sequence for ZNF365 (NM_199452.1,436-454).
gctaagggagacagtcaaa

SEQ ID NO: 441233 - DNA, 19 bp, Homo sapiens
  siRNA target sequence for ZNF365 (NM_199452.1,562-580).
gcgttggcagtcaggtaat

SEQ ID NO: 441234 - DNA, 19 bp, Homo sapiens
  siRNA target sequence for ZNF365 (NM_199452.1,563-581).
cgttggcagtcaggtaatt

SEQ ID NO: 441235 - DNA, 19 bp, Homo sapiens
  siRNA target sequence for ZNF365 (NM_199452.1,571-589).
gtcaggtaattcatcagat

SEQ ID NO: 441236 - DNA, 19 bp, Homo sapiens
  siRNA target sequence for ZNF365 (NM_199452.1,635-653).
cgtgacgttgtgctgaata

SEQ ID NO: 441237 - DNA, 19 bp, Homo sapiens
  siRNA target sequence for ZNF365 (NM_199452.1,640-658).
cgttgtgctgaatacactt

SEQ ID NO: 441238 - DNA, 19 bp, Homo sapiens
  siRNA target sequence for ZNF365 (NM_199452.1,701-719).
ccctatgcaggagtttcaa

SEQ ID NO: 441239 - DNA, 19 bp, Homo sapiens
  siRNA target sequence for ZNF365 (NM_199452.1,711-729).
gagtttcaattcaaggatt

SEQ ID NO: 441240 - DNA, 19 bp, Homo sapiens
  siRNA target sequence for ZNF365 (NM_199452.1,713-731).
gtttcaattcaaggattta

SEQ ID NO: 441241 - DNA, 19 bp, Homo sapiens
  siRNA target sequence for LOC118461 (NM_199459.1,360-378).
ggcctcgtggcaagcaatt

SEQ ID NO: 441242 - DNA, 19 bp, Homo sapiens
  siRNA target sequence for LOC118461 (NM_199459.1,363-381).
ctcgtggcaagcaattgca

SEQ ID NO: 441243 - DNA, 19 bp, Homo sapiens
  siRNA target sequence for LOC118461 (NM_199459.1,425-443).
catccccaccattgcttta

SEQ ID NO: 441244 - DNA, 19 bp, Homo sapiens
  siRNA target sequence for LOC283439 (NM_199460.1,1862-1880).
gacatctcaaggatctatt

SEQ ID NO: 441245 - DNA, 19 bp, Homo sapiens
  siRNA target sequence for NANOS1 (NM_199461.1,729-747).
gtgttctgccggaacaaca

SEQ ID NO: 441246 - DNA, 19 bp, Homo sapiens
  siRNA target sequence for KCNRG (NM_199464.1,812-830).
gagtcaggctggtatgcaa

SEQ ID NO: 441247 - DNA, 19 bp, Mus musculus
  siRNA target sequence for Gtf2ird1 (NM_020331.1,1215-1233).
gaaatggaggacatcaata

SEQ ID NO: 441248 - DNA, 19 bp, Mus musculus
  siRNA target sequence for Gtf2ird1 (NM_020331.1,1336-1354).
ccgaggctgtggaaattgt

SEQ ID NO: 441249 - DNA, 19 bp, Mus musculus
  siRNA target sequence for Gtf2ird1 (NM_020331.1,1428-1446).
gagcgacacagcattcact

SEQ ID NO: 441250 - DNA, 19 bp, Mus musculus
  siRNA target sequence for Gtf2ird1 (NM_020331.1,1432-1450).
gacacagcattcacttcat

SEQ ID NO: 441251 - DNA, 19 bp, Mus musculus
  siRNA target sequence for Gtf2ird1 (NM_020331.1,1466-1484).
cgatgagcgcattttcaca

SEQ ID NO: 441252 - DNA, 19 bp, Mus musculus
  siRNA target sequence for Gtf2ird1 (NM_020331.1,1636-1654).
cctcaggagagatagcaat

SEQ ID NO: 441253 - DNA, 19 bp, Mus musculus
  siRNA target sequence for Gtf2ird1 (NM_020331.1,1639-1657).
caggagagatagcaatgtt

SEQ ID NO: 441254 - DNA, 19 bp, Mus musculus
  siRNA target sequence for Gtf2ird1 (NM_020331.1,1651-1669).
caatgttgaggcctatcaa

SEQ ID NO: 441255 - DNA, 19 bp, Mus musculus
  siRNA target sequence for Gtf2ird1 (NM_020331.1,1777-1795).
ccggttatgggatggaaat

SEQ ID NO: 441256 - DNA, 19 bp, Mus musculus
  siRNA target sequence for Gtf2ird1 (NM_020331.1,1790-1808).
ggaaatgccggctgacaaa

SEQ ID NO: 441257 - DNA, 19 bp, Mus musculus
  siRNA target sequence for Gtf2ird1 (NM_020331.1,1898-1916).
gctgttcaacacgaaatat

SEQ ID NO: 441258 - DNA, 19 bp, Mus musculus
  siRNA target sequence for Gtf2ird1 (NM_020331.1,1909-1927).
cgaaatatgccaaagctat

SEQ ID NO: 441259 - DNA, 19 bp, Mus musculus
  siRNA target sequence for Gtf2ird1 (NM_020331.1,2319-2337).
gtgcaggtgccctacaaga

SEQ ID NO: 441260 - DNA, 19 bp, Mus musculus
  siRNA target sequence for Gtf2ird1 (NM_020331.1,2322-2340).
caggtgccctacaagagaa

SEQ ID NO: 441261 - DNA, 19 bp, Mus musculus
  siRNA target sequence for Gtf2ird1 (NM_020331.1,2325-2343).
gtgccctacaagagaatca

SEQ ID NO: 441262 - DNA, 19 bp, Mus musculus
  siRNA target sequence for Gtf2ird1 (NM_020331.1,2327-2345).
gccctacaagagaatcaaa

SEQ ID NO: 441263 - DNA, 19 bp, Mus musculus
  siRNA target sequence for Gtf2ird1 (NM_020331.1,2328-2346).
ccctacaagagaatcaaaa

SEQ ID NO: 441264 - DNA, 19 bp, Mus musculus
  siRNA target sequence for Gtf2ird1 (NM_020331.1,2351-2369).
cccaggctcggtaatcatt

SEQ ID NO: 441265 - DNA, 19 bp, Mus musculus
  siRNA target sequence for Gtf2ird1 (NM_020331.1,2895-2913).
gaggaggatgactctaaca

SEQ ID NO: 441266 - DNA, 19 bp, Mus musculus
  siRNA target sequence for Meis1 (NM_010789.1,463-481).
cgacgacctaccccattat

SEQ ID NO: 441267 - DNA, 19 bp, Mus musculus
  siRNA target sequence for Meis1 (NM_010789.1,475-493).
ccattatgggggtatggat

SEQ ID NO: 441268 - DNA, 19 bp, Mus musculus
  siRNA target sequence for Meis1 (NM_010789.1,502-520).
catcccctccacgatgtat

SEQ ID NO: 441269 - DNA, 19 bp, Mus musculus
  siRNA target sequence for Meis1 (NM_010789.1,579-597).
ctctgcactcgcatcagta

SEQ ID NO: 441270 - DNA, 19 bp, Mus musculus
  siRNA target sequence for Meis1 (NM_010789.1,645-663).
cggtcaatgacgctttaaa

SEQ ID NO: 441271 - DNA, 19 bp, Mus musculus
  siRNA target sequence for Meis1 (NM_010789.1,647-665).
gtcaatgacgctttaaaga

SEQ ID NO: 441272 - DNA, 19 bp, Mus musculus
  siRNA target sequence for Meis1 (NM_010789.1,655-673).
cgctttaaagagagataaa

SEQ ID NO: 441273 - DNA, 19 bp, Mus musculus
  siRNA target sequence for Meis1 (NM_010789.1,666-684).
gagataaagatgccattta

SEQ ID NO: 441274 - DNA, 19 bp, Mus musculus
  siRNA target sequence for Meis1 (NM_010789.1,783-801).
gctcgtcagagtcattcaa

SEQ ID NO: 441275 - DNA, 19 bp, Mus musculus
  siRNA target sequence for Meis1 (NM_010789.1,784-802).
ctcgtcagagtcattcaat

SEQ ID NO: 441276 - DNA, 19 bp, Mus musculus
  siRNA target sequence for Meis1 (NM_010789.1,786-804).
cgtcagagtcattcaatga

SEQ ID NO: 441277 - DNA, 19 bp, Mus musculus
  siRNA target sequence for Meis1 (NM_010789.1,787-805).
gtcagagtcattcaatgaa

SEQ ID NO: 441278 - DNA, 19 bp, Mus musculus
  siRNA target sequence for Meis1 (NM_010789.1,789-807).
cagagtcattcaatgaaga

SEQ ID NO: 441279 - DNA, 19 bp, Mus musculus
  siRNA target sequence for Meis1 (NM_010789.1,791-809).
gagtcattcaatgaagata

SEQ ID NO: 441280 - DNA, 19 bp, Mus musculus
  siRNA target sequence for Meis1 (NM_010789.1,812-830).
gcggtgttcgccaaacaga

SEQ ID NO: 441281 - DNA, 19 bp, Mus musculus
  siRNA target sequence for Meis1 (NM_010789.1,813-831).
cggtgttcgccaaacagat

SEQ ID NO: 441282 - DNA, 19 bp, Mus musculus
  siRNA target sequence for Meis1 (NM_010789.1,814-832).
ggtgttcgccaaacagatt

SEQ ID NO: 441283 - DNA, 19 bp, Mus musculus
  siRNA target sequence for Meis1 (NM_010789.1,829-847).
gattcgcgcagaaaaacct

SEQ ID NO: 441284 - DNA, 19 bp, Mus musculus
  siRNA target sequence for Meis1 (NM_010789.1,890-908).
gccatacaagtgttaaggt

SEQ ID NO: 441285 - DNA, 19 bp, Mus musculus
  siRNA target sequence for Meis1 (NM_010789.1,906-924).
ggtttcatctgttggaatt

SEQ ID NO: 441286 - DNA, 19 bp, Mus musculus
  siRNA target sequence for Meis1 (NM_010789.1,907-925).
gtttcatctgttggaatta

SEQ ID NO: 441287 - DNA, 19 bp, Mus musculus
  siRNA target sequence for Meis1 (NM_010789.1,911-929).
catctgttggaattagaga

SEQ ID NO: 441288 - DNA, 19 bp, Mus musculus
  siRNA target sequence for Meis1 (NM_010789.1,926-944).
gagaaggtacacgaattat

SEQ ID NO: 441289 - DNA, 19 bp, Mus musculus
  siRNA target sequence for Meis1 (NM_010789.1,928-946).
gaaggtacacgaattatgt

SEQ ID NO: 441290 - DNA, 19 bp, Mus musculus
  siRNA target sequence for Meis1 (NM_010789.1,935-953).
cacgaattatgtgacaatt

SEQ ID NO: 441291 - DNA, 19 bp, Mus musculus
  siRNA target sequence for Meis1 (NM_010789.1,983-1001).
gggaaaatgcctatcgatt

SEQ ID NO: 441292 - DNA, 19 bp, Mus musculus
  siRNA target sequence for Meis1 (NM_010789.1,993-1011).
ctatcgatttggtgataga

SEQ ID NO: 441293 - DNA, 19 bp, Mus musculus
  siRNA target sequence for Meis1 (NM_010789.1,997-1015).
cgatttggtgatagatgat

SEQ ID NO: 441294 - DNA, 19 bp, Mus musculus
  siRNA target sequence for Meis1 (NM_010789.1,998-1016).
gatttggtgatagatgata

SEQ ID NO: 441295 - DNA, 19 bp, Mus musculus
  siRNA target sequence for Meis1 (NM_010789.1,1037-1055).
gacagtgaagatgtaacaa

SEQ ID NO: 441296 - DNA, 19 bp, Mus musculus
  siRNA target sequence for Meis1 (NM_010789.1,1056-1074).
gatcagcaaatctaactga

SEQ ID NO: 441297 - DNA, 19 bp, Mus musculus
  siRNA target sequence for Meis1 (NM_010789.1,1144-1162).
cagcggtggccatacttca

SEQ ID NO: 441298 - DNA, 19 bp, Mus musculus
  siRNA target sequence for Meis1 (NM_010789.1,1224-1242).
gcacaggtgacgatgatga

SEQ ID NO: 441299 - DNA, 19 bp, Mus musculus
  siRNA target sequence for Meis1 (NM_010789.1,1252-1270).
ggacaaaaagcgtcacaaa

SEQ ID NO: 441300 - DNA, 19 bp, Mus musculus
  siRNA target sequence for Meis1 (NM_010789.1,1366-1384).
gcagttggcacaagataca

SEQ ID NO: 441301 - DNA, 19 bp, Mus musculus
  siRNA target sequence for Meis1 (NM_010789.1,1386-1404).
gacttaccatccttcaagt

SEQ ID NO: 441302 - DNA, 19 bp, Mus musculus
  siRNA target sequence for Meis1 (NM_010789.1,1474-1492).
cagccaagggacaccttat

SEQ ID NO: 441303 - DNA, 19 bp, Mus musculus
  siRNA target sequence for Meis1 (NM_010789.1,1556-1574).
gcgccagggctgcaaagta

SEQ ID NO: 441304 - DNA, 19 bp, Mus musculus
  siRNA target sequence for Meis1 (NM_010789.1,1557-1575).
cgccagggctgcaaagtat

SEQ ID NO: 441305 - DNA, 19 bp, Mus musculus
  siRNA target sequence for Meis1 (NM_010789.1,1572-1590).
gtatgccaggggagtatgt

SEQ ID NO: 441306 - DNA, 19 bp, Mus musculus
  siRNA target sequence for Meis1 (NM_010789.1,1602-1620).
gcccaatgggtgtgagtat

SEQ ID NO: 441307 - DNA, 19 bp, Mus musculus
  siRNA target sequence for Meis1 (NM_010789.1,1684-1702).
ccccatgcatacgtacatt

SEQ ID NO: 441308 - DNA, 19 bp, Mus musculus
  siRNA target sequence for Meis1 (NM_010789.1,1776-1794).
caagcccctcggttcttaa

SEQ ID NO: 441309 - DNA, 19 bp, Mus musculus
  siRNA target sequence for Meis1 (NM_010789.1,1780-1798).
cccctcggttcttaacaca

SEQ ID NO: 441310 - DNA, 19 bp, Mus musculus
  siRNA target sequence for Meis1 (NM_010789.1,1809-1827).
caatgagtgcacaagtcat

SEQ ID NO: 441311 - DNA, 19 bp, Mus musculus
  siRNA target sequence for Meis1 (NM_010789.1,1818-1836).
cacaagtcatggacattca

SEQ ID NO: 441312 - DNA, 19 bp, Mus musculus
  siRNA target sequence for Pknox1 (NM_016670.2,75-93).
gcgacacagacgctaagta

SEQ ID NO: 441313 - DNA, 19 bp, Mus musculus
  siRNA target sequence for Pknox1 (NM_016670.2,76-94).
cgacacagacgctaagtat

SEQ ID NO: 441314 - DNA, 19 bp, Mus musculus
  siRNA target sequence for Pknox1 (NM_016670.2,79-97).
cacagacgctaagtataga

SEQ ID NO: 441315 - DNA, 19 bp, Mus musculus
  siRNA target sequence for Pknox1 (NM_016670.2,81-99).
cagacgctaagtatagaca

SEQ ID NO: 441316 - DNA, 19 bp, Mus musculus
  siRNA target sequence for Pknox1 (NM_016670.2,91-109).
gtatagacagctatcaaga

SEQ ID NO: 441317 - DNA, 19 bp, Mus musculus
  siRNA target sequence for Pknox1 (NM_016670.2,125-143).
ggtggtcacggagttaaaa

SEQ ID NO: 441318 - DNA, 19 bp, Mus musculus
  siRNA target sequence for Pknox1 (NM_016670.2,126-144).
gtggtcacggagttaaaaa

SEQ ID NO: 441319 - DNA, 19 bp, Mus musculus
  siRNA target sequence for Pknox1 (NM_016670.2,226-244).
ccgacaagcaggccattta

SEQ ID NO: 441320 - DNA, 19 bp, Mus musculus
  siRNA target sequence for Pknox1 (NM_016670.2,227-245).
cgacaagcaggccatttat

SEQ ID NO: 441321 - DNA, 19 bp, Mus musculus
  siRNA target sequence for Pknox1 (NM_016670.2,262-280).
cgttgctagctttgttgtt

SEQ ID NO: 441322 - DNA, 19 bp, Mus musculus
  siRNA target sequence for Pknox1 (NM_016670.2,402-420).
ccggaaactgacaacctaa

SEQ ID NO: 441323 - DNA, 19 bp, Mus musculus
  siRNA target sequence for Pknox1 (NM_016670.2,403-421).
cggaaactgacaacctaat

SEQ ID NO: 441324 - DNA, 19 bp, Mus musculus
  siRNA target sequence for Pknox1 (NM_016670.2,434-452).
ccaggtcctgcgcattcat

SEQ ID NO: 441325 - DNA, 19 bp, Mus musculus
  siRNA target sequence for Pknox1 (NM_016670.2,437-455).
ggtcctgcgcattcatctt

SEQ ID NO: 441326 - DNA, 19 bp, Mus musculus
  siRNA target sequence for Pknox1 (NM_016670.2,470-488).
ggttaatgagctctgtaaa

SEQ ID NO: 441327 - DNA, 19 bp, Mus musculus
  siRNA target sequence for Pknox1 (NM_016670.2,652-670).
ccctacaacagggaaatgt

SEQ ID NO: 441328 - DNA, 19 bp, Mus musculus
  siRNA target sequence for Pknox1 (NM_016670.2,740-758).
ggtcacgcaggcattatct

SEQ ID NO: 441329 - DNA, 19 bp, Mus musculus
  siRNA target sequence for Pknox1 (NM_016670.2,757-775).
ctcctgggacaattaggat

SEQ ID NO: 441330 - DNA, 19 bp, Mus musculus
  siRNA target sequence for Pknox1 (NM_016670.2,1001-1019).
caacgcgagaagacgaatt

SEQ ID NO: 441331 - DNA, 19 bp, Mus musculus
  siRNA target sequence for Pknox1 (NM_016670.2,1020-1038).
ctccagccaatgttggatt

SEQ ID NO: 441332 - DNA, 19 bp, Mus musculus
  siRNA target sequence for Pknox1 (NM_016670.2,1097-1115).
gaggttttggccagattct

SEQ ID NO: 441333 - DNA, 19 bp, Mus musculus
  siRNA target sequence for Pknox1 (NM_016670.2,1189-1207).
cacctgtaaacatgaatgt

SEQ ID NO: 441334 - DNA, 19 bp, Mus musculus
  siRNA target sequence for Six3 (NM_011381.1,678-696).
gctcccccctagatctcta

SEQ ID NO: 441335 - DNA, 19 bp, Mus musculus
  siRNA target sequence for Six3 (NM_011381.1,679-697).
ctcccccctagatctctat

SEQ ID NO: 441336 - DNA, 19 bp, Mus musculus
  siRNA target sequence for Six3 (NM_011381.1,717-735).
caaacttcgccgattctca

SEQ ID NO: 441337 - DNA, 19 bp, Mus musculus
  siRNA target sequence for Six3 (NM_011381.1,1031-1049).
gcgtgcgaggccatcaaca

SEQ ID NO: 441338 - DNA, 19 bp, Mus musculus
  siRNA target sequence for Six3 (NM_011381.1,1033-1051).
gtgcgaggccatcaacaaa

SEQ ID NO: 441339 - DNA, 19 bp, Mus musculus
  siRNA target sequence for Six3 (NM_011381.1,1035-1053).
gcgaggccatcaacaaaca

SEQ ID NO: 441340 - DNA, 19 bp, Mus musculus
  siRNA target sequence for 0610009M14Rik (NM_023910.4,1290-1308).
cgtgtgtggatgtttacaa

SEQ ID NO: 441341 - DNA, 19 bp, Mus musculus
  siRNA target sequence for 0610009M14Rik (NM_023910.4,1370-1388).
ggcaccggaggcagatcat

SEQ ID NO: 441342 - DNA, 19 bp, Mus musculus
  siRNA target sequence for 0610009M14Rik (NM_023910.4,1371-1389).
gcaccggaggcagatcatt

SEQ ID NO: 441343 - DNA, 19 bp, Mus musculus
  siRNA target sequence for 0610009M14Rik (NM_023910.4,1375-1393).
cggaggcagatcattggat

SEQ ID NO: 441344 - DNA, 19 bp, Mus musculus
  siRNA target sequence for 0610009M14Rik (NM_023910.4,1379-1397).
ggcagatcattggattcta

SEQ ID NO: 441345 - DNA, 19 bp, Mus musculus
  siRNA target sequence for 0610009M14Rik (NM_023910.4,1398-1416).
ggttggagctggctagttt

SEQ ID NO: 441346 - DNA, 19 bp, Mus musculus
  siRNA target sequence for 0610009M14Rik (NM_023910.4,1828-1846).
gtctccagacccatttgga

SEQ ID NO: 441347 - DNA, 19 bp, Mus musculus
  siRNA target sequence for 1110014N07Rik (NM_023162.3,163-181).
ccgctccaactttcaatca

SEQ ID NO: 441348 - DNA, 19 bp, Mus musculus
  siRNA target sequence for 1110014N07Rik (NM_023162.3,165-183).
gctccaactttcaatcaga

SEQ ID NO: 441349 - DNA, 19 bp, Mus musculus
  siRNA target sequence for 1110014N07Rik (NM_023162.3,233-251).
caggacactgtcatatgtt

SEQ ID NO: 441350 - DNA, 19 bp, Mus musculus
  siRNA target sequence for 1110014N07Rik (NM_023162.3,268-286).
catcgatgtgcgagattgt

SEQ ID NO: 441351 - DNA, 19 bp, Mus musculus
  siRNA target sequence for 1110014N07Rik (NM_023162.3,271-289).
cgatgtgcgagattgtgaa

SEQ ID NO: 441352 - DNA, 19 bp, Mus musculus
  siRNA target sequence for 1110014N07Rik (NM_023162.3,285-303).
gtgaagggaaggttgtgaa

SEQ ID NO: 441353 - DNA, 19 bp, Mus musculus
  siRNA target sequence for 1110014N07Rik (NM_023162.3,322-340).
caagctgggggctaccata

SEQ ID NO: 441354 - DNA, 19 bp, Mus musculus
  siRNA target sequence for 1110014N07Rik (NM_023162.3,326-344).
ctgggggctaccatacctt

SEQ ID NO: 441355 - DNA, 19 bp, Mus musculus
  siRNA target sequence for 1110014N07Rik (NM_023162.3,352-370).
ggatgagggacctgaatta

SEQ ID NO: 441356 - DNA, 19 bp, Mus musculus
  siRNA target sequence for 1110014N07Rik (NM_023162.3,413-431).
gagggaatggcatatcaca

SEQ ID NO: 441357 - DNA, 19 bp, Mus musculus
  siRNA target sequence for 1110014N07Rik (NM_023162.3,458-476).
ggacagacggtcttctata

SEQ ID NO: 441358 - DNA, 19 bp, Mus musculus
  siRNA target sequence for 1110014N07Rik (NM_023162.3,478-496).
ctgtatcaactgcaagttt

SEQ ID NO: 441359 - DNA, 19 bp, Mus musculus
  siRNA target sequence for 1500004O14Rik (NM_025901.2,136-154).
ctgcgggaacggactcatt

SEQ ID NO: 441360 - DNA, 19 bp, Mus musculus
  siRNA target sequence for 1500004O14Rik (NM_025901.2,138-156).
gcgggaacggactcattgt

SEQ ID NO: 441361 - DNA, 19 bp, Mus musculus
  siRNA target sequence for 1500004O14Rik (NM_025901.2,195-213).
cttgcccctacgtccataa

SEQ ID NO: 441362 - DNA, 19 bp, Mus musculus
  siRNA target sequence for 1500004O14Rik (NM_025901.2,198-216).
gcccctacgtccataatat

SEQ ID NO: 441363 - DNA, 19 bp, Mus musculus
  siRNA target sequence for 1500004O14Rik (NM_025901.2,200-218).
ccctacgtccataatatca

SEQ ID NO: 441364 - DNA, 19 bp, Mus musculus
  siRNA target sequence for 1500004O14Rik (NM_025901.2,226-244).
ggtaacaaaccgaaagtat

SEQ ID NO: 441365 - DNA, 19 bp, Mus musculus
  siRNA target sequence for 1500004O14Rik (NM_025901.2,231-249).
caaaccgaaagtatccaaa

SEQ ID NO: 441366 - DNA, 19 bp, Mus musculus
  siRNA target sequence for 1500004O14Rik (NM_025901.2,235-253).
ccgaaagtatccaaagcta

SEQ ID NO: 441367 - DNA, 19 bp, Mus musculus
  siRNA target sequence for 1500004O14Rik (NM_025901.2,236-254).
cgaaagtatccaaagctaa

SEQ ID NO: 441368 - DNA, 19 bp, Mus musculus
  siRNA target sequence for 1500004O14Rik (NM_025901.2,241-259).
gtatccaaagctaaaagaa

SEQ ID NO: 441369 - DNA, 19 bp, Mus musculus
  siRNA target sequence for 1500004O14Rik (NM_025901.2,282-300).
cagctgcatgggagaatgt

SEQ ID NO: 441370 - DNA, 19 bp, Mus musculus
  siRNA target sequence for 1700013G24Rik (NM_027063.1,125-143).
gtaagccggtccaacactt

SEQ ID NO: 441371 - DNA, 19 bp, Mus musculus
  siRNA target sequence for 1700013G24Rik (NM_027063.1,129-147).
gccggtccaacacttacaa

SEQ ID NO: 441372 - DNA, 19 bp, Mus musculus
  siRNA target sequence for 1700013G24Rik (NM_027063.1,198-216).
ggacccagtatcccaatat

SEQ ID NO: 441373 - DNA, 19 bp, Mus musculus
  siRNA target sequence for 1700013G24Rik (NM_027063.1,201-219).
cccagtatcccaatatgaa

SEQ ID NO: 441374 - DNA, 19 bp, Mus musculus
  siRNA target sequence for 1700013G24Rik (NM_027063.1,203-221).
cagtatcccaatatgaaca

SEQ ID NO: 441375 - DNA, 19 bp, Mus musculus
  siRNA target sequence for 1700013G24Rik (NM_027063.1,288-306).
gccactccgagcaatcctt

SEQ ID NO: 441376 - DNA, 19 bp, Mus musculus
  siRNA target sequence for 1700013G24Rik (NM_027063.1,530-548).
gacagatccaccaatgttt

SEQ ID NO: 441377 - DNA, 19 bp, Mus musculus
  siRNA target sequence for 1700013G24Rik (NM_027063.1,534-552).
gatccaccaatgttttcaa

SEQ ID NO: 441378 - DNA, 19 bp, Mus musculus
  siRNA target sequence for 1700013G24Rik (NM_027063.1,653-671).
ccaccccgaagctattcca

SEQ ID NO: 441379 - DNA, 19 bp, Mus musculus
  siRNA target sequence for 1700013G24Rik (NM_027063.1,764-782).
ggttccactggtttgaact

SEQ ID NO: 441380 - DNA, 19 bp, Mus musculus
  siRNA target sequence for 1700013G24Rik (NM_027063.1,765-783).
gttccactggtttgaacta

SEQ ID NO: 441381 - DNA, 19 bp, Mus musculus
  siRNA target sequence for 1700013G24Rik (NM_027063.1,792-810).
ggcctaacagccagacttt

SEQ ID NO: 441382 - DNA, 19 bp, Mus musculus
  siRNA target sequence for 1700013G24Rik (NM_027063.1,794-812).
cctaacagccagactttca

SEQ ID NO: 441383 - DNA, 19 bp, Mus musculus
  siRNA target sequence for 1700013G24Rik (NM_027063.1,795-813).
ctaacagccagactttcaa

SEQ ID NO: 441384 - DNA, 19 bp, Mus musculus
  siRNA target sequence for 1700013G24Rik (NM_027063.1,887-905).
ggtcgtctgcccaagttct

SEQ ID NO: 441385 - DNA, 19 bp, Mus musculus
  siRNA target sequence for 1810043J12Rik (NM_028067.1,286-304).
gtctggccacctctgtatt

SEQ ID NO: 441386 - DNA, 19 bp, Mus musculus
  siRNA target sequence for 1810043J12Rik (NM_028067.1,492-510).
cgagaaaatgcactgttaa

SEQ ID NO: 441387 - DNA, 19 bp, Mus musculus
  siRNA target sequence for 1810043J12Rik (NM_028067.1,501-519).
gcactgttaaaatctcttt

SEQ ID NO: 441388 - DNA, 19 bp, Mus musculus
  siRNA target sequence for 1810043J12Rik (NM_028067.1,514-532).
ctctttcaaacaatgatca

SEQ ID NO: 441389 - DNA, 19 bp, Mus musculus
  siRNA target sequence for 2810047M21Rik (NM_026033.1,569-587).
cggctcagaaataccaaat

SEQ ID NO: 441390 - DNA, 19 bp, Mus musculus
  siRNA target sequence for 2810047M21Rik (NM_026033.1,572-590).
ctcagaaataccaaataca

SEQ ID NO: 441391 - DNA, 19 bp, Mus musculus
  siRNA target sequence for 2810047M21Rik (NM_026033.1,594-612).
cggctccagctgctgaaaa

SEQ ID NO: 441392 - DNA, 19 bp, Mus musculus
  siRNA target sequence for 2810047M21Rik (NM_026033.1,655-673).
gttaaaaaatcctatcaaa

SEQ ID NO: 441393 - DNA, 19 bp, Mus musculus
  siRNA target sequence for 2810047M21Rik (NM_026033.1,674-692).
gcgcctgaatctgtttcta

SEQ ID NO: 441394 - DNA, 19 bp, Mus musculus
  siRNA target sequence for 2810047M21Rik (NM_026033.1,698-716).
gtcactgcagagtcaatct

SEQ ID NO: 441395 - DNA, 19 bp, Mus musculus
  siRNA target sequence for 2810047M21Rik (NM_026033.1,702-720).
ctgcagagtcaatcttcta

SEQ ID NO: 441396 - DNA, 19 bp, Mus musculus
  siRNA target sequence for 2810047M21Rik (NM_026033.1,715-733).
cttctacaagggagtatat

SEQ ID NO: 441397 - DNA, 19 bp, Mus musculus
  siRNA target sequence for 2810047M21Rik (NM_026033.1,721-739).
caagggagtatattaccaa

SEQ ID NO: 441398 - DNA, 19 bp, Mus musculus
  siRNA target sequence for 2810047M21Rik (NM_026033.1,792-810).
ctcagatcaggggctttat

SEQ ID NO: 441399 - DNA, 19 bp, Mus musculus
  siRNA target sequence for 2810047M21Rik (NM_026033.1,842-860).
ctgacatggctcattccta

SEQ ID NO: 441400 - DNA, 19 bp, Mus musculus
  siRNA target sequence for 2810047M21Rik (NM_026033.1,883-901).
gtttgatcctgcatcatat

SEQ ID NO: 441401 - DNA, 19 bp, Mus musculus
  siRNA target sequence for 2810047M21Rik (NM_026033.1,958-976).
ccacgcgccttctgagtat

SEQ ID NO: 441402 - DNA, 19 bp, Mus musculus
  siRNA target sequence for 2810047M21Rik (NM_026033.1,959-977).
cacgcgccttctgagtatt

SEQ ID NO: 441403 - DNA, 19 bp, Mus musculus
  siRNA target sequence for 2810047M21Rik (NM_026033.1,982-1000).
gtcaaggtcctcaccattt

SEQ ID NO: 441404 - DNA, 19 bp, Mus musculus
  siRNA target sequence for 2810047M21Rik (NM_026033.1,1019-1037).
ccggagaagggctacatat

SEQ ID NO: 441405 - DNA, 19 bp, Mus musculus
  siRNA target sequence for 2810047M21Rik (NM_026033.1,1022-1040).
gagaagggctacatatgga

SEQ ID NO: 441406 - DNA, 19 bp, Mus musculus
  siRNA target sequence for 2810047M21Rik (NM_026033.1,1053-1071).
ctactcctgcgataactat

SEQ ID NO: 441407 - DNA, 19 bp, Mus musculus
  siRNA target sequence for 2810047M21Rik (NM_026033.1,1056-1074).
ctcctgcgataactattaa

SEQ ID NO: 441408 - DNA, 19 bp, Mus musculus
  siRNA target sequence for 2810047M21Rik (NM_026033.1,1059-1077).
ctgcgataactattaagga

SEQ ID NO: 441409 - DNA, 19 bp, Mus musculus
  siRNA target sequence for 2810047M21Rik (NM_026033.1,1061-1079).
gcgataactattaaggaaa

SEQ ID NO: 441410 - DNA, 19 bp, Mus musculus
  siRNA target sequence for 2810435N07Rik (NM_023685.2,1025-1043).
ggaaccaggcggttctatt

SEQ ID NO: 441411 - DNA, 19 bp, Mus musculus
  siRNA target sequence for 2810435N07Rik (NM_023685.2,1036-1054).
gttctattgccgtgaatgt

SEQ ID NO: 441412 - DNA, 19 bp, Mus musculus
  siRNA target sequence for 2810435N07Rik (NM_023685.2,1072-1090).
gagttcaggcctaagtaaa

SEQ ID NO: 441413 - DNA, 19 bp, Mus musculus
  siRNA target sequence for 2810435N07Rik (NM_023685.2,1074-1092).
gttcaggcctaagtaaaca

SEQ ID NO: 441414 - DNA, 19 bp, Mus musculus
  siRNA target sequence for 2810435N07Rik (NM_023685.2,1437-1455).
cccatactggggataaaga

SEQ ID NO: 441415 - DNA, 19 bp, Mus musculus
  siRNA target sequence for 2810435N07Rik (NM_023685.2,1438-1456).
ccatactggggataaagat

SEQ ID NO: 441416 - DNA, 19 bp, Mus musculus
  siRNA target sequence for 2810435N07Rik (NM_023685.2,1527-1545).
ctgtgtcttatcaatgtaa

SEQ ID NO: 441417 - DNA, 19 bp, Mus musculus
  siRNA target sequence for 2810435N07Rik (NM_023685.2,1555-1573).
gagaagtttcagtaggatt

SEQ ID NO: 441418 - DNA, 19 bp, Mus musculus
  siRNA target sequence for 2810435N07Rik (NM_023685.2,1570-1588).
gattacaagccttattgaa

SEQ ID NO: 441419 - DNA, 19 bp, Mus musculus
  siRNA target sequence for 2810435N07Rik (NM_023685.2,1650-1668).
cccgaccttcataccttat

SEQ ID NO: 441420 - DNA, 19 bp, Mus musculus
  siRNA target sequence for 2810435N07Rik (NM_023685.2,1651-1669).
ccgaccttcataccttatt

SEQ ID NO: 441421 - DNA, 19 bp, Mus musculus
  siRNA target sequence for 2810435N07Rik (NM_023685.2,1739-1757).
ggtgttcaactgtcattga

SEQ ID NO: 441422 - DNA, 19 bp, Mus musculus
  siRNA target sequence for 5730599O09Rik (NM_173396.1,380-398).
gtgctgcagatatgtaact

SEQ ID NO: 441423 - DNA, 19 bp, Mus musculus
  siRNA target sequence for 9130423L19Rik (NM_133906.3,223-241).
gaaagatggtatagttatt

SEQ ID NO: 441424 - DNA, 19 bp, Mus musculus
  siRNA target sequence for 9130423L19Rik (NM_133906.3,227-245).
gatggtatagttattgtga

SEQ ID NO: 441425 - DNA, 19 bp, Mus musculus
  siRNA target sequence for 9130423L19Rik (NM_133906.3,312-330).
cacccgacccagaggtatt

SEQ ID NO: 441426 - DNA, 19 bp, Mus musculus
  siRNA target sequence for 9130423L19Rik (NM_133906.3,339-357).
ggttcaggcgcttctgtta

SEQ ID NO: 441427 - DNA, 19 bp, Mus musculus
  siRNA target sequence for 9130423L19Rik (NM_133906.3,372-390).
ggcctcgagaagctttgaa

SEQ ID NO: 441428 - DNA, 19 bp, Mus musculus
  siRNA target sequence for 9130423L19Rik (NM_133906.3,373-391).
gcctcgagaagctttgaat

SEQ ID NO: 441429 - DNA, 19 bp, Mus musculus
  siRNA target sequence for 9130423L19Rik (NM_133906.3,384-402).
ctttgaatcgactaaagga

SEQ ID NO: 441430 - DNA, 19 bp, Mus musculus
  siRNA target sequence for 9130423L19Rik (NM_133906.3,683-701).
gaaactgcccagtctcatt

SEQ ID NO: 441431 - DNA, 19 bp, Mus musculus
  siRNA target sequence for 9130423L19Rik (NM_133906.3,798-816).
cgatggcatctgcactatt

SEQ ID NO: 441432 - DNA, 19 bp, Mus musculus
  siRNA target sequence for 9130423L19Rik (NM_133906.3,898-916).
ggctcggaggaatctcaat

SEQ ID NO: 441433 - DNA, 19 bp, Mus musculus
  siRNA target sequence for 9130423L19Rik (NM_133906.3,920-938).
gacagcaggcagatgaatt

SEQ ID NO: 441434 - DNA, 19 bp, Mus musculus
  siRNA target sequence for 9130423L19Rik (NM_133906.3,1091-1109).
gtcgaaaggcaacagaaaa

SEQ ID NO: 441435 - DNA, 19 bp, Mus musculus
  siRNA target sequence for 9130423L19Rik (NM_133906.3,1093-1111).
cgaaaggcaacagaaaaat

SEQ ID NO: 441436 - DNA, 19 bp, Mus musculus
  siRNA target sequence for 9130423L19Rik (NM_133906.3,1233-1251).
gcctgagcgcaaactttaa

SEQ ID NO: 441437 - DNA, 19 bp, Mus musculus
  siRNA target sequence for 9130423L19Rik (NM_133906.3,1234-1252).
cctgagcgcaaactttaat

SEQ ID NO: 441438 - DNA, 19 bp, Mus musculus
  siRNA target sequence for 9130423L19Rik (NM_133906.3,1235-1253).
ctgagcgcaaactttaata

SEQ ID NO: 441439 - DNA, 19 bp, Mus musculus
  siRNA target sequence for 9130423L19Rik (NM_133906.3,1650-1668).
ctttcaaccgaaactcata

SEQ ID NO: 441440 - DNA, 19 bp, Mus musculus
  siRNA target sequence for 9130423L19Rik (NM_133906.3,1654-1672).
caaccgaaactcatacctt

SEQ ID NO: 441441 - DNA, 19 bp, Mus musculus
  siRNA target sequence for 9130423L19Rik (NM_133906.3,1658-1676).
cgaaactcataccttattt

SEQ ID NO: 441442 - DNA, 19 bp, Mus musculus
  siRNA target sequence for 9430065N20Rik (NM_175435.2,228-246).
gagccccatagggtattaa

SEQ ID NO: 441443 - DNA, 19 bp, Mus musculus
  siRNA target sequence for 9430065N20Rik (NM_175435.2,239-257).
ggtattaatggaaaaacct

SEQ ID NO: 441444 - DNA, 19 bp, Mus musculus
  siRNA target sequence for 9430065N20Rik (NM_175435.2,365-383).
gtctcaacctagagataca

SEQ ID NO: 441445 - DNA, 19 bp, Mus musculus
  siRNA target sequence for 9430065N20Rik (NM_175435.2,414-432).
gtggggaggagaccatata

SEQ ID NO: 441446 - DNA, 19 bp, Mus musculus
  siRNA target sequence for 9430065N20Rik (NM_175435.2,416-434).
ggggaggagaccatataga

SEQ ID NO: 441447 - DNA, 19 bp, Mus musculus
  siRNA target sequence for 9430065N20Rik (NM_175435.2,418-436).
ggaggagaccatatagact

SEQ ID NO: 441448 - DNA, 19 bp, Mus musculus
  siRNA target sequence for 9430065N20Rik (NM_175435.2,419-437).
gaggagaccatatagactt

SEQ ID NO: 441449 - DNA, 19 bp, Mus musculus
  siRNA target sequence for 9430065N20Rik (NM_175435.2,427-445).
catatagacttctcaaata

SEQ ID NO: 441450 - DNA, 19 bp, Mus musculus
  siRNA target sequence for 9430065N20Rik (NM_175435.2,438-456).
ctcaaatatggggaaaact

SEQ ID NO: 441451 - DNA, 19 bp, Mus musculus
  siRNA target sequence for 9430065N20Rik (NM_175435.2,967-985).
gctctttcctcactaaaca

SEQ ID NO: 441452 - DNA, 19 bp, Mus musculus
  siRNA target sequence for 9430065N20Rik (NM_175435.2,990-1008).
gaagtccacatgagagaaa

SEQ ID NO: 441453 - DNA, 19 bp, Mus musculus
  siRNA target sequence for 9530049C15Rik (NM_030139.1,180-198).
gctctgtgctgcaagagta

SEQ ID NO: 441454 - DNA, 19 bp, Mus musculus
  siRNA target sequence for 9530049C15Rik (NM_030139.1,181-199).
ctctgtgctgcaagagtat

SEQ ID NO: 441455 - DNA, 19 bp, Mus musculus
  siRNA target sequence for 9530049C15Rik (NM_030139.1,261-279).
ggcctcatgaagcattcaa

SEQ ID NO: 441456 - DNA, 19 bp, Mus musculus
  siRNA target sequence for 9530049C15Rik (NM_030139.1,263-281).
cctcatgaagcattcaaca

SEQ ID NO: 441457 - DNA, 19 bp, Mus musculus
  siRNA target sequence for 9530049C15Rik (NM_030139.1,432-450).
gagttgtgtcactcattga

SEQ ID NO: 441458 - DNA, 19 bp, Mus musculus
  siRNA target sequence for 9530049C15Rik (NM_030139.1,439-457).
gtcactcattgaagactta

SEQ ID NO: 441459 - DNA, 19 bp, Mus musculus
  siRNA target sequence for 9530049C15Rik (NM_030139.1,520-538).
ggcgccagttggaacagta

SEQ ID NO: 441460 - DNA, 19 bp, Mus musculus
  siRNA target sequence for 9530049C15Rik (NM_030139.1,683-701).
ctggaccctggttatcagt

SEQ ID NO: 441461 - DNA, 19 bp, Mus musculus
  siRNA target sequence for 9530049C15Rik (NM_030139.1,689-707).
cctggttatcagttaccaa

SEQ ID NO: 441462 - DNA, 19 bp, Mus musculus
  siRNA target sequence for 9530049C15Rik (NM_030139.1,690-708).
ctggttatcagttaccaaa

SEQ ID NO: 441463 - DNA, 19 bp, Mus musculus
  siRNA target sequence for 9530049C15Rik (NM_030139.1,704-722).
ccaaagcttgacatgaact

SEQ ID NO: 441464 - DNA, 19 bp, Mus musculus
  siRNA target sequence for 9530049C15Rik (NM_030139.1,705-723).
caaagcttgacatgaactt

SEQ ID NO: 441465 - DNA, 19 bp, Mus musculus
  siRNA target sequence for 9530049C15Rik (NM_030139.1,764-782).
gaggatcccaaagaaatga

SEQ ID NO: 441466 - DNA, 19 bp, Mus musculus
  siRNA target sequence for 9530049C15Rik (NM_030139.1,791-809).
cttgattccaagattggtt

SEQ ID NO: 441467 - DNA, 19 bp, Mus musculus
  siRNA target sequence for 9530049C15Rik (NM_030139.1,868-886).
gtacccatttgttgtaact

SEQ ID NO: 441468 - DNA, 19 bp, Mus musculus
  siRNA target sequence for 9530049C15Rik (NM_030139.1,900-918).
ctctccatggtcccatttt

SEQ ID NO: 441469 - DNA, 19 bp, Mus musculus
  siRNA target sequence for 9530049C15Rik (NM_030139.1,909-927).
gtcccattttgcagaaaga

SEQ ID NO: 441470 - DNA, 19 bp, Mus musculus
  siRNA target sequence for 9530049C15Rik (NM_030139.1,932-950).
gtgcagttagaaaaccaat

SEQ ID NO: 441471 - DNA, 19 bp, Mus musculus
  siRNA target sequence for 9530049C15Rik (NM_030139.1,957-975).
catccccagaggacttaca

SEQ ID NO: 441472 - DNA, 19 bp, Mus musculus
  siRNA target sequence for 9530049C15Rik (NM_030139.1,1129-1147).
cgctcggaagtcacaactt

SEQ ID NO: 441473 - DNA, 19 bp, Mus musculus
  siRNA target sequence for 9530049C15Rik (NM_030139.1,1130-1148).
gctcggaagtcacaactta

SEQ ID NO: 441474 - DNA, 19 bp, Mus musculus
  siRNA target sequence for 9530049C15Rik (NM_030139.1,1193-1211).
cctgaatgcggaaaaaggt

SEQ ID NO: 441475 - DNA, 19 bp, Mus musculus
  siRNA target sequence for 9530049C15Rik (NM_030139.1,1217-1235).
cgtagctctgacctttaca

SEQ ID NO: 441476 - DNA, 19 bp, Mus musculus
  siRNA target sequence for 9530049C15Rik (NM_030139.1,1432-1450).
gcctcatagatgtcctaat

SEQ ID NO: 441477 - DNA, 19 bp, Mus musculus
  siRNA target sequence for 9530049C15Rik (NM_030139.1,1433-1451).
cctcatagatgtcctaatt

SEQ ID NO: 441478 - DNA, 19 bp, Mus musculus
  siRNA target sequence for 9530049C15Rik (NM_030139.1,1445-1463).
cctaattgtgggaaaagtt

SEQ ID NO: 441479 - DNA, 19 bp, Mus musculus
  siRNA target sequence for 9530049C15Rik (NM_030139.1,1469-1487).
cgcctgacggcacttactt

SEQ ID NO: 441480 - DNA, 19 bp, Mus musculus
  siRNA target sequence for 9530049C15Rik (NM_030139.1,1470-1488).
gcctgacggcacttacttt

SEQ ID NO: 441481 - DNA, 19 bp, Mus musculus
  siRNA target sequence for 9530049C15Rik (NM_030139.1,1504-1522).
cacggaagagagacctttt

SEQ ID NO: 441482 - DNA, 19 bp, Mus musculus
  siRNA target sequence for 9530049C15Rik (NM_030139.1,1515-1533).
gaccttttaaatgtagtta

SEQ ID NO: 441483 - DNA, 19 bp, Mus musculus
  siRNA target sequence for 9530049C15Rik (NM_030139.1,1557-1575).
gaccaagccttgtcattca

SEQ ID NO: 441484 - DNA, 19 bp, Mus musculus
  siRNA target sequence for 9530049C15Rik (NM_030139.1,1559-1577).
ccaagccttgtcattcatt

SEQ ID NO: 441485 - DNA, 19 bp, Mus musculus
  siRNA target sequence for 9530049C15Rik (NM_030139.1,1606-1624).
caagtgtactcattgttct

SEQ ID NO: 441486 - DNA, 19 bp, Mus musculus
  siRNA target sequence for 9530049C15Rik (NM_030139.1,1614-1632).
ctcattgttctaaaagctt

SEQ ID NO: 441487 - DNA, 19 bp, Mus musculus
  siRNA target sequence for A330080J22Rik (NM_178667.2,522-540).
gttctgattgggaatccat

SEQ ID NO: 441488 - DNA, 19 bp, Mus musculus
  siRNA target sequence for A330080J22Rik (NM_178667.2,525-543).
ctgattgggaatccatata

SEQ ID NO: 441489 - DNA, 19 bp, Mus musculus
  siRNA target sequence for A330080J22Rik (NM_178667.2,560-578).
ggtcactcagactcacata

SEQ ID NO: 441490 - DNA, 19 bp, Mus musculus
  siRNA target sequence for A330080J22Rik (NM_178667.2,591-609).
ggctgggttcccagtgata

SEQ ID NO: 441491 - DNA, 19 bp, Mus musculus
  siRNA target sequence for A330080J22Rik (NM_178667.2,595-613).
gggttcccagtgatagaaa

SEQ ID NO: 441492 - DNA, 19 bp, Mus musculus
  siRNA target sequence for A330080J22Rik (NM_178667.2,736-754).
gcacaacgtcatacaatga

SEQ ID NO: 441493 - DNA, 19 bp, Mus musculus
  siRNA target sequence for A330080J22Rik (NM_178667.2,777-795).
gagtttaccaactcaaata

SEQ ID NO: 441494 - DNA, 19 bp, Mus musculus
  siRNA target sequence for A330080J22Rik (NM_178667.2,808-826).
ctgattcggcttatgatca

SEQ ID NO: 441495 - DNA, 19 bp, Mus musculus
  siRNA target sequence for A330080J22Rik (NM_178667.2,830-848).
gaacattagacgaagagtt

SEQ ID NO: 441496 - DNA, 19 bp, Mus musculus
  siRNA target sequence for A330080J22Rik (NM_178667.2,833-851).
cattagacgaagagtttat

SEQ ID NO: 441497 - DNA, 19 bp, Mus musculus
  siRNA target sequence for A330080J22Rik (NM_178667.2,841-859).
gaagagtttatgatgcttt

SEQ ID NO: 441498 - DNA, 19 bp, Mus musculus
  siRNA target sequence for A330080J22Rik (NM_178667.2,973-991).
ggcggatagaacggataaa

SEQ ID NO: 441499 - DNA, 19 bp, Mus musculus
  siRNA target sequence for A330080J22Rik (NM_178667.2,1000-1018).
gagcccagctacaagaact

SEQ ID NO: 441500 - DNA, 19 bp, Mus musculus
  siRNA target sequence for A330080J22Rik (NM_178667.2,1109-1127).
cattcagctgccatttata

SEQ ID NO: 441501 - DNA, 19 bp, Mus musculus
  siRNA target sequence for A330080J22Rik (NM_178667.2,1326-1344).
gctttagaaggctatatta

SEQ ID NO: 441502 - DNA, 19 bp, Mus musculus
  siRNA target sequence for A330080J22Rik (NM_178667.2,1335-1353).
ggctatattacagatatct

SEQ ID NO: 441503 - DNA, 19 bp, Mus musculus
  siRNA target sequence for A330080J22Rik (NM_178667.2,1370-1388).
gttaaatcagggactactt

SEQ ID NO: 441504 - DNA, 19 bp, Mus musculus
  siRNA target sequence for A330080J22Rik (NM_178667.2,1380-1398).
ggactacttttgaactcta

SEQ ID NO: 441505 - DNA, 19 bp, Mus musculus
  siRNA target sequence for A330080J22Rik (NM_178667.2,1396-1414).
ctacccaatcagtttcaaa

SEQ ID NO: 441506 - DNA, 19 bp, Mus musculus
  siRNA target sequence for A330080J22Rik (NM_178667.2,1434-1452).
gccactgtaccccaatcaa

SEQ ID NO: 441507 - DNA, 19 bp, Mus musculus
  siRNA target sequence for A330080J22Rik (NM_178667.2,1440-1458).
gtaccccaatcaagtgtaa

SEQ ID NO: 441508 - DNA, 19 bp, Mus musculus
  siRNA target sequence for A330080J22Rik (NM_178667.2,1444-1462).
cccaatcaagtgtaaacca

SEQ ID NO: 441509 - DNA, 19 bp, Mus musculus
  siRNA target sequence for A330080J22Rik (NM_178667.2,1505-1523).
gctccctgcctcaaacagt

SEQ ID NO: 441510 - DNA, 19 bp, Mus musculus
  siRNA target sequence for A330080J22Rik (NM_178667.2,1569-1587).
gagaccccctgttcattca

SEQ ID NO: 441511 - DNA, 19 bp, Mus musculus
  siRNA target sequence for A630035I11Rik (NM_175558.2,57-75).
ggctgcggttgcaagagaa

SEQ ID NO: 441512 - DNA, 19 bp, Mus musculus
  siRNA target sequence for A630035I11Rik (NM_175558.2,588-606).
cgaggaggccgcagttctt

SEQ ID NO: 441513 - DNA, 19 bp, Mus musculus
  siRNA target sequence for A630035I11Rik (NM_175558.2,784-802).
cgatctacccagatcagtt

SEQ ID NO: 441514 - DNA, 19 bp, Mus musculus
  siRNA target sequence for A630035I11Rik (NM_175558.2,850-868).
ccaagtgccctcctttcaa

SEQ ID NO: 441515 - DNA, 19 bp, Mus musculus
  siRNA target sequence for A630035I11Rik (NM_175558.2,878-896).
ccgagggacatcttgaaca

SEQ ID NO: 441516 - DNA, 19 bp, Mus musculus
  siRNA target sequence for A630035I11Rik (NM_175558.2,879-897).
cgagggacatcttgaacat

SEQ ID NO: 441517 - DNA, 19 bp, Mus musculus
  siRNA target sequence for A630035I11Rik (NM_175558.2,898-916).
caggaaacggtctccatat

SEQ ID NO: 441518 - DNA, 19 bp, Mus musculus
  siRNA target sequence for A630035I11Rik (NM_175558.2,907-925).
gtctccatatccttccaaa

SEQ ID NO: 441519 - DNA, 19 bp, Mus musculus
  siRNA target sequence for A630035I11Rik (NM_175558.2,949-967).
ctgttggactcatcacaaa

SEQ ID NO: 441520 - DNA, 19 bp, Mus musculus
  siRNA target sequence for A630035I11Rik (NM_175558.2,951-969).
gttggactcatcacaaaaa

SEQ ID NO: 441521 - DNA, 19 bp, Mus musculus
  siRNA target sequence for A630035I11Rik (NM_175558.2,983-1001).
gtgtgatgccggagaagta

SEQ ID NO: 441522 - DNA, 19 bp, Mus musculus
  siRNA target sequence for A630035I11Rik (NM_175558.2,1142-1160).
cagatccaaggctagttca

SEQ ID NO: 441523 - DNA, 19 bp, Mus musculus
  siRNA target sequence for A630035I11Rik (NM_175558.2,1159-1177).
caagccactccaagtgaaa

SEQ ID NO: 441524 - DNA, 19 bp, Mus musculus
  siRNA target sequence for A630035I11Rik (NM_175558.2,1249-1267).
cctcggaagctgtacgttt

SEQ ID NO: 441525 - DNA, 19 bp, Mus musculus
  siRNA target sequence for A630035I11Rik (NM_175558.2,1253-1271).
ggaagctgtacgtttgtga

SEQ ID NO: 441526 - DNA, 19 bp, Mus musculus
  siRNA target sequence for A630038G13Rik (NM_172298.1,174-192).
ctatgtttccgatgagtta

SEQ ID NO: 441527 - DNA, 19 bp, Mus musculus
  siRNA target sequence for A630038G13Rik (NM_172298.1,197-215).
cagctgccttggtagaaga

SEQ ID NO: 441528 - DNA, 19 bp, Mus musculus
  siRNA target sequence for A630038G13Rik (NM_172298.1,250-268).
gagccctcagccaagtaca

SEQ ID NO: 441529 - DNA, 19 bp, Mus musculus
  siRNA target sequence for A630038G13Rik (NM_172298.1,253-271).
ccctcagccaagtacatgt

SEQ ID NO: 441530 - DNA, 19 bp, Mus musculus
  siRNA target sequence for A630038G13Rik (NM_172298.1,454-472).
gacaccatcgtgtctgata

SEQ ID NO: 441531 - DNA, 19 bp, Mus musculus
  siRNA target sequence for A630038G13Rik (NM_172298.1,901-919).
cctcgcaaacggtctttgt

SEQ ID NO: 441532 - DNA, 19 bp, Mus musculus
  siRNA target sequence for A630038G13Rik (NM_172298.1,902-920).
ctcgcaaacggtctttgtt

SEQ ID NO: 441533 - DNA, 19 bp, Mus musculus
  siRNA target sequence for A630038G13Rik (NM_172298.1,997-1015).
gacctgagcgtccatatga

SEQ ID NO: 441534 - DNA, 19 bp, Mus musculus
  siRNA target sequence for A630038G13Rik (NM_172298.1,1000-1018).
ctgagcgtccatatgatca

SEQ ID NO: 441535 - DNA, 19 bp, Mus musculus
  siRNA target sequence for A630038G13Rik (NM_172298.1,1002-1020).
gagcgtccatatgatcaaa

SEQ ID NO: 441536 - DNA, 19 bp, Mus musculus
  siRNA target sequence for A630038G13Rik (NM_172298.1,1005-1023).
cgtccatatgatcaaaact

SEQ ID NO: 441537 - DNA, 19 bp, Mus musculus
  siRNA target sequence for A630038G13Rik (NM_172298.1,1061-1079).
cacccgttgcagccaaaat

SEQ ID NO: 441538 - DNA, 19 bp, Mus musculus
  siRNA target sequence for A630038G13Rik (NM_172298.1,1063-1081).
cccgttgcagccaaaatca

SEQ ID NO: 441539 - DNA, 19 bp, Mus musculus
  siRNA target sequence for A630038G13Rik (NM_172298.1,1064-1082).
ccgttgcagccaaaatcat

SEQ ID NO: 441540 - DNA, 19 bp, Mus musculus
  siRNA target sequence for A630038G13Rik (NM_172298.1,1178-1196).
gcgacgccctgcagaagaa

SEQ ID NO: 441541 - DNA, 19 bp, Mus musculus
  siRNA target sequence for A630038G13Rik (NM_172298.1,1204-1222).
ccttacatcacgccaaata

SEQ ID NO: 441542 - DNA, 19 bp, Mus musculus
  siRNA target sequence for A630038G13Rik (NM_172298.1,1532-1550).
cggtggagatcaaaaagga

SEQ ID NO: 441543 - DNA, 19 bp, Mus musculus
  siRNA target sequence for A630038G13Rik (NM_172298.1,1614-1632).
ggaggagaagtatgatatt

SEQ ID NO: 441544 - DNA, 19 bp, Mus musculus
  siRNA target sequence for A630038G13Rik (NM_172298.1,1617-1635).
ggagaagtatgatatttct

SEQ ID NO: 441545 - DNA, 19 bp, Mus musculus
  siRNA target sequence for A630038G13Rik (NM_172298.1,1638-1656).
caagtaccactatttgact

SEQ ID NO: 441546 - DNA, 19 bp, Mus musculus
  siRNA target sequence for A630038G13Rik (NM_172298.1,1655-1673).
ctgaaaacgacctagaaga

SEQ ID NO: 441547 - DNA, 19 bp, Mus musculus
  siRNA target sequence for A630038G13Rik (NM_172298.1,1677-1695).
ccctaaaggtggactagat

SEQ ID NO: 441548 - DNA, 19 bp, Mus musculus
  siRNA target sequence for A630038G13Rik (NM_172298.1,1678-1696).
cctaaaggtggactagata

SEQ ID NO: 441549 - DNA, 19 bp, Mus musculus
  siRNA target sequence for A630038G13Rik (NM_172298.1,1679-1697).
ctaaaggtggactagatat

SEQ ID NO: 441550 - DNA, 19 bp, Mus musculus
  siRNA target sequence for A630038G13Rik (NM_172298.1,1687-1705).
ggactagatatcctcaaat

SEQ ID NO: 441551 - DNA, 19 bp, Mus musculus
  siRNA target sequence for A630038G13Rik (NM_172298.1,1798-1816).
ctccccaacatgatgaagt

SEQ ID NO: 441552 - DNA, 19 bp, Mus musculus
  siRNA target sequence for A630038G13Rik (NM_172298.1,1801-1819).
cccaacatgatgaagttgt

SEQ ID NO: 441553 - DNA, 19 bp, Mus musculus
  siRNA target sequence for A630038G13Rik (NM_172298.1,2080-2098).
cagagcgaacccatcaaga

SEQ ID NO: 441554 - DNA, 19 bp, Mus musculus
  siRNA target sequence for A630038G13Rik (NM_172298.1,2109-2127).
cagcgacggcagcttcaaa

SEQ ID NO: 441555 - DNA, 19 bp, Mus musculus
  siRNA target sequence for A630038G13Rik (NM_172298.1,2183-2201).
ccgcagagcccgtagagaa

SEQ ID NO: 441556 - DNA, 19 bp, Mus musculus
  siRNA target sequence for A630038G13Rik (NM_172298.1,2184-2202).
cgcagagcccgtagagaat

SEQ ID NO: 441557 - DNA, 19 bp, Mus musculus
  siRNA target sequence for A630038G13Rik (NM_172298.1,2240-2258).
gcggcagcacagccattat

SEQ ID NO: 441558 - DNA, 19 bp, Mus musculus
  siRNA target sequence for A630038G13Rik (NM_172298.1,2272-2290).
ccagaacagccttttgtga

SEQ ID NO: 441559 - DNA, 19 bp, Mus musculus
  siRNA target sequence for A630038G13Rik (NM_172298.1,2365-2383).
gaccccatgagcatgcttt

SEQ ID NO: 441560 - DNA, 19 bp, Mus musculus
  siRNA target sequence for A630038G13Rik (NM_172298.1,2458-2476).
catctggaccgctatttct

SEQ ID NO: 441561 - DNA, 19 bp, Mus musculus
  siRNA target sequence for A630038G13Rik (NM_172298.1,2515-2533).
gggaagagcgacaaaggtt

SEQ ID NO: 441562 - DNA, 19 bp, Mus musculus
  siRNA target sequence for A630038G13Rik (NM_172298.1,2523-2541).
cgacaaaggttgctcttta

SEQ ID NO: 441563 - DNA, 19 bp, Mus musculus
  siRNA target sequence for A630038G13Rik (NM_172298.1,2640-2658).
ctcgccgctgcgtgagaat

SEQ ID NO: 441564 - DNA, 19 bp, Mus musculus
  siRNA target sequence for A630038G13Rik (NM_172298.1,2655-2673).
gaatgccttgtcagatata

SEQ ID NO: 441565 - DNA, 19 bp, Mus musculus
  siRNA target sequence for A630038G13Rik (NM_172298.1,2666-2684).
cagatatatccgatatgtt

SEQ ID NO: 441566 - DNA, 19 bp, Mus musculus
  siRNA target sequence for A630038G13Rik (NM_172298.1,2668-2686).
gatatatccgatatgttga

SEQ ID NO: 441567 - DNA, 19 bp, Mus musculus
  siRNA target sequence for A630038G13Rik (NM_172298.1,3070-3088).
gactgtgcgtcacaaatca

SEQ ID NO: 441568 - DNA, 19 bp, Mus musculus
  siRNA target sequence for A630038G13Rik (NM_172298.1,3135-3153).
ccggctacgggacttatca

SEQ ID NO: 441569 - DNA, 19 bp, Mus musculus
  siRNA target sequence for A630038G13Rik (NM_172298.1,3136-3154).
cggctacgggacttatcaa

SEQ ID NO: 441570 - DNA, 19 bp, Mus musculus
  siRNA target sequence for A630038G13Rik (NM_172298.1,3142-3160).
cgggacttatcaaaattgt

SEQ ID NO: 441571 - DNA, 19 bp, Mus musculus
  siRNA target sequence for A630038G13Rik (NM_172298.1,3161-3179).
ccaccgaacagattaacaa

SEQ ID NO: 441572 - DNA, 19 bp, Mus musculus
  siRNA target sequence for A630038G13Rik (NM_172298.1,3162-3180).
caccgaacagattaacaat

SEQ ID NO: 441573 - DNA, 19 bp, Mus musculus
  siRNA target sequence for A630038G13Rik (NM_172298.1,3171-3189).
gattaacaatcaaatagca

SEQ ID NO: 441574 - DNA, 19 bp, Mus musculus
  siRNA target sequence for A630038G13Rik (NM_172298.1,3194-3212).
ccaagtcgccgtctgaaaa

SEQ ID NO: 441575 - DNA, 19 bp, Mus musculus
  siRNA target sequence for A630038G13Rik (NM_172298.1,3195-3213).
caagtcgccgtctgaaaaa

SEQ ID NO: 441576 - DNA, 19 bp, Mus musculus
  siRNA target sequence for A630038G13Rik (NM_172298.1,3255-3273).
ccagtgcaaactttgtaat

SEQ ID NO: 441577 - DNA, 19 bp, Mus musculus
  siRNA target sequence for Adnp (NM_009628.1,24-42).
ctcccttgcttctggaaat

SEQ ID NO: 441578 - DNA, 19 bp, Mus musculus
  siRNA target sequence for Adnp (NM_009628.1,26-44).
cccttgcttctggaaatgt

SEQ ID NO: 441579 - DNA, 19 bp, Mus musculus
  siRNA target sequence for Adnp (NM_009628.1,55-73).
ccatcacagcagatggtaa

SEQ ID NO: 441580 - DNA, 19 bp, Mus musculus
  siRNA target sequence for Adnp (NM_009628.1,56-74).
catcacagcagatggtaaa

SEQ ID NO: 441581 - DNA, 19 bp, Mus musculus
  siRNA target sequence for Adnp (NM_009628.1,66-84).
gatggtaaaccgattgtca

SEQ ID NO: 441582 - DNA, 19 bp, Mus musculus
  siRNA target sequence for Adnp (NM_009628.1,69-87).
ggtaaaccgattgtcaata

SEQ ID NO: 441583 - DNA, 19 bp, Mus musculus
  siRNA target sequence for Adnp (NM_009628.1,107-125).
caacgggagtcaacatgat

SEQ ID NO: 441584 - DNA, 19 bp, Mus musculus
  siRNA target sequence for Adnp (NM_009628.1,506-524).
caatctgtaacgagctttt

SEQ ID NO: 441585 - DNA, 19 bp, Mus musculus
  siRNA target sequence for Adnp (NM_009628.1,549-567).
cttcgaaaaggagcataaa

SEQ ID NO: 441586 - DNA, 19 bp, Mus musculus
  siRNA target sequence for Adnp (NM_009628.1,580-598).
ccagccgtagctaactaca

SEQ ID NO: 441587 - DNA, 19 bp, Mus musculus
  siRNA target sequence for Adnp (NM_009628.1,583-601).
gccgtagctaactacatta

SEQ ID NO: 441588 - DNA, 19 bp, Mus musculus
  siRNA target sequence for Adnp (NM_009628.1,584-602).
ccgtagctaactacattat

SEQ ID NO: 441589 - DNA, 19 bp, Mus musculus
  siRNA target sequence for Adnp (NM_009628.1,586-604).
gtagctaactacattatga

SEQ ID NO: 441590 - DNA, 19 bp, Mus musculus
  siRNA target sequence for Adnp (NM_009628.1,589-607).
gctaactacattatgaaaa

SEQ ID NO: 441591 - DNA, 19 bp, Mus musculus
  siRNA target sequence for Adnp (NM_009628.1,624-642).
caaatgcctctactgtaat

SEQ ID NO: 441592 - DNA, 19 bp, Mus musculus
  siRNA target sequence for Adnp (NM_009628.1,653-671).
ctacagataccctactcaa

SEQ ID NO: 441593 - DNA, 19 bp, Mus musculus
  siRNA target sequence for Adnp (NM_009628.1,663-681).
cctactcaaccatatgtta

SEQ ID NO: 441594 - DNA, 19 bp, Mus musculus
  siRNA target sequence for Adnp (NM_009628.1,664-682).
ctactcaaccatatgttaa

SEQ ID NO: 441595 - DNA, 19 bp, Mus musculus
  siRNA target sequence for Adnp (NM_009628.1,707-725).
gccgttccaccttcaatga

SEQ ID NO: 441596 - DNA, 19 bp, Mus musculus
  siRNA target sequence for Adnp (NM_009628.1,708-726).
ccgttccaccttcaatgat

SEQ ID NO: 441597 - DNA, 19 bp, Mus musculus
  siRNA target sequence for Adnp (NM_009628.1,716-734).
ccttcaatgatgtagagaa

SEQ ID NO: 441598 - DNA, 19 bp, Mus musculus
  siRNA target sequence for Adnp (NM_009628.1,745-763).
cacatgcgaatggttcata

SEQ ID NO: 441599 - DNA, 19 bp, Mus musculus
  siRNA target sequence for Adnp (NM_009628.1,750-768).
gcgaatggttcatattgat

SEQ ID NO: 441600 - DNA, 19 bp, Mus musculus
  siRNA target sequence for Adnp (NM_009628.1,778-796).
gggcctaaaacggattcta

SEQ ID NO: 441601 - DNA, 19 bp, Mus musculus
  siRNA target sequence for Adnp (NM_009628.1,780-798).
gcctaaaacggattctact

SEQ ID NO: 441602 - DNA, 19 bp, Mus musculus
  siRNA target sequence for Adnp (NM_009628.1,825-843).
gggcagtcacaccaacatt

SEQ ID NO: 441603 - DNA, 19 bp, Mus musculus
  siRNA target sequence for Adnp (NM_009628.1,830-848).
gtcacaccaacattcatct

SEQ ID NO: 441604 - DNA, 19 bp, Mus musculus
  siRNA target sequence for Adnp (NM_009628.1,847-865).
ctcctggtgaccacataca

SEQ ID NO: 441605 - DNA, 19 bp, Mus musculus
  siRNA target sequence for Adnp (NM_009628.1,881-899).
cggctgaatcagttgctta

SEQ ID NO: 441606 - DNA, 19 bp, Mus musculus
  siRNA target sequence for Adnp (NM_009628.1,895-913).
gcttaccatgcccaaaata

SEQ ID NO: 441607 - DNA, 19 bp, Mus musculus
  siRNA target sequence for Adnp (NM_009628.1,896-914).
cttaccatgcccaaaataa

SEQ ID NO: 441608 - DNA, 19 bp, Mus musculus
  siRNA target sequence for Adnp (NM_009628.1,958-976).
gcagatgtcccggttaaaa

SEQ ID NO: 441609 - DNA, 19 bp, Mus musculus
  siRNA target sequence for Adnp (NM_009628.1,961-979).
gatgtcccggttaaaagtt

SEQ ID NO: 441610 - DNA, 19 bp, Mus musculus
  siRNA target sequence for Adnp (NM_009628.1,988-1006).
gctgcagtgccctataaaa

SEQ ID NO: 441611 - DNA, 19 bp, Mus musculus
  siRNA target sequence for Adnp (NM_009628.1,989-1007).
ctgcagtgccctataaaaa

SEQ ID NO: 441612 - DNA, 19 bp, Mus musculus
  siRNA target sequence for Adnp (NM_009628.1,1066-1084).
gatgcacttgcacatcatt

SEQ ID NO: 441613 - DNA, 19 bp, Mus musculus
  siRNA target sequence for Adnp (NM_009628.1,1114-1132).
gttcatccggttgagaaaa

SEQ ID NO: 441614 - DNA, 19 bp, Mus musculus
  siRNA target sequence for Adnp (NM_009628.1,1120-1138).
ccggttgagaaaaagctaa

SEQ ID NO: 441615 - DNA, 19 bp, Mus musculus
  siRNA target sequence for Adnp (NM_009628.1,1123-1141).
gttgagaaaaagctaactt

SEQ ID NO: 441616 - DNA, 19 bp, Mus musculus
  siRNA target sequence for Adnp (NM_009628.1,1126-1144).
gagaaaaagctaacttaca

SEQ ID NO: 441617 - DNA, 19 bp, Mus musculus
  siRNA target sequence for Adnp (NM_009628.1,1262-1280).
caccttctcggctcaatca

SEQ ID NO: 441618 - DNA, 19 bp, Mus musculus
  siRNA target sequence for Adnp (NM_009628.1,1264-1282).
ccttctcggctcaatcagt

SEQ ID NO: 441619 - DNA, 19 bp, Mus musculus
  siRNA target sequence for Adnp (NM_009628.1,1370-1388).
cccctagctgctttgaaga

SEQ ID NO: 441620 - DNA, 19 bp, Mus musculus
  siRNA target sequence for Adnp (NM_009628.1,1401-1419).
gcctgttgttttagcttta

SEQ ID NO: 441621 - DNA, 19 bp, Mus musculus
  siRNA target sequence for Adnp (NM_009628.1,1499-1517).
ccaccaggagagaaattga

SEQ ID NO: 441622 - DNA, 19 bp, Mus musculus
  siRNA target sequence for Adnp (NM_009628.1,1558-1576).
gcctcccatttcagtaaca

SEQ ID NO: 441623 - DNA, 19 bp, Mus musculus
  siRNA target sequence for Adnp (NM_009628.1,1589-1607).
gtgtccgcgactgtgaaaa

SEQ ID NO: 441624 - DNA, 19 bp, Mus musculus
  siRNA target sequence for Adnp (NM_009628.1,1591-1609).
gtccgcgactgtgaaaagt

SEQ ID NO: 441625 - DNA, 19 bp, Mus musculus
  siRNA target sequence for Adnp (NM_009628.1,1594-1612).
cgcgactgtgaaaagtaca

SEQ ID NO: 441626 - DNA, 19 bp, Mus musculus
  siRNA target sequence for Adnp (NM_009628.1,1595-1613).
gcgactgtgaaaagtacaa

SEQ ID NO: 441627 - DNA, 19 bp, Mus musculus
  siRNA target sequence for Adnp (NM_009628.1,1621-1639).
gtgctgctaggttttaaca

SEQ ID NO: 441628 - DNA, 19 bp, Mus musculus
  siRNA target sequence for Adnp (NM_009628.1,1624-1642).
ctgctaggttttaacatga

SEQ ID NO: 441629 - DNA, 19 bp, Mus musculus
  siRNA target sequence for Adnp (NM_009628.1,1657-1675).
gtcaaacacgagatggatt

SEQ ID NO: 441630 - DNA, 19 bp, Mus musculus
  siRNA target sequence for Adnp (NM_009628.1,1659-1677).
caaacacgagatggatttt

SEQ ID NO: 441631 - DNA, 19 bp, Mus musculus
  siRNA target sequence for Adnp (NM_009628.1,1737-1755).
gactgttgacaaaaagcat

SEQ ID NO: 441632 - DNA, 19 bp, Mus musculus
  siRNA target sequence for Adnp (NM_009628.1,1763-1781).
ggaaagaagatgatagctt

SEQ ID NO: 441633 - DNA, 19 bp, Mus musculus
  siRNA target sequence for Adnp (NM_009628.1,1774-1792).
gatagcttctcagatagtt

SEQ ID NO: 441634 - DNA, 19 bp, Mus musculus
  siRNA target sequence for Adnp (NM_009628.1,1778-1796).
gcttctcagatagttttga

SEQ ID NO: 441635 - DNA, 19 bp, Mus musculus
  siRNA target sequence for Adnp (NM_009628.1,1779-1797).
cttctcagatagttttgaa

SEQ ID NO: 441636 - DNA, 19 bp, Mus musculus
  siRNA target sequence for Adnp (NM_009628.1,1782-1800).
ctcagatagttttgaacat

SEQ ID NO: 441637 - DNA, 19 bp, Mus musculus
  siRNA target sequence for Adnp (NM_009628.1,1820-1838).
gaagcgggagtccttttga

SEQ ID NO: 441638 - DNA, 19 bp, Mus musculus
  siRNA target sequence for Adnp (NM_009628.1,1859-1877).
ctaaaattcccagtgataa

SEQ ID NO: 441639 - DNA, 19 bp, Mus musculus
  siRNA target sequence for Adnp (NM_009628.1,1885-1903).
gagcctgtaccgaaggtta

SEQ ID NO: 441640 - DNA, 19 bp, Mus musculus
  siRNA target sequence for Adnp (NM_009628.1,1887-1905).
gcctgtaccgaaggttatt

SEQ ID NO: 441641 - DNA, 19 bp, Mus musculus
  siRNA target sequence for Adnp (NM_009628.1,1906-1924).
ccggaaggtgctttggaat

SEQ ID NO: 441642 - DNA, 19 bp, Mus musculus
  siRNA target sequence for Adnp (NM_009628.1,1925-1943).
ctgagaagctagaccaaaa

SEQ ID NO: 441643 - DNA, 19 bp, Mus musculus
  siRNA target sequence for Adnp (NM_009628.1,1965-1983).
ggaggaggatggttcaaaa

SEQ ID NO: 441644 - DNA, 19 bp, Mus musculus
  siRNA target sequence for Adnp (NM_009628.1,1966-1984).
gaggaggatggttcaaaat

SEQ ID NO: 441645 - DNA, 19 bp, Mus musculus
  siRNA target sequence for Adnp (NM_009628.1,2046-2064).
ggtagaccaagatgatgta

SEQ ID NO: 441646 - DNA, 19 bp, Mus musculus
  siRNA target sequence for Adnp (NM_009628.1,2102-2120).
ggcctggttcccaacaaat

SEQ ID NO: 441647 - DNA, 19 bp, Mus musculus
  siRNA target sequence for Adnp (NM_009628.1,2104-2122).
cctggttcccaacaaatct

SEQ ID NO: 441648 - DNA, 19 bp, Mus musculus
  siRNA target sequence for Adnp (NM_009628.1,2265-2283).
gaatagttcctatggaaaa

SEQ ID NO: 441649 - DNA, 19 bp, Mus musculus
  siRNA target sequence for Adnp (NM_009628.1,2350-2368).
ccaaacccacagattgagt

SEQ ID NO: 441650 - DNA, 19 bp, Mus musculus
  siRNA target sequence for Adnp (NM_009628.1,2367-2385).
gtggcagaatagcacaatt

SEQ ID NO: 441651 - DNA, 19 bp, Mus musculus
  siRNA target sequence for Adnp (NM_009628.1,2371-2389).
cagaatagcacaattgaca

SEQ ID NO: 441652 - DNA, 19 bp, Mus musculus
  siRNA target sequence for Alx3 (NM_007441.1,490-508).
cagggacggaccctctaat

SEQ ID NO: 441653 - DNA, 19 bp, Mus musculus
  siRNA target sequence for Alx3 (NM_007441.1,492-510).
gggacggaccctctaatgt

SEQ ID NO: 441654 - DNA, 19 bp, Mus musculus
  siRNA target sequence for Alx3 (NM_007441.1,972-990).
cccactcccatggaaatgt

SEQ ID NO: 441655 - DNA, 19 bp, Mus musculus
  siRNA target sequence for Alx3 (NM_007441.1,1094-1112).
ccggatggtgactacaagt

SEQ ID NO: 441656 - DNA, 19 bp, Mus musculus
  siRNA target sequence for Alx3 (NM_007441.1,1113-1131).
ccccaagcctcgtttcact

SEQ ID NO: 441657 - DNA, 19 bp, Mus musculus
  siRNA target sequence for Alx4 (NM_007442.1,203-221).
ctgagacttgcgtctctta

SEQ ID NO: 441658 - DNA, 19 bp, Mus musculus
  siRNA target sequence for Alx4 (NM_007442.1,241-259).
gccatggacgcctactaca

SEQ ID NO: 441659 - DNA, 19 bp, Mus musculus
  siRNA target sequence for Alx4 (NM_007442.1,280-298).
gaaggttcgtcgcctttta

SEQ ID NO: 441660 - DNA, 19 bp, Mus musculus
  siRNA target sequence for Alx4 (NM_007442.1,315-333).
cgacaagttcggtacaact

SEQ ID NO: 441661 - DNA, 19 bp, Mus musculus
  siRNA target sequence for Alx4 (NM_007442.1,316-334).
gacaagttcggtacaactt

SEQ ID NO: 441662 - DNA, 19 bp, Mus musculus
  siRNA target sequence for Alx4 (NM_007442.1,318-336).
caagttcggtacaactttt

SEQ ID NO: 441663 - DNA, 19 bp, Mus musculus
  siRNA target sequence for Alx4 (NM_007442.1,446-464).
ggggatcctttaacaagtt

SEQ ID NO: 441664 - DNA, 19 bp, Mus musculus
  siRNA target sequence for Alx4 (NM_007442.1,616-634).
ccctgctacgccaaagaga

SEQ ID NO: 441665 - DNA, 19 bp, Mus musculus
  siRNA target sequence for Alx4 (NM_007442.1,773-791).
ccgattctgagagtaacaa

SEQ ID NO: 441666 - DNA, 19 bp, Mus musculus
  siRNA target sequence for Alx4 (NM_007442.1,1190-1208).
gcagcgtctccgacttctt

SEQ ID NO: 441667 - DNA, 19 bp, Mus musculus
  siRNA target sequence for Ar (NM_013476.2,496-514).
gctgctccgccgacattaa

SEQ ID NO: 441668 - DNA, 19 bp, Mus musculus
  siRNA target sequence for Ar (NM_013476.2,497-515).
ctgctccgccgacattaaa

SEQ ID NO: 441669 - DNA, 19 bp, Mus musculus
  siRNA target sequence for Ar (NM_013476.2,499-517).
gctccgccgacattaaaga

SEQ ID NO: 441670 - DNA, 19 bp, Mus musculus
  siRNA target sequence for Ar (NM_013476.2,502-520).
ccgccgacattaaagacat

SEQ ID NO: 441671 - DNA, 19 bp, Mus musculus
  siRNA target sequence for Ar (NM_013476.2,503-521).
cgccgacattaaagacatt

SEQ ID NO: 441672 - DNA, 19 bp, Mus musculus
  siRNA target sequence for Ar (NM_013476.2,533-551).
cggcaccatgcaacttctt

SEQ ID NO: 441673 - DNA, 19 bp, Mus musculus
  siRNA target sequence for Ar (NM_013476.2,690-708).
gggggcaattcaaccatat

SEQ ID NO: 441674 - DNA, 19 bp, Mus musculus
  siRNA target sequence for Ar (NM_013476.2,692-710).
gggcaattcaaccatatct

SEQ ID NO: 441675 - DNA, 19 bp, Mus musculus
  siRNA target sequence for Ar (NM_013476.2,694-712).
gcaattcaaccatatctga

SEQ ID NO: 441676 - DNA, 19 bp, Mus musculus
  siRNA target sequence for Ar (NM_013476.2,719-737).
caaggagttgtgtaaagca

SEQ ID NO: 441677 - DNA, 19 bp, Mus musculus
  siRNA target sequence for Ar (NM_013476.2,921-939).
gaagagactgctgagtatt

SEQ ID NO: 441678 - DNA, 19 bp, Mus musculus
  siRNA target sequence for Ar (NM_013476.2,952-970).
gaggttacgccaaaggatt

SEQ ID NO: 441679 - DNA, 19 bp, Mus musculus
  siRNA target sequence for Ar (NM_013476.2,1089-1107).
cagaatcgcgactactaca

SEQ ID NO: 441680 - DNA, 19 bp, Mus musculus
  siRNA target sequence for Ar (NM_013476.2,1238-1256).
ggacttgggtagtctacat

SEQ ID NO: 441681 - DNA, 19 bp, Mus musculus
  siRNA target sequence for Ar (NM_013476.2,1332-1350).
gctgaagaaggccaattat

SEQ ID NO: 441682 - DNA, 19 bp, Mus musculus
  siRNA target sequence for Ar (NM_013476.2,1508-1526).
ctatcccagtcccaattgt

SEQ ID NO: 441683 - DNA, 19 bp, Mus musculus
  siRNA target sequence for Ar (NM_013476.2,1545-1563).
ccttggatggagaactact

SEQ ID NO: 441684 - DNA, 19 bp, Mus musculus
  siRNA target sequence for Ar (NM_013476.2,1556-1574).
gaactactccggaccttat

SEQ ID NO: 441685 - DNA, 19 bp, Mus musculus
  siRNA target sequence for Ar (NM_013476.2,1608-1626).
gttttacccatcgactatt

SEQ ID NO: 441686 - DNA, 19 bp, Mus musculus
  siRNA target sequence for Ar (NM_013476.2,1728-1746).
gccgctgaagggaaacaga

SEQ ID NO: 441687 - DNA, 19 bp, Mus musculus
  siRNA target sequence for Ar (NM_013476.2,1737-1755).
gggaaacagaagtatctat

SEQ ID NO: 441688 - DNA, 19 bp, Mus musculus
  siRNA target sequence for Ar (NM_013476.2,1758-1776).
gccagcagaaacgattgta

SEQ ID NO: 441689 - DNA, 19 bp, Mus musculus
  siRNA target sequence for Ar (NM_013476.2,1763-1781).
cagaaacgattgtaccatt

SEQ ID NO: 441690 - DNA, 19 bp, Mus musculus
  siRNA target sequence for Ar (NM_013476.2,1769-1787).
cgattgtaccattgataaa

SEQ ID NO: 441691 - DNA, 19 bp, Mus musculus
  siRNA target sequence for Ar (NM_013476.2,1770-1788).
gattgtaccattgataaat

SEQ ID NO: 441692 - DNA, 19 bp, Mus musculus
  siRNA target sequence for Ar (NM_013476.2,1813-1831).
gtcgtctccggaaatgtta

SEQ ID NO: 441693 - DNA, 19 bp, Mus musculus
  siRNA target sequence for Ar (NM_013476.2,1816-1834).
gtctccggaaatgttatga

SEQ ID NO: 441694 - DNA, 19 bp, Mus musculus
  siRNA target sequence for Ar (NM_013476.2,1852-1870).
gagctcgtaagctgaagaa

SEQ ID NO: 441695 - DNA, 19 bp, Mus musculus
  siRNA target sequence for Ar (NM_013476.2,1940-1958).
ccagaagatgactgtatca

SEQ ID NO: 441696 - DNA, 19 bp, Mus musculus
  siRNA target sequence for Ar (NM_013476.2,1959-1977).
cacattgaaggctatgaat

SEQ ID NO: 441697 - DNA, 19 bp, Mus musculus
  siRNA target sequence for Ar (NM_013476.2,2029-2047).
gtgccggacatgacaacaa

SEQ ID NO: 441698 - DNA, 19 bp, Mus musculus
  siRNA target sequence for Ar (NM_013476.2,2045-2063).
caaccaaccagattccttt

SEQ ID NO: 441699 - DNA, 19 bp, Mus musculus
  siRNA target sequence for Ar (NM_013476.2,2220-2238).
ggttggcggtccttcacta

SEQ ID NO: 441700 - DNA, 19 bp, Mus musculus
  siRNA target sequence for Ar (NM_013476.2,2221-2239).
gttggcggtccttcactaa

SEQ ID NO: 441701 - DNA, 19 bp, Mus musculus
  siRNA target sequence for Ar (NM_013476.2,2224-2242).
ggcggtccttcactaatgt

SEQ ID NO: 441702 - DNA, 19 bp, Mus musculus
  siRNA target sequence for Ar (NM_013476.2,2227-2245).
ggtccttcactaatgtcaa

SEQ ID NO: 441703 - DNA, 19 bp, Mus musculus
  siRNA target sequence for Ar (NM_013476.2,2265-2283).
gcacctgacttggttttca

SEQ ID NO: 441704 - DNA, 19 bp, Mus musculus
  siRNA target sequence for Ar (NM_013476.2,2271-2289).
gacttggttttcaatgagt

SEQ ID NO: 441705 - DNA, 19 bp, Mus musculus
  siRNA target sequence for Ar (NM_013476.2,2298-2316).
cacaagtctcggatgtaca

SEQ ID NO: 441706 - DNA, 19 bp, Mus musculus
  siRNA target sequence for Ar (NM_013476.2,2340-2358).
ctgtctcaagagtttggat

SEQ ID NO: 441707 - DNA, 19 bp, Mus musculus
  siRNA target sequence for Ar (NM_013476.2,2351-2369).
gtttggatggctccaaata

SEQ ID NO: 441708 - DNA, 19 bp, Mus musculus
  siRNA target sequence for Ar (NM_013476.2,2426-2444).
ggatgggctgaaaaatcaa

SEQ ID NO: 441709 - DNA, 19 bp, Mus musculus
  siRNA target sequence for Ar (NM_013476.2,2454-2472).
gatgaacttcgaatgaact

SEQ ID NO: 441710 - DNA, 19 bp, Mus musculus
  siRNA target sequence for Ar (NM_013476.2,2480-2498).
ggaactcgatcgcatcatt

SEQ ID NO: 441711 - DNA, 19 bp, Mus musculus
  siRNA target sequence for Ar (NM_013476.2,2484-2502).
ctcgatcgcatcattgcat

SEQ ID NO: 441712 - DNA, 19 bp, Mus musculus
  siRNA target sequence for Ar (NM_013476.2,2490-2508).
cgcatcattgcatgcaaaa

SEQ ID NO: 441713 - DNA, 19 bp, Mus musculus
  siRNA target sequence for Ar (NM_013476.2,2588-2606).
gctgcatcagttcactttt

SEQ ID NO: 441714 - DNA, 19 bp, Mus musculus
  siRNA target sequence for Arnt (NM_009709.1,16-34).
gctaacccagaaatgacat

SEQ ID NO: 441715 - DNA, 19 bp, Mus musculus
  siRNA target sequence for Arnt (NM_009709.1,21-39).
cccagaaatgacatcagat

SEQ ID NO: 441716 - DNA, 19 bp, Mus musculus
  siRNA target sequence for Arnt (NM_009709.1,106-124).
gttgtacagagggctatta

SEQ ID NO: 441717 - DNA, 19 bp, Mus musculus
  siRNA target sequence for Arnt (NM_009709.1,128-146).
gacggtcagggctggattt

SEQ ID NO: 441718 - DNA, 19 bp, Mus musculus
  siRNA target sequence for Arnt (NM_009709.1,131-149).
ggtcagggctggattttga

SEQ ID NO: 441719 - DNA, 19 bp, Mus musculus
  siRNA target sequence for Arnt (NM_009709.1,157-175).
gtagaagtgaacactaaat

SEQ ID NO: 441720 - DNA, 19 bp, Mus musculus
  siRNA target sequence for Arnt (NM_009709.1,187-205).
gatgatgaccagatgtgta

SEQ ID NO: 441721 - DNA, 19 bp, Mus musculus
  siRNA target sequence for Arnt (NM_009709.1,193-211).
gaccagatgtgtaatgaca

SEQ ID NO: 441722 - DNA, 19 bp, Mus musculus
  siRNA target sequence for Arnt (NM_009709.1,282-300).
catggtacctacatgtagt

SEQ ID NO: 441723 - DNA, 19 bp, Mus musculus
  siRNA target sequence for Arnt (NM_009709.1,421-439).
gatcaggaactgaaacatt

SEQ ID NO: 441724 - DNA, 19 bp, Mus musculus
  siRNA target sequence for Arnt (NM_009709.1,488-506).
ctggacgggtggtgtatgt

SEQ ID NO: 441725 - DNA, 19 bp, Mus musculus
  siRNA target sequence for Arnt (NM_009709.1,552-570).
gttcgggagcacactgtat

SEQ ID NO: 441726 - DNA, 19 bp, Mus musculus
  siRNA target sequence for Arnt (NM_009709.1,557-575).
ggagcacactgtatgatca

SEQ ID NO: 441727 - DNA, 19 bp, Mus musculus
  siRNA target sequence for Arnt (NM_009709.1,582-600).
cccagatgatgtggataaa

SEQ ID NO: 441728 - DNA, 19 bp, Mus musculus
  siRNA target sequence for Arnt (NM_009709.1,612-630).
gctctctacatcagaaaat

SEQ ID NO: 441729 - DNA, 19 bp, Mus musculus
  siRNA target sequence for Arnt (NM_009709.1,758-776).
ccgtggaccctgtttccat

SEQ ID NO: 441730 - DNA, 19 bp, Mus musculus
  siRNA target sequence for Arnt (NM_009709.1,767-785).
ctgtttccatgaatagact

SEQ ID NO: 441731 - DNA, 19 bp, Mus musculus
  siRNA target sequence for Arnt (NM_009709.1,963-981).
caggctgcaggtaactagt

SEQ ID NO: 441732 - DNA, 19 bp, Mus musculus
  siRNA target sequence for Arnt (NM_009709.1,966-984).
gctgcaggtaactagttct

SEQ ID NO: 441733 - DNA, 19 bp, Mus musculus
  siRNA target sequence for Arnt (NM_009709.1,992-1010).
gtacagacatgagtaacat

SEQ ID NO: 441734 - DNA, 19 bp, Mus musculus
  siRNA target sequence for Arnt (NM_009709.1,1015-1033).
cagccaacagagttcatct

SEQ ID NO: 441735 - DNA, 19 bp, Mus musculus
  siRNA target sequence for Arnt (NM_009709.1,1029-1047).
catctcccgacacaacatt

SEQ ID NO: 441736 - DNA, 19 bp, Mus musculus
  siRNA target sequence for Arnt (NM_009709.1,1032-1050).
ctcccgacacaacattgaa

SEQ ID NO: 441737 - DNA, 19 bp, Mus musculus
  siRNA target sequence for Arnt (NM_009709.1,1110-1128).
gctcttagggaagaatatt

SEQ ID NO: 441738 - DNA, 19 bp, Mus musculus
  siRNA target sequence for Arnt (NM_009709.1,1117-1135).
gggaagaatattgtagaat

SEQ ID NO: 441739 - DNA, 19 bp, Mus musculus
  siRNA target sequence for Arnt (NM_009709.1,1147-1165).
gaagaccaacaacttctaa

SEQ ID NO: 441740 - DNA, 19 bp, Mus musculus
  siRNA target sequence for Arnt (NM_009709.1,1179-1197).
gcaggtggtgaaattaaaa

SEQ ID NO: 441741 - DNA, 19 bp, Mus musculus
  siRNA target sequence for Arnt (NM_009709.1,1259-1277).
gaacgagctcctttacctt

SEQ ID NO: 441742 - DNA, 19 bp, Mus musculus
  siRNA target sequence for Arnt (NM_009709.1,1278-1296).
ccaaaacccttattcagat

SEQ ID NO: 441743 - DNA, 19 bp, Mus musculus
  siRNA target sequence for Arnt (NM_009709.1,1284-1302).
cccttattcagatgaaatt

SEQ ID NO: 441744 - DNA, 19 bp, Mus musculus
  siRNA target sequence for Arnt (NM_009709.1,1393-1411).
ggtccgacagccaatttat

SEQ ID NO: 441745 - DNA, 19 bp, Mus musculus
  siRNA target sequence for Arnt (NM_009709.1,1464-1482).
cacagaactggatatggta

SEQ ID NO: 441746 - DNA, 19 bp, Mus musculus
  siRNA target sequence for Arnt (NM_009709.1,1497-1515).
gctggccagctataatcat

SEQ ID NO: 441747 - DNA, 19 bp, Mus musculus
  siRNA target sequence for Arnt (NM_009709.1,1610-1628).
caaggtttccagaaatcta

SEQ ID NO: 441748 - DNA, 19 bp, Mus musculus
  siRNA target sequence for Arnt (NM_009709.1,1776-1794).
cattgtccagccatcatct

SEQ ID NO: 441749 - DNA, 19 bp, Mus musculus
  siRNA target sequence for Arnt (NM_009709.1,1793-1811).
cttctgcagggcagatact

SEQ ID NO: 441750 - DNA, 19 bp, Mus musculus
  siRNA target sequence for Arnt (NM_009709.1,1806-1824).
gatactggcccagatttca

SEQ ID NO: 441751 - DNA, 19 bp, Mus musculus
  siRNA target sequence for Arnt (NM_009709.1,1923-1941).
gactcgttcttcccaattt

SEQ ID NO: 441752 - DNA, 19 bp, Mus musculus
  siRNA target sequence for Arnt (NM_009709.1,2146-2164).
ccccatcatcggtctagtt

SEQ ID NO: 441753 - DNA, 19 bp, Mus musculus
  siRNA target sequence for Arnt (NM_009709.1,2211-2229).
gcctgaggtctttcaagaa

SEQ ID NO: 441754 - DNA, 19 bp, Mus musculus
  siRNA target sequence for Arnt (NM_009709.1,2259-2277).
cacctacaacaatgaagaa

SEQ ID NO: 441755 - DNA, 19 bp, Mus musculus
  siRNA target sequence for Arnt (NM_009709.1,2261-2279).
cctacaacaatgaagaatt

SEQ ID NO: 441756 - DNA, 19 bp, Mus musculus
  siRNA target sequence for Arnt (NM_009709.1,2275-2293).
gaatttcctgatctaacta

SEQ ID NO: 441757 - DNA, 19 bp, Mus musculus
  siRNA target sequence for Arnt2 (NM_007488.2,104-122).
ggagatggcgtcagacata

SEQ ID NO: 441758 - DNA, 19 bp, Mus musculus
  siRNA target sequence for Arnt2 (NM_007488.2,243-261).
ggtgaaggtcccagtaaat

SEQ ID NO: 441759 - DNA, 19 bp, Mus musculus
  siRNA target sequence for Arnt2 (NM_007488.2,244-262).
gtgaaggtcccagtaaatt

SEQ ID NO: 441760 - DNA, 19 bp, Mus musculus
  siRNA target sequence for Arnt2 (NM_007488.2,246-264).
gaaggtcccagtaaattct

SEQ ID NO: 441761 - DNA, 19 bp, Mus musculus
  siRNA target sequence for Arnt2 (NM_007488.2,300-318).
cggaacaagatgactcaat

SEQ ID NO: 441762 - DNA, 19 bp, Mus musculus
  siRNA target sequence for Arnt2 (NM_007488.2,301-319).
ggaacaagatgactcaata

SEQ ID NO: 441763 - DNA, 19 bp, Mus musculus
  siRNA target sequence for Arnt2 (NM_007488.2,399-417).
gcggtctcgcacatgaagt

SEQ ID NO: 441764 - DNA, 19 bp, Mus musculus
  siRNA target sequence for Arnt2 (NM_007488.2,422-440).
gaggggcaccggcaacaaa

SEQ ID NO: 441765 - DNA, 19 bp, Mus musculus
  siRNA target sequence for Arnt2 (NM_007488.2,426-444).
ggcaccggcaacaaatcga

SEQ ID NO: 441766 - DNA, 19 bp, Mus musculus
  siRNA target sequence for Arnt2 (NM_007488.2,503-521).
ggaagccgctgatggattt

SEQ ID NO: 441767 - DNA, 19 bp, Mus musculus
  siRNA target sequence for Arnt2 (NM_007488.2,507-525).
gccgctgatggatttctgt

SEQ ID NO: 441768 - DNA, 19 bp, Mus musculus
  siRNA target sequence for Arnt2 (NM_007488.2,608-626).
gtttgggagcacgctttat

SEQ ID NO: 441769 - DNA, 19 bp, Mus musculus
  siRNA target sequence for Arnt2 (NM_007488.2,640-658).
ctgatgacgtggagaaact

SEQ ID NO: 441770 - DNA, 19 bp, Mus musculus
  siRNA target sequence for Arnt2 (NM_007488.2,774-792).
cggcgctccttcatctgta

SEQ ID NO: 441771 - DNA, 19 bp, Mus musculus
  siRNA target sequence for Arnt2 (NM_007488.2,828-846).
cctttgaacagaataacca

SEQ ID NO: 441772 - DNA, 19 bp, Mus musculus
  siRNA target sequence for Arnt2 (NM_007488.2,1228-1246).
gcttccaacaggtggttaa

SEQ ID NO: 441773 - DNA, 19 bp, Mus musculus
  siRNA target sequence for Arnt2 (NM_007488.2,1437-1455).
gggctgtcgtcatatgact

SEQ ID NO: 441774 - DNA, 19 bp, Mus musculus
  siRNA target sequence for Arnt2 (NM_007488.2,1438-1456).
ggctgtcgtcatatgactt

SEQ ID NO: 441775 - DNA, 19 bp, Mus musculus
  siRNA target sequence for Arnt2 (NM_007488.2,1439-1457).
gctgtcgtcatatgactta

SEQ ID NO: 441776 - DNA, 19 bp, Mus musculus
  siRNA target sequence for Arnt2 (NM_007488.2,1440-1458).
ctgtcgtcatatgacttat

SEQ ID NO: 441777 - DNA, 19 bp, Mus musculus
  siRNA target sequence for Arnt2 (NM_007488.2,1442-1460).
gtcgtcatatgacttatct

SEQ ID NO: 441778 - DNA, 19 bp, Mus musculus
  siRNA target sequence for Arnt2 (NM_007488.2,1444-1462).
cgtcatatgacttatctca

SEQ ID NO: 441779 - DNA, 19 bp, Mus musculus
  siRNA target sequence for Arnt2 (NM_007488.2,1544-1562).
gagagaccctcgttttgct

SEQ ID NO: 441780 - DNA, 19 bp, Mus musculus
  siRNA target sequence for Arnt2 (NM_007488.2,1552-1570).
ctcgttttgctgagatgtt

SEQ ID NO: 441781 - DNA, 19 bp, Mus musculus
  siRNA target sequence for Arnt2 (NM_007488.2,1708-1726).
ctggagtgaatgacattca

SEQ ID NO: 441782 - DNA, 19 bp, Mus musculus
  siRNA target sequence for Arnt2 (NM_007488.2,1735-1753).
cctcaacgggacagaacat

SEQ ID NO: 441783 - DNA, 19 bp, Mus musculus
  siRNA target sequence for Arnt2 (NM_007488.2,1736-1754).
ctcaacgggacagaacata

SEQ ID NO: 441784 - DNA, 19 bp, Mus musculus
  siRNA target sequence for Arnt2 (NM_007488.2,2144-2162).
gcaggggactggcaactat

SEQ ID NO: 441785 - DNA, 19 bp, Mus musculus
  siRNA target sequence for Arnt2 (NM_007488.2,2149-2167).
ggactggcaactataacat

SEQ ID NO: 441786 - DNA, 19 bp, Mus musculus
  siRNA target sequence for Arnt2 (NM_007488.2,2186-2204).
gggcatgttccctccattt

SEQ ID NO: 441787 - DNA, 19 bp, Mus musculus
  siRNA target sequence for Arntl (NM_007489.1,535-553).
cactgactaccaagaaagt

SEQ ID NO: 441788 - DNA, 19 bp, Mus musculus
  siRNA target sequence for Arntl (NM_007489.1,537-555).
ctgactaccaagaaagtat

SEQ ID NO: 441789 - DNA, 19 bp, Mus musculus
  siRNA target sequence for Arntl (NM_007489.1,574-592).
ccctcatggaaggttagaa

SEQ ID NO: 441790 - DNA, 19 bp, Mus musculus
  siRNA target sequence for Arntl (NM_007489.1,575-593).
cctcatggaaggttagaat

SEQ ID NO: 441791 - DNA, 19 bp, Mus musculus
  siRNA target sequence for Arntl (NM_007489.1,576-594).
ctcatggaaggttagaata

SEQ ID NO: 441792 - DNA, 19 bp, Mus musculus
  siRNA target sequence for Arntl (NM_007489.1,604-622).
ccaaggaaggatcaagaat

SEQ ID NO: 441793 - DNA, 19 bp, Mus musculus
  siRNA target sequence for Arntl (NM_007489.1,635-653).
cacagtcagattgaaaaga

SEQ ID NO: 441794 - DNA, 19 bp, Mus musculus
  siRNA target sequence for Arntl (NM_007489.1,654-672).
ggcgtcgggacaaaatgaa

SEQ ID NO: 441795 - DNA, 19 bp, Mus musculus
  siRNA target sequence for Arntl (NM_007489.1,659-677).
cgggacaaaatgaacagtt

SEQ ID NO: 441796 - DNA, 19 bp, Mus musculus
  siRNA target sequence for Arntl (NM_007489.1,660-678).
gggacaaaatgaacagttt

SEQ ID NO: 441797 - DNA, 19 bp, Mus musculus
  siRNA target sequence for Arntl (NM_007489.1,662-680).
gacaaaatgaacagtttca

SEQ ID NO: 441798 - DNA, 19 bp, Mus musculus
  siRNA target sequence for Arntl (NM_007489.1,664-682).
caaaatgaacagtttcatt

SEQ ID NO: 441799 - DNA, 19 bp, Mus musculus
  siRNA target sequence for Arntl (NM_007489.1,701-719).
gtaccaacatgcaatgcaa

SEQ ID NO: 441800 - DNA, 19 bp, Mus musculus
  siRNA target sequence for Arntl (NM_007489.1,717-735).
caatgtccaggaagttaga

SEQ ID NO: 441801 - DNA, 19 bp, Mus musculus
  siRNA target sequence for Arntl (NM_007489.1,864-882).
gggcagcagatggattttt

SEQ ID NO: 441802 - DNA, 19 bp, Mus musculus
  siRNA target sequence for Arntl (NM_007489.1,924-942).
ccgagtctgtcttcaagat

SEQ ID NO: 441803 - DNA, 19 bp, Mus musculus
  siRNA target sequence for Arntl (NM_007489.1,971-989).
ggccagagcttgtttgact

SEQ ID NO: 441804 - DNA, 19 bp, Mus musculus
  siRNA target sequence for Arntl (NM_007489.1,1085-1103).
ccggttaaaacggatataa

SEQ ID NO: 441805 - DNA, 19 bp, Mus musculus
  siRNA target sequence for Arntl (NM_007489.1,1176-1194).
cagtaaaggtggaagataa

SEQ ID NO: 441806 - DNA, 19 bp, Mus musculus
  siRNA target sequence for Arntl (NM_007489.1,1253-1271).
cacagcacaggctatttga

SEQ ID NO: 441807 - DNA, 19 bp, Mus musculus
  siRNA target sequence for Arntl (NM_007489.1,1399-1417).
ggaaatacgggtgaaatct

SEQ ID NO: 441808 - DNA, 19 bp, Mus musculus
  siRNA target sequence for Arntl (NM_007489.1,1400-1418).
gaaatacgggtgaaatcta

SEQ ID NO: 441809 - DNA, 19 bp, Mus musculus
  siRNA target sequence for Arntl (NM_007489.1,1438-1456).
cgcaatagatgggaaattt

SEQ ID NO: 441810 - DNA, 19 bp, Mus musculus
  siRNA target sequence for Arntl (NM_007489.1,1440-1458).
caatagatgggaaatttgt

SEQ ID NO: 441811 - DNA, 19 bp, Mus musculus
  siRNA target sequence for Arntl (NM_007489.1,1505-1523).
gaacttctaggtacatcat

SEQ ID NO: 441812 - DNA, 19 bp, Mus musculus
  siRNA target sequence for Arntl (NM_007489.1,1508-1526).
cttctaggtacatcatgtt

SEQ ID NO: 441813 - DNA, 19 bp, Mus musculus
  siRNA target sequence for Arntl (NM_007489.1,1514-1532).
ggtacatcatgttatgagt

SEQ ID NO: 441814 - DNA, 19 bp, Mus musculus
  siRNA target sequence for Arntl (NM_007489.1,1627-1645).
gatcaaagatggttctttt

SEQ ID NO: 441815 - DNA, 19 bp, Mus musculus
  siRNA target sequence for Arntl (NM_007489.1,1655-1673).
cgaagtcgatggttcagtt

SEQ ID NO: 441816 - DNA, 19 bp, Mus musculus
  siRNA target sequence for Arntl (NM_007489.1,1656-1674).
gaagtcgatggttcagttt

SEQ ID NO: 441817 - DNA, 19 bp, Mus musculus
  siRNA target sequence for Arntl (NM_007489.1,1659-1677).
gtcgatggttcagtttcat

SEQ ID NO: 441818 - DNA, 19 bp, Mus musculus
  siRNA target sequence for Arntl (NM_007489.1,1683-1701).
cgtggaccaaggaagttga

SEQ ID NO: 441819 - DNA, 19 bp, Mus musculus
  siRNA target sequence for Arntl (NM_007489.1,1694-1712).
gaagttgaatacattgtct

SEQ ID NO: 441820 - DNA, 19 bp, Mus musculus
  siRNA target sequence for Arntl (NM_007489.1,1884-1902).
gaaaaataggtcgaatgat

SEQ ID NO: 441821 - DNA, 19 bp, Mus musculus
  siRNA target sequence for Arntl (NM_007489.1,1896-1914).
gaatgatcgcggaggaaat

SEQ ID NO: 441822 - DNA, 19 bp, Mus musculus
  siRNA target sequence for Arntl (NM_007489.1,1967-1985).
ccgctgaacatcacaagta

SEQ ID NO: 441823 - DNA, 19 bp, Mus musculus
  siRNA target sequence for Arntl (NM_007489.1,2089-2107).
cccagggtatccctattct

SEQ ID NO: 441824 - DNA, 19 bp, Mus musculus
  siRNA target sequence for Arntl (NM_007489.1,2093-2111).
gggtatccctattctgata

SEQ ID NO: 441825 - DNA, 19 bp, Mus musculus
  siRNA target sequence for Arntl (NM_007489.1,2095-2113).
gtatccctattctgatagt

SEQ ID NO: 441826 - DNA, 19 bp, Mus musculus
  siRNA target sequence for Arntl (NM_007489.1,2099-2117).
ccctattctgatagttctt

SEQ ID NO: 441827 - DNA, 19 bp, Mus musculus
  siRNA target sequence for Arntl (NM_007489.1,2106-2124).
ctgatagttcttctattct

SEQ ID NO: 441828 - DNA, 19 bp, Mus musculus
  siRNA target sequence for Arx (NM_007492.3,120-138).
ggccggagtgcaagagtaa

SEQ ID NO: 441829 - DNA, 19 bp, Mus musculus
  siRNA target sequence for Arx (NM_007492.3,124-142).
ggagtgcaagagtaaatct

SEQ ID NO: 441830 - DNA, 19 bp, Mus musculus
  siRNA target sequence for Arx (NM_007492.3,543-561).
cctgggacacgctcaagat

SEQ ID NO: 441831 - DNA, 19 bp, Mus musculus
  siRNA target sequence for Arx (NM_007492.3,1468-1486).
gggtctgagcacttttcta

SEQ ID NO: 441832 - DNA, 19 bp, Mus musculus
  siRNA target sequence for Arx (NM_007492.3,1526-1544).
gcatttggcaggctctttt

SEQ ID NO: 441833 - DNA, 19 bp, Mus musculus
  siRNA target sequence for Arx (NM_007492.3,1666-1684).
cagacgcgcgtcaagcata

SEQ ID NO: 441834 - DNA, 19 bp, Mus musculus
  siRNA target sequence for Atbf1 (NM_007496.1,795-813).
ggcaatggactgaactcaa

SEQ ID NO: 441835 - DNA, 19 bp, Mus musculus
  siRNA target sequence for Atbf1 (NM_007496.1,1144-1162).
cggctccgcgtacattgtt

SEQ ID NO: 441836 - DNA, 19 bp, Mus musculus
  siRNA target sequence for Atbf1 (NM_007496.1,1146-1164).
gctccgcgtacattgttga

SEQ ID NO: 441837 - DNA, 19 bp, Mus musculus
  siRNA target sequence for Atbf1 (NM_007496.1,1296-1314).
ccgtgtacccgcagatcat

SEQ ID NO: 441838 - DNA, 19 bp, Mus musculus
  siRNA target sequence for Atbf1 (NM_007496.1,1298-1316).
gtgtacccgcagatcatca

SEQ ID NO: 441839 - DNA, 19 bp, Mus musculus
  siRNA target sequence for Atbf1 (NM_007496.1,1335-1353).
catccttcgggaaatggtt

SEQ ID NO: 441840 - DNA, 19 bp, Mus musculus
  siRNA target sequence for Atbf1 (NM_007496.1,1339-1357).
cttcgggaaatggtttgaa

SEQ ID NO: 441841 - DNA, 19 bp, Mus musculus
  siRNA target sequence for Atbf1 (NM_007496.1,1414-1432).
gcacagcttccgcgttttt

SEQ ID NO: 441842 - DNA, 19 bp, Mus musculus
  siRNA target sequence for Atbf1 (NM_007496.1,1492-1510).
ctgcgtatccaaagatgtt

SEQ ID NO: 441843 - DNA, 19 bp, Mus musculus
  siRNA target sequence for Atbf1 (NM_007496.1,1632-1650).
cggtgcacgaccatcgaat

SEQ ID NO: 441844 - DNA, 19 bp, Mus musculus
  siRNA target sequence for Atbf1 (NM_007496.1,1660-1678).
cgaagaggagcggaaactt

SEQ ID NO: 441845 - DNA, 19 bp, Mus musculus
  siRNA target sequence for Atbf1 (NM_007496.1,1664-1682).
gaggagcggaaacttctta

SEQ ID NO: 441846 - DNA, 19 bp, Mus musculus
  siRNA target sequence for Atbf1 (NM_007496.1,1669-1687).
gcggaaacttcttagcaat

SEQ ID NO: 441847 - DNA, 19 bp, Mus musculus
  siRNA target sequence for Atbf1 (NM_007496.1,1670-1688).
cggaaacttcttagcaata

SEQ ID NO: 441848 - DNA, 19 bp, Mus musculus
  siRNA target sequence for Atbf1 (NM_007496.1,1810-1828).
cggacacagtttttatggt

SEQ ID NO: 441849 - DNA, 19 bp, Mus musculus
  siRNA target sequence for Atbf1 (NM_007496.1,1961-1979).
ctgaagacccccattacct

SEQ ID NO: 441850 - DNA, 19 bp, Mus musculus
  siRNA target sequence for Atbf1 (NM_007496.1,1999-2017).
ggcttctagtcctaccaaa

SEQ ID NO: 441851 - DNA, 19 bp, Mus musculus
  siRNA target sequence for Atbf1 (NM_007496.1,2000-2018).
gcttctagtcctaccaaat

SEQ ID NO: 441852 - DNA, 19 bp, Mus musculus
  siRNA target sequence for Atbf1 (NM_007496.1,2083-2101).
ctgcttctccgagaaagta

SEQ ID NO: 441853 - DNA, 19 bp, Mus musculus
  siRNA target sequence for Atbf1 (NM_007496.1,2085-2103).
gcttctccgagaaagtaga

SEQ ID NO: 441854 - DNA, 19 bp, Mus musculus
  siRNA target sequence for Atbf1 (NM_007496.1,2334-2352).
cccccttaatgcctaatgt

SEQ ID NO: 441855 - DNA, 19 bp, Mus musculus
  siRNA target sequence for Atbf1 (NM_007496.1,2397-2415).
ctgcttctaactttgttgt

SEQ ID NO: 441856 - DNA, 19 bp, Mus musculus
  siRNA target sequence for Atbf1 (NM_007496.1,2428-2446).
gaacaggaggagtcgttta

SEQ ID NO: 441857 - DNA, 19 bp, Mus musculus
  siRNA target sequence for Atbf1 (NM_007496.1,2433-2451).
ggaggagtcgtttaagctt

SEQ ID NO: 441858 - DNA, 19 bp, Mus musculus
  siRNA target sequence for Atbf1 (NM_007496.1,2434-2452).
gaggagtcgtttaagcttt

SEQ ID NO: 441859 - DNA, 19 bp, Mus musculus
  siRNA target sequence for Atbf1 (NM_007496.1,2436-2454).
ggagtcgtttaagctttaa

SEQ ID NO: 441860 - DNA, 19 bp, Mus musculus
  siRNA target sequence for Atbf1 (NM_007496.1,2535-2553).
cagcaccagaaccaaatga

SEQ ID NO: 441861 - DNA, 19 bp, Mus musculus
  siRNA target sequence for Atbf1 (NM_007496.1,2537-2555).
gcaccagaaccaaatgaaa

SEQ ID NO: 441862 - DNA, 19 bp, Mus musculus
  siRNA target sequence for Atbf1 (NM_007496.1,2886-2904).
gctacacgtgtggttacaa

SEQ ID NO: 441863 - DNA, 19 bp, Mus musculus
  siRNA target sequence for Atbf1 (NM_007496.1,2912-2930).
cgctgcgaggtgtgtaact

SEQ ID NO: 441864 - DNA, 19 bp, Mus musculus
  siRNA target sequence for Atbf1 (NM_007496.1,2973-2991).
ccgacaaacatctcaacaa

SEQ ID NO: 441865 - DNA, 19 bp, Mus musculus
  siRNA target sequence for Atbf1 (NM_007496.1,3233-3251).
ctgcttcaacagaacatga

SEQ ID NO: 441866 - DNA, 19 bp, Mus musculus
  siRNA target sequence for Atbf1 (NM_007496.1,3378-3396).
cggatgcccagttcatgat

SEQ ID NO: 441867 - DNA, 19 bp, Mus musculus
  siRNA target sequence for Atbf1 (NM_007496.1,3666-3684).
ccgtgatgggggactctta

SEQ ID NO: 441868 - DNA, 19 bp, Mus musculus
  siRNA target sequence for Atbf1 (NM_007496.1,3794-3812).
ggtggcaaggccaatgagt

SEQ ID NO: 441869 - DNA, 19 bp, Mus musculus
  siRNA target sequence for Atbf1 (NM_007496.1,4437-4455).
cctactgcaagtatagcaa

SEQ ID NO: 441870 - DNA, 19 bp, Mus musculus
  siRNA target sequence for Atbf1 (NM_007496.1,4521-4539).
gtcccctgtgccaagacat

SEQ ID NO: 441871 - DNA, 19 bp, Mus musculus
  siRNA target sequence for Atbf1 (NM_007496.1,4629-4647).
ccgctcctgagatggttat

SEQ ID NO: 441872 - DNA, 19 bp, Mus musculus
  siRNA target sequence for Atbf1 (NM_007496.1,4739-4757).
gacccgggaaagaacatct

SEQ ID NO: 441873 - DNA, 19 bp, Mus musculus
  siRNA target sequence for Atbf1 (NM_007496.1,4941-4959).
cagaccgccacgtgtataa

SEQ ID NO: 441874 - DNA, 19 bp, Mus musculus
  siRNA target sequence for Atbf1 (NM_007496.1,4985-5003).
gctttcaagaccattgaaa

SEQ ID NO: 441875 - DNA, 19 bp, Mus musculus
  siRNA target sequence for Atbf1 (NM_007496.1,5403-5421).
cggtctgcaaggaatcctt

SEQ ID NO: 441876 - DNA, 19 bp, Mus musculus
  siRNA target sequence for Atbf1 (NM_007496.1,5438-5456).
ctgctggtgcactacaact

SEQ ID NO: 441877 - DNA, 19 bp, Mus musculus
  siRNA target sequence for Atbf1 (NM_007496.1,5463-5481).
cgcacctgcacaagttaaa

SEQ ID NO: 441878 - DNA, 19 bp, Mus musculus
  siRNA target sequence for Atbf1 (NM_007496.1,5536-5554).
caataagccgtttaagtgt

SEQ ID NO: 441879 - DNA, 19 bp, Mus musculus
  siRNA target sequence for Atbf1 (NM_007496.1,5542-5560).
gccgtttaagtgtaacact

SEQ ID NO: 441880 - DNA, 19 bp, Mus musculus
  siRNA target sequence for Atbf1 (NM_007496.1,5543-5561).
ccgtttaagtgtaacactt

SEQ ID NO: 441881 - DNA, 19 bp, Mus musculus
  siRNA target sequence for Atbf1 (NM_007496.1,5902-5920).
gaagttagcggatatgatt

SEQ ID NO: 441882 - DNA, 19 bp, Mus musculus
  siRNA target sequence for Atbf1 (NM_007496.1,6360-6378).
gccaacacccggaaaagaa

SEQ ID NO: 441883 - DNA, 19 bp, Mus musculus
  siRNA target sequence for Atbf1 (NM_007496.1,6526-6544).
ctctgagggcactatgctt

SEQ ID NO: 441884 - DNA, 19 bp, Mus musculus
  siRNA target sequence for Atbf1 (NM_007496.1,6542-6560).
cttcctccacgcattgctt

SEQ ID NO: 441885 - DNA, 19 bp, Mus musculus
  siRNA target sequence for Atbf1 (NM_007496.1,6563-6581).
gatgccagggggaatgcta

SEQ ID NO: 441886 - DNA, 19 bp, Mus musculus
  siRNA target sequence for Atbf1 (NM_007496.1,6606-6624).
gctttgagctcgtcattca

SEQ ID NO: 441887 - DNA, 19 bp, Mus musculus
  siRNA target sequence for Atbf1 (NM_007496.1,6819-6837).
gagagcactatgataaact

SEQ ID NO: 441888 - DNA, 19 bp, Mus musculus
  siRNA target sequence for Atbf1 (NM_007496.1,6821-6839).
gagcactatgataaactgt

SEQ ID NO: 441889 - DNA, 19 bp, Mus musculus
  siRNA target sequence for Atbf1 (NM_007496.1,7224-7242).
gagtgctcaggcagtactt

SEQ ID NO: 441890 - DNA, 19 bp, Mus musculus
  siRNA target sequence for Atbf1 (NM_007496.1,7326-7344).
ggttcagaaacactctatt

SEQ ID NO: 441891 - DNA, 19 bp, Mus musculus
  siRNA target sequence for Atbf1 (NM_007496.1,7404-7422).
gtctggaggaactcaagat

SEQ ID NO: 441892 - DNA, 19 bp, Mus musculus
  siRNA target sequence for Atbf1 (NM_007496.1,7591-7609).
ccttccaacccgtgtcata

SEQ ID NO: 441893 - DNA, 19 bp, Mus musculus
  siRNA target sequence for Atbf1 (NM_007496.1,7715-7733).
cggacgagcaacttgaatt

SEQ ID NO: 441894 - DNA, 19 bp, Mus musculus
  siRNA target sequence for Atbf1 (NM_007496.1,7716-7734).
ggacgagcaacttgaatta

SEQ ID NO: 441895 - DNA, 19 bp, Mus musculus
  siRNA target sequence for Atbf1 (NM_007496.1,7719-7737).
cgagcaacttgaattacca

SEQ ID NO: 441896 - DNA, 19 bp, Mus musculus
  siRNA target sequence for Atbf1 (NM_007496.1,7756-7774).
cgtgtttcagcgcatcttt

SEQ ID NO: 441897 - DNA, 19 bp, Mus musculus
  siRNA target sequence for Atbf1 (NM_007496.1,7984-8002).
cacagcggagactgatgaa

SEQ ID NO: 441898 - DNA, 19 bp, Mus musculus
  siRNA target sequence for Atbf1 (NM_007496.1,8179-8197).
gccggctgccccttcctta

SEQ ID NO: 441899 - DNA, 19 bp, Mus musculus
  siRNA target sequence for Atbf1 (NM_007496.1,8421-8439).
gtgcccagaaccagttcat

SEQ ID NO: 441900 - DNA, 19 bp, Mus musculus
  siRNA target sequence for Atbf1 (NM_007496.1,8473-8491).
gcctttcatgctgtttgat

SEQ ID NO: 441901 - DNA, 19 bp, Mus musculus
  siRNA target sequence for Atbf1 (NM_007496.1,8684-8702).
cgtttgaggacgaccataa

SEQ ID NO: 441902 - DNA, 19 bp, Mus musculus
  siRNA target sequence for Atbf1 (NM_007496.1,8703-8721).
ccccggagcagctggaaat

SEQ ID NO: 441903 - DNA, 19 bp, Mus musculus
  siRNA target sequence for Atbf1 (NM_007496.1,8748-8766).
ccaacccgacccgaaagat

SEQ ID NO: 441904 - DNA, 19 bp, Mus musculus
  siRNA target sequence for Atbf1 (NM_007496.1,8783-8801).
catgaggtgggcttgaaga

SEQ ID NO: 441905 - DNA, 19 bp, Mus musculus
  siRNA target sequence for Atbf1 (NM_007496.1,9110-9128).
ctctcgcccgtgagcaaaa

SEQ ID NO: 441906 - DNA, 19 bp, Mus musculus
  siRNA target sequence for Atbf1 (NM_007496.1,9114-9132).
cgcccgtgagcaaaaccat

SEQ ID NO: 441907 - DNA, 19 bp, Mus musculus
  siRNA target sequence for Atbf1 (NM_007496.1,9178-9196).
ggaagggatcgaagacttt

SEQ ID NO: 441908 - DNA, 19 bp, Mus musculus
  siRNA target sequence for Atbf1 (NM_007496.1,9207-9225).
ccatgtcctccgttaacct

SEQ ID NO: 441909 - DNA, 19 bp, Mus musculus
  siRNA target sequence for Atbf1 (NM_007496.1,9214-9232).
ctccgttaacctgaacttt

SEQ ID NO: 441910 - DNA, 19 bp, Mus musculus
  siRNA target sequence for Atbf1 (NM_007496.1,9216-9234).
ccgttaacctgaactttga

SEQ ID NO: 441911 - DNA, 19 bp, Mus musculus
  siRNA target sequence for Atbf1 (NM_007496.1,9268-9286).
ggtcaacaccgcaatcaca

SEQ ID NO: 441912 - DNA, 19 bp, Mus musculus
  siRNA target sequence for Atbf1 (NM_007496.1,9322-9340).
cgacagcgcaacaggaata

SEQ ID NO: 441913 - DNA, 19 bp, Mus musculus
  siRNA target sequence for Atbf1 (NM_007496.1,9341-9359).
gcgactgaaaccaaatctt

SEQ ID NO: 441914 - DNA, 19 bp, Mus musculus
  siRNA target sequence for Atbf1 (NM_007496.1,9399-9417).
caatgtccgagtatgaaga

SEQ ID NO: 441915 - DNA, 19 bp, Mus musculus
  siRNA target sequence for Atbf1 (NM_007496.1,9446-9464).
gccccgagcttttatagca

SEQ ID NO: 441916 - DNA, 19 bp, Mus musculus
  siRNA target sequence for Atbf1 (NM_007496.1,9447-9465).
ccccgagcttttatagcaa

SEQ ID NO: 441917 - DNA, 19 bp, Mus musculus
  siRNA target sequence for Atbf1 (NM_007496.1,9453-9471).
gcttttatagcaaggaata

SEQ ID NO: 441918 - DNA, 19 bp, Mus musculus
  siRNA target sequence for Atbf1 (NM_007496.1,9581-9599).
cgacctgggcagaaacgtt

SEQ ID NO: 441919 - DNA, 19 bp, Mus musculus
  siRNA target sequence for Atbf1 (NM_007496.1,9582-9600).
gacctgggcagaaacgttt

SEQ ID NO: 441920 - DNA, 19 bp, Mus musculus
  siRNA target sequence for Atbf1 (NM_007496.1,9596-9614).
cgttttcgcactcaaatga

SEQ ID NO: 441921 - DNA, 19 bp, Mus musculus
  siRNA target sequence for Atbf1 (NM_007496.1,9634-9652).
cctcaagtcatgctttaat

SEQ ID NO: 441922 - DNA, 19 bp, Mus musculus
  siRNA target sequence for Atbf1 (NM_007496.1,9683-9701).
gaggttctaggcaatgaca

SEQ ID NO: 441923 - DNA, 19 bp, Mus musculus
  siRNA target sequence for Atbf1 (NM_007496.1,9685-9703).
ggttctaggcaatgacatt

SEQ ID NO: 441924 - DNA, 19 bp, Mus musculus
  siRNA target sequence for Atbf1 (NM_007496.1,9793-9811).
gataaaccaaacgagttat

SEQ ID NO: 441925 - DNA, 19 bp, Mus musculus
  siRNA target sequence for Atbf1 (NM_007496.1,9834-9852).
ctttgtgtggcatcaagta

SEQ ID NO: 441926 - DNA, 19 bp, Mus musculus
  siRNA target sequence for Atbf1 (NM_007496.1,9867-9885).
ctgtacgtgaccatatctt

SEQ ID NO: 441927 - DNA, 19 bp, Mus musculus
  siRNA target sequence for Atbf1 (NM_007496.1,9869-9887).
gtacgtgaccatatctttt

SEQ ID NO: 441928 - DNA, 19 bp, Mus musculus
  siRNA target sequence for Atbf1 (NM_007496.1,9908-9926).
gttaaggacaccattggaa

SEQ ID NO: 441929 - DNA, 19 bp, Mus musculus
  siRNA target sequence for Atbf1 (NM_007496.1,9963-9981).
ccactgtacgccagttgat

SEQ ID NO: 441930 - DNA, 19 bp, Mus musculus
  siRNA target sequence for Atbf1 (NM_007496.1,9992-10010).
gagctggaccggatcaaga

SEQ ID NO: 441931 - DNA, 19 bp, Mus musculus
  siRNA target sequence for Atbf1 (NM_007496.1,10027-10045).
cggactggcagctcaacaa

SEQ ID NO: 441932 - DNA, 19 bp, Mus musculus
  siRNA target sequence for Atbf1 (NM_007496.1,10172-10190).
gccaacacagctttaacgt

SEQ ID NO: 441933 - DNA, 19 bp, Mus musculus
  siRNA target sequence for Atbf1 (NM_007496.1,10247-10265).
cccacatctggattaccaa

SEQ ID NO: 441934 - DNA, 19 bp, Mus musculus
  siRNA target sequence for Atbf1 (NM_007496.1,10249-10267).
cacatctggattaccaaat

SEQ ID NO: 441935 - DNA, 19 bp, Mus musculus
  siRNA target sequence for Atbf1 (NM_007496.1,10251-10269).
catctggattaccaaataa

SEQ ID NO: 441936 - DNA, 19 bp, Mus musculus
  siRNA target sequence for Atbf1 (NM_007496.1,10422-10440).
ccccgcagcagcaacgtaa

SEQ ID NO: 441937 - DNA, 19 bp, Mus musculus
  siRNA target sequence for Atbf1 (NM_007496.1,10432-10450).
gcaacgtaaggacaaagat

SEQ ID NO: 441938 - DNA, 19 bp, Mus musculus
  siRNA target sequence for Atbf1 (NM_007496.1,10680-10698).
cgggcttttctccttatta

SEQ ID NO: 441939 - DNA, 19 bp, Mus musculus
  siRNA target sequence for Atbf1 (NM_007496.1,11186-11204).
ccaaaggtgcagtacaagt

SEQ ID NO: 441940 - DNA, 19 bp, Mus musculus
  siRNA target sequence for Atbf1 (NM_007496.1,11187-11205).
caaaggtgcagtacaagtt

SEQ ID NO: 441941 - DNA, 19 bp, Mus musculus
  siRNA target sequence for Atbf1 (NM_007496.1,11494-11512).
caaagagcaccctagttta

SEQ ID NO: 441942 - DNA, 19 bp, Mus musculus
  siRNA target sequence for Atbf1 (NM_007496.1,11500-11518).
gcaccctagtttattacct

SEQ ID NO: 441943 - DNA, 19 bp, Mus musculus
  siRNA target sequence for Atbf1 (NM_007496.1,11677-11695).
cgcgaagcccccttctttt

SEQ ID NO: 441944 - DNA, 19 bp, Mus musculus
  siRNA target sequence for Atbf1 (NM_007496.1,11888-11906).
ggaacggacaccttcagat

SEQ ID NO: 441945 - DNA, 19 bp, Mus musculus
  siRNA target sequence for B130055A05 (NM_183193.1,574-592).
ggaaaaggcaattattgga

SEQ ID NO: 441946 - DNA, 19 bp, Mus musculus
  siRNA target sequence for B130055A05 (NM_183193.1,844-862).
ggtctggcccatgactttt

SEQ ID NO: 441947 - DNA, 19 bp, Mus musculus
  siRNA target sequence for B130055A05 (NM_183193.1,965-983).
ggatggggcacctcatcta

SEQ ID NO: 441948 - DNA, 19 bp, Mus musculus
  siRNA target sequence for B230358A15 (NM_172931.1,356-374).
ggaagatggatgccaaata

SEQ ID NO: 441949 - DNA, 19 bp, Mus musculus
  siRNA target sequence for B230358A15 (NM_172931.1,357-375).
gaagatggatgccaaatat

SEQ ID NO: 441950 - DNA, 19 bp, Mus musculus
  siRNA target sequence for B230358A15 (NM_172931.1,360-378).
gatggatgccaaatataca

SEQ ID NO: 441951 - DNA, 19 bp, Mus musculus
  siRNA target sequence for B230358A15 (NM_172931.1,379-397).
caaatgaaacaggactatt

SEQ ID NO: 441952 - DNA, 19 bp, Mus musculus
  siRNA target sequence for B230358A15 (NM_172931.1,388-406).
caggactattcaaacctat

SEQ ID NO: 441953 - DNA, 19 bp, Mus musculus
  siRNA target sequence for B230358A15 (NM_172931.1,390-408).
ggactattcaaacctatat

SEQ ID NO: 441954 - DNA, 19 bp, Mus musculus
  siRNA target sequence for B230358A15 (NM_172931.1,402-420).
cctatatcatgaagttaca

SEQ ID NO: 441955 - DNA, 19 bp, Mus musculus
  siRNA target sequence for B230358A15 (NM_172931.1,459-477).
gacacgggtactccatttt

SEQ ID NO: 441956 - DNA, 19 bp, Mus musculus
  siRNA target sequence for B230358A15 (NM_172931.1,461-479).
cacgggtactccattttat

SEQ ID NO: 441957 - DNA, 19 bp, Mus musculus
  siRNA target sequence for B230358A15 (NM_172931.1,560-578).
ctgaatgggatcatcagta

SEQ ID NO: 441958 - DNA, 19 bp, Mus musculus
  siRNA target sequence for B230358A15 (NM_172931.1,562-580).
gaatgggatcatcagtatt

SEQ ID NO: 441959 - DNA, 19 bp, Mus musculus
  siRNA target sequence for B230358A15 (NM_172931.1,633-651).
cgaactcgttgaagacaaa

SEQ ID NO: 441960 - DNA, 19 bp, Mus musculus
  siRNA target sequence for B230358A15 (NM_172931.1,671-689).
gagtcatgccaattttgaa

SEQ ID NO: 441961 - DNA, 19 bp, Mus musculus
  siRNA target sequence for B230358A15 (NM_172931.1,756-774).
gccagttcaggataaacct

SEQ ID NO: 441962 - DNA, 19 bp, Mus musculus
  siRNA target sequence for B230358A15 (NM_172931.1,757-775).
ccagttcaggataaaccta

SEQ ID NO: 441963 - DNA, 19 bp, Mus musculus
  siRNA target sequence for B230358A15 (NM_172931.1,758-776).
cagttcaggataaacctat

SEQ ID NO: 441964 - DNA, 19 bp, Mus musculus
  siRNA target sequence for B230358A15 (NM_172931.1,765-783).
ggataaacctatgaatgaa

SEQ ID NO: 441965 - DNA, 19 bp, Mus musculus
  siRNA target sequence for B230358A15 (NM_172931.1,856-874).
caagaacctaaggatattt

SEQ ID NO: 441966 - DNA, 19 bp, Mus musculus
  siRNA target sequence for B230358A15 (NM_172931.1,919-937).
gataaatcagacaatttat

SEQ ID NO: 441967 - DNA, 19 bp, Mus musculus
  siRNA target sequence for B230358A15 (NM_172931.1,926-944).
cagacaatttatataacaa

SEQ ID NO: 441968 - DNA, 19 bp, Mus musculus
  siRNA target sequence for B230358A15 (NM_172931.1,997-1015).
gagctaaattcattactat

SEQ ID NO: 441969 - DNA, 19 bp, Mus musculus
  siRNA target sequence for B230358A15 (NM_172931.1,1016-1034).
ctaggaaggcattgaatta

SEQ ID NO: 441970 - DNA, 19 bp, Mus musculus
  siRNA target sequence for Bach1 (NM_007520.1,347-365).
cttccactcgagaatcgta

SEQ ID NO: 441971 - DNA, 19 bp, Mus musculus
  siRNA target sequence for Bach1 (NM_007520.1,407-425).
ggtaacggttaaaggattt

SEQ ID NO: 441972 - DNA, 19 bp, Mus musculus
  siRNA target sequence for Bach1 (NM_007520.1,453-471).
gccaaactcattttaagta

SEQ ID NO: 441973 - DNA, 19 bp, Mus musculus
  siRNA target sequence for Bach1 (NM_007520.1,543-561).
cagtttctcaagtttaagt

SEQ ID NO: 441974 - DNA, 19 bp, Mus musculus
  siRNA target sequence for Bach1 (NM_007520.1,584-602).
gcaggaatgcgcaagaaaa

SEQ ID NO: 441975 - DNA, 19 bp, Mus musculus
  siRNA target sequence for Bach1 (NM_007520.1,585-603).
caggaatgcgcaagaaaaa

SEQ ID NO: 441976 - DNA, 19 bp, Mus musculus
  siRNA target sequence for Bach1 (NM_007520.1,659-677).
gaaagatctcgaaatcgat

SEQ ID NO: 441977 - DNA, 19 bp, Mus musculus
  siRNA target sequence for Bach1 (NM_007520.1,736-754).
ggtgtcagggcagtgtaaa

SEQ ID NO: 441978 - DNA, 19 bp, Mus musculus
  siRNA target sequence for Bach1 (NM_007520.1,741-759).
cagggcagtgtaaaagcat

SEQ ID NO: 441979 - DNA, 19 bp, Mus musculus
  siRNA target sequence for Bach1 (NM_007520.1,825-843).
ctggcattgccatctctat

SEQ ID NO: 441980 - DNA, 19 bp, Mus musculus
  siRNA target sequence for Bach1 (NM_007520.1,840-858).
ctatgccccaaatacagaa

SEQ ID NO: 441981 - DNA, 19 bp, Mus musculus
  siRNA target sequence for Bach1 (NM_007520.1,844-862).
gccccaaatacagaaagtt

SEQ ID NO: 441982 - DNA, 19 bp, Mus musculus
  siRNA target sequence for Bach1 (NM_007520.1,884-902).
caagatccgaactctagaa

SEQ ID NO: 441983 - DNA, 19 bp, Mus musculus
  siRNA target sequence for Bach1 (NM_007520.1,928-946).
cctctgtccagccaaatga

SEQ ID NO: 441984 - DNA, 19 bp, Mus musculus
  siRNA target sequence for Bach1 (NM_007520.1,987-1005).
gcagatttacacgtgattt

SEQ ID NO: 441985 - DNA, 19 bp, Mus musculus
  siRNA target sequence for Bach1 (NM_007520.1,988-1006).
cagatttacacgtgatttt

SEQ ID NO: 441986 - DNA, 19 bp, Mus musculus
  siRNA target sequence for Bach1 (NM_007520.1,1258-1276).
catcggaaaatcaggattt

SEQ ID NO: 441987 - DNA, 19 bp, Mus musculus
  siRNA target sequence for Bach1 (NM_007520.1,1261-1279).
cggaaaatcaggatttata

SEQ ID NO: 441988 - DNA, 19 bp, Mus musculus
  siRNA target sequence for Bach1 (NM_007520.1,1272-1290).
gatttatatctgaagtcta

SEQ ID NO: 441989 - DNA, 19 bp, Mus musculus
  siRNA target sequence for Bach1 (NM_007520.1,1288-1306).
ctagcatgggccctaaaga

SEQ ID NO: 441990 - DNA, 19 bp, Mus musculus
  siRNA target sequence for Bach1 (NM_007520.1,1291-1309).
gcatgggccctaaagaaga

SEQ ID NO: 441991 - DNA, 19 bp, Mus musculus
  siRNA target sequence for Bach1 (NM_007520.1,1527-1545).
ggccagcggactttcacaa

SEQ ID NO: 441992 - DNA, 19 bp, Mus musculus
  siRNA target sequence for Bach1 (NM_007520.1,1555-1573).
ccgtcaactgcccttttat

SEQ ID NO: 441993 - DNA, 19 bp, Mus musculus
  siRNA target sequence for Bach1 (NM_007520.1,1557-1575).
gtcaactgcccttttatca

SEQ ID NO: 441994 - DNA, 19 bp, Mus musculus
  siRNA target sequence for Bach1 (NM_007520.1,1559-1577).
caactgcccttttatcagt

SEQ ID NO: 441995 - DNA, 19 bp, Mus musculus
  siRNA target sequence for Bach1 (NM_007520.1,1617-1635).
ggaaactacgattatgtct

SEQ ID NO: 441996 - DNA, 19 bp, Mus musculus
  siRNA target sequence for Bach1 (NM_007520.1,1658-1676).
cccgtatgcttgtgtgatt

SEQ ID NO: 441997 - DNA, 19 bp, Mus musculus
  siRNA target sequence for Bach1 (NM_007520.1,1659-1677).
ccgtatgcttgtgtgatta

SEQ ID NO: 441998 - DNA, 19 bp, Mus musculus
  siRNA target sequence for Bach1 (NM_007520.1,1751-1769).
ggtgaagctgccattcaat

SEQ ID NO: 441999 - DNA, 19 bp, Mus musculus
  siRNA target sequence for Bach1 (NM_007520.1,1766-1784).
caatgcccaacggataatt

SEQ ID NO: 442000 - DNA, 19 bp, Mus musculus
  siRNA target sequence for Bach1 (NM_007520.1,1786-1804).
cgctctcacgaaatgattt

SEQ ID NO: 442001 - DNA, 19 bp, Mus musculus
  siRNA target sequence for Bach1 (NM_007520.1,1790-1808).
ctcacgaaatgatttccaa

SEQ ID NO: 442002 - DNA, 19 bp, Mus musculus
  siRNA target sequence for Bach1 (NM_007520.1,1800-1818).
gatttccaatccttgttga

SEQ ID NO: 442003 - DNA, 19 bp, Mus musculus
  siRNA target sequence for Bach1 (NM_007520.1,1841-1859).
gcagctcgactgtatccat

SEQ ID NO: 442004 - DNA, 19 bp, Mus musculus
  siRNA target sequence for Bach1 (NM_007520.1,2027-2045).
gaacctgaccggactttgt

SEQ ID NO: 442005 - DNA, 19 bp, Mus musculus
  siRNA target sequence for Bach1 (NM_007520.1,2119-2137).
gcccgctttcctttttaat

SEQ ID NO: 442006 - DNA, 19 bp, Mus musculus
  siRNA target sequence for Bach1 (NM_007520.1,2120-2138).
cccgctttcctttttaatt

SEQ ID NO: 442007 - DNA, 19 bp, Mus musculus
  siRNA target sequence for Bach1 (NM_007520.1,2161-2179).
ccgacggcgagcttgcttt

SEQ ID NO: 442008 - DNA, 19 bp, Mus musculus
  siRNA target sequence for Bach1 (NM_007520.1,2162-2180).
cgacggcgagcttgctttt

SEQ ID NO: 442009 - DNA, 19 bp, Mus musculus
  siRNA target sequence for Bach1 (NM_007520.1,2163-2181).
gacggcgagcttgctttta

SEQ ID NO: 442010 - DNA, 19 bp, Mus musculus
  siRNA target sequence for Bach2 (NM_007521.2,575-593).
ccgcatgcagtgaatactt

SEQ ID NO: 442011 - DNA, 19 bp, Mus musculus
  siRNA target sequence for Bach2 (NM_007521.2,606-624).
ggttggacagacgaaagat

SEQ ID NO: 442012 - DNA, 19 bp, Mus musculus
  siRNA target sequence for Bach2 (NM_007521.2,611-629).
gacagacgaaagatgactt

SEQ ID NO: 442013 - DNA, 19 bp, Mus musculus
  siRNA target sequence for Bach2 (NM_007521.2,817-835).
gaggatggcctgtttgttt

SEQ ID NO: 442014 - DNA, 19 bp, Mus musculus
  siRNA target sequence for Bach2 (NM_007521.2,1080-1098).
gacccagtaccctagatat

SEQ ID NO: 442015 - DNA, 19 bp, Mus musculus
  siRNA target sequence for Bach2 (NM_007521.2,1082-1100).
cccagtaccctagatataa

SEQ ID NO: 442016 - DNA, 19 bp, Mus musculus
  siRNA target sequence for Bach2 (NM_007521.2,1110-1128).
gctcgcgtgtaccaagaat

SEQ ID NO: 442017 - DNA, 19 bp, Mus musculus
  siRNA target sequence for Bach2 (NM_007521.2,1115-1133).
cgtgtaccaagaatgtcta

SEQ ID NO: 442018 - DNA, 19 bp, Mus musculus
  siRNA target sequence for Bach2 (NM_007521.2,1161-1179).
gtttgcgagcacattcagt

SEQ ID NO: 442019 - DNA, 19 bp, Mus musculus
  siRNA target sequence for Bach2 (NM_007521.2,1216-1234).
cccatgggacagattaaaa

SEQ ID NO: 442020 - DNA, 19 bp, Mus musculus
  siRNA target sequence for Bach2 (NM_007521.2,1326-1344).
cgagatggaccgaaaacaa

SEQ ID NO: 442021 - DNA, 19 bp, Mus musculus
  siRNA target sequence for Bach2 (NM_007521.2,1429-1447).
cggtctctgttcggtataa

SEQ ID NO: 442022 - DNA, 19 bp, Mus musculus
  siRNA target sequence for Bach2 (NM_007521.2,1433-1451).
ctctgttcggtataacgaa

SEQ ID NO: 442023 - DNA, 19 bp, Mus musculus
  siRNA target sequence for Bach2 (NM_007521.2,1508-1526).
cagcgtgccctttcaacaa

SEQ ID NO: 442024 - DNA, 19 bp, Mus musculus
  siRNA target sequence for Bach2 (NM_007521.2,1541-1559).
gtgaccttaaaactgatta

SEQ ID NO: 442025 - DNA, 19 bp, Mus musculus
  siRNA target sequence for Bach2 (NM_007521.2,1543-1561).
gaccttaaaactgattaca

SEQ ID NO: 442026 - DNA, 19 bp, Mus musculus
  siRNA target sequence for Bach2 (NM_007521.2,1562-1580).
cccctttggcagggaatta

SEQ ID NO: 442027 - DNA, 19 bp, Mus musculus
  siRNA target sequence for Bach2 (NM_007521.2,1756-1774).
caagtccgaccccagatta

SEQ ID NO: 442028 - DNA, 19 bp, Mus musculus
  siRNA target sequence for Bach2 (NM_007521.2,1759-1777).
gtccgaccccagattaaat

SEQ ID NO: 442029 - DNA, 19 bp, Mus musculus
  siRNA target sequence for Bach2 (NM_007521.2,1763-1781).
gaccccagattaaatgtga

SEQ ID NO: 442030 - DNA, 19 bp, Mus musculus
  siRNA target sequence for Bach2 (NM_007521.2,1782-1800).
gcagtcttacggaaccaat

SEQ ID NO: 442031 - DNA, 19 bp, Mus musculus
  siRNA target sequence for Bach2 (NM_007521.2,1783-1801).
cagtcttacggaaccaatt

SEQ ID NO: 442032 - DNA, 19 bp, Mus musculus
  siRNA target sequence for Bach2 (NM_007521.2,1883-1901).
cttttcctgtcgatcagat

SEQ ID NO: 442033 - DNA, 19 bp, Mus musculus
  siRNA target sequence for Bach2 (NM_007521.2,2033-2051).
ggaagctggactgtattca

SEQ ID NO: 442034 - DNA, 19 bp, Mus musculus
  siRNA target sequence for Bach2 (NM_007521.2,2077-2095).
ctggtgtgcgagaaggaaa

SEQ ID NO: 442035 - DNA, 19 bp, Mus musculus
  siRNA target sequence for Bach2 (NM_007521.2,2079-2097).
ggtgtgcgagaaggaaaaa

SEQ ID NO: 442036 - DNA, 19 bp, Mus musculus
  siRNA target sequence for Bach2 (NM_007521.2,2084-2102).
gcgagaaggaaaaactgtt

SEQ ID NO: 442037 - DNA, 19 bp, Mus musculus
  siRNA target sequence for Bach2 (NM_007521.2,2137-2155).
gagctcctggacaactttt

SEQ ID NO: 442038 - DNA, 19 bp, Mus musculus
  siRNA target sequence for Bach2 (NM_007521.2,2140-2158).
ctcctggacaacttttcct

SEQ ID NO: 442039 - DNA, 19 bp, Mus musculus
  siRNA target sequence for Bach2 (NM_007521.2,2532-2550).
cgaacagcccaggaaagat

SEQ ID NO: 442040 - DNA, 19 bp, Mus musculus
  siRNA target sequence for Bapx1 (NM_007524.1,319-337).
caggcgatcctcaacaaga

SEQ ID NO: 442041 - DNA, 19 bp, Mus musculus
  siRNA target sequence for Bapx1 (NM_007524.1,323-341).
cgatcctcaacaagaaaga

SEQ ID NO: 442042 - DNA, 19 bp, Mus musculus
  siRNA target sequence for Bapx1 (NM_007524.1,1205-1223).
cctactactacccttacta

SEQ ID NO: 442043 - DNA, 19 bp, Mus musculus
  siRNA target sequence for Barhl1 (NM_019446.2,1169-1187).
cgagacaagctggacaaaa

SEQ ID NO: 442044 - DNA, 19 bp, Mus musculus
  siRNA target sequence for Barhl1 (NM_019446.2,1203-1221).
catcagactctgagtacaa

SEQ ID NO: 442045 - DNA, 19 bp, Mus musculus
  siRNA target sequence for Barhl1 (NM_019446.2,1490-1508).
gcggaggcaggcaattact

SEQ ID NO: 442046 - DNA, 19 bp, Mus musculus
  siRNA target sequence for Barhl1 (NM_019446.2,1509-1527).
cggcgctccagagaatgtt

SEQ ID NO: 442047 - DNA, 19 bp, Mus musculus
  siRNA target sequence for Barhl1 (NM_019446.2,1575-1593).
ccggtgccgcactctatct

SEQ ID NO: 442048 - DNA, 19 bp, Mus musculus
  siRNA target sequence for Barhl1 (NM_019446.2,1577-1595).
ggtgccgcactctatctgt

SEQ ID NO: 442049 - DNA, 19 bp, Mus musculus
  siRNA target sequence for Barhl1 (NM_019446.2,1578-1596).
gtgccgcactctatctgta

SEQ ID NO: 442050 - DNA, 19 bp, Mus musculus
  siRNA target sequence for Barx1 (NM_007526.1,253-271).
cggagtcgcaccgtattca

SEQ ID NO: 442051 - DNA, 19 bp, Mus musculus
  siRNA target sequence for Barx1 (NM_007526.1,255-273).
gagtcgcaccgtattcact

SEQ ID NO: 442052 - DNA, 19 bp, Mus musculus
  siRNA target sequence for Barx1 (NM_007526.1,324-342).
ctctacccctgacagaata

SEQ ID NO: 442053 - DNA, 19 bp, Mus musculus
  siRNA target sequence for Barx1 (NM_007526.1,326-344).
ctacccctgacagaataga

SEQ ID NO: 442054 - DNA, 19 bp, Mus musculus
  siRNA target sequence for Barx1 (NM_007526.1,378-396).
ggtgaagacgtggtatcaa

SEQ ID NO: 442055 - DNA, 19 bp, Mus musculus
  siRNA target sequence for Barx1 (NM_007526.1,559-577).
gagcccagcgaccgaaatt

SEQ ID NO: 442056 - DNA, 19 bp, Mus musculus
  siRNA target sequence for Barx2 (NM_013800.1,99-117).
gcgactactttgagaaact

SEQ ID NO: 442057 - DNA, 19 bp, Mus musculus
  siRNA target sequence for Barx2 (NM_013800.1,100-118).
cgactactttgagaaactt

SEQ ID NO: 442058 - DNA, 19 bp, Mus musculus
  siRNA target sequence for Barx2 (NM_013800.1,265-283).
gggactcaccccagtgtta

SEQ ID NO: 442059 - DNA, 19 bp, Mus musculus
  siRNA target sequence for Barx2 (NM_013800.1,529-547).
gcaagtgaagacttggtat

SEQ ID NO: 442060 - DNA, 19 bp, Mus musculus
  siRNA target sequence for Barx2 (NM_013800.1,568-586).
gaagaagatggtccttaaa

SEQ ID NO: 442061 - DNA, 19 bp, Mus musculus
  siRNA target sequence for Barx2 (NM_013800.1,571-589).
gaagatggtccttaaaggt

SEQ ID NO: 442062 - DNA, 19 bp, Mus musculus
  siRNA target sequence for Barx2 (NM_013800.1,621-639).
gccctaagaagaattccat

SEQ ID NO: 442063 - DNA, 19 bp, Mus musculus
  siRNA target sequence for Barx2 (NM_013800.1,622-640).
ccctaagaagaattccatt

SEQ ID NO: 442064 - DNA, 19 bp, Mus musculus
  siRNA target sequence for BC040205 (NM_172941.2,744-762).
cgcctggggctctagtaca

SEQ ID NO: 442065 - DNA, 19 bp, Mus musculus
  siRNA target sequence for BC040205 (NM_172941.2,796-814).
gcctagcgaagacttagtt

SEQ ID NO: 442066 - DNA, 19 bp, Mus musculus
  siRNA target sequence for BC040205 (NM_172941.2,900-918).
ccccatttaaggacatgat

SEQ ID NO: 442067 - DNA, 19 bp, Mus musculus
  siRNA target sequence for BC040205 (NM_172941.2,968-986).
ggtttctatggcgaattca

SEQ ID NO: 442068 - DNA, 19 bp, Mus musculus
  siRNA target sequence for BC040205 (NM_172941.2,969-987).
gtttctatggcgaattcat

SEQ ID NO: 442069 - DNA, 19 bp, Mus musculus
  siRNA target sequence for BC040205 (NM_172941.2,973-991).
ctatggcgaattcatcatt

SEQ ID NO: 442070 - DNA, 19 bp, Mus musculus
  siRNA target sequence for BC040205 (NM_172941.2,985-1003).
catcattggggaagactat

SEQ ID NO: 442071 - DNA, 19 bp, Mus musculus
  siRNA target sequence for BC040205 (NM_172941.2,1432-1450).
ggtgcaaacctcacagaaa

SEQ ID NO: 442072 - DNA, 19 bp, Mus musculus
  siRNA target sequence for BC040205 (NM_172941.2,1525-1543).
ggagcagaagccacacaaa

SEQ ID NO: 442073 - DNA, 19 bp, Mus musculus
  siRNA target sequence for BC040205 (NM_172941.2,1550-1568).
gtgtgcggggagttattca

SEQ ID NO: 442074 - DNA, 19 bp, Mus musculus
  siRNA target sequence for BC040205 (NM_172941.2,1552-1570).
gtgcggggagttattcagt

SEQ ID NO: 442075 - DNA, 19 bp, Mus musculus
  siRNA target sequence for BC040205 (NM_172941.2,1855-1873).
ccgtagacactgtcatcta

SEQ ID NO: 442076 - DNA, 19 bp, Mus musculus
  siRNA target sequence for BC040205 (NM_172941.2,1856-1874).
cgtagacactgtcatctaa

SEQ ID NO: 442077 - DNA, 19 bp, Mus musculus
  siRNA target sequence for BC040205 (NM_172941.2,1857-1875).
gtagacactgtcatctaaa

SEQ ID NO: 442078 - DNA, 19 bp, Mus musculus
  siRNA target sequence for BC040205 (NM_172941.2,1860-1878).
gacactgtcatctaaagga

SEQ ID NO: 442079 - DNA, 19 bp, Mus musculus
  siRNA target sequence for BC040205 (NM_172941.2,1901-1919).
cggtactgtgtcaaaactt

SEQ ID NO: 442080 - DNA, 19 bp, Mus musculus
  siRNA target sequence for BC040205 (NM_172941.2,1912-1930).
caaaactttccgacagaat

SEQ ID NO: 442081 - DNA, 19 bp, Mus musculus
  siRNA target sequence for BC040205 (NM_172941.2,1917-1935).
ctttccgacagaattatga

SEQ ID NO: 442082 - DNA, 19 bp, Mus musculus
  siRNA target sequence for BC040205 (NM_172941.2,1979-1997).
caggctctcaactcatact

SEQ ID NO: 442083 - DNA, 19 bp, Mus musculus
  siRNA target sequence for Bmyc (NM_023326.1,128-146).
cgcgacctggactatgact

SEQ ID NO: 442084 - DNA, 19 bp, Mus musculus
  siRNA target sequence for Bmyc (NM_023326.1,147-165).
cggtgcagccatacttcat

SEQ ID NO: 442085 - DNA, 19 bp, Mus musculus
  siRNA target sequence for Bpnt1 (NM_011794.2,310-328).
cccgaagctgaccatcata

SEQ ID NO: 442086 - DNA, 19 bp, Mus musculus
  siRNA target sequence for Bpnt1 (NM_011794.2,417-435).
cgcagtacagtgctatcaa

SEQ ID NO: 442087 - DNA, 19 bp, Mus musculus
  siRNA target sequence for Bpnt1 (NM_011794.2,515-533).
gttctcattgggattgctt

SEQ ID NO: 442088 - DNA, 19 bp, Mus musculus
  siRNA target sequence for Bpnt1 (NM_011794.2,671-689).
gccgggaagcacattatca

SEQ ID NO: 442089 - DNA, 19 bp, Mus musculus
  siRNA target sequence for Bpnt1 (NM_011794.2,673-691).
cgggaagcacattatcaca

SEQ ID NO: 442090 - DNA, 19 bp, Mus musculus
  siRNA target sequence for Bpnt1 (NM_011794.2,770-788).
ggagcaggaaacaagatta

SEQ ID NO: 442091 - DNA, 19 bp, Mus musculus
  siRNA target sequence for Bpnt1 (NM_011794.2,912-930).
ggaatgccctgcagtacaa

SEQ ID NO: 442092 - DNA, 19 bp, Mus musculus
  siRNA target sequence for Bpnt1 (NM_011794.2,976-994).
gaggaactacgagtactat

SEQ ID NO: 442093 - DNA, 19 bp, Mus musculus
  siRNA target sequence for Bpnt1 (NM_011794.2,1004-1022).
gttccagagtcggtcaaaa

SEQ ID NO: 442094 - DNA, 19 bp, Mus musculus
  siRNA target sequence for Bsx (NM_178245.2,94-112).
cagaggcccacgtcgtttt

SEQ ID NO: 442095 - DNA, 19 bp, Mus musculus
  siRNA target sequence for Bsx (NM_178245.2,189-207).
ctctagggtgcctttgcta

SEQ ID NO: 442096 - DNA, 19 bp, Mus musculus
  siRNA target sequence for Bsx (NM_178245.2,194-212).
gggtgcctttgctagacta

SEQ ID NO: 442097 - DNA, 19 bp, Mus musculus
  siRNA target sequence for Bsx (NM_178245.2,195-213).
ggtgcctttgctagactat

SEQ ID NO: 442098 - DNA, 19 bp, Mus musculus
  siRNA target sequence for Bsx (NM_178245.2,415-433).
ctctccggcctggagaaaa

SEQ ID NO: 442099 - DNA, 19 bp, Mus musculus
  siRNA target sequence for Bsx (NM_178245.2,419-437).
ccggcctggagaaaaggtt

SEQ ID NO: 442100 - DNA, 19 bp, Mus musculus
  siRNA target sequence for Bsx (NM_178245.2,668-686).
gtgccttcgtgcttactga

SEQ ID NO: 442101 - DNA, 19 bp, Mus musculus
  siRNA target sequence for C130041O22Rik (NM_030708.1,202-220).
cggatgagcgcaaaagtga

SEQ ID NO: 442102 - DNA, 19 bp, Mus musculus
  siRNA target sequence for C130041O22Rik (NM_030708.1,203-221).
ggatgagcgcaaaagtgaa

SEQ ID NO: 442103 - DNA, 19 bp, Mus musculus
  siRNA target sequence for C130041O22Rik (NM_030708.1,279-297).
gaaataccctgcaacgaat

SEQ ID NO: 442104 - DNA, 19 bp, Mus musculus
  siRNA target sequence for C130041O22Rik (NM_030708.1,293-311).
cgaatgtgccacttctttt

SEQ ID NO: 442105 - DNA, 19 bp, Mus musculus
  siRNA target sequence for C130041O22Rik (NM_030708.1,312-330).
cccagtttacagaaatata

SEQ ID NO: 442106 - DNA, 19 bp, Mus musculus
  siRNA target sequence for C130041O22Rik (NM_030708.1,316-334).
gtttacagaaatatatgga

SEQ ID NO: 442107 - DNA, 19 bp, Mus musculus
  siRNA target sequence for C130041O22Rik (NM_030708.1,404-422).
cagtgatgtggaaaactta

SEQ ID NO: 442108 - DNA, 19 bp, Mus musculus
  siRNA target sequence for C130041O22Rik (NM_030708.1,419-437).
cttaacaggggagatagtt

SEQ ID NO: 442109 - DNA, 19 bp, Mus musculus
  siRNA target sequence for C130041O22Rik (NM_030708.1,424-442).
caggggagatagtttacca

SEQ ID NO: 442110 - DNA, 19 bp, Mus musculus
  siRNA target sequence for C130041O22Rik (NM_030708.1,447-465).
gatggatcagcgtatataa

SEQ ID NO: 442111 - DNA, 19 bp, Mus musculus
  siRNA target sequence for C130041O22Rik (NM_030708.1,451-469).
gatcagcgtatataattga

SEQ ID NO: 442112 - DNA, 19 bp, Mus musculus
  siRNA target sequence for C130041O22Rik (NM_030708.1,505-523).
gggcaaacagcaaactctt

SEQ ID NO: 442113 - DNA, 19 bp, Mus musculus
  siRNA target sequence for C130041O22Rik (NM_030708.1,506-524).
ggcaaacagcaaactcttt

SEQ ID NO: 442114 - DNA, 19 bp, Mus musculus
  siRNA target sequence for C130041O22Rik (NM_030708.1,637-655).
catccctcgggaaaccatt

SEQ ID NO: 442115 - DNA, 19 bp, Mus musculus
  siRNA target sequence for C130041O22Rik (NM_030708.1,674-692).
cccaaatacctcagcatta

SEQ ID NO: 442116 - DNA, 19 bp, Mus musculus
  siRNA target sequence for C130041O22Rik (NM_030708.1,703-721).
gtcctgtgttgcacagttt

SEQ ID NO: 442117 - DNA, 19 bp, Mus musculus
  siRNA target sequence for C130041O22Rik (NM_030708.1,713-731).
gcacagtttccgtgtctat

SEQ ID NO: 442118 - DNA, 19 bp, Mus musculus
  siRNA target sequence for C130041O22Rik (NM_030708.1,737-755).
ccgacacaagagagagaaa

SEQ ID NO: 442119 - DNA, 19 bp, Mus musculus
  siRNA target sequence for C130041O22Rik (NM_030708.1,905-923).
ctatatcaggtcatttgta

SEQ ID NO: 442120 - DNA, 19 bp, Mus musculus
  siRNA target sequence for C130041O22Rik (NM_030708.1,991-1009).
gcgtctccgccataataca

SEQ ID NO: 442121 - DNA, 19 bp, Mus musculus
  siRNA target sequence for C130041O22Rik (NM_030708.1,1077-1095).
cccaatttttctactacaa

SEQ ID NO: 442122 - DNA, 19 bp, Mus musculus
  siRNA target sequence for C130041O22Rik (NM_030708.1,1078-1096).
ccaatttttctactacaaa

SEQ ID NO: 442123 - DNA, 19 bp, Mus musculus
  siRNA target sequence for C130041O22Rik (NM_030708.1,1113-1131).
ccaaccttccgcggtttat

SEQ ID NO: 442124 - DNA, 19 bp, Mus musculus
  siRNA target sequence for C130041O22Rik (NM_030708.1,1126-1144).
gtttatggagcgcttttca

SEQ ID NO: 442125 - DNA, 19 bp, Mus musculus
  siRNA target sequence for C130041O22Rik (NM_030708.1,1132-1150).
ggagcgcttttcatgttga

SEQ ID NO: 442126 - DNA, 19 bp, Mus musculus
  siRNA target sequence for C130041O22Rik (NM_030708.1,1133-1151).
gagcgcttttcatgttgaa

SEQ ID NO: 442127 - DNA, 19 bp, Mus musculus
  siRNA target sequence for C130041O22Rik (NM_030708.1,1270-1288).
ggctgtctagtttagtagt

SEQ ID NO: 442128 - DNA, 19 bp, Mus musculus
  siRNA target sequence for C130041O22Rik (NM_030708.1,1284-1302).
gtagtgaacaccccaatta

SEQ ID NO: 442129 - DNA, 19 bp, Mus musculus
  siRNA target sequence for C130041O22Rik (NM_030708.1,1287-1305).
gtgaacaccccaattacct

SEQ ID NO: 442130 - DNA, 19 bp, Mus musculus
  siRNA target sequence for C130041O22Rik (NM_030708.1,1308-1326).
gtctccctcagccacttat

SEQ ID NO: 442131 - DNA, 19 bp, Mus musculus
  siRNA target sequence for C130041O22Rik (NM_030708.1,1313-1331).
cctcagccacttatcatct

SEQ ID NO: 442132 - DNA, 19 bp, Mus musculus
  siRNA target sequence for C130041O22Rik (NM_030708.1,1413-1431).
gtggggtgccctgtcaaaa

SEQ ID NO: 442133 - DNA, 19 bp, Mus musculus
  siRNA target sequence for C130041O22Rik (NM_030708.1,1418-1436).
gtgccctgtcaaaagtgaa

SEQ ID NO: 442134 - DNA, 19 bp, Mus musculus
  siRNA target sequence for C130041O22Rik (NM_030708.1,1458-1476).
gatgaagaggatgcatatt

SEQ ID NO: 442135 - DNA, 19 bp, Mus musculus
  siRNA target sequence for C130041O22Rik (NM_030708.1,1487-1505).
cgatgacgaggaagtatta

SEQ ID NO: 442136 - DNA, 19 bp, Mus musculus
  siRNA target sequence for C130041O22Rik (NM_030708.1,1581-1599).
gtgctaaaatttattgaaa

SEQ ID NO: 442137 - DNA, 19 bp, Mus musculus
  siRNA target sequence for C130041O22Rik (NM_030708.1,1610-1628).
gtcctcctcggggactatt

SEQ ID NO: 442138 - DNA, 19 bp, Mus musculus
  siRNA target sequence for C130041O22Rik (NM_030708.1,1613-1631).
ctcctcggggactattgct

SEQ ID NO: 442139 - DNA, 19 bp, Mus musculus
  siRNA target sequence for C130041O22Rik (NM_030708.1,1680-1698).
ggcaacgttactaatagct

SEQ ID NO: 442140 - DNA, 19 bp, Mus musculus
  siRNA target sequence for C130041O22Rik (NM_030708.1,1681-1699).
gcaacgttactaatagcta

SEQ ID NO: 442141 - DNA, 19 bp, Mus musculus
  siRNA target sequence for C130041O22Rik (NM_030708.1,1682-1700).
caacgttactaatagctat

SEQ ID NO: 442142 - DNA, 19 bp, Mus musculus
  siRNA target sequence for C130041O22Rik (NM_030708.1,1686-1704).
gttactaatagctatagca

SEQ ID NO: 442143 - DNA, 19 bp, Mus musculus
  siRNA target sequence for C130041O22Rik (NM_030708.1,1727-1745).
cggaagtatcagtagagat

SEQ ID NO: 442144 - DNA, 19 bp, Mus musculus
  siRNA target sequence for C130041O22Rik (NM_030708.1,1782-1800).
gacgaggacagttcaacaa

SEQ ID NO: 442145 - DNA, 19 bp, Mus musculus
  siRNA target sequence for C130041O22Rik (NM_030708.1,1920-1938).
cttggtggtcacatgacta

SEQ ID NO: 442146 - DNA, 19 bp, Mus musculus
  siRNA target sequence for C130041O22Rik (NM_030708.1,1923-1941).
ggtggtcacatgactatga

SEQ ID NO: 442147 - DNA, 19 bp, Mus musculus
  siRNA target sequence for C130041O22Rik (NM_030708.1,2047-2065).
caggtggctcttgtgttta

SEQ ID NO: 442148 - DNA, 19 bp, Mus musculus
  siRNA target sequence for C130041O22Rik (NM_030708.1,2136-2154).
cgttgtgaggtttgtaact

SEQ ID NO: 442149 - DNA, 19 bp, Mus musculus
  siRNA target sequence for C130041O22Rik (NM_030708.1,2265-2283).
gctccaacccctaacacta

SEQ ID NO: 442150 - DNA, 19 bp, Mus musculus
  siRNA target sequence for C130041O22Rik (NM_030708.1,2628-2646).
ggagagctgtcaccttata

SEQ ID NO: 442151 - DNA, 19 bp, Mus musculus
  siRNA target sequence for C130041O22Rik (NM_030708.1,2631-2649).
gagctgtcaccttatatca

SEQ ID NO: 442152 - DNA, 19 bp, Mus musculus
  siRNA target sequence for C130041O22Rik (NM_030708.1,2707-2725).
gcctggaggctctaagtgt

SEQ ID NO: 442153 - DNA, 19 bp, Mus musculus
  siRNA target sequence for C130041O22Rik (NM_030708.1,2759-2777).
ggaatggagagctgtaatt

SEQ ID NO: 442154 - DNA, 19 bp, Mus musculus
  siRNA target sequence for C130041O22Rik (NM_030708.1,2769-2787).
gctgtaattggagatatct

SEQ ID NO: 442155 - DNA, 19 bp, Mus musculus
  siRNA target sequence for C130041O22Rik (NM_030708.1,2770-2788).
ctgtaattggagatatcta

SEQ ID NO: 442156 - DNA, 19 bp, Mus musculus
  siRNA target sequence for C130041O22Rik (NM_030708.1,2845-2863).
gcaagactgataagcatat

SEQ ID NO: 442157 - DNA, 19 bp, Mus musculus
  siRNA target sequence for C130041O22Rik (NM_030708.1,2946-2964).
cctgttcacctaaagtgta

SEQ ID NO: 442158 - DNA, 19 bp, Mus musculus
  siRNA target sequence for C130041O22Rik (NM_030708.1,2983-3001).
ccaacagtgtggataaatt

SEQ ID NO: 442159 - DNA, 19 bp, Mus musculus
  siRNA target sequence for C130041O22Rik (NM_030708.1,2984-3002).
caacagtgtggataaatta

SEQ ID NO: 442160 - DNA, 19 bp, Mus musculus
  siRNA target sequence for C130041O22Rik (NM_030708.1,2987-3005).
cagtgtggataaattacgt

SEQ ID NO: 442161 - DNA, 19 bp, Mus musculus
  siRNA target sequence for C130041O22Rik (NM_030708.1,3006-3024).
ctgcatactaccaatcaca

SEQ ID NO: 442162 - DNA, 19 bp, Mus musculus
  siRNA target sequence for C130041O22Rik (NM_030708.1,3066-3084).
caagagggtgcggtgaatt

SEQ ID NO: 442163 - DNA, 19 bp, Mus musculus
  siRNA target sequence for C130041O22Rik (NM_030708.1,3117-3135).
gattactcctccaagatca

SEQ ID NO: 442164 - DNA, 19 bp, Mus musculus
  siRNA target sequence for C130041O22Rik (NM_030708.1,3127-3145).
ccaagatcaagttaaacct

SEQ ID NO: 442165 - DNA, 19 bp, Mus musculus
  siRNA target sequence for C130041O22Rik (NM_030708.1,3128-3146).
caagatcaagttaaaccta

SEQ ID NO: 442166 - DNA, 19 bp, Mus musculus
  siRNA target sequence for C130041O22Rik (NM_030708.1,3270-3288).
ccagcgaatgagcttgaaa

SEQ ID NO: 442167 - DNA, 19 bp, Mus musculus
  siRNA target sequence for C130041O22Rik (NM_030708.1,3313-3331).
gtgaggacgaacttataga

SEQ ID NO: 442168 - DNA, 19 bp, Mus musculus
  siRNA target sequence for C130041O22Rik (NM_030708.1,3565-3583).
caaaacctacagaggataa

SEQ ID NO: 442169 - DNA, 19 bp, Mus musculus
  siRNA target sequence for C130041O22Rik (NM_030708.1,3594-3612).
cctgaacagttctatcagt

SEQ ID NO: 442170 - DNA, 19 bp, Mus musculus
  siRNA target sequence for C130041O22Rik (NM_030708.1,3781-3799).
gtgtggagaagctgcttat

SEQ ID NO: 442171 - DNA, 19 bp, Mus musculus
  siRNA target sequence for C130041O22Rik (NM_030708.1,3931-3949).
cagtggatgacaaaagcat

SEQ ID NO: 442172 - DNA, 19 bp, Mus musculus
  siRNA target sequence for C130041O22Rik (NM_030708.1,4022-4040).
ggaggcatcagaatggaat

SEQ ID NO: 442173 - DNA, 19 bp, Mus musculus
  siRNA target sequence for C130041O22Rik (NM_030708.1,4023-4041).
gaggcatcagaatggaata

SEQ ID NO: 442174 - DNA, 19 bp, Mus musculus
  siRNA target sequence for C130041O22Rik (NM_030708.1,4064-4082).
catctcagatgctctacaa

SEQ ID NO: 442175 - DNA, 19 bp, Mus musculus
  siRNA target sequence for C130041O22Rik (NM_030708.1,4122-4140).
gtctccgaccgccatgttt

SEQ ID NO: 442176 - DNA, 19 bp, Mus musculus
  siRNA target sequence for C130041O22Rik (NM_030708.1,4126-4144).
ccgaccgccatgtttataa

SEQ ID NO: 442177 - DNA, 19 bp, Mus musculus
  siRNA target sequence for C130041O22Rik (NM_030708.1,4184-4202).
gcagaagcttcagatacat

SEQ ID NO: 442178 - DNA, 19 bp, Mus musculus
  siRNA target sequence for C130041O22Rik (NM_030708.1,4196-4214).
gatacattcccagtatcat

SEQ ID NO: 442179 - DNA, 19 bp, Mus musculus
  siRNA target sequence for C130041O22Rik (NM_030708.1,4260-4278).
cgtacattccaggctttaa

SEQ ID NO: 442180 - DNA, 19 bp, Mus musculus
  siRNA target sequence for C130041O22Rik (NM_030708.1,4391-4409).
ggatgaccatggcatagat

SEQ ID NO: 442181 - DNA, 19 bp, Mus musculus
  siRNA target sequence for C130041O22Rik (NM_030708.1,4511-4529).
gcggaccttaccttttaga

SEQ ID NO: 442182 - DNA, 19 bp, Mus musculus
  siRNA target sequence for C130041O22Rik (NM_030708.1,4512-4530).
cggaccttaccttttagaa

SEQ ID NO: 442183 - DNA, 19 bp, Mus musculus
  siRNA target sequence for C130041O22Rik (NM_030708.1,4513-4531).
ggaccttaccttttagaaa

SEQ ID NO: 442184 - DNA, 19 bp, Mus musculus
  siRNA target sequence for C130041O22Rik (NM_030708.1,4566-4584).
ccatctcgtccttacaagt

SEQ ID NO: 442185 - DNA, 19 bp, Mus musculus
  siRNA target sequence for C130041O22Rik (NM_030708.1,4590-4608).
gtgtgtaaagagtcattta

SEQ ID NO: 442186 - DNA, 19 bp, Mus musculus
  siRNA target sequence for C130041O22Rik (NM_030708.1,4625-4643).
cttggtccattataattca

SEQ ID NO: 442187 - DNA, 19 bp, Mus musculus
  siRNA target sequence for C130041O22Rik (NM_030708.1,4644-4662).
gtgtctcacttgcataagt

SEQ ID NO: 442188 - DNA, 19 bp, Mus musculus
  siRNA target sequence for C130041O22Rik (NM_030708.1,4648-4666).
ctcacttgcataagttgaa

SEQ ID NO: 442189 - DNA, 19 bp, Mus musculus
  siRNA target sequence for C130041O22Rik (NM_030708.1,4650-4668).
cacttgcataagttgaaaa

SEQ ID NO: 442190 - DNA, 19 bp, Mus musculus
  siRNA target sequence for C130041O22Rik (NM_030708.1,4655-4673).
gcataagttgaaaaaggtt

SEQ ID NO: 442191 - DNA, 19 bp, Mus musculus
  siRNA target sequence for C130041O22Rik (NM_030708.1,4656-4674).
cataagttgaaaaaggttt

SEQ ID NO: 442192 - DNA, 19 bp, Mus musculus
  siRNA target sequence for C130041O22Rik (NM_030708.1,4708-4726).
ccaatagcagcacagataa

SEQ ID NO: 442193 - DNA, 19 bp, Mus musculus
  siRNA target sequence for C130041O22Rik (NM_030708.1,4722-4740).
gataataagccctacaagt

SEQ ID NO: 442194 - DNA, 19 bp, Mus musculus
  siRNA target sequence for C130041O22Rik (NM_030708.1,4798-4816).
cagtgctccaccagacaaa

SEQ ID NO: 442195 - DNA, 19 bp, Mus musculus
  siRNA target sequence for C130041O22Rik (NM_030708.1,4891-4909).
ctggccaagggatgttaga

SEQ ID NO: 442196 - DNA, 19 bp, Mus musculus
  siRNA target sequence for C130041O22Rik (NM_030708.1,4947-4965).
cacttagatgccaaagaat

SEQ ID NO: 442197 - DNA, 19 bp, Mus musculus
  siRNA target sequence for C130041O22Rik (NM_030708.1,4977-4995).
caaactcccgaattaatct

SEQ ID NO: 442198 - DNA, 19 bp, Mus musculus
  siRNA target sequence for C130041O22Rik (NM_030708.1,5190-5208).
cctggggcagagtttagct

SEQ ID NO: 442199 - DNA, 19 bp, Mus musculus
  siRNA target sequence for C130041O22Rik (NM_030708.1,5191-5209).
ctggggcagagtttagctt

SEQ ID NO: 442200 - DNA, 19 bp, Mus musculus
  siRNA target sequence for C130041O22Rik (NM_030708.1,5443-5461).
caagcaaactgttgaaaca

SEQ ID NO: 442201 - DNA, 19 bp, Mus musculus
  siRNA target sequence for C130041O22Rik (NM_030708.1,5446-5464).
gcaaactgttgaaacaaga

SEQ ID NO: 442202 - DNA, 19 bp, Mus musculus
  siRNA target sequence for C130041O22Rik (NM_030708.1,5482-5500).
gtacagactgccaactcat

SEQ ID NO: 442203 - DNA, 19 bp, Mus musculus
  siRNA target sequence for C130041O22Rik (NM_030708.1,5485-5503).
cagactgccaactcatgaa

SEQ ID NO: 442204 - DNA, 19 bp, Mus musculus
  siRNA target sequence for C130041O22Rik (NM_030708.1,5709-5727).
gaactggttattcagtata

SEQ ID NO: 442205 - DNA, 19 bp, Mus musculus
  siRNA target sequence for C130041O22Rik (NM_030708.1,5789-5807).
gctggagtgcggaatctgt

SEQ ID NO: 442206 - DNA, 19 bp, Mus musculus
  siRNA target sequence for C130041O22Rik (NM_030708.1,5795-5813).
gtgcggaatctgtggtaaa

SEQ ID NO: 442207 - DNA, 19 bp, Mus musculus
  siRNA target sequence for C130041O22Rik (NM_030708.1,5800-5818).
gaatctgtggtaaattgtt

SEQ ID NO: 442208 - DNA, 19 bp, Mus musculus
  siRNA target sequence for C130041O22Rik (NM_030708.1,5806-5824).
gtggtaaattgttctcaaa

SEQ ID NO: 442209 - DNA, 19 bp, Mus musculus
  siRNA target sequence for C130041O22Rik (NM_030708.1,5809-5827).
gtaaattgttctcaaatgt

SEQ ID NO: 442210 - DNA, 19 bp, Mus musculus
  siRNA target sequence for C130041O22Rik (NM_030708.1,5853-5871).
catgtgcatgggcaatttt

SEQ ID NO: 442211 - DNA, 19 bp, Mus musculus
  siRNA target sequence for C130041O22Rik (NM_030708.1,5864-5882).
gcaatttttcccatatgga

SEQ ID NO: 442212 - DNA, 19 bp, Mus musculus
  siRNA target sequence for C130041O22Rik (NM_030708.1,5873-5891).
cccatatggagcactagaa

SEQ ID NO: 442213 - DNA, 19 bp, Mus musculus
  siRNA target sequence for C130041O22Rik (NM_030708.1,6216-6234).
gggatagaccctaacttct

SEQ ID NO: 442214 - DNA, 19 bp, Mus musculus
  siRNA target sequence for C130041O22Rik (NM_030708.1,6230-6248).
cttcttgagacattctcaa

SEQ ID NO: 442215 - DNA, 19 bp, Mus musculus
  siRNA target sequence for C130041O22Rik (NM_030708.1,6257-6275).
gccacggacccggattaca

SEQ ID NO: 442216 - DNA, 19 bp, Mus musculus
  siRNA target sequence for C130041O22Rik (NM_030708.1,6259-6277).
cacggacccggattacaga

SEQ ID NO: 442217 - DNA, 19 bp, Mus musculus
  siRNA target sequence for C130041O22Rik (NM_030708.1,6263-6281).
gacccggattacagatgat

SEQ ID NO: 442218 - DNA, 19 bp, Mus musculus
  siRNA target sequence for C130041O22Rik (NM_030708.1,6301-6319).
cttattttgacatcaataa

SEQ ID NO: 442219 - DNA, 19 bp, Mus musculus
  siRNA target sequence for C130041O22Rik (NM_030708.1,6392-6410).
gtttcgaaatacactcttt

SEQ ID NO: 442220 - DNA, 19 bp, Mus musculus
  siRNA target sequence for C130041O22Rik (NM_030708.1,6432-6450).
gattctccatacaacttca

SEQ ID NO: 442221 - DNA, 19 bp, Mus musculus
  siRNA target sequence for C130041O22Rik (NM_030708.1,6446-6464).
cttcagtaaccctcctata

SEQ ID NO: 442222 - DNA, 19 bp, Mus musculus
  siRNA target sequence for C130041O22Rik (NM_030708.1,6449-6467).
cagtaaccctcctataact

SEQ ID NO: 442223 - DNA, 19 bp, Mus musculus
  siRNA target sequence for C130041O22Rik (NM_030708.1,6489-6507).
gatccgcaacctacatctt

SEQ ID NO: 442224 - DNA, 19 bp, Mus musculus
  siRNA target sequence for C130041O22Rik (NM_030708.1,6493-6511).
cgcaacctacatctttaga

SEQ ID NO: 442225 - DNA, 19 bp, Mus musculus
  siRNA target sequence for C130041O22Rik (NM_030708.1,6494-6512).
gcaacctacatctttagaa

SEQ ID NO: 442226 - DNA, 19 bp, Mus musculus
  siRNA target sequence for C130041O22Rik (NM_030708.1,6599-6617).
cgacacaaatgcttatcca

SEQ ID NO: 442227 - DNA, 19 bp, Mus musculus
  siRNA target sequence for C130041O22Rik (NM_030708.1,6600-6618).
gacacaaatgcttatccaa

SEQ ID NO: 442228 - DNA, 19 bp, Mus musculus
  siRNA target sequence for C130041O22Rik (NM_030708.1,6656-6674).
cctccccacccgggttatt

SEQ ID NO: 442229 - DNA, 19 bp, Mus musculus
  siRNA target sequence for C130041O22Rik (NM_030708.1,6661-6679).
ccacccgggttattgttgt

SEQ ID NO: 442230 - DNA, 19 bp, Mus musculus
  siRNA target sequence for C130041O22Rik (NM_030708.1,6662-6680).
cacccgggttattgttgta

SEQ ID NO: 442231 - DNA, 19 bp, Mus musculus
  siRNA target sequence for C130041O22Rik (NM_030708.1,6722-6740).
gaaccaagcagaagctaaa

SEQ ID NO: 442232 - DNA, 19 bp, Mus musculus
  siRNA target sequence for C130041O22Rik (NM_030708.1,6761-6779).
caccaatgaacgctacatt

SEQ ID NO: 442233 - DNA, 19 bp, Mus musculus
  siRNA target sequence for C130041O22Rik (NM_030708.1,6764-6782).
caatgaacgctacattaga

SEQ ID NO: 442234 - DNA, 19 bp, Mus musculus
  siRNA target sequence for C130041O22Rik (NM_030708.1,6768-6786).
gaacgctacattagaacaa

SEQ ID NO: 442235 - DNA, 19 bp, Mus musculus
  siRNA target sequence for C130041O22Rik (NM_030708.1,6781-6799).
gaacaagcaacatgcaata

SEQ ID NO: 442236 - DNA, 19 bp, Mus musculus
  siRNA target sequence for C130041O22Rik (NM_030708.1,6784-6802).
caagcaacatgcaatacca

SEQ ID NO: 442237 - DNA, 19 bp, Mus musculus
  siRNA target sequence for C130041O22Rik (NM_030708.1,6795-6813).
caataccaatgcaaaaagt

SEQ ID NO: 442238 - DNA, 19 bp, Mus musculus
  siRNA target sequence for C130041O22Rik (NM_030708.1,6829-6847).
ccaggatctttgacttgat

SEQ ID NO: 442239 - DNA, 19 bp, Mus musculus
  siRNA target sequence for C130041O22Rik (NM_030708.1,6855-6873).
cagaaaaagcagtgttata

SEQ ID NO: 442240 - DNA, 19 bp, Mus musculus
  siRNA target sequence for C130041O22Rik (NM_030708.1,6857-6875).
gaaaaagcagtgttataaa

SEQ ID NO: 442241 - DNA, 19 bp, Mus musculus
  siRNA target sequence for C130041O22Rik (NM_030708.1,6928-6946).
ccactgatcaagtgttgta

SEQ ID NO: 442242 - DNA, 19 bp, Mus musculus
  siRNA target sequence for C130041O22Rik (NM_030708.1,6931-6949).
ctgatcaagtgttgtacaa

SEQ ID NO: 442243 - DNA, 19 bp, Mus musculus
  siRNA target sequence for C130041O22Rik (NM_030708.1,6959-6977).
ggtgtctggacaaacagat

SEQ ID NO: 442244 - DNA, 19 bp, Mus musculus
  siRNA target sequence for C130041O22Rik (NM_030708.1,6960-6978).
gtgtctggacaaacagata

SEQ ID NO: 442245 - DNA, 19 bp, Mus musculus
  siRNA target sequence for C130041O22Rik (NM_030708.1,6962-6980).
gtctggacaaacagataca

SEQ ID NO: 442246 - DNA, 19 bp, Mus musculus
  siRNA target sequence for C130041O22Rik (NM_030708.1,7083-7101).
gaatatcctggagaaaaga

SEQ ID NO: 442247 - DNA, 19 bp, Mus musculus
  siRNA target sequence for C130041O22Rik (NM_030708.1,7213-7231).
ccaagcaaccccaactgat

SEQ ID NO: 442248 - DNA, 19 bp, Mus musculus
  siRNA target sequence for C130041O22Rik (NM_030708.1,7214-7232).
caagcaaccccaactgatt

SEQ ID NO: 442249 - DNA, 19 bp, Mus musculus
  siRNA target sequence for C130041O22Rik (NM_030708.1,7239-7257).
cctccctcagcgtcacaaa

SEQ ID NO: 442250 - DNA, 19 bp, Mus musculus
  siRNA target sequence for C130041O22Rik (NM_030708.1,7278-7296).
ctgcaaatttccatgactt

SEQ ID NO: 442251 - DNA, 19 bp, Mus musculus
  siRNA target sequence for C130041O22Rik (NM_030708.1,7307-7325).
cagtctacctccacagtta

SEQ ID NO: 442252 - DNA, 19 bp, Mus musculus
  siRNA target sequence for C130041O22Rik (NM_030708.1,7309-7327).
gtctacctccacagttact

SEQ ID NO: 442253 - DNA, 19 bp, Mus musculus
  siRNA target sequence for C130041O22Rik (NM_030708.1,7408-7426).
ctgctcaaaaccaattcct

SEQ ID NO: 442254 - DNA, 19 bp, Mus musculus
  siRNA target sequence for C130041O22Rik (NM_030708.1,7512-7530).
gggagctctctcactcaaa

SEQ ID NO: 442255 - DNA, 19 bp, Mus musculus
  siRNA target sequence for C130041O22Rik (NM_030708.1,7513-7531).
ggagctctctcactcaaat

SEQ ID NO: 442256 - DNA, 19 bp, Mus musculus
  siRNA target sequence for C130041O22Rik (NM_030708.1,7575-7593).
gtcgctgcttcccttaaaa

SEQ ID NO: 442257 - DNA, 19 bp, Mus musculus
  siRNA target sequence for C130041O22Rik (NM_030708.1,7585-7603).
cccttaaaaggaaattgga

SEQ ID NO: 442258 - DNA, 19 bp, Mus musculus
  siRNA target sequence for C130041O22Rik (NM_030708.1,7640-7658).
cgggaatagcggtgaagat

SEQ ID NO: 442259 - DNA, 19 bp, Mus musculus
  siRNA target sequence for C130041O22Rik (NM_030708.1,7643-7661).
gaatagcggtgaagatcaa

SEQ ID NO: 442260 - DNA, 19 bp, Mus musculus
  siRNA target sequence for C130041O22Rik (NM_030708.1,7665-7683).
cgtgataaacgcttgagaa

SEQ ID NO: 442261 - DNA, 19 bp, Mus musculus
  siRNA target sequence for C130041O22Rik (NM_030708.1,7693-7711).
cgcctgagcaactcgaaat

SEQ ID NO: 442262 - DNA, 19 bp, Mus musculus
  siRNA target sequence for C130041O22Rik (NM_030708.1,7694-7712).
gcctgagcaactcgaaata

SEQ ID NO: 442263 - DNA, 19 bp, Mus musculus
  siRNA target sequence for C130041O22Rik (NM_030708.1,7696-7714).
ctgagcaactcgaaatact

SEQ ID NO: 442264 - DNA, 19 bp, Mus musculus
  siRNA target sequence for C130041O22Rik (NM_030708.1,7698-7716).
gagcaactcgaaatactct

SEQ ID NO: 442265 - DNA, 19 bp, Mus musculus
  siRNA target sequence for C130041O22Rik (NM_030708.1,7700-7718).
gcaactcgaaatactctat

SEQ ID NO: 442266 - DNA, 19 bp, Mus musculus
  siRNA target sequence for C130041O22Rik (NM_030708.1,7704-7722).
ctcgaaatactctatgaaa

SEQ ID NO: 442267 - DNA, 19 bp, Mus musculus
  siRNA target sequence for C130041O22Rik (NM_030708.1,7707-7725).
gaaatactctatgaaaagt

SEQ ID NO: 442268 - DNA, 19 bp, Mus musculus
  siRNA target sequence for C130041O22Rik (NM_030708.1,7738-7756).
ctaatcctacccgaaaaat

SEQ ID NO: 442269 - DNA, 19 bp, Mus musculus
  siRNA target sequence for C130041O22Rik (NM_030708.1,7822-7840).
ctcgggctcgagaaaggaa

SEQ ID NO: 442270 - DNA, 19 bp, Mus musculus
  siRNA target sequence for C130041O22Rik (NM_030708.1,7892-7910).
ctgcagagctctatttaaa

SEQ ID NO: 442271 - DNA, 19 bp, Mus musculus
  siRNA target sequence for C130041O22Rik (NM_030708.1,7982-8000).
gccaccaagccctttaata

SEQ ID NO: 442272 - DNA, 19 bp, Mus musculus
  siRNA target sequence for C130041O22Rik (NM_030708.1,7983-8001).
ccaccaagccctttaatat

SEQ ID NO: 442273 - DNA, 19 bp, Mus musculus
  siRNA target sequence for C130041O22Rik (NM_030708.1,7986-8004).
ccaagccctttaatatcca

SEQ ID NO: 442274 - DNA, 19 bp, Mus musculus
  siRNA target sequence for C130041O22Rik (NM_030708.1,8056-8074).
ctttgccattgactaaaat

SEQ ID NO: 442275 - DNA, 19 bp, Mus musculus
  siRNA target sequence for C130041O22Rik (NM_030708.1,8060-8078).
gccattgactaaaattgat

SEQ ID NO: 442276 - DNA, 19 bp, Mus musculus
  siRNA target sequence for C130041O22Rik (NM_030708.1,8062-8080).
cattgactaaaattgatct

SEQ ID NO: 442277 - DNA, 19 bp, Mus musculus
  siRNA target sequence for C130041O22Rik (NM_030708.1,8066-8084).
gactaaaattgatctatct

SEQ ID NO: 442278 - DNA, 19 bp, Mus musculus
  siRNA target sequence for C130041O22Rik (NM_030708.1,8079-8097).
ctatctactgagaatgaat

SEQ ID NO: 442279 - DNA, 19 bp, Mus musculus
  siRNA target sequence for C130041O22Rik (NM_030708.1,8109-8127).
gtctctacgcctgttagta

SEQ ID NO: 442280 - DNA, 19 bp, Mus musculus
  siRNA target sequence for C130041O22Rik (NM_030708.1,8111-8129).
ctctacgcctgttagtaaa

SEQ ID NO: 442281 - DNA, 19 bp, Mus musculus
  siRNA target sequence for C130041O22Rik (NM_030708.1,8139-8157).
ctgtcacccaaaaatcttt

SEQ ID NO: 442282 - DNA, 19 bp, Mus musculus
  siRNA target sequence for C130041O22Rik (NM_030708.1,8190-8208).
gaggatgtagagaatctaa

SEQ ID NO: 442283 - DNA, 19 bp, Mus musculus
  siRNA target sequence for C130041O22Rik (NM_030708.1,8259-8277).
gagacctcatctattaata

SEQ ID NO: 442284 - DNA, 19 bp, Mus musculus
  siRNA target sequence for C130041O22Rik (NM_030708.1,8310-8328).
ggagcagcagatatggaaa

SEQ ID NO: 442285 - DNA, 19 bp, Mus musculus
  siRNA target sequence for C130041O22Rik (NM_030708.1,8358-8376).
gctttgtcccctaaagaaa

SEQ ID NO: 442286 - DNA, 19 bp, Mus musculus
  siRNA target sequence for C130041O22Rik (NM_030708.1,8426-8444).
ggtctgtgatgacaaattt

SEQ ID NO: 442287 - DNA, 19 bp, Mus musculus
  siRNA target sequence for C130041O22Rik (NM_030708.1,8452-8470).
ctctcacaagtccatcaat

SEQ ID NO: 442288 - DNA, 19 bp, Mus musculus
  siRNA target sequence for C130041O22Rik (NM_030708.1,8491-8509).
gtgaccatgaccaaagctt

SEQ ID NO: 442289 - DNA, 19 bp, Mus musculus
  siRNA target sequence for C130041O22Rik (NM_030708.1,8541-8559).
gaccgcagtgaaacatcta

SEQ ID NO: 442290 - DNA, 19 bp, Mus musculus
  siRNA target sequence for C130041O22Rik (NM_030708.1,8604-8622).
ccctttaagtccaaaagca

SEQ ID NO: 442291 - DNA, 19 bp, Mus musculus
  siRNA target sequence for C130041O22Rik (NM_030708.1,8606-8624).
ctttaagtccaaaagcaat

SEQ ID NO: 442292 - DNA, 19 bp, Mus musculus
  siRNA target sequence for C130041O22Rik (NM_030708.1,8653-8671).
cccagatgagcaatcttca

SEQ ID NO: 442293 - DNA, 19 bp, Mus musculus
  siRNA target sequence for C130041O22Rik (NM_030708.1,8662-8680).
gcaatcttcaactaaaggt

SEQ ID NO: 442294 - DNA, 19 bp, Mus musculus
  siRNA target sequence for C130041O22Rik (NM_030708.1,8730-8748).
gaaatgctgggcaatgaga

SEQ ID NO: 442295 - DNA, 19 bp, Mus musculus
  siRNA target sequence for C130041O22Rik (NM_030708.1,8775-8793).
gtgtggtttcagaatgcta

SEQ ID NO: 442296 - DNA, 19 bp, Mus musculus
  siRNA target sequence for C130041O22Rik (NM_030708.1,8786-8804).
gaatgctagggcaaaggaa

SEQ ID NO: 442297 - DNA, 19 bp, Mus musculus
  siRNA target sequence for C130041O22Rik (NM_030708.1,8826-8844).
ggaaagccgttcatgatca

SEQ ID NO: 442298 - DNA, 19 bp, Mus musculus
  siRNA target sequence for C130041O22Rik (NM_030708.1,8827-8845).
gaaagccgttcatgatcaa

SEQ ID NO: 442299 - DNA, 19 bp, Mus musculus
  siRNA target sequence for C130041O22Rik (NM_030708.1,8831-8849).
gccgttcatgatcaatcaa

SEQ ID NO: 442300 - DNA, 19 bp, Mus musculus
  siRNA target sequence for C130041O22Rik (NM_030708.1,8832-8850).
ccgttcatgatcaatcaaa

SEQ ID NO: 442301 - DNA, 19 bp, Mus musculus
  siRNA target sequence for C130041O22Rik (NM_030708.1,8834-8852).
gttcatgatcaatcaaagt

SEQ ID NO: 442302 - DNA, 19 bp, Mus musculus
  siRNA target sequence for C130041O22Rik (NM_030708.1,8909-8927).
cttgtccatccgagatcat

SEQ ID NO: 442303 - DNA, 19 bp, Mus musculus
  siRNA target sequence for C130041O22Rik (NM_030708.1,8912-8930).
gtccatccgagatcatatt

SEQ ID NO: 442304 - DNA, 19 bp, Mus musculus
  siRNA target sequence for C130041O22Rik (NM_030708.1,8919-8937).
cgagatcatattttttcca

SEQ ID NO: 442305 - DNA, 19 bp, Mus musculus
  siRNA target sequence for C130041O22Rik (NM_030708.1,8936-8954).
caaacagcatatttccaaa

SEQ ID NO: 442306 - DNA, 19 bp, Mus musculus
  siRNA target sequence for C130041O22Rik (NM_030708.1,8979-8997).
cttgaccgggagaaagatt

SEQ ID NO: 442307 - DNA, 19 bp, Mus musculus
  siRNA target sequence for C130041O22Rik (NM_030708.1,8984-9002).
ccgggagaaagattacctt

SEQ ID NO: 442308 - DNA, 19 bp, Mus musculus
  siRNA target sequence for C130041O22Rik (NM_030708.1,9010-9028).
ccaccgttcgacagctaat

SEQ ID NO: 442309 - DNA, 19 bp, Mus musculus
  siRNA target sequence for C130041O22Rik (NM_030708.1,9036-9054).
caagaactggaccgtataa

SEQ ID NO: 442310 - DNA, 19 bp, Mus musculus
  siRNA target sequence for C130041O22Rik (NM_030708.1,9039-9057).
gaactggaccgtataaaga

SEQ ID NO: 442311 - DNA, 19 bp, Mus musculus
  siRNA target sequence for C130041O22Rik (NM_030708.1,9045-9063).
gaccgtataaagaaagctt

SEQ ID NO: 442312 - DNA, 19 bp, Mus musculus
  siRNA target sequence for C130041O22Rik (NM_030708.1,9093-9111).
caaggcatcaccgataact

SEQ ID NO: 442313 - DNA, 19 bp, Mus musculus
  siRNA target sequence for C130041O22Rik (NM_030708.1,9217-9235).
cacaaaattcaaacacatt

SEQ ID NO: 442314 - DNA, 19 bp, Mus musculus
  siRNA target sequence for C130041O22Rik (NM_030708.1,9305-9323).
cagtggccccaccaaatct

SEQ ID NO: 442315 - DNA, 19 bp, Mus musculus
  siRNA target sequence for C130041O22Rik (NM_030708.1,9412-9430).
cggagaaaaagcaaactaa

SEQ ID NO: 442316 - DNA, 19 bp, Mus musculus
  siRNA target sequence for C130041O22Rik (NM_030708.1,9461-9479).
ggaatcggaggctatcaaa

SEQ ID NO: 442317 - DNA, 19 bp, Mus musculus
  siRNA target sequence for C130041O22Rik (NM_030708.1,9472-9490).
ctatcaaacccgaaaagca

SEQ ID NO: 442318 - DNA, 19 bp, Mus musculus
  siRNA target sequence for C130041O22Rik (NM_030708.1,9600-9618).
ggggacccagcatccttta

SEQ ID NO: 442319 - DNA, 19 bp, Mus musculus
  siRNA target sequence for C130041O22Rik (NM_030708.1,9651-9669).
gggtttgcatcctactttt

SEQ ID NO: 442320 - DNA, 19 bp, Mus musculus
  siRNA target sequence for C130041O22Rik (NM_030708.1,9653-9671).
gtttgcatcctacttttca

SEQ ID NO: 442321 - DNA, 19 bp, Mus musculus
  siRNA target sequence for C130041O22Rik (NM_030708.1,9824-9842).
gcaagattccctacagaaa

SEQ ID NO: 442322 - DNA, 19 bp, Mus musculus
  siRNA target sequence for C130041O22Rik (NM_030708.1,9967-9985).
ccgaaagcacaaaagaaga

SEQ ID NO: 442323 - DNA, 19 bp, Mus musculus
  siRNA target sequence for C130041O22Rik (NM_030708.1,9981-9999).
gaagaagtccagttagatt

SEQ ID NO: 442324 - DNA, 19 bp, Mus musculus
  siRNA target sequence for C130041O22Rik (NM_030708.1,10004-10022).
gagtgcagagttttcagat

SEQ ID NO: 442325 - DNA, 19 bp, Mus musculus
  siRNA target sequence for C130041O22Rik (NM_030708.1,10008-10026).
gcagagttttcagatactt

SEQ ID NO: 442326 - DNA, 19 bp, Mus musculus
  siRNA target sequence for C130041O22Rik (NM_030708.1,10024-10042).
cttgtattgttccatttgt

SEQ ID NO: 442327 - DNA, 19 bp, Mus musculus
  siRNA target sequence for C130041O22Rik (NM_030708.1,10035-10053).
ccatttgtcaagtatgagt

SEQ ID NO: 442328 - DNA, 19 bp, Mus musculus
  siRNA target sequence for C130041O22Rik (NM_030708.1,10107-10125).
catcaaaagtccttctgtt

SEQ ID NO: 442329 - DNA, 19 bp, Mus musculus
  siRNA target sequence for C130041O22Rik (NM_030708.1,10208-10226).
ggctctcagtgggaatgaa

SEQ ID NO: 442330 - DNA, 19 bp, Mus musculus
  siRNA target sequence for C130041O22Rik (NM_030708.1,10219-10237).
ggaatgaagcacttagtca

SEQ ID NO: 442331 - DNA, 19 bp, Mus musculus
  siRNA target sequence for C130041O22Rik (NM_030708.1,10220-10238).
gaatgaagcacttagtcaa

SEQ ID NO: 442332 - DNA, 19 bp, Mus musculus
  siRNA target sequence for C130041O22Rik (NM_030708.1,10274-10292).
caaacaagcaatgagaaat

SEQ ID NO: 442333 - DNA, 19 bp, Mus musculus
  siRNA target sequence for C130041O22Rik (NM_030708.1,10294-10312).
ccaaagagcatgttagatt

SEQ ID NO: 442334 - DNA, 19 bp, Mus musculus
  siRNA target sequence for C130041O22Rik (NM_030708.1,10295-10313).
caaagagcatgttagatta

SEQ ID NO: 442335 - DNA, 19 bp, Mus musculus
  siRNA target sequence for C130041O22Rik (NM_030708.1,10301-10319).
gcatgttagattattacct

SEQ ID NO: 442336 - DNA, 19 bp, Mus musculus
  siRNA target sequence for C130041O22Rik (NM_030708.1,10418-10436).
gtcctggcctaatatcctt

SEQ ID NO: 442337 - DNA, 19 bp, Mus musculus
  siRNA target sequence for C130041O22Rik (NM_030708.1,10598-10616).
gctacaagacttagataat

SEQ ID NO: 442338 - DNA, 19 bp, Mus musculus
  siRNA target sequence for C130041O22Rik (NM_030708.1,10599-10617).
ctacaagacttagataatt

SEQ ID NO: 442339 - DNA, 19 bp, Mus musculus
  siRNA target sequence for C130041O22Rik (NM_030708.1,10642-10660).
cttctggcctagatggtaa

SEQ ID NO: 442340 - DNA, 19 bp, Mus musculus
  siRNA target sequence for C130041O22Rik (NM_030708.1,10645-10663).
ctggcctagatggtaattt

SEQ ID NO: 442341 - DNA, 19 bp, Mus musculus
  siRNA target sequence for C130041O22Rik (NM_030708.1,10649-10667).
cctagatggtaatttcaat

SEQ ID NO: 442342 - DNA, 19 bp, Mus musculus
  siRNA target sequence for C130041O22Rik (NM_030708.1,10664-10682).
caatagtgtccgaatggat

SEQ ID NO: 442343 - DNA, 19 bp, Mus musculus
  siRNA target sequence for C130041O22Rik (NM_030708.1,10671-10689).
gtccgaatggatatgttca

SEQ ID NO: 442344 - DNA, 19 bp, Mus musculus
  siRNA target sequence for C330003B14Rik (NM_175342.2,64-82).
cctggcgctccagaaacaa

SEQ ID NO: 442345 - DNA, 19 bp, Mus musculus
  siRNA target sequence for C330003B14Rik (NM_175342.2,126-144).
ctcaaaaccgagacataaa

SEQ ID NO: 442346 - DNA, 19 bp, Mus musculus
  siRNA target sequence for C330003B14Rik (NM_175342.2,133-151).
ccgagacataaattttcca

SEQ ID NO: 442347 - DNA, 19 bp, Mus musculus
  siRNA target sequence for C330003B14Rik (NM_175342.2,259-277).
gacaactggtttcagaata

SEQ ID NO: 442348 - DNA, 19 bp, Mus musculus
  siRNA target sequence for C330003B14Rik (NM_175342.2,284-302).
ccagattggcaccagaatt

SEQ ID NO: 442349 - DNA, 19 bp, Mus musculus
  siRNA target sequence for C330003B14Rik (NM_175342.2,287-305).
gattggcaccagaattgaa

SEQ ID NO: 442350 - DNA, 19 bp, Mus musculus
  siRNA target sequence for C330003B14Rik (NM_175342.2,431-449).
gcatcggaaggcaatcaat

SEQ ID NO: 442351 - DNA, 19 bp, Mus musculus
  siRNA target sequence for C330003B14Rik (NM_175342.2,432-450).
catcggaaggcaatcaatt

SEQ ID NO: 442352 - DNA, 19 bp, Mus musculus
  siRNA target sequence for C330003B14Rik (NM_175342.2,474-492).
cgctggaagggaatcttct

SEQ ID NO: 442353 - DNA, 19 bp, Mus musculus
  siRNA target sequence for C330003B14Rik (NM_175342.2,478-496).
ggaagggaatcttctttca

SEQ ID NO: 442354 - DNA, 19 bp, Mus musculus
  siRNA target sequence for C330003B14Rik (NM_175342.2,495-513).
cagaccaacaaactttact

SEQ ID NO: 442355 - DNA, 19 bp, Mus musculus
  siRNA target sequence for C330003B14Rik (NM_175342.2,497-515).
gaccaacaaactttacttt

SEQ ID NO: 442356 - DNA, 19 bp, Mus musculus
  siRNA target sequence for C330003B14Rik (NM_175342.2,520-538).
cctgtgtatgagcagtatt

SEQ ID NO: 442357 - DNA, 19 bp, Mus musculus
  siRNA target sequence for C330003B14Rik (NM_175342.2,521-539).
ctgtgtatgagcagtatta

SEQ ID NO: 442358 - DNA, 19 bp, Mus musculus
  siRNA target sequence for C330039G02Rik (NM_172699.2,194-212).
gcttgtccatctgtaactt

SEQ ID NO: 442359 - DNA, 19 bp, Mus musculus
  siRNA target sequence for C330039G02Rik (NM_172699.2,235-253).
ggagagcagcctaacatct

SEQ ID NO: 442360 - DNA, 19 bp, Mus musculus
  siRNA target sequence for C330039G02Rik (NM_172699.2,236-254).
gagagcagcctaacatcta

SEQ ID NO: 442361 - DNA, 19 bp, Mus musculus
  siRNA target sequence for C330039G02Rik (NM_172699.2,320-338).
catggaacgggaatttcta

SEQ ID NO: 442362 - DNA, 19 bp, Mus musculus
  siRNA target sequence for C330039G02Rik (NM_172699.2,327-345).
cgggaatttctaagaagaa

SEQ ID NO: 442363 - DNA, 19 bp, Mus musculus
  siRNA target sequence for C330039G02Rik (NM_172699.2,347-365).
gcactccttgacccaaata

SEQ ID NO: 442364 - DNA, 19 bp, Mus musculus
  siRNA target sequence for C330039G02Rik (NM_172699.2,427-445).
cagcctcatcacatttgca

SEQ ID NO: 442365 - DNA, 19 bp, Mus musculus
  siRNA target sequence for C330039G02Rik (NM_172699.2,429-447).
gcctcatcacatttgcaat

SEQ ID NO: 442366 - DNA, 19 bp, Mus musculus
  siRNA target sequence for C330039G02Rik (NM_172699.2,430-448).
cctcatcacatttgcaatt

SEQ ID NO: 442367 - DNA, 19 bp, Mus musculus
  siRNA target sequence for C330039G02Rik (NM_172699.2,474-492).
cattaagtgagatttacca

SEQ ID NO: 442368 - DNA, 19 bp, Mus musculus
  siRNA target sequence for C330039G02Rik (NM_172699.2,482-500).
gagatttaccaatggattt

SEQ ID NO: 442369 - DNA, 19 bp, Mus musculus
  siRNA target sequence for C330039G02Rik (NM_172699.2,484-502).
gatttaccaatggatttgt

SEQ ID NO: 442370 - DNA, 19 bp, Mus musculus
  siRNA target sequence for C330039G02Rik (NM_172699.2,491-509).
caatggatttgtgataact

SEQ ID NO: 442371 - DNA, 19 bp, Mus musculus
  siRNA target sequence for C330039G02Rik (NM_172699.2,501-519).
gtgataactttccgtatta

SEQ ID NO: 442372 - DNA, 19 bp, Mus musculus
  siRNA target sequence for C330039G02Rik (NM_172699.2,503-521).
gataactttccgtattata

SEQ ID NO: 442373 - DNA, 19 bp, Mus musculus
  siRNA target sequence for C330039G02Rik (NM_172699.2,544-562).
gaattctatacgacataat

SEQ ID NO: 442374 - DNA, 19 bp, Mus musculus
  siRNA target sequence for C330039G02Rik (NM_172699.2,571-589).
gaacaaatgtttccttaaa

SEQ ID NO: 442375 - DNA, 19 bp, Mus musculus
  siRNA target sequence for C330039G02Rik (NM_172699.2,665-683).
cctactcggccaaagaaga

SEQ ID NO: 442376 - DNA, 19 bp, Mus musculus
  siRNA target sequence for C330039G02Rik (NM_172699.2,701-719).
cgggcctcaactccatata

SEQ ID NO: 442377 - DNA, 19 bp, Mus musculus
  siRNA target sequence for C330039G02Rik (NM_172699.2,705-723).
cctcaactccatatagcat

SEQ ID NO: 442378 - DNA, 19 bp, Mus musculus
  siRNA target sequence for C330039G02Rik (NM_172699.2,714-732).
catatagcatagattcaga

SEQ ID NO: 442379 - DNA, 19 bp, Mus musculus
  siRNA target sequence for C330039G02Rik (NM_172699.2,794-812).
gtgactaacaaagtaacat

SEQ ID NO: 442380 - DNA, 19 bp, Mus musculus
  siRNA target sequence for C330039G02Rik (NM_172699.2,798-816).
ctaacaaagtaacattgta

SEQ ID NO: 442381 - DNA, 19 bp, Mus musculus
  siRNA target sequence for C330039G02Rik (NM_172699.2,845-863).
cctcgaagcagccttaaca

SEQ ID NO: 442382 - DNA, 19 bp, Mus musculus
  siRNA target sequence for C330039G02Rik (NM_172699.2,846-864).
ctcgaagcagccttaacaa

SEQ ID NO: 442383 - DNA, 19 bp, Mus musculus
  siRNA target sequence for C330039G02Rik (NM_172699.2,878-896).
cagagtttggcgtctgtta

SEQ ID NO: 442384 - DNA, 19 bp, Mus musculus
  siRNA target sequence for C330039G02Rik (NM_172699.2,882-900).
gtttggcgtctgttaattt

SEQ ID NO: 442385 - DNA, 19 bp, Mus musculus
  siRNA target sequence for C330039G02Rik (NM_172699.2,887-905).
gcgtctgttaatttgaaca

SEQ ID NO: 442386 - DNA, 19 bp, Mus musculus
  siRNA target sequence for C330039G02Rik (NM_172699.2,901-919).
gaacagtgttggaagtgta

SEQ ID NO: 442387 - DNA, 19 bp, Mus musculus
  siRNA target sequence for C330039G02Rik (NM_172699.2,911-929).
ggaagtgtacatagttata

SEQ ID NO: 442388 - DNA, 19 bp, Mus musculus
  siRNA target sequence for C330039G02Rik (NM_172699.2,924-942).
gttatacaccggtcactaa

SEQ ID NO: 442389 - DNA, 19 bp, Mus musculus
  siRNA target sequence for C330039G02Rik (NM_172699.2,1014-1032).
gagaaaaacaactcctttt

SEQ ID NO: 442390 - DNA, 19 bp, Mus musculus
  siRNA target sequence for C330039G02Rik (NM_172699.2,1025-1043).
ctccttttcacagaataca

SEQ ID NO: 442391 - DNA, 19 bp, Mus musculus
  siRNA target sequence for C330039G02Rik (NM_172699.2,1027-1045).
ccttttcacagaatacaat

SEQ ID NO: 442392 - DNA, 19 bp, Mus musculus
  siRNA target sequence for C330039G02Rik (NM_172699.2,1028-1046).
cttttcacagaatacaatt

SEQ ID NO: 442393 - DNA, 19 bp, Mus musculus
  siRNA target sequence for C330039G02Rik (NM_172699.2,1033-1051).
cacagaatacaattttgaa

SEQ ID NO: 442394 - DNA, 19 bp, Mus musculus
  siRNA target sequence for C330039G02Rik (NM_172699.2,1061-1079).
gcctcatttcggagtcttt

SEQ ID NO: 442395 - DNA, 19 bp, Mus musculus
  siRNA target sequence for C330039G02Rik (NM_172699.2,1063-1081).
ctcatttcggagtctttat

SEQ ID NO: 442396 - DNA, 19 bp, Mus musculus
  siRNA target sequence for C330039G02Rik (NM_172699.2,1096-1114).
gcagtcacttagtcaacaa

SEQ ID NO: 442397 - DNA, 19 bp, Mus musculus
  siRNA target sequence for C330039G02Rik (NM_172699.2,1101-1119).
cacttagtcaacaaggttt

SEQ ID NO: 442398 - DNA, 19 bp, Mus musculus
  siRNA target sequence for C330039G02Rik (NM_172699.2,1329-1347).
cccatagaccgcatggttt

SEQ ID NO: 442399 - DNA, 19 bp, Mus musculus
  siRNA target sequence for C330039G02Rik (NM_172699.2,1330-1348).
ccatagaccgcatggttta

SEQ ID NO: 442400 - DNA, 19 bp, Mus musculus
  siRNA target sequence for C330039G02Rik (NM_172699.2,1507-1525).
gcaacaggtatcctgtaat

SEQ ID NO: 442401 - DNA, 19 bp, Mus musculus
  siRNA target sequence for C330039G02Rik (NM_172699.2,1508-1526).
caacaggtatcctgtaatt

SEQ ID NO: 442402 - DNA, 19 bp, Mus musculus
  siRNA target sequence for C330039G02Rik (NM_172699.2,1530-1548).
gtgtttcaagtgattggta

SEQ ID NO: 442403 - DNA, 19 bp, Mus musculus
  siRNA target sequence for C330039G02Rik (NM_172699.2,1545-1563).
ggtatgcaacactcgatat

SEQ ID NO: 442404 - DNA, 19 bp, Mus musculus
  siRNA target sequence for C330039G02Rik (NM_172699.2,1556-1574).
ctcgatatgctgaaggaaa

SEQ ID NO: 442405 - DNA, 19 bp, Mus musculus
  siRNA target sequence for C330039G02Rik (NM_172699.2,1663-1681).
caagaactggtcattagat

SEQ ID NO: 442406 - DNA, 19 bp, Mus musculus
  siRNA target sequence for C330039G02Rik (NM_172699.2,1674-1692).
cattagatcaggttcagtt

SEQ ID NO: 442407 - DNA, 19 bp, Mus musculus
  siRNA target sequence for C330039G02Rik (NM_172699.2,1697-1715).
gatctctgttcctctctta

SEQ ID NO: 442408 - DNA, 19 bp, Mus musculus
  siRNA target sequence for C330039G02Rik (NM_172699.2,1755-1773).
gtaatgttccgcagaatgt

SEQ ID NO: 442409 - DNA, 19 bp, Mus musculus
  siRNA target sequence for C330039G02Rik (NM_172699.2,1818-1836).
gggcaggaaatttgtacat

SEQ ID NO: 442410 - DNA, 19 bp, Mus musculus
  siRNA target sequence for C330039G02Rik (NM_172699.2,1819-1837).
ggcaggaaatttgtacata

SEQ ID NO: 442411 - DNA, 19 bp, Mus musculus
  siRNA target sequence for C330039G02Rik (NM_172699.2,1875-1893).
cccctggttatcctcatat

SEQ ID NO: 442412 - DNA, 19 bp, Mus musculus
  siRNA target sequence for C330039G02Rik (NM_172699.2,2023-2041).
ctttgattgggattcaata

SEQ ID NO: 442413 - DNA, 19 bp, Mus musculus
  siRNA target sequence for C330039G02Rik (NM_172699.2,2027-2045).
gattgggattcaatagtgt

SEQ ID NO: 442414 - DNA, 19 bp, Mus musculus
  siRNA target sequence for C430014D17Rik (NM_139304.1,31-49).
gctctgcgcctgaatcttt

SEQ ID NO: 442415 - DNA, 19 bp, Mus musculus
  siRNA target sequence for C430014D17Rik (NM_139304.1,32-50).
ctctgcgcctgaatctttt

SEQ ID NO: 442416 - DNA, 19 bp, Mus musculus
  siRNA target sequence for C430014D17Rik (NM_139304.1,34-52).
ctgcgcctgaatcttttga

SEQ ID NO: 442417 - DNA, 19 bp, Mus musculus
  siRNA target sequence for C430014D17Rik (NM_139304.1,37-55).
cgcctgaatcttttgaaga

SEQ ID NO: 442418 - DNA, 19 bp, Mus musculus
  siRNA target sequence for C430014D17Rik (NM_139304.1,91-109).
ctggcaaaacgactgaaaa

SEQ ID NO: 442419 - DNA, 19 bp, Mus musculus
  siRNA target sequence for C430014D17Rik (NM_139304.1,125-143).
ccatggaacggctgaaaat

SEQ ID NO: 442420 - DNA, 19 bp, Mus musculus
  siRNA target sequence for C430014D17Rik (NM_139304.1,188-206).
cgcatgagttacctactaa

SEQ ID NO: 442421 - DNA, 19 bp, Mus musculus
  siRNA target sequence for C430014D17Rik (NM_139304.1,260-278).
ggcctcatggagacaacaa

SEQ ID NO: 442422 - DNA, 19 bp, Mus musculus
  siRNA target sequence for C430014D17Rik (NM_139304.1,522-540).
ggacgagctacgattggaa

SEQ ID NO: 442423 - DNA, 19 bp, Mus musculus
  siRNA target sequence for C430014D17Rik (NM_139304.1,545-563).
ctcgcctggtgctgctaaa

SEQ ID NO: 442424 - DNA, 19 bp, Mus musculus
  siRNA target sequence for C430014D17Rik (NM_139304.1,547-565).
cgcctggtgctgctaaaga

SEQ ID NO: 442425 - DNA, 19 bp, Mus musculus
  siRNA target sequence for C430014D17Rik (NM_139304.1,592-610).
gagaatgtggtccaaaaga

SEQ ID NO: 442426 - DNA, 19 bp, Mus musculus
  siRNA target sequence for C430014D17Rik (NM_139304.1,594-612).
gaatgtggtccaaaagact

SEQ ID NO: 442427 - DNA, 19 bp, Mus musculus
  siRNA target sequence for C430014D17Rik (NM_139304.1,603-621).
ccaaaagactccagttgta

SEQ ID NO: 442428 - DNA, 19 bp, Mus musculus
  siRNA target sequence for C430014D17Rik (NM_139304.1,663-681).
gggacaacaaggcttatct

SEQ ID NO: 442429 - DNA, 19 bp, Mus musculus
  siRNA target sequence for C430014D17Rik (NM_139304.1,665-683).
gacaacaaggcttatctaa

SEQ ID NO: 442430 - DNA, 19 bp, Mus musculus
  siRNA target sequence for C430014D17Rik (NM_139304.1,718-736).
cctcaaaatatgagaacat

SEQ ID NO: 442431 - DNA, 19 bp, Mus musculus
  siRNA target sequence for C430014D17Rik (NM_139304.1,776-794).
cccttccacacatgttgat

SEQ ID NO: 442432 - DNA, 19 bp, Mus musculus
  siRNA target sequence for C430014D17Rik (NM_139304.1,778-796).
cttccacacatgttgatgt

SEQ ID NO: 442433 - DNA, 19 bp, Mus musculus
  siRNA target sequence for C430014D17Rik (NM_139304.1,1067-1085).
ccaagttggcccttcgaaa

SEQ ID NO: 442434 - DNA, 19 bp, Mus musculus
  siRNA target sequence for C430014D17Rik (NM_139304.1,1130-1148).
ctgctcccttgcttcactt

SEQ ID NO: 442435 - DNA, 19 bp, Mus musculus
  siRNA target sequence for C430014D17Rik (NM_139304.1,1159-1177).
gcagccaatagcgagttta

SEQ ID NO: 442436 - DNA, 19 bp, Mus musculus
  siRNA target sequence for C430014D17Rik (NM_139304.1,1160-1178).
cagccaatagcgagtttat

SEQ ID NO: 442437 - DNA, 19 bp, Mus musculus
  siRNA target sequence for C430014D17Rik (NM_139304.1,1190-1208).
gcttggaagaagttgtaca

SEQ ID NO: 442438 - DNA, 19 bp, Mus musculus
  siRNA target sequence for C430014D17Rik (NM_139304.1,1251-1269).
gagggtcgaaccctttgta

SEQ ID NO: 442439 - DNA, 19 bp, Mus musculus
  siRNA target sequence for C430014D17Rik (NM_139304.1,1254-1272).
ggtcgaaccctttgtatgt

SEQ ID NO: 442440 - DNA, 19 bp, Mus musculus
  siRNA target sequence for C430014D17Rik (NM_139304.1,1273-1291).
gcccagtgccgcacagatt

SEQ ID NO: 442441 - DNA, 19 bp, Mus musculus
  siRNA target sequence for C430014D17Rik (NM_139304.1,1274-1292).
cccagtgccgcacagattt

SEQ ID NO: 442442 - DNA, 19 bp, Mus musculus
  siRNA target sequence for C430014D17Rik (NM_139304.1,1276-1294).
cagtgccgcacagatttca

SEQ ID NO: 442443 - DNA, 19 bp, Mus musculus
  siRNA target sequence for C430014D17Rik (NM_139304.1,1381-1399).
cacactaaccggctgaaaa

SEQ ID NO: 442444 - DNA, 19 bp, Mus musculus
  siRNA target sequence for C430014D17Rik (NM_139304.1,1392-1410).
gctgaaaaacgctttcgtt

SEQ ID NO: 442445 - DNA, 19 bp, Mus musculus
  siRNA target sequence for C430014D17Rik (NM_139304.1,1512-1530).
gaccatcatgagacatcat

SEQ ID NO: 442446 - DNA, 19 bp, Mus musculus
  siRNA target sequence for C430014D17Rik (NM_139304.1,1560-1578).
cagcctccagcgtggtata

SEQ ID NO: 442447 - DNA, 19 bp, Mus musculus
  siRNA target sequence for C430014D17Rik (NM_139304.1,1588-1606).
gcccgatccatgctttcaa

SEQ ID NO: 442448 - DNA, 19 bp, Mus musculus
  siRNA target sequence for C430014D17Rik (NM_139304.1,1589-1607).
cccgatccatgctttcaaa

SEQ ID NO: 442449 - DNA, 19 bp, Mus musculus
  siRNA target sequence for C430014D17Rik (NM_139304.1,1591-1609).
cgatccatgctttcaaact

SEQ ID NO: 442450 - DNA, 19 bp, Mus musculus
  siRNA target sequence for C430014D17Rik (NM_139304.1,1658-1676).
caggtgtcaacattgcata

SEQ ID NO: 442451 - DNA, 19 bp, Mus musculus
  siRNA target sequence for C430014D17Rik (NM_139304.1,1661-1679).
gtgtcaacattgcatactt

SEQ ID NO: 442452 - DNA, 19 bp, Mus musculus
  siRNA target sequence for C430014D17Rik (NM_139304.1,1663-1681).
gtcaacattgcatacttga

SEQ ID NO: 442453 - DNA, 19 bp, Mus musculus
  siRNA target sequence for C430014D17Rik (NM_139304.1,1685-1703).
ctggcatcggaggacataa

SEQ ID NO: 442454 - DNA, 19 bp, Mus musculus
  siRNA target sequence for Carf (NM_139150.1,193-211).
ggagcagcgtcattcctta

SEQ ID NO: 442455 - DNA, 19 bp, Mus musculus
  siRNA target sequence for Carf (NM_139150.1,283-301).
ctctggggatccttccttt

SEQ ID NO: 442456 - DNA, 19 bp, Mus musculus
  siRNA target sequence for Carf (NM_139150.1,328-346).
gcccattactgctcctaaa

SEQ ID NO: 442457 - DNA, 19 bp, Mus musculus
  siRNA target sequence for Carf (NM_139150.1,357-375).
cactcacatcacaggatat

SEQ ID NO: 442458 - DNA, 19 bp, Mus musculus
  siRNA target sequence for Carf (NM_139150.1,394-412).
cacacaggcccttcatgaa

SEQ ID NO: 442459 - DNA, 19 bp, Mus musculus
  siRNA target sequence for Carf (NM_139150.1,441-459).
ggcagcctattcaatatga

SEQ ID NO: 442460 - DNA, 19 bp, Mus musculus
  siRNA target sequence for Carf (NM_139150.1,442-460).
gcagcctattcaatatgat

SEQ ID NO: 442461 - DNA, 19 bp, Mus musculus
  siRNA target sequence for Carf (NM_139150.1,445-463).
gcctattcaatatgatctt

SEQ ID NO: 442462 - DNA, 19 bp, Mus musculus
  siRNA target sequence for Carf (NM_139150.1,474-492).
gaaattctactgcacaaat

SEQ ID NO: 442463 - DNA, 19 bp, Mus musculus
  siRNA target sequence for Carf (NM_139150.1,542-560).
catagccctcaagatatct

SEQ ID NO: 442464 - DNA, 19 bp, Mus musculus
  siRNA target sequence for Carf (NM_139150.1,568-586).
gaaacccactggtgtaaga

SEQ ID NO: 442465 - DNA, 19 bp, Mus musculus
  siRNA target sequence for Carf (NM_139150.1,579-597).
gtgtaagagcagatgttct

SEQ ID NO: 442466 - DNA, 19 bp, Mus musculus
  siRNA target sequence for Carf (NM_139150.1,639-657).
ccctcgtgctacccaaaaa

SEQ ID NO: 442467 - DNA, 19 bp, Mus musculus
  siRNA target sequence for Carf (NM_139150.1,745-763).
gagttgtgagaaaattgga

SEQ ID NO: 442468 - DNA, 19 bp, Mus musculus
  siRNA target sequence for Carf (NM_139150.1,772-790).
ccgtggctactgtgtaagt

SEQ ID NO: 442469 - DNA, 19 bp, Mus musculus
  siRNA target sequence for Carf (NM_139150.1,878-896).
cctgccacacgcttgatgt

SEQ ID NO: 442470 - DNA, 19 bp, Mus musculus
  siRNA target sequence for Carf (NM_139150.1,903-921).
ctcagtatgtcccatatga

SEQ ID NO: 442471 - DNA, 19 bp, Mus musculus
  siRNA target sequence for Carf (NM_139150.1,920-938).
gacggaatcccatttgtca

SEQ ID NO: 442472 - DNA, 19 bp, Mus musculus
  siRNA target sequence for Carf (NM_139150.1,945-963).
gaagtcgagctgtggtaat

SEQ ID NO: 442473 - DNA, 19 bp, Mus musculus
  siRNA target sequence for Carf (NM_139150.1,948-966).
gtcgagctgtggtaatgga

SEQ ID NO: 442474 - DNA, 19 bp, Mus musculus
  siRNA target sequence for Carf (NM_139150.1,985-1003).
gagaaaaggttttcagtta

SEQ ID NO: 442475 - DNA, 19 bp, Mus musculus
  siRNA target sequence for Carf (NM_139150.1,1030-1048).
gtcttgtcatctctataaa

SEQ ID NO: 442476 - DNA, 19 bp, Mus musculus
  siRNA target sequence for Carf (NM_139150.1,1053-1071).
cttgtccagccaggatata

SEQ ID NO: 442477 - DNA, 19 bp, Mus musculus
  siRNA target sequence for Carf (NM_139150.1,1058-1076).
ccagccaggatatacatta

SEQ ID NO: 442478 - DNA, 19 bp, Mus musculus
  siRNA target sequence for Carf (NM_139150.1,1066-1084).
gatatacattaaaaaggta

SEQ ID NO: 442479 - DNA, 19 bp, Mus musculus
  siRNA target sequence for Carf (NM_139150.1,1110-1128).
ctacagacccccaaattga

SEQ ID NO: 442480 - DNA, 19 bp, Mus musculus
  siRNA target sequence for Carf (NM_139150.1,1121-1139).
caaattgacaggaagataa

SEQ ID NO: 442481 - DNA, 19 bp, Mus musculus
  siRNA target sequence for Carf (NM_139150.1,1279-1297).
gtcaccgtcaccttttcct

SEQ ID NO: 442482 - DNA, 19 bp, Mus musculus
  siRNA target sequence for Carf (NM_139150.1,1367-1385).
ccgcaagtagcgcataaga

SEQ ID NO: 442483 - DNA, 19 bp, Mus musculus
  siRNA target sequence for Carf (NM_139150.1,1368-1386).
cgcaagtagcgcataagat

SEQ ID NO: 442484 - DNA, 19 bp, Mus musculus
  siRNA target sequence for Carf (NM_139150.1,1369-1387).
gcaagtagcgcataagatt

SEQ ID NO: 442485 - DNA, 19 bp, Mus musculus
  siRNA target sequence for Carf (NM_139150.1,1405-1423).
gggagtaggacaagtgtat

SEQ ID NO: 442486 - DNA, 19 bp, Mus musculus
  siRNA target sequence for Carf (NM_139150.1,1453-1471).
ggaaagagaactgttcaaa

SEQ ID NO: 442487 - DNA, 19 bp, Mus musculus
  siRNA target sequence for Carf (NM_139150.1,1465-1483).
gttcaaacctgatgagata

SEQ ID NO: 442488 - DNA, 19 bp, Mus musculus
  siRNA target sequence for Carf (NM_139150.1,1478-1496).
gagatacctgaaagacata

SEQ ID NO: 442489 - DNA, 19 bp, Mus musculus
  siRNA target sequence for Carf (NM_139150.1,1480-1498).
gatacctgaaagacataat

SEQ ID NO: 442490 - DNA, 19 bp, Mus musculus
  siRNA target sequence for Carf (NM_139150.1,1484-1502).
cctgaaagacataatttat

SEQ ID NO: 442491 - DNA, 19 bp, Mus musculus
  siRNA target sequence for Carf (NM_139150.1,1541-1559).
catgaggtacagaaatcct

SEQ ID NO: 442492 - DNA, 19 bp, Mus musculus
  siRNA target sequence for Carf (NM_139150.1,1568-1586).
ggagatgtggtatataact

SEQ ID NO: 442493 - DNA, 19 bp, Mus musculus
  siRNA target sequence for Carf (NM_139150.1,1607-1625).
cttcagtggacgacagata

SEQ ID NO: 442494 - DNA, 19 bp, Mus musculus
  siRNA target sequence for Carf (NM_139150.1,1636-1654).
cctcagagagactgtaaca

SEQ ID NO: 442495 - DNA, 19 bp, Mus musculus
  siRNA target sequence for Carf (NM_139150.1,1645-1663).
gactgtaacagttacattt

SEQ ID NO: 442496 - DNA, 19 bp, Mus musculus
  siRNA target sequence for Carf (NM_139150.1,1685-1703).
gaaccgattcccagcaaaa

SEQ ID NO: 442497 - DNA, 19 bp, Mus musculus
  siRNA target sequence for Carf (NM_139150.1,1741-1759).
gccactttcttcatttcca

SEQ ID NO: 442498 - DNA, 19 bp, Mus musculus
  siRNA target sequence for Carf (NM_139150.1,1775-1793).
cactttcaggctttgaagt

SEQ ID NO: 442499 - DNA, 19 bp, Mus musculus
  siRNA target sequence for Carf (NM_139150.1,1815-1833).
ctgatggctcacaagcttt

SEQ ID NO: 442500 - DNA, 19 bp, Mus musculus
  siRNA target sequence for Carf (NM_139150.1,1824-1842).
cacaagctttggtatcagt

SEQ ID NO: 442501 - DNA, 19 bp, Mus musculus
  siRNA target sequence for Carf (NM_139150.1,1934-1952).
caaaaccctgggacagata

SEQ ID NO: 442502 - DNA, 19 bp, Mus musculus
  siRNA target sequence for Carf (NM_139150.1,1990-2008).
gggccacctcccagaatca

SEQ ID NO: 442503 - DNA, 19 bp, Mus musculus
  siRNA target sequence for Carf (NM_139150.1,2092-2110).
gactctgttgggagatgta

SEQ ID NO: 442504 - DNA, 19 bp, Mus musculus
  siRNA target sequence for Carf (NM_139150.1,2111-2129).
caaaccgttccaatacaga

SEQ ID NO: 442505 - DNA, 19 bp, Mus musculus
  siRNA target sequence for Carf (NM_139150.1,2115-2133).
ccgttccaatacagatcat

SEQ ID NO: 442506 - DNA, 19 bp, Mus musculus
  siRNA target sequence for Carf (NM_139150.1,2116-2134).
cgttccaatacagatcata

SEQ ID NO: 442507 - DNA, 19 bp, Mus musculus
  siRNA target sequence for Carf (NM_139150.1,2139-2157).
gccgtccagtgcttgttga

SEQ ID NO: 442508 - DNA, 19 bp, Mus musculus
  siRNA target sequence for Carf (NM_139150.1,2140-2158).
ccgtccagtgcttgttgaa

SEQ ID NO: 442509 - DNA, 19 bp, Mus musculus
  siRNA target sequence for Carf (NM_139150.1,2167-2185).
gtctaagaaccaagttaaa

SEQ ID NO: 442510 - DNA, 19 bp, Mus musculus
  siRNA target sequence for Carf (NM_139150.1,2173-2191).
gaaccaagttaaacaagaa

SEQ ID NO: 442511 - DNA, 19 bp, Mus musculus
  siRNA target sequence for Cart1 (NM_172553.1,511-529).
gagcgaactggatgaactt

SEQ ID NO: 442512 - DNA, 19 bp, Mus musculus
  siRNA target sequence for Cart1 (NM_172553.1,571-589).
gagacaccgaactaccttt

SEQ ID NO: 442513 - DNA, 19 bp, Mus musculus
  siRNA target sequence for Cart1 (NM_172553.1,753-771).
gccaaatacagcaagctaa

SEQ ID NO: 442514 - DNA, 19 bp, Mus musculus
  siRNA target sequence for Cart1 (NM_172553.1,754-772).
ccaaatacagcaagctaaa

SEQ ID NO: 442515 - DNA, 19 bp, Mus musculus
  siRNA target sequence for Cart1 (NM_172553.1,782-800).
gctgccacgtacgacatat

SEQ ID NO: 442516 - DNA, 19 bp, Mus musculus
  siRNA target sequence for Cart1 (NM_172553.1,786-804).
ccacgtacgacatatcagt

SEQ ID NO: 442517 - DNA, 19 bp, Mus musculus
  siRNA target sequence for Cart1 (NM_172553.1,790-808).
gtacgacatatcagtctta

SEQ ID NO: 442518 - DNA, 19 bp, Mus musculus
  siRNA target sequence for Cart1 (NM_172553.1,830-848).
cagatccagaacaatttgt

SEQ ID NO: 442519 - DNA, 19 bp, Mus musculus
  siRNA target sequence for Cart1 (NM_172553.1,932-950).
cactcgcctcggacagatt

SEQ ID NO: 442520 - DNA, 19 bp, Mus musculus
  siRNA target sequence for Cart1 (NM_172553.1,941-959).
cggacagattccagttata

SEQ ID NO: 442521 - DNA, 19 bp, Mus musculus
  siRNA target sequence for Cart1 (NM_172553.1,954-972).
gttatacggggttttcgaa

SEQ ID NO: 442522 - DNA, 19 bp, Mus musculus
  siRNA target sequence for Cart1 (NM_172553.1,969-987).
cgaaccaccagaatcagtt

SEQ ID NO: 442523 - DNA, 19 bp, Mus musculus
  siRNA target sequence for Cart1 (NM_172553.1,992-1010).
cacgtgcccctcaataatt

SEQ ID NO: 442524 - DNA, 19 bp, Mus musculus
  siRNA target sequence for Cart1 (NM_172553.1,994-1012).
cgtgcccctcaataatttt

SEQ ID NO: 442525 - DNA, 19 bp, Mus musculus
  siRNA target sequence for Cart1 (NM_172553.1,1041-1059).
ccaacggacacgcatttga

SEQ ID NO: 442526 - DNA, 19 bp, Mus musculus
  siRNA target sequence for Cart1 (NM_172553.1,1042-1060).
caacggacacgcatttgaa

SEQ ID NO: 442527 - DNA, 19 bp, Mus musculus
  siRNA target sequence for Cart1 (NM_172553.1,1045-1063).
cggacacgcatttgaaaca

SEQ ID NO: 442528 - DNA, 19 bp, Mus musculus
  siRNA target sequence for Cart1 (NM_172553.1,1092-1110).
gtatcgctgttctgagaat

SEQ ID NO: 442529 - DNA, 19 bp, Mus musculus
  siRNA target sequence for Cart1 (NM_172553.1,1121-1139).
gagcacaccgccaatattt

SEQ ID NO: 442530 - DNA, 19 bp, Mus musculus
  siRNA target sequence for Cart1 (NM_172553.1,1123-1141).
gcacaccgccaatatttca

SEQ ID NO: 442531 - DNA, 19 bp, Mus musculus
  siRNA target sequence for Cart1 (NM_172553.1,1124-1142).
cacaccgccaatatttcat

SEQ ID NO: 442532 - DNA, 19 bp, Mus musculus
  siRNA target sequence for Cbfa2t1h (NM_009822.1,488-506).
gccaacgacattaacgaat

SEQ ID NO: 442533 - DNA, 19 bp, Mus musculus
  siRNA target sequence for Cbfa2t1h (NM_009822.1,549-567).
ccgcctaatggctttagca

SEQ ID NO: 442534 - DNA, 19 bp, Mus musculus
  siRNA target sequence for Cbfa2t1h (NM_009822.1,550-568).
cgcctaatggctttagcaa

SEQ ID NO: 442535 - DNA, 19 bp, Mus musculus
  siRNA target sequence for Cbfa2t1h (NM_009822.1,641-659).
cagcaagctgaaacgattt

SEQ ID NO: 442536 - DNA, 19 bp, Mus musculus
  siRNA target sequence for Cbfa2t1h (NM_009822.1,643-661).
gcaagctgaaacgatttct

SEQ ID NO: 442537 - DNA, 19 bp, Mus musculus
  siRNA target sequence for Cbfa2t1h (NM_009822.1,644-662).
caagctgaaacgatttctt

SEQ ID NO: 442538 - DNA, 19 bp, Mus musculus
  siRNA target sequence for Cbfa2t1h (NM_009822.1,648-666).
ctgaaacgatttcttacta

SEQ ID NO: 442539 - DNA, 19 bp, Mus musculus
  siRNA target sequence for Cbfa2t1h (NM_009822.1,697-715).
cagagattggagaaagagt

SEQ ID NO: 442540 - DNA, 19 bp, Mus musculus
  siRNA target sequence for Cbfa2t1h (NM_009822.1,712-730).
gagttcgcacccttgtact

SEQ ID NO: 442541 - DNA, 19 bp, Mus musculus
  siRNA target sequence for Cbfa2t1h (NM_009822.1,732-750).
ggactggtgaactctactt

SEQ ID NO: 442542 - DNA, 19 bp, Mus musculus
  siRNA target sequence for Cbfa2t1h (NM_009822.1,737-755).
ggtgaactctactttgaca

SEQ ID NO: 442543 - DNA, 19 bp, Mus musculus
  siRNA target sequence for Cbfa2t1h (NM_009822.1,740-758).
gaactctactttgacaatt

SEQ ID NO: 442544 - DNA, 19 bp, Mus musculus
  siRNA target sequence for Cbfa2t1h (NM_009822.1,777-795).
ctgcaagaagctactaact

SEQ ID NO: 442545 - DNA, 19 bp, Mus musculus
  siRNA target sequence for Cbfa2t1h (NM_009822.1,808-826).
cttttgtcatcccgttttt

SEQ ID NO: 442546 - DNA, 19 bp, Mus musculus
  siRNA target sequence for Cbfa2t1h (NM_009822.1,969-987).
cttctcgacgtgaacgaaa

SEQ ID NO: 442547 - DNA, 19 bp, Mus musculus
  siRNA target sequence for Cbfa2t1h (NM_009822.1,1064-1082).
caagcgaccatgcactatt

SEQ ID NO: 442548 - DNA, 19 bp, Mus musculus
  siRNA target sequence for Cbfa2t1h (NM_009822.1,1091-1109).
ccagcggtacagtccaaat

SEQ ID NO: 442549 - DNA, 19 bp, Mus musculus
  siRNA target sequence for Cbfa2t1h (NM_009822.1,1092-1110).
cagcggtacagtccaaata

SEQ ID NO: 442550 - DNA, 19 bp, Mus musculus
  siRNA target sequence for Cbfa2t1h (NM_009822.1,1094-1112).
gcggtacagtccaaataat

SEQ ID NO: 442551 - DNA, 19 bp, Mus musculus
  siRNA target sequence for Cbfa2t1h (NM_009822.1,1104-1122).
ccaaataatggcttatcct

SEQ ID NO: 442552 - DNA, 19 bp, Mus musculus
  siRNA target sequence for Cbfa2t1h (NM_009822.1,1167-1185).
cattaccgattggatgata

SEQ ID NO: 442553 - DNA, 19 bp, Mus musculus
  siRNA target sequence for Cbfa2t1h (NM_009822.1,1292-1310).
gattgaccacagactaaca

SEQ ID NO: 442554 - DNA, 19 bp, Mus musculus
  siRNA target sequence for Cbfa2t1h (NM_009822.1,1338-1356).
catctcgatcatctgttaa

SEQ ID NO: 442555 - DNA, 19 bp, Mus musculus
  siRNA target sequence for Cbfa2t1h (NM_009822.1,1341-1359).
ctcgatcatctgttaaact

SEQ ID NO: 442556 - DNA, 19 bp, Mus musculus
  siRNA target sequence for Cbfa2t1h (NM_009822.1,1389-1407).
cgatccctcactgtactaa

SEQ ID NO: 442557 - DNA, 19 bp, Mus musculus
  siRNA target sequence for Cbfa2t1h (NM_009822.1,1425-1443).
gaccgggaagaactgaatt

SEQ ID NO: 442558 - DNA, 19 bp, Mus musculus
  siRNA target sequence for Cbfa2t1h (NM_009822.1,1428-1446).
cgggaagaactgaattact

SEQ ID NO: 442559 - DNA, 19 bp, Mus musculus
  siRNA target sequence for Cbfa2t1h (NM_009822.1,1464-1482).
gatgctgaggacttaaaaa

SEQ ID NO: 442560 - DNA, 19 bp, Mus musculus
  siRNA target sequence for Cbfa2t1h (NM_009822.1,1534-1552).
cagacccagtcgcattaga

SEQ ID NO: 442561 - DNA, 19 bp, Mus musculus
  siRNA target sequence for Cbfa2t1h (NM_009822.1,1651-1669).
caatgacggagctgcaaaa

SEQ ID NO: 442562 - DNA, 19 bp, Mus musculus
  siRNA target sequence for Cbfa2t1h (NM_009822.1,1868-1886).
ccgatactgtggctctttt

SEQ ID NO: 442563 - DNA, 19 bp, Mus musculus
  siRNA target sequence for Cbfa2t1h (NM_009822.1,1869-1887).
cgatactgtggctcttttt

SEQ ID NO: 442564 - DNA, 19 bp, Mus musculus
  siRNA target sequence for Cbfa2t1h (NM_009822.1,2051-2069).
gggaaccccctctaccata

SEQ ID NO: 442565 - DNA, 19 bp, Mus musculus
  siRNA target sequence for Cbfa2t3h (NM_009824.1,363-381).
cgtttccacggctgcttaa

SEQ ID NO: 442566 - DNA, 19 bp, Mus musculus
  siRNA target sequence for Cbfa2t3h (NM_009824.1,364-382).
gtttccacggctgcttaaa

SEQ ID NO: 442567 - DNA, 19 bp, Mus musculus
  siRNA target sequence for Cbfa2t3h (NM_009824.1,388-406).
ccatggtctgtctcttgat

SEQ ID NO: 442568 - DNA, 19 bp, Mus musculus
  siRNA target sequence for Cbfa2t3h (NM_009824.1,437-455).
ccacggtgccccatctaca

SEQ ID NO: 442569 - DNA, 19 bp, Mus musculus
  siRNA target sequence for Cbfa2t3h (NM_009824.1,652-670).
ctctgacgatcgaagagtt

SEQ ID NO: 442570 - DNA, 19 bp, Mus musculus
  siRNA target sequence for Cbfa2t3h (NM_009824.1,656-674).
gacgatcgaagagtttcat

SEQ ID NO: 442571 - DNA, 19 bp, Mus musculus
  siRNA target sequence for Cbfa2t3h (NM_009824.1,702-720).
ccactgaggccgtttgtta

SEQ ID NO: 442572 - DNA, 19 bp, Mus musculus
  siRNA target sequence for Cbfa2t3h (NM_009824.1,703-721).
cactgaggccgtttgttat

SEQ ID NO: 442573 - DNA, 19 bp, Mus musculus
  siRNA target sequence for Cbfa2t3h (NM_009824.1,712-730).
cgtttgttatcccttttct

SEQ ID NO: 442574 - DNA, 19 bp, Mus musculus
  siRNA target sequence for Cbfa2t3h (NM_009824.1,909-927).
cctgacaggaccaaagaga

SEQ ID NO: 442575 - DNA, 19 bp, Mus musculus
  siRNA target sequence for Cbfa2t3h (NM_009824.1,1159-1177).
ctcgacaagaagaagtgat

SEQ ID NO: 442576 - DNA, 19 bp, Mus musculus
  siRNA target sequence for Cbfa2t3h (NM_009824.1,1197-1215).
cgcgagtgggcagaagaat

SEQ ID NO: 442577 - DNA, 19 bp, Mus musculus
  siRNA target sequence for Cbfa2t3h (NM_009824.1,1418-1436).
ggggtctcagctagatgtt

SEQ ID NO: 442578 - DNA, 19 bp, Mus musculus
  siRNA target sequence for Cbfa2t3h (NM_009824.1,1526-1544).
ccaggccatgtcagaacta

SEQ ID NO: 442579 - DNA, 19 bp, Mus musculus
  siRNA target sequence for Cdkn2a (NM_009877.1,160-178).
ctggctttcgtgaacatgt

SEQ ID NO: 442580 - DNA, 19 bp, Mus musculus
  siRNA target sequence for Cdkn2a (NM_009877.1,163-181).
gctttcgtgaacatgttgt

SEQ ID NO: 442581 - DNA, 19 bp, Mus musculus
  siRNA target sequence for Cdkn2a (NM_009877.1,164-182).
ctttcgtgaacatgttgtt

SEQ ID NO: 442582 - DNA, 19 bp, Mus musculus
  siRNA target sequence for Cdkn2a (NM_009877.1,452-470).
caagacatcgtgcgatatt

SEQ ID NO: 442583 - DNA, 19 bp, Mus musculus
  siRNA target sequence for Cdx1 (NM_009880.1,161-179).
ggacgccctacgaatggat

SEQ ID NO: 442584 - DNA, 19 bp, Mus musculus
  siRNA target sequence for Cdx1 (NM_009880.1,224-242).
cccgaaccaaggacaagta

SEQ ID NO: 442585 - DNA, 19 bp, Mus musculus
  siRNA target sequence for Cdx1 (NM_009880.1,353-371).
cagagcggcaggtaaagat

SEQ ID NO: 442586 - DNA, 19 bp, Mus musculus
  siRNA target sequence for Cdx1 (NM_009880.1,397-415).
gagcgcaaagtaaacaaga

SEQ ID NO: 442587 - DNA, 19 bp, Mus musculus
  siRNA target sequence for Cdx1 (NM_009880.1,492-510).
gccacccctaggaagtcta

SEQ ID NO: 442588 - DNA, 19 bp, Mus musculus
  siRNA target sequence for Cdx1 (NM_009880.1,493-511).
ccacccctaggaagtctat

SEQ ID NO: 442589 - DNA, 19 bp, Mus musculus
  siRNA target sequence for Cdx1 (NM_009880.1,503-521).
gaagtctatgccctactaa

SEQ ID NO: 442590 - DNA, 19 bp, Mus musculus
  siRNA target sequence for Cdx2 (NM_007673.2,292-310).
caaggacgtgagcatgtat

SEQ ID NO: 442591 - DNA, 19 bp, Mus musculus
  siRNA target sequence for Cdx2 (NM_007673.2,296-314).
gacgtgagcatgtatccta

SEQ ID NO: 442592 - DNA, 19 bp, Mus musculus
  siRNA target sequence for Cdx2 (NM_007673.2,343-361).
cctggctccgcagaacttt

SEQ ID NO: 442593 - DNA, 19 bp, Mus musculus
  siRNA target sequence for Cdx2 (NM_007673.2,347-365).
gctccgcagaactttgtca

SEQ ID NO: 442594 - DNA, 19 bp, Mus musculus
  siRNA target sequence for Cdx2 (NM_007673.2,538-556).
ggtagcccacggtctcaat

SEQ ID NO: 442595 - DNA, 19 bp, Mus musculus
  siRNA target sequence for Cdx2 (NM_007673.2,794-812).
ctaggaagccaagtgaaaa

SEQ ID NO: 442596 - DNA, 19 bp, Mus musculus
  siRNA target sequence for Cdx2 (NM_007673.2,881-899).
cactttagtcgatacatca

SEQ ID NO: 442597 - DNA, 19 bp, Mus musculus
  siRNA target sequence for Cdx2 (NM_007673.2,940-958).
ctccgagaggcaggttaaa

SEQ ID NO: 442598 - DNA, 19 bp, Mus musculus
  siRNA target sequence for Cdx2 (NM_007673.2,943-961).
cgagaggcaggttaaaatt

SEQ ID NO: 442599 - DNA, 19 bp, Mus musculus
  siRNA target sequence for Cdx4 (NM_007674.1,168-186).
gtatggaagctgcctttta

SEQ ID NO: 442600 - DNA, 19 bp, Mus musculus
  siRNA target sequence for Cdx4 (NM_007674.1,325-343).
gtgggttaccctcatatgt

SEQ ID NO: 442601 - DNA, 19 bp, Mus musculus
  siRNA target sequence for Cdx4 (NM_007674.1,404-422).
gggaagactggagtacata

SEQ ID NO: 442602 - DNA, 19 bp, Mus musculus
  siRNA target sequence for Cdx4 (NM_007674.1,652-670).
caggtgacggggaaaacca

SEQ ID NO: 442603 - DNA, 19 bp, Mus musculus
  siRNA target sequence for Cdx4 (NM_007674.1,669-687).
caggacaaaagaaaagtat

SEQ ID NO: 442604 - DNA, 19 bp, Mus musculus
  siRNA target sequence for Cdx4 (NM_007674.1,730-748).
gaatttcactgcaatagat

SEQ ID NO: 442605 - DNA, 19 bp, Mus musculus
  siRNA target sequence for Cdx4 (NM_007674.1,736-754).
cactgcaatagatacatca

SEQ ID NO: 442606 - DNA, 19 bp, Mus musculus
  siRNA target sequence for Cdx4 (NM_007674.1,887-905).
gaggttccgtgcaaagtga

SEQ ID NO: 442607 - DNA, 19 bp, Mus musculus
  siRNA target sequence for Cdx4 (NM_007674.1,931-949).
ctgcctaacgctttcttca

SEQ ID NO: 442608 - DNA, 19 bp, Mus musculus
  siRNA target sequence for Cdx4 (NM_007674.1,959-977).
ctgctgtccgtggatttca

SEQ ID NO: 442609 - DNA, 19 bp, Mus musculus
  siRNA target sequence for Cdx4 (NM_007674.1,987-1005).
gatacagcaggtcatagtt

SEQ ID NO: 442610 - DNA, 19 bp, Mus musculus
  siRNA target sequence for Cdx4 (NM_007674.1,993-1011).
gcaggtcatagtttctgaa

SEQ ID NO: 442611 - DNA, 19 bp, Mus musculus
  siRNA target sequence for Cdx4 (NM_007674.1,994-1012).
caggtcatagtttctgaat

SEQ ID NO: 442612 - DNA, 19 bp, Mus musculus
  siRNA target sequence for Chd4 (NM_145979.1,266-284).
caccccatccagaaaatga

SEQ ID NO: 442613 - DNA, 19 bp, Mus musculus
  siRNA target sequence for Chd4 (NM_145979.1,380-398).
gcaagcgccaaaaaaagga

SEQ ID NO: 442614 - DNA, 19 bp, Mus musculus
  siRNA target sequence for Chd4 (NM_145979.1,514-532).
ctcggacctaagaaagaga

SEQ ID NO: 442615 - DNA, 19 bp, Mus musculus
  siRNA target sequence for Chd4 (NM_145979.1,693-711).
ggccttcagccaatttgtt

SEQ ID NO: 442616 - DNA, 19 bp, Mus musculus
  siRNA target sequence for Chd4 (NM_145979.1,694-712).
gccttcagccaatttgtta

SEQ ID NO: 442617 - DNA, 19 bp, Mus musculus
  siRNA target sequence for Chd4 (NM_145979.1,696-714).
cttcagccaatttgttaga

SEQ ID NO: 442618 - DNA, 19 bp, Mus musculus
  siRNA target sequence for Chd4 (NM_145979.1,715-733).
cccctgattgctgctaaaa

SEQ ID NO: 442619 - DNA, 19 bp, Mus musculus
  siRNA target sequence for Chd4 (NM_145979.1,775-793).
gcaaagtggagggaattca

SEQ ID NO: 442620 - DNA, 19 bp, Mus musculus
  siRNA target sequence for Chd4 (NM_145979.1,873-891).
catggtgacagctactgaa

SEQ ID NO: 442621 - DNA, 19 bp, Mus musculus
  siRNA target sequence for Chd4 (NM_145979.1,1060-1078).
ggctccaagcggaagagat

SEQ ID NO: 442622 - DNA, 19 bp, Mus musculus
  siRNA target sequence for Chd4 (NM_145979.1,1082-1100).
cgagtgaggacgacgattt

SEQ ID NO: 442623 - DNA, 19 bp, Mus musculus
  siRNA target sequence for Chd4 (NM_145979.1,1083-1101).
gagtgaggacgacgattta

SEQ ID NO: 442624 - DNA, 19 bp, Mus musculus
  siRNA target sequence for Chd4 (NM_145979.1,1085-1103).
gtgaggacgacgatttaga

SEQ ID NO: 442625 - DNA, 19 bp, Mus musculus
  siRNA target sequence for Chd4 (NM_145979.1,1089-1107).
ggacgacgatttagatgta

SEQ ID NO: 442626 - DNA, 19 bp, Mus musculus
  siRNA target sequence for Chd4 (NM_145979.1,1126-1144).
gccagtatcaacagctatt

SEQ ID NO: 442627 - DNA, 19 bp, Mus musculus
  siRNA target sequence for Chd4 (NM_145979.1,1128-1146).
cagtatcaacagctattct

SEQ ID NO: 442628 - DNA, 19 bp, Mus musculus
  siRNA target sequence for Chd4 (NM_145979.1,1130-1148).
gtatcaacagctattctgt

SEQ ID NO: 442629 - DNA, 19 bp, Mus musculus
  siRNA target sequence for Chd4 (NM_145979.1,1172-1190).
gtagtcggagccgtaagaa

SEQ ID NO: 442630 - DNA, 19 bp, Mus musculus
  siRNA target sequence for Chd4 (NM_145979.1,1175-1193).
gtcggagccgtaagaaact

SEQ ID NO: 442631 - DNA, 19 bp, Mus musculus
  siRNA target sequence for Chd4 (NM_145979.1,1192-1210).
ctccggaccgctaaaaaga

SEQ ID NO: 442632 - DNA, 19 bp, Mus musculus
  siRNA target sequence for Chd4 (NM_145979.1,1194-1212).
ccggaccgctaaaaagaaa

SEQ ID NO: 442633 - DNA, 19 bp, Mus musculus
  siRNA target sequence for Chd4 (NM_145979.1,1195-1213).
cggaccgctaaaaagaaaa

SEQ ID NO: 442634 - DNA, 19 bp, Mus musculus
  siRNA target sequence for Chd4 (NM_145979.1,1233-1251).
gactgctgtggatggttat

SEQ ID NO: 442635 - DNA, 19 bp, Mus musculus
  siRNA target sequence for Chd4 (NM_145979.1,1319-1337).
gtccccgagcctaccatat

SEQ ID NO: 442636 - DNA, 19 bp, Mus musculus
  siRNA target sequence for Chd4 (NM_145979.1,1409-1427).
ggatccagtgggaagctaa

SEQ ID NO: 442637 - DNA, 19 bp, Mus musculus
  siRNA target sequence for Chd4 (NM_145979.1,1489-1507).
gatgaccatcacatggaat

SEQ ID NO: 442638 - DNA, 19 bp, Mus musculus
  siRNA target sequence for Chd4 (NM_145979.1,1623-1641).
ctgtccccgctgtacttgt

SEQ ID NO: 442639 - DNA, 19 bp, Mus musculus
  siRNA target sequence for Chd4 (NM_145979.1,1723-1741).
ccagatgctgaccctaata

SEQ ID NO: 442640 - DNA, 19 bp, Mus musculus
  siRNA target sequence for Chd4 (NM_145979.1,1875-1893).
ctaccagcggaagaatgat

SEQ ID NO: 442641 - DNA, 19 bp, Mus musculus
  siRNA target sequence for Chd4 (NM_145979.1,1953-1971).
gaacaaggaccctaagttt

SEQ ID NO: 442642 - DNA, 19 bp, Mus musculus
  siRNA target sequence for Chd4 (NM_145979.1,1992-2010).
ctaccgctatggaataaaa

SEQ ID NO: 442643 - DNA, 19 bp, Mus musculus
  siRNA target sequence for Chd4 (NM_145979.1,2058-2076).
gaagggccacgttcactat

SEQ ID NO: 442644 - DNA, 19 bp, Mus musculus
  siRNA target sequence for Chd4 (NM_145979.1,2061-2079).
gggccacgttcactattta

SEQ ID NO: 442645 - DNA, 19 bp, Mus musculus
  siRNA target sequence for Chd4 (NM_145979.1,2062-2080).
ggccacgttcactatttaa

SEQ ID NO: 442646 - DNA, 19 bp, Mus musculus
  siRNA target sequence for Chd4 (NM_145979.1,2063-2081).
gccacgttcactatttaat

SEQ ID NO: 442647 - DNA, 19 bp, Mus musculus
  siRNA target sequence for Chd4 (NM_145979.1,2065-2083).
cacgttcactatttaatca

SEQ ID NO: 442648 - DNA, 19 bp, Mus musculus
  siRNA target sequence for Chd4 (NM_145979.1,2068-2086).
gttcactatttaatcaagt

SEQ ID NO: 442649 - DNA, 19 bp, Mus musculus
  siRNA target sequence for Chd4 (NM_145979.1,2171-2189).
ggaaccacagggagttaat

SEQ ID NO: 442650 - DNA, 19 bp, Mus musculus
  siRNA target sequence for Chd4 (NM_145979.1,2206-2224).
cgacccggcaagaagctta

SEQ ID NO: 442651 - DNA, 19 bp, Mus musculus
  siRNA target sequence for Chd4 (NM_145979.1,2207-2225).
gacccggcaagaagcttaa

SEQ ID NO: 442652 - DNA, 19 bp, Mus musculus
  siRNA target sequence for Chd4 (NM_145979.1,2330-2348).
ccctgcatccctaccaaat

SEQ ID NO: 442653 - DNA, 19 bp, Mus musculus
  siRNA target sequence for Chd4 (NM_145979.1,2380-2398).
gctcagggaaccgatacta

SEQ ID NO: 442654 - DNA, 19 bp, Mus musculus
  siRNA target sequence for Chd4 (NM_145979.1,2381-2399).
ctcagggaaccgatactat

SEQ ID NO: 442655 - DNA, 19 bp, Mus musculus
  siRNA target sequence for Chd4 (NM_145979.1,2383-2401).
cagggaaccgatactatct

SEQ ID NO: 442656 - DNA, 19 bp, Mus musculus
  siRNA target sequence for Chd4 (NM_145979.1,2477-2495).
ccaaaggccccttcttagt

SEQ ID NO: 442657 - DNA, 19 bp, Mus musculus
  siRNA target sequence for Chd4 (NM_145979.1,2658-2676).
ctcgaggatgaagaaagaa

SEQ ID NO: 442658 - DNA, 19 bp, Mus musculus
  siRNA target sequence for Chd4 (NM_145979.1,2698-2716).
ctgctgacatcctatgagt

SEQ ID NO: 442659 - DNA, 19 bp, Mus musculus
  siRNA target sequence for Chd4 (NM_145979.1,2713-2731).
gagttgatcaccattgata

SEQ ID NO: 442660 - DNA, 19 bp, Mus musculus
  siRNA target sequence for Chd4 (NM_145979.1,2839-2857).
cagcacaagctgttgctaa

SEQ ID NO: 442661 - DNA, 19 bp, Mus musculus
  siRNA target sequence for Chd4 (NM_145979.1,2861-2879).
gaactccgttacagaacaa

SEQ ID NO: 442662 - DNA, 19 bp, Mus musculus
  siRNA target sequence for Chd4 (NM_145979.1,2864-2882).
ctccgttacagaacaatct

SEQ ID NO: 442663 - DNA, 19 bp, Mus musculus
  siRNA target sequence for Chd4 (NM_145979.1,2877-2895).
caatctagaggaactgttt

SEQ ID NO: 442664 - DNA, 19 bp, Mus musculus
  siRNA target sequence for Chd4 (NM_145979.1,2892-2910).
gtttcatctgctcaacttt

SEQ ID NO: 442665 - DNA, 19 bp, Mus musculus
  siRNA target sequence for Chd4 (NM_145979.1,2922-2940).
gaggttccacaacttagaa

SEQ ID NO: 442666 - DNA, 19 bp, Mus musculus
  siRNA target sequence for Chd4 (NM_145979.1,3034-3052).
gctgacgtcttcaagaata

SEQ ID NO: 442667 - DNA, 19 bp, Mus musculus
  siRNA target sequence for Chd4 (NM_145979.1,3131-3149).
ggaatttcgaagcacttaa

SEQ ID NO: 442668 - DNA, 19 bp, Mus musculus
  siRNA target sequence for Chd4 (NM_145979.1,3132-3150).
gaatttcgaagcacttaat

SEQ ID NO: 442669 - DNA, 19 bp, Mus musculus
  siRNA target sequence for Chd4 (NM_145979.1,3253-3271).
cctaagatgcctaatggta

SEQ ID NO: 442670 - DNA, 19 bp, Mus musculus
  siRNA target sequence for Chd4 (NM_145979.1,3254-3272).
ctaagatgcctaatggtat

SEQ ID NO: 442671 - DNA, 19 bp, Mus musculus
  siRNA target sequence for Chd4 (NM_145979.1,3258-3276).
gatgcctaatggtatgtat

SEQ ID NO: 442672 - DNA, 19 bp, Mus musculus
  siRNA target sequence for Chd4 (NM_145979.1,3261-3279).
gcctaatggtatgtatgat

SEQ ID NO: 442673 - DNA, 19 bp, Mus musculus
  siRNA target sequence for Chd4 (NM_145979.1,3277-3295).
gatggcagtgccctaatca

SEQ ID NO: 442674 - DNA, 19 bp, Mus musculus
  siRNA target sequence for Chd4 (NM_145979.1,3353-3371).
ggcatcgtgtgctcatctt

SEQ ID NO: 442675 - DNA, 19 bp, Mus musculus
  siRNA target sequence for Chd4 (NM_145979.1,3396-3414).
cttgctagaggatttttta

SEQ ID NO: 442676 - DNA, 19 bp, Mus musculus
  siRNA target sequence for Chd4 (NM_145979.1,3468-3486).
gcgtcaggaggccattgat

SEQ ID NO: 442677 - DNA, 19 bp, Mus musculus
  siRNA target sequence for Chd4 (NM_145979.1,3497-3515).
caccgggtgctcaacagtt

SEQ ID NO: 442678 - DNA, 19 bp, Mus musculus
  siRNA target sequence for Chd4 (NM_145979.1,3562-3580).
gccactgcggacacagtta

SEQ ID NO: 442679 - DNA, 19 bp, Mus musculus
  siRNA target sequence for Chd4 (NM_145979.1,3563-3581).
ccactgcggacacagttat

SEQ ID NO: 442680 - DNA, 19 bp, Mus musculus
  siRNA target sequence for Chd4 (NM_145979.1,3564-3582).
cactgcggacacagttatt

SEQ ID NO: 442681 - DNA, 19 bp, Mus musculus
  siRNA target sequence for Chd4 (NM_145979.1,3568-3586).
gcggacacagttattatat

SEQ ID NO: 442682 - DNA, 19 bp, Mus musculus
  siRNA target sequence for Chd4 (NM_145979.1,3636-3654).
ccaccgtattgggcaaaat

SEQ ID NO: 442683 - DNA, 19 bp, Mus musculus
  siRNA target sequence for Chd4 (NM_145979.1,3637-3655).
caccgtattgggcaaaata

SEQ ID NO: 442684 - DNA, 19 bp, Mus musculus
  siRNA target sequence for Chd4 (NM_145979.1,3640-3658).
cgtattgggcaaaataaga

SEQ ID NO: 442685 - DNA, 19 bp, Mus musculus
  siRNA target sequence for Chd4 (NM_145979.1,3641-3659).
gtattgggcaaaataagaa

SEQ ID NO: 442686 - DNA, 19 bp, Mus musculus
  siRNA target sequence for Chd4 (NM_145979.1,3774-3792).
gacaggctcaatgtctaaa

SEQ ID NO: 442687 - DNA, 19 bp, Mus musculus
  siRNA target sequence for Chd4 (NM_145979.1,3799-3817).
cttgatgatatcctcaaat

SEQ ID NO: 442688 - DNA, 19 bp, Mus musculus
  siRNA target sequence for Chd4 (NM_145979.1,3820-3838).
ggcactgaggagctattca

SEQ ID NO: 442689 - DNA, 19 bp, Mus musculus
  siRNA target sequence for Chd4 (NM_145979.1,3821-3839).
gcactgaggagctattcaa

SEQ ID NO: 442690 - DNA, 19 bp, Mus musculus
  siRNA target sequence for Chd4 (NM_145979.1,3966-3984).
gcagggcatgaatgaatat

SEQ ID NO: 442691 - DNA, 19 bp, Mus musculus
  siRNA target sequence for Chd4 (NM_145979.1,4237-4255).
gacaaccagtccgattact

SEQ ID NO: 442692 - DNA, 19 bp, Mus musculus
  siRNA target sequence for Chd4 (NM_145979.1,4239-4257).
caaccagtccgattactca

SEQ ID NO: 442693 - DNA, 19 bp, Mus musculus
  siRNA target sequence for Chd4 (NM_145979.1,4323-4341).
caagggcctgcggaatgat

SEQ ID NO: 442694 - DNA, 19 bp, Mus musculus
  siRNA target sequence for Chd4 (NM_145979.1,4326-4344).
gggcctgcggaatgataaa

SEQ ID NO: 442695 - DNA, 19 bp, Mus musculus
  siRNA target sequence for Chd4 (NM_145979.1,4330-4348).
ctgcggaatgataaagata

SEQ ID NO: 442696 - DNA, 19 bp, Mus musculus
  siRNA target sequence for Chd4 (NM_145979.1,4370-4388).
cccgtgttggtgggaatat

SEQ ID NO: 442697 - DNA, 19 bp, Mus musculus
  siRNA target sequence for Chd4 (NM_145979.1,4371-4389).
ccgtgttggtgggaatatt

SEQ ID NO: 442698 - DNA, 19 bp, Mus musculus
  siRNA target sequence for Chd4 (NM_145979.1,4373-4391).
gtgttggtgggaatattga

SEQ ID NO: 442699 - DNA, 19 bp, Mus musculus
  siRNA target sequence for Chd4 (NM_145979.1,4409-4427).
ctcgtcagcgaaaagcatt

SEQ ID NO: 442700 - DNA, 19 bp, Mus musculus
  siRNA target sequence for Chd4 (NM_145979.1,4414-4432).
cagcgaaaagcatttctta

SEQ ID NO: 442701 - DNA, 19 bp, Mus musculus
  siRNA target sequence for Chd4 (NM_145979.1,4416-4434).
gcgaaaagcatttcttaat

SEQ ID NO: 442702 - DNA, 19 bp, Mus musculus
  siRNA target sequence for Chd4 (NM_145979.1,4423-4441).
gcatttcttaatgcaatta

SEQ ID NO: 442703 - DNA, 19 bp, Mus musculus
  siRNA target sequence for Chd4 (NM_145979.1,4613-4631).
gcctgtctcgtcaacatgt

SEQ ID NO: 442704 - DNA, 19 bp, Mus musculus
  siRNA target sequence for Chd4 (NM_145979.1,4614-4632).
cctgtctcgtcaacatgtt

SEQ ID NO: 442705 - DNA, 19 bp, Mus musculus
  siRNA target sequence for Chd4 (NM_145979.1,4644-4662).
cggtgtcatgtctctgatt

SEQ ID NO: 442706 - DNA, 19 bp, Mus musculus
  siRNA target sequence for Chd4 (NM_145979.1,4648-4666).
gtcatgtctctgattcgaa

SEQ ID NO: 442707 - DNA, 19 bp, Mus musculus
  siRNA target sequence for Chd4 (NM_145979.1,4712-4730).
ccgaactggctgaagtaga

SEQ ID NO: 442708 - DNA, 19 bp, Mus musculus
  siRNA target sequence for Chd4 (NM_145979.1,4797-4815).
ggacacacaacccaatact

SEQ ID NO: 442709 - DNA, 19 bp, Mus musculus
  siRNA target sequence for Chd4 (NM_145979.1,4891-4909).
ggagagaaggaagttaaat

SEQ ID NO: 442710 - DNA, 19 bp, Mus musculus
  siRNA target sequence for Chd4 (NM_145979.1,4894-4912).
gagaaggaagttaaatcta

SEQ ID NO: 442711 - DNA, 19 bp, Mus musculus
  siRNA target sequence for Chd4 (NM_145979.1,5021-5039).
ctgagggggaggaaaaagt

SEQ ID NO: 442712 - DNA, 19 bp, Mus musculus
  siRNA target sequence for Chd4 (NM_145979.1,5080-5098).
gagacagaggccaaaggta

SEQ ID NO: 442713 - DNA, 19 bp, Mus musculus
  siRNA target sequence for Chd4 (NM_145979.1,5218-5236).
gaaactcccaaggatctta

SEQ ID NO: 442714 - DNA, 19 bp, Mus musculus
  siRNA target sequence for Chd4 (NM_145979.1,5222-5240).
ctcccaaggatcttagtga

SEQ ID NO: 442715 - DNA, 19 bp, Mus musculus
  siRNA target sequence for Chd4 (NM_145979.1,5261-5279).
gcaaacagcgtttcatgtt

SEQ ID NO: 442716 - DNA, 19 bp, Mus musculus
  siRNA target sequence for Chd4 (NM_145979.1,5372-5390).
ggcaccgtcgccatgatta

SEQ ID NO: 442717 - DNA, 19 bp, Mus musculus
  siRNA target sequence for Chd4 (NM_145979.1,5456-5474).
ggtatgccatcctcaatga

SEQ ID NO: 442718 - DNA, 19 bp, Mus musculus
  siRNA target sequence for Chd4 (NM_145979.1,5493-5511).
gaatcgtggcaattttcta

SEQ ID NO: 442719 - DNA, 19 bp, Mus musculus
  siRNA target sequence for Chd4 (NM_145979.1,5501-5519).
gcaattttctagagatcaa

SEQ ID NO: 442720 - DNA, 19 bp, Mus musculus
  siRNA target sequence for Chd4 (NM_145979.1,5626-5644).
ccgtctatggcccttaaca

SEQ ID NO: 442721 - DNA, 19 bp, Mus musculus
  siRNA target sequence for Chd4 (NM_145979.1,5827-5845).
gtcgctgtgaggttacaga

SEQ ID NO: 442722 - DNA, 19 bp, Mus musculus
  siRNA target sequence for Chd4 (NM_145979.1,5844-5862).
gatgtcagagcggaacatt

SEQ ID NO: 442723 - DNA, 19 bp, Mus musculus
  siRNA target sequence for Chx10 (NM_007701.2,456-474).
gctccgattccgaagatgt

SEQ ID NO: 442724 - DNA, 19 bp, Mus musculus
  siRNA target sequence for Chx10 (NM_007701.2,457-475).
ctccgattccgaagatgtt

SEQ ID NO: 442725 - DNA, 19 bp, Mus musculus
  siRNA target sequence for Chx10 (NM_007701.2,485-503).
gaccgaaaaatgtccaaat

SEQ ID NO: 442726 - DNA, 19 bp, Mus musculus
  siRNA target sequence for Chx10 (NM_007701.2,498-516).
ccaaatcggctttaaacca

SEQ ID NO: 442727 - DNA, 19 bp, Mus musculus
  siRNA target sequence for Chx10 (NM_007701.2,536-554).
cggcgacacaggacaatct

SEQ ID NO: 442728 - DNA, 19 bp, Mus musculus
  siRNA target sequence for Chx10 (NM_007701.2,539-557).
cgacacaggacaatcttta

SEQ ID NO: 442729 - DNA, 19 bp, Mus musculus
  siRNA target sequence for Chx10 (NM_007701.2,542-560).
cacaggacaatctttactt

SEQ ID NO: 442730 - DNA, 19 bp, Mus musculus
  siRNA target sequence for Chx10 (NM_007701.2,730-748).
cagcgtcatggctgagtat

SEQ ID NO: 442731 - DNA, 19 bp, Mus musculus
  siRNA target sequence for Chx10 (NM_007701.2,739-757).
ggctgagtatggtctctat

SEQ ID NO: 442732 - DNA, 19 bp, Mus musculus
  siRNA target sequence for Chx10 (NM_007701.2,807-825).
ctgccaaggatggcataat

SEQ ID NO: 442733 - DNA, 19 bp, Mus musculus
  siRNA target sequence for Clock (NM_007715.4,401-419).
gtaagctgtagtaaaatga

SEQ ID NO: 442734 - DNA, 19 bp, Mus musculus
  siRNA target sequence for Clock (NM_007715.4,435-453).
gagatgacagtagtatttt

SEQ ID NO: 442735 - DNA, 19 bp, Mus musculus
  siRNA target sequence for Clock (NM_007715.4,488-506).
gcaaaaagagtatctagaa

SEQ ID NO: 442736 - DNA, 19 bp, Mus musculus
  siRNA target sequence for Clock (NM_007715.4,553-571).
ggagctggggtctatgctt

SEQ ID NO: 442737 - DNA, 19 bp, Mus musculus
  siRNA target sequence for Clock (NM_007715.4,572-590).
cctggtaacgcgagaaaga

SEQ ID NO: 442738 - DNA, 19 bp, Mus musculus
  siRNA target sequence for Clock (NM_007715.4,623-641).
gattttttgcgcaaacata

SEQ ID NO: 442739 - DNA, 19 bp, Mus musculus
  siRNA target sequence for Clock (NM_007715.4,658-676).
gtcagatgctagtgagatt

SEQ ID NO: 442740 - DNA, 19 bp, Mus musculus
  siRNA target sequence for Clock (NM_007715.4,796-814).
gagtgtaacttcgttactt

SEQ ID NO: 442741 - DNA, 19 bp, Mus musculus
  siRNA target sequence for Clock (NM_007715.4,798-816).
gtgtaacttcgttacttga

SEQ ID NO: 442742 - DNA, 19 bp, Mus musculus
  siRNA target sequence for Clock (NM_007715.4,836-854).
gtggatcaaagtatattta

SEQ ID NO: 442743 - DNA, 19 bp, Mus musculus
  siRNA target sequence for Clock (NM_007715.4,838-856).
ggatcaaagtatatttaat

SEQ ID NO: 442744 - DNA, 19 bp, Mus musculus
  siRNA target sequence for Clock (NM_007715.4,881-899).
gaggtttataagatactct

SEQ ID NO: 442745 - DNA, 19 bp, Mus musculus
  siRNA target sequence for Clock (NM_007715.4,903-921).
ctcatctgctggaaagtga

SEQ ID NO: 442746 - DNA, 19 bp, Mus musculus
  siRNA target sequence for Clock (NM_007715.4,931-949).
ccctgagtacttaaaatca

SEQ ID NO: 442747 - DNA, 19 bp, Mus musculus
  siRNA target sequence for Clock (NM_007715.4,932-950).
cctgagtacttaaaatcaa

SEQ ID NO: 442748 - DNA, 19 bp, Mus musculus
  siRNA target sequence for Clock (NM_007715.4,976-994).
catgcttcgaggaacaata

SEQ ID NO: 442749 - DNA, 19 bp, Mus musculus
  siRNA target sequence for Clock (NM_007715.4,1003-1021).
ggagccatccacctatgaa

SEQ ID NO: 442750 - DNA, 19 bp, Mus musculus
  siRNA target sequence for Clock (NM_007715.4,1057-1075).
cagtgtatcaacttcaaca

SEQ ID NO: 442751 - DNA, 19 bp, Mus musculus
  siRNA target sequence for Clock (NM_007715.4,1104-1122).
gcacacataggccttctta

SEQ ID NO: 442752 - DNA, 19 bp, Mus musculus
  siRNA target sequence for Clock (NM_007715.4,1105-1123).
cacacataggccttcttat

SEQ ID NO: 442753 - DNA, 19 bp, Mus musculus
  siRNA target sequence for Clock (NM_007715.4,1145-1163).
gctactgtcagattagcta

SEQ ID NO: 442754 - DNA, 19 bp, Mus musculus
  siRNA target sequence for Clock (NM_007715.4,1161-1179).
ctacacctcagttcatcaa

SEQ ID NO: 442755 - DNA, 19 bp, Mus musculus
  siRNA target sequence for Clock (NM_007715.4,1218-1236).
catctagacacagtttaga

SEQ ID NO: 442756 - DNA, 19 bp, Mus musculus
  siRNA target sequence for Clock (NM_007715.4,1269-1287).
caccaataataggctattt

SEQ ID NO: 442757 - DNA, 19 bp, Mus musculus
  siRNA target sequence for Clock (NM_007715.4,1303-1321).
gggaacatcaggctatgat

SEQ ID NO: 442758 - DNA, 19 bp, Mus musculus
  siRNA target sequence for Clock (NM_007715.4,1305-1323).
gaacatcaggctatgatta

SEQ ID NO: 442759 - DNA, 19 bp, Mus musculus
  siRNA target sequence for Clock (NM_007715.4,1328-1346).
catgtggatgacctagaaa

SEQ ID NO: 442760 - DNA, 19 bp, Mus musculus
  siRNA target sequence for Clock (NM_007715.4,1359-1377).
gtcacgagcacttaatgca

SEQ ID NO: 442761 - DNA, 19 bp, Mus musculus
  siRNA target sequence for Clock (NM_007715.4,1361-1379).
cacgagcacttaatgcaat

SEQ ID NO: 442762 - DNA, 19 bp, Mus musculus
  siRNA target sequence for Clock (NM_007715.4,1363-1381).
cgagcacttaatgcaatat

SEQ ID NO: 442763 - DNA, 19 bp, Mus musculus
  siRNA target sequence for Clock (NM_007715.4,1366-1384).
gcacttaatgcaatatgga

SEQ ID NO: 442764 - DNA, 19 bp, Mus musculus
  siRNA target sequence for Clock (NM_007715.4,1388-1406).
ggcaaatcgtgttactata

SEQ ID NO: 442765 - DNA, 19 bp, Mus musculus
  siRNA target sequence for Clock (NM_007715.4,1390-1408).
caaatcgtgttactataga

SEQ ID NO: 442766 - DNA, 19 bp, Mus musculus
  siRNA target sequence for Clock (NM_007715.4,1437-1455).
ggcttcagactcattatta

SEQ ID NO: 442767 - DNA, 19 bp, Mus musculus
  siRNA target sequence for Clock (NM_007715.4,1438-1456).
gcttcagactcattattat

SEQ ID NO: 442768 - DNA, 19 bp, Mus musculus
  siRNA target sequence for Clock (NM_007715.4,1439-1457).
cttcagactcattattata

SEQ ID NO: 442769 - DNA, 19 bp, Mus musculus
  siRNA target sequence for Clock (NM_007715.4,1446-1464).
ctcattattatattactta

SEQ ID NO: 442770 - DNA, 19 bp, Mus musculus
  siRNA target sequence for Clock (NM_007715.4,1484-1502).
ccagagttcattgtttgta

SEQ ID NO: 442771 - DNA, 19 bp, Mus musculus
  siRNA target sequence for Clock (NM_007715.4,1586-1604).
gctgacaaaagccaagatt

SEQ ID NO: 442772 - DNA, 19 bp, Mus musculus
  siRNA target sequence for Clock (NM_007715.4,1605-1623).
ctgggtctgacaatcgtat

SEQ ID NO: 442773 - DNA, 19 bp, Mus musculus
  siRNA target sequence for Clock (NM_007715.4,1608-1626).
ggtctgacaatcgtatcaa

SEQ ID NO: 442774 - DNA, 19 bp, Mus musculus
  siRNA target sequence for Clock (NM_007715.4,1882-1900).
gatgtctcaagctgcaaat

SEQ ID NO: 442775 - DNA, 19 bp, Mus musculus
  siRNA target sequence for Clock (NM_007715.4,1889-1907).
caagctgcaaatttaccaa

SEQ ID NO: 442776 - DNA, 19 bp, Mus musculus
  siRNA target sequence for Clock (NM_007715.4,1949-1967).
ggagccatgcagcatctaa

SEQ ID NO: 442777 - DNA, 19 bp, Mus musculus
  siRNA target sequence for Clock (NM_007715.4,1950-1968).
gagccatgcagcatctaaa

SEQ ID NO: 442778 - DNA, 19 bp, Mus musculus
  siRNA target sequence for Clock (NM_007715.4,1981-1999).
gcagcggacacggatgata

SEQ ID NO: 442779 - DNA, 19 bp, Mus musculus
  siRNA target sequence for Clock (NM_007715.4,1991-2009).
cggatgatagaggcaaata

SEQ ID NO: 442780 - DNA, 19 bp, Mus musculus
  siRNA target sequence for Clock (NM_007715.4,2020-2038).
gcaagaagaactaaggaaa

SEQ ID NO: 442781 - DNA, 19 bp, Mus musculus
  siRNA target sequence for Clock (NM_007715.4,2129-2147).
ctttcctctggaaattcta

SEQ ID NO: 442782 - DNA, 19 bp, Mus musculus
  siRNA target sequence for Clock (NM_007715.4,2133-2151).
cctctggaaattctaatat

SEQ ID NO: 442783 - DNA, 19 bp, Mus musculus
  siRNA target sequence for Clock (NM_007715.4,2204-2222).
gttcagagtggacatatca

SEQ ID NO: 442784 - DNA, 19 bp, Mus musculus
  siRNA target sequence for Clock (NM_007715.4,2224-2242).
cacaggccagcacatgata

SEQ ID NO: 442785 - DNA, 19 bp, Mus musculus
  siRNA target sequence for Clock (NM_007715.4,2351-2369).
gccccactgtacaatacga

SEQ ID NO: 442786 - DNA, 19 bp, Mus musculus
  siRNA target sequence for Clock (NM_007715.4,2352-2370).
ccccactgtacaatacgat

SEQ ID NO: 442787 - DNA, 19 bp, Mus musculus
  siRNA target sequence for Clock (NM_007715.4,2467-2485).
ggacagacagataagattt

SEQ ID NO: 442788 - DNA, 19 bp, Mus musculus
  siRNA target sequence for Clock (NM_007715.4,2487-2505).
ctcaaggtcagcaacttgt

SEQ ID NO: 442789 - DNA, 19 bp, Mus musculus
  siRNA target sequence for Clock (NM_007715.4,2497-2515).
gcaacttgtgaccaaatta

SEQ ID NO: 442790 - DNA, 19 bp, Mus musculus
  siRNA target sequence for Clock (NM_007715.4,2623-2641).
gacattatcggtaacacaa

SEQ ID NO: 442791 - DNA, 19 bp, Mus musculus
  siRNA target sequence for Cml3 (NM_053097.1,869-887).
gtccagactaaggaaatct

SEQ ID NO: 442792 - DNA, 19 bp, Mus musculus
  siRNA target sequence for Cml3 (NM_053097.1,888-906).
ccaatgataaacttaaagt

SEQ ID NO: 442793 - DNA, 19 bp, Mus musculus
  siRNA target sequence for Creb1 (NM_009952.1,205-223).
cattagcccaggtatccat

SEQ ID NO: 442794 - DNA, 19 bp, Mus musculus
  siRNA target sequence for Creb1 (NM_009952.1,228-246).
gcagctcatgcaacatcat

SEQ ID NO: 442795 - DNA, 19 bp, Mus musculus
  siRNA target sequence for Creb1 (NM_009952.1,397-415).
gaactcagatttcaactat

SEQ ID NO: 442796 - DNA, 19 bp, Mus musculus
  siRNA target sequence for Creb1 (NM_009952.1,409-427).
caactattgcagaaagtga

SEQ ID NO: 442797 - DNA, 19 bp, Mus musculus
  siRNA target sequence for Creb1 (NM_009952.1,438-456).
gagtctgtggatagtgtaa

SEQ ID NO: 442798 - DNA, 19 bp, Mus musculus
  siRNA target sequence for Creb1 (NM_009952.1,440-458).
gtctgtggatagtgtaact

SEQ ID NO: 442799 - DNA, 19 bp, Mus musculus
  siRNA target sequence for Creb1 (NM_009952.1,471-489).
cgaagggaaatcctttcaa

SEQ ID NO: 442800 - DNA, 19 bp, Mus musculus
  siRNA target sequence for Creb1 (NM_009952.1,515-533).
gaatgacttatcttctgat

SEQ ID NO: 442801 - DNA, 19 bp, Mus musculus
  siRNA target sequence for Creb1 (NM_009952.1,541-559).
gggtgccaaggattgaaga

SEQ ID NO: 442802 - DNA, 19 bp, Mus musculus
  siRNA target sequence for Creb1 (NM_009952.1,607-625).
cagtgccaacccccattta

SEQ ID NO: 442803 - DNA, 19 bp, Mus musculus
  siRNA target sequence for Creb1 (NM_009952.1,658-676).
cccagggaggagcaataca

SEQ ID NO: 442804 - DNA, 19 bp, Mus musculus
  siRNA target sequence for Creb1 (NM_009952.1,675-693).
cagctggctaacaatggta

SEQ ID NO: 442805 - DNA, 19 bp, Mus musculus
  siRNA target sequence for Creb1 (NM_009952.1,749-767).
gccgggtactaccattcta

SEQ ID NO: 442806 - DNA, 19 bp, Mus musculus
  siRNA target sequence for Creb1 (NM_009952.1,754-772).
gtactaccattctacagta

SEQ ID NO: 442807 - DNA, 19 bp, Mus musculus
  siRNA target sequence for Creb1 (NM_009952.1,806-824).
gcccagcaaccaagttgtt

SEQ ID NO: 442808 - DNA, 19 bp, Mus musculus
  siRNA target sequence for Creb1 (NM_009952.1,811-829).
gcaaccaagttgttgttca

SEQ ID NO: 442809 - DNA, 19 bp, Mus musculus
  siRNA target sequence for Creb1 (NM_009952.1,832-850).
ctgcctcaggcgatgtaca

SEQ ID NO: 442810 - DNA, 19 bp, Mus musculus
  siRNA target sequence for Creb1 (NM_009952.1,958-976).
gagaggtccgtctaatgaa

SEQ ID NO: 442811 - DNA, 19 bp, Mus musculus
  siRNA target sequence for Creb1 (NM_009952.1,960-978).
gaggtccgtctaatgaaga

SEQ ID NO: 442812 - DNA, 19 bp, Mus musculus
  siRNA target sequence for Creb1 (NM_009952.1,963-981).
gtccgtctaatgaagaaca

SEQ ID NO: 442813 - DNA, 19 bp, Mus musculus
  siRNA target sequence for Creb1 (NM_009952.1,983-1001).
ggaggcagcaagagaatgt

SEQ ID NO: 442814 - DNA, 19 bp, Mus musculus
  siRNA target sequence for Creb1 (NM_009952.1,991-1009).
caagagaatgtcgtagaaa

SEQ ID NO: 442815 - DNA, 19 bp, Mus musculus
  siRNA target sequence for Creb1 (NM_009952.1,994-1012).
gagaatgtcgtagaaagaa

SEQ ID NO: 442816 - DNA, 19 bp, Mus musculus
  siRNA target sequence for Creb1 (NM_009952.1,996-1014).
gaatgtcgtagaaagaaga

SEQ ID NO: 442817 - DNA, 19 bp, Mus musculus
  siRNA target sequence for Creb1 (NM_009952.1,1103-1121).
cctttactgccacaaatca

SEQ ID NO: 442818 - DNA, 19 bp, Mus musculus
  siRNA target sequence for Creb1 (NM_133828.1,408-426).
caaacagttcagatttcaa

SEQ ID NO: 442819 - DNA, 19 bp, Mus musculus
  siRNA target sequence for Crem (NM_013498.1,36-54).
catggaaacagttgaatca

SEQ ID NO: 442820 - DNA, 19 bp, Mus musculus
  siRNA target sequence for Crem (NM_013498.1,57-75).
gcaggatcgaagtgtaaca

SEQ ID NO: 442821 - DNA, 19 bp, Mus musculus
  siRNA target sequence for Crem (NM_013498.1,197-215).
cgcataaacgtagagaaat

SEQ ID NO: 442822 - DNA, 19 bp, Mus musculus
  siRNA target sequence for Crem (NM_013498.1,230-248).
cctcatatagaaaaatact

SEQ ID NO: 442823 - DNA, 19 bp, Mus musculus
  siRNA target sequence for Crem (NM_013498.1,270-288).
gcctggtattcccaagatt

SEQ ID NO: 442824 - DNA, 19 bp, Mus musculus
  siRNA target sequence for Crem (NM_013498.1,272-290).
ctggtattcccaagattga

SEQ ID NO: 442825 - DNA, 19 bp, Mus musculus
  siRNA target sequence for Crem (NM_013498.1,340-358).
gcagtaccaactagcatat

SEQ ID NO: 442826 - DNA, 19 bp, Mus musculus
  siRNA target sequence for Crem (NM_013498.1,341-359).
cagtaccaactagcatata

SEQ ID NO: 442827 - DNA, 19 bp, Mus musculus
  siRNA target sequence for Crem (NM_013498.1,346-364).
ccaactagcatatatcaga

SEQ ID NO: 442828 - DNA, 19 bp, Mus musculus
  siRNA target sequence for Crem (NM_013498.1,368-386).
gcacggggcaatacaatga

SEQ ID NO: 442829 - DNA, 19 bp, Mus musculus
  siRNA target sequence for Crem (NM_013498.1,447-465).
gatccgagctcctactact

SEQ ID NO: 442830 - DNA, 19 bp, Mus musculus
  siRNA target sequence for Crem (NM_013498.1,684-702).
ggccctcaaagacctttat

SEQ ID NO: 442831 - DNA, 19 bp, Mus musculus
  siRNA target sequence for Crem (NM_013498.1,685-703).
gccctcaaagacctttatt

SEQ ID NO: 442832 - DNA, 19 bp, Mus musculus
  siRNA target sequence for Crem (NM_013498.1,696-714).
cctttattgccataaagca

SEQ ID NO: 442833 - DNA, 19 bp, Mus musculus
  siRNA target sequence for Crx (NM_007770.2,328-346).
ggttgctcttaagatcaat

SEQ ID NO: 442834 - DNA, 19 bp, Mus musculus
  siRNA target sequence for Crx (NM_007770.2,368-386).
gtctggttcaagaatcgta

SEQ ID NO: 442835 - DNA, 19 bp, Mus musculus
  siRNA target sequence for Crx (NM_007770.2,584-602).
gtggccaccgtgtccattt

SEQ ID NO: 442836 - DNA, 19 bp, Mus musculus
  siRNA target sequence for Crx (NM_007770.2,764-782).
gggttggatccctaccttt

SEQ ID NO: 442837 - DNA, 19 bp, Mus musculus
  siRNA target sequence for Crx (NM_007770.2,936-954).
gcacctggaaatttaccta

SEQ ID NO: 442838 - DNA, 19 bp, Mus musculus
  siRNA target sequence for Crx (NM_007770.2,940-958).
ctggaaatttacctacaat

SEQ ID NO: 442839 - DNA, 19 bp, Mus musculus
  siRNA target sequence for Crx (NM_007770.2,964-982).
ggaccctctggactacaaa

SEQ ID NO: 442840 - DNA, 19 bp, Mus musculus
  siRNA target sequence for Cutl1 (NM_009986.2,332-350).
cgtctacacgacattgaaa

SEQ ID NO: 442841 - DNA, 19 bp, Mus musculus
  siRNA target sequence for Cutl1 (NM_009986.2,375-393).
cactagaagagtacaacaa

SEQ ID NO: 442842 - DNA, 19 bp, Mus musculus
  siRNA target sequence for Cutl1 (NM_009986.2,562-580).
gatgtccaccacctcaaaa

SEQ ID NO: 442843 - DNA, 19 bp, Mus musculus
  siRNA target sequence for Cutl1 (NM_009986.2,625-643).
ggaaaaaactcgaacagaa

SEQ ID NO: 442844 - DNA, 19 bp, Mus musculus
  siRNA target sequence for Cutl1 (NM_009986.2,864-882).
cccgatccagcctagaagt

SEQ ID NO: 442845 - DNA, 19 bp, Mus musculus
  siRNA target sequence for Cutl1 (NM_009986.2,865-883).
ccgatccagcctagaagta

SEQ ID NO: 442846 - DNA, 19 bp, Mus musculus
  siRNA target sequence for Cutl1 (NM_009986.2,867-885).
gatccagcctagaagtaga

SEQ ID NO: 442847 - DNA, 19 bp, Mus musculus
  siRNA target sequence for Cutl1 (NM_009986.2,870-888).
ccagcctagaagtagagtt

SEQ ID NO: 442848 - DNA, 19 bp, Mus musculus
  siRNA target sequence for Cutl1 (NM_009986.2,1000-1018).
gcaactgaatgccaagaat

SEQ ID NO: 442849 - DNA, 19 bp, Mus musculus
  siRNA target sequence for Cutl1 (NM_009986.2,1012-1030).
caagaatagcacactcaaa

SEQ ID NO: 442850 - DNA, 19 bp, Mus musculus
  siRNA target sequence for Cutl1 (NM_009986.2,1015-1033).
gaatagcacactcaaacaa

SEQ ID NO: 442851 - DNA, 19 bp, Mus musculus
  siRNA target sequence for Cutl1 (NM_009986.2,1048-1066).
caaaggccaggctgactat

SEQ ID NO: 442852 - DNA, 19 bp, Mus musculus
  siRNA target sequence for Cutl1 (NM_009986.2,1059-1077).
ctgactatgaagaagtgaa

SEQ ID NO: 442853 - DNA, 19 bp, Mus musculus
  siRNA target sequence for Cutl1 (NM_009986.2,1147-1165).
caagcccctggaggtttta

SEQ ID NO: 442854 - DNA, 19 bp, Mus musculus
  siRNA target sequence for Cutl1 (NM_009986.2,1234-1252).
cgggtcagccaggagaaaa

SEQ ID NO: 442855 - DNA, 19 bp, Mus musculus
  siRNA target sequence for Cutl1 (NM_009986.2,1328-1346).
ggggaacaggtttccaata

SEQ ID NO: 442856 - DNA, 19 bp, Mus musculus
  siRNA target sequence for Cutl1 (NM_009986.2,1330-1348).
ggaacaggtttccaatact

SEQ ID NO: 442857 - DNA, 19 bp, Mus musculus
  siRNA target sequence for Cutl1 (NM_009986.2,1331-1349).
gaacaggtttccaatacta

SEQ ID NO: 442858 - DNA, 19 bp, Mus musculus
  siRNA target sequence for Cutl1 (NM_009986.2,1374-1392).
cggggttaagtcaagactt

SEQ ID NO: 442859 - DNA, 19 bp, Mus musculus
  siRNA target sequence for Cutl1 (NM_009986.2,1375-1393).
ggggttaagtcaagacttt

SEQ ID NO: 442860 - DNA, 19 bp, Mus musculus
  siRNA target sequence for Cutl1 (NM_009986.2,1376-1394).
gggttaagtcaagactttt

SEQ ID NO: 442861 - DNA, 19 bp, Mus musculus
  siRNA target sequence for Cutl1 (NM_009986.2,1377-1395).
ggttaagtcaagacttttt

SEQ ID NO: 442862 - DNA, 19 bp, Mus musculus
  siRNA target sequence for Cutl1 (NM_009986.2,1429-1447).
ggcttctacaggaaagttt

SEQ ID NO: 442863 - DNA, 19 bp, Mus musculus
  siRNA target sequence for Cutl1 (NM_009986.2,1475-1493).
ctaatgcagtccttctact

SEQ ID NO: 442864 - DNA, 19 bp, Mus musculus
  siRNA target sequence for Cutl1 (NM_009986.2,1541-1559).
ggtccttacagcacaaact

SEQ ID NO: 442865 - DNA, 19 bp, Mus musculus
  siRNA target sequence for Cutl1 (NM_009986.2,1549-1567).
cagcacaaactccatatct

SEQ ID NO: 442866 - DNA, 19 bp, Mus musculus
  siRNA target sequence for Cutl1 (NM_009986.2,1571-1589).
ccaagtccattacaacaaa

SEQ ID NO: 442867 - DNA, 19 bp, Mus musculus
  siRNA target sequence for Cutl1 (NM_009986.2,1614-1632).
catctcccagccaatcaga

SEQ ID NO: 442868 - DNA, 19 bp, Mus musculus
  siRNA target sequence for Cutl1 (NM_009986.2,1650-1668).
cagagggcgaggaaattga

SEQ ID NO: 442869 - DNA, 19 bp, Mus musculus
  siRNA target sequence for Cutl1 (NM_009986.2,1652-1670).
gagggcgaggaaattgata

SEQ ID NO: 442870 - DNA, 19 bp, Mus musculus
  siRNA target sequence for Cutl1 (NM_009986.2,1728-1746).
gcatcttcggacattacgt

SEQ ID NO: 442871 - DNA, 19 bp, Mus musculus
  siRNA target sequence for Cutl1 (NM_009986.2,1826-1844).
gagccattccacaagatga

SEQ ID NO: 442872 - DNA, 19 bp, Mus musculus
  siRNA target sequence for Cutl1 (NM_009986.2,1921-1939).
gagcctgaacagactcttt

SEQ ID NO: 442873 - DNA, 19 bp, Mus musculus
  siRNA target sequence for Cutl1 (NM_009986.2,2078-2096).
gagccagtccagacatctt

SEQ ID NO: 442874 - DNA, 19 bp, Mus musculus
  siRNA target sequence for Cutl1 (NM_009986.2,2280-2298).
cttacccgcctcttgctat

SEQ ID NO: 442875 - DNA, 19 bp, Mus musculus
  siRNA target sequence for Cutl1 (NM_009986.2,2429-2447).
gtgctgaggccgatgaaga

SEQ ID NO: 442876 - DNA, 19 bp, Mus musculus
  siRNA target sequence for Cutl1 (NM_009986.2,2481-2499).
cctggtggagccctataca

SEQ ID NO: 442877 - DNA, 19 bp, Mus musculus
  siRNA target sequence for Cutl1 (NM_009986.2,2531-2549).
gagaccaaggccgatgaaa

SEQ ID NO: 442878 - DNA, 19 bp, Mus musculus
  siRNA target sequence for Cutl1 (NM_009986.2,2533-2551).
gaccaaggccgatgaaaca

SEQ ID NO: 442879 - DNA, 19 bp, Mus musculus
  siRNA target sequence for Cutl1 (NM_009986.2,2804-2822).
cagtacgaggtctacatgt

SEQ ID NO: 442880 - DNA, 19 bp, Mus musculus
  siRNA target sequence for Cutl1 (NM_009986.2,2936-2954).
gtcagcgacatgctttcaa

SEQ ID NO: 442881 - DNA, 19 bp, Mus musculus
  siRNA target sequence for Cutl1 (NM_009986.2,3172-3190).
ccctgagtccccaatgagt

SEQ ID NO: 442882 - DNA, 19 bp, Mus musculus
  siRNA target sequence for Cutl1 (NM_009986.2,3173-3191).
cctgagtccccaatgagtt

SEQ ID NO: 442883 - DNA, 19 bp, Mus musculus
  siRNA target sequence for Cutl1 (NM_009986.2,3233-3251).
ccctgtcccgccattgaga

SEQ ID NO: 442884 - DNA, 19 bp, Mus musculus
  siRNA target sequence for Cutl1 (NM_009986.2,3342-3360).
ccctcagcatccaagaatt

SEQ ID NO: 442885 - DNA, 19 bp, Mus musculus
  siRNA target sequence for Cutl1 (NM_009986.2,3383-3401).
gacacgtatggcataacca

SEQ ID NO: 442886 - DNA, 19 bp, Mus musculus
  siRNA target sequence for Cutl1 (NM_009986.2,3433-3451).
cctcggtcagcgcttattt

SEQ ID NO: 442887 - DNA, 19 bp, Mus musculus
  siRNA target sequence for Cutl1 (NM_009986.2,3507-3525).
caaagccttggcataagct

SEQ ID NO: 442888 - DNA, 19 bp, Mus musculus
  siRNA target sequence for Cutl1 (NM_009986.2,3513-3531).
cttggcataagcttagtct

SEQ ID NO: 442889 - DNA, 19 bp, Mus musculus
  siRNA target sequence for Cutl1 (NM_009986.2,3568-3586).
gctgaacgaccccaacaat

SEQ ID NO: 442890 - DNA, 19 bp, Mus musculus
  siRNA target sequence for Cutl1 (NM_009986.2,3680-3698).
ccctctgtgggtattgact

SEQ ID NO: 442891 - DNA, 19 bp, Mus musculus
  siRNA target sequence for Cutl1 (NM_009986.2,3681-3699).
cctctgtgggtattgacta

SEQ ID NO: 442892 - DNA, 19 bp, Mus musculus
  siRNA target sequence for Cutl1 (NM_009986.2,3777-3795).
cgctgaagcgagcatatca

SEQ ID NO: 442893 - DNA, 19 bp, Mus musculus
  siRNA target sequence for Cutl1 (NM_009986.2,3802-3820).
gccatacccatcaccaaaa

SEQ ID NO: 442894 - DNA, 19 bp, Mus musculus
  siRNA target sequence for Cutl1 (NM_009986.2,3803-3821).
ccatacccatcaccaaaaa

SEQ ID NO: 442895 - DNA, 19 bp, Mus musculus
  siRNA target sequence for Cutl1 (NM_009986.2,3901-3919).
ccgcagagaactgttcatt

SEQ ID NO: 442896 - DNA, 19 bp, Mus musculus
  siRNA target sequence for Cutl1 (NM_009986.2,3903-3921).
gcagagaactgttcattga

SEQ ID NO: 442897 - DNA, 19 bp, Mus musculus
  siRNA target sequence for Cutl1 (NM_009986.2,4538-4556).
cgggaggagcccatcgaat

SEQ ID NO: 442898 - DNA, 19 bp, Mus musculus
  siRNA target sequence for Cutl2 (NM_007804.2,495-513).
ggctctcagtaaaagaagt

SEQ ID NO: 442899 - DNA, 19 bp, Mus musculus
  siRNA target sequence for Cutl2 (NM_007804.2,528-546).
ggcgttcctgagtgtttat

SEQ ID NO: 442900 - DNA, 19 bp, Mus musculus
  siRNA target sequence for Cutl2 (NM_007804.2,529-547).
gcgttcctgagtgtttata

SEQ ID NO: 442901 - DNA, 19 bp, Mus musculus
  siRNA target sequence for Cutl2 (NM_007804.2,566-584).
cagaccctgtcccatcatt

SEQ ID NO: 442902 - DNA, 19 bp, Mus musculus
  siRNA target sequence for Cutl2 (NM_007804.2,638-656).
gtgggcagcgcctacaaga

SEQ ID NO: 442903 - DNA, 19 bp, Mus musculus
  siRNA target sequence for Cutl2 (NM_007804.2,973-991).
gatgaggtcggcttgatca

SEQ ID NO: 442904 - DNA, 19 bp, Mus musculus
  siRNA target sequence for Cutl2 (NM_007804.2,976-994).
gaggtcggcttgatcatga

SEQ ID NO: 442905 - DNA, 19 bp, Mus musculus
  siRNA target sequence for Cutl2 (NM_007804.2,1299-1317).
gtccgaggccatagagaaa

SEQ ID NO: 442906 - DNA, 19 bp, Mus musculus
  siRNA target sequence for Cutl2 (NM_007804.2,1733-1751).
gggactcactgctatccaa

SEQ ID NO: 442907 - DNA, 19 bp, Mus musculus
  siRNA target sequence for Cutl2 (NM_007804.2,1734-1752).
ggactcactgctatccaaa

SEQ ID NO: 442908 - DNA, 19 bp, Mus musculus
  siRNA target sequence for Cutl2 (NM_007804.2,1739-1757).
cactgctatccaaacatat

SEQ ID NO: 442909 - DNA, 19 bp, Mus musculus
  siRNA target sequence for Cutl2 (NM_007804.2,1761-1779).
gggcccagctgccttcaaa

SEQ ID NO: 442910 - DNA, 19 bp, Mus musculus
  siRNA target sequence for Cutl2 (NM_007804.2,1988-2006).
gcgtgtttggccactatgt

SEQ ID NO: 442911 - DNA, 19 bp, Mus musculus
  siRNA target sequence for Cutl2 (NM_007804.2,2266-2284).
gggggtgagtccaagaact

SEQ ID NO: 442912 - DNA, 19 bp, Mus musculus
  siRNA target sequence for Cutl2 (NM_007804.2,2619-2637).
cggcgatgccggctacttt

SEQ ID NO: 442913 - DNA, 19 bp, Mus musculus
  siRNA target sequence for Cutl2 (NM_007804.2,2621-2639).
gcgatgccggctactttga

SEQ ID NO: 442914 - DNA, 19 bp, Mus musculus
  siRNA target sequence for Cutl2 (NM_007804.2,2925-2943).
gacacccgagcagtatgaa

SEQ ID NO: 442915 - DNA, 19 bp, Mus musculus
  siRNA target sequence for Cutl2 (NM_007804.2,3257-3275).
gccccacggagcctgaaaa

SEQ ID NO: 442916 - DNA, 19 bp, Mus musculus
  siRNA target sequence for Cutl2 (NM_007804.2,3950-3968).
ccaggatgcgccgtgaaat

SEQ ID NO: 442917 - DNA, 19 bp, Mus musculus
  siRNA target sequence for Cutl2 (NM_007804.2,3953-3971).
ggatgcgccgtgaaatgct

SEQ ID NO: 442918 - DNA, 19 bp, Mus musculus
  siRNA target sequence for Cutl2 (NM_007804.2,4272-4290).
ccaccctctgggaaacagt

SEQ ID NO: 442919 - DNA, 19 bp, Mus musculus
  siRNA target sequence for Cutl2 (NM_007804.2,4305-4323).
ggccccagggccctttctt

SEQ ID NO: 442920 - DNA, 19 bp, Mus musculus
  siRNA target sequence for Cutl2 (NM_007804.2,4399-4417).
gagcctctgagtttcaagt

SEQ ID NO: 442921 - DNA, 19 bp, Mus musculus
  siRNA target sequence for D11Ertd714e (NM_026107.2,604-622).
ggatcagcacccaagttct

SEQ ID NO: 442922 - DNA, 19 bp, Mus musculus
  siRNA target sequence for D11Ertd714e (NM_026107.2,605-623).
gatcagcacccaagttcta

SEQ ID NO: 442923 - DNA, 19 bp, Mus musculus
  siRNA target sequence for D11Ertd714e (NM_026107.2,621-639).
ctaggacaagagattccat

SEQ ID NO: 442924 - DNA, 19 bp, Mus musculus
  siRNA target sequence for D11Ertd714e (NM_026107.2,636-654).
ccattcgagaaggagaatt

SEQ ID NO: 442925 - DNA, 19 bp, Mus musculus
  siRNA target sequence for D11Ertd714e (NM_026107.2,637-655).
cattcgagaaggagaattt

SEQ ID NO: 442926 - DNA, 19 bp, Mus musculus
  siRNA target sequence for D11Ertd714e (NM_026107.2,641-659).
cgagaaggagaatttgaca

SEQ ID NO: 442927 - DNA, 19 bp, Mus musculus
  siRNA target sequence for D11Ertd714e (NM_026107.2,1009-1027).
ccaaacctgacttgactaa

SEQ ID NO: 442928 - DNA, 19 bp, Mus musculus
  siRNA target sequence for D11Ertd714e (NM_026107.2,1022-1040).
gactaacttagcagaatat

SEQ ID NO: 442929 - DNA, 19 bp, Mus musculus
  siRNA target sequence for D11Ertd714e (NM_026107.2,1206-1224).
cagactgccttgagtgatt

SEQ ID NO: 442930 - DNA, 19 bp, Mus musculus
  siRNA target sequence for D11Ertd714e (NM_026107.2,1548-1566).
cattgccacatttgcaaaa

SEQ ID NO: 442931 - DNA, 19 bp, Mus musculus
  siRNA target sequence for D11Ertd714e (NM_026107.2,1578-1596).
cgaagctcagactttgtga

SEQ ID NO: 442932 - DNA, 19 bp, Mus musculus
  siRNA target sequence for D11Ertd714e (NM_026107.2,1750-1768).
ggtcaaacttcaatagaca

SEQ ID NO: 442933 - DNA, 19 bp, Mus musculus
  siRNA target sequence for D11Ertd714e (NM_026107.2,1831-1849).
ggagctccagccttgacaa

SEQ ID NO: 442934 - DNA, 19 bp, Mus musculus
  siRNA target sequence for D130006K24Rik (NM_175006.1,522-540).
ctgcccaccgcgaatctca

SEQ ID NO: 442935 - DNA, 19 bp, Mus musculus
  siRNA target sequence for D130006K24Rik (NM_175006.1,526-544).
ccaccgcgaatctcacaaa

SEQ ID NO: 442936 - DNA, 19 bp, Mus musculus
  siRNA target sequence for D130006K24Rik (NM_175006.1,529-547).
ccgcgaatctcacaaacat

SEQ ID NO: 442937 - DNA, 19 bp, Mus musculus
  siRNA target sequence for D130006K24Rik (NM_175006.1,568-586).
ctgcagctggaggcattat

SEQ ID NO: 442938 - DNA, 19 bp, Mus musculus
  siRNA target sequence for D130006K24Rik (NM_175006.1,589-607).
ctctgccattgcaaaatct

SEQ ID NO: 442939 - DNA, 19 bp, Mus musculus
  siRNA target sequence for D130006K24Rik (NM_175006.1,593-611).
gccattgcaaaatctacaa

SEQ ID NO: 442940 - DNA, 19 bp, Mus musculus
  siRNA target sequence for D130006K24Rik (NM_175006.1,1003-1021).
ctctacagctggttaataa

SEQ ID NO: 442941 - DNA, 19 bp, Mus musculus
  siRNA target sequence for D130006K24Rik (NM_175006.1,1112-1130).
gggggtcacaggtcaacta

SEQ ID NO: 442942 - DNA, 19 bp, Mus musculus
  siRNA target sequence for D130006K24Rik (NM_175006.1,1114-1132).
gggtcacaggtcaactagt

SEQ ID NO: 442943 - DNA, 19 bp, Mus musculus
  siRNA target sequence for D130006K24Rik (NM_175006.1,1115-1133).
ggtcacaggtcaactagtt

SEQ ID NO: 442944 - DNA, 19 bp, Mus musculus
  siRNA target sequence for D130006K24Rik (NM_175006.1,1116-1134).
gtcacaggtcaactagtta

SEQ ID NO: 442945 - DNA, 19 bp, Mus musculus
  siRNA target sequence for D130006K24Rik (NM_175006.1,1120-1138).
caggtcaactagttactaa

SEQ ID NO: 442946 - DNA, 19 bp, Mus musculus
  siRNA target sequence for D130006K24Rik (NM_175006.1,1210-1228).
gcactcagggccttcaagt

SEQ ID NO: 442947 - DNA, 19 bp, Mus musculus
  siRNA target sequence for D130006K24Rik (NM_175006.1,1578-1596).
cgagaatttgccaaagctt

SEQ ID NO: 442948 - DNA, 19 bp, Mus musculus
  siRNA target sequence for D130006K24Rik (NM_175006.1,1739-1757).
ccaagagaacactatagct

SEQ ID NO: 442949 - DNA, 19 bp, Mus musculus
  siRNA target sequence for D130006K24Rik (NM_175006.1,1817-1835).
ggacatcacccctaaaagt

SEQ ID NO: 442950 - DNA, 19 bp, Mus musculus
  siRNA target sequence for D130006K24Rik (NM_175006.1,1828-1846).
ctaaaagtgcccagaagat

SEQ ID NO: 442951 - DNA, 19 bp, Mus musculus
  siRNA target sequence for D130006K24Rik (NM_175006.1,1894-1912).
gagcaggtatgcagaatct

SEQ ID NO: 442952 - DNA, 19 bp, Mus musculus
  siRNA target sequence for D130006K24Rik (NM_175006.1,1896-1914).
gcaggtatgcagaatctca

SEQ ID NO: 442953 - DNA, 19 bp, Mus musculus
  siRNA target sequence for D130006K24Rik (NM_175006.1,1904-1922).
gcagaatctcacggaattt

SEQ ID NO: 442954 - DNA, 19 bp, Mus musculus
  siRNA target sequence for D130006K24Rik (NM_175006.1,1905-1923).
cagaatctcacggaattta

SEQ ID NO: 442955 - DNA, 19 bp, Mus musculus
  siRNA target sequence for D130006K24Rik (NM_175006.1,1926-1944).
gggagtgagccatccaaaa

SEQ ID NO: 442956 - DNA, 19 bp, Mus musculus
  siRNA target sequence for D130006K24Rik (NM_175006.1,1927-1945).
ggagtgagccatccaaaaa

SEQ ID NO: 442957 - DNA, 19 bp, Mus musculus
  siRNA target sequence for D130006K24Rik (NM_175006.1,1969-1987).
cgccccaggcccttgagat

SEQ ID NO: 442958 - DNA, 19 bp, Mus musculus
  siRNA target sequence for D130006K24Rik (NM_175006.1,2060-2078).
ctacgaccgggaagtagtt

SEQ ID NO: 442959 - DNA, 19 bp, Mus musculus
  siRNA target sequence for D130006K24Rik (NM_175006.1,2063-2081).
cgaccgggaagtagttaga

SEQ ID NO: 442960 - DNA, 19 bp, Mus musculus
  siRNA target sequence for D130006K24Rik (NM_175006.1,2066-2084).
ccgggaagtagttagagtt

SEQ ID NO: 442961 - DNA, 19 bp, Mus musculus
  siRNA target sequence for D130006K24Rik (NM_175006.1,2067-2085).
cgggaagtagttagagttt

SEQ ID NO: 442962 - DNA, 19 bp, Mus musculus
  siRNA target sequence for D130006K24Rik (NM_175006.1,2080-2098).
gagtttggttctgcaataa

SEQ ID NO: 442963 - DNA, 19 bp, Mus musculus
  siRNA target sequence for D130006K24Rik (NM_175006.1,2082-2100).
gtttggttctgcaataaga

SEQ ID NO: 442964 - DNA, 19 bp, Mus musculus
  siRNA target sequence for D5Ertd679e (NM_181410.2,23-41).
ccgctgacgaagatgagtt

SEQ ID NO: 442965 - DNA, 19 bp, Mus musculus
  siRNA target sequence for D5Ertd679e (NM_181410.2,42-60).
gaaccttctggtgatcata

SEQ ID NO: 442966 - DNA, 19 bp, Mus musculus
  siRNA target sequence for D5Ertd679e (NM_181410.2,102-120).
ggaatctcagtttacttta

SEQ ID NO: 442967 - DNA, 19 bp, Mus musculus
  siRNA target sequence for D5Ertd679e (NM_181410.2,152-170).
cgaattctcacctgttcat

SEQ ID NO: 442968 - DNA, 19 bp, Mus musculus
  siRNA target sequence for D5Ertd679e (NM_181410.2,211-229).
caggaaagccggctcttat

SEQ ID NO: 442969 - DNA, 19 bp, Mus musculus
  siRNA target sequence for D5Ertd679e (NM_181410.2,297-315).
cccctctgggagtaaagat

SEQ ID NO: 442970 - DNA, 19 bp, Mus musculus
  siRNA target sequence for D5Ertd679e (NM_181410.2,308-326).
gtaaagatgggaaatacga

SEQ ID NO: 442971 - DNA, 19 bp, Mus musculus
  siRNA target sequence for D5Ertd679e (NM_181410.2,435-453).
caaagctctgtgctacatt

SEQ ID NO: 442972 - DNA, 19 bp, Mus musculus
  siRNA target sequence for D5Ertd679e (NM_181410.2,478-496).
gataatcaggagatgaaat

SEQ ID NO: 442973 - DNA, 19 bp, Mus musculus
  siRNA target sequence for D5Ertd679e (NM_181410.2,530-548).
gcgcactgcagtacatgaa

SEQ ID NO: 442974 - DNA, 19 bp, Mus musculus
  siRNA target sequence for D5Ertd679e (NM_181410.2,789-807).
ctgtcatcgcagtctcatt

SEQ ID NO: 442975 - DNA, 19 bp, Mus musculus
  siRNA target sequence for D5Ertd679e (NM_181410.2,791-809).
gtcatcgcagtctcattga

SEQ ID NO: 442976 - DNA, 19 bp, Mus musculus
  siRNA target sequence for D5Ertd679e (NM_181410.2,793-811).
catcgcagtctcattgaga

SEQ ID NO: 442977 - DNA, 19 bp, Mus musculus
  siRNA target sequence for D5Ertd679e (NM_181410.2,870-888).
cacgtgcgagacagctttt

SEQ ID NO: 442978 - DNA, 19 bp, Mus musculus
  siRNA target sequence for D5Ertd679e (NM_181410.2,872-890).
cgtgcgagacagcttttaa

SEQ ID NO: 442979 - DNA, 19 bp, Mus musculus
  siRNA target sequence for D5Ertd679e (NM_181410.2,875-893).
gcgagacagcttttaagat

SEQ ID NO: 442980 - DNA, 19 bp, Mus musculus
  siRNA target sequence for Dlx1 (NM_010053.1,1245-1263).
ctacgtccccagctataca

SEQ ID NO: 442981 - DNA, 19 bp, Mus musculus
  siRNA target sequence for Dlx1 (NM_010053.1,1248-1266).
cgtccccagctatacatca

SEQ ID NO: 442982 - DNA, 19 bp, Mus musculus
  siRNA target sequence for Dlx1 (NM_010053.1,1254-1272).
cagctatacatcatggtat

SEQ ID NO: 442983 - DNA, 19 bp, Mus musculus
  siRNA target sequence for Dlx2 (NM_010054.1,732-750).
gttcgtctccggtcaacaa

SEQ ID NO: 442984 - DNA, 19 bp, Mus musculus
  siRNA target sequence for Dlx2 (NM_010054.1,776-794).
cctgaaatccgaatagtga

SEQ ID NO: 442985 - DNA, 19 bp, Mus musculus
  siRNA target sequence for Dlx2 (NM_010054.1,777-795).
ctgaaatccgaatagtgaa

SEQ ID NO: 442986 - DNA, 19 bp, Mus musculus
  siRNA target sequence for Dlx3 (NM_010055.2,291-309).
cccaccctgcccgaatcta

SEQ ID NO: 442987 - DNA, 19 bp, Mus musculus
  siRNA target sequence for Dlx3 (NM_010055.2,293-311).
caccctgcccgaatctaca

SEQ ID NO: 442988 - DNA, 19 bp, Mus musculus
  siRNA target sequence for Dlx3 (NM_010055.2,334-352).
gcgctcctcagcatgacta

SEQ ID NO: 442989 - DNA, 19 bp, Mus musculus
  siRNA target sequence for Dlx3 (NM_010055.2,337-355).
ctcctcagcatgactacta

SEQ ID NO: 442990 - DNA, 19 bp, Mus musculus
  siRNA target sequence for Dlx3 (NM_010055.2,339-357).
cctcagcatgactactact

SEQ ID NO: 442991 - DNA, 19 bp, Mus musculus
  siRNA target sequence for Dlx3 (NM_010055.2,395-413).
ctaccaccaccagttcaat

SEQ ID NO: 442992 - DNA, 19 bp, Mus musculus
  siRNA target sequence for Dlx3 (NM_010055.2,443-461).
ctcgcccaagtcggaatat

SEQ ID NO: 442993 - DNA, 19 bp, Mus musculus
  siRNA target sequence for Dlx3 (NM_010055.2,447-465).
cccaagtcggaatatacct

SEQ ID NO: 442994 - DNA, 19 bp, Mus musculus
  siRNA target sequence for Dlx3 (NM_010055.2,448-466).
ccaagtcggaatataccta

SEQ ID NO: 442995 - DNA, 19 bp, Mus musculus
  siRNA target sequence for Dlx3 (NM_010055.2,696-714).
cagctgggcctcacacaaa

SEQ ID NO: 442996 - DNA, 19 bp, Mus musculus
  siRNA target sequence for Dlx3 (NM_010055.2,899-917).
cccaccgctcccatacagt

SEQ ID NO: 442997 - DNA, 19 bp, Mus musculus
  siRNA target sequence for Dlx4 (NM_007867.1,273-291).
ggagctcgaagcagaatca

SEQ ID NO: 442998 - DNA, 19 bp, Mus musculus
  siRNA target sequence for Dlx4 (NM_007867.1,495-513).
gaacaaacgctccaaatat

SEQ ID NO: 442999 - DNA, 19 bp, Mus musculus
  siRNA target sequence for Dlx4 (NM_007867.1,592-610).
ccagccctaccattcatct

SEQ ID NO: 443000 - DNA, 19 bp, Mus musculus
  siRNA target sequence for Dlx5 (NM_010056.2,301-319).
cctcggccaccgattctga

SEQ ID NO: 443001 - DNA, 19 bp, Mus musculus
  siRNA target sequence for Dlx5 (NM_010056.2,307-325).
ccaccgattctgactacta

SEQ ID NO: 443002 - DNA, 19 bp, Mus musculus
  siRNA target sequence for Dlx5 (NM_010056.2,566-584).
gatggtgaatggtaaacca

SEQ ID NO: 443003 - DNA, 19 bp, Mus musculus
  siRNA target sequence for Dlx5 (NM_010056.2,572-590).
gaatggtaaaccaaagaaa

SEQ ID NO: 443004 - DNA, 19 bp, Mus musculus
  siRNA target sequence for Dlx5 (NM_010056.2,624-642).
cagctggccgctttacaga

SEQ ID NO: 443005 - DNA, 19 bp, Mus musculus
  siRNA target sequence for Dlx5 (NM_010056.2,632-650).
cgctttacagagaaggttt

SEQ ID NO: 443006 - DNA, 19 bp, Mus musculus
  siRNA target sequence for Dlx5 (NM_010056.2,813-831).
gaccctatggcgtgtaact

SEQ ID NO: 443007 - DNA, 19 bp, Mus musculus
  siRNA target sequence for Dlx5 (NM_010056.2,967-985).
gcgcagccagctcaatcaa

SEQ ID NO: 443008 - DNA, 19 bp, Mus musculus
  siRNA target sequence for Dlx5 (NM_010056.2,968-986).
cgcagccagctcaatcaat

SEQ ID NO: 443009 - DNA, 19 bp, Mus musculus
  siRNA target sequence for Dlx5 (NM_010056.2,1032-1050).
gcctccgggacgctttatt

SEQ ID NO: 443010 - DNA, 19 bp, Mus musculus
  siRNA target sequence for Dmbx1 (NM_130865.2,85-103).
cactcagcgccatgtacaa

SEQ ID NO: 443011 - DNA, 19 bp, Mus musculus
  siRNA target sequence for Dmbx1 (NM_130865.2,157-175).
cagtgcatgcgcttacgtt

SEQ ID NO: 443012 - DNA, 19 bp, Mus musculus
  siRNA target sequence for Dmbx1 (NM_130865.2,185-203).
cctagctggctgtacattt

SEQ ID NO: 443013 - DNA, 19 bp, Mus musculus
  siRNA target sequence for Dmbx1 (NM_130865.2,233-251).
ctcccagcaccgtaaacaa

SEQ ID NO: 443014 - DNA, 19 bp, Mus musculus
  siRNA target sequence for Dmbx1 (NM_130865.2,304-322).
ccttccaaaagactcatta

SEQ ID NO: 443015 - DNA, 19 bp, Mus musculus
  siRNA target sequence for Dmbx1 (NM_130865.2,342-360).
gagaggctggccatgtgta

SEQ ID NO: 443016 - DNA, 19 bp, Mus musculus
  siRNA target sequence for Dmbx1 (NM_130865.2,347-365).
gctggccatgtgtaccaat

SEQ ID NO: 443017 - DNA, 19 bp, Mus musculus
  siRNA target sequence for Dmbx1 (NM_130865.2,406-424).
gggccaagttccgaaagaa

SEQ ID NO: 443018 - DNA, 19 bp, Mus musculus
  siRNA target sequence for Dmbx1 (NM_130865.2,872-890).
gatgcactactcgtctttt

SEQ ID NO: 443019 - DNA, 19 bp, Mus musculus
  siRNA target sequence for Dmbx1 (NM_130865.2,875-893).
gcactactcgtcttttgaa

SEQ ID NO: 443020 - DNA, 19 bp, Mus musculus
  siRNA target sequence for Dmbx1 (NM_130865.2,983-1001).
ctgccagtcctattaccaa

SEQ ID NO: 443021 - DNA, 19 bp, Mus musculus
  siRNA target sequence for Dmbx1 (NM_130865.2,1088-1106).
cgctgccctgaacagtaaa

SEQ ID NO: 443022 - DNA, 19 bp, Mus musculus
  siRNA target sequence for Dmbx1 (NM_130865.2,1108-1126).
ccacgagcattgaaaacct

SEQ ID NO: 443023 - DNA, 19 bp, Mus musculus
  siRNA target sequence for Dmbx1 (NM_130865.2,1109-1127).
cacgagcattgaaaacctt

SEQ ID NO: 443024 - DNA, 19 bp, Mus musculus
  siRNA target sequence for Dmbx1 (NM_130865.2,1156-1174).
ccctgggactcgatacact

SEQ ID NO: 443025 - DNA, 19 bp, Mus musculus
  siRNA target sequence for Dmrt1 (NM_015826.2,1123-1141).
ccccagcagtcaagattct

SEQ ID NO: 443026 - DNA, 19 bp, Mus musculus
  siRNA target sequence for Dmrt2 (NM_145831.1,921-939).
ggctttctgggaaacagaa

SEQ ID NO: 443027 - DNA, 19 bp, Mus musculus
  siRNA target sequence for Dmrt2 (NM_145831.1,930-948).
ggaaacagaacaatttcga

SEQ ID NO: 443028 - DNA, 19 bp, Mus musculus
  siRNA target sequence for Dmrt2 (NM_145831.1,931-949).
gaaacagaacaatttcgat

SEQ ID NO: 443029 - DNA, 19 bp, Mus musculus
  siRNA target sequence for Dmrt2 (NM_145831.1,987-1005).
gtttgctggccaaaagcat

SEQ ID NO: 443030 - DNA, 19 bp, Mus musculus
  siRNA target sequence for Dmrt2 (NM_145831.1,991-1009).
gctggccaaaagcatttta

SEQ ID NO: 443031 - DNA, 19 bp, Mus musculus
  siRNA target sequence for Dmrt2 (NM_145831.1,1023-1041).
caatgacggcagagactta

SEQ ID NO: 443032 - DNA, 19 bp, Mus musculus
  siRNA target sequence for Dmrt2 (NM_145831.1,1027-1045).
gacggcagagacttaccta

SEQ ID NO: 443033 - DNA, 19 bp, Mus musculus
  siRNA target sequence for Dmrt2 (NM_145831.1,1159-1177).
gatgttagaaacatctcaa

SEQ ID NO: 443034 - DNA, 19 bp, Mus musculus
  siRNA target sequence for Dmrt2 (NM_145831.1,1211-1229).
cctggacccgagtacagtt

SEQ ID NO: 443035 - DNA, 19 bp, Mus musculus
  siRNA target sequence for Dmrt2 (NM_145831.1,1219-1237).
cgagtacagttcctacaaa

SEQ ID NO: 443036 - DNA, 19 bp, Mus musculus
  siRNA target sequence for Dmrt2 (NM_145831.1,1268-1286).
ccgagcaaggacttctgta

SEQ ID NO: 443037 - DNA, 19 bp, Mus musculus
  siRNA target sequence for Dmrt2 (NM_145831.1,1273-1291).
caaggacttctgtaacttt

SEQ ID NO: 443038 - DNA, 19 bp, Mus musculus
  siRNA target sequence for Dmrt2 (NM_145831.1,1307-1325).
gatctcaccatgcagtatt

SEQ ID NO: 443039 - DNA, 19 bp, Mus musculus
  siRNA target sequence for Dmrt2 (NM_145831.1,1326-1344).
cagggtctgggaatatgga

SEQ ID NO: 443040 - DNA, 19 bp, Mus musculus
  siRNA target sequence for Dmrt2 (NM_145831.1,1370-1388).
gccacaacttacagacaat

SEQ ID NO: 443041 - DNA, 19 bp, Mus musculus
  siRNA target sequence for Dmrt2 (NM_145831.1,1420-1438).
caagtgcggtcccattagt

SEQ ID NO: 443042 - DNA, 19 bp, Mus musculus
  siRNA target sequence for Dmrt2 (NM_145831.1,1453-1471).
ccagcaatatctgttaaat

SEQ ID NO: 443043 - DNA, 19 bp, Mus musculus
  siRNA target sequence for Dmrt2 (NM_145831.1,1456-1474).
gcaatatctgttaaatgct

SEQ ID NO: 443044 - DNA, 19 bp, Mus musculus
  siRNA target sequence for Dmrt2 (NM_145831.1,1548-1566).
gcgcagagcaagacatgat

SEQ ID NO: 443045 - DNA, 19 bp, Mus musculus
  siRNA target sequence for Dmrt2 (NM_145831.1,1674-1692).
ccccacccggtcggaattt

SEQ ID NO: 443046 - DNA, 19 bp, Mus musculus
  siRNA target sequence for Dmrt2 (NM_145831.1,1676-1694).
ccacccggtcggaatttct

SEQ ID NO: 443047 - DNA, 19 bp, Mus musculus
  siRNA target sequence for Dmrt2 (NM_145831.1,1724-1742).
gctcaagggcacgtcttaa

SEQ ID NO: 443048 - DNA, 19 bp, Mus musculus
  siRNA target sequence for Dmrt2 (NM_145831.1,1727-1745).
caagggcacgtcttaacca

SEQ ID NO: 443049 - DNA, 19 bp, Mus musculus
  siRNA target sequence for Dmrt2 (NM_145831.1,1814-1832).
cagacgctcagcgacaaat

SEQ ID NO: 443050 - DNA, 19 bp, Mus musculus
  siRNA target sequence for Dmrt2 (NM_145831.1,1816-1834).
gacgctcagcgacaaatca

SEQ ID NO: 443051 - DNA, 19 bp, Mus musculus
  siRNA target sequence for Dmrt2 (NM_145831.1,1846-1864).
gaacgcaccatttgtcaaa

SEQ ID NO: 443052 - DNA, 19 bp, Mus musculus
  siRNA target sequence for Dmrt2 (NM_145831.1,1973-1991).
caagttggaacgaaacttt

SEQ ID NO: 443053 - DNA, 19 bp, Mus musculus
  siRNA target sequence for Dmrt2 (NM_145831.1,2010-2028).
cgttctctgtcgaatctat

SEQ ID NO: 443054 - DNA, 19 bp, Mus musculus
  siRNA target sequence for Dmrt2 (NM_145831.1,2016-2034).
ctgtcgaatctattcttaa

SEQ ID NO: 443055 - DNA, 19 bp, Mus musculus
  siRNA target sequence for Dmrt3 (NM_177360.2,811-829).
gaggagctccccagatgtt

SEQ ID NO: 443056 - DNA, 19 bp, Mus musculus
  siRNA target sequence for Dmrt3 (NM_177360.2,890-908).
gggtacgccgtgcagaaaa

SEQ ID NO: 443057 - DNA, 19 bp, Mus musculus
  siRNA target sequence for Dmrt3 (NM_177360.2,891-909).
ggtacgccgtgcagaaaaa

SEQ ID NO: 443058 - DNA, 19 bp, Mus musculus
  siRNA target sequence for Dmrt3 (NM_177360.2,1197-1215).
cctctagcggccatatctt

SEQ ID NO: 443059 - DNA, 19 bp, Mus musculus
  siRNA target sequence for Dmrt3 (NM_177360.2,1198-1216).
ctctagcggccatatcttt

SEQ ID NO: 443060 - DNA, 19 bp, Mus musculus
  siRNA target sequence for Dmrt3 (NM_177360.2,1200-1218).
ctagcggccatatctttga

SEQ ID NO: 443061 - DNA, 19 bp, Mus musculus
  siRNA target sequence for Dmrt3 (NM_177360.2,1203-1221).
gcggccatatctttgaaca

SEQ ID NO: 443062 - DNA, 19 bp, Mus musculus
  siRNA target sequence for Dmrt3 (NM_177360.2,1379-1397).
ccgctgatgctgaggaata

SEQ ID NO: 443063 - DNA, 19 bp, Mus musculus
  siRNA target sequence for Dmrt3 (NM_177360.2,1411-1429).
ccagtcgagccccttttta

SEQ ID NO: 443064 - DNA, 19 bp, Mus musculus
  siRNA target sequence for Dmrt3 (NM_177360.2,1596-1614).
gttgtccaatcgtgacaaa

SEQ ID NO: 443065 - DNA, 19 bp, Mus musculus
  siRNA target sequence for Dmrt3 (NM_177360.2,1624-1642).
ctacacagaggatgactat

SEQ ID NO: 443066 - DNA, 19 bp, Mus musculus
  siRNA target sequence for Dmrt3 (NM_177360.2,1657-1675).
ctcctcggattctagaata

SEQ ID NO: 443067 - DNA, 19 bp, Mus musculus
  siRNA target sequence for Dmrt3 (NM_177360.2,1659-1677).
cctcggattctagaatact

SEQ ID NO: 443068 - DNA, 19 bp, Mus musculus
  siRNA target sequence for Dmrt3 (NM_177360.2,1662-1680).
cggattctagaatactcaa

SEQ ID NO: 443069 - DNA, 19 bp, Mus musculus
  siRNA target sequence for Dmrta1 (NM_175647.2,686-704).
gccggtcagtcccaacttt

SEQ ID NO: 443070 - DNA, 19 bp, Mus musculus
  siRNA target sequence for Dmrta1 (NM_175647.2,698-716).
caactttcgaggttttcca

SEQ ID NO: 443071 - DNA, 19 bp, Mus musculus
  siRNA target sequence for Dmrta1 (NM_175647.2,821-839).
gatcatctaagggtaatgt

SEQ ID NO: 443072 - DNA, 19 bp, Mus musculus
  siRNA target sequence for Dmrta1 (NM_175647.2,858-876).
cttcatgtcatctattcca

SEQ ID NO: 443073 - DNA, 19 bp, Mus musculus
  siRNA target sequence for Dmrta1 (NM_175647.2,910-928).
ccttgccccacggatcaat

SEQ ID NO: 443074 - DNA, 19 bp, Mus musculus
  siRNA target sequence for Dmrta1 (NM_175647.2,940-958).
gacagtcccaggtctttct

SEQ ID NO: 443075 - DNA, 19 bp, Mus musculus
  siRNA target sequence for Dmrta1 (NM_175647.2,993-1011).
gtgggccagagactacatt

SEQ ID NO: 443076 - DNA, 19 bp, Mus musculus
  siRNA target sequence for Dmrta1 (NM_175647.2,997-1015).
gccagagactacattgcta

SEQ ID NO: 443077 - DNA, 19 bp, Mus musculus
  siRNA target sequence for Dmrta1 (NM_175647.2,1052-1070).
gagaccctctcggaattct

SEQ ID NO: 443078 - DNA, 19 bp, Mus musculus
  siRNA target sequence for Dmrta1 (NM_175647.2,1054-1072).
gaccctctcggaattctta

SEQ ID NO: 443079 - DNA, 19 bp, Mus musculus
  siRNA target sequence for Dmrta1 (NM_175647.2,1076-1094).
ggatctttccaggttacaa

SEQ ID NO: 443080 - DNA, 19 bp, Mus musculus
  siRNA target sequence for Dmrta1 (NM_175647.2,1101-1119).
ccgcctagaaggcattcta

SEQ ID NO: 443081 - DNA, 19 bp, Mus musculus
  siRNA target sequence for Dmrta1 (NM_175647.2,1122-1140).
gttctgcaagggagatgta

SEQ ID NO: 443082 - DNA, 19 bp, Mus musculus
  siRNA target sequence for Dmrta1 (NM_175647.2,1161-1179).
cttaaatgggagagaacat

SEQ ID NO: 443083 - DNA, 19 bp, Mus musculus
  siRNA target sequence for Dmrta1 (NM_175647.2,1206-1224).
cgcagacttggaaaatgca

SEQ ID NO: 443084 - DNA, 19 bp, Mus musculus
  siRNA target sequence for Dmrta1 (NM_175647.2,1231-1249).
cagagagcgtcagatttta

SEQ ID NO: 443085 - DNA, 19 bp, Mus musculus
  siRNA target sequence for Dmrta1 (NM_175647.2,1233-1251).
gagagcgtcagattttagt

SEQ ID NO: 443086 - DNA, 19 bp, Mus musculus
  siRNA target sequence for Dmrta1 (NM_175647.2,1235-1253).
gagcgtcagattttagtct

SEQ ID NO: 443087 - DNA, 19 bp, Mus musculus
  siRNA target sequence for Dmrta1 (NM_175647.2,1265-1283).
gctttgggactctaagtaa

SEQ ID NO: 443088 - DNA, 19 bp, Mus musculus
  siRNA target sequence for Dmrta1 (NM_175647.2,1266-1284).
ctttgggactctaagtaat

SEQ ID NO: 443089 - DNA, 19 bp, Mus musculus
  siRNA target sequence for Dmrta1 (NM_175647.2,1270-1288).
gggactctaagtaataaat

SEQ ID NO: 443090 - DNA, 19 bp, Mus musculus
  siRNA target sequence for Dmrta1 (NM_175647.2,1333-1351).
gattcaactctctacagtt

SEQ ID NO: 443091 - DNA, 19 bp, Mus musculus
  siRNA target sequence for Dmrta1 (NM_175647.2,1378-1396).
ctgcgcctggcatattctt

SEQ ID NO: 443092 - DNA, 19 bp, Mus musculus
  siRNA target sequence for Dmrta1 (NM_175647.2,1406-1424).
gagcgctgtctggttttgt

SEQ ID NO: 443093 - DNA, 19 bp, Mus musculus
  siRNA target sequence for Dmrta1 (NM_175647.2,1486-1504).
gcgtttccagggatgatta

SEQ ID NO: 443094 - DNA, 19 bp, Mus musculus
  siRNA target sequence for Dmrta1 (NM_175647.2,1521-1539).
ccctagcaagcacttagta

SEQ ID NO: 443095 - DNA, 19 bp, Mus musculus
  siRNA target sequence for Dmrta1 (NM_175647.2,1541-1559).
ctggtggtagactgtattt

SEQ ID NO: 443096 - DNA, 19 bp, Mus musculus
  siRNA target sequence for Dmrta1 (NM_175647.2,1543-1561).
ggtggtagactgtatttca

SEQ ID NO: 443097 - DNA, 19 bp, Mus musculus
  siRNA target sequence for Dmrta2 (NM_172296.1,742-760).
gcctgcctacgaagtcttt

SEQ ID NO: 443098 - DNA, 19 bp, Mus musculus
  siRNA target sequence for Dmrta2 (NM_172296.1,1144-1162).
gggttcggaggctgacaaa

SEQ ID NO: 443099 - DNA, 19 bp, Mus musculus
  siRNA target sequence for Dmrtc2 (NM_027732.1,309-327).
ggcttgcgagtgtcacaaa

SEQ ID NO: 443100 - DNA, 19 bp, Mus musculus
  siRNA target sequence for Dmrtc2 (NM_027732.1,310-328).
gcttgcgagtgtcacaaat

SEQ ID NO: 443101 - DNA, 19 bp, Mus musculus
  siRNA target sequence for Dmrtc2 (NM_027732.1,314-332).
gcgagtgtcacaaatgtgt

SEQ ID NO: 443102 - DNA, 19 bp, Mus musculus
  siRNA target sequence for Dmrtc2 (NM_027732.1,388-406).
caggaggcacagctgaaaa

SEQ ID NO: 443103 - DNA, 19 bp, Mus musculus
  siRNA target sequence for Dmrtc2 (NM_027732.1,452-470).
ctcccctccgtgtcaagaa

SEQ ID NO: 443104 - DNA, 19 bp, Mus musculus
  siRNA target sequence for Dmrtc2 (NM_027732.1,873-891).
gcctcacacatgttcaact

SEQ ID NO: 443105 - DNA, 19 bp, Mus musculus
  siRNA target sequence for Dmrtc2 (NM_027732.1,1018-1036).
cttgtaggtctgaaagact

SEQ ID NO: 443106 - DNA, 19 bp, Mus musculus
  siRNA target sequence for E2f1 (NM_007891.1,270-288).
ctggccctcgcgattctga

SEQ ID NO: 443107 - DNA, 19 bp, Mus musculus
  siRNA target sequence for E2f1 (NM_007891.1,906-924).
ctcctgagacccaactaca

SEQ ID NO: 443108 - DNA, 19 bp, Mus musculus
  siRNA target sequence for E2f1 (NM_007891.1,936-954).
cttcagagacatttcagat

SEQ ID NO: 443109 - DNA, 19 bp, Mus musculus
  siRNA target sequence for E2f1 (NM_007891.1,1280-1298).
ctccctggggagttcatca

SEQ ID NO: 443110 - DNA, 19 bp, Mus musculus
  siRNA target sequence for E2f1 (NM_007891.1,1311-1329).
cccacgaggcccttgacta

SEQ ID NO: 443111 - DNA, 19 bp, Mus musculus
  siRNA target sequence for E2f1 (NM_007891.1,1312-1330).
ccacgaggcccttgactat

SEQ ID NO: 443112 - DNA, 19 bp, Mus musculus
  siRNA target sequence for E2f1 (NM_007891.1,1316-1334).
gaggcccttgactatcact

SEQ ID NO: 443113 - DNA, 19 bp, Mus musculus
  siRNA target sequence for E2f1 (NM_007891.1,1354-1372).
gggcattagagatctcttt

SEQ ID NO: 443114 - DNA, 19 bp, Mus musculus
  siRNA target sequence for E2f1 (NM_007891.1,1391-1409).
ctgacccctctggatttct

SEQ ID NO: 443115 - DNA, 19 bp, Mus musculus
  siRNA target sequence for E2f2 (NM_177733.2,420-438).
ccacggcgcaacctacaaa

SEQ ID NO: 443116 - DNA, 19 bp, Mus musculus
  siRNA target sequence for E2f2 (NM_177733.2,515-533).
gccaccacctactacactt

SEQ ID NO: 443117 - DNA, 19 bp, Mus musculus
  siRNA target sequence for E2f2 (NM_177733.2,600-618).
gacccgagggccaaattgt

SEQ ID NO: 443118 - DNA, 19 bp, Mus musculus
  siRNA target sequence for E2f2 (NM_177733.2,681-699).
ggcctacggtccctgaatt

SEQ ID NO: 443119 - DNA, 19 bp, Mus musculus
  siRNA target sequence for E2f2 (NM_177733.2,720-738).
gcatccgcgtggatggttt

SEQ ID NO: 443120 - DNA, 19 bp, Mus musculus
  siRNA target sequence for E2f2 (NM_177733.2,969-987).
gggtaggcagggaactatt

SEQ ID NO: 443121 - DNA, 19 bp, Mus musculus
  siRNA target sequence for E2f2 (NM_177733.2,970-988).
ggtaggcagggaactattt

SEQ ID NO: 443122 - DNA, 19 bp, Mus musculus
  siRNA target sequence for E2f2 (NM_177733.2,1102-1120).
gcacctgaccgaagataat

SEQ ID NO: 443123 - DNA, 19 bp, Mus musculus
  siRNA target sequence for E2f2 (NM_177733.2,1253-1271).
ctgcagatttatctaaaga

SEQ ID NO: 443124 - DNA, 19 bp, Mus musculus
  siRNA target sequence for E2f2 (NM_177733.2,1256-1274).
cagatttatctaaagagta

SEQ ID NO: 443125 - DNA, 19 bp, Mus musculus
  siRNA target sequence for E2f2 (NM_177733.2,1537-1555).
gtcacaccctcttctacaa

SEQ ID NO: 443126 - DNA, 19 bp, Mus musculus
  siRNA target sequence for E2f2 (NM_177733.2,1623-1641).
ccttggaccaggacgaata

SEQ ID NO: 443127 - DNA, 19 bp, Mus musculus
  siRNA target sequence for E2f2 (NM_177733.2,1700-1718).
ggggacctgttgattaatt

SEQ ID NO: 443128 - DNA, 19 bp, Mus musculus
  siRNA target sequence for E2f4 (NM_148952.1,282-300).
cggtctgatcgagaagaaa

SEQ ID NO: 443129 - DNA, 19 bp, Mus musculus
  siRNA target sequence for E2f4 (NM_148952.1,283-301).
ggtctgatcgagaagaaat

SEQ ID NO: 443130 - DNA, 19 bp, Mus musculus
  siRNA target sequence for E2f4 (NM_148952.1,327-345).
cgtcgggccaggttgcaat

SEQ ID NO: 443131 - DNA, 19 bp, Mus musculus
  siRNA target sequence for E2f4 (NM_148952.1,328-346).
gtcgggccaggttgcaata

SEQ ID NO: 443132 - DNA, 19 bp, Mus musculus
  siRNA target sequence for E2f4 (NM_148952.1,489-507).
ggcctacgtgactcatgaa

SEQ ID NO: 443133 - DNA, 19 bp, Mus musculus
  siRNA target sequence for E2f4 (NM_148952.1,491-509).
cctacgtgactcatgaaga

SEQ ID NO: 443134 - DNA, 19 bp, Mus musculus
  siRNA target sequence for E2f4 (NM_148952.1,707-725).
ctccccctgacgatctact

SEQ ID NO: 443135 - DNA, 19 bp, Mus musculus
  siRNA target sequence for E2f4 (NM_148952.1,988-1006).
gcactgctggatagtagta

SEQ ID NO: 443136 - DNA, 19 bp, Mus musculus
  siRNA target sequence for E2f4 (NM_148952.1,1115-1133).
ccaaagagctgtcagaaat

SEQ ID NO: 443137 - DNA, 19 bp, Mus musculus
  siRNA target sequence for E2f4 (NM_148952.1,1226-1244).
ctcccggagaccacgatta

SEQ ID NO: 443138 - DNA, 19 bp, Mus musculus
  siRNA target sequence for E2f4 (NM_148952.1,1228-1246).
cccggagaccacgattaca

SEQ ID NO: 443139 - DNA, 19 bp, Mus musculus
  siRNA target sequence for E2f4 (NM_148952.1,1229-1247).
ccggagaccacgattacat

SEQ ID NO: 443140 - DNA, 19 bp, Mus musculus
  siRNA target sequence for E2f4 (NM_148952.1,1232-1250).
gagaccacgattacatcta

SEQ ID NO: 443141 - DNA, 19 bp, Mus musculus
  siRNA target sequence for E2f5 (NM_007892.2,285-303).
ggcttgcttaccaccaaat

SEQ ID NO: 443142 - DNA, 19 bp, Mus musculus
  siRNA target sequence for E2f5 (NM_007892.2,286-304).
gcttgcttaccaccaaatt

SEQ ID NO: 443143 - DNA, 19 bp, Mus musculus
  siRNA target sequence for E2f5 (NM_007892.2,332-350).
cggcgtcctggatctcaaa

SEQ ID NO: 443144 - DNA, 19 bp, Mus musculus
  siRNA target sequence for E2f5 (NM_007892.2,377-395).
gcaaaagcgaagaatttat

SEQ ID NO: 443145 - DNA, 19 bp, Mus musculus
  siRNA target sequence for E2f5 (NM_007892.2,468-486).
gtaggtgctggctgtaata

SEQ ID NO: 443146 - DNA, 19 bp, Mus musculus
  siRNA target sequence for E2f5 (NM_007892.2,492-510).
gaagttatcgatagattaa

SEQ ID NO: 443147 - DNA, 19 bp, Mus musculus
  siRNA target sequence for E2f5 (NM_007892.2,495-513).
gttatcgatagattaaggt

SEQ ID NO: 443148 - DNA, 19 bp, Mus musculus
  siRNA target sequence for E2f5 (NM_007892.2,539-557).
cgaattgaaggaaagagaa

SEQ ID NO: 443149 - DNA, 19 bp, Mus musculus
  siRNA target sequence for E2f5 (NM_007892.2,558-576).
cttgaccagcagaagttgt

SEQ ID NO: 443150 - DNA, 19 bp, Mus musculus
  siRNA target sequence for E2f5 (NM_007892.2,578-596).
gctacagcaaagcatcaaa

SEQ ID NO: 443151 - DNA, 19 bp, Mus musculus
  siRNA target sequence for E2f5 (NM_007892.2,606-624).
gaagactccattaataaca

SEQ ID NO: 443152 - DNA, 19 bp, Mus musculus
  siRNA target sequence for E2f5 (NM_007892.2,611-629).
ctccattaataacagattt

SEQ ID NO: 443153 - DNA, 19 bp, Mus musculus
  siRNA target sequence for E2f5 (NM_007892.2,706-724).
cacagctggaagtacctat

SEQ ID NO: 443154 - DNA, 19 bp, Mus musculus
  siRNA target sequence for E2f5 (NM_007892.2,710-728).
gctggaagtacctattcca

SEQ ID NO: 443155 - DNA, 19 bp, Mus musculus
  siRNA target sequence for E2f5 (NM_007892.2,786-804).
cctatccatgtgctactta

SEQ ID NO: 443156 - DNA, 19 bp, Mus musculus
  siRNA target sequence for E2f5 (NM_007892.2,787-805).
ctatccatgtgctacttat

SEQ ID NO: 443157 - DNA, 19 bp, Mus musculus
  siRNA target sequence for E2f5 (NM_007892.2,798-816).
ctacttataaataaagagt

SEQ ID NO: 443158 - DNA, 19 bp, Mus musculus
  siRNA target sequence for E2f5 (NM_007892.2,977-995).
gacaccagctgcagaagta

SEQ ID NO: 443159 - DNA, 19 bp, Mus musculus
  siRNA target sequence for E2f5 (NM_007892.2,993-1011).
gtatcttcaggatctatta

SEQ ID NO: 443160 - DNA, 19 bp, Mus musculus
  siRNA target sequence for E2f5 (NM_007892.2,1006-1024).
ctattagtggagacatcat

SEQ ID NO: 443161 - DNA, 19 bp, Mus musculus
  siRNA target sequence for E2f5 (NM_007892.2,1012-1030).
gtggagacatcattgatga

SEQ ID NO: 443162 - DNA, 19 bp, Mus musculus
  siRNA target sequence for E2f5 (NM_007892.2,1072-1090).
ctaccccagcagatgacta

SEQ ID NO: 443163 - DNA, 19 bp, Mus musculus
  siRNA target sequence for E2f5 (NM_007892.2,1077-1095).
ccagcagatgactacaact

SEQ ID NO: 443164 - DNA, 19 bp, Mus musculus
  siRNA target sequence for E2f5 (NM_007892.2,1078-1096).
cagcagatgactacaactt

SEQ ID NO: 443165 - DNA, 19 bp, Mus musculus
  siRNA target sequence for E2f5 (NM_007892.2,1088-1106).
ctacaactttaatttagat

SEQ ID NO: 443166 - DNA, 19 bp, Mus musculus
  siRNA target sequence for E2f5 (NM_007892.2,1091-1109).
caactttaatttagatgat

SEQ ID NO: 443167 - DNA, 19 bp, Mus musculus
  siRNA target sequence for E2f5 (NM_007892.2,1134-1152).
gatgttcagatactaaatt

SEQ ID NO: 443168 - DNA, 19 bp, Mus musculus
  siRNA target sequence for E2f6 (NM_033270.1,419-437).
gtcactggtatacttaact

SEQ ID NO: 443169 - DNA, 19 bp, Mus musculus
  siRNA target sequence for E2f6 (NM_033270.1,475-493).
gcattcttgacttaaacaa

SEQ ID NO: 443170 - DNA, 19 bp, Mus musculus
  siRNA target sequence for E2f6 (NM_033270.1,693-711).
gacgagttgattaaagatt

SEQ ID NO: 443171 - DNA, 19 bp, Mus musculus
  siRNA target sequence for E2f6 (NM_033270.1,695-713).
cgagttgattaaagattgt

SEQ ID NO: 443172 - DNA, 19 bp, Mus musculus
  siRNA target sequence for E2f6 (NM_033270.1,743-761).
caaggaaaatgaaagacta

SEQ ID NO: 443173 - DNA, 19 bp, Mus musculus
  siRNA target sequence for E2f6 (NM_033270.1,753-771).
gaaagactagcgtatgtaa

SEQ ID NO: 443174 - DNA, 19 bp, Mus musculus
  siRNA target sequence for E2f6 (NM_033270.1,757-775).
gactagcgtatgtaaccta

SEQ ID NO: 443175 - DNA, 19 bp, Mus musculus
  siRNA target sequence for E2f6 (NM_033270.1,779-797).
ggatattcacggcattcaa

SEQ ID NO: 443176 - DNA, 19 bp, Mus musculus
  siRNA target sequence for E2f6 (NM_033270.1,788-806).
cggcattcaagctttccat

SEQ ID NO: 443177 - DNA, 19 bp, Mus musculus
  siRNA target sequence for E2f6 (NM_033270.1,803-821).
ccatgaacagattgtcatt

SEQ ID NO: 443178 - DNA, 19 bp, Mus musculus
  siRNA target sequence for E2f6 (NM_033270.1,901-919).
ccaaaggacccattgatgt

SEQ ID NO: 443179 - DNA, 19 bp, Mus musculus
  siRNA target sequence for E2f6 (NM_033270.1,902-920).
caaaggacccattgatgta

SEQ ID NO: 443180 - DNA, 19 bp, Mus musculus
  siRNA target sequence for E2f6 (NM_033270.1,939-957).
cagaaccattcaaatggta

SEQ ID NO: 443181 - DNA, 19 bp, Mus musculus
  siRNA target sequence for E2f6 (NM_033270.1,941-959).
gaaccattcaaatggtaaa

SEQ ID NO: 443182 - DNA, 19 bp, Mus musculus
  siRNA target sequence for E2f6 (NM_033270.1,945-963).
cattcaaatggtaaaacca

SEQ ID NO: 443183 - DNA, 19 bp, Mus musculus
  siRNA target sequence for E2f6 (NM_033270.1,978-996).
gcctctccatctaaaagca

SEQ ID NO: 443184 - DNA, 19 bp, Mus musculus
  siRNA target sequence for Egr1 (NM_007913.2,1693-1711).
gccgagatgcaattgatgt

SEQ ID NO: 443185 - DNA, 19 bp, Mus musculus
  siRNA target sequence for Egr1 (NM_007913.2,2096-2114).
ccaacagtggcaacacttt

SEQ ID NO: 443186 - DNA, 19 bp, Mus musculus
  siRNA target sequence for Egr1 (NM_007913.2,2433-2451).
ctatctgtttccacaacaa

SEQ ID NO: 443187 - DNA, 19 bp, Mus musculus
  siRNA target sequence for Egr1 (NM_007913.2,2567-2585).
cgggctcccaggacttaaa

SEQ ID NO: 443188 - DNA, 19 bp, Mus musculus
  siRNA target sequence for Egr1 (NM_007913.2,2577-2595).
ggacttaaaggctcttaat

SEQ ID NO: 443189 - DNA, 19 bp, Mus musculus
  siRNA target sequence for Egr1 (NM_007913.2,2590-2608).
cttaataccacctaccaat

SEQ ID NO: 443190 - DNA, 19 bp, Mus musculus
  siRNA target sequence for Egr1 (NM_007913.2,2670-2688).
ccatgaacgcccatatgct

SEQ ID NO: 443191 - DNA, 19 bp, Mus musculus
  siRNA target sequence for Egr1 (NM_007913.2,2671-2689).
catgaacgcccatatgctt

SEQ ID NO: 443192 - DNA, 19 bp, Mus musculus
  siRNA target sequence for Egr1 (NM_007913.2,2868-2886).
catttgtgggaggaagttt

SEQ ID NO: 443193 - DNA, 19 bp, Mus musculus
  siRNA target sequence for Egr1 (NM_007913.2,2909-2927).
ggcataccaaaatccattt

SEQ ID NO: 443194 - DNA, 19 bp, Mus musculus
  siRNA target sequence for Egr1 (NM_007913.2,2910-2928).
gcataccaaaatccattta

SEQ ID NO: 443195 - DNA, 19 bp, Mus musculus
  siRNA target sequence for Egr1 (NM_007913.2,3216-3234).
cacctcaactggtctttca

SEQ ID NO: 443196 - DNA, 19 bp, Mus musculus
  siRNA target sequence for Egr1 (NM_007913.2,3218-3236).
cctcaactggtctttcaga

SEQ ID NO: 443197 - DNA, 19 bp, Mus musculus
  siRNA target sequence for Egr1 (NM_007913.2,3249-3267).
cttttctcccaggacaatt

SEQ ID NO: 443198 - DNA, 19 bp, Mus musculus
  siRNA target sequence for Ehf (NM_007914.1,153-171).
gaaggaagtggtgtaatga

SEQ ID NO: 443199 - DNA, 19 bp, Mus musculus
  siRNA target sequence for Ehf (NM_007914.1,157-175).
gaagtggtgtaatgaatct

SEQ ID NO: 443200 - DNA, 19 bp, Mus musculus
  siRNA target sequence for Ehf (NM_007914.1,160-178).
gtggtgtaatgaatctcaa

SEQ ID NO: 443201 - DNA, 19 bp, Mus musculus
  siRNA target sequence for Ehf (NM_007914.1,224-242).
ctaccccacatgcaatgtt

SEQ ID NO: 443202 - DNA, 19 bp, Mus musculus
  siRNA target sequence for Ehf (NM_007914.1,282-300).
cctcagtactggaccaaat

SEQ ID NO: 443203 - DNA, 19 bp, Mus musculus
  siRNA target sequence for Ehf (NM_007914.1,510-528).
cagtccgcacacaatgtca

SEQ ID NO: 443204 - DNA, 19 bp, Mus musculus
  siRNA target sequence for Ehf (NM_007914.1,514-532).
ccgcacacaatgtcattgt

SEQ ID NO: 443205 - DNA, 19 bp, Mus musculus
  siRNA target sequence for Ehf (NM_007914.1,607-625).
gtagcacagtagatctgtt

SEQ ID NO: 443206 - DNA, 19 bp, Mus musculus
  siRNA target sequence for Ehf (NM_007914.1,714-732).
caagaccaccctgtaaagt

SEQ ID NO: 443207 - DNA, 19 bp, Mus musculus
  siRNA target sequence for Ehf (NM_007914.1,837-855).
cgttcggaaggcatcttca

SEQ ID NO: 443208 - DNA, 19 bp, Mus musculus
  siRNA target sequence for Ehf (NM_007914.1,937-955).
gggctatgagatattacta

SEQ ID NO: 443209 - DNA, 19 bp, Mus musculus
  siRNA target sequence for Ehf (NM_007914.1,985-1003).
gacgacggctggtctataa

SEQ ID NO: 443210 - DNA, 19 bp, Mus musculus
  siRNA target sequence for Elf1 (NM_007920.2,677-695).
ctgctgttgtccaacagaa

SEQ ID NO: 443211 - DNA, 19 bp, Mus musculus
  siRNA target sequence for Elf1 (NM_007920.2,770-788).
ctgttattgtggaacatgt

SEQ ID NO: 443212 - DNA, 19 bp, Mus musculus
  siRNA target sequence for Elf1 (NM_007920.2,790-808).
cctggtgctgatattctca

SEQ ID NO: 443213 - DNA, 19 bp, Mus musculus
  siRNA target sequence for Elf1 (NM_007920.2,796-814).
gctgatattctcaatagtt

SEQ ID NO: 443214 - DNA, 19 bp, Mus musculus
  siRNA target sequence for Elf1 (NM_007920.2,797-815).
ctgatattctcaatagtta

SEQ ID NO: 443215 - DNA, 19 bp, Mus musculus
  siRNA target sequence for Elf1 (NM_007920.2,1178-1196).
cagagcagcgcaagagaaa

SEQ ID NO: 443216 - DNA, 19 bp, Mus musculus
  siRNA target sequence for Elf1 (NM_007920.2,1233-1251).
cccgacgactacaccaaat

SEQ ID NO: 443217 - DNA, 19 bp, Mus musculus
  siRNA target sequence for Elf1 (NM_007920.2,1234-1252).
ccgacgactacaccaaata

SEQ ID NO: 443218 - DNA, 19 bp, Mus musculus
  siRNA target sequence for Elf1 (NM_007920.2,1235-1253).
cgacgactacaccaaatat

SEQ ID NO: 443219 - DNA, 19 bp, Mus musculus
  siRNA target sequence for Elf1 (NM_007920.2,1336-1354).
gctacctgtcctaagtaca

SEQ ID NO: 443220 - DNA, 19 bp, Mus musculus
  siRNA target sequence for Elf1 (NM_007920.2,1337-1355).
ctacctgtcctaagtacat

SEQ ID NO: 443221 - DNA, 19 bp, Mus musculus
  siRNA target sequence for Elf1 (NM_007920.2,1400-1418).
ctaaagccgtgtctagatt

SEQ ID NO: 443222 - DNA, 19 bp, Mus musculus
  siRNA target sequence for Elf1 (NM_007920.2,1629-1647).
cgcatcaagtcggaatcaa

SEQ ID NO: 443223 - DNA, 19 bp, Mus musculus
  siRNA target sequence for Elf1 (NM_007920.2,1818-1836).
cttccgaactgttcatgta

SEQ ID NO: 443224 - DNA, 19 bp, Mus musculus
  siRNA target sequence for Elf1 (NM_007920.2,1821-1839).
ccgaactgttcatgtagta

SEQ ID NO: 443225 - DNA, 19 bp, Mus musculus
  siRNA target sequence for Elf1 (NM_007920.2,1916-1934).
caagtattaggactataca

SEQ ID NO: 443226 - DNA, 19 bp, Mus musculus
  siRNA target sequence for Elf1 (NM_007920.2,1964-1982).
ctcctggcaaccaacagtt

SEQ ID NO: 443227 - DNA, 19 bp, Mus musculus
  siRNA target sequence for Elf1 (NM_007920.2,1969-1987).
ggcaaccaacagttacata

SEQ ID NO: 443228 - DNA, 19 bp, Mus musculus
  siRNA target sequence for Elf1 (NM_007920.2,1971-1989).
caaccaacagttacataca

SEQ ID NO: 443229 - DNA, 19 bp, Mus musculus
  siRNA target sequence for Elf1 (NM_007920.2,1998-2016).
gccactcacaacggttata

SEQ ID NO: 443230 - DNA, 19 bp, Mus musculus
  siRNA target sequence for Elf1 (NM_007920.2,2087-2105).
ccatgacagtactgaaaga

SEQ ID NO: 443231 - DNA, 19 bp, Mus musculus
  siRNA target sequence for Elf1 (NM_007920.2,2130-2148).
gccaggctctccttcaatt

SEQ ID NO: 443232 - DNA, 19 bp, Mus musculus
  siRNA target sequence for Elf1 (NM_007920.2,2132-2150).
caggctctccttcaattgt

SEQ ID NO: 443233 - DNA, 19 bp, Mus musculus
  siRNA target sequence for Elf1 (NM_007920.2,2172-2190).
gcaggtcctcacaagcaat

SEQ ID NO: 443234 - DNA, 19 bp, Mus musculus
  siRNA target sequence for Elf1 (NM_007920.2,2249-2267).
cgacacctgtggtgacttt

SEQ ID NO: 443235 - DNA, 19 bp, Mus musculus
  siRNA target sequence for Elf1 (NM_007920.2,2306-2324).
ctgtgatcacttctgttat

SEQ ID NO: 443236 - DNA, 19 bp, Mus musculus
  siRNA target sequence for Elf1 (NM_007920.2,2310-2328).
gatcacttctgttatcaaa

SEQ ID NO: 443237 - DNA, 19 bp, Mus musculus
  siRNA target sequence for Elf1 (NM_007920.2,2370-2388).
ggccgaagatgatttgaat

SEQ ID NO: 443238 - DNA, 19 bp, Mus musculus
  siRNA target sequence for Elf1 (NM_007920.2,2413-2431).
cagccccagccttatgtga

SEQ ID NO: 443239 - DNA, 19 bp, Mus musculus
  siRNA target sequence for Elf1 (NM_007920.2,2422-2440).
ccttatgtgatggtgttat

SEQ ID NO: 443240 - DNA, 19 bp, Mus musculus
  siRNA target sequence for Elf1 (NM_007920.2,2462-2480).
ctcaggtagccgtcaaaca

SEQ ID NO: 443241 - DNA, 19 bp, Mus musculus
  siRNA target sequence for Elf1 (NM_007920.2,2464-2482).
caggtagccgtcaaacaga

SEQ ID NO: 443242 - DNA, 19 bp, Mus musculus
  siRNA target sequence for Elf1 (NM_007920.2,2466-2484).
ggtagccgtcaaacagaat

SEQ ID NO: 443243 - DNA, 19 bp, Mus musculus
  siRNA target sequence for Elf1 (NM_007920.2,2471-2489).
ccgtcaaacagaatgaact

SEQ ID NO: 443244 - DNA, 19 bp, Mus musculus
  siRNA target sequence for Elf1 (NM_007920.2,2488-2506).
ctgctagagcccaactctt

SEQ ID NO: 443245 - DNA, 19 bp, Mus musculus
  siRNA target sequence for Elf2 (NM_023502.1,363-381).
ctatgacgacgagacttat

SEQ ID NO: 443246 - DNA, 19 bp, Mus musculus
  siRNA target sequence for Elf2 (NM_023502.1,367-385).
gacgacgagacttatatga

SEQ ID NO: 443247 - DNA, 19 bp, Mus musculus
  siRNA target sequence for Elf2 (NM_023502.1,463-481).
gctcactgtacggataaga

SEQ ID NO: 443248 - DNA, 19 bp, Mus musculus
  siRNA target sequence for Elf2 (NM_023502.1,493-511).
gctgaagccctgcttcata

SEQ ID NO: 443249 - DNA, 19 bp, Mus musculus
  siRNA target sequence for Elf2 (NM_023502.1,499-517).
gccctgcttcatatggaat

SEQ ID NO: 443250 - DNA, 19 bp, Mus musculus
  siRNA target sequence for Elf2 (NM_023502.1,525-543).
ctgcttgagggattcaaga

SEQ ID NO: 443251 - DNA, 19 bp, Mus musculus
  siRNA target sequence for Elf2 (NM_023502.1,564-582).
ccctccttgtatatcaact

SEQ ID NO: 443252 - DNA, 19 bp, Mus musculus
  siRNA target sequence for Elf2 (NM_023502.1,602-620).
cgatgaggccggatgtcat

SEQ ID NO: 443253 - DNA, 19 bp, Mus musculus
  siRNA target sequence for Elf2 (NM_023502.1,672-690).
ctcgcctatccctacttca

SEQ ID NO: 443254 - DNA, 19 bp, Mus musculus
  siRNA target sequence for Elf2 (NM_023502.1,696-714).
cagccacgaaccaatgaaa

SEQ ID NO: 443255 - DNA, 19 bp, Mus musculus
  siRNA target sequence for Elf2 (NM_023502.1,698-716).
gccacgaaccaatgaaaaa

SEQ ID NO: 443256 - DNA, 19 bp, Mus musculus
  siRNA target sequence for Elf2 (NM_023502.1,700-718).
cacgaaccaatgaaaaaga

SEQ ID NO: 443257 - DNA, 19 bp, Mus musculus
  siRNA target sequence for Elf2 (NM_023502.1,747-765).
gcagtcaccagtttccaat

SEQ ID NO: 443258 - DNA, 19 bp, Mus musculus
  siRNA target sequence for Elf2 (NM_023502.1,767-785).
ggtctcctgagttaggaat

SEQ ID NO: 443259 - DNA, 19 bp, Mus musculus
  siRNA target sequence for Elf2 (NM_023502.1,772-790).
cctgagttaggaatcaaga

SEQ ID NO: 443260 - DNA, 19 bp, Mus musculus
  siRNA target sequence for Elf2 (NM_023502.1,821-839).
cctatctgtgggagtttct

SEQ ID NO: 443261 - DNA, 19 bp, Mus musculus
  siRNA target sequence for Elf2 (NM_023502.1,849-867).
gcttcaagataaaaatact

SEQ ID NO: 443262 - DNA, 19 bp, Mus musculus
  siRNA target sequence for Elf2 (NM_023502.1,871-889).
cccaggtatattaaatgga

SEQ ID NO: 443263 - DNA, 19 bp, Mus musculus
  siRNA target sequence for Elf2 (NM_023502.1,987-1005).
catggggcgagcgttaaga

SEQ ID NO: 443264 - DNA, 19 bp, Mus musculus
  siRNA target sequence for Elf2 (NM_023502.1,990-1008).
ggggcgagcgttaagatat

SEQ ID NO: 443265 - DNA, 19 bp, Mus musculus
  siRNA target sequence for Elf2 (NM_023502.1,991-1009).
gggcgagcgttaagatatt

SEQ ID NO: 443266 - DNA, 19 bp, Mus musculus
  siRNA target sequence for Elf2 (NM_023502.1,992-1010).
ggcgagcgttaagatatta

SEQ ID NO: 443267 - DNA, 19 bp, Mus musculus
  siRNA target sequence for Elf2 (NM_023502.1,994-1012).
cgagcgttaagatattact

SEQ ID NO: 443268 - DNA, 19 bp, Mus musculus
  siRNA target sequence for Elf2 (NM_023502.1,995-1013).
gagcgttaagatattacta

SEQ ID NO: 443269 - DNA, 19 bp, Mus musculus
  siRNA target sequence for Elf2 (NM_023502.1,1020-1038).
gggaattcttgcaaaggtt

SEQ ID NO: 443270 - DNA, 19 bp, Mus musculus
  siRNA target sequence for Elf2 (NM_023502.1,1043-1061).
gacagaggcttgtatatca

SEQ ID NO: 443271 - DNA, 19 bp, Mus musculus
  siRNA target sequence for Elf2 (NM_023502.1,1205-1223).
ccgtccgaggtgggaaaaa

SEQ ID NO: 443272 - DNA, 19 bp, Mus musculus
  siRNA target sequence for Elf2 (NM_023502.1,1207-1225).
gtccgaggtgggaaaaact

SEQ ID NO: 443273 - DNA, 19 bp, Mus musculus
  siRNA target sequence for Elf2 (NM_023502.1,1210-1228).
cgaggtgggaaaaactcat

SEQ ID NO: 443274 - DNA, 19 bp, Mus musculus
  siRNA target sequence for Elf2 (NM_023502.1,1445-1463).
gcacaggctcgccgttaat

SEQ ID NO: 443275 - DNA, 19 bp, Mus musculus
  siRNA target sequence for Elf2 (NM_023502.1,1446-1464).
cacaggctcgccgttaata

SEQ ID NO: 443276 - DNA, 19 bp, Mus musculus
  siRNA target sequence for Elf2 (NM_023502.1,1450-1468).
ggctcgccgttaataacca

SEQ ID NO: 443277 - DNA, 19 bp, Mus musculus
  siRNA target sequence for Elf2 (NM_023502.1,1482-1500).
ctcggccagctctccaaaa

SEQ ID NO: 443278 - DNA, 19 bp, Mus musculus
  siRNA target sequence for Elf2 (NM_023502.1,1484-1502).
cggccagctctccaaaagt

SEQ ID NO: 443279 - DNA, 19 bp, Mus musculus
  siRNA target sequence for Elf2 (NM_023502.1,1490-1508).
gctctccaaaagtagtcat

SEQ ID NO: 443280 - DNA, 19 bp, Mus musculus
  siRNA target sequence for Elf2 (NM_023502.1,1642-1660).
gggtcaggaagcattaaca

SEQ ID NO: 443281 - DNA, 19 bp, Mus musculus
  siRNA target sequence for Elf2 (NM_023502.1,1643-1661).
ggtcaggaagcattaacat

SEQ ID NO: 443282 - DNA, 19 bp, Mus musculus
  siRNA target sequence for Elf2 (NM_023502.1,1644-1662).
gtcaggaagcattaacatt

SEQ ID NO: 443283 - DNA, 19 bp, Mus musculus
  siRNA target sequence for Elf2 (NM_023502.1,1646-1664).
caggaagcattaacattgt

SEQ ID NO: 443284 - DNA, 19 bp, Mus musculus
  siRNA target sequence for Elf2 (NM_023502.1,1686-1704).
ggcactcacccctgtttca

SEQ ID NO: 443285 - DNA, 19 bp, Mus musculus
  siRNA target sequence for Elf2 (NM_023502.1,1709-1727).
cccacggtacacctgtaat

SEQ ID NO: 443286 - DNA, 19 bp, Mus musculus
  siRNA target sequence for Elf2 (NM_023502.1,1713-1731).
cggtacacctgtaatgaga

SEQ ID NO: 443287 - DNA, 19 bp, Mus musculus
  siRNA target sequence for Elf2 (NM_023502.1,1828-1846).
caggaacacgatgtgaaaa

SEQ ID NO: 443288 - DNA, 19 bp, Mus musculus
  siRNA target sequence for Elf2 (NM_023502.1,1847-1865).
ctttgcagctggtagaaga

SEQ ID NO: 443289 - DNA, 19 bp, Mus musculus
  siRNA target sequence for Elf2 (NM_023502.1,1870-1888).
ggggcagacggcaataaga

SEQ ID NO: 443290 - DNA, 19 bp, Mus musculus
  siRNA target sequence for Elf2 (NM_023502.1,1872-1890).
ggcagacggcaataagaca

SEQ ID NO: 443291 - DNA, 19 bp, Mus musculus
  siRNA target sequence for Elf2 (NM_023502.1,1876-1894).
gacggcaataagacagtaa

SEQ ID NO: 443292 - DNA, 19 bp, Mus musculus
  siRNA target sequence for Elf2 (NM_023502.1,1959-1977).
gctagtgacgtgtgagaaa

SEQ ID NO: 443293 - DNA, 19 bp, Mus musculus
  siRNA target sequence for Elf2 (NM_023502.1,1960-1978).
ctagtgacgtgtgagaaat

SEQ ID NO: 443294 - DNA, 19 bp, Mus musculus
  siRNA target sequence for Elf3 (NM_007921.1,116-134).
gatcagcaacgtttttagt

SEQ ID NO: 443295 - DNA, 19 bp, Mus musculus
  siRNA target sequence for Elf3 (NM_007921.1,223-241).
ccctgaacaaccaacagat

SEQ ID NO: 443296 - DNA, 19 bp, Mus musculus
  siRNA target sequence for Elf3 (NM_007921.1,419-437).
ggagctgcggctagtcttt

SEQ ID NO: 443297 - DNA, 19 bp, Mus musculus
  siRNA target sequence for Elf3 (NM_007921.1,632-650).
ctactactgcagtacctat

SEQ ID NO: 443298 - DNA, 19 bp, Mus musculus
  siRNA target sequence for Elf3 (NM_007921.1,993-1011).
cacgagggtgtgttcaagt

SEQ ID NO: 443299 - DNA, 19 bp, Mus musculus
  siRNA target sequence for Elf3 (NM_007921.1,1087-1105).
gccgagccatgaggtatta

SEQ ID NO: 443300 - DNA, 19 bp, Mus musculus
  siRNA target sequence for Elf3 (NM_007921.1,1089-1107).
cgagccatgaggtattact

SEQ ID NO: 443301 - DNA, 19 bp, Mus musculus
  siRNA target sequence for Elf3 (NM_007921.1,1090-1108).
gagccatgaggtattacta

SEQ ID NO: 443302 - DNA, 19 bp, Mus musculus
  siRNA target sequence for Elf3 (NM_007921.1,1138-1156).
gccgacggctcgtctacaa

SEQ ID NO: 443303 - DNA, 19 bp, Mus musculus
  siRNA target sequence for Elf4 (NM_019680.1,253-271).
gcaacgggatggatgatat

SEQ ID NO: 443304 - DNA, 19 bp, Mus musculus
  siRNA target sequence for Elf4 (NM_019680.1,371-389).
ggtccacaatggcatcata

SEQ ID NO: 443305 - DNA, 19 bp, Mus musculus
  siRNA target sequence for Elf4 (NM_019680.1,372-390).
gtccacaatggcatcataa

SEQ ID NO: 443306 - DNA, 19 bp, Mus musculus
  siRNA target sequence for Elf4 (NM_019680.1,410-428).
gacacaggatcagatttta

SEQ ID NO: 443307 - DNA, 19 bp, Mus musculus
  siRNA target sequence for Elf4 (NM_019680.1,412-430).
cacaggatcagattttaga

SEQ ID NO: 443308 - DNA, 19 bp, Mus musculus
  siRNA target sequence for Elf4 (NM_019680.1,485-503).
cactgaagtcctattcaat

SEQ ID NO: 443309 - DNA, 19 bp, Mus musculus
  siRNA target sequence for Elf4 (NM_019680.1,550-568).
caccggaagtgctttcaga

SEQ ID NO: 443310 - DNA, 19 bp, Mus musculus
  siRNA target sequence for Elf4 (NM_019680.1,686-704).
ggtctccagagaggaaaat

SEQ ID NO: 443311 - DNA, 19 bp, Mus musculus
  siRNA target sequence for Elf4 (NM_019680.1,785-803).
catgcctatacggaagaaa

SEQ ID NO: 443312 - DNA, 19 bp, Mus musculus
  siRNA target sequence for Elf4 (NM_019680.1,789-807).
cctatacggaagaaatcca

SEQ ID NO: 443313 - DNA, 19 bp, Mus musculus
  siRNA target sequence for Elf4 (NM_019680.1,790-808).
ctatacggaagaaatccaa

SEQ ID NO: 443314 - DNA, 19 bp, Mus musculus
  siRNA target sequence for Elf4 (NM_019680.1,814-832).
gcaaaggcagcaccattta

SEQ ID NO: 443315 - DNA, 19 bp, Mus musculus
  siRNA target sequence for Elf4 (NM_019680.1,815-833).
caaaggcagcaccatttat

SEQ ID NO: 443316 - DNA, 19 bp, Mus musculus
  siRNA target sequence for Elf4 (NM_019680.1,819-837).
ggcagcaccatttatctgt

SEQ ID NO: 443317 - DNA, 19 bp, Mus musculus
  siRNA target sequence for Elf4 (NM_019680.1,874-892).
cctgccccaagtacattaa

SEQ ID NO: 443318 - DNA, 19 bp, Mus musculus
  siRNA target sequence for Elf4 (NM_019680.1,998-1016).
ggggcgagccctgagatat

SEQ ID NO: 443319 - DNA, 19 bp, Mus musculus
  siRNA target sequence for Elf4 (NM_019680.1,999-1017).
gggcgagccctgagatatt

SEQ ID NO: 443320 - DNA, 19 bp, Mus musculus
  siRNA target sequence for Elf4 (NM_019680.1,1001-1019).
gcgagccctgagatattat

SEQ ID NO: 443321 - DNA, 19 bp, Mus musculus
  siRNA target sequence for Elf4 (NM_019680.1,1006-1024).
ccctgagatattattatca

SEQ ID NO: 443322 - DNA, 19 bp, Mus musculus
  siRNA target sequence for Elf4 (NM_019680.1,1007-1025).
cctgagatattattatcaa

SEQ ID NO: 443323 - DNA, 19 bp, Mus musculus
  siRNA target sequence for Elf4 (NM_019680.1,1287-1305).
gcaagcctggagttaggat

SEQ ID NO: 443324 - DNA, 19 bp, Mus musculus
  siRNA target sequence for Elf4 (NM_019680.1,1288-1306).
caagcctggagttaggatt

SEQ ID NO: 443325 - DNA, 19 bp, Mus musculus
  siRNA target sequence for Elf4 (NM_019680.1,1292-1310).
cctggagttaggattgtct

SEQ ID NO: 443326 - DNA, 19 bp, Mus musculus
  siRNA target sequence for Elf4 (NM_019680.1,1365-1383).
caggccaggctcaccaaaa

SEQ ID NO: 443327 - DNA, 19 bp, Mus musculus
  siRNA target sequence for Elf4 (NM_019680.1,1367-1385).
ggccaggctcaccaaaact

SEQ ID NO: 443328 - DNA, 19 bp, Mus musculus
  siRNA target sequence for Elf4 (NM_019680.1,1369-1387).
ccaggctcaccaaaactgt

SEQ ID NO: 443329 - DNA, 19 bp, Mus musculus
  siRNA target sequence for Elf4 (NM_019680.1,1396-1414).
ctccagcacccagtaacat

SEQ ID NO: 443330 - DNA, 19 bp, Mus musculus
  siRNA target sequence for Elf4 (NM_019680.1,1594-1612).
ccctgaacaccaatttgca

SEQ ID NO: 443331 - DNA, 19 bp, Mus musculus
  siRNA target sequence for Elf4 (NM_019680.1,1595-1613).
cctgaacaccaatttgcaa

SEQ ID NO: 443332 - DNA, 19 bp, Mus musculus
  siRNA target sequence for Elf4 (NM_019680.1,1654-1672).
gtggtctcccccaacttct

SEQ ID NO: 443333 - DNA, 19 bp, Mus musculus
  siRNA target sequence for Elf4 (NM_019680.1,1761-1779).
gtgattgctgcctttatca

SEQ ID NO: 443334 - DNA, 19 bp, Mus musculus
  siRNA target sequence for Elf4 (NM_019680.1,1795-1813).
catcagtgcctgtggtaaa

SEQ ID NO: 443335 - DNA, 19 bp, Mus musculus
  siRNA target sequence for Elf4 (NM_019680.1,1823-1841).
cttgaggtcctcttcatat

SEQ ID NO: 443336 - DNA, 19 bp, Mus musculus
  siRNA target sequence for Elf4 (NM_019680.1,1957-1975).
caaggggttcccataacct

SEQ ID NO: 443337 - DNA, 19 bp, Mus musculus
  siRNA target sequence for Elf4 (NM_019680.1,2137-2155).
ccacttccctcattaagat

SEQ ID NO: 443338 - DNA, 19 bp, Mus musculus
  siRNA target sequence for Elf4 (NM_019680.1,2153-2171).
gatggaaccccaagatata

SEQ ID NO: 443339 - DNA, 19 bp, Mus musculus
  siRNA target sequence for Elf5 (NM_010125.1,256-274).
catcagtgcaccctgaata

SEQ ID NO: 443340 - DNA, 19 bp, Mus musculus
  siRNA target sequence for Elf5 (NM_010125.1,429-447).
ggggagtacctgtacttca

SEQ ID NO: 443341 - DNA, 19 bp, Mus musculus
  siRNA target sequence for Elf5 (NM_010125.1,472-490).
gttactcctttttcaatga

SEQ ID NO: 443342 - DNA, 19 bp, Mus musculus
  siRNA target sequence for Elf5 (NM_010125.1,579-597).
cgaacaagcctccaaagtt

SEQ ID NO: 443343 - DNA, 19 bp, Mus musculus
  siRNA target sequence for Elf5 (NM_010125.1,600-618).
cacctgtgggaatttgtca

SEQ ID NO: 443344 - DNA, 19 bp, Mus musculus
  siRNA target sequence for Elf5 (NM_010125.1,682-700).
gcattttccgagtggttaa

SEQ ID NO: 443345 - DNA, 19 bp, Mus musculus
  siRNA target sequence for Elf5 (NM_010125.1,774-792).
gccctgagatactactata

SEQ ID NO: 443346 - DNA, 19 bp, Mus musculus
  siRNA target sequence for Elf5 (NM_010125.1,775-793).
ccctgagatactactataa

SEQ ID NO: 443347 - DNA, 19 bp, Mus musculus
  siRNA target sequence for Elf5 (NM_010125.1,776-794).
cctgagatactactataaa

SEQ ID NO: 443348 - DNA, 19 bp, Mus musculus
  siRNA target sequence for Elf5 (NM_010125.1,813-831).
gttgaccggaggttagtgt

SEQ ID NO: 443349 - DNA, 19 bp, Mus musculus
  siRNA target sequence for Elf5 (NM_010125.1,818-836).
ccggaggttagtgtacaaa

SEQ ID NO: 443350 - DNA, 19 bp, Mus musculus
  siRNA target sequence for Elf5 (NM_010125.1,819-837).
cggaggttagtgtacaaat

SEQ ID NO: 443351 - DNA, 19 bp, Mus musculus
  siRNA target sequence for Elf5 (NM_010125.1,820-838).
ggaggttagtgtacaaatt

SEQ ID NO: 443352 - DNA, 19 bp, Mus musculus
  siRNA target sequence for Elk1 (NM_007922.1,659-677).
ggccttgcggtactactat

SEQ ID NO: 443353 - DNA, 19 bp, Mus musculus
  siRNA target sequence for Elk1 (NM_007922.1,661-679).
ccttgcggtactactatga

SEQ ID NO: 443354 - DNA, 19 bp, Mus musculus
  siRNA target sequence for Elk1 (NM_007922.1,662-680).
cttgcggtactactatgat

SEQ ID NO: 443355 - DNA, 19 bp, Mus musculus
  siRNA target sequence for Elk1 (NM_007922.1,667-685).
ggtactactatgataagaa

SEQ ID NO: 443356 - DNA, 19 bp, Mus musculus
  siRNA target sequence for Elk1 (NM_007922.1,777-795).
cagcctgaggtgtctgtaa

SEQ ID NO: 443357 - DNA, 19 bp, Mus musculus
  siRNA target sequence for Elk1 (NM_007922.1,909-927).
cgaagcagccggaatgaat

SEQ ID NO: 443358 - DNA, 19 bp, Mus musculus
  siRNA target sequence for Elk1 (NM_007922.1,913-931).
gcagccggaatgaatacat

SEQ ID NO: 443359 - DNA, 19 bp, Mus musculus
  siRNA target sequence for Elk1 (NM_007922.1,932-950).
gcgctcgggcctctattct

SEQ ID NO: 443360 - DNA, 19 bp, Mus musculus
  siRNA target sequence for Elk1 (NM_007922.1,933-951).
cgctcgggcctctattcta

SEQ ID NO: 443361 - DNA, 19 bp, Mus musculus
  siRNA target sequence for Elk1 (NM_007922.1,1073-1091).
cagtccaaaccccttagaa

SEQ ID NO: 443362 - DNA, 19 bp, Mus musculus
  siRNA target sequence for Elk1 (NM_007922.1,1117-1135).
gtctgcccctgcaggttat

SEQ ID NO: 443363 - DNA, 19 bp, Mus musculus
  siRNA target sequence for Elk1 (NM_007922.1,1122-1140).
cccctgcaggttatcctaa

SEQ ID NO: 443364 - DNA, 19 bp, Mus musculus
  siRNA target sequence for Elk1 (NM_007922.1,1149-1167).
gaggccccaaaccagaaat

SEQ ID NO: 443365 - DNA, 19 bp, Mus musculus
  siRNA target sequence for Elk1 (NM_007922.1,1204-1222).
cacagcccccagaagctaa

SEQ ID NO: 443366 - DNA, 19 bp, Mus musculus
  siRNA target sequence for Elk1 (NM_007922.1,1231-1249).
ggcctaaggaagaattgga

SEQ ID NO: 443367 - DNA, 19 bp, Mus musculus
  siRNA target sequence for Elk1 (NM_007922.1,1271-1289).
cagttcagaagctgtcaaa

SEQ ID NO: 443368 - DNA, 19 bp, Mus musculus
  siRNA target sequence for Elk1 (NM_007922.1,1590-1608).
ctgccccctagcatccatt

SEQ ID NO: 443369 - DNA, 19 bp, Mus musculus
  siRNA target sequence for Elk1 (NM_007922.1,1593-1611).
ccccctagcatccatttct

SEQ ID NO: 443370 - DNA, 19 bp, Mus musculus
  siRNA target sequence for Elk1 (NM_007922.1,1616-1634).
cactctgagtccaattgca

SEQ ID NO: 443371 - DNA, 19 bp, Mus musculus
  siRNA target sequence for Elk3 (NM_013508.1,377-395).
cgaacgatggcgagttcaa

SEQ ID NO: 443372 - DNA, 19 bp, Mus musculus
  siRNA target sequence for Elk3 (NM_013508.1,474-492).
cagagcgctgagatactat

SEQ ID NO: 443373 - DNA, 19 bp, Mus musculus
  siRNA target sequence for Elk3 (NM_013508.1,843-861).
caggtttgtgaccaataaa

SEQ ID NO: 443374 - DNA, 19 bp, Mus musculus
  siRNA target sequence for Elk3 (NM_013508.1,958-976).
gccaagatctcctctttaa

SEQ ID NO: 443375 - DNA, 19 bp, Mus musculus
  siRNA target sequence for Elk3 (NM_013508.1,1336-1354).
ctgctgcccagcatacact

SEQ ID NO: 443376 - DNA, 19 bp, Mus musculus
  siRNA target sequence for Elk3 (NM_013508.1,1402-1420).
caagggccgaacacacttt

SEQ ID NO: 443377 - DNA, 19 bp, Mus musculus
  siRNA target sequence for Elk3 (NM_013508.1,1406-1424).
ggccgaacacacttttcca

SEQ ID NO: 443378 - DNA, 19 bp, Mus musculus
  siRNA target sequence for Elk4 (NM_007923.1,373-391).
ctaacaatggggagttcaa

SEQ ID NO: 443379 - DNA, 19 bp, Mus musculus
  siRNA target sequence for Elk4 (NM_007923.1,424-442).
gggggattcgcaagaacaa

SEQ ID NO: 443380 - DNA, 19 bp, Mus musculus
  siRNA target sequence for Elk4 (NM_007923.1,432-450).
cgcaagaacaagcctaata

SEQ ID NO: 443381 - DNA, 19 bp, Mus musculus
  siRNA target sequence for Elk4 (NM_007923.1,437-455).
gaacaagcctaatatgaat

SEQ ID NO: 443382 - DNA, 19 bp, Mus musculus
  siRNA target sequence for Elk4 (NM_007923.1,443-461).
gcctaatatgaattatgat

SEQ ID NO: 443383 - DNA, 19 bp, Mus musculus
  siRNA target sequence for Elk4 (NM_007923.1,477-495).
ctgcgatactactacgtaa

SEQ ID NO: 443384 - DNA, 19 bp, Mus musculus
  siRNA target sequence for Elk4 (NM_007923.1,480-498).
cgatactactacgtaaaga

SEQ ID NO: 443385 - DNA, 19 bp, Mus musculus
  siRNA target sequence for Elk4 (NM_007923.1,481-499).
gatactactacgtaaagaa

SEQ ID NO: 443386 - DNA, 19 bp, Mus musculus
  siRNA target sequence for Elk4 (NM_007923.1,596-614).
gggagactgtgaagcttta

SEQ ID NO: 443387 - DNA, 19 bp, Mus musculus
  siRNA target sequence for Elk4 (NM_007923.1,691-709).
cctctagtcgcaatgacta

SEQ ID NO: 443388 - DNA, 19 bp, Mus musculus
  siRNA target sequence for Elk4 (NM_007923.1,694-712).
ctagtcgcaatgactacat

SEQ ID NO: 443389 - DNA, 19 bp, Mus musculus
  siRNA target sequence for Elk4 (NM_007923.1,710-728).
catacactctggtttgtat

SEQ ID NO: 443390 - DNA, 19 bp, Mus musculus
  siRNA target sequence for Elk4 (NM_007923.1,748-766).
ctctgaacacctccaataa

SEQ ID NO: 443391 - DNA, 19 bp, Mus musculus
  siRNA target sequence for Elk4 (NM_007923.1,750-768).
ctgaacacctccaataaga

SEQ ID NO: 443392 - DNA, 19 bp, Mus musculus
  siRNA target sequence for Elk4 (NM_007923.1,757-775).
cctccaataagaagctttt

SEQ ID NO: 443393 - DNA, 19 bp, Mus musculus
  siRNA target sequence for Elk4 (NM_007923.1,835-853).
caacaccgtccgtcatcaa

SEQ ID NO: 443394 - DNA, 19 bp, Mus musculus
  siRNA target sequence for Elk4 (NM_007923.1,838-856).
caccgtccgtcatcaaatt

SEQ ID NO: 443395 - DNA, 19 bp, Mus musculus
  siRNA target sequence for Elk4 (NM_007923.1,841-859).
cgtccgtcatcaaatttgt

SEQ ID NO: 443396 - DNA, 19 bp, Mus musculus
  siRNA target sequence for Elk4 (NM_007923.1,909-927).
gcaacgagccctagtcttt

SEQ ID NO: 443397 - DNA, 19 bp, Mus musculus
  siRNA target sequence for Elk4 (NM_007923.1,998-1016).
cccagcctccatatccatt

SEQ ID NO: 443398 - DNA, 19 bp, Mus musculus
  siRNA target sequence for Elk4 (NM_007923.1,1158-1176).
gaacttccagagaacttat

SEQ ID NO: 443399 - DNA, 19 bp, Mus musculus
  siRNA target sequence for Elk4 (NM_007923.1,1177-1195).
cactggagcctaaaaatga

SEQ ID NO: 443400 - DNA, 19 bp, Mus musculus
  siRNA target sequence for Elk4 (NM_007923.1,1329-1347).
ctcccgacagcgtctctta

SEQ ID NO: 443401 - DNA, 19 bp, Mus musculus
  siRNA target sequence for Elk4 (NM_007923.1,1331-1349).
cccgacagcgtctcttaca

SEQ ID NO: 443402 - DNA, 19 bp, Mus musculus
  siRNA target sequence for Elk4 (NM_007923.1,1344-1362).
cttacaccagcactctttt

SEQ ID NO: 443403 - DNA, 19 bp, Mus musculus
  siRNA target sequence for Elk4 (NM_007923.1,1456-1474).
gactgcaaggtgctaatat

SEQ ID NO: 443404 - DNA, 19 bp, Mus musculus
  siRNA target sequence for Elk4 (NM_007923.1,1461-1479).
caaggtgctaatatgcttt

SEQ ID NO: 443405 - DNA, 19 bp, Mus musculus
  siRNA target sequence for Elk4 (NM_007923.1,1465-1483).
gtgctaatatgcttttcca

SEQ ID NO: 443406 - DNA, 19 bp, Mus musculus
  siRNA target sequence for Emx2 (NM_010132.1,1266-1284).
gtcccgagagtttcctttt

SEQ ID NO: 443407 - DNA, 19 bp, Mus musculus
  siRNA target sequence for Emx2 (NM_010132.1,1350-1368).
ggctagagcacgcttttga

SEQ ID NO: 443408 - DNA, 19 bp, Mus musculus
  siRNA target sequence for Emx2 (NM_010132.1,1352-1370).
ctagagcacgcttttgaga

SEQ ID NO: 443409 - DNA, 19 bp, Mus musculus
  siRNA target sequence for Emx2 (NM_010132.1,1409-1427).
gctcacagtctcagtctta

SEQ ID NO: 443410 - DNA, 19 bp, Mus musculus
  siRNA target sequence for Emx2 (NM_010132.1,1429-1447).
ggaaactcaggtaaaagta

SEQ ID NO: 443411 - DNA, 19 bp, Mus musculus
  siRNA target sequence for Emx2 (NM_010132.1,1459-1477).
ccggagaacgaaattcaaa

SEQ ID NO: 443412 - DNA, 19 bp, Mus musculus
  siRNA target sequence for Emx2 (NM_010132.1,1460-1478).
cggagaacgaaattcaaaa

SEQ ID NO: 443413 - DNA, 19 bp, Mus musculus
  siRNA target sequence for Emx2 (NM_010132.1,1500-1518).
gctcagattctcaacagaa

SEQ ID NO: 443414 - DNA, 19 bp, Mus musculus
  siRNA target sequence for Emx2 (NM_010132.1,1567-1585).
ggcgagtccggaggaaata

SEQ ID NO: 443415 - DNA, 19 bp, Mus musculus
  siRNA target sequence for Emx2 (NM_010132.1,1569-1587).
cgagtccggaggaaataga

SEQ ID NO: 443416 - DNA, 19 bp, Mus musculus
  siRNA target sequence for Emx2 (NM_010132.1,1572-1590).
gtccggaggaaatagatgt

SEQ ID NO: 443417 - DNA, 19 bp, Mus musculus
  siRNA target sequence for En1 (NM_010133.1,362-380).
cagcagccggagcctaaaa

SEQ ID NO: 443418 - DNA, 19 bp, Mus musculus
  siRNA target sequence for En1 (NM_010133.1,364-382).
gcagccggagcctaaaagt

SEQ ID NO: 443419 - DNA, 19 bp, Mus musculus
  siRNA target sequence for En1 (NM_010133.1,700-718).
gcccgatttcggttgcaaa

SEQ ID NO: 443420 - DNA, 19 bp, Mus musculus
  siRNA target sequence for En1 (NM_010133.1,701-719).
cccgatttcggttgcaaaa

SEQ ID NO: 443421 - DNA, 19 bp, Mus musculus
  siRNA target sequence for En1 (NM_010133.1,1101-1119).
ccaagttcccggaacacaa

SEQ ID NO: 443422 - DNA, 19 bp, Mus musculus
  siRNA target sequence for En1 (NM_010133.1,1245-1263).
cacgcaccaggaagctaaa

SEQ ID NO: 443423 - DNA, 19 bp, Mus musculus
  siRNA target sequence for En1 (NM_010133.1,1247-1265).
cgcaccaggaagctaaaga

SEQ ID NO: 443424 - DNA, 19 bp, Mus musculus
  siRNA target sequence for En1 (NM_010133.1,1346-1364).
caggcaaaccgctatatca

SEQ ID NO: 443425 - DNA, 19 bp, Mus musculus
  siRNA target sequence for En2 (NM_010134.1,225-243).
catcgcatcaccaacttct

SEQ ID NO: 443426 - DNA, 19 bp, Mus musculus
  siRNA target sequence for En2 (NM_010134.1,254-272).
catcctgcggcctgagttt

SEQ ID NO: 443427 - DNA, 19 bp, Mus musculus
  siRNA target sequence for En2 (NM_010134.1,490-508).
gttccaagacgctatcact

SEQ ID NO: 443428 - DNA, 19 bp, Mus musculus
  siRNA target sequence for Epas1 (NM_010137.2,468-486).
ggagacggaggtcttctat

SEQ ID NO: 443429 - DNA, 19 bp, Mus musculus
  siRNA target sequence for Epas1 (NM_010137.2,566-584).
gcttccttcggacacataa

SEQ ID NO: 443430 - DNA, 19 bp, Mus musculus
  siRNA target sequence for Epas1 (NM_010137.2,627-645).
ggccgaccagcaaatggat

SEQ ID NO: 443431 - DNA, 19 bp, Mus musculus
  siRNA target sequence for Epas1 (NM_010137.2,628-646).
gccgaccagcaaatggata

SEQ ID NO: 443432 - DNA, 19 bp, Mus musculus
  siRNA target sequence for Epas1 (NM_010137.2,629-647).
ccgaccagcaaatggataa

SEQ ID NO: 443433 - DNA, 19 bp, Mus musculus
  siRNA target sequence for Epas1 (NM_010137.2,634-652).
cagcaaatggataacttgt

SEQ ID NO: 443434 - DNA, 19 bp, Mus musculus
  siRNA target sequence for Epas1 (NM_010137.2,689-707).
cccaagacggtgacatgat

SEQ ID NO: 443435 - DNA, 19 bp, Mus musculus
  siRNA target sequence for Epas1 (NM_010137.2,691-709).
caagacggtgacatgatct

SEQ ID NO: 443436 - DNA, 19 bp, Mus musculus
  siRNA target sequence for Epas1 (NM_010137.2,740-758).
gacttactcaggtagaact

SEQ ID NO: 443437 - DNA, 19 bp, Mus musculus
  siRNA target sequence for Epas1 (NM_010137.2,971-989).
ggcaagtgagagtctacaa

SEQ ID NO: 443438 - DNA, 19 bp, Mus musculus
  siRNA target sequence for Epas1 (NM_010137.2,1201-1219).
ggacgctctgcctatgagt

SEQ ID NO: 443439 - DNA, 19 bp, Mus musculus
  siRNA target sequence for Epas1 (NM_010137.2,1202-1220).
gacgctctgcctatgagtt

SEQ ID NO: 443440 - DNA, 19 bp, Mus musculus
  siRNA target sequence for Epas1 (NM_010137.2,1205-1223).
gctctgcctatgagttcta

SEQ ID NO: 443441 - DNA, 19 bp, Mus musculus
  siRNA target sequence for Epas1 (NM_010137.2,1231-1249).
ctggattcggagaacatga

SEQ ID NO: 443442 - DNA, 19 bp, Mus musculus
  siRNA target sequence for Epas1 (NM_010137.2,1250-1268).
ccaaaagtcaccagaactt

SEQ ID NO: 443443 - DNA, 19 bp, Mus musculus
  siRNA target sequence for Epas1 (NM_010137.2,1313-1331).
ccaaacacggaggatatgt

SEQ ID NO: 443444 - DNA, 19 bp, Mus musculus
  siRNA target sequence for Epas1 (NM_010137.2,1375-1393).
ctgcagcctcagtgtatca

SEQ ID NO: 443445 - DNA, 19 bp, Mus musculus
  siRNA target sequence for Epas1 (NM_010137.2,1600-1618).
ccaggagatgccattattt

SEQ ID NO: 443446 - DNA, 19 bp, Mus musculus
  siRNA target sequence for Epas1 (NM_010137.2,1604-1622).
gagatgccattatttctct

SEQ ID NO: 443447 - DNA, 19 bp, Mus musculus
  siRNA target sequence for Epas1 (NM_010137.2,1610-1628).
ccattatttctctcgattt

SEQ ID NO: 443448 - DNA, 19 bp, Mus musculus
  siRNA target sequence for Epas1 (NM_010137.2,1768-1786).
gacaccccagggaacacta

SEQ ID NO: 443449 - DNA, 19 bp, Mus musculus
  siRNA target sequence for Epas1 (NM_010137.2,1831-1849).
cctgaggactactattcat

SEQ ID NO: 443450 - DNA, 19 bp, Mus musculus
  siRNA target sequence for Epas1 (NM_010137.2,1862-1880).
ccttgaagatcgaagtgat

SEQ ID NO: 443451 - DNA, 19 bp, Mus musculus
  siRNA target sequence for Epas1 (NM_010137.2,1863-1881).
cttgaagatcgaagtgatt

SEQ ID NO: 443452 - DNA, 19 bp, Mus musculus
  siRNA target sequence for Epas1 (NM_010137.2,2122-2140).
cccttcttcctcgataagt

SEQ ID NO: 443453 - DNA, 19 bp, Mus musculus
  siRNA target sequence for Epas1 (NM_010137.2,2300-2318).
cggatccaccattacattt

SEQ ID NO: 443454 - DNA, 19 bp, Mus musculus
  siRNA target sequence for Epas1 (NM_010137.2,2314-2332).
catttcggccctactaagt

SEQ ID NO: 443455 - DNA, 19 bp, Mus musculus
  siRNA target sequence for Epas1 (NM_010137.2,2416-2434).
catgtctccatgttcaaga

SEQ ID NO: 443456 - DNA, 19 bp, Mus musculus
  siRNA target sequence for Epas1 (NM_010137.2,2459-2477).
cccgaggtccatacatgat

SEQ ID NO: 443457 - DNA, 19 bp, Mus musculus
  siRNA target sequence for Epas1 (NM_010137.2,2461-2479).
cgaggtccatacatgatga

SEQ ID NO: 443458 - DNA, 19 bp, Mus musculus
  siRNA target sequence for Epas1 (NM_010137.2,2593-2611).
cacttgatgtggaaacgta

SEQ ID NO: 443459 - DNA, 19 bp, Mus musculus
  siRNA target sequence for Epas1 (NM_010137.2,2679-2697).
cgatgaattcacccaaaaa

SEQ ID NO: 443460 - DNA, 19 bp, Mus musculus
  siRNA target sequence for Epas1 (NM_010137.2,2680-2698).
gatgaattcacccaaaaat

SEQ ID NO: 443461 - DNA, 19 bp, Mus musculus
  siRNA target sequence for Epas1 (NM_010137.2,2901-2919).
gccggaactgaccagatat

SEQ ID NO: 443462 - DNA, 19 bp, Mus musculus
  siRNA target sequence for Epas1 (NM_010137.2,2903-2921).
cggaactgaccagatatga

SEQ ID NO: 443463 - DNA, 19 bp, Mus musculus
  siRNA target sequence for Erf (NM_010155.2,313-331).
gggctttgcgctattatta

SEQ ID NO: 443464 - DNA, 19 bp, Mus musculus
  siRNA target sequence for Erf (NM_010155.2,316-334).
ctttgcgctattattacaa

SEQ ID NO: 443465 - DNA, 19 bp, Mus musculus
  siRNA target sequence for Erf (NM_010155.2,907-925).
ccacgctgagtcctatgta

SEQ ID NO: 443466 - DNA, 19 bp, Mus musculus
  siRNA target sequence for Erf (NM_010155.2,1018-1036).
cccaaagcgtctacaacta

SEQ ID NO: 443467 - DNA, 19 bp, Mus musculus
  siRNA target sequence for Erf (NM_010155.2,1180-1198).
catccccgttcaagtttaa

SEQ ID NO: 443468 - DNA, 19 bp, Mus musculus
  siRNA target sequence for Erf (NM_010155.2,1183-1201).
ccccgttcaagtttaagct

SEQ ID NO: 443469 - DNA, 19 bp, Mus musculus
  siRNA target sequence for Erf (NM_010155.2,1333-1351).
caccaccccagattaaggt

SEQ ID NO: 443470 - DNA, 19 bp, Mus musculus
  siRNA target sequence for Erf (NM_010155.2,1507-1525).
cccttaaactgcgctttaa

SEQ ID NO: 443471 - DNA, 19 bp, Mus musculus
  siRNA target sequence for Erg (NM_133659.1,207-225).
cgaggaccagtcactattt

SEQ ID NO: 443472 - DNA, 19 bp, Mus musculus
  siRNA target sequence for Erg (NM_133659.1,211-229).
gaccagtcactatttgagt

SEQ ID NO: 443473 - DNA, 19 bp, Mus musculus
  siRNA target sequence for Erg (NM_133659.1,353-371).
ccagggtcaccatcaagat

SEQ ID NO: 443474 - DNA, 19 bp, Mus musculus
  siRNA target sequence for Erg (NM_133659.1,627-645).
cgatgtggacgtcttacta

SEQ ID NO: 443475 - DNA, 19 bp, Mus musculus
  siRNA target sequence for Erg (NM_133659.1,628-646).
gatgtggacgtcttactat

SEQ ID NO: 443476 - DNA, 19 bp, Mus musculus
  siRNA target sequence for Erg (NM_133659.1,634-652).
gacgtcttactatttcaga

SEQ ID NO: 443477 - DNA, 19 bp, Mus musculus
  siRNA target sequence for Erg (NM_133659.1,636-654).
cgtcttactatttcagaat

SEQ ID NO: 443478 - DNA, 19 bp, Mus musculus
  siRNA target sequence for Erg (NM_133659.1,667-685).
gagctgtgcaagatgacaa

SEQ ID NO: 443479 - DNA, 19 bp, Mus musculus
  siRNA target sequence for Erg (NM_133659.1,672-690).
gtgcaagatgacaaaggat

SEQ ID NO: 443480 - DNA, 19 bp, Mus musculus
  siRNA target sequence for Erg (NM_133659.1,702-720).
gctcacgccgagctacaat

SEQ ID NO: 443481 - DNA, 19 bp, Mus musculus
  siRNA target sequence for Erg (NM_133659.1,714-732).
ctacaatgccgacattctt

SEQ ID NO: 443482 - DNA, 19 bp, Mus musculus
  siRNA target sequence for Erg (NM_133659.1,779-797).
cttccgatgacgttgataa

SEQ ID NO: 443483 - DNA, 19 bp, Mus musculus
  siRNA target sequence for Erg (NM_133659.1,793-811).
gataaggctttacaaaact

SEQ ID NO: 443484 - DNA, 19 bp, Mus musculus
  siRNA target sequence for Erg (NM_133659.1,810-828).
ctctccacggttaatgcat

SEQ ID NO: 443485 - DNA, 19 bp, Mus musculus
  siRNA target sequence for Erg (NM_133659.1,837-855).
cacagggggtgcagctttt

SEQ ID NO: 443486 - DNA, 19 bp, Mus musculus
  siRNA target sequence for Erg (NM_133659.1,839-857).
cagggggtgcagcttttat

SEQ ID NO: 443487 - DNA, 19 bp, Mus musculus
  siRNA target sequence for Erg (NM_133659.1,880-898).
cccgaagctacgcaaagaa

SEQ ID NO: 443488 - DNA, 19 bp, Mus musculus
  siRNA target sequence for Erg (NM_133659.1,881-899).
ccgaagctacgcaaagaat

SEQ ID NO: 443489 - DNA, 19 bp, Mus musculus
  siRNA target sequence for Erg (NM_133659.1,1001-1019).
ctgcagtgcccaaaactga

SEQ ID NO: 443490 - DNA, 19 bp, Mus musculus
  siRNA target sequence for Erg (NM_133659.1,1023-1041).
ccagcgtcctcagttagat

SEQ ID NO: 443491 - DNA, 19 bp, Mus musculus
  siRNA target sequence for Erg (NM_133659.1,1064-1082).
ccagtagccgccttgctaa

SEQ ID NO: 443492 - DNA, 19 bp, Mus musculus
  siRNA target sequence for Erg (NM_133659.1,1065-1083).
cagtagccgccttgctaat

SEQ ID NO: 443493 - DNA, 19 bp, Mus musculus
  siRNA target sequence for Erg (NM_133659.1,1320-1338).
gcgctacgcctacaagttt

SEQ ID NO: 443494 - DNA, 19 bp, Mus musculus
  siRNA target sequence for Erg (NM_133659.1,1438-1456).
cacccccagaagatgaact

SEQ ID NO: 443495 - DNA, 19 bp, Mus musculus
  siRNA target sequence for Erg (NM_133659.1,1477-1495).
gctctcccagtcacatctt

SEQ ID NO: 443496 - DNA, 19 bp, Mus musculus
  siRNA target sequence for Erg (NM_133659.1,1543-1561).
ggcatctacccgaacacta

SEQ ID NO: 443497 - DNA, 19 bp, Mus musculus
  siRNA target sequence for Esr1 (NM_007956.2,292-310).
gggccctgggcgaggtata

SEQ ID NO: 443498 - DNA, 19 bp, Mus musculus
  siRNA target sequence for Esr1 (NM_007956.2,295-313).
ccctgggcgaggtatacgt

SEQ ID NO: 443499 - DNA, 19 bp, Mus musculus
  siRNA target sequence for Esr1 (NM_007956.2,322-340).
gcaagcccactgtgttcaa

SEQ ID NO: 443500 - DNA, 19 bp, Mus musculus
  siRNA target sequence for Esr1 (NM_007956.2,635-653).
cgccttctacaggtctaat

SEQ ID NO: 443501 - DNA, 19 bp, Mus musculus
  siRNA target sequence for Esr1 (NM_007956.2,638-656).
cttctacaggtctaattct

SEQ ID NO: 443502 - DNA, 19 bp, Mus musculus
  siRNA target sequence for Esr1 (NM_007956.2,748-766).
gtgccgtgtgcaatgacta

SEQ ID NO: 443503 - DNA, 19 bp, Mus musculus
  siRNA target sequence for Esr1 (NM_007956.2,913-931).
gtcggctgcgcaagtgtta

SEQ ID NO: 443504 - DNA, 19 bp, Mus musculus
  siRNA target sequence for Esr1 (NM_007956.2,917-935).
gctgcgcaagtgttacgaa

SEQ ID NO: 443505 - DNA, 19 bp, Mus musculus
  siRNA target sequence for Esr1 (NM_007956.2,969-987).
cgccgaggagggagaatgt

SEQ ID NO: 443506 - DNA, 19 bp, Mus musculus
  siRNA target sequence for Esr1 (NM_007956.2,970-988).
gccgaggagggagaatgtt

SEQ ID NO: 443507 - DNA, 19 bp, Mus musculus
  siRNA target sequence for Esr1 (NM_007956.2,972-990).
cgaggagggagaatgttga

SEQ ID NO: 443508 - DNA, 19 bp, Mus musculus
  siRNA target sequence for Esr1 (NM_007956.2,1070-1088).
gccaagccctcttgtgatt

SEQ ID NO: 443509 - DNA, 19 bp, Mus musculus
  siRNA target sequence for Esr1 (NM_007956.2,1071-1089).
ccaagccctcttgtgatta

SEQ ID NO: 443510 - DNA, 19 bp, Mus musculus
  siRNA target sequence for Esr1 (NM_007956.2,1072-1090).
caagccctcttgtgattaa

SEQ ID NO: 443511 - DNA, 19 bp, Mus musculus
  siRNA target sequence for Esr1 (NM_007956.2,1075-1093).
gccctcttgtgattaagca

SEQ ID NO: 443512 - DNA, 19 bp, Mus musculus
  siRNA target sequence for Esr1 (NM_007956.2,1158-1176).
gctgaaccgcccatgatct

SEQ ID NO: 443513 - DNA, 19 bp, Mus musculus
  siRNA target sequence for Esr1 (NM_007956.2,1159-1177).
ctgaaccgcccatgatcta

SEQ ID NO: 443514 - DNA, 19 bp, Mus musculus
  siRNA target sequence for Esr1 (NM_007956.2,1161-1179).
gaaccgcccatgatctatt

SEQ ID NO: 443515 - DNA, 19 bp, Mus musculus
  siRNA target sequence for Esr1 (NM_007956.2,1165-1183).
cgcccatgatctattctga

SEQ ID NO: 443516 - DNA, 19 bp, Mus musculus
  siRNA target sequence for Esr1 (NM_007956.2,1166-1184).
gcccatgatctattctgaa

SEQ ID NO: 443517 - DNA, 19 bp, Mus musculus
  siRNA target sequence for Esr1 (NM_007956.2,1167-1185).
cccatgatctattctgaat

SEQ ID NO: 443518 - DNA, 19 bp, Mus musculus
  siRNA target sequence for Esr1 (NM_007956.2,1168-1186).
ccatgatctattctgaata

SEQ ID NO: 443519 - DNA, 19 bp, Mus musculus
  siRNA target sequence for Esr1 (NM_007956.2,1169-1187).
catgatctattctgaatat

SEQ ID NO: 443520 - DNA, 19 bp, Mus musculus
  siRNA target sequence for Esr1 (NM_007956.2,1213-1231).
cctcaatgatgggcttatt

SEQ ID NO: 443521 - DNA, 19 bp, Mus musculus
  siRNA target sequence for Esr1 (NM_007956.2,1249-1267).
gggagctggttcatatgat

SEQ ID NO: 443522 - DNA, 19 bp, Mus musculus
  siRNA target sequence for Esr1 (NM_007956.2,1254-1272).
ctggttcatatgatcaact

SEQ ID NO: 443523 - DNA, 19 bp, Mus musculus
  siRNA target sequence for Esr1 (NM_007956.2,1343-1361).
gctggagattctgatgatt

SEQ ID NO: 443524 - DNA, 19 bp, Mus musculus
  siRNA target sequence for Esr1 (NM_007956.2,1418-1436).
gctcctggacaggaatcaa

SEQ ID NO: 443525 - DNA, 19 bp, Mus musculus
  siRNA target sequence for Esr1 (NM_007956.2,1492-1510).
gtcggttccgcatgatgaa

SEQ ID NO: 443526 - DNA, 19 bp, Mus musculus
  siRNA target sequence for Esr1 (NM_007956.2,1524-1542).
gagtttgtgtgcctcaaat

SEQ ID NO: 443527 - DNA, 19 bp, Mus musculus
  siRNA target sequence for Esr1 (NM_007956.2,1563-1581).
ggagtgtacacgtttctgt

SEQ ID NO: 443528 - DNA, 19 bp, Mus musculus
  siRNA target sequence for Esr1 (NM_007956.2,1731-1749).
catatccggcacatgagta

SEQ ID NO: 443529 - DNA, 19 bp, Mus musculus
  siRNA target sequence for Esr1 (NM_007956.2,1736-1754).
ccggcacatgagtaacaaa

SEQ ID NO: 443530 - DNA, 19 bp, Mus musculus
  siRNA target sequence for Esr1 (NM_007956.2,1756-1774).
gcatggagcatctctacaa

SEQ ID NO: 443531 - DNA, 19 bp, Mus musculus
  siRNA target sequence for Esr1 (NM_007956.2,1764-1782).
catctctacaacatgaaat

SEQ ID NO: 443532 - DNA, 19 bp, Mus musculus
  siRNA target sequence for Esr1 (NM_007956.2,1928-1946).
cttacaaacctactacata

SEQ ID NO: 443533 - DNA, 19 bp, Mus musculus
  siRNA target sequence for Esr2 (NM_010157.2,322-340).
gcgccgtctgcagtgatta

SEQ ID NO: 443534 - DNA, 19 bp, Mus musculus
  siRNA target sequence for Esr2 (NM_010157.2,326-344).
cgtctgcagtgattatgca

SEQ ID NO: 443535 - DNA, 19 bp, Mus musculus
  siRNA target sequence for Esr2 (NM_010157.2,327-345).
gtctgcagtgattatgcat

SEQ ID NO: 443536 - DNA, 19 bp, Mus musculus
  siRNA target sequence for Esr2 (NM_010157.2,379-397).
gatgtaaggccttttttaa

SEQ ID NO: 443537 - DNA, 19 bp, Mus musculus
  siRNA target sequence for Esr2 (NM_010157.2,544-562).
ggtgtgggtaccgaatagt

SEQ ID NO: 443538 - DNA, 19 bp, Mus musculus
  siRNA target sequence for Esr2 (NM_010157.2,545-563).
gtgtgggtaccgaatagta

SEQ ID NO: 443539 - DNA, 19 bp, Mus musculus
  siRNA target sequence for Esr2 (NM_010157.2,788-806).
ggaactggtgcacatgatt

SEQ ID NO: 443540 - DNA, 19 bp, Mus musculus
  siRNA target sequence for Esr2 (NM_010157.2,855-873).
caagtccgcctcttggaaa

SEQ ID NO: 443541 - DNA, 19 bp, Mus musculus
  siRNA target sequence for Esr2 (NM_010157.2,1028-1046).
ggcacggttccgtgagtta

SEQ ID NO: 443542 - DNA, 19 bp, Mus musculus
  siRNA target sequence for Esr2 (NM_010157.2,1029-1047).
gcacggttccgtgagttaa

SEQ ID NO: 443543 - DNA, 19 bp, Mus musculus
  siRNA target sequence for Esr2 (NM_010157.2,1030-1048).
cacggttccgtgagttaaa

SEQ ID NO: 443544 - DNA, 19 bp, Mus musculus
  siRNA target sequence for Esr2 (NM_010157.2,1053-1071).
cagcacaaagaatatctgt

SEQ ID NO: 443545 - DNA, 19 bp, Mus musculus
  siRNA target sequence for Esr2 (NM_010157.2,1147-1165).
ggaagctgacacacctatt

SEQ ID NO: 443546 - DNA, 19 bp, Mus musculus
  siRNA target sequence for Esr2 (NM_010157.2,1182-1200).
gccctggtctgggtgattt

SEQ ID NO: 443547 - DNA, 19 bp, Mus musculus
  siRNA target sequence for Esr2 (NM_010157.2,1185-1203).
ctggtctgggtgatttcga

SEQ ID NO: 443548 - DNA, 19 bp, Mus musculus
  siRNA target sequence for Esr2 (NM_010157.2,1266-1284).
catgtcaggcacatcagta

SEQ ID NO: 443549 - DNA, 19 bp, Mus musculus
  siRNA target sequence for Esr2 (NM_010157.2,1269-1287).
gtcaggcacatcagtaaca

SEQ ID NO: 443550 - DNA, 19 bp, Mus musculus
  siRNA target sequence for Esr2 (NM_010157.2,1414-1432).
gctcgacagaggacagtaa

SEQ ID NO: 443551 - DNA, 19 bp, Mus musculus
  siRNA target sequence for Esrra (NM_007953.1,186-204).
gcatcgagcctctctacat

SEQ ID NO: 443552 - DNA, 19 bp, Mus musculus
  siRNA target sequence for Esrra (NM_007953.1,853-871).
cctttttgatcgagagata

SEQ ID NO: 443553 - DNA, 19 bp, Mus musculus
  siRNA target sequence for Esrrb (NM_011934.2,469-487).
gttgcggctccttcatcaa

SEQ ID NO: 443554 - DNA, 19 bp, Mus musculus
  siRNA target sequence for Esrrb (NM_011934.2,503-521).
cccgtcctcgggcattgat

SEQ ID NO: 443555 - DNA, 19 bp, Mus musculus
  siRNA target sequence for Esrrb (NM_011934.2,662-680).
ctacgaggactgtactagt

SEQ ID NO: 443556 - DNA, 19 bp, Mus musculus
  siRNA target sequence for Esrrb (NM_011934.2,689-707).
ggaggactccgccatcaaa

SEQ ID NO: 443557 - DNA, 19 bp, Mus musculus
  siRNA target sequence for Esrrb (NM_011934.2,690-708).
gaggactccgccatcaaat

SEQ ID NO: 443558 - DNA, 19 bp, Mus musculus
  siRNA target sequence for Esrrb (NM_011934.2,834-852).
ggcaacatcgagtacaact

SEQ ID NO: 443559 - DNA, 19 bp, Mus musculus
  siRNA target sequence for Esrrb (NM_011934.2,1037-1055).
gatttccccacctgctaaa

SEQ ID NO: 443560 - DNA, 19 bp, Mus musculus
  siRNA target sequence for Esrrb (NM_011934.2,1050-1068).
gctaaaaagccattgacta

SEQ ID NO: 443561 - DNA, 19 bp, Mus musculus
  siRNA target sequence for Esrrb (NM_011934.2,1070-1088).
gatcgtctcgaatctacta

SEQ ID NO: 443562 - DNA, 19 bp, Mus musculus
  siRNA target sequence for Esrrb (NM_011934.2,1113-1131).
gctatgcctcccaacgata

SEQ ID NO: 443563 - DNA, 19 bp, Mus musculus
  siRNA target sequence for Esrrb (NM_011934.2,1114-1132).
ctatgcctcccaacgatat

SEQ ID NO: 443564 - DNA, 19 bp, Mus musculus
  siRNA target sequence for Esrrb (NM_011934.2,1307-1325).
ccgctcgctcccatacgat

SEQ ID NO: 443565 - DNA, 19 bp, Mus musculus
  siRNA target sequence for Esrrb (NM_011934.2,1312-1330).
cgctcccatacgatgacaa

SEQ ID NO: 443566 - DNA, 19 bp, Mus musculus
  siRNA target sequence for Esrrb (NM_011934.2,1336-1354).
catacgccgaggactatat

SEQ ID NO: 443567 - DNA, 19 bp, Mus musculus
  siRNA target sequence for Esrrb (NM_011934.2,1479-1497).
gccctcgccaactcagatt

SEQ ID NO: 443568 - DNA, 19 bp, Mus musculus
  siRNA target sequence for Esrrb (NM_011934.2,1490-1508).
ctcagattcgatgtacatt

SEQ ID NO: 443569 - DNA, 19 bp, Mus musculus
  siRNA target sequence for Esrrb (NM_011934.2,1494-1512).
gattcgatgtacattgaga

SEQ ID NO: 443570 - DNA, 19 bp, Mus musculus
  siRNA target sequence for Esrrb (NM_011934.2,1648-1666).
ccaaagccgtgcaacactt

SEQ ID NO: 443571 - DNA, 19 bp, Mus musculus
  siRNA target sequence for Esrrb (NM_011934.2,1653-1671).
gccgtgcaacacttctaca

SEQ ID NO: 443572 - DNA, 19 bp, Mus musculus
  siRNA target sequence for Esrrg (NM_011935.1,105-123).
ccctgcactacgaagaaga

SEQ ID NO: 443573 - DNA, 19 bp, Mus musculus
  siRNA target sequence for Esrrg (NM_011935.1,130-148).
ctgcagaatgtcaaacaaa

SEQ ID NO: 443574 - DNA, 19 bp, Mus musculus
  siRNA target sequence for Esrrg (NM_011935.1,145-163).
caaagatcgacacattgat

SEQ ID NO: 443575 - DNA, 19 bp, Mus musculus
  siRNA target sequence for Esrrg (NM_011935.1,168-186).
gctgttcgtccttcatcaa

SEQ ID NO: 443576 - DNA, 19 bp, Mus musculus
  siRNA target sequence for Esrrg (NM_011935.1,254-272).
gacgccagtgggagttaca

SEQ ID NO: 443577 - DNA, 19 bp, Mus musculus
  siRNA target sequence for Esrrg (NM_011935.1,351-369).
ggcctgtccggaaactgta

SEQ ID NO: 443578 - DNA, 19 bp, Mus musculus
  siRNA target sequence for Esrrg (NM_011935.1,352-370).
gcctgtccggaaactgtat

SEQ ID NO: 443579 - DNA, 19 bp, Mus musculus
  siRNA target sequence for Esrrg (NM_011935.1,354-372).
ctgtccggaaactgtatga

SEQ ID NO: 443580 - DNA, 19 bp, Mus musculus
  siRNA target sequence for Esrrg (NM_011935.1,528-546).
ggacgattcaaggtaacat

SEQ ID NO: 443581 - DNA, 19 bp, Mus musculus
  siRNA target sequence for Esrrg (NM_011935.1,529-547).
gacgattcaaggtaacata

SEQ ID NO: 443582 - DNA, 19 bp, Mus musculus
  siRNA target sequence for Esrrg (NM_011935.1,531-549).
cgattcaaggtaacataga

SEQ ID NO: 443583 - DNA, 19 bp, Mus musculus
  siRNA target sequence for Esrrg (NM_011935.1,619-637).
cttcatgaagtgtctcaaa

SEQ ID NO: 443584 - DNA, 19 bp, Mus musculus
  siRNA target sequence for Esrrg (NM_011935.1,694-712).
gtacaagcgcagaatagat

SEQ ID NO: 443585 - DNA, 19 bp, Mus musculus
  siRNA target sequence for Esrrg (NM_011935.1,755-773).
gccaaaaagccatataaca

SEQ ID NO: 443586 - DNA, 19 bp, Mus musculus
  siRNA target sequence for Esrrg (NM_011935.1,904-922).
cattggatgggcaaaacat

SEQ ID NO: 443587 - DNA, 19 bp, Mus musculus
  siRNA target sequence for Esrrg (NM_011935.1,1009-1027).
gtaccgatcgctttcgttt

SEQ ID NO: 443588 - DNA, 19 bp, Mus musculus
  siRNA target sequence for Esrrg (NM_011935.1,1040-1058).
gtctatgcagacgattata

SEQ ID NO: 443589 - DNA, 19 bp, Mus musculus
  siRNA target sequence for Esrrg (NM_011935.1,1042-1060).
ctatgcagacgattatata

SEQ ID NO: 443590 - DNA, 19 bp, Mus musculus
  siRNA target sequence for Esrrg (NM_011935.1,1047-1065).
cagacgattatataatgga

SEQ ID NO: 443591 - DNA, 19 bp, Mus musculus
  siRNA target sequence for Esrrg (NM_011935.1,1086-1104).
caggccttcttgacctaaa

SEQ ID NO: 443592 - DNA, 19 bp, Mus musculus
  siRNA target sequence for Esrrg (NM_011935.1,1090-1108).
ccttcttgacctaaataat

SEQ ID NO: 443593 - DNA, 19 bp, Mus musculus
  siRNA target sequence for Esrrg (NM_011935.1,1094-1112).
cttgacctaaataatgcta

SEQ ID NO: 443594 - DNA, 19 bp, Mus musculus
  siRNA target sequence for Esrrg (NM_011935.1,1168-1186).
caccctcaaagcaatagct

SEQ ID NO: 443595 - DNA, 19 bp, Mus musculus
  siRNA target sequence for Esrrg (NM_011935.1,1178-1196).
gcaatagctcttgctaatt

SEQ ID NO: 443596 - DNA, 19 bp, Mus musculus
  siRNA target sequence for Esx1 (NM_007957.1,706-724).
cctggaatgggaatgaaaa

SEQ ID NO: 443597 - DNA, 19 bp, Mus musculus
  siRNA target sequence for Esx1 (NM_007957.1,1168-1186).
ctgtgggtgtctatcttga

SEQ ID NO: 443598 - DNA, 19 bp, Mus musculus
  siRNA target sequence for Esx1 (NM_007957.1,1174-1192).
gtgtctatcttgatgatca

SEQ ID NO: 443599 - DNA, 19 bp, Mus musculus
  siRNA target sequence for Esx1 (NM_007957.1,1249-1267).
gtcccatgcatcctcaaat

SEQ ID NO: 443600 - DNA, 19 bp, Mus musculus
  siRNA target sequence for Esx1 (NM_007957.1,1251-1269).
cccatgcatcctcaaatga

SEQ ID NO: 443601 - DNA, 19 bp, Mus musculus
  siRNA target sequence for Esx1 (NM_007957.1,1252-1270).
ccatgcatcctcaaatgat

SEQ ID NO: 443602 - DNA, 19 bp, Mus musculus
  siRNA target sequence for Ets1 (NM_011808.1,115-133).
ccgactctcaccatcatca

SEQ ID NO: 443603 - DNA, 19 bp, Mus musculus
  siRNA target sequence for Ets1 (NM_011808.1,116-134).
cgactctcaccatcatcaa

SEQ ID NO: 443604 - DNA, 19 bp, Mus musculus
  siRNA target sequence for Ets1 (NM_011808.1,699-717).
cgactacccttctgtcatt

SEQ ID NO: 443605 - DNA, 19 bp, Mus musculus
  siRNA target sequence for Ets1 (NM_011808.1,743-761).
ccttgcagacagactactt

SEQ ID NO: 443606 - DNA, 19 bp, Mus musculus
  siRNA target sequence for Ets1 (NM_011808.1,744-762).
cttgcagacagactacttt

SEQ ID NO: 443607 - DNA, 19 bp, Mus musculus
  siRNA target sequence for Ets1 (NM_011808.1,853-871).
gtagagagctacgatagtt

SEQ ID NO: 443608 - DNA, 19 bp, Mus musculus
  siRNA target sequence for Ets1 (NM_011808.1,925-943).
cgggtcccctcctatgaca

SEQ ID NO: 443609 - DNA, 19 bp, Mus musculus
  siRNA target sequence for Ets1 (NM_011808.1,1114-1132).
ctggaattactcactgata

SEQ ID NO: 443610 - DNA, 19 bp, Mus musculus
  siRNA target sequence for Ets1 (NM_011808.1,1267-1285).
cttcgctactattatgaca

SEQ ID NO: 443611 - DNA, 19 bp, Mus musculus
  siRNA target sequence for Ets1 (NM_011808.1,1378-1396).
cacgccatgctggatgtaa

SEQ ID NO: 443612 - DNA, 19 bp, Mus musculus
  siRNA target sequence for Ets2 (NM_011809.2,166-184).
gactttggaatcaagaaca

SEQ ID NO: 443613 - DNA, 19 bp, Mus musculus
  siRNA target sequence for Ets2 (NM_011809.2,196-214).
gcccctgtcgccaacagtt

SEQ ID NO: 443614 - DNA, 19 bp, Mus musculus
  siRNA target sequence for Ets2 (NM_011809.2,198-216).
ccctgtcgccaacagtttt

SEQ ID NO: 443615 - DNA, 19 bp, Mus musculus
  siRNA target sequence for Ets2 (NM_011809.2,252-270).
cttcgatggctctctgttt

SEQ ID NO: 443616 - DNA, 19 bp, Mus musculus
  siRNA target sequence for Ets2 (NM_011809.2,317-335).
ccacgggcctggattctgt

SEQ ID NO: 443617 - DNA, 19 bp, Mus musculus
  siRNA target sequence for Ets2 (NM_011809.2,393-411).
gatgagccaagccttaaaa

SEQ ID NO: 443618 - DNA, 19 bp, Mus musculus
  siRNA target sequence for Ets2 (NM_011809.2,603-621).
ggagctggcgcctgacttt

SEQ ID NO: 443619 - DNA, 19 bp, Mus musculus
  siRNA target sequence for Ets2 (NM_011809.2,687-705).
ccaatatgaggaaaactct

SEQ ID NO: 443620 - DNA, 19 bp, Mus musculus
  siRNA target sequence for Ets2 (NM_011809.2,728-746).
ggatcaacagcaatacatt

SEQ ID NO: 443621 - DNA, 19 bp, Mus musculus
  siRNA target sequence for Ets2 (NM_011809.2,760-778).
gaacaggctccatatggaa

SEQ ID NO: 443622 - DNA, 19 bp, Mus musculus
  siRNA target sequence for Ets2 (NM_011809.2,895-913).
gtcaatgtcaattactgtt

SEQ ID NO: 443623 - DNA, 19 bp, Mus musculus
  siRNA target sequence for Ets2 (NM_011809.2,931-949).
cccagcagcaacgtgaatt

SEQ ID NO: 443624 - DNA, 19 bp, Mus musculus
  siRNA target sequence for Ets2 (NM_011809.2,932-950).
ccagcagcaacgtgaattt

SEQ ID NO: 443625 - DNA, 19 bp, Mus musculus
  siRNA target sequence for Ets2 (NM_011809.2,935-953).
gcagcaacgtgaatttgct

SEQ ID NO: 443626 - DNA, 19 bp, Mus musculus
  siRNA target sequence for Ets2 (NM_011809.2,943-961).
gtgaatttgctcaacaaca

SEQ ID NO: 443627 - DNA, 19 bp, Mus musculus
  siRNA target sequence for Ets2 (NM_011809.2,945-963).
gaatttgctcaacaacaat

SEQ ID NO: 443628 - DNA, 19 bp, Mus musculus
  siRNA target sequence for Ets2 (NM_011809.2,1055-1073).
cgtccctactggatgtaca

SEQ ID NO: 443629 - DNA, 19 bp, Mus musculus
  siRNA target sequence for Ets2 (NM_011809.2,1279-1297).
gacaagtcctgtcaatctt

SEQ ID NO: 443630 - DNA, 19 bp, Mus musculus
  siRNA target sequence for Ets2 (NM_011809.2,1467-1485).
ctacgtgtaccgtttcgta

SEQ ID NO: 443631 - DNA, 19 bp, Mus musculus
  siRNA target sequence for Ets2 (NM_011809.2,1539-1557).
gggcgtccagcctgataca

SEQ ID NO: 443632 - DNA, 19 bp, Mus musculus
  siRNA target sequence for Ets2 (NM_011809.2,1541-1559).
gcgtccagcctgatacaga

SEQ ID NO: 443633 - DNA, 19 bp, Mus musculus
  siRNA target sequence for Ets2 (NM_011809.2,1542-1560).
cgtccagcctgatacagaa

SEQ ID NO: 443634 - DNA, 19 bp, Mus musculus
  siRNA target sequence for Etsrp71 (NM_007959.1,89-107).
ctgggagcggaatttggtt

SEQ ID NO: 443635 - DNA, 19 bp, Mus musculus
  siRNA target sequence for Etsrp71 (NM_007959.1,93-111).
gagcggaatttggtttcta

SEQ ID NO: 443636 - DNA, 19 bp, Mus musculus
  siRNA target sequence for Etsrp71 (NM_007959.1,95-113).
gcggaatttggtttctatt

SEQ ID NO: 443637 - DNA, 19 bp, Mus musculus
  siRNA target sequence for Etsrp71 (NM_007959.1,141-159).
caccgatcacaccaatgaa

SEQ ID NO: 443638 - DNA, 19 bp, Mus musculus
  siRNA target sequence for Etsrp71 (NM_007959.1,213-231).
ctcacgaagacgtaccttt

SEQ ID NO: 443639 - DNA, 19 bp, Mus musculus
  siRNA target sequence for Etsrp71 (NM_007959.1,361-379).
ccccttcgtcggctttgaa

SEQ ID NO: 443640 - DNA, 19 bp, Mus musculus
  siRNA target sequence for Etsrp71 (NM_007959.1,521-539).
gaagcgcatgaggactata

SEQ ID NO: 443641 - DNA, 19 bp, Mus musculus
  siRNA target sequence for Etsrp71 (NM_007959.1,524-542).
gcgcatgaggactataaaa

SEQ ID NO: 443642 - DNA, 19 bp, Mus musculus
  siRNA target sequence for Etsrp71 (NM_007959.1,525-543).
cgcatgaggactataaaat

SEQ ID NO: 443643 - DNA, 19 bp, Mus musculus
  siRNA target sequence for Etsrp71 (NM_007959.1,574-592).
caccaccacgtggaatact

SEQ ID NO: 443644 - DNA, 19 bp, Mus musculus
  siRNA target sequence for Etsrp71 (NM_007959.1,688-706).
gactcgctactccaaaact

SEQ ID NO: 443645 - DNA, 19 bp, Mus musculus
  siRNA target sequence for Etsrp71 (NM_007959.1,690-708).
ctcgctactccaaaactaa

SEQ ID NO: 443646 - DNA, 19 bp, Mus musculus
  siRNA target sequence for Etsrp71 (NM_007959.1,856-874).
gaggaagccgggaatgaat

SEQ ID NO: 443647 - DNA, 19 bp, Mus musculus
  siRNA target sequence for Etsrp71 (NM_007959.1,859-877).
gaagccgggaatgaattat

SEQ ID NO: 443648 - DNA, 19 bp, Mus musculus
  siRNA target sequence for Etsrp71 (NM_007959.1,863-881).
ccgggaatgaattatgaga

SEQ ID NO: 443649 - DNA, 19 bp, Mus musculus
  siRNA target sequence for Etsrp71 (NM_007959.1,886-904).
gagtcgaggtctacgttat

SEQ ID NO: 443650 - DNA, 19 bp, Mus musculus
  siRNA target sequence for Etsrp71 (NM_007959.1,888-906).
gtcgaggtctacgttatta

SEQ ID NO: 443651 - DNA, 19 bp, Mus musculus
  siRNA target sequence for Etsrp71 (NM_007959.1,890-908).
cgaggtctacgttattatt

SEQ ID NO: 443652 - DNA, 19 bp, Mus musculus
  siRNA target sequence for Etsrp71 (NM_007959.1,891-909).
gaggtctacgttattatta

SEQ ID NO: 443653 - DNA, 19 bp, Mus musculus
  siRNA target sequence for Etsrp71 (NM_007959.1,935-953).
ggtgggcgcaagtacacat

SEQ ID NO: 443654 - DNA, 19 bp, Mus musculus
  siRNA target sequence for Etsrp71 (NM_007959.1,936-954).
gtgggcgcaagtacacata

SEQ ID NO: 443655 - DNA, 19 bp, Mus musculus
  siRNA target sequence for Etsrp71 (NM_007959.1,980-998).
ctcgcctatcaggatgata

SEQ ID NO: 443656 - DNA, 19 bp, Mus musculus
  siRNA target sequence for Etv1 (NM_007960.1,268-286).
ccgagaaaccaacaaatgt

SEQ ID NO: 443657 - DNA, 19 bp, Mus musculus
  siRNA target sequence for Etv1 (NM_007960.1,270-288).
gagaaaccaacaaatgtca

SEQ ID NO: 443658 - DNA, 19 bp, Mus musculus
  siRNA target sequence for Etv1 (NM_007960.1,276-294).
ccaacaaatgtcaggaaaa

SEQ ID NO: 443659 - DNA, 19 bp, Mus musculus
  siRNA target sequence for Etv1 (NM_007960.1,444-462).
catggcctcccactgaaaa

SEQ ID NO: 443660 - DNA, 19 bp, Mus musculus
  siRNA target sequence for Etv1 (NM_007960.1,557-575).
caatgtcagtgcctatgat

SEQ ID NO: 443661 - DNA, 19 bp, Mus musculus
  siRNA target sequence for Etv1 (NM_007960.1,1318-1336).
ggcgttggggcattcagaa

SEQ ID NO: 443662 - DNA, 19 bp, Mus musculus
  siRNA target sequence for Etv1 (NM_007960.1,1346-1364).
ggcgatgaactatgacaaa

SEQ ID NO: 443663 - DNA, 19 bp, Mus musculus
  siRNA target sequence for Etv1 (NM_007960.1,1392-1410).
gagaagggaatcatgcaaa

SEQ ID NO: 443664 - DNA, 19 bp, Mus musculus
  siRNA target sequence for Etv1 (NM_007960.1,1422-1440).
gaaagatacgtgtacaaat

SEQ ID NO: 443665 - DNA, 19 bp, Mus musculus
  siRNA target sequence for Etv1 (NM_007960.1,1449-1467).
gacccggaagcccttttct

SEQ ID NO: 443666 - DNA, 19 bp, Mus musculus
  siRNA target sequence for Etv1 (NM_007960.1,1452-1470).
ccggaagcccttttctcta

SEQ ID NO: 443667 - DNA, 19 bp, Mus musculus
  siRNA target sequence for Etv1 (NM_007960.1,1453-1471).
cggaagcccttttctctat

SEQ ID NO: 443668 - DNA, 19 bp, Mus musculus
  siRNA target sequence for Etv3 (NM_012051.2,115-133).
ggaggtggagggtatcagt

SEQ ID NO: 443669 - DNA, 19 bp, Mus musculus
  siRNA target sequence for Etv3 (NM_012051.2,116-134).
gaggtggagggtatcagtt

SEQ ID NO: 443670 - DNA, 19 bp, Mus musculus
  siRNA target sequence for Etv3 (NM_012051.2,355-373).
gccctcagatactattaca

SEQ ID NO: 443671 - DNA, 19 bp, Mus musculus
  siRNA target sequence for Etv3 (NM_012051.2,378-396).
gaggatccttcataaaaca

SEQ ID NO: 443672 - DNA, 19 bp, Mus musculus
  siRNA target sequence for Etv3 (NM_012051.2,380-398).
ggatccttcataaaacaaa

SEQ ID NO: 443673 - DNA, 19 bp, Mus musculus
  siRNA target sequence for Etv3 (NM_012051.2,400-418).
gggaaaaggtttacttaca

SEQ ID NO: 443674 - DNA, 19 bp, Mus musculus
  siRNA target sequence for Etv3 (NM_012051.2,401-419).
ggaaaaggtttacttacaa

SEQ ID NO: 443675 - DNA, 19 bp, Mus musculus
  siRNA target sequence for Etv3 (NM_012051.2,407-425).
ggtttacttacaagtttaa

SEQ ID NO: 443676 - DNA, 19 bp, Mus musculus
  siRNA target sequence for Etv3 (NM_012051.2,702-720).
catgccctcccgaaatgct

SEQ ID NO: 443677 - DNA, 19 bp, Mus musculus
  siRNA target sequence for Etv3 (NM_012051.2,842-860).
gcggaggggtccttaatgt

SEQ ID NO: 443678 - DNA, 19 bp, Mus musculus
  siRNA target sequence for Etv3 (NM_012051.2,994-1012).
gcctgttcggtgttcaact

SEQ ID NO: 443679 - DNA, 19 bp, Mus musculus
  siRNA target sequence for Etv3 (NM_012051.2,1448-1466).
ccggtgtacccgagaagaa

SEQ ID NO: 443680 - DNA, 19 bp, Mus musculus
  siRNA target sequence for Etv3 (NM_012051.2,1449-1467).
cggtgtacccgagaagaaa

SEQ ID NO: 443681 - DNA, 19 bp, Mus musculus
  siRNA target sequence for Etv3 (NM_012051.2,1476-1494).
cctgatgccccctaagctt

SEQ ID NO: 443682 - DNA, 19 bp, Mus musculus
  siRNA target sequence for Etv3 (NM_012051.2,1528-1546).
gccagggagctcaacaaaa

SEQ ID NO: 443683 - DNA, 19 bp, Mus musculus
  siRNA target sequence for Etv4 (NM_008815.1,361-379).
ggatgaaaggcggatactt

SEQ ID NO: 443684 - DNA, 19 bp, Mus musculus
  siRNA target sequence for Etv4 (NM_008815.1,398-416).
caccttctgcagcaaatct

SEQ ID NO: 443685 - DNA, 19 bp, Mus musculus
  siRNA target sequence for Etv4 (NM_008815.1,490-508).
cttccgactcagaagatct

SEQ ID NO: 443686 - DNA, 19 bp, Mus musculus
  siRNA target sequence for Etv4 (NM_008815.1,493-511).
ccgactcagaagatctctt

SEQ ID NO: 443687 - DNA, 19 bp, Mus musculus
  siRNA target sequence for Etv4 (NM_008815.1,578-596).
gtttgttcctgatttccat

SEQ ID NO: 443688 - DNA, 19 bp, Mus musculus
  siRNA target sequence for Etv4 (NM_008815.1,588-606).
gatttccattcagaaaact

SEQ ID NO: 443689 - DNA, 19 bp, Mus musculus
  siRNA target sequence for Etv4 (NM_008815.1,994-1012).
cctacccccagcagaactt

SEQ ID NO: 443690 - DNA, 19 bp, Mus musculus
  siRNA target sequence for Etv4 (NM_008815.1,1155-1173).
cctggatgtgcatcaatgt

SEQ ID NO: 443691 - DNA, 19 bp, Mus musculus
  siRNA target sequence for Etv4 (NM_008815.1,1156-1174).
ctggatgtgcatcaatgta

SEQ ID NO: 443692 - DNA, 19 bp, Mus musculus
  siRNA target sequence for Etv4 (NM_008815.1,1223-1241).
gggttatggctatgaaaaa

SEQ ID NO: 443693 - DNA, 19 bp, Mus musculus
  siRNA target sequence for Etv4 (NM_008815.1,1224-1242).
ggttatggctatgaaaaat

SEQ ID NO: 443694 - DNA, 19 bp, Mus musculus
  siRNA target sequence for Etv4 (NM_008815.1,1249-1267).
gaccattcccagatgatgt

SEQ ID NO: 443695 - DNA, 19 bp, Mus musculus
  siRNA target sequence for Etv4 (NM_008815.1,1266-1284).
gtctgcattgtccctaaaa

SEQ ID NO: 443696 - DNA, 19 bp, Mus musculus
  siRNA target sequence for Etv4 (NM_008815.1,1268-1286).
ctgcattgtccctaaaaaa

SEQ ID NO: 443697 - DNA, 19 bp, Mus musculus
  siRNA target sequence for Etv4 (NM_008815.1,1271-1289).
cattgtccctaaaaaattt

SEQ ID NO: 443698 - DNA, 19 bp, Mus musculus
  siRNA target sequence for Etv4 (NM_008815.1,1432-1450).
ggggaatggagtttaaact

SEQ ID NO: 443699 - DNA, 19 bp, Mus musculus
  siRNA target sequence for Etv4 (NM_008815.1,1433-1451).
gggaatggagtttaaacta

SEQ ID NO: 443700 - DNA, 19 bp, Mus musculus
  siRNA target sequence for Etv4 (NM_008815.1,1434-1452).
ggaatggagtttaaactaa

SEQ ID NO: 443701 - DNA, 19 bp, Mus musculus
  siRNA target sequence for Etv4 (NM_008815.1,1435-1453).
gaatggagtttaaactaat

SEQ ID NO: 443702 - DNA, 19 bp, Mus musculus
  siRNA target sequence for Etv4 (NM_008815.1,1439-1457).
ggagtttaaactaattgaa

SEQ ID NO: 443703 - DNA, 19 bp, Mus musculus
  siRNA target sequence for Etv4 (NM_008815.1,1525-1543).
gccgctcgctgcgatacta

SEQ ID NO: 443704 - DNA, 19 bp, Mus musculus
  siRNA target sequence for Etv4 (NM_008815.1,1526-1544).
ccgctcgctgcgatactat

SEQ ID NO: 443705 - DNA, 19 bp, Mus musculus
  siRNA target sequence for Etv4 (NM_008815.1,1527-1545).
cgctcgctgcgatactatt

SEQ ID NO: 443706 - DNA, 19 bp, Mus musculus
  siRNA target sequence for Etv4 (NM_008815.1,1528-1546).
gctcgctgcgatactatta

SEQ ID NO: 443707 - DNA, 19 bp, Mus musculus
  siRNA target sequence for Etv4 (NM_008815.1,1529-1547).
ctcgctgcgatactattat

SEQ ID NO: 443708 - DNA, 19 bp, Mus musculus
  siRNA target sequence for Etv4 (NM_008815.1,1533-1551).
ctgcgatactattatgaga

SEQ ID NO: 443709 - DNA, 19 bp, Mus musculus
  siRNA target sequence for Etv4 (NM_008815.1,1535-1553).
gcgatactattatgagaaa

SEQ ID NO: 443710 - DNA, 19 bp, Mus musculus
  siRNA target sequence for Etv4 (NM_008815.1,1767-1785).
ggccacagaggtggatatt

SEQ ID NO: 443711 - DNA, 19 bp, Mus musculus
  siRNA target sequence for Etv4 (NM_008815.1,1769-1787).
ccacagaggtggatattct

SEQ ID NO: 443712 - DNA, 19 bp, Mus musculus
  siRNA target sequence for Etv5 (NM_023794.2,197-215).
gtcgagggcgacctttgat

SEQ ID NO: 443713 - DNA, 19 bp, Mus musculus
  siRNA target sequence for Etv5 (NM_023794.2,200-218).
gagggcgacctttgattga

SEQ ID NO: 443714 - DNA, 19 bp, Mus musculus
  siRNA target sequence for Etv5 (NM_023794.2,202-220).
gggcgacctttgattgaca

SEQ ID NO: 443715 - DNA, 19 bp, Mus musculus
  siRNA target sequence for Etv5 (NM_023794.2,206-224).
gacctttgattgacagaaa

SEQ ID NO: 443716 - DNA, 19 bp, Mus musculus
  siRNA target sequence for Etv5 (NM_023794.2,265-283).
gagttgtttcaggatctta

SEQ ID NO: 443717 - DNA, 19 bp, Mus musculus
  siRNA target sequence for Etv5 (NM_023794.2,460-478).
gctaagtatggagaaaagt

SEQ ID NO: 443718 - DNA, 19 bp, Mus musculus
  siRNA target sequence for Etv5 (NM_023794.2,472-490).
gaaaagtgcctctacaact

SEQ ID NO: 443719 - DNA, 19 bp, Mus musculus
  siRNA target sequence for Etv5 (NM_023794.2,477-495).
gtgcctctacaactattgt

SEQ ID NO: 443720 - DNA, 19 bp, Mus musculus
  siRNA target sequence for Etv5 (NM_023794.2,555-573).
gtcacccacccatcagaat

SEQ ID NO: 443721 - DNA, 19 bp, Mus musculus
  siRNA target sequence for Etv6 (NM_007961.2,118-136).
ctgctcagtctagcattaa

SEQ ID NO: 443722 - DNA, 19 bp, Mus musculus
  siRNA target sequence for Etv6 (NM_007961.2,130-148).
gcattaagcaggaacgaat

SEQ ID NO: 443723 - DNA, 19 bp, Mus musculus
  siRNA target sequence for Etv6 (NM_007961.2,131-149).
cattaagcaggaacgaatt

SEQ ID NO: 443724 - DNA, 19 bp, Mus musculus
  siRNA target sequence for Etv6 (NM_007961.2,191-209).
ctcgactccgcttcatgtt

SEQ ID NO: 443725 - DNA, 19 bp, Mus musculus
  siRNA target sequence for Etv6 (NM_007961.2,193-211).
cgactccgcttcatgttca

SEQ ID NO: 443726 - DNA, 19 bp, Mus musculus
  siRNA target sequence for Etv6 (NM_007961.2,270-288).
cgtttgcagccgatttact

SEQ ID NO: 443727 - DNA, 19 bp, Mus musculus
  siRNA target sequence for Etv6 (NM_007961.2,320-338).
gtgggcagaaaatgagttt

SEQ ID NO: 443728 - DNA, 19 bp, Mus musculus
  siRNA target sequence for Etv6 (NM_007961.2,349-367).
ccattgagagcaacaagtt

SEQ ID NO: 443729 - DNA, 19 bp, Mus musculus
  siRNA target sequence for Etv6 (NM_007961.2,358-376).
gcaacaagttcgaaatgaa

SEQ ID NO: 443730 - DNA, 19 bp, Mus musculus
  siRNA target sequence for Etv6 (NM_007961.2,416-434).
ctaccgatctcctcattca

SEQ ID NO: 443731 - DNA, 19 bp, Mus musculus
  siRNA target sequence for Etv6 (NM_007961.2,433-451).
caggcgacgtgctctatga

SEQ ID NO: 443732 - DNA, 19 bp, Mus musculus
  siRNA target sequence for Etv6 (NM_007961.2,436-454).
gcgacgtgctctatgaact

SEQ ID NO: 443733 - DNA, 19 bp, Mus musculus
  siRNA target sequence for Etv6 (NM_007961.2,555-573).
cagaaccatgacgaagata

SEQ ID NO: 443734 - DNA, 19 bp, Mus musculus
  siRNA target sequence for Etv6 (NM_007961.2,625-643).
ctcccaccatcgaactctt

SEQ ID NO: 443735 - DNA, 19 bp, Mus musculus
  siRNA target sequence for Etv6 (NM_007961.2,628-646).
ccaccatcgaactcttaca

SEQ ID NO: 443736 - DNA, 19 bp, Mus musculus
  siRNA target sequence for Etv6 (NM_007961.2,816-834).
gtgtctcctgtcgagaata

SEQ ID NO: 443737 - DNA, 19 bp, Mus musculus
  siRNA target sequence for Etv6 (NM_007961.2,820-838).
ctcctgtcgagaataatca

SEQ ID NO: 443738 - DNA, 19 bp, Mus musculus
  siRNA target sequence for Etv6 (NM_007961.2,822-840).
cctgtcgagaataatcact

SEQ ID NO: 443739 - DNA, 19 bp, Mus musculus
  siRNA target sequence for Etv6 (NM_007961.2,898-916).
ccatcatgcaccctttgat

SEQ ID NO: 443740 - DNA, 19 bp, Mus musculus
  siRNA target sequence for Etv6 (NM_007961.2,935-953).
gcactcggtggacttcaaa

SEQ ID NO: 443741 - DNA, 19 bp, Mus musculus
  siRNA target sequence for Etv6 (NM_007961.2,1076-1094).
catgcccattgggagaata

SEQ ID NO: 443742 - DNA, 19 bp, Mus musculus
  siRNA target sequence for Etv6 (NM_007961.2,1109-1127).
gctttgggattatgtctat

SEQ ID NO: 443743 - DNA, 19 bp, Mus musculus
  siRNA target sequence for Etv6 (NM_007961.2,1114-1132).
gggattatgtctatcagtt

SEQ ID NO: 443744 - DNA, 19 bp, Mus musculus
  siRNA target sequence for Etv6 (NM_007961.2,1138-1156).
ctgacagccggtacgaaaa

SEQ ID NO: 443745 - DNA, 19 bp, Mus musculus
  siRNA target sequence for Etv6 (NM_007961.2,1140-1158).
gacagccggtacgaaaact

SEQ ID NO: 443746 - DNA, 19 bp, Mus musculus
  siRNA target sequence for Etv6 (NM_007961.2,1144-1162).
gccggtacgaaaacttcat

SEQ ID NO: 443747 - DNA, 19 bp, Mus musculus
  siRNA target sequence for Etv6 (NM_007961.2,1163-1181).
ccgatgggaggacaaagaa

SEQ ID NO: 443748 - DNA, 19 bp, Mus musculus
  siRNA target sequence for Etv6 (NM_007961.2,1221-1239).
cgactctggggaaaccata

SEQ ID NO: 443749 - DNA, 19 bp, Mus musculus
  siRNA target sequence for Etv6 (NM_007961.2,1222-1240).
gactctggggaaaccataa

SEQ ID NO: 443750 - DNA, 19 bp, Mus musculus
  siRNA target sequence for Etv6 (NM_007961.2,1283-1301).
gcgccactactacaaacta

SEQ ID NO: 443751 - DNA, 19 bp, Mus musculus
  siRNA target sequence for Etv6 (NM_007961.2,1284-1302).
cgccactactacaaactaa

SEQ ID NO: 443752 - DNA, 19 bp, Mus musculus
  siRNA target sequence for Etv6 (NM_007961.2,1285-1303).
gccactactacaaactaaa

SEQ ID NO: 443753 - DNA, 19 bp, Mus musculus
  siRNA target sequence for Etv6 (NM_007961.2,1289-1307).
ctactacaaactaaacatt

SEQ ID NO: 443754 - DNA, 19 bp, Mus musculus
  siRNA target sequence for Etv6 (NM_007961.2,1320-1338).
cccggacaaaggcttttgt

SEQ ID NO: 443755 - DNA, 19 bp, Mus musculus
  siRNA target sequence for Etv6 (NM_007961.2,1321-1339).
ccggacaaaggcttttgtt

SEQ ID NO: 443756 - DNA, 19 bp, Mus musculus
  siRNA target sequence for Etv6 (NM_007961.2,1376-1394).
ccggacagaccgtctagaa

SEQ ID NO: 443757 - DNA, 19 bp, Mus musculus
  siRNA target sequence for Etv6 (NM_007961.2,1378-1396).
ggacagaccgtctagaaca

SEQ ID NO: 443758 - DNA, 19 bp, Mus musculus
  siRNA target sequence for Evx1 (NM_007966.1,356-374).
gccgaaaggacatggttat

SEQ ID NO: 443759 - DNA, 19 bp, Mus musculus
  siRNA target sequence for Evx1 (NM_007966.1,358-376).
cgaaaggacatggttatgt

SEQ ID NO: 443760 - DNA, 19 bp, Mus musculus
  siRNA target sequence for Evx1 (NM_007966.1,688-706).
gacaccgaatcggatttct

SEQ ID NO: 443761 - DNA, 19 bp, Mus musculus
  siRNA target sequence for Evx1 (NM_007966.1,690-708).
caccgaatcggatttctat

SEQ ID NO: 443762 - DNA, 19 bp, Mus musculus
  siRNA target sequence for Evx1 (NM_007966.1,692-710).
ccgaatcggatttctatga

SEQ ID NO: 443763 - DNA, 19 bp, Mus musculus
  siRNA target sequence for Evx1 (NM_007966.1,693-711).
cgaatcggatttctatgaa

SEQ ID NO: 443764 - DNA, 19 bp, Mus musculus
  siRNA target sequence for Evx2 (NM_007967.1,17-35).
gaaaagagatgattctgat

SEQ ID NO: 443765 - DNA, 19 bp, Mus musculus
  siRNA target sequence for Evx2 (NM_007967.1,108-126).
gctcgaggccctggaaaat

SEQ ID NO: 443766 - DNA, 19 bp, Mus musculus
  siRNA target sequence for Evx2 (NM_007967.1,109-127).
ctcgaggccctggaaaatt

SEQ ID NO: 443767 - DNA, 19 bp, Mus musculus
  siRNA target sequence for Evx2 (NM_007967.1,295-313).
cgcaagaagcctagtcatt

SEQ ID NO: 443768 - DNA, 19 bp, Mus musculus
  siRNA target sequence for Evx2 (NM_007967.1,297-315).
caagaagcctagtcattat

SEQ ID NO: 443769 - DNA, 19 bp, Mus musculus
  siRNA target sequence for Evx2 (NM_007967.1,397-415).
gctgcaccgctcaaggaaa

SEQ ID NO: 443770 - DNA, 19 bp, Mus musculus
  siRNA target sequence for Evx2 (NM_007967.1,400-418).
gcaccgctcaaggaaaaca

SEQ ID NO: 443771 - DNA, 19 bp, Mus musculus
  siRNA target sequence for Evx2 (NM_007967.1,590-608).
cattcacccgcgaacagat

SEQ ID NO: 443772 - DNA, 19 bp, Mus musculus
  siRNA target sequence for Evx2 (NM_007967.1,827-845).
gcctaccctacccttttca

SEQ ID NO: 443773 - DNA, 19 bp, Mus musculus
  siRNA target sequence for Evx2 (NM_007967.1,971-989).
ccttccgtgcgctttcaca

SEQ ID NO: 443774 - DNA, 19 bp, Mus musculus
  siRNA target sequence for Evx2 (NM_007967.1,979-997).
gcgctttcacatccttatt

SEQ ID NO: 443775 - DNA, 19 bp, Mus musculus
  siRNA target sequence for F830020C16Rik (NM_177338.3,437-455).
cgggatgaccaaacatgaa

SEQ ID NO: 443776 - DNA, 19 bp, Mus musculus
  siRNA target sequence for F830020C16Rik (NM_177338.3,438-456).
gggatgaccaaacatgaaa

SEQ ID NO: 443777 - DNA, 19 bp, Mus musculus
  siRNA target sequence for F830020C16Rik (NM_177338.3,439-457).
ggatgaccaaacatgaaat

SEQ ID NO: 443778 - DNA, 19 bp, Mus musculus
  siRNA target sequence for F830020C16Rik (NM_177338.3,443-461).
gaccaaacatgaaatcctt

SEQ ID NO: 443779 - DNA, 19 bp, Mus musculus
  siRNA target sequence for F830020C16Rik (NM_177338.3,458-476).
ccttcatgcattagaaact

SEQ ID NO: 443780 - DNA, 19 bp, Mus musculus
  siRNA target sequence for F830020C16Rik (NM_177338.3,459-477).
cttcatgcattagaaactt

SEQ ID NO: 443781 - DNA, 19 bp, Mus musculus
  siRNA target sequence for F830020C16Rik (NM_177338.3,497-515).
gcatagtgataaatttgga

SEQ ID NO: 443782 - DNA, 19 bp, Mus musculus
  siRNA target sequence for F830020C16Rik (NM_177338.3,527-545).
ctacgggggaagctcatat

SEQ ID NO: 443783 - DNA, 19 bp, Mus musculus
  siRNA target sequence for F830020C16Rik (NM_177338.3,625-643).
catcacccagcaacagtta

SEQ ID NO: 443784 - DNA, 19 bp, Mus musculus
  siRNA target sequence for F830020C16Rik (NM_177338.3,630-648).
cccagcaacagttacgata

SEQ ID NO: 443785 - DNA, 19 bp, Mus musculus
  siRNA target sequence for F830020C16Rik (NM_177338.3,661-679).
cttgcactaccaatcaaaa

SEQ ID NO: 443786 - DNA, 19 bp, Mus musculus
  siRNA target sequence for F830020C16Rik (NM_177338.3,685-703).
gggagaacaatgatcgatt

SEQ ID NO: 443787 - DNA, 19 bp, Mus musculus
  siRNA target sequence for F830020C16Rik (NM_177338.3,730-748).
catctcgctaccatgcaaa

SEQ ID NO: 443788 - DNA, 19 bp, Mus musculus
  siRNA target sequence for F830020C16Rik (NM_177338.3,794-812).
cctagatgtagatgataaa

SEQ ID NO: 443789 - DNA, 19 bp, Mus musculus
  siRNA target sequence for F830020C16Rik (NM_177338.3,807-825).
gataaagtggaggaattaa

SEQ ID NO: 443790 - DNA, 19 bp, Mus musculus
  siRNA target sequence for F830020C16Rik (NM_177338.3,870-888).
cttgccaatcggaggattt

SEQ ID NO: 443791 - DNA, 19 bp, Mus musculus
  siRNA target sequence for F830020C16Rik (NM_177338.3,986-1004).
ggcgttctaccgatggtat

SEQ ID NO: 443792 - DNA, 19 bp, Mus musculus
  siRNA target sequence for F830020C16Rik (NM_177338.3,1023-1041).
cctggggctacgctaagta

SEQ ID NO: 443793 - DNA, 19 bp, Mus musculus
  siRNA target sequence for F830020C16Rik (NM_177338.3,1024-1042).
ctggggctacgctaagtat

SEQ ID NO: 443794 - DNA, 19 bp, Mus musculus
  siRNA target sequence for F830020C16Rik (NM_177338.3,1045-1063).
gacctgcccccattccaat

SEQ ID NO: 443795 - DNA, 19 bp, Mus musculus
  siRNA target sequence for F830020C16Rik (NM_177338.3,1125-1143).
cttcgacgagggagtagat

SEQ ID NO: 443796 - DNA, 19 bp, Mus musculus
  siRNA target sequence for F830020C16Rik (NM_177338.3,1128-1146).
cgacgagggagtagattta

SEQ ID NO: 443797 - DNA, 19 bp, Mus musculus
  siRNA target sequence for F830020C16Rik (NM_177338.3,1131-1149).
cgagggagtagatttacct

SEQ ID NO: 443798 - DNA, 19 bp, Mus musculus
  siRNA target sequence for F830020C16Rik (NM_177338.3,1172-1190).
catggaaagttacttcaat

SEQ ID NO: 443799 - DNA, 19 bp, Mus musculus
  siRNA target sequence for F830020C16Rik (NM_177338.3,1240-1258).
gcaatgcagtcatacagaa

SEQ ID NO: 443800 - DNA, 19 bp, Mus musculus
  siRNA target sequence for F830020C16Rik (NM_177338.3,1295-1313).
ctctctgaaagtatataat

SEQ ID NO: 443801 - DNA, 19 bp, Mus musculus
  siRNA target sequence for F830020C16Rik (NM_177338.3,1305-1323).
gtatataattggtttgcta

SEQ ID NO: 443802 - DNA, 19 bp, Mus musculus
  siRNA target sequence for F830020C16Rik (NM_177338.3,1396-1414).
gtccaggaggccattccaa

SEQ ID NO: 443803 - DNA, 19 bp, Mus musculus
  siRNA target sequence for F830020C16Rik (NM_177338.3,1513-1531).
ccgtcaaccacactatctt

SEQ ID NO: 443804 - DNA, 19 bp, Mus musculus
  siRNA target sequence for F830020C16Rik (NM_177338.3,1542-1560).
cggcagggagccaatgaaa

SEQ ID NO: 443805 - DNA, 19 bp, Mus musculus
  siRNA target sequence for Fbxw7 (NM_080428.2,233-251).
cggttccgctgcctaatct

SEQ ID NO: 443806 - DNA, 19 bp, Mus musculus
  siRNA target sequence for Fbxw7 (NM_080428.2,239-257).
cgctgcctaatcttccttt

SEQ ID NO: 443807 - DNA, 19 bp, Mus musculus
  siRNA target sequence for Fbxw7 (NM_080428.2,240-258).
gctgcctaatcttcctttt

SEQ ID NO: 443808 - DNA, 19 bp, Mus musculus
  siRNA target sequence for Fbxw7 (NM_080428.2,270-288).
gagcatgtccacgttagaa

SEQ ID NO: 443809 - DNA, 19 bp, Mus musculus
  siRNA target sequence for Fbxw7 (NM_080428.2,281-299).
cgttagaatctgtgacata

SEQ ID NO: 443810 - DNA, 19 bp, Mus musculus
  siRNA target sequence for Fbxw7 (NM_080428.2,383-401).
cagaaaatatgggtttcta

SEQ ID NO: 443811 - DNA, 19 bp, Mus musculus
  siRNA target sequence for Fbxw7 (NM_080428.2,393-411).
gggtttctacggcacatta

SEQ ID NO: 443812 - DNA, 19 bp, Mus musculus
  siRNA target sequence for Fbxw7 (NM_080428.2,394-412).
ggtttctacggcacattaa

SEQ ID NO: 443813 - DNA, 19 bp, Mus musculus
  siRNA target sequence for Fbxw7 (NM_080428.2,395-413).
gtttctacggcacattaaa

SEQ ID NO: 443814 - DNA, 19 bp, Mus musculus
  siRNA target sequence for Fbxw7 (NM_080428.2,402-420).
cggcacattaaaaatgatt

SEQ ID NO: 443815 - DNA, 19 bp, Mus musculus
  siRNA target sequence for Fbxw7 (NM_080428.2,659-677).
ggagcggaccagagaagtt

SEQ ID NO: 443816 - DNA, 19 bp, Mus musculus
  siRNA target sequence for Fbxw7 (NM_080428.2,713-731).
caacacaagtgaagcatat

SEQ ID NO: 443817 - DNA, 19 bp, Mus musculus
  siRNA target sequence for Fbxw7 (NM_080428.2,716-734).
cacaagtgaagcatatgat

SEQ ID NO: 443818 - DNA, 19 bp, Mus musculus
  siRNA target sequence for Fbxw7 (NM_080428.2,773-791).
ccttgcttcctaaagagtt

SEQ ID NO: 443819 - DNA, 19 bp, Mus musculus
  siRNA target sequence for Fbxw7 (NM_080428.2,922-940).
gaaccgttgcacatcaaga

SEQ ID NO: 443820 - DNA, 19 bp, Mus musculus
  siRNA target sequence for Fbxw7 (NM_080428.2,925-943).
ccgttgcacatcaagagaa

SEQ ID NO: 443821 - DNA, 19 bp, Mus musculus
  siRNA target sequence for Fbxw7 (NM_080428.2,1022-1040).
ggagacgaggagaactcaa

SEQ ID NO: 443822 - DNA, 19 bp, Mus musculus
  siRNA target sequence for Fbxw7 (NM_080428.2,1023-1041).
gagacgaggagaactcaaa

SEQ ID NO: 443823 - DNA, 19 bp, Mus musculus
  siRNA target sequence for Fbxw7 (NM_080428.2,1077-1095).
gatcacatgcctacagttt

SEQ ID NO: 443824 - DNA, 19 bp, Mus musculus
  siRNA target sequence for Fbxw7 (NM_080428.2,1107-1125).
catagttagtggttctgat

SEQ ID NO: 443825 - DNA, 19 bp, Mus musculus
  siRNA target sequence for Fbxw7 (NM_080428.2,1117-1135).
ggttctgatgacaacactt

SEQ ID NO: 443826 - DNA, 19 bp, Mus musculus
  siRNA target sequence for Fbxw7 (NM_080428.2,1118-1136).
gttctgatgacaacacttt

SEQ ID NO: 443827 - DNA, 19 bp, Mus musculus
  siRNA target sequence for Fbxw7 (NM_080428.2,1244-1262).
ctgaccggactctcaaagt

SEQ ID NO: 443828 - DNA, 19 bp, Mus musculus
  siRNA target sequence for Fbxw7 (NM_080428.2,1246-1264).
gaccggactctcaaagtgt

SEQ ID NO: 443829 - DNA, 19 bp, Mus musculus
  siRNA target sequence for Fbxw7 (NM_080428.2,1336-1354).
catgaaaaaagggttgtaa

SEQ ID NO: 443830 - DNA, 19 bp, Mus musculus
  siRNA target sequence for Fbxw7 (NM_080428.2,1436-1454).
cggtccgctgcgttcagta

SEQ ID NO: 443831 - DNA, 19 bp, Mus musculus
  siRNA target sequence for Fbxw7 (NM_080428.2,1437-1455).
ggtccgctgcgttcagtat

SEQ ID NO: 443832 - DNA, 19 bp, Mus musculus
  siRNA target sequence for Fbxw7 (NM_080428.2,1440-1458).
ccgctgcgttcagtatgat

SEQ ID NO: 443833 - DNA, 19 bp, Mus musculus
  siRNA target sequence for Fbxw7 (NM_080428.2,1467-1485).
ggttgttagtggagcttat

SEQ ID NO: 443834 - DNA, 19 bp, Mus musculus
  siRNA target sequence for Fbxw7 (NM_080428.2,1535-1553).
cgttacagggacacactaa

SEQ ID NO: 443835 - DNA, 19 bp, Mus musculus
  siRNA target sequence for Fbxw7 (NM_080428.2,1536-1554).
gttacagggacacactaat

SEQ ID NO: 443836 - DNA, 19 bp, Mus musculus
  siRNA target sequence for Fbxw7 (NM_080428.2,1548-1566).
cactaatagagtctattca

SEQ ID NO: 443837 - DNA, 19 bp, Mus musculus
  siRNA target sequence for Fbxw7 (NM_080428.2,1590-1608).
ggtgagtggatctcttgat

SEQ ID NO: 443838 - DNA, 19 bp, Mus musculus
  siRNA target sequence for Fbxw7 (NM_080428.2,1591-1609).
gtgagtggatctcttgata

SEQ ID NO: 443839 - DNA, 19 bp, Mus musculus
  siRNA target sequence for Fbxw7 (NM_080428.2,1593-1611).
gagtggatctcttgataca

SEQ ID NO: 443840 - DNA, 19 bp, Mus musculus
  siRNA target sequence for Fbxw7 (NM_080428.2,1598-1616).
gatctcttgatacatcaat

SEQ ID NO: 443841 - DNA, 19 bp, Mus musculus
  siRNA target sequence for Fbxw7 (NM_080428.2,1632-1650).
ggagacagggaattgtatt

SEQ ID NO: 443842 - DNA, 19 bp, Mus musculus
  siRNA target sequence for Fbxw7 (NM_080428.2,1663-1681).
ggacaccagtcattaacga

SEQ ID NO: 443843 - DNA, 19 bp, Mus musculus
  siRNA target sequence for Fbxw7 (NM_080428.2,1679-1697).
cgagtggaatggaactcaa

SEQ ID NO: 443844 - DNA, 19 bp, Mus musculus
  siRNA target sequence for Fbxw7 (NM_080428.2,1680-1698).
gagtggaatggaactcaaa

SEQ ID NO: 443845 - DNA, 19 bp, Mus musculus
  siRNA target sequence for Fbxw7 (NM_080428.2,1726-1744).
gattctacagttaagatct

SEQ ID NO: 443846 - DNA, 19 bp, Mus musculus
  siRNA target sequence for Fbxw7 (NM_080428.2,1740-1758).
gatctgggatatcaaaaca

SEQ ID NO: 443847 - DNA, 19 bp, Mus musculus
  siRNA target sequence for Fbxw7 (NM_080428.2,1764-1782).
gtgtttacaaactttgcaa

SEQ ID NO: 443848 - DNA, 19 bp, Mus musculus
  siRNA target sequence for Fbxw7 (NM_080428.2,1948-1966).
cggatcagggcctcaaaca

SEQ ID NO: 443849 - DNA, 19 bp, Mus musculus
  siRNA target sequence for Fbxw7 (NM_080428.2,1984-2002).
gtcgggagtcggaatggaa

SEQ ID NO: 443850 - DNA, 19 bp, Mus musculus
  siRNA target sequence for Fkh3 (NM_010226.1,132-150).
gcccccttacagctacata

SEQ ID NO: 443851 - DNA, 19 bp, Mus musculus
  siRNA target sequence for Fkh3 (NM_010226.1,365-383).
cggactgccacgacatgtt

SEQ ID NO: 443852 - DNA, 19 bp, Mus musculus
  siRNA target sequence for Fkh3 (NM_010226.1,660-678).
gatgtgctcggcaaagtct

SEQ ID NO: 443853 - DNA, 19 bp, Mus musculus
  siRNA target sequence for Fkh3 (NM_010226.1,723-741).
cccagcattcggcttttca

SEQ ID NO: 443854 - DNA, 19 bp, Mus musculus
  siRNA target sequence for Fkh3 (NM_010226.1,724-742).
ccagcattcggcttttcat

SEQ ID NO: 443855 - DNA, 19 bp, Mus musculus
  siRNA target sequence for Fkh3 (NM_010226.1,825-843).
ccggatgcagacactgaat

SEQ ID NO: 443856 - DNA, 19 bp, Mus musculus
  siRNA target sequence for Fkh3 (NM_010226.1,826-844).
cggatgcagacactgaatt

SEQ ID NO: 443857 - DNA, 19 bp, Mus musculus
  siRNA target sequence for Fkh3 (NM_010226.1,827-845).
ggatgcagacactgaattt

SEQ ID NO: 443858 - DNA, 19 bp, Mus musculus
  siRNA target sequence for Fkh3 (NM_010226.1,948-966).
gccggctgactccaaagaa

SEQ ID NO: 443859 - DNA, 19 bp, Mus musculus
  siRNA target sequence for Fkh3 (NM_010226.1,1019-1037).
gattacccccctgtcttta

SEQ ID NO: 443860 - DNA, 19 bp, Mus musculus
  siRNA target sequence for Fkh3 (NM_010226.1,1039-1057).
cggactccgggaatgttct

SEQ ID NO: 443861 - DNA, 19 bp, Mus musculus
  siRNA target sequence for Fkh3 (NM_010226.1,1043-1061).
ctccgggaatgttcttctt

SEQ ID NO: 443862 - DNA, 19 bp, Mus musculus
  siRNA target sequence for Fli1 (NM_008026.1,286-304).
cgatcagtccctttttgat

SEQ ID NO: 443863 - DNA, 19 bp, Mus musculus
  siRNA target sequence for Fli1 (NM_008026.1,287-305).
gatcagtccctttttgatt

SEQ ID NO: 443864 - DNA, 19 bp, Mus musculus
  siRNA target sequence for Fli1 (NM_008026.1,329-347).
ctccccaaggcagatatga

SEQ ID NO: 443865 - DNA, 19 bp, Mus musculus
  siRNA target sequence for Fli1 (NM_008026.1,371-389).
gggcagccccacaaaatca

SEQ ID NO: 443866 - DNA, 19 bp, Mus musculus
  siRNA target sequence for Fli1 (NM_008026.1,447-465).
gggagtatgaccacatgaa

SEQ ID NO: 443867 - DNA, 19 bp, Mus musculus
  siRNA target sequence for Fli1 (NM_008026.1,448-466).
ggagtatgaccacatgaat

SEQ ID NO: 443868 - DNA, 19 bp, Mus musculus
  siRNA target sequence for Fli1 (NM_008026.1,495-513).
gtgtcagcaaatgtaacaa

SEQ ID NO: 443869 - DNA, 19 bp, Mus musculus
  siRNA target sequence for Fli1 (NM_008026.1,530-548).
gaagccaaccccatgaact

SEQ ID NO: 443870 - DNA, 19 bp, Mus musculus
  siRNA target sequence for Fli1 (NM_008026.1,534-552).
ccaaccccatgaactataa

SEQ ID NO: 443871 - DNA, 19 bp, Mus musculus
  siRNA target sequence for Fli1 (NM_008026.1,535-553).
caaccccatgaactataat

SEQ ID NO: 443872 - DNA, 19 bp, Mus musculus
  siRNA target sequence for Fli1 (NM_008026.1,539-557).
cccatgaactataatagct

SEQ ID NO: 443873 - DNA, 19 bp, Mus musculus
  siRNA target sequence for Fli1 (NM_008026.1,540-558).
ccatgaactataatagcta

SEQ ID NO: 443874 - DNA, 19 bp, Mus musculus
  siRNA target sequence for Fli1 (NM_008026.1,601-619).
caacgaacggagagtcatt

SEQ ID NO: 443875 - DNA, 19 bp, Mus musculus
  siRNA target sequence for Fli1 (NM_008026.1,692-710).
ggattgatggagattgaca

SEQ ID NO: 443876 - DNA, 19 bp, Mus musculus
  siRNA target sequence for Fli1 (NM_008026.1,731-749).
gatggcaaggaattgtgta

SEQ ID NO: 443877 - DNA, 19 bp, Mus musculus
  siRNA target sequence for Fli1 (NM_008026.1,871-889).
ccagtcctcacgactgaat

SEQ ID NO: 443878 - DNA, 19 bp, Mus musculus
  siRNA target sequence for Fli1 (NM_008026.1,876-894).
cctcacgactgaatgtcaa

SEQ ID NO: 443879 - DNA, 19 bp, Mus musculus
  siRNA target sequence for Fli1 (NM_008026.1,892-910).
caaggaagacccttcttat

SEQ ID NO: 443880 - DNA, 19 bp, Mus musculus
  siRNA target sequence for Fli1 (NM_008026.1,896-914).
gaagacccttcttatgact

SEQ ID NO: 443881 - DNA, 19 bp, Mus musculus
  siRNA target sequence for Fli1 (NM_008026.1,926-944).
ggagcatggaacaataata

SEQ ID NO: 443882 - DNA, 19 bp, Mus musculus
  siRNA target sequence for Fli1 (NM_008026.1,1017-1035).
cccagccagatccttatca

SEQ ID NO: 443883 - DNA, 19 bp, Mus musculus
  siRNA target sequence for Fli1 (NM_008026.1,1019-1037).
cagccagatccttatcaga

SEQ ID NO: 443884 - DNA, 19 bp, Mus musculus
  siRNA target sequence for Fli1 (NM_008026.1,1127-1145).
gccaacgccagctgtatca

SEQ ID NO: 443885 - DNA, 19 bp, Mus musculus
  siRNA target sequence for Fli1 (NM_008026.1,1369-1387).
gacatccatgtacaagtat

SEQ ID NO: 443886 - DNA, 19 bp, Mus musculus
  siRNA target sequence for Fli1 (NM_008026.1,1519-1537).
ccccactgctgggatctat

SEQ ID NO: 443887 - DNA, 19 bp, Mus musculus
  siRNA target sequence for Fli1 (NM_008026.1,1524-1542).
ctgctgggatctatccaaa

SEQ ID NO: 443888 - DNA, 19 bp, Mus musculus
  siRNA target sequence for Foxa1 (NM_008259.1,696-714).
ggcgacgccaagacattca

SEQ ID NO: 443889 - DNA, 19 bp, Mus musculus
  siRNA target sequence for Foxa1 (NM_008259.1,697-715).
gcgacgccaagacattcaa

SEQ ID NO: 443890 - DNA, 19 bp, Mus musculus
  siRNA target sequence for Foxa1 (NM_008259.1,1265-1283).
gtctccagcgtcttcatct

SEQ ID NO: 443891 - DNA, 19 bp, Mus musculus
  siRNA target sequence for Foxa1 (NM_008259.1,1484-1502).
gctgcagtactctccttat

SEQ ID NO: 443892 - DNA, 19 bp, Mus musculus
  siRNA target sequence for Foxa1 (NM_008259.1,1610-1628).
cagacccgtgctaaatact

SEQ ID NO: 443893 - DNA, 19 bp, Mus musculus
  siRNA target sequence for Foxa2 (NM_010446.1,172-190).
gagcccgagggctactctt

SEQ ID NO: 443894 - DNA, 19 bp, Mus musculus
  siRNA target sequence for Foxa2 (NM_010446.1,188-206).
cttccgtgagcaacatgaa

SEQ ID NO: 443895 - DNA, 19 bp, Mus musculus
  siRNA target sequence for Foxa2 (NM_010446.1,484-502).
gccccctacgccaacatga

SEQ ID NO: 443896 - DNA, 19 bp, Mus musculus
  siRNA target sequence for Foxa2 (NM_010446.1,485-503).
ccccctacgccaacatgaa

SEQ ID NO: 443897 - DNA, 19 bp, Mus musculus
  siRNA target sequence for Foxa2 (NM_010446.1,487-505).
ccctacgccaacatgaact

SEQ ID NO: 443898 - DNA, 19 bp, Mus musculus
  siRNA target sequence for Foxa2 (NM_010446.1,545-563).
ctcgggaccccaagacata

SEQ ID NO: 443899 - DNA, 19 bp, Mus musculus
  siRNA target sequence for Foxa2 (NM_010446.1,1064-1082).
gtggcctaagcgagctaaa

SEQ ID NO: 443900 - DNA, 19 bp, Mus musculus
  siRNA target sequence for Foxa2 (NM_010446.1,1262-1280).
cgtccgagcagcaacatca

SEQ ID NO: 443901 - DNA, 19 bp, Mus musculus
  siRNA target sequence for Foxa2 (NM_010446.1,1459-1477).
gtgtactccaggcctatta

SEQ ID NO: 443902 - DNA, 19 bp, Mus musculus
  siRNA target sequence for Foxa3 (NM_008260.1,467-485).
ccacgccaaaccaccatat

SEQ ID NO: 443903 - DNA, 19 bp, Mus musculus
  siRNA target sequence for Foxa3 (NM_008260.1,468-486).
cacgccaaaccaccatatt

SEQ ID NO: 443904 - DNA, 19 bp, Mus musculus
  siRNA target sequence for Foxa3 (NM_008260.1,471-489).
gccaaaccaccatattcct

SEQ ID NO: 443905 - DNA, 19 bp, Mus musculus
  siRNA target sequence for Foxa3 (NM_008260.1,537-555).
ctgaccctgagtgaaatct

SEQ ID NO: 443906 - DNA, 19 bp, Mus musculus
  siRNA target sequence for Foxa3 (NM_008260.1,958-976).
cttcgtccacaccttattt

SEQ ID NO: 443907 - DNA, 19 bp, Mus musculus
  siRNA target sequence for Foxa3 (NM_008260.1,1011-1029).
gatgcgccctataacttca

SEQ ID NO: 443908 - DNA, 19 bp, Mus musculus
  siRNA target sequence for Foxa3 (NM_008260.1,1067-1085).
gacatcgacaccttccaaa

SEQ ID NO: 443909 - DNA, 19 bp, Mus musculus
  siRNA target sequence for Foxa3 (NM_008260.1,1123-1141).
gggagcctggagtctacta

SEQ ID NO: 443910 - DNA, 19 bp, Mus musculus
  siRNA target sequence for Foxa3 (NM_008260.1,1157-1175).
ccgctctctgcttaatgca

SEQ ID NO: 443911 - DNA, 19 bp, Mus musculus
  siRNA target sequence for Foxa3 (NM_008260.1,1158-1176).
cgctctctgcttaatgcat

SEQ ID NO: 443912 - DNA, 19 bp, Mus musculus
  siRNA target sequence for Foxb1 (NM_022378.2,438-456).
ccgctcagcgagatctaca

SEQ ID NO: 443913 - DNA, 19 bp, Mus musculus
  siRNA target sequence for Foxb1 (NM_022378.2,838-856).
cctttgctatcgagaacat

SEQ ID NO: 443914 - DNA, 19 bp, Mus musculus
  siRNA target sequence for Foxb1 (NM_022378.2,927-945).
cctctccctaaccagttaa

SEQ ID NO: 443915 - DNA, 19 bp, Mus musculus
  siRNA target sequence for Foxb1 (NM_022378.2,930-948).
ctccctaaccagttaacta

SEQ ID NO: 443916 - DNA, 19 bp, Mus musculus
  siRNA target sequence for Foxb1 (NM_022378.2,970-988).
ctggatggccacatgtgta

SEQ ID NO: 443917 - DNA, 19 bp, Mus musculus
  siRNA target sequence for Foxb2 (NM_008023.1,194-212).
ccacggccagggaagagtt

SEQ ID NO: 443918 - DNA, 19 bp, Mus musculus
  siRNA target sequence for Foxb2 (NM_008023.1,210-228).
gttcctacagcgaccaaaa

SEQ ID NO: 443919 - DNA, 19 bp, Mus musculus
  siRNA target sequence for Foxb2 (NM_008023.1,462-480).
ctgactgcggtgacatgtt

SEQ ID NO: 443920 - DNA, 19 bp, Mus musculus
  siRNA target sequence for Foxb2 (NM_008023.1,705-723).
cgcacatggtgccctattt

SEQ ID NO: 443921 - DNA, 19 bp, Mus musculus
  siRNA target sequence for Foxb2 (NM_008023.1,966-984).
ccaccacaggcttcaaaca

SEQ ID NO: 443922 - DNA, 19 bp, Mus musculus
  siRNA target sequence for Foxb2 (NM_008023.1,983-1001).
catccgttcgccatagaga

SEQ ID NO: 443923 - DNA, 19 bp, Mus musculus
  siRNA target sequence for Foxb2 (NM_008023.1,987-1005).
cgttcgccatagagaacat

SEQ ID NO: 443924 - DNA, 19 bp, Mus musculus
  siRNA target sequence for Foxb2 (NM_008023.1,1092-1110).
gccagctcagcaatgttgt

SEQ ID NO: 443925 - DNA, 19 bp, Mus musculus
  siRNA target sequence for Foxb2 (NM_008023.1,1127-1145).
catgttggcgtgatggatt

SEQ ID NO: 443926 - DNA, 19 bp, Mus musculus
  siRNA target sequence for Foxc1 (NM_008592.1,2062-2080).
cactcggtgcgggaaatgt

SEQ ID NO: 443927 - DNA, 19 bp, Mus musculus
  siRNA target sequence for Foxc1 (NM_008592.1,2089-2107).
cagcggatcggcttgaaca

SEQ ID NO: 443928 - DNA, 19 bp, Mus musculus
  siRNA target sequence for Foxc1 (NM_008592.1,2092-2110).
cggatcggcttgaacaact

SEQ ID NO: 443929 - DNA, 19 bp, Mus musculus
  siRNA target sequence for Foxc1 (NM_008592.1,2187-2205).
cgtctatgactgtagcaaa

SEQ ID NO: 443930 - DNA, 19 bp, Mus musculus
  siRNA target sequence for Foxc1 (NM_008592.1,2188-2206).
gtctatgactgtagcaaat

SEQ ID NO: 443931 - DNA, 19 bp, Mus musculus
  siRNA target sequence for Foxc2 (NM_013519.1,68-86).
ggagtggtaccctatttga

SEQ ID NO: 443932 - DNA, 19 bp, Mus musculus
  siRNA target sequence for Foxc2 (NM_013519.1,78-96).
cctatttgagtgagcaaaa

SEQ ID NO: 443933 - DNA, 19 bp, Mus musculus
  siRNA target sequence for Foxc2 (NM_013519.1,1018-1036).
cagtatgcgggctatgagt

SEQ ID NO: 443934 - DNA, 19 bp, Mus musculus
  siRNA target sequence for Foxc2 (NM_013519.1,1331-1349).
gcaacccaacagcaaactt

SEQ ID NO: 443935 - DNA, 19 bp, Mus musculus
  siRNA target sequence for Foxc2 (NM_013519.1,1332-1350).
caacccaacagcaaacttt

SEQ ID NO: 443936 - DNA, 19 bp, Mus musculus
  siRNA target sequence for Foxc2 (NM_013519.1,1353-1371).
ccaacgtccgggagatgtt

SEQ ID NO: 443937 - DNA, 19 bp, Mus musculus
  siRNA target sequence for Foxc2 (NM_013519.1,1491-1509).
cttacgactgcaccaaata

SEQ ID NO: 443938 - DNA, 19 bp, Mus musculus
  siRNA target sequence for Foxd1 (NM_008242.1,988-1006).
cggagtccgcagatatgtt

SEQ ID NO: 443939 - DNA, 19 bp, Mus musculus
  siRNA target sequence for Foxd1 (NM_008242.1,1706-1724).
gaactttactgctaggatt

SEQ ID NO: 443940 - DNA, 19 bp, Mus musculus
  siRNA target sequence for Foxd1 (NM_008242.1,1716-1734).
gctaggatttccaattgtt

SEQ ID NO: 443941 - DNA, 19 bp, Mus musculus
  siRNA target sequence for Foxd2 (NM_008593.1,434-452).
ctggtgaaaccaccttatt

SEQ ID NO: 443942 - DNA, 19 bp, Mus musculus
  siRNA target sequence for Foxd2 (NM_008593.1,675-693).
cggagtcggccgacatgtt

SEQ ID NO: 443943 - DNA, 19 bp, Mus musculus
  siRNA target sequence for Foxd2 (NM_008593.1,1128-1146).
gttgcgccaaggctttcta

SEQ ID NO: 443944 - DNA, 19 bp, Mus musculus
  siRNA target sequence for Foxd3 (NM_010425.1,945-963).
cccagtccgaggacatgtt

SEQ ID NO: 443945 - DNA, 19 bp, Mus musculus
  siRNA target sequence for Foxd3 (NM_010425.1,1360-1378).
gcaccacgtcgctcatcaa

SEQ ID NO: 443946 - DNA, 19 bp, Mus musculus
  siRNA target sequence for Foxf1a (NM_010426.1,141-159).
cgagatctaccagtttctt

SEQ ID NO: 443947 - DNA, 19 bp, Mus musculus
  siRNA target sequence for Foxf1a (NM_010426.1,298-316).
gatccggctagcgagttta

SEQ ID NO: 443948 - DNA, 19 bp, Mus musculus
  siRNA target sequence for Foxf1a (NM_010426.1,301-319).
ccggctagcgagtttatgt

SEQ ID NO: 443949 - DNA, 19 bp, Mus musculus
  siRNA target sequence for Foxf1a (NM_010426.1,302-320).
cggctagcgagtttatgtt

SEQ ID NO: 443950 - DNA, 19 bp, Mus musculus
  siRNA target sequence for Foxf1a (NM_010426.1,492-510).
cggcttgggcatgatgaat

SEQ ID NO: 443951 - DNA, 19 bp, Mus musculus
  siRNA target sequence for Foxf1a (NM_010426.1,694-712).
gagccgcacgccgtttact

SEQ ID NO: 443952 - DNA, 19 bp, Mus musculus
  siRNA target sequence for Foxf1a (NM_010426.1,901-919).
ggcatccctcggtatcact

SEQ ID NO: 443953 - DNA, 19 bp, Mus musculus
  siRNA target sequence for Foxf1a (NM_010426.1,995-1013).
caacaggcggaggatctta

SEQ ID NO: 443954 - DNA, 19 bp, Mus musculus
  siRNA target sequence for Foxf1a (NM_010426.1,998-1016).
caggcggaggatcttacta

SEQ ID NO: 443955 - DNA, 19 bp, Mus musculus
  siRNA target sequence for Foxf1a (NM_010426.1,1001-1019).
gcggaggatcttactatca

SEQ ID NO: 443956 - DNA, 19 bp, Mus musculus
  siRNA target sequence for Foxf2 (NM_010225.1,473-491).
gcctcgtcctcttctaact

SEQ ID NO: 443957 - DNA, 19 bp, Mus musculus
  siRNA target sequence for Foxf2 (NM_010225.1,835-853).
ggccagcgaattcatgttt

SEQ ID NO: 443958 - DNA, 19 bp, Mus musculus
  siRNA target sequence for Foxf2 (NM_010225.1,895-913).
gaagtgccaggctctcaaa

SEQ ID NO: 443959 - DNA, 19 bp, Mus musculus
  siRNA target sequence for Foxf2 (NM_010225.1,1015-1033).
cggtcaaggcggttatggt

SEQ ID NO: 443960 - DNA, 19 bp, Mus musculus
  siRNA target sequence for Foxf2 (NM_010225.1,1369-1387).
cctgacgccaagcagtaat

SEQ ID NO: 443961 - DNA, 19 bp, Mus musculus
  siRNA target sequence for Foxf2 (NM_010225.1,1529-1547).
gatttcgtcctcaatttca

SEQ ID NO: 443962 - DNA, 19 bp, Mus musculus
  siRNA target sequence for Foxf2 (NM_010225.1,1540-1558).
caatttcaatggcatttct

SEQ ID NO: 443963 - DNA, 19 bp, Mus musculus
  siRNA target sequence for Foxf2 (NM_010225.1,1572-1590).
ccgctagtggctcttatta

SEQ ID NO: 443964 - DNA, 19 bp, Mus musculus
  siRNA target sequence for Foxf2 (NM_010225.1,1573-1591).
cgctagtggctcttattat

SEQ ID NO: 443965 - DNA, 19 bp, Mus musculus
  siRNA target sequence for Foxf2 (NM_010225.1,1575-1593).
ctagtggctcttattatca

SEQ ID NO: 443966 - DNA, 19 bp, Mus musculus
  siRNA target sequence for Foxf2 (NM_010225.1,1606-1624).
gagcgtgtgccaagatatt

SEQ ID NO: 443967 - DNA, 19 bp, Mus musculus
  siRNA target sequence for Foxf2 (NM_010225.1,1608-1626).
gcgtgtgccaagatattaa

SEQ ID NO: 443968 - DNA, 19 bp, Mus musculus
  siRNA target sequence for Foxf2 (NM_010225.1,1619-1637).
gatattaagccctgtgtta

SEQ ID NO: 443969 - DNA, 19 bp, Mus musculus
  siRNA target sequence for Foxg1 (NM_008241.1,1095-1113).
gctacaacgcgctcatcat

SEQ ID NO: 443970 - DNA, 19 bp, Mus musculus
  siRNA target sequence for Foxg1 (NM_008241.1,1149-1167).
cgctcaatggcatctatga

SEQ ID NO: 443971 - DNA, 19 bp, Mus musculus
  siRNA target sequence for Foxg1 (NM_008241.1,1566-1584).
gctccgtgttgactcaaaa

SEQ ID NO: 443972 - DNA, 19 bp, Mus musculus
  siRNA target sequence for Foxg1 (NM_008241.1,1775-1793).
ggccagaccagttactttt

SEQ ID NO: 443973 - DNA, 19 bp, Mus musculus
  siRNA target sequence for Foxg1 (NM_008241.1,1804-1822).
cccgcacccgtcaatgact

SEQ ID NO: 443974 - DNA, 19 bp, Mus musculus
  siRNA target sequence for Foxg1 (NM_008241.1,1805-1823).
ccgcacccgtcaatgactt

SEQ ID NO: 443975 - DNA, 19 bp, Mus musculus
  siRNA target sequence for Foxg1 (NM_008241.1,1894-1912).
gccctgtgagtctttaaga

SEQ ID NO: 443976 - DNA, 19 bp, Mus musculus
  siRNA target sequence for Foxg1 (NM_008241.1,1947-1965).
ggggactgtctgattattt

SEQ ID NO: 443977 - DNA, 19 bp, Mus musculus
  siRNA target sequence for Foxg1 (NM_008241.1,1949-1967).
ggactgtctgattatttca

SEQ ID NO: 443978 - DNA, 19 bp, Mus musculus
  siRNA target sequence for Foxg1 (NM_008241.1,1989-2007).
cttccaaccctttaataca

SEQ ID NO: 443979 - DNA, 19 bp, Mus musculus
  siRNA target sequence for Foxh1 (NM_007989.1,176-194).
gatacctacggcatgacaa

SEQ ID NO: 443980 - DNA, 19 bp, Mus musculus
  siRNA target sequence for Foxh1 (NM_007989.1,214-232).
gccatgatcgccttggtaa

SEQ ID NO: 443981 - DNA, 19 bp, Mus musculus
  siRNA target sequence for Foxh1 (NM_007989.1,215-233).
ccatgatcgccttggtaat

SEQ ID NO: 443982 - DNA, 19 bp, Mus musculus
  siRNA target sequence for Foxh1 (NM_007989.1,216-234).
catgatcgccttggtaatt

SEQ ID NO: 443983 - DNA, 19 bp, Mus musculus
  siRNA target sequence for Foxh1 (NM_007989.1,255-273).
gctgaaactggctcagatt

SEQ ID NO: 443984 - DNA, 19 bp, Mus musculus
  siRNA target sequence for Foxh1 (NM_007989.1,356-374).
ctaatcggtgcttccataa

SEQ ID NO: 443985 - DNA, 19 bp, Mus musculus
  siRNA target sequence for Foxh1 (NM_007989.1,800-818).
gttcccaaggggaggtaat

SEQ ID NO: 443986 - DNA, 19 bp, Mus musculus
  siRNA target sequence for Foxh1 (NM_007989.1,928-946).
ggacagctacccacttctt

SEQ ID NO: 443987 - DNA, 19 bp, Mus musculus
  siRNA target sequence for Foxh1 (NM_007989.1,929-947).
gacagctacccacttctta

SEQ ID NO: 443988 - DNA, 19 bp, Mus musculus
  siRNA target sequence for Foxh1 (NM_007989.1,954-972).
catctatacgcccaatgta

SEQ ID NO: 443989 - DNA, 19 bp, Mus musculus
  siRNA target sequence for Foxh1 (NM_007989.1,957-975).
ctatacgcccaatgtagta

SEQ ID NO: 443990 - DNA, 19 bp, Mus musculus
  siRNA target sequence for Foxh1 (NM_007989.1,1074-1092).
ggacctgctctgtgatcta

SEQ ID NO: 443991 - DNA, 19 bp, Mus musculus
  siRNA target sequence for Foxh1 (NM_007989.1,1108-1126).
ggagtaccacccaacaaga

SEQ ID NO: 443992 - DNA, 19 bp, Mus musculus
  siRNA target sequence for Foxh1 (NM_007989.1,1111-1129).
gtaccacccaacaagagta

SEQ ID NO: 443993 - DNA, 19 bp, Mus musculus
  siRNA target sequence for Foxh1 (NM_007989.1,1115-1133).
cacccaacaagagtatcta

SEQ ID NO: 443994 - DNA, 19 bp, Mus musculus
  siRNA target sequence for Foxh1 (NM_007989.1,1119-1137).
caacaagagtatctatgat

SEQ ID NO: 443995 - DNA, 19 bp, Mus musculus
  siRNA target sequence for Foxi1 (NM_023907.2,144-162).
ccggagatgaatctttact

SEQ ID NO: 443996 - DNA, 19 bp, Mus musculus
  siRNA target sequence for Foxi1 (NM_023907.2,145-163).
cggagatgaatctttacta

SEQ ID NO: 443997 - DNA, 19 bp, Mus musculus
  siRNA target sequence for Foxi1 (NM_023907.2,156-174).
ctttactatgagaatttct

SEQ ID NO: 443998 - DNA, 19 bp, Mus musculus
  siRNA target sequence for Foxi1 (NM_023907.2,410-428).
gctggtacgcccaccatat

SEQ ID NO: 443999 - DNA, 19 bp, Mus musculus
  siRNA target sequence for Foxi1 (NM_023907.2,411-429).
ctggtacgcccaccatatt

SEQ ID NO: 444000 - DNA, 19 bp, Mus musculus
  siRNA target sequence for Foxi1 (NM_023907.2,414-432).
gtacgcccaccatattcct

SEQ ID NO: 444001 - DNA, 19 bp, Mus musculus
  siRNA target sequence for Foxi1 (NM_023907.2,417-435).
cgcccaccatattcctatt

SEQ ID NO: 444002 - DNA, 19 bp, Mus musculus
  siRNA target sequence for Foxi1 (NM_023907.2,503-521).
gtacgtggccgacaacttt

SEQ ID NO: 444003 - DNA, 19 bp, Mus musculus
  siRNA target sequence for Foxi1 (NM_023907.2,621-639).
ccaggcaaagggaattact

SEQ ID NO: 444004 - DNA, 19 bp, Mus musculus
  siRNA target sequence for Foxi1 (NM_023907.2,792-810).
cctcaggaggtcttagaca

SEQ ID NO: 444005 - DNA, 19 bp, Mus musculus
  siRNA target sequence for Foxi1 (NM_023907.2,967-985).
cagagcctattgacaagat

SEQ ID NO: 444006 - DNA, 19 bp, Mus musculus
  siRNA target sequence for Foxi1 (NM_023907.2,986-1004).
ggggcagaactcactgaat

SEQ ID NO: 444007 - DNA, 19 bp, Mus musculus
  siRNA target sequence for Foxi1 (NM_023907.2,987-1005).
gggcagaactcactgaatt

SEQ ID NO: 444008 - DNA, 19 bp, Mus musculus
  siRNA target sequence for Foxi1 (NM_023907.2,1012-1030).
cctacaccccccttaccaa

SEQ ID NO: 444009 - DNA, 19 bp, Mus musculus
  siRNA target sequence for Foxj1 (NM_008240.1,769-787).
ctcagtggggccttcaaga

SEQ ID NO: 444010 - DNA, 19 bp, Mus musculus
  siRNA target sequence for Foxj1 (NM_008240.1,1057-1075).
ctggaaccactcaaaggta

SEQ ID NO: 444011 - DNA, 19 bp, Mus musculus
  siRNA target sequence for Foxj1 (NM_008240.1,1178-1196).
gagatgtggatcttacagt

SEQ ID NO: 444012 - DNA, 19 bp, Mus musculus
  siRNA target sequence for Foxj2 (NM_021899.2,489-507).
ctcagagccactattgaga

SEQ ID NO: 444013 - DNA, 19 bp, Mus musculus
  siRNA target sequence for Foxj2 (NM_021899.2,721-739).
gcgacaacttcccctatta

SEQ ID NO: 444014 - DNA, 19 bp, Mus musculus
  siRNA target sequence for Foxj2 (NM_021899.2,870-888).
gacatttcccggaagagaa

SEQ ID NO: 444015 - DNA, 19 bp, Mus musculus
  siRNA target sequence for Foxj2 (NM_021899.2,889-907).
gacaccctccagatgatga

SEQ ID NO: 444016 - DNA, 19 bp, Mus musculus
  siRNA target sequence for Foxj2 (NM_021899.2,1266-1284).
gacatgccaccttctaaca

SEQ ID NO: 444017 - DNA, 19 bp, Mus musculus
  siRNA target sequence for Foxj2 (NM_021899.2,1444-1462).
ctacaccagggggaaaaca

SEQ ID NO: 444018 - DNA, 19 bp, Mus musculus
  siRNA target sequence for Foxj2 (NM_021899.2,1639-1657).
ctgactggtgctccaatat

SEQ ID NO: 444019 - DNA, 19 bp, Mus musculus
  siRNA target sequence for Foxj2 (NM_021899.2,1651-1669).
ccaatattgactccttaaa

SEQ ID NO: 444020 - DNA, 19 bp, Mus musculus
  siRNA target sequence for Foxj2 (NM_021899.2,1774-1792).
ccctcgaccagcatcacat

SEQ ID NO: 444021 - DNA, 19 bp, Mus musculus
  siRNA target sequence for Foxj2 (NM_021899.2,1785-1803).
catcacatcgccaacttgt

SEQ ID NO: 444022 - DNA, 19 bp, Mus musculus
  siRNA target sequence for Foxj2 (NM_021899.2,1960-1978).
cacaagcttcccatctcta

SEQ ID NO: 444023 - DNA, 19 bp, Mus musculus
  siRNA target sequence for Foxl1 (NM_008024.1,38-56).
cagcctcgccgctgttgta

SEQ ID NO: 444024 - DNA, 19 bp, Mus musculus
  siRNA target sequence for Foxl1 (NM_008024.1,381-399).
ccgctgcttggacatgttt

SEQ ID NO: 444025 - DNA, 19 bp, Mus musculus
  siRNA target sequence for Foxl1 (NM_008024.1,396-414).
gtttgagaacggcaattat

SEQ ID NO: 444026 - DNA, 19 bp, Mus musculus
  siRNA target sequence for Foxl1 (NM_008024.1,730-748).
cagcggctccccaaaaggt

SEQ ID NO: 444027 - DNA, 19 bp, Mus musculus
  siRNA target sequence for Foxl1 (NM_008024.1,740-758).
ccaaaaggttccaagtcaa

SEQ ID NO: 444028 - DNA, 19 bp, Mus musculus
  siRNA target sequence for Foxl1 (NM_008024.1,746-764).
ggttccaagtcaaagagtt

SEQ ID NO: 444029 - DNA, 19 bp, Mus musculus
  siRNA target sequence for Foxl2 (NM_012020.1,57-75).
gagcggacgcgcagtcaaa

SEQ ID NO: 444030 - DNA, 19 bp, Mus musculus
  siRNA target sequence for Foxl2 (NM_012020.1,253-271).
ccgttctacgagaagaaca

SEQ ID NO: 444031 - DNA, 19 bp, Mus musculus
  siRNA target sequence for Foxl2 (NM_012020.1,254-272).
cgttctacgagaagaacaa

SEQ ID NO: 444032 - DNA, 19 bp, Mus musculus
  siRNA target sequence for Foxl2 (NM_012020.1,1051-1069).
gagctcgccatgatgcatt

SEQ ID NO: 444033 - DNA, 19 bp, Mus musculus
  siRNA target sequence for Foxm1 (NM_008021.2,266-284).
gagtccagctcttgcaaat

SEQ ID NO: 444034 - DNA, 19 bp, Mus musculus
  siRNA target sequence for Foxm1 (NM_008021.2,268-286).
gtccagctcttgcaaattt

SEQ ID NO: 444035 - DNA, 19 bp, Mus musculus
  siRNA target sequence for Foxm1 (NM_008021.2,287-305).
ccagccggaatcaagatta

SEQ ID NO: 444036 - DNA, 19 bp, Mus musculus
  siRNA target sequence for Foxm1 (NM_008021.2,288-306).
cagccggaatcaagattat

SEQ ID NO: 444037 - DNA, 19 bp, Mus musculus
  siRNA target sequence for Foxm1 (NM_008021.2,290-308).
gccggaatcaagattatca

SEQ ID NO: 444038 - DNA, 19 bp, Mus musculus
  siRNA target sequence for Foxm1 (NM_008021.2,291-309).
ccggaatcaagattatcaa

SEQ ID NO: 444039 - DNA, 19 bp, Mus musculus
  siRNA target sequence for Foxm1 (NM_008021.2,348-366).
ccagcaacgctgatatcca

SEQ ID NO: 444040 - DNA, 19 bp, Mus musculus
  siRNA target sequence for Foxm1 (NM_008021.2,637-655).
ggacaacagcttaaccaat

SEQ ID NO: 444041 - DNA, 19 bp, Mus musculus
  siRNA target sequence for Foxm1 (NM_008021.2,886-904).
ggacatctacacttggatt

SEQ ID NO: 444042 - DNA, 19 bp, Mus musculus
  siRNA target sequence for Foxm1 (NM_008021.2,1046-1064).
gccaatcgctacttgacat

SEQ ID NO: 444043 - DNA, 19 bp, Mus musculus
  siRNA target sequence for Foxm1 (NM_008021.2,1047-1065).
ccaatcgctacttgacatt

SEQ ID NO: 444044 - DNA, 19 bp, Mus musculus
  siRNA target sequence for Foxm1 (NM_008021.2,1062-1080).
cattggaccaagtgtttaa

SEQ ID NO: 444045 - DNA, 19 bp, Mus musculus
  siRNA target sequence for Foxm1 (NM_008021.2,1146-1164).
ctgagctccatagaaatgt

SEQ ID NO: 444046 - DNA, 19 bp, Mus musculus
  siRNA target sequence for Foxm1 (NM_008021.2,1148-1166).
gagctccatagaaatgtga

SEQ ID NO: 444047 - DNA, 19 bp, Mus musculus
  siRNA target sequence for Foxm1 (NM_008021.2,1191-1209).
gcgcacggcgaaagatgaa

SEQ ID NO: 444048 - DNA, 19 bp, Mus musculus
  siRNA target sequence for Foxm1 (NM_008021.2,1307-1325).
ctggcagcatcgcttatga

SEQ ID NO: 444049 - DNA, 19 bp, Mus musculus
  siRNA target sequence for Foxm1 (NM_008021.2,1463-1481).
cctttacttcctattcagt

SEQ ID NO: 444050 - DNA, 19 bp, Mus musculus
  siRNA target sequence for Foxm1 (NM_008021.2,1469-1487).
cttcctattcagtccatta

SEQ ID NO: 444051 - DNA, 19 bp, Mus musculus
  siRNA target sequence for Foxm1 (NM_008021.2,1514-1532).
gacatagcacacttagaga

SEQ ID NO: 444052 - DNA, 19 bp, Mus musculus
  siRNA target sequence for Foxm1 (NM_008021.2,1525-1543).
cttagagaggcctatcaaa

SEQ ID NO: 444053 - DNA, 19 bp, Mus musculus
  siRNA target sequence for Foxm1 (NM_008021.2,1606-1624).
caactcctgggaagattct

SEQ ID NO: 444054 - DNA, 19 bp, Mus musculus
  siRNA target sequence for Foxm1 (NM_008021.2,1680-1698).
cgcgctgtgtctcagaaat

SEQ ID NO: 444055 - DNA, 19 bp, Mus musculus
  siRNA target sequence for Foxm1 (NM_008021.2,1692-1710).
cagaaatgctggtgactaa

SEQ ID NO: 444056 - DNA, 19 bp, Mus musculus
  siRNA target sequence for Foxm1 (NM_008021.2,1993-2011).
caaagttggggggttagat

SEQ ID NO: 444057 - DNA, 19 bp, Mus musculus
  siRNA target sequence for Foxm1 (NM_008021.2,1997-2015).
gttggggggttagatttca

SEQ ID NO: 444058 - DNA, 19 bp, Mus musculus
  siRNA target sequence for Foxm1 (NM_008021.2,2066-2084).
gggttgatggagctgaata

SEQ ID NO: 444059 - DNA, 19 bp, Mus musculus
  siRNA target sequence for Foxm1 (NM_008021.2,2095-2113).
gaaaagtggtcctctcttt

SEQ ID NO: 444060 - DNA, 19 bp, Mus musculus
  siRNA target sequence for Foxm1 (NM_008021.2,2272-2290).
cctggacacaatgaatgat

SEQ ID NO: 444061 - DNA, 19 bp, Mus musculus
  siRNA target sequence for Foxm1 (NM_008021.2,2273-2291).
ctggacacaatgaatgata

SEQ ID NO: 444062 - DNA, 19 bp, Mus musculus
  siRNA target sequence for Foxm1 (NM_008021.2,2298-2316).
gcaagatccttctagacat

SEQ ID NO: 444063 - DNA, 19 bp, Mus musculus
  siRNA target sequence for Foxm1 (NM_008021.2,2348-2366).
ggccctgacaacatcaact

SEQ ID NO: 444064 - DNA, 19 bp, Mus musculus
  siRNA target sequence for Foxn1 (NM_008238.1,457-475).
cctttccacccctacaaga

SEQ ID NO: 444065 - DNA, 19 bp, Mus musculus
  siRNA target sequence for Foxn1 (NM_008238.1,510-528).
gacggccatggcacttgat

SEQ ID NO: 444066 - DNA, 19 bp, Mus musculus
  siRNA target sequence for Foxn1 (NM_008238.1,656-674).
gccaggaacacaaccaaat

SEQ ID NO: 444067 - DNA, 19 bp, Mus musculus
  siRNA target sequence for Foxn1 (NM_008238.1,742-760).
cagcctcccttgcaacata

SEQ ID NO: 444068 - DNA, 19 bp, Mus musculus
  siRNA target sequence for Foxn1 (NM_008238.1,746-764).
ctcccttgcaacatatgta

SEQ ID NO: 444069 - DNA, 19 bp, Mus musculus
  siRNA target sequence for Foxn1 (NM_008238.1,965-983).
gccttccagtcagtgaaat

SEQ ID NO: 444070 - DNA, 19 bp, Mus musculus
  siRNA target sequence for Foxn1 (NM_008238.1,971-989).
cagtcagtgaaatctacaa

SEQ ID NO: 444071 - DNA, 19 bp, Mus musculus
  siRNA target sequence for Foxn1 (NM_008238.1,973-991).
gtcagtgaaatctacaatt

SEQ ID NO: 444072 - DNA, 19 bp, Mus musculus
  siRNA target sequence for Foxn1 (NM_008238.1,1126-1144).
ctgtgggccctcaatcctt

SEQ ID NO: 444073 - DNA, 19 bp, Mus musculus
  siRNA target sequence for Foxn1 (NM_008238.1,1239-1257).
cagcctcattggagacaaa

SEQ ID NO: 444074 - DNA, 19 bp, Mus musculus
  siRNA target sequence for Foxn1 (NM_008238.1,1631-1649).
ggaccatgcacgatactct

SEQ ID NO: 444075 - DNA, 19 bp, Mus musculus
  siRNA target sequence for Foxn1 (NM_008238.1,1632-1650).
gaccatgcacgatactcta

SEQ ID NO: 444076 - DNA, 19 bp, Mus musculus
  siRNA target sequence for Foxn1 (NM_008238.1,1757-1775).
ccctggaccccctcgtatt

SEQ ID NO: 444077 - DNA, 19 bp, Mus musculus
  siRNA target sequence for Foxn1 (NM_008238.1,1817-1835).
caccagcagcccattgctt

SEQ ID NO: 444078 - DNA, 19 bp, Mus musculus
  siRNA target sequence for Foxn2 (NM_180974.1,207-225).
caggactgagtcagattta

SEQ ID NO: 444079 - DNA, 19 bp, Mus musculus
  siRNA target sequence for Foxn2 (NM_180974.1,210-228).
gactgagtcagatttacaa

SEQ ID NO: 444080 - DNA, 19 bp, Mus musculus
  siRNA target sequence for Foxn2 (NM_180974.1,299-317).
gatgacgagctaacaaact

SEQ ID NO: 444081 - DNA, 19 bp, Mus musculus
  siRNA target sequence for Foxn2 (NM_180974.1,302-320).
gacgagctaacaaacttga

SEQ ID NO: 444082 - DNA, 19 bp, Mus musculus
  siRNA target sequence for Foxn2 (NM_180974.1,336-354).
gcagtaaccttctaacaaa

SEQ ID NO: 444083 - DNA, 19 bp, Mus musculus
  siRNA target sequence for Foxn2 (NM_180974.1,386-404).
gtcagtccgctgtatgaca

SEQ ID NO: 444084 - DNA, 19 bp, Mus musculus
  siRNA target sequence for Foxn2 (NM_180974.1,388-406).
cagtccgctgtatgacata

SEQ ID NO: 444085 - DNA, 19 bp, Mus musculus
  siRNA target sequence for Foxn2 (NM_180974.1,390-408).
gtccgctgtatgacataga

SEQ ID NO: 444086 - DNA, 19 bp, Mus musculus
  siRNA target sequence for Foxn2 (NM_180974.1,481-499).
cccgtactcctttagtctt

SEQ ID NO: 444087 - DNA, 19 bp, Mus musculus
  siRNA target sequence for Foxn2 (NM_180974.1,489-507).
cctttagtcttctcattta

SEQ ID NO: 444088 - DNA, 19 bp, Mus musculus
  siRNA target sequence for Foxn2 (NM_180974.1,518-536).
gaacactcgccaaataaat

SEQ ID NO: 444089 - DNA, 19 bp, Mus musculus
  siRNA target sequence for Foxn2 (NM_180974.1,521-539).
cactcgccaaataaatgtt

SEQ ID NO: 444090 - DNA, 19 bp, Mus musculus
  siRNA target sequence for Foxn2 (NM_180974.1,542-560).
cctgtcaaagaaatttaca

SEQ ID NO: 444091 - DNA, 19 bp, Mus musculus
  siRNA target sequence for Foxn2 (NM_180974.1,571-589).
ggatcgcttcccatacttt

SEQ ID NO: 444092 - DNA, 19 bp, Mus musculus
  siRNA target sequence for Foxn2 (NM_180974.1,671-689).
catggcaaggttaatggaa

SEQ ID NO: 444093 - DNA, 19 bp, Mus musculus
  siRNA target sequence for Foxn2 (NM_180974.1,702-720).
ggtgcgttgatccagaata

SEQ ID NO: 444094 - DNA, 19 bp, Mus musculus
  siRNA target sequence for Foxn2 (NM_180974.1,703-721).
gtgcgttgatccagaatat

SEQ ID NO: 444095 - DNA, 19 bp, Mus musculus
  siRNA target sequence for Foxn2 (NM_180974.1,705-723).
gcgttgatccagaatataa

SEQ ID NO: 444096 - DNA, 19 bp, Mus musculus
  siRNA target sequence for Foxn2 (NM_180974.1,716-734).
gaatataagcccaatctta

SEQ ID NO: 444097 - DNA, 19 bp, Mus musculus
  siRNA target sequence for Foxn2 (NM_180974.1,731-749).
cttatgcaggccttaaaga

SEQ ID NO: 444098 - DNA, 19 bp, Mus musculus
  siRNA target sequence for Foxn4 (NM_148935.1,105-123).
ggtccagaatgtcagaaat

SEQ ID NO: 444099 - DNA, 19 bp, Mus musculus
  siRNA target sequence for Foxn4 (NM_148935.1,622-640).
ggcccacggggcaatgcat

SEQ ID NO: 444100 - DNA, 19 bp, Mus musculus
  siRNA target sequence for Foxn4 (NM_148935.1,740-758).
cccgtgagtgagatctaca

SEQ ID NO: 444101 - DNA, 19 bp, Mus musculus
  siRNA target sequence for Foxn4 (NM_148935.1,1061-1079).
cctaaagcccccatgctaa

SEQ ID NO: 444102 - DNA, 19 bp, Mus musculus
  siRNA target sequence for Foxn4 (NM_148935.1,1380-1398).
gtaacctgtgggaagagat

SEQ ID NO: 444103 - DNA, 19 bp, Mus musculus
  siRNA target sequence for Foxo1 (NM_019739.2,507-525).
ctgcccaggccggagttta

SEQ ID NO: 444104 - DNA, 19 bp, Mus musculus
  siRNA target sequence for Foxo1 (NM_019739.2,618-636).
gtcagcaccgactttatga

SEQ ID NO: 444105 - DNA, 19 bp, Mus musculus
  siRNA target sequence for Foxo1 (NM_019739.2,1072-1090).
cccttcacagcaagtttat

SEQ ID NO: 444106 - DNA, 19 bp, Mus musculus
  siRNA target sequence for Foxo1 (NM_019739.2,1146-1164).
ggaggcaagagcggaaaat

SEQ ID NO: 444107 - DNA, 19 bp, Mus musculus
  siRNA target sequence for Foxo1 (NM_019739.2,1180-1198).
ctgcgtccatggacaacaa

SEQ ID NO: 444108 - DNA, 19 bp, Mus musculus
  siRNA target sequence for Foxo1 (NM_019739.2,1190-1208).
ggacaacaacagtaaattt

SEQ ID NO: 444109 - DNA, 19 bp, Mus musculus
  siRNA target sequence for Foxo1 (NM_019739.2,1560-1578).
ctctcgtccccaacatctt

SEQ ID NO: 444110 - DNA, 19 bp, Mus musculus
  siRNA target sequence for Foxo1 (NM_019739.2,1565-1583).
gtccccaacatctttaact

SEQ ID NO: 444111 - DNA, 19 bp, Mus musculus
  siRNA target sequence for Foxo1 (NM_019739.2,1567-1585).
ccccaacatctttaactgt

SEQ ID NO: 444112 - DNA, 19 bp, Mus musculus
  siRNA target sequence for Foxo1 (NM_019739.2,1620-1638).
cagacaccatgctattcgt

SEQ ID NO: 444113 - DNA, 19 bp, Mus musculus
  siRNA target sequence for Foxo1 (NM_019739.2,1622-1640).
gacaccatgctattcgttt

SEQ ID NO: 444114 - DNA, 19 bp, Mus musculus
  siRNA target sequence for Foxo1 (NM_019739.2,1644-1662).
ccgccaaacaccagtctaa

SEQ ID NO: 444115 - DNA, 19 bp, Mus musculus
  siRNA target sequence for Foxo1 (NM_019739.2,1645-1663).
cgccaaacaccagtctaaa

SEQ ID NO: 444116 - DNA, 19 bp, Mus musculus
  siRNA target sequence for Foxo1 (NM_019739.2,1668-1686).
cccagtccaaactactcaa

SEQ ID NO: 444117 - DNA, 19 bp, Mus musculus
  siRNA target sequence for Foxo1 (NM_019739.2,1672-1690).
gtccaaactactcaaagta

SEQ ID NO: 444118 - DNA, 19 bp, Mus musculus
  siRNA target sequence for Foxo1 (NM_019739.2,1770-1788).
ggattgaaccagtataact

SEQ ID NO: 444119 - DNA, 19 bp, Mus musculus
  siRNA target sequence for Foxo1 (NM_019739.2,1795-1813).
caggactcttgaaagagtt

SEQ ID NO: 444120 - DNA, 19 bp, Mus musculus
  siRNA target sequence for Foxo1 (NM_019739.2,1800-1818).
ctcttgaaagagttgttga

SEQ ID NO: 444121 - DNA, 19 bp, Mus musculus
  siRNA target sequence for Foxo1 (NM_019739.2,1888-1906).
gggtcctgggccaaaatgt

SEQ ID NO: 444122 - DNA, 19 bp, Mus musculus
  siRNA target sequence for Foxo1 (NM_019739.2,1893-1911).
ctgggccaaaatgtaatga

SEQ ID NO: 444123 - DNA, 19 bp, Mus musculus
  siRNA target sequence for Foxo1 (NM_019739.2,1905-1923).
gtaatgatgggccctaatt

SEQ ID NO: 444124 - DNA, 19 bp, Mus musculus
  siRNA target sequence for Foxo1 (NM_019739.2,1945-1963).
gccaggcatctcataacaa

SEQ ID NO: 444125 - DNA, 19 bp, Mus musculus
  siRNA target sequence for Foxo1 (NM_019739.2,1946-1964).
ccaggcatctcataacaaa

SEQ ID NO: 444126 - DNA, 19 bp, Mus musculus
  siRNA target sequence for Foxo1 (NM_019739.2,2087-2105).
ccccgtgaagacaccttta

SEQ ID NO: 444127 - DNA, 19 bp, Mus musculus
  siRNA target sequence for Foxo1 (NM_019739.2,2089-2107).
ccgtgaagacacctttaca

SEQ ID NO: 444128 - DNA, 19 bp, Mus musculus
  siRNA target sequence for Foxo1 (NM_019739.2,2090-2108).
cgtgaagacacctttacaa

SEQ ID NO: 444129 - DNA, 19 bp, Mus musculus
  siRNA target sequence for Foxo1 (NM_019739.2,2289-2307).
gatggagataccttggatt

SEQ ID NO: 444130 - DNA, 19 bp, Mus musculus
  siRNA target sequence for Foxo1 (NM_019739.2,2343-2361).
ccacacagtgtcaagacta

SEQ ID NO: 444131 - DNA, 19 bp, Mus musculus
  siRNA target sequence for Foxo1 (NM_019739.2,2348-2366).
cagtgtcaagactacaaca

SEQ ID NO: 444132 - DNA, 19 bp, Mus musculus
  siRNA target sequence for Foxo3 (NM_019740.1,755-773).
gggcaaccaaggaaatgct

SEQ ID NO: 444133 - DNA, 19 bp, Mus musculus
  siRNA target sequence for Foxo3 (NM_019740.1,843-861).
cggacaaacggctcacttt

SEQ ID NO: 444134 - DNA, 19 bp, Mus musculus
  siRNA target sequence for Foxo3 (NM_019740.1,845-863).
gacaaacggctcactttgt

SEQ ID NO: 444135 - DNA, 19 bp, Mus musculus
  siRNA target sequence for Foxo3 (NM_019740.1,978-996).
gcttcatgcgcgttcagaa

SEQ ID NO: 444136 - DNA, 19 bp, Mus musculus
  siRNA target sequence for Foxo3 (NM_019740.1,1014-1032).
gctcttggtggatcatcaa

SEQ ID NO: 444137 - DNA, 19 bp, Mus musculus
  siRNA target sequence for Foxo3 (NM_019740.1,1250-1268).
cgctcgcgcaccaattcca

SEQ ID NO: 444138 - DNA, 19 bp, Mus musculus
  siRNA target sequence for Foxo3 (NM_019740.1,1251-1269).
gctcgcgcaccaattccaa

SEQ ID NO: 444139 - DNA, 19 bp, Mus musculus
  siRNA target sequence for Foxo3 (NM_019740.1,1441-1459).
cggcaccatgaatctgaat

SEQ ID NO: 444140 - DNA, 19 bp, Mus musculus
  siRNA target sequence for Foxo3 (NM_019740.1,1761-1779).
gccacagcgacgtcatgat

SEQ ID NO: 444141 - DNA, 19 bp, Mus musculus
  siRNA target sequence for Foxo3 (NM_019740.1,1763-1781).
cacagcgacgtcatgatga

SEQ ID NO: 444142 - DNA, 19 bp, Mus musculus
  siRNA target sequence for Foxo3 (NM_019740.1,1784-1802).
cagtcggaccccttgatgt

SEQ ID NO: 444143 - DNA, 19 bp, Mus musculus
  siRNA target sequence for Foxo3 (NM_019740.1,1856-1874).
cgcaacgatccaatgatgt

SEQ ID NO: 444144 - DNA, 19 bp, Mus musculus
  siRNA target sequence for Foxo3 (NM_019740.1,1898-1916).
gggagtttggtcaatcaga

SEQ ID NO: 444145 - DNA, 19 bp, Mus musculus
  siRNA target sequence for Foxo3 (NM_019740.1,1899-1917).
ggagtttggtcaatcagaa

SEQ ID NO: 444146 - DNA, 19 bp, Mus musculus
  siRNA target sequence for Foxo3 (NM_019740.1,1902-1920).
gtttggtcaatcagaactt

SEQ ID NO: 444147 - DNA, 19 bp, Mus musculus
  siRNA target sequence for Foxo3 (NM_019740.1,1958-1976).
ggcagccgtgccttgtcaa

SEQ ID NO: 444148 - DNA, 19 bp, Mus musculus
  siRNA target sequence for Foxo3 (NM_019740.1,1959-1977).
gcagccgtgccttgtcaaa

SEQ ID NO: 444149 - DNA, 19 bp, Mus musculus
  siRNA target sequence for Foxo3 (NM_019740.1,1960-1978).
cagccgtgccttgtcaaat

SEQ ID NO: 444150 - DNA, 19 bp, Mus musculus
  siRNA target sequence for Foxo3 (NM_019740.1,1963-1981).
ccgtgccttgtcaaattct

SEQ ID NO: 444151 - DNA, 19 bp, Mus musculus
  siRNA target sequence for Foxo3 (NM_019740.1,2083-2101).
ctcaggctcctcactgtat

SEQ ID NO: 444152 - DNA, 19 bp, Mus musculus
  siRNA target sequence for Foxo3 (NM_019740.1,2121-2139).
ccgtcatgggccacgataa

SEQ ID NO: 444153 - DNA, 19 bp, Mus musculus
  siRNA target sequence for Foxo3 (NM_019740.1,2197-2215).
gtccatcatccgtagtgaa

SEQ ID NO: 444154 - DNA, 19 bp, Mus musculus
  siRNA target sequence for Foxo3 (NM_019740.1,2222-2240).
gatgctgacgggttggatt

SEQ ID NO: 444155 - DNA, 19 bp, Mus musculus
  siRNA target sequence for Foxo3 (NM_019740.1,2225-2243).
gctgacgggttggatttta

SEQ ID NO: 444156 - DNA, 19 bp, Mus musculus
  siRNA target sequence for Foxo3 (NM_019740.1,2226-2244).
ctgacgggttggattttaa

SEQ ID NO: 444157 - DNA, 19 bp, Mus musculus
  siRNA target sequence for Foxo3 (NM_019740.1,2228-2246).
gacgggttggattttaact

SEQ ID NO: 444158 - DNA, 19 bp, Mus musculus
  siRNA target sequence for Foxo3 (NM_019740.1,2230-2248).
cgggttggattttaacttt

SEQ ID NO: 444159 - DNA, 19 bp, Mus musculus
  siRNA target sequence for Foxp1 (NM_053202.1,16-34).
gggtctgagacaaaaagta

SEQ ID NO: 444160 - DNA, 19 bp, Mus musculus
  siRNA target sequence for Foxp1 (NM_053202.1,17-35).
ggtctgagacaaaaagtaa

SEQ ID NO: 444161 - DNA, 19 bp, Mus musculus
  siRNA target sequence for Foxp1 (NM_053202.1,62-80).
gcggtggcaaccacttact

SEQ ID NO: 444162 - DNA, 19 bp, Mus musculus
  siRNA target sequence for Foxp1 (NM_053202.1,63-81).
cggtggcaaccacttacta

SEQ ID NO: 444163 - DNA, 19 bp, Mus musculus
  siRNA target sequence for Foxp1 (NM_053202.1,319-337).
caagttagtggattaaagt

SEQ ID NO: 444164 - DNA, 19 bp, Mus musculus
  siRNA target sequence for Foxp1 (NM_053202.1,510-528).
gcagcttcaagaattttat

SEQ ID NO: 444165 - DNA, 19 bp, Mus musculus
  siRNA target sequence for Foxp1 (NM_053202.1,738-756).
cctcgctcaaggcatgatt

SEQ ID NO: 444166 - DNA, 19 bp, Mus musculus
  siRNA target sequence for Foxp1 (NM_053202.1,900-918).
cccgcatgcctctaccaat

SEQ ID NO: 444167 - DNA, 19 bp, Mus musculus
  siRNA target sequence for Foxp1 (NM_053202.1,1019-1037).
gctgtgaggcggtttgtga

SEQ ID NO: 444168 - DNA, 19 bp, Mus musculus
  siRNA target sequence for Foxp1 (NM_053202.1,1038-1056).
cgacttcccagcctttcta

SEQ ID NO: 444169 - DNA, 19 bp, Mus musculus
  siRNA target sequence for Foxp1 (NM_053202.1,1046-1064).
cagcctttctaaaacatct

SEQ ID NO: 444170 - DNA, 19 bp, Mus musculus
  siRNA target sequence for Foxp1 (NM_053202.1,1075-1093).
catgcgctggacgatagaa

SEQ ID NO: 444171 - DNA, 19 bp, Mus musculus
  siRNA target sequence for Foxp1 (NM_053202.1,1095-1113).
cacagctcaatgtagagta

SEQ ID NO: 444172 - DNA, 19 bp, Mus musculus
  siRNA target sequence for Foxp1 (NM_053202.1,1099-1117).
gctcaatgtagagtacaaa

SEQ ID NO: 444173 - DNA, 19 bp, Mus musculus
  siRNA target sequence for Foxp1 (NM_053202.1,1100-1118).
ctcaatgtagagtacaaat

SEQ ID NO: 444174 - DNA, 19 bp, Mus musculus
  siRNA target sequence for Foxp1 (NM_053202.1,1165-1183).
cgcctgcaagccatgatga

SEQ ID NO: 444175 - DNA, 19 bp, Mus musculus
  siRNA target sequence for Foxp1 (NM_053202.1,1230-1248).
cctgaatctggtatcaagt

SEQ ID NO: 444176 - DNA, 19 bp, Mus musculus
  siRNA target sequence for Foxp1 (NM_053202.1,1392-1410).
caggcggtactcagacaaa

SEQ ID NO: 444177 - DNA, 19 bp, Mus musculus
  siRNA target sequence for Foxp1 (NM_053202.1,1394-1412).
ggcggtactcagacaaata

SEQ ID NO: 444178 - DNA, 19 bp, Mus musculus
  siRNA target sequence for Foxp1 (NM_053202.1,1397-1415).
ggtactcagacaaatacaa

SEQ ID NO: 444179 - DNA, 19 bp, Mus musculus
  siRNA target sequence for Foxp1 (NM_053202.1,1441-1459).
gcgcagaaccaagaatttt

SEQ ID NO: 444180 - DNA, 19 bp, Mus musculus
  siRNA target sequence for Foxp1 (NM_053202.1,1470-1488).
ggaagttagaccaccattt

SEQ ID NO: 444181 - DNA, 19 bp, Mus musculus
  siRNA target sequence for Foxp1 (NM_053202.1,1471-1489).
gaagttagaccaccattta

SEQ ID NO: 444182 - DNA, 19 bp, Mus musculus
  siRNA target sequence for Foxp1 (NM_053202.1,1536-1554).
gcagctaacactaaacgaa

SEQ ID NO: 444183 - DNA, 19 bp, Mus musculus
  siRNA target sequence for Foxp1 (NM_053202.1,1537-1555).
cagctaacactaaacgaaa

SEQ ID NO: 444184 - DNA, 19 bp, Mus musculus
  siRNA target sequence for Foxp1 (NM_053202.1,1540-1558).
ctaacactaaacgaaatct

SEQ ID NO: 444185 - DNA, 19 bp, Mus musculus
  siRNA target sequence for Foxp1 (NM_053202.1,1544-1562).
cactaaacgaaatctataa

SEQ ID NO: 444186 - DNA, 19 bp, Mus musculus
  siRNA target sequence for Foxp1 (NM_053202.1,1563-1581).
ctggttcacacgaatgttt

SEQ ID NO: 444187 - DNA, 19 bp, Mus musculus
  siRNA target sequence for Foxp1 (NM_053202.1,1654-1672).
gtgcgagtagagaacgtta

SEQ ID NO: 444188 - DNA, 19 bp, Mus musculus
  siRNA target sequence for Foxp1 (NM_053202.1,1656-1674).
gcgagtagagaacgttaaa

SEQ ID NO: 444189 - DNA, 19 bp, Mus musculus
  siRNA target sequence for Foxp1 (NM_053202.1,1735-1753).
ggtaacccttcccttatta

SEQ ID NO: 444190 - DNA, 19 bp, Mus musculus
  siRNA target sequence for Foxp1 (NM_053202.1,1736-1754).
gtaacccttcccttattaa

SEQ ID NO: 444191 - DNA, 19 bp, Mus musculus
  siRNA target sequence for Foxp1 (NM_053202.1,1776-1794).
ctactgcacacctctcaat

SEQ ID NO: 444192 - DNA, 19 bp, Mus musculus
  siRNA target sequence for Foxp1 (NM_053202.1,1806-1824).
ggcttccatggctgagaat

SEQ ID NO: 444193 - DNA, 19 bp, Mus musculus
  siRNA target sequence for Foxp1 (NM_053202.1,1807-1825).
gcttccatggctgagaata

SEQ ID NO: 444194 - DNA, 19 bp, Mus musculus
  siRNA target sequence for Foxp1 (NM_053202.1,2023-2041).
ggccctctgtccttagtga

SEQ ID NO: 444195 - DNA, 19 bp, Mus musculus
  siRNA target sequence for Foxp1 (NM_053202.1,2049-2067).
caaccacagtccagatttt

SEQ ID NO: 444196 - DNA, 19 bp, Mus musculus
  siRNA target sequence for Foxp1 (NM_053202.1,2085-2103).
cgaagacgaaccagtaaat

SEQ ID NO: 444197 - DNA, 19 bp, Mus musculus
  siRNA target sequence for Foxp2 (NM_053242.2,324-342).
cagttcaatgaatcaaaat

SEQ ID NO: 444198 - DNA, 19 bp, Mus musculus
  siRNA target sequence for Foxp2 (NM_053242.2,351-369).
cactttaagcagccaatta

SEQ ID NO: 444199 - DNA, 19 bp, Mus musculus
  siRNA target sequence for Foxp2 (NM_053242.2,353-371).
ctttaagcagccaattaga

SEQ ID NO: 444200 - DNA, 19 bp, Mus musculus
  siRNA target sequence for Foxp2 (NM_053242.2,381-399).
cagggatgggagatcaagt

SEQ ID NO: 444201 - DNA, 19 bp, Mus musculus
  siRNA target sequence for Foxp2 (NM_053242.2,462-480).
ccaggcagcaagacaactt

SEQ ID NO: 444202 - DNA, 19 bp, Mus musculus
  siRNA target sequence for Foxp2 (NM_053242.2,470-488).
caagacaacttttgttaca

SEQ ID NO: 444203 - DNA, 19 bp, Mus musculus
  siRNA target sequence for Foxp2 (NM_053242.2,688-706).
caactacaagagttttaca

SEQ ID NO: 444204 - DNA, 19 bp, Mus musculus
  siRNA target sequence for Foxp2 (NM_053242.2,1150-1168).
ctagacctcacgactaaca

SEQ ID NO: 444205 - DNA, 19 bp, Mus musculus
  siRNA target sequence for Foxp2 (NM_053242.2,1153-1171).
gacctcacgactaacaatt

SEQ ID NO: 444206 - DNA, 19 bp, Mus musculus
  siRNA target sequence for Foxp2 (NM_053242.2,1210-1228).
ccacccatcacacatcatt

SEQ ID NO: 444207 - DNA, 19 bp, Mus musculus
  siRNA target sequence for Foxp2 (NM_053242.2,1236-1254).
gaacggacagtcttcagtt

SEQ ID NO: 444208 - DNA, 19 bp, Mus musculus
  siRNA target sequence for Foxp2 (NM_053242.2,1266-1284).
gcgggacagctcatcacat

SEQ ID NO: 444209 - DNA, 19 bp, Mus musculus
  siRNA target sequence for Foxp2 (NM_053242.2,1296-1314).
ggcctcgcacactctctat

SEQ ID NO: 444210 - DNA, 19 bp, Mus musculus
  siRNA target sequence for Foxp2 (NM_053242.2,1350-1368).
catatgtgaagattttgga

SEQ ID NO: 444211 - DNA, 19 bp, Mus musculus
  siRNA target sequence for Foxp2 (NM_053242.2,1421-1439).
cccaatgtcgagtgcaaat

SEQ ID NO: 444212 - DNA, 19 bp, Mus musculus
  siRNA target sequence for Foxp2 (NM_053242.2,1476-1494).
ggaacgcgaacgtcttcaa

SEQ ID NO: 444213 - DNA, 19 bp, Mus musculus
  siRNA target sequence for Foxp2 (NM_053242.2,1486-1504).
cgtcttcaagcgatgatga

SEQ ID NO: 444214 - DNA, 19 bp, Mus musculus
  siRNA target sequence for Foxp2 (NM_053242.2,1707-1725).
catacgaaggcgacattca

SEQ ID NO: 444215 - DNA, 19 bp, Mus musculus
  siRNA target sequence for Foxp2 (NM_053242.2,1715-1733).
ggcgacattcagacaaata

SEQ ID NO: 444216 - DNA, 19 bp, Mus musculus
  siRNA target sequence for Foxp2 (NM_053242.2,1717-1735).
cgacattcagacaaataca

SEQ ID NO: 444217 - DNA, 19 bp, Mus musculus
  siRNA target sequence for Foxp2 (NM_053242.2,1751-1769).
cagagattgccccaaacta

SEQ ID NO: 444218 - DNA, 19 bp, Mus musculus
  siRNA target sequence for Foxp2 (NM_053242.2,1759-1777).
gccccaaactacgaatttt

SEQ ID NO: 444219 - DNA, 19 bp, Mus musculus
  siRNA target sequence for Foxp2 (NM_053242.2,1760-1778).
ccccaaactacgaatttta

SEQ ID NO: 444220 - DNA, 19 bp, Mus musculus
  siRNA target sequence for Foxp2 (NM_053242.2,1761-1779).
cccaaactacgaattttat

SEQ ID NO: 444221 - DNA, 19 bp, Mus musculus
  siRNA target sequence for Foxp2 (NM_053242.2,1763-1781).
caaactacgaattttataa

SEQ ID NO: 444222 - DNA, 19 bp, Mus musculus
  siRNA target sequence for Foxp2 (NM_053242.2,1792-1810).
gttagacctcccttcactt

SEQ ID NO: 444223 - DNA, 19 bp, Mus musculus
  siRNA target sequence for Foxp2 (NM_053242.2,1806-1824).
cacttatgcaacactcata

SEQ ID NO: 444224 - DNA, 19 bp, Mus musculus
  siRNA target sequence for Foxp2 (NM_053242.2,1853-1871).
ggcagttaacacttaatga

SEQ ID NO: 444225 - DNA, 19 bp, Mus musculus
  siRNA target sequence for Foxp2 (NM_053242.2,1855-1873).
cagttaacacttaatgaaa

SEQ ID NO: 444226 - DNA, 19 bp, Mus musculus
  siRNA target sequence for Foxp2 (NM_053242.2,1857-1875).
gttaacacttaatgaaatt

SEQ ID NO: 444227 - DNA, 19 bp, Mus musculus
  siRNA target sequence for Foxp2 (NM_053242.2,1884-1902).
gtttacacggacatttgct

SEQ ID NO: 444228 - DNA, 19 bp, Mus musculus
  siRNA target sequence for Foxp2 (NM_053242.2,1972-1990).
gttcgagtagaaaatgtta

SEQ ID NO: 444229 - DNA, 19 bp, Mus musculus
  siRNA target sequence for Foxp2 (NM_053242.2,2006-2024).
ctgtggacgaagtcgaata

SEQ ID NO: 444230 - DNA, 19 bp, Mus musculus
  siRNA target sequence for Foxp2 (NM_053242.2,2054-2072).
gaagtccaactttagtaaa

SEQ ID NO: 444231 - DNA, 19 bp, Mus musculus
  siRNA target sequence for Foxp2 (NM_053242.2,2057-2075).
gtccaactttagtaaaaaa

SEQ ID NO: 444232 - DNA, 19 bp, Mus musculus
  siRNA target sequence for Foxp2 (NM_053242.2,2093-2111).
gctatggagcagctctaaa

SEQ ID NO: 444233 - DNA, 19 bp, Mus musculus
  siRNA target sequence for Foxp2 (NM_053242.2,2094-2112).
ctatggagcagctctaaat

SEQ ID NO: 444234 - DNA, 19 bp, Mus musculus
  siRNA target sequence for Foxp2 (NM_053242.2,2159-2177).
gtaaccctggactgatcaa

SEQ ID NO: 444235 - DNA, 19 bp, Mus musculus
  siRNA target sequence for Foxp2 (NM_053242.2,2209-2227).
cacgaagacctcaatggtt

SEQ ID NO: 444236 - DNA, 19 bp, Mus musculus
  siRNA target sequence for Foxp2 (NM_053242.2,2372-2390).
gtccggagttagaagatga

SEQ ID NO: 444237 - DNA, 19 bp, Mus musculus
  siRNA target sequence for Foxp3 (NM_054039.1,470-488).
ctacagtgcccctagtcat

SEQ ID NO: 444238 - DNA, 19 bp, Mus musculus
  siRNA target sequence for Foxp3 (NM_054039.1,699-717).
cctgccacctgggatcaat

SEQ ID NO: 444239 - DNA, 19 bp, Mus musculus
  siRNA target sequence for Foxp3 (NM_054039.1,879-897).
cgaggagccagaagagttt

SEQ ID NO: 444240 - DNA, 19 bp, Mus musculus
  siRNA target sequence for Foxp3 (NM_054039.1,1197-1215).
gggaagccatggcaatagt

SEQ ID NO: 444241 - DNA, 19 bp, Mus musculus
  siRNA target sequence for Foxp3 (NM_054039.1,1198-1216).
ggaagccatggcaatagtt

SEQ ID NO: 444242 - DNA, 19 bp, Mus musculus
  siRNA target sequence for Foxp3 (NM_054039.1,1323-1341).
gaggcagaggacactcaat

SEQ ID NO: 444243 - DNA, 19 bp, Mus musculus
  siRNA target sequence for Foxp3 (NM_054039.1,1331-1349).
ggacactcaatgaaatcta

SEQ ID NO: 444244 - DNA, 19 bp, Mus musculus
  siRNA target sequence for Foxp3 (NM_054039.1,1336-1354).
ctcaatgaaatctaccatt

SEQ ID NO: 444245 - DNA, 19 bp, Mus musculus
  siRNA target sequence for Foxp3 (NM_054039.1,1363-1381).
cgcatgttcgcctacttca

SEQ ID NO: 444246 - DNA, 19 bp, Mus musculus
  siRNA target sequence for Foxp3 (NM_054039.1,1469-1487).
cagtgtggaccgtagatga

SEQ ID NO: 444247 - DNA, 19 bp, Mus musculus
  siRNA target sequence for Foxp3 (NM_054039.1,1471-1489).
gtgtggaccgtagatgaat

SEQ ID NO: 444248 - DNA, 19 bp, Mus musculus
  siRNA target sequence for Foxp3 (NM_054039.1,1473-1491).
gtggaccgtagatgaattt

SEQ ID NO: 444249 - DNA, 19 bp, Mus musculus
  siRNA target sequence for Foxp3 (NM_054039.1,1475-1493).
ggaccgtagatgaatttga

SEQ ID NO: 444250 - DNA, 19 bp, Mus musculus
  siRNA target sequence for Foxp3 (NM_054039.1,1478-1496).
ccgtagatgaatttgagtt

SEQ ID NO: 444251 - DNA, 19 bp, Mus musculus
  siRNA target sequence for Foxp4 (NM_028767.1,1026-1044).
cgccagcacagctgttact

SEQ ID NO: 444252 - DNA, 19 bp, Mus musculus
  siRNA target sequence for Foxp4 (NM_028767.1,1225-1243).
gaagacctgggccagttta

SEQ ID NO: 444253 - DNA, 19 bp, Mus musculus
  siRNA target sequence for Foxp4 (NM_028767.1,1455-1473).
cgtgcaccccccaacttca

SEQ ID NO: 444254 - DNA, 19 bp, Mus musculus
  siRNA target sequence for Foxp4 (NM_028767.1,1546-1564).
cgcaggagaagtaatgaca

SEQ ID NO: 444255 - DNA, 19 bp, Mus musculus
  siRNA target sequence for Foxp4 (NM_028767.1,1547-1565).
gcaggagaagtaatgacaa

SEQ ID NO: 444256 - DNA, 19 bp, Mus musculus
  siRNA target sequence for Foxp4 (NM_028767.1,1548-1566).
caggagaagtaatgacaaa

SEQ ID NO: 444257 - DNA, 19 bp, Mus musculus
  siRNA target sequence for Foxp4 (NM_028767.1,1688-1706).
ggcagctgacgctaaatga

SEQ ID NO: 444258 - DNA, 19 bp, Mus musculus
  siRNA target sequence for Foxp4 (NM_028767.1,1690-1708).
cagctgacgctaaatgaga

SEQ ID NO: 444259 - DNA, 19 bp, Mus musculus
  siRNA target sequence for Foxp4 (NM_028767.1,1692-1710).
gctgacgctaaatgagatt

SEQ ID NO: 444260 - DNA, 19 bp, Mus musculus
  siRNA target sequence for Foxp4 (NM_028767.1,1693-1711).
ctgacgctaaatgagattt

SEQ ID NO: 444261 - DNA, 19 bp, Mus musculus
  siRNA target sequence for Foxp4 (NM_028767.1,1695-1713).
gacgctaaatgagatttat

SEQ ID NO: 444262 - DNA, 19 bp, Mus musculus
  siRNA target sequence for Foxp4 (NM_028767.1,1697-1715).
cgctaaatgagatttataa

SEQ ID NO: 444263 - DNA, 19 bp, Mus musculus
  siRNA target sequence for Foxp4 (NM_028767.1,1867-1885).
cggagaccgccaaagatga

SEQ ID NO: 444264 - DNA, 19 bp, Mus musculus
  siRNA target sequence for Foxp4 (NM_028767.1,1894-1912).
cccactctggtgaagaaca

SEQ ID NO: 444265 - DNA, 19 bp, Mus musculus
  siRNA target sequence for Foxp4 (NM_028767.1,2319-2337).
cttaagttattgtgttaaa

SEQ ID NO: 444266 - DNA, 19 bp, Mus musculus
  siRNA target sequence for Foxq1 (NM_008239.3,508-526).
gcagcccacggggacaaaa

SEQ ID NO: 444267 - DNA, 19 bp, Mus musculus
  siRNA target sequence for Foxq1 (NM_008239.3,509-527).
cagcccacggggacaaaat

SEQ ID NO: 444268 - DNA, 19 bp, Mus musculus
  siRNA target sequence for Gabpa (NM_008065.2,485-503).
gatcgacgggactgagaaa

SEQ ID NO: 444269 - DNA, 19 bp, Mus musculus
  siRNA target sequence for Gabpa (NM_008065.2,519-537).
gaaagcattgtggaacaaa

SEQ ID NO: 444270 - DNA, 19 bp, Mus musculus
  siRNA target sequence for Gabpa (NM_008065.2,523-541).
gcattgtggaacaaaccta

SEQ ID NO: 444271 - DNA, 19 bp, Mus musculus
  siRNA target sequence for Gabpa (NM_008065.2,539-557).
ctataccccagctgaatgt

SEQ ID NO: 444272 - DNA, 19 bp, Mus musculus
  siRNA target sequence for Gabpa (NM_008065.2,558-576).
gtaagccaggccatagaca

SEQ ID NO: 444273 - DNA, 19 bp, Mus musculus
  siRNA target sequence for Gabpa (NM_008065.2,562-580).
gccaggccatagacatcaa

SEQ ID NO: 444274 - DNA, 19 bp, Mus musculus
  siRNA target sequence for Gabpa (NM_008065.2,676-694).
cagaccgaagcttgtttga

SEQ ID NO: 444275 - DNA, 19 bp, Mus musculus
  siRNA target sequence for Gabpa (NM_008065.2,680-698).
ccgaagcttgtttgatcaa

SEQ ID NO: 444276 - DNA, 19 bp, Mus musculus
  siRNA target sequence for Gabpa (NM_008065.2,689-707).
gtttgatcaaggagtgaaa

SEQ ID NO: 444277 - DNA, 19 bp, Mus musculus
  siRNA target sequence for Gabpa (NM_008065.2,715-733).
ggactgtacagcttagtgt

SEQ ID NO: 444278 - DNA, 19 bp, Mus musculus
  siRNA target sequence for Gabpa (NM_008065.2,716-734).
gactgtacagcttagtgta

SEQ ID NO: 444279 - DNA, 19 bp, Mus musculus
  siRNA target sequence for Gabpa (NM_008065.2,725-743).
gcttagtgtacaggtaatt

SEQ ID NO: 444280 - DNA, 19 bp, Mus musculus
  siRNA target sequence for Gabpa (NM_008065.2,726-744).
cttagtgtacaggtaattt

SEQ ID NO: 444281 - DNA, 19 bp, Mus musculus
  siRNA target sequence for Gabpa (NM_008065.2,730-748).
gtgtacaggtaatttctta

SEQ ID NO: 444282 - DNA, 19 bp, Mus musculus
  siRNA target sequence for Gabpa (NM_008065.2,754-772).
gaatggagccaaagttgaa

SEQ ID NO: 444283 - DNA, 19 bp, Mus musculus
  siRNA target sequence for Gabpa (NM_008065.2,888-906).
ggcaccaagcacattacga

SEQ ID NO: 444284 - DNA, 19 bp, Mus musculus
  siRNA target sequence for Gabpa (NM_008065.2,896-914).
gcacattacgaccatttca

SEQ ID NO: 444285 - DNA, 19 bp, Mus musculus
  siRNA target sequence for Gabpa (NM_008065.2,983-1001).
ccttggcatcccctatgat

SEQ ID NO: 444286 - DNA, 19 bp, Mus musculus
  siRNA target sequence for Gabpa (NM_008065.2,988-1006).
gcatcccctatgatcctat

SEQ ID NO: 444287 - DNA, 19 bp, Mus musculus
  siRNA target sequence for Gabpa (NM_008065.2,1056-1074).
gagttcagcatgactgata

SEQ ID NO: 444288 - DNA, 19 bp, Mus musculus
  siRNA target sequence for Gabpa (NM_008065.2,1058-1076).
gttcagcatgactgatata

SEQ ID NO: 444289 - DNA, 19 bp, Mus musculus
  siRNA target sequence for Gabpa (NM_008065.2,1091-1109).
caacatttcgggaagagaa

SEQ ID NO: 444290 - DNA, 19 bp, Mus musculus
  siRNA target sequence for Gabpa (NM_008065.2,1094-1112).
catttcgggaagagaatta

SEQ ID NO: 444291 - DNA, 19 bp, Mus musculus
  siRNA target sequence for Gabpa (NM_008065.2,1114-1132).
gtagtctcaaccaagaaga

SEQ ID NO: 444292 - DNA, 19 bp, Mus musculus
  siRNA target sequence for Gabpa (NM_008065.2,1144-1162).
gggtccctcggggagaaat

SEQ ID NO: 444293 - DNA, 19 bp, Mus musculus
  siRNA target sequence for Gabpa (NM_008065.2,1145-1163).
ggtccctcggggagaaatt

SEQ ID NO: 444294 - DNA, 19 bp, Mus musculus
  siRNA target sequence for Gabpa (NM_008065.2,1148-1166).
ccctcggggagaaattctt

SEQ ID NO: 444295 - DNA, 19 bp, Mus musculus
  siRNA target sequence for Gabpa (NM_008065.2,1149-1167).
cctcggggagaaattcttt

SEQ ID NO: 444296 - DNA, 19 bp, Mus musculus
  siRNA target sequence for Gabpa (NM_008065.2,1178-1196).
ggagcttcttcgaaaatat

SEQ ID NO: 444297 - DNA, 19 bp, Mus musculus
  siRNA target sequence for Gabpa (NM_008065.2,1181-1199).
gcttcttcgaaaatatgtt

SEQ ID NO: 444298 - DNA, 19 bp, Mus musculus
  siRNA target sequence for Gabpa (NM_008065.2,1218-1236).
cagatgaatgagatagtta

SEQ ID NO: 444299 - DNA, 19 bp, Mus musculus
  siRNA target sequence for Gabpa (NM_008065.2,1244-1262).
ccagcctgtgcagattatt

SEQ ID NO: 444300 - DNA, 19 bp, Mus musculus
  siRNA target sequence for Gabpa (NM_008065.2,1247-1265).
gcctgtgcagattattcca

SEQ ID NO: 444301 - DNA, 19 bp, Mus musculus
  siRNA target sequence for Gabpa (NM_008065.2,1280-1298).
cgctacaccgactacgatt

SEQ ID NO: 444302 - DNA, 19 bp, Mus musculus
  siRNA target sequence for Gabpa (NM_008065.2,1281-1299).
gctacaccgactacgatta

SEQ ID NO: 444303 - DNA, 19 bp, Mus musculus
  siRNA target sequence for Gabpa (NM_008065.2,1282-1300).
ctacaccgactacgattaa

SEQ ID NO: 444304 - DNA, 19 bp, Mus musculus
  siRNA target sequence for Gabpa (NM_008065.2,1285-1303).
caccgactacgattaaagt

SEQ ID NO: 444305 - DNA, 19 bp, Mus musculus
  siRNA target sequence for Gabpa (NM_008065.2,1287-1305).
ccgactacgattaaagtta

SEQ ID NO: 444306 - DNA, 19 bp, Mus musculus
  siRNA target sequence for Gabpa (NM_008065.2,1288-1306).
cgactacgattaaagttat

SEQ ID NO: 444307 - DNA, 19 bp, Mus musculus
  siRNA target sequence for Gabpa (NM_008065.2,1291-1309).
ctacgattaaagttataaa

SEQ ID NO: 444308 - DNA, 19 bp, Mus musculus
  siRNA target sequence for Gabpa (NM_008065.2,1334-1352).
gcaacggtccccaaggatt

SEQ ID NO: 444309 - DNA, 19 bp, Mus musculus
  siRNA target sequence for Gabpa (NM_008065.2,1414-1432).
ggcagtttttgctagaact

SEQ ID NO: 444310 - DNA, 19 bp, Mus musculus
  siRNA target sequence for Gabpa (NM_008065.2,1415-1433).
gcagtttttgctagaactt

SEQ ID NO: 444311 - DNA, 19 bp, Mus musculus
  siRNA target sequence for Gabpa (NM_008065.2,1446-1464).
gatgctcgagactgtattt

SEQ ID NO: 444312 - DNA, 19 bp, Mus musculus
  siRNA target sequence for Gabpa (NM_008065.2,1449-1467).
gctcgagactgtatttctt

SEQ ID NO: 444313 - DNA, 19 bp, Mus musculus
  siRNA target sequence for Gabpa (NM_008065.2,1474-1492).
gtgatgaaggtgaatttaa

SEQ ID NO: 444314 - DNA, 19 bp, Mus musculus
  siRNA target sequence for Gabpa (NM_008065.2,1506-1524).
gagttggttgcgcaaaaat

SEQ ID NO: 444315 - DNA, 19 bp, Mus musculus
  siRNA target sequence for Gabpa (NM_008065.2,1562-1580).
gaaacttagccgtgcatta

SEQ ID NO: 444316 - DNA, 19 bp, Mus musculus
  siRNA target sequence for Gabpa (NM_008065.2,1570-1588).
gccgtgcattacggtatta

SEQ ID NO: 444317 - DNA, 19 bp, Mus musculus
  siRNA target sequence for Gabpa (NM_008065.2,1571-1589).
ccgtgcattacggtattat

SEQ ID NO: 444318 - DNA, 19 bp, Mus musculus
  siRNA target sequence for Gabpa (NM_008065.2,1572-1590).
cgtgcattacggtattatt

SEQ ID NO: 444319 - DNA, 19 bp, Mus musculus
  siRNA target sequence for Gabpa (NM_008065.2,1573-1591).
gtgcattacggtattatta

SEQ ID NO: 444320 - DNA, 19 bp, Mus musculus
  siRNA target sequence for Gabpa (NM_008065.2,1658-1676).
gactcttattggatacagt

SEQ ID NO: 444321 - DNA, 19 bp, Mus musculus
  siRNA target sequence for Gabpa (NM_008065.2,1784-1802).
ctctctacaggcagacaaa

SEQ ID NO: 444322 - DNA, 19 bp, Mus musculus
  siRNA target sequence for Gata1 (NM_008089.1,137-155).
ggtgtcctcaccatcagat

SEQ ID NO: 444323 - DNA, 19 bp, Mus musculus
  siRNA target sequence for Gata1 (NM_008089.1,275-293).
cagacactccccagtcttt

SEQ ID NO: 444324 - DNA, 19 bp, Mus musculus
  siRNA target sequence for Gata1 (NM_008089.1,277-295).
gacactccccagtctttca

SEQ ID NO: 444325 - DNA, 19 bp, Mus musculus
  siRNA target sequence for Gata1 (NM_008089.1,314-332).
cagtatggagggaattcct

SEQ ID NO: 444326 - DNA, 19 bp, Mus musculus
  siRNA target sequence for Gata1 (NM_008089.1,333-351).
gggggctcaccttatgcta

SEQ ID NO: 444327 - DNA, 19 bp, Mus musculus
  siRNA target sequence for Gata1 (NM_008089.1,799-817).
ccaagaagcgaatgattgt

SEQ ID NO: 444328 - DNA, 19 bp, Mus musculus
  siRNA target sequence for Gata1 (NM_008089.1,831-849).
ggcacccaatgcactaact

SEQ ID NO: 444329 - DNA, 19 bp, Mus musculus
  siRNA target sequence for Gata1 (NM_008089.1,833-851).
cacccaatgcactaactgt

SEQ ID NO: 444330 - DNA, 19 bp, Mus musculus
  siRNA target sequence for Gata1 (NM_008089.1,889-907).
gcggagatccggtatgcaa

SEQ ID NO: 444331 - DNA, 19 bp, Mus musculus
  siRNA target sequence for Gata1 (NM_008089.1,890-908).
cggagatccggtatgcaat

SEQ ID NO: 444332 - DNA, 19 bp, Mus musculus
  siRNA target sequence for Gata1 (NM_008089.1,1144-1162).
gtactgcccacctctatca

SEQ ID NO: 444333 - DNA, 19 bp, Mus musculus
  siRNA target sequence for Gata1 (NM_008089.1,1199-1217).
ccatcttatgccttttcct

SEQ ID NO: 444334 - DNA, 19 bp, Mus musculus
  siRNA target sequence for Gata2 (NM_008090.3,341-359).
ggcctggcgcataactaca

SEQ ID NO: 444335 - DNA, 19 bp, Mus musculus
  siRNA target sequence for Gata2 (NM_008090.3,342-360).
gcctggcgcataactacat

SEQ ID NO: 444336 - DNA, 19 bp, Mus musculus
  siRNA target sequence for Gata2 (NM_008090.3,384-402).
ccgacgaggtggatgtctt

SEQ ID NO: 444337 - DNA, 19 bp, Mus musculus
  siRNA target sequence for Gata2 (NM_008090.3,420-438).
cgcagggcaacccttacta

SEQ ID NO: 444338 - DNA, 19 bp, Mus musculus
  siRNA target sequence for Gata2 (NM_008090.3,663-681).
gagggcctctgtctgttta

SEQ ID NO: 444339 - DNA, 19 bp, Mus musculus
  siRNA target sequence for Gata2 (NM_008090.3,783-801).
ccacgccacccaaagaagt

SEQ ID NO: 444340 - DNA, 19 bp, Mus musculus
  siRNA target sequence for Gata2 (NM_008090.3,1387-1405).
ctacaagctgcacaatgtt

SEQ ID NO: 444341 - DNA, 19 bp, Mus musculus
  siRNA target sequence for Gata2 (NM_008090.3,1580-1598).
ggacacctcccacctttta

SEQ ID NO: 444342 - DNA, 19 bp, Mus musculus
  siRNA target sequence for Gata3 (NM_008091.2,323-341).
gtggacgtactttttaaca

SEQ ID NO: 444343 - DNA, 19 bp, Mus musculus
  siRNA target sequence for Gata3 (NM_008091.2,705-723).
ggtcggccaggcaagatga

SEQ ID NO: 444344 - DNA, 19 bp, Mus musculus
  siRNA target sequence for Gata3 (NM_008091.2,708-726).
cggccaggcaagatgagaa

SEQ ID NO: 444345 - DNA, 19 bp, Mus musculus
  siRNA target sequence for Gata3 (NM_008091.2,915-933).
ctaccgggttcggatgtaa

SEQ ID NO: 444346 - DNA, 19 bp, Mus musculus
  siRNA target sequence for Gata3 (NM_008091.2,1019-1037).
ggtaccgggcactaccttt

SEQ ID NO: 444347 - DNA, 19 bp, Mus musculus
  siRNA target sequence for Gata3 (NM_008091.2,1043-1061).
gcctgcggactctaccata

SEQ ID NO: 444348 - DNA, 19 bp, Mus musculus
  siRNA target sequence for Gata3 (NM_008091.2,1044-1062).
cctgcggactctaccataa

SEQ ID NO: 444349 - DNA, 19 bp, Mus musculus
  siRNA target sequence for Gata3 (NM_008091.2,1045-1063).
ctgcggactctaccataaa

SEQ ID NO: 444350 - DNA, 19 bp, Mus musculus
  siRNA target sequence for Gata3 (NM_008091.2,1216-1234).
gtactacaagcttcataat

SEQ ID NO: 444351 - DNA, 19 bp, Mus musculus
  siRNA target sequence for Gata3 (NM_008091.2,1219-1237).
ctacaagcttcataatatt

SEQ ID NO: 444352 - DNA, 19 bp, Mus musculus
  siRNA target sequence for Gata3 (NM_008091.2,1225-1243).
gcttcataatattaacaga

SEQ ID NO: 444353 - DNA, 19 bp, Mus musculus
  siRNA target sequence for Gata3 (NM_008091.2,1242-1260).
gacccctgactatgaagaa

SEQ ID NO: 444354 - DNA, 19 bp, Mus musculus
  siRNA target sequence for Gata3 (NM_008091.2,1245-1263).
ccctgactatgaagaaaga

SEQ ID NO: 444355 - DNA, 19 bp, Mus musculus
  siRNA target sequence for Gata3 (NM_008091.2,1277-1295).
cgaaaccggaagatgtcta

SEQ ID NO: 444356 - DNA, 19 bp, Mus musculus
  siRNA target sequence for Gata3 (NM_008091.2,1288-1306).
gatgtctagcaaatcgaaa

SEQ ID NO: 444357 - DNA, 19 bp, Mus musculus
  siRNA target sequence for Gata3 (NM_008091.2,1302-1320).
cgaaaaagtgcaaaaaggt

SEQ ID NO: 444358 - DNA, 19 bp, Mus musculus
  siRNA target sequence for Gata5 (NM_008093.1,843-861).
gcttcgtacctgacttctt

SEQ ID NO: 444359 - DNA, 19 bp, Mus musculus
  siRNA target sequence for Gata5 (NM_008093.1,931-949).
ggacggcaccggacactat

SEQ ID NO: 444360 - DNA, 19 bp, Mus musculus
  siRNA target sequence for Gata5 (NM_008093.1,934-952).
cggcaccggacactatcta

SEQ ID NO: 444361 - DNA, 19 bp, Mus musculus
  siRNA target sequence for Gata5 (NM_008093.1,935-953).
ggcaccggacactatctat

SEQ ID NO: 444362 - DNA, 19 bp, Mus musculus
  siRNA target sequence for Gata5 (NM_008093.1,939-957).
ccggacactatctatgcaa

SEQ ID NO: 444363 - DNA, 19 bp, Mus musculus
  siRNA target sequence for Gata5 (NM_008093.1,940-958).
cggacactatctatgcaat

SEQ ID NO: 444364 - DNA, 19 bp, Mus musculus
  siRNA target sequence for Gata5 (NM_008093.1,1158-1176).
ggccactggcaatgaaaaa

SEQ ID NO: 444365 - DNA, 19 bp, Mus musculus
  siRNA target sequence for Gata5 (NM_008093.1,1178-1196).
gagagtatccagacaagaa

SEQ ID NO: 444366 - DNA, 19 bp, Mus musculus
  siRNA target sequence for Gata6 (NM_010258.1,608-626).
ccagcaggacccttcgaaa

SEQ ID NO: 444367 - DNA, 19 bp, Mus musculus
  siRNA target sequence for Gata6 (NM_010258.1,768-786).
gagacggcaccggtcatta

SEQ ID NO: 444368 - DNA, 19 bp, Mus musculus
  siRNA target sequence for Gata6 (NM_010258.1,853-871).
gaagcgcgtgccttcatca

SEQ ID NO: 444369 - DNA, 19 bp, Mus musculus
  siRNA target sequence for Gata6 (NM_010258.1,915-933).
ctaccttatggcgtagaaa

SEQ ID NO: 444370 - DNA, 19 bp, Mus musculus
  siRNA target sequence for Gata6 (NM_010258.1,919-937).
cttatggcgtagaaatgct

SEQ ID NO: 444371 - DNA, 19 bp, Mus musculus
  siRNA target sequence for Gata6 (NM_010258.1,959-977).
gcttgcgggctctatatga

SEQ ID NO: 444372 - DNA, 19 bp, Mus musculus
  siRNA target sequence for Gata6 (NM_010258.1,995-1013).
cgaccacttgctatgaaaa

SEQ ID NO: 444373 - DNA, 19 bp, Mus musculus
  siRNA target sequence for Gata6 (NM_010258.1,1114-1132).
ctcttcttctaattcagat

SEQ ID NO: 444374 - DNA, 19 bp, Mus musculus
  siRNA target sequence for Gata6 (NM_010258.1,1133-1151).
gactgcaccaaaaatactt

SEQ ID NO: 444375 - DNA, 19 bp, Mus musculus
  siRNA target sequence for Gata6 (NM_010258.1,1251-1269).
gtcaagacggcctctacat

SEQ ID NO: 444376 - DNA, 19 bp, Mus musculus
  siRNA target sequence for Gbx1 (NM_015739.1,706-724).
cgcacttctctgagacttt

SEQ ID NO: 444377 - DNA, 19 bp, Mus musculus
  siRNA target sequence for Gbx1 (NM_015739.1,888-906).
ggacctaaaccgaagctaa

SEQ ID NO: 444378 - DNA, 19 bp, Mus musculus
  siRNA target sequence for Gbx1 (NM_015739.1,889-907).
gacctaaaccgaagctaaa

SEQ ID NO: 444379 - DNA, 19 bp, Mus musculus
  siRNA target sequence for Gbx2 (NM_010262.2,1025-1043).
gagagcgatgtggattaca

SEQ ID NO: 444380 - DNA, 19 bp, Mus musculus
  siRNA target sequence for Gbx2 (NM_010262.2,1065-1083).
gtcagactgctcataagga

SEQ ID NO: 444381 - DNA, 19 bp, Mus musculus
  siRNA target sequence for Gbx2 (NM_010262.2,1277-1295).
ctcagcgaggtgcaagtaa

SEQ ID NO: 444382 - DNA, 19 bp, Mus musculus
  siRNA target sequence for Gbx2 (NM_010262.2,1420-1438).
gttcgctattcgaagtcaa

SEQ ID NO: 444383 - DNA, 19 bp, Mus musculus
  siRNA target sequence for Gcdh (NM_008097.1,197-215).
ggaaggacccactcatact

SEQ ID NO: 444384 - DNA, 19 bp, Mus musculus
  siRNA target sequence for Gcdh (NM_008097.1,230-248).
ctgccgatgagaaactgat

SEQ ID NO: 444385 - DNA, 19 bp, Mus musculus
  siRNA target sequence for Gcdh (NM_008097.1,251-269).
gggacaccttccgtaacta

SEQ ID NO: 444386 - DNA, 19 bp, Mus musculus
  siRNA target sequence for Gcdh (NM_008097.1,300-318).
gctggctaatcgaaatgaa

SEQ ID NO: 444387 - DNA, 19 bp, Mus musculus
  siRNA target sequence for Gcdh (NM_008097.1,305-323).
ctaatcgaaatgaagtttt

SEQ ID NO: 444388 - DNA, 19 bp, Mus musculus
  siRNA target sequence for Gcdh (NM_008097.1,310-328).
cgaaatgaagtttttcaca

SEQ ID NO: 444389 - DNA, 19 bp, Mus musculus
  siRNA target sequence for Gcdh (NM_008097.1,329-347).
gggacattgtgtatgagat

SEQ ID NO: 444390 - DNA, 19 bp, Mus musculus
  siRNA target sequence for Gcdh (NM_008097.1,361-379).
gtgttgggacccaccatta

SEQ ID NO: 444391 - DNA, 19 bp, Mus musculus
  siRNA target sequence for Gcdh (NM_008097.1,363-381).
gttgggacccaccattaaa

SEQ ID NO: 444392 - DNA, 19 bp, Mus musculus
  siRNA target sequence for Gcdh (NM_008097.1,454-472).
ggctacaggtcgatgatga

SEQ ID NO: 444393 - DNA, 19 bp, Mus musculus
  siRNA target sequence for Gcdh (NM_008097.1,490-508).
gtcatgcaccccatctata

SEQ ID NO: 444394 - DNA, 19 bp, Mus musculus
  siRNA target sequence for Gcdh (NM_008097.1,495-513).
gcaccccatctatacctat

SEQ ID NO: 444395 - DNA, 19 bp, Mus musculus
  siRNA target sequence for Gcdh (NM_008097.1,522-540).
ggaacagcgacagaaatat

SEQ ID NO: 444396 - DNA, 19 bp, Mus musculus
  siRNA target sequence for Gcdh (NM_008097.1,570-588).
gggctgctttggacttaca

SEQ ID NO: 444397 - DNA, 19 bp, Mus musculus
  siRNA target sequence for Gcdh (NM_008097.1,632-650).
ctcgccacaatccatcaaa

SEQ ID NO: 444398 - DNA, 19 bp, Mus musculus
  siRNA target sequence for Gcdh (NM_008097.1,695-713).
cccctgtggctgacctatt

SEQ ID NO: 444399 - DNA, 19 bp, Mus musculus
  siRNA target sequence for Gcdh (NM_008097.1,696-714).
ccctgtggctgacctattt

SEQ ID NO: 444400 - DNA, 19 bp, Mus musculus
  siRNA target sequence for Gcdh (NM_008097.1,697-715).
cctgtggctgacctattta

SEQ ID NO: 444401 - DNA, 19 bp, Mus musculus
  siRNA target sequence for Gcdh (NM_008097.1,698-716).
ctgtggctgacctatttat

SEQ ID NO: 444402 - DNA, 19 bp, Mus musculus
  siRNA target sequence for Gcdh (NM_008097.1,703-721).
gctgacctatttatagtgt

SEQ ID NO: 444403 - DNA, 19 bp, Mus musculus
  siRNA target sequence for Gcdh (NM_008097.1,722-740).
gggctcggtgtgaggataa

SEQ ID NO: 444404 - DNA, 19 bp, Mus musculus
  siRNA target sequence for Gcdh (NM_008097.1,724-742).
gctcggtgtgaggataact

SEQ ID NO: 444405 - DNA, 19 bp, Mus musculus
  siRNA target sequence for Gcdh (NM_008097.1,727-745).
cggtgtgaggataactgta

SEQ ID NO: 444406 - DNA, 19 bp, Mus musculus
  siRNA target sequence for Gcdh (NM_008097.1,729-747).
gtgtgaggataactgtatt

SEQ ID NO: 444407 - DNA, 19 bp, Mus musculus
  siRNA target sequence for Gcdh (NM_008097.1,791-809).
ctaggattgaaggaaagtt

SEQ ID NO: 444408 - DNA, 19 bp, Mus musculus
  siRNA target sequence for Gcdh (NM_008097.1,821-839).
cctcggctaccggtatgat

SEQ ID NO: 444409 - DNA, 19 bp, Mus musculus
  siRNA target sequence for Gcdh (NM_008097.1,824-842).
cggctaccggtatgatcat

SEQ ID NO: 444410 - DNA, 19 bp, Mus musculus
  siRNA target sequence for Gcdh (NM_008097.1,826-844).
gctaccggtatgatcatca

SEQ ID NO: 444411 - DNA, 19 bp, Mus musculus
  siRNA target sequence for Gcdh (NM_008097.1,827-845).
ctaccggtatgatcatcat

SEQ ID NO: 444412 - DNA, 19 bp, Mus musculus
  siRNA target sequence for Gcdh (NM_008097.1,925-943).
gcccgctatggcatcacat

SEQ ID NO: 444413 - DNA, 19 bp, Mus musculus
  siRNA target sequence for Gcdh (NM_008097.1,1147-1165).
gtctccatgttgaagagaa

SEQ ID NO: 444414 - DNA, 19 bp, Mus musculus
  siRNA target sequence for Gcdh (NM_008097.1,1269-1287).
ggaggcagtgaacacttat

SEQ ID NO: 444415 - DNA, 19 bp, Mus musculus
  siRNA target sequence for Gmeb1 (NM_020273.1,95-113).
ggtacccactgaaggaaat

SEQ ID NO: 444416 - DNA, 19 bp, Mus musculus
  siRNA target sequence for Gmeb1 (NM_020273.1,122-140).
gaacccggaagacactaaa

SEQ ID NO: 444417 - DNA, 19 bp, Mus musculus
  siRNA target sequence for Gmeb1 (NM_020273.1,125-143).
cccggaagacactaaaact

SEQ ID NO: 444418 - DNA, 19 bp, Mus musculus
  siRNA target sequence for Gmeb1 (NM_020273.1,128-146).
ggaagacactaaaactcaa

SEQ ID NO: 444419 - DNA, 19 bp, Mus musculus
  siRNA target sequence for Gmeb1 (NM_020273.1,200-218).
gaatagcgcagcagttgta

SEQ ID NO: 444420 - DNA, 19 bp, Mus musculus
  siRNA target sequence for Gmeb1 (NM_020273.1,220-238).
ccgtagagacccactcaat

SEQ ID NO: 444421 - DNA, 19 bp, Mus musculus
  siRNA target sequence for Gmeb1 (NM_020273.1,221-239).
cgtagagacccactcaata

SEQ ID NO: 444422 - DNA, 19 bp, Mus musculus
  siRNA target sequence for Gmeb1 (NM_020273.1,225-243).
gagacccactcaatacaca

SEQ ID NO: 444423 - DNA, 19 bp, Mus musculus
  siRNA target sequence for Gmeb1 (NM_020273.1,242-260).
caaaatcgaggaaggaatt

SEQ ID NO: 444424 - DNA, 19 bp, Mus musculus
  siRNA target sequence for Gmeb1 (NM_020273.1,294-312).
gagatcgcttaccctataa

SEQ ID NO: 444425 - DNA, 19 bp, Mus musculus
  siRNA target sequence for Gmeb1 (NM_020273.1,350-368).
gttcgtgtgtccaggaata

SEQ ID NO: 444426 - DNA, 19 bp, Mus musculus
  siRNA target sequence for Gmeb1 (NM_020273.1,374-392).
gaagtgtgtcaagtttaat

SEQ ID NO: 444427 - DNA, 19 bp, Mus musculus
  siRNA target sequence for Gmeb1 (NM_020273.1,503-521).
ctctggacagatcgatttt

SEQ ID NO: 444428 - DNA, 19 bp, Mus musculus
  siRNA target sequence for Gmeb1 (NM_020273.1,508-526).
gacagatcgatttttacca

SEQ ID NO: 444429 - DNA, 19 bp, Mus musculus
  siRNA target sequence for Gmeb1 (NM_020273.1,553-571).
gcaggagcaccaaatttga

SEQ ID NO: 444430 - DNA, 19 bp, Mus musculus
  siRNA target sequence for Gmeb1 (NM_020273.1,916-934).
cagatgctgctgttctaaa

SEQ ID NO: 444431 - DNA, 19 bp, Mus musculus
  siRNA target sequence for Gmeb1 (NM_020273.1,918-936).
gatgctgctgttctaaaca

SEQ ID NO: 444432 - DNA, 19 bp, Mus musculus
  siRNA target sequence for Gmeb1 (NM_020273.1,935-953).
caatgtggcgaacacattt

SEQ ID NO: 444433 - DNA, 19 bp, Mus musculus
  siRNA target sequence for Gmeb1 (NM_020273.1,963-981).
gacgcggtcaagagagttt

SEQ ID NO: 444434 - DNA, 19 bp, Mus musculus
  siRNA target sequence for Gmeb1 (NM_020273.1,1094-1112).
gaaatcccagacagttcaa

SEQ ID NO: 444435 - DNA, 19 bp, Mus musculus
  siRNA target sequence for Gsc (NM_010351.1,817-835).
gaacaagacgtcctcaaaa

SEQ ID NO: 444436 - DNA, 19 bp, Mus musculus
  siRNA target sequence for Gsh1 (NM_008178.1,415-433).
cggcactgccgctactcaa

SEQ ID NO: 444437 - DNA, 19 bp, Mus musculus
  siRNA target sequence for Gsh1 (NM_008178.1,571-589).
cggatcccagacagtttca

SEQ ID NO: 444438 - DNA, 19 bp, Mus musculus
  siRNA target sequence for Gsh1 (NM_008178.1,573-591).
gatcccagacagtttcact

SEQ ID NO: 444439 - DNA, 19 bp, Mus musculus
  siRNA target sequence for Gsh1 (NM_008178.1,684-702).
gagttcgcctccaacatgt

SEQ ID NO: 444440 - DNA, 19 bp, Mus musculus
  siRNA target sequence for Gsh1 (NM_008178.1,726-744).
gagatcgcgacctatctga

SEQ ID NO: 444441 - DNA, 19 bp, Mus musculus
  siRNA target sequence for Gsh1 (NM_008178.1,904-922).
cagaggacgacgacgaatt

SEQ ID NO: 444442 - DNA, 19 bp, Mus musculus
  siRNA target sequence for Gsh2 (NM_133256.1,497-515).
cctggggacgcgcagtttt

SEQ ID NO: 444443 - DNA, 19 bp, Mus musculus
  siRNA target sequence for Gsh2 (NM_133256.1,812-830).
ctggagcgagaattctctt

SEQ ID NO: 444444 - DNA, 19 bp, Mus musculus
  siRNA target sequence for Gsh2 (NM_133256.1,817-835).
gcgagaattctcttccaat

SEQ ID NO: 444445 - DNA, 19 bp, Mus musculus
  siRNA target sequence for Gsh2 (NM_133256.1,818-836).
cgagaattctcttccaata

SEQ ID NO: 444446 - DNA, 19 bp, Mus musculus
  siRNA target sequence for Gsh2 (NM_133256.1,862-880).
cgagatcgcgacataccta

SEQ ID NO: 444447 - DNA, 19 bp, Mus musculus
  siRNA target sequence for Gsh2 (NM_133256.1,863-881).
gagatcgcgacatacctaa

SEQ ID NO: 444448 - DNA, 19 bp, Mus musculus
  siRNA target sequence for Gsh2 (NM_133256.1,953-971).
gcttcgaggaacaatcaca

SEQ ID NO: 444449 - DNA, 19 bp, Mus musculus
  siRNA target sequence for Gsh2 (NM_133256.1,988-1006).
gggtagccaggcgcattat

SEQ ID NO: 444450 - DNA, 19 bp, Mus musculus
  siRNA target sequence for Gsh2 (NM_133256.1,1036-1054).
ccctgcctcggctaacgaa

SEQ ID NO: 444451 - DNA, 19 bp, Mus musculus
  siRNA target sequence for Gsh2 (NM_133256.1,1041-1059).
cctcggctaacgaagacaa

SEQ ID NO: 444452 - DNA, 19 bp, Mus musculus
  siRNA target sequence for Gtf2h4 (NM_010364.1,222-240).
gggtgctggaccgattgta

SEQ ID NO: 444453 - DNA, 19 bp, Mus musculus
  siRNA target sequence for Gtf2h4 (NM_010364.1,223-241).
ggtgctggaccgattgtat

SEQ ID NO: 444454 - DNA, 19 bp, Mus musculus
  siRNA target sequence for Gtf2h4 (NM_010364.1,449-467).
ctccaaggcctcatcttga

SEQ ID NO: 444455 - DNA, 19 bp, Mus musculus
  siRNA target sequence for Gtf2h4 (NM_010364.1,710-728).
gagccaccctgcatcactt

SEQ ID NO: 444456 - DNA, 19 bp, Mus musculus
  siRNA target sequence for Gtf2h4 (NM_010364.1,893-911).
gggatgagtgactctttgt

SEQ ID NO: 444457 - DNA, 19 bp, Mus musculus
  siRNA target sequence for Gtf2h4 (NM_010364.1,894-912).
ggatgagtgactctttgtt

SEQ ID NO: 444458 - DNA, 19 bp, Mus musculus
  siRNA target sequence for Gtf2h4 (NM_010364.1,932-950).
cgtgagttcgggcttgttt

SEQ ID NO: 444459 - DNA, 19 bp, Mus musculus
  siRNA target sequence for Gtf2h4 (NM_010364.1,933-951).
gtgagttcgggcttgtttt

SEQ ID NO: 444460 - DNA, 19 bp, Mus musculus
  siRNA target sequence for Gtf2h4 (NM_010364.1,1131-1149).
ccgaaatgctctatcgatt

SEQ ID NO: 444461 - DNA, 19 bp, Mus musculus
  siRNA target sequence for Gtf2h4 (NM_010364.1,1347-1365).
ctgaaggcgtcctgtataa

SEQ ID NO: 444462 - DNA, 19 bp, Mus musculus
  siRNA target sequence for Hes6 (NM_019479.2,461-479).
ctgaaccacctgctagaat

SEQ ID NO: 444463 - DNA, 19 bp, Mus musculus
  siRNA target sequence for Hesx1 (NM_010420.1,456-474).
gattgtacaacgtcagtaa

SEQ ID NO: 444464 - DNA, 19 bp, Mus musculus
  siRNA target sequence for Hesx1 (NM_010420.1,637-655).
ccgaaacacgctctttgaa

SEQ ID NO: 444465 - DNA, 19 bp, Mus musculus
  siRNA target sequence for Hesx1 (NM_010420.1,638-656).
cgaaacacgctctttgaaa

SEQ ID NO: 444466 - DNA, 19 bp, Mus musculus
  siRNA target sequence for Hesx1 (NM_010420.1,705-723).
cagaaccaggtcgaagtat

SEQ ID NO: 444467 - DNA, 19 bp, Mus musculus
  siRNA target sequence for Hesx1 (NM_010420.1,713-731).
ggtcgaagtattggaaaat

SEQ ID NO: 444468 - DNA, 19 bp, Mus musculus
  siRNA target sequence for Hesx1 (NM_010420.1,831-849).
cgccgagcaaagatgaaaa

SEQ ID NO: 444469 - DNA, 19 bp, Mus musculus
  siRNA target sequence for Hesx1 (NM_010420.1,845-863).
gaaaaggtcccgtagagaa

SEQ ID NO: 444470 - DNA, 19 bp, Mus musculus
  siRNA target sequence for Hesx1 (NM_010420.1,850-868).
ggtcccgtagagaatcaca

SEQ ID NO: 444471 - DNA, 19 bp, Mus musculus
  siRNA target sequence for Hesx1 (NM_010420.1,854-872).
ccgtagagaatcacagttt

SEQ ID NO: 444472 - DNA, 19 bp, Mus musculus
  siRNA target sequence for Hesx1 (NM_010420.1,869-887).
gtttctaatggcgaaaaaa

SEQ ID NO: 444473 - DNA, 19 bp, Mus musculus
  siRNA target sequence for Hhex (NM_008245.2,424-442).
cagcgacctctgcacaaaa

SEQ ID NO: 444474 - DNA, 19 bp, Mus musculus
  siRNA target sequence for Hhex (NM_008245.2,427-445).
cgacctctgcacaaaagga

SEQ ID NO: 444475 - DNA, 19 bp, Mus musculus
  siRNA target sequence for Hhex (NM_008245.2,428-446).
gacctctgcacaaaaggaa

SEQ ID NO: 444476 - DNA, 19 bp, Mus musculus
  siRNA target sequence for Hhex (NM_008245.2,537-555).
gcgtctggccaagatgtta

SEQ ID NO: 444477 - DNA, 19 bp, Mus musculus
  siRNA target sequence for Hhex (NM_008245.2,539-557).
gtctggccaagatgttaca

SEQ ID NO: 444478 - DNA, 19 bp, Mus musculus
  siRNA target sequence for Hhex (NM_008245.2,589-607).
cagaatcgccgagctaaat

SEQ ID NO: 444479 - DNA, 19 bp, Mus musculus
  siRNA target sequence for Hhex (NM_008245.2,696-714).
gcccagtgaacagaataaa

SEQ ID NO: 444480 - DNA, 19 bp, Mus musculus
  siRNA target sequence for Hhex (NM_008245.2,699-717).
cagtgaacagaataaaggt

SEQ ID NO: 444481 - DNA, 19 bp, Mus musculus
  siRNA target sequence for Hif1a (NM_010431.1,298-316).
gttctgaacgtcgaaaaga

SEQ ID NO: 444482 - DNA, 19 bp, Mus musculus
  siRNA target sequence for Hif1a (NM_010431.1,303-321).
gaacgtcgaaaagaaaagt

SEQ ID NO: 444483 - DNA, 19 bp, Mus musculus
  siRNA target sequence for Hif1a (NM_010431.1,306-324).
cgtcgaaaagaaaagtcta

SEQ ID NO: 444484 - DNA, 19 bp, Mus musculus
  siRNA target sequence for Hif1a (NM_010431.1,390-408).
ccacttccccacaatgtga

SEQ ID NO: 444485 - DNA, 19 bp, Mus musculus
  siRNA target sequence for Hif1a (NM_010431.1,401-419).
caatgtgagctcacatctt

SEQ ID NO: 444486 - DNA, 19 bp, Mus musculus
  siRNA target sequence for Hif1a (NM_010431.1,417-435).
cttgataaagcttctgtta

SEQ ID NO: 444487 - DNA, 19 bp, Mus musculus
  siRNA target sequence for Hif1a (NM_010431.1,420-438).
gataaagcttctgttatga

SEQ ID NO: 444488 - DNA, 19 bp, Mus musculus
  siRNA target sequence for Hif1a (NM_010431.1,440-458).
gctcaccatcagttattta

SEQ ID NO: 444489 - DNA, 19 bp, Mus musculus
  siRNA target sequence for Hif1a (NM_010431.1,443-461).
caccatcagttatttacgt

SEQ ID NO: 444490 - DNA, 19 bp, Mus musculus
  siRNA target sequence for Hif1a (NM_010431.1,521-539).
ggactgtttttatctgaaa

SEQ ID NO: 444491 - DNA, 19 bp, Mus musculus
  siRNA target sequence for Hif1a (NM_010431.1,573-591).
gacggcgacatggtttaca

SEQ ID NO: 444492 - DNA, 19 bp, Mus musculus
  siRNA target sequence for Hif1a (NM_010431.1,575-593).
cggcgacatggtttacatt

SEQ ID NO: 444493 - DNA, 19 bp, Mus musculus
  siRNA target sequence for Hif1a (NM_010431.1,576-594).
ggcgacatggtttacattt

SEQ ID NO: 444494 - DNA, 19 bp, Mus musculus
  siRNA target sequence for Hif1a (NM_010431.1,595-613).
ctgataacgtgaacaaata

SEQ ID NO: 444495 - DNA, 19 bp, Mus musculus
  siRNA target sequence for Hif1a (NM_010431.1,597-615).
gataacgtgaacaaataca

SEQ ID NO: 444496 - DNA, 19 bp, Mus musculus
  siRNA target sequence for Hif1a (NM_010431.1,614-632).
catggggttaactcagttt

SEQ ID NO: 444497 - DNA, 19 bp, Mus musculus
  siRNA target sequence for Hif1a (NM_010431.1,617-635).
ggggttaactcagtttgaa

SEQ ID NO: 444498 - DNA, 19 bp, Mus musculus
  siRNA target sequence for Hif1a (NM_010431.1,619-637).
ggttaactcagtttgaact

SEQ ID NO: 444499 - DNA, 19 bp, Mus musculus
  siRNA target sequence for Hif1a (NM_010431.1,647-665).
cagtgtgtttgattttact

SEQ ID NO: 444500 - DNA, 19 bp, Mus musculus
  siRNA target sequence for Hif1a (NM_010431.1,743-761).
cacacagcggagctttttt

SEQ ID NO: 444501 - DNA, 19 bp, Mus musculus
  siRNA target sequence for Hif1a (NM_010431.1,747-765).
cagcggagcttttttctca

SEQ ID NO: 444502 - DNA, 19 bp, Mus musculus
  siRNA target sequence for Hif1a (NM_010431.1,836-854).
ctgcacgggccatattcat

SEQ ID NO: 444503 - DNA, 19 bp, Mus musculus
  siRNA target sequence for Hif1a (NM_010431.1,855-873).
gtctatgataccaacagta

SEQ ID NO: 444504 - DNA, 19 bp, Mus musculus
  siRNA target sequence for Hif1a (NM_010431.1,942-960).
catccgtcaaatattgaaa

SEQ ID NO: 444505 - DNA, 19 bp, Mus musculus
  siRNA target sequence for Hif1a (NM_010431.1,963-981).
cctttagatagcaagacat

SEQ ID NO: 444506 - DNA, 19 bp, Mus musculus
  siRNA target sequence for Hif1a (NM_010431.1,964-982).
ctttagatagcaagacatt

SEQ ID NO: 444507 - DNA, 19 bp, Mus musculus
  siRNA target sequence for Hif1a (NM_010431.1,988-1006).
gtcgacacagcctcgatat

SEQ ID NO: 444508 - DNA, 19 bp, Mus musculus
  siRNA target sequence for Hif1a (NM_010431.1,990-1008).
cgacacagcctcgatatga

SEQ ID NO: 444509 - DNA, 19 bp, Mus musculus
  siRNA target sequence for Hif1a (NM_010431.1,991-1009).
gacacagcctcgatatgaa

SEQ ID NO: 444510 - DNA, 19 bp, Mus musculus
  siRNA target sequence for Hif1a (NM_010431.1,1048-1066).
gttatgagccggaagaact

SEQ ID NO: 444511 - DNA, 19 bp, Mus musculus
  siRNA target sequence for Hif1a (NM_010431.1,1073-1091).
ccgctcaatttatgaatat

SEQ ID NO: 444512 - DNA, 19 bp, Mus musculus
  siRNA target sequence for Hif1a (NM_010431.1,1074-1092).
cgctcaatttatgaatatt

SEQ ID NO: 444513 - DNA, 19 bp, Mus musculus
  siRNA target sequence for Hif1a (NM_010431.1,1076-1094).
ctcaatttatgaatattat

SEQ ID NO: 444514 - DNA, 19 bp, Mus musculus
  siRNA target sequence for Hif1a (NM_010431.1,1128-1146).
caccatgatatgtttacta

SEQ ID NO: 444515 - DNA, 19 bp, Mus musculus
  siRNA target sequence for Hif1a (NM_010431.1,1172-1190).
caggatgcttgccaaaaga

SEQ ID NO: 444516 - DNA, 19 bp, Mus musculus
  siRNA target sequence for Hif1a (NM_010431.1,1183-1201).
ccaaaagaggtggatatgt

SEQ ID NO: 444517 - DNA, 19 bp, Mus musculus
  siRNA target sequence for Hif1a (NM_010431.1,1213-1231).
ctcaagcaactgtcatata

SEQ ID NO: 444518 - DNA, 19 bp, Mus musculus
  siRNA target sequence for Hif1a (NM_010431.1,1215-1233).
caagcaactgtcatatata

SEQ ID NO: 444519 - DNA, 19 bp, Mus musculus
  siRNA target sequence for Hif1a (NM_010431.1,1222-1240).
ctgtcatatataatacgaa

SEQ ID NO: 444520 - DNA, 19 bp, Mus musculus
  siRNA target sequence for Hif1a (NM_010431.1,1335-1353).
gtgctcaaaccagttgaat

SEQ ID NO: 444521 - DNA, 19 bp, Mus musculus
  siRNA target sequence for Hif1a (NM_010431.1,1497-1515).
ggcagcgatgacacagaaa

SEQ ID NO: 444522 - DNA, 19 bp, Mus musculus
  siRNA target sequence for Hif1a (NM_010431.1,1557-1575).
gtaatgtttccctcttcta

SEQ ID NO: 444523 - DNA, 19 bp, Mus musculus
  siRNA target sequence for Hif1a (NM_010431.1,1567-1585).
cctcttctaatgaaaaatt

SEQ ID NO: 444524 - DNA, 19 bp, Mus musculus
  siRNA target sequence for Hif1a (NM_010431.1,1701-1719).
gagtcactgggactttctt

SEQ ID NO: 444525 - DNA, 19 bp, Mus musculus
  siRNA target sequence for Hif1a (NM_010431.1,1703-1721).
gtcactgggactttctttt

SEQ ID NO: 444526 - DNA, 19 bp, Mus musculus
  siRNA target sequence for Hif1a (NM_010431.1,1745-1763).
gccagcaagtccttctgat

SEQ ID NO: 444527 - DNA, 19 bp, Mus musculus
  siRNA target sequence for Hif1a (NM_010431.1,1761-1779).
gatggaagcactagacaaa

SEQ ID NO: 444528 - DNA, 19 bp, Mus musculus
  siRNA target sequence for Hif1a (NM_010431.1,1808-1826).
cgtaaacactcctaacttt

SEQ ID NO: 444529 - DNA, 19 bp, Mus musculus
  siRNA target sequence for Hif1a (NM_010431.1,1834-1852).
ctaacagtcccagtgaata

SEQ ID NO: 444530 - DNA, 19 bp, Mus musculus
  siRNA target sequence for Hif1a (NM_010431.1,2004-2022).
gatgatttccagttacgtt

SEQ ID NO: 444531 - DNA, 19 bp, Mus musculus
  siRNA target sequence for Hif1a (NM_010431.1,2167-2185).
cagagacgaaggacaataa

SEQ ID NO: 444532 - DNA, 19 bp, Mus musculus
  siRNA target sequence for Hif1a (NM_010431.1,2171-2189).
gacgaaggacaataaagaa

SEQ ID NO: 444533 - DNA, 19 bp, Mus musculus
  siRNA target sequence for Hif1a (NM_010431.1,2364-2382).
gccactttgaatcaaagaa

SEQ ID NO: 444534 - DNA, 19 bp, Mus musculus
  siRNA target sequence for Hif1a (NM_010431.1,2433-2451).
gctcagaggaagcgaaaaa

SEQ ID NO: 444535 - DNA, 19 bp, Mus musculus
  siRNA target sequence for Hif1a (NM_010431.1,2444-2462).
gcgaaaaatggaacatgat

SEQ ID NO: 444536 - DNA, 19 bp, Mus musculus
  siRNA target sequence for Hif1a (NM_010431.1,2485-2503).
gaattggaacattattgca

SEQ ID NO: 444537 - DNA, 19 bp, Mus musculus
  siRNA target sequence for Hif1a (NM_010431.1,2520-2538).
gcacctactatgtcacttt

SEQ ID NO: 444538 - DNA, 19 bp, Mus musculus
  siRNA target sequence for Hif1a (NM_010431.1,2542-2560).
ggaaacgagtgaaaggatt

SEQ ID NO: 444539 - DNA, 19 bp, Mus musculus
  siRNA target sequence for Hif1a (NM_010431.1,2547-2565).
cgagtgaaaggattcatat

SEQ ID NO: 444540 - DNA, 19 bp, Mus musculus
  siRNA target sequence for Hif1a (NM_010431.1,2581-2599).
gaacggagcaaaagactat

SEQ ID NO: 444541 - DNA, 19 bp, Mus musculus
  siRNA target sequence for Hif1a (NM_010431.1,2584-2602).
cggagcaaaagactattat

SEQ ID NO: 444542 - DNA, 19 bp, Mus musculus
  siRNA target sequence for Hif1a (NM_010431.1,2588-2606).
gcaaaagactattatttta

SEQ ID NO: 444543 - DNA, 19 bp, Mus musculus
  siRNA target sequence for Hif1a (NM_010431.1,2648-2666).
ggatgagagtggattacca

SEQ ID NO: 444544 - DNA, 19 bp, Mus musculus
  siRNA target sequence for Hif1a (NM_010431.1,2667-2685).
cagctgaccagttacgatt

SEQ ID NO: 444545 - DNA, 19 bp, Mus musculus
  siRNA target sequence for Hif1a (NM_010431.1,2672-2690).
gaccagttacgattgtgaa

SEQ ID NO: 444546 - DNA, 19 bp, Mus musculus
  siRNA target sequence for Hif1a (NM_010431.1,2677-2695).
gttacgattgtgaagttaa

SEQ ID NO: 444547 - DNA, 19 bp, Mus musculus
  siRNA target sequence for Hif1a (NM_010431.1,2681-2699).
cgattgtgaagttaatgct

SEQ ID NO: 444548 - DNA, 19 bp, Mus musculus
  siRNA target sequence for Hif1a (NM_010431.1,2727-2745).
cagggtgaagaattactca

SEQ ID NO: 444549 - DNA, 19 bp, Mus musculus
  siRNA target sequence for Hif1a (NM_010431.1,2744-2762).
cagagctttggatcaagtt

SEQ ID NO: 444550 - DNA, 19 bp, Mus musculus
  siRNA target sequence for Hif3a (NM_016868.1,241-259).
ccatcatgcgcctcacaat

SEQ ID NO: 444551 - DNA, 19 bp, Mus musculus
  siRNA target sequence for Hif3a (NM_016868.1,395-413).
ggcttacctgtcggaaaat

SEQ ID NO: 444552 - DNA, 19 bp, Mus musculus
  siRNA target sequence for Hif3a (NM_016868.1,397-415).
cttacctgtcggaaaatgt

SEQ ID NO: 444553 - DNA, 19 bp, Mus musculus
  siRNA target sequence for Hif3a (NM_016868.1,520-538).
ggccgaacctgtcaaagaa

SEQ ID NO: 444554 - DNA, 19 bp, Mus musculus
  siRNA target sequence for Hif3a (NM_016868.1,552-570).
ccaacagagcgccactttt

SEQ ID NO: 444555 - DNA, 19 bp, Mus musculus
  siRNA target sequence for Hif3a (NM_016868.1,888-906).
ggctgttctgcctatgaat

SEQ ID NO: 444556 - DNA, 19 bp, Mus musculus
  siRNA target sequence for Hif3a (NM_016868.1,1002-1020).
cggactggaggctatctgt

SEQ ID NO: 444557 - DNA, 19 bp, Mus musculus
  siRNA target sequence for Hif3a (NM_016868.1,1063-1081).
cccagtcggaaagtatcat

SEQ ID NO: 444558 - DNA, 19 bp, Mus musculus
  siRNA target sequence for Hif3a (NM_016868.1,1065-1083).
cagtcggaaagtatcatct

SEQ ID NO: 444559 - DNA, 19 bp, Mus musculus
  siRNA target sequence for Hif3a (NM_016868.1,1137-1155).
gaacaaacggagcaacata

SEQ ID NO: 444560 - DNA, 19 bp, Mus musculus
  siRNA target sequence for Hif3a (NM_016868.1,1284-1302).
gaccctcgccgtttctgta

SEQ ID NO: 444561 - DNA, 19 bp, Mus musculus
  siRNA target sequence for Hif3a (NM_016868.1,1405-1423).
cggctgatctcccagataa

SEQ ID NO: 444562 - DNA, 19 bp, Mus musculus
  siRNA target sequence for Hif3a (NM_016868.1,1408-1426).
ctgatctcccagataagtt

SEQ ID NO: 444563 - DNA, 19 bp, Mus musculus
  siRNA target sequence for Hif3a (NM_016868.1,1478-1496).
gaccgtggagacagatcta

SEQ ID NO: 444564 - DNA, 19 bp, Mus musculus
  siRNA target sequence for Hif3a (NM_016868.1,1480-1498).
ccgtggagacagatctaga

SEQ ID NO: 444565 - DNA, 19 bp, Mus musculus
  siRNA target sequence for Hif3a (NM_016868.1,1481-1499).
cgtggagacagatctagat

SEQ ID NO: 444566 - DNA, 19 bp, Mus musculus
  siRNA target sequence for Hif3a (NM_016868.1,1704-1722).
gatccacgactgaactgtt

SEQ ID NO: 444567 - DNA, 19 bp, Mus musculus
  siRNA target sequence for Hif3a (NM_016868.1,1838-1856).
caagcggtccccaagacta

SEQ ID NO: 444568 - DNA, 19 bp, Mus musculus
  siRNA target sequence for Hif3a (NM_016868.1,1841-1859).
gcggtccccaagactagaa

SEQ ID NO: 444569 - DNA, 19 bp, Mus musculus
  siRNA target sequence for Hlx (NM_008250.1,583-601).
gtcaagaaaccctctttct

SEQ ID NO: 444570 - DNA, 19 bp, Mus musculus
  siRNA target sequence for Hlx (NM_008250.1,978-996).
cctcaaatttggtatcgat

SEQ ID NO: 444571 - DNA, 19 bp, Mus musculus
  siRNA target sequence for Hlx (NM_008250.1,988-1006).
ggtatcgatcgaattttgt

SEQ ID NO: 444572 - DNA, 19 bp, Mus musculus
  siRNA target sequence for Hlx (NM_008250.1,1010-1028).
cggaatttgacccaaaagt

SEQ ID NO: 444573 - DNA, 19 bp, Mus musculus
  siRNA target sequence for Hlx (NM_008250.1,1112-1130).
cttcagcgggacagttctt

SEQ ID NO: 444574 - DNA, 19 bp, Mus musculus
  siRNA target sequence for Hlx (NM_008250.1,1295-1313).
cccgtgctgtcttttccaa

SEQ ID NO: 444575 - DNA, 19 bp, Mus musculus
  siRNA target sequence for Hlx (NM_008250.1,1724-1742).
gtggtagcagcttcagttt

SEQ ID NO: 444576 - DNA, 19 bp, Mus musculus
  siRNA target sequence for Hlxb9 (NM_019944.1,294-312).
cctcgcgactacagtatct

SEQ ID NO: 444577 - DNA, 19 bp, Mus musculus
  siRNA target sequence for Hlxb9 (NM_019944.1,673-691).
ggacacccggtctacagtt

SEQ ID NO: 444578 - DNA, 19 bp, Mus musculus
  siRNA target sequence for Hlxb9 (NM_019944.1,674-692).
gacacccggtctacagtta

SEQ ID NO: 444579 - DNA, 19 bp, Mus musculus
  siRNA target sequence for Hlxb9 (NM_019944.1,676-694).
cacccggtctacagttatt

SEQ ID NO: 444580 - DNA, 19 bp, Mus musculus
  siRNA target sequence for Hlxb9 (NM_019944.1,970-988).
cagttcaagctcaacaagt

SEQ ID NO: 444581 - DNA, 19 bp, Mus musculus
  siRNA target sequence for Hlxb9 (NM_019944.1,995-1013).
ctcgacccaagcgttttga

SEQ ID NO: 444582 - DNA, 19 bp, Mus musculus
  siRNA target sequence for Hlxb9 (NM_019944.1,1359-1377).
ctcgcctcctccaagacta

SEQ ID NO: 444583 - DNA, 19 bp, Mus musculus
  siRNA target sequence for Hmg20b (NM_010440.1,471-489).
gttcgcttcctgaatgaga

SEQ ID NO: 444584 - DNA, 19 bp, Mus musculus
  siRNA target sequence for Hmg20b (NM_010440.1,532-550).
cggagatcacgaagatgtt

SEQ ID NO: 444585 - DNA, 19 bp, Mus musculus
  siRNA target sequence for Hmg20b (NM_010440.1,615-633).
gagaaacagcagtacttga

SEQ ID NO: 444586 - DNA, 19 bp, Mus musculus
  siRNA target sequence for Hmg20b (NM_010440.1,671-689).
ggtctgcactgagaagatt

SEQ ID NO: 444587 - DNA, 19 bp, Mus musculus
  siRNA target sequence for Hmg20b (NM_010440.1,674-692).
ctgcactgagaagattcaa

SEQ ID NO: 444588 - DNA, 19 bp, Mus musculus
  siRNA target sequence for Hmg20b (NM_010440.1,797-815).
catcttcacggaagagttt

SEQ ID NO: 444589 - DNA, 19 bp, Mus musculus
  siRNA target sequence for Hmg20b (NM_010440.1,1068-1086).
ctcgggacgctggactttt

SEQ ID NO: 444590 - DNA, 19 bp, Mus musculus
  siRNA target sequence for Hmg20b (NM_010440.1,1071-1089).
gggacgctggacttttaca

SEQ ID NO: 444591 - DNA, 19 bp, Mus musculus
  siRNA target sequence for Hmg20b (NM_010440.1,1072-1090).
ggacgctggacttttacat

SEQ ID NO: 444592 - DNA, 19 bp, Mus musculus
  siRNA target sequence for Hmx3 (NM_008257.2,543-561).
ctcggaggaaggcaaaaaa

SEQ ID NO: 444593 - DNA, 19 bp, Mus musculus
  siRNA target sequence for Hmx3 (NM_008257.2,670-688).
gcgtgccgcaaaaagaaga

SEQ ID NO: 444594 - DNA, 19 bp, Mus musculus
  siRNA target sequence for Hmx3 (NM_008257.2,1009-1027).
ccgcacccagtctactact

SEQ ID NO: 444595 - DNA, 19 bp, Mus musculus
  siRNA target sequence for Hnf4 (NM_008261.1,174-192).
gaaggtgccaacctcaatt

SEQ ID NO: 444596 - DNA, 19 bp, Mus musculus
  siRNA target sequence for Hnf4 (NM_008261.1,177-195).
ggtgccaacctcaattcat

SEQ ID NO: 444597 - DNA, 19 bp, Mus musculus
  siRNA target sequence for Hnf4 (NM_008261.1,334-352).
ggtttagccgacaatgtgt

SEQ ID NO: 444598 - DNA, 19 bp, Mus musculus
  siRNA target sequence for Hnf4 (NM_008261.1,381-399).
cgttactgcaggcttaaga

SEQ ID NO: 444599 - DNA, 19 bp, Mus musculus
  siRNA target sequence for Hnf4 (NM_008261.1,422-440).
gaaggaagctgtccaaaat

SEQ ID NO: 444600 - DNA, 19 bp, Mus musculus
  siRNA target sequence for Hnf4 (NM_008261.1,569-587).
cattcgggcaaagaagatt

SEQ ID NO: 444601 - DNA, 19 bp, Mus musculus
  siRNA target sequence for Hnf4 (NM_008261.1,639-657).
gtcgagtgggccaagtaca

SEQ ID NO: 444602 - DNA, 19 bp, Mus musculus
  siRNA target sequence for Hnf4 (NM_008261.1,1243-1261).
ccaatgtcattgttgctaa

SEQ ID NO: 444603 - DNA, 19 bp, Mus musculus
  siRNA target sequence for Hnf4 (NM_008261.1,1363-1381).
gctcgggatctgaatccta

SEQ ID NO: 444604 - DNA, 19 bp, Mus musculus
  siRNA target sequence for Hnf4g (NM_013920.1,264-282).
gccccagagaccacaagta

SEQ ID NO: 444605 - DNA, 19 bp, Mus musculus
  siRNA target sequence for Hnf4g (NM_013920.1,267-285).
ccagagaccacaagtatga

SEQ ID NO: 444606 - DNA, 19 bp, Mus musculus
  siRNA target sequence for Hnf4g (NM_013920.1,402-420).
cggaagagtcatgtttatt

SEQ ID NO: 444607 - DNA, 19 bp, Mus musculus
  siRNA target sequence for Hnf4g (NM_013920.1,433-451).
gtcggcagtgtgttgttga

SEQ ID NO: 444608 - DNA, 19 bp, Mus musculus
  siRNA target sequence for Hnf4g (NM_013920.1,436-454).
ggcagtgtgttgttgacaa

SEQ ID NO: 444609 - DNA, 19 bp, Mus musculus
  siRNA target sequence for Hnf4g (NM_013920.1,444-462).
gttgttgacaaggacaaaa

SEQ ID NO: 444610 - DNA, 19 bp, Mus musculus
  siRNA target sequence for Hnf4g (NM_013920.1,447-465).
gttgacaaggacaaaagga

SEQ ID NO: 444611 - DNA, 19 bp, Mus musculus
  siRNA target sequence for Hnf4g (NM_013920.1,473-491).
cagatactgtcgattaaga

SEQ ID NO: 444612 - DNA, 19 bp, Mus musculus
  siRNA target sequence for Hnf4g (NM_013920.1,475-493).
gatactgtcgattaagaaa

SEQ ID NO: 444613 - DNA, 19 bp, Mus musculus
  siRNA target sequence for Hnf4g (NM_013920.1,479-497).
ctgtcgattaagaaagtgt

SEQ ID NO: 444614 - DNA, 19 bp, Mus musculus
  siRNA target sequence for Hnf4g (NM_013920.1,481-499).
gtcgattaagaaagtgttt

SEQ ID NO: 444615 - DNA, 19 bp, Mus musculus
  siRNA target sequence for Hnf4g (NM_013920.1,534-552).
gaacgcgacagaatcagta

SEQ ID NO: 444616 - DNA, 19 bp, Mus musculus
  siRNA target sequence for Hnf4g (NM_013920.1,537-555).
cgcgacagaatcagtacaa

SEQ ID NO: 444617 - DNA, 19 bp, Mus musculus
  siRNA target sequence for Hnf4g (NM_013920.1,577-595).
gcaacatcccctccataaa

SEQ ID NO: 444618 - DNA, 19 bp, Mus musculus
  siRNA target sequence for Hnf4g (NM_013920.1,581-599).
catcccctccataaacact

SEQ ID NO: 444619 - DNA, 19 bp, Mus musculus
  siRNA target sequence for Hnf4g (NM_013920.1,615-633).
gtgaggtcttgccagattt

SEQ ID NO: 444620 - DNA, 19 bp, Mus musculus
  siRNA target sequence for Hnf4g (NM_013920.1,647-665).
cagttccagcactgacata

SEQ ID NO: 444621 - DNA, 19 bp, Mus musculus
  siRNA target sequence for Hnf4g (NM_013920.1,649-667).
gttccagcactgacataaa

SEQ ID NO: 444622 - DNA, 19 bp, Mus musculus
  siRNA target sequence for Hnf4g (NM_013920.1,685-703).
gcatcagtgacgtttgtga

SEQ ID NO: 444623 - DNA, 19 bp, Mus musculus
  siRNA target sequence for Hnf4g (NM_013920.1,732-750).
gtggaatgggccaaataca

SEQ ID NO: 444624 - DNA, 19 bp, Mus musculus
  siRNA target sequence for Hnf4g (NM_013920.1,839-857).
gagatccatgatgtataaa

SEQ ID NO: 444625 - DNA, 19 bp, Mus musculus
  siRNA target sequence for Hnf4g (NM_013920.1,844-862).
ccatgatgtataaagatat

SEQ ID NO: 444626 - DNA, 19 bp, Mus musculus
  siRNA target sequence for Hnf4g (NM_013920.1,874-892).
gaaaccactatgttattca

SEQ ID NO: 444627 - DNA, 19 bp, Mus musculus
  siRNA target sequence for Hnf4g (NM_013920.1,962-980).
ccaagagatccagatagat

SEQ ID NO: 444628 - DNA, 19 bp, Mus musculus
  siRNA target sequence for Hnf4g (NM_013920.1,998-1016).
cttgaaggccattgtgttt

SEQ ID NO: 444629 - DNA, 19 bp, Mus musculus
  siRNA target sequence for Hnf4g (NM_013920.1,1048-1066).
ctgtgaagattaagaacat

SEQ ID NO: 444630 - DNA, 19 bp, Mus musculus
  siRNA target sequence for Hnf4g (NM_013920.1,1214-1232).
gttcggcatggtcaaaatt

SEQ ID NO: 444631 - DNA, 19 bp, Mus musculus
  siRNA target sequence for Hnf4g (NM_013920.1,1259-1277).
gggtggtgctgccaatgat

SEQ ID NO: 444632 - DNA, 19 bp, Mus musculus
  siRNA target sequence for Hnf4g (NM_013920.1,1282-1300).
gtcatctccatcatccaat

SEQ ID NO: 444633 - DNA, 19 bp, Mus musculus
  siRNA target sequence for Hnf4g (NM_013920.1,1301-1319).
gcacccacatttatctcaa

SEQ ID NO: 444634 - DNA, 19 bp, Mus musculus
  siRNA target sequence for Hnf4g (NM_013920.1,1324-1342).
cactaactgggcaaactat

SEQ ID NO: 444635 - DNA, 19 bp, Mus musculus
  siRNA target sequence for Hnf4g (NM_013920.1,1358-1376).
gtccacactggttcataca

SEQ ID NO: 444636 - DNA, 19 bp, Mus musculus
  siRNA target sequence for Hnf4g (NM_013920.1,1428-1446).
ggacaagaaccgtacaaaa

SEQ ID NO: 444637 - DNA, 19 bp, Mus musculus
  siRNA target sequence for Hnf4g (NM_013920.1,1431-1449).
caagaaccgtacaaaatta

SEQ ID NO: 444638 - DNA, 19 bp, Mus musculus
  siRNA target sequence for Hnf4g (NM_013920.1,1479-1497).
caatccctctctaagcaaa

SEQ ID NO: 444639 - DNA, 19 bp, Mus musculus
  siRNA target sequence for Homez (NM_183174.1,448-466).
ctccgctgcggcattagct

SEQ ID NO: 444640 - DNA, 19 bp, Mus musculus
  siRNA target sequence for Homez (NM_183174.1,465-483).
ctggtcatctgaagagata

SEQ ID NO: 444641 - DNA, 19 bp, Mus musculus
  siRNA target sequence for Homez (NM_183174.1,467-485).
ggtcatctgaagagataga

SEQ ID NO: 444642 - DNA, 19 bp, Mus musculus
  siRNA target sequence for Homez (NM_183174.1,514-532).
cgagatcagctccttttca

SEQ ID NO: 444643 - DNA, 19 bp, Mus musculus
  siRNA target sequence for Homez (NM_183174.1,515-533).
gagatcagctccttttcaa

SEQ ID NO: 444644 - DNA, 19 bp, Mus musculus
  siRNA target sequence for Homez (NM_183174.1,640-658).
gagcagcccactcatatga

SEQ ID NO: 444645 - DNA, 19 bp, Mus musculus
  siRNA target sequence for Homez (NM_183174.1,642-660).
gcagcccactcatatgaaa

SEQ ID NO: 444646 - DNA, 19 bp, Mus musculus
  siRNA target sequence for Homez (NM_183174.1,725-743).
ctaaggagcctctgatgat

SEQ ID NO: 444647 - DNA, 19 bp, Mus musculus
  siRNA target sequence for Homez (NM_183174.1,872-890).
ctgtccatcagccagataa

SEQ ID NO: 444648 - DNA, 19 bp, Mus musculus
  siRNA target sequence for Homez (NM_183174.1,891-909).
gcccgcatcggtctcatta

SEQ ID NO: 444649 - DNA, 19 bp, Mus musculus
  siRNA target sequence for Homez (NM_183174.1,893-911).
ccgcatcggtctcattact

SEQ ID NO: 444650 - DNA, 19 bp, Mus musculus
  siRNA target sequence for Homez (NM_183174.1,894-912).
cgcatcggtctcattactt

SEQ ID NO: 444651 - DNA, 19 bp, Mus musculus
  siRNA target sequence for Homez (NM_183174.1,984-1002).
ccaggcattggctaatgga

SEQ ID NO: 444652 - DNA, 19 bp, Mus musculus
  siRNA target sequence for Homez (NM_183174.1,985-1003).
caggcattggctaatggaa

SEQ ID NO: 444653 - DNA, 19 bp, Mus musculus
  siRNA target sequence for Homez (NM_183174.1,1100-1118).
ggccccaaaggctatggaa

SEQ ID NO: 444654 - DNA, 19 bp, Mus musculus
  siRNA target sequence for Homez (NM_183174.1,1101-1119).
gccccaaaggctatggaat

SEQ ID NO: 444655 - DNA, 19 bp, Mus musculus
  siRNA target sequence for Homez (NM_183174.1,1102-1120).
ccccaaaggctatggaata

SEQ ID NO: 444656 - DNA, 19 bp, Mus musculus
  siRNA target sequence for Homez (NM_183174.1,1105-1123).
caaaggctatggaataact

SEQ ID NO: 444657 - DNA, 19 bp, Mus musculus
  siRNA target sequence for Homez (NM_183174.1,1141-1159).
ggccccacagaataccttt

SEQ ID NO: 444658 - DNA, 19 bp, Mus musculus
  siRNA target sequence for Homez (NM_183174.1,1170-1188).
gcaacaccagcgaaagact

SEQ ID NO: 444659 - DNA, 19 bp, Mus musculus
  siRNA target sequence for Homez (NM_183174.1,1185-1203).
gactaagcggaaaaccaaa

SEQ ID NO: 444660 - DNA, 19 bp, Mus musculus
  siRNA target sequence for Homez (NM_183174.1,1218-1236).
cctcaaatcctttttccta

SEQ ID NO: 444661 - DNA, 19 bp, Mus musculus
  siRNA target sequence for Homez (NM_183174.1,1247-1265).
gggcacgacgagaagatta

SEQ ID NO: 444662 - DNA, 19 bp, Mus musculus
  siRNA target sequence for Homez (NM_183174.1,1250-1268).
cacgacgagaagattacca

SEQ ID NO: 444663 - DNA, 19 bp, Mus musculus
  siRNA target sequence for Hoxa1 (NM_010449.1,156-174).
gaccatgggattacaactt

SEQ ID NO: 444664 - DNA, 19 bp, Mus musculus
  siRNA target sequence for Hoxa1 (NM_010449.1,387-405).
ccttatggcccctatggat

SEQ ID NO: 444665 - DNA, 19 bp, Mus musculus
  siRNA target sequence for Hoxa1 (NM_010449.1,394-412).
gcccctatggattaaatca

SEQ ID NO: 444666 - DNA, 19 bp, Mus musculus
  siRNA target sequence for Hoxa1 (NM_010449.1,442-460).
cgtgcgctcccgctgttta

SEQ ID NO: 444667 - DNA, 19 bp, Mus musculus
  siRNA target sequence for Hoxa1 (NM_010449.1,500-518).
ccaccaccagggttatgct

SEQ ID NO: 444668 - DNA, 19 bp, Mus musculus
  siRNA target sequence for Hoxa1 (NM_010449.1,532-550).
gctcgccccagtacattca

SEQ ID NO: 444669 - DNA, 19 bp, Mus musculus
  siRNA target sequence for Hoxa1 (NM_010449.1,542-560).
gtacattcaccactcatat

SEQ ID NO: 444670 - DNA, 19 bp, Mus musculus
  siRNA target sequence for Hoxa1 (NM_010449.1,545-563).
cattcaccactcatatgga

SEQ ID NO: 444671 - DNA, 19 bp, Mus musculus
  siRNA target sequence for Hoxa1 (NM_010449.1,579-597).
ctggccctggccacgtata

SEQ ID NO: 444672 - DNA, 19 bp, Mus musculus
  siRNA target sequence for Hoxa1 (NM_010449.1,581-599).
ggccctggccacgtataat

SEQ ID NO: 444673 - DNA, 19 bp, Mus musculus
  siRNA target sequence for Hoxa1 (NM_010449.1,582-600).
gccctggccacgtataata

SEQ ID NO: 444674 - DNA, 19 bp, Mus musculus
  siRNA target sequence for Hoxa1 (NM_010449.1,583-601).
ccctggccacgtataataa

SEQ ID NO: 444675 - DNA, 19 bp, Mus musculus
  siRNA target sequence for Hoxa1 (NM_010449.1,585-603).
ctggccacgtataataact

SEQ ID NO: 444676 - DNA, 19 bp, Mus musculus
  siRNA target sequence for Hoxa1 (NM_010449.1,669-687).
ccagcgcagacctttgact

SEQ ID NO: 444677 - DNA, 19 bp, Mus musculus
  siRNA target sequence for Hoxa1 (NM_010449.1,680-698).
ctttgactggatgaaagtt

SEQ ID NO: 444678 - DNA, 19 bp, Mus musculus
  siRNA target sequence for Hoxa1 (NM_010449.1,684-702).
gactggatgaaagttaaaa

SEQ ID NO: 444679 - DNA, 19 bp, Mus musculus
  siRNA target sequence for Hoxa1 (NM_010449.1,759-777).
gcagtgcgcaccaatttca

SEQ ID NO: 444680 - DNA, 19 bp, Mus musculus
  siRNA target sequence for Hoxa1 (NM_010449.1,859-877).
cgtccctacagctcaatga

SEQ ID NO: 444681 - DNA, 19 bp, Mus musculus
  siRNA target sequence for Hoxa1 (NM_010449.1,969-987).
cctggcagcgatgagaaaa

SEQ ID NO: 444682 - DNA, 19 bp, Mus musculus
  siRNA target sequence for Hoxa1 (NM_010449.1,983-1001).
gaaaacggaagaatcatct

SEQ ID NO: 444683 - DNA, 19 bp, Mus musculus
  siRNA target sequence for Hoxa1 (NM_010449.1,989-1007).
ggaagaatcatctgagaaa

SEQ ID NO: 444684 - DNA, 19 bp, Mus musculus
  siRNA target sequence for Hoxa10 (NM_008263.1,75-93).
cctgccgcgaactcctttt

SEQ ID NO: 444685 - DNA, 19 bp, Mus musculus
  siRNA target sequence for Hoxa10 (NM_008263.1,79-97).
ccgcgaactcctttttggt

SEQ ID NO: 444686 - DNA, 19 bp, Mus musculus
  siRNA target sequence for Hoxa10 (NM_008263.1,254-272).
gggcagcaagcgtaatgaa

SEQ ID NO: 444687 - DNA, 19 bp, Mus musculus
  siRNA target sequence for Hoxa10 (NM_008263.1,486-504).
caggccacttcgtgttctt

SEQ ID NO: 444688 - DNA, 19 bp, Mus musculus
  siRNA target sequence for Hoxa10 (NM_008263.1,488-506).
ggccacttcgtgttctttt

SEQ ID NO: 444689 - DNA, 19 bp, Mus musculus
  siRNA target sequence for Hoxa10 (NM_008263.1,502-520).
cttttgcgcagaacatcaa

SEQ ID NO: 444690 - DNA, 19 bp, Mus musculus
  siRNA target sequence for Hoxa10 (NM_008263.1,937-955).
ccccttcagaaaacagtaa

SEQ ID NO: 444691 - DNA, 19 bp, Mus musculus
  siRNA target sequence for Hoxa11 (NM_010450.1,412-430).
gccgtctcgtccaatttct

SEQ ID NO: 444692 - DNA, 19 bp, Mus musculus
  siRNA target sequence for Hoxa11 (NM_010450.1,413-431).
ccgtctcgtccaatttcta

SEQ ID NO: 444693 - DNA, 19 bp, Mus musculus
  siRNA target sequence for Hoxa11 (NM_010450.1,414-432).
cgtctcgtccaatttctat

SEQ ID NO: 444694 - DNA, 19 bp, Mus musculus
  siRNA target sequence for Hoxa11 (NM_010450.1,415-433).
gtctcgtccaatttctata

SEQ ID NO: 444695 - DNA, 19 bp, Mus musculus
  siRNA target sequence for Hoxa11 (NM_010450.1,463-481).
caggctttcgaccagtttt

SEQ ID NO: 444696 - DNA, 19 bp, Mus musculus
  siRNA target sequence for Hoxa11 (NM_010450.1,467-485).
ctttcgaccagtttttcga

SEQ ID NO: 444697 - DNA, 19 bp, Mus musculus
  siRNA target sequence for Hoxa11 (NM_010450.1,761-779).
gccaacgcacccgcaaaaa

SEQ ID NO: 444698 - DNA, 19 bp, Mus musculus
  siRNA target sequence for Hoxa11 (NM_010450.1,950-968).
gagaccggttacagtacta

SEQ ID NO: 444699 - DNA, 19 bp, Mus musculus
  siRNA target sequence for Hoxa2 (NM_010451.1,196-214).
cgaatttgagcgagagatt

SEQ ID NO: 444700 - DNA, 19 bp, Mus musculus
  siRNA target sequence for Hoxa2 (NM_010451.1,209-227).
gagattggttttatcaata

SEQ ID NO: 444701 - DNA, 19 bp, Mus musculus
  siRNA target sequence for Hoxa2 (NM_010451.1,263-281).
ccccctgtcgctgatacat

SEQ ID NO: 444702 - DNA, 19 bp, Mus musculus
  siRNA target sequence for Hoxa2 (NM_010451.1,264-282).
cccctgtcgctgatacatt

SEQ ID NO: 444703 - DNA, 19 bp, Mus musculus
  siRNA target sequence for Hoxa2 (NM_010451.1,269-287).
gtcgctgatacatttcaaa

SEQ ID NO: 444704 - DNA, 19 bp, Mus musculus
  siRNA target sequence for Hoxa2 (NM_010451.1,271-289).
cgctgatacatttcaaagt

SEQ ID NO: 444705 - DNA, 19 bp, Mus musculus
  siRNA target sequence for Hoxa2 (NM_010451.1,460-478).
cctgcagccgcctgagtat

SEQ ID NO: 444706 - DNA, 19 bp, Mus musculus
  siRNA target sequence for Hoxa2 (NM_010451.1,684-702).
gaccccgcagggtggaaat

SEQ ID NO: 444707 - DNA, 19 bp, Mus musculus
  siRNA target sequence for Hoxa2 (NM_010451.1,918-936).
ggtacacttttcagcaaaa

SEQ ID NO: 444708 - DNA, 19 bp, Mus musculus
  siRNA target sequence for Hoxa2 (NM_010451.1,1058-1076).
cctaactgcttgtcaacaa

SEQ ID NO: 444709 - DNA, 19 bp, Mus musculus
  siRNA target sequence for Hoxa2 (NM_010451.1,1059-1077).
ctaactgcttgtcaacaat

SEQ ID NO: 444710 - DNA, 19 bp, Mus musculus
  siRNA target sequence for Hoxa2 (NM_010451.1,1089-1107).
gtggagctggcctaaacaa

SEQ ID NO: 444711 - DNA, 19 bp, Mus musculus
  siRNA target sequence for Hoxa2 (NM_010451.1,1092-1110).
gagctggcctaaacaatga

SEQ ID NO: 444712 - DNA, 19 bp, Mus musculus
  siRNA target sequence for Hoxa2 (NM_010451.1,1241-1259).
gctgacagctttgactttt

SEQ ID NO: 444713 - DNA, 19 bp, Mus musculus
  siRNA target sequence for Hoxa2 (NM_010451.1,1246-1264).
cagctttgacttttttaca

SEQ ID NO: 444714 - DNA, 19 bp, Mus musculus
  siRNA target sequence for Hoxa5 (NM_010453.2,286-304).
ccggactaccagttgcata

SEQ ID NO: 444715 - DNA, 19 bp, Mus musculus
  siRNA target sequence for Hoxa5 (NM_010453.2,287-305).
cggactaccagttgcataa

SEQ ID NO: 444716 - DNA, 19 bp, Mus musculus
  siRNA target sequence for Hoxa5 (NM_010453.2,291-309).
ctaccagttgcataattat

SEQ ID NO: 444717 - DNA, 19 bp, Mus musculus
  siRNA target sequence for Hoxa5 (NM_010453.2,294-312).
ccagttgcataattatgga

SEQ ID NO: 444718 - DNA, 19 bp, Mus musculus
  siRNA target sequence for Hoxa5 (NM_010453.2,300-318).
gcataattatggagatcat

SEQ ID NO: 444719 - DNA, 19 bp, Mus musculus
  siRNA target sequence for Hoxa5 (NM_010453.2,301-319).
cataattatggagatcata

SEQ ID NO: 444720 - DNA, 19 bp, Mus musculus
  siRNA target sequence for Hoxa5 (NM_010453.2,320-338).
gttccgtgagcgaacaatt

SEQ ID NO: 444721 - DNA, 19 bp, Mus musculus
  siRNA target sequence for Hoxa5 (NM_010453.2,369-387).
gtacggctacggctacaat

SEQ ID NO: 444722 - DNA, 19 bp, Mus musculus
  siRNA target sequence for Hoxa5 (NM_010453.2,777-795).
gcgcaagctgcacattagt

SEQ ID NO: 444723 - DNA, 19 bp, Mus musculus
  siRNA target sequence for Hoxa5 (NM_010453.2,779-797).
gcaagctgcacattagtca

SEQ ID NO: 444724 - DNA, 19 bp, Mus musculus
  siRNA target sequence for Hoxa5 (NM_010453.2,787-805).
cacattagtcacgacaata

SEQ ID NO: 444725 - DNA, 19 bp, Mus musculus
  siRNA target sequence for Hoxa5 (NM_010453.2,789-807).
cattagtcacgacaatata

SEQ ID NO: 444726 - DNA, 19 bp, Mus musculus
  siRNA target sequence for Hoxa5 (NM_010453.2,902-920).
gccgaagaaggatcgaaat

SEQ ID NO: 444727 - DNA, 19 bp, Mus musculus
  siRNA target sequence for Hoxa5 (NM_010453.2,903-921).
ccgaagaaggatcgaaata

SEQ ID NO: 444728 - DNA, 19 bp, Mus musculus
  siRNA target sequence for Hoxa5 (NM_010453.2,936-954).
cctctccgagagacaaatt

SEQ ID NO: 444729 - DNA, 19 bp, Mus musculus
  siRNA target sequence for Hoxa5 (NM_010453.2,937-955).
ctctccgagagacaaatta

SEQ ID NO: 444730 - DNA, 19 bp, Mus musculus
  siRNA target sequence for Hoxa6 (NM_010454.1,137-155).
gtcttccggacaagacata

SEQ ID NO: 444731 - DNA, 19 bp, Mus musculus
  siRNA target sequence for Hoxa6 (NM_010454.1,139-157).
cttccggacaagacataca

SEQ ID NO: 444732 - DNA, 19 bp, Mus musculus
  siRNA target sequence for Hoxa6 (NM_010454.1,263-281).
cctcaccctcgggcaataa

SEQ ID NO: 444733 - DNA, 19 bp, Mus musculus
  siRNA target sequence for Hoxa6 (NM_010454.1,266-284).
caccctcgggcaataacaa

SEQ ID NO: 444734 - DNA, 19 bp, Mus musculus
  siRNA target sequence for Hoxa6 (NM_010454.1,376-394).
ggcaccgaccggaagtaca

SEQ ID NO: 444735 - DNA, 19 bp, Mus musculus
  siRNA target sequence for Hoxa7 (NM_010455.1,1171-1189).
gttcttcgtattatgtgaa

SEQ ID NO: 444736 - DNA, 19 bp, Mus musculus
  siRNA target sequence for Hoxa7 (NM_010455.1,1185-1203).
gtgaacgcgctttttagca

SEQ ID NO: 444737 - DNA, 19 bp, Mus musculus
  siRNA target sequence for Hoxa7 (NM_010455.1,1187-1205).
gaacgcgctttttagcaaa

SEQ ID NO: 444738 - DNA, 19 bp, Mus musculus
  siRNA target sequence for Hoxa7 (NM_010455.1,1191-1209).
gcgctttttagcaaatata

SEQ ID NO: 444739 - DNA, 19 bp, Mus musculus
  siRNA target sequence for Hoxa9 (NM_010456.1,1647-1665).
gccttatggcattaaacct

SEQ ID NO: 444740 - DNA, 19 bp, Mus musculus
  siRNA target sequence for Hoxa9 (NM_010456.1,1702-1720).
cttgacactcacactttgt

SEQ ID NO: 444741 - DNA, 19 bp, Mus musculus
  siRNA target sequence for Hoxa9 (NM_010456.1,1748-1766).
ctccagttgatagagaaaa

SEQ ID NO: 444742 - DNA, 19 bp, Mus musculus
  siRNA target sequence for Hoxa9 (NM_010456.1,1780-1798).
ggcgccttctccgaaaaca

SEQ ID NO: 444743 - DNA, 19 bp, Mus musculus
  siRNA target sequence for Hoxa9 (NM_010456.1,1781-1799).
gcgccttctccgaaaacaa

SEQ ID NO: 444744 - DNA, 19 bp, Mus musculus
  siRNA target sequence for Hoxa9 (NM_010456.1,1782-1800).
cgccttctccgaaaacaat

SEQ ID NO: 444745 - DNA, 19 bp, Mus musculus
  siRNA target sequence for Hoxa9 (NM_010456.1,2055-2073).
caacaaggaccgagcaaaa

SEQ ID NO: 444746 - DNA, 19 bp, Mus musculus
  siRNA target sequence for Hoxb13 (NM_008267.2,335-353).
ggaggcgggtactactctt

SEQ ID NO: 444747 - DNA, 19 bp, Mus musculus
  siRNA target sequence for Hoxb13 (NM_008267.2,727-745).
ccgccgaggccgcaaaaaa

SEQ ID NO: 444748 - DNA, 19 bp, Mus musculus
  siRNA target sequence for Hoxb13 (NM_008267.2,788-806).
gagtatgcagccaacaagt

SEQ ID NO: 444749 - DNA, 19 bp, Mus musculus
  siRNA target sequence for Hoxb13 (NM_008267.2,790-808).
gtatgcagccaacaagttt

SEQ ID NO: 444750 - DNA, 19 bp, Mus musculus
  siRNA target sequence for Hoxb13 (NM_008267.2,797-815).
gccaacaagtttatcacta

SEQ ID NO: 444751 - DNA, 19 bp, Mus musculus
  siRNA target sequence for Hoxb3 (NM_010458.1,1595-1613).
ccctctacggcctcaatca

SEQ ID NO: 444752 - DNA, 19 bp, Mus musculus
  siRNA target sequence for Hoxb3 (NM_010458.1,1733-1751).
caccgcctcagggtagaat

SEQ ID NO: 444753 - DNA, 19 bp, Mus musculus
  siRNA target sequence for Hoxb4 (NM_010459.2,131-149).
cgtgcgaggagtattcaca

SEQ ID NO: 444754 - DNA, 19 bp, Mus musculus
  siRNA target sequence for Hoxb4 (NM_010459.2,498-516).
cccctggatgcgcaaagtt

SEQ ID NO: 444755 - DNA, 19 bp, Mus musculus
  siRNA target sequence for Hoxb5 (NM_008268.1,151-169).
ccggactatcagttgctaa

SEQ ID NO: 444756 - DNA, 19 bp, Mus musculus
  siRNA target sequence for Hoxb5 (NM_008268.1,152-170).
cggactatcagttgctaaa

SEQ ID NO: 444757 - DNA, 19 bp, Mus musculus
  siRNA target sequence for Hoxb5 (NM_008268.1,153-171).
ggactatcagttgctaaat

SEQ ID NO: 444758 - DNA, 19 bp, Mus musculus
  siRNA target sequence for Hoxb5 (NM_008268.1,154-172).
gactatcagttgctaaatt

SEQ ID NO: 444759 - DNA, 19 bp, Mus musculus
  siRNA target sequence for Hoxb5 (NM_008268.1,229-247).
ggctcttacggctacaatt

SEQ ID NO: 444760 - DNA, 19 bp, Mus musculus
  siRNA target sequence for Hoxb5 (NM_008268.1,233-251).
cttacggctacaattacaa

SEQ ID NO: 444761 - DNA, 19 bp, Mus musculus
  siRNA target sequence for Hoxb5 (NM_008268.1,483-501).
cgccaatttcaccgaaata

SEQ ID NO: 444762 - DNA, 19 bp, Mus musculus
  siRNA target sequence for Hoxb5 (NM_008268.1,612-630).
ggggcagactccacagata

SEQ ID NO: 444763 - DNA, 19 bp, Mus musculus
  siRNA target sequence for Hoxb5 (NM_008268.1,652-670).
cacatcagccacgatatga

SEQ ID NO: 444764 - DNA, 19 bp, Mus musculus
  siRNA target sequence for Hoxb5 (NM_008268.1,654-672).
catcagccacgatatgact

SEQ ID NO: 444765 - DNA, 19 bp, Mus musculus
  siRNA target sequence for Hoxb5 (NM_008268.1,861-879).
caaactgaaaagtatgagt

SEQ ID NO: 444766 - DNA, 19 bp, Mus musculus
  siRNA target sequence for Hoxb7 (NM_010460.1,2234-2252).
ggagccttccccgaacaaa

SEQ ID NO: 444767 - DNA, 19 bp, Mus musculus
  siRNA target sequence for Hoxb7 (NM_010460.1,2239-2257).
cttccccgaacaaacttct

SEQ ID NO: 444768 - DNA, 19 bp, Mus musculus
  siRNA target sequence for Hoxb7 (NM_010460.1,2405-2423).
gaaccgagttccttcaaca

SEQ ID NO: 444769 - DNA, 19 bp, Mus musculus
  siRNA target sequence for Hoxb8 (NM_010461.1,1681-1699).
caagtttcccagcagtaaa

SEQ ID NO: 444770 - DNA, 19 bp, Mus musculus
  siRNA target sequence for Hoxb9 (NM_008270.1,46-64).
gggacgcttagcagctatt

SEQ ID NO: 444771 - DNA, 19 bp, Mus musculus
  siRNA target sequence for Hoxb9 (NM_008270.1,47-65).
ggacgcttagcagctatta

SEQ ID NO: 444772 - DNA, 19 bp, Mus musculus
  siRNA target sequence for Hoxb9 (NM_008270.1,48-66).
gacgcttagcagctattat

SEQ ID NO: 444773 - DNA, 19 bp, Mus musculus
  siRNA target sequence for Hoxb9 (NM_008270.1,99-117).
cgcgcctccagccaagttt

SEQ ID NO: 444774 - DNA, 19 bp, Mus musculus
  siRNA target sequence for Hoxb9 (NM_008270.1,427-445).
ggcacgcccgagtacagtt

SEQ ID NO: 444775 - DNA, 19 bp, Mus musculus
  siRNA target sequence for Hoxb9 (NM_008270.1,428-446).
gcacgcccgagtacagttt

SEQ ID NO: 444776 - DNA, 19 bp, Mus musculus
  siRNA target sequence for Hoxb9 (NM_008270.1,468-486).
ggctgtcctgtctaatcaa

SEQ ID NO: 444777 - DNA, 19 bp, Mus musculus
  siRNA target sequence for Hoxb9 (NM_008270.1,469-487).
gctgtcctgtctaatcaaa

SEQ ID NO: 444778 - DNA, 19 bp, Mus musculus
  siRNA target sequence for Hoxb9 (NM_008270.1,490-508).
gctggctacggggacaata

SEQ ID NO: 444779 - DNA, 19 bp, Mus musculus
  siRNA target sequence for Hoxb9 (NM_008270.1,493-511).
ggctacggggacaataaaa

SEQ ID NO: 444780 - DNA, 19 bp, Mus musculus
  siRNA target sequence for Hoxb9 (NM_008270.1,494-512).
gctacggggacaataaaat

SEQ ID NO: 444781 - DNA, 19 bp, Mus musculus
  siRNA target sequence for Hoxb9 (NM_008270.1,495-513).
ctacggggacaataaaatt

SEQ ID NO: 444782 - DNA, 19 bp, Mus musculus
  siRNA target sequence for Hoxb9 (NM_008270.1,668-686).
gggaccgcaggcatgaagt

SEQ ID NO: 444783 - DNA, 19 bp, Mus musculus
  siRNA target sequence for Hoxc12 (NM_010463.1,257-275).
ctcgcgtggaggatagcaa

SEQ ID NO: 444784 - DNA, 19 bp, Mus musculus
  siRNA target sequence for Hoxc12 (NM_010463.1,397-415).
cctgcgctcggcttcaagt

SEQ ID NO: 444785 - DNA, 19 bp, Mus musculus
  siRNA target sequence for Hoxc12 (NM_010463.1,503-521).
ccagttcgtccctactcaa

SEQ ID NO: 444786 - DNA, 19 bp, Mus musculus
  siRNA target sequence for Hoxc12 (NM_010463.1,517-535).
ctcaacgagggcaataaga

SEQ ID NO: 444787 - DNA, 19 bp, Mus musculus
  siRNA target sequence for Hoxc12 (NM_010463.1,735-753).
ctcggaccgcttgaatctt

SEQ ID NO: 444788 - DNA, 19 bp, Mus musculus
  siRNA target sequence for Hoxc12 (NM_010463.1,738-756).
ggaccgcttgaatcttagt

SEQ ID NO: 444789 - DNA, 19 bp, Mus musculus
  siRNA target sequence for Hoxc12 (NM_010463.1,741-759).
ccgcttgaatcttagtgat

SEQ ID NO: 444790 - DNA, 19 bp, Mus musculus
  siRNA target sequence for Hoxc12 (NM_010463.1,755-773).
gtgatcagcaggtcaagat

SEQ ID NO: 444791 - DNA, 19 bp, Mus musculus
  siRNA target sequence for Hoxc12 (NM_010463.1,823-841).
caagctctctccttcttct

SEQ ID NO: 444792 - DNA, 19 bp, Mus musculus
  siRNA target sequence for Hoxc13 (NM_010464.1,89-107).
ggccggagagccttatgta

SEQ ID NO: 444793 - DNA, 19 bp, Mus musculus
  siRNA target sequence for Hoxc13 (NM_010464.1,669-687).
cgcgctcatccctgttgaa

SEQ ID NO: 444794 - DNA, 19 bp, Mus musculus
  siRNA target sequence for Hoxc13 (NM_010464.1,696-714).
gcactgggctctttccaat

SEQ ID NO: 444795 - DNA, 19 bp, Mus musculus
  siRNA target sequence for Hoxc13 (NM_010464.1,883-901).
gagtacgcagccagcaaat

SEQ ID NO: 444796 - DNA, 19 bp, Mus musculus
  siRNA target sequence for Hoxc13 (NM_010464.1,982-1000).
cgacgcgtgaaagagaaaa

SEQ ID NO: 444797 - DNA, 19 bp, Mus musculus
  siRNA target sequence for Hoxc13 (NM_010464.1,983-1001).
gacgcgtgaaagagaaaaa

SEQ ID NO: 444798 - DNA, 19 bp, Mus musculus
  siRNA target sequence for Hoxc4 (NM_013553.1,360-378).
ctacatcgatccgaaattt

SEQ ID NO: 444799 - DNA, 19 bp, Mus musculus
  siRNA target sequence for Hoxc4 (NM_013553.1,363-381).
catcgatccgaaatttcct

SEQ ID NO: 444800 - DNA, 19 bp, Mus musculus
  siRNA target sequence for Hoxc4 (NM_013553.1,387-405).
cgaagaatattcgcaaaat

SEQ ID NO: 444801 - DNA, 19 bp, Mus musculus
  siRNA target sequence for Hoxc4 (NM_013553.1,391-409).
gaatattcgcaaaatagct

SEQ ID NO: 444802 - DNA, 19 bp, Mus musculus
  siRNA target sequence for Hoxc4 (NM_013553.1,418-436).
gaacacagtccggaatatt

SEQ ID NO: 444803 - DNA, 19 bp, Mus musculus
  siRNA target sequence for Hoxc4 (NM_013553.1,514-532).
cctgagcgtcagtatagct

SEQ ID NO: 444804 - DNA, 19 bp, Mus musculus
  siRNA target sequence for Hoxc4 (NM_013553.1,716-734).
gcaagcaacccatagtcta

SEQ ID NO: 444805 - DNA, 19 bp, Mus musculus
  siRNA target sequence for Hoxc4 (NM_013553.1,1102-1120).
gaggacatcaccaggttat

SEQ ID NO: 444806 - DNA, 19 bp, Mus musculus
  siRNA target sequence for Hoxc5 (NM_175730.2,81-99).
ctcctacgtagccaattca

SEQ ID NO: 444807 - DNA, 19 bp, Mus musculus
  siRNA target sequence for Hoxc5 (NM_175730.2,83-101).
cctacgtagccaattcatt

SEQ ID NO: 444808 - DNA, 19 bp, Mus musculus
  siRNA target sequence for Hoxc5 (NM_175730.2,87-105).
cgtagccaattcattctat

SEQ ID NO: 444809 - DNA, 19 bp, Mus musculus
  siRNA target sequence for Hoxc5 (NM_175730.2,88-106).
gtagccaattcattctata

SEQ ID NO: 444810 - DNA, 19 bp, Mus musculus
  siRNA target sequence for Hoxc5 (NM_175730.2,116-134).
ccaatatccctgcctataa

SEQ ID NO: 444811 - DNA, 19 bp, Mus musculus
  siRNA target sequence for Hoxc5 (NM_175730.2,124-142).
cctgcctataacatgcaaa

SEQ ID NO: 444812 - DNA, 19 bp, Mus musculus
  siRNA target sequence for Hoxc5 (NM_175730.2,127-145).
gcctataacatgcaaactt

SEQ ID NO: 444813 - DNA, 19 bp, Mus musculus
  siRNA target sequence for Hoxc5 (NM_175730.2,129-147).
ctataacatgcaaacttgt

SEQ ID NO: 444814 - DNA, 19 bp, Mus musculus
  siRNA target sequence for Hoxc5 (NM_175730.2,138-156).
gcaaacttgtgggaactat

SEQ ID NO: 444815 - DNA, 19 bp, Mus musculus
  siRNA target sequence for Hoxc5 (NM_175730.2,544-562).
cggtcccgaaccagttaca

SEQ ID NO: 444816 - DNA, 19 bp, Mus musculus
  siRNA target sequence for Hoxc5 (NM_175730.2,621-639).
ccgcaggcgcatagagatt

SEQ ID NO: 444817 - DNA, 19 bp, Mus musculus
  siRNA target sequence for Hoxc6 (NM_010465.1,191-209).
cccaacgtcgccctcaatt

SEQ ID NO: 444818 - DNA, 19 bp, Mus musculus
  siRNA target sequence for Hoxc6 (NM_010465.1,205-223).
caattccaccgcctatgat

SEQ ID NO: 444819 - DNA, 19 bp, Mus musculus
  siRNA target sequence for Hoxc6 (NM_010465.1,274-292).
ctactcgactcccttttat

SEQ ID NO: 444820 - DNA, 19 bp, Mus musculus
  siRNA target sequence for Hoxc6 (NM_010465.1,333-351).
cgtatgactatggatctaa

SEQ ID NO: 444821 - DNA, 19 bp, Mus musculus
  siRNA target sequence for Hoxc6 (NM_010465.1,334-352).
gtatgactatggatctaat

SEQ ID NO: 444822 - DNA, 19 bp, Mus musculus
  siRNA target sequence for Hoxc6 (NM_010465.1,340-358).
ctatggatctaattccttt

SEQ ID NO: 444823 - DNA, 19 bp, Mus musculus
  siRNA target sequence for Hoxc6 (NM_010465.1,420-438).
cctcaatcgctcaggattt

SEQ ID NO: 444824 - DNA, 19 bp, Mus musculus
  siRNA target sequence for Hoxc6 (NM_010465.1,421-439).
ctcaatcgctcaggatttt

SEQ ID NO: 444825 - DNA, 19 bp, Mus musculus
  siRNA target sequence for Hoxc8 (NM_010466.1,257-275).
gtcaaccccctgttttcca

SEQ ID NO: 444826 - DNA, 19 bp, Mus musculus
  siRNA target sequence for Hoxc8 (NM_010466.1,399-417).
cgcaccacgtccaagactt

SEQ ID NO: 444827 - DNA, 19 bp, Mus musculus
  siRNA target sequence for Hoxc8 (NM_010466.1,485-503).
cacggagacgcctccaaat

SEQ ID NO: 444828 - DNA, 19 bp, Mus musculus
  siRNA target sequence for Hoxc8 (NM_010466.1,488-506).
ggagacgcctccaaattct

SEQ ID NO: 444829 - DNA, 19 bp, Mus musculus
  siRNA target sequence for Hoxc8 (NM_010466.1,523-541).
ccccagacagtccctttat

SEQ ID NO: 444830 - DNA, 19 bp, Mus musculus
  siRNA target sequence for Hoxc8 (NM_010466.1,556-574).
ggcgagcgtggtgcaatat

SEQ ID NO: 444831 - DNA, 19 bp, Mus musculus
  siRNA target sequence for Hoxc8 (NM_010466.1,589-607).
ctccgccaacactaacagt

SEQ ID NO: 444832 - DNA, 19 bp, Mus musculus
  siRNA target sequence for Hoxc8 (NM_010466.1,615-633).
gacaaggccacttaaatca

SEQ ID NO: 444833 - DNA, 19 bp, Mus musculus
  siRNA target sequence for Hoxc8 (NM_010466.1,688-706).
gcgcagcggtcgacaaact

SEQ ID NO: 444834 - DNA, 19 bp, Mus musculus
  siRNA target sequence for Hoxc8 (NM_010466.1,740-758).
gagtttctctttaatcctt

SEQ ID NO: 444835 - DNA, 19 bp, Mus musculus
  siRNA target sequence for Hoxc9 (NM_008272.2,673-691).
catctctcacgacaatgaa

SEQ ID NO: 444836 - DNA, 19 bp, Mus musculus
  siRNA target sequence for Hoxc9 (NM_008272.2,760-778).
gccggactgtagcgatttt

SEQ ID NO: 444837 - DNA, 19 bp, Mus musculus
  siRNA target sequence for Hoxc9 (NM_008272.2,799-817).
caagccggctgtattcagt

SEQ ID NO: 444838 - DNA, 19 bp, Mus musculus
  siRNA target sequence for Hoxc9 (NM_008272.2,1035-1053).
gcagctacccggactacat

SEQ ID NO: 444839 - DNA, 19 bp, Mus musculus
  siRNA target sequence for Hoxc9 (NM_008272.2,1300-1318).
ggtggcccgtgttctcaat

SEQ ID NO: 444840 - DNA, 19 bp, Mus musculus
  siRNA target sequence for Hoxc9 (NM_008272.2,1304-1322).
gcccgtgttctcaatctca

SEQ ID NO: 444841 - DNA, 19 bp, Mus musculus
  siRNA target sequence for Hoxd1 (NM_010467.1,728-746).
cactttcgagtggatgaaa

SEQ ID NO: 444842 - DNA, 19 bp, Mus musculus
  siRNA target sequence for Hoxd1 (NM_010467.1,730-748).
ctttcgagtggatgaaagt

SEQ ID NO: 444843 - DNA, 19 bp, Mus musculus
  siRNA target sequence for Hoxd1 (NM_010467.1,773-791).
caaactgtccgaatatgga

SEQ ID NO: 444844 - DNA, 19 bp, Mus musculus
  siRNA target sequence for Hoxd1 (NM_010467.1,869-887).
caataagtacctaactaga

SEQ ID NO: 444845 - DNA, 19 bp, Mus musculus
  siRNA target sequence for Hoxd1 (NM_010467.1,899-917).
cgagatagccaactgttta

SEQ ID NO: 444846 - DNA, 19 bp, Mus musculus
  siRNA target sequence for Hoxd1 (NM_010467.1,1008-1026).
gcctctgtggcctcgatta

SEQ ID NO: 444847 - DNA, 19 bp, Mus musculus
  siRNA target sequence for Hoxd1 (NM_010467.1,1009-1027).
cctctgtggcctcgattaa

SEQ ID NO: 444848 - DNA, 19 bp, Mus musculus
  siRNA target sequence for Hoxd1 (NM_010467.1,1012-1030).
ctgtggcctcgattaagct

SEQ ID NO: 444849 - DNA, 19 bp, Mus musculus
  siRNA target sequence for Hoxd1 (NM_010467.1,1041-1059).
gaaacaagtcccatcaaat

SEQ ID NO: 444850 - DNA, 19 bp, Mus musculus
  siRNA target sequence for Hoxd1 (NM_010467.1,1055-1073).
caaatctggccggaatcta

SEQ ID NO: 444851 - DNA, 19 bp, Mus musculus
  siRNA target sequence for Hoxd10 (NM_013554.2,68-86).
ctctcctgctgctaatact

SEQ ID NO: 444852 - DNA, 19 bp, Mus musculus
  siRNA target sequence for Hoxd10 (NM_013554.2,72-90).
cctgctgctaatacttttt

SEQ ID NO: 444853 - DNA, 19 bp, Mus musculus
  siRNA target sequence for Hoxd10 (NM_013554.2,76-94).
ctgctaatacttttttagt

SEQ ID NO: 444854 - DNA, 19 bp, Mus musculus
  siRNA target sequence for Hoxd10 (NM_013554.2,113-131).
ctgcaggagtgacagtttt

SEQ ID NO: 444855 - DNA, 19 bp, Mus musculus
  siRNA target sequence for Hoxd10 (NM_013554.2,115-133).
gcaggagtgacagttttta

SEQ ID NO: 444856 - DNA, 19 bp, Mus musculus
  siRNA target sequence for Hoxd10 (NM_013554.2,139-157).
gcagcgccagcatgtacat

SEQ ID NO: 444857 - DNA, 19 bp, Mus musculus
  siRNA target sequence for Hoxd10 (NM_013554.2,174-192).
gacatggggacctatggaa

SEQ ID NO: 444858 - DNA, 19 bp, Mus musculus
  siRNA target sequence for Hoxd10 (NM_013554.2,212-230).
cccgtctttggccaaaaga

SEQ ID NO: 444859 - DNA, 19 bp, Mus musculus
  siRNA target sequence for Hoxd10 (NM_013554.2,214-232).
cgtctttggccaaaagaga

SEQ ID NO: 444860 - DNA, 19 bp, Mus musculus
  siRNA target sequence for Hoxd10 (NM_013554.2,242-260).
ccaaaatatgggtatgaat

SEQ ID NO: 444861 - DNA, 19 bp, Mus musculus
  siRNA target sequence for Hoxd10 (NM_013554.2,253-271).
gtatgaatgtacatcctta

SEQ ID NO: 444862 - DNA, 19 bp, Mus musculus
  siRNA target sequence for Hoxd10 (NM_013554.2,302-320).
gaacagatcttgtcgaata

SEQ ID NO: 444863 - DNA, 19 bp, Mus musculus
  siRNA target sequence for Hoxd10 (NM_013554.2,342-360).
gtccccacttgctcattca

SEQ ID NO: 444864 - DNA, 19 bp, Mus musculus
  siRNA target sequence for Hoxd10 (NM_013554.2,353-371).
ctcattcaccgccaacatt

SEQ ID NO: 444865 - DNA, 19 bp, Mus musculus
  siRNA target sequence for Hoxd10 (NM_013554.2,355-373).
cattcaccgccaacattaa

SEQ ID NO: 444866 - DNA, 19 bp, Mus musculus
  siRNA target sequence for Hoxd10 (NM_013554.2,400-418).
ctgataagcgcaacaaact

SEQ ID NO: 444867 - DNA, 19 bp, Mus musculus
  siRNA target sequence for Hoxd10 (NM_013554.2,402-420).
gataagcgcaacaaactca

SEQ ID NO: 444868 - DNA, 19 bp, Mus musculus
  siRNA target sequence for Hoxd10 (NM_013554.2,407-425).
gcgcaacaaactcatttct

SEQ ID NO: 444869 - DNA, 19 bp, Mus musculus
  siRNA target sequence for Hoxd10 (NM_013554.2,529-547).
ccgggaaaacccaagagta

SEQ ID NO: 444870 - DNA, 19 bp, Mus musculus
  siRNA target sequence for Hoxd10 (NM_013554.2,533-551).
gaaaacccaagagtacaat

SEQ ID NO: 444871 - DNA, 19 bp, Mus musculus
  siRNA target sequence for Hoxd10 (NM_013554.2,668-686).
cggccaggagcccactaaa

SEQ ID NO: 444872 - DNA, 19 bp, Mus musculus
  siRNA target sequence for Hoxd10 (NM_013554.2,936-954).
cgcctagagatcagtaaga

SEQ ID NO: 444873 - DNA, 19 bp, Mus musculus
  siRNA target sequence for Hoxd12 (NM_008274.1,36-54).
gggctcgcttctgaattta

SEQ ID NO: 444874 - DNA, 19 bp, Mus musculus
  siRNA target sequence for Hoxd12 (NM_008274.1,38-56).
gctcgcttctgaatttaca

SEQ ID NO: 444875 - DNA, 19 bp, Mus musculus
  siRNA target sequence for Hoxd12 (NM_008274.1,59-77).
caccggactctttctactt

SEQ ID NO: 444876 - DNA, 19 bp, Mus musculus
  siRNA target sequence for Hoxd12 (NM_008274.1,286-304).
gaccaggtcaagttctata

SEQ ID NO: 444877 - DNA, 19 bp, Mus musculus
  siRNA target sequence for Hoxd12 (NM_008274.1,375-393).
ggttcattcggctctcaaa

SEQ ID NO: 444878 - DNA, 19 bp, Mus musculus
  siRNA target sequence for Hoxd12 (NM_008274.1,540-558).
ctcttgcctgcgatcttca

SEQ ID NO: 444879 - DNA, 19 bp, Mus musculus
  siRNA target sequence for Hoxd12 (NM_008274.1,557-575).
cactgcccgacggtaaaca

SEQ ID NO: 444880 - DNA, 19 bp, Mus musculus
  siRNA target sequence for Hoxd12 (NM_008274.1,559-577).
ctgcccgacggtaaacagt

SEQ ID NO: 444881 - DNA, 19 bp, Mus musculus
  siRNA target sequence for Hoxd12 (NM_008274.1,711-729).
ccggcagaagcgtaaggaa

SEQ ID NO: 444882 - DNA, 19 bp, Mus musculus
  siRNA target sequence for Hoxd12 (NM_008274.1,712-730).
cggcagaagcgtaaggaat

SEQ ID NO: 444883 - DNA, 19 bp, Mus musculus
  siRNA target sequence for Hoxd12 (NM_008274.1,715-733).
cagaagcgtaaggaattgt

SEQ ID NO: 444884 - DNA, 19 bp, Mus musculus
  siRNA target sequence for Hoxd12 (NM_008274.1,721-739).
cgtaaggaattgtctaaca

SEQ ID NO: 444885 - DNA, 19 bp, Mus musculus
  siRNA target sequence for Hoxd12 (NM_008274.1,752-770).
gcgaccagcaggtcaaaat

SEQ ID NO: 444886 - DNA, 19 bp, Mus musculus
  siRNA target sequence for Hoxd13 (NM_008275.1,470-488).
gtttcccggtggagaagta

SEQ ID NO: 444887 - DNA, 19 bp, Mus musculus
  siRNA target sequence for Hoxd13 (NM_008275.1,609-627).
cgacatggtgtccactttt

SEQ ID NO: 444888 - DNA, 19 bp, Mus musculus
  siRNA target sequence for Hoxd13 (NM_008275.1,612-630).
catggtgtccacttttgga

SEQ ID NO: 444889 - DNA, 19 bp, Mus musculus
  siRNA target sequence for Hoxd13 (NM_008275.1,770-788).
gagatgtggctttaaacca

SEQ ID NO: 444890 - DNA, 19 bp, Mus musculus
  siRNA target sequence for Hoxd13 (NM_008275.1,807-825).
ccgacggggaaggaagaaa

SEQ ID NO: 444891 - DNA, 19 bp, Mus musculus
  siRNA target sequence for Hoxd13 (NM_008275.1,868-886).
gagtatgccattaacaagt

SEQ ID NO: 444892 - DNA, 19 bp, Mus musculus
  siRNA target sequence for Hoxd13 (NM_008275.1,874-892).
gccattaacaagttcatta

SEQ ID NO: 444893 - DNA, 19 bp, Mus musculus
  siRNA target sequence for Hoxd13 (NM_008275.1,930-948).
cctttcggagagacaagta

SEQ ID NO: 444894 - DNA, 19 bp, Mus musculus
  siRNA target sequence for Hoxd13 (NM_008275.1,931-949).
ctttcggagagacaagtaa

SEQ ID NO: 444895 - DNA, 19 bp, Mus musculus
  siRNA target sequence for Hoxd3 (NM_010468.1,153-171).
cgagaacccaggactcttt

SEQ ID NO: 444896 - DNA, 19 bp, Mus musculus
  siRNA target sequence for Hoxd3 (NM_010468.1,995-1013).
ccaaatcgcagcccaatat

SEQ ID NO: 444897 - DNA, 19 bp, Mus musculus
  siRNA target sequence for Hoxd9 (NM_013555.2,341-359).
ggcaccctcagcaactact

SEQ ID NO: 444898 - DNA, 19 bp, Mus musculus
  siRNA target sequence for Hoxd9 (NM_013555.2,342-360).
gcaccctcagcaactacta

SEQ ID NO: 444899 - DNA, 19 bp, Mus musculus
  siRNA target sequence for Hoxd9 (NM_013555.2,482-500).
gagttcgcctcgtgtagtt

SEQ ID NO: 444900 - DNA, 19 bp, Mus musculus
  siRNA target sequence for Hoxd9 (NM_013555.2,484-502).
gttcgcctcgtgtagtttt

SEQ ID NO: 444901 - DNA, 19 bp, Mus musculus
  siRNA target sequence for Hsf1 (NM_008296.1,364-382).
gtgcggcagctcaacatgt

SEQ ID NO: 444902 - DNA, 19 bp, Mus musculus
  siRNA target sequence for Hsf1 (NM_008296.1,366-384).
gcggcagctcaacatgtat

SEQ ID NO: 444903 - DNA, 19 bp, Mus musculus
  siRNA target sequence for Hsf1 (NM_008296.1,932-950).
ccagctctggacccataat

SEQ ID NO: 444904 - DNA, 19 bp, Mus musculus
  siRNA target sequence for Hsf1 (NM_008296.1,943-961).
cccataatctccgatatca

SEQ ID NO: 444905 - DNA, 19 bp, Mus musculus
  siRNA target sequence for Hsf1 (NM_008296.1,945-963).
cataatctccgatatcact

SEQ ID NO: 444906 - DNA, 19 bp, Mus musculus
  siRNA target sequence for Hsf1 (NM_008296.1,1131-1149).
gtccccaactgccttcatt

SEQ ID NO: 444907 - DNA, 19 bp, Mus musculus
  siRNA target sequence for Hsf1 (NM_008296.1,1268-1286).
gcgtagcctgcctagacaa

SEQ ID NO: 444908 - DNA, 19 bp, Mus musculus
  siRNA target sequence for Hsf2 (NM_008297.2,87-105).
cacaccaacgagttcatca

SEQ ID NO: 444909 - DNA, 19 bp, Mus musculus
  siRNA target sequence for Hsf2 (NM_008297.2,112-130).
gtcagaatggacaaagttt

SEQ ID NO: 444910 - DNA, 19 bp, Mus musculus
  siRNA target sequence for Hsf2 (NM_008297.2,202-220).
gctttgtgagacaactaaa

SEQ ID NO: 444911 - DNA, 19 bp, Mus musculus
  siRNA target sequence for Hsf2 (NM_008297.2,207-225).
gtgagacaactaaatatgt

SEQ ID NO: 444912 - DNA, 19 bp, Mus musculus
  siRNA target sequence for Hsf2 (NM_008297.2,235-253).
gaaaagtagtgcatatcga

SEQ ID NO: 444913 - DNA, 19 bp, Mus musculus
  siRNA target sequence for Hsf2 (NM_008297.2,245-263).
gcatatcgaatctggaatt

SEQ ID NO: 444914 - DNA, 19 bp, Mus musculus
  siRNA target sequence for Hsf2 (NM_008297.2,246-264).
catatcgaatctggaatta

SEQ ID NO: 444915 - DNA, 19 bp, Mus musculus
  siRNA target sequence for Hsf2 (NM_008297.2,251-269).
cgaatctggaattatcaaa

SEQ ID NO: 444916 - DNA, 19 bp, Mus musculus
  siRNA target sequence for Hsf2 (NM_008297.2,554-572).
gattgtccagtttattgtt

SEQ ID NO: 444917 - DNA, 19 bp, Mus musculus
  siRNA target sequence for Hsf2 (NM_008297.2,558-576).
gtccagtttattgttacat

SEQ ID NO: 444918 - DNA, 19 bp, Mus musculus
  siRNA target sequence for Hsf2 (NM_008297.2,570-588).
gttacattggttcagaata

SEQ ID NO: 444919 - DNA, 19 bp, Mus musculus
  siRNA target sequence for Hsf2 (NM_008297.2,578-596).
ggttcagaataatcaactt

SEQ ID NO: 444920 - DNA, 19 bp, Mus musculus
  siRNA target sequence for Hsf2 (NM_008297.2,610-628).
gtaaaaggcctctacttct

SEQ ID NO: 444921 - DNA, 19 bp, Mus musculus
  siRNA target sequence for Hsf2 (NM_008297.2,618-636).
cctctacttctaaacacaa

SEQ ID NO: 444922 - DNA, 19 bp, Mus musculus
  siRNA target sequence for Hsf2 (NM_008297.2,672-690).
gtcaaagaaccaactgata

SEQ ID NO: 444923 - DNA, 19 bp, Mus musculus
  siRNA target sequence for Hsf2 (NM_008297.2,674-692).
caaagaaccaactgataat

SEQ ID NO: 444924 - DNA, 19 bp, Mus musculus
  siRNA target sequence for Hsf2 (NM_008297.2,715-733).
gcaggactgaaggtttaaa

SEQ ID NO: 444925 - DNA, 19 bp, Mus musculus
  siRNA target sequence for Hsf2 (NM_008297.2,807-825).
ccagttattccagaaacaa

SEQ ID NO: 444926 - DNA, 19 bp, Mus musculus
  siRNA target sequence for Hsf2 (NM_008297.2,991-1009).
ctagtgctgtccagctaaa

SEQ ID NO: 444927 - DNA, 19 bp, Mus musculus
  siRNA target sequence for Hsf2 (NM_008297.2,1053-1071).
gactccattctgaatgaca

SEQ ID NO: 444928 - DNA, 19 bp, Mus musculus
  siRNA target sequence for Hsf2 (NM_008297.2,1057-1075).
ccattctgaatgacaacat

SEQ ID NO: 444929 - DNA, 19 bp, Mus musculus
  siRNA target sequence for Hsf2 (NM_008297.2,1156-1174).
caggaagacagtttagcat

SEQ ID NO: 444930 - DNA, 19 bp, Mus musculus
  siRNA target sequence for Hsf2 (NM_008297.2,1226-1244).
gagcagtgttgttcaacat

SEQ ID NO: 444931 - DNA, 19 bp, Mus musculus
  siRNA target sequence for Hsf2 (NM_008297.2,1444-1462).
cagaaccgacccagagtaa

SEQ ID NO: 444932 - DNA, 19 bp, Mus musculus
  siRNA target sequence for Hsf2 (NM_008297.2,1503-1521).
gaagccacactcttctatt

SEQ ID NO: 444933 - DNA, 19 bp, Mus musculus
  siRNA target sequence for Hsf2 (NM_008297.2,1537-1555).
ctgcacctctggatagtga

SEQ ID NO: 444934 - DNA, 19 bp, Mus musculus
  siRNA target sequence for Hsf2 (NM_008297.2,1539-1557).
gcacctctggatagtgata

SEQ ID NO: 444935 - DNA, 19 bp, Mus musculus
  siRNA target sequence for Hsf2 (NM_008297.2,1540-1558).
cacctctggatagtgatat

SEQ ID NO: 444936 - DNA, 19 bp, Mus musculus
  siRNA target sequence for Hsf4 (NM_011939.1,131-149).
ccagcttcctcgtaagtga

SEQ ID NO: 444937 - DNA, 19 bp, Mus musculus
  siRNA target sequence for Hsf4 (NM_011939.1,132-150).
cagcttcctcgtaagtgat

SEQ ID NO: 444938 - DNA, 19 bp, Mus musculus
  siRNA target sequence for Hsf4 (NM_011939.1,214-232).
gttcgccaactcaacatgt

SEQ ID NO: 444939 - DNA, 19 bp, Mus musculus
  siRNA target sequence for Hsf4 (NM_011939.1,285-303).
gcgtgaccacgttgagttt

SEQ ID NO: 444940 - DNA, 19 bp, Mus musculus
  siRNA target sequence for Hsf4 (NM_011939.1,484-502).
cagcagaacgagatcttgt

SEQ ID NO: 444941 - DNA, 19 bp, Mus musculus
  siRNA target sequence for Hsf4 (NM_011939.1,547-565).
cgggtcatcggcaagctaa

SEQ ID NO: 444942 - DNA, 19 bp, Mus musculus
  siRNA target sequence for Hsf4 (NM_011939.1,548-566).
gggtcatcggcaagctaat

SEQ ID NO: 444943 - DNA, 19 bp, Mus musculus
  siRNA target sequence for Hsf4 (NM_011939.1,1203-1221).
gacggtcaaggagttgaat

SEQ ID NO: 444944 - DNA, 19 bp, Mus musculus
  siRNA target sequence for Hsf4 (NM_011939.1,1206-1224).
ggtcaaggagttgaattct

SEQ ID NO: 444945 - DNA, 19 bp, Mus musculus
  siRNA target sequence for Hsf4 (NM_011939.1,1256-1274).
ctccactcatgctagatgt

SEQ ID NO: 444946 - DNA, 19 bp, Mus musculus
  siRNA target sequence for Hsf4 (NM_011939.1,1313-1331).
gggctttaaccctgtacaa

SEQ ID NO: 444947 - DNA, 19 bp, Mus musculus
  siRNA target sequence for Icsbp1 (NM_008320.2,109-127).
ggctgatctgggaaaatga

SEQ ID NO: 444948 - DNA, 19 bp, Mus musculus
  siRNA target sequence for Icsbp1 (NM_008320.2,110-128).
gctgatctgggaaaatgat

SEQ ID NO: 444949 - DNA, 19 bp, Mus musculus
  siRNA target sequence for Icsbp1 (NM_008320.2,327-345).
cggtcccagctggacattt

SEQ ID NO: 444950 - DNA, 19 bp, Mus musculus
  siRNA target sequence for Icsbp1 (NM_008320.2,448-466).
gtggccgctcagagattga

SEQ ID NO: 444951 - DNA, 19 bp, Mus musculus
  siRNA target sequence for Icsbp1 (NM_008320.2,1104-1122).
cccttgcgctccaaactca

SEQ ID NO: 444952 - DNA, 19 bp, Mus musculus
  siRNA target sequence for Icsbp1 (NM_008320.2,1105-1123).
ccttgcgctccaaactcat

SEQ ID NO: 444953 - DNA, 19 bp, Mus musculus
  siRNA target sequence for Icsbp1 (NM_008320.2,1106-1124).
cttgcgctccaaactcatt

SEQ ID NO: 444954 - DNA, 19 bp, Mus musculus
  siRNA target sequence for Icsbp1 (NM_008320.2,1239-1257).
cgcatgtttccggatatct

SEQ ID NO: 444955 - DNA, 19 bp, Mus musculus
  siRNA target sequence for Icsbp1 (NM_008320.2,1241-1259).
catgtttccggatatctgt

SEQ ID NO: 444956 - DNA, 19 bp, Mus musculus
  siRNA target sequence for Ipf1 (NM_008814.2,605-623).
ggaattcttatttaacaaa

SEQ ID NO: 444957 - DNA, 19 bp, Mus musculus
  siRNA target sequence for Irf2 (NM_008391.2,234-252).
cagataaattccaatacga

SEQ ID NO: 444958 - DNA, 19 bp, Mus musculus
  siRNA target sequence for Irf2 (NM_008391.2,236-254).
gataaattccaatacgata

SEQ ID NO: 444959 - DNA, 19 bp, Mus musculus
  siRNA target sequence for Irf2 (NM_008391.2,342-360).
gatgctccgctcttcagaa

SEQ ID NO: 444960 - DNA, 19 bp, Mus musculus
  siRNA target sequence for Irf2 (NM_008391.2,345-363).
gctccgctcttcagaaact

SEQ ID NO: 444961 - DNA, 19 bp, Mus musculus
  siRNA target sequence for Irf2 (NM_008391.2,368-386).
gatccatacaggaaagcat

SEQ ID NO: 444962 - DNA, 19 bp, Mus musculus
  siRNA target sequence for Irf2 (NM_008391.2,383-401).
gcatcaaccaggaatagat

SEQ ID NO: 444963 - DNA, 19 bp, Mus musculus
  siRNA target sequence for Irf2 (NM_008391.2,384-402).
catcaaccaggaatagata

SEQ ID NO: 444964 - DNA, 19 bp, Mus musculus
  siRNA target sequence for Irf2 (NM_008391.2,471-489).
gtgaaggacagaagcataa

SEQ ID NO: 444965 - DNA, 19 bp, Mus musculus
  siRNA target sequence for Irf2 (NM_008391.2,536-554).
cgaacgaccttccaagaaa

SEQ ID NO: 444966 - DNA, 19 bp, Mus musculus
  siRNA target sequence for Irf2 (NM_008391.2,540-558).
cgaccttccaagaaaggaa

SEQ ID NO: 444967 - DNA, 19 bp, Mus musculus
  siRNA target sequence for Irf2 (NM_008391.2,619-637).
catctttggggcttagtaa

SEQ ID NO: 444968 - DNA, 19 bp, Mus musculus
  siRNA target sequence for Irf2 (NM_008391.2,668-686).
ggtcctgacttcagctata

SEQ ID NO: 444969 - DNA, 19 bp, Mus musculus
  siRNA target sequence for Irf2 (NM_008391.2,669-687).
gtcctgacttcagctataa

SEQ ID NO: 444970 - DNA, 19 bp, Mus musculus
  siRNA target sequence for Irf2 (NM_008391.2,671-689).
cctgacttcagctataaaa

SEQ ID NO: 444971 - DNA, 19 bp, Mus musculus
  siRNA target sequence for Irf2 (NM_008391.2,672-690).
ctgacttcagctataaaaa

SEQ ID NO: 444972 - DNA, 19 bp, Mus musculus
  siRNA target sequence for Irf2 (NM_008391.2,703-721).
gtacggtgaacatcatagt

SEQ ID NO: 444973 - DNA, 19 bp, Mus musculus
  siRNA target sequence for Irf2 (NM_008391.2,706-724).
cggtgaacatcatagttgt

SEQ ID NO: 444974 - DNA, 19 bp, Mus musculus
  siRNA target sequence for Irf2 (NM_008391.2,845-863).
gctctaccctctacagatt

SEQ ID NO: 444975 - DNA, 19 bp, Mus musculus
  siRNA target sequence for Irf2 (NM_008391.2,1078-1096).
gctgtccgatgccttacaa

SEQ ID NO: 444976 - DNA, 19 bp, Mus musculus
  siRNA target sequence for Irf2 (NM_008391.2,1193-1211).
catcaagaagacatctgat

SEQ ID NO: 444977 - DNA, 19 bp, Mus musculus
  siRNA target sequence for Irf3 (NM_016849.2,139-157).
ccccgaaaccgcggatttt

SEQ ID NO: 444978 - DNA, 19 bp, Mus musculus
  siRNA target sequence for Irf3 (NM_016849.2,401-419).
gcggttagctgctgacaat

SEQ ID NO: 444979 - DNA, 19 bp, Mus musculus
  siRNA target sequence for Irf3 (NM_016849.2,402-420).
cggttagctgctgacaata

SEQ ID NO: 444980 - DNA, 19 bp, Mus musculus
  siRNA target sequence for Irf3 (NM_016849.2,430-448).
cttatgaccctcataaagt

SEQ ID NO: 444981 - DNA, 19 bp, Mus musculus
  siRNA target sequence for Irf3 (NM_016849.2,438-456).
cctcataaagtgtatgagt

SEQ ID NO: 444982 - DNA, 19 bp, Mus musculus
  siRNA target sequence for Irf3 (NM_016849.2,539-557).
ggaaaacctaccgaagtta

SEQ ID NO: 444983 - DNA, 19 bp, Mus musculus
  siRNA target sequence for Irf3 (NM_016849.2,540-558).
gaaaacctaccgaagttat

SEQ ID NO: 444984 - DNA, 19 bp, Mus musculus
  siRNA target sequence for Irf3 (NM_016849.2,545-563).
cctaccgaagttatttgat

SEQ ID NO: 444985 - DNA, 19 bp, Mus musculus
  siRNA target sequence for Irf3 (NM_016849.2,598-616).
cctcagatctggctattgt

SEQ ID NO: 444986 - DNA, 19 bp, Mus musculus
  siRNA target sequence for Irf3 (NM_016849.2,599-617).
ctcagatctggctattgtt

SEQ ID NO: 444987 - DNA, 19 bp, Mus musculus
  siRNA target sequence for Irf3 (NM_016849.2,636-654).
ctgccaagccccaatgtga

SEQ ID NO: 444988 - DNA, 19 bp, Mus musculus
  siRNA target sequence for Irf3 (NM_016849.2,643-661).
gccccaatgtgaacaactt

SEQ ID NO: 444989 - DNA, 19 bp, Mus musculus
  siRNA target sequence for Irf3 (NM_016849.2,668-686).
ccctgcaccccaagaaaat

SEQ ID NO: 444990 - DNA, 19 bp, Mus musculus
  siRNA target sequence for Irf3 (NM_016849.2,699-717).
ctgctagctgaggaacaat

SEQ ID NO: 444991 - DNA, 19 bp, Mus musculus
  siRNA target sequence for Irf3 (NM_016849.2,1222-1240).
gtcttaaggagctgttaga

SEQ ID NO: 444992 - DNA, 19 bp, Mus musculus
  siRNA target sequence for Irf3 (NM_016849.2,1256-1274).
gggagcctcttcactgaaa

SEQ ID NO: 444993 - DNA, 19 bp, Mus musculus
  siRNA target sequence for Irf3 (NM_016849.2,1371-1389).
caggccactggaaatatct

SEQ ID NO: 444994 - DNA, 19 bp, Mus musculus
  siRNA target sequence for Irf4 (NM_013674.1,409-427).
gagccagctggatatctct

SEQ ID NO: 444995 - DNA, 19 bp, Mus musculus
  siRNA target sequence for Irf4 (NM_013674.1,436-454).
caaggtgtacaggattgtt

SEQ ID NO: 444996 - DNA, 19 bp, Mus musculus
  siRNA target sequence for Irf4 (NM_013674.1,555-573).
cagcccagcaggttcataa

SEQ ID NO: 444997 - DNA, 19 bp, Mus musculus
  siRNA target sequence for Irf4 (NM_013674.1,557-575).
gcccagcaggttcataact

SEQ ID NO: 444998 - DNA, 19 bp, Mus musculus
  siRNA target sequence for Irf4 (NM_013674.1,558-576).
cccagcaggttcataacta

SEQ ID NO: 444999 - DNA, 19 bp, Mus musculus
  siRNA target sequence for Irf4 (NM_013674.1,632-650).
ccagaaatcccatatcaat

SEQ ID NO: 445000 - DNA, 19 bp, Mus musculus
  siRNA target sequence for Irf4 (NM_013674.1,769-787).
ccccattgagccaagcata

SEQ ID NO: 445001 - DNA, 19 bp, Mus musculus
  siRNA target sequence for Irf4 (NM_013674.1,770-788).
cccattgagccaagcataa

SEQ ID NO: 445002 - DNA, 19 bp, Mus musculus
  siRNA target sequence for Irf4 (NM_013674.1,813-831).
cagactgccggctgcatat

SEQ ID NO: 445003 - DNA, 19 bp, Mus musculus
  siRNA target sequence for Irf4 (NM_013674.1,901-919).
ccacggacacacctatgat

SEQ ID NO: 445004 - DNA, 19 bp, Mus musculus
  siRNA target sequence for Irf4 (NM_013674.1,904-922).
cggacacacctatgatgtt

SEQ ID NO: 445005 - DNA, 19 bp, Mus musculus
  siRNA target sequence for Irf4 (NM_013674.1,1106-1124).
cggcccaacaagctagaaa

SEQ ID NO: 445006 - DNA, 19 bp, Mus musculus
  siRNA target sequence for Irf4 (NM_013674.1,1148-1166).
gacacacagcagtttctat

SEQ ID NO: 445007 - DNA, 19 bp, Mus musculus
  siRNA target sequence for Irf4 (NM_013674.1,1150-1168).
cacacagcagtttctatca

SEQ ID NO: 445008 - DNA, 19 bp, Mus musculus
  siRNA target sequence for Irf4 (NM_013674.1,1152-1170).
cacagcagtttctatcaga

SEQ ID NO: 445009 - DNA, 19 bp, Mus musculus
  siRNA target sequence for Irf4 (NM_013674.1,1299-1317).
ccagacaactgtattactt

SEQ ID NO: 445010 - DNA, 19 bp, Mus musculus
  siRNA target sequence for Irf4 (NM_013674.1,1309-1327).
gtattactttgctcaacaa

SEQ ID NO: 445011 - DNA, 19 bp, Mus musculus
  siRNA target sequence for Irf4 (NM_013674.1,1390-1408).
ccgctccctccgtcattct

SEQ ID NO: 445012 - DNA, 19 bp, Mus musculus
  siRNA target sequence for Irf4 (NM_013674.1,1391-1409).
cgctccctccgtcattctt

SEQ ID NO: 445013 - DNA, 19 bp, Mus musculus
  siRNA target sequence for Irf5 (NM_012057.1,157-175).
gggtcaacggggaaaagaa

SEQ ID NO: 445014 - DNA, 19 bp, Mus musculus
  siRNA target sequence for Irf5 (NM_012057.1,166-184).
gggaaaagaaactcttcta

SEQ ID NO: 445015 - DNA, 19 bp, Mus musculus
  siRNA target sequence for Irf5 (NM_012057.1,323-341).
gcgctgtgcccttaacaaa

SEQ ID NO: 445016 - DNA, 19 bp, Mus musculus
  siRNA target sequence for Irf5 (NM_012057.1,350-368).
cttccagctgttctatgat

SEQ ID NO: 445017 - DNA, 19 bp, Mus musculus
  siRNA target sequence for Irf5 (NM_012057.1,388-406).
ctcagccgtacaagatcta

SEQ ID NO: 445018 - DNA, 19 bp, Mus musculus
  siRNA target sequence for Irf5 (NM_012057.1,440-458).
gagccaacccactgatgat

SEQ ID NO: 445019 - DNA, 19 bp, Mus musculus
  siRNA target sequence for Irf5 (NM_012057.1,442-460).
gccaacccactgatgatta

SEQ ID NO: 445020 - DNA, 19 bp, Mus musculus
  siRNA target sequence for Irf5 (NM_012057.1,554-572).
caacgcaccctattcctta

SEQ ID NO: 445021 - DNA, 19 bp, Mus musculus
  siRNA target sequence for Irf5 (NM_012057.1,787-805).
ctttgacggacctagagat

SEQ ID NO: 445022 - DNA, 19 bp, Mus musculus
  siRNA target sequence for Irf5 (NM_012057.1,899-917).
ggagcaagtggaactcttt

SEQ ID NO: 445023 - DNA, 19 bp, Mus musculus
  siRNA target sequence for Irf5 (NM_012057.1,970-988).
gtgacaagcagcgtttcta

SEQ ID NO: 445024 - DNA, 19 bp, Mus musculus
  siRNA target sequence for Irf5 (NM_012057.1,991-1009).
cgaaccagctgctagatgt

SEQ ID NO: 445025 - DNA, 19 bp, Mus musculus
  siRNA target sequence for Irf5 (NM_012057.1,1129-1147).
ccattcagcgggaagtcaa

SEQ ID NO: 445026 - DNA, 19 bp, Mus musculus
  siRNA target sequence for Irf5 (NM_012057.1,1163-1181).
cctagagcagtttctcaat

SEQ ID NO: 445027 - DNA, 19 bp, Mus musculus
  siRNA target sequence for Irf5 (NM_012057.1,1196-1214).
ccagaagggccagactaat

SEQ ID NO: 445028 - DNA, 19 bp, Mus musculus
  siRNA target sequence for Irf5 (NM_012057.1,1197-1215).
cagaagggccagactaata

SEQ ID NO: 445029 - DNA, 19 bp, Mus musculus
  siRNA target sequence for Irf5 (NM_012057.1,1385-1403).
ctcaaacccggatctcaaa

SEQ ID NO: 445030 - DNA, 19 bp, Mus musculus
  siRNA target sequence for Irf6 (NM_016851.1,357-375).
cgatcctgacccagctaaa

SEQ ID NO: 445031 - DNA, 19 bp, Mus musculus
  siRNA target sequence for Irf6 (NM_016851.1,390-408).
ccgctgtgctctcaacaaa

SEQ ID NO: 445032 - DNA, 19 bp, Mus musculus
  siRNA target sequence for Irf6 (NM_016851.1,847-865).
gagtatgggcaaactatga

SEQ ID NO: 445033 - DNA, 19 bp, Mus musculus
  siRNA target sequence for Irf6 (NM_016851.1,882-900).
gggctgccggctcttctat

SEQ ID NO: 445034 - DNA, 19 bp, Mus musculus
  siRNA target sequence for Irf6 (NM_016851.1,970-988).
ccaggtccagagcatatca

SEQ ID NO: 445035 - DNA, 19 bp, Mus musculus
  siRNA target sequence for Irf6 (NM_016851.1,1059-1077).
cagcggacatgccatttat

SEQ ID NO: 445036 - DNA, 19 bp, Mus musculus
  siRNA target sequence for Irf6 (NM_016851.1,1242-1260).
gccttttgagatctactta

SEQ ID NO: 445037 - DNA, 19 bp, Mus musculus
  siRNA target sequence for Irf6 (NM_016851.1,1336-1354).
gctcgcatgatctatgaga

SEQ ID NO: 445038 - DNA, 19 bp, Mus musculus
  siRNA target sequence for Irf6 (NM_016851.1,1337-1355).
ctcgcatgatctatgagat

SEQ ID NO: 445039 - DNA, 19 bp, Mus musculus
  siRNA target sequence for Irf6 (NM_016851.1,1340-1358).
gcatgatctatgagatgtt

SEQ ID NO: 445040 - DNA, 19 bp, Mus musculus
  siRNA target sequence for Irf6 (NM_016851.1,1341-1359).
catgatctatgagatgttt

SEQ ID NO: 445041 - DNA, 19 bp, Mus musculus
  siRNA target sequence for Irf6 (NM_016851.1,1456-1474).
ctgtaccgcatccttcaaa

SEQ ID NO: 445042 - DNA, 19 bp, Mus musculus
  siRNA target sequence for Irf7 (NM_016850.1,535-553).
cgcgtaccctggaagcatt

SEQ ID NO: 445043 - DNA, 19 bp, Mus musculus
  siRNA target sequence for Irf7 (NM_016850.1,536-554).
gcgtaccctggaagcattt

SEQ ID NO: 445044 - DNA, 19 bp, Mus musculus
  siRNA target sequence for Irf7 (NM_016850.1,722-740).
gcacagggcgttttatctt

SEQ ID NO: 445045 - DNA, 19 bp, Mus musculus
  siRNA target sequence for Irf7 (NM_016850.1,738-756).
cttgcgccaagacaattca

SEQ ID NO: 445046 - DNA, 19 bp, Mus musculus
  siRNA target sequence for Irf7 (NM_016850.1,764-782).
cagttgatccgcataaggt

SEQ ID NO: 445047 - DNA, 19 bp, Mus musculus
  siRNA target sequence for Irf7 (NM_016850.1,795-813).
ccgggagcttggatctact

SEQ ID NO: 445048 - DNA, 19 bp, Mus musculus
  siRNA target sequence for Irf7 (NM_016850.1,816-834).
gggcccagccacggaaaat

SEQ ID NO: 445049 - DNA, 19 bp, Mus musculus
  siRNA target sequence for Irf7 (NM_016850.1,817-835).
ggcccagccacggaaaata

SEQ ID NO: 445050 - DNA, 19 bp, Mus musculus
  siRNA target sequence for Irf7 (NM_016850.1,827-845).
cggaaaatagggaagaagt

SEQ ID NO: 445051 - DNA, 19 bp, Mus musculus
  siRNA target sequence for Irf7 (NM_016850.1,1714-1732).
ctcggcttgtgcttgtcta

SEQ ID NO: 445052 - DNA, 19 bp, Mus musculus
  siRNA target sequence for Irx3 (NM_008393.1,141-159).
ctctgggtccctatccaat

SEQ ID NO: 445053 - DNA, 19 bp, Mus musculus
  siRNA target sequence for Irx3 (NM_008393.1,151-169).
ctatccaatgtgctttcat

SEQ ID NO: 445054 - DNA, 19 bp, Mus musculus
  siRNA target sequence for Irx3 (NM_008393.1,609-627).
cgaggagggcaatgcttat

SEQ ID NO: 445055 - DNA, 19 bp, Mus musculus
  siRNA target sequence for Irx3 (NM_008393.1,766-784).
gagatcgatttggaaaact

SEQ ID NO: 445056 - DNA, 19 bp, Mus musculus
  siRNA target sequence for Irx3 (NM_008393.1,768-786).
gatcgatttggaaaactta

SEQ ID NO: 445057 - DNA, 19 bp, Mus musculus
  siRNA target sequence for Irx3 (NM_008393.1,861-879).
catttcggactgcaaaact

SEQ ID NO: 445058 - DNA, 19 bp, Mus musculus
  siRNA target sequence for Irx3 (NM_008393.1,1386-1404).
gccggagagtggaacagat

SEQ ID NO: 445059 - DNA, 19 bp, Mus musculus
  siRNA target sequence for Irx3 (NM_008393.1,1419-1437).
ggaagtggagaaaaagtta

SEQ ID NO: 445060 - DNA, 19 bp, Mus musculus
  siRNA target sequence for Irx3 (NM_008393.1,1486-1504).
gacgctgctctggtcttat

SEQ ID NO: 445061 - DNA, 19 bp, Mus musculus
  siRNA target sequence for Irx3 (NM_008393.1,1488-1506).
cgctgctctggtcttatca

SEQ ID NO: 445062 - DNA, 19 bp, Mus musculus
  siRNA target sequence for Irx4 (NM_018885.1,348-366).
ctgcacgccacgaactcaa

SEQ ID NO: 445063 - DNA, 19 bp, Mus musculus
  siRNA target sequence for Irx4 (NM_018885.1,350-368).
gcacgccacgaactcaatt

SEQ ID NO: 445064 - DNA, 19 bp, Mus musculus
  siRNA target sequence for Irx4 (NM_018885.1,796-814).
ctggccacctagaaataaa

SEQ ID NO: 445065 - DNA, 19 bp, Mus musculus
  siRNA target sequence for Irx4 (NM_018885.1,1110-1128).
ccgctggtggagctgttat

SEQ ID NO: 445066 - DNA, 19 bp, Mus musculus
  siRNA target sequence for Irx4 (NM_018885.1,1211-1229).
gcttgcgaagccaaactga

SEQ ID NO: 445067 - DNA, 19 bp, Mus musculus
  siRNA target sequence for Irx4 (NM_018885.1,1441-1459).
ccaggactccccagtaact

SEQ ID NO: 445068 - DNA, 19 bp, Mus musculus
  siRNA target sequence for Irx4 (NM_018885.1,1442-1460).
caggactccccagtaacta

SEQ ID NO: 445069 - DNA, 19 bp, Mus musculus
  siRNA target sequence for Irx4 (NM_018885.1,1452-1470).
cagtaactagcctcagaaa

SEQ ID NO: 445070 - DNA, 19 bp, Mus musculus
  siRNA target sequence for Irx5 (NM_018826.1,833-851).
caggttccttgggatatca

SEQ ID NO: 445071 - DNA, 19 bp, Mus musculus
  siRNA target sequence for Irx5 (NM_018826.1,1290-1308).
cctcagcgactcggatttt

SEQ ID NO: 445072 - DNA, 19 bp, Mus musculus
  siRNA target sequence for Irx5 (NM_018826.1,1291-1309).
ctcagcgactcggatttta

SEQ ID NO: 445073 - DNA, 19 bp, Mus musculus
  siRNA target sequence for Irx5 (NM_018826.1,1295-1313).
gcgactcggattttaagga

SEQ ID NO: 445074 - DNA, 19 bp, Mus musculus
  siRNA target sequence for Irx5 (NM_018826.1,1543-1561).
ctagccaagcccaaactgt

SEQ ID NO: 445075 - DNA, 19 bp, Mus musculus
  siRNA target sequence for Irx5 (NM_018826.1,1805-1823).
gctccttcggacatcttca

SEQ ID NO: 445076 - DNA, 19 bp, Mus musculus
  siRNA target sequence for Irx5 (NM_018826.1,1859-1877).
gtcctggctctcatttcaa

SEQ ID NO: 445077 - DNA, 19 bp, Mus musculus
  siRNA target sequence for Irx5 (NM_018826.1,1864-1882).
ggctctcatttcaatggat

SEQ ID NO: 445078 - DNA, 19 bp, Mus musculus
  siRNA target sequence for Irx5 (NM_018826.1,1907-1925).
cggacgttttggctaaaga

SEQ ID NO: 445079 - DNA, 19 bp, Mus musculus
  siRNA target sequence for Irx5 (NM_018826.1,1918-1936).
gctaaagacccgaaaatgt

SEQ ID NO: 445080 - DNA, 19 bp, Mus musculus
  siRNA target sequence for Irx6 (NM_022428.1,13-31).
ggccttttcaccttttgga

SEQ ID NO: 445081 - DNA, 19 bp, Mus musculus
  siRNA target sequence for Irx6 (NM_022428.1,298-316).
cgcactgaatcctcagtat

SEQ ID NO: 445082 - DNA, 19 bp, Mus musculus
  siRNA target sequence for Irx6 (NM_022428.1,414-432).
ggtatggcggagtggaatt

SEQ ID NO: 445083 - DNA, 19 bp, Mus musculus
  siRNA target sequence for Irx6 (NM_022428.1,831-849).
gcaggctggcggattttca

SEQ ID NO: 445084 - DNA, 19 bp, Mus musculus
  siRNA target sequence for Irx6 (NM_022428.1,834-852).
ggctggcggattttcagaa

SEQ ID NO: 445085 - DNA, 19 bp, Mus musculus
  siRNA target sequence for Irx6 (NM_022428.1,965-983).
ggggaagctgacttcatca

SEQ ID NO: 445086 - DNA, 19 bp, Mus musculus
  siRNA target sequence for Irx6 (NM_022428.1,1002-1020).
ccacgatgatcttacacta

SEQ ID NO: 445087 - DNA, 19 bp, Mus musculus
  siRNA target sequence for Irx6 (NM_022428.1,1031-1049).
cacaaaccccgcatttggt

SEQ ID NO: 445088 - DNA, 19 bp, Mus musculus
  siRNA target sequence for Irx6 (NM_022428.1,1205-1223).
gcagccaaagcttttggaa

SEQ ID NO: 445089 - DNA, 19 bp, Mus musculus
  siRNA target sequence for Isgf3g (NM_008394.2,337-355).
cttgggcactgtttaagga

SEQ ID NO: 445090 - DNA, 19 bp, Mus musculus
  siRNA target sequence for Isgf3g (NM_008394.2,343-361).
cactgtttaaggaaaagca

SEQ ID NO: 445091 - DNA, 19 bp, Mus musculus
  siRNA target sequence for Isgf3g (NM_008394.2,419-437).
caacaagagttccgaattt

SEQ ID NO: 445092 - DNA, 19 bp, Mus musculus
  siRNA target sequence for Isgf3g (NM_008394.2,449-467).
cgagagaggtcgtatggat

SEQ ID NO: 445093 - DNA, 19 bp, Mus musculus
  siRNA target sequence for Isgf3g (NM_008394.2,471-489).
gctgaaccctacaaagtat

SEQ ID NO: 445094 - DNA, 19 bp, Mus musculus
  siRNA target sequence for Isgf3g (NM_008394.2,477-495).
ccctacaaagtatatcgaa

SEQ ID NO: 445095 - DNA, 19 bp, Mus musculus
  siRNA target sequence for Isgf3g (NM_008394.2,478-496).
cctacaaagtatatcgaat

SEQ ID NO: 445096 - DNA, 19 bp, Mus musculus
  siRNA target sequence for Isgf3g (NM_008394.2,543-561).
ccatgcaagcgaagtatca

SEQ ID NO: 445097 - DNA, 19 bp, Mus musculus
  siRNA target sequence for Isgf3g (NM_008394.2,607-625).
ccaatggcgttgtaaacca

SEQ ID NO: 445098 - DNA, 19 bp, Mus musculus
  siRNA target sequence for Isgf3g (NM_008394.2,991-1009).
ccagaggcctctttgttca

SEQ ID NO: 445099 - DNA, 19 bp, Mus musculus
  siRNA target sequence for Isgf3g (NM_008394.2,1071-1089).
catctgctgcccagcaata

SEQ ID NO: 445100 - DNA, 19 bp, Mus musculus
  siRNA target sequence for Isgf3g (NM_008394.2,1076-1094).
gctgcccagcaataagtgt

SEQ ID NO: 445101 - DNA, 19 bp, Mus musculus
  siRNA target sequence for Isgf3g (NM_008394.2,1112-1130).
cacctacttctgtagagat

SEQ ID NO: 445102 - DNA, 19 bp, Mus musculus
  siRNA target sequence for Isgf3g (NM_008394.2,1114-1132).
cctacttctgtagagattt

SEQ ID NO: 445103 - DNA, 19 bp, Mus musculus
  siRNA target sequence for Isgf3g (NM_008394.2,1173-1191).
caagcaaccctacatttct

SEQ ID NO: 445104 - DNA, 19 bp, Mus musculus
  siRNA target sequence for Isgf3g (NM_008394.2,1255-1273).
cctttgcccgacatttact

SEQ ID NO: 445105 - DNA, 19 bp, Mus musculus
  siRNA target sequence for Isl1 (NM_021459.2,279-297).
gggcgatccaccaaaaaaa

SEQ ID NO: 445106 - DNA, 19 bp, Mus musculus
  siRNA target sequence for Isl1 (NM_021459.2,323-341).
gttgcggcaatcaaattca

SEQ ID NO: 445107 - DNA, 19 bp, Mus musculus
  siRNA target sequence for Isl1 (NM_021459.2,334-352).
caaattcacgaccagtata

SEQ ID NO: 445108 - DNA, 19 bp, Mus musculus
  siRNA target sequence for Isl1 (NM_021459.2,340-358).
cacgaccagtatattctga

SEQ ID NO: 445109 - DNA, 19 bp, Mus musculus
  siRNA target sequence for Isl1 (NM_021459.2,396-414).
gaaatgtgcggagtgtaat

SEQ ID NO: 445110 - DNA, 19 bp, Mus musculus
  siRNA target sequence for Isl1 (NM_021459.2,401-419).
gtgcggagtgtaatcagta

SEQ ID NO: 445111 - DNA, 19 bp, Mus musculus
  siRNA target sequence for Isl1 (NM_021459.2,403-421).
gcggagtgtaatcagtatt

SEQ ID NO: 445112 - DNA, 19 bp, Mus musculus
  siRNA target sequence for Isl1 (NM_021459.2,404-422).
cggagtgtaatcagtattt

SEQ ID NO: 445113 - DNA, 19 bp, Mus musculus
  siRNA target sequence for Isl1 (NM_021459.2,483-501).
caggttgtacgggatcaaa

SEQ ID NO: 445114 - DNA, 19 bp, Mus musculus
  siRNA target sequence for Isl1 (NM_021459.2,1012-1030).
cagcaacccaacgacaaaa

SEQ ID NO: 445115 - DNA, 19 bp, Mus musculus
  siRNA target sequence for Isl1 (NM_021459.2,1014-1032).
gcaacccaacgacaaaact

SEQ ID NO: 445116 - DNA, 19 bp, Mus musculus
  siRNA target sequence for Isl1 (NM_021459.2,1015-1033).
caacccaacgacaaaacta

SEQ ID NO: 445117 - DNA, 19 bp, Mus musculus
  siRNA target sequence for Isl1 (NM_021459.2,1019-1037).
ccaacgacaaaactaatat

SEQ ID NO: 445118 - DNA, 19 bp, Mus musculus
  siRNA target sequence for Isl1 (NM_021459.2,1080-1098).
gagacatgatggtggttta

SEQ ID NO: 445119 - DNA, 19 bp, Mus musculus
  siRNA target sequence for Isl1 (NM_021459.2,1108-1126).
ccagtagaggtgcaaagtt

SEQ ID NO: 445120 - DNA, 19 bp, Mus musculus
  siRNA target sequence for Isl1 (NM_021459.2,1160-1178).
ccttgcaaagcgacataga

SEQ ID NO: 445121 - DNA, 19 bp, Mus musculus
  siRNA target sequence for Isl1 (NM_021459.2,1161-1179).
cttgcaaagcgacatagat

SEQ ID NO: 445122 - DNA, 19 bp, Mus musculus
  siRNA target sequence for Isl1 (NM_021459.2,1216-1234).
ggaggaccaggctctaatt

SEQ ID NO: 445123 - DNA, 19 bp, Mus musculus
  siRNA target sequence for Isl1 (NM_021459.2,1290-1308).
catggtagccagtcctatt

SEQ ID NO: 445124 - DNA, 19 bp, Mus musculus
  siRNA target sequence for Isl2 (NM_027397.1,109-127).
ggtgctatgggggatcatt

SEQ ID NO: 445125 - DNA, 19 bp, Mus musculus
  siRNA target sequence for Isl2 (NM_027397.1,113-131).
ctatgggggatcattccaa

SEQ ID NO: 445126 - DNA, 19 bp, Mus musculus
  siRNA target sequence for Isl2 (NM_027397.1,118-136).
ggggatcattccaagaaga

SEQ ID NO: 445127 - DNA, 19 bp, Mus musculus
  siRNA target sequence for Isl2 (NM_027397.1,119-137).
gggatcattccaagaagaa

SEQ ID NO: 445128 - DNA, 19 bp, Mus musculus
  siRNA target sequence for Isl2 (NM_027397.1,177-195).
ccacgaccagtttatcctt

SEQ ID NO: 445129 - DNA, 19 bp, Mus musculus
  siRNA target sequence for Isl2 (NM_027397.1,283-301).
gtgagagacgggaaaacct

SEQ ID NO: 445130 - DNA, 19 bp, Mus musculus
  siRNA target sequence for Isl2 (NM_027397.1,802-820).
cgttgcaaggacaagaaga

SEQ ID NO: 445131 - DNA, 19 bp, Mus musculus
  siRNA target sequence for Isl2 (NM_027397.1,1014-1032).
ggaccaacccgcctttcaa

SEQ ID NO: 445132 - DNA, 19 bp, Mus musculus
  siRNA target sequence for Isl2 (NM_027397.1,1111-1129).
ccggacacccccaacagta

SEQ ID NO: 445133 - DNA, 19 bp, Mus musculus
  siRNA target sequence for Isl2 (NM_027397.1,1112-1130).
cggacacccccaacagtat

SEQ ID NO: 445134 - DNA, 19 bp, Mus musculus
  siRNA target sequence for Jun (NM_010591.1,986-1004).
ggtgcctacggctacagta

SEQ ID NO: 445135 - DNA, 19 bp, Mus musculus
  siRNA target sequence for Jun (NM_010591.1,1007-1025).
cctaagatcctaaaacaga

SEQ ID NO: 445136 - DNA, 19 bp, Mus musculus
  siRNA target sequence for Jun (NM_010591.1,1895-1913).
ctaacgcagcagttgcaaa

SEQ ID NO: 445137 - DNA, 19 bp, Mus musculus
  siRNA target sequence for Jun (NM_010591.1,1899-1917).
cgcagcagttgcaaacgtt

SEQ ID NO: 445138 - DNA, 19 bp, Mus musculus
  siRNA target sequence for Jun (NM_010591.1,1900-1918).
gcagcagttgcaaacgttt

SEQ ID NO: 445139 - DNA, 19 bp, Mus musculus
  siRNA target sequence for Jun (NM_010591.1,1901-1919).
cagcagttgcaaacgtttt

SEQ ID NO: 445140 - DNA, 19 bp, Mus musculus
  siRNA target sequence for Junb (NM_008416.1,1014-1032).
gcgcttccgcctttaaaga

SEQ ID NO: 445141 - DNA, 19 bp, Mus musculus
  siRNA target sequence for Klf16 (NM_078477.1,105-123).
ccgtggcgtgtgtggatta

SEQ ID NO: 445142 - DNA, 19 bp, Mus musculus
  siRNA target sequence for Klf16 (NM_078477.1,107-125).
gtggcgtgtgtggattact

SEQ ID NO: 445143 - DNA, 19 bp, Mus musculus
  siRNA target sequence for Klf16 (NM_078477.1,492-510).
gcgccaaagcctattacaa

SEQ ID NO: 445144 - DNA, 19 bp, Mus musculus
  siRNA target sequence for Klf16 (NM_078477.1,494-512).
gccaaagcctattacaagt

SEQ ID NO: 445145 - DNA, 19 bp, Mus musculus
  siRNA target sequence for Lass2 (NM_029789.1,106-124).
ctccagaccttgtatgact

SEQ ID NO: 445146 - DNA, 19 bp, Mus musculus
  siRNA target sequence for Lass2 (NM_029789.1,244-262).
ctctttctcgtcattcgat

SEQ ID NO: 445147 - DNA, 19 bp, Mus musculus
  siRNA target sequence for Lass2 (NM_029789.1,252-270).
cgtcattcgatacttcttt

SEQ ID NO: 445148 - DNA, 19 bp, Mus musculus
  siRNA target sequence for Lass2 (NM_029789.1,260-278).
gatacttctttgagcttta

SEQ ID NO: 445149 - DNA, 19 bp, Mus musculus
  siRNA target sequence for Lass2 (NM_029789.1,294-312).
ggctgccctcctgaatgtt

SEQ ID NO: 445150 - DNA, 19 bp, Mus musculus
  siRNA target sequence for Lass2 (NM_029789.1,481-499).
cccagtcttctcaaaaagt

SEQ ID NO: 445151 - DNA, 19 bp, Mus musculus
  siRNA target sequence for Lass2 (NM_029789.1,512-530).
gctggagattcacgtatta

SEQ ID NO: 445152 - DNA, 19 bp, Mus musculus
  siRNA target sequence for Lass2 (NM_029789.1,516-534).
gagattcacgtattaccta

SEQ ID NO: 445153 - DNA, 19 bp, Mus musculus
  siRNA target sequence for Lass2 (NM_029789.1,518-536).
gattcacgtattacctaat

SEQ ID NO: 445154 - DNA, 19 bp, Mus musculus
  siRNA target sequence for Lass2 (NM_029789.1,567-585).
ggataaaccctggttctat

SEQ ID NO: 445155 - DNA, 19 bp, Mus musculus
  siRNA target sequence for Lass2 (NM_029789.1,574-592).
ccctggttctatgacttaa

SEQ ID NO: 445156 - DNA, 19 bp, Mus musculus
  siRNA target sequence for Lass2 (NM_029789.1,578-596).
ggttctatgacttaaggaa

SEQ ID NO: 445157 - DNA, 19 bp, Mus musculus
  siRNA target sequence for Lass2 (NM_029789.1,582-600).
ctatgacttaaggaaagtt

SEQ ID NO: 445158 - DNA, 19 bp, Mus musculus
  siRNA target sequence for Lass2 (NM_029789.1,604-622).
gagggatatcccatacaga

SEQ ID NO: 445159 - DNA, 19 bp, Mus musculus
  siRNA target sequence for Lass2 (NM_029789.1,624-642).
catcatcccttctcagtat

SEQ ID NO: 445160 - DNA, 19 bp, Mus musculus
  siRNA target sequence for Lass2 (NM_029789.1,644-662).
ggtactacatgattgaact

SEQ ID NO: 445161 - DNA, 19 bp, Mus musculus
  siRNA target sequence for Lass2 (NM_029789.1,703-721).
gtcaagcgaaaggatttta

SEQ ID NO: 445162 - DNA, 19 bp, Mus musculus
  siRNA target sequence for Lass2 (NM_029789.1,736-754).
caccatgtggccactatca

SEQ ID NO: 445163 - DNA, 19 bp, Mus musculus
  siRNA target sequence for Lass2 (NM_029789.1,738-756).
ccatgtggccactatcatt

SEQ ID NO: 445164 - DNA, 19 bp, Mus musculus
  siRNA target sequence for Lass2 (NM_029789.1,845-863).
ctgccaagatgtttaacta

SEQ ID NO: 445165 - DNA, 19 bp, Mus musculus
  siRNA target sequence for Lass2 (NM_029789.1,901-919).
gtgttcgccatcgttttca

SEQ ID NO: 445166 - DNA, 19 bp, Mus musculus
  siRNA target sequence for Lass2 (NM_029789.1,954-972).
cctacactgcacgatgata

SEQ ID NO: 445167 - DNA, 19 bp, Mus musculus
  siRNA target sequence for Lass2 (NM_029789.1,955-973).
ctacactgcacgatgatat

SEQ ID NO: 445168 - DNA, 19 bp, Mus musculus
  siRNA target sequence for Lass2 (NM_029789.1,1036-1054).
ctacagatgctccatatct

SEQ ID NO: 445169 - DNA, 19 bp, Mus musculus
  siRNA target sequence for Lass2 (NM_029789.1,1039-1057).
cagatgctccatatcttct

SEQ ID NO: 445170 - DNA, 19 bp, Mus musculus
  siRNA target sequence for Lass2 (NM_029789.1,1053-1071).
cttctgggcctacttcatt

SEQ ID NO: 445171 - DNA, 19 bp, Mus musculus
  siRNA target sequence for Lass2 (NM_029789.1,1075-1093).
cgtatggcccacaagttca

SEQ ID NO: 445172 - DNA, 19 bp, Mus musculus
  siRNA target sequence for Lass2 (NM_029789.1,1076-1094).
gtatggcccacaagttcat

SEQ ID NO: 445173 - DNA, 19 bp, Mus musculus
  siRNA target sequence for Lass2 (NM_029789.1,1080-1098).
ggcccacaagttcataact

SEQ ID NO: 445174 - DNA, 19 bp, Mus musculus
  siRNA target sequence for Lass2 (NM_029789.1,1204-1222).
ggccaccccatcctcaata

SEQ ID NO: 445175 - DNA, 19 bp, Mus musculus
  siRNA target sequence for Lass4 (NM_026058.2,115-133).
ctgtggcaggagacatact

SEQ ID NO: 445176 - DNA, 19 bp, Mus musculus
  siRNA target sequence for Lass4 (NM_026058.2,238-256).
gtggctgtgcgaattgtct

SEQ ID NO: 445177 - DNA, 19 bp, Mus musculus
  siRNA target sequence for Lass4 (NM_026058.2,240-258).
ggctgtgcgaattgtcttt

SEQ ID NO: 445178 - DNA, 19 bp, Mus musculus
  siRNA target sequence for Lass4 (NM_026058.2,242-260).
ctgtgcgaattgtctttga

SEQ ID NO: 445179 - DNA, 19 bp, Mus musculus
  siRNA target sequence for Lass4 (NM_026058.2,244-262).
gtgcgaattgtctttgaga

SEQ ID NO: 445180 - DNA, 19 bp, Mus musculus
  siRNA target sequence for Lass4 (NM_026058.2,248-266).
gaattgtctttgagagatt

SEQ ID NO: 445181 - DNA, 19 bp, Mus musculus
  siRNA target sequence for Lass4 (NM_026058.2,334-352).
ccggtgctggagaagtact

SEQ ID NO: 445182 - DNA, 19 bp, Mus musculus
  siRNA target sequence for Lass4 (NM_026058.2,474-492).
cttatccaagaaattctgt

SEQ ID NO: 445183 - DNA, 19 bp, Mus musculus
  siRNA target sequence for Lass4 (NM_026058.2,500-518).
gctggaggtttgtcttcta

SEQ ID NO: 445184 - DNA, 19 bp, Mus musculus
  siRNA target sequence for Lass4 (NM_026058.2,501-519).
ctggaggtttgtcttctat

SEQ ID NO: 445185 - DNA, 19 bp, Mus musculus
  siRNA target sequence for Lass4 (NM_026058.2,503-521).
ggaggtttgtcttctatct

SEQ ID NO: 445186 - DNA, 19 bp, Mus musculus
  siRNA target sequence for Lass4 (NM_026058.2,546-564).
catcctctaccatgaatca

SEQ ID NO: 445187 - DNA, 19 bp, Mus musculus
  siRNA target sequence for Lass4 (NM_026058.2,661-679).
ctttcactgctgatcactt

SEQ ID NO: 445188 - DNA, 19 bp, Mus musculus
  siRNA target sequence for Lass4 (NM_026058.2,677-695).
ctttgccctttgatgtcaa

SEQ ID NO: 445189 - DNA, 19 bp, Mus musculus
  siRNA target sequence for Lass4 (NM_026058.2,785-803).
gcgctgtggtactgttgtt

SEQ ID NO: 445190 - DNA, 19 bp, Mus musculus
  siRNA target sequence for Lass4 (NM_026058.2,825-843).
gctggagggttgtaagatt

SEQ ID NO: 445191 - DNA, 19 bp, Mus musculus
  siRNA target sequence for Lass4 (NM_026058.2,829-847).
gagggttgtaagattctca

SEQ ID NO: 445192 - DNA, 19 bp, Mus musculus
  siRNA target sequence for Lass4 (NM_026058.2,833-851).
gttgtaagattctcaacta

SEQ ID NO: 445193 - DNA, 19 bp, Mus musculus
  siRNA target sequence for Lass4 (NM_026058.2,869-887).
ggtgcgatgctctcttcat

SEQ ID NO: 445194 - DNA, 19 bp, Mus musculus
  siRNA target sequence for Lass4 (NM_026058.2,872-890).
gcgatgctctcttcatcat

SEQ ID NO: 445195 - DNA, 19 bp, Mus musculus
  siRNA target sequence for Lass4 (NM_026058.2,942-960).
catctacacgtctgtgtat

SEQ ID NO: 445196 - DNA, 19 bp, Mus musculus
  siRNA target sequence for Lass4 (NM_026058.2,1017-1035).
ggtgatgctacagattctt

SEQ ID NO: 445197 - DNA, 19 bp, Mus musculus
  siRNA target sequence for Lass4 (NM_026058.2,1060-1078).
ctgcgcatgctctacagtt

SEQ ID NO: 445198 - DNA, 19 bp, Mus musculus
  siRNA target sequence for Lass4 (NM_026058.2,1185-1203).
ggctcgagggtctagagta

SEQ ID NO: 445199 - DNA, 19 bp, Mus musculus
  siRNA target sequence for Lass4 (NM_026058.2,1196-1214).
ctagagtagctgttaccaa

SEQ ID NO: 445200 - DNA, 19 bp, Mus musculus
  siRNA target sequence for Lass5 (NM_028015.2,322-340).
gctgtttgagcgatttatt

SEQ ID NO: 445201 - DNA, 19 bp, Mus musculus
  siRNA target sequence for Lass5 (NM_028015.2,419-437).
gtgttcgtatctgttacta

SEQ ID NO: 445202 - DNA, 19 bp, Mus musculus
  siRNA target sequence for Lass5 (NM_028015.2,456-474).
ggttgaagggcctatcaaa

SEQ ID NO: 445203 - DNA, 19 bp, Mus musculus
  siRNA target sequence for Lass5 (NM_028015.2,481-499).
ggactggagtgttcgaaaa

SEQ ID NO: 445204 - DNA, 19 bp, Mus musculus
  siRNA target sequence for Lass5 (NM_028015.2,486-504).
ggagtgttcgaaaaatcca

SEQ ID NO: 445205 - DNA, 19 bp, Mus musculus
  siRNA target sequence for Lass5 (NM_028015.2,487-505).
gagtgttcgaaaaatccaa

SEQ ID NO: 445206 - DNA, 19 bp, Mus musculus
  siRNA target sequence for Lass5 (NM_028015.2,540-558).
ctccaacgctcacgaaatt

SEQ ID NO: 445207 - DNA, 19 bp, Mus musculus
  siRNA target sequence for Lass5 (NM_028015.2,548-566).
ctcacgaaattctgtgaaa

SEQ ID NO: 445208 - DNA, 19 bp, Mus musculus
  siRNA target sequence for Lass5 (NM_028015.2,568-586).
catgtggagattcacttat

SEQ ID NO: 445209 - DNA, 19 bp, Mus musculus
  siRNA target sequence for Lass5 (NM_028015.2,571-589).
gtggagattcacttattat

SEQ ID NO: 445210 - DNA, 19 bp, Mus musculus
  siRNA target sequence for Lass5 (NM_028015.2,573-591).
ggagattcacttattattt

SEQ ID NO: 445211 - DNA, 19 bp, Mus musculus
  siRNA target sequence for Lass5 (NM_028015.2,598-616).
cttctgctacggaatcaga

SEQ ID NO: 445212 - DNA, 19 bp, Mus musculus
  siRNA target sequence for Lass5 (NM_028015.2,601-619).
ctgctacggaatcagattt

SEQ ID NO: 445213 - DNA, 19 bp, Mus musculus
  siRNA target sequence for Lass5 (NM_028015.2,683-701).
ctctcgagagagctgtatt

SEQ ID NO: 445214 - DNA, 19 bp, Mus musculus
  siRNA target sequence for Lass5 (NM_028015.2,687-705).
cgagagagctgtattacta

SEQ ID NO: 445215 - DNA, 19 bp, Mus musculus
  siRNA target sequence for Lass5 (NM_028015.2,688-706).
gagagagctgtattactat

SEQ ID NO: 445216 - DNA, 19 bp, Mus musculus
  siRNA target sequence for Lass5 (NM_028015.2,727-745).
ctactggtctcttatgttt

SEQ ID NO: 445217 - DNA, 19 bp, Mus musculus
  siRNA target sequence for Lass5 (NM_028015.2,787-805).
gtttattcatcatatgatt

SEQ ID NO: 445218 - DNA, 19 bp, Mus musculus
  siRNA target sequence for Lass5 (NM_028015.2,849-867).
gagtgggagcactcatctt

SEQ ID NO: 445219 - DNA, 19 bp, Mus musculus
  siRNA target sequence for Lass5 (NM_028015.2,851-869).
gtgggagcactcatcttct

SEQ ID NO: 445220 - DNA, 19 bp, Mus musculus
  siRNA target sequence for Lass5 (NM_028015.2,937-955).
gctctgtaccacccttttt

SEQ ID NO: 445221 - DNA, 19 bp, Mus musculus
  siRNA target sequence for Lass5 (NM_028015.2,945-963).
ccaccctttttgtgatctt

SEQ ID NO: 445222 - DNA, 19 bp, Mus musculus
  siRNA target sequence for Lass5 (NM_028015.2,965-983).
ggcgcagcttttatagttt

SEQ ID NO: 445223 - DNA, 19 bp, Mus musculus
  siRNA target sequence for Lass5 (NM_028015.2,1015-1033).
gaacacaaccctctttgaa

SEQ ID NO: 445224 - DNA, 19 bp, Mus musculus
  siRNA target sequence for Lass5 (NM_028015.2,1329-1347).
ccactggcaacctacattt

SEQ ID NO: 445225 - DNA, 19 bp, Mus musculus
  siRNA target sequence for Lass6 (NM_172856.1,235-253).
ggctcatcttcgagagatt

SEQ ID NO: 445226 - DNA, 19 bp, Mus musculus
  siRNA target sequence for Lass6 (NM_172856.1,237-255).
ctcatcttcgagagattca

SEQ ID NO: 445227 - DNA, 19 bp, Mus musculus
  siRNA target sequence for Lass6 (NM_172856.1,239-257).
catcttcgagagattcata

SEQ ID NO: 445228 - DNA, 19 bp, Mus musculus
  siRNA target sequence for Lass6 (NM_172856.1,335-353).
ggttttcactgctataaca

SEQ ID NO: 445229 - DNA, 19 bp, Mus musculus
  siRNA target sequence for Lass6 (NM_172856.1,336-354).
gttttcactgctataacaa

SEQ ID NO: 445230 - DNA, 19 bp, Mus musculus
  siRNA target sequence for Lass6 (NM_172856.1,341-359).
cactgctataacaaagcat

SEQ ID NO: 445231 - DNA, 19 bp, Mus musculus
  siRNA target sequence for Lass6 (NM_172856.1,361-379).
ctgatgaaaagagattaga

SEQ ID NO: 445232 - DNA, 19 bp, Mus musculus
  siRNA target sequence for Lass6 (NM_172856.1,404-422).
ggatgttcggagcattcaa

SEQ ID NO: 445233 - DNA, 19 bp, Mus musculus
  siRNA target sequence for Lass6 (NM_172856.1,524-542).
cggagtccggttcttgaaa

SEQ ID NO: 445234 - DNA, 19 bp, Mus musculus
  siRNA target sequence for Lass6 (NM_172856.1,526-544).
gagtccggttcttgaaaca

SEQ ID NO: 445235 - DNA, 19 bp, Mus musculus
  siRNA target sequence for Lass6 (NM_172856.1,528-546).
gtccggttcttgaaacaga

SEQ ID NO: 445236 - DNA, 19 bp, Mus musculus
  siRNA target sequence for Lass6 (NM_172856.1,565-583).
caagacactgctggtataa

SEQ ID NO: 445237 - DNA, 19 bp, Mus musculus
  siRNA target sequence for Lass6 (NM_172856.1,604-622).
cagctgaccttcactacta

SEQ ID NO: 445238 - DNA, 19 bp, Mus musculus
  siRNA target sequence for Lass6 (NM_172856.1,606-624).
gctgaccttcactactatt

SEQ ID NO: 445239 - DNA, 19 bp, Mus musculus
  siRNA target sequence for Lass6 (NM_172856.1,607-625).
ctgaccttcactactatta

SEQ ID NO: 445240 - DNA, 19 bp, Mus musculus
  siRNA target sequence for Lass6 (NM_172856.1,609-627).
gaccttcactactattaca

SEQ ID NO: 445241 - DNA, 19 bp, Mus musculus
  siRNA target sequence for Lass6 (NM_172856.1,629-647).
cctggagctgtcattttat

SEQ ID NO: 445242 - DNA, 19 bp, Mus musculus
  siRNA target sequence for Lass6 (NM_172856.1,685-703).
ggaaggacttcggcattat

SEQ ID NO: 445243 - DNA, 19 bp, Mus musculus
  siRNA target sequence for Lass6 (NM_172856.1,710-728).
gcaccaccttgcaacaatt

SEQ ID NO: 445244 - DNA, 19 bp, Mus musculus
  siRNA target sequence for Lass6 (NM_172856.1,711-729).
caccaccttgcaacaattt

SEQ ID NO: 445245 - DNA, 19 bp, Mus musculus
  siRNA target sequence for Lass6 (NM_172856.1,716-734).
ccttgcaacaattttctta

SEQ ID NO: 445246 - DNA, 19 bp, Mus musculus
  siRNA target sequence for Lass6 (NM_172856.1,717-735).
cttgcaacaattttcttaa

SEQ ID NO: 445247 - DNA, 19 bp, Mus musculus
  siRNA target sequence for Lass6 (NM_172856.1,830-848).
ggcaaattacgccaaattt

SEQ ID NO: 445248 - DNA, 19 bp, Mus musculus
  siRNA target sequence for Lass6 (NM_172856.1,832-850).
caaattacgccaaatttca

SEQ ID NO: 445249 - DNA, 19 bp, Mus musculus
  siRNA target sequence for Lass6 (NM_172856.1,898-916).
ccacacggctgggcatatt

SEQ ID NO: 445250 - DNA, 19 bp, Mus musculus
  siRNA target sequence for Lass6 (NM_172856.1,926-944).
ggtgttgaataccacatta

SEQ ID NO: 445251 - DNA, 19 bp, Mus musculus
  siRNA target sequence for Lass6 (NM_172856.1,932-950).
gaataccacattatttgaa

SEQ ID NO: 445252 - DNA, 19 bp, Mus musculus
  siRNA target sequence for Lass6 (NM_172856.1,975-993).
ccttcctggtgggttttta

SEQ ID NO: 445253 - DNA, 19 bp, Mus musculus
  siRNA target sequence for Lass6 (NM_172856.1,1031-1049).
ctggtcttacctgattgta

SEQ ID NO: 445254 - DNA, 19 bp, Mus musculus
  siRNA target sequence for Lass6 (NM_172856.1,1034-1052).
gtcttacctgattgtaaaa

SEQ ID NO: 445255 - DNA, 19 bp, Mus musculus
  siRNA target sequence for Lass6 (NM_172856.1,1041-1059).
ctgattgtaaaaatagctt

SEQ ID NO: 445256 - DNA, 19 bp, Mus musculus
  siRNA target sequence for Lass6 (NM_172856.1,1097-1115).
ccggagtgacattgaatct

SEQ ID NO: 445257 - DNA, 19 bp, Mus musculus
  siRNA target sequence for Lass6 (NM_172856.1,1098-1116).
cggagtgacattgaatcta

SEQ ID NO: 445258 - DNA, 19 bp, Mus musculus
  siRNA target sequence for Lass6 (NM_172856.1,1215-1233).
ccttgttccgtggatgatt

SEQ ID NO: 445259 - DNA, 19 bp, Mus musculus
  siRNA target sequence for Lbx1h (NM_010691.2,631-649).
ccgtccgtgcggagaagtt

SEQ ID NO: 445260 - DNA, 19 bp, Mus musculus
  siRNA target sequence for Lbx1h (NM_010691.2,632-650).
cgtccgtgcggagaagtta

SEQ ID NO: 445261 - DNA, 19 bp, Mus musculus
  siRNA target sequence for Lbx1h (NM_010691.2,768-786).
ctcgccagcaagaccttta

SEQ ID NO: 445262 - DNA, 19 bp, Mus musculus
  siRNA target sequence for Lbx1h (NM_010691.2,1472-1490).
cgatgggatgaccatcttt

SEQ ID NO: 445263 - DNA, 19 bp, Mus musculus
  siRNA target sequence for Lbx1h (NM_010691.2,1506-1524).
cccaagaaacggcgaaaat

SEQ ID NO: 445264 - DNA, 19 bp, Mus musculus
  siRNA target sequence for Lbx1h (NM_010691.2,1508-1526).
caagaaacggcgaaaatca

SEQ ID NO: 445265 - DNA, 19 bp, Mus musculus
  siRNA target sequence for Lbx1h (NM_010691.2,1597-1615).
cggcagatcgcgaccaaat

SEQ ID NO: 445266 - DNA, 19 bp, Mus musculus
  siRNA target sequence for Lbx1h (NM_010691.2,1598-1616).
ggcagatcgcgaccaaatt

SEQ ID NO: 445267 - DNA, 19 bp, Mus musculus
  siRNA target sequence for Lbx1h (NM_010691.2,1712-1730).
cgtggagtctgccaagaaa

SEQ ID NO: 445268 - DNA, 19 bp, Mus musculus
  siRNA target sequence for Lbx2h (NM_010692.2,194-212).
ggaggagctagcaagtaaa

SEQ ID NO: 445269 - DNA, 19 bp, Mus musculus
  siRNA target sequence for Lbx2h (NM_010692.2,197-215).
ggagctagcaagtaaaact

SEQ ID NO: 445270 - DNA, 19 bp, Mus musculus
  siRNA target sequence for Lbx2h (NM_010692.2,198-216).
gagctagcaagtaaaactt

SEQ ID NO: 445271 - DNA, 19 bp, Mus musculus
  siRNA target sequence for Lbx2h (NM_010692.2,364-382).
gattcgtcttccagaagta

SEQ ID NO: 445272 - DNA, 19 bp, Mus musculus
  siRNA target sequence for Lbx2h (NM_010692.2,529-547).
cccctggagtcctgtgtta

SEQ ID NO: 445273 - DNA, 19 bp, Mus musculus
  siRNA target sequence for Lef1 (NM_010703.2,1036-1054).
gcgccaccgatgagatgat

SEQ ID NO: 445274 - DNA, 19 bp, Mus musculus
  siRNA target sequence for Lef1 (NM_010703.2,1126-1144).
gcgacttagccgacatcaa

SEQ ID NO: 445275 - DNA, 19 bp, Mus musculus
  siRNA target sequence for Lef1 (NM_010703.2,1135-1153).
ccgacatcaagtcatcttt

SEQ ID NO: 445276 - DNA, 19 bp, Mus musculus
  siRNA target sequence for Lef1 (NM_010703.2,1139-1157).
catcaagtcatctttggtt

SEQ ID NO: 445277 - DNA, 19 bp, Mus musculus
  siRNA target sequence for Lef1 (NM_010703.2,1155-1173).
gttaacgagtccgaaatca

SEQ ID NO: 445278 - DNA, 19 bp, Mus musculus
  siRNA target sequence for Lef1 (NM_010703.2,1273-1291).
cagacggaggcctgtacaa

SEQ ID NO: 445279 - DNA, 19 bp, Mus musculus
  siRNA target sequence for Lef1 (NM_010703.2,1301-1319).
ctcctactccagttactct

SEQ ID NO: 445280 - DNA, 19 bp, Mus musculus
  siRNA target sequence for Lef1 (NM_010703.2,1310-1328).
cagttactctggctacata

SEQ ID NO: 445281 - DNA, 19 bp, Mus musculus
  siRNA target sequence for Lef1 (NM_010703.2,1348-1366).
gcgacccgtacatgtcaaa

SEQ ID NO: 445282 - DNA, 19 bp, Mus musculus
  siRNA target sequence for Lef1 (NM_010703.2,1349-1367).
cgacccgtacatgtcaaat

SEQ ID NO: 445283 - DNA, 19 bp, Mus musculus
  siRNA target sequence for Lef1 (NM_010703.2,1383-1401).
cccatcccgaggacatcaa

SEQ ID NO: 445284 - DNA, 19 bp, Mus musculus
  siRNA target sequence for Lef1 (NM_010703.2,1384-1402).
ccatcccgaggacatcaaa

SEQ ID NO: 445285 - DNA, 19 bp, Mus musculus
  siRNA target sequence for Lef1 (NM_010703.2,1385-1403).
catcccgaggacatcaaat

SEQ ID NO: 445286 - DNA, 19 bp, Mus musculus
  siRNA target sequence for Lef1 (NM_010703.2,1388-1406).
cccgaggacatcaaataaa

SEQ ID NO: 445287 - DNA, 19 bp, Mus musculus
  siRNA target sequence for Lef1 (NM_010703.2,1807-1825).
cggacagtgacctaatgca

SEQ ID NO: 445288 - DNA, 19 bp, Mus musculus
  siRNA target sequence for Lef1 (NM_010703.2,1853-1871).
ggagcaggagcccaaaaga

SEQ ID NO: 445289 - DNA, 19 bp, Mus musculus
  siRNA target sequence for Lef1 (NM_010703.2,1863-1881).
cccaaaagacctcatatta

SEQ ID NO: 445290 - DNA, 19 bp, Mus musculus
  siRNA target sequence for Lef1 (NM_010703.2,2031-2049).
gaactagcacggaaagaga

SEQ ID NO: 445291 - DNA, 19 bp, Mus musculus
  siRNA target sequence for Lef1 (NM_010703.2,2078-2096).
ctggtcagcgcgagacaat

SEQ ID NO: 445292 - DNA, 19 bp, Mus musculus
  siRNA target sequence for Lef1 (NM_010703.2,2080-2098).
ggtcagcgcgagacaatta

SEQ ID NO: 445293 - DNA, 19 bp, Mus musculus
  siRNA target sequence for Lef1 (NM_010703.2,2081-2099).
gtcagcgcgagacaattat

SEQ ID NO: 445294 - DNA, 19 bp, Mus musculus
  siRNA target sequence for Lhx1 (NM_008498.1,1443-1461).
cgtccagtgctgtgaatgt

SEQ ID NO: 445295 - DNA, 19 bp, Mus musculus
  siRNA target sequence for Lhx1 (NM_008498.1,1444-1462).
gtccagtgctgtgaatgta

SEQ ID NO: 445296 - DNA, 19 bp, Mus musculus
  siRNA target sequence for Lhx1 (NM_008498.1,1527-1545).
ccgatgtttcggtaccaaa

SEQ ID NO: 445297 - DNA, 19 bp, Mus musculus
  siRNA target sequence for Lhx1 (NM_008498.1,1528-1546).
cgatgtttcggtaccaaat

SEQ ID NO: 445298 - DNA, 19 bp, Mus musculus
  siRNA target sequence for Lhx1 (NM_008498.1,1595-1613).
cgcgaagcaaagtgtttca

SEQ ID NO: 445299 - DNA, 19 bp, Mus musculus
  siRNA target sequence for Lhx1 (NM_008498.1,1660-1678).
ggcgaggagctctacatca

SEQ ID NO: 445300 - DNA, 19 bp, Mus musculus
  siRNA target sequence for Lhx1 (NM_008498.1,1662-1680).
cgaggagctctacatcata

SEQ ID NO: 445301 - DNA, 19 bp, Mus musculus
  siRNA target sequence for Lhx1 (NM_008498.1,1684-1702).
gagaacaagttcgtttgta

SEQ ID NO: 445302 - DNA, 19 bp, Mus musculus
  siRNA target sequence for Lhx1 (NM_008498.1,1686-1704).
gaacaagttcgtttgtaaa

SEQ ID NO: 445303 - DNA, 19 bp, Mus musculus
  siRNA target sequence for Lhx1 (NM_008498.1,1705-1723).
gaggattacctgagtaaca

SEQ ID NO: 445304 - DNA, 19 bp, Mus musculus
  siRNA target sequence for Lhx1 (NM_008498.1,1767-1785).
cagtgaccctagtttatct

SEQ ID NO: 445305 - DNA, 19 bp, Mus musculus
  siRNA target sequence for Lhx1 (NM_008498.1,1832-1850).
gtgccaacgtctcagataa

SEQ ID NO: 445306 - DNA, 19 bp, Mus musculus
  siRNA target sequence for Lhx1 (NM_008498.1,1852-1870).
gaaggtggtagtaatgaga

SEQ ID NO: 445307 - DNA, 19 bp, Mus musculus
  siRNA target sequence for Lhx1 (NM_008498.1,1862-1880).
gtaatgagaatgatgatca

SEQ ID NO: 445308 - DNA, 19 bp, Mus musculus
  siRNA target sequence for Lhx1 (NM_008498.1,2012-2030).
gcctcaacatgcgtgttat

SEQ ID NO: 445309 - DNA, 19 bp, Mus musculus
  siRNA target sequence for Lhx1 (NM_008498.1,2189-2207).
ccttttacggagattacca

SEQ ID NO: 445310 - DNA, 19 bp, Mus musculus
  siRNA target sequence for Lhx1 (NM_008498.1,2521-2539).
gccagctacgggaaccatt

SEQ ID NO: 445311 - DNA, 19 bp, Mus musculus
  siRNA target sequence for Lhx1 (NM_008498.1,2522-2540).
ccagctacgggaaccattt

SEQ ID NO: 445312 - DNA, 19 bp, Mus musculus
  siRNA target sequence for Lhx1 (NM_008498.1,2526-2544).
ctacgggaaccatttgtct

SEQ ID NO: 445313 - DNA, 19 bp, Mus musculus
  siRNA target sequence for Lhx2 (NM_010710.2,666-684).
ctggcagtagacaagcaat

SEQ ID NO: 445314 - DNA, 19 bp, Mus musculus
  siRNA target sequence for Lhx2 (NM_010710.2,855-873).
cgcgctcgggacttggttt

SEQ ID NO: 445315 - DNA, 19 bp, Mus musculus
  siRNA target sequence for Lhx2 (NM_010710.2,856-874).
gcgctcgggacttggttta

SEQ ID NO: 445316 - DNA, 19 bp, Mus musculus
  siRNA target sequence for Lhx2 (NM_010710.2,857-875).
cgctcgggacttggtttat

SEQ ID NO: 445317 - DNA, 19 bp, Mus musculus
  siRNA target sequence for Lhx2 (NM_010710.2,859-877).
ctcgggacttggtttatca

SEQ ID NO: 445318 - DNA, 19 bp, Mus musculus
  siRNA target sequence for Lhx2 (NM_010710.2,895-913).
gcacaacgtgtaacaagat

SEQ ID NO: 445319 - DNA, 19 bp, Mus musculus
  siRNA target sequence for Lhx2 (NM_010710.2,992-1010).
cgaatacccagcacacttt

SEQ ID NO: 445320 - DNA, 19 bp, Mus musculus
  siRNA target sequence for Lhx2 (NM_010710.2,1092-1110).
ctgggtcttccctactaca

SEQ ID NO: 445321 - DNA, 19 bp, Mus musculus
  siRNA target sequence for Lhx2 (NM_010710.2,1114-1132).
gcgtgggcactgtgcaaaa

SEQ ID NO: 445322 - DNA, 19 bp, Mus musculus
  siRNA target sequence for Lhx2 (NM_010710.2,1296-1314).
cagcttcggacaatgaagt

SEQ ID NO: 445323 - DNA, 19 bp, Mus musculus
  siRNA target sequence for Lhx2 (NM_010710.2,1302-1320).
cggacaatgaagtcttact

SEQ ID NO: 445324 - DNA, 19 bp, Mus musculus
  siRNA target sequence for Lhx2 (NM_010710.2,1427-1445).
gttcaggcgcaacctttta

SEQ ID NO: 445325 - DNA, 19 bp, Mus musculus
  siRNA target sequence for Lhx2 (NM_010710.2,1599-1617).
gtgacgtcagtcttaactt

SEQ ID NO: 445326 - DNA, 19 bp, Mus musculus
  siRNA target sequence for Lhx2 (NM_010710.2,1601-1619).
gacgtcagtcttaacttct

SEQ ID NO: 445327 - DNA, 19 bp, Mus musculus
  siRNA target sequence for Lhx3 (NM_010711.1,743-761).
gacagtatttccgcaatat

SEQ ID NO: 445328 - DNA, 19 bp, Mus musculus
  siRNA target sequence for Lhx3 (NM_010711.1,745-763).
cagtatttccgcaatatga

SEQ ID NO: 445329 - DNA, 19 bp, Mus musculus
  siRNA target sequence for Lhx4 (NM_010712.1,27-45).
ctggctgcaaccaacatat

SEQ ID NO: 445330 - DNA, 19 bp, Mus musculus
  siRNA target sequence for Lhx4 (NM_010712.1,38-56).
caacatatcctggataagt

SEQ ID NO: 445331 - DNA, 19 bp, Mus musculus
  siRNA target sequence for Lhx4 (NM_010712.1,41-59).
catatcctggataagttca

SEQ ID NO: 445332 - DNA, 19 bp, Mus musculus
  siRNA target sequence for Lhx4 (NM_010712.1,165-183).
gcaaggaagatttcttcaa

SEQ ID NO: 445333 - DNA, 19 bp, Mus musculus
  siRNA target sequence for Lhx4 (NM_010712.1,181-199).
caaacgctttggcacaaaa

SEQ ID NO: 445334 - DNA, 19 bp, Mus musculus
  siRNA target sequence for Lhx4 (NM_010712.1,345-363).
ggctagtgtgcaaagaaga

SEQ ID NO: 445335 - DNA, 19 bp, Mus musculus
  siRNA target sequence for Lhx4 (NM_010712.1,370-388).
gacagccaagcaaaacgat

SEQ ID NO: 445336 - DNA, 19 bp, Mus musculus
  siRNA target sequence for Lhx4 (NM_010712.1,447-465).
cactaaagaacgcatacaa

SEQ ID NO: 445337 - DNA, 19 bp, Mus musculus
  siRNA target sequence for Lhx4 (NM_010712.1,449-467).
ctaaagaacgcatacaaga

SEQ ID NO: 445338 - DNA, 19 bp, Mus musculus
  siRNA target sequence for Lhx4 (NM_010712.1,700-718).
gctgagcttccgagaagat

SEQ ID NO: 445339 - DNA, 19 bp, Mus musculus
  siRNA target sequence for Lhx4 (NM_010712.1,705-723).
gcttccgagaagatcaaat

SEQ ID NO: 445340 - DNA, 19 bp, Mus musculus
  siRNA target sequence for Lhx4 (NM_010712.1,710-728).
cgagaagatcaaatactct

SEQ ID NO: 445341 - DNA, 19 bp, Mus musculus
  siRNA target sequence for Lhx4 (NM_010712.1,734-752).
cttggccacaccaatagga

SEQ ID NO: 445342 - DNA, 19 bp, Mus musculus
  siRNA target sequence for Lhx4 (NM_010712.1,738-756).
gccacaccaataggattta

SEQ ID NO: 445343 - DNA, 19 bp, Mus musculus
  siRNA target sequence for Lhx4 (NM_010712.1,739-757).
ccacaccaataggatttat

SEQ ID NO: 445344 - DNA, 19 bp, Mus musculus
  siRNA target sequence for Lhx4 (NM_010712.1,772-790).
cgttacaggcggacagtta

SEQ ID NO: 445345 - DNA, 19 bp, Mus musculus
  siRNA target sequence for Lhx4 (NM_010712.1,773-791).
gttacaggcggacagttaa

SEQ ID NO: 445346 - DNA, 19 bp, Mus musculus
  siRNA target sequence for Lhx4 (NM_010712.1,777-795).
caggcggacagttaatgaa

SEQ ID NO: 445347 - DNA, 19 bp, Mus musculus
  siRNA target sequence for Lhx4 (NM_010712.1,1043-1061).
ggctaccctgattttccaa

SEQ ID NO: 445348 - DNA, 19 bp, Mus musculus
  siRNA target sequence for Lhx5 (NM_008499.2,451-469).
cgcgtggcatatcaaatgt

SEQ ID NO: 445349 - DNA, 19 bp, Mus musculus
  siRNA target sequence for Lhx5 (NM_008499.2,453-471).
cgtggcatatcaaatgtgt

SEQ ID NO: 445350 - DNA, 19 bp, Mus musculus
  siRNA target sequence for Lhx5 (NM_008499.2,454-472).
gtggcatatcaaatgtgtt

SEQ ID NO: 445351 - DNA, 19 bp, Mus musculus
  siRNA target sequence for Lhx5 (NM_008499.2,457-475).
gcatatcaaatgtgttcaa

SEQ ID NO: 445352 - DNA, 19 bp, Mus musculus
  siRNA target sequence for Lhx5 (NM_008499.2,580-598).
ctgcgcgcaaggtatctct

SEQ ID NO: 445353 - DNA, 19 bp, Mus musculus
  siRNA target sequence for Lhx5 (NM_008499.2,701-719).
gtgatcgacgagaacaagt

SEQ ID NO: 445354 - DNA, 19 bp, Mus musculus
  siRNA target sequence for Lhx5 (NM_008499.2,703-721).
gatcgacgagaacaagttt

SEQ ID NO: 445355 - DNA, 19 bp, Mus musculus
  siRNA target sequence for Lhx5 (NM_008499.2,724-742).
gtgcaaggacgactactta

SEQ ID NO: 445356 - DNA, 19 bp, Mus musculus
  siRNA target sequence for Lhx5 (NM_008499.2,839-857).
cccaaagagaccgacaatt

SEQ ID NO: 445357 - DNA, 19 bp, Mus musculus
  siRNA target sequence for Lhx5 (NM_008499.2,1081-1099).
caaagaacgccgcatgaaa

SEQ ID NO: 445358 - DNA, 19 bp, Mus musculus
  siRNA target sequence for Lhx5 (NM_008499.2,1195-1213).
ggggtctaccccatacact

SEQ ID NO: 445359 - DNA, 19 bp, Mus musculus
  siRNA target sequence for Lhx5 (NM_008499.2,1196-1214).
gggtctaccccatacactt

SEQ ID NO: 445360 - DNA, 19 bp, Mus musculus
  siRNA target sequence for Lhx5 (NM_008499.2,1197-1215).
ggtctaccccatacactta

SEQ ID NO: 445361 - DNA, 19 bp, Mus musculus
  siRNA target sequence for Lhx5 (NM_008499.2,1198-1216).
gtctaccccatacacttat

SEQ ID NO: 445362 - DNA, 19 bp, Mus musculus
  siRNA target sequence for Lhx5 (NM_008499.2,1200-1218).
ctaccccatacacttatta

SEQ ID NO: 445363 - DNA, 19 bp, Mus musculus
  siRNA target sequence for Lhx5 (NM_008499.2,1247-1265).
ccgggaggcaattacgatt

SEQ ID NO: 445364 - DNA, 19 bp, Mus musculus
  siRNA target sequence for Lhx5 (NM_008499.2,1248-1266).
cgggaggcaattacgattt

SEQ ID NO: 445365 - DNA, 19 bp, Mus musculus
  siRNA target sequence for Lhx5 (NM_008499.2,1388-1406).
gcggacaaccccagattca

SEQ ID NO: 445366 - DNA, 19 bp, Mus musculus
  siRNA target sequence for Lhx5 (NM_008499.2,1398-1416).
ccagattcaccgacatgat

SEQ ID NO: 445367 - DNA, 19 bp, Mus musculus
  siRNA target sequence for Lhx6 (NM_008500.1,317-335).
ccgtctgccggcaagaata

SEQ ID NO: 445368 - DNA, 19 bp, Mus musculus
  siRNA target sequence for Lhx6 (NM_008500.1,318-336).
cgtctgccggcaagaatat

SEQ ID NO: 445369 - DNA, 19 bp, Mus musculus
  siRNA target sequence for Lhx6 (NM_008500.1,529-547).
gtgcggcagacaaatctat

SEQ ID NO: 445370 - DNA, 19 bp, Mus musculus
  siRNA target sequence for Lhx6 (NM_008500.1,937-955).
ctgccgagcgcgtcataaa

SEQ ID NO: 445371 - DNA, 19 bp, Mus musculus
  siRNA target sequence for Lhx6 (NM_008500.1,939-957).
gccgagcgcgtcataaaaa

SEQ ID NO: 445372 - DNA, 19 bp, Mus musculus
  siRNA target sequence for Lhx6 (NM_008500.1,942-960).
gagcgcgtcataaaaagca

SEQ ID NO: 445373 - DNA, 19 bp, Mus musculus
  siRNA target sequence for Lhx6 (NM_008500.1,944-962).
gcgcgtcataaaaagcata

SEQ ID NO: 445374 - DNA, 19 bp, Mus musculus
  siRNA target sequence for Lhx6 (NM_008500.1,1074-1092).
ccttgcacggctacattga

SEQ ID NO: 445375 - DNA, 19 bp, Mus musculus
  siRNA target sequence for Lhx8 (NM_010713.1,633-651).
ctcaaggtgaatgacttat

SEQ ID NO: 445376 - DNA, 19 bp, Mus musculus
  siRNA target sequence for Lhx8 (NM_010713.1,709-727).
cgagctgctacattaagga

SEQ ID NO: 445377 - DNA, 19 bp, Mus musculus
  siRNA target sequence for Lhx8 (NM_010713.1,712-730).
gctgctacattaaggataa

SEQ ID NO: 445378 - DNA, 19 bp, Mus musculus
  siRNA target sequence for Lhx8 (NM_010713.1,713-731).
ctgctacattaaggataaa

SEQ ID NO: 445379 - DNA, 19 bp, Mus musculus
  siRNA target sequence for Lhx8 (NM_010713.1,715-733).
gctacattaaggataaaga

SEQ ID NO: 445380 - DNA, 19 bp, Mus musculus
  siRNA target sequence for Lhx8 (NM_010713.1,977-995).
gaacggtaatgggattagt

SEQ ID NO: 445381 - DNA, 19 bp, Mus musculus
  siRNA target sequence for Lhx8 (NM_010713.1,1072-1090).
ccgatcagctccaggttat

SEQ ID NO: 445382 - DNA, 19 bp, Mus musculus
  siRNA target sequence for Lhx8 (NM_010713.1,1160-1178).
cttaagcagacgtgtcata

SEQ ID NO: 445383 - DNA, 19 bp, Mus musculus
  siRNA target sequence for Lhx9 (NM_010714.1,169-187).
gaggccacatccaaggtat

SEQ ID NO: 445384 - DNA, 19 bp, Mus musculus
  siRNA target sequence for Lhx9 (NM_010714.1,172-190).
gccacatccaaggtatcat

SEQ ID NO: 445385 - DNA, 19 bp, Mus musculus
  siRNA target sequence for Lhx9 (NM_010714.1,320-338).
gatctccgacaggtactat

SEQ ID NO: 445386 - DNA, 19 bp, Mus musculus
  siRNA target sequence for Lhx9 (NM_010714.1,426-444).
gccaaggacggtagcattt

SEQ ID NO: 445387 - DNA, 19 bp, Mus musculus
  siRNA target sequence for Lhx9 (NM_010714.1,427-445).
ccaaggacggtagcattta

SEQ ID NO: 445388 - DNA, 19 bp, Mus musculus
  siRNA target sequence for Lhx9 (NM_010714.1,656-674).
cctcttgcaaggggaatat

SEQ ID NO: 445389 - DNA, 19 bp, Mus musculus
  siRNA target sequence for Lhx9 (NM_010714.1,659-677).
cttgcaaggggaatatcca

SEQ ID NO: 445390 - DNA, 19 bp, Mus musculus
  siRNA target sequence for Lhx9 (NM_010714.1,722-740).
ggctttgccttacttcaat

SEQ ID NO: 445391 - DNA, 19 bp, Mus musculus
  siRNA target sequence for Lhx9 (NM_010714.1,801-819).
gacatcgtgaattacaact

SEQ ID NO: 445392 - DNA, 19 bp, Mus musculus
  siRNA target sequence for Lhx9 (NM_010714.1,894-912).
cggatgcgaacttctttca

SEQ ID NO: 445393 - DNA, 19 bp, Mus musculus
  siRNA target sequence for Lhx9 (NM_010714.1,920-938).
ccagctccggaccatgaaa

SEQ ID NO: 445394 - DNA, 19 bp, Mus musculus
  siRNA target sequence for Lhx9 (NM_010714.1,921-939).
cagctccggaccatgaaat

SEQ ID NO: 445395 - DNA, 19 bp, Mus musculus
  siRNA target sequence for Lhx9 (NM_010714.1,924-942).
ctccggaccatgaaatcct

SEQ ID NO: 445396 - DNA, 19 bp, Mus musculus
  siRNA target sequence for Lhx9 (NM_010714.1,980-998).
caaacagcttgctcaaaaa

SEQ ID NO: 445397 - DNA, 19 bp, Mus musculus
  siRNA target sequence for Lhx9 (NM_010714.1,1002-1020).
ggcctgaccaaaagagttt

SEQ ID NO: 445398 - DNA, 19 bp, Mus musculus
  siRNA target sequence for Lhx9 (NM_010714.1,1017-1035).
gttttacagggagaacaaa

SEQ ID NO: 445399 - DNA, 19 bp, Mus musculus
  siRNA target sequence for Lhx9 (NM_010714.1,1032-1050).
caaatcttggggcattaca

SEQ ID NO: 445400 - DNA, 19 bp, Mus musculus
  siRNA target sequence for Lhx9 (NM_010714.1,1041-1059).
gggcattacagccaaacat

SEQ ID NO: 445401 - DNA, 19 bp, Mus musculus
  siRNA target sequence for Lmo4 (NM_010723.2,389-407).
catgatcctttgcagaaat

SEQ ID NO: 445402 - DNA, 19 bp, Mus musculus
  siRNA target sequence for Lmo4 (NM_010723.2,491-509).
ccaaggcaacgtgtatcat

SEQ ID NO: 445403 - DNA, 19 bp, Mus musculus
  siRNA target sequence for Lmo4 (NM_010723.2,507-525).
catctcaagtgtttcacat

SEQ ID NO: 445404 - DNA, 19 bp, Mus musculus
  siRNA target sequence for Lmo4 (NM_010723.2,558-576).
gatcggtttcactacatca

SEQ ID NO: 445405 - DNA, 19 bp, Mus musculus
  siRNA target sequence for Lmo4 (NM_010723.2,569-587).
ctacatcaatggcagttta

SEQ ID NO: 445406 - DNA, 19 bp, Mus musculus
  siRNA target sequence for Lmo4 (NM_010723.2,581-599).
cagtttattttgtgaacat

SEQ ID NO: 445407 - DNA, 19 bp, Mus musculus
  siRNA target sequence for Lmx1a (NM_033652.2,471-489).
ccactacgagaaactgttt

SEQ ID NO: 445408 - DNA, 19 bp, Mus musculus
  siRNA target sequence for Lmx1a (NM_033652.2,517-535).
gccattgcgcccaatgagt

SEQ ID NO: 445409 - DNA, 19 bp, Mus musculus
  siRNA target sequence for Lmx1a (NM_033652.2,518-536).
ccattgcgcccaatgagtt

SEQ ID NO: 445410 - DNA, 19 bp, Mus musculus
  siRNA target sequence for Lmx1a (NM_033652.2,519-537).
cattgcgcccaatgagttt

SEQ ID NO: 445411 - DNA, 19 bp, Mus musculus
  siRNA target sequence for Lmx1a (NM_033652.2,523-541).
gcgcccaatgagtttgtca

SEQ ID NO: 445412 - DNA, 19 bp, Mus musculus
  siRNA target sequence for Lmx1a (NM_033652.2,849-867).
caaggcctcgtttgaagta

SEQ ID NO: 445413 - DNA, 19 bp, Mus musculus
  siRNA target sequence for Lmx1a (NM_033652.2,1029-1047).
gacttctgctcagacaaat

SEQ ID NO: 445414 - DNA, 19 bp, Mus musculus
  siRNA target sequence for Lmx1a (NM_033652.2,1063-1081).
ggcatggaagggatcatga

SEQ ID NO: 445415 - DNA, 19 bp, Mus musculus
  siRNA target sequence for Lmx1a (NM_033652.2,1074-1092).
gatcatgaacccctataca

SEQ ID NO: 445416 - DNA, 19 bp, Mus musculus
  siRNA target sequence for Lmx1a (NM_033652.2,1126-1144).
gaacagagcgtctacaact

SEQ ID NO: 445417 - DNA, 19 bp, Mus musculus
  siRNA target sequence for Lmx1a (NM_033652.2,1333-1351).
ctgtactccatgcagaatt

SEQ ID NO: 445418 - DNA, 19 bp, Mus musculus
  siRNA target sequence for Lmx1a (NM_033652.2,1338-1356).
ctccatgcagaattcctat

SEQ ID NO: 445419 - DNA, 19 bp, Mus musculus
  siRNA target sequence for Lmx1b (NM_010725.1,420-438).
gctgtgcaagggtgactat

SEQ ID NO: 445420 - DNA, 19 bp, Mus musculus
  siRNA target sequence for Lmyc1 (NM_008506.2,1402-1420).
cctcagcaaggcgttagaa

SEQ ID NO: 445421 - DNA, 19 bp, Mus musculus
  siRNA target sequence for Lmyc1 (NM_008506.2,1403-1421).
ctcagcaaggcgttagaat

SEQ ID NO: 445422 - DNA, 19 bp, Mus musculus
  siRNA target sequence for Lmyc1 (NM_008506.2,1407-1425).
gcaaggcgttagaatactt

SEQ ID NO: 445423 - DNA, 19 bp, Mus musculus
  siRNA target sequence for Mafk (NM_010757.1,322-340).
cagtgcgggagctaaacca

SEQ ID NO: 445424 - DNA, 19 bp, Mus musculus
  siRNA target sequence for Max (NM_008558.1,229-247).
caagcgggctcaccataat

SEQ ID NO: 445425 - DNA, 19 bp, Mus musculus
  siRNA target sequence for Max (NM_008558.1,232-250).
gcgggctcaccataatgca

SEQ ID NO: 445426 - DNA, 19 bp, Mus musculus
  siRNA target sequence for Max (NM_008558.1,248-266).
gcactggaacgaaaacgta

SEQ ID NO: 445427 - DNA, 19 bp, Mus musculus
  siRNA target sequence for Max (NM_008558.1,264-282).
gtagggaccacatcaaaga

SEQ ID NO: 445428 - DNA, 19 bp, Mus musculus
  siRNA target sequence for Mef2a (NM_194070.1,1326-1344).
catgatgcccccacttaat

SEQ ID NO: 445429 - DNA, 19 bp, Mus musculus
  siRNA target sequence for Mef2a (NM_194070.1,1337-1355).
cacttaatgcccaaaggat

SEQ ID NO: 445430 - DNA, 19 bp, Mus musculus
  siRNA target sequence for Mef2b (NM_008578.1,208-226).
gcgacattgccctgatcat

SEQ ID NO: 445431 - DNA, 19 bp, Mus musculus
  siRNA target sequence for Mef2b (NM_008578.1,322-340).
gcaccaacgcggatatcct

SEQ ID NO: 445432 - DNA, 19 bp, Mus musculus
  siRNA target sequence for Mef2b (NM_008578.1,323-341).
caccaacgcggatatcctt

SEQ ID NO: 445433 - DNA, 19 bp, Mus musculus
  siRNA target sequence for Mef2b (NM_008578.1,972-990).
cctccggtcagcatcaagt

SEQ ID NO: 445434 - DNA, 19 bp, Mus musculus
  siRNA target sequence for Mef2c (NM_025282.1,439-457).
gattacgaggataatggat

SEQ ID NO: 445435 - DNA, 19 bp, Mus musculus
  siRNA target sequence for Mef2c (NM_025282.1,540-558).
gtgagattgcactgatcat

SEQ ID NO: 445436 - DNA, 19 bp, Mus musculus
  siRNA target sequence for Mef2c (NM_025282.1,644-662).
cacgagagccggacaaact

SEQ ID NO: 445437 - DNA, 19 bp, Mus musculus
  siRNA target sequence for Mef2c (NM_025282.1,646-664).
cgagagccggacaaactca

SEQ ID NO: 445438 - DNA, 19 bp, Mus musculus
  siRNA target sequence for Mef2c (NM_025282.1,652-670).
ccggacaaactcagacatt

SEQ ID NO: 445439 - DNA, 19 bp, Mus musculus
  siRNA target sequence for Mef2c (NM_025282.1,673-691).
ggaggcattgaacaagaaa

SEQ ID NO: 445440 - DNA, 19 bp, Mus musculus
  siRNA target sequence for Mef2c (NM_025282.1,715-733).
cgatcctgactcctcttat

SEQ ID NO: 445441 - DNA, 19 bp, Mus musculus
  siRNA target sequence for Mef2c (NM_025282.1,793-811).
gatcaagagtcataaaatt

SEQ ID NO: 445442 - DNA, 19 bp, Mus musculus
  siRNA target sequence for Mef2c (NM_025282.1,796-814).
caagagtcataaaattcct

SEQ ID NO: 445443 - DNA, 19 bp, Mus musculus
  siRNA target sequence for Mef2c (NM_025282.1,854-872).
ccagtgtccagccataaca

SEQ ID NO: 445444 - DNA, 19 bp, Mus musculus
  siRNA target sequence for Mef2c (NM_025282.1,857-875).
gtgtccagccataacagtt

SEQ ID NO: 445445 - DNA, 19 bp, Mus musculus
  siRNA target sequence for Mef2c (NM_025282.1,935-953).
ccgtctctgcagaggaata

SEQ ID NO: 445446 - DNA, 19 bp, Mus musculus
  siRNA target sequence for Mef2c (NM_025282.1,937-955).
gtctctgcagaggaatagt

SEQ ID NO: 445447 - DNA, 19 bp, Mus musculus
  siRNA target sequence for Mef2c (NM_025282.1,939-957).
ctctgcagaggaatagtat

SEQ ID NO: 445448 - DNA, 19 bp, Mus musculus
  siRNA target sequence for Mef2c (NM_025282.1,943-961).
gcagaggaatagtatgtct

SEQ ID NO: 445449 - DNA, 19 bp, Mus musculus
  siRNA target sequence for Mef2c (NM_025282.1,1041-1059).
ccagcgcagggaatggata

SEQ ID NO: 445450 - DNA, 19 bp, Mus musculus
  siRNA target sequence for Mef2c (NM_025282.1,1095-1113).
cacctggtaacctgaacaa

SEQ ID NO: 445451 - DNA, 19 bp, Mus musculus
  siRNA target sequence for Mef2c (NM_025282.1,1100-1118).
ggtaacctgaacaagaata

SEQ ID NO: 445452 - DNA, 19 bp, Mus musculus
  siRNA target sequence for Mef2c (NM_025282.1,1105-1123).
cctgaacaagaatatacaa

SEQ ID NO: 445453 - DNA, 19 bp, Mus musculus
  siRNA target sequence for Mef2c (NM_025282.1,1148-1166).
ctaggaatgaataatcgta

SEQ ID NO: 445454 - DNA, 19 bp, Mus musculus
  siRNA target sequence for Mef2c (NM_025282.1,1169-1187).
ccagatctccgcgttctta

SEQ ID NO: 445455 - DNA, 19 bp, Mus musculus
  siRNA target sequence for Mef2c (NM_025282.1,1170-1188).
cagatctccgcgttcttat

SEQ ID NO: 445456 - DNA, 19 bp, Mus musculus
  siRNA target sequence for Mef2c (NM_025282.1,1207-1225).
cacgatgccatcagtgaat

SEQ ID NO: 445457 - DNA, 19 bp, Mus musculus
  siRNA target sequence for Mef2c (NM_025282.1,1209-1227).
cgatgccatcagtgaatca

SEQ ID NO: 445458 - DNA, 19 bp, Mus musculus
  siRNA target sequence for Mef2c (NM_025282.1,1210-1228).
gatgccatcagtgaatcaa

SEQ ID NO: 445459 - DNA, 19 bp, Mus musculus
  siRNA target sequence for Mef2c (NM_025282.1,1242-1260).
cccagtcggctcagtcatt

SEQ ID NO: 445460 - DNA, 19 bp, Mus musculus
  siRNA target sequence for Mef2c (NM_025282.1,1278-1296).
ccgtagcaactcctacttt

SEQ ID NO: 445461 - DNA, 19 bp, Mus musculus
  siRNA target sequence for Mef2c (NM_025282.1,1279-1297).
cgtagcaactcctacttta

SEQ ID NO: 445462 - DNA, 19 bp, Mus musculus
  siRNA target sequence for Mef2c (NM_025282.1,1307-1325).
ggaatgggaggatatccat

SEQ ID NO: 445463 - DNA, 19 bp, Mus musculus
  siRNA target sequence for Mef2c (NM_025282.1,1330-1348).
catttcaacaacatatggt

SEQ ID NO: 445464 - DNA, 19 bp, Mus musculus
  siRNA target sequence for Mef2c (NM_025282.1,1414-1432).
ccacctcggctctgtaact

SEQ ID NO: 445465 - DNA, 19 bp, Mus musculus
  siRNA target sequence for Mef2c (NM_025282.1,1604-1622).
gaggatcaccggaacgaat

SEQ ID NO: 445466 - DNA, 19 bp, Mus musculus
  siRNA target sequence for Mef2d (NM_133665.1,403-421).
ccagcgaatcactgatgaa

SEQ ID NO: 445467 - DNA, 19 bp, Mus musculus
  siRNA target sequence for Mef2d (NM_133665.1,439-457).
cttcaccaagcggaagttt

SEQ ID NO: 445468 - DNA, 19 bp, Mus musculus
  siRNA target sequence for Mef2d (NM_133665.1,501-519).
gcgagatcgcgctcatcat

SEQ ID NO: 445469 - DNA, 19 bp, Mus musculus
  siRNA target sequence for Mef2d (NM_133665.1,766-784).
gcgctatgggtcatctgtt

SEQ ID NO: 445470 - DNA, 19 bp, Mus musculus
  siRNA target sequence for Mef2d (NM_133665.1,815-833).
gtgcccgtgtccaatcaga

SEQ ID NO: 445471 - DNA, 19 bp, Mus musculus
  siRNA target sequence for Mef2d (NM_133665.1,1098-1116).
gcaacagcctaaacaaagt

SEQ ID NO: 445472 - DNA, 19 bp, Mus musculus
  siRNA target sequence for Mef2d (NM_133665.1,1217-1235).
gggttaatgcatcatttga

SEQ ID NO: 445473 - DNA, 19 bp, Mus musculus
  siRNA target sequence for Mef2d (NM_133665.1,1218-1236).
ggttaatgcatcatttgaa

SEQ ID NO: 445474 - DNA, 19 bp, Mus musculus
  siRNA target sequence for Mef2d (NM_133665.1,1879-1897).
gctggatacttggacatta

SEQ ID NO: 445475 - DNA, 19 bp, Mus musculus
  siRNA target sequence for Meox1 (NM_010791.3,480-498).
ccttccaccaaaaatcaga

SEQ ID NO: 445476 - DNA, 19 bp, Mus musculus
  siRNA target sequence for Meox1 (NM_010791.3,569-587).
cggactgagcgaatcttca

SEQ ID NO: 445477 - DNA, 19 bp, Mus musculus
  siRNA target sequence for Meox1 (NM_010791.3,570-588).
ggactgagcgaatcttcaa

SEQ ID NO: 445478 - DNA, 19 bp, Mus musculus
  siRNA target sequence for Meox1 (NM_010791.3,729-747).
gattgggggaggattgcat

SEQ ID NO: 445479 - DNA, 19 bp, Mus musculus
  siRNA target sequence for Meox1 (NM_010791.3,755-773).
gggacgatcgccaatgaga

SEQ ID NO: 445480 - DNA, 19 bp, Mus musculus
  siRNA target sequence for Meox1 (NM_010791.3,934-952).
gacccggctccggagatat

SEQ ID NO: 445481 - DNA, 19 bp, Mus musculus
  siRNA target sequence for Meox1 (NM_010791.3,936-954).
cccggctccggagatatga

SEQ ID NO: 445482 - DNA, 19 bp, Mus musculus
  siRNA target sequence for Meox1 (NM_010791.3,938-956).
cggctccggagatatgaga

SEQ ID NO: 445483 - DNA, 19 bp, Mus musculus
  siRNA target sequence for Meox1 (NM_010791.3,939-957).
ggctccggagatatgagat

SEQ ID NO: 445484 - DNA, 19 bp, Mus musculus
  siRNA target sequence for Meox1 (NM_010791.3,940-958).
gctccggagatatgagatt

SEQ ID NO: 445485 - DNA, 19 bp, Mus musculus
  siRNA target sequence for Meox2 (NM_008584.1,417-435).
cttcctcgtcttgcataat

SEQ ID NO: 445486 - DNA, 19 bp, Mus musculus
  siRNA target sequence for Meox2 (NM_008584.1,712-730).
gtgcgcaccaggggattat

SEQ ID NO: 445487 - DNA, 19 bp, Mus musculus
  siRNA target sequence for Meox2 (NM_008584.1,747-765).
cacccgcagacgtagagaa

SEQ ID NO: 445488 - DNA, 19 bp, Mus musculus
  siRNA target sequence for Meox2 (NM_008584.1,804-822).
cccaggaaggaaactacaa

SEQ ID NO: 445489 - DNA, 19 bp, Mus musculus
  siRNA target sequence for Meox2 (NM_008584.1,827-845).
gaagtgaacagcaaaccta

SEQ ID NO: 445490 - DNA, 19 bp, Mus musculus
  siRNA target sequence for Meox2 (NM_008584.1,1131-1149).
caggggactcactagcaaa

SEQ ID NO: 445491 - DNA, 19 bp, Mus musculus
  siRNA target sequence for Mga (NM_013720.1,59-77).
gagcacctaccttctttgt

SEQ ID NO: 445492 - DNA, 19 bp, Mus musculus
  siRNA target sequence for Mga (NM_013720.1,61-79).
gcacctaccttctttgtca

SEQ ID NO: 445493 - DNA, 19 bp, Mus musculus
  siRNA target sequence for Mga (NM_013720.1,62-80).
cacctaccttctttgtcat

SEQ ID NO: 445494 - DNA, 19 bp, Mus musculus
  siRNA target sequence for Mga (NM_013720.1,90-108).
gccaggaaatggcaaaact

SEQ ID NO: 445495 - DNA, 19 bp, Mus musculus
  siRNA target sequence for Mga (NM_013720.1,101-119).
gcaaaactgatcaaggaat

SEQ ID NO: 445496 - DNA, 19 bp, Mus musculus
  siRNA target sequence for Mga (NM_013720.1,112-130).
caaggaattttagttacta

SEQ ID NO: 445497 - DNA, 19 bp, Mus musculus
  siRNA target sequence for Mga (NM_013720.1,139-157).
gcccgtgctttgttgagta

SEQ ID NO: 445498 - DNA, 19 bp, Mus musculus
  siRNA target sequence for Mga (NM_013720.1,195-213).
ccttccggctgattgtact

SEQ ID NO: 445499 - DNA, 19 bp, Mus musculus
  siRNA target sequence for Mga (NM_013720.1,229-247).
gttacccttgataacaata

SEQ ID NO: 445500 - DNA, 19 bp, Mus musculus
  siRNA target sequence for Mga (NM_013720.1,233-251).
cccttgataacaatagtat

SEQ ID NO: 445501 - DNA, 19 bp, Mus musculus
  siRNA target sequence for Mga (NM_013720.1,255-273).
gaatgagttccataatcga

SEQ ID NO: 445502 - DNA, 19 bp, Mus musculus
  siRNA target sequence for Mga (NM_013720.1,302-320).
gaagacgcatgtttcctta

SEQ ID NO: 445503 - DNA, 19 bp, Mus musculus
  siRNA target sequence for Mga (NM_013720.1,312-330).
gtttccttattgtcgatat

SEQ ID NO: 445504 - DNA, 19 bp, Mus musculus
  siRNA target sequence for Mga (NM_013720.1,316-334).
ccttattgtcgatattgga

SEQ ID NO: 445505 - DNA, 19 bp, Mus musculus
  siRNA target sequence for Mga (NM_013720.1,317-335).
cttattgtcgatattggat

SEQ ID NO: 445506 - DNA, 19 bp, Mus musculus
  siRNA target sequence for Mga (NM_013720.1,350-368).
caaatttaaagtatatcct

SEQ ID NO: 445507 - DNA, 19 bp, Mus musculus
  siRNA target sequence for Mga (NM_013720.1,366-384).
ccttgtaatggacatatct

SEQ ID NO: 445508 - DNA, 19 bp, Mus musculus
  siRNA target sequence for Mga (NM_013720.1,391-409).
gatagtcatcggtataagt

SEQ ID NO: 445509 - DNA, 19 bp, Mus musculus
  siRNA target sequence for Mga (NM_013720.1,438-456).
gaaggctgaaccccatatt

SEQ ID NO: 445510 - DNA, 19 bp, Mus musculus
  siRNA target sequence for Mga (NM_013720.1,451-469).
catattttggggagagttt

SEQ ID NO: 445511 - DNA, 19 bp, Mus musculus
  siRNA target sequence for Mga (NM_013720.1,459-477).
ggggagagttttcattcat

SEQ ID NO: 445512 - DNA, 19 bp, Mus musculus
  siRNA target sequence for Mga (NM_013720.1,485-503).
ctccttctacaggtcatta

SEQ ID NO: 445513 - DNA, 19 bp, Mus musculus
  siRNA target sequence for Mga (NM_013720.1,491-509).
ctacaggtcattattggat

SEQ ID NO: 445514 - DNA, 19 bp, Mus musculus
  siRNA target sequence for Mga (NM_013720.1,514-532).
caaccagtgtctttctata

SEQ ID NO: 445515 - DNA, 19 bp, Mus musculus
  siRNA target sequence for Mga (NM_013720.1,524-542).
ctttctataaactcaaact

SEQ ID NO: 445516 - DNA, 19 bp, Mus musculus
  siRNA target sequence for Mga (NM_013720.1,535-553).
ctcaaacttactaacaata

SEQ ID NO: 445517 - DNA, 19 bp, Mus musculus
  siRNA target sequence for Mga (NM_013720.1,736-754).
cagttgaaaatagattaca

SEQ ID NO: 445518 - DNA, 19 bp, Mus musculus
  siRNA target sequence for Mga (NM_013720.1,821-839).
ggaatagctccgatcaaga

SEQ ID NO: 445519 - DNA, 19 bp, Mus musculus
  siRNA target sequence for Mga (NM_013720.1,822-840).
gaatagctccgatcaagaa

SEQ ID NO: 445520 - DNA, 19 bp, Mus musculus
  siRNA target sequence for Mga (NM_013720.1,831-849).
cgatcaagaagggaatagt

SEQ ID NO: 445521 - DNA, 19 bp, Mus musculus
  siRNA target sequence for Mga (NM_013720.1,835-853).
caagaagggaatagtgttt

SEQ ID NO: 445522 - DNA, 19 bp, Mus musculus
  siRNA target sequence for Mga (NM_013720.1,838-856).
gaagggaatagtgtttcta

SEQ ID NO: 445523 - DNA, 19 bp, Mus musculus
  siRNA target sequence for Mga (NM_013720.1,890-908).
gtgaagggtcagagataca

SEQ ID NO: 445524 - DNA, 19 bp, Mus musculus
  siRNA target sequence for Mga (NM_013720.1,892-910).
gaagggtcagagatacatt

SEQ ID NO: 445525 - DNA, 19 bp, Mus musculus
  siRNA target sequence for Mga (NM_013720.1,903-921).
gatacattcaggtgatttt

SEQ ID NO: 445526 - DNA, 19 bp, Mus musculus
  siRNA target sequence for Mga (NM_013720.1,966-984).
gaaggctccccataatgta

SEQ ID NO: 445527 - DNA, 19 bp, Mus musculus
  siRNA target sequence for Mga (NM_013720.1,969-987).
ggctccccataatgtaaaa

SEQ ID NO: 445528 - DNA, 19 bp, Mus musculus
  siRNA target sequence for Mga (NM_013720.1,971-989).
ctccccataatgtaaaaca

SEQ ID NO: 445529 - DNA, 19 bp, Mus musculus
  siRNA target sequence for Mga (NM_013720.1,974-992).
cccataatgtaaaacaaga

SEQ ID NO: 445530 - DNA, 19 bp, Mus musculus
  siRNA target sequence for Mga (NM_013720.1,1000-1018).
ggatttatgaatactgatt

SEQ ID NO: 445531 - DNA, 19 bp, Mus musculus
  siRNA target sequence for Mga (NM_013720.1,1084-1102).
gatgattcccagatttcct

SEQ ID NO: 445532 - DNA, 19 bp, Mus musculus
  siRNA target sequence for Mga (NM_013720.1,1113-1131).
cccgaatggaaactttaat

SEQ ID NO: 445533 - DNA, 19 bp, Mus musculus
  siRNA target sequence for Mga (NM_013720.1,1125-1143).
ctttaatgtcgtcattaaa

SEQ ID NO: 445534 - DNA, 19 bp, Mus musculus
  siRNA target sequence for Mga (NM_013720.1,1144-1162).
gaagagcctctagatgatt

SEQ ID NO: 445535 - DNA, 19 bp, Mus musculus
  siRNA target sequence for Mga (NM_013720.1,1149-1167).
gcctctagatgattatgat

SEQ ID NO: 445536 - DNA, 19 bp, Mus musculus
  siRNA target sequence for Mga (NM_013720.1,1224-1242).
ggaaacggatgtatactca

SEQ ID NO: 445537 - DNA, 19 bp, Mus musculus
  siRNA target sequence for Mga (NM_013720.1,1225-1243).
gaaacggatgtatactcaa

SEQ ID NO: 445538 - DNA, 19 bp, Mus musculus
  siRNA target sequence for Mga (NM_013720.1,1245-1263).
cagcgatgacgatcctata

SEQ ID NO: 445539 - DNA, 19 bp, Mus musculus
  siRNA target sequence for Mga (NM_013720.1,1247-1265).
gcgatgacgatcctatact

SEQ ID NO: 445540 - DNA, 19 bp, Mus musculus
  siRNA target sequence for Mga (NM_013720.1,1248-1266).
cgatgacgatcctatacta

SEQ ID NO: 445541 - DNA, 19 bp, Mus musculus
  siRNA target sequence for Mga (NM_013720.1,1254-1272).
cgatcctatactagagaaa

SEQ ID NO: 445542 - DNA, 19 bp, Mus musculus
  siRNA target sequence for Mga (NM_013720.1,1259-1277).
ctatactagagaaacaact

SEQ ID NO: 445543 - DNA, 19 bp, Mus musculus
  siRNA target sequence for Mga (NM_013720.1,1273-1291).
caactaaagaggcacaata

SEQ ID NO: 445544 - DNA, 19 bp, Mus musculus
  siRNA target sequence for Mga (NM_013720.1,1309-1327).
gctgaccatccatcttata

SEQ ID NO: 445545 - DNA, 19 bp, Mus musculus
  siRNA target sequence for Mga (NM_013720.1,1310-1328).
ctgaccatccatcttataa

SEQ ID NO: 445546 - DNA, 19 bp, Mus musculus
  siRNA target sequence for Mga (NM_013720.1,1312-1330).
gaccatccatcttataaat

SEQ ID NO: 445547 - DNA, 19 bp, Mus musculus
  siRNA target sequence for Mga (NM_013720.1,1322-1340).
cttataaatggctaccaaa

SEQ ID NO: 445548 - DNA, 19 bp, Mus musculus
  siRNA target sequence for Mga (NM_013720.1,1348-1366).
ggtgttgctaaagctaaaa

SEQ ID NO: 445549 - DNA, 19 bp, Mus musculus
  siRNA target sequence for Mga (NM_013720.1,1430-1448).
gcacagtgaaaatttctga

SEQ ID NO: 445550 - DNA, 19 bp, Mus musculus
  siRNA target sequence for Mga (NM_013720.1,1445-1463).
ctgaattgcctgataatat

SEQ ID NO: 445551 - DNA, 19 bp, Mus musculus
  siRNA target sequence for Mga (NM_013720.1,1467-1485).
ctccacttctcgaaaagat

SEQ ID NO: 445552 - DNA, 19 bp, Mus musculus
  siRNA target sequence for Mga (NM_013720.1,1469-1487).
ccacttctcgaaaagataa

SEQ ID NO: 445553 - DNA, 19 bp, Mus musculus
  siRNA target sequence for Mga (NM_013720.1,1477-1495).
cgaaaagataaatctatgt

SEQ ID NO: 445554 - DNA, 19 bp, Mus musculus
  siRNA target sequence for Mga (NM_013720.1,1515-1533).
gcctgcgtatattgaaaat

SEQ ID NO: 445555 - DNA, 19 bp, Mus musculus
  siRNA target sequence for Mga (NM_013720.1,1520-1538).
cgtatattgaaaattctga

SEQ ID NO: 445556 - DNA, 19 bp, Mus musculus
  siRNA target sequence for Mga (NM_013720.1,1521-1539).
gtatattgaaaattctgat

SEQ ID NO: 445557 - DNA, 19 bp, Mus musculus
  siRNA target sequence for Mga (NM_013720.1,1553-1571).
gcttaagcaaggattcaga

SEQ ID NO: 445558 - DNA, 19 bp, Mus musculus
  siRNA target sequence for Mga (NM_013720.1,1554-1572).
cttaagcaaggattcagaa

SEQ ID NO: 445559 - DNA, 19 bp, Mus musculus
  siRNA target sequence for Mga (NM_013720.1,1627-1645).
cttaaagagcctaattgga

SEQ ID NO: 445560 - DNA, 19 bp, Mus musculus
  siRNA target sequence for Mga (NM_013720.1,1643-1661).
ggaaatacccggacatact

SEQ ID NO: 445561 - DNA, 19 bp, Mus musculus
  siRNA target sequence for Mga (NM_013720.1,1644-1662).
gaaatacccggacatactt

SEQ ID NO: 445562 - DNA, 19 bp, Mus musculus
  siRNA target sequence for Mga (NM_013720.1,1654-1672).
gacatacttgacaacagta

SEQ ID NO: 445563 - DNA, 19 bp, Mus musculus
  siRNA target sequence for Mga (NM_013720.1,1668-1686).
cagtagcacggaaagaata

SEQ ID NO: 445564 - DNA, 19 bp, Mus musculus
  siRNA target sequence for Mga (NM_013720.1,1670-1688).
gtagcacggaaagaataca

SEQ ID NO: 445565 - DNA, 19 bp, Mus musculus
  siRNA target sequence for Mga (NM_013720.1,1742-1760).
gcaaaaagcgaacaacaat

SEQ ID NO: 445566 - DNA, 19 bp, Mus musculus
  siRNA target sequence for Mga (NM_013720.1,1749-1767).
gcgaacaacaatgcttaaa

SEQ ID NO: 445567 - DNA, 19 bp, Mus musculus
  siRNA target sequence for Mga (NM_013720.1,1750-1768).
cgaacaacaatgcttaaaa

SEQ ID NO: 445568 - DNA, 19 bp, Mus musculus
  siRNA target sequence for Mga (NM_013720.1,1751-1769).
gaacaacaatgcttaaaat

SEQ ID NO: 445569 - DNA, 19 bp, Mus musculus
  siRNA target sequence for Mga (NM_013720.1,1863-1881).
ggcagggcgaccacctaaa

SEQ ID NO: 445570 - DNA, 19 bp, Mus musculus
  siRNA target sequence for Mga (NM_013720.1,1864-1882).
gcagggcgaccacctaaaa

SEQ ID NO: 445571 - DNA, 19 bp, Mus musculus
  siRNA target sequence for Mga (NM_013720.1,2000-2018).
caaaggaggctcttgatat

SEQ ID NO: 445572 - DNA, 19 bp, Mus musculus
  siRNA target sequence for Mga (NM_013720.1,2064-2082).
cacaaccacaaatgattca

SEQ ID NO: 445573 - DNA, 19 bp, Mus musculus
  siRNA target sequence for Mga (NM_013720.1,2077-2095).
gattcaggttgcagaacaa

SEQ ID NO: 445574 - DNA, 19 bp, Mus musculus
  siRNA target sequence for Mga (NM_013720.1,2081-2099).
caggttgcagaacaagaat

SEQ ID NO: 445575 - DNA, 19 bp, Mus musculus
  siRNA target sequence for Mga (NM_013720.1,2145-2163).
gcataagcaggtgatacat

SEQ ID NO: 445576 - DNA, 19 bp, Mus musculus
  siRNA target sequence for Mga (NM_013720.1,2176-2194).
gaagtgggcttaaaactga

SEQ ID NO: 445577 - DNA, 19 bp, Mus musculus
  siRNA target sequence for Mga (NM_013720.1,2210-2228).
cagtgagcattgatcttaa

SEQ ID NO: 445578 - DNA, 19 bp, Mus musculus
  siRNA target sequence for Mga (NM_013720.1,2212-2230).
gtgagcattgatcttaaat

SEQ ID NO: 445579 - DNA, 19 bp, Mus musculus
  siRNA target sequence for Mga (NM_013720.1,2346-2364).
gaccaatgactttaccaaa

SEQ ID NO: 445580 - DNA, 19 bp, Mus musculus
  siRNA target sequence for Mga (NM_013720.1,2370-2388).
gggatggagaggaaaattt

SEQ ID NO: 445581 - DNA, 19 bp, Mus musculus
  siRNA target sequence for Mga (NM_013720.1,2459-2477).
gtagtgataagctagatga

SEQ ID NO: 445582 - DNA, 19 bp, Mus musculus
  siRNA target sequence for Mga (NM_013720.1,2462-2480).
gtgataagctagatgagta

SEQ ID NO: 445583 - DNA, 19 bp, Mus musculus
  siRNA target sequence for Mga (NM_013720.1,2557-2575).
cagctacccaccaagagta

SEQ ID NO: 445584 - DNA, 19 bp, Mus musculus
  siRNA target sequence for Mga (NM_013720.1,2577-2595).
cagctatgttcgaactctt

SEQ ID NO: 445585 - DNA, 19 bp, Mus musculus
  siRNA target sequence for Mga (NM_013720.1,2580-2598).
ctatgttcgaactcttgat

SEQ ID NO: 445586 - DNA, 19 bp, Mus musculus
  siRNA target sequence for Mga (NM_013720.1,2591-2609).
ctcttgatagtgtactaaa

SEQ ID NO: 445587 - DNA, 19 bp, Mus musculus
  siRNA target sequence for Mga (NM_013720.1,2593-2611).
cttgatagtgtactaaaga

SEQ ID NO: 445588 - DNA, 19 bp, Mus musculus
  siRNA target sequence for Mga (NM_013720.1,2710-2728).
ctcagtggccgaactaaat

SEQ ID NO: 445589 - DNA, 19 bp, Mus musculus
  siRNA target sequence for Mga (NM_013720.1,2712-2730).
cagtggccgaactaaatca

SEQ ID NO: 445590 - DNA, 19 bp, Mus musculus
  siRNA target sequence for Mga (NM_013720.1,2729-2747).
catcttataagtctatttt

SEQ ID NO: 445591 - DNA, 19 bp, Mus musculus
  siRNA target sequence for Mga (NM_013720.1,2787-2805).
gagccaaggagataaaatt

SEQ ID NO: 445592 - DNA, 19 bp, Mus musculus
  siRNA target sequence for Mga (NM_013720.1,2791-2809).
caaggagataaaattacca

SEQ ID NO: 445593 - DNA, 19 bp, Mus musculus
  siRNA target sequence for Mga (NM_013720.1,2820-2838).
gagttcgacctcagataat

SEQ ID NO: 445594 - DNA, 19 bp, Mus musculus
  siRNA target sequence for Mga (NM_013720.1,2822-2840).
gttcgacctcagataatca

SEQ ID NO: 445595 - DNA, 19 bp, Mus musculus
  siRNA target sequence for Mga (NM_013720.1,2833-2851).
gataatcaggtgactaact

SEQ ID NO: 445596 - DNA, 19 bp, Mus musculus
  siRNA target sequence for Mga (NM_013720.1,2857-2875).
gtgccatctgtagatgaaa

SEQ ID NO: 445597 - DNA, 19 bp, Mus musculus
  siRNA target sequence for Mga (NM_013720.1,2944-2962).
cctccaggcttgtcgaaat

SEQ ID NO: 445598 - DNA, 19 bp, Mus musculus
  siRNA target sequence for Mga (NM_013720.1,2952-2970).
cttgtcgaaatctcaagta

SEQ ID NO: 445599 - DNA, 19 bp, Mus musculus
  siRNA target sequence for Mga (NM_013720.1,2963-2981).
ctcaagtaaagcttatgga

SEQ ID NO: 445600 - DNA, 19 bp, Mus musculus
  siRNA target sequence for Mga (NM_013720.1,3007-3025).
ggaaaaccaaggacctata

SEQ ID NO: 445601 - DNA, 19 bp, Mus musculus
  siRNA target sequence for Mga (NM_013720.1,3040-3058).
gcagatgtctccttgacaa

SEQ ID NO: 445602 - DNA, 19 bp, Mus musculus
  siRNA target sequence for Mga (NM_013720.1,3075-3093).
ggcatctctcaaaactaaa

SEQ ID NO: 445603 - DNA, 19 bp, Mus musculus
  siRNA target sequence for Mga (NM_013720.1,3089-3107).
ctaaacctatccacacaat

SEQ ID NO: 445604 - DNA, 19 bp, Mus musculus
  siRNA target sequence for Mga (NM_013720.1,3094-3112).
cctatccacacaatcataa

SEQ ID NO: 445605 - DNA, 19 bp, Mus musculus
  siRNA target sequence for Mga (NM_013720.1,3267-3285).
gggatctaaaacaaagcat

SEQ ID NO: 445606 - DNA, 19 bp, Mus musculus
  siRNA target sequence for Mga (NM_013720.1,3301-3319).
gctaatcgagatccattat

SEQ ID NO: 445607 - DNA, 19 bp, Mus musculus
  siRNA target sequence for Mga (NM_013720.1,3302-3320).
ctaatcgagatccattatt

SEQ ID NO: 445608 - DNA, 19 bp, Mus musculus
  siRNA target sequence for Mga (NM_013720.1,3408-3426).
gctcgaatacactgtatgt

SEQ ID NO: 445609 - DNA, 19 bp, Mus musculus
  siRNA target sequence for Mga (NM_013720.1,3496-3514).
gagccggtttatattccaa

SEQ ID NO: 445610 - DNA, 19 bp, Mus musculus
  siRNA target sequence for Mga (NM_013720.1,3518-3536).
cttctgtcattgaacctat

SEQ ID NO: 445611 - DNA, 19 bp, Mus musculus
  siRNA target sequence for Mga (NM_013720.1,3549-3567).
gttgcctcagccggattta

SEQ ID NO: 445612 - DNA, 19 bp, Mus musculus
  siRNA target sequence for Mga (NM_013720.1,3552-3570).
gcctcagccggatttatct

SEQ ID NO: 445613 - DNA, 19 bp, Mus musculus
  siRNA target sequence for Mga (NM_013720.1,3553-3571).
cctcagccggatttatctt

SEQ ID NO: 445614 - DNA, 19 bp, Mus musculus
  siRNA target sequence for Mga (NM_013720.1,3558-3576).
gccggatttatcttctact

SEQ ID NO: 445615 - DNA, 19 bp, Mus musculus
  siRNA target sequence for Mga (NM_013720.1,3588-3606).
caaactaacccctggaatt

SEQ ID NO: 445616 - DNA, 19 bp, Mus musculus
  siRNA target sequence for Mga (NM_013720.1,3630-3648).
caagcccaatcctgtgata

SEQ ID NO: 445617 - DNA, 19 bp, Mus musculus
  siRNA target sequence for Mga (NM_013720.1,3701-3719).
gtgcccgagttcgagtata

SEQ ID NO: 445618 - DNA, 19 bp, Mus musculus
  siRNA target sequence for Mga (NM_013720.1,3705-3723).
ccgagttcgagtatatgaa

SEQ ID NO: 445619 - DNA, 19 bp, Mus musculus
  siRNA target sequence for Mga (NM_013720.1,3808-3826).
cctgagaaccgtgttacaa

SEQ ID NO: 445620 - DNA, 19 bp, Mus musculus
  siRNA target sequence for Mga (NM_013720.1,3809-3827).
ctgagaaccgtgttacaaa

SEQ ID NO: 445621 - DNA, 19 bp, Mus musculus
  siRNA target sequence for Mga (NM_013720.1,3813-3831).
gaaccgtgttacaaaggaa

SEQ ID NO: 445622 - DNA, 19 bp, Mus musculus
  siRNA target sequence for Mga (NM_013720.1,3818-3836).
gtgttacaaaggaacttga

SEQ ID NO: 445623 - DNA, 19 bp, Mus musculus
  siRNA target sequence for Mga (NM_013720.1,3835-3853).
gattctgaacagaccttaa

SEQ ID NO: 445624 - DNA, 19 bp, Mus musculus
  siRNA target sequence for Mga (NM_013720.1,3839-3857).
ctgaacagaccttaaagca

SEQ ID NO: 445625 - DNA, 19 bp, Mus musculus
  siRNA target sequence for Mga (NM_013720.1,3909-3927).
gaaatcctcctgcaatgaa

SEQ ID NO: 445626 - DNA, 19 bp, Mus musculus
  siRNA target sequence for Mga (NM_013720.1,3936-3954).
ctcttctacctcgtatgta

SEQ ID NO: 445627 - DNA, 19 bp, Mus musculus
  siRNA target sequence for Mga (NM_013720.1,3938-3956).
cttctacctcgtatgtaca

SEQ ID NO: 445628 - DNA, 19 bp, Mus musculus
  siRNA target sequence for Mga (NM_013720.1,3941-3959).
ctacctcgtatgtacatca

SEQ ID NO: 445629 - DNA, 19 bp, Mus musculus
  siRNA target sequence for Mga (NM_013720.1,3967-3985).
cctggtggtcctaccaaat

SEQ ID NO: 445630 - DNA, 19 bp, Mus musculus
  siRNA target sequence for Mga (NM_013720.1,3976-3994).
cctaccaaattgatagaga

SEQ ID NO: 445631 - DNA, 19 bp, Mus musculus
  siRNA target sequence for Mga (NM_013720.1,4013-4031).
gggaagaagatcgaaacaa

SEQ ID NO: 445632 - DNA, 19 bp, Mus musculus
  siRNA target sequence for Mga (NM_013720.1,4018-4036).
gaagatcgaaacaagatct

SEQ ID NO: 445633 - DNA, 19 bp, Mus musculus
  siRNA target sequence for Mga (NM_013720.1,4021-4039).
gatcgaaacaagatcttga

SEQ ID NO: 445634 - DNA, 19 bp, Mus musculus
  siRNA target sequence for Mga (NM_013720.1,4032-4050).
gatcttgagcattttatct

SEQ ID NO: 445635 - DNA, 19 bp, Mus musculus
  siRNA target sequence for Mga (NM_013720.1,4091-4109).
gcagcttcatcattgagtt

SEQ ID NO: 445636 - DNA, 19 bp, Mus musculus
  siRNA target sequence for Mga (NM_013720.1,4137-4155).
gaagacccctcctgtttat

SEQ ID NO: 445637 - DNA, 19 bp, Mus musculus
  siRNA target sequence for Mga (NM_013720.1,4160-4178).
ctcgtgtgaaaatctctat

SEQ ID NO: 445638 - DNA, 19 bp, Mus musculus
  siRNA target sequence for Mga (NM_013720.1,4173-4191).
ctctatgccatcaagtcaa

SEQ ID NO: 445639 - DNA, 19 bp, Mus musculus
  siRNA target sequence for Mga (NM_013720.1,4252-4270).
gggaaaatggatgatatct

SEQ ID NO: 445640 - DNA, 19 bp, Mus musculus
  siRNA target sequence for Mga (NM_013720.1,4298-4316).
cagtgagggagagattaca

SEQ ID NO: 445641 - DNA, 19 bp, Mus musculus
  siRNA target sequence for Mga (NM_013720.1,4319-4337).
gaggcaaaggtctaccttt

SEQ ID NO: 445642 - DNA, 19 bp, Mus musculus
  siRNA target sequence for Mga (NM_013720.1,4365-4383).
gcttgtggcctataaacgt

SEQ ID NO: 445643 - DNA, 19 bp, Mus musculus
  siRNA target sequence for Mga (NM_013720.1,4366-4384).
cttgtggcctataaacgta

SEQ ID NO: 445644 - DNA, 19 bp, Mus musculus
  siRNA target sequence for Mga (NM_013720.1,4381-4399).
cgtaaacccagttcaacta

SEQ ID NO: 445645 - DNA, 19 bp, Mus musculus
  siRNA target sequence for Mga (NM_013720.1,4397-4415).
ctacatctgggcttatcca

SEQ ID NO: 445646 - DNA, 19 bp, Mus musculus
  siRNA target sequence for Mga (NM_013720.1,4464-4482).
gttgccttcaacatccaat

SEQ ID NO: 445647 - DNA, 19 bp, Mus musculus
  siRNA target sequence for Mga (NM_013720.1,4468-4486).
ccttcaacatccaattcca

SEQ ID NO: 445648 - DNA, 19 bp, Mus musculus
  siRNA target sequence for Mga (NM_013720.1,4469-4487).
cttcaacatccaattccaa

SEQ ID NO: 445649 - DNA, 19 bp, Mus musculus
  siRNA target sequence for Mga (NM_013720.1,4619-4637).
gtgccttacagcagaagat

SEQ ID NO: 445650 - DNA, 19 bp, Mus musculus
  siRNA target sequence for Mga (NM_013720.1,4669-4687).
gggccacagaagttcagta

SEQ ID NO: 445651 - DNA, 19 bp, Mus musculus
  siRNA target sequence for Mga (NM_013720.1,4670-4688).
ggccacagaagttcagtat

SEQ ID NO: 445652 - DNA, 19 bp, Mus musculus
  siRNA target sequence for Mga (NM_013720.1,4691-4709).
ggccttctccagtaatggt

SEQ ID NO: 445653 - DNA, 19 bp, Mus musculus
  siRNA target sequence for Mga (NM_013720.1,4786-4804).
gtgtttctagaaaatgtta

SEQ ID NO: 445654 - DNA, 19 bp, Mus musculus
  siRNA target sequence for Mga (NM_013720.1,4843-4861).
gctaaagaagctacatatt

SEQ ID NO: 445655 - DNA, 19 bp, Mus musculus
  siRNA target sequence for Mga (NM_013720.1,4874-4892).
ccactgctggggttgttga

SEQ ID NO: 445656 - DNA, 19 bp, Mus musculus
  siRNA target sequence for Mga (NM_013720.1,4896-4914).
ctctgaaactaataacact

SEQ ID NO: 445657 - DNA, 19 bp, Mus musculus
  siRNA target sequence for Mga (NM_013720.1,4950-4968).
gaaccttaccaaaactact

SEQ ID NO: 445658 - DNA, 19 bp, Mus musculus
  siRNA target sequence for Mga (NM_013720.1,5021-5039).
catctccaaccataactct

SEQ ID NO: 445659 - DNA, 19 bp, Mus musculus
  siRNA target sequence for Mga (NM_013720.1,5103-5121).
ggtgaccacacctacttca

SEQ ID NO: 445660 - DNA, 19 bp, Mus musculus
  siRNA target sequence for Mga (NM_013720.1,5127-5145).
gagttctgtacctattata

SEQ ID NO: 445661 - DNA, 19 bp, Mus musculus
  siRNA target sequence for Mga (NM_013720.1,5129-5147).
gttctgtacctattatact

SEQ ID NO: 445662 - DNA, 19 bp, Mus musculus
  siRNA target sequence for Mga (NM_013720.1,5216-5234).
ctccacagatctcttctaa

SEQ ID NO: 445663 - DNA, 19 bp, Mus musculus
  siRNA target sequence for Mga (NM_013720.1,5295-5313).
cctacctttacatcagatt

SEQ ID NO: 445664 - DNA, 19 bp, Mus musculus
  siRNA target sequence for Mga (NM_013720.1,5336-5354).
gcttacagcctgtggtatt

SEQ ID NO: 445665 - DNA, 19 bp, Mus musculus
  siRNA target sequence for Mga (NM_013720.1,5483-5501).
ctccaacagtaaatgtcat

SEQ ID NO: 445666 - DNA, 19 bp, Mus musculus
  siRNA target sequence for Mga (NM_013720.1,5520-5538).
gctttcctctggatctagt

SEQ ID NO: 445667 - DNA, 19 bp, Mus musculus
  siRNA target sequence for Mga (NM_013720.1,5521-5539).
ctttcctctggatctagtt

SEQ ID NO: 445668 - DNA, 19 bp, Mus musculus
  siRNA target sequence for Mga (NM_013720.1,5571-5589).
gatctctcctcctgaaact

SEQ ID NO: 445669 - DNA, 19 bp, Mus musculus
  siRNA target sequence for Mga (NM_013720.1,5588-5606).
ctcaaaaccttgcaagtaa

SEQ ID NO: 445670 - DNA, 19 bp, Mus musculus
  siRNA target sequence for Mga (NM_013720.1,5609-5627).
caggctctgaaagcaaaat

SEQ ID NO: 445671 - DNA, 19 bp, Mus musculus
  siRNA target sequence for Mga (NM_013720.1,5611-5629).
ggctctgaaagcaaaataa

SEQ ID NO: 445672 - DNA, 19 bp, Mus musculus
  siRNA target sequence for Mga (NM_013720.1,5749-5767).
gttgcttcccttcaaataa

SEQ ID NO: 445673 - DNA, 19 bp, Mus musculus
  siRNA target sequence for Mga (NM_013720.1,5839-5857).
gctctaccatcaaaagata

SEQ ID NO: 445674 - DNA, 19 bp, Mus musculus
  siRNA target sequence for Mga (NM_013720.1,5840-5858).
ctctaccatcaaaagataa

SEQ ID NO: 445675 - DNA, 19 bp, Mus musculus
  siRNA target sequence for Mga (NM_013720.1,5866-5884).
gactctgaggctaatataa

SEQ ID NO: 445676 - DNA, 19 bp, Mus musculus
  siRNA target sequence for Mga (NM_013720.1,5870-5888).
ctgaggctaatataatgaa

SEQ ID NO: 445677 - DNA, 19 bp, Mus musculus
  siRNA target sequence for Mga (NM_013720.1,5875-5893).
gctaatataatgaagcaaa

SEQ ID NO: 445678 - DNA, 19 bp, Mus musculus
  siRNA target sequence for Mga (NM_013720.1,5886-5904).
gaagcaaaactcaggaatt

SEQ ID NO: 445679 - DNA, 19 bp, Mus musculus
  siRNA target sequence for Mga (NM_013720.1,5912-5930).
cagaaaatacctcgaataa

SEQ ID NO: 445680 - DNA, 19 bp, Mus musculus
  siRNA target sequence for Mga (NM_013720.1,5922-5940).
ctcgaataattcattggat

SEQ ID NO: 445681 - DNA, 19 bp, Mus musculus
  siRNA target sequence for Mga (NM_013720.1,5938-5956).
gatgatgggggtgatcttt

SEQ ID NO: 445682 - DNA, 19 bp, Mus musculus
  siRNA target sequence for Mga (NM_013720.1,5983-6001).
gccagaccttatgaatact

SEQ ID NO: 445683 - DNA, 19 bp, Mus musculus
  siRNA target sequence for Mga (NM_013720.1,5985-6003).
cagaccttatgaatactct

SEQ ID NO: 445684 - DNA, 19 bp, Mus musculus
  siRNA target sequence for Mga (NM_013720.1,5987-6005).
gaccttatgaatactctta

SEQ ID NO: 445685 - DNA, 19 bp, Mus musculus
  siRNA target sequence for Mga (NM_013720.1,6112-6130).
ggctctaaaaacattgata

SEQ ID NO: 445686 - DNA, 19 bp, Mus musculus
  siRNA target sequence for Mga (NM_013720.1,6113-6131).
gctctaaaaacattgatat

SEQ ID NO: 445687 - DNA, 19 bp, Mus musculus
  siRNA target sequence for Mga (NM_013720.1,6141-6159).
ccaaagcatcagaagtata

SEQ ID NO: 445688 - DNA, 19 bp, Mus musculus
  siRNA target sequence for Mga (NM_013720.1,6152-6170).
gaagtatacggcctcaaaa

SEQ ID NO: 445689 - DNA, 19 bp, Mus musculus
  siRNA target sequence for Mga (NM_013720.1,6160-6178).
cggcctcaaaagtgtgtta

SEQ ID NO: 445690 - DNA, 19 bp, Mus musculus
  siRNA target sequence for Mga (NM_013720.1,6161-6179).
ggcctcaaaagtgtgttaa

SEQ ID NO: 445691 - DNA, 19 bp, Mus musculus
  siRNA target sequence for Mga (NM_013720.1,6164-6182).
ctcaaaagtgtgttaaggt

SEQ ID NO: 445692 - DNA, 19 bp, Mus musculus
  siRNA target sequence for Mga (NM_013720.1,6219-6237).
gaacccagatgactttcta

SEQ ID NO: 445693 - DNA, 19 bp, Mus musculus
  siRNA target sequence for Mga (NM_013720.1,6229-6247).
gactttctagtcctttcta

SEQ ID NO: 445694 - DNA, 19 bp, Mus musculus
  siRNA target sequence for Mga (NM_013720.1,6250-6268).
gacagtaaatttgaattat

SEQ ID NO: 445695 - DNA, 19 bp, Mus musculus
  siRNA target sequence for Mga (NM_013720.1,6269-6287).
cggggaaccaagttaagga

SEQ ID NO: 445696 - DNA, 19 bp, Mus musculus
  siRNA target sequence for Mga (NM_013720.1,6285-6303).
ggaacagcaatctaactca

SEQ ID NO: 445697 - DNA, 19 bp, Mus musculus
  siRNA target sequence for Mga (NM_013720.1,6385-6403).
cccttaactcagaagtaca

SEQ ID NO: 445698 - DNA, 19 bp, Mus musculus
  siRNA target sequence for Mga (NM_013720.1,6396-6414).
gaagtacattggaatttca

SEQ ID NO: 445699 - DNA, 19 bp, Mus musculus
  siRNA target sequence for Mga (NM_013720.1,6406-6424).
ggaatttcacagaacttta

SEQ ID NO: 445700 - DNA, 19 bp, Mus musculus
  siRNA target sequence for Mga (NM_013720.1,6432-6450).
ggcaaacgttcagttcttt

SEQ ID NO: 445701 - DNA, 19 bp, Mus musculus
  siRNA target sequence for Mga (NM_013720.1,6433-6451).
gcaaacgttcagttcttta

SEQ ID NO: 445702 - DNA, 19 bp, Mus musculus
  siRNA target sequence for Mga (NM_013720.1,6464-6482).
catgtcaagaaaattctga

SEQ ID NO: 445703 - DNA, 19 bp, Mus musculus
  siRNA target sequence for Mga (NM_013720.1,6523-6541).
gagagtggtggagttctaa

SEQ ID NO: 445704 - DNA, 19 bp, Mus musculus
  siRNA target sequence for Mga (NM_013720.1,6525-6543).
gagtggtggagttctaaaa

SEQ ID NO: 445705 - DNA, 19 bp, Mus musculus
  siRNA target sequence for Mga (NM_013720.1,6578-6596).
ctgcggccttctctattat

SEQ ID NO: 445706 - DNA, 19 bp, Mus musculus
  siRNA target sequence for Mga (NM_013720.1,6662-6680).
gagaacagatgaaaccaaa

SEQ ID NO: 445707 - DNA, 19 bp, Mus musculus
  siRNA target sequence for Mga (NM_013720.1,6810-6828).
gagtgaggaggttgatgta

SEQ ID NO: 445708 - DNA, 19 bp, Mus musculus
  siRNA target sequence for Mga (NM_013720.1,6834-6852).
gaataactatgtagactat

SEQ ID NO: 445709 - DNA, 19 bp, Mus musculus
  siRNA target sequence for Mga (NM_013720.1,6884-6902).
caatagaagagctttcaga

SEQ ID NO: 445710 - DNA, 19 bp, Mus musculus
  siRNA target sequence for Mga (NM_013720.1,6895-6913).
ctttcagaggaaattaact

SEQ ID NO: 445711 - DNA, 19 bp, Mus musculus
  siRNA target sequence for Mga (NM_013720.1,7005-7023).
gagtcgaaaggtttcatta

SEQ ID NO: 445712 - DNA, 19 bp, Mus musculus
  siRNA target sequence for Mga (NM_013720.1,7055-7073).
gtgataaaccacacaaaga

SEQ ID NO: 445713 - DNA, 19 bp, Mus musculus
  siRNA target sequence for Mga (NM_013720.1,7072-7090).
gaaacagaagcttttgcat

SEQ ID NO: 445714 - DNA, 19 bp, Mus musculus
  siRNA target sequence for Mga (NM_013720.1,7076-7094).
cagaagcttttgcatatta

SEQ ID NO: 445715 - DNA, 19 bp, Mus musculus
  siRNA target sequence for Mga (NM_013720.1,7121-7139).
ggcgtcggcgtggtgaaat

SEQ ID NO: 445716 - DNA, 19 bp, Mus musculus
  siRNA target sequence for Mga (NM_013720.1,7123-7141).
cgtcggcgtggtgaaatga

SEQ ID NO: 445717 - DNA, 19 bp, Mus musculus
  siRNA target sequence for Mga (NM_013720.1,7200-7218).
caaaagtctcattcttaat

SEQ ID NO: 445718 - DNA, 19 bp, Mus musculus
  siRNA target sequence for Mga (NM_013720.1,7221-7239).
ggcattcagtgaaattcaa

SEQ ID NO: 445719 - DNA, 19 bp, Mus musculus
  siRNA target sequence for Mga (NM_013720.1,7247-7265).
cagaccaggcagataaatt

SEQ ID NO: 445720 - DNA, 19 bp, Mus musculus
  siRNA target sequence for Mga (NM_013720.1,7249-7267).
gaccaggcagataaattga

SEQ ID NO: 445721 - DNA, 19 bp, Mus musculus
  siRNA target sequence for Mga (NM_013720.1,7251-7269).
ccaggcagataaattgata

SEQ ID NO: 445722 - DNA, 19 bp, Mus musculus
  siRNA target sequence for Mga (NM_013720.1,7282-7300).
ctcctgagtcgaaaacgaa

SEQ ID NO: 445723 - DNA, 19 bp, Mus musculus
  siRNA target sequence for Mga (NM_013720.1,7289-7307).
gtcgaaaacgaagtatttt

SEQ ID NO: 445724 - DNA, 19 bp, Mus musculus
  siRNA target sequence for Mga (NM_013720.1,7359-7377).
gaagctagagtatatttat

SEQ ID NO: 445725 - DNA, 19 bp, Mus musculus
  siRNA target sequence for Mga (NM_013720.1,7362-7380).
gctagagtatatttatgca

SEQ ID NO: 445726 - DNA, 19 bp, Mus musculus
  siRNA target sequence for Mga (NM_013720.1,7478-7496).
ctgcatcatctgtagatct

SEQ ID NO: 445727 - DNA, 19 bp, Mus musculus
  siRNA target sequence for Mga (NM_013720.1,7499-7517).
gacagatgctcatgaataa

SEQ ID NO: 445728 - DNA, 19 bp, Mus musculus
  siRNA target sequence for Mga (NM_013720.1,7598-7616).
cttctgccaacctggtaat

SEQ ID NO: 445729 - DNA, 19 bp, Mus musculus
  siRNA target sequence for Mga (NM_013720.1,7640-7658).
ccctaaaaggccccttatt

SEQ ID NO: 445730 - DNA, 19 bp, Mus musculus
  siRNA target sequence for Mga (NM_013720.1,7714-7732).
caagttgcaagcagtacta

SEQ ID NO: 445731 - DNA, 19 bp, Mus musculus
  siRNA target sequence for Mga (NM_013720.1,7742-7760).
ctgagaatgatgacttatt

SEQ ID NO: 445732 - DNA, 19 bp, Mus musculus
  siRNA target sequence for Mga (NM_013720.1,7764-7782).
gatgccacgaattgtcaat

SEQ ID NO: 445733 - DNA, 19 bp, Mus musculus
  siRNA target sequence for Mga (NM_013720.1,7768-7786).
ccacgaattgtcaatgtga

SEQ ID NO: 445734 - DNA, 19 bp, Mus musculus
  siRNA target sequence for Mga (NM_013720.1,7816-7834).
ggtatgagtggcaacaaat

SEQ ID NO: 445735 - DNA, 19 bp, Mus musculus
  siRNA target sequence for Mga (NM_013720.1,7817-7835).
gtatgagtggcaacaaata

SEQ ID NO: 445736 - DNA, 19 bp, Mus musculus
  siRNA target sequence for Mga (NM_013720.1,7967-7985).
gtccaacacaggtgctttt

SEQ ID NO: 445737 - DNA, 19 bp, Mus musculus
  siRNA target sequence for Mga (NM_013720.1,8042-8060).
cacaggaatttatacctaa

SEQ ID NO: 445738 - DNA, 19 bp, Mus musculus
  siRNA target sequence for Mga (NM_013720.1,8044-8062).
caggaatttatacctaaaa

SEQ ID NO: 445739 - DNA, 19 bp, Mus musculus
  siRNA target sequence for Mga (NM_013720.1,8079-8097).
gagagggcatcggtataaa

SEQ ID NO: 445740 - DNA, 19 bp, Mus musculus
  siRNA target sequence for Mga (NM_013720.1,8083-8101).
gggcatcggtataaatgga

SEQ ID NO: 445741 - DNA, 19 bp, Mus musculus
  siRNA target sequence for Mga (NM_013720.1,8140-8158).
gagtctcagtttcataaat

SEQ ID NO: 445742 - DNA, 19 bp, Mus musculus
  siRNA target sequence for Mga (NM_013720.1,8142-8160).
gtctcagtttcataaatta

SEQ ID NO: 445743 - DNA, 19 bp, Mus musculus
  siRNA target sequence for Mga (NM_013720.1,8646-8664).
ccataggaaatctagtgat

SEQ ID NO: 445744 - DNA, 19 bp, Mus musculus
  siRNA target sequence for Mga (NM_013720.1,8662-8680).
gatggagggcagagtactt

SEQ ID NO: 445745 - DNA, 19 bp, Mus musculus
  siRNA target sequence for Mga (NM_013720.1,8688-8706).
ccccgcagagcctgaaagt

SEQ ID NO: 445746 - DNA, 19 bp, Mus musculus
  siRNA target sequence for Mga (NM_013720.1,8690-8708).
ccgcagagcctgaaagtgt

SEQ ID NO: 445747 - DNA, 19 bp, Mus musculus
  siRNA target sequence for Mga (NM_013720.1,8691-8709).
cgcagagcctgaaagtgta

SEQ ID NO: 445748 - DNA, 19 bp, Mus musculus
  siRNA target sequence for Mga (NM_013720.1,8717-8735).
ctcccatcttacacatgaa

SEQ ID NO: 445749 - DNA, 19 bp, Mus musculus
  siRNA target sequence for Mga (NM_013720.1,8748-8766).
gaacagcaacacagatact

SEQ ID NO: 445750 - DNA, 19 bp, Mus musculus
  siRNA target sequence for Mga (NM_013720.1,8856-8874).
gcctgccttggcacctata

SEQ ID NO: 445751 - DNA, 19 bp, Mus musculus
  siRNA target sequence for Mga (NM_013720.1,8880-8898).
caaagttgggtcaattgga

SEQ ID NO: 445752 - DNA, 19 bp, Mus musculus
  siRNA target sequence for Mga (NM_013720.1,8887-8905).
gggtcaattggacacaaaa

SEQ ID NO: 445753 - DNA, 19 bp, Mus musculus
  siRNA target sequence for Mga (NM_013720.1,8888-8906).
ggtcaattggacacaaaat

SEQ ID NO: 445754 - DNA, 19 bp, Mus musculus
  siRNA target sequence for Mga (NM_013720.1,8961-8979).
ggcacctgttgtacctaaa

SEQ ID NO: 445755 - DNA, 19 bp, Mus musculus
  siRNA target sequence for Mga (NM_013720.1,8962-8980).
gcacctgttgtacctaaat

SEQ ID NO: 445756 - DNA, 19 bp, Mus musculus
  siRNA target sequence for Mint (NM_019763.1,273-291).
cagggagcgtgcttatgaa

SEQ ID NO: 445757 - DNA, 19 bp, Mus musculus
  siRNA target sequence for Mint (NM_019763.1,275-293).
gggagcgtgcttatgaaca

SEQ ID NO: 445758 - DNA, 19 bp, Mus musculus
  siRNA target sequence for Mint (NM_019763.1,276-294).
ggagcgtgcttatgaacat

SEQ ID NO: 445759 - DNA, 19 bp, Mus musculus
  siRNA target sequence for Mint (NM_019763.1,277-295).
gagcgtgcttatgaacata

SEQ ID NO: 445760 - DNA, 19 bp, Mus musculus
  siRNA target sequence for Mint (NM_019763.1,317-335).
gggggacaggagcatttga

SEQ ID NO: 445761 - DNA, 19 bp, Mus musculus
  siRNA target sequence for Mint (NM_019763.1,318-336).
ggggacaggagcatttgat

SEQ ID NO: 445762 - DNA, 19 bp, Mus musculus
  siRNA target sequence for Mint (NM_019763.1,344-362).
gacattacgatcaggatta

SEQ ID NO: 445763 - DNA, 19 bp, Mus musculus
  siRNA target sequence for Mint (NM_019763.1,346-364).
cattacgatcaggattact

SEQ ID NO: 445764 - DNA, 19 bp, Mus musculus
  siRNA target sequence for Mint (NM_019763.1,351-369).
cgatcaggattactataga

SEQ ID NO: 445765 - DNA, 19 bp, Mus musculus
  siRNA target sequence for Mint (NM_019763.1,372-390).
ccctcgagagcggacttta

SEQ ID NO: 445766 - DNA, 19 bp, Mus musculus
  siRNA target sequence for Mint (NM_019763.1,377-395).
gagagcggactttacaaca

SEQ ID NO: 445767 - DNA, 19 bp, Mus musculus
  siRNA target sequence for Mint (NM_019763.1,391-409).
caacacgggctctattaca

SEQ ID NO: 445768 - DNA, 19 bp, Mus musculus
  siRNA target sequence for Mint (NM_019763.1,394-412).
cacgggctctattacactt

SEQ ID NO: 445769 - DNA, 19 bp, Mus musculus
  siRNA target sequence for Mint (NM_019763.1,496-514).
gtggtacacagggatatct

SEQ ID NO: 445770 - DNA, 19 bp, Mus musculus
  siRNA target sequence for Mint (NM_019763.1,552-570).
gccagagcgcagttaccaa

SEQ ID NO: 445771 - DNA, 19 bp, Mus musculus
  siRNA target sequence for Mint (NM_019763.1,592-610).
cattcgtcccagtctagaa

SEQ ID NO: 445772 - DNA, 19 bp, Mus musculus
  siRNA target sequence for Mint (NM_019763.1,830-848).
cgtcccttgaaaaagatga

SEQ ID NO: 445773 - DNA, 19 bp, Mus musculus
  siRNA target sequence for Mint (NM_019763.1,918-936).
cggccttttccatgagttt

SEQ ID NO: 445774 - DNA, 19 bp, Mus musculus
  siRNA target sequence for Mint (NM_019763.1,919-937).
ggccttttccatgagttta

SEQ ID NO: 445775 - DNA, 19 bp, Mus musculus
  siRNA target sequence for Mint (NM_019763.1,920-938).
gccttttccatgagtttaa

SEQ ID NO: 445776 - DNA, 19 bp, Mus musculus
  siRNA target sequence for Mint (NM_019763.1,922-940).
cttttccatgagtttaaga

SEQ ID NO: 445777 - DNA, 19 bp, Mus musculus
  siRNA target sequence for Mint (NM_019763.1,989-1007).
gatacggcctggtgttctt

SEQ ID NO: 445778 - DNA, 19 bp, Mus musculus
  siRNA target sequence for Mint (NM_019763.1,1150-1168).
gaattccatcccaaagcaa

SEQ ID NO: 445779 - DNA, 19 bp, Mus musculus
  siRNA target sequence for Mint (NM_019763.1,1161-1179).
caaagcaacgagaactctt

SEQ ID NO: 445780 - DNA, 19 bp, Mus musculus
  siRNA target sequence for Mint (NM_019763.1,1166-1184).
caacgagaactctttttat

SEQ ID NO: 445781 - DNA, 19 bp, Mus musculus
  siRNA target sequence for Mint (NM_019763.1,1186-1204).
gggaaccttgaaaaaacga

SEQ ID NO: 445782 - DNA, 19 bp, Mus musculus
  siRNA target sequence for Mint (NM_019763.1,1208-1226).
cttaccacgaccttcgaaa

SEQ ID NO: 445783 - DNA, 19 bp, Mus musculus
  siRNA target sequence for Mint (NM_019763.1,1213-1231).
cacgaccttcgaaacatct

SEQ ID NO: 445784 - DNA, 19 bp, Mus musculus
  siRNA target sequence for Mint (NM_019763.1,1215-1233).
cgaccttcgaaacatcttt

SEQ ID NO: 445785 - DNA, 19 bp, Mus musculus
  siRNA target sequence for Mint (NM_019763.1,1350-1368).
cggagagtaccttggaaat

SEQ ID NO: 445786 - DNA, 19 bp, Mus musculus
  siRNA target sequence for Mint (NM_019763.1,1351-1369).
ggagagtaccttggaaata

SEQ ID NO: 445787 - DNA, 19 bp, Mus musculus
  siRNA target sequence for Mint (NM_019763.1,1352-1370).
gagagtaccttggaaataa

SEQ ID NO: 445788 - DNA, 19 bp, Mus musculus
  siRNA target sequence for Mint (NM_019763.1,1407-1425).
caactgtgtgtggttagat

SEQ ID NO: 445789 - DNA, 19 bp, Mus musculus
  siRNA target sequence for Mint (NM_019763.1,1436-1454).
caaatgtgtccgatcagta

SEQ ID NO: 445790 - DNA, 19 bp, Mus musculus
  siRNA target sequence for Mint (NM_019763.1,1441-1459).
gtgtccgatcagtatttaa

SEQ ID NO: 445791 - DNA, 19 bp, Mus musculus
  siRNA target sequence for Mint (NM_019763.1,1443-1461).
gtccgatcagtatttaact

SEQ ID NO: 445792 - DNA, 19 bp, Mus musculus
  siRNA target sequence for Mint (NM_019763.1,1475-1493).
gatacggacctgtggtaaa

SEQ ID NO: 445793 - DNA, 19 bp, Mus musculus
  siRNA target sequence for Mint (NM_019763.1,1517-1535).
gcatggctctggttctcta

SEQ ID NO: 445794 - DNA, 19 bp, Mus musculus
  siRNA target sequence for Mint (NM_019763.1,1575-1593).
caagggcaggaaaattggt

SEQ ID NO: 445795 - DNA, 19 bp, Mus musculus
  siRNA target sequence for Mint (NM_019763.1,1592-1610).
gtgggaataagattaaggt

SEQ ID NO: 445796 - DNA, 19 bp, Mus musculus
  siRNA target sequence for Mint (NM_019763.1,1627-1645).
gaaagccaactggcatttt

SEQ ID NO: 445797 - DNA, 19 bp, Mus musculus
  siRNA target sequence for Mint (NM_019763.1,1633-1651).
caactggcattttatcact

SEQ ID NO: 445798 - DNA, 19 bp, Mus musculus
  siRNA target sequence for Mint (NM_019763.1,1679-1697).
gagacttctatgaaatgct

SEQ ID NO: 445799 - DNA, 19 bp, Mus musculus
  siRNA target sequence for Mint (NM_019763.1,1786-1804).
cgaagagggtcctatgagt

SEQ ID NO: 445800 - DNA, 19 bp, Mus musculus
  siRNA target sequence for Mint (NM_019763.1,1787-1805).
gaagagggtcctatgagta

SEQ ID NO: 445801 - DNA, 19 bp, Mus musculus
  siRNA target sequence for Mint (NM_019763.1,1808-1826).
gtcaagaacggacatacta

SEQ ID NO: 445802 - DNA, 19 bp, Mus musculus
  siRNA target sequence for Mint (NM_019763.1,1813-1831).
gaacggacatactatgaaa

SEQ ID NO: 445803 - DNA, 19 bp, Mus musculus
  siRNA target sequence for Mint (NM_019763.1,1921-1939).
caaggagagtattatgact

SEQ ID NO: 445804 - DNA, 19 bp, Mus musculus
  siRNA target sequence for Mint (NM_019763.1,1957-1975).
cctcgcgaatacagagaat

SEQ ID NO: 445805 - DNA, 19 bp, Mus musculus
  siRNA target sequence for Mint (NM_019763.1,1958-1976).
ctcgcgaatacagagaata

SEQ ID NO: 445806 - DNA, 19 bp, Mus musculus
  siRNA target sequence for Mint (NM_019763.1,1960-1978).
cgcgaatacagagaatata

SEQ ID NO: 445807 - DNA, 19 bp, Mus musculus
  siRNA target sequence for Mint (NM_019763.1,2041-2059).
gaacgggagagattcgaat

SEQ ID NO: 445808 - DNA, 19 bp, Mus musculus
  siRNA target sequence for Mint (NM_019763.1,2045-2063).
gggagagattcgaatctga

SEQ ID NO: 445809 - DNA, 19 bp, Mus musculus
  siRNA target sequence for Mint (NM_019763.1,2144-2162).
ctgcgcattcggagagatt

SEQ ID NO: 445810 - DNA, 19 bp, Mus musculus
  siRNA target sequence for Mint (NM_019763.1,2234-2252).
ccccacggtacgataagct

SEQ ID NO: 445811 - DNA, 19 bp, Mus musculus
  siRNA target sequence for Mint (NM_019763.1,2264-2282).
ggctggagcgctacacaaa

SEQ ID NO: 445812 - DNA, 19 bp, Mus musculus
  siRNA target sequence for Mint (NM_019763.1,2265-2283).
gctggagcgctacacaaaa

SEQ ID NO: 445813 - DNA, 19 bp, Mus musculus
  siRNA target sequence for Mint (NM_019763.1,2271-2289).
gcgctacacaaaaaacgaa

SEQ ID NO: 445814 - DNA, 19 bp, Mus musculus
  siRNA target sequence for Mint (NM_019763.1,2272-2290).
cgctacacaaaaaacgaaa

SEQ ID NO: 445815 - DNA, 19 bp, Mus musculus
  siRNA target sequence for Mint (NM_019763.1,2273-2291).
gctacacaaaaaacgaaaa

SEQ ID NO: 445816 - DNA, 19 bp, Mus musculus
  siRNA target sequence for Mint (NM_019763.1,2298-2316).
caaagagcgcactttcgat

SEQ ID NO: 445817 - DNA, 19 bp, Mus musculus
  siRNA target sequence for Mint (NM_019763.1,2331-2349).
gagggagagacgaatagtt

SEQ ID NO: 445818 - DNA, 19 bp, Mus musculus
  siRNA target sequence for Mint (NM_019763.1,2403-2421).
ggctcactcccctagttct

SEQ ID NO: 445819 - DNA, 19 bp, Mus musculus
  siRNA target sequence for Mint (NM_019763.1,2429-2447).
cggaaaccgagcaggaaaa

SEQ ID NO: 445820 - DNA, 19 bp, Mus musculus
  siRNA target sequence for Mint (NM_019763.1,2928-2946).
gacagaggatactcgaata

SEQ ID NO: 445821 - DNA, 19 bp, Mus musculus
  siRNA target sequence for Mint (NM_019763.1,2934-2952).
ggatactcgaatactttta

SEQ ID NO: 445822 - DNA, 19 bp, Mus musculus
  siRNA target sequence for Mint (NM_019763.1,2958-2976).
gcagcctgacacatcaaga

SEQ ID NO: 445823 - DNA, 19 bp, Mus musculus
  siRNA target sequence for Mint (NM_019763.1,2969-2987).
catcaagagatggtgtttt

SEQ ID NO: 445824 - DNA, 19 bp, Mus musculus
  siRNA target sequence for Mint (NM_019763.1,2972-2990).
caagagatggtgttttgct

SEQ ID NO: 445825 - DNA, 19 bp, Mus musculus
  siRNA target sequence for Mint (NM_019763.1,3056-3074).
ctaagctggaaagacttaa

SEQ ID NO: 445826 - DNA, 19 bp, Mus musculus
  siRNA target sequence for Mint (NM_019763.1,3156-3174).
cgcaggactgggagaacta

SEQ ID NO: 445827 - DNA, 19 bp, Mus musculus
  siRNA target sequence for Mint (NM_019763.1,3157-3175).
gcaggactgggagaactaa

SEQ ID NO: 445828 - DNA, 19 bp, Mus musculus
  siRNA target sequence for Mint (NM_019763.1,3282-3300).
ggaagtgaggaaaaactat

SEQ ID NO: 445829 - DNA, 19 bp, Mus musculus
  siRNA target sequence for Mint (NM_019763.1,3372-3390).
gaaacttggcattgacatt

SEQ ID NO: 445830 - DNA, 19 bp, Mus musculus
  siRNA target sequence for Mint (NM_019763.1,3459-3477).
cgccaaggctgagaagttt

SEQ ID NO: 445831 - DNA, 19 bp, Mus musculus
  siRNA target sequence for Mint (NM_019763.1,3474-3492).
gtttggcagtccgaagaaa

SEQ ID NO: 445832 - DNA, 19 bp, Mus musculus
  siRNA target sequence for Mint (NM_019763.1,3479-3497).
gcagtccgaagaaagatgt

SEQ ID NO: 445833 - DNA, 19 bp, Mus musculus
  siRNA target sequence for Mint (NM_019763.1,3480-3498).
cagtccgaagaaagatgta

SEQ ID NO: 445834 - DNA, 19 bp, Mus musculus
  siRNA target sequence for Mint (NM_019763.1,3482-3500).
gtccgaagaaagatgtaga

SEQ ID NO: 445835 - DNA, 19 bp, Mus musculus
  siRNA target sequence for Mint (NM_019763.1,3587-3605).
ggacggatcacgtggattt

SEQ ID NO: 445836 - DNA, 19 bp, Mus musculus
  siRNA target sequence for Mint (NM_019763.1,3590-3608).
cggatcacgtggatttcga

SEQ ID NO: 445837 - DNA, 19 bp, Mus musculus
  siRNA target sequence for Mint (NM_019763.1,3591-3609).
ggatcacgtggatttcgat

SEQ ID NO: 445838 - DNA, 19 bp, Mus musculus
  siRNA target sequence for Mint (NM_019763.1,3592-3610).
gatcacgtggatttcgata

SEQ ID NO: 445839 - DNA, 19 bp, Mus musculus
  siRNA target sequence for Mint (NM_019763.1,3595-3613).
cacgtggatttcgatatct

SEQ ID NO: 445840 - DNA, 19 bp, Mus musculus
  siRNA target sequence for Mint (NM_019763.1,3597-3615).
cgtggatttcgatatctgt

SEQ ID NO: 445841 - DNA, 19 bp, Mus musculus
  siRNA target sequence for Mint (NM_019763.1,3606-3624).
cgatatctgtaccaaaaga

SEQ ID NO: 445842 - DNA, 19 bp, Mus musculus
  siRNA target sequence for Mint (NM_019763.1,3627-3645).
gagaaactaccgaagttca

SEQ ID NO: 445843 - DNA, 19 bp, Mus musculus
  siRNA target sequence for Mint (NM_019763.1,3805-3823).
gtgagagacgatccattaa

SEQ ID NO: 445844 - DNA, 19 bp, Mus musculus
  siRNA target sequence for Mint (NM_019763.1,3807-3825).
gagagacgatccattaaaa

SEQ ID NO: 445845 - DNA, 19 bp, Mus musculus
  siRNA target sequence for Mint (NM_019763.1,3811-3829).
gacgatccattaaaatgca

SEQ ID NO: 445846 - DNA, 19 bp, Mus musculus
  siRNA target sequence for Mint (NM_019763.1,3813-3831).
cgatccattaaaatgcaat

SEQ ID NO: 445847 - DNA, 19 bp, Mus musculus
  siRNA target sequence for Mint (NM_019763.1,3918-3936).
gtgggaccctccgatgaaa

SEQ ID NO: 445848 - DNA, 19 bp, Mus musculus
  siRNA target sequence for Mint (NM_019763.1,3920-3938).
gggaccctccgatgaaaca

SEQ ID NO: 445849 - DNA, 19 bp, Mus musculus
  siRNA target sequence for Mint (NM_019763.1,3939-3957).
ggaccccagccggtttgat

SEQ ID NO: 445850 - DNA, 19 bp, Mus musculus
  siRNA target sequence for Mint (NM_019763.1,3967-3985).
ccaaacagtgtaattaaga

SEQ ID NO: 445851 - DNA, 19 bp, Mus musculus
  siRNA target sequence for Mint (NM_019763.1,4027-4045).
ggtgaggtgccctctgatt

SEQ ID NO: 445852 - DNA, 19 bp, Mus musculus
  siRNA target sequence for Mint (NM_019763.1,4103-4121).
gccctcggctgtctttttt

SEQ ID NO: 445853 - DNA, 19 bp, Mus musculus
  siRNA target sequence for Mint (NM_019763.1,4104-4122).
ccctcggctgtctttttta

SEQ ID NO: 445854 - DNA, 19 bp, Mus musculus
  siRNA target sequence for Mint (NM_019763.1,4144-4162).
ctacgtgagcgagatgaaa

SEQ ID NO: 445855 - DNA, 19 bp, Mus musculus
  siRNA target sequence for Mint (NM_019763.1,4163-4181).
gactcgctagctctttaga

SEQ ID NO: 445856 - DNA, 19 bp, Mus musculus
  siRNA target sequence for Mint (NM_019763.1,4301-4319).
gggactcgcggtttgctaa

SEQ ID NO: 445857 - DNA, 19 bp, Mus musculus
  siRNA target sequence for Mint (NM_019763.1,4302-4320).
ggactcgcggtttgctaat

SEQ ID NO: 445858 - DNA, 19 bp, Mus musculus
  siRNA target sequence for Mint (NM_019763.1,4303-4321).
gactcgcggtttgctaatt

SEQ ID NO: 445859 - DNA, 19 bp, Mus musculus
  siRNA target sequence for Mint (NM_019763.1,4305-4323).
ctcgcggtttgctaatttt

SEQ ID NO: 445860 - DNA, 19 bp, Mus musculus
  siRNA target sequence for Mint (NM_019763.1,4308-4326).
gcggtttgctaattttcga

SEQ ID NO: 445861 - DNA, 19 bp, Mus musculus
  siRNA target sequence for Mint (NM_019763.1,4309-4327).
cggtttgctaattttcgaa

SEQ ID NO: 445862 - DNA, 19 bp, Mus musculus
  siRNA target sequence for Mint (NM_019763.1,4310-4328).
ggtttgctaattttcgaaa

SEQ ID NO: 445863 - DNA, 19 bp, Mus musculus
  siRNA target sequence for Mint (NM_019763.1,4476-4494).
gttcgcctctcggttctta

SEQ ID NO: 445864 - DNA, 19 bp, Mus musculus
  siRNA target sequence for Mint (NM_019763.1,4606-4624).
gcaaacagcacgagtgatt

SEQ ID NO: 445865 - DNA, 19 bp, Mus musculus
  siRNA target sequence for Mint (NM_019763.1,4645-4663).
ctgttccacagcagattca

SEQ ID NO: 445866 - DNA, 19 bp, Mus musculus
  siRNA target sequence for Mint (NM_019763.1,5088-5106).
cgccgtcccttgtgtgaat

SEQ ID NO: 445867 - DNA, 19 bp, Mus musculus
  siRNA target sequence for Mint (NM_019763.1,5280-5298).
cgctggggttgcatcagaa

SEQ ID NO: 445868 - DNA, 19 bp, Mus musculus
  siRNA target sequence for Mint (NM_019763.1,5338-5356).
ccagtcgctgcaaaagaca

SEQ ID NO: 445869 - DNA, 19 bp, Mus musculus
  siRNA target sequence for Mint (NM_019763.1,5614-5632).
cggaacgtgaggagtgttt

SEQ ID NO: 445870 - DNA, 19 bp, Mus musculus
  siRNA target sequence for Mint (NM_019763.1,5615-5633).
ggaacgtgaggagtgttta

SEQ ID NO: 445871 - DNA, 19 bp, Mus musculus
  siRNA target sequence for Mint (NM_019763.1,5616-5634).
gaacgtgaggagtgtttat

SEQ ID NO: 445872 - DNA, 19 bp, Mus musculus
  siRNA target sequence for Mint (NM_019763.1,5957-5975).
cgagcacgagggaaggtaa

SEQ ID NO: 445873 - DNA, 19 bp, Mus musculus
  siRNA target sequence for Mint (NM_019763.1,6471-6489).
ggccacggcagcatctgaa

SEQ ID NO: 445874 - DNA, 19 bp, Mus musculus
  siRNA target sequence for Mint (NM_019763.1,6801-6819).
ggaagccaaggggtctaaa

SEQ ID NO: 445875 - DNA, 19 bp, Mus musculus
  siRNA target sequence for Mint (NM_019763.1,6866-6884).
cacgacgccggaaaaggaa

SEQ ID NO: 445876 - DNA, 19 bp, Mus musculus
  siRNA target sequence for Mint (NM_019763.1,7342-7360).
gtgacagagtggatcacaa

SEQ ID NO: 445877 - DNA, 19 bp, Mus musculus
  siRNA target sequence for Mint (NM_019763.1,7415-7433).
caaaggcctctgatatgga

SEQ ID NO: 445878 - DNA, 19 bp, Mus musculus
  siRNA target sequence for Mint (NM_019763.1,7652-7670).
cggtggctgccgacaaaga

SEQ ID NO: 445879 - DNA, 19 bp, Mus musculus
  siRNA target sequence for Mint (NM_019763.1,7681-7699).
ccggtcattgcccctaaaa

SEQ ID NO: 445880 - DNA, 19 bp, Mus musculus
  siRNA target sequence for Mint (NM_019763.1,7715-7733).
gccggatgcccgttagcat

SEQ ID NO: 445881 - DNA, 19 bp, Mus musculus
  siRNA target sequence for Mint (NM_019763.1,7716-7734).
ccggatgcccgttagcatt

SEQ ID NO: 445882 - DNA, 19 bp, Mus musculus
  siRNA target sequence for Mint (NM_019763.1,7741-7759).
gagaactcgcagaagatca

SEQ ID NO: 445883 - DNA, 19 bp, Mus musculus
  siRNA target sequence for Mint (NM_019763.1,8144-8162).
ggtccatgtcagtgattga

SEQ ID NO: 445884 - DNA, 19 bp, Mus musculus
  siRNA target sequence for Mint (NM_019763.1,8194-8212).
gggctgcgggtgaatacat

SEQ ID NO: 445885 - DNA, 19 bp, Mus musculus
  siRNA target sequence for Mint (NM_019763.1,8196-8214).
gctgcgggtgaatacatca

SEQ ID NO: 445886 - DNA, 19 bp, Mus musculus
  siRNA target sequence for Mint (NM_019763.1,8199-8217).
gcgggtgaatacatcagaa

SEQ ID NO: 445887 - DNA, 19 bp, Mus musculus
  siRNA target sequence for Mint (NM_019763.1,8306-8324).
caatggacatcgagtttca

SEQ ID NO: 445888 - DNA, 19 bp, Mus musculus
  siRNA target sequence for Mint (NM_019763.1,8317-8335).
gagtttcagcagtcagtat

SEQ ID NO: 445889 - DNA, 19 bp, Mus musculus
  siRNA target sequence for Mint (NM_019763.1,8575-8593).
ctcacccagggcatcaaca

SEQ ID NO: 445890 - DNA, 19 bp, Mus musculus
  siRNA target sequence for Mint (NM_019763.1,8669-8687).
ctgtcactctgaaaatcga

SEQ ID NO: 445891 - DNA, 19 bp, Mus musculus
  siRNA target sequence for Mint (NM_019763.1,8834-8852).
cccccaaaccagatactca

SEQ ID NO: 445892 - DNA, 19 bp, Mus musculus
  siRNA target sequence for Mint (NM_019763.1,8835-8853).
ccccaaaccagatactcat

SEQ ID NO: 445893 - DNA, 19 bp, Mus musculus
  siRNA target sequence for Mint (NM_019763.1,8968-8986).
ccggtgccgcagttcatct

SEQ ID NO: 445894 - DNA, 19 bp, Mus musculus
  siRNA target sequence for Mint (NM_019763.1,9416-9434).
ccacagagggggtggtaaa

SEQ ID NO: 445895 - DNA, 19 bp, Mus musculus
  siRNA target sequence for Mint (NM_019763.1,9471-9489).
gaaggaagcggttaagact

SEQ ID NO: 445896 - DNA, 19 bp, Mus musculus
  siRNA target sequence for Mint (NM_019763.1,9568-9586).
ggtgaagcccgcattctca

SEQ ID NO: 445897 - DNA, 19 bp, Mus musculus
  siRNA target sequence for Mint (NM_019763.1,9644-9662).
cccacggggtgcagattgt

SEQ ID NO: 445898 - DNA, 19 bp, Mus musculus
  siRNA target sequence for Mint (NM_019763.1,9867-9885).
ggccacgcagcctatacca

SEQ ID NO: 445899 - DNA, 19 bp, Mus musculus
  siRNA target sequence for Mint (NM_019763.1,9930-9948).
gccaccgagtggcaagatt

SEQ ID NO: 445900 - DNA, 19 bp, Mus musculus
  siRNA target sequence for Mint (NM_019763.1,10371-10389).
cttcgtctctggcaacaat

SEQ ID NO: 445901 - DNA, 19 bp, Mus musculus
  siRNA target sequence for Mint (NM_019763.1,10480-10498).
ggggtcgccaggagaatga

SEQ ID NO: 445902 - DNA, 19 bp, Mus musculus
  siRNA target sequence for Mint (NM_019763.1,10482-10500).
ggtcgccaggagaatgaca

SEQ ID NO: 445903 - DNA, 19 bp, Mus musculus
  siRNA target sequence for Mint (NM_019763.1,10615-10633).
caagcagcagggattatca

SEQ ID NO: 445904 - DNA, 19 bp, Mus musculus
  siRNA target sequence for Mint (NM_019763.1,10619-10637).
cagcagggattatcaatgt

SEQ ID NO: 445905 - DNA, 19 bp, Mus musculus
  siRNA target sequence for Mint (NM_019763.1,10664-10682).
cctacgtgcttcagatctt

SEQ ID NO: 445906 - DNA, 19 bp, Mus musculus
  siRNA target sequence for Mint (NM_019763.1,10757-10775).
ctcctcacctcatgattgt

SEQ ID NO: 445907 - DNA, 19 bp, Mus musculus
  siRNA target sequence for Mint (NM_019763.1,10759-10777).
cctcacctcatgattgtca

SEQ ID NO: 445908 - DNA, 19 bp, Mus musculus
  siRNA target sequence for Mixl1 (NM_013729.2,173-191).
gccacgcagtgctttccaa

SEQ ID NO: 445909 - DNA, 19 bp, Mus musculus
  siRNA target sequence for Mixl1 (NM_013729.2,174-192).
ccacgcagtgctttccaaa

SEQ ID NO: 445910 - DNA, 19 bp, Mus musculus
  siRNA target sequence for Mixl1 (NM_013729.2,449-467).
cgccagagtgggaagtcat

SEQ ID NO: 445911 - DNA, 19 bp, Mus musculus
  siRNA target sequence for Mixl1 (NM_013729.2,642-660).
cgtctctctctgaagatat

SEQ ID NO: 445912 - DNA, 19 bp, Mus musculus
  siRNA target sequence for Mixl1 (NM_013729.2,643-661).
gtctctctctgaagatatt

SEQ ID NO: 445913 - DNA, 19 bp, Mus musculus
  siRNA target sequence for Mllt7 (NM_018789.1,592-610).
cctggggaaatcagtcata

SEQ ID NO: 445914 - DNA, 19 bp, Mus musculus
  siRNA target sequence for Mllt7 (NM_018789.1,596-614).
gggaaatcagtcatatgca

SEQ ID NO: 445915 - DNA, 19 bp, Mus musculus
  siRNA target sequence for Mllt7 (NM_018789.1,663-681).
ctcgcccagatctacgaat

SEQ ID NO: 445916 - DNA, 19 bp, Mus musculus
  siRNA target sequence for Mllt7 (NM_018789.1,1016-1034).
cccttgtcctcgaaatcga

SEQ ID NO: 445917 - DNA, 19 bp, Mus musculus
  siRNA target sequence for Mllt7 (NM_018789.1,1062-1080).
cgtccacgaagcagttcaa

SEQ ID NO: 445918 - DNA, 19 bp, Mus musculus
  siRNA target sequence for Mllt7 (NM_018789.1,1192-1210).
cgctcagtgaagatctaga

SEQ ID NO: 445919 - DNA, 19 bp, Mus musculus
  siRNA target sequence for Mllt7 (NM_018789.1,1263-1281).
ggtctctccggcttctctt

SEQ ID NO: 445920 - DNA, 19 bp, Mus musculus
  siRNA target sequence for Mllt7 (NM_018789.1,1300-1318).
ctggccccttacatagcta

SEQ ID NO: 445921 - DNA, 19 bp, Mus musculus
  siRNA target sequence for Mllt7 (NM_018789.1,1327-1345).
ccctctttggcccaataga

SEQ ID NO: 445922 - DNA, 19 bp, Mus musculus
  siRNA target sequence for Mllt7 (NM_018789.1,1328-1346).
cctctttggcccaatagat

SEQ ID NO: 445923 - DNA, 19 bp, Mus musculus
  siRNA target sequence for Mllt7 (NM_018789.1,1338-1356).
ccaatagatgggtctttgt

SEQ ID NO: 445924 - DNA, 19 bp, Mus musculus
  siRNA target sequence for Mllt7 (NM_018789.1,1362-1380).
ggagaagggtgcttctcaa

SEQ ID NO: 445925 - DNA, 19 bp, Mus musculus
  siRNA target sequence for Mllt7 (NM_018789.1,1365-1383).
gaagggtgcttctcaagtt

SEQ ID NO: 445926 - DNA, 19 bp, Mus musculus
  siRNA target sequence for Mllt7 (NM_018789.1,1472-1490).
ggctcctacacttctgtta

SEQ ID NO: 445927 - DNA, 19 bp, Mus musculus
  siRNA target sequence for Mllt7 (NM_018789.1,1655-1673).
gctcgcatctcctactgaa

SEQ ID NO: 445928 - DNA, 19 bp, Mus musculus
  siRNA target sequence for Mllt7 (NM_018789.1,1658-1676).
cgcatctcctactgaagat

SEQ ID NO: 445929 - DNA, 19 bp, Mus musculus
  siRNA target sequence for Mllt7 (NM_018789.1,1659-1677).
gcatctcctactgaagatt

SEQ ID NO: 445930 - DNA, 19 bp, Mus musculus
  siRNA target sequence for Mllt7 (NM_018789.1,1734-1752).
gagtgcgacatggataaca

SEQ ID NO: 445931 - DNA, 19 bp, Mus musculus
  siRNA target sequence for Mllt7 (NM_018789.1,1780-1798).
gactggacttcaactttga

SEQ ID NO: 445932 - DNA, 19 bp, Mus musculus
  siRNA target sequence for Mpl (NM_010823.1,5-23).
cctcttgggccctcttcat

SEQ ID NO: 445933 - DNA, 19 bp, Mus musculus
  siRNA target sequence for Mpl (NM_010823.1,119-137).
gcttctcccaaacatttga

SEQ ID NO: 445934 - DNA, 19 bp, Mus musculus
  siRNA target sequence for Mpl (NM_010823.1,223-241).
cgtgcatgccccctgtatt

SEQ ID NO: 445935 - DNA, 19 bp, Mus musculus
  siRNA target sequence for Mpl (NM_010823.1,321-339).
gcacctctgggtgaagaat

SEQ ID NO: 445936 - DNA, 19 bp, Mus musculus
  siRNA target sequence for Mpl (NM_010823.1,468-486).
ccctgctcctgaaatcagt

SEQ ID NO: 445937 - DNA, 19 bp, Mus musculus
  siRNA target sequence for Mpl (NM_010823.1,661-679).
ggaccagctccatttctga

SEQ ID NO: 445938 - DNA, 19 bp, Mus musculus
  siRNA target sequence for Mpl (NM_010823.1,838-856).
ggacttcagtgctttacct

SEQ ID NO: 445939 - DNA, 19 bp, Mus musculus
  siRNA target sequence for Mpl (NM_010823.1,839-857).
gacttcagtgctttacctt

SEQ ID NO: 445940 - DNA, 19 bp, Mus musculus
  siRNA target sequence for Mpl (NM_010823.1,848-866).
gctttaccttggatctgaa

SEQ ID NO: 445941 - DNA, 19 bp, Mus musculus
  siRNA target sequence for Mpl (NM_010823.1,962-980).
ccacctgggagaaatgtga

SEQ ID NO: 445942 - DNA, 19 bp, Mus musculus
  siRNA target sequence for Mpl (NM_010823.1,1040-1058).
cacgaaatgacagtgttat

SEQ ID NO: 445943 - DNA, 19 bp, Mus musculus
  siRNA target sequence for Mpl (NM_010823.1,1498-1516).
ggcctactgctgctaaagt

SEQ ID NO: 445944 - DNA, 19 bp, Mus musculus
  siRNA target sequence for Mpl (NM_010823.1,1506-1524).
gctgctaaagtggcaattt

SEQ ID NO: 445945 - DNA, 19 bp, Mus musculus
  siRNA target sequence for Mpl (NM_010823.1,1613-1631).
cagccctaagtccttctaa

SEQ ID NO: 445946 - DNA, 19 bp, Mus musculus
  siRNA target sequence for Mpl (NM_010823.1,1695-1713).
ctcagagagcactccttta

SEQ ID NO: 445947 - DNA, 19 bp, Mus musculus
  siRNA target sequence for Mpl (NM_010823.1,1815-1833).
ctgctgcaccacacacatt

SEQ ID NO: 445948 - DNA, 19 bp, Mus musculus
  siRNA target sequence for Mpl (NM_010823.1,1844-1862).
cctacctaccactaagcta

SEQ ID NO: 445949 - DNA, 19 bp, Mus musculus
  siRNA target sequence for Mpl (NM_010823.1,1845-1863).
ctacctaccactaagctat

SEQ ID NO: 445950 - DNA, 19 bp, Mus musculus
  siRNA target sequence for Mrg1 (NM_010825.2,516-534).
gtcaacgacgccttgaaaa

SEQ ID NO: 445951 - DNA, 19 bp, Mus musculus
  siRNA target sequence for Mrg1 (NM_010825.2,535-553).
gagacaaggacgcaatcta

SEQ ID NO: 445952 - DNA, 19 bp, Mus musculus
  siRNA target sequence for Mrg1 (NM_010825.2,705-723).
gccgaaaagcctctttttt

SEQ ID NO: 445953 - DNA, 19 bp, Mus musculus
  siRNA target sequence for Mrg1 (NM_010825.2,737-755).
gctggataatttgatgata

SEQ ID NO: 445954 - DNA, 19 bp, Mus musculus
  siRNA target sequence for Mrg1 (NM_010825.2,795-813).
gaaaaggtccacgaactat

SEQ ID NO: 445955 - DNA, 19 bp, Mus musculus
  siRNA target sequence for Mrg1 (NM_010825.2,801-819).
gtccacgaactatgtgata

SEQ ID NO: 445956 - DNA, 19 bp, Mus musculus
  siRNA target sequence for Mrg1 (NM_010825.2,804-822).
cacgaactatgtgataact

SEQ ID NO: 445957 - DNA, 19 bp, Mus musculus
  siRNA target sequence for Mrg1 (NM_010825.2,863-881).
cattgacctcgtgattgat

SEQ ID NO: 445958 - DNA, 19 bp, Mus musculus
  siRNA target sequence for Mrg1 (NM_010825.2,895-913).
gctccaagtcagatcatga

SEQ ID NO: 445959 - DNA, 19 bp, Mus musculus
  siRNA target sequence for Mrg1 (NM_010825.2,898-916).
ccaagtcagatcatgaaga

SEQ ID NO: 445960 - DNA, 19 bp, Mus musculus
  siRNA target sequence for Mrg1 (NM_010825.2,1062-1080).
caaggcgatgggttagaca

SEQ ID NO: 445961 - DNA, 19 bp, Mus musculus
  siRNA target sequence for Mrg1 (NM_010825.2,1160-1178).
ccccaaagtcgcgacaaat

SEQ ID NO: 445962 - DNA, 19 bp, Mus musculus
  siRNA target sequence for Mrg1 (NM_010825.2,1162-1180).
ccaaagtcgcgacaaatat

SEQ ID NO: 445963 - DNA, 19 bp, Mus musculus
  siRNA target sequence for Mrg1 (NM_010825.2,1167-1185).
gtcgcgacaaatatcatga

SEQ ID NO: 445964 - DNA, 19 bp, Mus musculus
  siRNA target sequence for Mrg1 (NM_010825.2,1352-1370).
ccaaggagcagcgtatagt

SEQ ID NO: 445965 - DNA, 19 bp, Mus musculus
  siRNA target sequence for Mrg1 (NM_010825.2,1453-1471).
caggggactacgtttctca

SEQ ID NO: 445966 - DNA, 19 bp, Mus musculus
  siRNA target sequence for Mrg1 (NM_010825.2,1496-1514).
ggcccagccaagttacact

SEQ ID NO: 445967 - DNA, 19 bp, Mus musculus
  siRNA target sequence for Mrg1 (NM_010825.2,1535-1553).
ccctactcagttaagacat

SEQ ID NO: 445968 - DNA, 19 bp, Mus musculus
  siRNA target sequence for Mrg1 (NM_010825.2,1651-1669).
cacagagccccacaatgtt

SEQ ID NO: 445969 - DNA, 19 bp, Mus musculus
  siRNA target sequence for Mrg2 (NM_008627.1,444-462).
ctccttcaatgaggatatt

SEQ ID NO: 445970 - DNA, 19 bp, Mus musculus
  siRNA target sequence for Mrg2 (NM_008627.1,589-607).
gacctgtgcgacaacttct

SEQ ID NO: 445971 - DNA, 19 bp, Mus musculus
  siRNA target sequence for Mrg2 (NM_008627.1,721-739).
ctcccagaccagaatacta

SEQ ID NO: 445972 - DNA, 19 bp, Mus musculus
  siRNA target sequence for Mrg2 (NM_008627.1,724-742).
ccagaccagaatactacat

SEQ ID NO: 445973 - DNA, 19 bp, Mus musculus
  siRNA target sequence for Mrg2 (NM_008627.1,759-777).
ggacagtgggtctgtacat

SEQ ID NO: 445974 - DNA, 19 bp, Mus musculus
  siRNA target sequence for Mrg2 (NM_008627.1,910-928).
gaacgcagacggaacaaga

SEQ ID NO: 445975 - DNA, 19 bp, Mus musculus
  siRNA target sequence for Msx1 (NM_010835.1,462-480).
gcctctcggccatttctca

SEQ ID NO: 445976 - DNA, 19 bp, Mus musculus
  siRNA target sequence for Msx1 (NM_010835.1,525-543).
cgaaagccccgagaaacta

SEQ ID NO: 445977 - DNA, 19 bp, Mus musculus
  siRNA target sequence for Msx2 (NM_013601.1,377-395).
ctaaaggcggtgacttgtt

SEQ ID NO: 445978 - DNA, 19 bp, Mus musculus
  siRNA target sequence for Msx2 (NM_013601.1,672-690).
ctcggtcaagtcggaaaat

SEQ ID NO: 445979 - DNA, 19 bp, Mus musculus
  siRNA target sequence for Msx2 (NM_013601.1,947-965).
gggctaaggcgaaaagact

SEQ ID NO: 445980 - DNA, 19 bp, Mus musculus
  siRNA target sequence for Msx2 (NM_013601.1,1053-1071).
cctgcaagcagcatccata

SEQ ID NO: 445981 - DNA, 19 bp, Mus musculus
  siRNA target sequence for Msx2 (NM_013601.1,1078-1096).
gcatcctaccccttccata

SEQ ID NO: 445982 - DNA, 19 bp, Mus musculus
  siRNA target sequence for Msx3 (NM_010836.1,396-414).
ggcgcttgagcgcaagttt

SEQ ID NO: 445983 - DNA, 19 bp, Mus musculus
  siRNA target sequence for Msx3 (NM_010836.1,398-416).
cgcttgagcgcaagtttca

SEQ ID NO: 445984 - DNA, 19 bp, Mus musculus
  siRNA target sequence for Msx3 (NM_010836.1,415-433).
caccagaagcaatacttat

SEQ ID NO: 445985 - DNA, 19 bp, Mus musculus
  siRNA target sequence for Msx3 (NM_010836.1,418-436).
cagaagcaatacttatcca

SEQ ID NO: 445986 - DNA, 19 bp, Mus musculus
  siRNA target sequence for Msx3 (NM_010836.1,686-704).
cctatggcatgtactactt

SEQ ID NO: 445987 - DNA, 19 bp, Mus musculus
  siRNA target sequence for Msx3 (NM_010836.1,691-709).
ggcatgtactacttgtctt

SEQ ID NO: 445988 - DNA, 19 bp, Mus musculus
  siRNA target sequence for Mta1 (NM_054081.1,168-186).
cctgatccgcaggattgaa

SEQ ID NO: 445989 - DNA, 19 bp, Mus musculus
  siRNA target sequence for Mta1 (NM_054081.1,176-194).
gcaggattgaagagcttaa

SEQ ID NO: 445990 - DNA, 19 bp, Mus musculus
  siRNA target sequence for Mta1 (NM_054081.1,179-197).
ggattgaagagcttaacaa

SEQ ID NO: 445991 - DNA, 19 bp, Mus musculus
  siRNA target sequence for Mta1 (NM_054081.1,478-496).
cgtgaggatttcttcttct

SEQ ID NO: 445992 - DNA, 19 bp, Mus musculus
  siRNA target sequence for Mta1 (NM_054081.1,545-563).
gggaaattcgtgtaggaaa

SEQ ID NO: 445993 - DNA, 19 bp, Mus musculus
  siRNA target sequence for Mta1 (NM_054081.1,817-835).
gacacgctgcacaagaaca

SEQ ID NO: 445994 - DNA, 19 bp, Mus musculus
  siRNA target sequence for Mta1 (NM_054081.1,909-927).
ggagtggtccgcatcagaa

SEQ ID NO: 445995 - DNA, 19 bp, Mus musculus
  siRNA target sequence for Mta1 (NM_054081.1,972-990).
caccgacattcaacaagat

SEQ ID NO: 445996 - DNA, 19 bp, Mus musculus
  siRNA target sequence for Mta1 (NM_054081.1,974-992).
ccgacattcaacaagattt

SEQ ID NO: 445997 - DNA, 19 bp, Mus musculus
  siRNA target sequence for Mta1 (NM_054081.1,975-993).
cgacattcaacaagatttt

SEQ ID NO: 445998 - DNA, 19 bp, Mus musculus
  siRNA target sequence for Mta1 (NM_054081.1,1005-1023).
gtcgctcaccagcatcatt

SEQ ID NO: 445999 - DNA, 19 bp, Mus musculus
  siRNA target sequence for Mta1 (NM_054081.1,1087-1105).
gaagctgagagcaagttaa

SEQ ID NO: 446000 - DNA, 19 bp, Mus musculus
  siRNA target sequence for Mta1 (NM_054081.1,1097-1115).
gcaagttaaagcaggttta

SEQ ID NO: 446001 - DNA, 19 bp, Mus musculus
  siRNA target sequence for Mta1 (NM_054081.1,1098-1116).
caagttaaagcaggtttat

SEQ ID NO: 446002 - DNA, 19 bp, Mus musculus
  siRNA target sequence for Mta1 (NM_054081.1,1111-1129).
gtttatattcccaactata

SEQ ID NO: 446003 - DNA, 19 bp, Mus musculus
  siRNA target sequence for Mta1 (NM_054081.1,1314-1332).
gacatattggaagaaatat

SEQ ID NO: 446004 - DNA, 19 bp, Mus musculus
  siRNA target sequence for Mta1 (NM_054081.1,1373-1391).
cgggaccaaaccgcaataa

SEQ ID NO: 446005 - DNA, 19 bp, Mus musculus
  siRNA target sequence for Mta1 (NM_054081.1,1375-1393).
ggaccaaaccgcaataaca

SEQ ID NO: 446006 - DNA, 19 bp, Mus musculus
  siRNA target sequence for Mta1 (NM_054081.1,1376-1394).
gaccaaaccgcaataacat

SEQ ID NO: 446007 - DNA, 19 bp, Mus musculus
  siRNA target sequence for Mta1 (NM_054081.1,1378-1396).
ccaaaccgcaataacatga

SEQ ID NO: 446008 - DNA, 19 bp, Mus musculus
  siRNA target sequence for Mta1 (NM_054081.1,1432-1450).
cccaagtttgccatgaaga

SEQ ID NO: 446009 - DNA, 19 bp, Mus musculus
  siRNA target sequence for Mta1 (NM_054081.1,1459-1477).
gccttctacctgcatacta

SEQ ID NO: 446010 - DNA, 19 bp, Mus musculus
  siRNA target sequence for Mta1 (NM_054081.1,1468-1486).
ctgcatactaccaagttga

SEQ ID NO: 446011 - DNA, 19 bp, Mus musculus
  siRNA target sequence for Mta1 (NM_054081.1,1656-1674).
ggccgtgctccggtatctt

SEQ ID NO: 446012 - DNA, 19 bp, Mus musculus
  siRNA target sequence for Mta1 (NM_054081.1,1658-1676).
ccgtgctccggtatcttga

SEQ ID NO: 446013 - DNA, 19 bp, Mus musculus
  siRNA target sequence for Mta1 (NM_054081.1,1699-1717).
cccgaccccgtgaagagtt

SEQ ID NO: 446014 - DNA, 19 bp, Mus musculus
  siRNA target sequence for Mta1 (NM_054081.1,1702-1720).
gaccccgtgaagagttcat

SEQ ID NO: 446015 - DNA, 19 bp, Mus musculus
  siRNA target sequence for Mta1 (NM_054081.1,1819-1837).
ggggtagatggcaacatga

SEQ ID NO: 446016 - DNA, 19 bp, Mus musculus
  siRNA target sequence for Mta1 (NM_054081.1,1820-1838).
gggtagatggcaacatgaa

SEQ ID NO: 446017 - DNA, 19 bp, Mus musculus
  siRNA target sequence for Mta1 (NM_054081.1,1822-1840).
gtagatggcaacatgaaga

SEQ ID NO: 446018 - DNA, 19 bp, Mus musculus
  siRNA target sequence for Mta1 (NM_054081.1,2001-2019).
gatcgacgccccagatgat

SEQ ID NO: 446019 - DNA, 19 bp, Mus musculus
  siRNA target sequence for Mta1 (NM_054081.1,2005-2023).
gacgccccagatgatgtat

SEQ ID NO: 446020 - DNA, 19 bp, Mus musculus
  siRNA target sequence for Mta1 (NM_054081.1,2009-2027).
ccccagatgatgtatttta

SEQ ID NO: 446021 - DNA, 19 bp, Mus musculus
  siRNA target sequence for Mta1 (NM_054081.1,2159-2177).
ctgcaccagtcaatgatga

SEQ ID NO: 446022 - DNA, 19 bp, Mus musculus
  siRNA target sequence for Mta2 (NM_011842.2,370-388).
gtgggagattacgtctatt

SEQ ID NO: 446023 - DNA, 19 bp, Mus musculus
  siRNA target sequence for Mta2 (NM_011842.2,486-504).
ccggcgaagggatatttct

SEQ ID NO: 446024 - DNA, 19 bp, Mus musculus
  siRNA target sequence for Mta2 (NM_011842.2,487-505).
cggcgaagggatatttcta

SEQ ID NO: 446025 - DNA, 19 bp, Mus musculus
  siRNA target sequence for Mta2 (NM_011842.2,489-507).
gcgaagggatatttctagt

SEQ ID NO: 446026 - DNA, 19 bp, Mus musculus
  siRNA target sequence for Mta2 (NM_011842.2,490-508).
cgaagggatatttctagta

SEQ ID NO: 446027 - DNA, 19 bp, Mus musculus
  siRNA target sequence for Mta2 (NM_011842.2,519-537).
cttggctgacagtaatgct

SEQ ID NO: 446028 - DNA, 19 bp, Mus musculus
  siRNA target sequence for Mta2 (NM_011842.2,541-559).
gagtttgaggaggaatcaa

SEQ ID NO: 446029 - DNA, 19 bp, Mus musculus
  siRNA target sequence for Mta2 (NM_011842.2,597-615).
gaagcaccgagagcttttt

SEQ ID NO: 446030 - DNA, 19 bp, Mus musculus
  siRNA target sequence for Mta2 (NM_011842.2,600-618).
gcaccgagagctttttctt

SEQ ID NO: 446031 - DNA, 19 bp, Mus musculus
  siRNA target sequence for Mta2 (NM_011842.2,601-619).
caccgagagctttttcttt

SEQ ID NO: 446032 - DNA, 19 bp, Mus musculus
  siRNA target sequence for Mta2 (NM_011842.2,616-634).
ctttctcggcagtttgaat

SEQ ID NO: 446033 - DNA, 19 bp, Mus musculus
  siRNA target sequence for Mta2 (NM_011842.2,665-683).
gcagcgtgactctcttgaa

SEQ ID NO: 446034 - DNA, 19 bp, Mus musculus
  siRNA target sequence for Mta2 (NM_011842.2,693-711).
catcttaaaccagtatcta

SEQ ID NO: 446035 - DNA, 19 bp, Mus musculus
  siRNA target sequence for Mta2 (NM_011842.2,762-780).
gacacttctggctgatcaa

SEQ ID NO: 446036 - DNA, 19 bp, Mus musculus
  siRNA target sequence for Mta2 (NM_011842.2,812-830).
ctgagatcccagatcgttt

SEQ ID NO: 446037 - DNA, 19 bp, Mus musculus
  siRNA target sequence for Mta2 (NM_011842.2,837-855).
gggagaatcagataatcga

SEQ ID NO: 446038 - DNA, 19 bp, Mus musculus
  siRNA target sequence for Mta2 (NM_011842.2,838-856).
ggagaatcagataatcgaa

SEQ ID NO: 446039 - DNA, 19 bp, Mus musculus
  siRNA target sequence for Mta2 (NM_011842.2,839-857).
gagaatcagataatcgaaa

SEQ ID NO: 446040 - DNA, 19 bp, Mus musculus
  siRNA target sequence for Mta2 (NM_011842.2,909-927).
ccggcagattgatcagttt

SEQ ID NO: 446041 - DNA, 19 bp, Mus musculus
  siRNA target sequence for Mta2 (NM_011842.2,1016-1034).
ctgctgcgtcccgagatat

SEQ ID NO: 446042 - DNA, 19 bp, Mus musculus
  siRNA target sequence for Mta2 (NM_011842.2,1048-1066).
gccatggataccttgcaaa

SEQ ID NO: 446043 - DNA, 19 bp, Mus musculus
  siRNA target sequence for Mta2 (NM_011842.2,1053-1071).
ggataccttgcaaaggaat

SEQ ID NO: 446044 - DNA, 19 bp, Mus musculus
  siRNA target sequence for Mta2 (NM_011842.2,1146-1164).
ggaatggtctgcttctgaa

SEQ ID NO: 446045 - DNA, 19 bp, Mus musculus
  siRNA target sequence for Mta2 (NM_011842.2,1194-1212).
gtacgggaaggatttcaat

SEQ ID NO: 446046 - DNA, 19 bp, Mus musculus
  siRNA target sequence for Mta2 (NM_011842.2,1199-1217).
ggaaggatttcaatgatat

SEQ ID NO: 446047 - DNA, 19 bp, Mus musculus
  siRNA target sequence for Mta2 (NM_011842.2,1249-1267).
gcaagcatagtccagtttt

SEQ ID NO: 446048 - DNA, 19 bp, Mus musculus
  siRNA target sequence for Mta2 (NM_011842.2,1258-1276).
gtccagttttattacatgt

SEQ ID NO: 446049 - DNA, 19 bp, Mus musculus
  siRNA target sequence for Mta2 (NM_011842.2,1283-1301).
ccacagaccggtatattca

SEQ ID NO: 446050 - DNA, 19 bp, Mus musculus
  siRNA target sequence for Mta2 (NM_011842.2,1347-1365).
ggtctacatccccacttat

SEQ ID NO: 446051 - DNA, 19 bp, Mus musculus
  siRNA target sequence for Mta2 (NM_011842.2,1373-1391).
caaaccctaaccagatcat

SEQ ID NO: 446052 - DNA, 19 bp, Mus musculus
  siRNA target sequence for Mta2 (NM_011842.2,1503-1521).
catgcagtgccgactttgt

SEQ ID NO: 446053 - DNA, 19 bp, Mus musculus
  siRNA target sequence for Mta2 (NM_011842.2,1520-1538).
gtgcttcctgttggattta

SEQ ID NO: 446054 - DNA, 19 bp, Mus musculus
  siRNA target sequence for Mta2 (NM_011842.2,1563-1581).
gacccctacccaacttgaa

SEQ ID NO: 446055 - DNA, 19 bp, Mus musculus
  siRNA target sequence for Mta2 (NM_011842.2,1609-1627).
cactcaagaggtcatttat

SEQ ID NO: 446056 - DNA, 19 bp, Mus musculus
  siRNA target sequence for Mta2 (NM_011842.2,1690-1708).
gctaagaacaggcaaactt

SEQ ID NO: 446057 - DNA, 19 bp, Mus musculus
  siRNA target sequence for Mta2 (NM_011842.2,1691-1709).
ctaagaacaggcaaacttt

SEQ ID NO: 446058 - DNA, 19 bp, Mus musculus
  siRNA target sequence for Mta2 (NM_011842.2,1790-1808).
gaccctatgcacctatcaa

SEQ ID NO: 446059 - DNA, 19 bp, Mus musculus
  siRNA target sequence for Mta2 (NM_011842.2,1832-1850).
gctcgatccgacttcctaa

SEQ ID NO: 446060 - DNA, 19 bp, Mus musculus
  siRNA target sequence for Mta2 (NM_011842.2,1855-1873).
gccaagacgccactgaaaa

SEQ ID NO: 446061 - DNA, 19 bp, Mus musculus
  siRNA target sequence for Mta2 (NM_011842.2,1899-1917).
ggcaactatcgtcaaagat

SEQ ID NO: 446062 - DNA, 19 bp, Mus musculus
  siRNA target sequence for Mta2 (NM_011842.2,1958-1976).
gtaccaagacaccaatcaa

SEQ ID NO: 446063 - DNA, 19 bp, Mus musculus
  siRNA target sequence for Mta2 (NM_011842.2,2083-2101).
ctggcttcagggattcgtt

SEQ ID NO: 446064 - DNA, 19 bp, Mus musculus
  siRNA target sequence for Mta2 (NM_011842.2,2153-2171).
ccaatccagtggtatttgt

SEQ ID NO: 446065 - DNA, 19 bp, Mus musculus
  siRNA target sequence for Mta3 (NM_054082.1,68-86).
cgggtcggagactacgttt

SEQ ID NO: 446066 - DNA, 19 bp, Mus musculus
  siRNA target sequence for Mta3 (NM_054082.1,70-88).
ggtcggagactacgtttat

SEQ ID NO: 446067 - DNA, 19 bp, Mus musculus
  siRNA target sequence for Mta3 (NM_054082.1,71-89).
gtcggagactacgtttatt

SEQ ID NO: 446068 - DNA, 19 bp, Mus musculus
  siRNA target sequence for Mta3 (NM_054082.1,79-97).
ctacgtttattttgagaat

SEQ ID NO: 446069 - DNA, 19 bp, Mus musculus
  siRNA target sequence for Mta3 (NM_054082.1,168-186).
caaaagtcgtctgctttta

SEQ ID NO: 446070 - DNA, 19 bp, Mus musculus
  siRNA target sequence for Mta3 (NM_054082.1,173-191).
gtcgtctgcttttacagaa

SEQ ID NO: 446071 - DNA, 19 bp, Mus musculus
  siRNA target sequence for Mta3 (NM_054082.1,223-241).
cgccgacaagcatgctaaa

SEQ ID NO: 446072 - DNA, 19 bp, Mus musculus
  siRNA target sequence for Mta3 (NM_054082.1,345-363).
cactgcctgcgacacatat

SEQ ID NO: 446073 - DNA, 19 bp, Mus musculus
  siRNA target sequence for Mta3 (NM_054082.1,347-365).
ctgcctgcgacacatatca

SEQ ID NO: 446074 - DNA, 19 bp, Mus musculus
  siRNA target sequence for Mta3 (NM_054082.1,378-396).
gcgtggccctgctgaatga

SEQ ID NO: 446075 - DNA, 19 bp, Mus musculus
  siRNA target sequence for Mta3 (NM_054082.1,399-417).
cagaatccgtgttgtcata

SEQ ID NO: 446076 - DNA, 19 bp, Mus musculus
  siRNA target sequence for Mta3 (NM_054082.1,457-475).
cgacccttcagtgaaaaca

SEQ ID NO: 446077 - DNA, 19 bp, Mus musculus
  siRNA target sequence for Mta3 (NM_054082.1,458-476).
gacccttcagtgaaaacat

SEQ ID NO: 446078 - DNA, 19 bp, Mus musculus
  siRNA target sequence for Mta3 (NM_054082.1,557-575).
gagagggaacaatcaaaat

SEQ ID NO: 446079 - DNA, 19 bp, Mus musculus
  siRNA target sequence for Mta3 (NM_054082.1,617-635).
cgacagattgaccagtttt

SEQ ID NO: 446080 - DNA, 19 bp, Mus musculus
  siRNA target sequence for Mta3 (NM_054082.1,622-640).
gattgaccagtttttagtt

SEQ ID NO: 446081 - DNA, 19 bp, Mus musculus
  siRNA target sequence for Mta3 (NM_054082.1,645-663).
cccgtgccgtgggaacatt

SEQ ID NO: 446082 - DNA, 19 bp, Mus musculus
  siRNA target sequence for Mta3 (NM_054082.1,646-664).
ccgtgccgtgggaacattt

SEQ ID NO: 446083 - DNA, 19 bp, Mus musculus
  siRNA target sequence for Mta3 (NM_054082.1,867-885).
ctgaagcctgcctattcga

SEQ ID NO: 446084 - DNA, 19 bp, Mus musculus
  siRNA target sequence for Mta3 (NM_054082.1,941-959).
ccgtggaaatccttgacta

SEQ ID NO: 446085 - DNA, 19 bp, Mus musculus
  siRNA target sequence for Mta3 (NM_054082.1,955-973).
gactagcatcattgaatat

SEQ ID NO: 446086 - DNA, 19 bp, Mus musculus
  siRNA target sequence for Mta3 (NM_054082.1,1055-1073).
gtgtacatcccgacttaca

SEQ ID NO: 446087 - DNA, 19 bp, Mus musculus
  siRNA target sequence for Mta3 (NM_054082.1,1063-1081).
cccgacttacaaaccaaat

SEQ ID NO: 446088 - DNA, 19 bp, Mus musculus
  siRNA target sequence for Mta3 (NM_054082.1,1108-1126).
caaggctggcactgtgaat

SEQ ID NO: 446089 - DNA, 19 bp, Mus musculus
  siRNA target sequence for Mta3 (NM_054082.1,1253-1271).
gcgacctgttggctgtatt

SEQ ID NO: 446090 - DNA, 19 bp, Mus musculus
  siRNA target sequence for Mta3 (NM_054082.1,1264-1282).
gctgtattggaaaaagtat

SEQ ID NO: 446091 - DNA, 19 bp, Mus musculus
  siRNA target sequence for Mta3 (NM_054082.1,1444-1462).
cttccttcgtactacgtat

SEQ ID NO: 446092 - DNA, 19 bp, Mus musculus
  siRNA target sequence for Mta3 (NM_054082.1,1448-1466).
cttcgtactacgtatttca

SEQ ID NO: 446093 - DNA, 19 bp, Mus musculus
  siRNA target sequence for Mta3 (NM_054082.1,1451-1469).
cgtactacgtatttcacaa

SEQ ID NO: 446094 - DNA, 19 bp, Mus musculus
  siRNA target sequence for Mta3 (NM_054082.1,1459-1477).
gtatttcacaaaaattgct

SEQ ID NO: 446095 - DNA, 19 bp, Mus musculus
  siRNA target sequence for Mta3 (NM_054082.1,1525-1543).
gccgtttgttgctattaat

SEQ ID NO: 446096 - DNA, 19 bp, Mus musculus
  siRNA target sequence for Mta3 (NM_054082.1,1526-1544).
ccgtttgttgctattaatt

SEQ ID NO: 446097 - DNA, 19 bp, Mus musculus
  siRNA target sequence for Mta3 (NM_054082.1,1527-1545).
cgtttgttgctattaatta

SEQ ID NO: 446098 - DNA, 19 bp, Mus musculus
  siRNA target sequence for Mta3 (NM_054082.1,1552-1570).
cattagggcagaatatgca

SEQ ID NO: 446099 - DNA, 19 bp, Mus musculus
  siRNA target sequence for Mta3 (NM_054082.1,1571-1589).
gacagacatgccgaacttt

SEQ ID NO: 446100 - DNA, 19 bp, Mus musculus
  siRNA target sequence for Mta3 (NM_054082.1,1573-1591).
cagacatgccgaactttct

SEQ ID NO: 446101 - DNA, 19 bp, Mus musculus
  siRNA target sequence for Mta3 (NM_054082.1,1611-1629).
gaagcaccaggaaaccttt

SEQ ID NO: 446102 - DNA, 19 bp, Mus musculus
  siRNA target sequence for Mta3 (NM_054082.1,1632-1650).
cgtgtatcattgggtattt

SEQ ID NO: 446103 - DNA, 19 bp, Mus musculus
  siRNA target sequence for Mta3 (NM_054082.1,1633-1651).
gtgtatcattgggtattta

SEQ ID NO: 446104 - DNA, 19 bp, Mus musculus
  siRNA target sequence for Mta3 (NM_054082.1,1654-1672).
gatccatcccgcaaagaaa

SEQ ID NO: 446105 - DNA, 19 bp, Mus musculus
  siRNA target sequence for Mta3 (NM_054082.1,1658-1676).
catcccgcaaagaaaccta

SEQ ID NO: 446106 - DNA, 19 bp, Mus musculus
  siRNA target sequence for Mta3 (NM_054082.1,1662-1680).
ccgcaaagaaacctaatgt

SEQ ID NO: 446107 - DNA, 19 bp, Mus musculus
  siRNA target sequence for Mta3 (NM_054082.1,1663-1681).
cgcaaagaaacctaatgta

SEQ ID NO: 446108 - DNA, 19 bp, Mus musculus
  siRNA target sequence for Mta3 (NM_054082.1,1727-1745).
ctcgccgctccgaatcaca

SEQ ID NO: 446109 - DNA, 19 bp, Mus musculus
  siRNA target sequence for Mta3 (NM_054082.1,1770-1788).
gaaactacagccatcacaa

SEQ ID NO: 446110 - DNA, 19 bp, Mus musculus
  siRNA target sequence for Mtf1 (NM_008636.2,139-157).
gtccagacgacaatatcat

SEQ ID NO: 446111 - DNA, 19 bp, Mus musculus
  siRNA target sequence for Mtf1 (NM_008636.2,141-159).
ccagacgacaatatcatct

SEQ ID NO: 446112 - DNA, 19 bp, Mus musculus
  siRNA target sequence for Mtf1 (NM_008636.2,238-256).
cctcatctggaactgttta

SEQ ID NO: 446113 - DNA, 19 bp, Mus musculus
  siRNA target sequence for Mtf1 (NM_008636.2,262-280).
ggaccactgttctcataga

SEQ ID NO: 446114 - DNA, 19 bp, Mus musculus
  siRNA target sequence for Mtf1 (NM_008636.2,623-641).
gtacaccttcgtctgtaat

SEQ ID NO: 446115 - DNA, 19 bp, Mus musculus
  siRNA target sequence for Mtf1 (NM_008636.2,805-823).
cgtttaactgtgaatctca

SEQ ID NO: 446116 - DNA, 19 bp, Mus musculus
  siRNA target sequence for Mtf1 (NM_008636.2,820-838).
ctcaaggctgcagcaaata

SEQ ID NO: 446117 - DNA, 19 bp, Mus musculus
  siRNA target sequence for Mtf1 (NM_008636.2,822-840).
caaggctgcagcaaatact

SEQ ID NO: 446118 - DNA, 19 bp, Mus musculus
  siRNA target sequence for Mtf1 (NM_008636.2,1219-1237).
caccagcaatcatctttga

SEQ ID NO: 446119 - DNA, 19 bp, Mus musculus
  siRNA target sequence for Mtf1 (NM_008636.2,1221-1239).
ccagcaatcatctttgaat

SEQ ID NO: 446120 - DNA, 19 bp, Mus musculus
  siRNA target sequence for Mtf1 (NM_008636.2,1224-1242).
gcaatcatctttgaatcaa

SEQ ID NO: 446121 - DNA, 19 bp, Mus musculus
  siRNA target sequence for Mtf1 (NM_008636.2,1294-1312).
ctgccttgattgacagttt

SEQ ID NO: 446122 - DNA, 19 bp, Mus musculus
  siRNA target sequence for Mtf1 (NM_008636.2,1296-1314).
gccttgattgacagtttta

SEQ ID NO: 446123 - DNA, 19 bp, Mus musculus
  siRNA target sequence for Mtf1 (NM_008636.2,1297-1315).
ccttgattgacagttttaa

SEQ ID NO: 446124 - DNA, 19 bp, Mus musculus
  siRNA target sequence for Mtf1 (NM_008636.2,1356-1374).
ggaaattcggcgtctttat

SEQ ID NO: 446125 - DNA, 19 bp, Mus musculus
  siRNA target sequence for Mtf1 (NM_008636.2,1607-1625).
catcgtaccaggactttct

SEQ ID NO: 446126 - DNA, 19 bp, Mus musculus
  siRNA target sequence for Mtf1 (NM_008636.2,1683-1701).
gccccaccacaaagtacta

SEQ ID NO: 446127 - DNA, 19 bp, Mus musculus
  siRNA target sequence for Mtf1 (NM_008636.2,1685-1703).
cccaccacaaagtactact

SEQ ID NO: 446128 - DNA, 19 bp, Mus musculus
  siRNA target sequence for Mtf1 (NM_008636.2,1743-1761).
gccaactctgtcctaacta

SEQ ID NO: 446129 - DNA, 19 bp, Mus musculus
  siRNA target sequence for Mtf1 (NM_008636.2,1744-1762).
ccaactctgtcctaactaa

SEQ ID NO: 446130 - DNA, 19 bp, Mus musculus
  siRNA target sequence for Mtf1 (NM_008636.2,1745-1763).
caactctgtcctaactaat

SEQ ID NO: 446131 - DNA, 19 bp, Mus musculus
  siRNA target sequence for Mtf1 (NM_008636.2,1748-1766).
ctctgtcctaactaataat

SEQ ID NO: 446132 - DNA, 19 bp, Mus musculus
  siRNA target sequence for Mtf1 (NM_008636.2,1823-1841).
catgggagaacagaactta

SEQ ID NO: 446133 - DNA, 19 bp, Mus musculus
  siRNA target sequence for Mtf1 (NM_008636.2,1865-1883).
cagttcaccacaaaaccaa

SEQ ID NO: 446134 - DNA, 19 bp, Mus musculus
  siRNA target sequence for Mtf1 (NM_008636.2,1986-2004).
gttcctgtgatcatcatca

SEQ ID NO: 446135 - DNA, 19 bp, Mus musculus
  siRNA target sequence for Myc (NM_010849.2,610-628).
cccctcaacgtgaacttca

SEQ ID NO: 446136 - DNA, 19 bp, Mus musculus
  siRNA target sequence for Myc (NM_010849.2,659-677).
ccgtacagccctatttcat

SEQ ID NO: 446137 - DNA, 19 bp, Mus musculus
  siRNA target sequence for Myc (NM_010849.2,661-679).
gtacagccctatttcatct

SEQ ID NO: 446138 - DNA, 19 bp, Mus musculus
  siRNA target sequence for Myc (NM_010849.2,678-696).
ctgcgacgaggaagagaat

SEQ ID NO: 446139 - DNA, 19 bp, Mus musculus
  siRNA target sequence for Myc (NM_010849.2,909-927).
gatgatgaccgagttactt

SEQ ID NO: 446140 - DNA, 19 bp, Mus musculus
  siRNA target sequence for Myc (NM_010849.2,1066-1084).
caggctgcgcgcaaagaca

SEQ ID NO: 446141 - DNA, 19 bp, Mus musculus
  siRNA target sequence for Myc (NM_010849.2,1646-1664).
cctcagacacggaggaaaa

SEQ ID NO: 446142 - DNA, 19 bp, Mus musculus
  siRNA target sequence for Myc (NM_010849.2,1713-1731).
gctgaagcgcagctttttt

SEQ ID NO: 446143 - DNA, 19 bp, Mus musculus
  siRNA target sequence for Myc (NM_010849.2,1739-1757).
gtgaccagatccctgaatt

SEQ ID NO: 446144 - DNA, 19 bp, Mus musculus
  siRNA target sequence for Myc (NM_010849.2,1782-1800).
ggtagtgatcctcaaaaaa

SEQ ID NO: 446145 - DNA, 19 bp, Mus musculus
  siRNA target sequence for Myc (NM_010849.2,1809-1827).
ctacatcctgtccattcaa

SEQ ID NO: 446146 - DNA, 19 bp, Mus musculus
  siRNA target sequence for Myc (NM_010849.2,1868-1886).
ggaaacgacgagaacagtt

SEQ ID NO: 446147 - DNA, 19 bp, Mus musculus
  siRNA target sequence for Myc (NM_010849.2,1874-1892).
gacgagaacagttgaaaca

SEQ ID NO: 446148 - DNA, 19 bp, Mus musculus
  siRNA target sequence for Myc (NM_010849.2,1877-1895).
gagaacagttgaaacacaa

SEQ ID NO: 446149 - DNA, 19 bp, Mus musculus
  siRNA target sequence for Myc (NM_010849.2,1899-1917).
cgaacagcttcgaaactct

SEQ ID NO: 446150 - DNA, 19 bp, Mus musculus
  siRNA target sequence for Mycs (NM_010850.1,1071-1089).
gcgccaacgccgtgacatt

SEQ ID NO: 446151 - DNA, 19 bp, Mus musculus
  siRNA target sequence for Mycs (NM_010850.1,1072-1090).
cgccaacgccgtgacatta

SEQ ID NO: 446152 - DNA, 19 bp, Mus musculus
  siRNA target sequence for Mycs (NM_010850.1,1073-1091).
gccaacgccgtgacattat

SEQ ID NO: 446153 - DNA, 19 bp, Mus musculus
  siRNA target sequence for Mycs (NM_010850.1,1129-1147).
gagctggtgcacaatgaga

SEQ ID NO: 446154 - DNA, 19 bp, Mus musculus
  siRNA target sequence for Myo3a (NM_148413.1,53-71).
ctgatacatgggaaatcat

SEQ ID NO: 446155 - DNA, 19 bp, Mus musculus
  siRNA target sequence for Myo3a (NM_148413.1,73-91).
gaaaccatcggcaaaggaa

SEQ ID NO: 446156 - DNA, 19 bp, Mus musculus
  siRNA target sequence for Myo3a (NM_148413.1,78-96).
catcggcaaaggaacttat

SEQ ID NO: 446157 - DNA, 19 bp, Mus musculus
  siRNA target sequence for Myo3a (NM_148413.1,108-126).
caaagtcctgaataagaaa

SEQ ID NO: 446158 - DNA, 19 bp, Mus musculus
  siRNA target sequence for Myo3a (NM_148413.1,133-151).
cagaaagcagcagtcaaaa

SEQ ID NO: 446159 - DNA, 19 bp, Mus musculus
  siRNA target sequence for Myo3a (NM_148413.1,140-158).
cagcagtcaaaattttgga

SEQ ID NO: 446160 - DNA, 19 bp, Mus musculus
  siRNA target sequence for Myo3a (NM_148413.1,187-205).
gaagcagagtataacatct

SEQ ID NO: 446161 - DNA, 19 bp, Mus musculus
  siRNA target sequence for Myo3a (NM_148413.1,227-245).
caaatgtggtcagattcta

SEQ ID NO: 446162 - DNA, 19 bp, Mus musculus
  siRNA target sequence for Myo3a (NM_148413.1,239-257).
gattctacgggatttactt

SEQ ID NO: 446163 - DNA, 19 bp, Mus musculus
  siRNA target sequence for Myo3a (NM_148413.1,243-261).
ctacgggatttactttaaa

SEQ ID NO: 446164 - DNA, 19 bp, Mus musculus
  siRNA target sequence for Myo3a (NM_148413.1,317-335).
gatcagtgactgatcttgt

SEQ ID NO: 446165 - DNA, 19 bp, Mus musculus
  siRNA target sequence for Myo3a (NM_148413.1,362-380).
gaatgagcgagcctgtaat

SEQ ID NO: 446166 - DNA, 19 bp, Mus musculus
  siRNA target sequence for Myo3a (NM_148413.1,442-460).
caccgtgatgtcaaaggaa

SEQ ID NO: 446167 - DNA, 19 bp, Mus musculus
  siRNA target sequence for Myo3a (NM_148413.1,445-463).
cgtgatgtcaaaggaaata

SEQ ID NO: 446168 - DNA, 19 bp, Mus musculus
  siRNA target sequence for Myo3a (NM_148413.1,485-503).
gtggagtaaaactagtaga

SEQ ID NO: 446169 - DNA, 19 bp, Mus musculus
  siRNA target sequence for Myo3a (NM_148413.1,615-633).
cacttacgatgctagatgt

SEQ ID NO: 446170 - DNA, 19 bp, Mus musculus
  siRNA target sequence for Myo3a (NM_148413.1,712-730).
gcactcttcaaaataccaa

SEQ ID NO: 446171 - DNA, 19 bp, Mus musculus
  siRNA target sequence for Myo3a (NM_148413.1,765-783).
gtggtccgcagagttcaat

SEQ ID NO: 446172 - DNA, 19 bp, Mus musculus
  siRNA target sequence for Myo3a (NM_148413.1,767-785).
ggtccgcagagttcaatga

SEQ ID NO: 446173 - DNA, 19 bp, Mus musculus
  siRNA target sequence for Myo3a (NM_148413.1,770-788).
ccgcagagttcaatgactt

SEQ ID NO: 446174 - DNA, 19 bp, Mus musculus
  siRNA target sequence for Myo3a (NM_148413.1,775-793).
gagttcaatgacttcatta

SEQ ID NO: 446175 - DNA, 19 bp, Mus musculus
  siRNA target sequence for Myo3a (NM_148413.1,798-816).
gtgcttgaccaaagattat

SEQ ID NO: 446176 - DNA, 19 bp, Mus musculus
  siRNA target sequence for Myo3a (NM_148413.1,830-848).
cagtgtcagatcttttgaa

SEQ ID NO: 446177 - DNA, 19 bp, Mus musculus
  siRNA target sequence for Myo3a (NM_148413.1,870-888).
cgagggcaaagatgtgata

SEQ ID NO: 446178 - DNA, 19 bp, Mus musculus
  siRNA target sequence for Myo3a (NM_148413.1,892-910).
caaaaacaactaatggaat

SEQ ID NO: 446179 - DNA, 19 bp, Mus musculus
  siRNA target sequence for Myo3a (NM_148413.1,948-966).
ggccaggcatgaacgaatt

SEQ ID NO: 446180 - DNA, 19 bp, Mus musculus
  siRNA target sequence for Myo3a (NM_148413.1,1082-1100).
gtcattccagagatcagat

SEQ ID NO: 446181 - DNA, 19 bp, Mus musculus
  siRNA target sequence for Myo3a (NM_148413.1,1091-1109).
gagatcagatccacattca

SEQ ID NO: 446182 - DNA, 19 bp, Mus musculus
  siRNA target sequence for Myo3a (NM_148413.1,1170-1188).
gctttctaggttgtatatt

SEQ ID NO: 446183 - DNA, 19 bp, Mus musculus
  siRNA target sequence for Myo3a (NM_148413.1,1182-1200).
gtatattggagcaaagaga

SEQ ID NO: 446184 - DNA, 19 bp, Mus musculus
  siRNA target sequence for Myo3a (NM_148413.1,1204-1222).
gccaacccacctcacattt

SEQ ID NO: 446185 - DNA, 19 bp, Mus musculus
  siRNA target sequence for Myo3a (NM_148413.1,1209-1227).
cccacctcacatttttgca

SEQ ID NO: 446186 - DNA, 19 bp, Mus musculus
  siRNA target sequence for Myo3a (NM_148413.1,1210-1228).
ccacctcacatttttgcaa

SEQ ID NO: 446187 - DNA, 19 bp, Mus musculus
  siRNA target sequence for Myo3a (NM_148413.1,1248-1266).
gtctatggtcacatataat

SEQ ID NO: 446188 - DNA, 19 bp, Mus musculus
  siRNA target sequence for Myo3a (NM_148413.1,1267-1285).
gcagaccagtgcatcgtta

SEQ ID NO: 446189 - DNA, 19 bp, Mus musculus
  siRNA target sequence for Myo3a (NM_148413.1,1268-1286).
cagaccagtgcatcgttat

SEQ ID NO: 446190 - DNA, 19 bp, Mus musculus
  siRNA target sequence for Myo3a (NM_148413.1,1270-1288).
gaccagtgcatcgttattt

SEQ ID NO: 446191 - DNA, 19 bp, Mus musculus
  siRNA target sequence for Myo3a (NM_148413.1,1272-1290).
ccagtgcatcgttatttct

SEQ ID NO: 446192 - DNA, 19 bp, Mus musculus
  siRNA target sequence for Myo3a (NM_148413.1,1348-1366).
gtgcttggaaaggctaata

SEQ ID NO: 446193 - DNA, 19 bp, Mus musculus
  siRNA target sequence for Myo3a (NM_148413.1,1354-1372).
ggaaaggctaataacagaa

SEQ ID NO: 446194 - DNA, 19 bp, Mus musculus
  siRNA target sequence for Myo3a (NM_148413.1,1374-1392).
cctgcaagagaagatttta

SEQ ID NO: 446195 - DNA, 19 bp, Mus musculus
  siRNA target sequence for Myo3a (NM_148413.1,1381-1399).
gagaagattttacaaatga

SEQ ID NO: 446196 - DNA, 19 bp, Mus musculus
  siRNA target sequence for Myo3a (NM_148413.1,1430-1448).
gcactattataaatgacaa

SEQ ID NO: 446197 - DNA, 19 bp, Mus musculus
  siRNA target sequence for Myo3a (NM_148413.1,1462-1480).
ggaaaatacttagaaatga

SEQ ID NO: 446198 - DNA, 19 bp, Mus musculus
  siRNA target sequence for Myo3a (NM_148413.1,1501-1519).
gtagttggggcacagattt

SEQ ID NO: 446199 - DNA, 19 bp, Mus musculus
  siRNA target sequence for Myo3a (NM_148413.1,1508-1526).
gggcacagatttctgaata

SEQ ID NO: 446200 - DNA, 19 bp, Mus musculus
  siRNA target sequence for Myo3a (NM_148413.1,1620-1638).
gaaactagctctttacaaa

SEQ ID NO: 446201 - DNA, 19 bp, Mus musculus
  siRNA target sequence for Myo3a (NM_148413.1,1650-1668).
caagccacccaggtactta

SEQ ID NO: 446202 - DNA, 19 bp, Mus musculus
  siRNA target sequence for Myo3a (NM_148413.1,1655-1673).
cacccaggtacttacaaaa

SEQ ID NO: 446203 - DNA, 19 bp, Mus musculus
  siRNA target sequence for Myo3a (NM_148413.1,1658-1676).
ccaggtacttacaaaatga

SEQ ID NO: 446204 - DNA, 19 bp, Mus musculus
  siRNA target sequence for Myo3a (NM_148413.1,1661-1679).
ggtacttacaaaatgacaa

SEQ ID NO: 446205 - DNA, 19 bp, Mus musculus
  siRNA target sequence for Myo3a (NM_148413.1,1695-1713).
ggacatgatgaacaatagt

SEQ ID NO: 446206 - DNA, 19 bp, Mus musculus
  siRNA target sequence for Myo3a (NM_148413.1,1696-1714).
gacatgatgaacaatagtt

SEQ ID NO: 446207 - DNA, 19 bp, Mus musculus
  siRNA target sequence for Myo3a (NM_148413.1,1716-1734).
ctataaatcccagtatgaa

SEQ ID NO: 446208 - DNA, 19 bp, Mus musculus
  siRNA target sequence for Myo3a (NM_148413.1,1777-1795).
caacttgcaagtgtatata

SEQ ID NO: 446209 - DNA, 19 bp, Mus musculus
  siRNA target sequence for Myo3a (NM_148413.1,1812-1830).
cttgaacgttggaaacatt

SEQ ID NO: 446210 - DNA, 19 bp, Mus musculus
  siRNA target sequence for Myo3a (NM_148413.1,1815-1833).
gaacgttggaaacattgaa

SEQ ID NO: 446211 - DNA, 19 bp, Mus musculus
  siRNA target sequence for Myo3a (NM_148413.1,1836-1854).
ctcctcggtggcaactgaa

SEQ ID NO: 446212 - DNA, 19 bp, Mus musculus
  siRNA target sequence for Myo3a (NM_148413.1,1841-1859).
cggtggcaactgaatacca

SEQ ID NO: 446213 - DNA, 19 bp, Mus musculus
  siRNA target sequence for Myo3a (NM_148413.1,1885-1903).
cacactgctctggaaaact

SEQ ID NO: 446214 - DNA, 19 bp, Mus musculus
  siRNA target sequence for Myo3a (NM_148413.1,1966-1984).
gtcactagaggagaaacaa

SEQ ID NO: 446215 - DNA, 19 bp, Mus musculus
  siRNA target sequence for Myo3a (NM_148413.1,2052-2070).
ccgtctctttagctgtata

SEQ ID NO: 446216 - DNA, 19 bp, Mus musculus
  siRNA target sequence for Myo3a (NM_148413.1,2056-2074).
ctctttagctgtatagtca

SEQ ID NO: 446217 - DNA, 19 bp, Mus musculus
  siRNA target sequence for Myo3a (NM_148413.1,2058-2076).
ctttagctgtatagtcaat

SEQ ID NO: 446218 - DNA, 19 bp, Mus musculus
  siRNA target sequence for Myo3a (NM_148413.1,2063-2081).
gctgtatagtcaattgtat

SEQ ID NO: 446219 - DNA, 19 bp, Mus musculus
  siRNA target sequence for Myo3a (NM_148413.1,2127-2145).
gctaaacatcggcattctt

SEQ ID NO: 446220 - DNA, 19 bp, Mus musculus
  siRNA target sequence for Myo3a (NM_148413.1,2191-2209).
ctgtgcattaacattgcaa

SEQ ID NO: 446221 - DNA, 19 bp, Mus musculus
  siRNA target sequence for Myo3a (NM_148413.1,2193-2211).
gtgcattaacattgcaaat

SEQ ID NO: 446222 - DNA, 19 bp, Mus musculus
  siRNA target sequence for Myo3a (NM_148413.1,2215-2233).
cagatccagtattatttta

SEQ ID NO: 446223 - DNA, 19 bp, Mus musculus
  siRNA target sequence for Myo3a (NM_148413.1,2244-2262).
gtttgcatgggaacagaat

SEQ ID NO: 446224 - DNA, 19 bp, Mus musculus
  siRNA target sequence for Myo3a (NM_148413.1,2284-2302).
gatgctagagttattgaat

SEQ ID NO: 446225 - DNA, 19 bp, Mus musculus
  siRNA target sequence for Myo3a (NM_148413.1,2288-2306).
ctagagttattgaatacga

SEQ ID NO: 446226 - DNA, 19 bp, Mus musculus
  siRNA target sequence for Myo3a (NM_148413.1,2318-2336).
ccctcttggacatgtttct

SEQ ID NO: 446227 - DNA, 19 bp, Mus musculus
  siRNA target sequence for Myo3a (NM_148413.1,2319-2337).
cctcttggacatgtttcta

SEQ ID NO: 446228 - DNA, 19 bp, Mus musculus
  siRNA target sequence for Myo3a (NM_148413.1,2400-2418).
ccagactctcatagaaaaa

SEQ ID NO: 446229 - DNA, 19 bp, Mus musculus
  siRNA target sequence for Myo3a (NM_148413.1,2401-2419).
cagactctcatagaaaaat

SEQ ID NO: 446230 - DNA, 19 bp, Mus musculus
  siRNA target sequence for Myo3a (NM_148413.1,2405-2423).
ctctcatagaaaaatttga

SEQ ID NO: 446231 - DNA, 19 bp, Mus musculus
  siRNA target sequence for Myo3a (NM_148413.1,2494-2512).
gcaggaaaagtcctctata

SEQ ID NO: 446232 - DNA, 19 bp, Mus musculus
  siRNA target sequence for Myo3a (NM_148413.1,2519-2537).
gtgggttcttggctaaaaa

SEQ ID NO: 446233 - DNA, 19 bp, Mus musculus
  siRNA target sequence for Myo3a (NM_148413.1,2574-2592).
gaggtcatccgaaaacagt

SEQ ID NO: 446234 - DNA, 19 bp, Mus musculus
  siRNA target sequence for Myo3a (NM_148413.1,2591-2609).
gtgtaattcggcaacttgt

SEQ ID NO: 446235 - DNA, 19 bp, Mus musculus
  siRNA target sequence for Myo3a (NM_148413.1,2654-2672).
ctaaaaacatagtaaacta

SEQ ID NO: 446236 - DNA, 19 bp, Mus musculus
  siRNA target sequence for Myo3a (NM_148413.1,2706-2724).
gaccaagggtgaaactaga

SEQ ID NO: 446237 - DNA, 19 bp, Mus musculus
  siRNA target sequence for Myo3a (NM_148413.1,2744-2762).
gtgaaaccaccaatgtgaa

SEQ ID NO: 446238 - DNA, 19 bp, Mus musculus
  siRNA target sequence for Myo3a (NM_148413.1,2750-2768).
ccaccaatgtgaaaacaca

SEQ ID NO: 446239 - DNA, 19 bp, Mus musculus
  siRNA target sequence for Myo3a (NM_148413.1,2751-2769).
caccaatgtgaaaacacaa

SEQ ID NO: 446240 - DNA, 19 bp, Mus musculus
  siRNA target sequence for Myo3a (NM_148413.1,2767-2785).
caaacggtctcatcctatt

SEQ ID NO: 446241 - DNA, 19 bp, Mus musculus
  siRNA target sequence for Myo3a (NM_148413.1,2772-2790).
ggtctcatcctattttaga

SEQ ID NO: 446242 - DNA, 19 bp, Mus musculus
  siRNA target sequence for Myo3a (NM_148413.1,2773-2791).
gtctcatcctattttagat

SEQ ID NO: 446243 - DNA, 19 bp, Mus musculus
  siRNA target sequence for Myo3a (NM_148413.1,2789-2807).
gatactccttgatggattt

SEQ ID NO: 446244 - DNA, 19 bp, Mus musculus
  siRNA target sequence for Myo3a (NM_148413.1,2868-2886).
gcgacaggcaagaaagtat

SEQ ID NO: 446245 - DNA, 19 bp, Mus musculus
  siRNA target sequence for Myo3a (NM_148413.1,2915-2933).
gttgcacagggattttgga

SEQ ID NO: 446246 - DNA, 19 bp, Mus musculus
  siRNA target sequence for Myo3a (NM_148413.1,2942-2960).
gaattcgaaggcttggtta

SEQ ID NO: 446247 - DNA, 19 bp, Mus musculus
  siRNA target sequence for Myo3a (NM_148413.1,2970-2988).
gatactcttcgctaacttt

SEQ ID NO: 446248 - DNA, 19 bp, Mus musculus
  siRNA target sequence for Myo3a (NM_148413.1,3089-3107).
gggctcttggaaaaacgaa

SEQ ID NO: 446249 - DNA, 19 bp, Mus musculus
  siRNA target sequence for Myo3a (NM_148413.1,3104-3122).
cgaaagtgttccttaaata

SEQ ID NO: 446250 - DNA, 19 bp, Mus musculus
  siRNA target sequence for Myo3a (NM_148413.1,3130-3148).
gtggaacagttgaatctaa

SEQ ID NO: 446251 - DNA, 19 bp, Mus musculus
  siRNA target sequence for Myo3a (NM_148413.1,3141-3159).
gaatctaatgcgaaaggaa

SEQ ID NO: 446252 - DNA, 19 bp, Mus musculus
  siRNA target sequence for Myo3a (NM_148413.1,3160-3178).
gctaccaacaagcttgttt

SEQ ID NO: 446253 - DNA, 19 bp, Mus musculus
  siRNA target sequence for Myo3a (NM_148413.1,3161-3179).
ctaccaacaagcttgtttt

SEQ ID NO: 446254 - DNA, 19 bp, Mus musculus
  siRNA target sequence for Myo3a (NM_148413.1,3242-3260).
ggaagagtagtgctgtaat

SEQ ID NO: 446255 - DNA, 19 bp, Mus musculus
  siRNA target sequence for Myo3a (NM_148413.1,3246-3264).
gagtagtgctgtaataata

SEQ ID NO: 446256 - DNA, 19 bp, Mus musculus
  siRNA target sequence for Myo3a (NM_148413.1,3248-3266).
gtagtgctgtaataataca

SEQ ID NO: 446257 - DNA, 19 bp, Mus musculus
  siRNA target sequence for Myo3a (NM_148413.1,3358-3376).
caggaattcgactacaaga

SEQ ID NO: 446258 - DNA, 19 bp, Mus musculus
  siRNA target sequence for Myo3a (NM_148413.1,3360-3378).
ggaattcgactacaagaaa

SEQ ID NO: 446259 - DNA, 19 bp, Mus musculus
  siRNA target sequence for Myo3a (NM_148413.1,3361-3379).
gaattcgactacaagaaaa

SEQ ID NO: 446260 - DNA, 19 bp, Mus musculus
  siRNA target sequence for Myo3a (NM_148413.1,3366-3384).
cgactacaagaaaaacttt

SEQ ID NO: 446261 - DNA, 19 bp, Mus musculus
  siRNA target sequence for Myo3a (NM_148413.1,3426-3444).
cgcagtgcctactaatgaa

SEQ ID NO: 446262 - DNA, 19 bp, Mus musculus
  siRNA target sequence for Myo3a (NM_148413.1,3427-3445).
gcagtgcctactaatgaat

SEQ ID NO: 446263 - DNA, 19 bp, Mus musculus
  siRNA target sequence for Myo3a (NM_148413.1,3489-3507).
gaagacagctcccttcata

SEQ ID NO: 446264 - DNA, 19 bp, Mus musculus
  siRNA target sequence for Myo3a (NM_148413.1,3513-3531).
gtcaaaggccaccaatgtt

SEQ ID NO: 446265 - DNA, 19 bp, Mus musculus
  siRNA target sequence for Myo3a (NM_148413.1,3521-3539).
ccaccaatgttgagagtaa

SEQ ID NO: 446266 - DNA, 19 bp, Mus musculus
  siRNA target sequence for Myo3a (NM_148413.1,3564-3582).
gaaaatgagcaatgtgtat

SEQ ID NO: 446267 - DNA, 19 bp, Mus musculus
  siRNA target sequence for Myo3a (NM_148413.1,3592-3610).
cagaatcaagagctatata

SEQ ID NO: 446268 - DNA, 19 bp, Mus musculus
  siRNA target sequence for Myo3a (NM_148413.1,3619-3637).
gacacttgggcagaagtaa

SEQ ID NO: 446269 - DNA, 19 bp, Mus musculus
  siRNA target sequence for Myo3a (NM_148413.1,3706-3724).
gctgtgatccagagttact

SEQ ID NO: 446270 - DNA, 19 bp, Mus musculus
  siRNA target sequence for Myo3a (NM_148413.1,3821-3839).
ggctgactgaggagattta

SEQ ID NO: 446271 - DNA, 19 bp, Mus musculus
  siRNA target sequence for Myo3a (NM_148413.1,3831-3849).
ggagatttacctgagaaaa

SEQ ID NO: 446272 - DNA, 19 bp, Mus musculus
  siRNA target sequence for Myo3a (NM_148413.1,3859-3877).
cctactcttagccaaaagt

SEQ ID NO: 446273 - DNA, 19 bp, Mus musculus
  siRNA target sequence for Myo3a (NM_148413.1,3869-3887).
gccaaaagtcagtctatca

SEQ ID NO: 446274 - DNA, 19 bp, Mus musculus
  siRNA target sequence for Myo3a (NM_148413.1,3870-3888).
ccaaaagtcagtctatcaa

SEQ ID NO: 446275 - DNA, 19 bp, Mus musculus
  siRNA target sequence for Myo3a (NM_148413.1,3876-3894).
gtcagtctatcaaaatgca

SEQ ID NO: 446276 - DNA, 19 bp, Mus musculus
  siRNA target sequence for Myo3a (NM_148413.1,4099-4117).
ctggcacctccctttaaga

SEQ ID NO: 446277 - DNA, 19 bp, Mus musculus
  siRNA target sequence for Myo3a (NM_148413.1,4101-4119).
ggcacctccctttaagaat

SEQ ID NO: 446278 - DNA, 19 bp, Mus musculus
  siRNA target sequence for Myo3a (NM_148413.1,4151-4169).
caaaaaccactcacaatgt

SEQ ID NO: 446279 - DNA, 19 bp, Mus musculus
  siRNA target sequence for Myo3a (NM_148413.1,4252-4270).
gaagcgtgggatttagcaa

SEQ ID NO: 446280 - DNA, 19 bp, Mus musculus
  siRNA target sequence for Myo3a (NM_148413.1,4256-4274).
cgtgggatttagcaatgtt

SEQ ID NO: 446281 - DNA, 19 bp, Mus musculus
  siRNA target sequence for Myo3a (NM_148413.1,4348-4366).
cagcaactgaagccatttt

SEQ ID NO: 446282 - DNA, 19 bp, Mus musculus
  siRNA target sequence for Myo3a (NM_148413.1,4361-4379).
cattttatctaggtatcta

SEQ ID NO: 446283 - DNA, 19 bp, Mus musculus
  siRNA target sequence for Myo3a (NM_148413.1,4381-4399).
cgccataaaccaatcaaca

SEQ ID NO: 446284 - DNA, 19 bp, Mus musculus
  siRNA target sequence for Myo3a (NM_148413.1,4395-4413).
caacagacatgtttctact

SEQ ID NO: 446285 - DNA, 19 bp, Mus musculus
  siRNA target sequence for Myo3a (NM_148413.1,4477-4495).
cctcggaaacccaaaacat

SEQ ID NO: 446286 - DNA, 19 bp, Mus musculus
  siRNA target sequence for Myo3a (NM_148413.1,4478-4496).
ctcggaaacccaaaacatt

SEQ ID NO: 446287 - DNA, 19 bp, Mus musculus
  siRNA target sequence for Myo3a (NM_148413.1,4507-4525).
gaagactccacatactact

SEQ ID NO: 446288 - DNA, 19 bp, Mus musculus
  siRNA target sequence for Myo3a (NM_148413.1,4579-4597).
caagggaagttattaggtt

SEQ ID NO: 446289 - DNA, 19 bp, Mus musculus
  siRNA target sequence for Myo3a (NM_148413.1,4603-4621).
gatttctattataaggaat

SEQ ID NO: 446290 - DNA, 19 bp, Mus musculus
  siRNA target sequence for Myo3a (NM_148413.1,4644-4662).
caaggcacatagctctaat

SEQ ID NO: 446291 - DNA, 19 bp, Mus musculus
  siRNA target sequence for Myo3a (NM_148413.1,4647-4665).
ggcacatagctctaatgca

SEQ ID NO: 446292 - DNA, 19 bp, Mus musculus
  siRNA target sequence for Myo3a (NM_148413.1,4648-4666).
gcacatagctctaatgcaa

SEQ ID NO: 446293 - DNA, 19 bp, Mus musculus
  siRNA target sequence for Myo3a (NM_148413.1,4702-4720).
cccattgagagtaatgaga

SEQ ID NO: 446294 - DNA, 19 bp, Mus musculus
  siRNA target sequence for Myst2 (NM_177619.2,407-425).
ccccaacgtgtctcatgat

SEQ ID NO: 446295 - DNA, 19 bp, Mus musculus
  siRNA target sequence for Myst2 (NM_177619.2,484-502).
ccaagcgacgtcgatttca

SEQ ID NO: 446296 - DNA, 19 bp, Mus musculus
  siRNA target sequence for Myst2 (NM_177619.2,493-511).
gtcgatttcacgaaagcta

SEQ ID NO: 446297 - DNA, 19 bp, Mus musculus
  siRNA target sequence for Myst2 (NM_177619.2,548-566).
ctctctaggacatcttaca

SEQ ID NO: 446298 - DNA, 19 bp, Mus musculus
  siRNA target sequence for Myst2 (NM_177619.2,567-585).
ggaaagcacgagagacatt

SEQ ID NO: 446299 - DNA, 19 bp, Mus musculus
  siRNA target sequence for Myst2 (NM_177619.2,595-613).
caggatgcccgctgtatca

SEQ ID NO: 446300 - DNA, 19 bp, Mus musculus
  siRNA target sequence for Myst2 (NM_177619.2,597-615).
ggatgcccgctgtatcata

SEQ ID NO: 446301 - DNA, 19 bp, Mus musculus
  siRNA target sequence for Myst2 (NM_177619.2,598-616).
gatgcccgctgtatcataa

SEQ ID NO: 446302 - DNA, 19 bp, Mus musculus
  siRNA target sequence for Myst2 (NM_177619.2,601-619).
gcccgctgtatcataacct

SEQ ID NO: 446303 - DNA, 19 bp, Mus musculus
  siRNA target sequence for Myst2 (NM_177619.2,652-670).
gacagctgcggtataagga

SEQ ID NO: 446304 - DNA, 19 bp, Mus musculus
  siRNA target sequence for Myst2 (NM_177619.2,786-804).
ctgacaagtgaatatgact

SEQ ID NO: 446305 - DNA, 19 bp, Mus musculus
  siRNA target sequence for Myst2 (NM_177619.2,788-806).
gacaagtgaatatgactta

SEQ ID NO: 446306 - DNA, 19 bp, Mus musculus
  siRNA target sequence for Myst2 (NM_177619.2,793-811).
gtgaatatgacttagatct

SEQ ID NO: 446307 - DNA, 19 bp, Mus musculus
  siRNA target sequence for Myst2 (NM_177619.2,860-878).
gcttcaaggccaaatcaca

SEQ ID NO: 446308 - DNA, 19 bp, Mus musculus
  siRNA target sequence for Myst2 (NM_177619.2,877-895).
cagagggaagcaacatgat

SEQ ID NO: 446309 - DNA, 19 bp, Mus musculus
  siRNA target sequence for Myst2 (NM_177619.2,879-897).
gagggaagcaacatgatta

SEQ ID NO: 446310 - DNA, 19 bp, Mus musculus
  siRNA target sequence for Myst2 (NM_177619.2,907-925).
cttttggccgctatgaact

SEQ ID NO: 446311 - DNA, 19 bp, Mus musculus
  siRNA target sequence for Myst2 (NM_177619.2,943-961).
ctccctatcctgaggaata

SEQ ID NO: 446312 - DNA, 19 bp, Mus musculus
  siRNA target sequence for Myst2 (NM_177619.2,967-985).
ggctgggacgtctctacat

SEQ ID NO: 446313 - DNA, 19 bp, Mus musculus
  siRNA target sequence for Myst2 (NM_177619.2,975-993).
cgtctctacatgtgtgaat

SEQ ID NO: 446314 - DNA, 19 bp, Mus musculus
  siRNA target sequence for Myst2 (NM_177619.2,990-1008).
gaattctgcttaaagtaca

SEQ ID NO: 446315 - DNA, 19 bp, Mus musculus
  siRNA target sequence for Myst2 (NM_177619.2,1061-1079).
cccccctggtgatgagatt

SEQ ID NO: 446316 - DNA, 19 bp, Mus musculus
  siRNA target sequence for Myst2 (NM_177619.2,1064-1082).
ccctggtgatgagatttat

SEQ ID NO: 446317 - DNA, 19 bp, Mus musculus
  siRNA target sequence for Myst2 (NM_177619.2,1173-1191).
gaccataagacgctatact

SEQ ID NO: 446318 - DNA, 19 bp, Mus musculus
  siRNA target sequence for Myst2 (NM_177619.2,1175-1193).
ccataagacgctatactat

SEQ ID NO: 446319 - DNA, 19 bp, Mus musculus
  siRNA target sequence for Myst2 (NM_177619.2,1181-1199).
gacgctatactatgatgta

SEQ ID NO: 446320 - DNA, 19 bp, Mus musculus
  siRNA target sequence for Myst2 (NM_177619.2,1183-1201).
cgctatactatgatgtaga

SEQ ID NO: 446321 - DNA, 19 bp, Mus musculus
  siRNA target sequence for Myst2 (NM_177619.2,1184-1202).
gctatactatgatgtagaa

SEQ ID NO: 446322 - DNA, 19 bp, Mus musculus
  siRNA target sequence for Myst2 (NM_177619.2,1203-1221).
cctttcctgttctacgtta

SEQ ID NO: 446323 - DNA, 19 bp, Mus musculus
  siRNA target sequence for Myst2 (NM_177619.2,1204-1222).
ctttcctgttctacgttat

SEQ ID NO: 446324 - DNA, 19 bp, Mus musculus
  siRNA target sequence for Myst2 (NM_177619.2,1223-1241).
gacagaagcggacaatact

SEQ ID NO: 446325 - DNA, 19 bp, Mus musculus
  siRNA target sequence for Myst2 (NM_177619.2,1267-1285).
ctaaggagaagaattcatt

SEQ ID NO: 446326 - DNA, 19 bp, Mus musculus
  siRNA target sequence for Myst2 (NM_177619.2,1344-1362).
gggaagatgctgatcgatt

SEQ ID NO: 446327 - DNA, 19 bp, Mus musculus
  siRNA target sequence for Myst2 (NM_177619.2,1345-1363).
ggaagatgctgatcgattt

SEQ ID NO: 446328 - DNA, 19 bp, Mus musculus
  siRNA target sequence for Myst2 (NM_177619.2,1349-1367).
gatgctgatcgatttcagt

SEQ ID NO: 446329 - DNA, 19 bp, Mus musculus
  siRNA target sequence for Myst2 (NM_177619.2,1358-1376).
cgatttcagttatttactt

SEQ ID NO: 446330 - DNA, 19 bp, Mus musculus
  siRNA target sequence for Myst2 (NM_177619.2,1567-1585).
cccttcagatgctcaagta

SEQ ID NO: 446331 - DNA, 19 bp, Mus musculus
  siRNA target sequence for Myst2 (NM_177619.2,1568-1586).
ccttcagatgctcaagtat

SEQ ID NO: 446332 - DNA, 19 bp, Mus musculus
  siRNA target sequence for Myst2 (NM_177619.2,1572-1590).
cagatgctcaagtattgga

SEQ ID NO: 446333 - DNA, 19 bp, Mus musculus
  siRNA target sequence for Myst2 (NM_177619.2,1598-1616).
gcacctagttttaaagaga

SEQ ID NO: 446334 - DNA, 19 bp, Mus musculus
  siRNA target sequence for Myst2 (NM_177619.2,1680-1698).
gatccaagctgcttaaaat

SEQ ID NO: 446335 - DNA, 19 bp, Mus musculus
  siRNA target sequence for Myst2 (NM_177619.2,1683-1701).
ccaagctgcttaaaatgga

SEQ ID NO: 446336 - DNA, 19 bp, Mus musculus
  siRNA target sequence for Myt1 (NM_008665.2,536-554).
ctccagacatcgaagctta

SEQ ID NO: 446337 - DNA, 19 bp, Mus musculus
  siRNA target sequence for Myt1 (NM_008665.2,696-714).
gtgaaggacgtctctgttt

SEQ ID NO: 446338 - DNA, 19 bp, Mus musculus
  siRNA target sequence for Myt1 (NM_008665.2,698-716).
gaaggacgtctctgtttca

SEQ ID NO: 446339 - DNA, 19 bp, Mus musculus
  siRNA target sequence for Myt1 (NM_008665.2,701-719).
ggacgtctctgtttcagat

SEQ ID NO: 446340 - DNA, 19 bp, Mus musculus
  siRNA target sequence for Myt1 (NM_008665.2,705-723).
gtctctgtttcagatgaat

SEQ ID NO: 446341 - DNA, 19 bp, Mus musculus
  siRNA target sequence for Myt1 (NM_008665.2,763-781).
gacaggaggagattcatca

SEQ ID NO: 446342 - DNA, 19 bp, Mus musculus
  siRNA target sequence for Myt1 (NM_008665.2,806-824).
cctcatcaagccccatttt

SEQ ID NO: 446343 - DNA, 19 bp, Mus musculus
  siRNA target sequence for Myt1 (NM_008665.2,952-970).
ccgtctcagtagctaagtt

SEQ ID NO: 446344 - DNA, 19 bp, Mus musculus
  siRNA target sequence for Myt1 (NM_008665.2,954-972).
gtctcagtagctaagttga

SEQ ID NO: 446345 - DNA, 19 bp, Mus musculus
  siRNA target sequence for Myt1 (NM_008665.2,973-991).
gccccactgttgttcatca

SEQ ID NO: 446346 - DNA, 19 bp, Mus musculus
  siRNA target sequence for Myt1 (NM_008665.2,1046-1064).
ctttatacagccagaagat

SEQ ID NO: 446347 - DNA, 19 bp, Mus musculus
  siRNA target sequence for Myt1 (NM_008665.2,1124-1142).
gaaggatatggttagtgaa

SEQ ID NO: 446348 - DNA, 19 bp, Mus musculus
  siRNA target sequence for Myt1 (NM_008665.2,1134-1152).
gttagtgaagagtcaagta

SEQ ID NO: 446349 - DNA, 19 bp, Mus musculus
  siRNA target sequence for Myt1 (NM_008665.2,1403-1421).
gctatctagtcctaaacct

SEQ ID NO: 446350 - DNA, 19 bp, Mus musculus
  siRNA target sequence for Myt1 (NM_008665.2,1523-1541).
gatgacccgtgggaattta

SEQ ID NO: 446351 - DNA, 19 bp, Mus musculus
  siRNA target sequence for Myt1 (NM_008665.2,1708-1726).
gggtggagaagcgtgaaat

SEQ ID NO: 446352 - DNA, 19 bp, Mus musculus
  siRNA target sequence for Myt1 (NM_008665.2,1804-1822).
gtccccacaaggatagaat

SEQ ID NO: 446353 - DNA, 19 bp, Mus musculus
  siRNA target sequence for Myt1 (NM_008665.2,1819-1837).
gaatccctccagagatctt

SEQ ID NO: 446354 - DNA, 19 bp, Mus musculus
  siRNA target sequence for Myt1 (NM_008665.2,1882-1900).
cgggccaaggccatgtgaa

SEQ ID NO: 446355 - DNA, 19 bp, Mus musculus
  siRNA target sequence for Myt1 (NM_008665.2,1910-1928).
caatactcacagaagttta

SEQ ID NO: 446356 - DNA, 19 bp, Mus musculus
  siRNA target sequence for Myt1 (NM_008665.2,2060-2078).
gcttgaggttccaccttat

SEQ ID NO: 446357 - DNA, 19 bp, Mus musculus
  siRNA target sequence for Myt1 (NM_008665.2,2158-2176).
cctttgactacgcaagttt

SEQ ID NO: 446358 - DNA, 19 bp, Mus musculus
  siRNA target sequence for Myt1 (NM_008665.2,2159-2177).
ctttgactacgcaagtttt

SEQ ID NO: 446359 - DNA, 19 bp, Mus musculus
  siRNA target sequence for Myt1 (NM_008665.2,2244-2262).
gccttccaatgcttcgatt

SEQ ID NO: 446360 - DNA, 19 bp, Mus musculus
  siRNA target sequence for Myt1 (NM_008665.2,2249-2267).
ccaatgcttcgattactct

SEQ ID NO: 446361 - DNA, 19 bp, Mus musculus
  siRNA target sequence for Myt1 (NM_008665.2,2255-2273).
cttcgattactctcatgat

SEQ ID NO: 446362 - DNA, 19 bp, Mus musculus
  siRNA target sequence for Myt1 (NM_008665.2,2433-2451).
catcgcaagcgggaaaaca

SEQ ID NO: 446363 - DNA, 19 bp, Mus musculus
  siRNA target sequence for Myt1 (NM_008665.2,2436-2454).
cgcaagcgggaaaacactt

SEQ ID NO: 446364 - DNA, 19 bp, Mus musculus
  siRNA target sequence for Myt1 (NM_008665.2,2437-2455).
gcaagcgggaaaacacttt

SEQ ID NO: 446365 - DNA, 19 bp, Mus musculus
  siRNA target sequence for Myt1 (NM_008665.2,2590-2608).
gggaccgtcctctagacta

SEQ ID NO: 446366 - DNA, 19 bp, Mus musculus
  siRNA target sequence for Myt1 (NM_008665.2,2654-2672).
gccagcagcacactctttt

SEQ ID NO: 446367 - DNA, 19 bp, Mus musculus
  siRNA target sequence for Myt1 (NM_008665.2,2737-2755).
gggaagtcaccctaaccaa

SEQ ID NO: 446368 - DNA, 19 bp, Mus musculus
  siRNA target sequence for Myt1 (NM_008665.2,2746-2764).
ccctaaccaactttaagct

SEQ ID NO: 446369 - DNA, 19 bp, Mus musculus
  siRNA target sequence for Myt1 (NM_008665.2,2753-2771).
caactttaagctgaagttt

SEQ ID NO: 446370 - DNA, 19 bp, Mus musculus
  siRNA target sequence for Myt1 (NM_008665.2,2823-2841).
gacggcagtggccatatca

SEQ ID NO: 446371 - DNA, 19 bp, Mus musculus
  siRNA target sequence for Myt1 (NM_008665.2,2834-2852).
ccatatcaccgggaactat

SEQ ID NO: 446372 - DNA, 19 bp, Mus musculus
  siRNA target sequence for Myt1 (NM_008665.2,2985-3003).
gcttcacaccggagtttgt

SEQ ID NO: 446373 - DNA, 19 bp, Mus musculus
  siRNA target sequence for Myt1 (NM_008665.2,3043-3061).
cgcctaccaaggatgacaa

SEQ ID NO: 446374 - DNA, 19 bp, Mus musculus
  siRNA target sequence for Myt1 (NM_008665.2,3066-3084).
gaccccgagttgatgaagt

SEQ ID NO: 446375 - DNA, 19 bp, Mus musculus
  siRNA target sequence for Myt1 (NM_008665.2,3211-3229).
cgtggaagtcgctgaagaa

SEQ ID NO: 446376 - DNA, 19 bp, Mus musculus
  siRNA target sequence for Myt1 (NM_008665.2,3212-3230).
gtggaagtcgctgaagaat

SEQ ID NO: 446377 - DNA, 19 bp, Mus musculus
  siRNA target sequence for Myt1 (NM_008665.2,3214-3232).
ggaagtcgctgaagaatga

SEQ ID NO: 446378 - DNA, 19 bp, Mus musculus
  siRNA target sequence for Myt1 (NM_008665.2,3291-3309).
ctcacccaccgaagtttgt

SEQ ID NO: 446379 - DNA, 19 bp, Mus musculus
  siRNA target sequence for Myt1 (NM_008665.2,3432-3450).
caggagatacgagacttaa

SEQ ID NO: 446380 - DNA, 19 bp, Mus musculus
  siRNA target sequence for Myt1 (NM_008665.2,3434-3452).
ggagatacgagacttaaat

SEQ ID NO: 446381 - DNA, 19 bp, Mus musculus
  siRNA target sequence for Myt1 (NM_008665.2,3444-3462).
gacttaaatgagtccaatt

SEQ ID NO: 446382 - DNA, 19 bp, Mus musculus
  siRNA target sequence for Myt1 (NM_008665.2,3570-3588).
gccctgtttctggaattgt

SEQ ID NO: 446383 - DNA, 19 bp, Mus musculus
  siRNA target sequence for Myt1 (NM_008665.2,3636-3654).
ccacacatggaaccaatat

SEQ ID NO: 446384 - DNA, 19 bp, Mus musculus
  siRNA target sequence for Myt1 (NM_008665.2,3648-3666).
ccaatatgtgaacagaatt

SEQ ID NO: 446385 - DNA, 19 bp, Mus musculus
  siRNA target sequence for Myt1l (NM_008666.1,847-865).
gtcacgtcagtggcaaata

SEQ ID NO: 446386 - DNA, 19 bp, Mus musculus
  siRNA target sequence for Myt1l (NM_008666.1,867-885).
gcacgacacagaagtgtat

SEQ ID NO: 446387 - DNA, 19 bp, Mus musculus
  siRNA target sequence for Myt1l (NM_008666.1,868-886).
cacgacacagaagtgtata

SEQ ID NO: 446388 - DNA, 19 bp, Mus musculus
  siRNA target sequence for Myt1l (NM_008666.1,888-906).
ggttgtcccttggctaaaa

SEQ ID NO: 446389 - DNA, 19 bp, Mus musculus
  siRNA target sequence for Myt1l (NM_008666.1,889-907).
gttgtcccttggctaaaaa

SEQ ID NO: 446390 - DNA, 19 bp, Mus musculus
  siRNA target sequence for Myt1l (NM_008666.1,942-960).
gctcccaagcgaaaaccat

SEQ ID NO: 446391 - DNA, 19 bp, Mus musculus
  siRNA target sequence for Myt1l (NM_008666.1,943-961).
ctcccaagcgaaaaccatt

SEQ ID NO: 446392 - DNA, 19 bp, Mus musculus
  siRNA target sequence for Myt1l (NM_008666.1,947-965).
caagcgaaaaccatttgca

SEQ ID NO: 446393 - DNA, 19 bp, Mus musculus
  siRNA target sequence for Myt1l (NM_008666.1,963-981).
gcagtaaaagcagatagtt

SEQ ID NO: 446394 - DNA, 19 bp, Mus musculus
  siRNA target sequence for Myt1l (NM_008666.1,982-1000).
cctcagtagacgaatgtta

SEQ ID NO: 446395 - DNA, 19 bp, Mus musculus
  siRNA target sequence for Myt1l (NM_008666.1,983-1001).
ctcagtagacgaatgttat

SEQ ID NO: 446396 - DNA, 19 bp, Mus musculus
  siRNA target sequence for Myt1l (NM_008666.1,985-1003).
cagtagacgaatgttatga

SEQ ID NO: 446397 - DNA, 19 bp, Mus musculus
  siRNA target sequence for Myt1l (NM_008666.1,987-1005).
gtagacgaatgttatgaga

SEQ ID NO: 446398 - DNA, 19 bp, Mus musculus
  siRNA target sequence for Myt1l (NM_008666.1,1244-1262).
ccatcaaatgagttgtact

SEQ ID NO: 446399 - DNA, 19 bp, Mus musculus
  siRNA target sequence for Myt1l (NM_008666.1,1255-1273).
gttgtactcgaataatgca

SEQ ID NO: 446400 - DNA, 19 bp, Mus musculus
  siRNA target sequence for Myt1l (NM_008666.1,1328-1346).
ggtagctaagtcgctatta

SEQ ID NO: 446401 - DNA, 19 bp, Mus musculus
  siRNA target sequence for Myt1l (NM_008666.1,1329-1347).
gtagctaagtcgctattaa

SEQ ID NO: 446402 - DNA, 19 bp, Mus musculus
  siRNA target sequence for Myt1l (NM_008666.1,1333-1351).
ctaagtcgctattaaatct

SEQ ID NO: 446403 - DNA, 19 bp, Mus musculus
  siRNA target sequence for Myt1l (NM_008666.1,1398-1416).
gagatgaacagcaatacct

SEQ ID NO: 446404 - DNA, 19 bp, Mus musculus
  siRNA target sequence for Myt1l (NM_008666.1,1406-1424).
cagcaatacctccaatagt

SEQ ID NO: 446405 - DNA, 19 bp, Mus musculus
  siRNA target sequence for Myt1l (NM_008666.1,1408-1426).
gcaatacctccaatagtct

SEQ ID NO: 446406 - DNA, 19 bp, Mus musculus
  siRNA target sequence for Myt1l (NM_008666.1,1423-1441).
gtctggaggacgatagtga

SEQ ID NO: 446407 - DNA, 19 bp, Mus musculus
  siRNA target sequence for Myt1l (NM_008666.1,1548-1566).
gttgtgctatcagagaata

SEQ ID NO: 446408 - DNA, 19 bp, Mus musculus
  siRNA target sequence for Myt1l (NM_008666.1,1551-1569).
gtgctatcagagaatatca

SEQ ID NO: 446409 - DNA, 19 bp, Mus musculus
  siRNA target sequence for Myt1l (NM_008666.1,1553-1571).
gctatcagagaatatcagt

SEQ ID NO: 446410 - DNA, 19 bp, Mus musculus
  siRNA target sequence for Myt1l (NM_008666.1,1568-1586).
cagtgacagaagttatgct

SEQ ID NO: 446411 - DNA, 19 bp, Mus musculus
  siRNA target sequence for Myt1l (NM_008666.1,1599-1617).
cagcaggacagtagaaata

SEQ ID NO: 446412 - DNA, 19 bp, Mus musculus
  siRNA target sequence for Myt1l (NM_008666.1,1849-1867).
ggagctactcggatatgat

SEQ ID NO: 446413 - DNA, 19 bp, Mus musculus
  siRNA target sequence for Myt1l (NM_008666.1,1858-1876).
cggatatgatgaaccttat

SEQ ID NO: 446414 - DNA, 19 bp, Mus musculus
  siRNA target sequence for Myt1l (NM_008666.1,1942-1960).
gtcatgagagggatgatga

SEQ ID NO: 446415 - DNA, 19 bp, Mus musculus
  siRNA target sequence for Myt1l (NM_008666.1,2105-2123).
ggataacctgagatcctat

SEQ ID NO: 446416 - DNA, 19 bp, Mus musculus
  siRNA target sequence for Myt1l (NM_008666.1,2174-2192).
cagtgacagccatgtcaaa

SEQ ID NO: 446417 - DNA, 19 bp, Mus musculus
  siRNA target sequence for Myt1l (NM_008666.1,2307-2325).
ggatgcccgcacaaagata

SEQ ID NO: 446418 - DNA, 19 bp, Mus musculus
  siRNA target sequence for Myt1l (NM_008666.1,2326-2344).
gggtccctccagaaattct

SEQ ID NO: 446419 - DNA, 19 bp, Mus musculus
  siRNA target sequence for Myt1l (NM_008666.1,2327-2345).
ggtccctccagaaattctt

SEQ ID NO: 446420 - DNA, 19 bp, Mus musculus
  siRNA target sequence for Myt1l (NM_008666.1,2389-2407).
cagggcgagggcatgtgaa

SEQ ID NO: 446421 - DNA, 19 bp, Mus musculus
  siRNA target sequence for Myt1l (NM_008666.1,2391-2409).
gggcgagggcatgtgaata

SEQ ID NO: 446422 - DNA, 19 bp, Mus musculus
  siRNA target sequence for Myt1l (NM_008666.1,2394-2412).
cgagggcatgtgaatagca

SEQ ID NO: 446423 - DNA, 19 bp, Mus musculus
  siRNA target sequence for Myt1l (NM_008666.1,2497-2515).
gtgatgtgtccaaatccaa

SEQ ID NO: 446424 - DNA, 19 bp, Mus musculus
  siRNA target sequence for Myt1l (NM_008666.1,2539-2557).
ggccaatgtgctttgtcaa

SEQ ID NO: 446425 - DNA, 19 bp, Mus musculus
  siRNA target sequence for Myt1l (NM_008666.1,2572-2590).
ctcagtatggctacagaaa

SEQ ID NO: 446426 - DNA, 19 bp, Mus musculus
  siRNA target sequence for Myt1l (NM_008666.1,2668-2686).
gttacgacaaccatactta

SEQ ID NO: 446427 - DNA, 19 bp, Mus musculus
  siRNA target sequence for Myt1l (NM_008666.1,2678-2696).
ccatacttatggcaaaaga

SEQ ID NO: 446428 - DNA, 19 bp, Mus musculus
  siRNA target sequence for Myt1l (NM_008666.1,2724-2742).
gacatatcccccaaaggat

SEQ ID NO: 446429 - DNA, 19 bp, Mus musculus
  siRNA target sequence for Myt1l (NM_008666.1,2726-2744).
catatcccccaaaggatat

SEQ ID NO: 446430 - DNA, 19 bp, Mus musculus
  siRNA target sequence for Myt1l (NM_008666.1,2938-2956).
ccacacgttgtcgtgaaat

SEQ ID NO: 446431 - DNA, 19 bp, Mus musculus
  siRNA target sequence for Myt1l (NM_008666.1,3218-3236).
ggatgagcccaaagagatt

SEQ ID NO: 446432 - DNA, 19 bp, Mus musculus
  siRNA target sequence for Myt1l (NM_008666.1,3330-3348).
cagtgcaaggaaagcaaaa

SEQ ID NO: 446433 - DNA, 19 bp, Mus musculus
  siRNA target sequence for Myt1l (NM_008666.1,3381-3399).
gcggacaaaagcattcgaa

SEQ ID NO: 446434 - DNA, 19 bp, Mus musculus
  siRNA target sequence for Myt1l (NM_008666.1,3820-3838).
ccacatcagcaatgaagaa

SEQ ID NO: 446435 - DNA, 19 bp, Mus musculus
  siRNA target sequence for Myt1l (NM_008666.1,3853-3871).
gagaacagatgttgactat

SEQ ID NO: 446436 - DNA, 19 bp, Mus musculus
  siRNA target sequence for Myt1l (NM_008666.1,3880-3898).
gagccagcaacggtataga

SEQ ID NO: 446437 - DNA, 19 bp, Mus musculus
  siRNA target sequence for Myt1l (NM_008666.1,3882-3900).
gccagcaacggtatagaaa

SEQ ID NO: 446438 - DNA, 19 bp, Mus musculus
  siRNA target sequence for Myt1l (NM_008666.1,3883-3901).
ccagcaacggtatagaaaa

SEQ ID NO: 446439 - DNA, 19 bp, Mus musculus
  siRNA target sequence for Myt1l (NM_008666.1,3886-3904).
gcaacggtatagaaaatga

SEQ ID NO: 446440 - DNA, 19 bp, Mus musculus
  siRNA target sequence for Myt1l (NM_008666.1,3887-3905).
caacggtatagaaaatgat

SEQ ID NO: 446441 - DNA, 19 bp, Mus musculus
  siRNA target sequence for Myt1l (NM_008666.1,4164-4182).
gatgcttacgtgactactt

SEQ ID NO: 446442 - DNA, 19 bp, Mus musculus
  siRNA target sequence for Myt1l (NM_008666.1,4177-4195).
ctactttgacggaaatgta

SEQ ID NO: 446443 - DNA, 19 bp, Mus musculus
  siRNA target sequence for Myt1l (NM_008666.1,4198-4216).
caaatcaagatcgttatca

SEQ ID NO: 446444 - DNA, 19 bp, Mus musculus
  siRNA target sequence for Nfat5 (NM_018823.1,309-327).
cagccctaccatttattct

SEQ ID NO: 446445 - DNA, 19 bp, Mus musculus
  siRNA target sequence for Nfat5 (NM_018823.1,339-357).
cgacagcaaggctatgcaa

SEQ ID NO: 446446 - DNA, 19 bp, Mus musculus
  siRNA target sequence for Nfat5 (NM_018823.1,376-394).
gccgtgggggtaagtaaca

SEQ ID NO: 446447 - DNA, 19 bp, Mus musculus
  siRNA target sequence for Nfat5 (NM_018823.1,378-396).
cgtgggggtaagtaacaga

SEQ ID NO: 446448 - DNA, 19 bp, Mus musculus
  siRNA target sequence for Nfat5 (NM_018823.1,400-418).
gtaagtgaaaagcagttaa

SEQ ID NO: 446449 - DNA, 19 bp, Mus musculus
  siRNA target sequence for Nfat5 (NM_018823.1,411-429).
gcagttaaccggtaacaca

SEQ ID NO: 446450 - DNA, 19 bp, Mus musculus
  siRNA target sequence for Nfat5 (NM_018823.1,451-469).
ccgaagaggcacacagttt

SEQ ID NO: 446451 - DNA, 19 bp, Mus musculus
  siRNA target sequence for Nfat5 (NM_018823.1,452-470).
cgaagaggcacacagtttt

SEQ ID NO: 446452 - DNA, 19 bp, Mus musculus
  siRNA target sequence for Nfat5 (NM_018823.1,460-478).
cacacagttttgtacatct

SEQ ID NO: 446453 - DNA, 19 bp, Mus musculus
  siRNA target sequence for Nfat5 (NM_018823.1,533-551).
ggtgtggattggaatctga

SEQ ID NO: 446454 - DNA, 19 bp, Mus musculus
  siRNA target sequence for Nfat5 (NM_018823.1,577-595).
gattccccctccaacttca

SEQ ID NO: 446455 - DNA, 19 bp, Mus musculus
  siRNA target sequence for Nfat5 (NM_018823.1,605-623).
gcaccagttcctacaatga

SEQ ID NO: 446456 - DNA, 19 bp, Mus musculus
  siRNA target sequence for Nfat5 (NM_018823.1,608-626).
ccagttcctacaatgataa

SEQ ID NO: 446457 - DNA, 19 bp, Mus musculus
  siRNA target sequence for Nfat5 (NM_018823.1,627-645).
cactgaggtacctcgtaaa

SEQ ID NO: 446458 - DNA, 19 bp, Mus musculus
  siRNA target sequence for Nfat5 (NM_018823.1,640-658).
cgtaaatcacgaaaacgaa

SEQ ID NO: 446459 - DNA, 19 bp, Mus musculus
  siRNA target sequence for Nfat5 (NM_018823.1,678-696).
ggtcaaacgacgagattgt

SEQ ID NO: 446460 - DNA, 19 bp, Mus musculus
  siRNA target sequence for Nfat5 (NM_018823.1,681-699).
caaacgacgagattgtgaa

SEQ ID NO: 446461 - DNA, 19 bp, Mus musculus
  siRNA target sequence for Nfat5 (NM_018823.1,685-703).
cgacgagattgtgaagaat

SEQ ID NO: 446462 - DNA, 19 bp, Mus musculus
  siRNA target sequence for Nfat5 (NM_018823.1,695-713).
gtgaagaatctaatatgga

SEQ ID NO: 446463 - DNA, 19 bp, Mus musculus
  siRNA target sequence for Nfat5 (NM_018823.1,762-780).
gcttaccacggacaacaaa

SEQ ID NO: 446464 - DNA, 19 bp, Mus musculus
  siRNA target sequence for Nfat5 (NM_018823.1,855-873).
cggacagtatccggttaaa

SEQ ID NO: 446465 - DNA, 19 bp, Mus musculus
  siRNA target sequence for Nfat5 (NM_018823.1,856-874).
ggacagtatccggttaaaa

SEQ ID NO: 446466 - DNA, 19 bp, Mus musculus
  siRNA target sequence for Nfat5 (NM_018823.1,943-961).
ggcagccgaggctctgtaa

SEQ ID NO: 446467 - DNA, 19 bp, Mus musculus
  siRNA target sequence for Nfat5 (NM_018823.1,944-962).
gcagccgaggctctgtaaa

SEQ ID NO: 446468 - DNA, 19 bp, Mus musculus
  siRNA target sequence for Nfat5 (NM_018823.1,949-967).
cgaggctctgtaaaagaca

SEQ ID NO: 446469 - DNA, 19 bp, Mus musculus
  siRNA target sequence for Nfat5 (NM_018823.1,993-1011).
gaagctggaaggccataat

SEQ ID NO: 446470 - DNA, 19 bp, Mus musculus
  siRNA target sequence for Nfat5 (NM_018823.1,1029-1047).
ggtatttgtgggcaatgat

SEQ ID NO: 446471 - DNA, 19 bp, Mus musculus
  siRNA target sequence for Nfat5 (NM_018823.1,1030-1048).
gtatttgtgggcaatgatt

SEQ ID NO: 446472 - DNA, 19 bp, Mus musculus
  siRNA target sequence for Nfat5 (NM_018823.1,1055-1073).
gagtaaaaccacatggatt

SEQ ID NO: 446473 - DNA, 19 bp, Mus musculus
  siRNA target sequence for Nfat5 (NM_018823.1,1074-1092).
ctatcaggcctgtagagta

SEQ ID NO: 446474 - DNA, 19 bp, Mus musculus
  siRNA target sequence for Nfat5 (NM_018823.1,1115-1133).
gcaaagaagtggacattga

SEQ ID NO: 446475 - DNA, 19 bp, Mus musculus
  siRNA target sequence for Nfat5 (NM_018823.1,1187-1205).
cggtggactgtgttggaat

SEQ ID NO: 446476 - DNA, 19 bp, Mus musculus
  siRNA target sequence for Nfat5 (NM_018823.1,1188-1206).
ggtggactgtgttggaata

SEQ ID NO: 446477 - DNA, 19 bp, Mus musculus
  siRNA target sequence for Nfat5 (NM_018823.1,1189-1207).
gtggactgtgttggaatat

SEQ ID NO: 446478 - DNA, 19 bp, Mus musculus
  siRNA target sequence for Nfat5 (NM_018823.1,1215-1233).
gaggaatgccgatgttgaa

SEQ ID NO: 446479 - DNA, 19 bp, Mus musculus
  siRNA target sequence for Nfat5 (NM_018823.1,1224-1242).
cgatgttgaagccagaatt

SEQ ID NO: 446480 - DNA, 19 bp, Mus musculus
  siRNA target sequence for Nfat5 (NM_018823.1,1249-1267).
gctggatctaagaaaaaga

SEQ ID NO: 446481 - DNA, 19 bp, Mus musculus
  siRNA target sequence for Nfat5 (NM_018823.1,1269-1287).
cactcgtgccagattggtt

SEQ ID NO: 446482 - DNA, 19 bp, Mus musculus
  siRNA target sequence for Nfat5 (NM_018823.1,1271-1289).
ctcgtgccagattggtttt

SEQ ID NO: 446483 - DNA, 19 bp, Mus musculus
  siRNA target sequence for Nfat5 (NM_018823.1,1280-1298).
gattggtttttcgagttaa

SEQ ID NO: 446484 - DNA, 19 bp, Mus musculus
  siRNA target sequence for Nfat5 (NM_018823.1,1285-1303).
gtttttcgagttaatatca

SEQ ID NO: 446485 - DNA, 19 bp, Mus musculus
  siRNA target sequence for Nfat5 (NM_018823.1,1489-1507).
gtttctgatgaaaactctt

SEQ ID NO: 446486 - DNA, 19 bp, Mus musculus
  siRNA target sequence for Nfat5 (NM_018823.1,1573-1591).
ccgtatcatgaccaacata

SEQ ID NO: 446487 - DNA, 19 bp, Mus musculus
  siRNA target sequence for Nfat5 (NM_018823.1,1574-1592).
cgtatcatgaccaacatat

SEQ ID NO: 446488 - DNA, 19 bp, Mus musculus
  siRNA target sequence for Nfat5 (NM_018823.1,1575-1593).
gtatcatgaccaacatata

SEQ ID NO: 446489 - DNA, 19 bp, Mus musculus
  siRNA target sequence for Nfat5 (NM_018823.1,1579-1597).
catgaccaacatataactt

SEQ ID NO: 446490 - DNA, 19 bp, Mus musculus
  siRNA target sequence for Nfat5 (NM_018823.1,1600-1618).
cctgtatcagtgggaatat

SEQ ID NO: 446491 - DNA, 19 bp, Mus musculus
  siRNA target sequence for Nfat5 (NM_018823.1,1601-1619).
ctgtatcagtgggaatata

SEQ ID NO: 446492 - DNA, 19 bp, Mus musculus
  siRNA target sequence for Nfat5 (NM_018823.1,1634-1652).
ctggaagatctcatgatgt

SEQ ID NO: 446493 - DNA, 19 bp, Mus musculus
  siRNA target sequence for Nfat5 (NM_018823.1,1645-1663).
catgatgttcagccattta

SEQ ID NO: 446494 - DNA, 19 bp, Mus musculus
  siRNA target sequence for Nfat5 (NM_018823.1,1775-1793).
ctggatgtaacgtagataa

SEQ ID NO: 446495 - DNA, 19 bp, Mus musculus
  siRNA target sequence for Nfat5 (NM_018823.1,1778-1796).
gatgtaacgtagataaggt

SEQ ID NO: 446496 - DNA, 19 bp, Mus musculus
  siRNA target sequence for Nfat5 (NM_018823.1,1794-1812).
ggtgactatccttcctaat

SEQ ID NO: 446497 - DNA, 19 bp, Mus musculus
  siRNA target sequence for Nfat5 (NM_018823.1,1815-1833).
cctgatcactccactcata

SEQ ID NO: 446498 - DNA, 19 bp, Mus musculus
  siRNA target sequence for Nfat5 (NM_018823.1,1818-1836).
gatcactccactcatatca

SEQ ID NO: 446499 - DNA, 19 bp, Mus musculus
  siRNA target sequence for Nfat5 (NM_018823.1,1828-1846).
ctcatatcaagcagtatga

SEQ ID NO: 446500 - DNA, 19 bp, Mus musculus
  siRNA target sequence for Nfat5 (NM_018823.1,1892-1910).
gatcttccccaatttttca

SEQ ID NO: 446501 - DNA, 19 bp, Mus musculus
  siRNA target sequence for Nfat5 (NM_018823.1,1935-1953).
ccagcaaaccttagaaact

SEQ ID NO: 446502 - DNA, 19 bp, Mus musculus
  siRNA target sequence for Nfat5 (NM_018823.1,1936-1954).
cagcaaaccttagaaacta

SEQ ID NO: 446503 - DNA, 19 bp, Mus musculus
  siRNA target sequence for Nfat5 (NM_018823.1,1995-2013).
gtcatcttcccacttaact

SEQ ID NO: 446504 - DNA, 19 bp, Mus musculus
  siRNA target sequence for Nfat5 (NM_018823.1,2004-2022).
ccacttaactcctgaaagt

SEQ ID NO: 446505 - DNA, 19 bp, Mus musculus
  siRNA target sequence for Nfat5 (NM_018823.1,2059-2077).
ccagagaccctgacaacta

SEQ ID NO: 446506 - DNA, 19 bp, Mus musculus
  siRNA target sequence for Nfat5 (NM_018823.1,2205-2223).
cacaatacagtcagataca

SEQ ID NO: 446507 - DNA, 19 bp, Mus musculus
  siRNA target sequence for Nfat5 (NM_018823.1,2216-2234).
cagatacagtggttaactt

SEQ ID NO: 446508 - DNA, 19 bp, Mus musculus
  siRNA target sequence for Nfat5 (NM_018823.1,2262-2280).
gcagcaatccccactacaa

SEQ ID NO: 446509 - DNA, 19 bp, Mus musculus
  siRNA target sequence for Nfat5 (NM_018823.1,2265-2283).
gcaatccccactacaagaa

SEQ ID NO: 446510 - DNA, 19 bp, Mus musculus
  siRNA target sequence for Nfat5 (NM_018823.1,2307-2325).
gataccatcaaatattttt

SEQ ID NO: 446511 - DNA, 19 bp, Mus musculus
  siRNA target sequence for Nfat5 (NM_018823.1,2311-2329).
ccatcaaatatttttccat

SEQ ID NO: 446512 - DNA, 19 bp, Mus musculus
  siRNA target sequence for Nfat5 (NM_018823.1,2345-2363).
gccagctccagagtactat

SEQ ID NO: 446513 - DNA, 19 bp, Mus musculus
  siRNA target sequence for Nfat5 (NM_018823.1,2411-2429).
ggagtggaagcgttgattt

SEQ ID NO: 446514 - DNA, 19 bp, Mus musculus
  siRNA target sequence for Nfat5 (NM_018823.1,2414-2432).
gtggaagcgttgatttggt

SEQ ID NO: 446515 - DNA, 19 bp, Mus musculus
  siRNA target sequence for Nfat5 (NM_018823.1,2446-2464).
gaggcacaacagcagttat

SEQ ID NO: 446516 - DNA, 19 bp, Mus musculus
  siRNA target sequence for Nfat5 (NM_018823.1,2449-2467).
gcacaacagcagttatcgt

SEQ ID NO: 446517 - DNA, 19 bp, Mus musculus
  siRNA target sequence for Nfat5 (NM_018823.1,2596-2614).
cacactagaccagataact

SEQ ID NO: 446518 - DNA, 19 bp, Mus musculus
  siRNA target sequence for Nfat5 (NM_018823.1,2600-2618).
ctagaccagataacttact

SEQ ID NO: 446519 - DNA, 19 bp, Mus musculus
  siRNA target sequence for Nfat5 (NM_018823.1,3014-3032).
ctggagcacaagcaaaaca

SEQ ID NO: 446520 - DNA, 19 bp, Mus musculus
  siRNA target sequence for Nfat5 (NM_018823.1,3037-3055).
cagaacagcgtctttcaga

SEQ ID NO: 446521 - DNA, 19 bp, Mus musculus
  siRNA target sequence for Nfat5 (NM_018823.1,3082-3100).
gacagccaacctcaagtaa

SEQ ID NO: 446522 - DNA, 19 bp, Mus musculus
  siRNA target sequence for Nfat5 (NM_018823.1,3091-3109).
cctcaagtaaacctctttt

SEQ ID NO: 446523 - DNA, 19 bp, Mus musculus
  siRNA target sequence for Nfat5 (NM_018823.1,3097-3115).
gtaaacctcttttcatcta

SEQ ID NO: 446524 - DNA, 19 bp, Mus musculus
  siRNA target sequence for Nfat5 (NM_018823.1,3151-3169).
cagcaacaagggaatagct

SEQ ID NO: 446525 - DNA, 19 bp, Mus musculus
  siRNA target sequence for Nfat5 (NM_018823.1,3219-3237).
gcagcagtcctctcattca

SEQ ID NO: 446526 - DNA, 19 bp, Mus musculus
  siRNA target sequence for Nfat5 (NM_018823.1,3328-3346).
cctattgtccacagtcaaa

SEQ ID NO: 446527 - DNA, 19 bp, Mus musculus
  siRNA target sequence for Nfat5 (NM_018823.1,3353-3371).
cagcatcctctgaacaact

SEQ ID NO: 446528 - DNA, 19 bp, Mus musculus
  siRNA target sequence for Nfat5 (NM_018823.1,3396-3414).
gaataccattgctgtgtta

SEQ ID NO: 446529 - DNA, 19 bp, Mus musculus
  siRNA target sequence for Nfat5 (NM_018823.1,3438-3456).
ccagcagtcacccaacata

SEQ ID NO: 446530 - DNA, 19 bp, Mus musculus
  siRNA target sequence for Nfat5 (NM_018823.1,3441-3459).
gcagtcacccaacatattt

SEQ ID NO: 446531 - DNA, 19 bp, Mus musculus
  siRNA target sequence for Nfat5 (NM_018823.1,3460-3478).
ctttcccaaagttctatca

SEQ ID NO: 446532 - DNA, 19 bp, Mus musculus
  siRNA target sequence for Nfat5 (NM_018823.1,3653-3671).
cctctcagcaagggttatt

SEQ ID NO: 446533 - DNA, 19 bp, Mus musculus
  siRNA target sequence for Nfat5 (NM_018823.1,3656-3674).
ctcagcaagggttatttca

SEQ ID NO: 446534 - DNA, 19 bp, Mus musculus
  siRNA target sequence for Nfat5 (NM_018823.1,3693-3711).
ctccctgcctcctaatcca

SEQ ID NO: 446535 - DNA, 19 bp, Mus musculus
  siRNA target sequence for Nfat5 (NM_018823.1,3695-3713).
ccctgcctcctaatccaat

SEQ ID NO: 446536 - DNA, 19 bp, Mus musculus
  siRNA target sequence for Nfat5 (NM_018823.1,3727-3745).
caaggtccaattttccaaa

SEQ ID NO: 446537 - DNA, 19 bp, Mus musculus
  siRNA target sequence for Nfat5 (NM_018823.1,3731-3749).
gtccaattttccaaacaca

SEQ ID NO: 446538 - DNA, 19 bp, Mus musculus
  siRNA target sequence for Nfat5 (NM_018823.1,3841-3859).
caacagcaacagagcattt

SEQ ID NO: 446539 - DNA, 19 bp, Mus musculus
  siRNA target sequence for Nfat5 (NM_018823.1,3854-3872).
gcattttattcagtaatca

SEQ ID NO: 446540 - DNA, 19 bp, Mus musculus
  siRNA target sequence for Nfat5 (NM_018823.1,3992-4010).
gtaatatggccccaatgaa

SEQ ID NO: 446541 - DNA, 19 bp, Mus musculus
  siRNA target sequence for Nfat5 (NM_018823.1,4023-4041).
gcccatgcaatttcagaat

SEQ ID NO: 446542 - DNA, 19 bp, Mus musculus
  siRNA target sequence for Nfat5 (NM_018823.1,4025-4043).
ccatgcaatttcagaatca

SEQ ID NO: 446543 - DNA, 19 bp, Mus musculus
  siRNA target sequence for Nfat5 (NM_018823.1,4049-4067).
cggtttcctcacttcagaa

SEQ ID NO: 446544 - DNA, 19 bp, Mus musculus
  siRNA target sequence for Nfat5 (NM_018823.1,4096-4114).
cagacctccttgttccata

SEQ ID NO: 446545 - DNA, 19 bp, Mus musculus
  siRNA target sequence for Nfat5 (NM_018823.1,4201-4219).
gcattgcaaaccagtataa

SEQ ID NO: 446546 - DNA, 19 bp, Mus musculus
  siRNA target sequence for Nfat5 (NM_018823.1,4206-4224).
gcaaaccagtataaaccaa

SEQ ID NO: 446547 - DNA, 19 bp, Mus musculus
  siRNA target sequence for Nfat5 (NM_018823.1,4306-4324).
caggctactttatttcaca

SEQ ID NO: 446548 - DNA, 19 bp, Mus musculus
  siRNA target sequence for Nfat5 (NM_018823.1,4326-4344).
cactacaggaggcacaata

SEQ ID NO: 446549 - DNA, 19 bp, Mus musculus
  siRNA target sequence for Nfat5 (NM_018823.1,4328-4346).
ctacaggaggcacaataaa

SEQ ID NO: 446550 - DNA, 19 bp, Mus musculus
  siRNA target sequence for Nfat5 (NM_018823.1,4331-4349).
caggaggcacaataaacca

SEQ ID NO: 446551 - DNA, 19 bp, Mus musculus
  siRNA target sequence for Nfat5 (NM_018823.1,4333-4351).
ggaggcacaataaaccaaa

SEQ ID NO: 446552 - DNA, 19 bp, Mus musculus
  siRNA target sequence for Nfat5 (NM_018823.1,4334-4352).
gaggcacaataaaccaaat

SEQ ID NO: 446553 - DNA, 19 bp, Mus musculus
  siRNA target sequence for Nfat5 (NM_018823.1,4392-4410).
gttcttatttggcattcaa

SEQ ID NO: 446554 - DNA, 19 bp, Mus musculus
  siRNA target sequence for Nfat5 (NM_018823.1,4479-4497).
gcagggccaaccacaaaat

SEQ ID NO: 446555 - DNA, 19 bp, Mus musculus
  siRNA target sequence for Nfatc1 (NM_016791.2,35-53).
ccggagttcgacttcgatt

SEQ ID NO: 446556 - DNA, 19 bp, Mus musculus
  siRNA target sequence for Nfatc1 (NM_016791.2,36-54).
cggagttcgacttcgattt

SEQ ID NO: 446557 - DNA, 19 bp, Mus musculus
  siRNA target sequence for Nfatc1 (NM_016791.2,93-111).
ccgcagaacactacagtta

SEQ ID NO: 446558 - DNA, 19 bp, Mus musculus
  siRNA target sequence for Nfatc1 (NM_016791.2,369-387).
gcagcggccagtttttcca

SEQ ID NO: 446559 - DNA, 19 bp, Mus musculus
  siRNA target sequence for Nfatc1 (NM_016791.2,511-529).
ctccagaagctgtaactct

SEQ ID NO: 446560 - DNA, 19 bp, Mus musculus
  siRNA target sequence for Nfatc1 (NM_016791.2,854-872).
gtcagtgtgaccgaagata

SEQ ID NO: 446561 - DNA, 19 bp, Mus musculus
  siRNA target sequence for Nfatc1 (NM_016791.2,960-978).
gtgatggggtccctatcaa

SEQ ID NO: 446562 - DNA, 19 bp, Mus musculus
  siRNA target sequence for Nfatc1 (NM_016791.2,1142-1160).
ccacaggcctcgtatcagt

SEQ ID NO: 446563 - DNA, 19 bp, Mus musculus
  siRNA target sequence for Nfatc1 (NM_016791.2,1176-1194).
ctctttccccgacatcata

SEQ ID NO: 446564 - DNA, 19 bp, Mus musculus
  siRNA target sequence for Nfatc1 (NM_016791.2,1225-1243).
gcagctcccgtcacattct

SEQ ID NO: 446565 - DNA, 19 bp, Mus musculus
  siRNA target sequence for Nfatc1 (NM_016791.2,1366-1384).
cggttacttggagaatgaa

SEQ ID NO: 446566 - DNA, 19 bp, Mus musculus
  siRNA target sequence for Nfatc1 (NM_016791.2,1531-1549).
cccgttgcttccagaaaat

SEQ ID NO: 446567 - DNA, 19 bp, Mus musculus
  siRNA target sequence for Nfatc1 (NM_016791.2,1817-1835).
gtgctgtctggccataact

SEQ ID NO: 446568 - DNA, 19 bp, Mus musculus
  siRNA target sequence for Nfatc1 (NM_016791.2,1964-1982).
cgcaaccagaggataacca

SEQ ID NO: 446569 - DNA, 19 bp, Mus musculus
  siRNA target sequence for Nfatc1 (NM_016791.2,2066-2084).
ggtaactctgtctttctaa

SEQ ID NO: 446570 - DNA, 19 bp, Mus musculus
  siRNA target sequence for Nfatc1 (NM_016791.2,2071-2089).
ctctgtctttctaacctta

SEQ ID NO: 446571 - DNA, 19 bp, Mus musculus
  siRNA target sequence for Nfatc1 (NM_016791.2,2105-2123).
ctgagaggaggtttttact

SEQ ID NO: 446572 - DNA, 19 bp, Mus musculus
  siRNA target sequence for Nfatc1 (NM_198429.1,2378-2396).
cctgccaatgttccaatta

SEQ ID NO: 446573 - DNA, 19 bp, Mus musculus
  siRNA target sequence for Nfatc1 (NM_198429.1,2381-2399).
gccaatgttccaattataa

SEQ ID NO: 446574 - DNA, 19 bp, Mus musculus
  siRNA target sequence for Nfatc1 (NM_198429.1,2382-2400).
ccaatgttccaattataaa

SEQ ID NO: 446575 - DNA, 19 bp, Mus musculus
  siRNA target sequence for Nfatc1 (NM_198429.1,2468-2486).
ctgccgaggccttactaca

SEQ ID NO: 446576 - DNA, 19 bp, Mus musculus
  siRNA target sequence for Nfatc2 (NM_010899.1,162-180).
ccatcctcttcgattatga

SEQ ID NO: 446577 - DNA, 19 bp, Mus musculus
  siRNA target sequence for Nfatc2 (NM_010899.1,166-184).
cctcttcgattatgactat

SEQ ID NO: 446578 - DNA, 19 bp, Mus musculus
  siRNA target sequence for Nfatc2 (NM_010899.1,181-199).
ctatctgaaccctatcgaa

SEQ ID NO: 446579 - DNA, 19 bp, Mus musculus
  siRNA target sequence for Nfatc2 (NM_010899.1,328-346).
cggagagccggatagtata

SEQ ID NO: 446580 - DNA, 19 bp, Mus musculus
  siRNA target sequence for Nfatc2 (NM_010899.1,347-365).
gggttccagaactttctga

SEQ ID NO: 446581 - DNA, 19 bp, Mus musculus
  siRNA target sequence for Nfatc2 (NM_010899.1,642-660).
cctgcgtctcacccaataa

SEQ ID NO: 446582 - DNA, 19 bp, Mus musculus
  siRNA target sequence for Nfatc2 (NM_010899.1,1024-1042).
cgggatcccctccaagata

SEQ ID NO: 446583 - DNA, 19 bp, Mus musculus
  siRNA target sequence for Nfatc2 (NM_010899.1,1360-1378).
cagccgtggcgctgtcaaa

SEQ ID NO: 446584 - DNA, 19 bp, Mus musculus
  siRNA target sequence for Nfatc2 (NM_010899.1,1438-1456).
ggggcttcagatcttcatt

SEQ ID NO: 446585 - DNA, 19 bp, Mus musculus
  siRNA target sequence for Nfatc2 (NM_010899.1,1530-1548).
ccaccacgagctatgagaa

SEQ ID NO: 446586 - DNA, 19 bp, Mus musculus
  siRNA target sequence for Nfatc2 (NM_010899.1,1948-1966).
ggaagctacggtggataaa

SEQ ID NO: 446587 - DNA, 19 bp, Mus musculus
  siRNA target sequence for Nfatc2 (NM_010899.1,1952-1970).
gctacggtggataaagaca

SEQ ID NO: 446588 - DNA, 19 bp, Mus musculus
  siRNA target sequence for Nfatc2 (NM_010899.1,1953-1971).
ctacggtggataaagacaa

SEQ ID NO: 446589 - DNA, 19 bp, Mus musculus
  siRNA target sequence for Nfatc2 (NM_010899.1,1974-1992).
gccagcctaacatgctttt

SEQ ID NO: 446590 - DNA, 19 bp, Mus musculus
  siRNA target sequence for Nfatc2 (NM_010899.1,1978-1996).
gcctaacatgctttttgtt

SEQ ID NO: 446591 - DNA, 19 bp, Mus musculus
  siRNA target sequence for Nfatc2 (NM_010899.1,2027-2045).
cgcgtgcccgtgaaagtca

SEQ ID NO: 446592 - DNA, 19 bp, Mus musculus
  siRNA target sequence for Nfatc2 (NM_010899.1,2028-2046).
gcgtgcccgtgaaagtcaa

SEQ ID NO: 446593 - DNA, 19 bp, Mus musculus
  siRNA target sequence for Nfatc2 (NM_010899.1,2033-2051).
cccgtgaaagtcaacttct

SEQ ID NO: 446594 - DNA, 19 bp, Mus musculus
  siRNA target sequence for Nfatc2 (NM_010899.1,2034-2052).
ccgtgaaagtcaacttcta

SEQ ID NO: 446595 - DNA, 19 bp, Mus musculus
  siRNA target sequence for Nfatc2 (NM_010899.1,2081-2099).
cagccacagcactttacct

SEQ ID NO: 446596 - DNA, 19 bp, Mus musculus
  siRNA target sequence for Nfatc2 (NM_010899.1,2128-2146).
gcccagcgatgagtatgaa

SEQ ID NO: 446597 - DNA, 19 bp, Mus musculus
  siRNA target sequence for Nfatc2 (NM_010899.1,2138-2156).
gagtatgaaccatctttga

SEQ ID NO: 446598 - DNA, 19 bp, Mus musculus
  siRNA target sequence for Nfatc2 (NM_010899.1,2180-2198).
ctggggagccagccatatt

SEQ ID NO: 446599 - DNA, 19 bp, Mus musculus
  siRNA target sequence for Nfatc2 (NM_010899.1,2809-2827).
catcaggaaggagttttca

SEQ ID NO: 446600 - DNA, 19 bp, Mus musculus
  siRNA target sequence for Nfatc2 (NM_010899.1,2829-2847).
gacctccctcccgaaatca

SEQ ID NO: 446601 - DNA, 19 bp, Mus musculus
  siRNA target sequence for Nfatc4 (NM_023699.1,158-176).
ggatgaggagctggaattt

SEQ ID NO: 446602 - DNA, 19 bp, Mus musculus
  siRNA target sequence for Nfatc4 (NM_023699.1,284-302).
ggaaccccttccttatggt

SEQ ID NO: 446603 - DNA, 19 bp, Mus musculus
  siRNA target sequence for Nfatc4 (NM_023699.1,454-472).
ggggtggtcgtgttcttga

SEQ ID NO: 446604 - DNA, 19 bp, Mus musculus
  siRNA target sequence for Nfatc4 (NM_023699.1,528-546).
ctagaggacacatctgaaa

SEQ ID NO: 446605 - DNA, 19 bp, Mus musculus
  siRNA target sequence for Nfatc4 (NM_023699.1,554-572).
ggacggctctcctagagat

SEQ ID NO: 446606 - DNA, 19 bp, Mus musculus
  siRNA target sequence for Nfatc4 (NM_023699.1,731-749).
ggagtctgaacttaatgaa

SEQ ID NO: 446607 - DNA, 19 bp, Mus musculus
  siRNA target sequence for Nfatc4 (NM_023699.1,1069-1087).
cccctggcccttttgacta

SEQ ID NO: 446608 - DNA, 19 bp, Mus musculus
  siRNA target sequence for Nfatc4 (NM_023699.1,1072-1090).
ctggcccttttgactatgt

SEQ ID NO: 446609 - DNA, 19 bp, Mus musculus
  siRNA target sequence for Nfatc4 (NM_023699.1,1106-1124).
cgagagcatccctcagaaa

SEQ ID NO: 446610 - DNA, 19 bp, Mus musculus
  siRNA target sequence for Nfatc4 (NM_023699.1,1363-1381).
ctttacccagccagtatga

SEQ ID NO: 446611 - DNA, 19 bp, Mus musculus
  siRNA target sequence for Nfatc4 (NM_023699.1,1715-1733).
cctgaagcttcgaaattca

SEQ ID NO: 446612 - DNA, 19 bp, Mus musculus
  siRNA target sequence for Nfatc4 (NM_023699.1,1721-1739).
gcttcgaaattcagacatt

SEQ ID NO: 446613 - DNA, 19 bp, Mus musculus
  siRNA target sequence for Nfatc4 (NM_023699.1,1981-1999).
ctaaagtggtgttcattga

SEQ ID NO: 446614 - DNA, 19 bp, Mus musculus
  siRNA target sequence for Nfatc4 (NM_023699.1,2002-2020).
ggggtcctgatggaaaact

SEQ ID NO: 446615 - DNA, 19 bp, Mus musculus
  siRNA target sequence for Nfatc4 (NM_023699.1,2160-2178).
cgcagtcctacccaaagtt

SEQ ID NO: 446616 - DNA, 19 bp, Mus musculus
  siRNA target sequence for Nfatc4 (NM_023699.1,2161-2179).
gcagtcctacccaaagttt

SEQ ID NO: 446617 - DNA, 19 bp, Mus musculus
  siRNA target sequence for Nfatc4 (NM_023699.1,2164-2182).
gtcctacccaaagtttcaa

SEQ ID NO: 446618 - DNA, 19 bp, Mus musculus
  siRNA target sequence for Nfatc4 (NM_023699.1,2329-2347).
cttatgagactccttatct

SEQ ID NO: 446619 - DNA, 19 bp, Mus musculus
  siRNA target sequence for Nfatc4 (NM_023699.1,2348-2366).
gtcagaaggctttggttat

SEQ ID NO: 446620 - DNA, 19 bp, Mus musculus
  siRNA target sequence for Nfatc4 (NM_023699.1,2464-2482).
gcctaccttcagtctcttt

SEQ ID NO: 446621 - DNA, 19 bp, Mus musculus
  siRNA target sequence for Nfatc4 (NM_023699.1,2771-2789).
ggaagtgagtgagatcatt

SEQ ID NO: 446622 - DNA, 19 bp, Mus musculus
  siRNA target sequence for Nfia (NM_010905.1,106-124).
gtttcatcctttcattgaa

SEQ ID NO: 446623 - DNA, 19 bp, Mus musculus
  siRNA target sequence for Nfia (NM_010905.1,176-194).
gcccgaaagcggaaatact

SEQ ID NO: 446624 - DNA, 19 bp, Mus musculus
  siRNA target sequence for Nfia (NM_010905.1,177-195).
cccgaaagcggaaatactt

SEQ ID NO: 446625 - DNA, 19 bp, Mus musculus
  siRNA target sequence for Nfia (NM_010905.1,179-197).
cgaaagcggaaatacttca

SEQ ID NO: 446626 - DNA, 19 bp, Mus musculus
  siRNA target sequence for Nfia (NM_010905.1,180-198).
gaaagcggaaatacttcaa

SEQ ID NO: 446627 - DNA, 19 bp, Mus musculus
  siRNA target sequence for Nfia (NM_010905.1,208-226).
gaagcgcatgtcgaaagaa

SEQ ID NO: 446628 - DNA, 19 bp, Mus musculus
  siRNA target sequence for Nfia (NM_010905.1,301-319).
ggccaagttacggaaagat

SEQ ID NO: 446629 - DNA, 19 bp, Mus musculus
  siRNA target sequence for Nfia (NM_010905.1,303-321).
ccaagttacggaaagatat

SEQ ID NO: 446630 - DNA, 19 bp, Mus musculus
  siRNA target sequence for Nfia (NM_010905.1,328-346).
cgagtaccgagaggatttt

SEQ ID NO: 446631 - DNA, 19 bp, Mus musculus
  siRNA target sequence for Nfia (NM_010905.1,334-352).
ccgagaggattttgttctt

SEQ ID NO: 446632 - DNA, 19 bp, Mus musculus
  siRNA target sequence for Nfia (NM_010905.1,335-353).
cgagaggattttgttctta

SEQ ID NO: 446633 - DNA, 19 bp, Mus musculus
  siRNA target sequence for Nfia (NM_010905.1,408-426).
gcaagatgcggagaattga

SEQ ID NO: 446634 - DNA, 19 bp, Mus musculus
  siRNA target sequence for Nfia (NM_010905.1,429-447).
gcctccgccaggcagataa

SEQ ID NO: 446635 - DNA, 19 bp, Mus musculus
  siRNA target sequence for Nfia (NM_010905.1,433-451).
ccgccaggcagataaagta

SEQ ID NO: 446636 - DNA, 19 bp, Mus musculus
  siRNA target sequence for Nfia (NM_010905.1,488-506).
ggtattccgctggaaagta

SEQ ID NO: 446637 - DNA, 19 bp, Mus musculus
  siRNA target sequence for Nfia (NM_010905.1,512-530).
ggcgagcgccttgtaaaga

SEQ ID NO: 446638 - DNA, 19 bp, Mus musculus
  siRNA target sequence for Nfia (NM_010905.1,514-532).
cgagcgccttgtaaagagt

SEQ ID NO: 446639 - DNA, 19 bp, Mus musculus
  siRNA target sequence for Nfia (NM_010905.1,529-547).
gagtccacagtgctctaat

SEQ ID NO: 446640 - DNA, 19 bp, Mus musculus
  siRNA target sequence for Nfia (NM_010905.1,632-650).
gattcaagtcaatctgaaa

SEQ ID NO: 446641 - DNA, 19 bp, Mus musculus
  siRNA target sequence for Nfia (NM_010905.1,755-773).
ctagtaagagtgtcacaaa

SEQ ID NO: 446642 - DNA, 19 bp, Mus musculus
  siRNA target sequence for Nfia (NM_010905.1,993-1011).
ccagtggatggcatgaagt

SEQ ID NO: 446643 - DNA, 19 bp, Mus musculus
  siRNA target sequence for Nfia (NM_010905.1,1118-1136).
catcaccgacctgtcatta

SEQ ID NO: 446644 - DNA, 19 bp, Mus musculus
  siRNA target sequence for Nfia (NM_010905.1,1548-1566).
gggatccaagctttgtaaa

SEQ ID NO: 446645 - DNA, 19 bp, Mus musculus
  siRNA target sequence for Nfia (NM_010905.1,1549-1567).
ggatccaagctttgtaaat

SEQ ID NO: 446646 - DNA, 19 bp, Mus musculus
  siRNA target sequence for Nfib (NM_008687.2,436-454).
ccgtgcaattgcctatact

SEQ ID NO: 446647 - DNA, 19 bp, Mus musculus
  siRNA target sequence for Nfib (NM_008687.2,470-488).
gctcgaaaacgcaagtact

SEQ ID NO: 446648 - DNA, 19 bp, Mus musculus
  siRNA target sequence for Nfib (NM_008687.2,471-489).
ctcgaaaacgcaagtactt

SEQ ID NO: 446649 - DNA, 19 bp, Mus musculus
  siRNA target sequence for Nfib (NM_008687.2,473-491).
cgaaaacgcaagtacttta

SEQ ID NO: 446650 - DNA, 19 bp, Mus musculus
  siRNA target sequence for Nfib (NM_008687.2,664-682).
gcacccgtgctgtgtctta

SEQ ID NO: 446651 - DNA, 19 bp, Mus musculus
  siRNA target sequence for Nfib (NM_008687.2,692-710).
gaccagaagggtaagatta

SEQ ID NO: 446652 - DNA, 19 bp, Mus musculus
  siRNA target sequence for Nfib (NM_008687.2,728-746).
cgacaggcagacaaagtct

SEQ ID NO: 446653 - DNA, 19 bp, Mus musculus
  siRNA target sequence for Nfib (NM_008687.2,806-824).
ggagagcgactcatgaagt

SEQ ID NO: 446654 - DNA, 19 bp, Mus musculus
  siRNA target sequence for Nfib (NM_008687.2,913-931).
cgtgcaggagcaagattct

SEQ ID NO: 446655 - DNA, 19 bp, Mus musculus
  siRNA target sequence for Nfib (NM_008687.2,922-940).
gcaagattctggacaatca

SEQ ID NO: 446656 - DNA, 19 bp, Mus musculus
  siRNA target sequence for Nfib (NM_008687.2,1009-1027).
cggagtcttcaatgtatca

SEQ ID NO: 446657 - DNA, 19 bp, Mus musculus
  siRNA target sequence for Nfib (NM_008687.2,1078-1096).
cttcccaatcggagaaatt

SEQ ID NO: 446658 - DNA, 19 bp, Mus musculus
  siRNA target sequence for Nfib (NM_008687.2,1107-1125).
catactatcatgacatgaa

SEQ ID NO: 446659 - DNA, 19 bp, Mus musculus
  siRNA target sequence for Nfib (NM_008687.2,1179-1197).
ccaaaactatatctataga

SEQ ID NO: 446660 - DNA, 19 bp, Mus musculus
  siRNA target sequence for Nfib (NM_008687.2,1228-1246).
cttttacccctctccaaat

SEQ ID NO: 446661 - DNA, 19 bp, Mus musculus
  siRNA target sequence for Nfib (NM_008687.2,1272-1290).
ggcatgaacgagatcaaga

SEQ ID NO: 446662 - DNA, 19 bp, Mus musculus
  siRNA target sequence for Nfib (NM_008687.2,1280-1298).
cgagatcaagatatgtctt

SEQ ID NO: 446663 - DNA, 19 bp, Mus musculus
  siRNA target sequence for Nfib (NM_008687.2,1355-1373).
gattcttccccaagattga

SEQ ID NO: 446664 - DNA, 19 bp, Mus musculus
  siRNA target sequence for Nfib (NM_008687.2,1415-1433).
gcgcacagtgtcatctcaa

SEQ ID NO: 446665 - DNA, 19 bp, Mus musculus
  siRNA target sequence for Nfib (NM_008687.2,1464-1482).
catttccgacgcaagctat

SEQ ID NO: 446666 - DNA, 19 bp, Mus musculus
  siRNA target sequence for Nfib (NM_008687.2,1493-1511).
gcaccttccagctacttct

SEQ ID NO: 446667 - DNA, 19 bp, Mus musculus
  siRNA target sequence for Nfib (NM_008687.2,1564-1582).
gaactacgtaccttcttat

SEQ ID NO: 446668 - DNA, 19 bp, Mus musculus
  siRNA target sequence for Nfic (NM_008688.2,310-328).
ccgagtgccgtgaagactt

SEQ ID NO: 446669 - DNA, 19 bp, Mus musculus
  siRNA target sequence for Nfic (NM_008688.2,541-559).
gtgtgcagccgcaccatat

SEQ ID NO: 446670 - DNA, 19 bp, Mus musculus
  siRNA target sequence for Nfic (NM_008688.2,777-795).
ggaaccggacccaacttct

SEQ ID NO: 446671 - DNA, 19 bp, Mus musculus
  siRNA target sequence for Nfic (NM_008688.2,985-1003).
gcaactggacggaagacat

SEQ ID NO: 446672 - DNA, 19 bp, Mus musculus
  siRNA target sequence for Nfic (NM_008688.2,1044-1062).
gacaaatctccattcaaca

SEQ ID NO: 446673 - DNA, 19 bp, Mus musculus
  siRNA target sequence for Nfic (NM_008688.2,1339-1357).
cacgtcccctgcaaacagt

SEQ ID NO: 446674 - DNA, 19 bp, Mus musculus
  siRNA target sequence for Nfix (NM_010906.1,617-635).
cacattggagtcacaatca

SEQ ID NO: 446675 - DNA, 19 bp, Mus musculus
  siRNA target sequence for Nfix (NM_010906.1,624-642).
gagtcacaatcaaagaact

SEQ ID NO: 446676 - DNA, 19 bp, Mus musculus
  siRNA target sequence for Nfix (NM_010906.1,675-693).
cggaatccggacaatcaga

SEQ ID NO: 446677 - DNA, 19 bp, Mus musculus
  siRNA target sequence for Nfix (NM_010906.1,676-694).
ggaatccggacaatcagat

SEQ ID NO: 446678 - DNA, 19 bp, Mus musculus
  siRNA target sequence for Nfix (NM_010906.1,677-695).
gaatccggacaatcagata

SEQ ID NO: 446679 - DNA, 19 bp, Mus musculus
  siRNA target sequence for Nfix (NM_010906.1,731-749).
ctgcccaacgggcacttaa

SEQ ID NO: 446680 - DNA, 19 bp, Mus musculus
  siRNA target sequence for Nfix (NM_010906.1,733-751).
gcccaacgggcacttaagt

SEQ ID NO: 446681 - DNA, 19 bp, Mus musculus
  siRNA target sequence for Nfix (NM_010906.1,734-752).
cccaacgggcacttaagtt

SEQ ID NO: 446682 - DNA, 19 bp, Mus musculus
  siRNA target sequence for Nfix (NM_010906.1,735-753).
ccaacgggcacttaagttt

SEQ ID NO: 446683 - DNA, 19 bp, Mus musculus
  siRNA target sequence for Nfix (NM_010906.1,830-848).
gcatcagggcccaacttct

SEQ ID NO: 446684 - DNA, 19 bp, Mus musculus
  siRNA target sequence for Nfix (NM_010906.1,867-885).
gccccagctactacaacat

SEQ ID NO: 446685 - DNA, 19 bp, Mus musculus
  siRNA target sequence for Nfix (NM_010906.1,870-888).
ccagctactacaacataaa

SEQ ID NO: 446686 - DNA, 19 bp, Mus musculus
  siRNA target sequence for Nfix (NM_010906.1,1130-1148).
cagtcgagcccgtatttca

SEQ ID NO: 446687 - DNA, 19 bp, Mus musculus
  siRNA target sequence for Nfix (NM_010906.1,1132-1150).
gtcgagcccgtatttcaca

SEQ ID NO: 446688 - DNA, 19 bp, Mus musculus
  siRNA target sequence for Nfix (NM_010906.1,1239-1257).
ccaccggacagcattcaca

SEQ ID NO: 446689 - DNA, 19 bp, Mus musculus
  siRNA target sequence for Nfix (NM_010906.1,1240-1258).
caccggacagcattcacaa

SEQ ID NO: 446690 - DNA, 19 bp, Mus musculus
  siRNA target sequence for Nfkb1 (NM_008689.1,343-361).
gctttgactcactcaatat

SEQ ID NO: 446691 - DNA, 19 bp, Mus musculus
  siRNA target sequence for Nfkb1 (NM_008689.1,344-362).
ctttgactcactcaatatt

SEQ ID NO: 446692 - DNA, 19 bp, Mus musculus
  siRNA target sequence for Nfkb1 (NM_008689.1,348-366).
gactcactcaatatttaat

SEQ ID NO: 446693 - DNA, 19 bp, Mus musculus
  siRNA target sequence for Nfkb1 (NM_008689.1,406-424).
ggcccataccttcaaatat

SEQ ID NO: 446694 - DNA, 19 bp, Mus musculus
  siRNA target sequence for Nfkb1 (NM_008689.1,408-426).
cccataccttcaaatatta

SEQ ID NO: 446695 - DNA, 19 bp, Mus musculus
  siRNA target sequence for Nfkb1 (NM_008689.1,410-428).
cataccttcaaatattaga

SEQ ID NO: 446696 - DNA, 19 bp, Mus musculus
  siRNA target sequence for Nfkb1 (NM_008689.1,524-542).
cctacccacaggtcaaaat

SEQ ID NO: 446697 - DNA, 19 bp, Mus musculus
  siRNA target sequence for Nfkb1 (NM_008689.1,525-543).
ctacccacaggtcaaaatt

SEQ ID NO: 446698 - DNA, 19 bp, Mus musculus
  siRNA target sequence for Nfkb1 (NM_008689.1,557-575).
ggcctgcaaaggttatcgt

SEQ ID NO: 446699 - DNA, 19 bp, Mus musculus
  siRNA target sequence for Nfkb1 (NM_008689.1,558-576).
gcctgcaaaggttatcgtt

SEQ ID NO: 446700 - DNA, 19 bp, Mus musculus
  siRNA target sequence for Nfkb1 (NM_008689.1,573-591).
cgttcagttggtcacaaat

SEQ ID NO: 446701 - DNA, 19 bp, Mus musculus
  siRNA target sequence for Nfkb1 (NM_008689.1,715-733).
gtgactaagaaaaaggtat

SEQ ID NO: 446702 - DNA, 19 bp, Mus musculus
  siRNA target sequence for Nfkb1 (NM_008689.1,753-771).
gatgacagaggcgtgtatt

SEQ ID NO: 446703 - DNA, 19 bp, Mus musculus
  siRNA target sequence for Nfkb1 (NM_008689.1,764-782).
cgtgtattaggggctataa

SEQ ID NO: 446704 - DNA, 19 bp, Mus musculus
  siRNA target sequence for Nfkb1 (NM_008689.1,765-783).
gtgtattaggggctataat

SEQ ID NO: 446705 - DNA, 19 bp, Mus musculus
  siRNA target sequence for Nfkb1 (NM_008689.1,803-821).
ctgaccttgcctatctaca

SEQ ID NO: 446706 - DNA, 19 bp, Mus musculus
  siRNA target sequence for Nfkb1 (NM_008689.1,914-932).
gcgtggtgcgcctcatgtt

SEQ ID NO: 446707 - DNA, 19 bp, Mus musculus
  siRNA target sequence for Nfkb1 (NM_008689.1,916-934).
gtggtgcgcctcatgttca

SEQ ID NO: 446708 - DNA, 19 bp, Mus musculus
  siRNA target sequence for Nfkb1 (NM_008689.1,987-1005).
ggtgtcagacgccatctat

SEQ ID NO: 446709 - DNA, 19 bp, Mus musculus
  siRNA target sequence for Nfkb1 (NM_008689.1,990-1008).
gtcagacgccatctatgat

SEQ ID NO: 446710 - DNA, 19 bp, Mus musculus
  siRNA target sequence for Nfkb1 (NM_008689.1,996-1014).
cgccatctatgatagcaaa

SEQ ID NO: 446711 - DNA, 19 bp, Mus musculus
  siRNA target sequence for Nfkb1 (NM_008689.1,1025-1043).
catccaacctgaaaatcgt

SEQ ID NO: 446712 - DNA, 19 bp, Mus musculus
  siRNA target sequence for Nfkb1 (NM_008689.1,1122-1140).
catccagattcggttttat

SEQ ID NO: 446713 - DNA, 19 bp, Mus musculus
  siRNA target sequence for Nfkb1 (NM_008689.1,1125-1143).
ccagattcggttttatgaa

SEQ ID NO: 446714 - DNA, 19 bp, Mus musculus
  siRNA target sequence for Nfkb1 (NM_008689.1,1205-1223).
gacagtttgccattgtctt

SEQ ID NO: 446715 - DNA, 19 bp, Mus musculus
  siRNA target sequence for Nfkb1 (NM_008689.1,1276-1294).
gttcagcttcggaggaaat

SEQ ID NO: 446716 - DNA, 19 bp, Mus musculus
  siRNA target sequence for Nfkb1 (NM_008689.1,1327-1345).
ctctactaccctgaaatca

SEQ ID NO: 446717 - DNA, 19 bp, Mus musculus
  siRNA target sequence for Nfkb1 (NM_008689.1,1329-1347).
ctactaccctgaaatcaaa

SEQ ID NO: 446718 - DNA, 19 bp, Mus musculus
  siRNA target sequence for Nfkb1 (NM_008689.1,1367-1385).
ggaaacgccagaagcttat

SEQ ID NO: 446719 - DNA, 19 bp, Mus musculus
  siRNA target sequence for Nfkb1 (NM_008689.1,1503-1521).
ctcgaactacggatttcct

SEQ ID NO: 446720 - DNA, 19 bp, Mus musculus
  siRNA target sequence for Nfkb1 (NM_008689.1,1522-1540).
ccctacggtgggattacat

SEQ ID NO: 446721 - DNA, 19 bp, Mus musculus
  siRNA target sequence for Nfkb1 (NM_008689.1,1523-1541).
cctacggtgggattacatt

SEQ ID NO: 446722 - DNA, 19 bp, Mus musculus
  siRNA target sequence for Nfkb1 (NM_008689.1,1527-1545).
cggtgggattacattccat

SEQ ID NO: 446723 - DNA, 19 bp, Mus musculus
  siRNA target sequence for Nfkb1 (NM_008689.1,1543-1561).
catcccggagtcacgaaat

SEQ ID NO: 446724 - DNA, 19 bp, Mus musculus
  siRNA target sequence for Nfkb1 (NM_008689.1,1844-1862).
cgggggatgtgaagatgtt

SEQ ID NO: 446725 - DNA, 19 bp, Mus musculus
  siRNA target sequence for Nfkb1 (NM_008689.1,1887-1905).
cgccgtgcaggatgagaat

SEQ ID NO: 446726 - DNA, 19 bp, Mus musculus
  siRNA target sequence for Nfkb1 (NM_008689.1,1902-1920).
gaatggggacagtgtctta

SEQ ID NO: 446727 - DNA, 19 bp, Mus musculus
  siRNA target sequence for Nfkb1 (NM_008689.1,1972-1990).
gtcacatctggtttgatct

SEQ ID NO: 446728 - DNA, 19 bp, Mus musculus
  siRNA target sequence for Nfkb1 (NM_008689.1,2354-2372).
ccgtggagtacgacaacat

SEQ ID NO: 446729 - DNA, 19 bp, Mus musculus
  siRNA target sequence for Nfkb1 (NM_008689.1,2356-2374).
gtggagtacgacaacatct

SEQ ID NO: 446730 - DNA, 19 bp, Mus musculus
  siRNA target sequence for Nfkb1 (NM_008689.1,2415-2433).
ggacagtaccacctatgat

SEQ ID NO: 446731 - DNA, 19 bp, Mus musculus
  siRNA target sequence for Nfkb1 (NM_008689.1,2435-2453).
ggactacacctctgcatat

SEQ ID NO: 446732 - DNA, 19 bp, Mus musculus
  siRNA target sequence for Nfkb1 (NM_008689.1,2523-2541).
gaactttgagcctctctat

SEQ ID NO: 446733 - DNA, 19 bp, Mus musculus
  siRNA target sequence for Nfkb1 (NM_008689.1,2618-2636).
ccaactggcaggtatttga

SEQ ID NO: 446734 - DNA, 19 bp, Mus musculus
  siRNA target sequence for Nfkb1 (NM_008689.1,2624-2642).
ggcaggtatttgacatact

SEQ ID NO: 446735 - DNA, 19 bp, Mus musculus
  siRNA target sequence for Nfkb1 (NM_008689.1,2625-2643).
gcaggtatttgacatacta

SEQ ID NO: 446736 - DNA, 19 bp, Mus musculus
  siRNA target sequence for Nfkb1 (NM_008689.1,2665-2683).
gtgttcacatctgatgata

SEQ ID NO: 446737 - DNA, 19 bp, Mus musculus
  siRNA target sequence for Nfkb1 (NM_008689.1,2667-2685).
gttcacatctgatgatata

SEQ ID NO: 446738 - DNA, 19 bp, Mus musculus
  siRNA target sequence for Nfkb1 (NM_008689.1,2777-2795).
ccactctggcacagaagtt

SEQ ID NO: 446739 - DNA, 19 bp, Mus musculus
  siRNA target sequence for Nfkb1 (NM_008689.1,2871-2889).
ctctgggggtaccatcaaa

SEQ ID NO: 446740 - DNA, 19 bp, Mus musculus
  siRNA target sequence for Nfkb1 (NM_008689.1,2873-2891).
ctgggggtaccatcaaaga

SEQ ID NO: 446741 - DNA, 19 bp, Mus musculus
  siRNA target sequence for Nfkb1 (NM_008689.1,3029-3047).
ccacgaggcagcacataga

SEQ ID NO: 446742 - DNA, 19 bp, Mus musculus
  siRNA target sequence for Nfkb1 (NM_008689.1,3030-3048).
cacgaggcagcacatagat

SEQ ID NO: 446743 - DNA, 19 bp, Mus musculus
  siRNA target sequence for Nfkb1 (NM_008689.1,3032-3050).
cgaggcagcacatagatga

SEQ ID NO: 446744 - DNA, 19 bp, Mus musculus
  siRNA target sequence for Nfkb1 (NM_008689.1,3035-3053).
ggcagcacatagatgaact

SEQ ID NO: 446745 - DNA, 19 bp, Mus musculus
  siRNA target sequence for Nfkb1 (NM_008689.1,3099-3117).
ccgcaaactcagctttaca

SEQ ID NO: 446746 - DNA, 19 bp, Mus musculus
  siRNA target sequence for Nfkb1 (NM_008689.1,3111-3129).
ctttacagagtctcttact

SEQ ID NO: 446747 - DNA, 19 bp, Mus musculus
  siRNA target sequence for Nfkb1 (NM_008689.1,3177-3195).
gcaggaaggacctattgaa

SEQ ID NO: 446748 - DNA, 19 bp, Mus musculus
  siRNA target sequence for Nfkb1 (NM_008689.1,3185-3203).
gacctattgaaggcaaaat

SEQ ID NO: 446749 - DNA, 19 bp, Mus musculus
  siRNA target sequence for Nfkb2 (NM_019408.1,300-318).
ggatggcatccccgaatat

SEQ ID NO: 446750 - DNA, 19 bp, Mus musculus
  siRNA target sequence for Nfkb2 (NM_019408.1,305-323).
gcatccccgaatatgatga

SEQ ID NO: 446751 - DNA, 19 bp, Mus musculus
  siRNA target sequence for Nfkb2 (NM_019408.1,306-324).
catccccgaatatgatgat

SEQ ID NO: 446752 - DNA, 19 bp, Mus musculus
  siRNA target sequence for Nfkb2 (NM_019408.1,309-327).
ccccgaatatgatgatttt

SEQ ID NO: 446753 - DNA, 19 bp, Mus musculus
  siRNA target sequence for Nfkb2 (NM_019408.1,312-330).
cgaatatgatgattttgaa

SEQ ID NO: 446754 - DNA, 19 bp, Mus musculus
  siRNA target sequence for Nfkb2 (NM_019408.1,417-435).
gcgaggcttcagatttcga

SEQ ID NO: 446755 - DNA, 19 bp, Mus musculus
  siRNA target sequence for Nfkb2 (NM_019408.1,418-436).
cgaggcttcagatttcgat

SEQ ID NO: 446756 - DNA, 19 bp, Mus musculus
  siRNA target sequence for Nfkb2 (NM_019408.1,419-437).
gaggcttcagatttcgata

SEQ ID NO: 446757 - DNA, 19 bp, Mus musculus
  siRNA target sequence for Nfkb2 (NM_019408.1,500-518).
cctatcctactgtcaagat

SEQ ID NO: 446758 - DNA, 19 bp, Mus musculus
  siRNA target sequence for Nfkb2 (NM_019408.1,509-527).
ctgtcaagatctgtaacta

SEQ ID NO: 446759 - DNA, 19 bp, Mus musculus
  siRNA target sequence for Nfkb2 (NM_019408.1,654-672).
ggacatgactgctcaattt

SEQ ID NO: 446760 - DNA, 19 bp, Mus musculus
  siRNA target sequence for Nfkb2 (NM_019408.1,657-675).
catgactgctcaatttaat

SEQ ID NO: 446761 - DNA, 19 bp, Mus musculus
  siRNA target sequence for Nfkb2 (NM_019408.1,683-701).
gtgtcctgcatgtaaccaa

SEQ ID NO: 446762 - DNA, 19 bp, Mus musculus
  siRNA target sequence for Nfkb2 (NM_019408.1,694-712).
gtaaccaagaagaacatga

SEQ ID NO: 446763 - DNA, 19 bp, Mus musculus
  siRNA target sequence for Nfkb2 (NM_019408.1,825-843).
catggatctgagcattgta

SEQ ID NO: 446764 - DNA, 19 bp, Mus musculus
  siRNA target sequence for Nfkb2 (NM_019408.1,944-962).
gggcctcgaacctgaagat

SEQ ID NO: 446765 - DNA, 19 bp, Mus musculus
  siRNA target sequence for Nfkb2 (NM_019408.1,995-1013).
gcggtggagacgaagttta

SEQ ID NO: 446766 - DNA, 19 bp, Mus musculus
  siRNA target sequence for Nfkb2 (NM_019408.1,996-1014).
cggtggagacgaagtttat

SEQ ID NO: 446767 - DNA, 19 bp, Mus musculus
  siRNA target sequence for Nfkb2 (NM_019408.1,997-1015).
ggtggagacgaagtttatt

SEQ ID NO: 446768 - DNA, 19 bp, Mus musculus
  siRNA target sequence for Nfkb2 (NM_019408.1,1001-1019).
gagacgaagtttatttgct

SEQ ID NO: 446769 - DNA, 19 bp, Mus musculus
  siRNA target sequence for Nfkb2 (NM_019408.1,1109-1127).
cagacgttcataaacagta

SEQ ID NO: 446770 - DNA, 19 bp, Mus musculus
  siRNA target sequence for Nfkb2 (NM_019408.1,1141-1159).
cggacaccgccctatcaca

SEQ ID NO: 446771 - DNA, 19 bp, Mus musculus
  siRNA target sequence for Nfkb2 (NM_019408.1,1142-1160).
ggacaccgccctatcacaa

SEQ ID NO: 446772 - DNA, 19 bp, Mus musculus
  siRNA target sequence for Nfkb2 (NM_019408.1,1145-1163).
caccgccctatcacaagat

SEQ ID NO: 446773 - DNA, 19 bp, Mus musculus
  siRNA target sequence for Nfkb2 (NM_019408.1,1147-1165).
ccgccctatcacaagatga

SEQ ID NO: 446774 - DNA, 19 bp, Mus musculus
  siRNA target sequence for Nfkb2 (NM_019408.1,1151-1169).
cctatcacaagatgaagat

SEQ ID NO: 446775 - DNA, 19 bp, Mus musculus
  siRNA target sequence for Nfkb2 (NM_019408.1,1222-1240).
gtctcggactccaaacagt

SEQ ID NO: 446776 - DNA, 19 bp, Mus musculus
  siRNA target sequence for Nfkb2 (NM_019408.1,1232-1250).
ccaaacagttcacatatta

SEQ ID NO: 446777 - DNA, 19 bp, Mus musculus
  siRNA target sequence for Nfkb2 (NM_019408.1,1359-1377).
ctccgctgggggttatgga

SEQ ID NO: 446778 - DNA, 19 bp, Mus musculus
  siRNA target sequence for Nfkb2 (NM_019408.1,1789-1807).
cagatagcccacgtcattt

SEQ ID NO: 446779 - DNA, 19 bp, Mus musculus
  siRNA target sequence for Nfkb2 (NM_019408.1,1791-1809).
gatagcccacgtcatttat

SEQ ID NO: 446780 - DNA, 19 bp, Mus musculus
  siRNA target sequence for Nfkb2 (NM_019408.1,1864-1882).
ctgcacctggcggtaatca

SEQ ID NO: 446781 - DNA, 19 bp, Mus musculus
  siRNA target sequence for Nfkb2 (NM_019408.1,1866-1884).
gcacctggcggtaatcact

SEQ ID NO: 446782 - DNA, 19 bp, Mus musculus
  siRNA target sequence for Nfkb2 (NM_019408.1,2060-2078).
ctgattttgagggactata

SEQ ID NO: 446783 - DNA, 19 bp, Mus musculus
  siRNA target sequence for Nfkb2 (NM_019408.1,2117-2135).
gcctggatctgttagttga

SEQ ID NO: 446784 - DNA, 19 bp, Mus musculus
  siRNA target sequence for Nfkb2 (NM_019408.1,2216-2234).
ggctggtcacccatctagt

SEQ ID NO: 446785 - DNA, 19 bp, Mus musculus
  siRNA target sequence for Nfkb2 (NM_019408.1,2305-2323).
ctcgggtccccaactctta

SEQ ID NO: 446786 - DNA, 19 bp, Mus musculus
  siRNA target sequence for Nfkb2 (NM_019408.1,2307-2325).
cgggtccccaactcttact

SEQ ID NO: 446787 - DNA, 19 bp, Mus musculus
  siRNA target sequence for Nfkb2 (NM_019408.1,2320-2338).
cttactcgcctccttctaa

SEQ ID NO: 446788 - DNA, 19 bp, Mus musculus
  siRNA target sequence for Nfkb2 (NM_019408.1,2720-2738).
gtctccttcgtagttacaa

SEQ ID NO: 446789 - DNA, 19 bp, Mus musculus
  siRNA target sequence for Nfx1 (NM_023739.2,72-90).
ccggtctcaggcactttta

SEQ ID NO: 446790 - DNA, 19 bp, Mus musculus
  siRNA target sequence for Nfx1 (NM_023739.2,79-97).
caggcacttttaaattcaa

SEQ ID NO: 446791 - DNA, 19 bp, Mus musculus
  siRNA target sequence for Nfx1 (NM_023739.2,155-173).
gacccaaagaagactagat

SEQ ID NO: 446792 - DNA, 19 bp, Mus musculus
  siRNA target sequence for Nfx1 (NM_023739.2,158-176).
ccaaagaagactagattct

SEQ ID NO: 446793 - DNA, 19 bp, Mus musculus
  siRNA target sequence for Nfx1 (NM_023739.2,181-199).
ggattggcagaagaaatta

SEQ ID NO: 446794 - DNA, 19 bp, Mus musculus
  siRNA target sequence for Nfx1 (NM_023739.2,277-295).
cctctggaagcaaacctaa

SEQ ID NO: 446795 - DNA, 19 bp, Mus musculus
  siRNA target sequence for Nfx1 (NM_023739.2,306-324).
ggttttttccagtcatcta

SEQ ID NO: 446796 - DNA, 19 bp, Mus musculus
  siRNA target sequence for Nfx1 (NM_023739.2,314-332).
ccagtcatctaataaatca

SEQ ID NO: 446797 - DNA, 19 bp, Mus musculus
  siRNA target sequence for Nfx1 (NM_023739.2,338-356).
gaaccatggccttcagaat

SEQ ID NO: 446798 - DNA, 19 bp, Mus musculus
  siRNA target sequence for Nfx1 (NM_023739.2,423-441).
gagcagacgtcagatacat

SEQ ID NO: 446799 - DNA, 19 bp, Mus musculus
  siRNA target sequence for Nfx1 (NM_023739.2,425-443).
gcagacgtcagatacatct

SEQ ID NO: 446800 - DNA, 19 bp, Mus musculus
  siRNA target sequence for Nfx1 (NM_023739.2,426-444).
cagacgtcagatacatcta

SEQ ID NO: 446801 - DNA, 19 bp, Mus musculus
  siRNA target sequence for Nfx1 (NM_023739.2,428-446).
gacgtcagatacatctagt

SEQ ID NO: 446802 - DNA, 19 bp, Mus musculus
  siRNA target sequence for Nfx1 (NM_023739.2,430-448).
cgtcagatacatctagttt

SEQ ID NO: 446803 - DNA, 19 bp, Mus musculus
  siRNA target sequence for Nfx1 (NM_023739.2,431-449).
gtcagatacatctagttta

SEQ ID NO: 446804 - DNA, 19 bp, Mus musculus
  siRNA target sequence for Nfx1 (NM_023739.2,433-451).
cagatacatctagtttaga

SEQ ID NO: 446805 - DNA, 19 bp, Mus musculus
  siRNA target sequence for Nfx1 (NM_023739.2,435-453).
gatacatctagtttagaaa

SEQ ID NO: 446806 - DNA, 19 bp, Mus musculus
  siRNA target sequence for Nfx1 (NM_023739.2,439-457).
catctagtttagaaagtgt

SEQ ID NO: 446807 - DNA, 19 bp, Mus musculus
  siRNA target sequence for Nfx1 (NM_023739.2,508-526).
gtgagaaggaggtggttat

SEQ ID NO: 446808 - DNA, 19 bp, Mus musculus
  siRNA target sequence for Nfx1 (NM_023739.2,558-576).
gcagcacagcttacataca

SEQ ID NO: 446809 - DNA, 19 bp, Mus musculus
  siRNA target sequence for Nfx1 (NM_023739.2,562-580).
cacagcttacatacaacta

SEQ ID NO: 446810 - DNA, 19 bp, Mus musculus
  siRNA target sequence for Nfx1 (NM_023739.2,616-634).
gcgagtggggtaatagaat

SEQ ID NO: 446811 - DNA, 19 bp, Mus musculus
  siRNA target sequence for Nfx1 (NM_023739.2,618-636).
gagtggggtaatagaatga

SEQ ID NO: 446812 - DNA, 19 bp, Mus musculus
  siRNA target sequence for Nfx1 (NM_023739.2,811-829).
gcaggaacccaccaaaaca

SEQ ID NO: 446813 - DNA, 19 bp, Mus musculus
  siRNA target sequence for Nfx1 (NM_023739.2,830-848).
ggagagtcagcggcatata

SEQ ID NO: 446814 - DNA, 19 bp, Mus musculus
  siRNA target sequence for Nfx1 (NM_023739.2,831-849).
gagagtcagcggcatataa

SEQ ID NO: 446815 - DNA, 19 bp, Mus musculus
  siRNA target sequence for Nfx1 (NM_023739.2,833-851).
gagtcagcggcatataaat

SEQ ID NO: 446816 - DNA, 19 bp, Mus musculus
  siRNA target sequence for Nfx1 (NM_023739.2,939-957).
gcagttgtcagcaagtctt

SEQ ID NO: 446817 - DNA, 19 bp, Mus musculus
  siRNA target sequence for Nfx1 (NM_023739.2,955-973).
cttcgagaagggttaacca

SEQ ID NO: 446818 - DNA, 19 bp, Mus musculus
  siRNA target sequence for Nfx1 (NM_023739.2,1077-1095).
ctgattgagcagctaacta

SEQ ID NO: 446819 - DNA, 19 bp, Mus musculus
  siRNA target sequence for Nfx1 (NM_023739.2,1079-1097).
gattgagcagctaactaca

SEQ ID NO: 446820 - DNA, 19 bp, Mus musculus
  siRNA target sequence for Nfx1 (NM_023739.2,1276-1294).
cacatgttcccaataccta

SEQ ID NO: 446821 - DNA, 19 bp, Mus musculus
  siRNA target sequence for Nfx1 (NM_023739.2,1284-1302).
cccaatacctatacttgtt

SEQ ID NO: 446822 - DNA, 19 bp, Mus musculus
  siRNA target sequence for Nfx1 (NM_023739.2,1304-1322).
ctgtggcaaagtaaagaat

SEQ ID NO: 446823 - DNA, 19 bp, Mus musculus
  siRNA target sequence for Nfx1 (NM_023739.2,1359-1377).
ggtgaggtttgtagaaaga

SEQ ID NO: 446824 - DNA, 19 bp, Mus musculus
  siRNA target sequence for Nfx1 (NM_023739.2,1444-1462).
gccctgcttttacaactaa

SEQ ID NO: 446825 - DNA, 19 bp, Mus musculus
  siRNA target sequence for Nfx1 (NM_023739.2,1514-1532).
ctcagtccactgttctaat

SEQ ID NO: 446826 - DNA, 19 bp, Mus musculus
  siRNA target sequence for Nfx1 (NM_023739.2,1598-1616).
ccagccttgtcggatcata

SEQ ID NO: 446827 - DNA, 19 bp, Mus musculus
  siRNA target sequence for Nfx1 (NM_023739.2,1695-1713).
ggggacttcagctgtttaa

SEQ ID NO: 446828 - DNA, 19 bp, Mus musculus
  siRNA target sequence for Nfx1 (NM_023739.2,1853-1871).
ggaacatggaagtaatgct

SEQ ID NO: 446829 - DNA, 19 bp, Mus musculus
  siRNA target sequence for Nfx1 (NM_023739.2,1929-1947).
gcctgtggttcctcagatt

SEQ ID NO: 446830 - DNA, 19 bp, Mus musculus
  siRNA target sequence for Nfx1 (NM_023739.2,2046-2064).
cttccgtgtaccagtctta

SEQ ID NO: 446831 - DNA, 19 bp, Mus musculus
  siRNA target sequence for Nfx1 (NM_023739.2,2049-2067).
ccgtgtaccagtcttaaaa

SEQ ID NO: 446832 - DNA, 19 bp, Mus musculus
  siRNA target sequence for Nfx1 (NM_023739.2,2051-2069).
gtgtaccagtcttaaaagt

SEQ ID NO: 446833 - DNA, 19 bp, Mus musculus
  siRNA target sequence for Nfx1 (NM_023739.2,2070-2088).
gaagatgctacatttatgt

SEQ ID NO: 446834 - DNA, 19 bp, Mus musculus
  siRNA target sequence for Nfx1 (NM_023739.2,2089-2107).
gcgacaaacggtgtaacaa

SEQ ID NO: 446835 - DNA, 19 bp, Mus musculus
  siRNA target sequence for Nfx1 (NM_023739.2,2093-2111).
caaacggtgtaacaagaaa

SEQ ID NO: 446836 - DNA, 19 bp, Mus musculus
  siRNA target sequence for Nfx1 (NM_023739.2,2097-2115).
cggtgtaacaagaaacgat

SEQ ID NO: 446837 - DNA, 19 bp, Mus musculus
  siRNA target sequence for Nfx1 (NM_023739.2,2098-2116).
ggtgtaacaagaaacgatt

SEQ ID NO: 446838 - DNA, 19 bp, Mus musculus
  siRNA target sequence for Nfx1 (NM_023739.2,2117-2135).
gtgcggacggcataaatgt

SEQ ID NO: 446839 - DNA, 19 bp, Mus musculus
  siRNA target sequence for Nfx1 (NM_023739.2,2204-2222).
ccttcatcggtgtgaagaa

SEQ ID NO: 446840 - DNA, 19 bp, Mus musculus
  siRNA target sequence for Nfx1 (NM_023739.2,2252-2270).
ctggcaagccagctttgat

SEQ ID NO: 446841 - DNA, 19 bp, Mus musculus
  siRNA target sequence for Nfx1 (NM_023739.2,2254-2272).
ggcaagccagctttgatga

SEQ ID NO: 446842 - DNA, 19 bp, Mus musculus
  siRNA target sequence for Nfx1 (NM_023739.2,2259-2277).
gccagctttgatgaattaa

SEQ ID NO: 446843 - DNA, 19 bp, Mus musculus
  siRNA target sequence for Nfx1 (NM_023739.2,2287-2305).
gtggcgcctctgtgatcta

SEQ ID NO: 446844 - DNA, 19 bp, Mus musculus
  siRNA target sequence for Nfx1 (NM_023739.2,2371-2389).
gtgaccatccagtatatca

SEQ ID NO: 446845 - DNA, 19 bp, Mus musculus
  siRNA target sequence for Nfx1 (NM_023739.2,2373-2391).
gaccatccagtatatcatt

SEQ ID NO: 446846 - DNA, 19 bp, Mus musculus
  siRNA target sequence for Nfx1 (NM_023739.2,2375-2393).
ccatccagtatatcattct

SEQ ID NO: 446847 - DNA, 19 bp, Mus musculus
  siRNA target sequence for Nfx1 (NM_023739.2,2376-2394).
catccagtatatcattctt

SEQ ID NO: 446848 - DNA, 19 bp, Mus musculus
  siRNA target sequence for Nfx1 (NM_023739.2,2451-2469).
ggcaagcatgagttacgaa

SEQ ID NO: 446849 - DNA, 19 bp, Mus musculus
  siRNA target sequence for Nfx1 (NM_023739.2,2478-2496).
ccctgtcacctggttgata

SEQ ID NO: 446850 - DNA, 19 bp, Mus musculus
  siRNA target sequence for Nfx1 (NM_023739.2,2479-2497).
cctgtcacctggttgatat

SEQ ID NO: 446851 - DNA, 19 bp, Mus musculus
  siRNA target sequence for Nfx1 (NM_023739.2,2484-2502).
cacctggttgatatctctt

SEQ ID NO: 446852 - DNA, 19 bp, Mus musculus
  siRNA target sequence for Nfx1 (NM_023739.2,2535-2553).
gggatgcacaaatgtcaaa

SEQ ID NO: 446853 - DNA, 19 bp, Mus musculus
  siRNA target sequence for Nfx1 (NM_023739.2,2540-2558).
gcacaaatgtcaaagactt

SEQ ID NO: 446854 - DNA, 19 bp, Mus musculus
  siRNA target sequence for Nfx1 (NM_023739.2,2688-2706).
gccaaggtagagttacagt

SEQ ID NO: 446855 - DNA, 19 bp, Mus musculus
  siRNA target sequence for Nfx1 (NM_023739.2,2748-2766).
gcatcggggacttatcaaa

SEQ ID NO: 446856 - DNA, 19 bp, Mus musculus
  siRNA target sequence for Nfx1 (NM_023739.2,2752-2770).
cggggacttatcaaagaat

SEQ ID NO: 446857 - DNA, 19 bp, Mus musculus
  siRNA target sequence for Nfx1 (NM_023739.2,2756-2774).
gacttatcaaagaatagtt

SEQ ID NO: 446858 - DNA, 19 bp, Mus musculus
  siRNA target sequence for Nfx1 (NM_023739.2,2977-2995).
cgaaattcagtgacagttt

SEQ ID NO: 446859 - DNA, 19 bp, Mus musculus
  siRNA target sequence for Nfx1 (NM_023739.2,3031-3049).
gcgacgttgagaaggaaat

SEQ ID NO: 446860 - DNA, 19 bp, Mus musculus
  siRNA target sequence for Nfx1 (NM_023739.2,3057-3075).
ctcgtggaggccgtgaata

SEQ ID NO: 446861 - DNA, 19 bp, Mus musculus
  siRNA target sequence for Nfx1 (NM_023739.2,3068-3086).
cgtgaataagggcaagaat

SEQ ID NO: 446862 - DNA, 19 bp, Mus musculus
  siRNA target sequence for Nfx1 (NM_023739.2,3163-3181).
gcctggagagcataagcta

SEQ ID NO: 446863 - DNA, 19 bp, Mus musculus
  siRNA target sequence for Nfx1 (NM_023739.2,3168-3186).
gagagcataagctatgaca

SEQ ID NO: 446864 - DNA, 19 bp, Mus musculus
  siRNA target sequence for Nfx1 (NM_023739.2,3178-3196).
gctatgacagcgaaccaaa

SEQ ID NO: 446865 - DNA, 19 bp, Mus musculus
  siRNA target sequence for Nfx1 (NM_023739.2,3336-3354).
gggagcagtactttacaga

SEQ ID NO: 446866 - DNA, 19 bp, Mus musculus
  siRNA target sequence for Nfx1 (NM_023739.2,3368-3386).
ggccgtgattgactacttt

SEQ ID NO: 446867 - DNA, 19 bp, Mus musculus
  siRNA target sequence for Nfya (NM_010913.1,177-195).
gagcagtatacgacaaaca

SEQ ID NO: 446868 - DNA, 19 bp, Mus musculus
  siRNA target sequence for Nfya (NM_010913.1,282-300).
ggaggccagcttattacat

SEQ ID NO: 446869 - DNA, 19 bp, Mus musculus
  siRNA target sequence for Nfya (NM_010913.1,287-305).
ccagcttattacatcaaca

SEQ ID NO: 446870 - DNA, 19 bp, Mus musculus
  siRNA target sequence for Nfya (NM_010913.1,337-355).
gtggacaaggccaaaccat

SEQ ID NO: 446871 - DNA, 19 bp, Mus musculus
  siRNA target sequence for Nfya (NM_010913.1,373-391).
ctggaacacaaggtttaca

SEQ ID NO: 446872 - DNA, 19 bp, Mus musculus
  siRNA target sequence for Nfya (NM_010913.1,385-403).
gtttacagcagatacagtt

SEQ ID NO: 446873 - DNA, 19 bp, Mus musculus
  siRNA target sequence for Nfya (NM_010913.1,593-611).
ctaccaaccagttaatgca

SEQ ID NO: 446874 - DNA, 19 bp, Mus musculus
  siRNA target sequence for Nfya (NM_010913.1,699-717).
cagacaggagccaatacca

SEQ ID NO: 446875 - DNA, 19 bp, Mus musculus
  siRNA target sequence for Nfya (NM_010913.1,705-723).
ggagccaataccaacacaa

SEQ ID NO: 446876 - DNA, 19 bp, Mus musculus
  siRNA target sequence for Nfya (NM_010913.1,784-802).
caggaggaatggtcatgat

SEQ ID NO: 446877 - DNA, 19 bp, Mus musculus
  siRNA target sequence for Nfya (NM_010913.1,822-840).
gtgcctgctatccaaagaa

SEQ ID NO: 446878 - DNA, 19 bp, Mus musculus
  siRNA target sequence for Nfya (NM_010913.1,897-915).
cagtatcaccgcatcctta

SEQ ID NO: 446879 - DNA, 19 bp, Mus musculus
  siRNA target sequence for Nkx1-2 (NM_009123.2,148-166).
ccctctcaccacaagatct

SEQ ID NO: 446880 - DNA, 19 bp, Mus musculus
  siRNA target sequence for Nkx1-2 (NM_009123.2,183-201).
catcttggatccgcaaaaa

SEQ ID NO: 446881 - DNA, 19 bp, Mus musculus
  siRNA target sequence for Nkx1-2 (NM_009123.2,286-304).
gcttgttcggggaatccaa

SEQ ID NO: 446882 - DNA, 19 bp, Mus musculus
  siRNA target sequence for Nkx1-2 (NM_009123.2,287-305).
cttgttcggggaatccaat

SEQ ID NO: 446883 - DNA, 19 bp, Mus musculus
  siRNA target sequence for Nkx1-2 (NM_009123.2,637-655).
cgagccacgcgctatctgt

SEQ ID NO: 446884 - DNA, 19 bp, Mus musculus
  siRNA target sequence for Nkx1-2 (NM_009123.2,874-892).
ggcgctctgccctatcaga

SEQ ID NO: 446885 - DNA, 19 bp, Mus musculus
  siRNA target sequence for Nkx2-2 (NM_010919.1,360-378).
caaagacggggttttcagt

SEQ ID NO: 446886 - DNA, 19 bp, Mus musculus
  siRNA target sequence for Nkx2-2 (NM_010919.1,512-530).
cagagcctgccccttaaga

SEQ ID NO: 446887 - DNA, 19 bp, Mus musculus
  siRNA target sequence for Nkx2-2 (NM_010919.1,579-597).
gcaccgagggcctccaata

SEQ ID NO: 446888 - DNA, 19 bp, Mus musculus
  siRNA target sequence for Nkx2-5 (NM_008700.1,983-1001).
ctacggcgtgggtctcaat

SEQ ID NO: 446889 - DNA, 19 bp, Mus musculus
  siRNA target sequence for Nkx2-6 (NM_010920.1,117-135).
cgaggcggtccggtttcaa

SEQ ID NO: 446890 - DNA, 19 bp, Mus musculus
  siRNA target sequence for Nkx2-9 (NM_008701.1,257-275).
gtgcgcagcctcctgaatt

SEQ ID NO: 446891 - DNA, 19 bp, Mus musculus
  siRNA target sequence for Nkx2-9 (NM_008701.1,259-277).
gcgcagcctcctgaattta

SEQ ID NO: 446892 - DNA, 19 bp, Mus musculus
  siRNA target sequence for Nkx3-1 (NM_010921.1,243-261).
cggaggacccaccaagtat

SEQ ID NO: 446893 - DNA, 19 bp, Mus musculus
  siRNA target sequence for Nkx3-1 (NM_010921.1,306-324).
cacattttgagacttatct

SEQ ID NO: 446894 - DNA, 19 bp, Mus musculus
  siRNA target sequence for Nkx3-1 (NM_010921.1,411-429).
ctcacactcaggtgattga

SEQ ID NO: 446895 - DNA, 19 bp, Mus musculus
  siRNA target sequence for Nkx3-1 (NM_010921.1,428-446).
gagttggagaggaagttca

SEQ ID NO: 446896 - DNA, 19 bp, Mus musculus
  siRNA target sequence for Nkx3-1 (NM_010921.1,533-551).
cagaacagacgctataaga

SEQ ID NO: 446897 - DNA, 19 bp, Mus musculus
  siRNA target sequence for Nkx3-1 (NM_010921.1,649-667).
cttggtctccgtgtatact

SEQ ID NO: 446898 - DNA, 19 bp, Mus musculus
  siRNA target sequence for Nkx3-1 (NM_010921.1,655-673).
ctccgtgtatactagctat

SEQ ID NO: 446899 - DNA, 19 bp, Mus musculus
  siRNA target sequence for Nkx6-1 (NM_144955.1,662-680).
cacctttgggctcacataa

SEQ ID NO: 446900 - DNA, 19 bp, Mus musculus
  siRNA target sequence for Nkx6-1 (NM_144955.1,1075-1093).
ggtcggacgcccatcttct

SEQ ID NO: 446901 - DNA, 19 bp, Mus musculus
  siRNA target sequence for Nkx6-1 (NM_144955.1,1147-1165).
ccccatcaaggatccattt

SEQ ID NO: 446902 - DNA, 19 bp, Mus musculus
  siRNA target sequence for Nkx6-1 (NM_144955.1,1148-1166).
cccatcaaggatccatttt

SEQ ID NO: 446903 - DNA, 19 bp, Mus musculus
  siRNA target sequence for Nkx6-1 (NM_144955.1,1507-1525).
ctgaaaaagcacaaatcga

SEQ ID NO: 446904 - DNA, 19 bp, Mus musculus
  siRNA target sequence for Nmyc1 (NM_008709.2,560-578).
gagcgcgcagtgaacgaaa

SEQ ID NO: 446905 - DNA, 19 bp, Mus musculus
  siRNA target sequence for Nmyc1 (NM_008709.2,562-580).
gcgcgcagtgaacgaaaaa

SEQ ID NO: 446906 - DNA, 19 bp, Mus musculus
  siRNA target sequence for Nmyc1 (NM_008709.2,564-582).
gcgcagtgaacgaaaaact

SEQ ID NO: 446907 - DNA, 19 bp, Mus musculus
  siRNA target sequence for Nmyc1 (NM_008709.2,565-583).
cgcagtgaacgaaaaacta

SEQ ID NO: 446908 - DNA, 19 bp, Mus musculus
  siRNA target sequence for Nmyc1 (NM_008709.2,933-951).
cctccggagaggatacctt

SEQ ID NO: 446909 - DNA, 19 bp, Mus musculus
  siRNA target sequence for Nmyc1 (NM_008709.2,1026-1044).
gacgttcctcctctaacaa

SEQ ID NO: 446910 - DNA, 19 bp, Mus musculus
  siRNA target sequence for Nmyc1 (NM_008709.2,1028-1046).
cgttcctcctctaacaaca

SEQ ID NO: 446911 - DNA, 19 bp, Mus musculus
  siRNA target sequence for Npas2 (NM_008719.1,672-690).
catgctccctggtaacact

SEQ ID NO: 446912 - DNA, 19 bp, Mus musculus
  siRNA target sequence for Npas2 (NM_008719.1,680-698).
ctggtaacactcggaaaat

SEQ ID NO: 446913 - DNA, 19 bp, Mus musculus
  siRNA target sequence for Npas2 (NM_008719.1,691-709).
cggaaaatggacaaaacca

SEQ ID NO: 446914 - DNA, 19 bp, Mus musculus
  siRNA target sequence for Npas2 (NM_008719.1,875-893).
cagacggcagcatcatcta

SEQ ID NO: 446915 - DNA, 19 bp, Mus musculus
  siRNA target sequence for Npas2 (NM_008719.1,935-953).
cggatgtcatggatcagaa

SEQ ID NO: 446916 - DNA, 19 bp, Mus musculus
  siRNA target sequence for Npas2 (NM_008719.1,942-960).
catggatcagaacttgtta

SEQ ID NO: 446917 - DNA, 19 bp, Mus musculus
  siRNA target sequence for Npas2 (NM_008719.1,945-963).
ggatcagaacttgttaaat

SEQ ID NO: 446918 - DNA, 19 bp, Mus musculus
  siRNA target sequence for Npas2 (NM_008719.1,946-964).
gatcagaacttgttaaatt

SEQ ID NO: 446919 - DNA, 19 bp, Mus musculus
  siRNA target sequence for Npas2 (NM_008719.1,982-1000).
cattccgaagtttataaaa

SEQ ID NO: 446920 - DNA, 19 bp, Mus musculus
  siRNA target sequence for Npas2 (NM_008719.1,1002-1020).
cctttcttcccatatgctt

SEQ ID NO: 446921 - DNA, 19 bp, Mus musculus
  siRNA target sequence for Npas2 (NM_008719.1,1040-1058).
cagaattcctaaaatctga

SEQ ID NO: 446922 - DNA, 19 bp, Mus musculus
  siRNA target sequence for Npas2 (NM_008719.1,1048-1066).
ctaaaatctgacaacgatt

SEQ ID NO: 446923 - DNA, 19 bp, Mus musculus
  siRNA target sequence for Npas2 (NM_008719.1,1059-1077).
caacgatttagagttttat

SEQ ID NO: 446924 - DNA, 19 bp, Mus musculus
  siRNA target sequence for Npas2 (NM_008719.1,1101-1119).
gaacccaaaggaatttcca

SEQ ID NO: 446925 - DNA, 19 bp, Mus musculus
  siRNA target sequence for Npas2 (NM_008719.1,1111-1129).
gaatttccaacttacgaat

SEQ ID NO: 446926 - DNA, 19 bp, Mus musculus
  siRNA target sequence for Npas2 (NM_008719.1,1117-1135).
ccaacttacgaatatataa

SEQ ID NO: 446927 - DNA, 19 bp, Mus musculus
  siRNA target sequence for Npas2 (NM_008719.1,1118-1136).
caacttacgaatatataaa

SEQ ID NO: 446928 - DNA, 19 bp, Mus musculus
  siRNA target sequence for Npas2 (NM_008719.1,1121-1139).
cttacgaatatataaaatt

SEQ ID NO: 446929 - DNA, 19 bp, Mus musculus
  siRNA target sequence for Npas2 (NM_008719.1,1144-1162).
ggaaattttcgctcttaca

SEQ ID NO: 446930 - DNA, 19 bp, Mus musculus
  siRNA target sequence for Npas2 (NM_008719.1,1170-1188).
gcctagcccctcctgtaat

SEQ ID NO: 446931 - DNA, 19 bp, Mus musculus
  siRNA target sequence for Npas2 (NM_008719.1,1266-1284).
ggcaaccccgcagttctta

SEQ ID NO: 446932 - DNA, 19 bp, Mus musculus
  siRNA target sequence for Npas2 (NM_008719.1,1267-1285).
gcaaccccgcagttcttaa

SEQ ID NO: 446933 - DNA, 19 bp, Mus musculus
  siRNA target sequence for Npas2 (NM_008719.1,1268-1286).
caaccccgcagttcttaaa

SEQ ID NO: 446934 - DNA, 19 bp, Mus musculus
  siRNA target sequence for Npas2 (NM_008719.1,1271-1289).
ccccgcagttcttaaagga

SEQ ID NO: 446935 - DNA, 19 bp, Mus musculus
  siRNA target sequence for Npas2 (NM_008719.1,1503-1521).
gtgctgttaccggtttcta

SEQ ID NO: 446936 - DNA, 19 bp, Mus musculus
  siRNA target sequence for Npas2 (NM_008719.1,1534-1552).
cagtggatttggttgcaaa

SEQ ID NO: 446937 - DNA, 19 bp, Mus musculus
  siRNA target sequence for Npas2 (NM_008719.1,1544-1562).
ggttgcaaacccactacta

SEQ ID NO: 446938 - DNA, 19 bp, Mus musculus
  siRNA target sequence for Npas2 (NM_008719.1,1549-1567).
caaacccactactacatca

SEQ ID NO: 446939 - DNA, 19 bp, Mus musculus
  siRNA target sequence for Npas2 (NM_008719.1,1610-1628).
cacactcagtggtcagtta

SEQ ID NO: 446940 - DNA, 19 bp, Mus musculus
  siRNA target sequence for Npas2 (NM_008719.1,1620-1638).
ggtcagttacgcagatgtt

SEQ ID NO: 446941 - DNA, 19 bp, Mus musculus
  siRNA target sequence for Npas2 (NM_008719.1,1696-1714).
ccctctgcagtgaaggaaa

SEQ ID NO: 446942 - DNA, 19 bp, Mus musculus
  siRNA target sequence for Npas2 (NM_008719.1,2081-2099).
gcatgttccagaccattaa

SEQ ID NO: 446943 - DNA, 19 bp, Mus musculus
  siRNA target sequence for Npas2 (NM_008719.1,2082-2100).
catgttccagaccattaaa

SEQ ID NO: 446944 - DNA, 19 bp, Mus musculus
  siRNA target sequence for Npas2 (NM_008719.1,2199-2217).
ctccaacgtccagatgttt

SEQ ID NO: 446945 - DNA, 19 bp, Mus musculus
  siRNA target sequence for Npas2 (NM_008719.1,2351-2369).
catccacccaagtcacaaa

SEQ ID NO: 446946 - DNA, 19 bp, Mus musculus
  siRNA target sequence for Npas2 (NM_008719.1,2376-2394).
cctgctccgagaatcgaat

SEQ ID NO: 446947 - DNA, 19 bp, Mus musculus
  siRNA target sequence for Npas2 (NM_008719.1,2380-2398).
ctccgagaatcgaatgtga

SEQ ID NO: 446948 - DNA, 19 bp, Mus musculus
  siRNA target sequence for Npas2 (NM_008719.1,2678-2696).
ctggacggcaagtcaagta

SEQ ID NO: 446949 - DNA, 19 bp, Mus musculus
  siRNA target sequence for Nr0b1 (NM_007430.1,54-72).
gcagcatcctctacaatct

SEQ ID NO: 446950 - DNA, 19 bp, Mus musculus
  siRNA target sequence for Nr0b1 (NM_007430.1,55-73).
cagcatcctctacaatcta

SEQ ID NO: 446951 - DNA, 19 bp, Mus musculus
  siRNA target sequence for Nr0b1 (NM_007430.1,57-75).
gcatcctctacaatctact

SEQ ID NO: 446952 - DNA, 19 bp, Mus musculus
  siRNA target sequence for Nr0b1 (NM_007430.1,225-243).
gcttttgtggggagaatca

SEQ ID NO: 446953 - DNA, 19 bp, Mus musculus
  siRNA target sequence for Nr0b1 (NM_007430.1,617-635).
ctgtaccgcagctatgtgt

SEQ ID NO: 446954 - DNA, 19 bp, Mus musculus
  siRNA target sequence for Nr0b1 (NM_007430.1,804-822).
cgtccgctggcctgttgaa

SEQ ID NO: 446955 - DNA, 19 bp, Mus musculus
  siRNA target sequence for Nr0b1 (NM_007430.1,825-843).
ccctgcgctttgtcaagta

SEQ ID NO: 446956 - DNA, 19 bp, Mus musculus
  siRNA target sequence for Nr0b1 (NM_007430.1,972-990).
ccaacacgacgcaggaaat

SEQ ID NO: 446957 - DNA, 19 bp, Mus musculus
  siRNA target sequence for Nr0b1 (NM_007430.1,976-994).
cacgacgcaggaaatgctt

SEQ ID NO: 446958 - DNA, 19 bp, Mus musculus
  siRNA target sequence for Nr0b1 (NM_007430.1,1132-1150).
gtgctggagtctgaacatt

SEQ ID NO: 446959 - DNA, 19 bp, Mus musculus
  siRNA target sequence for Nr0b1 (NM_007430.1,1134-1152).
gctggagtctgaacattga

SEQ ID NO: 446960 - DNA, 19 bp, Mus musculus
  siRNA target sequence for Nr0b1 (NM_007430.1,1147-1165).
cattgacaccaaagagtat

SEQ ID NO: 446961 - DNA, 19 bp, Mus musculus
  siRNA target sequence for Nr0b1 (NM_007430.1,1208-1226).
ggcctgcagtgcgtgaaat

SEQ ID NO: 446962 - DNA, 19 bp, Mus musculus
  siRNA target sequence for Nr0b1 (NM_007430.1,1209-1227).
gcctgcagtgcgtgaaata

SEQ ID NO: 446963 - DNA, 19 bp, Mus musculus
  siRNA target sequence for Nr0b1 (NM_007430.1,1211-1229).
ctgcagtgcgtgaaataca

SEQ ID NO: 446964 - DNA, 19 bp, Mus musculus
  siRNA target sequence for Nr0b1 (NM_007430.1,1213-1231).
gcagtgcgtgaaatacatt

SEQ ID NO: 446965 - DNA, 19 bp, Mus musculus
  siRNA target sequence for Nr0b1 (NM_007430.1,1326-1344).
cccttttcctgctgagatt

SEQ ID NO: 446966 - DNA, 19 bp, Mus musculus
  siRNA target sequence for Nr0b1 (NM_007430.1,1358-1376).
gtcgtcactgaactctttt

SEQ ID NO: 446967 - DNA, 19 bp, Mus musculus
  siRNA target sequence for Nr0b1 (NM_007430.1,1361-1379).
gtcactgaactctttttca

SEQ ID NO: 446968 - DNA, 19 bp, Mus musculus
  siRNA target sequence for Nr0b2 (NM_011850.2,79-97).
caggtcgtccgactattct

SEQ ID NO: 446969 - DNA, 19 bp, Mus musculus
  siRNA target sequence for Nr0b2 (NM_011850.2,81-99).
ggtcgtccgactattctgt

SEQ ID NO: 446970 - DNA, 19 bp, Mus musculus
  siRNA target sequence for Nr0b2 (NM_011850.2,82-100).
gtcgtccgactattctgta

SEQ ID NO: 446971 - DNA, 19 bp, Mus musculus
  siRNA target sequence for Nr0b2 (NM_011850.2,381-399).
ccggtgcccagtatactta

SEQ ID NO: 446972 - DNA, 19 bp, Mus musculus
  siRNA target sequence for Nr0b2 (NM_011850.2,495-513).
cgctgcctggagtctttct

SEQ ID NO: 446973 - DNA, 19 bp, Mus musculus
  siRNA target sequence for Nr0b2 (NM_011850.2,705-723).
gcctctaccctcaagaaca

SEQ ID NO: 446974 - DNA, 19 bp, Mus musculus
  siRNA target sequence for Nr0b2 (NM_011850.2,789-807).
ctccttgaagacatgcttt

SEQ ID NO: 446975 - DNA, 19 bp, Mus musculus
  siRNA target sequence for Nr1d1 (NM_145434.1,79-97).
cgaccctggactccaataa

SEQ ID NO: 446976 - DNA, 19 bp, Mus musculus
  siRNA target sequence for Nr1d1 (NM_145434.1,210-228).
caaggttgtcccacatact

SEQ ID NO: 446977 - DNA, 19 bp, Mus musculus
  siRNA target sequence for Nr1d1 (NM_145434.1,425-443).
caagggcacaagcaacatt

SEQ ID NO: 446978 - DNA, 19 bp, Mus musculus
  siRNA target sequence for Nr1d1 (NM_145434.1,572-590).
gtacaaacggtgtctgaaa

SEQ ID NO: 446979 - DNA, 19 bp, Mus musculus
  siRNA target sequence for Nr1d1 (NM_145434.1,602-620).
ctccatcgttcgcatcaat

SEQ ID NO: 446980 - DNA, 19 bp, Mus musculus
  siRNA target sequence for Nr1d1 (NM_145434.1,657-675).
ctctccgttggcatgtcta

SEQ ID NO: 446981 - DNA, 19 bp, Mus musculus
  siRNA target sequence for Nr1d1 (NM_145434.1,926-944).
caccatggaggatgtgata

SEQ ID NO: 446982 - DNA, 19 bp, Mus musculus
  siRNA target sequence for Nr1d1 (NM_145434.1,960-978).
gcccatcgagaaatcttca

SEQ ID NO: 446983 - DNA, 19 bp, Mus musculus
  siRNA target sequence for Nr1d1 (NM_145434.1,980-998).
ctatgcccatgacaagtta

SEQ ID NO: 446984 - DNA, 19 bp, Mus musculus
  siRNA target sequence for Nr1d1 (NM_145434.1,1004-1022).
ctcacctggtaacttcaat

SEQ ID NO: 446985 - DNA, 19 bp, Mus musculus
  siRNA target sequence for Nr1d1 (NM_145434.1,1096-1114).
ccaacgacaacaacctttt

SEQ ID NO: 446986 - DNA, 19 bp, Mus musculus
  siRNA target sequence for Nr1d1 (NM_145434.1,1115-1133).
ggcggctcagcgtcataat

SEQ ID NO: 446987 - DNA, 19 bp, Mus musculus
  siRNA target sequence for Nr1d1 (NM_145434.1,1117-1135).
cggctcagcgtcataatga

SEQ ID NO: 446988 - DNA, 19 bp, Mus musculus
  siRNA target sequence for Nr1d1 (NM_145434.1,1118-1136).
ggctcagcgtcataatgaa

SEQ ID NO: 446989 - DNA, 19 bp, Mus musculus
  siRNA target sequence for Nr1d1 (NM_145434.1,1303-1321).
gcaacaccaagaatgttct

SEQ ID NO: 446990 - DNA, 19 bp, Mus musculus
  siRNA target sequence for Nr1d1 (NM_145434.1,1327-1345).
catgtcccatgaacatgta

SEQ ID NO: 446991 - DNA, 19 bp, Mus musculus
  siRNA target sequence for Nr1d1 (NM_145434.1,1515-1533).
ctgatggtgcgctttgcat

SEQ ID NO: 446992 - DNA, 19 bp, Mus musculus
  siRNA target sequence for Nr1d1 (NM_145434.1,1524-1542).
cgctttgcatcgttgttca

SEQ ID NO: 446993 - DNA, 19 bp, Mus musculus
  siRNA target sequence for Nr1d1 (NM_145434.1,1525-1543).
gctttgcatcgttgttcaa

SEQ ID NO: 446994 - DNA, 19 bp, Mus musculus
  siRNA target sequence for Nr1d1 (NM_145434.1,1626-1644).
ctcaatgccatgtttgact

SEQ ID NO: 446995 - DNA, 19 bp, Mus musculus
  siRNA target sequence for Nr1d2 (NM_011584.2,246-264).
gagggttctgagaatagct

SEQ ID NO: 446996 - DNA, 19 bp, Mus musculus
  siRNA target sequence for Nr1d2 (NM_011584.2,330-348).
cccaagaacgctgatatct

SEQ ID NO: 446997 - DNA, 19 bp, Mus musculus
  siRNA target sequence for Nr1d2 (NM_011584.2,371-389).
gagtgaccgcacagattgt

SEQ ID NO: 446998 - DNA, 19 bp, Mus musculus
  siRNA target sequence for Nr1d2 (NM_011584.2,1510-1528).
cttcattatttgatgcaaa

SEQ ID NO: 446999 - DNA, 19 bp, Mus musculus
  siRNA target sequence for Nr1d2 (NM_011584.2,1599-1617).
gatctgctcagctctatgt

SEQ ID NO: 447000 - DNA, 19 bp, Mus musculus
  siRNA target sequence for Nr1d2 (NM_011584.2,1699-1717).
cagatcgatctggaattga

SEQ ID NO: 447001 - DNA, 19 bp, Mus musculus
  siRNA target sequence for Nr1d2 (NM_011584.2,1701-1719).
gatcgatctggaattgaaa

SEQ ID NO: 447002 - DNA, 19 bp, Mus musculus
  siRNA target sequence for Nr1d2 (NM_011584.2,1761-1779).
gcactaaggaccttaataa

SEQ ID NO: 447003 - DNA, 19 bp, Mus musculus
  siRNA target sequence for Nr1d2 (NM_011584.2,1762-1780).
cactaaggaccttaataat

SEQ ID NO: 447004 - DNA, 19 bp, Mus musculus
  siRNA target sequence for Nr1d2 (NM_011584.2,1768-1786).
ggaccttaataatgaaaaa

SEQ ID NO: 447005 - DNA, 19 bp, Mus musculus
  siRNA target sequence for Nr1d2 (NM_011584.2,1791-1809).
ccaaatgaggcctccattt

SEQ ID NO: 447006 - DNA, 19 bp, Mus musculus
  siRNA target sequence for Nr1d2 (NM_011584.2,1800-1818).
gcctccatttttacaaaat

SEQ ID NO: 447007 - DNA, 19 bp, Mus musculus
  siRNA target sequence for Nr1d2 (NM_011584.2,1801-1819).
cctccatttttacaaaatt

SEQ ID NO: 447008 - DNA, 19 bp, Mus musculus
  siRNA target sequence for Nr1h2 (NM_009473.1,414-432).
ctacatcgtggtcatctta

SEQ ID NO: 447009 - DNA, 19 bp, Mus musculus
  siRNA target sequence for Nr1h2 (NM_009473.1,735-753).
gattcggaagaaaaggatt

SEQ ID NO: 447010 - DNA, 19 bp, Mus musculus
  siRNA target sequence for Nr1h2 (NM_009473.1,931-949).
ctgcagtgcaacaaacgat

SEQ ID NO: 447011 - DNA, 19 bp, Mus musculus
  siRNA target sequence for Nr1h2 (NM_009473.1,1142-1160).
cgtccaccattgagatcat

SEQ ID NO: 447012 - DNA, 19 bp, Mus musculus
  siRNA target sequence for Nr1h2 (NM_009473.1,1253-1271).
caggcttgcaggtggaatt

SEQ ID NO: 447013 - DNA, 19 bp, Mus musculus
  siRNA target sequence for Nr1h2 (NM_009473.1,1317-1335).
cctggacgatgcagagtat

SEQ ID NO: 447014 - DNA, 19 bp, Mus musculus
  siRNA target sequence for Nr1h2 (NM_009473.1,1327-1345).
gcagagtatgccttgctta

SEQ ID NO: 447015 - DNA, 19 bp, Mus musculus
  siRNA target sequence for Nr1h2 (NM_009473.1,1364-1382).
cagccgatcggcctaatgt

SEQ ID NO: 447016 - DNA, 19 bp, Mus musculus
  siRNA target sequence for Nr1h3 (NM_013839.1,208-226).
gcctcaatgcctgatgttt

SEQ ID NO: 447017 - DNA, 19 bp, Mus musculus
  siRNA target sequence for Nr1h3 (NM_013839.1,327-345).
gtcaactggggttgcttta

SEQ ID NO: 447018 - DNA, 19 bp, Mus musculus
  siRNA target sequence for Nr1h3 (NM_013839.1,422-440).
gtccacaaaagcggaaaaa

SEQ ID NO: 447019 - DNA, 19 bp, Mus musculus
  siRNA target sequence for Nr1h3 (NM_013839.1,697-715).
gaacagatccgcttgaaga

SEQ ID NO: 447020 - DNA, 19 bp, Mus musculus
  siRNA target sequence for Nr1h3 (NM_013839.1,839-857).
ctgcccagcaacagtgtaa

SEQ ID NO: 447021 - DNA, 19 bp, Mus musculus
  siRNA target sequence for Nr1h3 (NM_013839.1,972-990).
gtccgtgcaggagattgtt

SEQ ID NO: 447022 - DNA, 19 bp, Mus musculus
  siRNA target sequence for Nr1h3 (NM_013839.1,974-992).
ccgtgcaggagattgttga

SEQ ID NO: 447023 - DNA, 19 bp, Mus musculus
  siRNA target sequence for Nr1h3 (NM_013839.1,1142-1160).
gttacaaccgggaagactt

SEQ ID NO: 447024 - DNA, 19 bp, Mus musculus
  siRNA target sequence for Nr1h3 (NM_013839.1,1172-1190).
ggctgcaggtggagttcat

SEQ ID NO: 447025 - DNA, 19 bp, Mus musculus
  siRNA target sequence for Nr1h3 (NM_013839.1,1221-1239).
gaatgagctgcaactcaat

SEQ ID NO: 447026 - DNA, 19 bp, Mus musculus
  siRNA target sequence for Nr1h4 (NM_009108.1,105-123).
gtgaagccagctaaaggta

SEQ ID NO: 447027 - DNA, 19 bp, Mus musculus
  siRNA target sequence for Nr1h4 (NM_009108.1,110-128).
gccagctaaaggtatgcta

SEQ ID NO: 447028 - DNA, 19 bp, Mus musculus
  siRNA target sequence for Nr1h4 (NM_009108.1,155-173).
gcagaatctggatttggaa

SEQ ID NO: 447029 - DNA, 19 bp, Mus musculus
  siRNA target sequence for Nr1h4 (NM_009108.1,175-193).
cgtactccccatacaacaa

SEQ ID NO: 447030 - DNA, 19 bp, Mus musculus
  siRNA target sequence for Nr1h4 (NM_009108.1,176-194).
gtactccccatacaacaat

SEQ ID NO: 447031 - DNA, 19 bp, Mus musculus
  siRNA target sequence for Nr1h4 (NM_009108.1,229-247).
cctcgtcttactattccaa

SEQ ID NO: 447032 - DNA, 19 bp, Mus musculus
  siRNA target sequence for Nr1h4 (NM_009108.1,267-285).
caaccggaagactggtatt

SEQ ID NO: 447033 - DNA, 19 bp, Mus musculus
  siRNA target sequence for Nr1h4 (NM_009108.1,352-370).
cagagatgcctgtgacaaa

SEQ ID NO: 447034 - DNA, 19 bp, Mus musculus
  siRNA target sequence for Nr1h4 (NM_009108.1,389-407).
ggcatcggcaggcagaata

SEQ ID NO: 447035 - DNA, 19 bp, Mus musculus
  siRNA target sequence for Nr1h4 (NM_009108.1,390-408).
gcatcggcaggcagaataa

SEQ ID NO: 447036 - DNA, 19 bp, Mus musculus
  siRNA target sequence for Nr1h4 (NM_009108.1,445-463).
cctctgggtaccactacaa

SEQ ID NO: 447037 - DNA, 19 bp, Mus musculus
  siRNA target sequence for Nr1h4 (NM_009108.1,519-537).
gccgtgtacaagtgtaaga

SEQ ID NO: 447038 - DNA, 19 bp, Mus musculus
  siRNA target sequence for Nr1h4 (NM_009108.1,550-568).
gcgtgatggacatgtacat

SEQ ID NO: 447039 - DNA, 19 bp, Mus musculus
  siRNA target sequence for Nr1h4 (NM_009108.1,642-660).
gaaatccagtgtaaatcta

SEQ ID NO: 447040 - DNA, 19 bp, Mus musculus
  siRNA target sequence for Nr1h4 (NM_009108.1,663-681).
cggctaaggaaaaatgtga

SEQ ID NO: 447041 - DNA, 19 bp, Mus musculus
  siRNA target sequence for Nr1h4 (NM_009108.1,743-761).
gacctccacaaccaagttt

SEQ ID NO: 447042 - DNA, 19 bp, Mus musculus
  siRNA target sequence for Nr1h4 (NM_009108.1,797-815).
gaccctcctggattatatt

SEQ ID NO: 447043 - DNA, 19 bp, Mus musculus
  siRNA target sequence for Nr1h4 (NM_009108.1,819-837).
gattcgtacaacaaacaga

SEQ ID NO: 447044 - DNA, 19 bp, Mus musculus
  siRNA target sequence for Nr1h4 (NM_009108.1,930-948).
gtacagattctcgtagaat

SEQ ID NO: 447045 - DNA, 19 bp, Mus musculus
  siRNA target sequence for Nr1h4 (NM_009108.1,935-953).
gattctcgtagaattcaca

SEQ ID NO: 447046 - DNA, 19 bp, Mus musculus
  siRNA target sequence for Nr1h4 (NM_009108.1,939-957).
ctcgtagaattcacaaaaa

SEQ ID NO: 447047 - DNA, 19 bp, Mus musculus
  siRNA target sequence for Nr1h4 (NM_009108.1,984-1002).
cacgaagatcagattgctt

SEQ ID NO: 447048 - DNA, 19 bp, Mus musculus
  siRNA target sequence for Nr1h4 (NM_009108.1,1035-1053).
cttcgttcggcggagattt

SEQ ID NO: 447049 - DNA, 19 bp, Mus musculus
  siRNA target sequence for Nr1h4 (NM_009108.1,1038-1056).
cgttcggcggagattttca

SEQ ID NO: 447050 - DNA, 19 bp, Mus musculus
  siRNA target sequence for Nr1h4 (NM_009108.1,1039-1057).
gttcggcggagattttcaa

SEQ ID NO: 447051 - DNA, 19 bp, Mus musculus
  siRNA target sequence for Nr1h4 (NM_009108.1,1113-1131).
ggtatctctgatgagtata

SEQ ID NO: 447052 - DNA, 19 bp, Mus musculus
  siRNA target sequence for Nr1h4 (NM_009108.1,1114-1132).
gtatctctgatgagtatat

SEQ ID NO: 447053 - DNA, 19 bp, Mus musculus
  siRNA target sequence for Nr1h4 (NM_009108.1,1137-1155).
ccgatgttcagtttctata

SEQ ID NO: 447054 - DNA, 19 bp, Mus musculus
  siRNA target sequence for Nr1h4 (NM_009108.1,1159-1177).
gtgttggagaactcaaaat

SEQ ID NO: 447055 - DNA, 19 bp, Mus musculus
  siRNA target sequence for Nr1h4 (NM_009108.1,1224-1242).
ccagacagacaatacatca

SEQ ID NO: 447056 - DNA, 19 bp, Mus musculus
  siRNA target sequence for Nr1h4 (NM_009108.1,1360-1378).
cggaactccggacattcaa

SEQ ID NO: 447057 - DNA, 19 bp, Mus musculus
  siRNA target sequence for Nr1h4 (NM_009108.1,1400-1418).
gatgtcttggagagtgaat

SEQ ID NO: 447058 - DNA, 19 bp, Mus musculus
  siRNA target sequence for Nr1h4 (NM_009108.1,1403-1421).
gtcttggagagtgaatgat

SEQ ID NO: 447059 - DNA, 19 bp, Mus musculus
  siRNA target sequence for Nr1h4 (NM_009108.1,1408-1426).
ggagagtgaatgatcacaa

SEQ ID NO: 447060 - DNA, 19 bp, Mus musculus
  siRNA target sequence for Nr1i2 (NM_010936.1,358-376).
gccgagttggccttgtaca

SEQ ID NO: 447061 - DNA, 19 bp, Mus musculus
  siRNA target sequence for Nr1i2 (NM_010936.1,426-444).
gaagatggaggtcttcaaa

SEQ ID NO: 447062 - DNA, 19 bp, Mus musculus
  siRNA target sequence for Nr1i2 (NM_010936.1,429-447).
gatggaggtcttcaaatct

SEQ ID NO: 447063 - DNA, 19 bp, Mus musculus
  siRNA target sequence for Nr1i2 (NM_010936.1,469-487).
ccaatggctaccacttcaa

SEQ ID NO: 447064 - DNA, 19 bp, Mus musculus
  siRNA target sequence for Nr1i2 (NM_010936.1,470-488).
caatggctaccacttcaat

SEQ ID NO: 447065 - DNA, 19 bp, Mus musculus
  siRNA target sequence for Nr1i2 (NM_010936.1,794-812).
cgctcagatgcaaaccttt

SEQ ID NO: 447066 - DNA, 19 bp, Mus musculus
  siRNA target sequence for Nr1i2 (NM_010936.1,817-835).
caactttctcccacttcaa

SEQ ID NO: 447067 - DNA, 19 bp, Mus musculus
  siRNA target sequence for Nr1i2 (NM_010936.1,912-930).
cctgccacatggagtcaaa

SEQ ID NO: 447068 - DNA, 19 bp, Mus musculus
  siRNA target sequence for Nr1i2 (NM_010936.1,919-937).
catggagtcaaatcatgaa

SEQ ID NO: 447069 - DNA, 19 bp, Mus musculus
  siRNA target sequence for Nr1i2 (NM_010936.1,1018-1036).
gcgacgggaaagagatcat

SEQ ID NO: 447070 - DNA, 19 bp, Mus musculus
  siRNA target sequence for Nr1i2 (NM_010936.1,1059-1077).
gatgtgtcaacctacatgt

SEQ ID NO: 447071 - DNA, 19 bp, Mus musculus
  siRNA target sequence for Nr1i2 (NM_010936.1,1062-1080).
gtgtcaacctacatgttca

SEQ ID NO: 447072 - DNA, 19 bp, Mus musculus
  siRNA target sequence for Nr1i2 (NM_010936.1,1247-1265).
cttcgaagaccctaatggt

SEQ ID NO: 447073 - DNA, 19 bp, Mus musculus
  siRNA target sequence for Nr1i2 (NM_010936.1,1283-1301).
gttggatccattgatgaaa

SEQ ID NO: 447074 - DNA, 19 bp, Mus musculus
  siRNA target sequence for Nr1i2 (NM_010936.1,1460-1478).
gtgtagtcggccatatcct

SEQ ID NO: 447075 - DNA, 19 bp, Mus musculus
  siRNA target sequence for Nr1i2 (NM_010936.1,1591-1609).
ccccactcatgcaagagtt

SEQ ID NO: 447076 - DNA, 19 bp, Mus musculus
  siRNA target sequence for Nr1i2 (NM_010936.1,1592-1610).
cccactcatgcaagagtta

SEQ ID NO: 447077 - DNA, 19 bp, Mus musculus
  siRNA target sequence for Nr1i2 (NM_010936.1,1594-1612).
cactcatgcaagagttatt

SEQ ID NO: 447078 - DNA, 19 bp, Mus musculus
  siRNA target sequence for Nr1i2 (NM_010936.1,1596-1614).
ctcatgcaagagttattta

SEQ ID NO: 447079 - DNA, 19 bp, Mus musculus
  siRNA target sequence for Nr1i3 (NM_009803.1,381-399).
gcagaagtgtctaaatgtt

SEQ ID NO: 447080 - DNA, 19 bp, Mus musculus
  siRNA target sequence for Nr1i3 (NM_009803.1,653-671).
cacactttgcagatatcaa

SEQ ID NO: 447081 - DNA, 19 bp, Mus musculus
  siRNA target sequence for Nr1i3 (NM_009803.1,655-673).
cactttgcagatatcaaca

SEQ ID NO: 447082 - DNA, 19 bp, Mus musculus
  siRNA target sequence for Nr1i3 (NM_009803.1,661-679).
gcagatatcaacacgttta

SEQ ID NO: 447083 - DNA, 19 bp, Mus musculus
  siRNA target sequence for Nr1i3 (NM_009803.1,674-692).
cgtttatggtgcaacagat

SEQ ID NO: 447084 - DNA, 19 bp, Mus musculus
  siRNA target sequence for Nr1i3 (NM_009803.1,685-703).
caacagatcatcaagttca

SEQ ID NO: 447085 - DNA, 19 bp, Mus musculus
  siRNA target sequence for Nr1i3 (NM_009803.1,767-785).
cggctgtggaaatattgca

SEQ ID NO: 447086 - DNA, 19 bp, Mus musculus
  siRNA target sequence for Nr1i3 (NM_009803.1,768-786).
ggctgtggaaatattgcat

SEQ ID NO: 447087 - DNA, 19 bp, Mus musculus
  siRNA target sequence for Nr1i3 (NM_009803.1,769-787).
gctgtggaaatattgcata

SEQ ID NO: 447088 - DNA, 19 bp, Mus musculus
  siRNA target sequence for Nr1i3 (NM_009803.1,770-788).
ctgtggaaatattgcatat

SEQ ID NO: 447089 - DNA, 19 bp, Mus musculus
  siRNA target sequence for Nr1i3 (NM_009803.1,835-853).
gggcctctttgctacaaga

SEQ ID NO: 447090 - DNA, 19 bp, Mus musculus
  siRNA target sequence for Nr1i3 (NM_009803.1,836-854).
ggcctctttgctacaagat

SEQ ID NO: 447091 - DNA, 19 bp, Mus musculus
  siRNA target sequence for Nr1i3 (NM_009803.1,874-892).
gggttccagtacgagtttt

SEQ ID NO: 447092 - DNA, 19 bp, Mus musculus
  siRNA target sequence for Nr1i3 (NM_009803.1,875-893).
ggttccagtacgagttttt

SEQ ID NO: 447093 - DNA, 19 bp, Mus musculus
  siRNA target sequence for Nr1i3 (NM_009803.1,996-1014).
cggagttacccaaagagaa

SEQ ID NO: 447094 - DNA, 19 bp, Mus musculus
  siRNA target sequence for Nr1i3 (NM_009803.1,1053-1071).
gaacaaccacattatggaa

SEQ ID NO: 447095 - DNA, 19 bp, Mus musculus
  siRNA target sequence for Nr1i3 (NM_009803.1,1084-1102).
ctccaaagtcggtttctgt

SEQ ID NO: 447096 - DNA, 19 bp, Mus musculus
  siRNA target sequence for Nr1i3 (NM_009803.1,1086-1104).
ccaaagtcggtttctgtat

SEQ ID NO: 447097 - DNA, 19 bp, Mus musculus
  siRNA target sequence for Nr1i3 (NM_009803.1,1091-1109).
gtcggtttctgtatgcaaa

SEQ ID NO: 447098 - DNA, 19 bp, Mus musculus
  siRNA target sequence for Nr1i3 (NM_009803.1,1125-1143).
ggctgacctccggagtata

SEQ ID NO: 447099 - DNA, 19 bp, Mus musculus
  siRNA target sequence for Nr1i3 (NM_009803.1,1126-1144).
gctgacctccggagtataa

SEQ ID NO: 447100 - DNA, 19 bp, Mus musculus
  siRNA target sequence for Nr1i3 (NM_009803.1,1127-1145).
ctgacctccggagtataaa

SEQ ID NO: 447101 - DNA, 19 bp, Mus musculus
  siRNA target sequence for Nr1i3 (NM_009803.1,1129-1147).
gacctccggagtataaaca

SEQ ID NO: 447102 - DNA, 19 bp, Mus musculus
  siRNA target sequence for Nr1i3 (NM_009803.1,1131-1149).
cctccggagtataaacaat

SEQ ID NO: 447103 - DNA, 19 bp, Mus musculus
  siRNA target sequence for Nr1i3 (NM_009803.1,1136-1154).
ggagtataaacaatgcata

SEQ ID NO: 447104 - DNA, 19 bp, Mus musculus
  siRNA target sequence for Nr1i3 (NM_009803.1,1198-1216).
ccgctgctcggggagattt

SEQ ID NO: 447105 - DNA, 19 bp, Mus musculus
  siRNA target sequence for Nr2c1 (NM_011629.2,642-660).
ggcgaccatagaagaaatt

SEQ ID NO: 447106 - DNA, 19 bp, Mus musculus
  siRNA target sequence for Nr2c1 (NM_011629.2,879-897).
gcacctccagctcttaaca

SEQ ID NO: 447107 - DNA, 19 bp, Mus musculus
  siRNA target sequence for Nr2c1 (NM_011629.2,908-926).
ctgaccagggaccaaataa

SEQ ID NO: 447108 - DNA, 19 bp, Mus musculus
  siRNA target sequence for Nr2c1 (NM_011629.2,969-987).
gcgtcattacggagcaata

SEQ ID NO: 447109 - DNA, 19 bp, Mus musculus
  siRNA target sequence for Nr2c1 (NM_011629.2,973-991).
cattacggagcaataactt

SEQ ID NO: 447110 - DNA, 19 bp, Mus musculus
  siRNA target sequence for Nr2c1 (NM_011629.2,978-996).
cggagcaataacttgtgaa

SEQ ID NO: 447111 - DNA, 19 bp, Mus musculus
  siRNA target sequence for Nr2c1 (NM_011629.2,1027-1045).
cggaaaaacctagtctatt

SEQ ID NO: 447112 - DNA, 19 bp, Mus musculus
  siRNA target sequence for Nr2c1 (NM_011629.2,1144-1162).
gactctgttcagtgtgaaa

SEQ ID NO: 447113 - DNA, 19 bp, Mus musculus
  siRNA target sequence for Nr2c1 (NM_011629.2,1177-1195).
gtttcccgagaaaaatctt

SEQ ID NO: 447114 - DNA, 19 bp, Mus musculus
  siRNA target sequence for Nr2c1 (NM_011629.2,1211-1229).
caacagaaaaaatctacat

SEQ ID NO: 447115 - DNA, 19 bp, Mus musculus
  siRNA target sequence for Nr2c1 (NM_011629.2,1257-1275).
cgcaacgccaacctttgta

SEQ ID NO: 447116 - DNA, 19 bp, Mus musculus
  siRNA target sequence for Nr2c1 (NM_011629.2,1258-1276).
gcaacgccaacctttgtaa

SEQ ID NO: 447117 - DNA, 19 bp, Mus musculus
  siRNA target sequence for Nr2c1 (NM_011629.2,1336-1354).
catccgtctggaataaaaa

SEQ ID NO: 447118 - DNA, 19 bp, Mus musculus
  siRNA target sequence for Nr2c1 (NM_011629.2,1441-1459).
gcgaatctcggcaaagcta

SEQ ID NO: 447119 - DNA, 19 bp, Mus musculus
  siRNA target sequence for Nr2c1 (NM_011629.2,1442-1460).
cgaatctcggcaaagctaa

SEQ ID NO: 447120 - DNA, 19 bp, Mus musculus
  siRNA target sequence for Nr2c1 (NM_011629.2,1443-1461).
gaatctcggcaaagctaaa

SEQ ID NO: 447121 - DNA, 19 bp, Mus musculus
  siRNA target sequence for Nr2c1 (NM_011629.2,1520-1538).
catccttcggtgcttttca

SEQ ID NO: 447122 - DNA, 19 bp, Mus musculus
  siRNA target sequence for Nr2c1 (NM_011629.2,1523-1541).
ccttcggtgcttttcatca

SEQ ID NO: 447123 - DNA, 19 bp, Mus musculus
  siRNA target sequence for Nr2c1 (NM_011629.2,1524-1542).
cttcggtgcttttcatcat

SEQ ID NO: 447124 - DNA, 19 bp, Mus musculus
  siRNA target sequence for Nr2c1 (NM_011629.2,1564-1582).
gtttcaagggcatttgaca

SEQ ID NO: 447125 - DNA, 19 bp, Mus musculus
  siRNA target sequence for Nr2c1 (NM_011629.2,1574-1592).
catttgacactcttgcaaa

SEQ ID NO: 447126 - DNA, 19 bp, Mus musculus
  siRNA target sequence for Nr2c1 (NM_011629.2,1709-1727).
gcgagtcgcacgtagcttt

SEQ ID NO: 447127 - DNA, 19 bp, Mus musculus
  siRNA target sequence for Nr2c1 (NM_011629.2,1796-1814).
gactgctgttcttatcgat

SEQ ID NO: 447128 - DNA, 19 bp, Mus musculus
  siRNA target sequence for Nr2c1 (NM_011629.2,1823-1841).
cactttccataccttcttt

SEQ ID NO: 447129 - DNA, 19 bp, Mus musculus
  siRNA target sequence for Nr2c1 (NM_011629.2,1854-1872).
gcaggagaacagcatatca

SEQ ID NO: 447130 - DNA, 19 bp, Mus musculus
  siRNA target sequence for Nr2c1 (NM_011629.2,1863-1881).
cagcatatcactggtaaaa

SEQ ID NO: 447131 - DNA, 19 bp, Mus musculus
  siRNA target sequence for Nr2c1 (NM_011629.2,1873-1891).
ctggtaaaagcgtattgga

SEQ ID NO: 447132 - DNA, 19 bp, Mus musculus
  siRNA target sequence for Nr2c1 (NM_011629.2,1875-1893).
ggtaaaagcgtattggaat

SEQ ID NO: 447133 - DNA, 19 bp, Mus musculus
  siRNA target sequence for Nr2c1 (NM_011629.2,1883-1901).
cgtattggaatgagctttt

SEQ ID NO: 447134 - DNA, 19 bp, Mus musculus
  siRNA target sequence for Nr2c1 (NM_011629.2,1884-1902).
gtattggaatgagcttttt

SEQ ID NO: 447135 - DNA, 19 bp, Mus musculus
  siRNA target sequence for Nr2c1 (NM_011629.2,1932-1950).
gatgaacgtggcaactata

SEQ ID NO: 447136 - DNA, 19 bp, Mus musculus
  siRNA target sequence for Nr2c1 (NM_011629.2,1935-1953).
gaacgtggcaactatatta

SEQ ID NO: 447137 - DNA, 19 bp, Mus musculus
  siRNA target sequence for Nr2c1 (NM_011629.2,1979-1997).
gtagccttcagcaagataa

SEQ ID NO: 447138 - DNA, 19 bp, Mus musculus
  siRNA target sequence for Nr2c1 (NM_011629.2,2154-2172).
ggagctaattgagagattt

SEQ ID NO: 447139 - DNA, 19 bp, Mus musculus
  siRNA target sequence for Nr2c1 (NM_011629.2,2181-2199).
ggcttatgtggaattccaa

SEQ ID NO: 447140 - DNA, 19 bp, Mus musculus
  siRNA target sequence for Nr2c1 (NM_011629.2,2191-2209).
gaattccaagattatatca

SEQ ID NO: 447141 - DNA, 19 bp, Mus musculus
  siRNA target sequence for Nr2c1 (NM_011629.2,2235-2253).
caggctgtcgcgattactt

SEQ ID NO: 447142 - DNA, 19 bp, Mus musculus
  siRNA target sequence for Nr2c1 (NM_011629.2,2237-2255).
ggctgtcgcgattacttct

SEQ ID NO: 447143 - DNA, 19 bp, Mus musculus
  siRNA target sequence for Nr2c1 (NM_011629.2,2329-2347).
gtacggatcgacagtgtta

SEQ ID NO: 447144 - DNA, 19 bp, Mus musculus
  siRNA target sequence for Nr2c1 (NM_011629.2,2368-2386).
gagcctgcagattacaact

SEQ ID NO: 447145 - DNA, 19 bp, Mus musculus
  siRNA target sequence for Nr2c1 (NM_011629.2,2382-2400).
caactctcaaataattggt

SEQ ID NO: 447146 - DNA, 19 bp, Mus musculus
  siRNA target sequence for Nr2e1 (NM_152229.1,699-717).
gatcaacaagccgcatttt

SEQ ID NO: 447147 - DNA, 19 bp, Mus musculus
  siRNA target sequence for Nr2e1 (NM_152229.1,702-720).
caacaagccgcattttaga

SEQ ID NO: 447148 - DNA, 19 bp, Mus musculus
  siRNA target sequence for Nr2e1 (NM_152229.1,705-723).
caagccgcattttagatat

SEQ ID NO: 447149 - DNA, 19 bp, Mus musculus
  siRNA target sequence for Nr2e1 (NM_152229.1,719-737).
gatatcccttgcaaagtgt

SEQ ID NO: 447150 - DNA, 19 bp, Mus musculus
  siRNA target sequence for Nr2e1 (NM_152229.1,785-803).
ggctgctccggattcttca

SEQ ID NO: 447151 - DNA, 19 bp, Mus musculus
  siRNA target sequence for Nr2e1 (NM_152229.1,855-873).
gaggatgccccgtagacaa

SEQ ID NO: 447152 - DNA, 19 bp, Mus musculus
  siRNA target sequence for Nr2e1 (NM_152229.1,894-912).
gggcgtgtcgactgaagaa

SEQ ID NO: 447153 - DNA, 19 bp, Mus musculus
  siRNA target sequence for Nr2e1 (NM_152229.1,896-914).
gcgtgtcgactgaagaagt

SEQ ID NO: 447154 - DNA, 19 bp, Mus musculus
  siRNA target sequence for Nr2e1 (NM_152229.1,900-918).
gtcgactgaagaagtgttt

SEQ ID NO: 447155 - DNA, 19 bp, Mus musculus
  siRNA target sequence for Nr2e1 (NM_152229.1,915-933).
gtttggaagtcaacatgaa

SEQ ID NO: 447156 - DNA, 19 bp, Mus musculus
  siRNA target sequence for Nr2e1 (NM_152229.1,1005-1023).
gtggacacaaggaagacaa

SEQ ID NO: 447157 - DNA, 19 bp, Mus musculus
  siRNA target sequence for Nr2e1 (NM_152229.1,1192-1210).
gaatgggaccccaatgtat

SEQ ID NO: 447158 - DNA, 19 bp, Mus musculus
  siRNA target sequence for Nr2e1 (NM_152229.1,1259-1277).
ctctttatgagcatcaagt

SEQ ID NO: 447159 - DNA, 19 bp, Mus musculus
  siRNA target sequence for Nr2e1 (NM_152229.1,1342-1360).
cgcgtggagagaactgttt

SEQ ID NO: 447160 - DNA, 19 bp, Mus musculus
  siRNA target sequence for Nr2e1 (NM_152229.1,1357-1375).
gtttgttctaggaatagca

SEQ ID NO: 447161 - DNA, 19 bp, Mus musculus
  siRNA target sequence for Nr2e1 (NM_152229.1,1383-1401).
ccattccggttgatgctaa

SEQ ID NO: 447162 - DNA, 19 bp, Mus musculus
  siRNA target sequence for Nr2e1 (NM_152229.1,1402-1420).
cactctactggctgtatct

SEQ ID NO: 447163 - DNA, 19 bp, Mus musculus
  siRNA target sequence for Nr2e1 (NM_152229.1,1411-1429).
ggctgtatctggcatgaat

SEQ ID NO: 447164 - DNA, 19 bp, Mus musculus
  siRNA target sequence for Nr2e1 (NM_152229.1,1412-1430).
gctgtatctggcatgaata

SEQ ID NO: 447165 - DNA, 19 bp, Mus musculus
  siRNA target sequence for Nr2e1 (NM_152229.1,1450-1468).
gaagctgaacaagatcata

SEQ ID NO: 447166 - DNA, 19 bp, Mus musculus
  siRNA target sequence for Nr2e1 (NM_152229.1,1453-1471).
gctgaacaagatcatatct

SEQ ID NO: 447167 - DNA, 19 bp, Mus musculus
  siRNA target sequence for Nr2e1 (NM_152229.1,1517-1535).
cgattagacgccactgaat

SEQ ID NO: 447168 - DNA, 19 bp, Mus musculus
  siRNA target sequence for Nr2e1 (NM_152229.1,1518-1536).
gattagacgccactgaatt

SEQ ID NO: 447169 - DNA, 19 bp, Mus musculus
  siRNA target sequence for Nr2e1 (NM_152229.1,1703-1721).
gggaaactcctgttgcttt

SEQ ID NO: 447170 - DNA, 19 bp, Mus musculus
  siRNA target sequence for Nr2e1 (NM_152229.1,1724-1742).
ccagctttacggtcaatta

SEQ ID NO: 447171 - DNA, 19 bp, Mus musculus
  siRNA target sequence for Nr2e1 (NM_152229.1,1743-1761).
gcccatctaccatagaaga

SEQ ID NO: 447172 - DNA, 19 bp, Mus musculus
  siRNA target sequence for Nr2e1 (NM_152229.1,1744-1762).
cccatctaccatagaagaa

SEQ ID NO: 447173 - DNA, 19 bp, Mus musculus
  siRNA target sequence for Nr2e1 (NM_152229.1,1746-1764).
catctaccatagaagaagt

SEQ ID NO: 447174 - DNA, 19 bp, Mus musculus
  siRNA target sequence for Nr2e1 (NM_152229.1,1783-1801).
cggcaatgtgccgattaca

SEQ ID NO: 447175 - DNA, 19 bp, Mus musculus
  siRNA target sequence for Nr2e1 (NM_152229.1,1784-1802).
ggcaatgtgccgattacaa

SEQ ID NO: 447176 - DNA, 19 bp, Mus musculus
  siRNA target sequence for Nr2e1 (NM_152229.1,1786-1804).
caatgtgccgattacaaga

SEQ ID NO: 447177 - DNA, 19 bp, Mus musculus
  siRNA target sequence for Nr2e1 (NM_152229.1,1792-1810).
gccgattacaagactactt

SEQ ID NO: 447178 - DNA, 19 bp, Mus musculus
  siRNA target sequence for Nr2e1 (NM_152229.1,1793-1811).
ccgattacaagactacttt

SEQ ID NO: 447179 - DNA, 19 bp, Mus musculus
  siRNA target sequence for Nr2e1 (NM_152229.1,1800-1818).
caagactactttcagatat

SEQ ID NO: 447180 - DNA, 19 bp, Mus musculus
  siRNA target sequence for Nr2e1 (NM_152229.1,1805-1823).
ctactttcagatatgtaca

SEQ ID NO: 447181 - DNA, 19 bp, Mus musculus
  siRNA target sequence for Nr2e3 (NM_013708.3,332-350).
gcagcagtgggaaacatta

SEQ ID NO: 447182 - DNA, 19 bp, Mus musculus
  siRNA target sequence for Nr2e3 (NM_013708.3,437-455).
ggatgtgcccagtggataa

SEQ ID NO: 447183 - DNA, 19 bp, Mus musculus
  siRNA target sequence for Nr2e3 (NM_013708.3,703-721).
cttatcaccgccgaaactt

SEQ ID NO: 447184 - DNA, 19 bp, Mus musculus
  siRNA target sequence for Nr2e3 (NM_013708.3,713-731).
ccgaaacttgtgctaaact

SEQ ID NO: 447185 - DNA, 19 bp, Mus musculus
  siRNA target sequence for Nr2e3 (NM_013708.3,741-759).
ggacgctgaagagaatatt

SEQ ID NO: 447186 - DNA, 19 bp, Mus musculus
  siRNA target sequence for Nr2e3 (NM_013708.3,837-855).
gctcttcatggctgtcaaa

SEQ ID NO: 447187 - DNA, 19 bp, Mus musculus
  siRNA target sequence for Nr2e3 (NM_013708.3,850-868).
gtcaaatgggccaaaaact

SEQ ID NO: 447188 - DNA, 19 bp, Mus musculus
  siRNA target sequence for Nr2e3 (NM_013708.3,923-941).
catggaatgagcttttcct

SEQ ID NO: 447189 - DNA, 19 bp, Mus musculus
  siRNA target sequence for Nr2e3 (NM_013708.3,1122-1140).
ggccctggtcctcttcaaa

SEQ ID NO: 447190 - DNA, 19 bp, Mus musculus
  siRNA target sequence for Nr2e3 (NM_013708.3,1131-1149).
cctcttcaaacctgaaaca

SEQ ID NO: 447191 - DNA, 19 bp, Mus musculus
  siRNA target sequence for Nr2e3 (NM_013708.3,1304-1322).
gcattgagcttctcttctt

SEQ ID NO: 447192 - DNA, 19 bp, Mus musculus
  siRNA target sequence for Nr2f2 (NM_009697.1,562-580).
cgtacctgtccggatatat

SEQ ID NO: 447193 - DNA, 19 bp, Mus musculus
  siRNA target sequence for Nr2f2 (NM_009697.1,563-581).
gtacctgtccggatatatt

SEQ ID NO: 447194 - DNA, 19 bp, Mus musculus
  siRNA target sequence for Nr2f2 (NM_009697.1,785-803).
cgagctgttcgtgttgaat

SEQ ID NO: 447195 - DNA, 19 bp, Mus musculus
  siRNA target sequence for Nr2f2 (NM_009697.1,882-900).
gaccgggtggtcgctttta

SEQ ID NO: 447196 - DNA, 19 bp, Mus musculus
  siRNA target sequence for Nr2f2 (NM_009697.1,886-904).
gggtggtcgcttttatgga

SEQ ID NO: 447197 - DNA, 19 bp, Mus musculus
  siRNA target sequence for Nr2f2 (NM_009697.1,1159-1177).
cctcagtcatagagcaatt

SEQ ID NO: 447198 - DNA, 19 bp, Mus musculus
  siRNA target sequence for Nr2f2 (NM_009697.1,1164-1182).
gtcatagagcaattgtttt

SEQ ID NO: 447199 - DNA, 19 bp, Mus musculus
  siRNA target sequence for Nr2f2 (NM_009697.1,1217-1235).
cctcatccgggatatgtta

SEQ ID NO: 447200 - DNA, 19 bp, Mus musculus
  siRNA target sequence for Nr2f2 (NM_009697.1,1236-1254).
ctgtccggcagcagtttta

SEQ ID NO: 447201 - DNA, 19 bp, Mus musculus
  siRNA target sequence for Nr2f2 (NM_009697.1,1249-1267).
gttttaactggccatatat

SEQ ID NO: 447202 - DNA, 19 bp, Mus musculus
  siRNA target sequence for Nr2f2 (NM_009697.1,1258-1276).
ggccatatatggcaattca

SEQ ID NO: 447203 - DNA, 19 bp, Mus musculus
  siRNA target sequence for Nr2f2 (NM_009697.1,1259-1277).
gccatatatggcaattcaa

SEQ ID NO: 447204 - DNA, 19 bp, Mus musculus
  siRNA target sequence for Nr2f2 (NM_009697.1,1260-1278).
ccatatatggcaattcaat

SEQ ID NO: 447205 - DNA, 19 bp, Mus musculus
  siRNA target sequence for Nr2f6 (NM_010150.1,299-317).
caagtccagtggaaagcat

SEQ ID NO: 447206 - DNA, 19 bp, Mus musculus
  siRNA target sequence for Nr2f6 (NM_010150.1,403-421).
gtgactgtcagattgatca

SEQ ID NO: 447207 - DNA, 19 bp, Mus musculus
  siRNA target sequence for Nr2f6 (NM_010150.1,1242-1260).
ctgtcagggagcaccttta

SEQ ID NO: 447208 - DNA, 19 bp, Mus musculus
  siRNA target sequence for Nr3c1 (NM_008173.1,21-39).
ggactccaaagaatcctta

SEQ ID NO: 447209 - DNA, 19 bp, Mus musculus
  siRNA target sequence for Nr3c1 (NM_008173.1,92-110).
gaagcgtgatggacttgta

SEQ ID NO: 447210 - DNA, 19 bp, Mus musculus
  siRNA target sequence for Nr3c1 (NM_008173.1,95-113).
gcgtgatggacttgtataa

SEQ ID NO: 447211 - DNA, 19 bp, Mus musculus
  siRNA target sequence for Nr3c1 (NM_008173.1,96-114).
cgtgatggacttgtataaa

SEQ ID NO: 447212 - DNA, 19 bp, Mus musculus
  siRNA target sequence for Nr3c1 (NM_008173.1,196-214).
cagaggattctccttgatt

SEQ ID NO: 447213 - DNA, 19 bp, Mus musculus
  siRNA target sequence for Nr3c1 (NM_008173.1,201-219).
gattctccttgatttttca

SEQ ID NO: 447214 - DNA, 19 bp, Mus musculus
  siRNA target sequence for Nr3c1 (NM_008173.1,261-279).
gcagccgcagccagattta

SEQ ID NO: 447215 - DNA, 19 bp, Mus musculus
  siRNA target sequence for Nr3c1 (NM_008173.1,262-280).
cagccgcagccagatttat

SEQ ID NO: 447216 - DNA, 19 bp, Mus musculus
  siRNA target sequence for Nr3c1 (NM_008173.1,265-283).
ccgcagccagatttatcca

SEQ ID NO: 447217 - DNA, 19 bp, Mus musculus
  siRNA target sequence for Nr3c1 (NM_008173.1,266-284).
cgcagccagatttatccaa

SEQ ID NO: 447218 - DNA, 19 bp, Mus musculus
  siRNA target sequence for Nr3c1 (NM_008173.1,315-333).
gggagagaccgaaacaaaa

SEQ ID NO: 447219 - DNA, 19 bp, Mus musculus
  siRNA target sequence for Nr3c1 (NM_008173.1,317-335).
gagagaccgaaacaaaagt

SEQ ID NO: 447220 - DNA, 19 bp, Mus musculus
  siRNA target sequence for Nr3c1 (NM_008173.1,525-543).
ctctgatccatcttcagaa

SEQ ID NO: 447221 - DNA, 19 bp, Mus musculus
  siRNA target sequence for Nr3c1 (NM_008173.1,573-591).
caacggtggcagtgtgaaa

SEQ ID NO: 447222 - DNA, 19 bp, Mus musculus
  siRNA target sequence for Nr3c1 (NM_008173.1,577-595).
ggtggcagtgtgaaattgt

SEQ ID NO: 447223 - DNA, 19 bp, Mus musculus
  siRNA target sequence for Nr3c1 (NM_008173.1,647-665).
ccgggtccccaggtaaaga

SEQ ID NO: 447224 - DNA, 19 bp, Mus musculus
  siRNA target sequence for Nr3c1 (NM_008173.1,683-701).
ggaggtcagacctgttgat

SEQ ID NO: 447225 - DNA, 19 bp, Mus musculus
  siRNA target sequence for Nr3c1 (NM_008173.1,684-702).
gaggtcagacctgttgata

SEQ ID NO: 447226 - DNA, 19 bp, Mus musculus
  siRNA target sequence for Nr3c1 (NM_008173.1,686-704).
ggtcagacctgttgataga

SEQ ID NO: 447227 - DNA, 19 bp, Mus musculus
  siRNA target sequence for Nr3c1 (NM_008173.1,687-705).
gtcagacctgttgatagat

SEQ ID NO: 447228 - DNA, 19 bp, Mus musculus
  siRNA target sequence for Nr3c1 (NM_008173.1,689-707).
cagacctgttgatagatga

SEQ ID NO: 447229 - DNA, 19 bp, Mus musculus
  siRNA target sequence for Nr3c1 (NM_008173.1,691-709).
gacctgttgatagatgaaa

SEQ ID NO: 447230 - DNA, 19 bp, Mus musculus
  siRNA target sequence for Nr3c1 (NM_008173.1,728-746).
cgggagaagatgatccatt

SEQ ID NO: 447231 - DNA, 19 bp, Mus musculus
  siRNA target sequence for Nr3c1 (NM_008173.1,793-811).
ccggacactaaacctaaaa

SEQ ID NO: 447232 - DNA, 19 bp, Mus musculus
  siRNA target sequence for Nr3c1 (NM_008173.1,817-835).
gatactggagatacaatct

SEQ ID NO: 447233 - DNA, 19 bp, Mus musculus
  siRNA target sequence for Nr3c1 (NM_008173.1,823-841).
ggagatacaatcttatcaa

SEQ ID NO: 447234 - DNA, 19 bp, Mus musculus
  siRNA target sequence for Nr3c1 (NM_008173.1,902-920).
gcacccctggggtaattaa

SEQ ID NO: 447235 - DNA, 19 bp, Mus musculus
  siRNA target sequence for Nr3c1 (NM_008173.1,905-923).
cccctggggtaattaagca

SEQ ID NO: 447236 - DNA, 19 bp, Mus musculus
  siRNA target sequence for Nr3c1 (NM_008173.1,911-929).
gggtaattaagcaagagaa

SEQ ID NO: 447237 - DNA, 19 bp, Mus musculus
  siRNA target sequence for Nr3c1 (NM_008173.1,957-975).
cttttctgggacaaatata

SEQ ID NO: 447238 - DNA, 19 bp, Mus musculus
  siRNA target sequence for Nr3c1 (NM_008173.1,1028-1046).
gacagatgtaccactatga

SEQ ID NO: 447239 - DNA, 19 bp, Mus musculus
  siRNA target sequence for Nr3c1 (NM_008173.1,1191-1209).
cgcaggccgctcagtgttt

SEQ ID NO: 447240 - DNA, 19 bp, Mus musculus
  siRNA target sequence for Nr3c1 (NM_008173.1,1195-1213).
ggccgctcagtgttttcta

SEQ ID NO: 447241 - DNA, 19 bp, Mus musculus
  siRNA target sequence for Nr3c1 (NM_008173.1,1196-1214).
gccgctcagtgttttctaa

SEQ ID NO: 447242 - DNA, 19 bp, Mus musculus
  siRNA target sequence for Nr3c1 (NM_008173.1,1197-1215).
ccgctcagtgttttctaat

SEQ ID NO: 447243 - DNA, 19 bp, Mus musculus
  siRNA target sequence for Nr3c1 (NM_008173.1,1200-1218).
ctcagtgttttctaatgga

SEQ ID NO: 447244 - DNA, 19 bp, Mus musculus
  siRNA target sequence for Nr3c1 (NM_008173.1,1349-1367).
cgtgtggaagctgtaaagt

SEQ ID NO: 447245 - DNA, 19 bp, Mus musculus
  siRNA target sequence for Nr3c1 (NM_008173.1,1459-1477).
ccagcatgccgctatcgaa

SEQ ID NO: 447246 - DNA, 19 bp, Mus musculus
  siRNA target sequence for Nr3c1 (NM_008173.1,1460-1478).
cagcatgccgctatcgaaa

SEQ ID NO: 447247 - DNA, 19 bp, Mus musculus
  siRNA target sequence for Nr3c1 (NM_008173.1,1462-1480).
gcatgccgctatcgaaaat

SEQ ID NO: 447248 - DNA, 19 bp, Mus musculus
  siRNA target sequence for Nr3c1 (NM_008173.1,1466-1484).
gccgctatcgaaaatgtct

SEQ ID NO: 447249 - DNA, 19 bp, Mus musculus
  siRNA target sequence for Nr3c1 (NM_008173.1,1501-1519).
ctggaagctcgaaaaacga

SEQ ID NO: 447250 - DNA, 19 bp, Mus musculus
  siRNA target sequence for Nr3c1 (NM_008173.1,1653-1671).
cgagcctgaggtgttatat

SEQ ID NO: 447251 - DNA, 19 bp, Mus musculus
  siRNA target sequence for Nr3c1 (NM_008173.1,1656-1674).
gcctgaggtgttatatgca

SEQ ID NO: 447252 - DNA, 19 bp, Mus musculus
  siRNA target sequence for Nr3c1 (NM_008173.1,1662-1680).
ggtgttatatgcaggatat

SEQ ID NO: 447253 - DNA, 19 bp, Mus musculus
  siRNA target sequence for Nr3c1 (NM_008173.1,1696-1714).
gactcagcatggagaatta

SEQ ID NO: 447254 - DNA, 19 bp, Mus musculus
  siRNA target sequence for Nr3c1 (NM_008173.1,1716-1734).
gaccacgctcaacatgtta

SEQ ID NO: 447255 - DNA, 19 bp, Mus musculus
  siRNA target sequence for Nr3c1 (NM_008173.1,1747-1765).
gtgattgccgcagtgaaat

SEQ ID NO: 447256 - DNA, 19 bp, Mus musculus
  siRNA target sequence for Nr3c1 (NM_008173.1,1906-1924).
gctcctgatctgattatta

SEQ ID NO: 447257 - DNA, 19 bp, Mus musculus
  siRNA target sequence for Nr3c1 (NM_008173.1,1949-1967).
gcatgtatgaccaatgtaa

SEQ ID NO: 447258 - DNA, 19 bp, Mus musculus
  siRNA target sequence for Nr3c1 (NM_008173.1,1950-1968).
catgtatgaccaatgtaaa

SEQ ID NO: 447259 - DNA, 19 bp, Mus musculus
  siRNA target sequence for Nr3c1 (NM_008173.1,1975-1993).
ctgtttatctccactgaat

SEQ ID NO: 447260 - DNA, 19 bp, Mus musculus
  siRNA target sequence for Nr3c1 (NM_008173.1,2095-2113).
gatgagattcgaatgactt

SEQ ID NO: 447261 - DNA, 19 bp, Mus musculus
  siRNA target sequence for Nr3c1 (NM_008173.1,2098-2116).
gagattcgaatgacttata

SEQ ID NO: 447262 - DNA, 19 bp, Mus musculus
  siRNA target sequence for Nr3c1 (NM_008173.1,2105-2123).
gaatgacttatatcaaaga

SEQ ID NO: 447263 - DNA, 19 bp, Mus musculus
  siRNA target sequence for Nr3c1 (NM_008173.1,2125-2143).
ctaggaaaagccattgtca

SEQ ID NO: 447264 - DNA, 19 bp, Mus musculus
  siRNA target sequence for Nr3c1 (NM_008173.1,2171-2189).
ggcagcggttttatcaact

SEQ ID NO: 447265 - DNA, 19 bp, Mus musculus
  siRNA target sequence for Nr3c1 (NM_008173.1,2233-2251).
cttagctactgcttccaaa

SEQ ID NO: 447266 - DNA, 19 bp, Mus musculus
  siRNA target sequence for Nr3c1 (NM_008173.1,2244-2262).
cttccaaacatttttggat

SEQ ID NO: 447267 - DNA, 19 bp, Mus musculus
  siRNA target sequence for Nr3c1 (NM_008173.1,2285-2303).
cagagatgttagctgaaat

SEQ ID NO: 447268 - DNA, 19 bp, Mus musculus
  siRNA target sequence for Nr4a1 (NM_010444.1,116-134).
cctgtattcaagctcaata

SEQ ID NO: 447269 - DNA, 19 bp, Mus musculus
  siRNA target sequence for Nr4a1 (NM_010444.1,117-135).
ctgtattcaagctcaatat

SEQ ID NO: 447270 - DNA, 19 bp, Mus musculus
  siRNA target sequence for Nr4a1 (NM_010444.1,285-303).
cgggtacaccggagagttt

SEQ ID NO: 447271 - DNA, 19 bp, Mus musculus
  siRNA target sequence for Nr4a1 (NM_010444.1,287-305).
ggtacaccggagagtttga

SEQ ID NO: 447272 - DNA, 19 bp, Mus musculus
  siRNA target sequence for Nr4a1 (NM_010444.1,406-424).
gcttcggcgtccttcaagt

SEQ ID NO: 447273 - DNA, 19 bp, Mus musculus
  siRNA target sequence for Nr4a1 (NM_010444.1,600-618).
ctccccgagccagacttat

SEQ ID NO: 447274 - DNA, 19 bp, Mus musculus
  siRNA target sequence for Nr4a1 (NM_010444.1,1259-1277).
ccaaattggactattccaa

SEQ ID NO: 447275 - DNA, 19 bp, Mus musculus
  siRNA target sequence for Nr4a1 (NM_010444.1,1318-1336).
gccggtgacgtgcaacaat

SEQ ID NO: 447276 - DNA, 19 bp, Mus musculus
  siRNA target sequence for Nr4a1 (NM_010444.1,1319-1337).
ccggtgacgtgcaacaatt

SEQ ID NO: 447277 - DNA, 19 bp, Mus musculus
  siRNA target sequence for Nr4a1 (NM_010444.1,1320-1338).
cggtgacgtgcaacaattt

SEQ ID NO: 447278 - DNA, 19 bp, Mus musculus
  siRNA target sequence for Nr4a1 (NM_010444.1,1321-1339).
ggtgacgtgcaacaatttt

SEQ ID NO: 447279 - DNA, 19 bp, Mus musculus
  siRNA target sequence for Nr4a1 (NM_010444.1,1327-1345).
gtgcaacaattttatgact

SEQ ID NO: 447280 - DNA, 19 bp, Mus musculus
  siRNA target sequence for Nr4a1 (NM_010444.1,1352-1370).
ctggttccctggacgttat

SEQ ID NO: 447281 - DNA, 19 bp, Mus musculus
  siRNA target sequence for Nr4a1 (NM_010444.1,1372-1390).
cgaaagtgggcagaaaaaa

SEQ ID NO: 447282 - DNA, 19 bp, Mus musculus
  siRNA target sequence for Nr4a1 (NM_010444.1,1469-1487).
gcctggcataccgatctaa

SEQ ID NO: 447283 - DNA, 19 bp, Mus musculus
  siRNA target sequence for Nr4a1 (NM_010444.1,1470-1488).
cctggcataccgatctaaa

SEQ ID NO: 447284 - DNA, 19 bp, Mus musculus
  siRNA target sequence for Nr4a1 (NM_010444.1,1599-1617).
gcacagcttgggtgttgat

SEQ ID NO: 447285 - DNA, 19 bp, Mus musculus
  siRNA target sequence for Nr4a1 (NM_010444.1,1602-1620).
cagcttgggtgttgatgtt

SEQ ID NO: 447286 - DNA, 19 bp, Mus musculus
  siRNA target sequence for Nr4a1 (NM_010444.1,1835-1853).
gcatcttttgcctcaagtt

SEQ ID NO: 447287 - DNA, 19 bp, Mus musculus
  siRNA target sequence for Nr4a1 (NM_010444.1,1877-1895).
ctattgtggacaagatctt

SEQ ID NO: 447288 - DNA, 19 bp, Mus musculus
  siRNA target sequence for Nr4a1 (NM_010444.1,1893-1911).
ctttatggacacattgtct

SEQ ID NO: 447289 - DNA, 19 bp, Mus musculus
  siRNA target sequence for Nr4a2 (NM_013613.1,714-732).
cttctcagagctacagtta

SEQ ID NO: 447290 - DNA, 19 bp, Mus musculus
  siRNA target sequence for Nr4a2 (NM_013613.1,734-752).
cactcttcgggagaataca

SEQ ID NO: 447291 - DNA, 19 bp, Mus musculus
  siRNA target sequence for Nr4a2 (NM_013613.1,797-815).
ctcaccaacactgaaatta

SEQ ID NO: 447292 - DNA, 19 bp, Mus musculus
  siRNA target sequence for Nr4a2 (NM_013613.1,885-903).
caccttgcttgtaccaaat

SEQ ID NO: 447293 - DNA, 19 bp, Mus musculus
  siRNA target sequence for Nr4a2 (NM_013613.1,914-932).
ggacagcagtcctccatta

SEQ ID NO: 447294 - DNA, 19 bp, Mus musculus
  siRNA target sequence for Nr4a2 (NM_013613.1,924-942).
cctccattaaggtagaaga

SEQ ID NO: 447295 - DNA, 19 bp, Mus musculus
  siRNA target sequence for Nr4a2 (NM_013613.1,984-1002).
ctcagtccgaggagatgat

SEQ ID NO: 447296 - DNA, 19 bp, Mus musculus
  siRNA target sequence for Nr4a2 (NM_013613.1,1007-1025).
cacagcgggtcggtttact

SEQ ID NO: 447297 - DNA, 19 bp, Mus musculus
  siRNA target sequence for Nr4a2 (NM_013613.1,1011-1029).
gcgggtcggtttactacaa

SEQ ID NO: 447298 - DNA, 19 bp, Mus musculus
  siRNA target sequence for Nr4a2 (NM_013613.1,1130-1148).
gtggccactacgcatatga

SEQ ID NO: 447299 - DNA, 19 bp, Mus musculus
  siRNA target sequence for Nr4a2 (NM_013613.1,1534-1552).
gcaaaaaaacgcgaaatat

SEQ ID NO: 447300 - DNA, 19 bp, Mus musculus
  siRNA target sequence for Nr4a2 (NM_013613.1,1543-1561).
cgcgaaatatgtgtgttta

SEQ ID NO: 447301 - DNA, 19 bp, Mus musculus
  siRNA target sequence for Nr4a2 (NM_013613.1,1546-1564).
gaaatatgtgtgtttagca

SEQ ID NO: 447302 - DNA, 19 bp, Mus musculus
  siRNA target sequence for Nr4a2 (NM_013613.1,1657-1675).
ggttcgcacggacagttta

SEQ ID NO: 447303 - DNA, 19 bp, Mus musculus
  siRNA target sequence for Nr4a2 (NM_013613.1,1658-1676).
gttcgcacggacagtttaa

SEQ ID NO: 447304 - DNA, 19 bp, Mus musculus
  siRNA target sequence for Nr4a2 (NM_013613.1,1770-1788).
gagcccacgtcgattccaa

SEQ ID NO: 447305 - DNA, 19 bp, Mus musculus
  siRNA target sequence for Nr4a2 (NM_013613.1,1826-1844).
gcaaaccctgactatcaga

SEQ ID NO: 447306 - DNA, 19 bp, Mus musculus
  siRNA target sequence for Nr4a2 (NM_013613.1,1850-1868).
ggagatgatacccaacata

SEQ ID NO: 447307 - DNA, 19 bp, Mus musculus
  siRNA target sequence for Nr4a2 (NM_013613.1,1851-1869).
gagatgatacccaacatat

SEQ ID NO: 447308 - DNA, 19 bp, Mus musculus
  siRNA target sequence for Nr4a2 (NM_013613.1,1959-1977).
ccgaccaggacctgctttt

SEQ ID NO: 447309 - DNA, 19 bp, Mus musculus
  siRNA target sequence for Nr4a2 (NM_013613.1,1960-1978).
cgaccaggacctgcttttt

SEQ ID NO: 447310 - DNA, 19 bp, Mus musculus
  siRNA target sequence for Nr4a2 (NM_013613.1,1979-1997).
gaatcagctttcttagaat

SEQ ID NO: 447311 - DNA, 19 bp, Mus musculus
  siRNA target sequence for Nr4a2 (NM_013613.1,2040-2058).
gtaaactcatcttttgcaa

SEQ ID NO: 447312 - DNA, 19 bp, Mus musculus
  siRNA target sequence for Nr4a2 (NM_013613.1,2066-2084).
gtcttgcacaggttgcaat

SEQ ID NO: 447313 - DNA, 19 bp, Mus musculus
  siRNA target sequence for Nr4a2 (NM_013613.1,2101-2119).
ggaatggattgattccatt

SEQ ID NO: 447314 - DNA, 19 bp, Mus musculus
  siRNA target sequence for Nr4a2 (NM_013613.1,2111-2129).
gattccattgttgaattct

SEQ ID NO: 447315 - DNA, 19 bp, Mus musculus
  siRNA target sequence for Nr4a2 (NM_013613.1,2229-2247).
gagtggaagagctacaaaa

SEQ ID NO: 447316 - DNA, 19 bp, Mus musculus
  siRNA target sequence for Nr4a2 (NM_013613.1,2375-2393).
cgcattttctacctgaaat

SEQ ID NO: 447317 - DNA, 19 bp, Mus musculus
  siRNA target sequence for Nr4a2 (NM_013613.1,2376-2394).
gcattttctacctgaaatt

SEQ ID NO: 447318 - DNA, 19 bp, Mus musculus
  siRNA target sequence for Nr4a2 (NM_013613.1,2404-2422).
ggtaccaccaccagcaata

SEQ ID NO: 447319 - DNA, 19 bp, Mus musculus
  siRNA target sequence for Nr4a2 (NM_013613.1,2409-2427).
caccaccagcaataattga

SEQ ID NO: 447320 - DNA, 19 bp, Mus musculus
  siRNA target sequence for Nr4a3 (NM_015743.1,47-65).
cttacgccacgcagactta

SEQ ID NO: 447321 - DNA, 19 bp, Mus musculus
  siRNA target sequence for Nr4a3 (NM_015743.1,197-215).
ccagcagctgcgaactcaa

SEQ ID NO: 447322 - DNA, 19 bp, Mus musculus
  siRNA target sequence for Nr4a3 (NM_015743.1,217-235).
ccctcctgcctgtaccaaa

SEQ ID NO: 447323 - DNA, 19 bp, Mus musculus
  siRNA target sequence for Nr4a3 (NM_015743.1,247-265).
gggcctcggcctttgatca

SEQ ID NO: 447324 - DNA, 19 bp, Mus musculus
  siRNA target sequence for Nr4a3 (NM_015743.1,248-266).
ggcctcggcctttgatcaa

SEQ ID NO: 447325 - DNA, 19 bp, Mus musculus
  siRNA target sequence for Nr4a3 (NM_015743.1,251-269).
ctcggcctttgatcaagat

SEQ ID NO: 447326 - DNA, 19 bp, Mus musculus
  siRNA target sequence for Nr4a3 (NM_015743.1,392-410).
gcacctccatgtacttcaa

SEQ ID NO: 447327 - DNA, 19 bp, Mus musculus
  siRNA target sequence for Nr4a3 (NM_015743.1,562-580).
gcgcgcttcccgatcttct

SEQ ID NO: 447328 - DNA, 19 bp, Mus musculus
  siRNA target sequence for Nr4a3 (NM_015743.1,563-581).
cgcgcttcccgatcttctt

SEQ ID NO: 447329 - DNA, 19 bp, Mus musculus
  siRNA target sequence for Nr4a3 (NM_015743.1,565-583).
cgcttcccgatcttcttca

SEQ ID NO: 447330 - DNA, 19 bp, Mus musculus
  siRNA target sequence for Nr4a3 (NM_015743.1,566-584).
gcttcccgatcttcttcaa

SEQ ID NO: 447331 - DNA, 19 bp, Mus musculus
  siRNA target sequence for Nr4a3 (NM_015743.1,844-862).
cccaataggagctcatcat

SEQ ID NO: 447332 - DNA, 19 bp, Mus musculus
  siRNA target sequence for Nr4a3 (NM_015743.1,954-972).
gagaacggtgcagaaaaat

SEQ ID NO: 447333 - DNA, 19 bp, Mus musculus
  siRNA target sequence for Nr4a3 (NM_015743.1,963-981).
gcagaaaaatgcaaaatat

SEQ ID NO: 447334 - DNA, 19 bp, Mus musculus
  siRNA target sequence for Nr4a3 (NM_015743.1,1064-1082).
gtgtcgggatggttaagga

SEQ ID NO: 447335 - DNA, 19 bp, Mus musculus
  siRNA target sequence for Nr4a3 (NM_015743.1,1089-1107).
gcgtacagacagtctgaaa

SEQ ID NO: 447336 - DNA, 19 bp, Mus musculus
  siRNA target sequence for Nr4a3 (NM_015743.1,1181-1199).
ctcctccgatctgtatgat

SEQ ID NO: 447337 - DNA, 19 bp, Mus musculus
  siRNA target sequence for Nr4a3 (NM_015743.1,1183-1201).
cctccgatctgtatgatga

SEQ ID NO: 447338 - DNA, 19 bp, Mus musculus
  siRNA target sequence for Nr4a3 (NM_015743.1,1184-1202).
ctccgatctgtatgatgaa

SEQ ID NO: 447339 - DNA, 19 bp, Mus musculus
  siRNA target sequence for Nr4a3 (NM_015743.1,1204-1222).
gcccttgtccgagctttaa

SEQ ID NO: 447340 - DNA, 19 bp, Mus musculus
  siRNA target sequence for Nr4a3 (NM_015743.1,1206-1224).
ccttgtccgagctttaaca

SEQ ID NO: 447341 - DNA, 19 bp, Mus musculus
  siRNA target sequence for Nr4a3 (NM_015743.1,1229-1247).
caacacccagagatcttga

SEQ ID NO: 447342 - DNA, 19 bp, Mus musculus
  siRNA target sequence for Nr4a3 (NM_015743.1,1243-1261).
cttgattattccagatact

SEQ ID NO: 447343 - DNA, 19 bp, Mus musculus
  siRNA target sequence for Nr4a3 (NM_015743.1,1300-1318).
cacgtgcaacagttctaca

SEQ ID NO: 447344 - DNA, 19 bp, Mus musculus
  siRNA target sequence for Nr4a3 (NM_015743.1,1393-1411).
gaagatcagacgttactta

SEQ ID NO: 447345 - DNA, 19 bp, Mus musculus
  siRNA target sequence for Nr4a3 (NM_015743.1,1399-1417).
cagacgttacttatagaat

SEQ ID NO: 447346 - DNA, 19 bp, Mus musculus
  siRNA target sequence for Nr4a3 (NM_015743.1,1401-1419).
gacgttacttatagaatca

SEQ ID NO: 447347 - DNA, 19 bp, Mus musculus
  siRNA target sequence for Nr4a3 (NM_015743.1,1447-1465).
ctttccatcaggtcaaaca

SEQ ID NO: 447348 - DNA, 19 bp, Mus musculus
  siRNA target sequence for Nr4a3 (NM_015743.1,1458-1476).
gtcaaacactgctgaagat

SEQ ID NO: 447349 - DNA, 19 bp, Mus musculus
  siRNA target sequence for Nr4a3 (NM_015743.1,1537-1555).
gagtggctcgactccatta

SEQ ID NO: 447350 - DNA, 19 bp, Mus musculus
  siRNA target sequence for Nr4a3 (NM_015743.1,1539-1557).
gtggctcgactccattaaa

SEQ ID NO: 447351 - DNA, 19 bp, Mus musculus
  siRNA target sequence for Nr4a3 (NM_015743.1,1541-1559).
ggctcgactccattaaaga

SEQ ID NO: 447352 - DNA, 19 bp, Mus musculus
  siRNA target sequence for Nr4a3 (NM_015743.1,1543-1561).
ctcgactccattaaagact

SEQ ID NO: 447353 - DNA, 19 bp, Mus musculus
  siRNA target sequence for Nr4a3 (NM_015743.1,1545-1563).
cgactccattaaagacttt

SEQ ID NO: 447354 - DNA, 19 bp, Mus musculus
  siRNA target sequence for Nr4a3 (NM_015743.1,1548-1566).
ctccattaaagacttttct

SEQ ID NO: 447355 - DNA, 19 bp, Mus musculus
  siRNA target sequence for Nr4a3 (NM_015743.1,1576-1594).
cagagcctgaaccttgata

SEQ ID NO: 447356 - DNA, 19 bp, Mus musculus
  siRNA target sequence for Nr4a3 (NM_015743.1,1634-1652).
cagagcgacatgggttaaa

SEQ ID NO: 447357 - DNA, 19 bp, Mus musculus
  siRNA target sequence for Nr4a3 (NM_015743.1,1638-1656).
gcgacatgggttaaaagaa

SEQ ID NO: 447358 - DNA, 19 bp, Mus musculus
  siRNA target sequence for Nr4a3 (NM_015743.1,1675-1693).
ctatgcaccaagatcacaa

SEQ ID NO: 447359 - DNA, 19 bp, Mus musculus
  siRNA target sequence for Nr5a1 (NM_139051.2,289-307).
gtccagaacaacaagcatt

SEQ ID NO: 447360 - DNA, 19 bp, Mus musculus
  siRNA target sequence for Nr5a1 (NM_139051.2,413-431).
ctgtgcgtgctgatcgaat

SEQ ID NO: 447361 - DNA, 19 bp, Mus musculus
  siRNA target sequence for Nr5a1 (NM_139051.2,435-453).
gggtggccggaacaagttt

SEQ ID NO: 447362 - DNA, 19 bp, Mus musculus
  siRNA target sequence for Nr5a1 (NM_139051.2,566-584).
ctcccccaccggactacat

SEQ ID NO: 447363 - DNA, 19 bp, Mus musculus
  siRNA target sequence for Nr5a1 (NM_139051.2,568-586).
cccccaccggactacatgt

SEQ ID NO: 447364 - DNA, 19 bp, Mus musculus
  siRNA target sequence for Nr5a1 (NM_139051.2,569-587).
ccccaccggactacatgtt

SEQ ID NO: 447365 - DNA, 19 bp, Mus musculus
  siRNA target sequence for Nr5a1 (NM_139051.2,570-588).
cccaccggactacatgtta

SEQ ID NO: 447366 - DNA, 19 bp, Mus musculus
  siRNA target sequence for Nr5a1 (NM_139051.2,657-675).
ctttggagccccatctcta

SEQ ID NO: 447367 - DNA, 19 bp, Mus musculus
  siRNA target sequence for Nr5a1 (NM_139051.2,718-736).
ctctatcctgccttctcta

SEQ ID NO: 447368 - DNA, 19 bp, Mus musculus
  siRNA target sequence for Nr5a1 (NM_139051.2,1013-1031).
gaaggtgcatggtctttaa

SEQ ID NO: 447369 - DNA, 19 bp, Mus musculus
  siRNA target sequence for Nr5a1 (NM_139051.2,1299-1317).
cttcagcctcgatgtgaaa

SEQ ID NO: 447370 - DNA, 19 bp, Mus musculus
  siRNA target sequence for Nr5a1 (NM_139051.2,1304-1322).
gcctcgatgtgaaattcct

SEQ ID NO: 447371 - DNA, 19 bp, Mus musculus
  siRNA target sequence for Nr5a1 (NM_139051.2,1399-1417).
ccacactgcggggacaaat

SEQ ID NO: 447372 - DNA, 19 bp, Mus musculus
  siRNA target sequence for Nr5a1 (NM_139051.2,1400-1418).
cacactgcggggacaaatt

SEQ ID NO: 447373 - DNA, 19 bp, Mus musculus
  siRNA target sequence for Nr5a1 (NM_139051.2,1512-1530).
ccgcaacaaccttctcatt

SEQ ID NO: 447374 - DNA, 19 bp, Mus musculus
  siRNA target sequence for Nr5a2 (NM_030676.1,483-501).
gtgtgtggcgataaagtgt

SEQ ID NO: 447375 - DNA, 19 bp, Mus musculus
  siRNA target sequence for Nr5a2 (NM_030676.1,554-572).
gcgaactgtccaaaaccaa

SEQ ID NO: 447376 - DNA, 19 bp, Mus musculus
  siRNA target sequence for Nr5a2 (NM_030676.1,634-652).
gtccctactgtcgattcaa

SEQ ID NO: 447377 - DNA, 19 bp, Mus musculus
  siRNA target sequence for Nr5a2 (NM_030676.1,636-654).
ccctactgtcgattcaaaa

SEQ ID NO: 447378 - DNA, 19 bp, Mus musculus
  siRNA target sequence for Nr5a2 (NM_030676.1,641-659).
ctgtcgattcaaaaaatgt

SEQ ID NO: 447379 - DNA, 19 bp, Mus musculus
  siRNA target sequence for Nr5a2 (NM_030676.1,643-661).
gtcgattcaaaaaatgtat

SEQ ID NO: 447380 - DNA, 19 bp, Mus musculus
  siRNA target sequence for Nr5a2 (NM_030676.1,701-719).
catgcgagggggcagaaat

SEQ ID NO: 447381 - DNA, 19 bp, Mus musculus
  siRNA target sequence for Nr5a2 (NM_030676.1,705-723).
cgagggggcagaaataagt

SEQ ID NO: 447382 - DNA, 19 bp, Mus musculus
  siRNA target sequence for Nr5a2 (NM_030676.1,781-799).
gagccaatggacttaagct

SEQ ID NO: 447383 - DNA, 19 bp, Mus musculus
  siRNA target sequence for Nr5a2 (NM_030676.1,847-865).
ctgcaattcagaacattca

SEQ ID NO: 447384 - DNA, 19 bp, Mus musculus
  siRNA target sequence for Nr5a2 (NM_030676.1,849-867).
gcaattcagaacattcatt

SEQ ID NO: 447385 - DNA, 19 bp, Mus musculus
  siRNA target sequence for Nr5a2 (NM_030676.1,902-920).
cttgcctccgacagactat

SEQ ID NO: 447386 - DNA, 19 bp, Mus musculus
  siRNA target sequence for Nr5a2 (NM_030676.1,906-924).
cctccgacagactatgaca

SEQ ID NO: 447387 - DNA, 19 bp, Mus musculus
  siRNA target sequence for Nr5a2 (NM_030676.1,943-961).
ctcccattagcatgacaat

SEQ ID NO: 447388 - DNA, 19 bp, Mus musculus
  siRNA target sequence for Nr5a2 (NM_030676.1,989-1007).
ccaaccctatggtcacttt

SEQ ID NO: 447389 - DNA, 19 bp, Mus musculus
  siRNA target sequence for Nr5a2 (NM_030676.1,1008-1026).
cctagtcgggccatcaagt

SEQ ID NO: 447390 - DNA, 19 bp, Mus musculus
  siRNA target sequence for Nr5a2 (NM_030676.1,1051-1069).
gctcacctgagtcaatgat

SEQ ID NO: 447391 - DNA, 19 bp, Mus musculus
  siRNA target sequence for Nr5a2 (NM_030676.1,1086-1104).
gatggttaccagacaaact

SEQ ID NO: 447392 - DNA, 19 bp, Mus musculus
  siRNA target sequence for Nr5a2 (NM_030676.1,1122-1140).
cacctgatactggaacttt

SEQ ID NO: 447393 - DNA, 19 bp, Mus musculus
  siRNA target sequence for Nr5a2 (NM_030676.1,1232-1250).
gagcgcatttgggctttta

SEQ ID NO: 447394 - DNA, 19 bp, Mus musculus
  siRNA target sequence for Nr5a2 (NM_030676.1,1236-1254).
gcatttgggcttttatgca

SEQ ID NO: 447395 - DNA, 19 bp, Mus musculus
  siRNA target sequence for Nr5a2 (NM_030676.1,1237-1255).
catttgggcttttatgcaa

SEQ ID NO: 447396 - DNA, 19 bp, Mus musculus
  siRNA target sequence for Nr5a2 (NM_030676.1,1270-1288).
ccctgttctccattgttga

SEQ ID NO: 447397 - DNA, 19 bp, Mus musculus
  siRNA target sequence for Nr5a2 (NM_030676.1,1287-1305).
gagtgggccaggagtagta

SEQ ID NO: 447398 - DNA, 19 bp, Mus musculus
  siRNA target sequence for Nr5a2 (NM_030676.1,1291-1309).
gggccaggagtagtatctt

SEQ ID NO: 447399 - DNA, 19 bp, Mus musculus
  siRNA target sequence for Nr5a2 (NM_030676.1,1335-1353).
caaatgaagctgcttcaaa

SEQ ID NO: 447400 - DNA, 19 bp, Mus musculus
  siRNA target sequence for Nr5a2 (NM_030676.1,1358-1376).
ctggagtgagctcttgatt

SEQ ID NO: 447401 - DNA, 19 bp, Mus musculus
  siRNA target sequence for Nr5a2 (NM_030676.1,1474-1492).
cagaagtcgcgttcaacaa

SEQ ID NO: 447402 - DNA, 19 bp, Mus musculus
  siRNA target sequence for Nr5a2 (NM_030676.1,1525-1543).
ggctccgttcccttcagtt

SEQ ID NO: 447403 - DNA, 19 bp, Mus musculus
  siRNA target sequence for Nr5a2 (NM_030676.1,1545-1563).
gatcagcgggagtttgtat

SEQ ID NO: 447404 - DNA, 19 bp, Mus musculus
  siRNA target sequence for Nr5a2 (NM_030676.1,1684-1702).
cacaacagactgagaaatt

SEQ ID NO: 447405 - DNA, 19 bp, Mus musculus
  siRNA target sequence for Nr5a2 (NM_030676.1,1784-1802).
cggggatgtgccctataat

SEQ ID NO: 447406 - DNA, 19 bp, Mus musculus
  siRNA target sequence for Nr5a2 (NM_030676.1,1785-1803).
ggggatgtgccctataata

SEQ ID NO: 447407 - DNA, 19 bp, Mus musculus
  siRNA target sequence for Nr5a2 (NM_030676.1,1817-1835).
gatgctgcatgccaaaaga

SEQ ID NO: 447408 - DNA, 19 bp, Mus musculus
  siRNA target sequence for Nr6a1 (NM_010264.2,515-533).
gcttgatccaggcactaat

SEQ ID NO: 447409 - DNA, 19 bp, Mus musculus
  siRNA target sequence for Nr6a1 (NM_010264.2,865-883).
gaccagtccagatatcaga

SEQ ID NO: 447410 - DNA, 19 bp, Mus musculus
  siRNA target sequence for Nr6a1 (NM_010264.2,1030-1048).
gtaggtctgtggaactaaa

SEQ ID NO: 447411 - DNA, 19 bp, Mus musculus
  siRNA target sequence for Nr6a1 (NM_010264.2,1060-1078).
cattcagggatcagtacat

SEQ ID NO: 447412 - DNA, 19 bp, Mus musculus
  siRNA target sequence for Nr6a1 (NM_010264.2,1085-1103).
gtcagtgcctccacattat

SEQ ID NO: 447413 - DNA, 19 bp, Mus musculus
  siRNA target sequence for Nr6a1 (NM_010264.2,1089-1107).
gtgcctccacattatcaat

SEQ ID NO: 447414 - DNA, 19 bp, Mus musculus
  siRNA target sequence for Nr6a1 (NM_010264.2,1181-1199).
gtcctacagtctgattcat

SEQ ID NO: 447415 - DNA, 19 bp, Mus musculus
  siRNA target sequence for Nr6a1 (NM_010264.2,1228-1246).
cattgggcacacctatgtt

SEQ ID NO: 447416 - DNA, 19 bp, Mus musculus
  siRNA target sequence for Nr6a1 (NM_010264.2,1234-1252).
gcacacctatgttgattga

SEQ ID NO: 447417 - DNA, 19 bp, Mus musculus
  siRNA target sequence for Nr6a1 (NM_010264.2,1305-1323).
gccgacgagttgctcttta

SEQ ID NO: 447418 - DNA, 19 bp, Mus musculus
  siRNA target sequence for Nr6a1 (NM_010264.2,1362-1380).
gagctctcaatcaaggatt

SEQ ID NO: 447419 - DNA, 19 bp, Mus musculus
  siRNA target sequence for Nr6a1 (NM_010264.2,1399-1417).
ctacgtggcaggagttaat

SEQ ID NO: 447420 - DNA, 19 bp, Mus musculus
  siRNA target sequence for Nr6a1 (NM_010264.2,1402-1420).
cgtggcaggagttaatcct

SEQ ID NO: 447421 - DNA, 19 bp, Mus musculus
  siRNA target sequence for Nr6a1 (NM_010264.2,1439-1457).
gtacagcaagcagatcttt

SEQ ID NO: 447422 - DNA, 19 bp, Mus musculus
  siRNA target sequence for Nr6a1 (NM_010264.2,1484-1502).
gtactcaccctctgatgaa

SEQ ID NO: 447423 - DNA, 19 bp, Mus musculus
  siRNA target sequence for Nr6a1 (NM_010264.2,1508-1526).
ccacagatttagtgatgaa

SEQ ID NO: 447424 - DNA, 19 bp, Mus musculus
  siRNA target sequence for Nr6a1 (NM_010264.2,1542-1560).
gaacgactcatctacctat

SEQ ID NO: 447425 - DNA, 19 bp, Mus musculus
  siRNA target sequence for Nr6a1 (NM_010264.2,1546-1564).
gactcatctacctatatca

SEQ ID NO: 447426 - DNA, 19 bp, Mus musculus
  siRNA target sequence for Nr6a1 (NM_010264.2,1595-1613).
ggagtacgcatgcatgaaa

SEQ ID NO: 447427 - DNA, 19 bp, Mus musculus
  siRNA target sequence for Nr6a1 (NM_010264.2,1606-1624).
gcatgaaagcaattaactt

SEQ ID NO: 447428 - DNA, 19 bp, Mus musculus
  siRNA target sequence for Nr6a1 (NM_010264.2,1657-1675).
cctcacagctggaacaact

SEQ ID NO: 447429 - DNA, 19 bp, Mus musculus
  siRNA target sequence for Nr6a1 (NM_010264.2,1674-1692).
ctgaacaagcggtattggt

SEQ ID NO: 447430 - DNA, 19 bp, Mus musculus
  siRNA target sequence for Nr6a1 (NM_010264.2,1679-1697).
caagcggtattggtacatt

SEQ ID NO: 447431 - DNA, 19 bp, Mus musculus
  siRNA target sequence for Nr6a1 (NM_010264.2,1682-1700).
gcggtattggtacatttgt

SEQ ID NO: 447432 - DNA, 19 bp, Mus musculus
  siRNA target sequence for Nr6a1 (NM_010264.2,1703-1721).
ggatttcactgaatataaa

SEQ ID NO: 447433 - DNA, 19 bp, Mus musculus
  siRNA target sequence for Nt5c3 (NM_026004.1,143-161).
ccaagatcatcgaaatgat

SEQ ID NO: 447434 - DNA, 19 bp, Mus musculus
  siRNA target sequence for Nt5c3 (NM_026004.1,153-171).
cgaaatgatgccagaattt

SEQ ID NO: 447435 - DNA, 19 bp, Mus musculus
  siRNA target sequence for Nt5c3 (NM_026004.1,179-197).
gctcagttcgtatcaagaa

SEQ ID NO: 447436 - DNA, 19 bp, Mus musculus
  siRNA target sequence for Nt5c3 (NM_026004.1,239-257).
gaggcgctgccaaacttca

SEQ ID NO: 447437 - DNA, 19 bp, Mus musculus
  siRNA target sequence for Nt5c3 (NM_026004.1,242-260).
gcgctgccaaacttcagat

SEQ ID NO: 447438 - DNA, 19 bp, Mus musculus
  siRNA target sequence for Nt5c3 (NM_026004.1,243-261).
cgctgccaaacttcagata

SEQ ID NO: 447439 - DNA, 19 bp, Mus musculus
  siRNA target sequence for Nt5c3 (NM_026004.1,244-262).
gctgccaaacttcagataa

SEQ ID NO: 447440 - DNA, 19 bp, Mus musculus
  siRNA target sequence for Nt5c3 (NM_026004.1,245-263).
ctgccaaacttcagataat

SEQ ID NO: 447441 - DNA, 19 bp, Mus musculus
  siRNA target sequence for Nt5c3 (NM_026004.1,247-265).
gccaaacttcagataataa

SEQ ID NO: 447442 - DNA, 19 bp, Mus musculus
  siRNA target sequence for Nt5c3 (NM_026004.1,268-286).
gactttgacatgactctaa

SEQ ID NO: 447443 - DNA, 19 bp, Mus musculus
  siRNA target sequence for Nt5c3 (NM_026004.1,270-288).
ctttgacatgactctaagt

SEQ ID NO: 447444 - DNA, 19 bp, Mus musculus
  siRNA target sequence for Nt5c3 (NM_026004.1,311-329).
gatgcccaacgtgtcataa

SEQ ID NO: 447445 - DNA, 19 bp, Mus musculus
  siRNA target sequence for Nt5c3 (NM_026004.1,316-334).
ccaacgtgtcataatatca

SEQ ID NO: 447446 - DNA, 19 bp, Mus musculus
  siRNA target sequence for Nt5c3 (NM_026004.1,317-335).
caacgtgtcataatatcat

SEQ ID NO: 447447 - DNA, 19 bp, Mus musculus
  siRNA target sequence for Nt5c3 (NM_026004.1,320-338).
cgtgtcataatatcattga

SEQ ID NO: 447448 - DNA, 19 bp, Mus musculus
  siRNA target sequence for Nt5c3 (NM_026004.1,323-341).
gtcataatatcattgacaa

SEQ ID NO: 447449 - DNA, 19 bp, Mus musculus
  siRNA target sequence for Nt5c3 (NM_026004.1,333-351).
cattgacaactgtaagctt

SEQ ID NO: 447450 - DNA, 19 bp, Mus musculus
  siRNA target sequence for Nt5c3 (NM_026004.1,453-471).
ggtagagtggtataccaaa

SEQ ID NO: 447451 - DNA, 19 bp, Mus musculus
  siRNA target sequence for Nt5c3 (NM_026004.1,454-472).
gtagagtggtataccaaat

SEQ ID NO: 447452 - DNA, 19 bp, Mus musculus
  siRNA target sequence for Nt5c3 (NM_026004.1,468-486).
caaatctcacggtttgctt

SEQ ID NO: 447453 - DNA, 19 bp, Mus musculus
  siRNA target sequence for Nt5c3 (NM_026004.1,477-495).
cggtttgcttattgaacaa

SEQ ID NO: 447454 - DNA, 19 bp, Mus musculus
  siRNA target sequence for Nt5c3 (NM_026004.1,498-516).
cataccaaaagccaaactt

SEQ ID NO: 447455 - DNA, 19 bp, Mus musculus
  siRNA target sequence for Nt5c3 (NM_026004.1,591-609).
cggtatccctgtgttcata

SEQ ID NO: 447456 - DNA, 19 bp, Mus musculus
  siRNA target sequence for Nt5c3 (NM_026004.1,592-610).
ggtatccctgtgttcatat

SEQ ID NO: 447457 - DNA, 19 bp, Mus musculus
  siRNA target sequence for Nt5c3 (NM_026004.1,650-668).
ggcaggctggagtttatca

SEQ ID NO: 447458 - DNA, 19 bp, Mus musculus
  siRNA target sequence for Nt5c3 (NM_026004.1,676-694).
gtcaaagtagtgtcaaact

SEQ ID NO: 447459 - DNA, 19 bp, Mus musculus
  siRNA target sequence for Nt5c3 (NM_026004.1,685-703).
gtgtcaaacttcatggatt

SEQ ID NO: 447460 - DNA, 19 bp, Mus musculus
  siRNA target sequence for Nt5c3 (NM_026004.1,687-705).
gtcaaacttcatggatttt

SEQ ID NO: 447461 - DNA, 19 bp, Mus musculus
  siRNA target sequence for Nt5c3 (NM_026004.1,765-783).
cgatggtgccctgaagaat

SEQ ID NO: 447462 - DNA, 19 bp, Mus musculus
  siRNA target sequence for Nt5c3 (NM_026004.1,766-784).
gatggtgccctgaagaata

SEQ ID NO: 447463 - DNA, 19 bp, Mus musculus
  siRNA target sequence for Nt5c3 (NM_026004.1,861-879).
cgatggcgtagccaatgtt

SEQ ID NO: 447464 - DNA, 19 bp, Mus musculus
  siRNA target sequence for Nt5c3 (NM_026004.1,872-890).
ccaatgttgaacacattct

SEQ ID NO: 447465 - DNA, 19 bp, Mus musculus
  siRNA target sequence for Nt5c3 (NM_026004.1,914-932).
gagtagacgagcttttaga

SEQ ID NO: 447466 - DNA, 19 bp, Mus musculus
  siRNA target sequence for Nt5c3 (NM_026004.1,916-934).
gtagacgagcttttagaaa

SEQ ID NO: 447467 - DNA, 19 bp, Mus musculus
  siRNA target sequence for Nt5c3 (NM_026004.1,942-960).
ggactcttatgatattgtt

SEQ ID NO: 447468 - DNA, 19 bp, Mus musculus
  siRNA target sequence for Nt5c3 (NM_026004.1,943-961).
gactcttatgatattgttt

SEQ ID NO: 447469 - DNA, 19 bp, Mus musculus
  siRNA target sequence for Nt5c3 (NM_026004.1,981-999).
ggaggttgtcaactcaatt

SEQ ID NO: 447470 - DNA, 19 bp, Mus musculus
  siRNA target sequence for Nt5c3 (NM_026004.1,982-1000).
gaggttgtcaactcaattt

SEQ ID NO: 447471 - DNA, 19 bp, Mus musculus
  siRNA target sequence for Nt5c3 (NM_026004.1,984-1002).
ggttgtcaactcaatttta

SEQ ID NO: 447472 - DNA, 19 bp, Mus musculus
  siRNA target sequence for Og2x (NM_130869.1,294-312).
cgaggaagaaggttgttct

SEQ ID NO: 447473 - DNA, 19 bp, Mus musculus
  siRNA target sequence for Og2x (NM_130869.1,431-449).
cctgtcaatttcggaaaaa

SEQ ID NO: 447474 - DNA, 19 bp, Mus musculus
  siRNA target sequence for Og2x (NM_130869.1,513-531).
ctatcctgacagtgacaaa

SEQ ID NO: 447475 - DNA, 19 bp, Mus musculus
  siRNA target sequence for Og2x (NM_130869.1,524-542).
gtgacaaacgccatgagat

SEQ ID NO: 447476 - DNA, 19 bp, Mus musculus
  siRNA target sequence for Og2x (NM_130869.1,559-577).
gtaaccccccaaagaatca

SEQ ID NO: 447477 - DNA, 19 bp, Mus musculus
  siRNA target sequence for Og2x (NM_130869.1,625-643).
ctgaacgagaaggaaacta

SEQ ID NO: 447478 - DNA, 19 bp, Mus musculus
  siRNA target sequence for Og2x (NM_130869.1,803-821).
ctctgaccccctttcagaa

SEQ ID NO: 447479 - DNA, 19 bp, Mus musculus
  siRNA target sequence for Og2x (NM_130869.1,952-970).
cctggcagtgacagcatat

SEQ ID NO: 447480 - DNA, 19 bp, Mus musculus
  siRNA target sequence for Og2x (NM_130869.1,956-974).
gcagtgacagcatatacaa

SEQ ID NO: 447481 - DNA, 19 bp, Mus musculus
  siRNA target sequence for Og2x (NM_130869.1,1019-1037).
ccacctactcaaatttgga

SEQ ID NO: 447482 - DNA, 19 bp, Mus musculus
  siRNA target sequence for Og2x (NM_130869.1,1067-1085).
gcagccagttgggttcatt

SEQ ID NO: 447483 - DNA, 19 bp, Mus musculus
  siRNA target sequence for Og2x (NM_130869.1,1195-1213).
ccagaagactctctgtttt

SEQ ID NO: 447484 - DNA, 19 bp, Mus musculus
  siRNA target sequence for Og2x (NM_130869.1,1235-1253).
gagactcatcacaggatta

SEQ ID NO: 447485 - DNA, 19 bp, Mus musculus
  siRNA target sequence for Og2x (NM_130869.1,1265-1283).
ccccaccaggtcagatctt

SEQ ID NO: 447486 - DNA, 19 bp, Mus musculus
  siRNA target sequence for Og2x (NM_130869.1,1396-1414).
gcagagggttactttccta

SEQ ID NO: 447487 - DNA, 19 bp, Mus musculus
  siRNA target sequence for Og2x (NM_130869.1,1401-1419).
gggttactttcctaaccta

SEQ ID NO: 447488 - DNA, 19 bp, Mus musculus
  siRNA target sequence for Og2x (NM_130869.1,1402-1420).
ggttactttcctaacctat

SEQ ID NO: 447489 - DNA, 19 bp, Mus musculus
  siRNA target sequence for Og2x (NM_130869.1,1416-1434).
cctattgccaactccatat

SEQ ID NO: 447490 - DNA, 19 bp, Mus musculus
  siRNA target sequence for Og2x (NM_130869.1,1427-1445).
ctccatatgctctgactat

SEQ ID NO: 447491 - DNA, 19 bp, Mus musculus
  siRNA target sequence for Og2x (NM_130869.1,1429-1447).
ccatatgctctgactatga

SEQ ID NO: 447492 - DNA, 19 bp, Mus musculus
  siRNA target sequence for Og2x (NM_130869.1,1446-1464).
gagtaagcagtcttcatta

SEQ ID NO: 447493 - DNA, 19 bp, Mus musculus
  siRNA target sequence for Og2x (NM_130869.1,1502-1520).
ccgggtcctcactaagcaa

SEQ ID NO: 447494 - DNA, 19 bp, Mus musculus
  siRNA target sequence for Og2x (NM_130869.1,1503-1521).
cgggtcctcactaagcaaa

SEQ ID NO: 447495 - DNA, 19 bp, Mus musculus
  siRNA target sequence for Og2x (NM_130869.1,1570-1588).
gaggtcagagacaaaaata

SEQ ID NO: 447496 - DNA, 19 bp, Mus musculus
  siRNA target sequence for Og9x (NM_008759.1,96-114).
gctggagcgggtatttgca

SEQ ID NO: 447497 - DNA, 19 bp, Mus musculus
  siRNA target sequence for Og9x (NM_008759.1,205-223).
cggcgagccaagagaatca

SEQ ID NO: 447498 - DNA, 19 bp, Mus musculus
  siRNA target sequence for Og9x (NM_008759.1,419-437).
gttggtcaggggctaaagt

SEQ ID NO: 447499 - DNA, 19 bp, Mus musculus
  siRNA target sequence for Og9x (NM_008759.1,470-488).
ggattcactcttctttaga

SEQ ID NO: 447500 - DNA, 19 bp, Mus musculus
  siRNA target sequence for Og9x (NM_008759.1,515-533).
gcaacctgtctgaccttat

SEQ ID NO: 447501 - DNA, 19 bp, Mus musculus
  siRNA target sequence for Onecut1 (NM_008262.2,564-582).
gcggaggcagcgattacca

SEQ ID NO: 447502 - DNA, 19 bp, Mus musculus
  siRNA target sequence for Onecut1 (NM_008262.2,804-822).
gcaacgtgagcggtagttt

SEQ ID NO: 447503 - DNA, 19 bp, Mus musculus
  siRNA target sequence for Onecut1 (NM_008262.2,808-826).
cgtgagcggtagtttcaca

SEQ ID NO: 447504 - DNA, 19 bp, Mus musculus
  siRNA target sequence for Onecut1 (NM_008262.2,813-831).
gcggtagtttcacacttat

SEQ ID NO: 447505 - DNA, 19 bp, Mus musculus
  siRNA target sequence for Onecut1 (NM_008262.2,932-950).
ggtctgggcagcattcaca

SEQ ID NO: 447506 - DNA, 19 bp, Mus musculus
  siRNA target sequence for Onecut1 (NM_008262.2,1015-1033).
caccccaaatggctttgaa

SEQ ID NO: 447507 - DNA, 19 bp, Mus musculus
  siRNA target sequence for Onecut1 (NM_008262.2,1208-1226).
gcgcaggtcagcaatggaa

SEQ ID NO: 447508 - DNA, 19 bp, Mus musculus
  siRNA target sequence for Onecut1 (NM_008262.2,1281-1299).
ccaccgagctcaaacgtta

SEQ ID NO: 447509 - DNA, 19 bp, Mus musculus
  siRNA target sequence for Onecut1 (NM_008262.2,1558-1576).
cgtccaacgtcgaactcta

SEQ ID NO: 447510 - DNA, 19 bp, Mus musculus
  siRNA target sequence for Onecut1 (NM_008262.2,1566-1584).
gtcgaactctacatgcaat

SEQ ID NO: 447511 - DNA, 19 bp, Mus musculus
  siRNA target sequence for Onecut1 (NM_008262.2,1568-1586).
cgaactctacatgcaatat

SEQ ID NO: 447512 - DNA, 19 bp, Mus musculus
  siRNA target sequence for Onecut1 (NM_008262.2,1569-1587).
gaactctacatgcaatatt

SEQ ID NO: 447513 - DNA, 19 bp, Mus musculus
  siRNA target sequence for Onecut1 (NM_008262.2,1600-1618).
gcgtccgtccaaagaatta

SEQ ID NO: 447514 - DNA, 19 bp, Mus musculus
  siRNA target sequence for Onecut1 (NM_008262.2,1602-1620).
gtccgtccaaagaattaca

SEQ ID NO: 447515 - DNA, 19 bp, Mus musculus
  siRNA target sequence for Onecut1 (NM_008262.2,1604-1622).
ccgtccaaagaattacaaa

SEQ ID NO: 447516 - DNA, 19 bp, Mus musculus
  siRNA target sequence for Onecut3 (NM_139226.3,1040-1058).
ctgcagccgaagagatcaa

SEQ ID NO: 447517 - DNA, 19 bp, Mus musculus
  siRNA target sequence for Onecut3 (NM_139226.3,1042-1060).
gcagccgaagagatcaaca

SEQ ID NO: 447518 - DNA, 19 bp, Mus musculus
  siRNA target sequence for Onecut3 (NM_139226.3,1376-1394).
cgctgattgccatcttcaa

SEQ ID NO: 447519 - DNA, 19 bp, Mus musculus
  siRNA target sequence for Otp (NM_011021.1,215-233).
cgggaggcggtgaagtgta

SEQ ID NO: 447520 - DNA, 19 bp, Mus musculus
  siRNA target sequence for Otp (NM_011021.1,486-504).
cacagctcaacgaattgga

SEQ ID NO: 447521 - DNA, 19 bp, Mus musculus
  siRNA target sequence for Otx1 (NM_011023.2,407-425).
ggcgctgttcgcaaagact

SEQ ID NO: 447522 - DNA, 19 bp, Mus musculus
  siRNA target sequence for Otx1 (NM_011023.2,534-552).
cagcagagcgggaatggaa

SEQ ID NO: 447523 - DNA, 19 bp, Mus musculus
  siRNA target sequence for Otx1 (NM_011023.2,539-557).
gagcgggaatggaacgaaa

SEQ ID NO: 447524 - DNA, 19 bp, Mus musculus
  siRNA target sequence for Otx1 (NM_011023.2,1166-1184).
ctctgggctcgccttcaat

SEQ ID NO: 447525 - DNA, 19 bp, Mus musculus
  siRNA target sequence for Otx1 (NM_011023.2,1188-1206).
gccgattgcttggattaca

SEQ ID NO: 447526 - DNA, 19 bp, Mus musculus
  siRNA target sequence for Otx1 (NM_011023.2,1231-1249).
cctctgcctggaaactcaa

SEQ ID NO: 447527 - DNA, 19 bp, Mus musculus
  siRNA target sequence for Otx1 (NM_011023.2,1260-1278).
cccgactgtctggactata

SEQ ID NO: 447528 - DNA, 19 bp, Mus musculus
  siRNA target sequence for Otx1 (NM_011023.2,1261-1279).
ccgactgtctggactataa

SEQ ID NO: 447529 - DNA, 19 bp, Mus musculus
  siRNA target sequence for Otx2 (NM_144841.1,543-561).
gtggcactgaaaatcaact

SEQ ID NO: 447530 - DNA, 19 bp, Mus musculus
  siRNA target sequence for Otx2 (NM_144841.1,582-600).
gtatggtttaagaatcgaa

SEQ ID NO: 447531 - DNA, 19 bp, Mus musculus
  siRNA target sequence for Otx2 (NM_144841.1,639-657).
ggaggtcagaacaaagtga

SEQ ID NO: 447532 - DNA, 19 bp, Mus musculus
  siRNA target sequence for Otx2 (NM_144841.1,766-784).
gcagtgctccagtgtctat

SEQ ID NO: 447533 - DNA, 19 bp, Mus musculus
  siRNA target sequence for Otx2 (NM_144841.1,875-893).
ggcttcaggttatagtcaa

SEQ ID NO: 447534 - DNA, 19 bp, Mus musculus
  siRNA target sequence for Otx2 (NM_144841.1,894-912).
ggctatgctggctcaactt

SEQ ID NO: 447535 - DNA, 19 bp, Mus musculus
  siRNA target sequence for Otx2 (NM_144841.1,925-943).
gcatggactgtggatctta

SEQ ID NO: 447536 - DNA, 19 bp, Mus musculus
  siRNA target sequence for Otx2 (NM_144841.1,926-944).
catggactgtggatcttat

SEQ ID NO: 447537 - DNA, 19 bp, Mus musculus
  siRNA target sequence for Otx2 (NM_144841.1,989-1007).
cagtcccatgggtaccaat

SEQ ID NO: 447538 - DNA, 19 bp, Mus musculus
  siRNA target sequence for Otx2 (NM_144841.1,1090-1108).
ccactgattgcttggatta

SEQ ID NO: 447539 - DNA, 19 bp, Mus musculus
  siRNA target sequence for Otx2 (NM_144841.1,1170-1188).
cagacgtcctcatggaaat

SEQ ID NO: 447540 - DNA, 19 bp, Mus musculus
  siRNA target sequence for Otx2 (NM_144841.1,1174-1192).
cgtcctcatggaaattcca

SEQ ID NO: 447541 - DNA, 19 bp, Mus musculus
  siRNA target sequence for Pax3 (NM_008781.2,506-524).
cagctcggaggagtattta

SEQ ID NO: 447542 - DNA, 19 bp, Mus musculus
  siRNA target sequence for Pax3 (NM_008781.2,720-738).
cgcctgacgtggagaagaa

SEQ ID NO: 447543 - DNA, 19 bp, Mus musculus
  siRNA target sequence for Pax3 (NM_008781.2,721-739).
gcctgacgtggagaagaaa

SEQ ID NO: 447544 - DNA, 19 bp, Mus musculus
  siRNA target sequence for Pax3 (NM_008781.2,723-741).
ctgacgtggagaagaaaat

SEQ ID NO: 447545 - DNA, 19 bp, Mus musculus
  siRNA target sequence for Pax3 (NM_008781.2,854-872).
cgcatcctgaggagtaaat

SEQ ID NO: 447546 - DNA, 19 bp, Mus musculus
  siRNA target sequence for Pax3 (NM_008781.2,856-874).
catcctgaggagtaaattt

SEQ ID NO: 447547 - DNA, 19 bp, Mus musculus
  siRNA target sequence for Pax3 (NM_008781.2,860-878).
ctgaggagtaaatttggaa

SEQ ID NO: 447548 - DNA, 19 bp, Mus musculus
  siRNA target sequence for Pax3 (NM_008781.2,862-880).
gaggagtaaatttggaaaa

SEQ ID NO: 447549 - DNA, 19 bp, Mus musculus
  siRNA target sequence for Pax3 (NM_008781.2,927-945).
gcgagaaaaaggctaaaca

SEQ ID NO: 447550 - DNA, 19 bp, Mus musculus
  siRNA target sequence for Pax3 (NM_008781.2,995-1013).
gaaggctccgatattgact

SEQ ID NO: 447551 - DNA, 19 bp, Mus musculus
  siRNA target sequence for Pax3 (NM_008781.2,1145-1163).
gcccagagggcgaagctta

SEQ ID NO: 447552 - DNA, 19 bp, Mus musculus
  siRNA target sequence for Pax3 (NM_008781.2,1221-1239).
ctggagccaatcaactgat

SEQ ID NO: 447553 - DNA, 19 bp, Mus musculus
  siRNA target sequence for Pax3 (NM_008781.2,1240-1258).
ggctttcaaccatctcatt

SEQ ID NO: 447554 - DNA, 19 bp, Mus musculus
  siRNA target sequence for Pax3 (NM_008781.2,1677-1695).
gtcagagactggaacatat

SEQ ID NO: 447555 - DNA, 19 bp, Mus musculus
  siRNA target sequence for Pax3 (NM_008781.2,1793-1811).
gggcagtatggacaaagta

SEQ ID NO: 447556 - DNA, 19 bp, Mus musculus
  siRNA target sequence for Pax6 (NM_013627.2,648-666).
gcgacatttcccgaattct

SEQ ID NO: 447557 - DNA, 19 bp, Mus musculus
  siRNA target sequence for Pax6 (NM_013627.2,717-735).
ccaacggttgtgtgagtaa

SEQ ID NO: 447558 - DNA, 19 bp, Mus musculus
  siRNA target sequence for Pax6 (NM_013627.2,718-736).
caacggttgtgtgagtaaa

SEQ ID NO: 447559 - DNA, 19 bp, Mus musculus
  siRNA target sequence for Pax6 (NM_013627.2,721-739).
cggttgtgtgagtaaaatt

SEQ ID NO: 447560 - DNA, 19 bp, Mus musculus
  siRNA target sequence for Pax6 (NM_013627.2,805-823).
ggcgactccagaagttgta

SEQ ID NO: 447561 - DNA, 19 bp, Mus musculus
  siRNA target sequence for Pax6 (NM_013627.2,806-824).
gcgactccagaagttgtaa

SEQ ID NO: 447562 - DNA, 19 bp, Mus musculus
  siRNA target sequence for Pax6 (NM_013627.2,871-889).
ggaaatccgagacagatta

SEQ ID NO: 447563 - DNA, 19 bp, Mus musculus
  siRNA target sequence for Pax6 (NM_013627.2,872-890).
gaaatccgagacagattat

SEQ ID NO: 447564 - DNA, 19 bp, Mus musculus
  siRNA target sequence for Pax6 (NM_013627.2,904-922).
ctgtaccaacgataacata

SEQ ID NO: 447565 - DNA, 19 bp, Mus musculus
  siRNA target sequence for Pax6 (NM_013627.2,958-976).
cctggctagcgaaaagcaa

SEQ ID NO: 447566 - DNA, 19 bp, Mus musculus
  siRNA target sequence for Pax6 (NM_013627.2,963-981).
ctagcgaaaagcaacagat

SEQ ID NO: 447567 - DNA, 19 bp, Mus musculus
  siRNA target sequence for Pax6 (NM_013627.2,982-1000).
gggcgcagacggcatgtat

SEQ ID NO: 447568 - DNA, 19 bp, Mus musculus
  siRNA target sequence for Pax6 (NM_013627.2,984-1002).
gcgcagacggcatgtatga

SEQ ID NO: 447569 - DNA, 19 bp, Mus musculus
  siRNA target sequence for Pax6 (NM_013627.2,985-1003).
cgcagacggcatgtatgat

SEQ ID NO: 447570 - DNA, 19 bp, Mus musculus
  siRNA target sequence for Pax6 (NM_013627.2,986-1004).
gcagacggcatgtatgata

SEQ ID NO: 447571 - DNA, 19 bp, Mus musculus
  siRNA target sequence for Pax6 (NM_013627.2,987-1005).
cagacggcatgtatgataa

SEQ ID NO: 447572 - DNA, 19 bp, Mus musculus
  siRNA target sequence for Pax6 (NM_013627.2,991-1009).
cggcatgtatgataaacta

SEQ ID NO: 447573 - DNA, 19 bp, Mus musculus
  siRNA target sequence for Pax6 (NM_013627.2,992-1010).
ggcatgtatgataaactaa

SEQ ID NO: 447574 - DNA, 19 bp, Mus musculus
  siRNA target sequence for Pax6 (NM_013627.2,1001-1019).
gataaactaaggatgttga

SEQ ID NO: 447575 - DNA, 19 bp, Mus musculus
  siRNA target sequence for Pax6 (NM_013627.2,1042-1060).
cacacgccctggttggtat

SEQ ID NO: 447576 - DNA, 19 bp, Mus musculus
  siRNA target sequence for Pax6 (NM_013627.2,1057-1075).
gtatcccgggacttcagta

SEQ ID NO: 447577 - DNA, 19 bp, Mus musculus
  siRNA target sequence for Pax6 (NM_013627.2,1255-1273).
gtttgagaggacccattat

SEQ ID NO: 447578 - DNA, 19 bp, Mus musculus
  siRNA target sequence for Pax6 (NM_013627.2,1267-1285).
ccattatccagatgtgttt

SEQ ID NO: 447579 - DNA, 19 bp, Mus musculus
  siRNA target sequence for Pax6 (NM_013627.2,1296-1314).
gactagcagccaaaataga

SEQ ID NO: 447580 - DNA, 19 bp, Mus musculus
  siRNA target sequence for Pax6 (NM_013627.2,1336-1354).
ggtatggttttctaatcga

SEQ ID NO: 447581 - DNA, 19 bp, Mus musculus
  siRNA target sequence for Pax6 (NM_013627.2,1337-1355).
gtatggttttctaatcgaa

SEQ ID NO: 447582 - DNA, 19 bp, Mus musculus
  siRNA target sequence for Pax6 (NM_013627.2,1408-1426).
caacactcctagtcacatt

SEQ ID NO: 447583 - DNA, 19 bp, Mus musculus
  siRNA target sequence for Pax6 (NM_013627.2,1572-1590).
gcttcaccatggcaaacaa

SEQ ID NO: 447584 - DNA, 19 bp, Mus musculus
  siRNA target sequence for Pax6 (NM_013627.2,1648-1666).
caccagcccgtcagtgaat

SEQ ID NO: 447585 - DNA, 19 bp, Mus musculus
  siRNA target sequence for Pax6 (NM_013627.2,1663-1681).
gaatgggcggagttatgat

SEQ ID NO: 447586 - DNA, 19 bp, Mus musculus
  siRNA target sequence for Pax6 (NM_013627.2,1668-1686).
ggcggagttatgataccta

SEQ ID NO: 447587 - DNA, 19 bp, Mus musculus
  siRNA target sequence for Pax7 (NM_011039.1,1360-1378).
cccacgtcccagtcttact

SEQ ID NO: 447588 - DNA, 19 bp, Mus musculus
  siRNA target sequence for Pax7 (NM_011039.1,1447-1465).
ggccaaactgctgttgatt

SEQ ID NO: 447589 - DNA, 19 bp, Mus musculus
  siRNA target sequence for Pax7 (NM_011039.1,1448-1466).
gccaaactgctgttgatta

SEQ ID NO: 447590 - DNA, 19 bp, Mus musculus
  siRNA target sequence for Pax7 (NM_011039.1,1490-1508).
ccacacagcgccgtatgaa

SEQ ID NO: 447591 - DNA, 19 bp, Mus musculus
  siRNA target sequence for Pbx1 (NM_008783.1,584-602).
cagccgaggctgatgcatt

SEQ ID NO: 447592 - DNA, 19 bp, Mus musculus
  siRNA target sequence for Pbx1 (NM_008783.1,793-811).
gaagcctgccttgtttaat

SEQ ID NO: 447593 - DNA, 19 bp, Mus musculus
  siRNA target sequence for Pbx1 (NM_008783.1,1034-1052).
ctctcacagatcagacaaa

SEQ ID NO: 447594 - DNA, 19 bp, Mus musculus
  siRNA target sequence for Pbx1 (NM_008783.1,1275-1293).
ggcggaagagacggaattt

SEQ ID NO: 447595 - DNA, 19 bp, Mus musculus
  siRNA target sequence for Pbx1 (NM_183355.1,1350-1368).
gcgggttcttccagttctt

SEQ ID NO: 447596 - DNA, 19 bp, Mus musculus
  siRNA target sequence for Pbx1 (NM_183355.1,1351-1369).
cgggttcttccagttcttt

SEQ ID NO: 447597 - DNA, 19 bp, Mus musculus
  siRNA target sequence for Pbx1 (NM_183355.1,1357-1375).
cttccagttcttttaacat

SEQ ID NO: 447598 - DNA, 19 bp, Mus musculus
  siRNA target sequence for Pbx1 (NM_183355.1,1363-1381).
gttcttttaacatgtcaaa

SEQ ID NO: 447599 - DNA, 19 bp, Mus musculus
  siRNA target sequence for Pbx1 (NM_183355.1,1400-1418).
gagcgtgcagtcactcaat

SEQ ID NO: 447600 - DNA, 19 bp, Mus musculus
  siRNA target sequence for Pbx1 (NM_183355.1,1411-1429).
cactcaatggggattctta

SEQ ID NO: 447601 - DNA, 19 bp, Mus musculus
  siRNA target sequence for Pbx2 (NM_017463.1,550-568).
catcgaacactcagactat

SEQ ID NO: 447602 - DNA, 19 bp, Mus musculus
  siRNA target sequence for Pbx2 (NM_017463.1,821-839).
cggaaacgccggaacttca

SEQ ID NO: 447603 - DNA, 19 bp, Mus musculus
  siRNA target sequence for Pbx2 (NM_017463.1,854-872).
gaggtcctgaatgagtatt

SEQ ID NO: 447604 - DNA, 19 bp, Mus musculus
  siRNA target sequence for Pbx2 (NM_017463.1,945-963).
ccgtctctcaggtttccaa

SEQ ID NO: 447605 - DNA, 19 bp, Mus musculus
  siRNA target sequence for Pbx2 (NM_017463.1,1109-1127).
ggctctggcggctctttca

SEQ ID NO: 447606 - DNA, 19 bp, Mus musculus
  siRNA target sequence for Pbx2 (NM_017463.1,1111-1129).
ctctggcggctctttcaat

SEQ ID NO: 447607 - DNA, 19 bp, Mus musculus
  siRNA target sequence for Pbx2 (NM_017463.1,1113-1131).
ctggcggctctttcaatct

SEQ ID NO: 447608 - DNA, 19 bp, Mus musculus
  siRNA target sequence for Pbx2 (NM_017463.1,1115-1133).
ggcggctctttcaatctct

SEQ ID NO: 447609 - DNA, 19 bp, Mus musculus
  siRNA target sequence for Pbx2 (NM_017463.1,1134-1152).
caggatccggagacatgtt

SEQ ID NO: 447610 - DNA, 19 bp, Mus musculus
  siRNA target sequence for Pbx2 (NM_017463.1,1137-1155).
gatccggagacatgtttct

SEQ ID NO: 447611 - DNA, 19 bp, Mus musculus
  siRNA target sequence for Pbx2 (NM_017463.1,1167-1185).
ggctcaatggcgattccta

SEQ ID NO: 447612 - DNA, 19 bp, Mus musculus
  siRNA target sequence for Pbx2 (NM_017463.1,1229-1247).
gggagctacggggataaca

SEQ ID NO: 447613 - DNA, 19 bp, Mus musculus
  siRNA target sequence for Pbx2 (NM_017463.1,1230-1248).
ggagctacggggataacat

SEQ ID NO: 447614 - DNA, 19 bp, Mus musculus
  siRNA target sequence for Pbx2 (NM_017463.1,1231-1249).
gagctacggggataacatt

SEQ ID NO: 447615 - DNA, 19 bp, Mus musculus
  siRNA target sequence for Pbx2 (NM_017463.1,1252-1270).
gggaggtcagatatacagt

SEQ ID NO: 447616 - DNA, 19 bp, Mus musculus
  siRNA target sequence for Pbx3 (NM_016768.1,302-320).
cgaggcgcaagcaaagaaa

SEQ ID NO: 447617 - DNA, 19 bp, Mus musculus
  siRNA target sequence for Pbx3 (NM_016768.1,305-323).
ggcgcaagcaaagaaacat

SEQ ID NO: 447618 - DNA, 19 bp, Mus musculus
  siRNA target sequence for Pbx3 (NM_016768.1,325-343).
ctctgaactgtcacagaat

SEQ ID NO: 447619 - DNA, 19 bp, Mus musculus
  siRNA target sequence for Pbx3 (NM_016768.1,361-379).
gcgtcttgtgtgagatcaa

SEQ ID NO: 447620 - DNA, 19 bp, Mus musculus
  siRNA target sequence for Pbx3 (NM_016768.1,362-380).
cgtcttgtgtgagatcaaa

SEQ ID NO: 447621 - DNA, 19 bp, Mus musculus
  siRNA target sequence for Pbx3 (NM_016768.1,424-442).
ctcccgacccccagctaat

SEQ ID NO: 447622 - DNA, 19 bp, Mus musculus
  siRNA target sequence for Pbx3 (NM_016768.1,438-456).
ctaatgagactggacaata

SEQ ID NO: 447623 - DNA, 19 bp, Mus musculus
  siRNA target sequence for Pbx3 (NM_016768.1,445-463).
gactggacaatatgctttt

SEQ ID NO: 447624 - DNA, 19 bp, Mus musculus
  siRNA target sequence for Pbx3 (NM_016768.1,703-721).
cgaaagagatcgaaaggat

SEQ ID NO: 447625 - DNA, 19 bp, Mus musculus
  siRNA target sequence for Pbx3 (NM_016768.1,778-796).
cgtgtgaagcagttatgat

SEQ ID NO: 447626 - DNA, 19 bp, Mus musculus
  siRNA target sequence for Pbx3 (NM_016768.1,779-797).
gtgtgaagcagttatgatt

SEQ ID NO: 447627 - DNA, 19 bp, Mus musculus
  siRNA target sequence for Pbx3 (NM_016768.1,781-799).
gtgaagcagttatgatttt

SEQ ID NO: 447628 - DNA, 19 bp, Mus musculus
  siRNA target sequence for Pbx3 (NM_016768.1,823-841).
gacggaaaaggcgtaactt

SEQ ID NO: 447629 - DNA, 19 bp, Mus musculus
  siRNA target sequence for Pbx3 (NM_016768.1,825-843).
cggaaaaggcgtaacttca

SEQ ID NO: 447630 - DNA, 19 bp, Mus musculus
  siRNA target sequence for Pbx3 (NM_016768.1,832-850).
ggcgtaacttcagtaaaca

SEQ ID NO: 447631 - DNA, 19 bp, Mus musculus
  siRNA target sequence for Pbx3 (NM_016768.1,849-867).
caggctacggaaatcttga

SEQ ID NO: 447632 - DNA, 19 bp, Mus musculus
  siRNA target sequence for Pbx3 (NM_016768.1,851-869).
ggctacggaaatcttgaat

SEQ ID NO: 447633 - DNA, 19 bp, Mus musculus
  siRNA target sequence for Pbx3 (NM_016768.1,853-871).
ctacggaaatcttgaatga

SEQ ID NO: 447634 - DNA, 19 bp, Mus musculus
  siRNA target sequence for Pbx3 (NM_016768.1,856-874).
cggaaatcttgaatgaata

SEQ ID NO: 447635 - DNA, 19 bp, Mus musculus
  siRNA target sequence for Pbx3 (NM_016768.1,949-967).
cagtatcacaggtatccaa

SEQ ID NO: 447636 - DNA, 19 bp, Mus musculus
  siRNA target sequence for Pbx3 (NM_016768.1,1246-1264).
ccctccgtcatgttatcaa

SEQ ID NO: 447637 - DNA, 19 bp, Mus musculus
  siRNA target sequence for Pbx3 (NM_016768.1,1247-1265).
cctccgtcatgttatcaat

SEQ ID NO: 447638 - DNA, 19 bp, Mus musculus
  siRNA target sequence for Pbx3 (NM_016768.1,1251-1269).
cgtcatgttatcaatcaga

SEQ ID NO: 447639 - DNA, 19 bp, Mus musculus
  siRNA target sequence for Pbx3 (NM_016768.1,1286-1304).
cggccttggagcaaactca

SEQ ID NO: 447640 - DNA, 19 bp, Mus musculus
  siRNA target sequence for Pbx3 (NM_016768.1,1303-1321).
cactgtacagtccacataa

SEQ ID NO: 447641 - DNA, 19 bp, Mus musculus
  siRNA target sequence for Pbx4 (NM_030555.1,193-211).
gtgtgctctgcgagatcaa

SEQ ID NO: 447642 - DNA, 19 bp, Mus musculus
  siRNA target sequence for Pcdhb16 (NM_053141.2,239-257).
ggaactgaggcgctattct

SEQ ID NO: 447643 - DNA, 19 bp, Mus musculus
  siRNA target sequence for Pcdhb16 (NM_053141.2,272-290).
ggagggtaggtcctttgta

SEQ ID NO: 447644 - DNA, 19 bp, Mus musculus
  siRNA target sequence for Pcdhb16 (NM_053141.2,273-291).
gagggtaggtcctttgtaa

SEQ ID NO: 447645 - DNA, 19 bp, Mus musculus
  siRNA target sequence for Pcdhb16 (NM_053141.2,277-295).
gtaggtcctttgtaaccaa

SEQ ID NO: 447646 - DNA, 19 bp, Mus musculus
  siRNA target sequence for Pcdhb16 (NM_053141.2,281-299).
gtcctttgtaaccaattta

SEQ ID NO: 447647 - DNA, 19 bp, Mus musculus
  siRNA target sequence for Pcdhb16 (NM_053141.2,283-301).
cctttgtaaccaatttagt

SEQ ID NO: 447648 - DNA, 19 bp, Mus musculus
  siRNA target sequence for Pcdhb16 (NM_053141.2,284-302).
ctttgtaaccaatttagta

SEQ ID NO: 447649 - DNA, 19 bp, Mus musculus
  siRNA target sequence for Pcdhb16 (NM_053141.2,358-376).
ctaaaggtaacaaactaca

SEQ ID NO: 447650 - DNA, 19 bp, Mus musculus
  siRNA target sequence for Pcdhb16 (NM_053141.2,423-441).
gtggacagggaaaaactgt

SEQ ID NO: 447651 - DNA, 19 bp, Mus musculus
  siRNA target sequence for Pcdhb16 (NM_053141.2,483-501).
ctagacaaccccttggata

SEQ ID NO: 447652 - DNA, 19 bp, Mus musculus
  siRNA target sequence for Pcdhb16 (NM_053141.2,486-504).
gacaaccccttggatattt

SEQ ID NO: 447653 - DNA, 19 bp, Mus musculus
  siRNA target sequence for Pcdhb16 (NM_053141.2,491-509).
ccccttggatatttttcaa

SEQ ID NO: 447654 - DNA, 19 bp, Mus musculus
  siRNA target sequence for Pcdhb16 (NM_053141.2,515-533).
gctagaagtcacagacata

SEQ ID NO: 447655 - DNA, 19 bp, Mus musculus
  siRNA target sequence for Pcdhb16 (NM_053141.2,516-534).
ctagaagtcacagacataa

SEQ ID NO: 447656 - DNA, 19 bp, Mus musculus
  siRNA target sequence for Pcdhb16 (NM_053141.2,564-582).
gagatcatgctaaagatat

SEQ ID NO: 447657 - DNA, 19 bp, Mus musculus
  siRNA target sequence for Pcdhb16 (NM_053141.2,569-587).
catgctaaagatatcagaa

SEQ ID NO: 447658 - DNA, 19 bp, Mus musculus
  siRNA target sequence for Pcdhb16 (NM_053141.2,642-660).
ggccaaaacggtattgaca

SEQ ID NO: 447659 - DNA, 19 bp, Mus musculus
  siRNA target sequence for Pcdhb16 (NM_053141.2,643-661).
gccaaaacggtattgacaa

SEQ ID NO: 447660 - DNA, 19 bp, Mus musculus
  siRNA target sequence for Pcdhb16 (NM_053141.2,657-675).
gacaagtatctgatcagtt

SEQ ID NO: 447661 - DNA, 19 bp, Mus musculus
  siRNA target sequence for Pcdhb16 (NM_053141.2,666-684).
ctgatcagttccaattcct

SEQ ID NO: 447662 - DNA, 19 bp, Mus musculus
  siRNA target sequence for Pcdhb16 (NM_053141.2,668-686).
gatcagttccaattcctat

SEQ ID NO: 447663 - DNA, 19 bp, Mus musculus
  siRNA target sequence for Pcdhb16 (NM_053141.2,693-711).
gtgctcactcggaaacgaa

SEQ ID NO: 447664 - DNA, 19 bp, Mus musculus
  siRNA target sequence for Pcdhb16 (NM_053141.2,908-926).
ccctgaggatagtccaata

SEQ ID NO: 447665 - DNA, 19 bp, Mus musculus
  siRNA target sequence for Pcdhb16 (NM_053141.2,922-940).
caataggctttctgatcat

SEQ ID NO: 447666 - DNA, 19 bp, Mus musculus
  siRNA target sequence for Pcdhb16 (NM_053141.2,959-977).
caaggacattggagtcaat

SEQ ID NO: 447667 - DNA, 19 bp, Mus musculus
  siRNA target sequence for Pcdhb16 (NM_053141.2,979-997).
gacagatctcctattcact

SEQ ID NO: 447668 - DNA, 19 bp, Mus musculus
  siRNA target sequence for Pcdhb16 (NM_053141.2,981-999).
cagatctcctattcacttt

SEQ ID NO: 447669 - DNA, 19 bp, Mus musculus
  siRNA target sequence for Pcdhb16 (NM_053141.2,994-1012).
cacttttccaggtttcaga

SEQ ID NO: 447670 - DNA, 19 bp, Mus musculus
  siRNA target sequence for Pcdhb16 (NM_053141.2,1048-1066).
caggggaagtgcgattgaa

SEQ ID NO: 447671 - DNA, 19 bp, Mus musculus
  siRNA target sequence for Pcdhb16 (NM_053141.2,1128-1146).
gggaccttttctggaaaat

SEQ ID NO: 447672 - DNA, 19 bp, Mus musculus
  siRNA target sequence for Pcdhb16 (NM_053141.2,1150-1168).
cgattctggcccaagtctt

SEQ ID NO: 447673 - DNA, 19 bp, Mus musculus
  siRNA target sequence for Pcdhb16 (NM_053141.2,1159-1177).
cccaagtcttggatgtgaa

SEQ ID NO: 447674 - DNA, 19 bp, Mus musculus
  siRNA target sequence for Pcdhb16 (NM_053141.2,1339-1357).
cttctggggaaaactttta

SEQ ID NO: 447675 - DNA, 19 bp, Mus musculus
  siRNA target sequence for Pcdhb16 (NM_053141.2,1352-1370).
cttttatacgctgttatca

SEQ ID NO: 447676 - DNA, 19 bp, Mus musculus
  siRNA target sequence for Pcdhb16 (NM_053141.2,1393-1411).
gtgtagcagaatacaacat

SEQ ID NO: 447677 - DNA, 19 bp, Mus musculus
  siRNA target sequence for Pcdhb16 (NM_053141.2,1453-1471).
cacaagtcaacttaacagt

SEQ ID NO: 447678 - DNA, 19 bp, Mus musculus
  siRNA target sequence for Pcdhb16 (NM_053141.2,2013-2031).
cacaatggagaggtacata

SEQ ID NO: 447679 - DNA, 19 bp, Mus musculus
  siRNA target sequence for Pcdhb16 (NM_053141.2,2183-2201).
ggcacgtgatcctgatcat

SEQ ID NO: 447680 - DNA, 19 bp, Mus musculus
  siRNA target sequence for Pcdhb16 (NM_053141.2,2443-2461).
gtgagttcaaatatctgaa

SEQ ID NO: 447681 - DNA, 19 bp, Mus musculus
  siRNA target sequence for Pcdhb16 (NM_053141.2,2457-2475).
ctgaaaccaattttaccta

SEQ ID NO: 447682 - DNA, 19 bp, Mus musculus
  siRNA target sequence for Pcdhb16 (NM_053141.2,2464-2482).
caattttacctaattttca

SEQ ID NO: 447683 - DNA, 19 bp, Mus musculus
  siRNA target sequence for Pcdhb16 (NM_053141.2,2497-2515).
gaccagaaatgggtgaaaa

SEQ ID NO: 447684 - DNA, 19 bp, Mus musculus
  siRNA target sequence for Pcdhb16 (NM_053141.2,2508-2526).
ggtgaaaatcccaactcta

SEQ ID NO: 447685 - DNA, 19 bp, Mus musculus
  siRNA target sequence for Pcdhb16 (NM_053141.2,2536-2554).
ggagttttggtattcagtt

SEQ ID NO: 447686 - DNA, 19 bp, Mus musculus
  siRNA target sequence for Pem (NM_008818.1,508-526).
cattttgcagcgcactaat

SEQ ID NO: 447687 - DNA, 19 bp, Mus musculus
  siRNA target sequence for Pem (NM_008818.1,514-532).
gcagcgcactaattccttt

SEQ ID NO: 447688 - DNA, 19 bp, Mus musculus
  siRNA target sequence for Pem (NM_008818.1,517-535).
gcgcactaattcctttgat

SEQ ID NO: 447689 - DNA, 19 bp, Mus musculus
  siRNA target sequence for Pem (NM_008818.1,539-557).
ccaagggaggatcttgata

SEQ ID NO: 447690 - DNA, 19 bp, Mus musculus
  siRNA target sequence for Pem (NM_008818.1,543-561).
gggaggatcttgatagact

SEQ ID NO: 447691 - DNA, 19 bp, Mus musculus
  siRNA target sequence for Pem (NM_008818.1,642-660).
caccagtccctgaacattt

SEQ ID NO: 447692 - DNA, 19 bp, Mus musculus
  siRNA target sequence for Pgr (NM_008829.1,175-193).
ggacgggctgctttttcct

SEQ ID NO: 447693 - DNA, 19 bp, Mus musculus
  siRNA target sequence for Pgr (NM_008829.1,350-368).
gtcttagactcgttgttga

SEQ ID NO: 447694 - DNA, 19 bp, Mus musculus
  siRNA target sequence for Pgr (NM_008829.1,811-829).
ggtcccaaaggaagattca

SEQ ID NO: 447695 - DNA, 19 bp, Mus musculus
  siRNA target sequence for Pgr (NM_008829.1,1142-1160).
cagacgcctggcttgaaga

SEQ ID NO: 447696 - DNA, 19 bp, Mus musculus
  siRNA target sequence for Pgr (NM_008829.1,1366-1384).
ggagtgcatcctgtacaaa

SEQ ID NO: 447697 - DNA, 19 bp, Mus musculus
  siRNA target sequence for Pgr (NM_008829.1,1606-1624).
ctacctgaggccagattca

SEQ ID NO: 447698 - DNA, 19 bp, Mus musculus
  siRNA target sequence for Pgr (NM_008829.1,1639-1657).
cccacagtatggctttgat

SEQ ID NO: 447699 - DNA, 19 bp, Mus musculus
  siRNA target sequence for Pgr (NM_008829.1,1747-1765).
ctttaagagggcaatggaa

SEQ ID NO: 447700 - DNA, 19 bp, Mus musculus
  siRNA target sequence for Pgr (NM_008829.1,1763-1781).
gaagggcagcataactatt

SEQ ID NO: 447701 - DNA, 19 bp, Mus musculus
  siRNA target sequence for Pgr (NM_008829.1,1766-1784).
gggcagcataactatttat

SEQ ID NO: 447702 - DNA, 19 bp, Mus musculus
  siRNA target sequence for Pgr (NM_008829.1,1768-1786).
gcagcataactatttatgt

SEQ ID NO: 447703 - DNA, 19 bp, Mus musculus
  siRNA target sequence for Pgr (NM_008829.1,1838-1856).
gcatgtcgtctgagaaagt

SEQ ID NO: 447704 - DNA, 19 bp, Mus musculus
  siRNA target sequence for Pgr (NM_008829.1,1877-1895).
cttggaggtcgtaagttta

SEQ ID NO: 447705 - DNA, 19 bp, Mus musculus
  siRNA target sequence for Pgr (NM_008829.1,1883-1901).
ggtcgtaagtttaagaagt

SEQ ID NO: 447706 - DNA, 19 bp, Mus musculus
  siRNA target sequence for Pgr (NM_008829.1,1884-1902).
gtcgtaagtttaagaagtt

SEQ ID NO: 447707 - DNA, 19 bp, Mus musculus
  siRNA target sequence for Pgr (NM_008829.1,1886-1904).
cgtaagtttaagaagttta

SEQ ID NO: 447708 - DNA, 19 bp, Mus musculus
  siRNA target sequence for Pgr (NM_008829.1,1987-2005).
ccagagaatcaccttttca

SEQ ID NO: 447709 - DNA, 19 bp, Mus musculus
  siRNA target sequence for Pgr (NM_008829.1,2146-2164).
gagacaactgctttcagta

SEQ ID NO: 447710 - DNA, 19 bp, Mus musculus
  siRNA target sequence for Pgr (NM_008829.1,2156-2174).
ctttcagtagtcaaatggt

SEQ ID NO: 447711 - DNA, 19 bp, Mus musculus
  siRNA target sequence for Pgr (NM_008829.1,2162-2180).
gtagtcaaatggtctaaat

SEQ ID NO: 447712 - DNA, 19 bp, Mus musculus
  siRNA target sequence for Pgr (NM_008829.1,2185-2203).
gccaggtttccggaactta

SEQ ID NO: 447713 - DNA, 19 bp, Mus musculus
  siRNA target sequence for Pgr (NM_008829.1,2189-2207).
ggtttccggaacttacaca

SEQ ID NO: 447714 - DNA, 19 bp, Mus musculus
  siRNA target sequence for Pgr (NM_008829.1,2194-2212).
ccggaacttacacattgat

SEQ ID NO: 447715 - DNA, 19 bp, Mus musculus
  siRNA target sequence for Pgr (NM_008829.1,2204-2222).
cacattgatgaccagataa

SEQ ID NO: 447716 - DNA, 19 bp, Mus musculus
  siRNA target sequence for Pgr (NM_008829.1,2216-2234).
cagataaccctgattcagt

SEQ ID NO: 447717 - DNA, 19 bp, Mus musculus
  siRNA target sequence for Pgr (NM_008829.1,2292-2310).
gtggacagatgctatattt

SEQ ID NO: 447718 - DNA, 19 bp, Mus musculus
  siRNA target sequence for Pgr (NM_008829.1,2316-2334).
ctgatctaatcctaaatga

SEQ ID NO: 447719 - DNA, 19 bp, Mus musculus
  siRNA target sequence for Pgr (NM_008829.1,2436-2454).
gtatgaaagtcttactact

SEQ ID NO: 447720 - DNA, 19 bp, Mus musculus
  siRNA target sequence for Pgr (NM_008829.1,2444-2462).
gtcttactacttcttaaca

SEQ ID NO: 447721 - DNA, 19 bp, Mus musculus
  siRNA target sequence for Pgr (NM_008829.1,2446-2464).
cttactacttcttaacaca

SEQ ID NO: 447722 - DNA, 19 bp, Mus musculus
  siRNA target sequence for Pgr (NM_008829.1,2474-2492).
gaaggactgaggagtcaaa

SEQ ID NO: 447723 - DNA, 19 bp, Mus musculus
  siRNA target sequence for Pgr (NM_008829.1,2495-2513).
cagtttgaagagatgagat

SEQ ID NO: 447724 - DNA, 19 bp, Mus musculus
  siRNA target sequence for Pgr (NM_008829.1,2517-2535).
gctatatccgcgaattgat

SEQ ID NO: 447725 - DNA, 19 bp, Mus musculus
  siRNA target sequence for Pgr (NM_008829.1,2587-2605).
ctaccaactcacaaaactt

SEQ ID NO: 447726 - DNA, 19 bp, Mus musculus
  siRNA target sequence for Pgr (NM_008829.1,2639-2657).
cacctgtactgcttgaata

SEQ ID NO: 447727 - DNA, 19 bp, Mus musculus
  siRNA target sequence for Pgr (NM_008829.1,2755-2773).
gccgctcctctttcacaaa

SEQ ID NO: 447728 - DNA, 19 bp, Mus musculus
  siRNA target sequence for Phox2a (NM_008887.1,239-257).
cggcagttccctacaagtt

SEQ ID NO: 447729 - DNA, 19 bp, Mus musculus
  siRNA target sequence for Phox2a (NM_008887.1,241-259).
gcagttccctacaagttct

SEQ ID NO: 447730 - DNA, 19 bp, Mus musculus
  siRNA target sequence for Phox2a (NM_008887.1,269-287).
cgtccggcctgcatgagaa

SEQ ID NO: 447731 - DNA, 19 bp, Mus musculus
  siRNA target sequence for Phox2a (NM_008887.1,752-770).
gcgcagcggagctgcttaa

SEQ ID NO: 447732 - DNA, 19 bp, Mus musculus
  siRNA target sequence for Phox2b (NM_008888.1,293-311).
cttggcttcagcatatgca

SEQ ID NO: 447733 - DNA, 19 bp, Mus musculus
  siRNA target sequence for Phox2b (NM_008888.1,303-321).
gcatatgcagacttcagtt

SEQ ID NO: 447734 - DNA, 19 bp, Mus musculus
  siRNA target sequence for Phox2b (NM_008888.1,333-351).
gccagtggcttccagtata

SEQ ID NO: 447735 - DNA, 19 bp, Mus musculus
  siRNA target sequence for Phox2b (NM_008888.1,345-363).
cagtataacccgataagga

SEQ ID NO: 447736 - DNA, 19 bp, Mus musculus
  siRNA target sequence for Phox2b (NM_008888.1,353-371).
cccgataaggaccactttt

SEQ ID NO: 447737 - DNA, 19 bp, Mus musculus
  siRNA target sequence for Phox2b (NM_008888.1,448-466).
cgtacgccgcagttccata

SEQ ID NO: 447738 - DNA, 19 bp, Mus musculus
  siRNA target sequence for Phox2b (NM_008888.1,454-472).
ccgcagttccatacaaact

SEQ ID NO: 447739 - DNA, 19 bp, Mus musculus
  siRNA target sequence for Phox2b (NM_008888.1,456-474).
gcagttccatacaaactct

SEQ ID NO: 447740 - DNA, 19 bp, Mus musculus
  siRNA target sequence for Phox2b (NM_008888.1,457-475).
cagttccatacaaactctt

SEQ ID NO: 447741 - DNA, 19 bp, Mus musculus
  siRNA target sequence for Phox2b (NM_008888.1,535-553).
caagcgcgcagctcaaaga

SEQ ID NO: 447742 - DNA, 19 bp, Mus musculus
  siRNA target sequence for Phox2b (NM_008888.1,1086-1104).
cccttcgccagcgtcttat

SEQ ID NO: 447743 - DNA, 19 bp, Mus musculus
  siRNA target sequence for Phox2b (NM_008888.1,1088-1106).
cttcgccagcgtcttatct

SEQ ID NO: 447744 - DNA, 19 bp, Mus musculus
  siRNA target sequence for Phox2b (NM_008888.1,1128-1146).
gccaaagccgccttagtga

SEQ ID NO: 447745 - DNA, 19 bp, Mus musculus
  siRNA target sequence for Phox2b (NM_008888.1,1129-1147).
ccaaagccgccttagtgaa

SEQ ID NO: 447746 - DNA, 19 bp, Mus musculus
  siRNA target sequence for Pit1 (NM_008849.2,137-155).
cctcggctgatacctttat

SEQ ID NO: 447747 - DNA, 19 bp, Mus musculus
  siRNA target sequence for Pit1 (NM_008849.2,138-156).
ctcggctgatacctttata

SEQ ID NO: 447748 - DNA, 19 bp, Mus musculus
  siRNA target sequence for Pit1 (NM_008849.2,255-273).
cacagcgacaggacttcat

SEQ ID NO: 447749 - DNA, 19 bp, Mus musculus
  siRNA target sequence for Pit1 (NM_008849.2,259-277).
gcgacaggacttcattact

SEQ ID NO: 447750 - DNA, 19 bp, Mus musculus
  siRNA target sequence for Pit1 (NM_008849.2,261-279).
gacaggacttcattactct

SEQ ID NO: 447751 - DNA, 19 bp, Mus musculus
  siRNA target sequence for Pit1 (NM_008849.2,445-463).
gaactcaggcggaaaagca

SEQ ID NO: 447752 - DNA, 19 bp, Mus musculus
  siRNA target sequence for Pit1 (NM_008849.2,517-535).
cagtttgccaacgagttta

SEQ ID NO: 447753 - DNA, 19 bp, Mus musculus
  siRNA target sequence for Pit1 (NM_008849.2,519-537).
gtttgccaacgagtttaaa

SEQ ID NO: 447754 - DNA, 19 bp, Mus musculus
  siRNA target sequence for Pit1 (NM_008849.2,523-541).
gccaacgagtttaaagtga

SEQ ID NO: 447755 - DNA, 19 bp, Mus musculus
  siRNA target sequence for Pit1 (NM_008849.2,542-560).
gaagaattaagttaggata

SEQ ID NO: 447756 - DNA, 19 bp, Mus musculus
  siRNA target sequence for Pit1 (NM_008849.2,592-610).
gctgtccacggctcagaat

SEQ ID NO: 447757 - DNA, 19 bp, Mus musculus
  siRNA target sequence for Pit1 (NM_008849.2,593-611).
ctgtccacggctcagaatt

SEQ ID NO: 447758 - DNA, 19 bp, Mus musculus
  siRNA target sequence for Pit1 (NM_008849.2,595-613).
gtccacggctcagaattca

SEQ ID NO: 447759 - DNA, 19 bp, Mus musculus
  siRNA target sequence for Pit1 (NM_008849.2,620-638).
caaccatctgtcgatttga

SEQ ID NO: 447760 - DNA, 19 bp, Mus musculus
  siRNA target sequence for Pit1 (NM_008849.2,665-683).
cttgtaaactcaaagcaat

SEQ ID NO: 447761 - DNA, 19 bp, Mus musculus
  siRNA target sequence for Pit1 (NM_008849.2,712-730).
caggtcggagctttgtaca

SEQ ID NO: 447762 - DNA, 19 bp, Mus musculus
  siRNA target sequence for Pit1 (NM_008849.2,714-732).
ggtcggagctttgtacaat

SEQ ID NO: 447763 - DNA, 19 bp, Mus musculus
  siRNA target sequence for Pit1 (NM_008849.2,735-753).
gaaggtgggagcaaacgaa

SEQ ID NO: 447764 - DNA, 19 bp, Mus musculus
  siRNA target sequence for Pit1 (NM_008849.2,949-967).
cagagcctgttctctattt

SEQ ID NO: 447765 - DNA, 19 bp, Mus musculus
  siRNA target sequence for Pitx1 (NM_011097.1,1072-1090).
ctaccaagagctttacctt

SEQ ID NO: 447766 - DNA, 19 bp, Mus musculus
  siRNA target sequence for Pitx1 (NM_011097.1,1201-1219).
ccaactcgggcctcaacaa

SEQ ID NO: 447767 - DNA, 19 bp, Mus musculus
  siRNA target sequence for Pitx2 (NM_011098.2,236-254).
gaccaattgtcgcaaacta

SEQ ID NO: 447768 - DNA, 19 bp, Mus musculus
  siRNA target sequence for Pitx2 (NM_011098.2,238-256).
ccaattgtcgcaaactagt

SEQ ID NO: 447769 - DNA, 19 bp, Mus musculus
  siRNA target sequence for Pitx2 (NM_011098.2,257-275).
gtcggcctgcgtgcaatta

SEQ ID NO: 447770 - DNA, 19 bp, Mus musculus
  siRNA target sequence for Pitx2 (NM_011098.2,282-300).
cagccggcagccgttgaat

SEQ ID NO: 447771 - DNA, 19 bp, Mus musculus
  siRNA target sequence for Pitx2 (NM_011098.2,284-302).
gccggcagccgttgaatgt

SEQ ID NO: 447772 - DNA, 19 bp, Mus musculus
  siRNA target sequence for Pitx2 (NM_011098.2,286-304).
cggcagccgttgaatgtct

SEQ ID NO: 447773 - DNA, 19 bp, Mus musculus
  siRNA target sequence for Pitx2 (NM_011098.2,310-328).
ccaaagactccgaaatcaa

SEQ ID NO: 447774 - DNA, 19 bp, Mus musculus
  siRNA target sequence for Pitx2 (NM_011098.2,351-369).
cccaagagccggaaagagt

SEQ ID NO: 447775 - DNA, 19 bp, Mus musculus
  siRNA target sequence for Pitx2 (NM_011098.2,425-443).
gggccagcaaggaaagaat

SEQ ID NO: 447776 - DNA, 19 bp, Mus musculus
  siRNA target sequence for Pitx2 (NM_011098.2,489-507).
cggcagaggactcatttca

SEQ ID NO: 447777 - DNA, 19 bp, Mus musculus
  siRNA target sequence for Pitx2 (NM_011098.2,674-692).
ggccgagctgtgcaagaat

SEQ ID NO: 447778 - DNA, 19 bp, Mus musculus
  siRNA target sequence for Pitx2 (NM_011098.2,746-764).
cggctattcgtacaacaat

SEQ ID NO: 447779 - DNA, 19 bp, Mus musculus
  siRNA target sequence for Pitx2 (NM_011098.2,747-765).
ggctattcgtacaacaatt

SEQ ID NO: 447780 - DNA, 19 bp, Mus musculus
  siRNA target sequence for Pitx2 (NM_011098.2,871-889).
ccaactccatctcatctat

SEQ ID NO: 447781 - DNA, 19 bp, Mus musculus
  siRNA target sequence for Pitx2 (NM_011098.2,943-961).
gcctcaatagcctgaataa

SEQ ID NO: 447782 - DNA, 19 bp, Mus musculus
  siRNA target sequence for Pitx2 (NM_011098.2,945-963).
ctcaatagcctgaataact

SEQ ID NO: 447783 - DNA, 19 bp, Mus musculus
  siRNA target sequence for Pitx2 (NM_011098.2,1029-1047).
ccgactcctccgtacgttt

SEQ ID NO: 447784 - DNA, 19 bp, Mus musculus
  siRNA target sequence for Pitx2 (NM_011098.2,1030-1048).
cgactcctccgtacgttta

SEQ ID NO: 447785 - DNA, 19 bp, Mus musculus
  siRNA target sequence for Pitx2 (NM_011098.2,1031-1049).
gactcctccgtacgtttat

SEQ ID NO: 447786 - DNA, 19 bp, Mus musculus
  siRNA target sequence for Pitx3 (NM_008852.1,708-726).
gctccatcgccgcttctat

SEQ ID NO: 447787 - DNA, 19 bp, Mus musculus
  siRNA target sequence for Pitx3 (NM_008852.1,880-898).
cgcctcctccccctatgta

SEQ ID NO: 447788 - DNA, 19 bp, Mus musculus
  siRNA target sequence for Pitx3 (NM_008852.1,881-899).
gcctcctccccctatgtat

SEQ ID NO: 447789 - DNA, 19 bp, Mus musculus
  siRNA target sequence for Pitx3 (NM_008852.1,882-900).
cctcctccccctatgtata

SEQ ID NO: 447790 - DNA, 19 bp, Mus musculus
  siRNA target sequence for Pknox2 (NM_148950.1,382-400).
cctccgccagctttgatgt

SEQ ID NO: 447791 - DNA, 19 bp, Mus musculus
  siRNA target sequence for Pknox2 (NM_148950.1,505-523).
ggatccacctgctagagtt

SEQ ID NO: 447792 - DNA, 19 bp, Mus musculus
  siRNA target sequence for Pknox2 (NM_148950.1,516-534).
ctagagttggagaaagtca

SEQ ID NO: 447793 - DNA, 19 bp, Mus musculus
  siRNA target sequence for Pknox2 (NM_148950.1,537-555).
gagctctgcaaggactttt

SEQ ID NO: 447794 - DNA, 19 bp, Mus musculus
  siRNA target sequence for Pknox2 (NM_148950.1,583-601).
ccaagatgcacagtgataa

SEQ ID NO: 447795 - DNA, 19 bp, Mus musculus
  siRNA target sequence for Pknox2 (NM_148950.1,666-684).
caggacctcctgcagaatt

SEQ ID NO: 447796 - DNA, 19 bp, Mus musculus
  siRNA target sequence for Pknox2 (NM_148950.1,678-696).
cagaattcccccaattcaa

SEQ ID NO: 447797 - DNA, 19 bp, Mus musculus
  siRNA target sequence for Pknox2 (NM_148950.1,756-774).
ggcaacatcgccatgacaa

SEQ ID NO: 447798 - DNA, 19 bp, Mus musculus
  siRNA target sequence for Pknox2 (NM_148950.1,765-783).
gccatgacaaccgtcaatt

SEQ ID NO: 447799 - DNA, 19 bp, Mus musculus
  siRNA target sequence for Pknox2 (NM_148950.1,770-788).
gacaaccgtcaattctcaa

SEQ ID NO: 447800 - DNA, 19 bp, Mus musculus
  siRNA target sequence for Pknox2 (NM_148950.1,813-831).
cagccggttaccatggtaa

SEQ ID NO: 447801 - DNA, 19 bp, Mus musculus
  siRNA target sequence for Pknox2 (NM_148950.1,887-905).
gaatacacaggttaacctt

SEQ ID NO: 447802 - DNA, 19 bp, Mus musculus
  siRNA target sequence for Pknox2 (NM_148950.1,1019-1037).
cccctatcccactgaagat

SEQ ID NO: 447803 - DNA, 19 bp, Mus musculus
  siRNA target sequence for Pknox2 (NM_148950.1,1068-1086).
ctcacccttctgcaagtaa

SEQ ID NO: 447804 - DNA, 19 bp, Mus musculus
  siRNA target sequence for Pknox2 (NM_148950.1,1201-1219).
gattctggcccaattccat

SEQ ID NO: 447805 - DNA, 19 bp, Mus musculus
  siRNA target sequence for Pknox2 (NM_148950.1,1343-1361).
gatggctgcacatgatgat

SEQ ID NO: 447806 - DNA, 19 bp, Mus musculus
  siRNA target sequence for Pknox2 (NM_148950.1,1346-1364).
ggctgcacatgatgattca

SEQ ID NO: 447807 - DNA, 19 bp, Mus musculus
  siRNA target sequence for Pou2f1 (NM_011137.1,103-121).
gccagcacaggcacacaaa

SEQ ID NO: 447808 - DNA, 19 bp, Mus musculus
  siRNA target sequence for Pou2f1 (NM_011137.1,254-272).
ctttaaatgtacagtctaa

SEQ ID NO: 447809 - DNA, 19 bp, Mus musculus
  siRNA target sequence for Pou2f1 (NM_011137.1,369-387).
ggctgggggacagataact

SEQ ID NO: 447810 - DNA, 19 bp, Mus musculus
  siRNA target sequence for Pou2f1 (NM_011137.1,553-571).
ctgtctcagcccatacaga

SEQ ID NO: 447811 - DNA, 19 bp, Mus musculus
  siRNA target sequence for Pou2f1 (NM_011137.1,555-573).
gtctcagcccatacagatt

SEQ ID NO: 447812 - DNA, 19 bp, Mus musculus
  siRNA target sequence for Pou2f1 (NM_011137.1,601-619).
cttcagcagcaaaatctca

SEQ ID NO: 447813 - DNA, 19 bp, Mus musculus
  siRNA target sequence for Pou2f1 (NM_011137.1,658-676).
ctgcaaccagcacagttta

SEQ ID NO: 447814 - DNA, 19 bp, Mus musculus
  siRNA target sequence for Pou2f1 (NM_011137.1,661-679).
caaccagcacagtttatca

SEQ ID NO: 447815 - DNA, 19 bp, Mus musculus
  siRNA target sequence for Pou2f1 (NM_011137.1,711-729).
cctgcaagcgcaaaatctt

SEQ ID NO: 447816 - DNA, 19 bp, Mus musculus
  siRNA target sequence for Pou2f1 (NM_011137.1,712-730).
ctgcaagcgcaaaatcttt

SEQ ID NO: 447817 - DNA, 19 bp, Mus musculus
  siRNA target sequence for Pou2f1 (NM_011137.1,714-732).
gcaagcgcaaaatctttta

SEQ ID NO: 447818 - DNA, 19 bp, Mus musculus
  siRNA target sequence for Pou2f1 (NM_011137.1,810-828).
cccaactcgcacaatagca

SEQ ID NO: 447819 - DNA, 19 bp, Mus musculus
  siRNA target sequence for Pou2f1 (NM_011137.1,931-949).
gccaagactttcaaacaaa

SEQ ID NO: 447820 - DNA, 19 bp, Mus musculus
  siRNA target sequence for Pou2f1 (NM_011137.1,950-968).
gacgaatcaaacttggatt

SEQ ID NO: 447821 - DNA, 19 bp, Mus musculus
  siRNA target sequence for Pou2f1 (NM_011137.1,987-1005).
gctcgctatggggaaatta

SEQ ID NO: 447822 - DNA, 19 bp, Mus musculus
  siRNA target sequence for Pou2f1 (NM_011137.1,988-1006).
ctcgctatggggaaattat

SEQ ID NO: 447823 - DNA, 19 bp, Mus musculus
  siRNA target sequence for Pou2f1 (NM_011137.1,990-1008).
cgctatggggaaattatat

SEQ ID NO: 447824 - DNA, 19 bp, Mus musculus
  siRNA target sequence for Pou2f1 (NM_011137.1,1029-1047).
caccatctctcgctttgaa

SEQ ID NO: 447825 - DNA, 19 bp, Mus musculus
  siRNA target sequence for Pou2f1 (NM_011137.1,1077-1095).
caagttaaagcccctttta

SEQ ID NO: 447826 - DNA, 19 bp, Mus musculus
  siRNA target sequence for Pou2f1 (NM_011137.1,1176-1194).
gggggctgagggcttgaat

SEQ ID NO: 447827 - DNA, 19 bp, Mus musculus
  siRNA target sequence for Pou2f1 (NM_011137.1,1180-1198).
gctgagggcttgaatcgta

SEQ ID NO: 447828 - DNA, 19 bp, Mus musculus
  siRNA target sequence for Pou2f1 (NM_011137.1,1253-1271).
gtttcatggagaatcaaaa

SEQ ID NO: 447829 - DNA, 19 bp, Mus musculus
  siRNA target sequence for Pou2f1 (NM_011137.1,1301-1319).
ctgaacagctcaatatgga

SEQ ID NO: 447830 - DNA, 19 bp, Mus musculus
  siRNA target sequence for Pou2f1 (NM_011137.1,1326-1344).
ggtgattcgtgtttggttt

SEQ ID NO: 447831 - DNA, 19 bp, Mus musculus
  siRNA target sequence for Pou2f1 (NM_011137.1,1398-1416).
cagcagctcacctatcaaa

SEQ ID NO: 447832 - DNA, 19 bp, Mus musculus
  siRNA target sequence for Pou2f1 (NM_011137.1,1404-1422).
ctcacctatcaaagcaatt

SEQ ID NO: 447833 - DNA, 19 bp, Mus musculus
  siRNA target sequence for Pou2f1 (NM_011137.1,1520-1538).
gtgctgctgtgactaatct

SEQ ID NO: 447834 - DNA, 19 bp, Mus musculus
  siRNA target sequence for Pou2f1 (NM_011137.1,1522-1540).
gctgctgtgactaatctct

SEQ ID NO: 447835 - DNA, 19 bp, Mus musculus
  siRNA target sequence for Pou2f1 (NM_011137.1,1528-1546).
gtgactaatctctctctta

SEQ ID NO: 447836 - DNA, 19 bp, Mus musculus
  siRNA target sequence for Pou2f1 (NM_011137.1,1530-1548).
gactaatctctctcttaca

SEQ ID NO: 447837 - DNA, 19 bp, Mus musculus
  siRNA target sequence for Pou2f1 (NM_011137.1,1941-1959).
catggcaccctcacagttt

SEQ ID NO: 447838 - DNA, 19 bp, Mus musculus
  siRNA target sequence for Pou2f1 (NM_011137.1,2034-2052).
cagtacactggcaacgatt

SEQ ID NO: 447839 - DNA, 19 bp, Mus musculus
  siRNA target sequence for Pou2f1 (NM_011137.1,2066-2084).
ctagtggctctcttccaat

SEQ ID NO: 447840 - DNA, 19 bp, Mus musculus
  siRNA target sequence for Pou2f1 (NM_011137.1,2071-2089).
ggctctcttccaataacgt

SEQ ID NO: 447841 - DNA, 19 bp, Mus musculus
  siRNA target sequence for Pou2f1 (NM_011137.1,2192-2210).
ccagcaacccagtaagctt

SEQ ID NO: 447842 - DNA, 19 bp, Mus musculus
  siRNA target sequence for Pou2f1 (NM_198933.1,80-98).
gcagtgactgtgttctaga

SEQ ID NO: 447843 - DNA, 19 bp, Mus musculus
  siRNA target sequence for Pou2f2 (NM_011138.1,23-41).
catgggggctccagaaata

SEQ ID NO: 447844 - DNA, 19 bp, Mus musculus
  siRNA target sequence for Pou2f2 (NM_011138.1,33-51).
ccagaaataagaatgtcta

SEQ ID NO: 447845 - DNA, 19 bp, Mus musculus
  siRNA target sequence for Pou2f2 (NM_011138.1,112-130).
gaaatggacccgacattaa

SEQ ID NO: 447846 - DNA, 19 bp, Mus musculus
  siRNA target sequence for Pou2f2 (NM_011138.1,422-440).
gctaccaacgccaaatcta

SEQ ID NO: 447847 - DNA, 19 bp, Mus musculus
  siRNA target sequence for Pou2f2 (NM_011138.1,423-441).
ctaccaacgccaaatctat

SEQ ID NO: 447848 - DNA, 19 bp, Mus musculus
  siRNA target sequence for Pou2f2 (NM_011138.1,806-824).
cgacgcagagactatgtct

SEQ ID NO: 447849 - DNA, 19 bp, Mus musculus
  siRNA target sequence for Pou2f2 (NM_011138.1,930-948).
gtccgcttcgccttagaga

SEQ ID NO: 447850 - DNA, 19 bp, Mus musculus
  siRNA target sequence for Pou2f2 (NM_011138.1,1156-1174).
gcgcagggaccttaccatt

SEQ ID NO: 447851 - DNA, 19 bp, Mus musculus
  siRNA target sequence for Pou2f2 (NM_011138.1,1199-1217).
cacaacagttactacctta

SEQ ID NO: 447852 - DNA, 19 bp, Mus musculus
  siRNA target sequence for Pou2f3 (NM_011139.1,178-196).
gatcgaaatggcctagatt

SEQ ID NO: 447853 - DNA, 19 bp, Mus musculus
  siRNA target sequence for Pou2f3 (NM_011139.1,181-199).
cgaaatggcctagatttca

SEQ ID NO: 447854 - DNA, 19 bp, Mus musculus
  siRNA target sequence for Pou2f3 (NM_011139.1,516-534).
gctatcaggatcctcttta

SEQ ID NO: 447855 - DNA, 19 bp, Mus musculus
  siRNA target sequence for Pou2f3 (NM_011139.1,734-752).
ctaccatctcgcgatttga

SEQ ID NO: 447856 - DNA, 19 bp, Mus musculus
  siRNA target sequence for Pou2f3 (NM_011139.1,869-887).
ccactctcagcgaagtgtt

SEQ ID NO: 447857 - DNA, 19 bp, Mus musculus
  siRNA target sequence for Pou2f3 (NM_011139.1,870-888).
cactctcagcgaagtgttt

SEQ ID NO: 447858 - DNA, 19 bp, Mus musculus
  siRNA target sequence for Pou2f3 (NM_011139.1,943-961).
gagaagcgatttcaagata

SEQ ID NO: 447859 - DNA, 19 bp, Mus musculus
  siRNA target sequence for Pou2f3 (NM_011139.1,1080-1098).
cgtggccacccctgtcaaa

SEQ ID NO: 447860 - DNA, 19 bp, Mus musculus
  siRNA target sequence for Pou3f1 (NM_011141.1,1266-1284).
gcccatggacgacgtttat

SEQ ID NO: 447861 - DNA, 19 bp, Mus musculus
  siRNA target sequence for Pou3f2 (NM_008899.1,847-865).
cggatcaaactcggattta

SEQ ID NO: 447862 - DNA, 19 bp, Mus musculus
  siRNA target sequence for Pou3f2 (NM_008899.1,849-867).
gatcaaactcggatttact

SEQ ID NO: 447863 - DNA, 19 bp, Mus musculus
  siRNA target sequence for Pou3f2 (NM_008899.1,852-870).
caaactcggatttactcaa

SEQ ID NO: 447864 - DNA, 19 bp, Mus musculus
  siRNA target sequence for Pou3f3 (NM_008900.1,1353-1371).
ccgacgccaaaaggaaaaa

SEQ ID NO: 447865 - DNA, 19 bp, Mus musculus
  siRNA target sequence for Pou3f4 (NM_008901.1,166-184).
cactgggtgaccagtctta

SEQ ID NO: 447866 - DNA, 19 bp, Mus musculus
  siRNA target sequence for Pou3f4 (NM_008901.1,312-330).
ctcgccgcacactaaccat

SEQ ID NO: 447867 - DNA, 19 bp, Mus musculus
  siRNA target sequence for Pou3f4 (NM_008901.1,380-398).
gcggccaacccctcaatgt

SEQ ID NO: 447868 - DNA, 19 bp, Mus musculus
  siRNA target sequence for Pou3f4 (NM_008901.1,591-609).
cgccaaacaattcaaacaa

SEQ ID NO: 447869 - DNA, 19 bp, Mus musculus
  siRNA target sequence for Pou3f4 (NM_008901.1,592-610).
gccaaacaattcaaacaaa

SEQ ID NO: 447870 - DNA, 19 bp, Mus musculus
  siRNA target sequence for Pou3f4 (NM_008901.1,651-669).
ggcactgggcacactgtat

SEQ ID NO: 447871 - DNA, 19 bp, Mus musculus
  siRNA target sequence for Pou3f4 (NM_008901.1,699-717).
caggttcgaggccttacaa

SEQ ID NO: 447872 - DNA, 19 bp, Mus musculus
  siRNA target sequence for Pou3f4 (NM_008901.1,701-719).
ggttcgaggccttacaact

SEQ ID NO: 447873 - DNA, 19 bp, Mus musculus
  siRNA target sequence for Pou3f4 (NM_008901.1,738-756).
caagctgaaaccgctatta

SEQ ID NO: 447874 - DNA, 19 bp, Mus musculus
  siRNA target sequence for Pou3f4 (NM_008901.1,870-888).
gggcgtactggaaacacat

SEQ ID NO: 447875 - DNA, 19 bp, Mus musculus
  siRNA target sequence for Pou3f4 (NM_008901.1,871-889).
ggcgtactggaaacacatt

SEQ ID NO: 447876 - DNA, 19 bp, Mus musculus
  siRNA target sequence for Pou3f4 (NM_008901.1,872-890).
gcgtactggaaacacattt

SEQ ID NO: 447877 - DNA, 19 bp, Mus musculus
  siRNA target sequence for Pou3f4 (NM_008901.1,967-985).
cgtgtctggttctgtaata

SEQ ID NO: 447878 - DNA, 19 bp, Mus musculus
  siRNA target sequence for Pou3f4 (NM_008901.1,972-990).
ctggttctgtaatagaaga

SEQ ID NO: 447879 - DNA, 19 bp, Mus musculus
  siRNA target sequence for Pou3f4 (NM_008901.1,1026-1044).
gcagccacacgaggtttat

SEQ ID NO: 447880 - DNA, 19 bp, Mus musculus
  siRNA target sequence for Pou4f2 (NM_138944.1,3-21).
gtgtgccttctacttacaa

SEQ ID NO: 447881 - DNA, 19 bp, Mus musculus
  siRNA target sequence for Pou4f2 (NM_138944.1,8-26).
ccttctacttacaattgca

SEQ ID NO: 447882 - DNA, 19 bp, Mus musculus
  siRNA target sequence for Pou4f2 (NM_138944.1,875-893).
ccgaaaagctggatctcaa

SEQ ID NO: 447883 - DNA, 19 bp, Mus musculus
  siRNA target sequence for Pou4f3 (NM_138945.1,87-105).
ggccatgcgccgagtttgt

SEQ ID NO: 447884 - DNA, 19 bp, Mus musculus
  siRNA target sequence for Pou4f3 (NM_138945.1,89-107).
ccatgcgccgagtttgtct

SEQ ID NO: 447885 - DNA, 19 bp, Mus musculus
  siRNA target sequence for Pou4f3 (NM_138945.1,115-133).
ccgcagctgcagggtaata

SEQ ID NO: 447886 - DNA, 19 bp, Mus musculus
  siRNA target sequence for Pou4f3 (NM_138945.1,116-134).
cgcagctgcagggtaatat

SEQ ID NO: 447887 - DNA, 19 bp, Mus musculus
  siRNA target sequence for Pou4f3 (NM_138945.1,117-135).
gcagctgcagggtaatata

SEQ ID NO: 447888 - DNA, 19 bp, Mus musculus
  siRNA target sequence for Pou4f3 (NM_138945.1,120-138).
gctgcagggtaatatattt

SEQ ID NO: 447889 - DNA, 19 bp, Mus musculus
  siRNA target sequence for Pou4f3 (NM_138945.1,226-244).
cccgacgccacctaccata

SEQ ID NO: 447890 - DNA, 19 bp, Mus musculus
  siRNA target sequence for Pou4f3 (NM_138945.1,320-338).
cgcatcacgcggtacatca

SEQ ID NO: 447891 - DNA, 19 bp, Mus musculus
  siRNA target sequence for Pou4f3 (NM_138945.1,342-360).
cctcgagggcgacttactt

SEQ ID NO: 447892 - DNA, 19 bp, Mus musculus
  siRNA target sequence for Pou4f3 (NM_138945.1,429-447).
gatccacccgcatcatcta

SEQ ID NO: 447893 - DNA, 19 bp, Mus musculus
  siRNA target sequence for Pou4f3 (NM_138945.1,629-647).
cggctttagccaatcttaa

SEQ ID NO: 447894 - DNA, 19 bp, Mus musculus
  siRNA target sequence for Pou4f3 (NM_138945.1,689-707).
ggttcgagtctcttactct

SEQ ID NO: 447895 - DNA, 19 bp, Mus musculus
  siRNA target sequence for Pou4f3 (NM_138945.1,772-790).
gcctaccgagagaagaaca

SEQ ID NO: 447896 - DNA, 19 bp, Mus musculus
  siRNA target sequence for Pou4f3 (NM_138945.1,893-911).
gtccttcatccgagaagat

SEQ ID NO: 447897 - DNA, 19 bp, Mus musculus
  siRNA target sequence for Pou5f1 (NM_013633.1,141-159).
ctcgaacctggctaagctt

SEQ ID NO: 447898 - DNA, 19 bp, Mus musculus
  siRNA target sequence for Pou5f1 (NM_013633.1,333-351).
gagcacgagtggaaagcaa

SEQ ID NO: 447899 - DNA, 19 bp, Mus musculus
  siRNA target sequence for Pou5f1 (NM_013633.1,652-670).
ggaggaagccgacaacaat

SEQ ID NO: 447900 - DNA, 19 bp, Mus musculus
  siRNA target sequence for Pou5f1 (NM_013633.1,656-674).
gaagccgacaacaatgaga

SEQ ID NO: 447901 - DNA, 19 bp, Mus musculus
  siRNA target sequence for Pou5f1 (NM_013633.1,721-739).
gagaaagcgaactagcatt

SEQ ID NO: 447902 - DNA, 19 bp, Mus musculus
  siRNA target sequence for Pou6f1 (NM_010127.2,1126-1144).
gatgaggacgggatcaact

SEQ ID NO: 447903 - DNA, 19 bp, Mus musculus
  siRNA target sequence for Pou6f1 (NM_010127.2,1131-1149).
ggacgggatcaacttagaa

SEQ ID NO: 447904 - DNA, 19 bp, Mus musculus
  siRNA target sequence for Pou6f1 (NM_010127.2,1150-1168).
gagatccgggagtttgcta

SEQ ID NO: 447905 - DNA, 19 bp, Mus musculus
  siRNA target sequence for Pou6f1 (NM_010127.2,1155-1173).
ccgggagtttgctaagaat

SEQ ID NO: 447906 - DNA, 19 bp, Mus musculus
  siRNA target sequence for Pou6f1 (NM_010127.2,1156-1174).
cgggagtttgctaagaatt

SEQ ID NO: 447907 - DNA, 19 bp, Mus musculus
  siRNA target sequence for Pou6f1 (NM_010127.2,1157-1175).
gggagtttgctaagaattt

SEQ ID NO: 447908 - DNA, 19 bp, Mus musculus
  siRNA target sequence for Pou6f1 (NM_010127.2,1446-1464).
ggccatagaggctctcaat

SEQ ID NO: 447909 - DNA, 19 bp, Mus musculus
  siRNA target sequence for Ppara (NM_011144.2,740-758).
gaacatcgagtgtcgaata

SEQ ID NO: 447910 - DNA, 19 bp, Mus musculus
  siRNA target sequence for Ppara (NM_011144.2,743-761).
catcgagtgtcgaatatgt

SEQ ID NO: 447911 - DNA, 19 bp, Mus musculus
  siRNA target sequence for Ppara (NM_011144.2,817-835).
gcttctttcggcgaactat

SEQ ID NO: 447912 - DNA, 19 bp, Mus musculus
  siRNA target sequence for Ppara (NM_011144.2,818-836).
cttctttcggcgaactatt

SEQ ID NO: 447913 - DNA, 19 bp, Mus musculus
  siRNA target sequence for Ppara (NM_011144.2,904-922).
gccagtactgccgttttca

SEQ ID NO: 447914 - DNA, 19 bp, Mus musculus
  siRNA target sequence for Ppara (NM_011144.2,906-924).
cagtactgccgttttcaca

SEQ ID NO: 447915 - DNA, 19 bp, Mus musculus
  siRNA target sequence for Ppara (NM_011144.2,941-959).
gatgtcacacaatgcaatt

SEQ ID NO: 447916 - DNA, 19 bp, Mus musculus
  siRNA target sequence for Ppara (NM_011144.2,970-988).
gaatgccaagatctgaaaa

SEQ ID NO: 447917 - DNA, 19 bp, Mus musculus
  siRNA target sequence for Ppara (NM_011144.2,1020-1038).
gaacacgacctgaaagatt

SEQ ID NO: 447918 - DNA, 19 bp, Mus musculus
  siRNA target sequence for Ppara (NM_011144.2,1151-1169).
caacccgccttttgtcata

SEQ ID NO: 447919 - DNA, 19 bp, Mus musculus
  siRNA target sequence for Ppara (NM_011144.2,1154-1172).
cccgccttttgtcatacat

SEQ ID NO: 447920 - DNA, 19 bp, Mus musculus
  siRNA target sequence for Ppara (NM_011144.2,1156-1174).
cgccttttgtcatacatga

SEQ ID NO: 447921 - DNA, 19 bp, Mus musculus
  siRNA target sequence for Ppara (NM_011144.2,1173-1191).
gacatggagaccttgtgta

SEQ ID NO: 447922 - DNA, 19 bp, Mus musculus
  siRNA target sequence for Ppara (NM_011144.2,1225-1243).
ccaacggcgtcgaagacaa

SEQ ID NO: 447923 - DNA, 19 bp, Mus musculus
  siRNA target sequence for Ppara (NM_011144.2,1226-1244).
caacggcgtcgaagacaaa

SEQ ID NO: 447924 - DNA, 19 bp, Mus musculus
  siRNA target sequence for Ppara (NM_011144.2,1296-1314).
gtcacggagctcacagaat

SEQ ID NO: 447925 - DNA, 19 bp, Mus musculus
  siRNA target sequence for Ppara (NM_011144.2,1444-1462).
cgtacggcaatggctttat

SEQ ID NO: 447926 - DNA, 19 bp, Mus musculus
  siRNA target sequence for Ppara (NM_011144.2,1448-1466).
cggcaatggctttatcaca

SEQ ID NO: 447927 - DNA, 19 bp, Mus musculus
  siRNA target sequence for Ppara (NM_011144.2,1465-1483).
cacgcgagttccttaagaa

SEQ ID NO: 447928 - DNA, 19 bp, Mus musculus
  siRNA target sequence for Ppara (NM_011144.2,1526-1544).
cttcgctatgaagttcaat

SEQ ID NO: 447929 - DNA, 19 bp, Mus musculus
  siRNA target sequence for Ppara (NM_011144.2,1535-1553).
gaagttcaatgccttagaa

SEQ ID NO: 447930 - DNA, 19 bp, Mus musculus
  siRNA target sequence for Ppara (NM_011144.2,1564-1582).
gtgacatttccctgtttgt

SEQ ID NO: 447931 - DNA, 19 bp, Mus musculus
  siRNA target sequence for Ppara (NM_011144.2,1574-1592).
cctgtttgtggctgctata

SEQ ID NO: 447932 - DNA, 19 bp, Mus musculus
  siRNA target sequence for Ppara (NM_011144.2,1581-1599).
gtggctgctataatttgct

SEQ ID NO: 447933 - DNA, 19 bp, Mus musculus
  siRNA target sequence for Ppara (NM_011144.2,1605-1623).
gatcggcctggccttctaa

SEQ ID NO: 447934 - DNA, 19 bp, Mus musculus
  siRNA target sequence for Ppara (NM_011144.2,1608-1626).
cggcctggccttctaaaca

SEQ ID NO: 447935 - DNA, 19 bp, Mus musculus
  siRNA target sequence for Ppara (NM_011144.2,1609-1627).
ggcctggccttctaaacat

SEQ ID NO: 447936 - DNA, 19 bp, Mus musculus
  siRNA target sequence for Ppara (NM_011144.2,1773-1791).
ctcgtacaggtcatcaaga

SEQ ID NO: 447937 - DNA, 19 bp, Mus musculus
  siRNA target sequence for Ppara (NM_011144.2,1819-1837).
cactgttgcaagagatcta

SEQ ID NO: 447938 - DNA, 19 bp, Mus musculus
  siRNA target sequence for Ppard (NM_011145.1,251-269).
caggcggcagcctcaacat

SEQ ID NO: 447939 - DNA, 19 bp, Mus musculus
  siRNA target sequence for Ppard (NM_011145.1,362-380).
gcatgaagctcgagtatga

SEQ ID NO: 447940 - DNA, 19 bp, Mus musculus
  siRNA target sequence for Ppard (NM_011145.1,574-592).
gacctgaaggccttctcta

SEQ ID NO: 447941 - DNA, 19 bp, Mus musculus
  siRNA target sequence for Ppard (NM_011145.1,836-854).
ccgagttcgccaagaacat

SEQ ID NO: 447942 - DNA, 19 bp, Mus musculus
  siRNA target sequence for Ppard (NM_011145.1,888-906).
ggtgaccctcctcaagtat

SEQ ID NO: 447943 - DNA, 19 bp, Mus musculus
  siRNA target sequence for Ppard (NM_011145.1,909-927).
cgtgcacgaggccatcttt

SEQ ID NO: 447944 - DNA, 19 bp, Mus musculus
  siRNA target sequence for Ppard (NM_011145.1,1134-1152).
ccggccaggcctcatgaat

SEQ ID NO: 447945 - DNA, 19 bp, Mus musculus
  siRNA target sequence for Ppard (NM_011145.1,1182-1200).
cattctgcgggctctagaa

SEQ ID NO: 447946 - DNA, 19 bp, Mus musculus
  siRNA target sequence for Ppard (NM_011145.1,1188-1206).
gcgggctctagaattccat

SEQ ID NO: 447947 - DNA, 19 bp, Mus musculus
  siRNA target sequence for Pparg (NM_011146.1,102-120).
gcctatgagcacttcacaa

SEQ ID NO: 447948 - DNA, 19 bp, Mus musculus
  siRNA target sequence for Pparg (NM_011146.1,108-126).
gagcacttcacaagaaatt

SEQ ID NO: 447949 - DNA, 19 bp, Mus musculus
  siRNA target sequence for Pparg (NM_011146.1,209-227).
cgcattcctttgacatcaa

SEQ ID NO: 447950 - DNA, 19 bp, Mus musculus
  siRNA target sequence for Pparg (NM_011146.1,228-246).
gccctttaccacagttgat

SEQ ID NO: 447951 - DNA, 19 bp, Mus musculus
  siRNA target sequence for Pparg (NM_011146.1,260-278).
ctgctccacactatgaaga

SEQ ID NO: 447952 - DNA, 19 bp, Mus musculus
  siRNA target sequence for Pparg (NM_011146.1,301-319).
ccaatggttgctgattaca

SEQ ID NO: 447953 - DNA, 19 bp, Mus musculus
  siRNA target sequence for Pparg (NM_011146.1,325-343).
gacctgaagctccaagaat

SEQ ID NO: 447954 - DNA, 19 bp, Mus musculus
  siRNA target sequence for Pparg (NM_011146.1,345-363).
ccaaagtgcgatcaaagta

SEQ ID NO: 447955 - DNA, 19 bp, Mus musculus
  siRNA target sequence for Pparg (NM_011146.1,368-386).
ctgcatctccaccttatta

SEQ ID NO: 447956 - DNA, 19 bp, Mus musculus
  siRNA target sequence for Pparg (NM_011146.1,418-436).
catgaagaaccttctaact

SEQ ID NO: 447957 - DNA, 19 bp, Mus musculus
  siRNA target sequence for Pparg (NM_011146.1,530-548).
gaagaaccatccgattgaa

SEQ ID NO: 447958 - DNA, 19 bp, Mus musculus
  siRNA target sequence for Pparg (NM_011146.1,536-554).
ccatccgattgaagcttat

SEQ ID NO: 447959 - DNA, 19 bp, Mus musculus
  siRNA target sequence for Pparg (NM_011146.1,537-555).
catccgattgaagcttatt

SEQ ID NO: 447960 - DNA, 19 bp, Mus musculus
  siRNA target sequence for Pparg (NM_011146.1,540-558).
ccgattgaagcttatttat

SEQ ID NO: 447961 - DNA, 19 bp, Mus musculus
  siRNA target sequence for Pparg (NM_011146.1,542-560).
gattgaagcttatttatga

SEQ ID NO: 447962 - DNA, 19 bp, Mus musculus
  siRNA target sequence for Pparg (NM_011146.1,559-577).
gataggtgtgatcttaact

SEQ ID NO: 447963 - DNA, 19 bp, Mus musculus
  siRNA target sequence for Pparg (NM_011146.1,579-597).
ccggatccacaaaaaaagt

SEQ ID NO: 447964 - DNA, 19 bp, Mus musculus
  siRNA target sequence for Pparg (NM_011146.1,580-598).
cggatccacaaaaaaagta

SEQ ID NO: 447965 - DNA, 19 bp, Mus musculus
  siRNA target sequence for Pparg (NM_011146.1,706-724).
gcggagatctccagtgata

SEQ ID NO: 447966 - DNA, 19 bp, Mus musculus
  siRNA target sequence for Pparg (NM_011146.1,757-775).
cgagccctggcaaagcatt

SEQ ID NO: 447967 - DNA, 19 bp, Mus musculus
  siRNA target sequence for Pparg (NM_011146.1,772-790).
catttgtatgactcataca

SEQ ID NO: 447968 - DNA, 19 bp, Mus musculus
  siRNA target sequence for Pparg (NM_011146.1,828-846).
gatcttgacaggaaagaca

SEQ ID NO: 447969 - DNA, 19 bp, Mus musculus
  siRNA target sequence for Pparg (NM_011146.1,838-856).
ggaaagacaacggacaaat

SEQ ID NO: 447970 - DNA, 19 bp, Mus musculus
  siRNA target sequence for Pparg (NM_011146.1,951-969).
ggtggccatccgaattttt

SEQ ID NO: 447971 - DNA, 19 bp, Mus musculus
  siRNA target sequence for Pparg (NM_011146.1,954-972).
ggccatccgaatttttcaa

SEQ ID NO: 447972 - DNA, 19 bp, Mus musculus
  siRNA target sequence for Pparg (NM_011146.1,970-988).
caagggtgccagtttcgat

SEQ ID NO: 447973 - DNA, 19 bp, Mus musculus
  siRNA target sequence for Pparg (NM_011146.1,1013-1031).
cagagtatgccaaaaatat

SEQ ID NO: 447974 - DNA, 19 bp, Mus musculus
  siRNA target sequence for Pparg (NM_011146.1,1087-1105).
gtccatgagatcatctaca

SEQ ID NO: 447975 - DNA, 19 bp, Mus musculus
  siRNA target sequence for Pparg (NM_011146.1,1209-1227).
ctttatggagcctaagttt

SEQ ID NO: 447976 - DNA, 19 bp, Mus musculus
  siRNA target sequence for Pparg (NM_011146.1,1215-1233).
ggagcctaagtttgagttt

SEQ ID NO: 447977 - DNA, 19 bp, Mus musculus
  siRNA target sequence for Pparg (NM_011146.1,1245-1263).
caatgcactggaattagat

SEQ ID NO: 447978 - DNA, 19 bp, Mus musculus
  siRNA target sequence for Pparg (NM_011146.1,1264-1282).
gacagtgacttggctatat

SEQ ID NO: 447979 - DNA, 19 bp, Mus musculus
  siRNA target sequence for Pparg (NM_011146.1,1268-1286).
gtgacttggctatatttat

SEQ ID NO: 447980 - DNA, 19 bp, Mus musculus
  siRNA target sequence for Prop1 (NM_008936.1,616-634).
cagccgatagcccatctat

SEQ ID NO: 447981 - DNA, 19 bp, Mus musculus
  siRNA target sequence for Prop1 (NM_008936.1,618-636).
gccgatagcccatctatct

SEQ ID NO: 447982 - DNA, 19 bp, Mus musculus
  siRNA target sequence for Prop1 (NM_008936.1,619-637).
ccgatagcccatctatcta

SEQ ID NO: 447983 - DNA, 19 bp, Mus musculus
  siRNA target sequence for Prrx1 (NM_011127.1,223-241).
ctgcaggcgaaaaagaact

SEQ ID NO: 447984 - DNA, 19 bp, Mus musculus
  siRNA target sequence for Prrx1 (NM_011127.1,226-244).
caggcgaaaaagaacttct

SEQ ID NO: 447985 - DNA, 19 bp, Mus musculus
  siRNA target sequence for Prrx1 (NM_011127.1,293-311).
cacaagcagacgaaagtgt

SEQ ID NO: 447986 - DNA, 19 bp, Mus musculus
  siRNA target sequence for Prrx1 (NM_011127.1,379-397).
gacaatgaccagttgaact

SEQ ID NO: 447987 - DNA, 19 bp, Mus musculus
  siRNA target sequence for Prrx1 (NM_011127.1,424-442).
cggagaaacaggacaacat

SEQ ID NO: 447988 - DNA, 19 bp, Mus musculus
  siRNA target sequence for Prrx1 (NM_011127.1,462-480).
ggccttggagcgtgtcttt

SEQ ID NO: 447989 - DNA, 19 bp, Mus musculus
  siRNA target sequence for Prrx1 (NM_011127.1,475-493).
gtctttgagcggacacatt

SEQ ID NO: 447990 - DNA, 19 bp, Mus musculus
  siRNA target sequence for Prrx1 (NM_011127.1,488-506).
cacattacccggatgcttt

SEQ ID NO: 447991 - DNA, 19 bp, Mus musculus
  siRNA target sequence for Prrx1 (NM_011127.1,604-622).
gccatgctggccaataaaa

SEQ ID NO: 447992 - DNA, 19 bp, Mus musculus
  siRNA target sequence for Prrx1 (NM_011127.1,695-713).
ccagaccaaccgattatct

SEQ ID NO: 447993 - DNA, 19 bp, Mus musculus
  siRNA target sequence for Prrx1 (NM_011127.1,741-759).
cgccatggctacttattct

SEQ ID NO: 447994 - DNA, 19 bp, Mus musculus
  siRNA target sequence for Prrx1 (NM_011127.1,779-797).
gccctgcacagggtatcaa

SEQ ID NO: 447995 - DNA, 19 bp, Mus musculus
  siRNA target sequence for Prrx1 (NM_011127.1,826-844).
ctgaaggccaaggaatata

SEQ ID NO: 447996 - DNA, 19 bp, Mus musculus
  siRNA target sequence for Prrx1 (NM_011127.1,828-846).
gaaggccaaggaatatagt

SEQ ID NO: 447997 - DNA, 19 bp, Mus musculus
  siRNA target sequence for Prrx1 (NM_011127.1,831-849).
ggccaaggaatatagttta

SEQ ID NO: 447998 - DNA, 19 bp, Mus musculus
  siRNA target sequence for Prrx2 (NM_009116.1,652-670).
cctcgttgctcaagtctta

SEQ ID NO: 447999 - DNA, 19 bp, Mus musculus
  siRNA target sequence for Prrx2 (NM_009116.1,653-671).
ctcgttgctcaagtcttat

SEQ ID NO: 448000 - DNA, 19 bp, Mus musculus
  siRNA target sequence for Psx1 (NM_008955.1,193-211).
gctcgctcagggtgagttt

SEQ ID NO: 448001 - DNA, 19 bp, Mus musculus
  siRNA target sequence for Psx1 (NM_008955.1,196-214).
cgctcagggtgagtttgat

SEQ ID NO: 448002 - DNA, 19 bp, Mus musculus
  siRNA target sequence for Psx1 (NM_008955.1,617-635).
gaatgtgatgtgcagaatt

SEQ ID NO: 448003 - DNA, 19 bp, Mus musculus
  siRNA target sequence for Psx2 (NM_023894.1,671-689).
gatgtgcaggagtggttta

SEQ ID NO: 448004 - DNA, 19 bp, Mus musculus
  siRNA target sequence for Psx2 (NM_023894.1,677-695).
caggagtggtttaagatga

SEQ ID NO: 448005 - DNA, 19 bp, Mus musculus
  siRNA target sequence for Psx2 (NM_023894.1,739-757).
cgaactgccaccgattaca

SEQ ID NO: 448006 - DNA, 19 bp, Mus musculus
  siRNA target sequence for Psx2 (NM_023894.1,747-765).
caccgattacagagaacaa

SEQ ID NO: 448007 - DNA, 19 bp, Mus musculus
  siRNA target sequence for Rara (NM_009024.1,468-486).
cccccttacgccttcttct

SEQ ID NO: 448008 - DNA, 19 bp, Mus musculus
  siRNA target sequence for Rara (NM_009024.1,470-488).
cccttacgccttcttcttt

SEQ ID NO: 448009 - DNA, 19 bp, Mus musculus
  siRNA target sequence for Rara (NM_009024.1,656-674).
ctacaagccttgctttgtt

SEQ ID NO: 448010 - DNA, 19 bp, Mus musculus
  siRNA target sequence for Rara (NM_009024.1,659-677).
caagccttgctttgtttgt

SEQ ID NO: 448011 - DNA, 19 bp, Mus musculus
  siRNA target sequence for Rara (NM_009024.1,832-850).
gccggctgcagaaatgttt

SEQ ID NO: 448012 - DNA, 19 bp, Mus musculus
  siRNA target sequence for Rara (NM_009024.1,869-887).
ggagtcggtgcgaaacgat

SEQ ID NO: 448013 - DNA, 19 bp, Mus musculus
  siRNA target sequence for Rara (NM_009024.1,874-892).
cggtgcgaaacgatcgaaa

SEQ ID NO: 448014 - DNA, 19 bp, Mus musculus
  siRNA target sequence for Rara (NM_009024.1,878-896).
gcgaaacgatcgaaagaaa

SEQ ID NO: 448015 - DNA, 19 bp, Mus musculus
  siRNA target sequence for Rarg (NM_011244.2,351-369).
cagagggtcgccaccattt

SEQ ID NO: 448016 - DNA, 19 bp, Mus musculus
  siRNA target sequence for Rarg (NM_011244.2,353-371).
gagggtcgccaccatttga

SEQ ID NO: 448017 - DNA, 19 bp, Mus musculus
  siRNA target sequence for Rarg (NM_011244.2,355-373).
gggtcgccaccatttgaga

SEQ ID NO: 448018 - DNA, 19 bp, Mus musculus
  siRNA target sequence for Rarg (NM_011244.2,356-374).
ggtcgccaccatttgagat

SEQ ID NO: 448019 - DNA, 19 bp, Mus musculus
  siRNA target sequence for Rarg (NM_011244.2,496-514).
ccacctcctcgggtctata

SEQ ID NO: 448020 - DNA, 19 bp, Mus musculus
  siRNA target sequence for Rarg (NM_011244.2,497-515).
cacctcctcgggtctataa

SEQ ID NO: 448021 - DNA, 19 bp, Mus musculus
  siRNA target sequence for Rarg (NM_011244.2,516-534).
gccatgctttgtatgcaat

SEQ ID NO: 448022 - DNA, 19 bp, Mus musculus
  siRNA target sequence for Rarg (NM_011244.2,657-675).
caaggtcaccagaaatcga

SEQ ID NO: 448023 - DNA, 19 bp, Mus musculus
  siRNA target sequence for Rarg (NM_011244.2,684-702).
ctgcaggctacaaaagtgt

SEQ ID NO: 448024 - DNA, 19 bp, Mus musculus
  siRNA target sequence for Rarg (NM_011244.2,686-704).
gcaggctacaaaagtgttt

SEQ ID NO: 448025 - DNA, 19 bp, Mus musculus
  siRNA target sequence for Rarg (NM_011244.2,690-708).
gctacaaaagtgtttcgaa

SEQ ID NO: 448026 - DNA, 19 bp, Mus musculus
  siRNA target sequence for Rarg (NM_011244.2,738-756).
cgatcgaaacaagaagaaa

SEQ ID NO: 448027 - DNA, 19 bp, Mus musculus
  siRNA target sequence for Rarg (NM_011244.2,777-795).
ctcgcccgacagctatgaa

SEQ ID NO: 448028 - DNA, 19 bp, Mus musculus
  siRNA target sequence for Rarg (NM_011244.2,779-797).
cgcccgacagctatgaact

SEQ ID NO: 448029 - DNA, 19 bp, Mus musculus
  siRNA target sequence for Rarg (NM_011244.2,990-1008).
gcggctgcctggttttaca

SEQ ID NO: 448030 - DNA, 19 bp, Mus musculus
  siRNA target sequence for Rarg (NM_011244.2,1048-1066).
gcttgtctggacatcctaa

SEQ ID NO: 448031 - DNA, 19 bp, Mus musculus
  siRNA target sequence for Rarg (NM_011244.2,1049-1067).
cttgtctggacatcctaat

SEQ ID NO: 448032 - DNA, 19 bp, Mus musculus
  siRNA target sequence for Rarg (NM_011244.2,1052-1070).
gtctggacatcctaatgct

SEQ ID NO: 448033 - DNA, 19 bp, Mus musculus
  siRNA target sequence for Rarg (NM_011244.2,1071-1089).
gcggatctgtacaaggtat

SEQ ID NO: 448034 - DNA, 19 bp, Mus musculus
  siRNA target sequence for Rarg (NM_011244.2,1072-1090).
cggatctgtacaaggtata

SEQ ID NO: 448035 - DNA, 19 bp, Mus musculus
  siRNA target sequence for Rarg (NM_011244.2,1096-1114).
gagcaggacactatgacat

SEQ ID NO: 448036 - DNA, 19 bp, Mus musculus
  siRNA target sequence for Rarg (NM_011244.2,1439-1457).
gggctataaccctgaagat

SEQ ID NO: 448037 - DNA, 19 bp, Mus musculus
  siRNA target sequence for Rax (NM_013833.1,700-718).
gacgttcaccacttaccaa

SEQ ID NO: 448038 - DNA, 19 bp, Mus musculus
  siRNA target sequence for Rax (NM_013833.1,1185-1203).
cggcattcggggacaagtt

SEQ ID NO: 448039 - DNA, 19 bp, Mus musculus
  siRNA target sequence for Rax (NM_013833.1,1187-1205).
gcattcggggacaagttct

SEQ ID NO: 448040 - DNA, 19 bp, Mus musculus
  siRNA target sequence for Rel (NM_009044.1,283-301).
ggcctcgagtggatataat

SEQ ID NO: 448041 - DNA, 19 bp, Mus musculus
  siRNA target sequence for Rel (NM_009044.1,286-304).
ctcgagtggatataatcca

SEQ ID NO: 448042 - DNA, 19 bp, Mus musculus
  siRNA target sequence for Rel (NM_009044.1,288-306).
cgagtggatataatccata

SEQ ID NO: 448043 - DNA, 19 bp, Mus musculus
  siRNA target sequence for Rel (NM_009044.1,334-352).
gaggggaatgcggtttaga

SEQ ID NO: 448044 - DNA, 19 bp, Mus musculus
  siRNA target sequence for Rel (NM_009044.1,338-356).
ggaatgcggtttagataca

SEQ ID NO: 448045 - DNA, 19 bp, Mus musculus
  siRNA target sequence for Rel (NM_009044.1,339-357).
gaatgcggtttagatacaa

SEQ ID NO: 448046 - DNA, 19 bp, Mus musculus
  siRNA target sequence for Rel (NM_009044.1,422-440).
ccgtctgtccagattatga

SEQ ID NO: 448047 - DNA, 19 bp, Mus musculus
  siRNA target sequence for Rel (NM_009044.1,423-441).
cgtctgtccagattatgaa

SEQ ID NO: 448048 - DNA, 19 bp, Mus musculus
  siRNA target sequence for Rel (NM_009044.1,501-519).
ctcatcctcatgatttagt

SEQ ID NO: 448049 - DNA, 19 bp, Mus musculus
  siRNA target sequence for Rel (NM_009044.1,507-525).
ctcatgatttagttggaaa

SEQ ID NO: 448050 - DNA, 19 bp, Mus musculus
  siRNA target sequence for Rel (NM_009044.1,531-549).
gcagagatggatactatga

SEQ ID NO: 448051 - DNA, 19 bp, Mus musculus
  siRNA target sequence for Rel (NM_009044.1,566-584).
gaacgcagacctttgtttt

SEQ ID NO: 448052 - DNA, 19 bp, Mus musculus
  siRNA target sequence for Rel (NM_009044.1,646-664).
gattagtgcaggaatcaat

SEQ ID NO: 448053 - DNA, 19 bp, Mus musculus
  siRNA target sequence for Rel (NM_009044.1,876-894).
ggggaggagatgaaatatt

SEQ ID NO: 448054 - DNA, 19 bp, Mus musculus
  siRNA target sequence for Rel (NM_009044.1,877-895).
gggaggagatgaaatattt

SEQ ID NO: 448055 - DNA, 19 bp, Mus musculus
  siRNA target sequence for Rel (NM_009044.1,954-972).
gggaagccagaggtgtttt

SEQ ID NO: 448056 - DNA, 19 bp, Mus musculus
  siRNA target sequence for Rel (NM_009044.1,991-1009).
ccgccaagtagccattgtt

SEQ ID NO: 448057 - DNA, 19 bp, Mus musculus
  siRNA target sequence for Rel (NM_009044.1,992-1010).
cgccaagtagccattgttt

SEQ ID NO: 448058 - DNA, 19 bp, Mus musculus
  siRNA target sequence for Rel (NM_009044.1,993-1011).
gccaagtagccattgtttt

SEQ ID NO: 448059 - DNA, 19 bp, Mus musculus
  siRNA target sequence for Rel (NM_009044.1,1015-1033).
gactcctccgtattgcaaa

SEQ ID NO: 448060 - DNA, 19 bp, Mus musculus
  siRNA target sequence for Rel (NM_009044.1,1019-1037).
cctccgtattgcaaagcta

SEQ ID NO: 448061 - DNA, 19 bp, Mus musculus
  siRNA target sequence for Rel (NM_009044.1,1020-1038).
ctccgtattgcaaagctat

SEQ ID NO: 448062 - DNA, 19 bp, Mus musculus
  siRNA target sequence for Rel (NM_009044.1,1023-1041).
cgtattgcaaagctatact

SEQ ID NO: 448063 - DNA, 19 bp, Mus musculus
  siRNA target sequence for Rel (NM_009044.1,1117-1135).
cctgccagatgaaaaagat

SEQ ID NO: 448064 - DNA, 19 bp, Mus musculus
  siRNA target sequence for Rel (NM_009044.1,1133-1151).
gatgcatatggcaataaat

SEQ ID NO: 448065 - DNA, 19 bp, Mus musculus
  siRNA target sequence for Rel (NM_009044.1,1192-1210).
gcaagattgtggtcacttt

SEQ ID NO: 448066 - DNA, 19 bp, Mus musculus
  siRNA target sequence for Rel (NM_009044.1,1193-1211).
caagattgtggtcacttta

SEQ ID NO: 448067 - DNA, 19 bp, Mus musculus
  siRNA target sequence for Rel (NM_009044.1,1343-1361).
gaaccttactattcttcat

SEQ ID NO: 448068 - DNA, 19 bp, Mus musculus
  siRNA target sequence for Rel (NM_009044.1,1473-1491).
caaataccctgagtacttt

SEQ ID NO: 448069 - DNA, 19 bp, Mus musculus
  siRNA target sequence for Rel (NM_009044.1,1509-1527).
cctctaattcacaaggtat

SEQ ID NO: 448070 - DNA, 19 bp, Mus musculus
  siRNA target sequence for Rel (NM_009044.1,1557-1575).
gcgacttgagtgcatctaa

SEQ ID NO: 448071 - DNA, 19 bp, Mus musculus
  siRNA target sequence for Rel (NM_009044.1,1558-1576).
cgacttgagtgcatctaat

SEQ ID NO: 448072 - DNA, 19 bp, Mus musculus
  siRNA target sequence for Rel (NM_009044.1,1559-1577).
gacttgagtgcatctaatt

SEQ ID NO: 448073 - DNA, 19 bp, Mus musculus
  siRNA target sequence for Rel (NM_009044.1,1572-1590).
ctaattcgtgcctttataa

SEQ ID NO: 448074 - DNA, 19 bp, Mus musculus
  siRNA target sequence for Rel (NM_009044.1,1593-1611).
ctgatgacctagctagaat

SEQ ID NO: 448075 - DNA, 19 bp, Mus musculus
  siRNA target sequence for Rel (NM_009044.1,1624-1642).
catgtcaccaactgactta

SEQ ID NO: 448076 - DNA, 19 bp, Mus musculus
  siRNA target sequence for Rel (NM_009044.1,1631-1649).
ccaactgacttatacagta

SEQ ID NO: 448077 - DNA, 19 bp, Mus musculus
  siRNA target sequence for Rel (NM_009044.1,1632-1650).
caactgacttatacagtat

SEQ ID NO: 448078 - DNA, 19 bp, Mus musculus
  siRNA target sequence for Rel (NM_009044.1,1751-1769).
cttgaaaacccctcatgta

SEQ ID NO: 448079 - DNA, 19 bp, Mus musculus
  siRNA target sequence for Rel (NM_009044.1,1788-1806).
gagacctgagacaactaca

SEQ ID NO: 448080 - DNA, 19 bp, Mus musculus
  siRNA target sequence for Rel (NM_009044.1,1865-1883).
cagtcagatgcatttgata

SEQ ID NO: 448081 - DNA, 19 bp, Mus musculus
  siRNA target sequence for Rel (NM_009044.1,1918-1936).
gaatgagcctggactatca

SEQ ID NO: 448082 - DNA, 19 bp, Mus musculus
  siRNA target sequence for Rel (NM_009044.1,1942-1960).
cgcaaataatcctaccttt

SEQ ID NO: 448083 - DNA, 19 bp, Mus musculus
  siRNA target sequence for Rel (NM_009044.1,2008-2026).
gagtgatcccttcacatat

SEQ ID NO: 448084 - DNA, 19 bp, Mus musculus
  siRNA target sequence for Rela (NM_009045.2,307-325).
gaccaggaacagttcgaat

SEQ ID NO: 448085 - DNA, 19 bp, Mus musculus
  siRNA target sequence for Rela (NM_009045.2,353-371).
ccggcctcatccacatgaa

SEQ ID NO: 448086 - DNA, 19 bp, Mus musculus
  siRNA target sequence for Rela (NM_009045.2,356-374).
gcctcatccacatgaactt

SEQ ID NO: 448087 - DNA, 19 bp, Mus musculus
  siRNA target sequence for Rela (NM_009045.2,500-518).
gcgaatccagaccaacaat

SEQ ID NO: 448088 - DNA, 19 bp, Mus musculus
  siRNA target sequence for Rela (NM_009045.2,501-519).
cgaatccagaccaacaata

SEQ ID NO: 448089 - DNA, 19 bp, Mus musculus
  siRNA target sequence for Rela (NM_009045.2,641-659).
ctcacatccgatttttgat

SEQ ID NO: 448090 - DNA, 19 bp, Mus musculus
  siRNA target sequence for Rela (NM_009045.2,643-661).
cacatccgatttttgataa

SEQ ID NO: 448091 - DNA, 19 bp, Mus musculus
  siRNA target sequence for Rela (NM_009045.2,721-739).
gcctcggtggggatgagat

SEQ ID NO: 448092 - DNA, 19 bp, Mus musculus
  siRNA target sequence for Rela (NM_009045.2,771-789).
gacattgaggtgtatttca

SEQ ID NO: 448093 - DNA, 19 bp, Mus musculus
  siRNA target sequence for Rela (NM_009045.2,1008-1026).
cgcaaaaggacctatgaga

SEQ ID NO: 448094 - DNA, 19 bp, Mus musculus
  siRNA target sequence for Rela (NM_009045.2,1104-1122).
cctacccgaaactcaactt

SEQ ID NO: 448095 - DNA, 19 bp, Mus musculus
  siRNA target sequence for Rela (NM_009045.2,1209-1227).
ccatcagggcagatctcaa

SEQ ID NO: 448096 - DNA, 19 bp, Mus musculus
  siRNA target sequence for Rela (NM_009045.2,1210-1228).
catcagggcagatctcaaa

SEQ ID NO: 448097 - DNA, 19 bp, Mus musculus
  siRNA target sequence for Rela (NM_009045.2,1583-1601).
ggagtaccctgaagctata

SEQ ID NO: 448098 - DNA, 19 bp, Mus musculus
  siRNA target sequence for Rela (NM_009045.2,1584-1602).
gagtaccctgaagctataa

SEQ ID NO: 448099 - DNA, 19 bp, Mus musculus
  siRNA target sequence for Rela (NM_009045.2,1586-1604).
gtaccctgaagctataact

SEQ ID NO: 448100 - DNA, 19 bp, Mus musculus
  siRNA target sequence for Relb (NM_009046.2,305-323).
gaaatcatcgacgaataca

SEQ ID NO: 448101 - DNA, 19 bp, Mus musculus
  siRNA target sequence for Relb (NM_009046.2,865-883).
gggaattgacccctacaat

SEQ ID NO: 448102 - DNA, 19 bp, Mus musculus
  siRNA target sequence for Relb (NM_009046.2,1001-1019).
cctgtctacgacaagaagt

SEQ ID NO: 448103 - DNA, 19 bp, Mus musculus
  siRNA target sequence for Relb (NM_009046.2,1112-1130).
gtgcaaaaagaggacatat

SEQ ID NO: 448104 - DNA, 19 bp, Mus musculus
  siRNA target sequence for Relb (NM_009046.2,1193-1211).
cggcagatcgccattgtgt

SEQ ID NO: 448105 - DNA, 19 bp, Mus musculus
  siRNA target sequence for Relb (NM_009046.2,1194-1212).
ggcagatcgccattgtgtt

SEQ ID NO: 448106 - DNA, 19 bp, Mus musculus
  siRNA target sequence for Relb (NM_009046.2,1401-1419).
gctctgatccacatggaat

SEQ ID NO: 448107 - DNA, 19 bp, Mus musculus
  siRNA target sequence for Relb (NM_009046.2,1415-1433).
ggaatcgagagcaaacgaa

SEQ ID NO: 448108 - DNA, 19 bp, Mus musculus
  siRNA target sequence for Relb (NM_009046.2,1511-1529).
cagccggcagactctgatt

SEQ ID NO: 448109 - DNA, 19 bp, Mus musculus
  siRNA target sequence for Relb (NM_009046.2,1514-1532).
ccggcagactctgatttct

SEQ ID NO: 448110 - DNA, 19 bp, Mus musculus
  siRNA target sequence for Relb (NM_009046.2,1515-1533).
cggcagactctgatttctt

SEQ ID NO: 448111 - DNA, 19 bp, Mus musculus
  siRNA target sequence for Relb (NM_009046.2,1591-1609).
cgatggctttgcctatgat

SEQ ID NO: 448112 - DNA, 19 bp, Mus musculus
  siRNA target sequence for Relb (NM_009046.2,1616-1634).
gcccccacgctcttcacta

SEQ ID NO: 448113 - DNA, 19 bp, Mus musculus
  siRNA target sequence for Relb (NM_009046.2,1617-1635).
cccccacgctcttcactat

SEQ ID NO: 448114 - DNA, 19 bp, Mus musculus
  siRNA target sequence for Relb (NM_009046.2,1619-1637).
cccacgctcttcactatgt

SEQ ID NO: 448115 - DNA, 19 bp, Mus musculus
  siRNA target sequence for Relb (NM_009046.2,1732-1750).
cctatcactggactctttt

SEQ ID NO: 448116 - DNA, 19 bp, Mus musculus
  siRNA target sequence for Relb (NM_009046.2,1787-1805).
cttgtgggcagcaacatgt

SEQ ID NO: 448117 - DNA, 19 bp, Mus musculus
  siRNA target sequence for Rora (NM_013646.1,239-257).
caaatcgtcaggaatccat

SEQ ID NO: 448118 - DNA, 19 bp, Mus musculus
  siRNA target sequence for Rora (NM_013646.1,255-273).
cattatggtgtcattacgt

SEQ ID NO: 448119 - DNA, 19 bp, Mus musculus
  siRNA target sequence for Rora (NM_013646.1,333-351).
cctcgtcagaagaactgtt

SEQ ID NO: 448120 - DNA, 19 bp, Mus musculus
  siRNA target sequence for Rora (NM_013646.1,549-567).
ctgacgcccacctacaaca

SEQ ID NO: 448121 - DNA, 19 bp, Mus musculus
  siRNA target sequence for Rora (NM_013646.1,698-716).
gtcgggattggacatcaat

SEQ ID NO: 448122 - DNA, 19 bp, Mus musculus
  siRNA target sequence for Rora (NM_013646.1,722-740).
caaacccgaacccatatgt

SEQ ID NO: 448123 - DNA, 19 bp, Mus musculus
  siRNA target sequence for Rora (NM_013646.1,809-827).
gtccatggcagaactagaa

SEQ ID NO: 448124 - DNA, 19 bp, Mus musculus
  siRNA target sequence for Rora (NM_013646.1,828-846).
caccttgcccagaacatat

SEQ ID NO: 448125 - DNA, 19 bp, Mus musculus
  siRNA target sequence for Rora (NM_013646.1,831-849).
cttgcccagaacatatcca

SEQ ID NO: 448126 - DNA, 19 bp, Mus musculus
  siRNA target sequence for Rora (NM_013646.1,988-1006).
cagaagctatccagtatgt

SEQ ID NO: 448127 - DNA, 19 bp, Mus musculus
  siRNA target sequence for Rora (NM_013646.1,1018-1036).
ccaaacgcattgatggatt

SEQ ID NO: 448128 - DNA, 19 bp, Mus musculus
  siRNA target sequence for Rora (NM_013646.1,1019-1037).
caaacgcattgatggattt

SEQ ID NO: 448129 - DNA, 19 bp, Mus musculus
  siRNA target sequence for Rora (NM_013646.1,1046-1064).
gtgtcaaaatgatcaaatt

SEQ ID NO: 448130 - DNA, 19 bp, Mus musculus
  siRNA target sequence for Rora (NM_013646.1,1084-1102).
cgctagaggtggtgtttat

SEQ ID NO: 448131 - DNA, 19 bp, Mus musculus
  siRNA target sequence for Rora (NM_013646.1,1089-1107).
gaggtggtgtttattagga

SEQ ID NO: 448132 - DNA, 19 bp, Mus musculus
  siRNA target sequence for Rora (NM_013646.1,1130-1148).
gaacaacaccgtgtacttt

SEQ ID NO: 448133 - DNA, 19 bp, Mus musculus
  siRNA target sequence for Rora (NM_013646.1,1162-1180).
cgagccccgatgtcttcaa

SEQ ID NO: 448134 - DNA, 19 bp, Mus musculus
  siRNA target sequence for Rora (NM_013646.1,1183-1201).
ccctaggttgtgaagactt

SEQ ID NO: 448135 - DNA, 19 bp, Mus musculus
  siRNA target sequence for Rora (NM_013646.1,1259-1277).
cgaaatcgcgttattttct

SEQ ID NO: 448136 - DNA, 19 bp, Mus musculus
  siRNA target sequence for Rora (NM_013646.1,1379-1397).
gaagaaccaccgagaagat

SEQ ID NO: 448137 - DNA, 19 bp, Mus musculus
  siRNA target sequence for Rora (NM_013646.1,1385-1403).
ccaccgagaagatggaatt

SEQ ID NO: 448138 - DNA, 19 bp, Mus musculus
  siRNA target sequence for Rora (NM_013646.1,1388-1406).
ccgagaagatggaattcta

SEQ ID NO: 448139 - DNA, 19 bp, Mus musculus
  siRNA target sequence for Rora (NM_013646.1,1389-1407).
cgagaagatggaattctaa

SEQ ID NO: 448140 - DNA, 19 bp, Mus musculus
  siRNA target sequence for Rora (NM_013646.1,1399-1417).
gaattctaaccaagctaat

SEQ ID NO: 448141 - DNA, 19 bp, Mus musculus
  siRNA target sequence for Rora (NM_013646.1,1450-1468).
gacgacatacggaaaagct

SEQ ID NO: 448142 - DNA, 19 bp, Mus musculus
  siRNA target sequence for Rora (NM_013646.1,1452-1470).
cgacatacggaaaagctaa

SEQ ID NO: 448143 - DNA, 19 bp, Mus musculus
  siRNA target sequence for Rora (NM_013646.1,1461-1479).
gaaaagctaatggcattta

SEQ ID NO: 448144 - DNA, 19 bp, Mus musculus
  siRNA target sequence for Rora (NM_013646.1,1483-1501).
caatatacccagacattgt

SEQ ID NO: 448145 - DNA, 19 bp, Mus musculus
  siRNA target sequence for Rora (NM_013646.1,1496-1514).
cattgtgcgactccatttt

SEQ ID NO: 448146 - DNA, 19 bp, Mus musculus
  siRNA target sequence for Rora (NM_013646.1,1509-1527).
cattttcctccattataca

SEQ ID NO: 448147 - DNA, 19 bp, Mus musculus
  siRNA target sequence for Rora (NM_013646.1,1515-1533).
cctccattatacaaggaat

SEQ ID NO: 448148 - DNA, 19 bp, Mus musculus
  siRNA target sequence for Rora (NM_013646.1,1529-1547).
ggaattgttcacttcagaa

SEQ ID NO: 448149 - DNA, 19 bp, Mus musculus
  siRNA target sequence for Rora (NM_013646.1,1553-1571).
gccagccatgcaaatcgat

SEQ ID NO: 448150 - DNA, 19 bp, Mus musculus
  siRNA target sequence for Rorb (NM_146095.1,604-622).
gcccaagtccgaaggttat

SEQ ID NO: 448151 - DNA, 19 bp, Mus musculus
  siRNA target sequence for Rorb (NM_146095.1,605-623).
cccaagtccgaaggttatt

SEQ ID NO: 448152 - DNA, 19 bp, Mus musculus
  siRNA target sequence for Rorb (NM_146095.1,606-624).
ccaagtccgaaggttatta

SEQ ID NO: 448153 - DNA, 19 bp, Mus musculus
  siRNA target sequence for Rorb (NM_146095.1,617-635).
ggttattacagcatagatt

SEQ ID NO: 448154 - DNA, 19 bp, Mus musculus
  siRNA target sequence for Rorb (NM_146095.1,673-691).
gactgggatcaaacagata

SEQ ID NO: 448155 - DNA, 19 bp, Mus musculus
  siRNA target sequence for Rorb (NM_146095.1,706-724).
ctatgacctcacatctgta

SEQ ID NO: 448156 - DNA, 19 bp, Mus musculus
  siRNA target sequence for Rorb (NM_146095.1,722-740).
gtacccaacttgtttacct

SEQ ID NO: 448157 - DNA, 19 bp, Mus musculus
  siRNA target sequence for Rorb (NM_146095.1,738-756).
cctatagctctttcaacaa

SEQ ID NO: 448158 - DNA, 19 bp, Mus musculus
  siRNA target sequence for Rorb (NM_146095.1,767-785).
gctcccgggataacaatgt

SEQ ID NO: 448159 - DNA, 19 bp, Mus musculus
  siRNA target sequence for Rorb (NM_146095.1,784-802).
gtctgagatcgatcgaatt

SEQ ID NO: 448160 - DNA, 19 bp, Mus musculus
  siRNA target sequence for Rorb (NM_146095.1,881-899).
cacacctacgaggaaatca

SEQ ID NO: 448161 - DNA, 19 bp, Mus musculus
  siRNA target sequence for Rorb (NM_146095.1,892-910).
ggaaatcaaggcgtatcaa

SEQ ID NO: 448162 - DNA, 19 bp, Mus musculus
  siRNA target sequence for Rorb (NM_146095.1,893-911).
gaaatcaaggcgtatcaaa

SEQ ID NO: 448163 - DNA, 19 bp, Mus musculus
  siRNA target sequence for Rorb (NM_146095.1,982-1000).
gttcgccaagcggataaca

SEQ ID NO: 448164 - DNA, 19 bp, Mus musculus
  siRNA target sequence for Rorb (NM_146095.1,1017-1035).
gtcagaacgatcagatctt

SEQ ID NO: 448165 - DNA, 19 bp, Mus musculus
  siRNA target sequence for Rorb (NM_146095.1,1021-1039).
gaacgatcagatcttactt

SEQ ID NO: 448166 - DNA, 19 bp, Mus musculus
  siRNA target sequence for Rorb (NM_146095.1,1050-1068).
gttgcttggaagtggtttt

SEQ ID NO: 448167 - DNA, 19 bp, Mus musculus
  siRNA target sequence for Rorb (NM_146095.1,1053-1071).
gcttggaagtggttttagt

SEQ ID NO: 448168 - DNA, 19 bp, Mus musculus
  siRNA target sequence for Rorb (NM_146095.1,1063-1081).
ggttttagtgagaatgtgt

SEQ ID NO: 448169 - DNA, 19 bp, Mus musculus
  siRNA target sequence for Rorb (NM_146095.1,1082-1100).
cgtgccttcaacccattaa

SEQ ID NO: 448170 - DNA, 19 bp, Mus musculus
  siRNA target sequence for Rorb (NM_146095.1,1083-1101).
gtgccttcaacccattaaa

SEQ ID NO: 448171 - DNA, 19 bp, Mus musculus
  siRNA target sequence for Rorb (NM_146095.1,1085-1103).
gccttcaacccattaaaca

SEQ ID NO: 448172 - DNA, 19 bp, Mus musculus
  siRNA target sequence for Rorb (NM_146095.1,1114-1132).
gtttgaaggaaaatatgga

SEQ ID NO: 448173 - DNA, 19 bp, Mus musculus
  siRNA target sequence for Rorb (NM_146095.1,1158-1176).
gttcggatgacctagtgaa

SEQ ID NO: 448174 - DNA, 19 bp, Mus musculus
  siRNA target sequence for Rorb (NM_146095.1,1161-1179).
cggatgacctagtgaatga

SEQ ID NO: 448175 - DNA, 19 bp, Mus musculus
  siRNA target sequence for Rorb (NM_146095.1,1168-1186).
cctagtgaatgaagcattt

SEQ ID NO: 448176 - DNA, 19 bp, Mus musculus
  siRNA target sequence for Rorb (NM_146095.1,1172-1190).
gtgaatgaagcatttgact

SEQ ID NO: 448177 - DNA, 19 bp, Mus musculus
  siRNA target sequence for Rorb (NM_146095.1,1187-1205).
gactttgcgaagaatctgt

SEQ ID NO: 448178 - DNA, 19 bp, Mus musculus
  siRNA target sequence for Rorb (NM_146095.1,1278-1296).
ggctgatcgaaccaagaaa

SEQ ID NO: 448179 - DNA, 19 bp, Mus musculus
  siRNA target sequence for Rorb (NM_146095.1,1279-1297).
gctgatcgaaccaagaaaa

SEQ ID NO: 448180 - DNA, 19 bp, Mus musculus
  siRNA target sequence for Rorb (NM_146095.1,1331-1349).
ctgcaacatgtgattcaga

SEQ ID NO: 448181 - DNA, 19 bp, Mus musculus
  siRNA target sequence for Rorb (NM_146095.1,1369-1387).
gaccctggcaaagttaata

SEQ ID NO: 448182 - DNA, 19 bp, Mus musculus
  siRNA target sequence for Rorb (NM_146095.1,1450-1468).
gcagtctcatccagacata

SEQ ID NO: 448183 - DNA, 19 bp, Mus musculus
  siRNA target sequence for Rorb (NM_146095.1,1495-1513).
caaggagctctttaatcct

SEQ ID NO: 448184 - DNA, 19 bp, Mus musculus
  siRNA target sequence for Rorc (NM_011281.1,166-184).
gacccacacctcacaaatt

SEQ ID NO: 448185 - DNA, 19 bp, Mus musculus
  siRNA target sequence for Rorc (NM_011281.1,168-186).
cccacacctcacaaattga

SEQ ID NO: 448186 - DNA, 19 bp, Mus musculus
  siRNA target sequence for Rorc (NM_011281.1,433-451).
gcagagggacagtctacat

SEQ ID NO: 448187 - DNA, 19 bp, Mus musculus
  siRNA target sequence for Rorc (NM_011281.1,641-659).
ggctctggcccaccatatt

SEQ ID NO: 448188 - DNA, 19 bp, Mus musculus
  siRNA target sequence for Rorc (NM_011281.1,645-663).
ctggcccaccatattccaa

SEQ ID NO: 448189 - DNA, 19 bp, Mus musculus
  siRNA target sequence for Rorc (NM_011281.1,647-665).
ggcccaccatattccaata

SEQ ID NO: 448190 - DNA, 19 bp, Mus musculus
  siRNA target sequence for Rorc (NM_011281.1,650-668).
ccaccatattccaatacct

SEQ ID NO: 448191 - DNA, 19 bp, Mus musculus
  siRNA target sequence for Rorc (NM_011281.1,651-669).
caccatattccaatacctt

SEQ ID NO: 448192 - DNA, 19 bp, Mus musculus
  siRNA target sequence for Rorc (NM_011281.1,694-712).
ctcctgccaccttgagtat

SEQ ID NO: 448193 - DNA, 19 bp, Mus musculus
  siRNA target sequence for Rorc (NM_011281.1,697-715).
ctgccaccttgagtatagt

SEQ ID NO: 448194 - DNA, 19 bp, Mus musculus
  siRNA target sequence for Rorc (NM_011281.1,759-777).
ctgacggccaacttactct

SEQ ID NO: 448195 - DNA, 19 bp, Mus musculus
  siRNA target sequence for Rorc (NM_011281.1,780-798).
gaagatgtggacttcgttt

SEQ ID NO: 448196 - DNA, 19 bp, Mus musculus
  siRNA target sequence for Rorc (NM_011281.1,873-891).
gtgccccagaggtaccata

SEQ ID NO: 448197 - DNA, 19 bp, Mus musculus
  siRNA target sequence for Rorc (NM_011281.1,1134-1152).
gccagaatgaccagatcat

SEQ ID NO: 448198 - DNA, 19 bp, Mus musculus
  siRNA target sequence for Rorc (NM_011281.1,1138-1156).
gaatgaccagatcatacta

SEQ ID NO: 448199 - DNA, 19 bp, Mus musculus
  siRNA target sequence for Rorc (NM_011281.1,1178-1196).
gtcgtcctagtcagaatgt

SEQ ID NO: 448200 - DNA, 19 bp, Mus musculus
  siRNA target sequence for Rorc (NM_011281.1,1285-1303).
gctcatcagctccatattt

SEQ ID NO: 448201 - DNA, 19 bp, Mus musculus
  siRNA target sequence for Rorc (NM_011281.1,1321-1339).
cagcgccctgtgtttttct

SEQ ID NO: 448202 - DNA, 19 bp, Mus musculus
  siRNA target sequence for Rorc (NM_011281.1,1323-1341).
gcgccctgtgtttttctga

SEQ ID NO: 448203 - DNA, 19 bp, Mus musculus
  siRNA target sequence for Rorc (NM_011281.1,1389-1407).
gtcctgggctccaagagaa

SEQ ID NO: 448204 - DNA, 19 bp, Mus musculus
  siRNA target sequence for Rorc (NM_011281.1,1413-1431).
gagtggaacatctgcaata

SEQ ID NO: 448205 - DNA, 19 bp, Mus musculus
  siRNA target sequence for Rorc (NM_011281.1,1415-1433).
gtggaacatctgcaataca

SEQ ID NO: 448206 - DNA, 19 bp, Mus musculus
  siRNA target sequence for Rorc (NM_011281.1,1417-1435).
ggaacatctgcaatacaat

SEQ ID NO: 448207 - DNA, 19 bp, Mus musculus
  siRNA target sequence for Rorc (NM_011281.1,1527-1545).
gcagccaacatgtggaaaa

SEQ ID NO: 448208 - DNA, 19 bp, Mus musculus
  siRNA target sequence for Rorc (NM_011281.1,1530-1548).
gccaacatgtggaaaagct

SEQ ID NO: 448209 - DNA, 19 bp, Mus musculus
  siRNA target sequence for Rorc (NM_011281.1,1599-1617).
cactctataaggaactctt

SEQ ID NO: 448210 - DNA, 19 bp, Mus musculus
  siRNA target sequence for Rorc (NM_011281.1,1635-1653).
cccctgaggggctgtcaaa

SEQ ID NO: 448211 - DNA, 19 bp, Mus musculus
  siRNA target sequence for Rorc (NM_011281.1,1637-1655).
cctgaggggctgtcaaagt

SEQ ID NO: 448212 - DNA, 19 bp, Mus musculus
  siRNA target sequence for Rxra (NM_011305.2,196-214).
ctgccgctcgacttctcta

SEQ ID NO: 448213 - DNA, 19 bp, Mus musculus
  siRNA target sequence for Rxra (NM_011305.2,460-478).
ggtagcccccagctcaatt

SEQ ID NO: 448214 - DNA, 19 bp, Mus musculus
  siRNA target sequence for Rxra (NM_011305.2,613-631).
cgctcctcaggcaaacact

SEQ ID NO: 448215 - DNA, 19 bp, Mus musculus
  siRNA target sequence for Rxra (NM_011305.2,1041-1059).
caagaggatcccacacttt

SEQ ID NO: 448216 - DNA, 19 bp, Mus musculus
  siRNA target sequence for Rxra (NM_011305.2,1377-1395).
ggtgtatgcgtcactagaa

SEQ ID NO: 448217 - DNA, 19 bp, Mus musculus
  siRNA target sequence for Rxra (NM_011305.2,1393-1411).
gaagcgtactgcaaacaca

SEQ ID NO: 448218 - DNA, 19 bp, Mus musculus
  siRNA target sequence for Rxrb (NM_011306.2,820-838).
cctactcgtgtcgtgataa

SEQ ID NO: 448219 - DNA, 19 bp, Mus musculus
  siRNA target sequence for Rxrb (NM_011306.2,824-842).
ctcgtgtcgtgataacaaa

SEQ ID NO: 448220 - DNA, 19 bp, Mus musculus
  siRNA target sequence for Rxrb (NM_011306.2,1090-1108).
gtggcagcagcccaaatga

SEQ ID NO: 448221 - DNA, 19 bp, Mus musculus
  siRNA target sequence for Rxrb (NM_011306.2,1259-1277).
ctcccatcggtccattgat

SEQ ID NO: 448222 - DNA, 19 bp, Mus musculus
  siRNA target sequence for Rxrb (NM_011306.2,1261-1279).
cccatcggtccattgatgt

SEQ ID NO: 448223 - DNA, 19 bp, Mus musculus
  siRNA target sequence for Rxrb (NM_011306.2,1423-1441).
gctgcctgcgggcaatcat

SEQ ID NO: 448224 - DNA, 19 bp, Mus musculus
  siRNA target sequence for Rxrb (NM_011306.2,1426-1444).
gcctgcgggcaatcatact

SEQ ID NO: 448225 - DNA, 19 bp, Mus musculus
  siRNA target sequence for Rxrb (NM_011306.2,1428-1446).
ctgcgggcaatcatactgt

SEQ ID NO: 448226 - DNA, 19 bp, Mus musculus
  siRNA target sequence for Rxrb (NM_011306.2,1430-1448).
gcgggcaatcatactgttt

SEQ ID NO: 448227 - DNA, 19 bp, Mus musculus
  siRNA target sequence for Rxrb (NM_011306.2,1431-1449).
cgggcaatcatactgttta

SEQ ID NO: 448228 - DNA, 19 bp, Mus musculus
  siRNA target sequence for Rxrb (NM_011306.2,1432-1450).
gggcaatcatactgtttaa

SEQ ID NO: 448229 - DNA, 19 bp, Mus musculus
  siRNA target sequence for Rxrb (NM_011306.2,1433-1451).
ggcaatcatactgtttaat

SEQ ID NO: 448230 - DNA, 19 bp, Mus musculus
  siRNA target sequence for Rxrb (NM_011306.2,1647-1665).
ggcgacacccccattgaca

SEQ ID NO: 448231 - DNA, 19 bp, Mus musculus
  siRNA target sequence for Rxrg (NM_009107.1,309-327).
gtccatgagcccttcagta

SEQ ID NO: 448232 - DNA, 19 bp, Mus musculus
  siRNA target sequence for Rxrg (NM_009107.1,490-508).
gctcctccaggaatcaact

SEQ ID NO: 448233 - DNA, 19 bp, Mus musculus
  siRNA target sequence for Rxrg (NM_009107.1,592-610).
gggattggaaatatgaact

SEQ ID NO: 448234 - DNA, 19 bp, Mus musculus
  siRNA target sequence for Rxrg (NM_009107.1,593-611).
ggattggaaatatgaacta

SEQ ID NO: 448235 - DNA, 19 bp, Mus musculus
  siRNA target sequence for Rxrg (NM_009107.1,731-749).
ccatcaggaaagatctcat

SEQ ID NO: 448236 - DNA, 19 bp, Mus musculus
  siRNA target sequence for Rxrg (NM_009107.1,753-771).
cacctgtcgggataacaaa

SEQ ID NO: 448237 - DNA, 19 bp, Mus musculus
  siRNA target sequence for Rxrg (NM_009107.1,761-779).
gggataacaaagattgtct

SEQ ID NO: 448238 - DNA, 19 bp, Mus musculus
  siRNA target sequence for Rxrg (NM_009107.1,917-935).
gtagtagccacgaagacat

SEQ ID NO: 448239 - DNA, 19 bp, Mus musculus
  siRNA target sequence for Rxrg (NM_009107.1,936-954).
gcccgtggagaggattcta

SEQ ID NO: 448240 - DNA, 19 bp, Mus musculus
  siRNA target sequence for Rxrg (NM_009107.1,938-956).
ccgtggagaggattctaga

SEQ ID NO: 448241 - DNA, 19 bp, Mus musculus
  siRNA target sequence for Rxrg (NM_009107.1,939-957).
cgtggagaggattctagaa

SEQ ID NO: 448242 - DNA, 19 bp, Mus musculus
  siRNA target sequence for Rxrg (NM_009107.1,1005-1023).
cgtggagaactcaacaaat

SEQ ID NO: 448243 - DNA, 19 bp, Mus musculus
  siRNA target sequence for Rxrg (NM_009107.1,1140-1158).
ccgggcagggtggaatgaa

SEQ ID NO: 448244 - DNA, 19 bp, Mus musculus
  siRNA target sequence for Rxrg (NM_009107.1,1142-1160).
gggcagggtggaatgaact

SEQ ID NO: 448245 - DNA, 19 bp, Mus musculus
  siRNA target sequence for Rxrg (NM_009107.1,1349-1367).
gggccatcgtgctgtttaa

SEQ ID NO: 448246 - DNA, 19 bp, Mus musculus
  siRNA target sequence for Rxrg (NM_009107.1,1369-1387).
ccagatgccaagggtttat

SEQ ID NO: 448247 - DNA, 19 bp, Mus musculus
  siRNA target sequence for Rxrg (NM_009107.1,1372-1390).
gatgccaagggtttatcca

SEQ ID NO: 448248 - DNA, 19 bp, Mus musculus
  siRNA target sequence for Rxrg (NM_009107.1,1409-1427).
ctcttcgagagaaggttta

SEQ ID NO: 448249 - DNA, 19 bp, Mus musculus
  siRNA target sequence for Rxrg (NM_009107.1,1512-1530).
gcgctccatcggcttgaaa

SEQ ID NO: 448250 - DNA, 19 bp, Mus musculus
  siRNA target sequence for Rxrg (NM_009107.1,1513-1531).
cgctccatcggcttgaaat

SEQ ID NO: 448251 - DNA, 19 bp, Mus musculus
  siRNA target sequence for Satb1 (NM_009122.1,270-288).
gggtccacccgccaagatt

SEQ ID NO: 448252 - DNA, 19 bp, Mus musculus
  siRNA target sequence for Satb1 (NM_009122.1,375-393).
ctcgggccatctcatgaaa

SEQ ID NO: 448253 - DNA, 19 bp, Mus musculus
  siRNA target sequence for Satb1 (NM_009122.1,379-397).
ggccatctcatgaaaacca

SEQ ID NO: 448254 - DNA, 19 bp, Mus musculus
  siRNA target sequence for Satb1 (NM_009122.1,429-447).
ctgcgtggtggaacattat

SEQ ID NO: 448255 - DNA, 19 bp, Mus musculus
  siRNA target sequence for Satb1 (NM_009122.1,474-492).
ggaggagcacgcggaattt

SEQ ID NO: 448256 - DNA, 19 bp, Mus musculus
  siRNA target sequence for Satb1 (NM_009122.1,477-495).
ggagcacgcggaatttgta

SEQ ID NO: 448257 - DNA, 19 bp, Mus musculus
  siRNA target sequence for Satb1 (NM_009122.1,478-496).
gagcacgcggaatttgtat

SEQ ID NO: 448258 - DNA, 19 bp, Mus musculus
  siRNA target sequence for Satb1 (NM_009122.1,493-511).
gtattggtgagaaaggata

SEQ ID NO: 448259 - DNA, 19 bp, Mus musculus
  siRNA target sequence for Satb1 (NM_009122.1,690-708).
caccctcaaaattcagtta

SEQ ID NO: 448260 - DNA, 19 bp, Mus musculus
  siRNA target sequence for Satb1 (NM_009122.1,711-729).
cagttgccctaaactagaa

SEQ ID NO: 448261 - DNA, 19 bp, Mus musculus
  siRNA target sequence for Satb1 (NM_009122.1,713-731).
gttgccctaaactagaaga

SEQ ID NO: 448262 - DNA, 19 bp, Mus musculus
  siRNA target sequence for Satb1 (NM_009122.1,716-734).
gccctaaactagaagactt

SEQ ID NO: 448263 - DNA, 19 bp, Mus musculus
  siRNA target sequence for Satb1 (NM_009122.1,730-748).
gacttgcctcctgaacaat

SEQ ID NO: 448264 - DNA, 19 bp, Mus musculus
  siRNA target sequence for Satb1 (NM_009122.1,752-770).
cgcacaccacagtaaggaa

SEQ ID NO: 448265 - DNA, 19 bp, Mus musculus
  siRNA target sequence for Satb1 (NM_009122.1,772-790).
gctctgaaggacttactga

SEQ ID NO: 448266 - DNA, 19 bp, Mus musculus
  siRNA target sequence for Satb1 (NM_009122.1,781-799).
gacttactgaaagatatga

SEQ ID NO: 448267 - DNA, 19 bp, Mus musculus
  siRNA target sequence for Satb1 (NM_009122.1,829-847).
ctttcacagagcatgatct

SEQ ID NO: 448268 - DNA, 19 bp, Mus musculus
  siRNA target sequence for Satb1 (NM_009122.1,861-879).
cagcacgtactatgcaaat

SEQ ID NO: 448269 - DNA, 19 bp, Mus musculus
  siRNA target sequence for Satb1 (NM_009122.1,887-905).
cagcaaaatgtcaagaatt

SEQ ID NO: 448270 - DNA, 19 bp, Mus musculus
  siRNA target sequence for Satb1 (NM_009122.1,957-975).
ggatagtctgtctgaacta

SEQ ID NO: 448271 - DNA, 19 bp, Mus musculus
  siRNA target sequence for Satb1 (NM_009122.1,985-1003).
ggtgccaaccacgtcaatt

SEQ ID NO: 448272 - DNA, 19 bp, Mus musculus
  siRNA target sequence for Satb1 (NM_009122.1,986-1004).
gtgccaaccacgtcaattt

SEQ ID NO: 448273 - DNA, 19 bp, Mus musculus
  siRNA target sequence for Satb1 (NM_009122.1,1252-1270).
cctgtcagtaggtctatga

SEQ ID NO: 448274 - DNA, 19 bp, Mus musculus
  siRNA target sequence for Satb1 (NM_009122.1,1253-1271).
ctgtcagtaggtctatgaa

SEQ ID NO: 448275 - DNA, 19 bp, Mus musculus
  siRNA target sequence for Satb1 (NM_009122.1,1255-1273).
gtcagtaggtctatgaaca

SEQ ID NO: 448276 - DNA, 19 bp, Mus musculus
  siRNA target sequence for Satb1 (NM_009122.1,1304-1322).
cggaggtctcttctgaaat

SEQ ID NO: 448277 - DNA, 19 bp, Mus musculus
  siRNA target sequence for Satb1 (NM_009122.1,1347-1365).
gaaacgagccggaatctca

SEQ ID NO: 448278 - DNA, 19 bp, Mus musculus
  siRNA target sequence for Satb1 (NM_009122.1,1395-1413).
ccgaactcagggattgctt

SEQ ID NO: 448279 - DNA, 19 bp, Mus musculus
  siRNA target sequence for Satb1 (NM_009122.1,1396-1414).
cgaactcagggattgcttt

SEQ ID NO: 448280 - DNA, 19 bp, Mus musculus
  siRNA target sequence for Satb1 (NM_009122.1,1458-1476).
gtctctgctggtaaacctt

SEQ ID NO: 448281 - DNA, 19 bp, Mus musculus
  siRNA target sequence for Satb1 (NM_009122.1,1477-1495).
cgggctatgcagaatttct

SEQ ID NO: 448282 - DNA, 19 bp, Mus musculus
  siRNA target sequence for Satb1 (NM_009122.1,1511-1529).
ccgaaagagaccggatata

SEQ ID NO: 448283 - DNA, 19 bp, Mus musculus
  siRNA target sequence for Satb1 (NM_009122.1,1631-1649).
cccttgccactgagagaaa

SEQ ID NO: 448284 - DNA, 19 bp, Mus musculus
  siRNA target sequence for Satb1 (NM_009122.1,1632-1650).
ccttgccactgagagaaat

SEQ ID NO: 448285 - DNA, 19 bp, Mus musculus
  siRNA target sequence for Satb1 (NM_009122.1,1657-1675).
ccagagaacaatactatga

SEQ ID NO: 448286 - DNA, 19 bp, Mus musculus
  siRNA target sequence for Satb1 (NM_009122.1,1660-1678).
gagaacaatactatgaaca

SEQ ID NO: 448287 - DNA, 19 bp, Mus musculus
  siRNA target sequence for Satb1 (NM_009122.1,1662-1680).
gaacaatactatgaacatt

SEQ ID NO: 448288 - DNA, 19 bp, Mus musculus
  siRNA target sequence for Satb1 (NM_009122.1,1685-1703).
cctccatttatgatgagat

SEQ ID NO: 448289 - DNA, 19 bp, Mus musculus
  siRNA target sequence for Satb1 (NM_009122.1,1710-1728).
ggaaatgaagcgtgctaaa

SEQ ID NO: 448290 - DNA, 19 bp, Mus musculus
  siRNA target sequence for Satb1 (NM_009122.1,1956-1974).
cgttccagcagaacagatt

SEQ ID NO: 448291 - DNA, 19 bp, Mus musculus
  siRNA target sequence for Satb1 (NM_009122.1,2133-2151).
gaccaggccacgaaccaaa

SEQ ID NO: 448292 - DNA, 19 bp, Mus musculus
  siRNA target sequence for Satb1 (NM_009122.1,2135-2153).
ccaggccacgaaccaaaat

SEQ ID NO: 448293 - DNA, 19 bp, Mus musculus
  siRNA target sequence for Satb1 (NM_009122.1,2136-2154).
caggccacgaaccaaaatt

SEQ ID NO: 448294 - DNA, 19 bp, Mus musculus
  siRNA target sequence for Satb1 (NM_009122.1,2254-2272).
ccgaagtacaccatcatca

SEQ ID NO: 448295 - DNA, 19 bp, Mus musculus
  siRNA target sequence for Satb1 (NM_009122.1,2255-2273).
cgaagtacaccatcatcaa

SEQ ID NO: 448296 - DNA, 19 bp, Mus musculus
  siRNA target sequence for Satb1 (NM_009122.1,2343-2361).
ggatgtggccgagtacaaa

SEQ ID NO: 448297 - DNA, 19 bp, Mus musculus
  siRNA target sequence for Satb1 (NM_009122.1,2389-2407).
gagagcgtccaggataaaa

SEQ ID NO: 448298 - DNA, 19 bp, Mus musculus
  siRNA target sequence for Satb1 (NM_009122.1,2469-2487).
cgttaatgccgacttgaaa

SEQ ID NO: 448299 - DNA, 19 bp, Mus musculus
  siRNA target sequence for Satb2 (NM_139146.1,443-461).
ccgtgggaggtttgatgat

SEQ ID NO: 448300 - DNA, 19 bp, Mus musculus
  siRNA target sequence for Satb2 (NM_139146.1,444-462).
cgtgggaggtttgatgatt

SEQ ID NO: 448301 - DNA, 19 bp, Mus musculus
  siRNA target sequence for Satb2 (NM_139146.1,543-561).
gcggaaagatgtgcttttt

SEQ ID NO: 448302 - DNA, 19 bp, Mus musculus
  siRNA target sequence for Satb2 (NM_139146.1,544-562).
cggaaagatgtgcttttta

SEQ ID NO: 448303 - DNA, 19 bp, Mus musculus
  siRNA target sequence for Satb2 (NM_139146.1,614-632).
cagcgcaggcccaaggaat

SEQ ID NO: 448304 - DNA, 19 bp, Mus musculus
  siRNA target sequence for Satb2 (NM_139146.1,616-634).
gcgcaggcccaaggaataa

SEQ ID NO: 448305 - DNA, 19 bp, Mus musculus
  siRNA target sequence for Satb2 (NM_139146.1,617-635).
cgcaggcccaaggaataat

SEQ ID NO: 448306 - DNA, 19 bp, Mus musculus
  siRNA target sequence for Satb2 (NM_139146.1,656-674).
ccctccccctcagttatgt

SEQ ID NO: 448307 - DNA, 19 bp, Mus musculus
  siRNA target sequence for Satb2 (NM_139146.1,730-748).
gtgacgctgaagatccaat

SEQ ID NO: 448308 - DNA, 19 bp, Mus musculus
  siRNA target sequence for Satb2 (NM_139146.1,734-752).
cgctgaagatccaattaca

SEQ ID NO: 448309 - DNA, 19 bp, Mus musculus
  siRNA target sequence for Satb2 (NM_139146.1,744-762).
ccaattacaaagttgttca

SEQ ID NO: 448310 - DNA, 19 bp, Mus musculus
  siRNA target sequence for Satb2 (NM_139146.1,758-776).
gttcaaagttggaagactt

SEQ ID NO: 448311 - DNA, 19 bp, Mus musculus
  siRNA target sequence for Satb2 (NM_139146.1,803-821).
ccgtccgcaatgccttaaa

SEQ ID NO: 448312 - DNA, 19 bp, Mus musculus
  siRNA target sequence for Satb2 (NM_139146.1,869-887).
ctctctcccagagtatgat

SEQ ID NO: 448313 - DNA, 19 bp, Mus musculus
  siRNA target sequence for Satb2 (NM_139146.1,871-889).
ctctcccagagtatgattt

SEQ ID NO: 448314 - DNA, 19 bp, Mus musculus
  siRNA target sequence for Satb2 (NM_139146.1,873-891).
ctcccagagtatgatttca

SEQ ID NO: 448315 - DNA, 19 bp, Mus musculus
  siRNA target sequence for Satb2 (NM_139146.1,951-969).
gagatggtacaaaaagtat

SEQ ID NO: 448316 - DNA, 19 bp, Mus musculus
  siRNA target sequence for Satb2 (NM_139146.1,956-974).
ggtacaaaaagtataagaa

SEQ ID NO: 448317 - DNA, 19 bp, Mus musculus
  siRNA target sequence for Satb2 (NM_139146.1,1026-1044).
gggccagcggccaatgcat

SEQ ID NO: 448318 - DNA, 19 bp, Mus musculus
  siRNA target sequence for Satb2 (NM_139146.1,1028-1046).
gccagcggccaatgcattt

SEQ ID NO: 448319 - DNA, 19 bp, Mus musculus
  siRNA target sequence for Satb2 (NM_139146.1,1029-1047).
ccagcggccaatgcattta

SEQ ID NO: 448320 - DNA, 19 bp, Mus musculus
  siRNA target sequence for Satb2 (NM_139146.1,1034-1052).
ggccaatgcatttaccaaa

SEQ ID NO: 448321 - DNA, 19 bp, Mus musculus
  siRNA target sequence for Satb2 (NM_139146.1,1221-1239).
ggcccatctgataaaccaa

SEQ ID NO: 448322 - DNA, 19 bp, Mus musculus
  siRNA target sequence for Satb2 (NM_139146.1,1313-1331).
ccattcccagagcagttaa

SEQ ID NO: 448323 - DNA, 19 bp, Mus musculus
  siRNA target sequence for Satb2 (NM_139146.1,1369-1387).
gatatctaccagcaagtta

SEQ ID NO: 448324 - DNA, 19 bp, Mus musculus
  siRNA target sequence for Satb2 (NM_139146.1,1447-1465).
cgcacacagggattattgt

SEQ ID NO: 448325 - DNA, 19 bp, Mus musculus
  siRNA target sequence for Satb2 (NM_139146.1,1457-1475).
gattattgtcagagatact

SEQ ID NO: 448326 - DNA, 19 bp, Mus musculus
  siRNA target sequence for Satb2 (NM_139146.1,1503-1521).
gtctcagtctcttctagta

SEQ ID NO: 448327 - DNA, 19 bp, Mus musculus
  siRNA target sequence for Satb2 (NM_139146.1,1688-1706).
caacagacctccctattaa

SEQ ID NO: 448328 - DNA, 19 bp, Mus musculus
  siRNA target sequence for Satb2 (NM_139146.1,1691-1709).
cagacctccctattaaggt

SEQ ID NO: 448329 - DNA, 19 bp, Mus musculus
  siRNA target sequence for Satb2 (NM_139146.1,2125-2143).
cctcggtctcgcacaaaga

SEQ ID NO: 448330 - DNA, 19 bp, Mus musculus
  siRNA target sequence for Satb2 (NM_139146.1,2126-2144).
ctcggtctcgcacaaagat

SEQ ID NO: 448331 - DNA, 19 bp, Mus musculus
  siRNA target sequence for Satb2 (NM_139146.1,2128-2146).
cggtctcgcacaaagatct

SEQ ID NO: 448332 - DNA, 19 bp, Mus musculus
  siRNA target sequence for Satb2 (NM_139146.1,2132-2150).
ctcgcacaaagatctcttt

SEQ ID NO: 448333 - DNA, 19 bp, Mus musculus
  siRNA target sequence for Sema4b (NM_013659.1,375-393).
gctcggtccacggatcaat

SEQ ID NO: 448334 - DNA, 19 bp, Mus musculus
  siRNA target sequence for Sema4b (NM_013659.1,396-414).
gccactgtgctgtcaagaa

SEQ ID NO: 448335 - DNA, 19 bp, Mus musculus
  siRNA target sequence for Sema4b (NM_013659.1,409-427).
caagaaaggctgattagaa

SEQ ID NO: 448336 - DNA, 19 bp, Mus musculus
  siRNA target sequence for Sema4b (NM_013659.1,416-434).
ggctgattagaaaatttga

SEQ ID NO: 448337 - DNA, 19 bp, Mus musculus
  siRNA target sequence for Sema4b (NM_013659.1,511-529).
gccctctttgcacttaaca

SEQ ID NO: 448338 - DNA, 19 bp, Mus musculus
  siRNA target sequence for Sema4b (NM_013659.1,625-643).
ccaaagcgtgactgtcaaa

SEQ ID NO: 448339 - DNA, 19 bp, Mus musculus
  siRNA target sequence for Sema4b (NM_013659.1,632-650).
gtgactgtcaaaactacat

SEQ ID NO: 448340 - DNA, 19 bp, Mus musculus
  siRNA target sequence for Sema4b (NM_013659.1,713-731).
ccctgtgtgcttacattca

SEQ ID NO: 448341 - DNA, 19 bp, Mus musculus
  siRNA target sequence for Sema4b (NM_013659.1,715-733).
ctgtgtgcttacattcaca

SEQ ID NO: 448342 - DNA, 19 bp, Mus musculus
  siRNA target sequence for Sema4b (NM_013659.1,730-748).
cacatagcgagctttactt

SEQ ID NO: 448343 - DNA, 19 bp, Mus musculus
  siRNA target sequence for Sema4b (NM_013659.1,999-1017).
cagccccataggtgatgat

SEQ ID NO: 448344 - DNA, 19 bp, Mus musculus
  siRNA target sequence for Sema4b (NM_013659.1,1142-1160).
gctggacctcctttctcaa

SEQ ID NO: 448345 - DNA, 19 bp, Mus musculus
  siRNA target sequence for Sema4b (NM_013659.1,1199-1217).
cctttaacgtgctacaaga

SEQ ID NO: 448346 - DNA, 19 bp, Mus musculus
  siRNA target sequence for Sema4b (NM_013659.1,1200-1218).
ctttaacgtgctacaagat

SEQ ID NO: 448347 - DNA, 19 bp, Mus musculus
  siRNA target sequence for Sema4b (NM_013659.1,1322-1340).
gcgtcttcaccatgaatga

SEQ ID NO: 448348 - DNA, 19 bp, Mus musculus
  siRNA target sequence for Sema4b (NM_013659.1,1323-1341).
cgtcttcaccatgaatgat

SEQ ID NO: 448349 - DNA, 19 bp, Mus musculus
  siRNA target sequence for Sema4b (NM_013659.1,1359-1377).
cggcctgtacaagaaagta

SEQ ID NO: 448350 - DNA, 19 bp, Mus musculus
  siRNA target sequence for Sema4b (NM_013659.1,1360-1378).
ggcctgtacaagaaagtaa

SEQ ID NO: 448351 - DNA, 19 bp, Mus musculus
  siRNA target sequence for Sema4b (NM_013659.1,1361-1379).
gcctgtacaagaaagtaaa

SEQ ID NO: 448352 - DNA, 19 bp, Mus musculus
  siRNA target sequence for Sema4b (NM_013659.1,1363-1381).
ctgtacaagaaagtaaaca

SEQ ID NO: 448353 - DNA, 19 bp, Mus musculus
  siRNA target sequence for Sema4b (NM_013659.1,1433-1451).
cgggagcgtgcattaccaa

SEQ ID NO: 448354 - DNA, 19 bp, Mus musculus
  siRNA target sequence for Sema4b (NM_013659.1,1459-1477).
cgggaacggaagatcaact

SEQ ID NO: 448355 - DNA, 19 bp, Mus musculus
  siRNA target sequence for Sema4b (NM_013659.1,1513-1531).
ctcaaggatcacttcttga

SEQ ID NO: 448356 - DNA, 19 bp, Mus musculus
  siRNA target sequence for Sema4b (NM_013659.1,1614-1632).
cctgcacagcacttatgat

SEQ ID NO: 448357 - DNA, 19 bp, Mus musculus
  siRNA target sequence for Sema4b (NM_013659.1,1622-1640).
gcacttatgatgtcctatt

SEQ ID NO: 448358 - DNA, 19 bp, Mus musculus
  siRNA target sequence for Sema4b (NM_013659.1,1688-1706).
ccagagtccacatcattga

SEQ ID NO: 448359 - DNA, 19 bp, Mus musculus
  siRNA target sequence for Sema4b (NM_013659.1,1972-1990).
gaactctgcaagaattcct

SEQ ID NO: 448360 - DNA, 19 bp, Mus musculus
  siRNA target sequence for Sema4b (NM_013659.1,1979-1997).
gcaagaattcctcatacaa

SEQ ID NO: 448361 - DNA, 19 bp, Mus musculus
  siRNA target sequence for Sema4b (NM_013659.1,2013-2031).
gccaggtaagccatgtaaa

SEQ ID NO: 448362 - DNA, 19 bp, Mus musculus
  siRNA target sequence for Sema4b (NM_013659.1,2205-2223).
ccagtgttggtcgatagaa

SEQ ID NO: 448363 - DNA, 19 bp, Mus musculus
  siRNA target sequence for Sema4b (NM_013659.1,2213-2231).
ggtcgatagaagaaggatt

SEQ ID NO: 448364 - DNA, 19 bp, Mus musculus
  siRNA target sequence for Sema4b (NM_013659.1,2275-2293).
ggggtaatggaccaaaaga

SEQ ID NO: 448365 - DNA, 19 bp, Mus musculus
  siRNA target sequence for Sema4b (NM_013659.1,2276-2294).
gggtaatggaccaaaagaa

SEQ ID NO: 448366 - DNA, 19 bp, Mus musculus
  siRNA target sequence for Sema4b (NM_013659.1,2400-2418).
ggtgatgtgtactctgttt

SEQ ID NO: 448367 - DNA, 19 bp, Mus musculus
  siRNA target sequence for Sema4b (NM_013659.1,2465-2483).
gggatggcatgaaactctt

SEQ ID NO: 448368 - DNA, 19 bp, Mus musculus
  siRNA target sequence for Sema4b (NM_013659.1,2516-2534).
ccaagactcgccctatagt

SEQ ID NO: 448369 - DNA, 19 bp, Mus musculus
  siRNA target sequence for Sema4b (NM_013659.1,2545-2563).
gagacccgaccgctgaatt

SEQ ID NO: 448370 - DNA, 19 bp, Mus musculus
  siRNA target sequence for Sema4b (NM_013659.1,2549-2567).
cccgaccgctgaattgtgt

SEQ ID NO: 448371 - DNA, 19 bp, Mus musculus
  siRNA target sequence for Sfpi1 (NM_011355.1,198-216).
ccatcggatgacttggtta

SEQ ID NO: 448372 - DNA, 19 bp, Mus musculus
  siRNA target sequence for Sfpi1 (NM_011355.1,217-235).
cttacgattcagagctata

SEQ ID NO: 448373 - DNA, 19 bp, Mus musculus
  siRNA target sequence for Sfpi1 (NM_011355.1,221-239).
cgattcagagctataccaa

SEQ ID NO: 448374 - DNA, 19 bp, Mus musculus
  siRNA target sequence for Sfpi1 (NM_011355.1,241-259).
gtccaatgcatgactacta

SEQ ID NO: 448375 - DNA, 19 bp, Mus musculus
  siRNA target sequence for Sfpi1 (NM_011355.1,243-261).
ccaatgcatgactactact

SEQ ID NO: 448376 - DNA, 19 bp, Mus musculus
  siRNA target sequence for Sfpi1 (NM_011355.1,294-312).
gatcactactgggatttct

SEQ ID NO: 448377 - DNA, 19 bp, Mus musculus
  siRNA target sequence for Sfpi1 (NM_011355.1,327-345).
cacaacaacgagtttgaga

SEQ ID NO: 448378 - DNA, 19 bp, Mus musculus
  siRNA target sequence for Sfpi1 (NM_011355.1,503-521).
gatgtgcttcccttatcaa

SEQ ID NO: 448379 - DNA, 19 bp, Mus musculus
  siRNA target sequence for Sfpi1 (NM_011355.1,508-526).
gcttcccttatcaaacctt

SEQ ID NO: 448380 - DNA, 19 bp, Mus musculus
  siRNA target sequence for Shox2 (NM_013665.1,231-249).
gcgttcgtctccaagtctt

SEQ ID NO: 448381 - DNA, 19 bp, Mus musculus
  siRNA target sequence for Shox2 (NM_013665.1,247-265).
cttttgaccagaaagtgaa

SEQ ID NO: 448382 - DNA, 19 bp, Mus musculus
  siRNA target sequence for Shox2 (NM_013665.1,609-627).
gacgaaggccagaccaaaa

SEQ ID NO: 448383 - DNA, 19 bp, Mus musculus
  siRNA target sequence for Shox2 (NM_013665.1,637-655).
ggcgaagtcggaccaattt

SEQ ID NO: 448384 - DNA, 19 bp, Mus musculus
  siRNA target sequence for Shox2 (NM_013665.1,638-656).
gcgaagtcggaccaatttt

SEQ ID NO: 448385 - DNA, 19 bp, Mus musculus
  siRNA target sequence for Shox2 (NM_013665.1,639-657).
cgaagtcggaccaatttta

SEQ ID NO: 448386 - DNA, 19 bp, Mus musculus
  siRNA target sequence for Shox2 (NM_013665.1,715-733).
ctttcatgcgcgaggaatt

SEQ ID NO: 448387 - DNA, 19 bp, Mus musculus
  siRNA target sequence for Shox2 (NM_013665.1,786-804).
cgaagagctaagtgtagaa

SEQ ID NO: 448388 - DNA, 19 bp, Mus musculus
  siRNA target sequence for Shox2 (NM_013665.1,790-808).
gagctaagtgtagaaaaca

SEQ ID NO: 448389 - DNA, 19 bp, Mus musculus
  siRNA target sequence for Shox2 (NM_013665.1,841-859).
gagccgctagccagtttga

SEQ ID NO: 448390 - DNA, 19 bp, Mus musculus
  siRNA target sequence for Shox2 (NM_013665.1,868-886).
gagttgcaccctatgtcaa

SEQ ID NO: 448391 - DNA, 19 bp, Mus musculus
  siRNA target sequence for Shox2 (NM_013665.1,882-900).
gtcaacgtaggtgctttaa

SEQ ID NO: 448392 - DNA, 19 bp, Mus musculus
  siRNA target sequence for Shox2 (NM_013665.1,907-925).
catttcagcaggatagtca

SEQ ID NO: 448393 - DNA, 19 bp, Mus musculus
  siRNA target sequence for Shox2 (NM_013665.1,1023-1041).
gcgcacgcgccttacatga

SEQ ID NO: 448394 - DNA, 19 bp, Mus musculus
  siRNA target sequence for Shox2 (NM_013665.1,1024-1042).
cgcacgcgccttacatgat

SEQ ID NO: 448395 - DNA, 19 bp, Mus musculus
  siRNA target sequence for Shox2 (NM_013665.1,1026-1044).
cacgcgccttacatgatgt

SEQ ID NO: 448396 - DNA, 19 bp, Mus musculus
  siRNA target sequence for Shox2 (NM_013665.1,1164-1182).
gatctcagactgaaagcta

SEQ ID NO: 448397 - DNA, 19 bp, Mus musculus
  siRNA target sequence for Shox2 (NM_013665.1,1171-1189).
gactgaaagctaaaaagca

SEQ ID NO: 448398 - DNA, 19 bp, Mus musculus
  siRNA target sequence for Sim1 (NM_011376.1,379-397).
ctcacgaccagctatctca

SEQ ID NO: 448399 - DNA, 19 bp, Mus musculus
  siRNA target sequence for Sim1 (NM_011376.1,381-399).
cacgaccagctatctcaaa

SEQ ID NO: 448400 - DNA, 19 bp, Mus musculus
  siRNA target sequence for Sim1 (NM_011376.1,383-401).
cgaccagctatctcaaaat

SEQ ID NO: 448401 - DNA, 19 bp, Mus musculus
  siRNA target sequence for Sim1 (NM_011376.1,480-498).
cgaactcggctctcatcta

SEQ ID NO: 448402 - DNA, 19 bp, Mus musculus
  siRNA target sequence for Sim1 (NM_011376.1,680-698).
cctaccactctcactttgt

SEQ ID NO: 448403 - DNA, 19 bp, Mus musculus
  siRNA target sequence for Sim1 (NM_011376.1,681-699).
ctaccactctcactttgta

SEQ ID NO: 448404 - DNA, 19 bp, Mus musculus
  siRNA target sequence for Sim1 (NM_011376.1,711-729).
gatcgaacgctccttcttt

SEQ ID NO: 448405 - DNA, 19 bp, Mus musculus
  siRNA target sequence for Sim1 (NM_011376.1,714-732).
cgaacgctccttctttcta

SEQ ID NO: 448406 - DNA, 19 bp, Mus musculus
  siRNA target sequence for Sim1 (NM_011376.1,715-733).
gaacgctccttctttctaa

SEQ ID NO: 448407 - DNA, 19 bp, Mus musculus
  siRNA target sequence for Sim1 (NM_011376.1,730-748).
ctaaggatgaagtgtgttt

SEQ ID NO: 448408 - DNA, 19 bp, Mus musculus
  siRNA target sequence for Sim1 (NM_011376.1,947-965).
gagccagtctggatatgaa

SEQ ID NO: 448409 - DNA, 19 bp, Mus musculus
  siRNA target sequence for Sim1 (NM_011376.1,1012-1030).
cctcaggacttgattgaga

SEQ ID NO: 448410 - DNA, 19 bp, Mus musculus
  siRNA target sequence for Sim1 (NM_011376.1,1408-1426).
cagtattcgggattccata

SEQ ID NO: 448411 - DNA, 19 bp, Mus musculus
  siRNA target sequence for Sim1 (NM_011376.1,1427-1445).
ctgagagatcggaatctga

SEQ ID NO: 448412 - DNA, 19 bp, Mus musculus
  siRNA target sequence for Sim1 (NM_011376.1,1465-1483).
ggaagtcccctgactgata

SEQ ID NO: 448413 - DNA, 19 bp, Mus musculus
  siRNA target sequence for Sim1 (NM_011376.1,1754-1772).
gcagagaagcctatgagaa

SEQ ID NO: 448414 - DNA, 19 bp, Mus musculus
  siRNA target sequence for Sim1 (NM_011376.1,1816-1834).
ggtcactgggatgaagata

SEQ ID NO: 448415 - DNA, 19 bp, Mus musculus
  siRNA target sequence for Sim1 (NM_011376.1,1883-1901).
gataccgcaccgaacagta

SEQ ID NO: 448416 - DNA, 19 bp, Mus musculus
  siRNA target sequence for Sim1 (NM_011376.1,1887-1905).
ccgcaccgaacagtatcaa

SEQ ID NO: 448417 - DNA, 19 bp, Mus musculus
  siRNA target sequence for Sim1 (NM_011376.1,1888-1906).
cgcaccgaacagtatcaaa

SEQ ID NO: 448418 - DNA, 19 bp, Mus musculus
  siRNA target sequence for Sim1 (NM_011376.1,1889-1907).
gcaccgaacagtatcaaaa

SEQ ID NO: 448419 - DNA, 19 bp, Mus musculus
  siRNA target sequence for Sim1 (NM_011376.1,1890-1908).
caccgaacagtatcaaaat

SEQ ID NO: 448420 - DNA, 19 bp, Mus musculus
  siRNA target sequence for Sim1 (NM_011376.1,1912-1930).
ccacatgaacctagcaaaa

SEQ ID NO: 448421 - DNA, 19 bp, Mus musculus
  siRNA target sequence for Sim1 (NM_011376.1,1913-1931).
cacatgaacctagcaaaat

SEQ ID NO: 448422 - DNA, 19 bp, Mus musculus
  siRNA target sequence for Sim1 (NM_011376.1,1952-1970).
cccagcagatgattaaaga

SEQ ID NO: 448423 - DNA, 19 bp, Mus musculus
  siRNA target sequence for Sim1 (NM_011376.1,2166-2184).
ccctcatgaaaatgactat

SEQ ID NO: 448424 - DNA, 19 bp, Mus musculus
  siRNA target sequence for Sim1 (NM_011376.1,2168-2186).
ctcatgaaaatgactatga

SEQ ID NO: 448425 - DNA, 19 bp, Mus musculus
  siRNA target sequence for Sim1 (NM_011376.1,2200-2218).
gcactgtctcggataagta

SEQ ID NO: 448426 - DNA, 19 bp, Mus musculus
  siRNA target sequence for Sim1 (NM_011376.1,2211-2229).
gataagtagtcctagttct

SEQ ID NO: 448427 - DNA, 19 bp, Mus musculus
  siRNA target sequence for Sim1 (NM_011376.1,2240-2258).
caaagtctagtttaatcct

SEQ ID NO: 448428 - DNA, 19 bp, Mus musculus
  siRNA target sequence for Sim1 (NM_011376.1,2249-2267).
gtttaatcctggctaaaga

SEQ ID NO: 448429 - DNA, 19 bp, Mus musculus
  siRNA target sequence for Sim1 (NM_011376.1,2256-2274).
cctggctaaagactatcta

SEQ ID NO: 448430 - DNA, 19 bp, Mus musculus
  siRNA target sequence for Sim1 (NM_011376.1,2260-2278).
gctaaagactatctacatt

SEQ ID NO: 448431 - DNA, 19 bp, Mus musculus
  siRNA target sequence for Six1 (NM_009189.1,50-68).
gctgccgtcgtttggtttt

SEQ ID NO: 448432 - DNA, 19 bp, Mus musculus
  siRNA target sequence for Six1 (NM_009189.1,350-368).
gggtgccgtgggcaaatat

SEQ ID NO: 448433 - DNA, 19 bp, Mus musculus
  siRNA target sequence for Six1 (NM_009189.1,601-619).
gggagaacaccgaaaacaa

SEQ ID NO: 448434 - DNA, 19 bp, Mus musculus
  siRNA target sequence for Six1 (NM_009189.1,602-620).
ggagaacaccgaaaacaat

SEQ ID NO: 448435 - DNA, 19 bp, Mus musculus
  siRNA target sequence for Six1 (NM_009189.1,603-621).
gagaacaccgaaaacaata

SEQ ID NO: 448436 - DNA, 19 bp, Mus musculus
  siRNA target sequence for Six1 (NM_009189.1,759-777).
cacgccaggagctcaaact

SEQ ID NO: 448437 - DNA, 19 bp, Mus musculus
  siRNA target sequence for Six1 (NM_009189.1,762-780).
gccaggagctcaaactatt

SEQ ID NO: 448438 - DNA, 19 bp, Mus musculus
  siRNA target sequence for Six1 (NM_009189.1,766-784).
ggagctcaaactattctct

SEQ ID NO: 448439 - DNA, 19 bp, Mus musculus
  siRNA target sequence for Six2 (NM_011380.1,418-436).
gcacctccacaagaatgaa

SEQ ID NO: 448440 - DNA, 19 bp, Mus musculus
  siRNA target sequence for Six2 (NM_011380.1,555-573).
ggctcaaggcgcactacat

SEQ ID NO: 448441 - DNA, 19 bp, Mus musculus
  siRNA target sequence for Six4 (NM_011382.1,285-303).
cggcagatcaggtacaact

SEQ ID NO: 448442 - DNA, 19 bp, Mus musculus
  siRNA target sequence for Six4 (NM_011382.1,709-727).
cgaggagacggtgtattgt

SEQ ID NO: 448443 - DNA, 19 bp, Mus musculus
  siRNA target sequence for Six4 (NM_011382.1,713-731).
gagacggtgtattgtttca

SEQ ID NO: 448444 - DNA, 19 bp, Mus musculus
  siRNA target sequence for Six4 (NM_011382.1,946-964).
gggacatgaggatttgtct

SEQ ID NO: 448445 - DNA, 19 bp, Mus musculus
  siRNA target sequence for Six4 (NM_011382.1,1050-1068).
gaaatgctaagatatcact

SEQ ID NO: 448446 - DNA, 19 bp, Mus musculus
  siRNA target sequence for Six4 (NM_011382.1,1071-1089).
gctcgtctggagttttgtt

SEQ ID NO: 448447 - DNA, 19 bp, Mus musculus
  siRNA target sequence for Six4 (NM_011382.1,1074-1092).
cgtctggagttttgttgaa

SEQ ID NO: 448448 - DNA, 19 bp, Mus musculus
  siRNA target sequence for Six4 (NM_011382.1,1129-1147).
ccttaatggcaattctttt

SEQ ID NO: 448449 - DNA, 19 bp, Mus musculus
  siRNA target sequence for Six4 (NM_011382.1,1155-1173).
gacacaatggagttatcct

SEQ ID NO: 448450 - DNA, 19 bp, Mus musculus
  siRNA target sequence for Six4 (NM_011382.1,1157-1175).
cacaatggagttatcctta

SEQ ID NO: 448451 - DNA, 19 bp, Mus musculus
  siRNA target sequence for Six4 (NM_011382.1,1159-1177).
caatggagttatccttaat

SEQ ID NO: 448452 - DNA, 19 bp, Mus musculus
  siRNA target sequence for Six4 (NM_011382.1,1209-1227).
cactgaacccacccaaaat

SEQ ID NO: 448453 - DNA, 19 bp, Mus musculus
  siRNA target sequence for Six4 (NM_011382.1,1213-1231).
gaacccacccaaaatgtct

SEQ ID NO: 448454 - DNA, 19 bp, Mus musculus
  siRNA target sequence for Six4 (NM_011382.1,1461-1479).
ctacacccgtgcaaattaa

SEQ ID NO: 448455 - DNA, 19 bp, Mus musculus
  siRNA target sequence for Six4 (NM_011382.1,1464-1482).
cacccgtgcaaattaacca

SEQ ID NO: 448456 - DNA, 19 bp, Mus musculus
  siRNA target sequence for Six4 (NM_011382.1,1515-1533).
ccaacggccagttccttaa

SEQ ID NO: 448457 - DNA, 19 bp, Mus musculus
  siRNA target sequence for Six4 (NM_011382.1,1529-1547).
cttaatgggagcattggat

SEQ ID NO: 448458 - DNA, 19 bp, Mus musculus
  siRNA target sequence for Six4 (NM_011382.1,1581-1599).
cagcttcacaaggtaatct

SEQ ID NO: 448459 - DNA, 19 bp, Mus musculus
  siRNA target sequence for Six4 (NM_011382.1,1621-1639).
ggacggaagcacatttaca

SEQ ID NO: 448460 - DNA, 19 bp, Mus musculus
  siRNA target sequence for Six4 (NM_011382.1,1653-1671).
cagtccagcacggtaaact

SEQ ID NO: 448461 - DNA, 19 bp, Mus musculus
  siRNA target sequence for Six4 (NM_011382.1,1655-1673).
gtccagcacggtaaacttt

SEQ ID NO: 448462 - DNA, 19 bp, Mus musculus
  siRNA target sequence for Six4 (NM_011382.1,1689-1707).
cccccagtgcagtggtata

SEQ ID NO: 448463 - DNA, 19 bp, Mus musculus
  siRNA target sequence for Six4 (NM_011382.1,1702-1720).
ggtatacaccgttcctaat

SEQ ID NO: 448464 - DNA, 19 bp, Mus musculus
  siRNA target sequence for Six4 (NM_011382.1,1703-1721).
gtatacaccgttcctaatt

SEQ ID NO: 448465 - DNA, 19 bp, Mus musculus
  siRNA target sequence for Six4 (NM_011382.1,1795-1813).
caatcacagtgcacaagta

SEQ ID NO: 448466 - DNA, 19 bp, Mus musculus
  siRNA target sequence for Six4 (NM_011382.1,1801-1819).
cagtgcacaagtaaatgca

SEQ ID NO: 448467 - DNA, 19 bp, Mus musculus
  siRNA target sequence for Six4 (NM_011382.1,1862-1880).
ctgacctcgtcgttggtta

SEQ ID NO: 448468 - DNA, 19 bp, Mus musculus
  siRNA target sequence for Six4 (NM_011382.1,1864-1882).
gacctcgtcgttggttaat

SEQ ID NO: 448469 - DNA, 19 bp, Mus musculus
  siRNA target sequence for Six4 (NM_011382.1,1866-1884).
cctcgtcgttggttaatgt

SEQ ID NO: 448470 - DNA, 19 bp, Mus musculus
  siRNA target sequence for Six4 (NM_011382.1,1976-1994).
gcacctgtggcaagcaaat

SEQ ID NO: 448471 - DNA, 19 bp, Mus musculus
  siRNA target sequence for Six4 (NM_011382.1,2007-2025).
ctgtcagcaacactaacta

SEQ ID NO: 448472 - DNA, 19 bp, Mus musculus
  siRNA target sequence for Six4 (NM_011382.1,2148-2166).
cagtccaccaggattttgt

SEQ ID NO: 448473 - DNA, 19 bp, Mus musculus
  siRNA target sequence for Six4 (NM_011382.1,2189-2207).
cagtcagtccctaacataa

SEQ ID NO: 448474 - DNA, 19 bp, Mus musculus
  siRNA target sequence for Six4 (NM_011382.1,2191-2209).
gtcagtccctaacataaaa

SEQ ID NO: 448475 - DNA, 19 bp, Mus musculus
  siRNA target sequence for Six4 (NM_011382.1,2199-2217).
ctaacataaaagagaattt

SEQ ID NO: 448476 - DNA, 19 bp, Mus musculus
  siRNA target sequence for Six4 (NM_011382.1,2355-2373).
ccgtccagttggatgaaga

SEQ ID NO: 448477 - DNA, 19 bp, Mus musculus
  siRNA target sequence for Six6 (NM_011384.2,197-215).
cgcctaggtcgcttcctat

SEQ ID NO: 448478 - DNA, 19 bp, Mus musculus
  siRNA target sequence for Six6 (NM_011384.2,248-266).
gcccttaacaagaatgagt

SEQ ID NO: 448479 - DNA, 19 bp, Mus musculus
  siRNA target sequence for Six6 (NM_011384.2,307-325).
caactaccgcgagctttat

SEQ ID NO: 448480 - DNA, 19 bp, Mus musculus
  siRNA target sequence for Six6 (NM_011384.2,310-328).
ctaccgcgagctttatcat

SEQ ID NO: 448481 - DNA, 19 bp, Mus musculus
  siRNA target sequence for Six6 (NM_011384.2,315-333).
gcgagctttatcatatcct

SEQ ID NO: 448482 - DNA, 19 bp, Mus musculus
  siRNA target sequence for Six6 (NM_011384.2,341-359).
cataagtttactaaggaat

SEQ ID NO: 448483 - DNA, 19 bp, Mus musculus
  siRNA target sequence for Six6 (NM_011384.2,625-643).
ggtgggcaactggttcaaa

SEQ ID NO: 448484 - DNA, 19 bp, Mus musculus
  siRNA target sequence for Six6 (NM_011384.2,640-658).
caaaaaccgcagacaaaga

SEQ ID NO: 448485 - DNA, 19 bp, Mus musculus
  siRNA target sequence for Slc38a2 (NM_175121.3,391-409).
gaaatgggaaggttcaaca

SEQ ID NO: 448486 - DNA, 19 bp, Mus musculus
  siRNA target sequence for Slc38a2 (NM_175121.3,449-467).
gtgacttcaactactcata

SEQ ID NO: 448487 - DNA, 19 bp, Mus musculus
  siRNA target sequence for Slc38a2 (NM_175121.3,514-532).
cccgaaaaccagaactttt

SEQ ID NO: 448488 - DNA, 19 bp, Mus musculus
  siRNA target sequence for Slc38a2 (NM_175121.3,516-534).
cgaaaaccagaacttttta

SEQ ID NO: 448489 - DNA, 19 bp, Mus musculus
  siRNA target sequence for Slc38a2 (NM_175121.3,523-541).
cagaactttttacttgaat

SEQ ID NO: 448490 - DNA, 19 bp, Mus musculus
  siRNA target sequence for Slc38a2 (NM_175121.3,558-576).
gaagtacgaaacagacttt

SEQ ID NO: 448491 - DNA, 19 bp, Mus musculus
  siRNA target sequence for Slc38a2 (NM_175121.3,561-579).
gtacgaaacagactttcat

SEQ ID NO: 448492 - DNA, 19 bp, Mus musculus
  siRNA target sequence for Slc38a2 (NM_175121.3,583-601).
ggtactacttcctttggaa

SEQ ID NO: 448493 - DNA, 19 bp, Mus musculus
  siRNA target sequence for Slc38a2 (NM_175121.3,584-602).
gtactacttcctttggaat

SEQ ID NO: 448494 - DNA, 19 bp, Mus musculus
  siRNA target sequence for Slc38a2 (NM_175121.3,599-617).
gaatgtcagtatttaatct

SEQ ID NO: 448495 - DNA, 19 bp, Mus musculus
  siRNA target sequence for Slc38a2 (NM_175121.3,666-684).
ggctaatactggaattgct

SEQ ID NO: 448496 - DNA, 19 bp, Mus musculus
  siRNA target sequence for Slc38a2 (NM_175121.3,676-694).
ggaattgctctttttataa

SEQ ID NO: 448497 - DNA, 19 bp, Mus musculus
  siRNA target sequence for Slc38a2 (NM_175121.3,699-717).
cttgacgttcgtgtcaatt

SEQ ID NO: 448498 - DNA, 19 bp, Mus musculus
  siRNA target sequence for Slc38a2 (NM_175121.3,702-720).
gacgttcgtgtcaattttt

SEQ ID NO: 448499 - DNA, 19 bp, Mus musculus
  siRNA target sequence for Slc38a2 (NM_175121.3,756-774).
caacgaaggaggatcttta

SEQ ID NO: 448500 - DNA, 19 bp, Mus musculus
  siRNA target sequence for Slc38a2 (NM_175121.3,770-788).
ctttattgtacgaacagtt

SEQ ID NO: 448501 - DNA, 19 bp, Mus musculus
  siRNA target sequence for Slc38a2 (NM_175121.3,823-841).
gcagcctccggatcgataa

SEQ ID NO: 448502 - DNA, 19 bp, Mus musculus
  siRNA target sequence for Slc38a2 (NM_175121.3,826-844).
gcctccggatcgataacca

SEQ ID NO: 448503 - DNA, 19 bp, Mus musculus
  siRNA target sequence for Slc38a2 (NM_175121.3,827-845).
cctccggatcgataaccat

SEQ ID NO: 448504 - DNA, 19 bp, Mus musculus
  siRNA target sequence for Slc38a2 (NM_175121.3,837-855).
gataaccatgcagaacatt

SEQ ID NO: 448505 - DNA, 19 bp, Mus musculus
  siRNA target sequence for Slc38a2 (NM_175121.3,873-891).
cctcttcatagtgaaatat

SEQ ID NO: 448506 - DNA, 19 bp, Mus musculus
  siRNA target sequence for Slc38a2 (NM_175121.3,879-897).
catagtgaaatatgagtta

SEQ ID NO: 448507 - DNA, 19 bp, Mus musculus
  siRNA target sequence for Slc38a2 (NM_175121.3,909-927).
caaggcattaatgaacatt

SEQ ID NO: 448508 - DNA, 19 bp, Mus musculus
  siRNA target sequence for Slc38a2 (NM_175121.3,912-930).
ggcattaatgaacattgaa

SEQ ID NO: 448509 - DNA, 19 bp, Mus musculus
  siRNA target sequence for Slc38a2 (NM_175121.3,948-966).
gtatctgaacggtgactat

SEQ ID NO: 448510 - DNA, 19 bp, Mus musculus
  siRNA target sequence for Slc38a2 (NM_175121.3,990-1008).
cctcattcttccattgtca

SEQ ID NO: 448511 - DNA, 19 bp, Mus musculus
  siRNA target sequence for Slc38a2 (NM_175121.3,1050-1068).
ctctctgctctgtatgata

SEQ ID NO: 448512 - DNA, 19 bp, Mus musculus
  siRNA target sequence for Slc38a2 (NM_175121.3,1075-1093).
ctgatcgtggtgatttgca

SEQ ID NO: 448513 - DNA, 19 bp, Mus musculus
  siRNA target sequence for Slc38a2 (NM_175121.3,1172-1190).
cgttggcgttggcattcaa

SEQ ID NO: 448514 - DNA, 19 bp, Mus musculus
  siRNA target sequence for Slc38a2 (NM_175121.3,1173-1191).
gttggcgttggcattcaat

SEQ ID NO: 448515 - DNA, 19 bp, Mus musculus
  siRNA target sequence for Slc38a2 (NM_175121.3,1177-1195).
gcgttggcattcaatagca

SEQ ID NO: 448516 - DNA, 19 bp, Mus musculus
  siRNA target sequence for Slc38a2 (NM_175121.3,1208-1226).
cttgcaggccacgctattt

SEQ ID NO: 448517 - DNA, 19 bp, Mus musculus
  siRNA target sequence for Slc38a2 (NM_175121.3,1211-1229).
gcaggccacgctatttcat

SEQ ID NO: 448518 - DNA, 19 bp, Mus musculus
  siRNA target sequence for Slc38a2 (NM_175121.3,1214-1232).
ggccacgctatttcatctt

SEQ ID NO: 448519 - DNA, 19 bp, Mus musculus
  siRNA target sequence for Slc38a2 (NM_175121.3,1217-1235).
cacgctatttcatcttcaa

SEQ ID NO: 448520 - DNA, 19 bp, Mus musculus
  siRNA target sequence for Slc38a2 (NM_175121.3,1219-1237).
cgctatttcatcttcaact

SEQ ID NO: 448521 - DNA, 19 bp, Mus musculus
  siRNA target sequence for Slc38a2 (NM_175121.3,1233-1251).
caactcgcagactgtgtat

SEQ ID NO: 448522 - DNA, 19 bp, Mus musculus
  siRNA target sequence for Slc38a2 (NM_175121.3,1281-1299).
ctgccatcccgctgttctt

SEQ ID NO: 448523 - DNA, 19 bp, Mus musculus
  siRNA target sequence for Slc38a2 (NM_175121.3,1301-1319).
ccatctacgaagagctaaa

SEQ ID NO: 448524 - DNA, 19 bp, Mus musculus
  siRNA target sequence for Slc38a2 (NM_175121.3,1341-1359).
gatgaacgtgtccaagatt

SEQ ID NO: 448525 - DNA, 19 bp, Mus musculus
  siRNA target sequence for Slc38a2 (NM_175121.3,1369-1387).
gccatgtttctgatgtact

SEQ ID NO: 448526 - DNA, 19 bp, Mus musculus
  siRNA target sequence for Slc38a2 (NM_175121.3,1436-1454).
cggaattgctgcataccta

SEQ ID NO: 448527 - DNA, 19 bp, Mus musculus
  siRNA target sequence for Slc38a2 (NM_175121.3,1461-1479).
gatcgtggggactgacatt

SEQ ID NO: 448528 - DNA, 19 bp, Mus musculus
  siRNA target sequence for Slc38a2 (NM_175121.3,1464-1482).
cgtggggactgacattctt

SEQ ID NO: 448529 - DNA, 19 bp, Mus musculus
  siRNA target sequence for Slc38a2 (NM_175121.3,1521-1539).
cctcacggtcccagtagtt

SEQ ID NO: 448530 - DNA, 19 bp, Mus musculus
  siRNA target sequence for Slc38a2 (NM_175121.3,1522-1540).
ctcacggtcccagtagtta

SEQ ID NO: 448531 - DNA, 19 bp, Mus musculus
  siRNA target sequence for Slc38a2 (NM_175121.3,1524-1542).
cacggtcccagtagttatt

SEQ ID NO: 448532 - DNA, 19 bp, Mus musculus
  siRNA target sequence for Slc38a2 (NM_175121.3,1526-1544).
cggtcccagtagttatttt

SEQ ID NO: 448533 - DNA, 19 bp, Mus musculus
  siRNA target sequence for Slc38a2 (NM_175121.3,1554-1572).
gagttccgtcactcactta

SEQ ID NO: 448534 - DNA, 19 bp, Mus musculus
  siRNA target sequence for Slc38a2 (NM_175121.3,1556-1574).
gttccgtcactcacttact

SEQ ID NO: 448535 - DNA, 19 bp, Mus musculus
  siRNA target sequence for Slc38a2 (NM_175121.3,1640-1658).
ccaatttgctcgtcatctt

SEQ ID NO: 448536 - DNA, 19 bp, Mus musculus
  siRNA target sequence for Slc38a2 (NM_175121.3,1674-1692).
ggacatcttcgggttcatt

SEQ ID NO: 448537 - DNA, 19 bp, Mus musculus
  siRNA target sequence for Slc38a2 (NM_175121.3,1703-1721).
cggctgccatgctgatctt

SEQ ID NO: 448538 - DNA, 19 bp, Mus musculus
  siRNA target sequence for Slc38a2 (NM_175121.3,1704-1722).
ggctgccatgctgatcttt

SEQ ID NO: 448539 - DNA, 19 bp, Mus musculus
  siRNA target sequence for Slc38a2 (NM_175121.3,1730-1748).
cgtctgccttctacatcaa

SEQ ID NO: 448540 - DNA, 19 bp, Mus musculus
  siRNA target sequence for Slc38a2 (NM_175121.3,1733-1751).
ctgccttctacatcaagtt

SEQ ID NO: 448541 - DNA, 19 bp, Mus musculus
  siRNA target sequence for Slc38a2 (NM_175121.3,1736-1754).
ccttctacatcaagttagt

SEQ ID NO: 448542 - DNA, 19 bp, Mus musculus
  siRNA target sequence for Slc38a2 (NM_175121.3,1766-1784).
caatgagatccgtgcaaaa

SEQ ID NO: 448543 - DNA, 19 bp, Mus musculus
  siRNA target sequence for Slc38a2 (NM_175121.3,1770-1788).
gagatccgtgcaaaagatt

SEQ ID NO: 448544 - DNA, 19 bp, Mus musculus
  siRNA target sequence for Slc38a2 (NM_175121.3,1785-1803).
gattggggctctgtgtttt

SEQ ID NO: 448545 - DNA, 19 bp, Mus musculus
  siRNA target sequence for Slc4a10 (NM_033552.1,90-108).
gctgcctacgagaaatgat

SEQ ID NO: 448546 - DNA, 19 bp, Mus musculus
  siRNA target sequence for Slc4a10 (NM_033552.1,93-111).
gcctacgagaaatgatgaa

SEQ ID NO: 448547 - DNA, 19 bp, Mus musculus
  siRNA target sequence for Slc4a10 (NM_033552.1,131-149).
gtggaacacgctctattct

SEQ ID NO: 448548 - DNA, 19 bp, Mus musculus
  siRNA target sequence for Slc4a10 (NM_033552.1,133-151).
ggaacacgctctattctca

SEQ ID NO: 448549 - DNA, 19 bp, Mus musculus
  siRNA target sequence for Slc4a10 (NM_033552.1,134-152).
gaacacgctctattctcaa

SEQ ID NO: 448550 - DNA, 19 bp, Mus musculus
  siRNA target sequence for Slc4a10 (NM_033552.1,181-199).
ggtcatcggacattattta

SEQ ID NO: 448551 - DNA, 19 bp, Mus musculus
  siRNA target sequence for Slc4a10 (NM_033552.1,182-200).
gtcatcggacattatttat

SEQ ID NO: 448552 - DNA, 19 bp, Mus musculus
  siRNA target sequence for Slc4a10 (NM_033552.1,213-231).
gcccctgggtggaagaaaa

SEQ ID NO: 448553 - DNA, 19 bp, Mus musculus
  siRNA target sequence for Slc4a10 (NM_033552.1,248-266).
ggcatcgtggtcataagca

SEQ ID NO: 448554 - DNA, 19 bp, Mus musculus
  siRNA target sequence for Slc4a10 (NM_033552.1,409-427).
gagctggatgagatttgct

SEQ ID NO: 448555 - DNA, 19 bp, Mus musculus
  siRNA target sequence for Slc4a10 (NM_033552.1,529-547).
gccacgctttcattacaca

SEQ ID NO: 448556 - DNA, 19 bp, Mus musculus
  siRNA target sequence for Slc4a10 (NM_033552.1,600-618).
gcatgccaacacgatagaa

SEQ ID NO: 448557 - DNA, 19 bp, Mus musculus
  siRNA target sequence for Slc4a10 (NM_033552.1,604-622).
gccaacacgatagaagaaa

SEQ ID NO: 448558 - DNA, 19 bp, Mus musculus
  siRNA target sequence for Slc4a10 (NM_033552.1,605-623).
ccaacacgatagaagaaat

SEQ ID NO: 448559 - DNA, 19 bp, Mus musculus
  siRNA target sequence for Slc4a10 (NM_033552.1,653-671).
gctcaggccagctgaatga

SEQ ID NO: 448560 - DNA, 19 bp, Mus musculus
  siRNA target sequence for Slc4a10 (NM_033552.1,686-704).
gggtccacgaagcattgat

SEQ ID NO: 448561 - DNA, 19 bp, Mus musculus
  siRNA target sequence for Slc4a10 (NM_033552.1,688-706).
gtccacgaagcattgatga

SEQ ID NO: 448562 - DNA, 19 bp, Mus musculus
  siRNA target sequence for Slc4a10 (NM_033552.1,712-730).
catcatcaccagaatcaga

SEQ ID NO: 448563 - DNA, 19 bp, Mus musculus
  siRNA target sequence for Slc4a10 (NM_033552.1,715-733).
catcaccagaatcagaaaa

SEQ ID NO: 448564 - DNA, 19 bp, Mus musculus
  siRNA target sequence for Slc4a10 (NM_033552.1,787-805).
caatcagaaccaaattcca

SEQ ID NO: 448565 - DNA, 19 bp, Mus musculus
  siRNA target sequence for Slc4a10 (NM_033552.1,944-962).
gtgctgaagcttcaaacat

SEQ ID NO: 448566 - DNA, 19 bp, Mus musculus
  siRNA target sequence for Slc4a10 (NM_033552.1,1055-1073).
caatcccaagcagatttct

SEQ ID NO: 448567 - DNA, 19 bp, Mus musculus
  siRNA target sequence for Slc4a10 (NM_033552.1,1116-1134).
cgagattggcagatcgatt

SEQ ID NO: 448568 - DNA, 19 bp, Mus musculus
  siRNA target sequence for Slc4a10 (NM_033552.1,1127-1145).
gatcgattgcgaccttaat

SEQ ID NO: 448569 - DNA, 19 bp, Mus musculus
  siRNA target sequence for Slc4a10 (NM_033552.1,1131-1149).
gattgcgaccttaatgact

SEQ ID NO: 448570 - DNA, 19 bp, Mus musculus
  siRNA target sequence for Slc4a10 (NM_033552.1,1146-1164).
gactgatgaggtgtttcat

SEQ ID NO: 448571 - DNA, 19 bp, Mus musculus
  siRNA target sequence for Slc4a10 (NM_033552.1,1148-1166).
ctgatgaggtgtttcatga

SEQ ID NO: 448572 - DNA, 19 bp, Mus musculus
  siRNA target sequence for Slc4a10 (NM_033552.1,1186-1204).
gaccgcaatgacttggtat

SEQ ID NO: 448573 - DNA, 19 bp, Mus musculus
  siRNA target sequence for Slc4a10 (NM_033552.1,1256-1274).
gggatccaagcatacgaat

SEQ ID NO: 448574 - DNA, 19 bp, Mus musculus
  siRNA target sequence for Slc4a10 (NM_033552.1,1257-1275).
ggatccaagcatacgaata

SEQ ID NO: 448575 - DNA, 19 bp, Mus musculus
  siRNA target sequence for Slc4a10 (NM_033552.1,1314-1332).
gattcctgctgtaccaaat

SEQ ID NO: 448576 - DNA, 19 bp, Mus musculus
  siRNA target sequence for Slc4a10 (NM_033552.1,1403-1421).
ggatttttgggggacttat

SEQ ID NO: 448577 - DNA, 19 bp, Mus musculus
  siRNA target sequence for Slc4a10 (NM_033552.1,1561-1579).
gcaactgaaggtcgtataa

SEQ ID NO: 448578 - DNA, 19 bp, Mus musculus
  siRNA target sequence for Slc4a10 (NM_033552.1,1573-1591).
cgtataagtgcaatcgaat

SEQ ID NO: 448579 - DNA, 19 bp, Mus musculus
  siRNA target sequence for Slc4a10 (NM_033552.1,1592-1610).
cactctttggagcatctat

SEQ ID NO: 448580 - DNA, 19 bp, Mus musculus
  siRNA target sequence for Slc4a10 (NM_033552.1,1594-1612).
ctctttggagcatctatga

SEQ ID NO: 448581 - DNA, 19 bp, Mus musculus
  siRNA target sequence for Slc4a10 (NM_033552.1,1611-1629).
gaccgggatagcctattct

SEQ ID NO: 448582 - DNA, 19 bp, Mus musculus
  siRNA target sequence for Slc4a10 (NM_033552.1,1614-1632).
cgggatagcctattctctt

SEQ ID NO: 448583 - DNA, 19 bp, Mus musculus
  siRNA target sequence for Slc4a10 (NM_033552.1,1661-1679).
gcagcacaggacctgtttt

SEQ ID NO: 448584 - DNA, 19 bp, Mus musculus
  siRNA target sequence for Slc4a10 (NM_033552.1,1687-1705).
gaaaagatcttgtttaagt

SEQ ID NO: 448585 - DNA, 19 bp, Mus musculus
  siRNA target sequence for Slc4a10 (NM_033552.1,1900-1918).
ctcagtgaaacctatccaa

SEQ ID NO: 448586 - DNA, 19 bp, Mus musculus
  siRNA target sequence for Slc4a10 (NM_033552.1,1904-1922).
gtgaaacctatccaatcaa

SEQ ID NO: 448587 - DNA, 19 bp, Mus musculus
  siRNA target sequence for Slc4a10 (NM_033552.1,1906-1924).
gaaacctatccaatcaata

SEQ ID NO: 448588 - DNA, 19 bp, Mus musculus
  siRNA target sequence for Slc4a10 (NM_033552.1,1916-1934).
caatcaatatgcacaatga

SEQ ID NO: 448589 - DNA, 19 bp, Mus musculus
  siRNA target sequence for Slc4a10 (NM_033552.1,1939-1957).
gaactgctgacacaatact

SEQ ID NO: 448590 - DNA, 19 bp, Mus musculus
  siRNA target sequence for Slc4a10 (NM_033552.1,1965-1983).
ctgtatggagccacatagt

SEQ ID NO: 448591 - DNA, 19 bp, Mus musculus
  siRNA target sequence for Slc4a10 (NM_033552.1,2075-2093).
cactgcacggggagtatgt

SEQ ID NO: 448592 - DNA, 19 bp, Mus musculus
  siRNA target sequence for Slc4a10 (NM_033552.1,2120-2138).
cctacgtgccagatgttct

SEQ ID NO: 448593 - DNA, 19 bp, Mus musculus
  siRNA target sequence for Slc4a10 (NM_033552.1,2144-2162).
ggtcggtgatcctgttctt

SEQ ID NO: 448594 - DNA, 19 bp, Mus musculus
  siRNA target sequence for Slc4a10 (NM_033552.1,2230-2248).
cgatccatagtgagtgatt

SEQ ID NO: 448595 - DNA, 19 bp, Mus musculus
  siRNA target sequence for Slc4a10 (NM_033552.1,2241-2259).
gagtgattttgcggttttt

SEQ ID NO: 448596 - DNA, 19 bp, Mus musculus
  siRNA target sequence for Slc4a10 (NM_033552.1,2273-2291).
gtatggttttaattgacta

SEQ ID NO: 448597 - DNA, 19 bp, Mus musculus
  siRNA target sequence for Slc4a10 (NM_033552.1,2300-2318).
ggatcccatcaccaaaact

SEQ ID NO: 448598 - DNA, 19 bp, Mus musculus
  siRNA target sequence for Slc4a10 (NM_033552.1,2304-2322).
cccatcaccaaaactacaa

SEQ ID NO: 448599 - DNA, 19 bp, Mus musculus
  siRNA target sequence for Slc4a10 (NM_033552.1,2306-2324).
catcaccaaaactacaagt

SEQ ID NO: 448600 - DNA, 19 bp, Mus musculus
  siRNA target sequence for Slc4a10 (NM_033552.1,2320-2338).
caagtaccaagcgttttca

SEQ ID NO: 448601 - DNA, 19 bp, Mus musculus
  siRNA target sequence for Slc4a10 (NM_033552.1,2353-2371).
gaccgtggctggtttgtta

SEQ ID NO: 448602 - DNA, 19 bp, Mus musculus
  siRNA target sequence for Slc4a10 (NM_033552.1,2548-2566).
ctcggggtctgctccatta

SEQ ID NO: 448603 - DNA, 19 bp, Mus musculus
  siRNA target sequence for Slc4a10 (NM_033552.1,2694-2712).
gaccgggctcatgattttt

SEQ ID NO: 448604 - DNA, 19 bp, Mus musculus
  siRNA target sequence for Slc4a10 (NM_033552.1,2697-2715).
cgggctcatgatttttatt

SEQ ID NO: 448605 - DNA, 19 bp, Mus musculus
  siRNA target sequence for Slc4a10 (NM_033552.1,2722-2740).
ggttcatccgttttcatga

SEQ ID NO: 448606 - DNA, 19 bp, Mus musculus
  siRNA target sequence for Slc4a10 (NM_033552.1,2772-2790).
gttatacggagtgtttctt

SEQ ID NO: 448607 - DNA, 19 bp, Mus musculus
  siRNA target sequence for Slc4a10 (NM_033552.1,2796-2814).
gggtgcttcgtctctcaaa

SEQ ID NO: 448608 - DNA, 19 bp, Mus musculus
  siRNA target sequence for Slc4a10 (NM_033552.1,2801-2819).
cttcgtctctcaaaggaat

SEQ ID NO: 448609 - DNA, 19 bp, Mus musculus
  siRNA target sequence for Slc4a10 (NM_033552.1,2815-2833).
ggaattcagttatttgata

SEQ ID NO: 448610 - DNA, 19 bp, Mus musculus
  siRNA target sequence for Slc4a10 (NM_033552.1,2944-2962).
ggccttctgtggataatca

SEQ ID NO: 448611 - DNA, 19 bp, Mus musculus
  siRNA target sequence for Slc4a10 (NM_033552.1,2950-2968).
ctgtggataatcaaagttt

SEQ ID NO: 448612 - DNA, 19 bp, Mus musculus
  siRNA target sequence for Slc4a10 (NM_033552.1,3005-3023).
cactagtgtttgtgagaaa

SEQ ID NO: 448613 - DNA, 19 bp, Mus musculus
  siRNA target sequence for Slc4a10 (NM_033552.1,3007-3025).
ctagtgtttgtgagaaagt

SEQ ID NO: 448614 - DNA, 19 bp, Mus musculus
  siRNA target sequence for Slc4a10 (NM_033552.1,3057-3075).
cagctggcttgatgattta

SEQ ID NO: 448615 - DNA, 19 bp, Mus musculus
  siRNA target sequence for Slc4a10 (NM_033552.1,3192-3210).
cgacccgtctgtgatcaat

SEQ ID NO: 448616 - DNA, 19 bp, Mus musculus
  siRNA target sequence for Slc4a10 (NM_033552.1,3193-3211).
gacccgtctgtgatcaata

SEQ ID NO: 448617 - DNA, 19 bp, Mus musculus
  siRNA target sequence for Slc4a10 (NM_033552.1,3195-3213).
cccgtctgtgatcaatatt

SEQ ID NO: 448618 - DNA, 19 bp, Mus musculus
  siRNA target sequence for Slc4a10 (NM_033552.1,3196-3214).
ccgtctgtgatcaatattt

SEQ ID NO: 448619 - DNA, 19 bp, Mus musculus
  siRNA target sequence for Slc4a10 (NM_033552.1,3243-3261).
ggggaaccttctagttact

SEQ ID NO: 448620 - DNA, 19 bp, Mus musculus
  siRNA target sequence for Slc4a10 (NM_033552.1,3256-3274).
gttactgctgacaactcaa

SEQ ID NO: 448621 - DNA, 19 bp, Mus musculus
  siRNA target sequence for Slc4a10 (NM_033552.1,3285-3303).
gtcacgctttccttctaaa

SEQ ID NO: 448622 - DNA, 19 bp, Mus musculus
  siRNA target sequence for Slc4a10 (NM_033552.1,3289-3307).
cgctttccttctaaaagct

SEQ ID NO: 448623 - DNA, 19 bp, Mus musculus
  siRNA target sequence for Snai3 (NM_013914.2,144-162).
gacactgagagaagctaat

SEQ ID NO: 448624 - DNA, 19 bp, Mus musculus
  siRNA target sequence for Snai3 (NM_013914.2,289-307).
cctcttctgccgaatcaca

SEQ ID NO: 448625 - DNA, 19 bp, Mus musculus
  siRNA target sequence for Snai3 (NM_013914.2,295-313).
ctgccgaatcacagagaaa

SEQ ID NO: 448626 - DNA, 19 bp, Mus musculus
  siRNA target sequence for Snai3 (NM_013914.2,455-473).
gcccagacggagctctaaa

SEQ ID NO: 448627 - DNA, 19 bp, Mus musculus
  siRNA target sequence for Snai3 (NM_013914.2,456-474).
cccagacggagctctaaat

SEQ ID NO: 448628 - DNA, 19 bp, Mus musculus
  siRNA target sequence for Snai3 (NM_013914.2,458-476).
cagacggagctctaaatga

SEQ ID NO: 448629 - DNA, 19 bp, Mus musculus
  siRNA target sequence for Snai3 (NM_013914.2,462-480).
cggagctctaaatgaacat

SEQ ID NO: 448630 - DNA, 19 bp, Mus musculus
  siRNA target sequence for Snai3 (NM_013914.2,505-523).
gtcccaggtagctttgagt

SEQ ID NO: 448631 - DNA, 19 bp, Mus musculus
  siRNA target sequence for Sox2 (NM_011443.2,596-614).
gcggagtggaaacttttgt

SEQ ID NO: 448632 - DNA, 19 bp, Mus musculus
  siRNA target sequence for Sox2 (NM_011443.2,677-695).
gagcacccggattataaat

SEQ ID NO: 448633 - DNA, 19 bp, Mus musculus
  siRNA target sequence for Sox2 (NM_011443.2,1170-1188).
gggacctccgggacatgat

SEQ ID NO: 448634 - DNA, 19 bp, Mus musculus
  siRNA target sequence for Spdef (NM_013891.2,464-482).
ccggttgcctgctactgtt

SEQ ID NO: 448635 - DNA, 19 bp, Mus musculus
  siRNA target sequence for Spdef (NM_013891.2,779-797).
gcgaggtcctgaaagatat

SEQ ID NO: 448636 - DNA, 19 bp, Mus musculus
  siRNA target sequence for Spdef (NM_013891.2,780-798).
cgaggtcctgaaagatatt

SEQ ID NO: 448637 - DNA, 19 bp, Mus musculus
  siRNA target sequence for Spdef (NM_013891.2,858-876).
cgtgcagaagtggctttta

SEQ ID NO: 448638 - DNA, 19 bp, Mus musculus
  siRNA target sequence for Spdef (NM_013891.2,950-968).
ccatgtccgaggaacagtt

SEQ ID NO: 448639 - DNA, 19 bp, Mus musculus
  siRNA target sequence for Spdef (NM_013891.2,1151-1169).
ggcagttcctgaaagaact

SEQ ID NO: 448640 - DNA, 19 bp, Mus musculus
  siRNA target sequence for Spdef (NM_013891.2,1316-1334).
gctccatccgccagtatta

SEQ ID NO: 448641 - DNA, 19 bp, Mus musculus
  siRNA target sequence for Spdef (NM_013891.2,1319-1337).
ccatccgccagtattacaa

SEQ ID NO: 448642 - DNA, 19 bp, Mus musculus
  siRNA target sequence for Spdef (NM_013891.2,1338-1356).
gaagggcatcattcgtaaa

SEQ ID NO: 448643 - DNA, 19 bp, Mus musculus
  siRNA target sequence for Spdef (NM_013891.2,1369-1387).
cagcgccttgtctaccaat

SEQ ID NO: 448644 - DNA, 19 bp, Mus musculus
  siRNA target sequence for Spdef (NM_013891.2,1371-1389).
gcgccttgtctaccaattt

SEQ ID NO: 448645 - DNA, 19 bp, Mus musculus
  siRNA target sequence for Spdef (NM_013891.2,1373-1391).
gccttgtctaccaatttgt

SEQ ID NO: 448646 - DNA, 19 bp, Mus musculus
  siRNA target sequence for Spic (NM_011461.2,144-162).
gacttgttgtattgatcaa

SEQ ID NO: 448647 - DNA, 19 bp, Mus musculus
  siRNA target sequence for Spic (NM_011461.2,152-170).
gtattgatcaagacagttt

SEQ ID NO: 448648 - DNA, 19 bp, Mus musculus
  siRNA target sequence for Spic (NM_011461.2,165-183).
cagtttggggcaaacattt

SEQ ID NO: 448649 - DNA, 19 bp, Mus musculus
  siRNA target sequence for Spic (NM_011461.2,167-185).
gtttggggcaaacatttca

SEQ ID NO: 448650 - DNA, 19 bp, Mus musculus
  siRNA target sequence for Spic (NM_011461.2,198-216).
catattgatccaacaatca

SEQ ID NO: 448651 - DNA, 19 bp, Mus musculus
  siRNA target sequence for Spic (NM_011461.2,217-235).
gctggagaaagtcaatact

SEQ ID NO: 448652 - DNA, 19 bp, Mus musculus
  siRNA target sequence for Spic (NM_011461.2,227-245).
gtcaatactcctcagaaaa

SEQ ID NO: 448653 - DNA, 19 bp, Mus musculus
  siRNA target sequence for Spic (NM_011461.2,248-266).
gaaattacatggctatcat

SEQ ID NO: 448654 - DNA, 19 bp, Mus musculus
  siRNA target sequence for Spic (NM_011461.2,287-305).
gaggcaacgctaactacta

SEQ ID NO: 448655 - DNA, 19 bp, Mus musculus
  siRNA target sequence for Spic (NM_011461.2,320-338).
cagagaaccccctctatga

SEQ ID NO: 448656 - DNA, 19 bp, Mus musculus
  siRNA target sequence for Spic (NM_011461.2,337-355).
gactggagaggtgtaacaa

SEQ ID NO: 448657 - DNA, 19 bp, Mus musculus
  siRNA target sequence for Spic (NM_011461.2,342-360).
gagaggtgtaacaaatggt

SEQ ID NO: 448658 - DNA, 19 bp, Mus musculus
  siRNA target sequence for Spic (NM_011461.2,393-411).
ccaatccgtacagaacata

SEQ ID NO: 448659 - DNA, 19 bp, Mus musculus
  siRNA target sequence for Spic (NM_011461.2,478-496).
cggctgtttgaataccttt

SEQ ID NO: 448660 - DNA, 19 bp, Mus musculus
  siRNA target sequence for Spic (NM_011461.2,498-516).
cgaatccctgtgcaattca

SEQ ID NO: 448661 - DNA, 19 bp, Mus musculus
  siRNA target sequence for Spic (NM_011461.2,530-548).
gtattcagtgggttgacaa

SEQ ID NO: 448662 - DNA, 19 bp, Mus musculus
  siRNA target sequence for Spic (NM_011461.2,551-569).
ccagaggcatctttcagtt

SEQ ID NO: 448663 - DNA, 19 bp, Mus musculus
  siRNA target sequence for Spic (NM_011461.2,652-670).
gccagagccctgaggaatt

SEQ ID NO: 448664 - DNA, 19 bp, Mus musculus
  siRNA target sequence for Spic (NM_011461.2,674-692).
ccagaactggggagatcat

SEQ ID NO: 448665 - DNA, 19 bp, Mus musculus
  siRNA target sequence for Spic (NM_011461.2,809-827).
gctacctcagtttaaacca

SEQ ID NO: 448666 - DNA, 19 bp, Mus musculus
  siRNA target sequence for Spic (NM_011461.2,826-844).
cactggaatgcaaatcact

SEQ ID NO: 448667 - DNA, 19 bp, Mus musculus
  siRNA target sequence for Srebf1 (NM_011480.1,361-379).
cggcacccgctgctttaaa

SEQ ID NO: 448668 - DNA, 19 bp, Mus musculus
  siRNA target sequence for Srebf1 (NM_011480.1,366-384).
cccgctgctttaaagatgt

SEQ ID NO: 448669 - DNA, 19 bp, Mus musculus
  siRNA target sequence for Srebf1 (NM_011480.1,575-593).
gacccttccaggaaacact

SEQ ID NO: 448670 - DNA, 19 bp, Mus musculus
  siRNA target sequence for Srebf1 (NM_011480.1,917-935).
ggccacagtacctttggtt

SEQ ID NO: 448671 - DNA, 19 bp, Mus musculus
  siRNA target sequence for Srebf1 (NM_011480.1,1046-1064).
ctaccggtcttctatcaat

SEQ ID NO: 448672 - DNA, 19 bp, Mus musculus
  siRNA target sequence for Srebf1 (NM_011480.1,1202-1220).
cctacgaagtgcacacaaa

SEQ ID NO: 448673 - DNA, 19 bp, Mus musculus
  siRNA target sequence for Srebf1 (NM_011480.1,1352-1370).
gagtagccccttgtctttt

SEQ ID NO: 448674 - DNA, 19 bp, Mus musculus
  siRNA target sequence for Srebf1 (NM_011480.1,1586-1604).
gggtacacaccgtagttct

SEQ ID NO: 448675 - DNA, 19 bp, Mus musculus
  siRNA target sequence for Srebf1 (NM_011480.1,1684-1702).
ccaatggactactagtgtt

SEQ ID NO: 448676 - DNA, 19 bp, Mus musculus
  siRNA target sequence for Srebf1 (NM_011480.1,1775-1793).
ctggagacatcgcaaacaa

SEQ ID NO: 448677 - DNA, 19 bp, Mus musculus
  siRNA target sequence for Srebf1 (NM_011480.1,2029-2047).
gggatgcggctgttgtcta

SEQ ID NO: 448678 - DNA, 19 bp, Mus musculus
  siRNA target sequence for Srebf1 (NM_011480.1,2034-2052).
gcggctgttgtctaccata

SEQ ID NO: 448679 - DNA, 19 bp, Mus musculus
  siRNA target sequence for Srebf1 (NM_011480.1,2035-2053).
cggctgttgtctaccataa

SEQ ID NO: 448680 - DNA, 19 bp, Mus musculus
  siRNA target sequence for Srebf1 (NM_011480.1,2437-2455).
ggctattccgtgaacatct

SEQ ID NO: 448681 - DNA, 19 bp, Mus musculus
  siRNA target sequence for Srebf1 (NM_011480.1,2457-2475).
ctagagcgagcgttgaact

SEQ ID NO: 448682 - DNA, 19 bp, Mus musculus
  siRNA target sequence for Srebf1 (NM_011480.1,2460-2478).
gagcgagcgttgaactgta

SEQ ID NO: 448683 - DNA, 19 bp, Mus musculus
  siRNA target sequence for Srebf1 (NM_011480.1,2535-2553).
ggatatctgcagttgctaa

SEQ ID NO: 448684 - DNA, 19 bp, Mus musculus
  siRNA target sequence for Srebf1 (NM_011480.1,2536-2554).
gatatctgcagttgctaaa

SEQ ID NO: 448685 - DNA, 19 bp, Mus musculus
  siRNA target sequence for Srebf1 (NM_011480.1,2549-2567).
gctaaatagctgttctgat

SEQ ID NO: 448686 - DNA, 19 bp, Mus musculus
  siRNA target sequence for Srebf1 (NM_011480.1,2680-2698).
ggctgaggcgggatgaaga

SEQ ID NO: 448687 - DNA, 19 bp, Mus musculus
  siRNA target sequence for Srebf1 (NM_011480.1,2817-2835).
cacagaaaggtggaatcta

SEQ ID NO: 448688 - DNA, 19 bp, Mus musculus
  siRNA target sequence for Srebf1 (NM_011480.1,2905-2923).
ctggcagttccattgacaa

SEQ ID NO: 448689 - DNA, 19 bp, Mus musculus
  siRNA target sequence for Srebf1 (NM_011480.1,3050-3068).
ggagctgcgtggtttccaa

SEQ ID NO: 448690 - DNA, 19 bp, Mus musculus
  siRNA target sequence for Srebf1 (NM_011480.1,3115-3133).
ctatgaggagggtattcct

SEQ ID NO: 448691 - DNA, 19 bp, Mus musculus
  siRNA target sequence for Srebf1 (NM_011480.1,3367-3385).
cggcacgcaccgtagagaa

SEQ ID NO: 448692 - DNA, 19 bp, Mus musculus
  siRNA target sequence for Srf (NM_020493.1,813-831).
ggaagacgggcatcatgaa

SEQ ID NO: 448693 - DNA, 19 bp, Mus musculus
  siRNA target sequence for Srf (NM_020493.1,888-906).
gtgagacaggccatgtgta

SEQ ID NO: 448694 - DNA, 19 bp, Mus musculus
  siRNA target sequence for Srf (NM_020493.1,1015-1033).
cacagaccagagaatgagt

SEQ ID NO: 448695 - DNA, 19 bp, Mus musculus
  siRNA target sequence for Srf (NM_020493.1,1280-1298).
gggactgtgctcaagagta

SEQ ID NO: 448696 - DNA, 19 bp, Mus musculus
  siRNA target sequence for Srf (NM_020493.1,1554-1572).
gtccccatgcagtgatgta

SEQ ID NO: 448697 - DNA, 19 bp, Mus musculus
  siRNA target sequence for St18 (NM_173868.1,400-418).
gaagataaaacgttgcata

SEQ ID NO: 448698 - DNA, 19 bp, Mus musculus
  siRNA target sequence for St18 (NM_173868.1,410-428).
cgttgcatactctttcaaa

SEQ ID NO: 448699 - DNA, 19 bp, Mus musculus
  siRNA target sequence for St18 (NM_173868.1,411-429).
gttgcatactctttcaaaa

SEQ ID NO: 448700 - DNA, 19 bp, Mus musculus
  siRNA target sequence for St18 (NM_173868.1,519-537).
ggcatcgggagttccaatt

SEQ ID NO: 448701 - DNA, 19 bp, Mus musculus
  siRNA target sequence for St18 (NM_173868.1,520-538).
gcatcgggagttccaatta

SEQ ID NO: 448702 - DNA, 19 bp, Mus musculus
  siRNA target sequence for St18 (NM_173868.1,521-539).
catcgggagttccaattaa

SEQ ID NO: 448703 - DNA, 19 bp, Mus musculus
  siRNA target sequence for St18 (NM_173868.1,524-542).
cgggagttccaattaacaa

SEQ ID NO: 448704 - DNA, 19 bp, Mus musculus
  siRNA target sequence for St18 (NM_173868.1,526-544).
ggagttccaattaacaaga

SEQ ID NO: 448705 - DNA, 19 bp, Mus musculus
  siRNA target sequence for St18 (NM_173868.1,546-564).
gaaatctctgctaatgaaa

SEQ ID NO: 448706 - DNA, 19 bp, Mus musculus
  siRNA target sequence for St18 (NM_173868.1,648-666).
ccatgccactgcagatgaa

SEQ ID NO: 448707 - DNA, 19 bp, Mus musculus
  siRNA target sequence for St18 (NM_173868.1,652-670).
gccactgcagatgaaatca

SEQ ID NO: 448708 - DNA, 19 bp, Mus musculus
  siRNA target sequence for St18 (NM_173868.1,664-682).
gaaatcatggtaaaatcca

SEQ ID NO: 448709 - DNA, 19 bp, Mus musculus
  siRNA target sequence for St18 (NM_173868.1,751-769).
ccagagctcatggtcaaat

SEQ ID NO: 448710 - DNA, 19 bp, Mus musculus
  siRNA target sequence for St18 (NM_173868.1,836-854).
gcagcagtatccagtcttt

SEQ ID NO: 448711 - DNA, 19 bp, Mus musculus
  siRNA target sequence for St18 (NM_173868.1,837-855).
cagcagtatccagtcttta

SEQ ID NO: 448712 - DNA, 19 bp, Mus musculus
  siRNA target sequence for St18 (NM_173868.1,839-857).
gcagtatccagtctttaaa

SEQ ID NO: 448713 - DNA, 19 bp, Mus musculus
  siRNA target sequence for St18 (NM_173868.1,900-918).
cgacaatggaagagacaaa

SEQ ID NO: 448714 - DNA, 19 bp, Mus musculus
  siRNA target sequence for St18 (NM_173868.1,1228-1246).
gagagcctggccacagtaa

SEQ ID NO: 448715 - DNA, 19 bp, Mus musculus
  siRNA target sequence for St18 (NM_173868.1,1333-1351).
gtcttccatcacacttata

SEQ ID NO: 448716 - DNA, 19 bp, Mus musculus
  siRNA target sequence for St18 (NM_173868.1,1393-1411).
cggaggcaacctagagtta

SEQ ID NO: 448717 - DNA, 19 bp, Mus musculus
  siRNA target sequence for St18 (NM_173868.1,1408-1426).
gttactgatgccaatggaa

SEQ ID NO: 448718 - DNA, 19 bp, Mus musculus
  siRNA target sequence for St18 (NM_173868.1,1424-1442).
gaagacaaatctttactaa

SEQ ID NO: 448719 - DNA, 19 bp, Mus musculus
  siRNA target sequence for St18 (NM_173868.1,1434-1452).
ctttactaataaacattca

SEQ ID NO: 448720 - DNA, 19 bp, Mus musculus
  siRNA target sequence for St18 (NM_173868.1,1566-1584).
gcgagttcctctggaaatt

SEQ ID NO: 448721 - DNA, 19 bp, Mus musculus
  siRNA target sequence for St18 (NM_173868.1,1719-1737).
ccaggacaaaagtcaactt

SEQ ID NO: 448722 - DNA, 19 bp, Mus musculus
  siRNA target sequence for St18 (NM_173868.1,1722-1740).
ggacaaaagtcaacttgat

SEQ ID NO: 448723 - DNA, 19 bp, Mus musculus
  siRNA target sequence for St18 (NM_173868.1,1768-1786).
caggcacacagggtgaatt

SEQ ID NO: 448724 - DNA, 19 bp, Mus musculus
  siRNA target sequence for St18 (NM_173868.1,1813-1831).
cgctcacatgccatcactt

SEQ ID NO: 448725 - DNA, 19 bp, Mus musculus
  siRNA target sequence for St18 (NM_173868.1,1841-1859).
cctctgcatcaaaagaaca

SEQ ID NO: 448726 - DNA, 19 bp, Mus musculus
  siRNA target sequence for St18 (NM_173868.1,1870-1888).
gggaaagtaccgtttgatt

SEQ ID NO: 448727 - DNA, 19 bp, Mus musculus
  siRNA target sequence for St18 (NM_173868.1,1871-1889).
ggaaagtaccgtttgatta

SEQ ID NO: 448728 - DNA, 19 bp, Mus musculus
  siRNA target sequence for St18 (NM_173868.1,1872-1890).
gaaagtaccgtttgattat

SEQ ID NO: 448729 - DNA, 19 bp, Mus musculus
  siRNA target sequence for St18 (NM_173868.1,1895-1913).
gttttgatgcacaagtatt

SEQ ID NO: 448730 - DNA, 19 bp, Mus musculus
  siRNA target sequence for St18 (NM_173868.1,2104-2122).
gctgccatcctgaaccttt

SEQ ID NO: 448731 - DNA, 19 bp, Mus musculus
  siRNA target sequence for St18 (NM_173868.1,2220-2238).
ggacttaagcatgaaaaaa

SEQ ID NO: 448732 - DNA, 19 bp, Mus musculus
  siRNA target sequence for St18 (NM_173868.1,2242-2260).
cgaatccacgacaagtcta

SEQ ID NO: 448733 - DNA, 19 bp, Mus musculus
  siRNA target sequence for St18 (NM_173868.1,2274-2292).
ctcacctactacaattaca

SEQ ID NO: 448734 - DNA, 19 bp, Mus musculus
  siRNA target sequence for St18 (NM_173868.1,2375-2393).
ggaatgtgcccatcaacta

SEQ ID NO: 448735 - DNA, 19 bp, Mus musculus
  siRNA target sequence for St18 (NM_173868.1,2376-2394).
gaatgtgcccatcaactat

SEQ ID NO: 448736 - DNA, 19 bp, Mus musculus
  siRNA target sequence for St18 (NM_173868.1,2380-2398).
gtgcccatcaactatagca

SEQ ID NO: 448737 - DNA, 19 bp, Mus musculus
  siRNA target sequence for St18 (NM_173868.1,2383-2401).
cccatcaactatagcaaat

SEQ ID NO: 448738 - DNA, 19 bp, Mus musculus
  siRNA target sequence for St18 (NM_173868.1,2505-2523).
gcccaagctgcatacaaga

SEQ ID NO: 448739 - DNA, 19 bp, Mus musculus
  siRNA target sequence for St18 (NM_173868.1,2508-2526).
caagctgcatacaagagat

SEQ ID NO: 448740 - DNA, 19 bp, Mus musculus
  siRNA target sequence for St18 (NM_173868.1,2527-2545).
ctcaagaaagaattaatca

SEQ ID NO: 448741 - DNA, 19 bp, Mus musculus
  siRNA target sequence for St18 (NM_173868.1,2577-2595).
ccatgtcacaggcaactat

SEQ ID NO: 448742 - DNA, 19 bp, Mus musculus
  siRNA target sequence for St18 (NM_173868.1,2618-2636).
gatgtcctctagcagataa

SEQ ID NO: 448743 - DNA, 19 bp, Mus musculus
  siRNA target sequence for St18 (NM_173868.1,2778-2796).
caaaatgaccccaacaaaa

SEQ ID NO: 448744 - DNA, 19 bp, Mus musculus
  siRNA target sequence for St18 (NM_173868.1,2842-2860).
gacggccaaggccacatat

SEQ ID NO: 448745 - DNA, 19 bp, Mus musculus
  siRNA target sequence for St18 (NM_173868.1,2851-2869).
ggccacatatcaggtaaat

SEQ ID NO: 448746 - DNA, 19 bp, Mus musculus
  siRNA target sequence for St18 (NM_173868.1,2856-2874).
catatcaggtaaatacaca

SEQ ID NO: 448747 - DNA, 19 bp, Mus musculus
  siRNA target sequence for St18 (NM_173868.1,3010-3028).
ggtcatgtaaacaacgttt

SEQ ID NO: 448748 - DNA, 19 bp, Mus musculus
  siRNA target sequence for St18 (NM_173868.1,3011-3029).
gtcatgtaaacaacgtttt

SEQ ID NO: 448749 - DNA, 19 bp, Mus musculus
  siRNA target sequence for St18 (NM_173868.1,3016-3034).
gtaaacaacgtttttgtca

SEQ ID NO: 448750 - DNA, 19 bp, Mus musculus
  siRNA target sequence for St18 (NM_173868.1,3033-3051).
cacccacagaagcttatct

SEQ ID NO: 448751 - DNA, 19 bp, Mus musculus
  siRNA target sequence for St18 (NM_173868.1,3059-3077).
ctcttaatgcacaagctat

SEQ ID NO: 448752 - DNA, 19 bp, Mus musculus
  siRNA target sequence for St18 (NM_173868.1,3132-3150).
gggtattgatggtgatgaa

SEQ ID NO: 448753 - DNA, 19 bp, Mus musculus
  siRNA target sequence for St18 (NM_173868.1,3374-3392).
cacagatggggcctatcaa

SEQ ID NO: 448754 - DNA, 19 bp, Mus musculus
  siRNA target sequence for St18 (NM_173868.1,3385-3403).
cctatcaatgagcagaatt

SEQ ID NO: 448755 - DNA, 19 bp, Mus musculus
  siRNA target sequence for St18 (NM_173868.1,3396-3414).
gcagaattttgaagcatat

SEQ ID NO: 448756 - DNA, 19 bp, Mus musculus
  siRNA target sequence for St18 (NM_173868.1,3456-3474).
ctattccccagaatgcaaa

SEQ ID NO: 448757 - DNA, 19 bp, Mus musculus
  siRNA target sequence for Stat1 (NM_009283.2,461-479).
ggagcacgctgcctatgat

SEQ ID NO: 448758 - DNA, 19 bp, Mus musculus
  siRNA target sequence for Stat1 (NM_009283.2,530-548).
ccagtacagccgcttttct

SEQ ID NO: 448759 - DNA, 19 bp, Mus musculus
  siRNA target sequence for Stat1 (NM_009283.2,541-559).
gcttttctctggagaataa

SEQ ID NO: 448760 - DNA, 19 bp, Mus musculus
  siRNA target sequence for Stat1 (NM_009283.2,549-567).
ctggagaataatttcttgt

SEQ ID NO: 448761 - DNA, 19 bp, Mus musculus
  siRNA target sequence for Stat1 (NM_009283.2,583-601).
ggaaaagcaagcgtaatct

SEQ ID NO: 448762 - DNA, 19 bp, Mus musculus
  siRNA target sequence for Stat1 (NM_009283.2,594-612).
cgtaatctccaggataact

SEQ ID NO: 448763 - DNA, 19 bp, Mus musculus
  siRNA target sequence for Stat1 (NM_009283.2,595-613).
gtaatctccaggataactt

SEQ ID NO: 448764 - DNA, 19 bp, Mus musculus
  siRNA target sequence for Stat1 (NM_009283.2,627-645).
gtacagatgtccatgatca

SEQ ID NO: 448765 - DNA, 19 bp, Mus musculus
  siRNA target sequence for Stat1 (NM_009283.2,630-648).
cagatgtccatgatcatct

SEQ ID NO: 448766 - DNA, 19 bp, Mus musculus
  siRNA target sequence for Stat1 (NM_009283.2,704-722).
ggcccaggagggaaatatt

SEQ ID NO: 448767 - DNA, 19 bp, Mus musculus
  siRNA target sequence for Stat1 (NM_009283.2,725-743).
gaacactgtgatgttagat

SEQ ID NO: 448768 - DNA, 19 bp, Mus musculus
  siRNA target sequence for Stat1 (NM_009283.2,728-746).
cactgtgatgttagataaa

SEQ ID NO: 448769 - DNA, 19 bp, Mus musculus
  siRNA target sequence for Stat1 (NM_009283.2,730-748).
ctgtgatgttagataaaca

SEQ ID NO: 448770 - DNA, 19 bp, Mus musculus
  siRNA target sequence for Stat1 (NM_009283.2,732-750).
gtgatgttagataaacaga

SEQ ID NO: 448771 - DNA, 19 bp, Mus musculus
  siRNA target sequence for Stat1 (NM_009283.2,815-833).
gaccctagaagaattacaa

SEQ ID NO: 448772 - DNA, 19 bp, Mus musculus
  siRNA target sequence for Stat1 (NM_009283.2,893-911).
ggcgaagagcgaccaaaaa

SEQ ID NO: 448773 - DNA, 19 bp, Mus musculus
  siRNA target sequence for Stat1 (NM_009283.2,924-942).
ctgctccacaagatgtttt

SEQ ID NO: 448774 - DNA, 19 bp, Mus musculus
  siRNA target sequence for Stat1 (NM_009283.2,968-986).
gataattcacaaaatcaga

SEQ ID NO: 448775 - DNA, 19 bp, Mus musculus
  siRNA target sequence for Stat1 (NM_009283.2,1010-1028).
cactcagaacactctgatt

SEQ ID NO: 448776 - DNA, 19 bp, Mus musculus
  siRNA target sequence for Stat1 (NM_009283.2,1012-1030).
ctcagaacactctgattaa

SEQ ID NO: 448777 - DNA, 19 bp, Mus musculus
  siRNA target sequence for Stat1 (NM_009283.2,1148-1166).
gatccgtcagcagcttaaa

SEQ ID NO: 448778 - DNA, 19 bp, Mus musculus
  siRNA target sequence for Stat1 (NM_009283.2,1200-1218).
gagcccgaccctattacaa

SEQ ID NO: 448779 - DNA, 19 bp, Mus musculus
  siRNA target sequence for Stat1 (NM_009283.2,1202-1220).
gcccgaccctattacaaaa

SEQ ID NO: 448780 - DNA, 19 bp, Mus musculus
  siRNA target sequence for Stat1 (NM_009283.2,1203-1221).
cccgaccctattacaaaaa

SEQ ID NO: 448781 - DNA, 19 bp, Mus musculus
  siRNA target sequence for Stat1 (NM_009283.2,1204-1222).
ccgaccctattacaaaaaa

SEQ ID NO: 448782 - DNA, 19 bp, Mus musculus
  siRNA target sequence for Stat1 (NM_009283.2,1369-1387).
gactgttggtgaaattgca

SEQ ID NO: 448783 - DNA, 19 bp, Mus musculus
  siRNA target sequence for Stat1 (NM_009283.2,1391-1409).
gctgaactataacttgaaa

SEQ ID NO: 448784 - DNA, 19 bp, Mus musculus
  siRNA target sequence for Stat1 (NM_009283.2,1412-1430).
gaaagtctcatttgacaaa

SEQ ID NO: 448785 - DNA, 19 bp, Mus musculus
  siRNA target sequence for Stat1 (NM_009283.2,1478-1496).
cttgggtacgcacacaaaa

SEQ ID NO: 448786 - DNA, 19 bp, Mus musculus
  siRNA target sequence for Stat1 (NM_009283.2,1593-1611).
gaggggcctctcattgtca

SEQ ID NO: 448787 - DNA, 19 bp, Mus musculus
  siRNA target sequence for Stat1 (NM_009283.2,1604-1622).
cattgtcaccgaagaactt

SEQ ID NO: 448788 - DNA, 19 bp, Mus musculus
  siRNA target sequence for Stat1 (NM_009283.2,1838-1856).
gagttggcagttttcatca

SEQ ID NO: 448789 - DNA, 19 bp, Mus musculus
  siRNA target sequence for Stat1 (NM_009283.2,1924-1942).
ctggccctgatggtcttat

SEQ ID NO: 448790 - DNA, 19 bp, Mus musculus
  siRNA target sequence for Stat1 (NM_009283.2,1929-1947).
cctgatggtcttattccat

SEQ ID NO: 448791 - DNA, 19 bp, Mus musculus
  siRNA target sequence for Stat1 (NM_009283.2,2121-2139).
gggacgttcctgcttagat

SEQ ID NO: 448792 - DNA, 19 bp, Mus musculus
  siRNA target sequence for Stat1 (NM_009283.2,2122-2140).
ggacgttcctgcttagatt

SEQ ID NO: 448793 - DNA, 19 bp, Mus musculus
  siRNA target sequence for Stat1 (NM_009283.2,2126-2144).
gttcctgcttagattcagt

SEQ ID NO: 448794 - DNA, 19 bp, Mus musculus
  siRNA target sequence for Stat1 (NM_009283.2,2223-2241).
gtggagccctacacgaaaa

SEQ ID NO: 448795 - DNA, 19 bp, Mus musculus
  siRNA target sequence for Stat1 (NM_009283.2,2228-2246).
gccctacacgaaaaaagaa

SEQ ID NO: 448796 - DNA, 19 bp, Mus musculus
  siRNA target sequence for Stat1 (NM_009283.2,2231-2249).
ctacacgaaaaaagaactt

SEQ ID NO: 448797 - DNA, 19 bp, Mus musculus
  siRNA target sequence for Stat1 (NM_009283.2,2291-2309).
catggctgccgagaacata

SEQ ID NO: 448798 - DNA, 19 bp, Mus musculus
  siRNA target sequence for Stat1 (NM_009283.2,2300-2318).
cgagaacataccagagaat

SEQ ID NO: 448799 - DNA, 19 bp, Mus musculus
  siRNA target sequence for Stat1 (NM_009283.2,2327-2345).
gtatctgtaccccaatatt

SEQ ID NO: 448800 - DNA, 19 bp, Mus musculus
  siRNA target sequence for Stat1 (NM_009283.2,2331-2349).
ctgtaccccaatattgaca

SEQ ID NO: 448801 - DNA, 19 bp, Mus musculus
  siRNA target sequence for Stat1 (NM_009283.2,2333-2351).
gtaccccaatattgacaaa

SEQ ID NO: 448802 - DNA, 19 bp, Mus musculus
  siRNA target sequence for Stat1 (NM_009283.2,2357-2375).
cgcctttgggaagtattat

SEQ ID NO: 448803 - DNA, 19 bp, Mus musculus
  siRNA target sequence for Stat1 (NM_009283.2,2358-2376).
gcctttgggaagtattatt

SEQ ID NO: 448804 - DNA, 19 bp, Mus musculus
  siRNA target sequence for Stat1 (NM_009283.2,2419-2437).
ctaagcgaactggatacat

SEQ ID NO: 448805 - DNA, 19 bp, Mus musculus
  siRNA target sequence for Stat2 (NM_019963.1,323-341).
gccaacatgctatacttca

SEQ ID NO: 448806 - DNA, 19 bp, Mus musculus
  siRNA target sequence for Stat2 (NM_019963.1,383-401).
gactccaatcactttttat

SEQ ID NO: 448807 - DNA, 19 bp, Mus musculus
  siRNA target sequence for Stat2 (NM_019963.1,404-422).
cagcataacttgcgaaaat

SEQ ID NO: 448808 - DNA, 19 bp, Mus musculus
  siRNA target sequence for Stat2 (NM_019963.1,407-425).
cataacttgcgaaaattca

SEQ ID NO: 448809 - DNA, 19 bp, Mus musculus
  siRNA target sequence for Stat2 (NM_019963.1,494-512).
gaagagcaaaggattctga

SEQ ID NO: 448810 - DNA, 19 bp, Mus musculus
  siRNA target sequence for Stat2 (NM_019963.1,580-598).
gcttgagattgaaaatcga

SEQ ID NO: 448811 - DNA, 19 bp, Mus musculus
  siRNA target sequence for Stat2 (NM_019963.1,606-624).
gtttacatgtggacattga

SEQ ID NO: 448812 - DNA, 19 bp, Mus musculus
  siRNA target sequence for Stat2 (NM_019963.1,762-780).
ccaacaaagtcgacagaat

SEQ ID NO: 448813 - DNA, 19 bp, Mus musculus
  siRNA target sequence for Stat2 (NM_019963.1,766-784).
caaagtcgacagaatgaga

SEQ ID NO: 448814 - DNA, 19 bp, Mus musculus
  siRNA target sequence for Stat2 (NM_019963.1,809-827).
ggactggttggccgattaa

SEQ ID NO: 448815 - DNA, 19 bp, Mus musculus
  siRNA target sequence for Stat2 (NM_019963.1,812-830).
ctggttggccgattaacca

SEQ ID NO: 448816 - DNA, 19 bp, Mus musculus
  siRNA target sequence for Stat2 (NM_019963.1,828-846).
ccaccctggtcgacctatt

SEQ ID NO: 448817 - DNA, 19 bp, Mus musculus
  siRNA target sequence for Stat2 (NM_019963.1,831-849).
ccctggtcgacctattgct

SEQ ID NO: 448818 - DNA, 19 bp, Mus musculus
  siRNA target sequence for Stat2 (NM_019963.1,945-963).
cggctggagcaaagttctt

SEQ ID NO: 448819 - DNA, 19 bp, Mus musculus
  siRNA target sequence for Stat2 (NM_019963.1,1018-1036).
gtataagggtgacatgttt

SEQ ID NO: 448820 - DNA, 19 bp, Mus musculus
  siRNA target sequence for Stat2 (NM_019963.1,1093-1111).
ccaaaggtcctttgtagta

SEQ ID NO: 448821 - DNA, 19 bp, Mus musculus
  siRNA target sequence for Stat2 (NM_019963.1,1238-1256).
gtctctgtcgacaggaatt

SEQ ID NO: 448822 - DNA, 19 bp, Mus musculus
  siRNA target sequence for Stat2 (NM_019963.1,1242-1260).
ctgtcgacaggaattcaga

SEQ ID NO: 448823 - DNA, 19 bp, Mus musculus
  siRNA target sequence for Stat2 (NM_019963.1,1246-1264).
cgacaggaattcagactta

SEQ ID NO: 448824 - DNA, 19 bp, Mus musculus
  siRNA target sequence for Stat2 (NM_019963.1,1274-1292).
cggaagttcaacattctga

SEQ ID NO: 448825 - DNA, 19 bp, Mus musculus
  siRNA target sequence for Stat2 (NM_019963.1,1419-1437).
cagtgacagaggagttaca

SEQ ID NO: 448826 - DNA, 19 bp, Mus musculus
  siRNA target sequence for Stat2 (NM_019963.1,1554-1572).
ccattctctggttcaacat

SEQ ID NO: 448827 - DNA, 19 bp, Mus musculus
  siRNA target sequence for Stat2 (NM_019963.1,1657-1675).
gcagttctcctcttacgtt

SEQ ID NO: 448828 - DNA, 19 bp, Mus musculus
  siRNA target sequence for Stat2 (NM_019963.1,1677-1695).
gccgaggcctcgattctga

SEQ ID NO: 448829 - DNA, 19 bp, Mus musculus
  siRNA target sequence for Stat2 (NM_019963.1,1713-1731).
gaaccaagctgtttggaaa

SEQ ID NO: 448830 - DNA, 19 bp, Mus musculus
  siRNA target sequence for Stat2 (NM_019963.1,1756-1774).
gttgtcctgggtagacttt

SEQ ID NO: 448831 - DNA, 19 bp, Mus musculus
  siRNA target sequence for Stat2 (NM_019963.1,1761-1779).
cctgggtagacttttgcaa

SEQ ID NO: 448832 - DNA, 19 bp, Mus musculus
  siRNA target sequence for Stat2 (NM_019963.1,1812-1830).
ggacctggctggacaaaat

SEQ ID NO: 448833 - DNA, 19 bp, Mus musculus
  siRNA target sequence for Stat2 (NM_019963.1,1910-1928).
cgcagactgctgaagaaga

SEQ ID NO: 448834 - DNA, 19 bp, Mus musculus
  siRNA target sequence for Stat2 (NM_019963.1,1949-1967).
ctgcgcttcagtgaaactt

SEQ ID NO: 448835 - DNA, 19 bp, Mus musculus
  siRNA target sequence for Stat2 (NM_019963.1,1951-1969).
gcgcttcagtgaaacttct

SEQ ID NO: 448836 - DNA, 19 bp, Mus musculus
  siRNA target sequence for Stat2 (NM_019963.1,1954-1972).
cttcagtgaaacttctgaa

SEQ ID NO: 448837 - DNA, 19 bp, Mus musculus
  siRNA target sequence for Stat2 (NM_019963.1,1970-1988).
gaagggggcattacttgtt

SEQ ID NO: 448838 - DNA, 19 bp, Mus musculus
  siRNA target sequence for Stat2 (NM_019963.1,1999-2017).
gcaccaggatgacgataaa

SEQ ID NO: 448839 - DNA, 19 bp, Mus musculus
  siRNA target sequence for Stat2 (NM_019963.1,2009-2027).
gacgataaagtcgaaatct

SEQ ID NO: 448840 - DNA, 19 bp, Mus musculus
  siRNA target sequence for Stat2 (NM_019963.1,2012-2030).
gataaagtcgaaatctact

SEQ ID NO: 448841 - DNA, 19 bp, Mus musculus
  siRNA target sequence for Stat2 (NM_019963.1,2176-2194).
gtgttactaccaggaaaaa

SEQ ID NO: 448842 - DNA, 19 bp, Mus musculus
  siRNA target sequence for Stat2 (NM_019963.1,2178-2196).
gttactaccaggaaaaagt

SEQ ID NO: 448843 - DNA, 19 bp, Mus musculus
  siRNA target sequence for Stat2 (NM_019963.1,2236-2254).
cattgtgatctctaacaga

SEQ ID NO: 448844 - DNA, 19 bp, Mus musculus
  siRNA target sequence for Stat2 (NM_019963.1,2298-2316).
cagagtccttagaagtgaa

SEQ ID NO: 448845 - DNA, 19 bp, Mus musculus
  siRNA target sequence for Stat2 (NM_019963.1,2771-2789).
gatctgaaaaaattaagca

SEQ ID NO: 448846 - DNA, 19 bp, Mus musculus
  siRNA target sequence for Stat2 (NM_019963.1,2787-2805).
gcaacccgagtactgaata

SEQ ID NO: 448847 - DNA, 19 bp, Mus musculus
  siRNA target sequence for Stat2 (NM_019963.1,2792-2810).
ccgagtactgaatacatca

SEQ ID NO: 448848 - DNA, 19 bp, Mus musculus
  siRNA target sequence for Stat2 (NM_019963.1,2868-2886).
cctaccacagccattttga

SEQ ID NO: 448849 - DNA, 19 bp, Mus musculus
  siRNA target sequence for Stat3 (NM_011486.2,279-297).
gttcctggcaccttggatt

SEQ ID NO: 448850 - DNA, 19 bp, Mus musculus
  siRNA target sequence for Stat3 (NM_011486.2,342-360).
cacgttggtgtttcataat

SEQ ID NO: 448851 - DNA, 19 bp, Mus musculus
  siRNA target sequence for Stat3 (NM_011486.2,370-388).
gaaattgaccagcaatata

SEQ ID NO: 448852 - DNA, 19 bp, Mus musculus
  siRNA target sequence for Stat3 (NM_011486.2,642-660).
gcgagtgcaggatctagaa

SEQ ID NO: 448853 - DNA, 19 bp, Mus musculus
  siRNA target sequence for Stat3 (NM_011486.2,691-709).
gacgactttgatttcaact

SEQ ID NO: 448854 - DNA, 19 bp, Mus musculus
  siRNA target sequence for Stat3 (NM_011486.2,961-979).
ctggaccgtctggaaaact

SEQ ID NO: 448855 - DNA, 19 bp, Mus musculus
  siRNA target sequence for Stat3 (NM_011486.2,978-996).
ctggataacttcattagca

SEQ ID NO: 448856 - DNA, 19 bp, Mus musculus
  siRNA target sequence for Stat3 (NM_011486.2,1009-1027).
cagacccgccaacaaatta

SEQ ID NO: 448857 - DNA, 19 bp, Mus musculus
  siRNA target sequence for Stat3 (NM_011486.2,1013-1031).
cccgccaacaaattaagaa

SEQ ID NO: 448858 - DNA, 19 bp, Mus musculus
  siRNA target sequence for Stat3 (NM_011486.2,1113-1131).
ggagctgttcagaaactta

SEQ ID NO: 448859 - DNA, 19 bp, Mus musculus
  siRNA target sequence for Stat3 (NM_011486.2,1114-1132).
gagctgttcagaaacttaa

SEQ ID NO: 448860 - DNA, 19 bp, Mus musculus
  siRNA target sequence for Stat3 (NM_011486.2,1213-1231).
cagtttaccacgaaagtca

SEQ ID NO: 448861 - DNA, 19 bp, Mus musculus
  siRNA target sequence for Stat3 (NM_011486.2,1228-1246).
gtcaggttgctggtcaaat

SEQ ID NO: 448862 - DNA, 19 bp, Mus musculus
  siRNA target sequence for Stat3 (NM_011486.2,1233-1251).
gttgctggtcaaatttcct

SEQ ID NO: 448863 - DNA, 19 bp, Mus musculus
  siRNA target sequence for Stat3 (NM_011486.2,1242-1260).
caaatttcctgagttgaat

SEQ ID NO: 448864 - DNA, 19 bp, Mus musculus
  siRNA target sequence for Stat3 (NM_011486.2,1254-1272).
gttgaattatcagcttaaa

SEQ ID NO: 448865 - DNA, 19 bp, Mus musculus
  siRNA target sequence for Stat3 (NM_011486.2,1257-1275).
gaattatcagcttaaaatt

SEQ ID NO: 448866 - DNA, 19 bp, Mus musculus
  siRNA target sequence for Stat3 (NM_011486.2,1279-1297).
gtgtgcattgataaagact

SEQ ID NO: 448867 - DNA, 19 bp, Mus musculus
  siRNA target sequence for Stat3 (NM_011486.2,1319-1337).
gagggtctcggaaatttaa

SEQ ID NO: 448868 - DNA, 19 bp, Mus musculus
  siRNA target sequence for Stat3 (NM_011486.2,1445-1463).
gaggccgtgccaattgtga

SEQ ID NO: 448869 - DNA, 19 bp, Mus musculus
  siRNA target sequence for Stat3 (NM_011486.2,1595-1613).
caaatgcttgggcatcaat

SEQ ID NO: 448870 - DNA, 19 bp, Mus musculus
  siRNA target sequence for Stat3 (NM_011486.2,1642-1660).
cccaagaacgtgaacttct

SEQ ID NO: 448871 - DNA, 19 bp, Mus musculus
  siRNA target sequence for Stat3 (NM_011486.2,1643-1661).
ccaagaacgtgaacttctt

SEQ ID NO: 448872 - DNA, 19 bp, Mus musculus
  siRNA target sequence for Stat3 (NM_011486.2,1662-1680).
cactaagccgccaattgga

SEQ ID NO: 448873 - DNA, 19 bp, Mus musculus
  siRNA target sequence for Stat3 (NM_011486.2,1821-1839).
ggctaaattctgcaaagaa

SEQ ID NO: 448874 - DNA, 19 bp, Mus musculus
  siRNA target sequence for Stat3 (NM_011486.2,1868-1886).
gggtctggctagacaatat

SEQ ID NO: 448875 - DNA, 19 bp, Mus musculus
  siRNA target sequence for Stat3 (NM_011486.2,1870-1888).
gtctggctagacaatatca

SEQ ID NO: 448876 - DNA, 19 bp, Mus musculus
  siRNA target sequence for Stat3 (NM_011486.2,1890-1908).
cgaccttgtgaaaaagtat

SEQ ID NO: 448877 - DNA, 19 bp, Mus musculus
  siRNA target sequence for Stat3 (NM_011486.2,1891-1909).
gaccttgtgaaaaagtata

SEQ ID NO: 448878 - DNA, 19 bp, Mus musculus
  siRNA target sequence for Stat3 (NM_011486.2,2032-2050).
ggaggggtcactttcactt

SEQ ID NO: 448879 - DNA, 19 bp, Mus musculus
  siRNA target sequence for Stat3 (NM_011486.2,2042-2060).
ctttcacttgggtggaaaa

SEQ ID NO: 448880 - DNA, 19 bp, Mus musculus
  siRNA target sequence for Stat3 (NM_011486.2,2113-2131).
cagctgaacaacatgtcat

SEQ ID NO: 448881 - DNA, 19 bp, Mus musculus
  siRNA target sequence for Stat3 (NM_011486.2,2129-2147).
catttgctgaaatcatcat

SEQ ID NO: 448882 - DNA, 19 bp, Mus musculus
  siRNA target sequence for Stat3 (NM_011486.2,2224-2242).
gaggcatttggaaagtact

SEQ ID NO: 448883 - DNA, 19 bp, Mus musculus
  siRNA target sequence for Stat4 (NM_011487.1,498-516).
ggaatcaagtccaacaatt

SEQ ID NO: 448884 - DNA, 19 bp, Mus musculus
  siRNA target sequence for Stat4 (NM_011487.1,499-517).
gaatcaagtccaacaatta

SEQ ID NO: 448885 - DNA, 19 bp, Mus musculus
  siRNA target sequence for Stat4 (NM_011487.1,526-544).
gtttttggagcaagtagat

SEQ ID NO: 448886 - DNA, 19 bp, Mus musculus
  siRNA target sequence for Stat4 (NM_011487.1,535-553).
gcaagtagatcagttctat

SEQ ID NO: 448887 - DNA, 19 bp, Mus musculus
  siRNA target sequence for Stat4 (NM_011487.1,620-638).
gtagcttctaacaatgaaa

SEQ ID NO: 448888 - DNA, 19 bp, Mus musculus
  siRNA target sequence for Stat4 (NM_011487.1,644-662).
gcaacaattctgcttcaaa

SEQ ID NO: 448889 - DNA, 19 bp, Mus musculus
  siRNA target sequence for Stat4 (NM_011487.1,653-671).
ctgcttcaaaacttactaa

SEQ ID NO: 448890 - DNA, 19 bp, Mus musculus
  siRNA target sequence for Stat4 (NM_011487.1,664-682).
cttactaatacaattggat

SEQ ID NO: 448891 - DNA, 19 bp, Mus musculus
  siRNA target sequence for Stat4 (NM_011487.1,718-736).
gctattgattcacaatcta

SEQ ID NO: 448892 - DNA, 19 bp, Mus musculus
  siRNA target sequence for Stat4 (NM_011487.1,730-748).
caatctaaagagaattaga

SEQ ID NO: 448893 - DNA, 19 bp, Mus musculus
  siRNA target sequence for Stat4 (NM_011487.1,763-781).
caagtttcatggaaatcca

SEQ ID NO: 448894 - DNA, 19 bp, Mus musculus
  siRNA target sequence for Stat4 (NM_011487.1,784-802).
gcatgtagctgtggtaatt

SEQ ID NO: 448895 - DNA, 19 bp, Mus musculus
  siRNA target sequence for Stat4 (NM_011487.1,791-809).
gctgtggtaatttcaaatt

SEQ ID NO: 448896 - DNA, 19 bp, Mus musculus
  siRNA target sequence for Stat4 (NM_011487.1,796-814).
ggtaatttcaaattgctta

SEQ ID NO: 448897 - DNA, 19 bp, Mus musculus
  siRNA target sequence for Stat4 (NM_011487.1,986-1004).
ctgcaagatgagtttgact

SEQ ID NO: 448898 - DNA, 19 bp, Mus musculus
  siRNA target sequence for Stat4 (NM_011487.1,997-1015).
gtttgactacaggtataaa

SEQ ID NO: 448899 - DNA, 19 bp, Mus musculus
  siRNA target sequence for Stat4 (NM_011487.1,1031-1049).
gatcagggtgacaaaaaca

SEQ ID NO: 448900 - DNA, 19 bp, Mus musculus
  siRNA target sequence for Stat4 (NM_011487.1,1034-1052).
cagggtgacaaaaacagta

SEQ ID NO: 448901 - DNA, 19 bp, Mus musculus
  siRNA target sequence for Stat4 (NM_011487.1,1187-1205).
gagctgcaggactggaaaa

SEQ ID NO: 448902 - DNA, 19 bp, Mus musculus
  siRNA target sequence for Stat4 (NM_011487.1,1277-1295).
ctactggcagagagtcttt

SEQ ID NO: 448903 - DNA, 19 bp, Mus musculus
  siRNA target sequence for Stat4 (NM_011487.1,1322-1340).
ctacaggagcaatctacta

SEQ ID NO: 448904 - DNA, 19 bp, Mus musculus
  siRNA target sequence for Stat4 (NM_011487.1,1325-1343).
caggagcaatctactaaaa

SEQ ID NO: 448905 - DNA, 19 bp, Mus musculus
  siRNA target sequence for Stat4 (NM_011487.1,1472-1490).
cagaggccgatggtactta

SEQ ID NO: 448906 - DNA, 19 bp, Mus musculus
  siRNA target sequence for Stat4 (NM_011487.1,1474-1492).
gaggccgatggtacttaaa

SEQ ID NO: 448907 - DNA, 19 bp, Mus musculus
  siRNA target sequence for Stat4 (NM_011487.1,1496-1514).
ctcattcagttcactgtaa

SEQ ID NO: 448908 - DNA, 19 bp, Mus musculus
  siRNA target sequence for Stat4 (NM_011487.1,1509-1527).
ctgtaaaactgagattact

SEQ ID NO: 448909 - DNA, 19 bp, Mus musculus
  siRNA target sequence for Stat4 (NM_011487.1,1511-1529).
gtaaaactgagattactaa

SEQ ID NO: 448910 - DNA, 19 bp, Mus musculus
  siRNA target sequence for Stat4 (NM_011487.1,1517-1535).
ctgagattactaataaaat

SEQ ID NO: 448911 - DNA, 19 bp, Mus musculus
  siRNA target sequence for Stat4 (NM_011487.1,1567-1585).
ggcgtccattgacaagaat

SEQ ID NO: 448912 - DNA, 19 bp, Mus musculus
  siRNA target sequence for Stat4 (NM_011487.1,1569-1587).
cgtccattgacaagaatgt

SEQ ID NO: 448913 - DNA, 19 bp, Mus musculus
  siRNA target sequence for Stat4 (NM_011487.1,1570-1588).
gtccattgacaagaatgtt

SEQ ID NO: 448914 - DNA, 19 bp, Mus musculus
  siRNA target sequence for Stat4 (NM_011487.1,1586-1604).
gtttcaactctaagcaata

SEQ ID NO: 448915 - DNA, 19 bp, Mus musculus
  siRNA target sequence for Stat4 (NM_011487.1,1593-1611).
ctctaagcaatagaagatt

SEQ ID NO: 448916 - DNA, 19 bp, Mus musculus
  siRNA target sequence for Stat4 (NM_011487.1,1622-1640).
ggaactcacgtcaaagcta

SEQ ID NO: 448917 - DNA, 19 bp, Mus musculus
  siRNA target sequence for Stat4 (NM_011487.1,1623-1641).
gaactcacgtcaaagctat

SEQ ID NO: 448918 - DNA, 19 bp, Mus musculus
  siRNA target sequence for Stat4 (NM_011487.1,1669-1687).
cctctcagtggagtttaga

SEQ ID NO: 448919 - DNA, 19 bp, Mus musculus
  siRNA target sequence for Stat4 (NM_011487.1,1757-1775).
gaggagttgcattccataa

SEQ ID NO: 448920 - DNA, 19 bp, Mus musculus
  siRNA target sequence for Stat4 (NM_011487.1,1760-1778).
gagttgcattccataacct

SEQ ID NO: 448921 - DNA, 19 bp, Mus musculus
  siRNA target sequence for Stat4 (NM_011487.1,1830-1848).
cattacctgtcgtgatgat

SEQ ID NO: 448922 - DNA, 19 bp, Mus musculus
  siRNA target sequence for Stat4 (NM_011487.1,1858-1876).
cagccaactacctaatgca

SEQ ID NO: 448923 - DNA, 19 bp, Mus musculus
  siRNA target sequence for Stat4 (NM_011487.1,1888-1906).
catttggtacaatgtatca

SEQ ID NO: 448924 - DNA, 19 bp, Mus musculus
  siRNA target sequence for Stat4 (NM_011487.1,1893-1911).
ggtacaatgtatcaactaa

SEQ ID NO: 448925 - DNA, 19 bp, Mus musculus
  siRNA target sequence for Stat4 (NM_011487.1,1976-1994).
gtgatgagctggcaatttt

SEQ ID NO: 448926 - DNA, 19 bp, Mus musculus
  siRNA target sequence for Stat4 (NM_011487.1,2003-2021).
gtcggtcgtggccttaatt

SEQ ID NO: 448927 - DNA, 19 bp, Mus musculus
  siRNA target sequence for Stat4 (NM_011487.1,2005-2023).
cggtcgtggccttaattca

SEQ ID NO: 448928 - DNA, 19 bp, Mus musculus
  siRNA target sequence for Stat4 (NM_011487.1,2007-2025).
gtcgtggccttaattcaga

SEQ ID NO: 448929 - DNA, 19 bp, Mus musculus
  siRNA target sequence for Stat4 (NM_011487.1,2055-2073).
cagttcagtctaactacaa

SEQ ID NO: 448930 - DNA, 19 bp, Mus musculus
  siRNA target sequence for Stat4 (NM_011487.1,2139-2157).
ggacttggcttgaagcaat

SEQ ID NO: 448931 - DNA, 19 bp, Mus musculus
  siRNA target sequence for Stat4 (NM_011487.1,2140-2158).
gacttggcttgaagcaata

SEQ ID NO: 448932 - DNA, 19 bp, Mus musculus
  siRNA target sequence for Stat4 (NM_011487.1,2142-2160).
cttggcttgaagcaatatt

SEQ ID NO: 448933 - DNA, 19 bp, Mus musculus
  siRNA target sequence for Stat4 (NM_011487.1,2153-2171).
gcaatattggacctaatta

SEQ ID NO: 448934 - DNA, 19 bp, Mus musculus
  siRNA target sequence for Stat4 (NM_011487.1,2154-2172).
caatattggacctaattaa

SEQ ID NO: 448935 - DNA, 19 bp, Mus musculus
  siRNA target sequence for Stat4 (NM_011487.1,2202-2220).
ggtacatcatgggatttgt

SEQ ID NO: 448936 - DNA, 19 bp, Mus musculus
  siRNA target sequence for Stat4 (NM_011487.1,2209-2227).
catgggatttgttagtaaa

SEQ ID NO: 448937 - DNA, 19 bp, Mus musculus
  siRNA target sequence for Stat4 (NM_011487.1,2238-2256).
ggcttctgctcaaagataa

SEQ ID NO: 448938 - DNA, 19 bp, Mus musculus
  siRNA target sequence for Stat4 (NM_011487.1,2260-2278).
gcctgggacatttttgtta

SEQ ID NO: 448939 - DNA, 19 bp, Mus musculus
  siRNA target sequence for Stat4 (NM_011487.1,2316-2334).
cctgggtggaccaatctga

SEQ ID NO: 448940 - DNA, 19 bp, Mus musculus
  siRNA target sequence for Stat4 (NM_011487.1,2317-2335).
ctgggtggaccaatctgaa

SEQ ID NO: 448941 - DNA, 19 bp, Mus musculus
  siRNA target sequence for Stat4 (NM_011487.1,2319-2337).
gggtggaccaatctgaaaa

SEQ ID NO: 448942 - DNA, 19 bp, Mus musculus
  siRNA target sequence for Stat4 (NM_011487.1,2320-2338).
ggtggaccaatctgaaaat

SEQ ID NO: 448943 - DNA, 19 bp, Mus musculus
  siRNA target sequence for Stat4 (NM_011487.1,2323-2341).
ggaccaatctgaaaatgga

SEQ ID NO: 448944 - DNA, 19 bp, Mus musculus
  siRNA target sequence for Stat4 (NM_011487.1,2347-2365).
gagattccactctgtagaa

SEQ ID NO: 448945 - DNA, 19 bp, Mus musculus
  siRNA target sequence for Stat4 (NM_011487.1,2358-2376).
ctgtagaaccctacaacaa

SEQ ID NO: 448946 - DNA, 19 bp, Mus musculus
  siRNA target sequence for Stat4 (NM_011487.1,2411-2429).
ctgcgagactacaaggtta

SEQ ID NO: 448947 - DNA, 19 bp, Mus musculus
  siRNA target sequence for Stat4 (NM_011487.1,2415-2433).
gagactacaaggttatcat

SEQ ID NO: 448948 - DNA, 19 bp, Mus musculus
  siRNA target sequence for Stat4 (NM_011487.1,2561-2579).
ggttacgtcccctctgttt

SEQ ID NO: 448949 - DNA, 19 bp, Mus musculus
  siRNA target sequence for Stat4 (NM_011487.1,2562-2580).
gttacgtcccctctgtttt

SEQ ID NO: 448950 - DNA, 19 bp, Mus musculus
  siRNA target sequence for Stat4 (NM_011487.1,2686-2704).
cccaacgacaattgaaact

SEQ ID NO: 448951 - DNA, 19 bp, Mus musculus
  siRNA target sequence for Stat5a (NM_011488.2,411-429).
gccagccgtgggatgctat

SEQ ID NO: 448952 - DNA, 19 bp, Mus musculus
  siRNA target sequence for Stat5a (NM_011488.2,416-434).
ccgtgggatgctattgact

SEQ ID NO: 448953 - DNA, 19 bp, Mus musculus
  siRNA target sequence for Stat5a (NM_011488.2,417-435).
cgtgggatgctattgactt

SEQ ID NO: 448954 - DNA, 19 bp, Mus musculus
  siRNA target sequence for Stat5a (NM_011488.2,422-440).
gatgctattgacttggata

SEQ ID NO: 448955 - DNA, 19 bp, Mus musculus
  siRNA target sequence for Stat5a (NM_011488.2,2044-2062).
ccataagccccattggaat

SEQ ID NO: 448956 - DNA, 19 bp, Mus musculus
  siRNA target sequence for Stat5a (NM_011488.2,2204-2222).
cgaaacctctggaatctga

SEQ ID NO: 448957 - DNA, 19 bp, Mus musculus
  siRNA target sequence for Stat5a (NM_011488.2,2226-2244).
cattcacgacgcgagattt

SEQ ID NO: 448958 - DNA, 19 bp, Mus musculus
  siRNA target sequence for Stat5a (NM_011488.2,2276-2294).
gacctgaactaccttatct

SEQ ID NO: 448959 - DNA, 19 bp, Mus musculus
  siRNA target sequence for Stat5a (NM_011488.2,2335-2353).
gtattacactcctgtactt

SEQ ID NO: 448960 - DNA, 19 bp, Mus musculus
  siRNA target sequence for Stat5a (NM_011488.2,2402-2420).
cctgagttcgtcaatgcat

SEQ ID NO: 448961 - DNA, 19 bp, Mus musculus
  siRNA target sequence for Stat5b (NM_011489.2,564-582).
catcgaggtgcgacattat

SEQ ID NO: 448962 - DNA, 19 bp, Mus musculus
  siRNA target sequence for Stat5b (NM_011489.2,567-585).
cgaggtgcgacattattta

SEQ ID NO: 448963 - DNA, 19 bp, Mus musculus
  siRNA target sequence for Stat5b (NM_011489.2,568-586).
gaggtgcgacattatttat

SEQ ID NO: 448964 - DNA, 19 bp, Mus musculus
  siRNA target sequence for Stat5b (NM_011489.2,570-588).
ggtgcgacattatttatca

SEQ ID NO: 448965 - DNA, 19 bp, Mus musculus
  siRNA target sequence for Stat5b (NM_011489.2,611-629).
gggactcaatagatcttga

SEQ ID NO: 448966 - DNA, 19 bp, Mus musculus
  siRNA target sequence for Stat5b (NM_011489.2,612-630).
ggactcaatagatcttgat

SEQ ID NO: 448967 - DNA, 19 bp, Mus musculus
  siRNA target sequence for Stat5b (NM_011489.2,613-631).
gactcaatagatcttgata

SEQ ID NO: 448968 - DNA, 19 bp, Mus musculus
  siRNA target sequence for Stat5b (NM_011489.2,864-882).
ctctccagctggaagtctt

SEQ ID NO: 448969 - DNA, 19 bp, Mus musculus
  siRNA target sequence for Stat5b (NM_011489.2,1784-1802).
cagtaacggaagagaagtt

SEQ ID NO: 448970 - DNA, 19 bp, Mus musculus
  siRNA target sequence for Stat5b (NM_011489.2,1838-1856).
gaaacgagctggtctttca

SEQ ID NO: 448971 - DNA, 19 bp, Mus musculus
  siRNA target sequence for Stat5b (NM_011489.2,2173-2191).
ccaggacggaattacactt

SEQ ID NO: 448972 - DNA, 19 bp, Mus musculus
  siRNA target sequence for Stat5b (NM_011489.2,2174-2192).
caggacggaattacacttt

SEQ ID NO: 448973 - DNA, 19 bp, Mus musculus
  siRNA target sequence for Stat5b (NM_011489.2,2206-2224).
gatggcgtgatggaagtat

SEQ ID NO: 448974 - DNA, 19 bp, Mus musculus
  siRNA target sequence for Stat5b (NM_011489.2,2209-2227).
ggcgtgatggaagtattga

SEQ ID NO: 448975 - DNA, 19 bp, Mus musculus
  siRNA target sequence for Stat5b (NM_011489.2,2423-2441).
ccactagagacttctctat

SEQ ID NO: 448976 - DNA, 19 bp, Mus musculus
  siRNA target sequence for Stat5b (NM_011489.2,2500-2518).
cggccaaaggatgaagtat

SEQ ID NO: 448977 - DNA, 19 bp, Mus musculus
  siRNA target sequence for Stat5b (NM_011489.2,2501-2519).
ggccaaaggatgaagtata

SEQ ID NO: 448978 - DNA, 19 bp, Mus musculus
  siRNA target sequence for Stat5b (NM_011489.2,2604-2622).
ggtccccgagtttgcaaat

SEQ ID NO: 448979 - DNA, 19 bp, Mus musculus
  siRNA target sequence for Stat6 (NM_009284.1,399-417).
gttcctggtcggttcagat

SEQ ID NO: 448980 - DNA, 19 bp, Mus musculus
  siRNA target sequence for Stat6 (NM_009284.1,408-426).
cggttcagatgctttctgt

SEQ ID NO: 448981 - DNA, 19 bp, Mus musculus
  siRNA target sequence for Stat6 (NM_009284.1,527-545).
ccttggagagcatctatca

SEQ ID NO: 448982 - DNA, 19 bp, Mus musculus
  siRNA target sequence for Stat6 (NM_009284.1,565-583).
gtggccaccatcagacaaa

SEQ ID NO: 448983 - DNA, 19 bp, Mus musculus
  siRNA target sequence for Stat6 (NM_009284.1,567-585).
ggccaccatcagacaaata

SEQ ID NO: 448984 - DNA, 19 bp, Mus musculus
  siRNA target sequence for Stat6 (NM_009284.1,569-587).
ccaccatcagacaaatact

SEQ ID NO: 448985 - DNA, 19 bp, Mus musculus
  siRNA target sequence for Stat6 (NM_009284.1,570-588).
caccatcagacaaatactt

SEQ ID NO: 448986 - DNA, 19 bp, Mus musculus
  siRNA target sequence for Stat6 (NM_009284.1,711-729).
ccggcttctccgagaatct

SEQ ID NO: 448987 - DNA, 19 bp, Mus musculus
  siRNA target sequence for Stat6 (NM_009284.1,713-731).
ggcttctccgagaatctct

SEQ ID NO: 448988 - DNA, 19 bp, Mus musculus
  siRNA target sequence for Stat6 (NM_009284.1,714-732).
gcttctccgagaatctcta

SEQ ID NO: 448989 - DNA, 19 bp, Mus musculus
  siRNA target sequence for Stat6 (NM_009284.1,759-777).
gtctctgcagaatttgata

SEQ ID NO: 448990 - DNA, 19 bp, Mus musculus
  siRNA target sequence for Stat6 (NM_009284.1,774-792).
gatagaccctcctctcaat

SEQ ID NO: 448991 - DNA, 19 bp, Mus musculus
  siRNA target sequence for Stat6 (NM_009284.1,864-882).
cctggttctgttaaggatt

SEQ ID NO: 448992 - DNA, 19 bp, Mus musculus
  siRNA target sequence for Stat6 (NM_009284.1,868-886).
gttctgttaaggattcaga

SEQ ID NO: 448993 - DNA, 19 bp, Mus musculus
  siRNA target sequence for Stat6 (NM_009284.1,949-967).
ctccaggagaggtgtgaaa

SEQ ID NO: 448994 - DNA, 19 bp, Mus musculus
  siRNA target sequence for Stat6 (NM_009284.1,1167-1185).
gctgggtctgcagtttcta

SEQ ID NO: 448995 - DNA, 19 bp, Mus musculus
  siRNA target sequence for Stat6 (NM_009284.1,1286-1304).
gcacaggagagatcatgaa

SEQ ID NO: 448996 - DNA, 19 bp, Mus musculus
  siRNA target sequence for Stat6 (NM_009284.1,1515-1533).
catcgtgcatggtaaccaa

SEQ ID NO: 448997 - DNA, 19 bp, Mus musculus
  siRNA target sequence for Stat6 (NM_009284.1,1640-1658).
ccctaaacctcaagtttat

SEQ ID NO: 448998 - DNA, 19 bp, Mus musculus
  siRNA target sequence for Stat6 (NM_009284.1,1772-1790).
cctggtcacagttcaataa

SEQ ID NO: 448999 - DNA, 19 bp, Mus musculus
  siRNA target sequence for Stat6 (NM_009284.1,1801-1819).
ctgggccgaggcttcacat

SEQ ID NO: 449000 - DNA, 19 bp, Mus musculus
  siRNA target sequence for Stat6 (NM_009284.1,1803-1821).
gggccgaggcttcacattt

SEQ ID NO: 449001 - DNA, 19 bp, Mus musculus
  siRNA target sequence for Stat6 (NM_009284.1,1804-1822).
ggccgaggcttcacatttt

SEQ ID NO: 449002 - DNA, 19 bp, Mus musculus
  siRNA target sequence for Stat6 (NM_009284.1,1877-1895).
ggtcagatcggctgatcat

SEQ ID NO: 449003 - DNA, 19 bp, Mus musculus
  siRNA target sequence for Stat6 (NM_009284.1,1878-1896).
gtcagatcggctgatcatt

SEQ ID NO: 449004 - DNA, 19 bp, Mus musculus
  siRNA target sequence for Stat6 (NM_009284.1,1886-1904).
ggctgatcattggctttat

SEQ ID NO: 449005 - DNA, 19 bp, Mus musculus
  siRNA target sequence for Stat6 (NM_009284.1,1888-1906).
ctgatcattggctttatta

SEQ ID NO: 449006 - DNA, 19 bp, Mus musculus
  siRNA target sequence for Stat6 (NM_009284.1,1890-1908).
gatcattggctttattagt

SEQ ID NO: 449007 - DNA, 19 bp, Mus musculus
  siRNA target sequence for Stat6 (NM_009284.1,1897-1915).
ggctttattagtaagcaat

SEQ ID NO: 449008 - DNA, 19 bp, Mus musculus
  siRNA target sequence for Stat6 (NM_009284.1,1898-1916).
gctttattagtaagcaata

SEQ ID NO: 449009 - DNA, 19 bp, Mus musculus
  siRNA target sequence for Stat6 (NM_009284.1,2023-2041).
ggctcctcacagatagaga

SEQ ID NO: 449010 - DNA, 19 bp, Mus musculus
  siRNA target sequence for Stat6 (NM_009284.1,2038-2056).
gagaacatccagccatttt

SEQ ID NO: 449011 - DNA, 19 bp, Mus musculus
  siRNA target sequence for Stat6 (NM_009284.1,2097-2115).
ccgggatcttgctcagtta

SEQ ID NO: 449012 - DNA, 19 bp, Mus musculus
  siRNA target sequence for Stat6 (NM_009284.1,2098-2116).
cgggatcttgctcagttaa

SEQ ID NO: 449013 - DNA, 19 bp, Mus musculus
  siRNA target sequence for Stat6 (NM_009284.1,2099-2117).
gggatcttgctcagttaaa

SEQ ID NO: 449014 - DNA, 19 bp, Mus musculus
  siRNA target sequence for Stat6 (NM_009284.1,2100-2118).
ggatcttgctcagttaaaa

SEQ ID NO: 449015 - DNA, 19 bp, Mus musculus
  siRNA target sequence for Stat6 (NM_009284.1,2148-2166).
ggctttccggagtcactat

SEQ ID NO: 449016 - DNA, 19 bp, Mus musculus
  siRNA target sequence for Stat6 (NM_009284.1,2149-2167).
gctttccggagtcactata

SEQ ID NO: 449017 - DNA, 19 bp, Mus musculus
  siRNA target sequence for Stat6 (NM_009284.1,2150-2168).
ctttccggagtcactataa

SEQ ID NO: 449018 - DNA, 19 bp, Mus musculus
  siRNA target sequence for Stat6 (NM_009284.1,2188-2206).
gacgggaggggttatgtct

SEQ ID NO: 449019 - DNA, 19 bp, Mus musculus
  siRNA target sequence for Stat6 (NM_009284.1,2197-2215).
ggttatgtctctactacta

SEQ ID NO: 449020 - DNA, 19 bp, Mus musculus
  siRNA target sequence for Stat6 (NM_009284.1,2198-2216).
gttatgtctctactactat

SEQ ID NO: 449021 - DNA, 19 bp, Mus musculus
  siRNA target sequence for Stat6 (NM_009284.1,2203-2221).
gtctctactactatcaaga

SEQ ID NO: 449022 - DNA, 19 bp, Mus musculus
  siRNA target sequence for Stat6 (NM_009284.1,2273-2291).
ccatggtgccaccttatga

SEQ ID NO: 449023 - DNA, 19 bp, Mus musculus
  siRNA target sequence for Stat6 (NM_009284.1,2274-2292).
catggtgccaccttatgat

SEQ ID NO: 449024 - DNA, 19 bp, Mus musculus
  siRNA target sequence for Stat6 (NM_009284.1,2277-2295).
ggtgccaccttatgatctt

SEQ ID NO: 449025 - DNA, 19 bp, Mus musculus
  siRNA target sequence for Stat6 (NM_009284.1,2390-2408).
gtgtactgccatcttttca

SEQ ID NO: 449026 - DNA, 19 bp, Mus musculus
  siRNA target sequence for Stat6 (NM_009284.1,2431-2449).
cccaacatgagccagataa

SEQ ID NO: 449027 - DNA, 19 bp, Mus musculus
  siRNA target sequence for Stat6 (NM_009284.1,2603-2621).
cctgggtcagtgaagacat

SEQ ID NO: 449028 - DNA, 19 bp, Mus musculus
  siRNA target sequence for T (NM_009309.1,279-297).
gctaactaacgagatgatt

SEQ ID NO: 449029 - DNA, 19 bp, Mus musculus
  siRNA target sequence for T (NM_009309.1,324-342).
cccggtgctgaaggtaaat

SEQ ID NO: 449030 - DNA, 19 bp, Mus musculus
  siRNA target sequence for T (NM_009309.1,326-344).
cggtgctgaaggtaaatgt

SEQ ID NO: 449031 - DNA, 19 bp, Mus musculus
  siRNA target sequence for T (NM_009309.1,402-420).
caaccaccgctggaaatat

SEQ ID NO: 449032 - DNA, 19 bp, Mus musculus
  siRNA target sequence for T (NM_009309.1,406-424).
caccgctggaaatatgtga

SEQ ID NO: 449033 - DNA, 19 bp, Mus musculus
  siRNA target sequence for T (NM_009309.1,571-589).
gggggacagatcatgttaa

SEQ ID NO: 449034 - DNA, 19 bp, Mus musculus
  siRNA target sequence for T (NM_009309.1,572-590).
ggggacagatcatgttaaa

SEQ ID NO: 449035 - DNA, 19 bp, Mus musculus
  siRNA target sequence for T (NM_009309.1,574-592).
ggacagatcatgttaaact

SEQ ID NO: 449036 - DNA, 19 bp, Mus musculus
  siRNA target sequence for T (NM_009309.1,1240-1258).
ggctcccctgcacattaca

SEQ ID NO: 449037 - DNA, 19 bp, Mus musculus
  siRNA target sequence for T (NM_009309.1,1242-1260).
ctcccctgcacattacaca

SEQ ID NO: 449038 - DNA, 19 bp, Mus musculus
  siRNA target sequence for T (NM_009309.1,1327-1345).
gctacagtcacagacattt

SEQ ID NO: 449039 - DNA, 19 bp, Mus musculus
  siRNA target sequence for T (NM_009309.1,1397-1415).
ctgtgtcacccccatctat

SEQ ID NO: 449040 - DNA, 19 bp, Mus musculus
  siRNA target sequence for Tbr1 (NM_009322.2,348-366).
gcttgtcttgcatgatcat

SEQ ID NO: 449041 - DNA, 19 bp, Mus musculus
  siRNA target sequence for Tbr1 (NM_009322.2,432-450).
gacgaatcagtcagataca

SEQ ID NO: 449042 - DNA, 19 bp, Mus musculus
  siRNA target sequence for Tbr1 (NM_009322.2,439-457).
cagtcagatacagacaatt

SEQ ID NO: 449043 - DNA, 19 bp, Mus musculus
  siRNA target sequence for Tbr1 (NM_009322.2,487-505).
gtccagagaagtaaactct

SEQ ID NO: 449044 - DNA, 19 bp, Mus musculus
  siRNA target sequence for Tbr1 (NM_009322.2,527-545).
ctgagcttcgtcacagttt

SEQ ID NO: 449045 - DNA, 19 bp, Mus musculus
  siRNA target sequence for Tbr1 (NM_009322.2,531-549).
gcttcgtcacagtttcgat

SEQ ID NO: 449046 - DNA, 19 bp, Mus musculus
  siRNA target sequence for Tbr1 (NM_009322.2,697-715).
caccacccggtcattacca

SEQ ID NO: 449047 - DNA, 19 bp, Mus musculus
  siRNA target sequence for Tbr1 (NM_009322.2,860-878).
gcaaggcgcaagtatacct

SEQ ID NO: 449048 - DNA, 19 bp, Mus musculus
  siRNA target sequence for Tbr1 (NM_009322.2,958-976).
ccctttttgagttttaaca

SEQ ID NO: 449049 - DNA, 19 bp, Mus musculus
  siRNA target sequence for Tbr1 (NM_009322.2,988-1006).
gatcccaccgctcattaca

SEQ ID NO: 449050 - DNA, 19 bp, Mus musculus
  siRNA target sequence for Tbr1 (NM_009322.2,991-1009).
cccaccgctcattacaata

SEQ ID NO: 449051 - DNA, 19 bp, Mus musculus
  siRNA target sequence for Tbr1 (NM_009322.2,992-1010).
ccaccgctcattacaatat

SEQ ID NO: 449052 - DNA, 19 bp, Mus musculus
  siRNA target sequence for Tbr1 (NM_009322.2,993-1011).
caccgctcattacaatatt

SEQ ID NO: 449053 - DNA, 19 bp, Mus musculus
  siRNA target sequence for Tbr1 (NM_009322.2,995-1013).
ccgctcattacaatatttt

SEQ ID NO: 449054 - DNA, 19 bp, Mus musculus
  siRNA target sequence for Tbr1 (NM_009322.2,1038-1056).
caatcactggaggtttcaa

SEQ ID NO: 449055 - DNA, 19 bp, Mus musculus
  siRNA target sequence for Tbr1 (NM_009322.2,1099-1117).
caaggaaaccgggtctata

SEQ ID NO: 449056 - DNA, 19 bp, Mus musculus
  siRNA target sequence for Tbr1 (NM_009322.2,1147-1165).
cactggatgcggcaagaaa

SEQ ID NO: 449057 - DNA, 19 bp, Mus musculus
  siRNA target sequence for Tbr1 (NM_009322.2,1318-1336).
cgagtccagacgttcactt

SEQ ID NO: 449058 - DNA, 19 bp, Mus musculus
  siRNA target sequence for Tbr1 (NM_009322.2,1319-1337).
gagtccagacgttcacttt

SEQ ID NO: 449059 - DNA, 19 bp, Mus musculus
  siRNA target sequence for Tbr1 (NM_009322.2,1371-1389).
ccagaacacggatattaca

SEQ ID NO: 449060 - DNA, 19 bp, Mus musculus
  siRNA target sequence for Tbr1 (NM_009322.2,1374-1392).
gaacacggatattacacaa

SEQ ID NO: 449061 - DNA, 19 bp, Mus musculus
  siRNA target sequence for Tbr1 (NM_009322.2,1377-1395).
cacggatattacacaacta

SEQ ID NO: 449062 - DNA, 19 bp, Mus musculus
  siRNA target sequence for Tbr1 (NM_009322.2,1379-1397).
cggatattacacaactaaa

SEQ ID NO: 449063 - DNA, 19 bp, Mus musculus
  siRNA target sequence for Tbr1 (NM_009322.2,1380-1398).
ggatattacacaactaaaa

SEQ ID NO: 449064 - DNA, 19 bp, Mus musculus
  siRNA target sequence for Tbr1 (NM_009322.2,1418-1436).
caaaaggatttcgagataa

SEQ ID NO: 449065 - DNA, 19 bp, Mus musculus
  siRNA target sequence for Tbr1 (NM_009322.2,1424-1442).
gatttcgagataactatga

SEQ ID NO: 449066 - DNA, 19 bp, Mus musculus
  siRNA target sequence for Tbr1 (NM_009322.2,2129-2147).
ccagcgactcggggattta

SEQ ID NO: 449067 - DNA, 19 bp, Mus musculus
  siRNA target sequence for Tbr1 (NM_009322.2,2132-2150).
gcgactcggggatttacga

SEQ ID NO: 449068 - DNA, 19 bp, Mus musculus
  siRNA target sequence for Tbr1 (NM_009322.2,2236-2254).
cgggactgcgagaagaact

SEQ ID NO: 449069 - DNA, 19 bp, Mus musculus
  siRNA target sequence for Tbx1 (NM_011532.1,449-467).
cgttccaagtgaagctttt

SEQ ID NO: 449070 - DNA, 19 bp, Mus musculus
  siRNA target sequence for Tbx1 (NM_011532.1,531-549).
ctaccggtatgctttccat

SEQ ID NO: 449071 - DNA, 19 bp, Mus musculus
  siRNA target sequence for Tbx1 (NM_011532.1,590-608).
cacctggccgagtacacta

SEQ ID NO: 449072 - DNA, 19 bp, Mus musculus
  siRNA target sequence for Tbx1 (NM_011532.1,630-648).
gggcgcacagtggatgaaa

SEQ ID NO: 449073 - DNA, 19 bp, Mus musculus
  siRNA target sequence for Tbx1 (NM_011532.1,632-650).
gcgcacagtggatgaaaca

SEQ ID NO: 449074 - DNA, 19 bp, Mus musculus
  siRNA target sequence for Tbx1 (NM_011532.1,634-652).
gcacagtggatgaaacaga

SEQ ID NO: 449075 - DNA, 19 bp, Mus musculus
  siRNA target sequence for Tbx1 (NM_011532.1,740-758).
cccgattccatgttgtcta

SEQ ID NO: 449076 - DNA, 19 bp, Mus musculus
  siRNA target sequence for Tbx1 (NM_011532.1,741-759).
ccgattccatgttgtctat

SEQ ID NO: 449077 - DNA, 19 bp, Mus musculus
  siRNA target sequence for Tbx1 (NM_011532.1,756-774).
ctatgtggaccctcgaaaa

SEQ ID NO: 449078 - DNA, 19 bp, Mus musculus
  siRNA target sequence for Tbx1 (NM_011532.1,862-880).
cggatcacgcagcttaaga

SEQ ID NO: 449079 - DNA, 19 bp, Mus musculus
  siRNA target sequence for Tbx18 (NM_023814.2,882-900).
ggaagcgctttcacgaaat

SEQ ID NO: 449080 - DNA, 19 bp, Mus musculus
  siRNA target sequence for Tbx18 (NM_023814.2,883-901).
gaagcgctttcacgaaata

SEQ ID NO: 449081 - DNA, 19 bp, Mus musculus
  siRNA target sequence for Tbx18 (NM_023814.2,945-963).
cagcaatgcgggtgaagat

SEQ ID NO: 449082 - DNA, 19 bp, Mus musculus
  siRNA target sequence for Tbx18 (NM_023814.2,947-965).
gcaatgcgggtgaagatct

SEQ ID NO: 449083 - DNA, 19 bp, Mus musculus
  siRNA target sequence for Tbx18 (NM_023814.2,978-996).
ctcaccagcaatattacat

SEQ ID NO: 449084 - DNA, 19 bp, Mus musculus
  siRNA target sequence for Tbx18 (NM_023814.2,1024-1042).
caagagatacaggtatgtt

SEQ ID NO: 449085 - DNA, 19 bp, Mus musculus
  siRNA target sequence for Tbx18 (NM_023814.2,1029-1047).
gatacaggtatgtttacca

SEQ ID NO: 449086 - DNA, 19 bp, Mus musculus
  siRNA target sequence for Tbx18 (NM_023814.2,1086-1104).
cggtgccacccagagtata

SEQ ID NO: 449087 - DNA, 19 bp, Mus musculus
  siRNA target sequence for Tbx18 (NM_023814.2,1137-1155).
cttggatgagacaagtcat

SEQ ID NO: 449088 - DNA, 19 bp, Mus musculus
  siRNA target sequence for Tbx18 (NM_023814.2,1204-1222).
ccatatcattcttcattct

SEQ ID NO: 449089 - DNA, 19 bp, Mus musculus
  siRNA target sequence for Tbx18 (NM_023814.2,1205-1223).
catatcattcttcattcta

SEQ ID NO: 449090 - DNA, 19 bp, Mus musculus
  siRNA target sequence for Tbx18 (NM_023814.2,1331-1349).
ccagaaaccgtcttcacaa

SEQ ID NO: 449091 - DNA, 19 bp, Mus musculus
  siRNA target sequence for Tbx18 (NM_023814.2,1373-1391).
cagattactcgccttaaga

SEQ ID NO: 449092 - DNA, 19 bp, Mus musculus
  siRNA target sequence for Tbx18 (NM_023814.2,1375-1393).
gattactcgccttaagata

SEQ ID NO: 449093 - DNA, 19 bp, Mus musculus
  siRNA target sequence for Tbx18 (NM_023814.2,1435-1453).
gaacagaatgggtttggaa

SEQ ID NO: 449094 - DNA, 19 bp, Mus musculus
  siRNA target sequence for Tbx18 (NM_023814.2,1706-1724).
ggccttgccctcaatcgat

SEQ ID NO: 449095 - DNA, 19 bp, Mus musculus
  siRNA target sequence for Tbx18 (NM_023814.2,1707-1725).
gccttgccctcaatcgata

SEQ ID NO: 449096 - DNA, 19 bp, Mus musculus
  siRNA target sequence for Tbx18 (NM_023814.2,1746-1764).
cctacagcaggcttaccaa

SEQ ID NO: 449097 - DNA, 19 bp, Mus musculus
  siRNA target sequence for Tbx18 (NM_023814.2,1914-1932).
cccctcaacttcagtacat

SEQ ID NO: 449098 - DNA, 19 bp, Mus musculus
  siRNA target sequence for Tbx18 (NM_023814.2,1974-1992).
cccaccagagttcttacaa

SEQ ID NO: 449099 - DNA, 19 bp, Mus musculus
  siRNA target sequence for Tbx18 (NM_023814.2,1976-1994).
caccagagttcttacaaca

SEQ ID NO: 449100 - DNA, 19 bp, Mus musculus
  siRNA target sequence for Tbx18 (NM_023814.2,2016-2034).
gtgccttgtatggatataa

SEQ ID NO: 449101 - DNA, 19 bp, Mus musculus
  siRNA target sequence for Tbx18 (NM_023814.2,2019-2037).
ccttgtatggatataactt

SEQ ID NO: 449102 - DNA, 19 bp, Mus musculus
  siRNA target sequence for Tbx18 (NM_023814.2,2062-2080).
cagtcctgagaaaattgtt

SEQ ID NO: 449103 - DNA, 19 bp, Mus musculus
  siRNA target sequence for Tbx18 (NM_023814.2,2202-2220).
ccaggaccctaggaagttt

SEQ ID NO: 449104 - DNA, 19 bp, Mus musculus
  siRNA target sequence for Tbx18 (NM_023814.2,2206-2224).
gaccctaggaagtttaact

SEQ ID NO: 449105 - DNA, 19 bp, Mus musculus
  siRNA target sequence for Tbx18 (NM_023814.2,2208-2226).
ccctaggaagtttaactct

SEQ ID NO: 449106 - DNA, 19 bp, Mus musculus
  siRNA target sequence for Tbx19 (NM_032005.2,251-269).
ctgtgtctcgcctgcttaa

SEQ ID NO: 449107 - DNA, 19 bp, Mus musculus
  siRNA target sequence for Tbx19 (NM_032005.2,352-370).
cccctctggcagagattca

SEQ ID NO: 449108 - DNA, 19 bp, Mus musculus
  siRNA target sequence for Tbx19 (NM_032005.2,353-371).
ccctctggcagagattcaa

SEQ ID NO: 449109 - DNA, 19 bp, Mus musculus
  siRNA target sequence for Tbx19 (NM_032005.2,365-383).
gattcaaggaagtcactaa

SEQ ID NO: 449110 - DNA, 19 bp, Mus musculus
  siRNA target sequence for Tbx19 (NM_032005.2,560-578).
gccacagctgtgtctacat

SEQ ID NO: 449111 - DNA, 19 bp, Mus musculus
  siRNA target sequence for Tbx19 (NM_032005.2,561-579).
ccacagctgtgtctacatt

SEQ ID NO: 449112 - DNA, 19 bp, Mus musculus
  siRNA target sequence for Tbx19 (NM_032005.2,670-688).
gggcagataatgctgaatt

SEQ ID NO: 449113 - DNA, 19 bp, Mus musculus
  siRNA target sequence for Tbx19 (NM_032005.2,739-757).
catcgaatggtcatgaact

SEQ ID NO: 449114 - DNA, 19 bp, Mus musculus
  siRNA target sequence for Tbx19 (NM_032005.2,817-835).
gctctcaaaatcaagtaca

SEQ ID NO: 449115 - DNA, 19 bp, Mus musculus
  siRNA target sequence for Tbx19 (NM_032005.2,818-836).
ctctcaaaatcaagtacaa

SEQ ID NO: 449116 - DNA, 19 bp, Mus musculus
  siRNA target sequence for Tbx19 (NM_032005.2,1091-1109).
ctgcctacatgcatagaaa

SEQ ID NO: 449117 - DNA, 19 bp, Mus musculus
  siRNA target sequence for Tbx19 (NM_032005.2,1174-1192).
gacagctggacttccttat

SEQ ID NO: 449118 - DNA, 19 bp, Mus musculus
  siRNA target sequence for Tbx19 (NM_032005.2,1272-1290).
cctgtggaccattagcaat

SEQ ID NO: 449119 - DNA, 19 bp, Mus musculus
  siRNA target sequence for Tbx19 (NM_032005.2,1428-1446).
cttgggtgaaccttcacta

SEQ ID NO: 449120 - DNA, 19 bp, Mus musculus
  siRNA target sequence for Tbx2 (NM_009324.1,454-472).
cagcggcctggacaagaaa

SEQ ID NO: 449121 - DNA, 19 bp, Mus musculus
  siRNA target sequence for Tbx2 (NM_009324.1,474-492).
ccaaatacatcctgctaat

SEQ ID NO: 449122 - DNA, 19 bp, Mus musculus
  siRNA target sequence for Tbx2 (NM_009324.1,509-527).
gatgactgccgctataagt

SEQ ID NO: 449123 - DNA, 19 bp, Mus musculus
  siRNA target sequence for Tbx2 (NM_009324.1,516-534).
gccgctataagtttcacaa

SEQ ID NO: 449124 - DNA, 19 bp, Mus musculus
  siRNA target sequence for Tbx2 (NM_009324.1,658-676).
gctgaccaacaacatttct

SEQ ID NO: 449125 - DNA, 19 bp, Mus musculus
  siRNA target sequence for Tbx2 (NM_009324.1,740-758).
cgagccaatgacatcttga

SEQ ID NO: 449126 - DNA, 19 bp, Mus musculus
  siRNA target sequence for Tbx2 (NM_009324.1,774-792).
ccttccgcacctatgtctt

SEQ ID NO: 449127 - DNA, 19 bp, Mus musculus
  siRNA target sequence for Tbx2 (NM_009324.1,931-949).
gcccactctccgtttgtat

SEQ ID NO: 449128 - DNA, 19 bp, Mus musculus
  siRNA target sequence for Tbx2 (NM_009324.1,933-951).
ccactctccgtttgtatga

SEQ ID NO: 449129 - DNA, 19 bp, Mus musculus
  siRNA target sequence for Tbx2 (NM_009324.1,1751-1769).
ccctacccgtacacttaca

SEQ ID NO: 449130 - DNA, 19 bp, Mus musculus
  siRNA target sequence for Tbx2 (NM_009324.1,1752-1770).
cctacccgtacacttacat

SEQ ID NO: 449131 - DNA, 19 bp, Mus musculus
  siRNA target sequence for Tbx2 (NM_009324.1,1831-1849).
cgcagccgctggttcatta

SEQ ID NO: 449132 - DNA, 19 bp, Mus musculus
  siRNA target sequence for Tbx2 (NM_009324.1,1832-1850).
gcagccgctggttcattat

SEQ ID NO: 449133 - DNA, 19 bp, Mus musculus
  siRNA target sequence for Tbx2 (NM_009324.1,1964-1982).
ggctccaagggcggaaata

SEQ ID NO: 449134 - DNA, 19 bp, Mus musculus
  siRNA target sequence for Tbx20 (NM_020496.2,574-592).
caaacccctggaacaattt

SEQ ID NO: 449135 - DNA, 19 bp, Mus musculus
  siRNA target sequence for Tbx20 (NM_020496.2,587-605).
caatttgtggagaaatcat

SEQ ID NO: 449136 - DNA, 19 bp, Mus musculus
  siRNA target sequence for Tbx20 (NM_020496.2,694-712).
gtgcacagagccactgata

SEQ ID NO: 449137 - DNA, 19 bp, Mus musculus
  siRNA target sequence for Tbx20 (NM_020496.2,735-753).
gcgaagagatggctaaaat

SEQ ID NO: 449138 - DNA, 19 bp, Mus musculus
  siRNA target sequence for Tbx20 (NM_020496.2,800-818).
ctgggcacggagatgataa

SEQ ID NO: 449139 - DNA, 19 bp, Mus musculus
  siRNA target sequence for Tbx20 (NM_020496.2,846-864).
ccaccatccgcgtgtcatt

SEQ ID NO: 449140 - DNA, 19 bp, Mus musculus
  siRNA target sequence for Tbx20 (NM_020496.2,879-897).
ctgagtccaagtatatagt

SEQ ID NO: 449141 - DNA, 19 bp, Mus musculus
  siRNA target sequence for Tbx20 (NM_020496.2,1093-1111).
ggatcaacacggccatata

SEQ ID NO: 449142 - DNA, 19 bp, Mus musculus
  siRNA target sequence for Tbx20 (NM_020496.2,1094-1112).
gatcaacacggccatataa

SEQ ID NO: 449143 - DNA, 19 bp, Mus musculus
  siRNA target sequence for Tbx20 (NM_020496.2,1097-1115).
caacacggccatataattt

SEQ ID NO: 449144 - DNA, 19 bp, Mus musculus
  siRNA target sequence for Tbx20 (NM_020496.2,1100-1118).
cacggccatataattttga

SEQ ID NO: 449145 - DNA, 19 bp, Mus musculus
  siRNA target sequence for Tbx20 (NM_020496.2,1102-1120).
cggccatataattttgaat

SEQ ID NO: 449146 - DNA, 19 bp, Mus musculus
  siRNA target sequence for Tbx20 (NM_020496.2,1138-1156).
gccacgggtgcacatcata

SEQ ID NO: 449147 - DNA, 19 bp, Mus musculus
  siRNA target sequence for Tbx20 (NM_020496.2,1139-1157).
ccacgggtgcacatcataa

SEQ ID NO: 449148 - DNA, 19 bp, Mus musculus
  siRNA target sequence for Tbx20 (NM_020496.2,1140-1158).
cacgggtgcacatcataaa

SEQ ID NO: 449149 - DNA, 19 bp, Mus musculus
  siRNA target sequence for Tbx20 (NM_020496.2,1142-1160).
cgggtgcacatcataaaga

SEQ ID NO: 449150 - DNA, 19 bp, Mus musculus
  siRNA target sequence for Tbx20 (NM_020496.2,1190-1208).
ctgaagtcagaagaattca

SEQ ID NO: 449151 - DNA, 19 bp, Mus musculus
  siRNA target sequence for Tbx20 (NM_020496.2,1202-1220).
gaattcaggacgttcatct

SEQ ID NO: 449152 - DNA, 19 bp, Mus musculus
  siRNA target sequence for Tbx20 (NM_194263.1,1421-1439).
ctgggggaggagagtcaaa

SEQ ID NO: 449153 - DNA, 19 bp, Mus musculus
  siRNA target sequence for Tbx20 (NM_194263.1,1451-1469).
cgaggatcagcctttacaa

SEQ ID NO: 449154 - DNA, 19 bp, Mus musculus
  siRNA target sequence for Tbx20 (NM_194263.1,1454-1472).
ggatcagcctttacaacat

SEQ ID NO: 449155 - DNA, 19 bp, Mus musculus
  siRNA target sequence for Tbx20 (NM_194263.1,1604-1622).
ggttctctgccaccatata

SEQ ID NO: 449156 - DNA, 19 bp, Mus musculus
  siRNA target sequence for Tbx20 (NM_194263.1,1680-1698).
gtcccacgttcccttcatt

SEQ ID NO: 449157 - DNA, 19 bp, Mus musculus
  siRNA target sequence for Tbx20 (NM_194263.1,1695-1713).
cattccacatgcctagata

SEQ ID NO: 449158 - DNA, 19 bp, Mus musculus
  siRNA target sequence for Tbx20 (NM_194263.1,1699-1717).
ccacatgcctagataccat

SEQ ID NO: 449159 - DNA, 19 bp, Mus musculus
  siRNA target sequence for Tbx21 (NM_019507.1,235-253).
cggaccaacagcatcgttt

SEQ ID NO: 449160 - DNA, 19 bp, Mus musculus
  siRNA target sequence for Tbx21 (NM_019507.1,240-258).
caacagcatcgtttcttct

SEQ ID NO: 449161 - DNA, 19 bp, Mus musculus
  siRNA target sequence for Tbx21 (NM_019507.1,582-600).
ctgttgtggtccaagttca

SEQ ID NO: 449162 - DNA, 19 bp, Mus musculus
  siRNA target sequence for Tbx21 (NM_019507.1,681-699).
gagcccacaagccattaca

SEQ ID NO: 449163 - DNA, 19 bp, Mus musculus
  siRNA target sequence for Tbx21 (NM_019507.1,791-809).
gccagggaaccgcttatat

SEQ ID NO: 449164 - DNA, 19 bp, Mus musculus
  siRNA target sequence for Tbx21 (NM_019507.1,793-811).
cagggaaccgcttatatgt

SEQ ID NO: 449165 - DNA, 19 bp, Mus musculus
  siRNA target sequence for Tbx21 (NM_019507.1,845-863).
gatgcgccaggaagtttca

SEQ ID NO: 449166 - DNA, 19 bp, Mus musculus
  siRNA target sequence for Tbx21 (NM_019507.1,848-866).
gcgccaggaagtttcattt

SEQ ID NO: 449167 - DNA, 19 bp, Mus musculus
  siRNA target sequence for Tbx21 (NM_019507.1,890-908).
caagggggcttccaacaat

SEQ ID NO: 449168 - DNA, 19 bp, Mus musculus
  siRNA target sequence for Tbx21 (NM_019507.1,994-1012).
ctgcctgcagtgcttctaa

SEQ ID NO: 449169 - DNA, 19 bp, Mus musculus
  siRNA target sequence for Tbx21 (NM_019507.1,1136-1154).
gtccatgtacgcatctgtt

SEQ ID NO: 449170 - DNA, 19 bp, Mus musculus
  siRNA target sequence for Tbx21 (NM_019507.1,1240-1258).
ctgttcccagccgtttcta

SEQ ID NO: 449171 - DNA, 19 bp, Mus musculus
  siRNA target sequence for Tbx21 (NM_019507.1,1273-1291).
gccagcccaaggatatgat

SEQ ID NO: 449172 - DNA, 19 bp, Mus musculus
  siRNA target sequence for Tbx21 (NM_019507.1,1318-1336).
ctcgggaacacagttatga

SEQ ID NO: 449173 - DNA, 19 bp, Mus musculus
  siRNA target sequence for Tbx21 (NM_019507.1,1444-1462).
ggcccgtggcccctcaata

SEQ ID NO: 449174 - DNA, 19 bp, Mus musculus
  siRNA target sequence for Tbx21 (NM_019507.1,1707-1725).
gaaaccgaaggccagtttt

SEQ ID NO: 449175 - DNA, 19 bp, Mus musculus
  siRNA target sequence for Tbx21 (NM_019507.1,1716-1734).
ggccagttttataattatt

SEQ ID NO: 449176 - DNA, 19 bp, Mus musculus
  siRNA target sequence for Tbx22 (NM_145224.1,538-556).
ccctgtgaagcagtactat

SEQ ID NO: 449177 - DNA, 19 bp, Mus musculus
  siRNA target sequence for Tbx22 (NM_145224.1,581-599).
gattccaaacgctataggt

SEQ ID NO: 449178 - DNA, 19 bp, Mus musculus
  siRNA target sequence for Tbx22 (NM_145224.1,652-670).
cataactcccagattctat

SEQ ID NO: 449179 - DNA, 19 bp, Mus musculus
  siRNA target sequence for Tbx22 (NM_145224.1,709-727).
gcgtcaaatcatctctttt

SEQ ID NO: 449180 - DNA, 19 bp, Mus musculus
  siRNA target sequence for Tbx22 (NM_145224.1,721-739).
ctcttttgatcgagtgaaa

SEQ ID NO: 449181 - DNA, 19 bp, Mus musculus
  siRNA target sequence for Tbx22 (NM_145224.1,723-741).
cttttgatcgagtgaaact

SEQ ID NO: 449182 - DNA, 19 bp, Mus musculus
  siRNA target sequence for Tbx22 (NM_145224.1,848-866).
ctgattgagtcctttccta

SEQ ID NO: 449183 - DNA, 19 bp, Mus musculus
  siRNA target sequence for Tbx22 (NM_145224.1,863-881).
cctacggaaggcgttaaaa

SEQ ID NO: 449184 - DNA, 19 bp, Mus musculus
  siRNA target sequence for Tbx22 (NM_145224.1,867-885).
cggaaggcgttaaaacatt

SEQ ID NO: 449185 - DNA, 19 bp, Mus musculus
  siRNA target sequence for Tbx22 (NM_145224.1,994-1012).
gagaaataggggtgtctta

SEQ ID NO: 449186 - DNA, 19 bp, Mus musculus
  siRNA target sequence for Tbx22 (NM_145224.1,996-1014).
gaaataggggtgtcttaga

SEQ ID NO: 449187 - DNA, 19 bp, Mus musculus
  siRNA target sequence for Tbx22 (NM_145224.1,1002-1020).
ggggtgtcttagatggatt

SEQ ID NO: 449188 - DNA, 19 bp, Mus musculus
  siRNA target sequence for Tbx22 (NM_145224.1,1003-1021).
gggtgtcttagatggattt

SEQ ID NO: 449189 - DNA, 19 bp, Mus musculus
  siRNA target sequence for Tbx22 (NM_145224.1,1004-1022).
ggtgtcttagatggatttt

SEQ ID NO: 449190 - DNA, 19 bp, Mus musculus
  siRNA target sequence for Tbx22 (NM_145224.1,1051-1069).
ctctatggattttaaaact

SEQ ID NO: 449191 - DNA, 19 bp, Mus musculus
  siRNA target sequence for Tbx22 (NM_145224.1,1128-1146).
gagctccctctcctttgaa

SEQ ID NO: 449192 - DNA, 19 bp, Mus musculus
  siRNA target sequence for Tbx22 (NM_145224.1,1228-1246).
cctgcacagtgtcaacata

SEQ ID NO: 449193 - DNA, 19 bp, Mus musculus
  siRNA target sequence for Tbx22 (NM_145224.1,1281-1299).
ggcgatcacaaccttttgt

SEQ ID NO: 449194 - DNA, 19 bp, Mus musculus
  siRNA target sequence for Tbx22 (NM_145224.1,1282-1300).
gcgatcacaaccttttgtt

SEQ ID NO: 449195 - DNA, 19 bp, Mus musculus
  siRNA target sequence for Tbx22 (NM_145224.1,1289-1307).
caaccttttgttttaccta

SEQ ID NO: 449196 - DNA, 19 bp, Mus musculus
  siRNA target sequence for Tbx22 (NM_145224.1,1317-1335).
ggctaccaagtttcatcat

SEQ ID NO: 449197 - DNA, 19 bp, Mus musculus
  siRNA target sequence for Tbx22 (NM_145224.1,1318-1336).
gctaccaagtttcatcatt

SEQ ID NO: 449198 - DNA, 19 bp, Mus musculus
  siRNA target sequence for Tbx22 (NM_145224.1,1344-1362).
ccttacccccactcatgat

SEQ ID NO: 449199 - DNA, 19 bp, Mus musculus
  siRNA target sequence for Tbx22 (NM_145224.1,1386-1404).
ggggcatcatcaatccaaa

SEQ ID NO: 449200 - DNA, 19 bp, Mus musculus
  siRNA target sequence for Tbx22 (NM_145224.1,1527-1545).
caatcagttatccttttca

SEQ ID NO: 449201 - DNA, 19 bp, Mus musculus
  siRNA target sequence for Tbx22 (NM_145224.1,1547-1565).
cctcctaatggctgttata

SEQ ID NO: 449202 - DNA, 19 bp, Mus musculus
  siRNA target sequence for Tbx22 (NM_145224.1,1550-1568).
cctaatggctgttataggt

SEQ ID NO: 449203 - DNA, 19 bp, Mus musculus
  siRNA target sequence for Tbx22 (NM_145224.1,1582-1600).
gccacctagactggaaaat

SEQ ID NO: 449204 - DNA, 19 bp, Mus musculus
  siRNA target sequence for Tbx22 (NM_145224.1,1659-1677).
gtgatcattcccattggta

SEQ ID NO: 449205 - DNA, 19 bp, Mus musculus
  siRNA target sequence for Tbx22 (NM_145224.1,1675-1693).
gtatccagccattaaccat

SEQ ID NO: 449206 - DNA, 19 bp, Mus musculus
  siRNA target sequence for Tbx3 (NM_011535.2,1533-1551).
gcccatcatggatcagtta

SEQ ID NO: 449207 - DNA, 19 bp, Mus musculus
  siRNA target sequence for Tbx3 (NM_011535.2,1566-1584).
gaccggcatccctttctca

SEQ ID NO: 449208 - DNA, 19 bp, Mus musculus
  siRNA target sequence for Tbx3 (NM_011535.2,1739-1757).
gaatgttccctccgtttaa

SEQ ID NO: 449209 - DNA, 19 bp, Mus musculus
  siRNA target sequence for Tbx3 (NM_011535.2,1776-1794).
ggataaaaaggccaagtat

SEQ ID NO: 449210 - DNA, 19 bp, Mus musculus
  siRNA target sequence for Tbx3 (NM_011535.2,1819-1837).
gctgacgactgtcgatata

SEQ ID NO: 449211 - DNA, 19 bp, Mus musculus
  siRNA target sequence for Tbx3 (NM_011535.2,1820-1838).
ctgacgactgtcgatataa

SEQ ID NO: 449212 - DNA, 19 bp, Mus musculus
  siRNA target sequence for Tbx3 (NM_011535.2,1822-1840).
gacgactgtcgatataaat

SEQ ID NO: 449213 - DNA, 19 bp, Mus musculus
  siRNA target sequence for Tbx3 (NM_011535.2,1824-1842).
cgactgtcgatataaattt

SEQ ID NO: 449214 - DNA, 19 bp, Mus musculus
  siRNA target sequence for Tbx3 (NM_011535.2,1829-1847).
gtcgatataaatttcacaa

SEQ ID NO: 449215 - DNA, 19 bp, Mus musculus
  siRNA target sequence for Tbx3 (NM_011535.2,1879-1897).
cccgaaatgccaaagagaa

SEQ ID NO: 449216 - DNA, 19 bp, Mus musculus
  siRNA target sequence for Tbx3 (NM_011535.2,1880-1898).
ccgaaatgccaaagagaat

SEQ ID NO: 449217 - DNA, 19 bp, Mus musculus
  siRNA target sequence for Tbx3 (NM_011535.2,1887-1905).
gccaaagagaatgtatata

SEQ ID NO: 449218 - DNA, 19 bp, Mus musculus
  siRNA target sequence for Tbx3 (NM_011535.2,1922-1940).
ctacgggggagcaatggat

SEQ ID NO: 449219 - DNA, 19 bp, Mus musculus
  siRNA target sequence for Tbx3 (NM_011535.2,1977-1995).
caacaacatatcggataaa

SEQ ID NO: 449220 - DNA, 19 bp, Mus musculus
  siRNA target sequence for Tbx3 (NM_011535.2,2030-2048).
caacgtggcaggggaatta

SEQ ID NO: 449221 - DNA, 19 bp, Mus musculus
  siRNA target sequence for Tbx3 (NM_011535.2,2036-2054).
ggcaggggaattatagttt

SEQ ID NO: 449222 - DNA, 19 bp, Mus musculus
  siRNA target sequence for Tbx3 (NM_011535.2,2056-2074).
gggacccagactatactaa

SEQ ID NO: 449223 - DNA, 19 bp, Mus musculus
  siRNA target sequence for Tbx3 (NM_011535.2,2061-2079).
ccagactatactaaactct

SEQ ID NO: 449224 - DNA, 19 bp, Mus musculus
  siRNA target sequence for Tbx3 (NM_011535.2,2117-2135).
ccaacgatatcctgaaact

SEQ ID NO: 449225 - DNA, 19 bp, Mus musculus
  siRNA target sequence for Tbx3 (NM_011535.2,2127-2145).
cctgaaactgccttacagt

SEQ ID NO: 449226 - DNA, 19 bp, Mus musculus
  siRNA target sequence for Tbx3 (NM_011535.2,2136-2154).
gccttacagtacttttcga

SEQ ID NO: 449227 - DNA, 19 bp, Mus musculus
  siRNA target sequence for Tbx3 (NM_011535.2,2137-2155).
ccttacagtacttttcgaa

SEQ ID NO: 449228 - DNA, 19 bp, Mus musculus
  siRNA target sequence for Tbx3 (NM_011535.2,2160-2178).
cctgttcccggaaacagaa

SEQ ID NO: 449229 - DNA, 19 bp, Mus musculus
  siRNA target sequence for Tbx3 (NM_011535.2,2208-2226).
caagataactcagttaaaa

SEQ ID NO: 449230 - DNA, 19 bp, Mus musculus
  siRNA target sequence for Tbx3 (NM_011535.2,2304-2322).
gcagtccatgagagtgttt

SEQ ID NO: 449231 - DNA, 19 bp, Mus musculus
  siRNA target sequence for Tbx3 (NM_011535.2,2962-2980).
cccctgctggccacagtat

SEQ ID NO: 449232 - DNA, 19 bp, Mus musculus
  siRNA target sequence for Tbx3 (NM_011535.2,3214-3232).
cgccacccgttcctcaatt

SEQ ID NO: 449233 - DNA, 19 bp, Mus musculus
  siRNA target sequence for Tbx3 (NM_011535.2,3215-3233).
gccacccgttcctcaattt

SEQ ID NO: 449234 - DNA, 19 bp, Mus musculus
  siRNA target sequence for Tbx3 (NM_011535.2,3217-3235).
cacccgttcctcaatttga

SEQ ID NO: 449235 - DNA, 19 bp, Mus musculus
  siRNA target sequence for Tbx3 (NM_011535.2,3220-3238).
ccgttcctcaatttgaaca

SEQ ID NO: 449236 - DNA, 19 bp, Mus musculus
  siRNA target sequence for Tbx3 (NM_011535.2,3256-3274).
cgttacagcccctattcca

SEQ ID NO: 449237 - DNA, 19 bp, Mus musculus
  siRNA target sequence for Tbx3 (NM_011535.2,3311-3329).
ccacagctttaccatcaat

SEQ ID NO: 449238 - DNA, 19 bp, Mus musculus
  siRNA target sequence for Tbx3 (NM_198052.1,1996-2014).
cacggatttactatactaa

SEQ ID NO: 449239 - DNA, 19 bp, Mus musculus
  siRNA target sequence for Tbx4 (NM_011536.1,262-280).
gcaggcacggagatgatca

SEQ ID NO: 449240 - DNA, 19 bp, Mus musculus
  siRNA target sequence for Tbx4 (NM_011536.1,341-359).
ccaagaccaagtacatact

SEQ ID NO: 449241 - DNA, 19 bp, Mus musculus
  siRNA target sequence for Tbx4 (NM_011536.1,382-400).
gatgaccatcgctacaagt

SEQ ID NO: 449242 - DNA, 19 bp, Mus musculus
  siRNA target sequence for Tbx4 (NM_011536.1,385-403).
gaccatcgctacaagttct

SEQ ID NO: 449243 - DNA, 19 bp, Mus musculus
  siRNA target sequence for Tbx4 (NM_011536.1,441-459).
ggccatgccaggaagactt

SEQ ID NO: 449244 - DNA, 19 bp, Mus musculus
  siRNA target sequence for Tbx4 (NM_011536.1,444-462).
catgccaggaagactttat

SEQ ID NO: 449245 - DNA, 19 bp, Mus musculus
  siRNA target sequence for Tbx4 (NM_011536.1,616-634).
gccgacgagaacaatgctt

SEQ ID NO: 449246 - DNA, 19 bp, Mus musculus
  siRNA target sequence for Tbx4 (NM_011536.1,618-636).
cgacgagaacaatgctttt

SEQ ID NO: 449247 - DNA, 19 bp, Mus musculus
  siRNA target sequence for Tbx4 (NM_011536.1,1100-1118).
cagtgggggacgatcacta

SEQ ID NO: 449248 - DNA, 19 bp, Mus musculus
  siRNA target sequence for Tbx4 (NM_011536.1,1102-1120).
gtgggggacgatcactatt

SEQ ID NO: 449249 - DNA, 19 bp, Mus musculus
  siRNA target sequence for Tbx4 (NM_011536.1,1153-1171).
ctgagcccttcttattgca

SEQ ID NO: 449250 - DNA, 19 bp, Mus musculus
  siRNA target sequence for Tbx4 (NM_011536.1,1258-1276).
cccccactgagctgtaaca

SEQ ID NO: 449251 - DNA, 19 bp, Mus musculus
  siRNA target sequence for Tbx4 (NM_011536.1,1261-1279).
ccactgagctgtaacatgt

SEQ ID NO: 449252 - DNA, 19 bp, Mus musculus
  siRNA target sequence for Tbx4 (NM_011536.1,1421-1439).
gaaatgcccactttagtgt

SEQ ID NO: 449253 - DNA, 19 bp, Mus musculus
  siRNA target sequence for Tbx4 (NM_011536.1,1593-1611).
gacccgggagtcatcctta

SEQ ID NO: 449254 - DNA, 19 bp, Mus musculus
  siRNA target sequence for Tbx4 (NM_011536.1,1597-1615).
cgggagtcatccttacagt

SEQ ID NO: 449255 - DNA, 19 bp, Mus musculus
  siRNA target sequence for Tbx4 (NM_011536.1,1598-1616).
gggagtcatccttacagta

SEQ ID NO: 449256 - DNA, 19 bp, Mus musculus
  siRNA target sequence for Tbx4 (NM_011536.1,1599-1617).
ggagtcatccttacagtat

SEQ ID NO: 449257 - DNA, 19 bp, Mus musculus
  siRNA target sequence for Tbx5 (NM_011537.1,481-499).
caggtcttgcgattcgaaa

SEQ ID NO: 449258 - DNA, 19 bp, Mus musculus
  siRNA target sequence for Tbx5 (NM_011537.1,576-594).
gaatcaaggtgtttcttca

SEQ ID NO: 449259 - DNA, 19 bp, Mus musculus
  siRNA target sequence for Tbx5 (NM_011537.1,600-618).
gtgaactgtggctgaagtt

SEQ ID NO: 449260 - DNA, 19 bp, Mus musculus
  siRNA target sequence for Tbx5 (NM_011537.1,660-678).
ggagaatgtttcctagtta

SEQ ID NO: 449261 - DNA, 19 bp, Mus musculus
  siRNA target sequence for Tbx5 (NM_011537.1,685-703).
gaaggtgactggccttaat

SEQ ID NO: 449262 - DNA, 19 bp, Mus musculus
  siRNA target sequence for Tbx5 (NM_011537.1,696-714).
gccttaatcccaaaacgaa

SEQ ID NO: 449263 - DNA, 19 bp, Mus musculus
  siRNA target sequence for Tbx5 (NM_011537.1,705-723).
ccaaaacgaagtatattct

SEQ ID NO: 449264 - DNA, 19 bp, Mus musculus
  siRNA target sequence for Tbx5 (NM_011537.1,706-724).
caaaacgaagtatattctt

SEQ ID NO: 449265 - DNA, 19 bp, Mus musculus
  siRNA target sequence for Tbx5 (NM_011537.1,711-729).
cgaagtatattcttctcat

SEQ ID NO: 449266 - DNA, 19 bp, Mus musculus
  siRNA target sequence for Tbx5 (NM_011537.1,741-759).
ccgcagacgaccacagata

SEQ ID NO: 449267 - DNA, 19 bp, Mus musculus
  siRNA target sequence for Tbx5 (NM_011537.1,742-760).
cgcagacgaccacagatat

SEQ ID NO: 449268 - DNA, 19 bp, Mus musculus
  siRNA target sequence for Tbx5 (NM_011537.1,743-761).
gcagacgaccacagatata

SEQ ID NO: 449269 - DNA, 19 bp, Mus musculus
  siRNA target sequence for Tbx5 (NM_011537.1,746-764).
gacgaccacagatataaat

SEQ ID NO: 449270 - DNA, 19 bp, Mus musculus
  siRNA target sequence for Tbx5 (NM_011537.1,748-766).
cgaccacagatataaattt

SEQ ID NO: 449271 - DNA, 19 bp, Mus musculus
  siRNA target sequence for Tbx5 (NM_011537.1,913-931).
ggacccgtttggacacatt

SEQ ID NO: 449272 - DNA, 19 bp, Mus musculus
  siRNA target sequence for Tbx5 (NM_011537.1,914-932).
gacccgtttggacacatta

SEQ ID NO: 449273 - DNA, 19 bp, Mus musculus
  siRNA target sequence for Tbx5 (NM_011537.1,918-936).
cgtttggacacattatcct

SEQ ID NO: 449274 - DNA, 19 bp, Mus musculus
  siRNA target sequence for Tbx5 (NM_011537.1,995-1013).
gggttcggttcaaagaaca

SEQ ID NO: 449275 - DNA, 19 bp, Mus musculus
  siRNA target sequence for Tbx5 (NM_011537.1,1062-1080).
cttcgtaccagaatcacaa

SEQ ID NO: 449276 - DNA, 19 bp, Mus musculus
  siRNA target sequence for Tbx5 (NM_011537.1,1159-1177).
gtctcggatgcaaagtaaa

SEQ ID NO: 449277 - DNA, 19 bp, Mus musculus
  siRNA target sequence for Tbx5 (NM_011537.1,1161-1179).
ctcggatgcaaagtaaaga

SEQ ID NO: 449278 - DNA, 19 bp, Mus musculus
  siRNA target sequence for Tbx5 (NM_011537.1,1259-1277).
ctctccacctcatccaatt

SEQ ID NO: 449279 - DNA, 19 bp, Mus musculus
  siRNA target sequence for Tbx5 (NM_011537.1,1285-1303).
ccagtaccagtgtgagaat

SEQ ID NO: 449280 - DNA, 19 bp, Mus musculus
  siRNA target sequence for Tbx5 (NM_011537.1,1384-1402).
ctgtaccaagaggaaagat

SEQ ID NO: 449281 - DNA, 19 bp, Mus musculus
  siRNA target sequence for Tbx5 (NM_011537.1,1416-1434).
gcacggagcacccctataa

SEQ ID NO: 449282 - DNA, 19 bp, Mus musculus
  siRNA target sequence for Tbx5 (NM_011537.1,1419-1437).
cggagcacccctataagaa

SEQ ID NO: 449283 - DNA, 19 bp, Mus musculus
  siRNA target sequence for Tbx5 (NM_011537.1,1540-1558).
gcggcaggcctgcatgtat

SEQ ID NO: 449284 - DNA, 19 bp, Mus musculus
  siRNA target sequence for Tbx5 (NM_011537.1,1601-1619).
gacatcagctgtaacacat

SEQ ID NO: 449285 - DNA, 19 bp, Mus musculus
  siRNA target sequence for Tbx5 (NM_011537.1,1952-1970).
ccagagtggagtgagaata

SEQ ID NO: 449286 - DNA, 19 bp, Mus musculus
  siRNA target sequence for Tbx5 (NM_011537.1,1955-1973).
gagtggagtgagaatagct

SEQ ID NO: 449287 - DNA, 19 bp, Mus musculus
  siRNA target sequence for Tbx6 (NM_011538.1,128-146).
gttaccgctaccctgattt

SEQ ID NO: 449288 - DNA, 19 bp, Mus musculus
  siRNA target sequence for Tbx6 (NM_011538.1,132-150).
ccgctaccctgatttggat

SEQ ID NO: 449289 - DNA, 19 bp, Mus musculus
  siRNA target sequence for Tbx6 (NM_011538.1,133-151).
cgctaccctgatttggata

SEQ ID NO: 449290 - DNA, 19 bp, Mus musculus
  siRNA target sequence for Tbx6 (NM_011538.1,389-407).
ctgcttgccgagtatcagt

SEQ ID NO: 449291 - DNA, 19 bp, Mus musculus
  siRNA target sequence for Tbx6 (NM_011538.1,691-709).
gtgagagccacccaactat

SEQ ID NO: 449292 - DNA, 19 bp, Mus musculus
  siRNA target sequence for Tbx6 (NM_011538.1,828-846).
caaaggtttccgagaaaat

SEQ ID NO: 449293 - DNA, 19 bp, Mus musculus
  siRNA target sequence for Tbx6 (NM_011538.1,1239-1257).
cctttgccccacacttcat

SEQ ID NO: 449294 - DNA, 19 bp, Mus musculus
  siRNA target sequence for Tbx6 (NM_011538.1,1313-1331).
ggatccaagccaatgtact

SEQ ID NO: 449295 - DNA, 19 bp, Mus musculus
  siRNA target sequence for Tbx6 (NM_011538.1,1330-1348).
ctgagcctcggtgtagtaa

SEQ ID NO: 449296 - DNA, 19 bp, Mus musculus
  siRNA target sequence for Tcea1 (NM_011541.3,173-191).
gcggctggcgcattggatt

SEQ ID NO: 449297 - DNA, 19 bp, Mus musculus
  siRNA target sequence for Tcea1 (NM_011541.3,174-192).
cggctggcgcattggattt

SEQ ID NO: 449298 - DNA, 19 bp, Mus musculus
  siRNA target sequence for Tcea1 (NM_011541.3,177-195).
ctggcgcattggatttgct

SEQ ID NO: 449299 - DNA, 19 bp, Mus musculus
  siRNA target sequence for Tcea1 (NM_011541.3,217-235).
catgaccctagaattgcta

SEQ ID NO: 449300 - DNA, 19 bp, Mus musculus
  siRNA target sequence for Tcea1 (NM_011541.3,232-250).
gctacagtccacaagaatt

SEQ ID NO: 449301 - DNA, 19 bp, Mus musculus
  siRNA target sequence for Tcea1 (NM_011541.3,236-254).
cagtccacaagaattggaa

SEQ ID NO: 449302 - DNA, 19 bp, Mus musculus
  siRNA target sequence for Tcea1 (NM_011541.3,344-362).
gatggaccatcaactgata

SEQ ID NO: 449303 - DNA, 19 bp, Mus musculus
  siRNA target sequence for Tcea1 (NM_011541.3,348-366).
gaccatcaactgataaaga

SEQ ID NO: 449304 - DNA, 19 bp, Mus musculus
  siRNA target sequence for Tcea1 (NM_011541.3,392-410).
gcaatttcatcacagaata

SEQ ID NO: 449305 - DNA, 19 bp, Mus musculus
  siRNA target sequence for Tcea1 (NM_011541.3,469-487).
gacaaatgctcgagataca

SEQ ID NO: 449306 - DNA, 19 bp, Mus musculus
  siRNA target sequence for Tcea1 (NM_011541.3,471-489).
caaatgctcgagatacata

SEQ ID NO: 449307 - DNA, 19 bp, Mus musculus
  siRNA target sequence for Tcea2 (NM_009326.1,163-181).
cgcggagggagctatggat

SEQ ID NO: 449308 - DNA, 19 bp, Mus musculus
  siRNA target sequence for Tcea2 (NM_009326.1,165-183).
cggagggagctatggattt

SEQ ID NO: 449309 - DNA, 19 bp, Mus musculus
  siRNA target sequence for Tcea2 (NM_009326.1,196-214).
gaagaatatgcctattaca

SEQ ID NO: 449310 - DNA, 19 bp, Mus musculus
  siRNA target sequence for Tcea2 (NM_009326.1,262-280).
gcgcaagcagagttcagat

SEQ ID NO: 449311 - DNA, 19 bp, Mus musculus
  siRNA target sequence for Tcea2 (NM_009326.1,462-480).
ctccaaggatcactacatt

SEQ ID NO: 449312 - DNA, 19 bp, Mus musculus
  siRNA target sequence for Tcea2 (NM_009326.1,498-516).
cctgtgatgctgtacgaaa

SEQ ID NO: 449313 - DNA, 19 bp, Mus musculus
  siRNA target sequence for Tcea2 (NM_009326.1,501-519).
gtgatgctgtacgaaacaa

SEQ ID NO: 449314 - DNA, 19 bp, Mus musculus
  siRNA target sequence for Tcea2 (NM_009326.1,503-521).
gatgctgtacgaaacaaat

SEQ ID NO: 449315 - DNA, 19 bp, Mus musculus
  siRNA target sequence for Tcea2 (NM_009326.1,622-640).
cctggacgtgggaaatact

SEQ ID NO: 449316 - DNA, 19 bp, Mus musculus
  siRNA target sequence for Tcea2 (NM_009326.1,661-679).
ggtgcggagccgaatctct

SEQ ID NO: 449317 - DNA, 19 bp, Mus musculus
  siRNA target sequence for Tcea2 (NM_009326.1,662-680).
gtgcggagccgaatctcta

SEQ ID NO: 449318 - DNA, 19 bp, Mus musculus
  siRNA target sequence for Tcea2 (NM_009326.1,704-722).
ggtctacggcggaatgtgt

SEQ ID NO: 449319 - DNA, 19 bp, Mus musculus
  siRNA target sequence for Tcea2 (NM_009326.1,705-723).
gtctacggcggaatgtgtt

SEQ ID NO: 449320 - DNA, 19 bp, Mus musculus
  siRNA target sequence for Tcea2 (NM_009326.1,942-960).
ccatgactacctatgttgt

SEQ ID NO: 449321 - DNA, 19 bp, Mus musculus
  siRNA target sequence for Tcea3 (NM_011542.1,443-461).
gggggagagcccaaaacta

SEQ ID NO: 449322 - DNA, 19 bp, Mus musculus
  siRNA target sequence for Tcea3 (NM_011542.1,528-546).
ccaacagcagcaaatctaa

SEQ ID NO: 449323 - DNA, 19 bp, Mus musculus
  siRNA target sequence for Tcea3 (NM_011542.1,637-655).
ctctgtccgggacaaatgt

SEQ ID NO: 449324 - DNA, 19 bp, Mus musculus
  siRNA target sequence for Tcea3 (NM_011542.1,724-742).
gctggcctcagaaatagaa

SEQ ID NO: 449325 - DNA, 19 bp, Mus musculus
  siRNA target sequence for Tcea3 (NM_011542.1,1074-1092).
ccatgaccacttttgtctt

SEQ ID NO: 449326 - DNA, 19 bp, Mus musculus
  siRNA target sequence for Tcea3 (NM_011542.1,1075-1093).
catgaccacttttgtctta

SEQ ID NO: 449327 - DNA, 19 bp, Mus musculus
  siRNA target sequence for Tcea3 (NM_011542.1,1080-1098).
ccacttttgtcttatgcaa

SEQ ID NO: 449328 - DNA, 19 bp, Mus musculus
  siRNA target sequence for Tcea3 (NM_011542.1,1081-1099).
cacttttgtcttatgcaat

SEQ ID NO: 449329 - DNA, 19 bp, Mus musculus
  siRNA target sequence for Tcf1 (NM_009327.1,398-416).
cgcgtggctctgaagatga

SEQ ID NO: 449330 - DNA, 19 bp, Mus musculus
  siRNA target sequence for Tcf1 (NM_009327.1,441-459).
cgcgccacccattctgaaa

SEQ ID NO: 449331 - DNA, 19 bp, Mus musculus
  siRNA target sequence for Tcf1 (NM_009327.1,443-461).
cgccacccattctgaaaga

SEQ ID NO: 449332 - DNA, 19 bp, Mus musculus
  siRNA target sequence for Tcf1 (NM_009327.1,504-522).
cgtggtggagtcacttctt

SEQ ID NO: 449333 - DNA, 19 bp, Mus musculus
  siRNA target sequence for Tcf1 (NM_009327.1,741-759).
gcagggcggactgattgaa

SEQ ID NO: 449334 - DNA, 19 bp, Mus musculus
  siRNA target sequence for Tcf1 (NM_009327.1,770-788).
gcgatgagctgccaactaa

SEQ ID NO: 449335 - DNA, 19 bp, Mus musculus
  siRNA target sequence for Tcf1 (NM_009327.1,772-790).
gatgagctgccaactaaga

SEQ ID NO: 449336 - DNA, 19 bp, Mus musculus
  siRNA target sequence for Tcf1 (NM_009327.1,796-814).
cgtaggaaccggttcaagt

SEQ ID NO: 449337 - DNA, 19 bp, Mus musculus
  siRNA target sequence for Tcf1 (NM_009327.1,846-864).
ggcctacgagaggcaaaaa

SEQ ID NO: 449338 - DNA, 19 bp, Mus musculus
  siRNA target sequence for Tcf1 (NM_009327.1,847-865).
gcctacgagaggcaaaaaa

SEQ ID NO: 449339 - DNA, 19 bp, Mus musculus
  siRNA target sequence for Tcf1 (NM_009327.1,848-866).
cctacgagaggcaaaaaaa

SEQ ID NO: 449340 - DNA, 19 bp, Mus musculus
  siRNA target sequence for Tcf1 (NM_009327.1,1234-1252).
gcggccttacaccaagtat

SEQ ID NO: 449341 - DNA, 19 bp, Mus musculus
  siRNA target sequence for Tcf1 (NM_009327.1,1750-1768).
ccgcagaccatgttgatca

SEQ ID NO: 449342 - DNA, 19 bp, Mus musculus
  siRNA target sequence for Tcf1 (NM_009327.1,1968-1986).
cagcagcctggtgttgtat

SEQ ID NO: 449343 - DNA, 19 bp, Mus musculus
  siRNA target sequence for Tcf1 (NM_009327.1,2036-2054).
gtgtcatcgagacttttat

SEQ ID NO: 449344 - DNA, 19 bp, Mus musculus
  siRNA target sequence for Tcf1 (NM_009327.1,2038-2056).
gtcatcgagacttttatct

SEQ ID NO: 449345 - DNA, 19 bp, Mus musculus
  siRNA target sequence for Tcf2 (NM_009330.1,17-35).
cgtcgctccagcaagaact

SEQ ID NO: 449346 - DNA, 19 bp, Mus musculus
  siRNA target sequence for Tcf2 (NM_009330.1,171-189).
caccaagccggttttccat

SEQ ID NO: 449347 - DNA, 19 bp, Mus musculus
  siRNA target sequence for Tcf2 (NM_009330.1,353-371).
cgtggagggctgccaaaat

SEQ ID NO: 449348 - DNA, 19 bp, Mus musculus
  siRNA target sequence for Tcf2 (NM_009330.1,356-374).
ggagggctgccaaaatgat

SEQ ID NO: 449349 - DNA, 19 bp, Mus musculus
  siRNA target sequence for Tcf2 (NM_009330.1,620-638).
cagagttcagtcaacagaa

SEQ ID NO: 449350 - DNA, 19 bp, Mus musculus
  siRNA target sequence for Tcf2 (NM_009330.1,721-739).
gcatcccagcaaattttgt

SEQ ID NO: 449351 - DNA, 19 bp, Mus musculus
  siRNA target sequence for Tcf2 (NM_009330.1,745-763).
gcctacgaccggcaaaaga

SEQ ID NO: 449352 - DNA, 19 bp, Mus musculus
  siRNA target sequence for Tcf2 (NM_009330.1,746-764).
cctacgaccggcaaaagaa

SEQ ID NO: 449353 - DNA, 19 bp, Mus musculus
  siRNA target sequence for Tcf2 (NM_009330.1,747-765).
ctacgaccggcaaaagaat

SEQ ID NO: 449354 - DNA, 19 bp, Mus musculus
  siRNA target sequence for Tcf2 (NM_009330.1,801-819).
gtgtaacagggcagaatgt

SEQ ID NO: 449355 - DNA, 19 bp, Mus musculus
  siRNA target sequence for Tcf2 (NM_009330.1,803-821).
gtaacagggcagaatgttt

SEQ ID NO: 449356 - DNA, 19 bp, Mus musculus
  siRNA target sequence for Tcf2 (NM_009330.1,940-958).
gccatggatgcctatagct

SEQ ID NO: 449357 - DNA, 19 bp, Mus musculus
  siRNA target sequence for Tcf2 (NM_009330.1,1056-1074).
caaccagccgggaaacaat

SEQ ID NO: 449358 - DNA, 19 bp, Mus musculus
  siRNA target sequence for Tcf2 (NM_009330.1,1094-1112).
caatcagtcaccatggtaa

SEQ ID NO: 449359 - DNA, 19 bp, Mus musculus
  siRNA target sequence for Tcf2 (NM_009330.1,1125-1143).
gaccagccagtcggtttta

SEQ ID NO: 449360 - DNA, 19 bp, Mus musculus
  siRNA target sequence for Tcf2 (NM_009330.1,1240-1258).
gtcagcaccttgacgaata

SEQ ID NO: 449361 - DNA, 19 bp, Mus musculus
  siRNA target sequence for Tcf2 (NM_009330.1,1244-1262).
gcaccttgacgaatatcca

SEQ ID NO: 449362 - DNA, 19 bp, Mus musculus
  siRNA target sequence for Tcf2 (NM_009330.1,1638-1656).
cagcatgtcttccagtaaa

SEQ ID NO: 449363 - DNA, 19 bp, Mus musculus
  siRNA target sequence for Tcf2 (NM_009330.1,1640-1658).
gcatgtcttccagtaaaca

SEQ ID NO: 449364 - DNA, 19 bp, Mus musculus
  siRNA target sequence for Tcfap2a (NM_011547.2,365-383).
ctgacggataatatcaagt

SEQ ID NO: 449365 - DNA, 19 bp, Mus musculus
  siRNA target sequence for Tcfap2a (NM_011547.2,445-463).
gggcactgtaggtcaatct

SEQ ID NO: 449366 - DNA, 19 bp, Mus musculus
  siRNA target sequence for Tcfap2a (NM_011547.2,836-854).
gtagaagacccgggtatta

SEQ ID NO: 449367 - DNA, 19 bp, Mus musculus
  siRNA target sequence for Tcfap2a (NM_011547.2,839-857).
gaagacccgggtattaaca

SEQ ID NO: 449368 - DNA, 19 bp, Mus musculus
  siRNA target sequence for Tcfap2a (NM_011547.2,859-877).
cccagatcaaactgtaatt

SEQ ID NO: 449369 - DNA, 19 bp, Mus musculus
  siRNA target sequence for Tcfap2a (NM_011547.2,860-878).
ccagatcaaactgtaatta

SEQ ID NO: 449370 - DNA, 19 bp, Mus musculus
  siRNA target sequence for Tcfap2a (NM_011547.2,920-938).
gtctccgccatccctatta

SEQ ID NO: 449371 - DNA, 19 bp, Mus musculus
  siRNA target sequence for Tcfap2a (NM_011547.2,924-942).
ccgccatccctattaacaa

SEQ ID NO: 449372 - DNA, 19 bp, Mus musculus
  siRNA target sequence for Tcfap2a (NM_011547.2,971-989).
cccaacgaagtcttctgtt

SEQ ID NO: 449373 - DNA, 19 bp, Mus musculus
  siRNA target sequence for Tcfap2a (NM_011547.2,1112-1130).
cggagagcgaagtctaaga

SEQ ID NO: 449374 - DNA, 19 bp, Mus musculus
  siRNA target sequence for Tcfap2a (NM_011547.2,1113-1131).
ggagagcgaagtctaagaa

SEQ ID NO: 449375 - DNA, 19 bp, Mus musculus
  siRNA target sequence for Tcfap2a (NM_011547.2,1134-1152).
gagggagatctttaagaga

SEQ ID NO: 449376 - DNA, 19 bp, Mus musculus
  siRNA target sequence for Tcfap2a (NM_011547.2,1180-1198).
gccagcagggagacgtaaa

SEQ ID NO: 449377 - DNA, 19 bp, Mus musculus
  siRNA target sequence for Tcfap2a (NM_011547.2,1266-1284).
ggtacgtgtgcgaaactga

SEQ ID NO: 449378 - DNA, 19 bp, Mus musculus
  siRNA target sequence for Tcfap2a (NM_011547.2,1267-1285).
gtacgtgtgcgaaactgaa

SEQ ID NO: 449379 - DNA, 19 bp, Mus musculus
  siRNA target sequence for Tcfap2a (NM_011547.2,1298-1316).
gcagtagcagaatttctca

SEQ ID NO: 449380 - DNA, 19 bp, Mus musculus
  siRNA target sequence for Tcfap2a (NM_011547.2,1340-1358).
gagcaagtggcaagaaaaa

SEQ ID NO: 449381 - DNA, 19 bp, Mus musculus
  siRNA target sequence for Tcfap2a (NM_011547.2,1473-1491).
gttgcttgacccacttcaa

SEQ ID NO: 449382 - DNA, 19 bp, Mus musculus
  siRNA target sequence for Tcfap2b (NM_009334.1,221-239).
ggaaactcgtggagaatgt

SEQ ID NO: 449383 - DNA, 19 bp, Mus musculus
  siRNA target sequence for Tcfap2b (NM_009334.1,743-761).
gcggcatgaacctattgga

SEQ ID NO: 449384 - DNA, 19 bp, Mus musculus
  siRNA target sequence for Tcfap2b (NM_009334.1,759-777).
ggaccagtcagtcattaaa

SEQ ID NO: 449385 - DNA, 19 bp, Mus musculus
  siRNA target sequence for Tcfap2b (NM_009334.1,760-778).
gaccagtcagtcattaaaa

SEQ ID NO: 449386 - DNA, 19 bp, Mus musculus
  siRNA target sequence for Tcfap2b (NM_009334.1,809-827).
ctctaatgatgaataaaga

SEQ ID NO: 449387 - DNA, 19 bp, Mus musculus
  siRNA target sequence for Tcfap2b (NM_009334.1,852-870).
caacaccggcgaggtattt

SEQ ID NO: 449388 - DNA, 19 bp, Mus musculus
  siRNA target sequence for Tcfap2b (NM_009334.1,895-913).
ctactcagttcaacttcaa

SEQ ID NO: 449389 - DNA, 19 bp, Mus musculus
  siRNA target sequence for Tcfap2b (NM_009334.1,898-916).
ctcagttcaacttcaaagt

SEQ ID NO: 449390 - DNA, 19 bp, Mus musculus
  siRNA target sequence for Tcfap2b (NM_009334.1,1078-1096).
cgcaaagcagcaaatgtca

SEQ ID NO: 449391 - DNA, 19 bp, Mus musculus
  siRNA target sequence for Tcfap2b (NM_009334.1,1139-1157).
ctcgggatttcgggtatat

SEQ ID NO: 449392 - DNA, 19 bp, Mus musculus
  siRNA target sequence for Tcfap2b (NM_009334.1,1141-1159).
cgggatttcgggtatattt

SEQ ID NO: 449393 - DNA, 19 bp, Mus musculus
  siRNA target sequence for Tcfap2b (NM_009334.1,1143-1161).
ggatttcgggtatatttgt

SEQ ID NO: 449394 - DNA, 19 bp, Mus musculus
  siRNA target sequence for Tcfap2b (NM_009334.1,1149-1167).
cgggtatatttgtgaaaca

SEQ ID NO: 449395 - DNA, 19 bp, Mus musculus
  siRNA target sequence for Tcfap2b (NM_009334.1,1183-1201).
gccgtgtccgagtatttga

SEQ ID NO: 449396 - DNA, 19 bp, Mus musculus
  siRNA target sequence for Tcfap2b (NM_009334.1,1184-1202).
ccgtgtccgagtatttgaa

SEQ ID NO: 449397 - DNA, 19 bp, Mus musculus
  siRNA target sequence for Tcfap2b (NM_009334.1,1186-1204).
gtgtccgagtatttgaaca

SEQ ID NO: 449398 - DNA, 19 bp, Mus musculus
  siRNA target sequence for Tcfap2b (NM_009334.1,1508-1526).
gggaaggcccaggtagtaa

SEQ ID NO: 449399 - DNA, 19 bp, Mus musculus
  siRNA target sequence for Tcfap2c (NM_009335.1,227-245).
gtggaaaataacagataat

SEQ ID NO: 449400 - DNA, 19 bp, Mus musculus
  siRNA target sequence for Tcfap2c (NM_009335.1,275-293).
ccacgactcgagcagtaat

SEQ ID NO: 449401 - DNA, 19 bp, Mus musculus
  siRNA target sequence for Tcfap2c (NM_009335.1,317-335).
ctcctctccgggacaacat

SEQ ID NO: 449402 - DNA, 19 bp, Mus musculus
  siRNA target sequence for Tcfap2c (NM_009335.1,430-448).
cgcagtccgccgaccatta

SEQ ID NO: 449403 - DNA, 19 bp, Mus musculus
  siRNA target sequence for Tcfap2c (NM_009335.1,432-450).
cagtccgccgaccattact

SEQ ID NO: 449404 - DNA, 19 bp, Mus musculus
  siRNA target sequence for Tcfap2c (NM_009335.1,575-593).
cagccgctctgcaagtcta

SEQ ID NO: 449405 - DNA, 19 bp, Mus musculus
  siRNA target sequence for Tcfap2c (NM_009335.1,577-595).
gccgctctgcaagtctaat

SEQ ID NO: 449406 - DNA, 19 bp, Mus musculus
  siRNA target sequence for Tcfap2c (NM_009335.1,578-596).
ccgctctgcaagtctaata

SEQ ID NO: 449407 - DNA, 19 bp, Mus musculus
  siRNA target sequence for Tcfap2c (NM_009335.1,798-816).
cgcaaaggacccatttcga

SEQ ID NO: 449408 - DNA, 19 bp, Mus musculus
  siRNA target sequence for Tcfap2c (NM_009335.1,926-944).
cacgtcgaagtacaaagta

SEQ ID NO: 449409 - DNA, 19 bp, Mus musculus
  siRNA target sequence for Tcfap2c (NM_009335.1,929-947).
gtcgaagtacaaagtaact

SEQ ID NO: 449410 - DNA, 19 bp, Mus musculus
  siRNA target sequence for Tcfap2c (NM_009335.1,1058-1076).
gaagttggacaaaattgga

SEQ ID NO: 449411 - DNA, 19 bp, Mus musculus
  siRNA target sequence for Tcfap2c (NM_009335.1,1161-1179).
cgggacttcgcctatgtct

SEQ ID NO: 449412 - DNA, 19 bp, Mus musculus
  siRNA target sequence for Tcfap2c (NM_009335.1,1203-1221).
gcggtggctgactatttaa

SEQ ID NO: 449413 - DNA, 19 bp, Mus musculus
  siRNA target sequence for Tcfap2c (NM_009335.1,1206-1224).
gtggctgactatttaacga

SEQ ID NO: 449414 - DNA, 19 bp, Mus musculus
  siRNA target sequence for Tcfap2c (NM_009335.1,1254-1272).
gccacgcggaagagtatgt

SEQ ID NO: 449415 - DNA, 19 bp, Mus musculus
  siRNA target sequence for Tcfap2c (NM_009335.1,1258-1276).
cgcggaagagtatgttgtt

SEQ ID NO: 449416 - DNA, 19 bp, Mus musculus
  siRNA target sequence for Tcfap2c (NM_009335.1,1358-1376).
ggtcttggagccgaacata

SEQ ID NO: 449417 - DNA, 19 bp, Mus musculus
  siRNA target sequence for Tcfap2c (NM_009335.1,1361-1379).
cttggagccgaacatacaa

SEQ ID NO: 449418 - DNA, 19 bp, Mus musculus
  siRNA target sequence for Tcfap2c (NM_009335.1,1365-1383).
gagccgaacatacaaaact

SEQ ID NO: 449419 - DNA, 19 bp, Mus musculus
  siRNA target sequence for Tcfap2c (NM_009335.1,1443-1461).
gtctccgcagtgcagaatt

SEQ ID NO: 449420 - DNA, 19 bp, Mus musculus
  siRNA target sequence for Tcfap2c (NM_009335.1,1449-1467).
gcagtgcagaattatatca

SEQ ID NO: 449421 - DNA, 19 bp, Mus musculus
  siRNA target sequence for Tcfap2c (NM_009335.1,1473-1491).
gctctaatcgccatcgata

SEQ ID NO: 449422 - DNA, 19 bp, Mus musculus
  siRNA target sequence for Tcfap2c (NM_009335.1,1474-1492).
ctctaatcgccatcgataa

SEQ ID NO: 449423 - DNA, 19 bp, Mus musculus
  siRNA target sequence for Tcfap2c (NM_009335.1,1476-1494).
ctaatcgccatcgataagt

SEQ ID NO: 449424 - DNA, 19 bp, Mus musculus
  siRNA target sequence for Tcfap2d (NM_153154.1,304-322).
cgtcacgacggatcaaaca

SEQ ID NO: 449425 - DNA, 19 bp, Mus musculus
  siRNA target sequence for Tcfap2d (NM_153154.1,317-335).
caaacagctaccgtttgat

SEQ ID NO: 449426 - DNA, 19 bp, Mus musculus
  siRNA target sequence for Tcfap2d (NM_153154.1,352-370).
gagtccgtagccaattcca

SEQ ID NO: 449427 - DNA, 19 bp, Mus musculus
  siRNA target sequence for Tcfap2d (NM_153154.1,386-404).
cctcctctcctttaactta

SEQ ID NO: 449428 - DNA, 19 bp, Mus musculus
  siRNA target sequence for Tcfap2d (NM_153154.1,583-601).
ggggagcccaccgacttta

SEQ ID NO: 449429 - DNA, 19 bp, Mus musculus
  siRNA target sequence for Tcfap2d (NM_153154.1,584-602).
gggagcccaccgactttat

SEQ ID NO: 449430 - DNA, 19 bp, Mus musculus
  siRNA target sequence for Tcfap2d (NM_153154.1,585-603).
ggagcccaccgactttatt

SEQ ID NO: 449431 - DNA, 19 bp, Mus musculus
  siRNA target sequence for Tcfap2d (NM_153154.1,590-608).
ccaccgactttattaacct

SEQ ID NO: 449432 - DNA, 19 bp, Mus musculus
  siRNA target sequence for Tcfap2d (NM_153154.1,812-830).
cccagtgtgggattgttct

SEQ ID NO: 449433 - DNA, 19 bp, Mus musculus
  siRNA target sequence for Tcfap2d (NM_153154.1,860-878).
gtggcacctgtgtagtcaa

SEQ ID NO: 449434 - DNA, 19 bp, Mus musculus
  siRNA target sequence for Tcfap2d (NM_153154.1,982-1000).
cccgagtgcctcaatgctt

SEQ ID NO: 449435 - DNA, 19 bp, Mus musculus
  siRNA target sequence for Tcfap2d (NM_153154.1,1003-1021).
cttctgggaggcattctga

SEQ ID NO: 449436 - DNA, 19 bp, Mus musculus
  siRNA target sequence for Tcfap2d (NM_153154.1,1018-1036).
ctgaggagagcaaaatcca

SEQ ID NO: 449437 - DNA, 19 bp, Mus musculus
  siRNA target sequence for Tcfap2d (NM_153154.1,1023-1041).
gagagcaaaatccaagaat

SEQ ID NO: 449438 - DNA, 19 bp, Mus musculus
  siRNA target sequence for Tcfap2d (NM_153154.1,1069-1087).
gataggcttggcctaaact

SEQ ID NO: 449439 - DNA, 19 bp, Mus musculus
  siRNA target sequence for Tcfap2d (NM_153154.1,1117-1135).
gttaccttgctcacttctt

SEQ ID NO: 449440 - DNA, 19 bp, Mus musculus
  siRNA target sequence for Tcfap2d (NM_153154.1,1121-1139).
ccttgctcacttctttagt

SEQ ID NO: 449441 - DNA, 19 bp, Mus musculus
  siRNA target sequence for Tcfap2d (NM_153154.1,1218-1236).
gcatctcgccagacaacat

SEQ ID NO: 449442 - DNA, 19 bp, Mus musculus
  siRNA target sequence for Tcfap2d (NM_153154.1,1219-1237).
catctcgccagacaacata

SEQ ID NO: 449443 - DNA, 19 bp, Mus musculus
  siRNA target sequence for Tcfap2d (NM_153154.1,1347-1365).
cagacccactcccattcta

SEQ ID NO: 449444 - DNA, 19 bp, Mus musculus
  siRNA target sequence for Tcfap2d (NM_153154.1,1349-1367).
gacccactcccattctaga

SEQ ID NO: 449445 - DNA, 19 bp, Mus musculus
  siRNA target sequence for Tcfap2d (NM_153154.1,1372-1390).
gacatccagaggcacttaa

SEQ ID NO: 449446 - DNA, 19 bp, Mus musculus
  siRNA target sequence for Tcfap2d (NM_153154.1,1374-1392).
catccagaggcacttaaca

SEQ ID NO: 449447 - DNA, 19 bp, Mus musculus
  siRNA target sequence for Tcfap2d (NM_153154.1,1377-1395).
ccagaggcacttaacacat

SEQ ID NO: 449448 - DNA, 19 bp, Mus musculus
  siRNA target sequence for Tcfap2d (NM_153154.1,1383-1401).
gcacttaacacatttcagt

SEQ ID NO: 449449 - DNA, 19 bp, Mus musculus
  siRNA target sequence for Tcfap2d (NM_153154.1,1384-1402).
cacttaacacatttcagtt

SEQ ID NO: 449450 - DNA, 19 bp, Mus musculus
  siRNA target sequence for Tcfap2d (NM_153154.1,1465-1483).
ctcagtgagatgcttaact

SEQ ID NO: 449451 - DNA, 19 bp, Mus musculus
  siRNA target sequence for Tead1 (NM_009346.1,287-305).
cgtctggagtcctgatatt

SEQ ID NO: 449452 - DNA, 19 bp, Mus musculus
  siRNA target sequence for Tead1 (NM_009346.1,350-368).
gaggagaaaaatcatctta

SEQ ID NO: 449453 - DNA, 19 bp, Mus musculus
  siRNA target sequence for Tead1 (NM_009346.1,370-388).
cagacgaaggcaaaatgta

SEQ ID NO: 449454 - DNA, 19 bp, Mus musculus
  siRNA target sequence for Tead1 (NM_009346.1,380-398).
caaaatgtatggtagaaat

SEQ ID NO: 449455 - DNA, 19 bp, Mus musculus
  siRNA target sequence for Tead1 (NM_009346.1,404-422).
gatagccagatacatcaaa

SEQ ID NO: 449456 - DNA, 19 bp, Mus musculus
  siRNA target sequence for Tead1 (NM_009346.1,487-505).
ggaaatctcgtgattttca

SEQ ID NO: 449457 - DNA, 19 bp, Mus musculus
  siRNA target sequence for Tead1 (NM_009346.1,488-506).
gaaatctcgtgattttcat

SEQ ID NO: 449458 - DNA, 19 bp, Mus musculus
  siRNA target sequence for Tead1 (NM_009346.1,504-522).
cattccaagctgaaggtaa

SEQ ID NO: 449459 - DNA, 19 bp, Mus musculus
  siRNA target sequence for Tead1 (NM_009346.1,815-833).
ctggcagggccgatccatt

SEQ ID NO: 449460 - DNA, 19 bp, Mus musculus
  siRNA target sequence for Tead1 (NM_009346.1,857-875).
ggaattctccgctttcctt

SEQ ID NO: 449461 - DNA, 19 bp, Mus musculus
  siRNA target sequence for Tead1 (NM_009346.1,890-908).
cccagactcgtacaacaaa

SEQ ID NO: 449462 - DNA, 19 bp, Mus musculus
  siRNA target sequence for Tead1 (NM_009346.1,892-910).
cagactcgtacaacaaaca

SEQ ID NO: 449463 - DNA, 19 bp, Mus musculus
  siRNA target sequence for Tead1 (NM_009346.1,930-948).
catgccaaccattcttaca

SEQ ID NO: 449464 - DNA, 19 bp, Mus musculus
  siRNA target sequence for Tead1 (NM_009346.1,969-987).
gtggacattcgtcagatat

SEQ ID NO: 449465 - DNA, 19 bp, Mus musculus
  siRNA target sequence for Tead1 (NM_009346.1,971-989).
ggacattcgtcagatatat

SEQ ID NO: 449466 - DNA, 19 bp, Mus musculus
  siRNA target sequence for Tead1 (NM_009346.1,978-996).
cgtcagatatatgacaaat

SEQ ID NO: 449467 - DNA, 19 bp, Mus musculus
  siRNA target sequence for Tead1 (NM_009346.1,1074-1092).
gcggacttaaactgcaata

SEQ ID NO: 449468 - DNA, 19 bp, Mus musculus
  siRNA target sequence for Tead1 (NM_009346.1,1075-1093).
cggacttaaactgcaatat

SEQ ID NO: 449469 - DNA, 19 bp, Mus musculus
  siRNA target sequence for Tead1 (NM_009346.1,1184-1202).
ctttgggaaacaagtagta

SEQ ID NO: 449470 - DNA, 19 bp, Mus musculus
  siRNA target sequence for Tead1 (NM_009346.1,1242-1260).
cgattcgtgtaccgaataa

SEQ ID NO: 449471 - DNA, 19 bp, Mus musculus
  siRNA target sequence for Tead1 (NM_009346.1,1243-1261).
gattcgtgtaccgaataaa

SEQ ID NO: 449472 - DNA, 19 bp, Mus musculus
  siRNA target sequence for Tead1 (NM_009346.1,1263-1281).
cgctcgccaatgtgtgaat

SEQ ID NO: 449473 - DNA, 19 bp, Mus musculus
  siRNA target sequence for Tead1 (NM_009346.1,1264-1282).
gctcgccaatgtgtgaata

SEQ ID NO: 449474 - DNA, 19 bp, Mus musculus
  siRNA target sequence for Tead1 (NM_009346.1,1265-1283).
ctcgccaatgtgtgaatat

SEQ ID NO: 449475 - DNA, 19 bp, Mus musculus
  siRNA target sequence for Tead1 (NM_009346.1,1267-1285).
cgccaatgtgtgaatatat

SEQ ID NO: 449476 - DNA, 19 bp, Mus musculus
  siRNA target sequence for Tead1 (NM_009346.1,1311-1329).
cacctaccagagaaatata

SEQ ID NO: 449477 - DNA, 19 bp, Mus musculus
  siRNA target sequence for Tead1 (NM_009346.1,1347-1365).
gaaaacttcaccatattat

SEQ ID NO: 449478 - DNA, 19 bp, Mus musculus
  siRNA target sequence for Tead1 (NM_009346.1,1401-1419).
ctctgcatggcctgtgtat

SEQ ID NO: 449479 - DNA, 19 bp, Mus musculus
  siRNA target sequence for Tead1 (NM_009346.1,1406-1424).
catggcctgtgtatttgaa

SEQ ID NO: 449480 - DNA, 19 bp, Mus musculus
  siRNA target sequence for Tead1 (NM_009346.1,1416-1434).
gtatttgaagtctcgaata

SEQ ID NO: 449481 - DNA, 19 bp, Mus musculus
  siRNA target sequence for Tead1 (NM_009346.1,1443-1461).
ggagcacagcaccatatct

SEQ ID NO: 449482 - DNA, 19 bp, Mus musculus
  siRNA target sequence for Tead1 (NM_009346.1,1446-1464).
gcacagcaccatatctaca

SEQ ID NO: 449483 - DNA, 19 bp, Mus musculus
  siRNA target sequence for Tead2 (NM_011565.2,274-292).
gtggccgtcgcaagatcat

SEQ ID NO: 449484 - DNA, 19 bp, Mus musculus
  siRNA target sequence for Tead2 (NM_011565.2,401-419).
ggttttggctcgaaggaaa

SEQ ID NO: 449485 - DNA, 19 bp, Mus musculus
  siRNA target sequence for Tead2 (NM_011565.2,402-420).
gttttggctcgaaggaaat

SEQ ID NO: 449486 - DNA, 19 bp, Mus musculus
  siRNA target sequence for Tead2 (NM_011565.2,550-568).
ctcaggccactgagctttt

SEQ ID NO: 449487 - DNA, 19 bp, Mus musculus
  siRNA target sequence for Tead2 (NM_011565.2,765-783).
cgcctgcagctgatagagt

SEQ ID NO: 449488 - DNA, 19 bp, Mus musculus
  siRNA target sequence for Tead2 (NM_011565.2,766-784).
gcctgcagctgatagagtt

SEQ ID NO: 449489 - DNA, 19 bp, Mus musculus
  siRNA target sequence for Tead2 (NM_011565.2,820-838).
cgttccagaggcatctgtt

SEQ ID NO: 449490 - DNA, 19 bp, Mus musculus
  siRNA target sequence for Tead2 (NM_011565.2,937-955).
gcctccgcgagctgtatga

SEQ ID NO: 449491 - DNA, 19 bp, Mus musculus
  siRNA target sequence for Tead2 (NM_011565.2,1217-1235).
gtgtgagtacctggttaat

SEQ ID NO: 449492 - DNA, 19 bp, Mus musculus
  siRNA target sequence for Tead2 (NM_011565.2,1257-1275).
ctgcctgaacgctacatga

SEQ ID NO: 449493 - DNA, 19 bp, Mus musculus
  siRNA target sequence for Tead2 (NM_011565.2,1260-1278).
cctgaacgctacatgatga

SEQ ID NO: 449494 - DNA, 19 bp, Mus musculus
  siRNA target sequence for Tead2 (NM_011565.2,1263-1281).
gaacgctacatgatgaaca

SEQ ID NO: 449495 - DNA, 19 bp, Mus musculus
  siRNA target sequence for Tead2 (NM_011565.2,1387-1405).
gagcccagtaccacatcta

SEQ ID NO: 449496 - DNA, 19 bp, Mus musculus
  siRNA target sequence for Tead3 (NM_011566.1,612-630).
ccagcgttctacagaacaa

SEQ ID NO: 449497 - DNA, 19 bp, Mus musculus
  siRNA target sequence for Tead3 (NM_011566.1,615-633).
gcgttctacagaacaagtt

SEQ ID NO: 449498 - DNA, 19 bp, Mus musculus
  siRNA target sequence for Tead3 (NM_011566.1,720-738).
gaccttctcaggacatcaa

SEQ ID NO: 449499 - DNA, 19 bp, Mus musculus
  siRNA target sequence for Tead3 (NM_011566.1,780-798).
caccagcgctcaacagtta

SEQ ID NO: 449500 - DNA, 19 bp, Mus musculus
  siRNA target sequence for Tead3 (NM_011566.1,887-905).
ctacgcctcctggagtatt

SEQ ID NO: 449501 - DNA, 19 bp, Mus musculus
  siRNA target sequence for Tead3 (NM_011566.1,1311-1329).
ccatgtgcgagtacatgat

SEQ ID NO: 449502 - DNA, 19 bp, Mus musculus
  siRNA target sequence for Tead3 (NM_011566.1,1315-1333).
gtgcgagtacatgatcaat

SEQ ID NO: 449503 - DNA, 19 bp, Mus musculus
  siRNA target sequence for Tead3 (NM_011566.1,1352-1370).
catctgcccgagaagtaca

SEQ ID NO: 449504 - DNA, 19 bp, Mus musculus
  siRNA target sequence for Tead3 (NM_011566.1,1447-1465).
cattgcttttgtctttgaa

SEQ ID NO: 449505 - DNA, 19 bp, Mus musculus
  siRNA target sequence for Tead3 (NM_011566.1,1488-1506).
cgcagcaccacgtctacaa

SEQ ID NO: 449506 - DNA, 19 bp, Mus musculus
  siRNA target sequence for Tead3 (NM_011566.1,1498-1516).
cgtctacaagcttgtcaaa

SEQ ID NO: 449507 - DNA, 19 bp, Mus musculus
  siRNA target sequence for Tfdp1 (NM_009361.1,446-464).
gaaccacctcctacaatga

SEQ ID NO: 449508 - DNA, 19 bp, Mus musculus
  siRNA target sequence for Tgfb1i4 (NM_009366.1,290-308).
cttccgtgagacttgacaa

SEQ ID NO: 449509 - DNA, 19 bp, Mus musculus
  siRNA target sequence for Tgfb1i4 (NM_009366.1,327-345).
ggtagctatcgacaacaaa

SEQ ID NO: 449510 - DNA, 19 bp, Mus musculus
  siRNA target sequence for Tgfb1i4 (NM_009366.1,420-438).
gcagatcaaagaactaata

SEQ ID NO: 449511 - DNA, 19 bp, Mus musculus
  siRNA target sequence for Tgif (NM_009372.2,480-498).
ggctgtatgaacacagata

SEQ ID NO: 449512 - DNA, 19 bp, Mus musculus
  siRNA target sequence for Tgif (NM_009372.2,482-500).
ctgtatgaacacagataca

SEQ ID NO: 449513 - DNA, 19 bp, Mus musculus
  siRNA target sequence for Tgif (NM_009372.2,555-573).
ccacactacaggtctgtaa

SEQ ID NO: 449514 - DNA, 19 bp, Mus musculus
  siRNA target sequence for Tgif (NM_009372.2,635-653).
ccaaatcagttcacgattt

SEQ ID NO: 449515 - DNA, 19 bp, Mus musculus
  siRNA target sequence for Tgif (NM_009372.2,658-676).
ccgtggggccaagatttca

SEQ ID NO: 449516 - DNA, 19 bp, Mus musculus
  siRNA target sequence for Tgif (NM_009372.2,675-693).
cagaagctagctctattga

SEQ ID NO: 449517 - DNA, 19 bp, Mus musculus
  siRNA target sequence for Tgif (NM_009372.2,698-716).
gcaatgggtatcaaaaact

SEQ ID NO: 449518 - DNA, 19 bp, Mus musculus
  siRNA target sequence for Tgif (NM_009372.2,699-717).
caatgggtatcaaaaactt

SEQ ID NO: 449519 - DNA, 19 bp, Mus musculus
  siRNA target sequence for Tgif (NM_009372.2,803-821).
ccctccccaggatccattt

SEQ ID NO: 449520 - DNA, 19 bp, Mus musculus
  siRNA target sequence for Tgif (NM_009372.2,1005-1023).
ctcagagtggtcttttcaa

SEQ ID NO: 449521 - DNA, 19 bp, Mus musculus
  siRNA target sequence for Tgifx1 (NM_153109.1,603-621).
gctgaagacaacatagaga

SEQ ID NO: 449522 - DNA, 19 bp, Mus musculus
  siRNA target sequence for Tgifx1 (NM_153109.1,704-722).
ctacatgttggttgatgtt

SEQ ID NO: 449523 - DNA, 19 bp, Mus musculus
  siRNA target sequence for Thra (NM_178060.2,486-504).
ccaggtcaccagatggaaa

SEQ ID NO: 449524 - DNA, 19 bp, Mus musculus
  siRNA target sequence for Thra (NM_178060.2,521-539).
ggccaatgtcccctgaaaa

SEQ ID NO: 449525 - DNA, 19 bp, Mus musculus
  siRNA target sequence for Thra (NM_178060.2,540-558).
gcagcatgtcagggtatat

SEQ ID NO: 449526 - DNA, 19 bp, Mus musculus
  siRNA target sequence for Thra (NM_178060.2,620-638).
cactaccgctgtatcactt

SEQ ID NO: 449527 - DNA, 19 bp, Mus musculus
  siRNA target sequence for Thra (NM_178060.2,664-682).
ccgcacaatccagaagaat

SEQ ID NO: 449528 - DNA, 19 bp, Mus musculus
  siRNA target sequence for Thra (NM_178060.2,691-709).
cacctattcctgcaagtat

SEQ ID NO: 449529 - DNA, 19 bp, Mus musculus
  siRNA target sequence for Thra (NM_178060.2,693-711).
cctattcctgcaagtatga

SEQ ID NO: 449530 - DNA, 19 bp, Mus musculus
  siRNA target sequence for Thra (NM_178060.2,717-735).
gctgtgtcatcgacaagat

SEQ ID NO: 449531 - DNA, 19 bp, Mus musculus
  siRNA target sequence for Thra (NM_178060.2,792-810).
ccatggacttggttctaga

SEQ ID NO: 449532 - DNA, 19 bp, Mus musculus
  siRNA target sequence for Thra (NM_178060.2,796-814).
ggacttggttctagatgat

SEQ ID NO: 449533 - DNA, 19 bp, Mus musculus
  siRNA target sequence for Thra (NM_178060.2,797-815).
gacttggttctagatgatt

SEQ ID NO: 449534 - DNA, 19 bp, Mus musculus
  siRNA target sequence for Thra (NM_178060.2,922-940).
gtgggacctgatacatgtt

SEQ ID NO: 449535 - DNA, 19 bp, Mus musculus
  siRNA target sequence for Thra (NM_178060.2,984-1002).
ggaaacagaggcgaaaatt

SEQ ID NO: 449536 - DNA, 19 bp, Mus musculus
  siRNA target sequence for Thra (NM_178060.2,1067-1085).
gaggccttcagcgagttta

SEQ ID NO: 449537 - DNA, 19 bp, Mus musculus
  siRNA target sequence for Thra (NM_178060.2,1070-1088).
gccttcagcgagtttacca

SEQ ID NO: 449538 - DNA, 19 bp, Mus musculus
  siRNA target sequence for Thra (NM_178060.2,1071-1089).
ccttcagcgagtttaccaa

SEQ ID NO: 449539 - DNA, 19 bp, Mus musculus
  siRNA target sequence for Thra (NM_178060.2,1077-1095).
gcgagtttaccaagatcat

SEQ ID NO: 449540 - DNA, 19 bp, Mus musculus
  siRNA target sequence for Thra (NM_178060.2,1312-1330).
ggtctctgacgccatcttt

SEQ ID NO: 449541 - DNA, 19 bp, Mus musculus
  siRNA target sequence for Thra (NM_178060.2,1487-1505).
gtcaaccaccgcaaacaca

SEQ ID NO: 449542 - DNA, 19 bp, Mus musculus
  siRNA target sequence for Thra (NM_178060.2,1492-1510).
ccaccgcaaacacaacatt

SEQ ID NO: 449543 - DNA, 19 bp, Mus musculus
  siRNA target sequence for Thrb (NM_009380.1,436-454).
ccagtagcagcatatatat

SEQ ID NO: 449544 - DNA, 19 bp, Mus musculus
  siRNA target sequence for Thrb (NM_009380.1,471-489).
gtgaatcagccttatacct

SEQ ID NO: 449545 - DNA, 19 bp, Mus musculus
  siRNA target sequence for Thrb (NM_009380.1,477-495).
cagccttatacctgtagtt

SEQ ID NO: 449546 - DNA, 19 bp, Mus musculus
  siRNA target sequence for Thrb (NM_009380.1,604-622).
cgccaccgcactcacaaaa

SEQ ID NO: 449547 - DNA, 19 bp, Mus musculus
  siRNA target sequence for Thrb (NM_009380.1,605-623).
gccaccgcactcacaaaaa

SEQ ID NO: 449548 - DNA, 19 bp, Mus musculus
  siRNA target sequence for Thrb (NM_009380.1,606-624).
ccaccgcactcacaaaaaa

SEQ ID NO: 449549 - DNA, 19 bp, Mus musculus
  siRNA target sequence for Thrb (NM_009380.1,627-645).
gggtatatccccagctatt

SEQ ID NO: 449550 - DNA, 19 bp, Mus musculus
  siRNA target sequence for Thrb (NM_009380.1,629-647).
gtatatccccagctattta

SEQ ID NO: 449551 - DNA, 19 bp, Mus musculus
  siRNA target sequence for Thrb (NM_009380.1,637-655).
ccagctatttagacaaaga

SEQ ID NO: 449552 - DNA, 19 bp, Mus musculus
  siRNA target sequence for Thrb (NM_009380.1,638-656).
cagctatttagacaaagat

SEQ ID NO: 449553 - DNA, 19 bp, Mus musculus
  siRNA target sequence for Thrb (NM_009380.1,790-808).
gaaagtgcatcatagacaa

SEQ ID NO: 449554 - DNA, 19 bp, Mus musculus
  siRNA target sequence for Thrb (NM_009380.1,826-844).
gccaggaatgtcgctttaa

SEQ ID NO: 449555 - DNA, 19 bp, Mus musculus
  siRNA target sequence for Thrb (NM_009380.1,830-848).
ggaatgtcgctttaagaaa

SEQ ID NO: 449556 - DNA, 19 bp, Mus musculus
  siRNA target sequence for Thrb (NM_009380.1,900-918).
ctagccaagcggaagctta

SEQ ID NO: 449557 - DNA, 19 bp, Mus musculus
  siRNA target sequence for Thrb (NM_009380.1,904-922).
ccaagcggaagcttataga

SEQ ID NO: 449558 - DNA, 19 bp, Mus musculus
  siRNA target sequence for Thrb (NM_009380.1,1142-1160).
ggaagccttcagtcatttt

SEQ ID NO: 449559 - DNA, 19 bp, Mus musculus
  siRNA target sequence for Thrb (NM_009380.1,1143-1161).
gaagccttcagtcatttta

SEQ ID NO: 449560 - DNA, 19 bp, Mus musculus
  siRNA target sequence for Thrb (NM_009380.1,1147-1165).
ccttcagtcattttacaaa

SEQ ID NO: 449561 - DNA, 19 bp, Mus musculus
  siRNA target sequence for Thrb (NM_009380.1,1194-1212).
gtggattttgccaaaaagt

SEQ ID NO: 449562 - DNA, 19 bp, Mus musculus
  siRNA target sequence for Thrb (NM_009380.1,1314-1332).
gacagcgagactctaactt

SEQ ID NO: 449563 - DNA, 19 bp, Mus musculus
  siRNA target sequence for Thrb (NM_009380.1,1378-1396).
gccttggggtggtttcaga

SEQ ID NO: 449564 - DNA, 19 bp, Mus musculus
  siRNA target sequence for Thrb (NM_009380.1,1466-1484).
ggccgtcctgctaatgtct

SEQ ID NO: 449565 - DNA, 19 bp, Mus musculus
  siRNA target sequence for Thrb (NM_009380.1,1504-1522).
cctgtgttgagagaataga

SEQ ID NO: 449566 - DNA, 19 bp, Mus musculus
  siRNA target sequence for Thrb (NM_009380.1,1619-1637).
gacagacctgcggatgatt

SEQ ID NO: 449567 - DNA, 19 bp, Mus musculus
  siRNA target sequence for Thrb (NM_009380.1,1697-1715).
cccgcctctgttcttagaa

SEQ ID NO: 449568 - DNA, 19 bp, Mus musculus
  siRNA target sequence for Titf1 (NM_009385.2,1007-1025).
gcgagcggcatgaatatga

SEQ ID NO: 449569 - DNA, 19 bp, Mus musculus
  siRNA target sequence for Titf1 (NM_009385.2,1009-1027).
gagcggcatgaatatgagt

SEQ ID NO: 449570 - DNA, 19 bp, Mus musculus
  siRNA target sequence for Titf1 (NM_009385.2,1053-1071).
gggacgtgagcaagaacat

SEQ ID NO: 449571 - DNA, 19 bp, Mus musculus
  siRNA target sequence for Titf1 (NM_009385.2,1146-1164).
gacgtttcaagcaacagaa

SEQ ID NO: 449572 - DNA, 19 bp, Mus musculus
  siRNA target sequence for Titf1 (NM_009385.2,1392-1410).
ccgtgccggtcctagtcaa

SEQ ID NO: 449573 - DNA, 19 bp, Mus musculus
  siRNA target sequence for Titf1 (NM_009385.2,1393-1411).
cgtgccggtcctagtcaaa

SEQ ID NO: 449574 - DNA, 19 bp, Mus musculus
  siRNA target sequence for Titf1 (NM_009385.2,1682-1700).
gactatggcgccatgtctt

SEQ ID NO: 449575 - DNA, 19 bp, Mus musculus
  siRNA target sequence for Titf1 (NM_009385.2,1688-1706).
ggcgccatgtcttgttcta

SEQ ID NO: 449576 - DNA, 19 bp, Mus musculus
  siRNA target sequence for Tlx1 (NM_021901.2,352-370).
gttggaggcgcctacactt

SEQ ID NO: 449577 - DNA, 19 bp, Mus musculus
  siRNA target sequence for Tlx1 (NM_021901.2,500-518).
gctcctacaacgtgaacat

SEQ ID NO: 449578 - DNA, 19 bp, Mus musculus
  siRNA target sequence for Tlx1 (NM_021901.2,695-713).
cggtgccgggtgtcaacaa

SEQ ID NO: 449579 - DNA, 19 bp, Mus musculus
  siRNA target sequence for Tlx1 (NM_021901.2,742-760).
gagagtaaccgcagataca

SEQ ID NO: 449580 - DNA, 19 bp, Mus musculus
  siRNA target sequence for Tlx1 (NM_021901.2,746-764).
gtaaccgcagatacacaaa

SEQ ID NO: 449581 - DNA, 19 bp, Mus musculus
  siRNA target sequence for Tlx1 (NM_021901.2,910-928).
ctggccaaggcgctcaaaa

SEQ ID NO: 449582 - DNA, 19 bp, Mus musculus
  siRNA target sequence for Tlx1 (NM_021901.2,913-931).
gccaaggcgctcaaaatga

SEQ ID NO: 449583 - DNA, 19 bp, Mus musculus
  siRNA target sequence for Tlx1 (NM_021901.2,930-948).
gaccgatgcgcaagtaaaa

SEQ ID NO: 449584 - DNA, 19 bp, Mus musculus
  siRNA target sequence for Tlx1 (NM_021901.2,934-952).
gatgcgcaagtaaaaacct

SEQ ID NO: 449585 - DNA, 19 bp, Mus musculus
  siRNA target sequence for Tlx1 (NM_021901.2,1148-1166).
ctgacgactccaccaaaat

SEQ ID NO: 449586 - DNA, 19 bp, Mus musculus
  siRNA target sequence for Tlx1 (NM_021901.2,1150-1168).
gacgactccaccaaaatca

SEQ ID NO: 449587 - DNA, 19 bp, Mus musculus
  siRNA target sequence for Tlx2 (NM_009392.1,588-606).
gcttcttgcgccagaagta

SEQ ID NO: 449588 - DNA, 19 bp, Mus musculus
  siRNA target sequence for Tlx2 (NM_009392.1,864-882).
cctgggcggaagacaacaa

SEQ ID NO: 449589 - DNA, 19 bp, Mus musculus
  siRNA target sequence for Tlx3 (NM_019916.1,211-229).
gaggacgcgggatcttaca

SEQ ID NO: 449590 - DNA, 19 bp, Mus musculus
  siRNA target sequence for Tlx3 (NM_019916.1,213-231).
ggacgcgggatcttacagt

SEQ ID NO: 449591 - DNA, 19 bp, Mus musculus
  siRNA target sequence for Tlx3 (NM_019916.1,387-405).
gagcagtcgccgctttgta

SEQ ID NO: 449592 - DNA, 19 bp, Mus musculus
  siRNA target sequence for Tlx3 (NM_019916.1,389-407).
gcagtcgccgctttgtaaa

SEQ ID NO: 449593 - DNA, 19 bp, Mus musculus
  siRNA target sequence for Tlx3 (NM_019916.1,485-503).
cgccacccaagcgtaagaa

SEQ ID NO: 449594 - DNA, 19 bp, Mus musculus
  siRNA target sequence for Tlx3 (NM_019916.1,595-613).
ctcgcaaagtccctcaaaa

SEQ ID NO: 449595 - DNA, 19 bp, Mus musculus
  siRNA target sequence for Tlx3 (NM_019916.1,598-616).
gcaaagtccctcaaaatga

SEQ ID NO: 449596 - DNA, 19 bp, Mus musculus
  siRNA target sequence for Trp53 (NM_011640.1,680-698).
ggatgttgaggagtttttt

SEQ ID NO: 449597 - DNA, 19 bp, Mus musculus
  siRNA target sequence for Trp53 (NM_011640.1,816-834).
gtcccttctcaaaaaactt

SEQ ID NO: 449598 - DNA, 19 bp, Mus musculus
  siRNA target sequence for Trp53 (NM_011640.1,910-928).
ctcccctcaataagctatt

SEQ ID NO: 449599 - DNA, 19 bp, Mus musculus
  siRNA target sequence for Trp53 (NM_011640.1,1113-1131).
cgggtggaaggaaatttgt

SEQ ID NO: 449600 - DNA, 19 bp, Mus musculus
  siRNA target sequence for Trp53 (NM_011640.1,1114-1132).
gggtggaaggaaatttgta

SEQ ID NO: 449601 - DNA, 19 bp, Mus musculus
  siRNA target sequence for Trp53 (NM_011640.1,1219-1237).
ccatccactacaagtacat

SEQ ID NO: 449602 - DNA, 19 bp, Mus musculus
  siRNA target sequence for Trp53 (NM_011640.1,1265-1283).
gaaccgccgacctatcctt

SEQ ID NO: 449603 - DNA, 19 bp, Mus musculus
  siRNA target sequence for Trp53 (NM_011640.1,1364-1382).
gagagaccgccgtacagaa

SEQ ID NO: 449604 - DNA, 19 bp, Mus musculus
  siRNA target sequence for Trp53 (NM_011640.1,1370-1388).
ccgccgtacagaagaagaa

SEQ ID NO: 449605 - DNA, 19 bp, Mus musculus
  siRNA target sequence for Trp53 (NM_011640.1,1491-1509).
ccacttgatggagagtatt

SEQ ID NO: 449606 - DNA, 19 bp, Mus musculus
  siRNA target sequence for Trp53 (NM_011640.1,1492-1510).
cacttgatggagagtattt

SEQ ID NO: 449607 - DNA, 19 bp, Mus musculus
  siRNA target sequence for Trp53 (NM_011640.1,1494-1512).
cttgatggagagtatttca

SEQ ID NO: 449608 - DNA, 19 bp, Mus musculus
  siRNA target sequence for Trp53 (NM_011640.1,1531-1549).
gtaaacgcttcgagatgtt

SEQ ID NO: 449609 - DNA, 19 bp, Mus musculus
  siRNA target sequence for Trp53 (NM_011640.1,1565-1583).
ggccttagagttaaaggat

SEQ ID NO: 449610 - DNA, 19 bp, Mus musculus
  siRNA target sequence for Trp63 (NM_011641.1,136-154).
caatgcccagactcaattt

SEQ ID NO: 449611 - DNA, 19 bp, Mus musculus
  siRNA target sequence for Trp63 (NM_011641.1,141-159).
cccagactcaatttagtga

SEQ ID NO: 449612 - DNA, 19 bp, Mus musculus
  siRNA target sequence for Trp63 (NM_011641.1,241-259).
cacagaccacgcacagaat

SEQ ID NO: 449613 - DNA, 19 bp, Mus musculus
  siRNA target sequence for Trp63 (NM_011641.1,414-432).
cgtattccaccgaactgaa

SEQ ID NO: 449614 - DNA, 19 bp, Mus musculus
  siRNA target sequence for Trp63 (NM_011641.1,492-510).
ccccacagggcgctgttat

SEQ ID NO: 449615 - DNA, 19 bp, Mus musculus
  siRNA target sequence for Trp63 (NM_011641.1,559-577).
gaaacgatgccctaaccat

SEQ ID NO: 449616 - DNA, 19 bp, Mus musculus
  siRNA target sequence for Trp63 (NM_011641.1,580-598).
gctgagccgtgagttcaat

SEQ ID NO: 449617 - DNA, 19 bp, Mus musculus
  siRNA target sequence for Trp63 (NM_011641.1,592-610).
gttcaatgagggacagatt

SEQ ID NO: 449618 - DNA, 19 bp, Mus musculus
  siRNA target sequence for Trp63 (NM_011641.1,612-630).
cccctcccagtcatctgat

SEQ ID NO: 449619 - DNA, 19 bp, Mus musculus
  siRNA target sequence for Trp63 (NM_011641.1,613-631).
ccctcccagtcatctgatt

SEQ ID NO: 449620 - DNA, 19 bp, Mus musculus
  siRNA target sequence for Trp63 (NM_011641.1,718-736).
ggttggcactgaattcaca

SEQ ID NO: 449621 - DNA, 19 bp, Mus musculus
  siRNA target sequence for Trp63 (NM_011641.1,738-756).
cagtcctgtacaatttcat

SEQ ID NO: 449622 - DNA, 19 bp, Mus musculus
  siRNA target sequence for Trp63 (NM_011641.1,768-786).
gctgcgtcggaggaatgaa

SEQ ID NO: 449623 - DNA, 19 bp, Mus musculus
  siRNA target sequence for Trp63 (NM_011641.1,789-807).
gacgtccaattttaatcat

SEQ ID NO: 449624 - DNA, 19 bp, Mus musculus
  siRNA target sequence for Trp63 (NM_011641.1,794-812).
ccaattttaatcatcgtta

SEQ ID NO: 449625 - DNA, 19 bp, Mus musculus
  siRNA target sequence for Trp63 (NM_011641.1,961-979).
gcgccctttccgtcagaat

SEQ ID NO: 449626 - DNA, 19 bp, Mus musculus
  siRNA target sequence for Trp63 (NM_011641.1,962-980).
cgccctttccgtcagaata

SEQ ID NO: 449627 - DNA, 19 bp, Mus musculus
  siRNA target sequence for Trp63 (NM_011641.1,964-982).
ccctttccgtcagaataca

SEQ ID NO: 449628 - DNA, 19 bp, Mus musculus
  siRNA target sequence for Trp63 (NM_011641.1,966-984).
ctttccgtcagaatacaca

SEQ ID NO: 449629 - DNA, 19 bp, Mus musculus
  siRNA target sequence for Trp63 (NM_011641.1,983-1001).
cacggaatccagatgactt

SEQ ID NO: 449630 - DNA, 19 bp, Mus musculus
  siRNA target sequence for Trp63 (NM_011641.1,1059-1077).
gtgagacgtacgagatgtt

SEQ ID NO: 449631 - DNA, 19 bp, Mus musculus
  siRNA target sequence for Trp63 (NM_011641.1,1118-1136).
cctcagcacacgatcgaaa

SEQ ID NO: 449632 - DNA, 19 bp, Mus musculus
  siRNA target sequence for Trp63 (NM_011641.1,1169-1187).
cacctacttcagaaacaga

SEQ ID NO: 449633 - DNA, 19 bp, Mus musculus
  siRNA target sequence for Trp63 (NM_011641.1,1229-1247).
cctctgaacaaaatgaaca

SEQ ID NO: 449634 - DNA, 19 bp, Mus musculus
  siRNA target sequence for Trp63 (NM_011641.1,1335-1353).
gagccaacattcctatgat

SEQ ID NO: 449635 - DNA, 19 bp, Mus musculus
  siRNA target sequence for Trp63 (NM_011641.1,1772-1790).
ctccgccagaccatctctt

SEQ ID NO: 449636 - DNA, 19 bp, Mus musculus
  siRNA target sequence for Trp63 (NM_011641.1,1774-1792).
ccgccagaccatctctttt

SEQ ID NO: 449637 - DNA, 19 bp, Mus musculus
  siRNA target sequence for Trp63 (NM_011641.1,1798-1816).
ccgtgacgagtggaatgat

SEQ ID NO: 449638 - DNA, 19 bp, Mus musculus
  siRNA target sequence for Trp63 (NM_011641.1,1799-1817).
cgtgacgagtggaatgatt

SEQ ID NO: 449639 - DNA, 19 bp, Mus musculus
  siRNA target sequence for Trp63 (NM_011641.1,1800-1818).
gtgacgagtggaatgattt

SEQ ID NO: 449640 - DNA, 19 bp, Mus musculus
  siRNA target sequence for Trp63 (NM_011641.1,1802-1820).
gacgagtggaatgatttca

SEQ ID NO: 449641 - DNA, 19 bp, Mus musculus
  siRNA target sequence for Trp63 (NM_011641.1,1846-1864).
caagcagcagcgtatcaaa

SEQ ID NO: 449642 - DNA, 19 bp, Mus musculus
  siRNA target sequence for Trp73 (NM_011642.1,721-739).
gcctgtcatcccttccaat

SEQ ID NO: 449643 - DNA, 19 bp, Mus musculus
  siRNA target sequence for Trp73 (NM_011642.1,722-740).
cctgtcatcccttccaata

SEQ ID NO: 449644 - DNA, 19 bp, Mus musculus
  siRNA target sequence for Trp73 (NM_011642.1,813-831).
catactccccactcttgaa

SEQ ID NO: 449645 - DNA, 19 bp, Mus musculus
  siRNA target sequence for Trp73 (NM_011642.1,940-958).
gcatgtgaccgacattgtt

SEQ ID NO: 449646 - DNA, 19 bp, Mus musculus
  siRNA target sequence for Trp73 (NM_011642.1,941-959).
catgtgaccgacattgtta

SEQ ID NO: 449647 - DNA, 19 bp, Mus musculus
  siRNA target sequence for Trp73 (NM_011642.1,1021-1039).
ccacctcatccgtgtagaa

SEQ ID NO: 449648 - DNA, 19 bp, Mus musculus
  siRNA target sequence for Trp73 (NM_011642.1,1112-1130).
ccacaggtgggaacagaat

SEQ ID NO: 449649 - DNA, 19 bp, Mus musculus
  siRNA target sequence for Trp73 (NM_011642.1,1113-1131).
cacaggtgggaacagaatt

SEQ ID NO: 449650 - DNA, 19 bp, Mus musculus
  siRNA target sequence for Trp73 (NM_011642.1,1188-1206).
ggaggcccatccttgtcat

SEQ ID NO: 449651 - DNA, 19 bp, Mus musculus
  siRNA target sequence for Trp73 (NM_011642.1,1193-1211).
cccatccttgtcatcatca

SEQ ID NO: 449652 - DNA, 19 bp, Mus musculus
  siRNA target sequence for Trp73 (NM_011642.1,1359-1377).
ccagcaaacgtgcattcaa

SEQ ID NO: 449653 - DNA, 19 bp, Mus musculus
  siRNA target sequence for Trp73 (NM_011642.1,1433-1451).
ggggacgaggacatgttct

SEQ ID NO: 449654 - DNA, 19 bp, Mus musculus
  siRNA target sequence for Trp73 (NM_011642.1,1434-1452).
gggacgaggacatgttcta

SEQ ID NO: 449655 - DNA, 19 bp, Mus musculus
  siRNA target sequence for Trp73 (NM_011642.1,1861-1879).
ccccagcctcgtcagtttt

SEQ ID NO: 449656 - DNA, 19 bp, Mus musculus
  siRNA target sequence for Trp73 (NM_011642.1,1862-1880).
cccagcctcgtcagttttt

SEQ ID NO: 449657 - DNA, 19 bp, Mus musculus
  siRNA target sequence for Trp73 (NM_011642.1,1867-1885).
cctcgtcagttttttgaca

SEQ ID NO: 449658 - DNA, 19 bp, Mus musculus
  siRNA target sequence for Trp73 (NM_011642.1,2257-2275).
ccgtaagcagcccatcaaa

SEQ ID NO: 449659 - DNA, 19 bp, Mus musculus
  siRNA target sequence for Trp73 (NM_011642.1,2259-2277).
gtaagcagcccatcaaaga

SEQ ID NO: 449660 - DNA, 19 bp, Mus musculus
  siRNA target sequence for Trps1 (NM_032000.1,1023-1041).
caggactttaaatgcaata

SEQ ID NO: 449661 - DNA, 19 bp, Mus musculus
  siRNA target sequence for Trps1 (NM_032000.1,1072-1090).
ccacagatctgattaagca

SEQ ID NO: 449662 - DNA, 19 bp, Mus musculus
  siRNA target sequence for Trps1 (NM_032000.1,1140-1158).
gagctggacagcaaaatct

SEQ ID NO: 449663 - DNA, 19 bp, Mus musculus
  siRNA target sequence for Trps1 (NM_032000.1,1178-1196).
gcagttcagccattccaaa

SEQ ID NO: 449664 - DNA, 19 bp, Mus musculus
  siRNA target sequence for Trps1 (NM_032000.1,1297-1315).
cttcaggaggaactttcat

SEQ ID NO: 449665 - DNA, 19 bp, Mus musculus
  siRNA target sequence for Trps1 (NM_032000.1,1431-1449).
cagacgcacccgaataaaa

SEQ ID NO: 449666 - DNA, 19 bp, Mus musculus
  siRNA target sequence for Trps1 (NM_032000.1,1435-1453).
cgcacccgaataaaatcaa

SEQ ID NO: 449667 - DNA, 19 bp, Mus musculus
  siRNA target sequence for Trps1 (NM_032000.1,1436-1454).
gcacccgaataaaatcaaa

SEQ ID NO: 449668 - DNA, 19 bp, Mus musculus
  siRNA target sequence for Trps1 (NM_032000.1,1440-1458).
ccgaataaaatcaaagtgt

SEQ ID NO: 449669 - DNA, 19 bp, Mus musculus
  siRNA target sequence for Trps1 (NM_032000.1,1466-1484).
gtcctccgagggtgtgaaa

SEQ ID NO: 449670 - DNA, 19 bp, Mus musculus
  siRNA target sequence for Trps1 (NM_032000.1,1625-1643).
cgattcctcacgacaaaat

SEQ ID NO: 449671 - DNA, 19 bp, Mus musculus
  siRNA target sequence for Trps1 (NM_032000.1,1699-1717).
catccagctcccttaagct

SEQ ID NO: 449672 - DNA, 19 bp, Mus musculus
  siRNA target sequence for Trps1 (NM_032000.1,1709-1727).
ccttaagctgctagaacat

SEQ ID NO: 449673 - DNA, 19 bp, Mus musculus
  siRNA target sequence for Trps1 (NM_032000.1,1798-1816).
gctctgtcattaatcagaa

SEQ ID NO: 449674 - DNA, 19 bp, Mus musculus
  siRNA target sequence for Trps1 (NM_032000.1,1814-1832).
gaatgatctagccaaaagt

SEQ ID NO: 449675 - DNA, 19 bp, Mus musculus
  siRNA target sequence for Trps1 (NM_032000.1,1866-1884).
ggcttgagtggggctaaaa

SEQ ID NO: 449676 - DNA, 19 bp, Mus musculus
  siRNA target sequence for Trps1 (NM_032000.1,1867-1885).
gcttgagtggggctaaaaa

SEQ ID NO: 449677 - DNA, 19 bp, Mus musculus
  siRNA target sequence for Trps1 (NM_032000.1,1922-1940).
ggtgacgagctataactgt

SEQ ID NO: 449678 - DNA, 19 bp, Mus musculus
  siRNA target sequence for Trps1 (NM_032000.1,1999-2017).
cacttcttcgtcattatca

SEQ ID NO: 449679 - DNA, 19 bp, Mus musculus
  siRNA target sequence for Trps1 (NM_032000.1,2025-2043).
cataacattcacaagtgta

SEQ ID NO: 449680 - DNA, 19 bp, Mus musculus
  siRNA target sequence for Trps1 (NM_032000.1,2093-2111).
gcaccttggagagattact

SEQ ID NO: 449681 - DNA, 19 bp, Mus musculus
  siRNA target sequence for Trps1 (NM_032000.1,2115-2133).
ccgtttgcttgtagaaaaa

SEQ ID NO: 449682 - DNA, 19 bp, Mus musculus
  siRNA target sequence for Trps1 (NM_032000.1,2186-2204).
cggaagttcgagagtcaaa

SEQ ID NO: 449683 - DNA, 19 bp, Mus musculus
  siRNA target sequence for Trps1 (NM_032000.1,2188-2206).
gaagttcgagagtcaaaca

SEQ ID NO: 449684 - DNA, 19 bp, Mus musculus
  siRNA target sequence for Trps1 (NM_032000.1,2214-2232).
caccagtgttccttctcta

SEQ ID NO: 449685 - DNA, 19 bp, Mus musculus
  siRNA target sequence for Trps1 (NM_032000.1,2228-2246).
ctctacccccgatgtagat

SEQ ID NO: 449686 - DNA, 19 bp, Mus musculus
  siRNA target sequence for Trps1 (NM_032000.1,2230-2248).
ctacccccgatgtagatgt

SEQ ID NO: 449687 - DNA, 19 bp, Mus musculus
  siRNA target sequence for Trps1 (NM_032000.1,2281-2299).
cccaagcatcggatgtcaa

SEQ ID NO: 449688 - DNA, 19 bp, Mus musculus
  siRNA target sequence for Trps1 (NM_032000.1,2282-2300).
ccaagcatcggatgtcaaa

SEQ ID NO: 449689 - DNA, 19 bp, Mus musculus
  siRNA target sequence for Trps1 (NM_032000.1,2427-2445).
gcacacagctgctataaat

SEQ ID NO: 449690 - DNA, 19 bp, Mus musculus
  siRNA target sequence for Trps1 (NM_032000.1,2469-2487).
gctgacactcagtcactat

SEQ ID NO: 449691 - DNA, 19 bp, Mus musculus
  siRNA target sequence for Trps1 (NM_032000.1,2470-2488).
ctgacactcagtcactatt

SEQ ID NO: 449692 - DNA, 19 bp, Mus musculus
  siRNA target sequence for Trps1 (NM_032000.1,2482-2500).
cactattggagcacttcaa

SEQ ID NO: 449693 - DNA, 19 bp, Mus musculus
  siRNA target sequence for Trps1 (NM_032000.1,2612-2630).
gctaaacccagactctaaa

SEQ ID NO: 449694 - DNA, 19 bp, Mus musculus
  siRNA target sequence for Trps1 (NM_032000.1,2846-2864).
gagggacagccccaatgtt

SEQ ID NO: 449695 - DNA, 19 bp, Mus musculus
  siRNA target sequence for Trps1 (NM_032000.1,2876-2894).
cctggcacgacctatgtat

SEQ ID NO: 449696 - DNA, 19 bp, Mus musculus
  siRNA target sequence for Trps1 (NM_032000.1,2945-2963).
cgagaagtctgcatctctt

SEQ ID NO: 449697 - DNA, 19 bp, Mus musculus
  siRNA target sequence for Trps1 (NM_032000.1,3031-3049).
gaagaggatctggtgtttt

SEQ ID NO: 449698 - DNA, 19 bp, Mus musculus
  siRNA target sequence for Trps1 (NM_032000.1,3083-3101).
ctggcgaaagaatgcaaat

SEQ ID NO: 449699 - DNA, 19 bp, Mus musculus
  siRNA target sequence for Trps1 (NM_032000.1,3096-3114).
gcaaatggcggatatgtat

SEQ ID NO: 449700 - DNA, 19 bp, Mus musculus
  siRNA target sequence for Trps1 (NM_032000.1,3127-3145).
gtctctaccagaaacttca

SEQ ID NO: 449701 - DNA, 19 bp, Mus musculus
  siRNA target sequence for Trps1 (NM_032000.1,3148-3166).
cgactcccaggcctttaaa

SEQ ID NO: 449702 - DNA, 19 bp, Mus musculus
  siRNA target sequence for Trps1 (NM_032000.1,3154-3172).
ccaggcctttaaacatcat

SEQ ID NO: 449703 - DNA, 19 bp, Mus musculus
  siRNA target sequence for Trps1 (NM_032000.1,3160-3178).
ctttaaacatcattaaaca

SEQ ID NO: 449704 - DNA, 19 bp, Mus musculus
  siRNA target sequence for Trps1 (NM_032000.1,3182-3200).
caacggcgagcagattatt

SEQ ID NO: 449705 - DNA, 19 bp, Mus musculus
  siRNA target sequence for Trps1 (NM_032000.1,3185-3203).
cggcgagcagattattaga

SEQ ID NO: 449706 - DNA, 19 bp, Mus musculus
  siRNA target sequence for Trps1 (NM_032000.1,3186-3204).
ggcgagcagattattagaa

SEQ ID NO: 449707 - DNA, 19 bp, Mus musculus
  siRNA target sequence for Trps1 (NM_032000.1,3355-3373).
cacttccgagcctgagtaa

SEQ ID NO: 449708 - DNA, 19 bp, Mus musculus
  siRNA target sequence for Trps1 (NM_032000.1,3357-3375).
cttccgagcctgagtaaat

SEQ ID NO: 449709 - DNA, 19 bp, Mus musculus
  siRNA target sequence for Trps1 (NM_032000.1,3361-3379).
cgagcctgagtaaatacga

SEQ ID NO: 449710 - DNA, 19 bp, Mus musculus
  siRNA target sequence for Trps1 (NM_032000.1,3362-3380).
gagcctgagtaaatacgaa

SEQ ID NO: 449711 - DNA, 19 bp, Mus musculus
  siRNA target sequence for Trps1 (NM_032000.1,3381-3399).
gcccagggttcattgacta

SEQ ID NO: 449712 - DNA, 19 bp, Mus musculus
  siRNA target sequence for Trps1 (NM_032000.1,3382-3400).
cccagggttcattgactaa

SEQ ID NO: 449713 - DNA, 19 bp, Mus musculus
  siRNA target sequence for Trps1 (NM_032000.1,3384-3402).
cagggttcattgactaaaa

SEQ ID NO: 449714 - DNA, 19 bp, Mus musculus
  siRNA target sequence for Trps1 (NM_032000.1,3462-3480).
cagcctttgcacattcaga

SEQ ID NO: 449715 - DNA, 19 bp, Mus musculus
  siRNA target sequence for Trps1 (NM_032000.1,3588-3606).
gcaaaacaccccaactatt

SEQ ID NO: 449716 - DNA, 19 bp, Mus musculus
  siRNA target sequence for Trps1 (NM_032000.1,3621-3639).
cccatcgaaaagtaccaat

SEQ ID NO: 449717 - DNA, 19 bp, Mus musculus
  siRNA target sequence for Trps1 (NM_032000.1,3622-3640).
ccatcgaaaagtaccaata

SEQ ID NO: 449718 - DNA, 19 bp, Mus musculus
  siRNA target sequence for Trps1 (NM_032000.1,3635-3653).
ccaatacccgctttttgga

SEQ ID NO: 449719 - DNA, 19 bp, Mus musculus
  siRNA target sequence for Trps1 (NM_032000.1,3643-3661).
cgctttttggagttccttt

SEQ ID NO: 449720 - DNA, 19 bp, Mus musculus
  siRNA target sequence for Trps1 (NM_032000.1,3652-3670).
gagttccttttgtacataa

SEQ ID NO: 449721 - DNA, 19 bp, Mus musculus
  siRNA target sequence for Trps1 (NM_032000.1,3696-3714).
ctacggttctggagtaaat

SEQ ID NO: 449722 - DNA, 19 bp, Mus musculus
  siRNA target sequence for Trps1 (NM_032000.1,3699-3717).
cggttctggagtaaatata

SEQ ID NO: 449723 - DNA, 19 bp, Mus musculus
  siRNA target sequence for Trps1 (NM_032000.1,3730-3748).
ctgggaatccgcactactt

SEQ ID NO: 449724 - DNA, 19 bp, Mus musculus
  siRNA target sequence for Trps1 (NM_032000.1,3732-3750).
gggaatccgcactacttga

SEQ ID NO: 449725 - DNA, 19 bp, Mus musculus
  siRNA target sequence for Trps1 (NM_032000.1,3768-3786).
ccaaatccttgccaaaact

SEQ ID NO: 449726 - DNA, 19 bp, Mus musculus
  siRNA target sequence for Trps1 (NM_032000.1,3791-3809).
gccttatcccaccttcaat

SEQ ID NO: 449727 - DNA, 19 bp, Mus musculus
  siRNA target sequence for Trps1 (NM_032000.1,3793-3811).
cttatcccaccttcaatct

SEQ ID NO: 449728 - DNA, 19 bp, Mus musculus
  siRNA target sequence for Trps1 (NM_032000.1,3842-3860).
caatgacattcctctagat

SEQ ID NO: 449729 - DNA, 19 bp, Mus musculus
  siRNA target sequence for Trps1 (NM_032000.1,3858-3876).
gatttggcgatcaagcatt

SEQ ID NO: 449730 - DNA, 19 bp, Mus musculus
  siRNA target sequence for Trps1 (NM_032000.1,3924-3942).
gcaccaccaactgtaaaaa

SEQ ID NO: 449731 - DNA, 19 bp, Mus musculus
  siRNA target sequence for Trps1 (NM_032000.1,3925-3943).
caccaccaactgtaaaaaa

SEQ ID NO: 449732 - DNA, 19 bp, Mus musculus
  siRNA target sequence for Trps1 (NM_032000.1,3948-3966).
gatcccttgaatgtagtta

SEQ ID NO: 449733 - DNA, 19 bp, Mus musculus
  siRNA target sequence for Trps1 (NM_032000.1,3951-3969).
cccttgaatgtagttaaga

SEQ ID NO: 449734 - DNA, 19 bp, Mus musculus
  siRNA target sequence for Trps1 (NM_032000.1,3985-4003).
gaagcactcaagatgaact

SEQ ID NO: 449735 - DNA, 19 bp, Mus musculus
  siRNA target sequence for Trps1 (NM_032000.1,4019-4037).
gcactgtggcattgttttt

SEQ ID NO: 449736 - DNA, 19 bp, Mus musculus
  siRNA target sequence for Trps1 (NM_032000.1,4113-4131).
catctttgcacggacaaat

SEQ ID NO: 449737 - DNA, 19 bp, Mus musculus
  siRNA target sequence for Trps1 (NM_032000.1,4125-4143).
gacaaatatgacttcacaa

SEQ ID NO: 449738 - DNA, 19 bp, Mus musculus
  siRNA target sequence for Trps1 (NM_032000.1,4157-4175).
gggcctgcataggaacaat

SEQ ID NO: 449739 - DNA, 19 bp, Mus musculus
  siRNA target sequence for Twist2 (NM_007855.1,314-332).
gcccgagcgcgcagtcttt

SEQ ID NO: 449740 - DNA, 19 bp, Mus musculus
  siRNA target sequence for Twist2 (NM_007855.1,518-536).
gcgacgagatggacaataa

SEQ ID NO: 449741 - DNA, 19 bp, Mus musculus
  siRNA target sequence for Twist2 (NM_007855.1,520-538).
gacgagatggacaataaga

SEQ ID NO: 449742 - DNA, 19 bp, Mus musculus
  siRNA target sequence for Ugp2 (NM_139297.2,274-292).
gtcgagatttgtacaagat

SEQ ID NO: 449743 - DNA, 19 bp, Mus musculus
  siRNA target sequence for Ugp2 (NM_139297.2,287-305).
caagatcttagcaaagcta

SEQ ID NO: 449744 - DNA, 19 bp, Mus musculus
  siRNA target sequence for Ugp2 (NM_139297.2,298-316).
caaagctatgtctcaagat

SEQ ID NO: 449745 - DNA, 19 bp, Mus musculus
  siRNA target sequence for Ugp2 (NM_139297.2,421-439).
cactaaaaaagatcttgat

SEQ ID NO: 449746 - DNA, 19 bp, Mus musculus
  siRNA target sequence for Ugp2 (NM_139297.2,437-455).
gatggatttcggaagctat

SEQ ID NO: 449747 - DNA, 19 bp, Mus musculus
  siRNA target sequence for Ugp2 (NM_139297.2,441-459).
gatttcggaagctatttca

SEQ ID NO: 449748 - DNA, 19 bp, Mus musculus
  siRNA target sequence for Ugp2 (NM_139297.2,557-575).
ggcttgcctgataacatat

SEQ ID NO: 449749 - DNA, 19 bp, Mus musculus
  siRNA target sequence for Ugp2 (NM_139297.2,576-594).
cttctgtgttgaacaagtt

SEQ ID NO: 449750 - DNA, 19 bp, Mus musculus
  siRNA target sequence for Ugp2 (NM_139297.2,639-657).
gcaaaggccctaaaagtct

SEQ ID NO: 449751 - DNA, 19 bp, Mus musculus
  siRNA target sequence for Ugp2 (NM_139297.2,654-672).
gtctgattggtgtaagaaa

SEQ ID NO: 449752 - DNA, 19 bp, Mus musculus
  siRNA target sequence for Ugp2 (NM_139297.2,679-697).
cacctttttggatctaact

SEQ ID NO: 449753 - DNA, 19 bp, Mus musculus
  siRNA target sequence for Ugp2 (NM_139297.2,713-731).
catttgaacaaaacctata

SEQ ID NO: 449754 - DNA, 19 bp, Mus musculus
  siRNA target sequence for Ugp2 (NM_139297.2,721-739).
caaaacctataatacagat

SEQ ID NO: 449755 - DNA, 19 bp, Mus musculus
  siRNA target sequence for Ugp2 (NM_139297.2,735-753).
cagatgttcctctcgtttt

SEQ ID NO: 449756 - DNA, 19 bp, Mus musculus
  siRNA target sequence for Ugp2 (NM_139297.2,737-755).
gatgttcctctcgttttaa

SEQ ID NO: 449757 - DNA, 19 bp, Mus musculus
  siRNA target sequence for Ugp2 (NM_139297.2,740-758).
gttcctctcgttttaatga

SEQ ID NO: 449758 - DNA, 19 bp, Mus musculus
  siRNA target sequence for Ugp2 (NM_139297.2,746-764).
ctcgttttaatgaattctt

SEQ ID NO: 449759 - DNA, 19 bp, Mus musculus
  siRNA target sequence for Ugp2 (NM_139297.2,805-823).
caatcactgtcgtgtgaaa

SEQ ID NO: 449760 - DNA, 19 bp, Mus musculus
  siRNA target sequence for Ugp2 (NM_139297.2,844-862).
caggtacccgaggatcaat

SEQ ID NO: 449761 - DNA, 19 bp, Mus musculus
  siRNA target sequence for Ugp2 (NM_139297.2,846-864).
ggtacccgaggatcaataa

SEQ ID NO: 449762 - DNA, 19 bp, Mus musculus
  siRNA target sequence for Ugp2 (NM_139297.2,850-868).
cccgaggatcaataaggaa

SEQ ID NO: 449763 - DNA, 19 bp, Mus musculus
  siRNA target sequence for Ugp2 (NM_139297.2,851-869).
ccgaggatcaataaggaat

SEQ ID NO: 449764 - DNA, 19 bp, Mus musculus
  siRNA target sequence for Ugp2 (NM_139297.2,855-873).
ggatcaataaggaatctct

SEQ ID NO: 449765 - DNA, 19 bp, Mus musculus
  siRNA target sequence for Ugp2 (NM_139297.2,856-874).
gatcaataaggaatctcta

SEQ ID NO: 449766 - DNA, 19 bp, Mus musculus
  siRNA target sequence for Ugp2 (NM_139297.2,859-877).
caataaggaatctctactt

SEQ ID NO: 449767 - DNA, 19 bp, Mus musculus
  siRNA target sequence for Ugp2 (NM_139297.2,884-902).
gcaaaggatgtgtcttatt

SEQ ID NO: 449768 - DNA, 19 bp, Mus musculus
  siRNA target sequence for Ugp2 (NM_139297.2,932-950).
ccagggcatggagatatct

SEQ ID NO: 449769 - DNA, 19 bp, Mus musculus
  siRNA target sequence for Ugp2 (NM_139297.2,938-956).
catggagatatctatgcta

SEQ ID NO: 449770 - DNA, 19 bp, Mus musculus
  siRNA target sequence for Ugp2 (NM_139297.2,942-960).
gagatatctatgctagttt

SEQ ID NO: 449771 - DNA, 19 bp, Mus musculus
  siRNA target sequence for Ugp2 (NM_139297.2,949-967).
ctatgctagtttctacaat

SEQ ID NO: 449772 - DNA, 19 bp, Mus musculus
  siRNA target sequence for Ugp2 (NM_139297.2,969-987).
ctggcttgctcgatacctt

SEQ ID NO: 449773 - DNA, 19 bp, Mus musculus
  siRNA target sequence for Ugp2 (NM_139297.2,971-989).
ggcttgctcgataccttta

SEQ ID NO: 449774 - DNA, 19 bp, Mus musculus
  siRNA target sequence for Ugp2 (NM_139297.2,972-990).
gcttgctcgatacctttat

SEQ ID NO: 449775 - DNA, 19 bp, Mus musculus
  siRNA target sequence for Ugp2 (NM_139297.2,1037-1055).
ggtgccacagtggatcttt

SEQ ID NO: 449776 - DNA, 19 bp, Mus musculus
  siRNA target sequence for Ugp2 (NM_139297.2,1038-1056).
gtgccacagtggatcttta

SEQ ID NO: 449777 - DNA, 19 bp, Mus musculus
  siRNA target sequence for Ugp2 (NM_139297.2,1040-1058).
gccacagtggatctttata

SEQ ID NO: 449778 - DNA, 19 bp, Mus musculus
  siRNA target sequence for Ugp2 (NM_139297.2,1041-1059).
ccacagtggatctttatat

SEQ ID NO: 449779 - DNA, 19 bp, Mus musculus
  siRNA target sequence for Ugp2 (NM_139297.2,1042-1060).
cacagtggatctttatatt

SEQ ID NO: 449780 - DNA, 19 bp, Mus musculus
  siRNA target sequence for Ugp2 (NM_139297.2,1089-1107).
ggaagcgctgtgagtttgt

SEQ ID NO: 449781 - DNA, 19 bp, Mus musculus
  siRNA target sequence for Ugp2 (NM_139297.2,1106-1124).
gtcatggaagtcacaaaca

SEQ ID NO: 449782 - DNA, 19 bp, Mus musculus
  siRNA target sequence for Ugp2 (NM_139297.2,1203-1221).
ccaaagcacacgttgatga

SEQ ID NO: 449783 - DNA, 19 bp, Mus musculus
  siRNA target sequence for Ugp2 (NM_139297.2,1209-1227).
cacacgttgatgagttcaa

SEQ ID NO: 449784 - DNA, 19 bp, Mus musculus
  siRNA target sequence for Ugp2 (NM_139297.2,1310-1328).
gccattgacatggaaatca

SEQ ID NO: 449785 - DNA, 19 bp, Mus musculus
  siRNA target sequence for Ugp2 (NM_139297.2,1349-1367).
gatggaggcctgaatgtaa

SEQ ID NO: 449786 - DNA, 19 bp, Mus musculus
  siRNA target sequence for Ugp2 (NM_139297.2,1353-1371).
gaggcctgaatgtaattca

SEQ ID NO: 449787 - DNA, 19 bp, Mus musculus
  siRNA target sequence for Ugp2 (NM_139297.2,1355-1373).
ggcctgaatgtaattcagt

SEQ ID NO: 449788 - DNA, 19 bp, Mus musculus
  siRNA target sequence for Ugp2 (NM_139297.2,1356-1374).
gcctgaatgtaattcagtt

SEQ ID NO: 449789 - DNA, 19 bp, Mus musculus
  siRNA target sequence for Ugp2 (NM_139297.2,1382-1400).
gcagttggagctgcaatta

SEQ ID NO: 449790 - DNA, 19 bp, Mus musculus
  siRNA target sequence for Ugp2 (NM_139297.2,1383-1401).
cagttggagctgcaattaa

SEQ ID NO: 449791 - DNA, 19 bp, Mus musculus
  siRNA target sequence for Ugp2 (NM_139297.2,1408-1426).
cgagaattctttaggtatt

SEQ ID NO: 449792 - DNA, 19 bp, Mus musculus
  siRNA target sequence for Ugp2 (NM_139297.2,1467-1485).
cagatctcttgcttgtgat

SEQ ID NO: 449793 - DNA, 19 bp, Mus musculus
  siRNA target sequence for Ugp2 (NM_139297.2,1481-1499).
gtgatgtcaaacctctata

SEQ ID NO: 449794 - DNA, 19 bp, Mus musculus
  siRNA target sequence for Ugp2 (NM_139297.2,1544-1562).
cctacagtgcccttggtta

SEQ ID NO: 449795 - DNA, 19 bp, Mus musculus
  siRNA target sequence for Ugp2 (NM_139297.2,1545-1563).
ctacagtgcccttggttaa

SEQ ID NO: 449796 - DNA, 19 bp, Mus musculus
  siRNA target sequence for Ugp2 (NM_139297.2,1559-1577).
gttaaattaggcagttctt

SEQ ID NO: 449797 - DNA, 19 bp, Mus musculus
  siRNA target sequence for Ugp2 (NM_139297.2,1581-1599).
ccaaggttcaagattatct

SEQ ID NO: 449798 - DNA, 19 bp, Mus musculus
  siRNA target sequence for Ugp2 (NM_139297.2,1598-1616).
ctaagaaggtttgaaagta

SEQ ID NO: 449799 - DNA, 19 bp, Mus musculus
  siRNA target sequence for Ugp2 (NM_139297.2,1636-1654).
ggaccacctcactgtttca

SEQ ID NO: 449800 - DNA, 19 bp, Mus musculus
  siRNA target sequence for Ugp2 (NM_139297.2,1670-1688).
ggaaaaaatgtttcactaa

SEQ ID NO: 449801 - DNA, 19 bp, Mus musculus
  siRNA target sequence for Ugp2 (NM_139297.2,1737-1755).
ccccaggagccgtgttaga

SEQ ID NO: 449802 - DNA, 19 bp, Mus musculus
  siRNA target sequence for Ugp2 (NM_139297.2,1739-1757).
ccaggagccgtgttagaga

SEQ ID NO: 449803 - DNA, 19 bp, Mus musculus
  siRNA target sequence for Ugp2 (NM_139297.2,1740-1758).
caggagccgtgttagagaa

SEQ ID NO: 449804 - DNA, 19 bp, Mus musculus
  siRNA target sequence for Ugp2 (NM_139297.2,1743-1761).
gagccgtgttagagaacaa

SEQ ID NO: 449805 - DNA, 19 bp, Mus musculus
  siRNA target sequence for Ugp2 (NM_139297.2,1746-1764).
ccgtgttagagaacaagat

SEQ ID NO: 449806 - DNA, 19 bp, Mus musculus
  siRNA target sequence for Ugp2 (NM_139297.2,1747-1765).
cgtgttagagaacaagatt

SEQ ID NO: 449807 - DNA, 19 bp, Mus musculus
  siRNA target sequence for Ugp2 (NM_139297.2,1750-1768).
gttagagaacaagattgta

SEQ ID NO: 449808 - DNA, 19 bp, Mus musculus
  siRNA target sequence for Uncx4.1 (NM_013702.2,479-497).
cactacccggacgtgttta

SEQ ID NO: 449809 - DNA, 19 bp, Mus musculus
  siRNA target sequence for Vax1 (NM_009501.1,3-21).
gttcgggaaaccagacaaa

SEQ ID NO: 449810 - DNA, 19 bp, Mus musculus
  siRNA target sequence for Vax1 (NM_009501.1,166-184).
gcttcggaagattgtaaca

SEQ ID NO: 449811 - DNA, 19 bp, Mus musculus
  siRNA target sequence for Vax1 (NM_009501.1,167-185).
cttcggaagattgtaacaa

SEQ ID NO: 449812 - DNA, 19 bp, Mus musculus
  siRNA target sequence for Vax1 (NM_009501.1,251-269).
ggtctatccgagaaatcat

SEQ ID NO: 449813 - DNA, 19 bp, Mus musculus
  siRNA target sequence for Vax1 (NM_009501.1,400-418).
gctcggcagctcaatctct

SEQ ID NO: 449814 - DNA, 19 bp, Mus musculus
  siRNA target sequence for Vax1 (NM_009501.1,902-920).
gttcgctagccgggaattt

SEQ ID NO: 449815 - DNA, 19 bp, Mus musculus
  siRNA target sequence for Vax1 (NM_009501.1,905-923).
cgctagccgggaatttgca

SEQ ID NO: 449816 - DNA, 19 bp, Mus musculus
  siRNA target sequence for Vax1 (NM_009501.1,906-924).
gctagccgggaatttgcaa

SEQ ID NO: 449817 - DNA, 19 bp, Mus musculus
  siRNA target sequence for Vax1 (NM_009501.1,911-929).
ccgggaatttgcaagaact

SEQ ID NO: 449818 - DNA, 19 bp, Mus musculus
  siRNA target sequence for Vax1 (NM_009501.1,971-989).
cccggaccaacaataaaga

SEQ ID NO: 449819 - DNA, 19 bp, Mus musculus
  siRNA target sequence for Vax2 (NM_011912.1,115-133).
caccgcggagcggaagatt

SEQ ID NO: 449820 - DNA, 19 bp, Mus musculus
  siRNA target sequence for Vax2 (NM_011912.1,710-728).
ccccacgcctcaatccaat

SEQ ID NO: 449821 - DNA, 19 bp, Mus musculus
  siRNA target sequence for Vax2 (NM_011912.1,769-787).
ccagccatctgcttttcct

SEQ ID NO: 449822 - DNA, 19 bp, Mus musculus
  siRNA target sequence for Vax2 (NM_011912.1,843-861).
gccctacagcagactagaa

SEQ ID NO: 449823 - DNA, 19 bp, Mus musculus
  siRNA target sequence for Vax2 (NM_011912.1,845-863).
cctacagcagactagaaca

SEQ ID NO: 449824 - DNA, 19 bp, Mus musculus
  siRNA target sequence for Vax2 (NM_011912.1,846-864).
ctacagcagactagaacaa

SEQ ID NO: 449825 - DNA, 19 bp, Mus musculus
  siRNA target sequence for Vax2 (NM_011912.1,854-872).
gactagaacaacagaaagt

SEQ ID NO: 449826 - DNA, 19 bp, Mus musculus
  siRNA target sequence for Vdr (NM_009504.2,446-464).
gtaagcgagagatgatcat

SEQ ID NO: 449827 - DNA, 19 bp, Mus musculus
  siRNA target sequence for Vdr (NM_009504.2,597-615).
cttccggcctccaattcgt

SEQ ID NO: 449828 - DNA, 19 bp, Mus musculus
  siRNA target sequence for Vdr (NM_009504.2,737-755).
cgatggatctgaatgaaga

SEQ ID NO: 449829 - DNA, 19 bp, Mus musculus
  siRNA target sequence for Vdr (NM_009504.2,826-844).
gtcagttacagcatccaaa

SEQ ID NO: 449830 - DNA, 19 bp, Mus musculus
  siRNA target sequence for Vdr (NM_009504.2,901-919).
cagattgtcctgcttaagt

SEQ ID NO: 449831 - DNA, 19 bp, Mus musculus
  siRNA target sequence for Vdr (NM_009504.2,903-921).
gattgtcctgcttaagtca

SEQ ID NO: 449832 - DNA, 19 bp, Mus musculus
  siRNA target sequence for Vdr (NM_009504.2,945-963).
gcgctccaaccagtctttt

SEQ ID NO: 449833 - DNA, 19 bp, Mus musculus
  siRNA target sequence for Vdr (NM_009504.2,946-964).
cgctccaaccagtctttta

SEQ ID NO: 449834 - DNA, 19 bp, Mus musculus
  siRNA target sequence for Vdr (NM_009504.2,950-968).
ccaaccagtcttttacctt

SEQ ID NO: 449835 - DNA, 19 bp, Mus musculus
  siRNA target sequence for Vdr (NM_009504.2,959-977).
cttttaccttggatgacat

SEQ ID NO: 449836 - DNA, 19 bp, Mus musculus
  siRNA target sequence for Vdr (NM_009504.2,995-1013).
gccaagactacaaatatga

SEQ ID NO: 449837 - DNA, 19 bp, Mus musculus
  siRNA target sequence for Vdr (NM_009504.2,1051-1069).
ctgatcgaacccctcataa

SEQ ID NO: 449838 - DNA, 19 bp, Mus musculus
  siRNA target sequence for Vsx1 (NM_054068.2,252-270).
ctctcgccttcgaagcttt

SEQ ID NO: 449839 - DNA, 19 bp, Mus musculus
  siRNA target sequence for Vsx1 (NM_054068.2,656-674).
cgaagatgtcccttatcct

SEQ ID NO: 449840 - DNA, 19 bp, Mus musculus
  siRNA target sequence for Vsx1 (NM_054068.2,667-685).
cttatcctgggcaaaagga

SEQ ID NO: 449841 - DNA, 19 bp, Mus musculus
  siRNA target sequence for Vsx1 (NM_054068.2,716-734).
cccatcaactcgaagaact

SEQ ID NO: 449842 - DNA, 19 bp, Mus musculus
  siRNA target sequence for Vsx1 (NM_054068.2,1196-1214).
ggcaggagactaagaaaat

SEQ ID NO: 449843 - DNA, 19 bp, Mus musculus
  siRNA target sequence for Wt1 (NM_144783.1,905-923).
ccatccgcaaccaaggata

SEQ ID NO: 449844 - DNA, 19 bp, Mus musculus
  siRNA target sequence for Wt1 (NM_144783.1,920-938).
gatacagcacggtcacttt

SEQ ID NO: 449845 - DNA, 19 bp, Mus musculus
  siRNA target sequence for Wt1 (NM_144783.1,982-1000).
gcgcagttccccaaccatt

SEQ ID NO: 449846 - DNA, 19 bp, Mus musculus
  siRNA target sequence for Wt1 (NM_144783.1,1137-1155).
ctacagcagtgacaattta

SEQ ID NO: 449847 - DNA, 19 bp, Mus musculus
  siRNA target sequence for Wt1 (NM_144783.1,1142-1160).
gcagtgacaatttatacca

SEQ ID NO: 449848 - DNA, 19 bp, Mus musculus
  siRNA target sequence for Wt1 (NM_144783.1,1143-1161).
cagtgacaatttataccaa

SEQ ID NO: 449849 - DNA, 19 bp, Mus musculus
  siRNA target sequence for Wt1 (NM_144783.1,1181-1199).
gcatgacctggaatcagat

SEQ ID NO: 449850 - DNA, 19 bp, Mus musculus
  siRNA target sequence for Wt1 (NM_144783.1,1200-1218).
gaacctaggagctacctta

SEQ ID NO: 449851 - DNA, 19 bp, Mus musculus
  siRNA target sequence for Wt1 (NM_144783.1,1322-1340).
gtggtgcccagtacagaat

SEQ ID NO: 449852 - DNA, 19 bp, Mus musculus
  siRNA target sequence for Wt1 (NM_144783.1,1371-1389).
ggatgtgcggcgtgtatct

SEQ ID NO: 449853 - DNA, 19 bp, Mus musculus
  siRNA target sequence for Wt1 (NM_144783.1,1408-1426).
gtccggtcagcatctgaaa

SEQ ID NO: 449854 - DNA, 19 bp, Mus musculus
  siRNA target sequence for Wt1 (NM_144783.1,1430-1448).
gtgagaaacgtcctttcat

SEQ ID NO: 449855 - DNA, 19 bp, Mus musculus
  siRNA target sequence for Wt1 (NM_144783.1,1432-1450).
gagaaacgtcctttcatgt

SEQ ID NO: 449856 - DNA, 19 bp, Mus musculus
  siRNA target sequence for Wt1 (NM_144783.1,1453-1471).
gcatacccaggctgcaata

SEQ ID NO: 449857 - DNA, 19 bp, Mus musculus
  siRNA target sequence for Wt1 (NM_144783.1,1462-1480).
ggctgcaataagagatatt

SEQ ID NO: 449858 - DNA, 19 bp, Mus musculus
  siRNA target sequence for Wt1 (NM_144783.1,1463-1481).
gctgcaataagagatattt

SEQ ID NO: 449859 - DNA, 19 bp, Mus musculus
  siRNA target sequence for Wt1 (NM_144783.1,1552-1570).
gactgcgagagaaggtttt

SEQ ID NO: 449860 - DNA, 19 bp, Mus musculus
  siRNA target sequence for Wt1 (NM_144783.1,1554-1572).
ctgcgagagaaggttttct

SEQ ID NO: 449861 - DNA, 19 bp, Mus musculus
  siRNA target sequence for Wt1 (NM_144783.1,1655-1673).
cccggtccgaccatctgaa

SEQ ID NO: 449862 - DNA, 19 bp, Mus musculus
  siRNA target sequence for Wt1 (NM_144783.1,1677-1695).
ccacaccaggactcataca

SEQ ID NO: 449863 - DNA, 19 bp, Mus musculus
  siRNA target sequence for Wt1 (NM_144783.1,1734-1752).
cagttgtcagaaaaagttt

SEQ ID NO: 449864 - DNA, 19 bp, Mus musculus
  siRNA target sequence for Wt1 (NM_144783.1,1754-1772).
cgcgctcagacgaattggt

SEQ ID NO: 449865 - DNA, 19 bp, Mus musculus
  siRNA target sequence for Yy1 (NM_009537.2,110-128).
cgggcgacaccctctacat

SEQ ID NO: 449866 - DNA, 19 bp, Mus musculus
  siRNA target sequence for Yy1 (NM_009537.2,530-548).
gcgacgacgactacataga

SEQ ID NO: 449867 - DNA, 19 bp, Mus musculus
  siRNA target sequence for Yy1 (NM_009537.2,813-831).
ggttgaagagcagatcatt

SEQ ID NO: 449868 - DNA, 19 bp, Mus musculus
  siRNA target sequence for Yy1 (NM_009537.2,931-949).
gcagaatttgccagaatga

SEQ ID NO: 449869 - DNA, 19 bp, Mus musculus
  siRNA target sequence for Yy1 (NM_009537.2,986-1004).
caatagcttgccctcataa

SEQ ID NO: 449870 - DNA, 19 bp, Mus musculus
  siRNA target sequence for Yy1 (NM_009537.2,1000-1018).
cataaaggctgcacaaaga

SEQ ID NO: 449871 - DNA, 19 bp, Mus musculus
  siRNA target sequence for Yy1 (NM_009537.2,1017-1035).
gatgttcagggataactct

SEQ ID NO: 449872 - DNA, 19 bp, Mus musculus
  siRNA target sequence for Yy1 (NM_009537.2,1104-1122).
cgttgagagctcaaagcta

SEQ ID NO: 449873 - DNA, 19 bp, Mus musculus
  siRNA target sequence for Yy1 (NM_009537.2,1105-1123).
gttgagagctcaaagctaa

SEQ ID NO: 449874 - DNA, 19 bp, Mus musculus
  siRNA target sequence for Yy1 (NM_009537.2,1110-1128).
gagctcaaagctaaaacga

SEQ ID NO: 449875 - DNA, 19 bp, Mus musculus
  siRNA target sequence for Yy1 (NM_009537.2,1181-1199).
gcgggaagcgcttttcact

SEQ ID NO: 449876 - DNA, 19 bp, Mus musculus
  siRNA target sequence for Yy1 (NM_009537.2,1256-1274).
gccccttcgacggttgtaa

SEQ ID NO: 449877 - DNA, 19 bp, Mus musculus
  siRNA target sequence for Yy1 (NM_009537.2,1257-1275).
ccccttcgacggttgtaat

SEQ ID NO: 449878 - DNA, 19 bp, Mus musculus
  siRNA target sequence for Yy1 (NM_009537.2,1258-1276).
cccttcgacggttgtaata

SEQ ID NO: 449879 - DNA, 19 bp, Mus musculus
  siRNA target sequence for Yy1 (NM_009537.2,1259-1277).
ccttcgacggttgtaataa

SEQ ID NO: 449880 - DNA, 19 bp, Mus musculus
  siRNA target sequence for Zfhx1a (NM_011546.1,573-591).
gcagttacacctttgcata

SEQ ID NO: 449881 - DNA, 19 bp, Mus musculus
  siRNA target sequence for Zfhx1a (NM_011546.1,597-615).
cccagcttgaacgtcatat

SEQ ID NO: 449882 - DNA, 19 bp, Mus musculus
  siRNA target sequence for Zfhx1a (NM_011546.1,599-617).
cagcttgaacgtcatatga

SEQ ID NO: 449883 - DNA, 19 bp, Mus musculus
  siRNA target sequence for Zfhx1a (NM_011546.1,601-619).
gcttgaacgtcatatgaca

SEQ ID NO: 449884 - DNA, 19 bp, Mus musculus
  siRNA target sequence for Zfhx1a (NM_011546.1,602-620).
cttgaacgtcatatgacat

SEQ ID NO: 449885 - DNA, 19 bp, Mus musculus
  siRNA target sequence for Zfhx1a (NM_011546.1,608-626).
cgtcatatgacatcacata

SEQ ID NO: 449886 - DNA, 19 bp, Mus musculus
  siRNA target sequence for Zfhx1a (NM_011546.1,662-680).
gggggaaaccgcaagttca

SEQ ID NO: 449887 - DNA, 19 bp, Mus musculus
  siRNA target sequence for Zfhx1a (NM_011546.1,728-746).
gagcacttacggattcaca

SEQ ID NO: 449888 - DNA, 19 bp, Mus musculus
  siRNA target sequence for Zfhx1a (NM_011546.1,800-818).
ggctcctatagctcacata

SEQ ID NO: 449889 - DNA, 19 bp, Mus musculus
  siRNA target sequence for Zfhx1a (NM_011546.1,802-820).
ctcctatagctcacatata

SEQ ID NO: 449890 - DNA, 19 bp, Mus musculus
  siRNA target sequence for Zfhx1a (NM_011546.1,815-833).
catataagcagtaagaagt

SEQ ID NO: 449891 - DNA, 19 bp, Mus musculus
  siRNA target sequence for Zfhx1a (NM_011546.1,825-843).
gtaagaagtgtattagctt

SEQ ID NO: 449892 - DNA, 19 bp, Mus musculus
  siRNA target sequence for Zfhx1a (NM_011546.1,958-976).
gaataaaccccttcaagaa

SEQ ID NO: 449893 - DNA, 19 bp, Mus musculus
  siRNA target sequence for Zfhx1a (NM_011546.1,977-995).
ccgctttctgtaaaccaaa

SEQ ID NO: 449894 - DNA, 19 bp, Mus musculus
  siRNA target sequence for Zfhx1a (NM_011546.1,1054-1072).
ctgttcaacccctttacaa

SEQ ID NO: 449895 - DNA, 19 bp, Mus musculus
  siRNA target sequence for Zfhx1a (NM_011546.1,1070-1088).
caaaatggggtttttagca

SEQ ID NO: 449896 - DNA, 19 bp, Mus musculus
  siRNA target sequence for Zfhx1a (NM_011546.1,1138-1156).
cgttgttctgccaacagtt

SEQ ID NO: 449897 - DNA, 19 bp, Mus musculus
  siRNA target sequence for Zfhx1a (NM_011546.1,1147-1165).
gccaacagttggtttggta

SEQ ID NO: 449898 - DNA, 19 bp, Mus musculus
  siRNA target sequence for Zfhx1a (NM_011546.1,1148-1166).
ccaacagttggtttggtat

SEQ ID NO: 449899 - DNA, 19 bp, Mus musculus
  siRNA target sequence for Zfhx1a (NM_011546.1,1163-1181).
gtatctcccataagtatca

SEQ ID NO: 449900 - DNA, 19 bp, Mus musculus
  siRNA target sequence for Zfhx1a (NM_011546.1,1167-1185).
ctcccataagtatcaactt

SEQ ID NO: 449901 - DNA, 19 bp, Mus musculus
  siRNA target sequence for Zfhx1a (NM_011546.1,1171-1189).
cataagtatcaacttaagt

SEQ ID NO: 449902 - DNA, 19 bp, Mus musculus
  siRNA target sequence for Zfhx1a (NM_011546.1,1192-1210).
cattcagaatgtacttaaa

SEQ ID NO: 449903 - DNA, 19 bp, Mus musculus
  siRNA target sequence for Zfhx1a (NM_011546.1,1214-1232).
gctgtagatggtaacgtaa

SEQ ID NO: 449904 - DNA, 19 bp, Mus musculus
  siRNA target sequence for Zfhx1a (NM_011546.1,1215-1233).
ctgtagatggtaacgtaat

SEQ ID NO: 449905 - DNA, 19 bp, Mus musculus
  siRNA target sequence for Zfhx1a (NM_011546.1,1236-1254).
gacaagtcttggagactaa

SEQ ID NO: 449906 - DNA, 19 bp, Mus musculus
  siRNA target sequence for Zfhx1a (NM_011546.1,1312-1330).
gggtggccattctgtcatt

SEQ ID NO: 449907 - DNA, 19 bp, Mus musculus
  siRNA target sequence for Zfhx1a (NM_011546.1,1313-1331).
ggtggccattctgtcattt

SEQ ID NO: 449908 - DNA, 19 bp, Mus musculus
  siRNA target sequence for Zfhx1a (NM_011546.1,1339-1357).
cagtcttcctttagttgat

SEQ ID NO: 449909 - DNA, 19 bp, Mus musculus
  siRNA target sequence for Zfhx1a (NM_011546.1,1358-1376).
caggatggaacaaccaaaa

SEQ ID NO: 449910 - DNA, 19 bp, Mus musculus
  siRNA target sequence for Zfhx1a (NM_011546.1,1364-1382).
ggaacaaccaaaatcatca

SEQ ID NO: 449911 - DNA, 19 bp, Mus musculus
  siRNA target sequence for Zfhx1a (NM_011546.1,1454-1472).
cctacaaacagctgcaaaa

SEQ ID NO: 449912 - DNA, 19 bp, Mus musculus
  siRNA target sequence for Zfhx1a (NM_011546.1,1493-1511).
cttactgtcaaatcagaaa

SEQ ID NO: 449913 - DNA, 19 bp, Mus musculus
  siRNA target sequence for Zfhx1a (NM_011546.1,1506-1524).
cagaaacggacaaaagctt

SEQ ID NO: 449914 - DNA, 19 bp, Mus musculus
  siRNA target sequence for Zfhx1a (NM_011546.1,1593-1611).
cagaactaaagcactatga

SEQ ID NO: 449915 - DNA, 19 bp, Mus musculus
  siRNA target sequence for Zfhx1a (NM_011546.1,1788-1806).
caaagatcgccgattctgt

SEQ ID NO: 449916 - DNA, 19 bp, Mus musculus
  siRNA target sequence for Zfhx1a (NM_011546.1,1817-1835).
ctggatggagttaaaaagt

SEQ ID NO: 449917 - DNA, 19 bp, Mus musculus
  siRNA target sequence for Zfhx1a (NM_011546.1,1846-1864).
gatgcaagctggacagatt

SEQ ID NO: 449918 - DNA, 19 bp, Mus musculus
  siRNA target sequence for Zfhx1a (NM_011546.1,1892-1910).
cctggaaccgggtcagtaa

SEQ ID NO: 449919 - DNA, 19 bp, Mus musculus
  siRNA target sequence for Zfhx1a (NM_011546.1,1905-1923).
cagtaaacatacctacaaa

SEQ ID NO: 449920 - DNA, 19 bp, Mus musculus
  siRNA target sequence for Zfhx1a (NM_011546.1,1907-1925).
gtaaacatacctacaaaaa

SEQ ID NO: 449921 - DNA, 19 bp, Mus musculus
  siRNA target sequence for Zfhx1a (NM_011546.1,2064-2082).
ccccatcccctctaaacct

SEQ ID NO: 449922 - DNA, 19 bp, Mus musculus
  siRNA target sequence for Zfhx1a (NM_011546.1,2205-2223).
cagtcagtagcgtttacca

SEQ ID NO: 449923 - DNA, 19 bp, Mus musculus
  siRNA target sequence for Zfhx1a (NM_011546.1,2221-2239).
ccagaacagtgtttattct

SEQ ID NO: 449924 - DNA, 19 bp, Mus musculus
  siRNA target sequence for Zfhx1a (NM_011546.1,2263-2281).
gtcttgtgcaaaaaaggaa

SEQ ID NO: 449925 - DNA, 19 bp, Mus musculus
  siRNA target sequence for Zfhx1a (NM_011546.1,2337-2355).
caagtgccaaccccataaa

SEQ ID NO: 449926 - DNA, 19 bp, Mus musculus
  siRNA target sequence for Zfhx1a (NM_011546.1,2413-2431).
gaacagtgttccatgttta

SEQ ID NO: 449927 - DNA, 19 bp, Mus musculus
  siRNA target sequence for Zfhx1a (NM_011546.1,2443-2461).
cgccaacaagcagactatt

SEQ ID NO: 449928 - DNA, 19 bp, Mus musculus
  siRNA target sequence for Zfhx1a (NM_011546.1,2445-2463).
ccaacaagcagactattct

SEQ ID NO: 449929 - DNA, 19 bp, Mus musculus
  siRNA target sequence for Zfhx1a (NM_011546.1,2470-2488).
ccaagtggcatatacatat

SEQ ID NO: 449930 - DNA, 19 bp, Mus musculus
  siRNA target sequence for Zfhx1a (NM_011546.1,2471-2489).
caagtggcatatacatatt

SEQ ID NO: 449931 - DNA, 19 bp, Mus musculus
  siRNA target sequence for Zfhx1a (NM_011546.1,2619-2637).
ccacgccacccaaaaagaa

SEQ ID NO: 449932 - DNA, 19 bp, Mus musculus
  siRNA target sequence for Zfhx1a (NM_011546.1,2647-2665).
gacagagaatggaatgtat

SEQ ID NO: 449933 - DNA, 19 bp, Mus musculus
  siRNA target sequence for Zfhx1a (NM_011546.1,2706-2724).
cactgttgagacacaaata

SEQ ID NO: 449934 - DNA, 19 bp, Mus musculus
  siRNA target sequence for Zfhx1a (NM_011546.1,2747-2765).
cacgagtgtggaatctgta

SEQ ID NO: 449935 - DNA, 19 bp, Mus musculus
  siRNA target sequence for Zfhx1a (NM_011546.1,2761-2779).
ctgtagaaaggcatttaaa

SEQ ID NO: 449936 - DNA, 19 bp, Mus musculus
  siRNA target sequence for Zfhx1a (NM_011546.1,2763-2781).
gtagaaaggcatttaaaca

SEQ ID NO: 449937 - DNA, 19 bp, Mus musculus
  siRNA target sequence for Zfhx1a (NM_011546.1,3028-3046).
ctcggacgagagagaaagt

SEQ ID NO: 449938 - DNA, 19 bp, Mus musculus
  siRNA target sequence for Zfhx1a (NM_011546.1,3030-3048).
cggacgagagagaaagtct

SEQ ID NO: 449939 - DNA, 19 bp, Mus musculus
  siRNA target sequence for Zfhx1b (NM_015753.2,296-314).
gtgcaagaggcgcaaacaa

SEQ ID NO: 449940 - DNA, 19 bp, Mus musculus
  siRNA target sequence for Zfhx1b (NM_015753.2,328-346).
ggaaaaacgtggtgaacta

SEQ ID NO: 449941 - DNA, 19 bp, Mus musculus
  siRNA target sequence for Zfhx1b (NM_015753.2,329-347).
gaaaaacgtggtgaactat

SEQ ID NO: 449942 - DNA, 19 bp, Mus musculus
  siRNA target sequence for Zfhx1b (NM_015753.2,637-655).
cgatccagaccacaattaa

SEQ ID NO: 449943 - DNA, 19 bp, Mus musculus
  siRNA target sequence for Zfhx1b (NM_015753.2,656-674).
caatggtacagttaagaat

SEQ ID NO: 449944 - DNA, 19 bp, Mus musculus
  siRNA target sequence for Zfhx1b (NM_015753.2,660-678).
ggtacagttaagaatgcaa

SEQ ID NO: 449945 - DNA, 19 bp, Mus musculus
  siRNA target sequence for Zfhx1b (NM_015753.2,685-703).
catcagactttgaggaata

SEQ ID NO: 449946 - DNA, 19 bp, Mus musculus
  siRNA target sequence for Zfhx1b (NM_015753.2,688-706).
cagactttgaggaatactt

SEQ ID NO: 449947 - DNA, 19 bp, Mus musculus
  siRNA target sequence for Zfhx1b (NM_015753.2,742-760).
cagtgagcatcgaagagta

SEQ ID NO: 449948 - DNA, 19 bp, Mus musculus
  siRNA target sequence for Zfhx1b (NM_015753.2,769-787).
gaagcgacacggccattat

SEQ ID NO: 449949 - DNA, 19 bp, Mus musculus
  siRNA target sequence for Zfhx1b (NM_015753.2,772-790).
gcgacacggccattattta

SEQ ID NO: 449950 - DNA, 19 bp, Mus musculus
  siRNA target sequence for Zfhx1b (NM_015753.2,833-851).
ggccaacgggcaagaagaa

SEQ ID NO: 449951 - DNA, 19 bp, Mus musculus
  siRNA target sequence for Zfhx1b (NM_015753.2,959-977).
ccgccacgagaagaatgaa

SEQ ID NO: 449952 - DNA, 19 bp, Mus musculus
  siRNA target sequence for Zfhx1b (NM_015753.2,1060-1078).
ggacagatcagcaccaaat

SEQ ID NO: 449953 - DNA, 19 bp, Mus musculus
  siRNA target sequence for Zfhx1b (NM_015753.2,1065-1083).
gatcagcaccaaatgctaa

SEQ ID NO: 449954 - DNA, 19 bp, Mus musculus
  siRNA target sequence for Zfhx1b (NM_015753.2,1093-1111).
caggtaaccgcaagttcaa

SEQ ID NO: 449955 - DNA, 19 bp, Mus musculus
  siRNA target sequence for Zfhx1b (NM_015753.2,1211-1229).
gaaacgcttctctcattct

SEQ ID NO: 449956 - DNA, 19 bp, Mus musculus
  siRNA target sequence for Zfhx1b (NM_015753.2,1230-1248).
gggtcctacagttcacata

SEQ ID NO: 449957 - DNA, 19 bp, Mus musculus
  siRNA target sequence for Zfhx1b (NM_015753.2,1253-1271).
cagcaagaaatgtattggt

SEQ ID NO: 449958 - DNA, 19 bp, Mus musculus
  siRNA target sequence for Zfhx1b (NM_015753.2,1255-1273).
gcaagaaatgtattggttt

SEQ ID NO: 449959 - DNA, 19 bp, Mus musculus
  siRNA target sequence for Zfhx1b (NM_015753.2,1281-1299).
gtaaatggccgaatgagaa

SEQ ID NO: 449960 - DNA, 19 bp, Mus musculus
  siRNA target sequence for Zfhx1b (NM_015753.2,1287-1305).
ggccgaatgagaaacaata

SEQ ID NO: 449961 - DNA, 19 bp, Mus musculus
  siRNA target sequence for Zfhx1b (NM_015753.2,1288-1306).
gccgaatgagaaacaatat

SEQ ID NO: 449962 - DNA, 19 bp, Mus musculus
  siRNA target sequence for Zfhx1b (NM_015753.2,1348-1366).
ctaactcagccattactca

SEQ ID NO: 449963 - DNA, 19 bp, Mus musculus
  siRNA target sequence for Zfhx1b (NM_015753.2,1352-1370).
ctcagccattactcagtta

SEQ ID NO: 449964 - DNA, 19 bp, Mus musculus
  siRNA target sequence for Zfhx1b (NM_015753.2,1356-1374).
gccattactcagttaagga

SEQ ID NO: 449965 - DNA, 19 bp, Mus musculus
  siRNA target sequence for Zfhx1b (NM_015753.2,1410-1428).
gagcagacaggcttactta

SEQ ID NO: 449966 - DNA, 19 bp, Mus musculus
  siRNA target sequence for Zfhx1b (NM_015753.2,1413-1431).
cagacaggcttacttaaga

SEQ ID NO: 449967 - DNA, 19 bp, Mus musculus
  siRNA target sequence for Zfhx1b (NM_015753.2,1417-1435).
caggcttacttaagattaa

SEQ ID NO: 449968 - DNA, 19 bp, Mus musculus
  siRNA target sequence for Zfhx1b (NM_015753.2,1419-1437).
ggcttacttaagattaaaa

SEQ ID NO: 449969 - DNA, 19 bp, Mus musculus
  siRNA target sequence for Zfhx1b (NM_015753.2,1451-1469).
cttcaatgactataaagtt

SEQ ID NO: 449970 - DNA, 19 bp, Mus musculus
  siRNA target sequence for Zfhx1b (NM_015753.2,1454-1472).
caatgactataaagttctt

SEQ ID NO: 449971 - DNA, 19 bp, Mus musculus
  siRNA target sequence for Zfhx1b (NM_015753.2,1475-1493).
ggcaacacatgggtttagt

SEQ ID NO: 449972 - DNA, 19 bp, Mus musculus
  siRNA target sequence for Zfhx1b (NM_015753.2,1589-1607).
gatggaagcccctttactt

SEQ ID NO: 449973 - DNA, 19 bp, Mus musculus
  siRNA target sequence for Zfhx1b (NM_015753.2,2225-2243).
ccacatgtctgtactgaaa

SEQ ID NO: 449974 - DNA, 19 bp, Mus musculus
  siRNA target sequence for Zfhx1b (NM_015753.2,2238-2256).
ctgaaagcatactatgcta

SEQ ID NO: 449975 - DNA, 19 bp, Mus musculus
  siRNA target sequence for Zfhx1b (NM_015753.2,2244-2262).
gcatactatgctatgaaca

SEQ ID NO: 449976 - DNA, 19 bp, Mus musculus
  siRNA target sequence for Zfhx1b (NM_015753.2,2352-2370).
gtctaccagtattcgaatt

SEQ ID NO: 449977 - DNA, 19 bp, Mus musculus
  siRNA target sequence for Zfhx1b (NM_015753.2,2403-2421).
ccgttagctcccaacagta

SEQ ID NO: 449978 - DNA, 19 bp, Mus musculus
  siRNA target sequence for Zfhx1b (NM_015753.2,2404-2422).
cgttagctcccaacagtaa

SEQ ID NO: 449979 - DNA, 19 bp, Mus musculus
  siRNA target sequence for Zfhx1b (NM_015753.2,2417-2435).
cagtaaccccaccacaaaa

SEQ ID NO: 449980 - DNA, 19 bp, Mus musculus
  siRNA target sequence for Zfhx1b (NM_015753.2,2428-2446).
ccacaaaagactctttgtt

SEQ ID NO: 449981 - DNA, 19 bp, Mus musculus
  siRNA target sequence for Zfhx1b (NM_015753.2,2429-2447).
cacaaaagactctttgtta

SEQ ID NO: 449982 - DNA, 19 bp, Mus musculus
  siRNA target sequence for Zfhx1b (NM_015753.2,2452-2470).
ggtctcctgtaaaacctat

SEQ ID NO: 449983 - DNA, 19 bp, Mus musculus
  siRNA target sequence for Zfhx1b (NM_015753.2,2476-2494).
ccatcacatcgccatctat

SEQ ID NO: 449984 - DNA, 19 bp, Mus musculus
  siRNA target sequence for Zfhx1b (NM_015753.2,2477-2495).
catcacatcgccatctata

SEQ ID NO: 449985 - DNA, 19 bp, Mus musculus
  siRNA target sequence for Zfhx1b (NM_015753.2,2480-2498).
cacatcgccatctatagca

SEQ ID NO: 449986 - DNA, 19 bp, Mus musculus
  siRNA target sequence for Zfhx1b (NM_015753.2,2499-2517).
gaactccacaacagtgtta

SEQ ID NO: 449987 - DNA, 19 bp, Mus musculus
  siRNA target sequence for Zfhx1b (NM_015753.2,2510-2528).
cagtgttacgagttgtgat

SEQ ID NO: 449988 - DNA, 19 bp, Mus musculus
  siRNA target sequence for Zfhx1b (NM_015753.2,2530-2548).
ctcctctcaggctaacaaa

SEQ ID NO: 449989 - DNA, 19 bp, Mus musculus
  siRNA target sequence for Zfhx1b (NM_015753.2,2532-2550).
cctctcaggctaacaaaat

SEQ ID NO: 449990 - DNA, 19 bp, Mus musculus
  siRNA target sequence for Zfhx1b (NM_015753.2,2588-2606).
ggaccactcgaggagtaat

SEQ ID NO: 449991 - DNA, 19 bp, Mus musculus
  siRNA target sequence for Zfhx1b (NM_015753.2,2589-2607).
gaccactcgaggagtaata

SEQ ID NO: 449992 - DNA, 19 bp, Mus musculus
  siRNA target sequence for Zfhx1b (NM_015753.2,2591-2609).
ccactcgaggagtaatact

SEQ ID NO: 449993 - DNA, 19 bp, Mus musculus
  siRNA target sequence for Zfhx1b (NM_015753.2,2662-2680).
cgtacactccaaatagctt

SEQ ID NO: 449994 - DNA, 19 bp, Mus musculus
  siRNA target sequence for Zfhx1b (NM_015753.2,2705-2723).
gccgttggacctgtcatta

SEQ ID NO: 449995 - DNA, 19 bp, Mus musculus
  siRNA target sequence for Zfhx1b (NM_015753.2,2708-2726).
gttggacctgtcattacca

SEQ ID NO: 449996 - DNA, 19 bp, Mus musculus
  siRNA target sequence for Zfhx1b (NM_015753.2,2737-2755).
gagaacccaaaggtattat

SEQ ID NO: 449997 - DNA, 19 bp, Mus musculus
  siRNA target sequence for Zfhx1b (NM_015753.2,2748-2766).
ggtattatagccacaaaga

SEQ ID NO: 449998 - DNA, 19 bp, Mus musculus
  siRNA target sequence for Zfhx1b (NM_015753.2,2773-2791).
caaaagctactagcataaa

SEQ ID NO: 449999 - DNA, 19 bp, Mus musculus
  siRNA target sequence for Zfhx1b (NM_015753.2,2779-2797).
ctactagcataaacttaga

SEQ ID NO: 450000 - DNA, 19 bp, Mus musculus
  siRNA target sequence for Zfhx1b (NM_015753.2,2832-2850).
gatgagcctctgaatttga

SEQ ID NO: 450001 - DNA, 19 bp, Mus musculus
  siRNA target sequence for Zfhx1b (NM_015753.2,2915-2933).
cggcatgaacccatttagt

SEQ ID NO: 450002 - DNA, 19 bp, Mus musculus
  siRNA target sequence for Zfhx1b (NM_015753.2,3060-3078).
ccgcatatggcctatacct

SEQ ID NO: 450003 - DNA, 19 bp, Mus musculus
  siRNA target sequence for Zfhx1b (NM_015753.2,3091-3109).
cagctacctttgctgatat

SEQ ID NO: 450004 - DNA, 19 bp, Mus musculus
  siRNA target sequence for Zfhx1b (NM_015753.2,3094-3112).
ctacctttgctgatatgca

SEQ ID NO: 450005 - DNA, 19 bp, Mus musculus
  siRNA target sequence for Zfhx1b (NM_015753.2,3165-3183).
ggagcacaagactacatgt

SEQ ID NO: 450006 - DNA, 19 bp, Mus musculus
  siRNA target sequence for Zfhx1b (NM_015753.2,3254-3272).
catgtatgcatgtgactta

SEQ ID NO: 450007 - DNA, 19 bp, Mus musculus
  siRNA target sequence for Zfhx1b (NM_015753.2,3301-3319).
cccttctgcgacataaata

SEQ ID NO: 450008 - DNA, 19 bp, Mus musculus
  siRNA target sequence for Zfhx1b (NM_015753.2,3345-3363).
cagtgtcagatttgtaaga

SEQ ID NO: 450009 - DNA, 19 bp, Mus musculus
  siRNA target sequence for Zfhx1b (NM_015753.2,3347-3365).
gtgtcagatttgtaagaaa

SEQ ID NO: 450010 - DNA, 19 bp, Mus musculus
  siRNA target sequence for Zfhx1b (NM_015753.2,3539-3557).
gcgcgaggcgcgagagaaa

SEQ ID NO: 450011 - DNA, 19 bp, Mus musculus
  siRNA target sequence for Zfp110 (NM_022981.2,189-207).
gatgtatctctgacgttta

SEQ ID NO: 450012 - DNA, 19 bp, Mus musculus
  siRNA target sequence for Zfp110 (NM_022981.2,323-341).
gatatctcagctagaaaaa

SEQ ID NO: 450013 - DNA, 19 bp, Mus musculus
  siRNA target sequence for Zfp110 (NM_022981.2,465-483).
gttgttgaggtccttacat

SEQ ID NO: 450014 - DNA, 19 bp, Mus musculus
  siRNA target sequence for Zfp110 (NM_022981.2,468-486).
gttgaggtccttacattga

SEQ ID NO: 450015 - DNA, 19 bp, Mus musculus
  siRNA target sequence for Zfp110 (NM_022981.2,505-523).
ctcggaatgccctgattca

SEQ ID NO: 450016 - DNA, 19 bp, Mus musculus
  siRNA target sequence for Zfp110 (NM_022981.2,507-525).
cggaatgccctgattcaat

SEQ ID NO: 450017 - DNA, 19 bp, Mus musculus
  siRNA target sequence for Zfp110 (NM_022981.2,526-544).
ccctctatccagaagactt

SEQ ID NO: 450018 - DNA, 19 bp, Mus musculus
  siRNA target sequence for Zfp110 (NM_022981.2,575-593).
gccaagcaagcgtttgact

SEQ ID NO: 450019 - DNA, 19 bp, Mus musculus
  siRNA target sequence for Zfp110 (NM_022981.2,703-721).
ccaatacacgttcaaagaa

SEQ ID NO: 450020 - DNA, 19 bp, Mus musculus
  siRNA target sequence for Zfp110 (NM_022981.2,892-910).
ccactgatcaactaaagga

SEQ ID NO: 450021 - DNA, 19 bp, Mus musculus
  siRNA target sequence for Zfp110 (NM_022981.2,926-944).
ggccaccttaccagttact

SEQ ID NO: 450022 - DNA, 19 bp, Mus musculus
  siRNA target sequence for Zfp110 (NM_022981.2,927-945).
gccaccttaccagttactt

SEQ ID NO: 450023 - DNA, 19 bp, Mus musculus
  siRNA target sequence for Zfp110 (NM_022981.2,928-946).
ccaccttaccagttacttt

SEQ ID NO: 450024 - DNA, 19 bp, Mus musculus
  siRNA target sequence for Zfp110 (NM_022981.2,932-950).
cttaccagttacttttgca

SEQ ID NO: 450025 - DNA, 19 bp, Mus musculus
  siRNA target sequence for Zfp110 (NM_022981.2,1036-1054).
cgcagaagactgagtatca

SEQ ID NO: 450026 - DNA, 19 bp, Mus musculus
  siRNA target sequence for Zfp110 (NM_022981.2,1045-1063).
ctgagtatcatgatgtgat

SEQ ID NO: 450027 - DNA, 19 bp, Mus musculus
  siRNA target sequence for Zfp110 (NM_022981.2,1103-1121).
gcctacattgggaaacaga

SEQ ID NO: 450028 - DNA, 19 bp, Mus musculus
  siRNA target sequence for Zfp110 (NM_022981.2,1182-1200).
gatctctcaaggaatggta

SEQ ID NO: 450029 - DNA, 19 bp, Mus musculus
  siRNA target sequence for Zfp110 (NM_022981.2,1201-1219).
cccagtctactgtctttga

SEQ ID NO: 450030 - DNA, 19 bp, Mus musculus
  siRNA target sequence for Zfp110 (NM_022981.2,1202-1220).
ccagtctactgtctttgaa

SEQ ID NO: 450031 - DNA, 19 bp, Mus musculus
  siRNA target sequence for Zfp110 (NM_022981.2,1203-1221).
cagtctactgtctttgaaa

SEQ ID NO: 450032 - DNA, 19 bp, Mus musculus
  siRNA target sequence for Zfp110 (NM_022981.2,1250-1268).
gcacaccatagaatcaaat

SEQ ID NO: 450033 - DNA, 19 bp, Mus musculus
  siRNA target sequence for Zfp110 (NM_022981.2,1253-1271).
caccatagaatcaaatcaa

SEQ ID NO: 450034 - DNA, 19 bp, Mus musculus
  siRNA target sequence for Zfp110 (NM_022981.2,1255-1273).
ccatagaatcaaatcaagt

SEQ ID NO: 450035 - DNA, 19 bp, Mus musculus
  siRNA target sequence for Zfp110 (NM_022981.2,1294-1312).
gccatcctcagaagaagtt

SEQ ID NO: 450036 - DNA, 19 bp, Mus musculus
  siRNA target sequence for Zfp110 (NM_022981.2,1357-1375).
gccagggctcactcaatga

SEQ ID NO: 450037 - DNA, 19 bp, Mus musculus
  siRNA target sequence for Zfp110 (NM_022981.2,1358-1376).
ccagggctcactcaatgaa

SEQ ID NO: 450038 - DNA, 19 bp, Mus musculus
  siRNA target sequence for Zfp110 (NM_022981.2,1361-1379).
gggctcactcaatgaagtt

SEQ ID NO: 450039 - DNA, 19 bp, Mus musculus
  siRNA target sequence for Zfp110 (NM_022981.2,1363-1381).
gctcactcaatgaagttct

SEQ ID NO: 450040 - DNA, 19 bp, Mus musculus
  siRNA target sequence for Zfp110 (NM_022981.2,1364-1382).
ctcactcaatgaagttctt

SEQ ID NO: 450041 - DNA, 19 bp, Mus musculus
  siRNA target sequence for Zfp110 (NM_022981.2,1458-1476).
cgaggtttacgcataagaa

SEQ ID NO: 450042 - DNA, 19 bp, Mus musculus
  siRNA target sequence for Zfp110 (NM_022981.2,1459-1477).
gaggtttacgcataagaaa

SEQ ID NO: 450043 - DNA, 19 bp, Mus musculus
  siRNA target sequence for Zfp110 (NM_022981.2,1537-1555).
gctcctccataaaaaacca

SEQ ID NO: 450044 - DNA, 19 bp, Mus musculus
  siRNA target sequence for Zfp110 (NM_022981.2,1589-1607).
cagtagagatcccattaca

SEQ ID NO: 450045 - DNA, 19 bp, Mus musculus
  siRNA target sequence for Zfp110 (NM_022981.2,1591-1609).
gtagagatcccattacact

SEQ ID NO: 450046 - DNA, 19 bp, Mus musculus
  siRNA target sequence for Zfp110 (NM_022981.2,1634-1652).
gaaagccactggctctaaa

SEQ ID NO: 450047 - DNA, 19 bp, Mus musculus
  siRNA target sequence for Zfp110 (NM_022981.2,1638-1656).
gccactggctctaaagaga

SEQ ID NO: 450048 - DNA, 19 bp, Mus musculus
  siRNA target sequence for Zfp110 (NM_022981.2,1648-1666).
ctaaagagagtatacttat

SEQ ID NO: 450049 - DNA, 19 bp, Mus musculus
  siRNA target sequence for Zfp110 (NM_022981.2,1720-1738).
gccctgaatggcataaagt

SEQ ID NO: 450050 - DNA, 19 bp, Mus musculus
  siRNA target sequence for Zfp110 (NM_022981.2,1737-1755).
gttggggaaagtaacaatt

SEQ ID NO: 450051 - DNA, 19 bp, Mus musculus
  siRNA target sequence for Zfp110 (NM_022981.2,1840-1858).
ccttacctgtaaaaagtca

SEQ ID NO: 450052 - DNA, 19 bp, Mus musculus
  siRNA target sequence for Zfp110 (NM_022981.2,1855-1873).
gtcatcagaaaggctataa

SEQ ID NO: 450053 - DNA, 19 bp, Mus musculus
  siRNA target sequence for Zfp110 (NM_022981.2,1884-1902).
gtccaagggaacaggaatt

SEQ ID NO: 450054 - DNA, 19 bp, Mus musculus
  siRNA target sequence for Zfp110 (NM_022981.2,1944-1962).
gaaagagtcgaggaactta

SEQ ID NO: 450055 - DNA, 19 bp, Mus musculus
  siRNA target sequence for Zfp110 (NM_022981.2,2030-2048).
ggaaatcaatgcttccata

SEQ ID NO: 450056 - DNA, 19 bp, Mus musculus
  siRNA target sequence for Zfp110 (NM_022981.2,2031-2049).
gaaatcaatgcttccataa

SEQ ID NO: 450057 - DNA, 19 bp, Mus musculus
  siRNA target sequence for Zfp110 (NM_022981.2,2100-2118).
ctcaggagagccaacaatt

SEQ ID NO: 450058 - DNA, 19 bp, Mus musculus
  siRNA target sequence for Zfp110 (NM_022981.2,2102-2120).
caggagagccaacaattgt

SEQ ID NO: 450059 - DNA, 19 bp, Mus musculus
  siRNA target sequence for Zfp110 (NM_022981.2,2180-2198).
ccaagtttgccgatgtagt

SEQ ID NO: 450060 - DNA, 19 bp, Mus musculus
  siRNA target sequence for Zfp110 (NM_022981.2,2213-2231).
gttccggaatgctaggtat

SEQ ID NO: 450061 - DNA, 19 bp, Mus musculus
  siRNA target sequence for Zfp110 (NM_022981.2,2227-2245).
ggtatttctctgtccataa

SEQ ID NO: 450062 - DNA, 19 bp, Mus musculus
  siRNA target sequence for Zfp110 (NM_022981.2,2262-2280).
gagcggccatatatgtgta

SEQ ID NO: 450063 - DNA, 19 bp, Mus musculus
  siRNA target sequence for Zfp110 (NM_022981.2,2315-2333).
cctcacacagcatcttaga

SEQ ID NO: 450064 - DNA, 19 bp, Mus musculus
  siRNA target sequence for Zfp110 (NM_022981.2,2520-2538).
ccatatgtgtgcatcaagt

SEQ ID NO: 450065 - DNA, 19 bp, Mus musculus
  siRNA target sequence for Zfp191 (NM_021559.1,22-40).
gaagattcaatacttatca

SEQ ID NO: 450066 - DNA, 19 bp, Mus musculus
  siRNA target sequence for Zfp191 (NM_021559.1,103-121).
gaagagggatcgagcattt

SEQ ID NO: 450067 - DNA, 19 bp, Mus musculus
  siRNA target sequence for Zfp191 (NM_021559.1,828-846).
gaaaccgtatggatgtgtt

SEQ ID NO: 450068 - DNA, 19 bp, Mus musculus
  siRNA target sequence for Zfp192 (NM_139141.1,134-152).
gaggatcttgtcattgtca

SEQ ID NO: 450069 - DNA, 19 bp, Mus musculus
  siRNA target sequence for Zfp192 (NM_139141.1,207-225).
cacctggccaagaactgtt

SEQ ID NO: 450070 - DNA, 19 bp, Mus musculus
  siRNA target sequence for Zfp192 (NM_139141.1,283-301).
gatccagctccgtgcattt

SEQ ID NO: 450071 - DNA, 19 bp, Mus musculus
  siRNA target sequence for Zfp192 (NM_139141.1,412-430).
ggagcaccagttacagaat

SEQ ID NO: 450072 - DNA, 19 bp, Mus musculus
  siRNA target sequence for Zfp202 (NM_030713.1,403-421).
gacttcgagagctttgtca

SEQ ID NO: 450073 - DNA, 19 bp, Mus musculus
  siRNA target sequence for Zfp202 (NM_030713.1,607-625).
gggtaaccgtccatgttca

SEQ ID NO: 450074 - DNA, 19 bp, Mus musculus
  siRNA target sequence for Zfp202 (NM_030713.1,680-698).
ctccagtgagcaacaagat

SEQ ID NO: 450075 - DNA, 19 bp, Mus musculus
  siRNA target sequence for Zfp202 (NM_030713.1,972-990).
ccaacacaaaaagaattct

SEQ ID NO: 450076 - DNA, 19 bp, Mus musculus
  siRNA target sequence for Zfp202 (NM_030713.1,1029-1047).
gtctctctgtcatttccaa

SEQ ID NO: 450077 - DNA, 19 bp, Mus musculus
  siRNA target sequence for Zfp202 (NM_030713.1,1031-1049).
ctctctgtcatttccaatt

SEQ ID NO: 450078 - DNA, 19 bp, Mus musculus
  siRNA target sequence for Zfp202 (NM_030713.1,1139-1157).
cctgagttttacctataca

SEQ ID NO: 450079 - DNA, 19 bp, Mus musculus
  siRNA target sequence for Zfp202 (NM_030713.1,1197-1215).
caagatacacacaagtcta

SEQ ID NO: 450080 - DNA, 19 bp, Mus musculus
  siRNA target sequence for Zfp202 (NM_030713.1,1200-1218).
gatacacacaagtctactt

SEQ ID NO: 450081 - DNA, 19 bp, Mus musculus
  siRNA target sequence for Zfp202 (NM_030713.1,1211-1229).
gtctactttggcaaacaca

SEQ ID NO: 450082 - DNA, 19 bp, Mus musculus
  siRNA target sequence for Zfp202 (NM_030713.1,1241-1259).
gtctccagattgggaaata

SEQ ID NO: 450083 - DNA, 19 bp, Mus musculus
  siRNA target sequence for Zfp202 (NM_030713.1,1245-1263).
ccagattgggaaatagtca

SEQ ID NO: 450084 - DNA, 19 bp, Mus musculus
  siRNA target sequence for Zfp202 (NM_030713.1,1246-1264).
cagattgggaaatagtcat

SEQ ID NO: 450085 - DNA, 19 bp, Mus musculus
  siRNA target sequence for Zfp202 (NM_030713.1,1268-1286).
ggataataccagtagactt

SEQ ID NO: 450086 - DNA, 19 bp, Mus musculus
  siRNA target sequence for Zfp202 (NM_030713.1,1279-1297).
gtagacttaatgaaagatt

SEQ ID NO: 450087 - DNA, 19 bp, Mus musculus
  siRNA target sequence for Zfp202 (NM_030713.1,1284-1302).
cttaatgaaagatttggta

SEQ ID NO: 450088 - DNA, 19 bp, Mus musculus
  siRNA target sequence for Zfp202 (NM_030713.1,1317-1335).
gttaatagtttcacaaata

SEQ ID NO: 450089 - DNA, 19 bp, Mus musculus
  siRNA target sequence for Zfp202 (NM_030713.1,1406-1424).
cacgtgtaattctcatctt

SEQ ID NO: 450090 - DNA, 19 bp, Mus musculus
  siRNA target sequence for Zfp202 (NM_030713.1,1408-1426).
cgtgtaattctcatcttat

SEQ ID NO: 450091 - DNA, 19 bp, Mus musculus
  siRNA target sequence for Zfp202 (NM_030713.1,1422-1440).
cttattaggcacttaagaa

SEQ ID NO: 450092 - DNA, 19 bp, Mus musculus
  siRNA target sequence for Zfp202 (NM_030713.1,1490-1508).
cacacggagctcacatcta

SEQ ID NO: 450093 - DNA, 19 bp, Mus musculus
  siRNA target sequence for Zfp202 (NM_030713.1,1532-1550).
gatgaacactcctcataaa

SEQ ID NO: 450094 - DNA, 19 bp, Mus musculus
  siRNA target sequence for Zfp202 (NM_030713.1,1587-1605).
gtccagtctgaggtaacta

SEQ ID NO: 450095 - DNA, 19 bp, Mus musculus
  siRNA target sequence for Zfp202 (NM_030713.1,1607-1625).
ccgtgtggagaaaccatat

SEQ ID NO: 450096 - DNA, 19 bp, Mus musculus
  siRNA target sequence for Zfp202 (NM_030713.1,1608-1626).
cgtgtggagaaaccatata

SEQ ID NO: 450097 - DNA, 19 bp, Mus musculus
  siRNA target sequence for Zfp202 (NM_030713.1,1740-1758).
cagaaatctgtgttaacga

SEQ ID NO: 450098 - DNA, 19 bp, Mus musculus
  siRNA target sequence for Zfp202 (NM_030713.1,1801-1819).
cgaactgtggcgagaactt

SEQ ID NO: 450099 - DNA, 19 bp, Mus musculus
  siRNA target sequence for Zfp202 (NM_030713.1,1872-1890).
caccatctgtgcaatgagt

SEQ ID NO: 450100 - DNA, 19 bp, Mus musculus
  siRNA target sequence for Zfp263 (NM_148924.2,285-303).
ggctcctcatagtgaaact

SEQ ID NO: 450101 - DNA, 19 bp, Mus musculus
  siRNA target sequence for Zfp263 (NM_148924.2,654-672).
ggggagcagaagtgctttt

SEQ ID NO: 450102 - DNA, 19 bp, Mus musculus
  siRNA target sequence for Zfp263 (NM_148924.2,806-824).
gtaaaggagagggcattat

SEQ ID NO: 450103 - DNA, 19 bp, Mus musculus
  siRNA target sequence for Zfp263 (NM_148924.2,908-926).
gaggacatggcaatgtata

SEQ ID NO: 450104 - DNA, 19 bp, Mus musculus
  siRNA target sequence for Zfp263 (NM_148924.2,913-931).
catggcaatgtatatctct

SEQ ID NO: 450105 - DNA, 19 bp, Mus musculus
  siRNA target sequence for Zfp263 (NM_148924.2,944-962).
catcaggatcctagtaaga

SEQ ID NO: 450106 - DNA, 19 bp, Mus musculus
  siRNA target sequence for Zfp263 (NM_148924.2,961-979).
gagagctctatcaaggtat

SEQ ID NO: 450107 - DNA, 19 bp, Mus musculus
  siRNA target sequence for Zfp263 (NM_148924.2,963-981).
gagctctatcaaggtatat

SEQ ID NO: 450108 - DNA, 19 bp, Mus musculus
  siRNA target sequence for Zfp263 (NM_148924.2,972-990).
caaggtatatggtacaaga

SEQ ID NO: 450109 - DNA, 19 bp, Mus musculus
  siRNA target sequence for Zfp263 (NM_148924.2,1287-1305).
gtcccccagaggacaaaat

SEQ ID NO: 450110 - DNA, 19 bp, Mus musculus
  siRNA target sequence for Zfp263 (NM_148924.2,1394-1412).
ggcaagaacttttctaata

SEQ ID NO: 450111 - DNA, 19 bp, Mus musculus
  siRNA target sequence for Zfp263 (NM_148924.2,1407-1425).
ctaataactcaaacctaat

SEQ ID NO: 450112 - DNA, 19 bp, Mus musculus
  siRNA target sequence for Zfp263 (NM_148924.2,1829-1847).
cggagttcacatcttgtta

SEQ ID NO: 450113 - DNA, 19 bp, Mus musculus
  siRNA target sequence for Zfp263 (NM_148924.2,1830-1848).
ggagttcacatcttgttat

SEQ ID NO: 450114 - DNA, 19 bp, Mus musculus
  siRNA target sequence for Zfp263 (NM_148924.2,1894-1912).
gtgtggtcaaggcatgaat

SEQ ID NO: 450115 - DNA, 19 bp, Mus musculus
  siRNA target sequence for Zfp263 (NM_148924.2,1898-1916).
ggtcaaggcatgaatgaca

SEQ ID NO: 450116 - DNA, 19 bp, Mus musculus
  siRNA target sequence for Zfp263 (NM_148924.2,1913-1931).
gacagtgccccctttctta

SEQ ID NO: 450117 - DNA, 19 bp, Mus musculus
  siRNA target sequence for Zfp263 (NM_148924.2,1917-1935).
gtgccccctttcttacaaa

SEQ ID NO: 450118 - DNA, 19 bp, Mus musculus
  siRNA target sequence for Zfp263 (NM_148924.2,2039-2057).
ccgtataagtgtatccttt

SEQ ID NO: 450119 - DNA, 19 bp, Mus musculus
  siRNA target sequence for Zfp263 (NM_148924.2,2243-2261).
cggagctcacgtcttacaa

SEQ ID NO: 450120 - DNA, 19 bp, Mus musculus
  siRNA target sequence for Zfp263 (NM_148924.2,2245-2263).
gagctcacgtcttacaagt

SEQ ID NO: 450121 - DNA, 19 bp, Mus musculus
  siRNA target sequence for Zfp263 (NM_148924.2,2248-2266).
ctcacgtcttacaagtcat

SEQ ID NO: 450122 - DNA, 19 bp, Mus musculus
  siRNA target sequence for Zfp287 (NM_133208.1,547-565).
ctgtcgacggaattttaga

SEQ ID NO: 450123 - DNA, 19 bp, Mus musculus
  siRNA target sequence for Zfp287 (NM_133208.1,549-567).
gtcgacggaattttagaaa

SEQ ID NO: 450124 - DNA, 19 bp, Mus musculus
  siRNA target sequence for Zfp287 (NM_133208.1,551-569).
cgacggaattttagaaatt

SEQ ID NO: 450125 - DNA, 19 bp, Mus musculus
  siRNA target sequence for Zfp287 (NM_133208.1,638-656).
ctgagacctgaggttcatt

SEQ ID NO: 450126 - DNA, 19 bp, Mus musculus
  siRNA target sequence for Zfp287 (NM_133208.1,718-736).
ggttaggacttgggtaaat

SEQ ID NO: 450127 - DNA, 19 bp, Mus musculus
  siRNA target sequence for Zfp287 (NM_133208.1,719-737).
gttaggacttgggtaaatt

SEQ ID NO: 450128 - DNA, 19 bp, Mus musculus
  siRNA target sequence for Zfp287 (NM_133208.1,912-930).
ccaaagacttggtgacatt

SEQ ID NO: 450129 - DNA, 19 bp, Mus musculus
  siRNA target sequence for Zfp287 (NM_133208.1,980-998).
cctgttcagaaggaattgt

SEQ ID NO: 450130 - DNA, 19 bp, Mus musculus
  siRNA target sequence for Zfp287 (NM_133208.1,988-1006).
gaaggaattgtataagact

SEQ ID NO: 450131 - DNA, 19 bp, Mus musculus
  siRNA target sequence for Zfp287 (NM_133208.1,1089-1107).
cgtggatggtgataaaaga

SEQ ID NO: 450132 - DNA, 19 bp, Mus musculus
  siRNA target sequence for Zfp287 (NM_133208.1,1192-1210).
cggaacccaaaccgtaaaa

SEQ ID NO: 450133 - DNA, 19 bp, Mus musculus
  siRNA target sequence for Zfp287 (NM_133208.1,1194-1212).
gaacccaaaccgtaaaact

SEQ ID NO: 450134 - DNA, 19 bp, Mus musculus
  siRNA target sequence for Zfp287 (NM_133208.1,1273-1291).
cgggatgatccacatagat

SEQ ID NO: 450135 - DNA, 19 bp, Mus musculus
  siRNA target sequence for Zfp287 (NM_133208.1,1275-1293).
ggatgatccacatagatga

SEQ ID NO: 450136 - DNA, 19 bp, Mus musculus
  siRNA target sequence for Zfp287 (NM_133208.1,1314-1332).
cagagctttcacaagaaga

SEQ ID NO: 450137 - DNA, 19 bp, Mus musculus
  siRNA target sequence for Zfp287 (NM_133208.1,1334-1352).
cctacagaagaatacctta

SEQ ID NO: 450138 - DNA, 19 bp, Mus musculus
  siRNA target sequence for Zfp287 (NM_133208.1,1338-1356).
cagaagaataccttagcaa

SEQ ID NO: 450139 - DNA, 19 bp, Mus musculus
  siRNA target sequence for Zfp287 (NM_133208.1,1354-1372).
caaatgtgacatatataga

SEQ ID NO: 450140 - DNA, 19 bp, Mus musculus
  siRNA target sequence for Zfp287 (NM_133208.1,1412-1430).
gatacccagtcggatgata

SEQ ID NO: 450141 - DNA, 19 bp, Mus musculus
  siRNA target sequence for Zfp287 (NM_133208.1,1417-1435).
ccagtcggatgataaaact

SEQ ID NO: 450142 - DNA, 19 bp, Mus musculus
  siRNA target sequence for Zfp287 (NM_133208.1,1485-1503).
gtgccgtgcgtgggaaaat

SEQ ID NO: 450143 - DNA, 19 bp, Mus musculus
  siRNA target sequence for Zfp287 (NM_133208.1,1488-1506).
ccgtgcgtgggaaaatact

SEQ ID NO: 450144 - DNA, 19 bp, Mus musculus
  siRNA target sequence for Zfp287 (NM_133208.1,1489-1507).
cgtgcgtgggaaaatactt

SEQ ID NO: 450145 - DNA, 19 bp, Mus musculus
  siRNA target sequence for Zfp287 (NM_133208.1,1520-1538).
ccttattcctgtaatgtct

SEQ ID NO: 450146 - DNA, 19 bp, Mus musculus
  siRNA target sequence for Zfp287 (NM_133208.1,1591-1609).
cgccaaagagaaagcttat

SEQ ID NO: 450147 - DNA, 19 bp, Mus musculus
  siRNA target sequence for Zfp287 (NM_133208.1,1726-1744).
gcgagcacacctgactata

SEQ ID NO: 450148 - DNA, 19 bp, Mus musculus
  siRNA target sequence for Zfp287 (NM_133208.1,1885-1903).
ctttagccatagttcatca

SEQ ID NO: 450149 - DNA, 19 bp, Mus musculus
  siRNA target sequence for Zfp287 (NM_133208.1,1899-1917).
catcactgattaatcatca

SEQ ID NO: 450150 - DNA, 19 bp, Mus musculus
  siRNA target sequence for Zfp287 (NM_133208.1,2146-2164).
ctcctcaactctcattcaa

SEQ ID NO: 450151 - DNA, 19 bp, Mus musculus
  siRNA target sequence for Zfp287 (NM_133208.1,2568-2586).
gaacatgccttattcaaca

SEQ ID NO: 450152 - DNA, 19 bp, Mus musculus
  siRNA target sequence for Zfp287 (NM_133208.1,2612-2630).
ccctacggatgccgtatat

SEQ ID NO: 450153 - DNA, 19 bp, Mus musculus
  siRNA target sequence for Zfp287 (NM_133208.1,2614-2632).
ctacggatgccgtatatgt

SEQ ID NO: 450154 - DNA, 19 bp, Mus musculus
  siRNA target sequence for Zfp287 (NM_133208.1,2646-2664).
cccagagtaccaatcttat

SEQ ID NO: 450155 - DNA, 19 bp, Mus musculus
  siRNA target sequence for Zfp287 (NM_133208.1,2647-2665).
ccagagtaccaatcttatt

SEQ ID NO: 450156 - DNA, 19 bp, Mus musculus
  siRNA target sequence for Zfp369 (NM_178364.2,319-337).
gaacctcaataacatgatt

SEQ ID NO: 450157 - DNA, 19 bp, Mus musculus
  siRNA target sequence for Zfp369 (NM_178364.2,322-340).
cctcaataacatgatttca

SEQ ID NO: 450158 - DNA, 19 bp, Mus musculus
  siRNA target sequence for Zfp369 (NM_178364.2,325-343).
caataacatgatttcagta

SEQ ID NO: 450159 - DNA, 19 bp, Mus musculus
  siRNA target sequence for Zfp369 (NM_178364.2,370-388).
gatgcctcagttagaagaa

SEQ ID NO: 450160 - DNA, 19 bp, Mus musculus
  siRNA target sequence for Zfp369 (NM_178364.2,373-391).
gcctcagttagaagaagta

SEQ ID NO: 450161 - DNA, 19 bp, Mus musculus
  siRNA target sequence for Zfp369 (NM_178364.2,451-469).
ggcatataggagtttccaa

SEQ ID NO: 450162 - DNA, 19 bp, Mus musculus
  siRNA target sequence for Zfp96 (NM_016684.1,446-464).
gtgataccaaggtctgtaa

SEQ ID NO: 450163 - DNA, 19 bp, Mus musculus
  siRNA target sequence for Zfp96 (NM_016684.1,472-490).
ggtggacttttggaaataa

SEQ ID NO: 450164 - DNA, 19 bp, Mus musculus
  siRNA target sequence for Zfp96 (NM_016684.1,473-491).
gtggacttttggaaataaa

SEQ ID NO: 450165 - DNA, 19 bp, Mus musculus
  siRNA target sequence for Zfp96 (NM_016684.1,510-528).
gtataccaccagacaagat

SEQ ID NO: 450166 - DNA, 19 bp, Mus musculus
  siRNA target sequence for Zfp96 (NM_016684.1,534-552).
cctacaaaagaacacttat

SEQ ID NO: 450167 - DNA, 19 bp, Mus musculus
  siRNA target sequence for Zfp96 (NM_016684.1,538-556).
caaaagaacacttataaca

SEQ ID NO: 450168 - DNA, 19 bp, Mus musculus
  siRNA target sequence for Zfp96 (NM_016684.1,562-580).
gtcttccgaaaatacttca

SEQ ID NO: 450169 - DNA, 19 bp, Mus musculus
  siRNA target sequence for Zfp96 (NM_016684.1,848-866).
ctgaagaacaggtaacgtt

SEQ ID NO: 450170 - DNA, 19 bp, Mus musculus
  siRNA target sequence for Zfp96 (NM_016684.1,905-923).
gcgtgtcccttcagtttgt

SEQ ID NO: 450171 - DNA, 19 bp, Mus musculus
  siRNA target sequence for Zfp96 (NM_016684.1,909-927).
gtcccttcagtttgtcaaa

SEQ ID NO: 450172 - DNA, 19 bp, Mus musculus
  siRNA target sequence for Zfp96 (NM_016684.1,961-979).
gcccaggaggagcaagttt

SEQ ID NO: 450173 - DNA, 19 bp, Mus musculus
  siRNA target sequence for Zfp96 (NM_016684.1,1008-1026).
gaatgtcactctaaagcaa

SEQ ID NO: 450174 - DNA, 19 bp, Mus musculus
  siRNA target sequence for Zfp96 (NM_016684.1,1060-1078).
cctgctagcagattagcaa

SEQ ID NO: 450175 - DNA, 19 bp, Mus musculus
  siRNA target sequence for Zfp96 (NM_016684.1,1061-1079).
ctgctagcagattagcaaa

SEQ ID NO: 450176 - DNA, 19 bp, Mus musculus
  siRNA target sequence for Zfp96 (NM_016684.1,1117-1135).
gaagagtcttctggtattt

SEQ ID NO: 450177 - DNA, 19 bp, Mus musculus
  siRNA target sequence for Zfp96 (NM_016684.1,1127-1145).
ctggtatttcccatgaaga

SEQ ID NO: 450178 - DNA, 19 bp, Mus musculus
  siRNA target sequence for Zfp96 (NM_016684.1,1148-1166).
gccagcctctgcgtaatga

SEQ ID NO: 450179 - DNA, 19 bp, Mus musculus
  siRNA target sequence for Zfp96 (NM_016684.1,1149-1167).
ccagcctctgcgtaatgaa

SEQ ID NO: 450180 - DNA, 19 bp, Mus musculus
  siRNA target sequence for Zfp96 (NM_016684.1,1150-1168).
cagcctctgcgtaatgaaa

SEQ ID NO: 450181 - DNA, 19 bp, Mus musculus
  siRNA target sequence for Zfp96 (NM_016684.1,1215-1233).
catctgtccagggagaaaa

SEQ ID NO: 450182 - DNA, 19 bp, Mus musculus
  siRNA target sequence for Zfp96 (NM_016684.1,1350-1368).
ccgatggaggactgttctt

SEQ ID NO: 450183 - DNA, 19 bp, Mus musculus
  siRNA target sequence for Zfp96 (NM_016684.1,1351-1369).
cgatggaggactgttctta

SEQ ID NO: 450184 - DNA, 19 bp, Mus musculus
  siRNA target sequence for Zfp96 (NM_016684.1,1543-1561).
catctcaagagccatagaa

SEQ ID NO: 450185 - DNA, 19 bp, Mus musculus
  siRNA target sequence for Zfp96 (NM_016684.1,1681-1699).
gcttttgtttataactcat

SEQ ID NO: 450186 - DNA, 19 bp, Mus musculus
  siRNA target sequence for Zfp96 (NM_016684.1,1743-1761).
cactcaaagtggtcctatt

SEQ ID NO: 450187 - DNA, 19 bp, Mus musculus
  siRNA target sequence for Zfp96 (NM_016684.1,1745-1763).
ctcaaagtggtcctattca

SEQ ID NO: 450188 - DNA, 19 bp, Mus musculus
  siRNA target sequence for Zfp96 (NM_016684.1,1840-1858).
cttatagaacacgaacaaa

SEQ ID NO: 450189 - DNA, 19 bp, Mus musculus
  siRNA target sequence for Zfp98 (NM_016793.1,385-403).
cctcgggtgtcctcttcat

SEQ ID NO: 450190 - DNA, 19 bp, Mus musculus
  siRNA target sequence for Zfp98 (NM_016793.1,405-423).
gcgaaggtctcggatgaaa

SEQ ID NO: 450191 - DNA, 19 bp, Mus musculus
  siRNA target sequence for Zfp98 (NM_016793.1,462-480).
ggctgtccttattacacat

SEQ ID NO: 450192 - DNA, 19 bp, Mus musculus
  siRNA target sequence for Zfp98 (NM_016793.1,696-714).
ccggtatgaggatgcaata

SEQ ID NO: 450193 - DNA, 19 bp, Mus musculus
  siRNA target sequence for Zfp98 (NM_016793.1,759-777).
gtggctacgcccagaagta

SEQ ID NO: 450194 - DNA, 19 bp, Mus musculus
  siRNA target sequence for Zfp98 (NM_016793.1,962-980).
gcaaggaggtcctatcaga

SEQ ID NO: 450195 - DNA, 19 bp, Mus musculus
  siRNA target sequence for Zfp98 (NM_016793.1,1079-1097).
cactgaacctaccaatgaa

SEQ ID NO: 450196 - DNA, 19 bp, Mus musculus
  siRNA target sequence for Zfp98 (NM_016793.1,1293-1311).
ggaagtagggggcatcttt

SEQ ID NO: 450197 - DNA, 19 bp, Mus musculus
  siRNA target sequence for Zfp98 (NM_016793.1,1294-1312).
gaagtagggggcatctttt

SEQ ID NO: 450198 - DNA, 19 bp, Mus musculus
  siRNA target sequence for Zfp98 (NM_016793.1,1346-1364).
cggcagagccagatatgat

SEQ ID NO: 450199 - DNA, 19 bp, Mus musculus
  siRNA target sequence for Zfp98 (NM_016793.1,1348-1366).
gcagagccagatatgatga

SEQ ID NO: 450200 - DNA, 19 bp, Mus musculus
  siRNA target sequence for Zfp98 (NM_016793.1,1638-1656).
gttcagccagcgaagcaat

SEQ ID NO: 450201 - DNA, 19 bp, Mus musculus
  siRNA target sequence for Zfp98 (NM_016793.1,2193-2211).
cttccggcagcgctctaat

SEQ ID NO: 450202 - DNA, 19 bp, Mus musculus
  siRNA target sequence for Zfp98 (NM_016793.1,2648-2666).
gcactcaccggcacgaaaa

SEQ ID NO: 450203 - DNA, 19 bp, Mus musculus
  siRNA target sequence for Zfp99 (NM_023322.1,214-232).
ctcggtgctgggctttgta

SEQ ID NO: 450204 - DNA, 19 bp, Mus musculus
  siRNA target sequence for Zfp99 (NM_023322.1,291-309).
gcagaaccccgaaacttct

SEQ ID NO: 450205 - DNA, 19 bp, Mus musculus
  siRNA target sequence for Zfp99 (NM_023322.1,297-315).
ccccgaaacttctcgaaaa

SEQ ID NO: 450206 - DNA, 19 bp, Mus musculus
  siRNA target sequence for Zfp99 (NM_023322.1,299-317).
ccgaaacttctcgaaaaca

SEQ ID NO: 450207 - DNA, 19 bp, Mus musculus
  siRNA target sequence for Zfp99 (NM_023322.1,300-318).
cgaaacttctcgaaaacaa

SEQ ID NO: 450208 - DNA, 19 bp, Mus musculus
  siRNA target sequence for Zfp99 (NM_023322.1,301-319).
gaaacttctcgaaaacaat

SEQ ID NO: 450209 - DNA, 19 bp, Mus musculus
  siRNA target sequence for Zfp99 (NM_023322.1,588-606).
caaggatgtggctgaatct

SEQ ID NO: 450210 - DNA, 19 bp, Mus musculus
  siRNA target sequence for Zfp99 (NM_023322.1,688-706).
gttgtgcctggcttggaaa

SEQ ID NO: 450211 - DNA, 19 bp, Mus musculus
  siRNA target sequence for Zfp99 (NM_023322.1,729-747).
gattctaaagcaggaaatt

SEQ ID NO: 450212 - DNA, 19 bp, Mus musculus
  siRNA target sequence for Zfp99 (NM_023322.1,905-923).
ctgccatcccgcttctcat

SEQ ID NO: 450213 - DNA, 19 bp, Mus musculus
  siRNA target sequence for Zfp99 (NM_023322.1,946-964).
gactctaaaaacaatgagt

SEQ ID NO: 450214 - DNA, 19 bp, Mus musculus
  siRNA target sequence for Zfp99 (NM_023322.1,1037-1055).
gtggggatgaccacaaaca

SEQ ID NO: 450215 - DNA, 19 bp, Mus musculus
  siRNA target sequence for Zfp99 (NM_023322.1,1277-1295).
gcgctgccctcgttaagca

SEQ ID NO: 450216 - DNA, 19 bp, Mus musculus
  siRNA target sequence for Zfp99 (NM_023322.1,1390-1408).
catgccagtgagaagtact

SEQ ID NO: 450217 - DNA, 19 bp, Mus musculus
  siRNA target sequence for Zfp99 (NM_023322.1,1393-1411).
gccagtgagaagtactata

SEQ ID NO: 450218 - DNA, 19 bp, Mus musculus
  siRNA target sequence for Zfp99 (NM_023322.1,1394-1412).
ccagtgagaagtactataa

SEQ ID NO: 450219 - DNA, 19 bp, Mus musculus
  siRNA target sequence for Zfp99 (NM_023322.1,1395-1413).
cagtgagaagtactataaa

SEQ ID NO: 450220 - DNA, 19 bp, Mus musculus
  siRNA target sequence for Zfp99 (NM_023322.1,1426-1444).
ggggagatcgttcatgttt

SEQ ID NO: 450221 - DNA, 19 bp, Mus musculus
  siRNA target sequence for Zfp99 (NM_023322.1,1582-1600).
gtcgtctgcgggagaagat

SEQ ID NO: 450222 - DNA, 19 bp, Mus musculus
  siRNA target sequence for Zfp99 (NM_023322.1,1606-1624).
cagagcgccaccctcatta

SEQ ID NO: 450223 - DNA, 19 bp, Mus musculus
  siRNA target sequence for Zfp99 (NM_023322.1,1608-1626).
gagcgccaccctcattaaa

SEQ ID NO: 450224 - DNA, 19 bp, Mus musculus
  siRNA target sequence for Zfp99 (NM_023322.1,1718-1736).
gaatccatcaaaattcagt

SEQ ID NO: 450225 - DNA, 19 bp, Mus musculus
  siRNA target sequence for Zhx1 (NM_009572.2,339-357).
ccagatcttgagctgatat

SEQ ID NO: 450226 - DNA, 19 bp, Mus musculus
  siRNA target sequence for Zhx1 (NM_009572.2,350-368).
gctgatatcggatttggat

SEQ ID NO: 450227 - DNA, 19 bp, Mus musculus
  siRNA target sequence for Zhx1 (NM_009572.2,415-433).
gtgtctccagcgatgaaga

SEQ ID NO: 450228 - DNA, 19 bp, Mus musculus
  siRNA target sequence for Zhx1 (NM_009572.2,421-439).
ccagcgatgaagaagttca

SEQ ID NO: 450229 - DNA, 19 bp, Mus musculus
  siRNA target sequence for Zhx1 (NM_009572.2,479-497).
ggaagggggctatgaatgt

SEQ ID NO: 450230 - DNA, 19 bp, Mus musculus
  siRNA target sequence for Zhx1 (NM_009572.2,483-501).
gggggctatgaatgtaaat

SEQ ID NO: 450231 - DNA, 19 bp, Mus musculus
  siRNA target sequence for Zhx1 (NM_009572.2,484-502).
ggggctatgaatgtaaata

SEQ ID NO: 450232 - DNA, 19 bp, Mus musculus
  siRNA target sequence for Zhx1 (NM_009572.2,485-503).
gggctatgaatgtaaatat

SEQ ID NO: 450233 - DNA, 19 bp, Mus musculus
  siRNA target sequence for Zhx1 (NM_009572.2,533-551).
gtttactttccatgtagat

SEQ ID NO: 450234 - DNA, 19 bp, Mus musculus
  siRNA target sequence for Zhx1 (NM_009572.2,572-590).
gctgaattcctcctatgtt

SEQ ID NO: 450235 - DNA, 19 bp, Mus musculus
  siRNA target sequence for Zhx1 (NM_009572.2,592-610).
gtgttgaatgcaattttct

SEQ ID NO: 450236 - DNA, 19 bp, Mus musculus
  siRNA target sequence for Zhx1 (NM_009572.2,619-637).
ggtatgatgcactttctga

SEQ ID NO: 450237 - DNA, 19 bp, Mus musculus
  siRNA target sequence for Zhx1 (NM_009572.2,628-646).
cactttctgagcataatct

SEQ ID NO: 450238 - DNA, 19 bp, Mus musculus
  siRNA target sequence for Zhx1 (NM_009572.2,634-652).
ctgagcataatctgaaata

SEQ ID NO: 450239 - DNA, 19 bp, Mus musculus
  siRNA target sequence for Zhx1 (NM_009572.2,693-711).
cggaataaccagacaatct

SEQ ID NO: 450240 - DNA, 19 bp, Mus musculus
  siRNA target sequence for Zhx1 (NM_009572.2,694-712).
ggaataaccagacaatctt

SEQ ID NO: 450241 - DNA, 19 bp, Mus musculus
  siRNA target sequence for Zhx1 (NM_009572.2,717-735).
cagacaataaatgatctaa

SEQ ID NO: 450242 - DNA, 19 bp, Mus musculus
  siRNA target sequence for Zhx1 (NM_009572.2,719-737).
gacaataaatgatctaact

SEQ ID NO: 450243 - DNA, 19 bp, Mus musculus
  siRNA target sequence for Zhx1 (NM_009572.2,721-739).
caataaatgatctaacttt

SEQ ID NO: 450244 - DNA, 19 bp, Mus musculus
  siRNA target sequence for Zhx1 (NM_009572.2,780-798).
gaatccatagatgtttctt

SEQ ID NO: 450245 - DNA, 19 bp, Mus musculus
  siRNA target sequence for Zhx1 (NM_009572.2,804-822).
ggaatctccattagtaaaa

SEQ ID NO: 450246 - DNA, 19 bp, Mus musculus
  siRNA target sequence for Zhx1 (NM_009572.2,865-883).
ggattacagtccaccataa

SEQ ID NO: 450247 - DNA, 19 bp, Mus musculus
  siRNA target sequence for Zhx1 (NM_009572.2,961-979).
cttcagctttagaatccaa

SEQ ID NO: 450248 - DNA, 19 bp, Mus musculus
  siRNA target sequence for Zhx1 (NM_009572.2,1056-1074).
gggttagcacaggtgataa

SEQ ID NO: 450249 - DNA, 19 bp, Mus musculus
  siRNA target sequence for Zhx1 (NM_009572.2,1058-1076).
gttagcacaggtgataact

SEQ ID NO: 450250 - DNA, 19 bp, Mus musculus
  siRNA target sequence for Zhx1 (NM_009572.2,1087-1105).
ctcaacagaactcaaactt

SEQ ID NO: 450251 - DNA, 19 bp, Mus musculus
  siRNA target sequence for Zhx1 (NM_009572.2,1103-1121).
cttgctccctaaagtctta

SEQ ID NO: 450252 - DNA, 19 bp, Mus musculus
  siRNA target sequence for Zhx1 (NM_009572.2,1116-1134).
gtcttaatccccgttaata

SEQ ID NO: 450253 - DNA, 19 bp, Mus musculus
  siRNA target sequence for Zhx1 (NM_009572.2,1145-1163).
ctacaatgctgcattggat

SEQ ID NO: 450254 - DNA, 19 bp, Mus musculus
  siRNA target sequence for Zhx1 (NM_009572.2,1166-1184).
caatcctcttctacttaat

SEQ ID NO: 450255 - DNA, 19 bp, Mus musculus
  siRNA target sequence for Zhx1 (NM_009572.2,1176-1194).
ctacttaatacctacaaca

SEQ ID NO: 450256 - DNA, 19 bp, Mus musculus
  siRNA target sequence for Zhx1 (NM_009572.2,1179-1197).
cttaatacctacaacaaat

SEQ ID NO: 450257 - DNA, 19 bp, Mus musculus
  siRNA target sequence for Zhx1 (NM_009572.2,1190-1208).
caacaaattcccttatcct

SEQ ID NO: 450258 - DNA, 19 bp, Mus musculus
  siRNA target sequence for Zhx1 (NM_009572.2,1199-1217).
cccttatcctacaatgtca

SEQ ID NO: 450259 - DNA, 19 bp, Mus musculus
  siRNA target sequence for Zhx1 (NM_009572.2,1210-1228).
caatgtcagaaattacagt

SEQ ID NO: 450260 - DNA, 19 bp, Mus musculus
  siRNA target sequence for Zhx1 (NM_009572.2,1254-1272).
gaggaacaaatcaagatct

SEQ ID NO: 450261 - DNA, 19 bp, Mus musculus
  siRNA target sequence for Zhx1 (NM_009572.2,1274-1292).
gttttcagcccaacgttta

SEQ ID NO: 450262 - DNA, 19 bp, Mus musculus
  siRNA target sequence for Zhx1 (NM_009572.2,1279-1297).
cagcccaacgtttaaagca

SEQ ID NO: 450263 - DNA, 19 bp, Mus musculus
  siRNA target sequence for Zhx1 (NM_009572.2,1332-1350).
gcgagaagaaaacaattca

SEQ ID NO: 450264 - DNA, 19 bp, Mus musculus
  siRNA target sequence for Zhx1 (NM_009572.2,1371-1389).
cctcagaccataactgtta

SEQ ID NO: 450265 - DNA, 19 bp, Mus musculus
  siRNA target sequence for Zhx1 (NM_009572.2,1372-1390).
ctcagaccataactgttat

SEQ ID NO: 450266 - DNA, 19 bp, Mus musculus
  siRNA target sequence for Zhx1 (NM_009572.2,1376-1394).
gaccataactgttattcct

SEQ ID NO: 450267 - DNA, 19 bp, Mus musculus
  siRNA target sequence for Zhx1 (NM_009572.2,1410-1428).
gggagtaacgggttaccat

SEQ ID NO: 450268 - DNA, 19 bp, Mus musculus
  siRNA target sequence for Zhx1 (NM_009572.2,1414-1432).
gtaacgggttaccatctat

SEQ ID NO: 450269 - DNA, 19 bp, Mus musculus
  siRNA target sequence for Zhx1 (NM_009572.2,1418-1436).
cgggttaccatctatctta

SEQ ID NO: 450270 - DNA, 19 bp, Mus musculus
  siRNA target sequence for Zhx1 (NM_009572.2,1420-1438).
ggttaccatctatcttaca

SEQ ID NO: 450271 - DNA, 19 bp, Mus musculus
  siRNA target sequence for Zhx1 (NM_009572.2,1462-1480).
caggtctggtccttactca

SEQ ID NO: 450272 - DNA, 19 bp, Mus musculus
  siRNA target sequence for Zhx1 (NM_009572.2,1532-1550).
ggcaggggttccaaatcaa

SEQ ID NO: 450273 - DNA, 19 bp, Mus musculus
  siRNA target sequence for Zhx1 (NM_009572.2,1533-1551).
gcaggggttccaaatcaaa

SEQ ID NO: 450274 - DNA, 19 bp, Mus musculus
  siRNA target sequence for Zhx1 (NM_009572.2,1537-1555).
gggttccaaatcaaacaaa

SEQ ID NO: 450275 - DNA, 19 bp, Mus musculus
  siRNA target sequence for Zhx1 (NM_009572.2,1538-1556).
ggttccaaatcaaacaaat

SEQ ID NO: 450276 - DNA, 19 bp, Mus musculus
  siRNA target sequence for Zhx1 (NM_009572.2,1656-1674).
ctagtgaacccagattcat

SEQ ID NO: 450277 - DNA, 19 bp, Mus musculus
  siRNA target sequence for Zhx1 (NM_009572.2,1677-1695).
ggtattcgggccaaaaaga

SEQ ID NO: 450278 - DNA, 19 bp, Mus musculus
  siRNA target sequence for Zhx1 (NM_009572.2,1711-1729).
cagaactgaaagttagcta

SEQ ID NO: 450279 - DNA, 19 bp, Mus musculus
  siRNA target sequence for Zhx1 (NM_009572.2,1749-1767).
catgactcagagatcatca

SEQ ID NO: 450280 - DNA, 19 bp, Mus musculus
  siRNA target sequence for Zhx1 (NM_009572.2,1797-1815).
ggcgagattaaaaaatggt

SEQ ID NO: 450281 - DNA, 19 bp, Mus musculus
  siRNA target sequence for Zhx1 (NM_009572.2,1798-1816).
gcgagattaaaaaatggtt

SEQ ID NO: 450282 - DNA, 19 bp, Mus musculus
  siRNA target sequence for Zhx1 (NM_009572.2,1799-1817).
cgagattaaaaaatggttt

SEQ ID NO: 450283 - DNA, 19 bp, Mus musculus
  siRNA target sequence for Zhx1 (NM_009572.2,1852-1870).
gtaaccagtgcttacatct

SEQ ID NO: 450284 - DNA, 19 bp, Mus musculus
  siRNA target sequence for Zhx1 (NM_009572.2,1859-1877).
gtgcttacatctcaacaat

SEQ ID NO: 450285 - DNA, 19 bp, Mus musculus
  siRNA target sequence for Zhx1 (NM_009572.2,1882-1900).
cctctgccactatcatcat

SEQ ID NO: 450286 - DNA, 19 bp, Mus musculus
  siRNA target sequence for Zhx1 (NM_009572.2,1883-1901).
ctctgccactatcatcata

SEQ ID NO: 450287 - DNA, 19 bp, Mus musculus
  siRNA target sequence for Zhx1 (NM_009572.2,2026-2044).
cccttcaggcaagttttct

SEQ ID NO: 450288 - DNA, 19 bp, Mus musculus
  siRNA target sequence for Zhx1 (NM_009572.2,2043-2061).
ctcaacagttctgtactta

SEQ ID NO: 450289 - DNA, 19 bp, Mus musculus
  siRNA target sequence for Zhx1 (NM_009572.2,2045-2063).
caacagttctgtacttact

SEQ ID NO: 450290 - DNA, 19 bp, Mus musculus
  siRNA target sequence for Zhx1 (NM_009572.2,2081-2099).
gttaagagcgcaaaccaaa

SEQ ID NO: 450291 - DNA, 19 bp, Mus musculus
  siRNA target sequence for Zhx1 (NM_009572.2,2088-2106).
gcgcaaaccaaacttacta

SEQ ID NO: 450292 - DNA, 19 bp, Mus musculus
  siRNA target sequence for Zhx1 (NM_009572.2,2090-2108).
gcaaaccaaacttactaga

SEQ ID NO: 450293 - DNA, 19 bp, Mus musculus
  siRNA target sequence for Zhx1 (NM_009572.2,2259-2277).
gggacaggcaagatatgta

SEQ ID NO: 450294 - DNA, 19 bp, Mus musculus
  siRNA target sequence for Zhx1 (NM_009572.2,2333-2351).
gccatcagcagaagagtat

SEQ ID NO: 450295 - DNA, 19 bp, Mus musculus
  siRNA target sequence for Zhx1 (NM_009572.2,2375-2393).
ccttgccagaacagatata

SEQ ID NO: 450296 - DNA, 19 bp, Mus musculus
  siRNA target sequence for Zhx1 (NM_009572.2,2381-2399).
cagaacagatatagttagt

SEQ ID NO: 450297 - DNA, 19 bp, Mus musculus
  siRNA target sequence for Zhx1 (NM_009572.2,2406-2424).
ggggatacccgttatgctt

SEQ ID NO: 450298 - DNA, 19 bp, Mus musculus
  siRNA target sequence for Zhx1 (NM_009572.2,2441-2459).
gaaatggtattactactat

SEQ ID NO: 450299 - DNA, 19 bp, Mus musculus
  siRNA target sequence for Zhx1 (NM_009572.2,2460-2478).
caaagctccaattcaagta

SEQ ID NO: 450300 - DNA, 19 bp, Mus musculus
  siRNA target sequence for Zhx1 (NM_009572.2,2467-2485).
ccaattcaagtagtttgaa

SEQ ID NO: 450301 - DNA, 19 bp, Mus musculus
  siRNA target sequence for Zhx1 (NM_009572.2,2591-2609).
cagggtaccatcgcttata

SEQ ID NO: 450302 - DNA, 19 bp, Mus musculus
  siRNA target sequence for Zhx1 (NM_009572.2,2598-2616).
ccatcgcttataaagttta

SEQ ID NO: 450303 - DNA, 19 bp, Mus musculus
  siRNA target sequence for Zhx1 (NM_009572.2,2599-2617).
catcgcttataaagtttaa

SEQ ID NO: 450304 - DNA, 19 bp, Mus musculus
  siRNA target sequence for Zhx1 (NM_009572.2,2620-2638).
ctggaacagcaatacttaa

SEQ ID NO: 450305 - DNA, 19 bp, Mus musculus
  siRNA target sequence for Zhx1 (NM_009572.2,2626-2644).
cagcaatacttaaggatta

SEQ ID NO: 450306 - DNA, 19 bp, Mus musculus
  siRNA target sequence for Zhx1 (NM_009572.2,2628-2646).
gcaatacttaaggattatt

SEQ ID NO: 450307 - DNA, 19 bp, Mus musculus
  siRNA target sequence for Zhx1 (NM_009572.2,2629-2647).
caatacttaaggattatta

SEQ ID NO: 450308 - DNA, 19 bp, Mus musculus
  siRNA target sequence for Zhx1 (NM_009572.2,2682-2700).
gatgaacttgtcaacagat

SEQ ID NO: 450309 - DNA, 19 bp, Mus musculus
  siRNA target sequence for Zhx1 (NM_009572.2,2868-2886).
catgtgaagcggaagcttt

SEQ ID NO: 450310 - DNA, 19 bp, Mus musculus
  siRNA target sequence for Zhx1 (NM_009572.2,2871-2889).
gtgaagcggaagctttcta

SEQ ID NO: 450311 - DNA, 19 bp, Mus musculus
  siRNA target sequence for Zic1 (NM_009573.1,800-818).
cagcgctgctttcaattct

SEQ ID NO: 450312 - DNA, 19 bp, Mus musculus
  siRNA target sequence for Zic1 (NM_009573.1,817-835).
ctacccgggactttctgtt

SEQ ID NO: 450313 - DNA, 19 bp, Mus musculus
  siRNA target sequence for Zic1 (NM_009573.1,991-1009).
cttcgcccaacgtggttaa

SEQ ID NO: 450314 - DNA, 19 bp, Mus musculus
  siRNA target sequence for Zic1 (NM_009573.1,1012-1030).
ggcagatgcggctaggttt

SEQ ID NO: 450315 - DNA, 19 bp, Mus musculus
  siRNA target sequence for Zic1 (NM_009573.1,1244-1262).
caaaaagtcgtgcaacaaa

SEQ ID NO: 450316 - DNA, 19 bp, Mus musculus
  siRNA target sequence for Zic1 (NM_009573.1,1719-1737).
gccagctcggggtatgagt

SEQ ID NO: 450317 - DNA, 19 bp, Mus musculus
  siRNA target sequence for Zic1 (NM_009573.1,1835-1853).
cagcgcgctctcttccaat

SEQ ID NO: 450318 - DNA, 19 bp, Mus musculus
  siRNA target sequence for Zic1 (NM_009573.1,1837-1855).
gcgcgctctcttccaattt

SEQ ID NO: 450319 - DNA, 19 bp, Mus musculus
  siRNA target sequence for Zic1 (NM_009573.1,1838-1856).
cgcgctctcttccaatttt

SEQ ID NO: 450320 - DNA, 19 bp, Mus musculus
  siRNA target sequence for Zic1 (NM_009573.1,1839-1857).
gcgctctcttccaatttta

SEQ ID NO: 450321 - DNA, 19 bp, Mus musculus
  siRNA target sequence for Zic1 (NM_009573.1,1844-1862).
ctcttccaattttaacgaa

SEQ ID NO: 450322 - DNA, 19 bp, Mus musculus
  siRNA target sequence for Zipro1 (NM_011757.1,1003-1021).
ggccacctcaggaatctat

SEQ ID NO: 450323 - DNA, 19 bp, Mus musculus
  siRNA target sequence for Zipro1 (NM_011757.1,1030-1048).
cgcccattaaagtagaaga

SEQ ID NO: 450324 - DNA, 19 bp, Mus musculus
  siRNA target sequence for Zipro1 (NM_011757.1,1307-1325).
ccctagcccagagatatct

SEQ ID NO: 450325 - DNA, 19 bp, Mus musculus
  siRNA target sequence for Zipro1 (NM_011757.1,1672-1690).
gtactgagacccaacatgt

SEQ ID NO: 450326 - DNA, 19 bp, Mus musculus
  siRNA target sequence for Zipro1 (NM_011757.1,1691-1709).
ggatgccagccctaaatat

SEQ ID NO: 450327 - DNA, 19 bp, Mus musculus
  siRNA target sequence for Zipro1 (NM_011757.1,1695-1713).
gccagccctaaatatgagt

SEQ ID NO: 450328 - DNA, 19 bp, Mus musculus
  siRNA target sequence for Zipro1 (NM_011757.1,1771-1789).
caagaaagcgccaaggttt

SEQ ID NO: 450329 - DNA, 19 bp, Mus musculus
  siRNA target sequence for Zipro1 (NM_011757.1,1779-1797).
cgccaaggttttaaatcga

SEQ ID NO: 450330 - DNA, 19 bp, Mus musculus
  siRNA target sequence for Zipro1 (NM_011757.1,1780-1798).
gccaaggttttaaatcgaa

SEQ ID NO: 450331 - DNA, 19 bp, Mus musculus
  siRNA target sequence for Zipro1 (NM_011757.1,1781-1799).
ccaaggttttaaatcgaat

SEQ ID NO: 450332 - DNA, 19 bp, Mus musculus
  siRNA target sequence for Zipro1 (NM_011757.1,1851-1869).
catgcagacggactcaaaa

SEQ ID NO: 450333 - DNA, 19 bp, Mus musculus
  siRNA target sequence for Zipro1 (NM_011757.1,1957-1975).
caaaagcctctcttcaaga

SEQ ID NO: 450334 - DNA, 19 bp, Mus musculus
  siRNA target sequence for Zipro1 (NM_011757.1,2020-2038).
ccccaggagagaaacgtta

SEQ ID NO: 450335 - DNA, 19 bp, Mus musculus
  siRNA target sequence for Zipro1 (NM_011757.1,2327-2345).
cagcctcattcgacactat

SEQ ID NO: 450336 - DNA, 19 bp, Mus musculus
  siRNA target sequence for Zipro1 (NM_011757.1,2526-2544).
ggcgaaaagccctattggt

SEQ ID NO: 450337 - DNA, 19 bp, Mus musculus
  siRNA target sequence for 4930548G07Rik (NM_023773.1,309-327).
gtgcgagggaggtaagaat

SEQ ID NO: 450338 - DNA, 19 bp, Mus musculus
  siRNA target sequence for 4930548G07Rik (NM_023773.1,311-329).
gcgagggaggtaagaatct

SEQ ID NO: 450339 - DNA, 19 bp, Mus musculus
  siRNA target sequence for 4930548G07Rik (NM_023773.1,312-330).
cgagggaggtaagaatctt

SEQ ID NO: 450340 - DNA, 19 bp, Mus musculus
  siRNA target sequence for 4930548G07Rik (NM_023773.1,313-331).
gagggaggtaagaatcttt

SEQ ID NO: 450341 - DNA, 19 bp, Mus musculus
  siRNA target sequence for 4930548G07Rik (NM_023773.1,316-334).
ggaggtaagaatctttata

SEQ ID NO: 450342 - DNA, 19 bp, Mus musculus
  siRNA target sequence for 4930548G07Rik (NM_023773.1,317-335).
gaggtaagaatctttataa

SEQ ID NO: 450343 - DNA, 19 bp, Mus musculus
  siRNA target sequence for 4930548G07Rik (NM_023773.1,337-355).
gttcgatggaaaggatata

SEQ ID NO: 450344 - DNA, 19 bp, Mus musculus
  siRNA target sequence for 4930548G07Rik (NM_023773.1,340-358).
cgatggaaaggatatacat

SEQ ID NO: 450345 - DNA, 19 bp, Mus musculus
  siRNA target sequence for 4930548G07Rik (NM_023773.1,457-475).
gtcaggaaagatattcaga

SEQ ID NO: 450346 - DNA, 19 bp, Mus musculus
  siRNA target sequence for 4930548G07Rik (NM_023773.1,466-484).
gatattcagagactatctt

SEQ ID NO: 450347 - DNA, 19 bp, Mus musculus
  siRNA target sequence for 4930548G07Rik (NM_023773.1,690-708).
cgatgtaaagacgaagaaa

SEQ ID NO: 450348 - DNA, 19 bp, Mus musculus
  siRNA target sequence for 4930548G07Rik (NM_023773.1,691-709).
gatgtaaagacgaagaaaa

SEQ ID NO: 450349 - DNA, 19 bp, Mus musculus
  siRNA target sequence for 4930548G07Rik (NM_023773.1,804-822).
ggctgaagtaagagattta

SEQ ID NO: 450350 - DNA, 19 bp, Mus musculus
  siRNA target sequence for 4930548G07Rik (NM_023773.1,897-915).
gtctgaatcgcctaatgat

SEQ ID NO: 450351 - DNA, 19 bp, Mus musculus
  siRNA target sequence for 4930548G07Rik (NM_023773.1,973-991).
cagaatgtgagaagtgtaa

SEQ ID NO: 450352 - DNA, 19 bp, Mus musculus
  siRNA target sequence for 4930548G07Rik (NM_023773.1,1023-1041).
gggtatttttgagaaacat

SEQ ID NO: 450353 - DNA, 19 bp, Mus musculus
  siRNA target sequence for 4930548G07Rik (NM_023773.1,1039-1057).
catctggatgaccttataa

SEQ ID NO: 450354 - DNA, 19 bp, Mus musculus
  siRNA target sequence for 4930548G07Rik (NM_023773.1,1042-1060).
ctggatgaccttataagta

SEQ ID NO: 450355 - DNA, 19 bp, Mus musculus
  siRNA target sequence for 4930548G07Rik (NM_023773.1,1044-1062).
ggatgaccttataagtatt

SEQ ID NO: 450356 - DNA, 19 bp, Mus musculus
  siRNA target sequence for 4930548G07Rik (NM_023773.1,1072-1090).
gctggtacccgagttagaa

SEQ ID NO: 450357 - DNA, 19 bp, Mus musculus
  siRNA target sequence for 4930548G07Rik (NM_023773.1,1148-1166).
gcacgaatgcctttttaga

SEQ ID NO: 450358 - DNA, 19 bp, Mus musculus
  siRNA target sequence for 4930548G07Rik (NM_023773.1,1169-1187).
ggagagcaatacccaaaaa

SEQ ID NO: 450359 - DNA, 19 bp, Mus musculus
  siRNA target sequence for 4930548G07Rik (NM_023773.1,1172-1190).
gagcaatacccaaaaagca

SEQ ID NO: 450360 - DNA, 19 bp, Mus musculus
  siRNA target sequence for 4930548G07Rik (NM_023773.1,1174-1192).
gcaatacccaaaaagcaaa

SEQ ID NO: 450361 - DNA, 19 bp, Mus musculus
  siRNA target sequence for 4930548G07Rik (NM_023773.1,1197-1215).
ccaagacaagggcataagt

SEQ ID NO: 450362 - DNA, 19 bp, Mus musculus
  siRNA target sequence for 4930548G07Rik (NM_023773.1,1198-1216).
caagacaagggcataagta

SEQ ID NO: 450363 - DNA, 19 bp, Mus musculus
  siRNA target sequence for 4930548G07Rik (NM_023773.1,1203-1221).
caagggcataagtaaccta

SEQ ID NO: 450364 - DNA, 19 bp, Mus musculus
  siRNA target sequence for 4930548G07Rik (NM_023773.1,1208-1226).
gcataagtaacctagagtt

SEQ ID NO: 450365 - DNA, 19 bp, Mus musculus
  siRNA target sequence for 4930548G07Rik (NM_023773.1,1209-1227).
cataagtaacctagagtta

SEQ ID NO: 450366 - DNA, 19 bp, Mus musculus
  siRNA target sequence for 4930548G07Rik (NM_023773.1,1214-1232).
gtaacctagagttaaataa

SEQ ID NO: 450367 - DNA, 19 bp, Mus musculus
  siRNA target sequence for 4930548G07Rik (NM_023773.1,1233-1251).
gctaccatcacctgtgttt

SEQ ID NO: 450368 - DNA, 19 bp, Mus musculus
  siRNA target sequence for 4930548G07Rik (NM_023773.1,1397-1415).
gaaaagagccaaaggtatt

SEQ ID NO: 450369 - DNA, 19 bp, Mus musculus
  siRNA target sequence for 4930548G07Rik (NM_023773.1,1404-1422).
gccaaaggtattaaaatca

SEQ ID NO: 450370 - DNA, 19 bp, Mus musculus
  siRNA target sequence for 4930548G07Rik (NM_023773.1,1480-1498).
gatgttcttgagaataatt

SEQ ID NO: 450371 - DNA, 19 bp, Mus musculus
  siRNA target sequence for 4930548G07Rik (NM_023773.1,1517-1535).
cactggattctaaaattat

SEQ ID NO: 450372 - DNA, 19 bp, Mus musculus
  siRNA target sequence for 4930548G07Rik (NM_023773.1,1519-1537).
ctggattctaaaattatga

SEQ ID NO: 450373 - DNA, 19 bp, Mus musculus
  siRNA target sequence for 4930548G07Rik (NM_023773.1,1521-1539).
ggattctaaaattatgaat

SEQ ID NO: 450374 - DNA, 19 bp, Mus musculus
  siRNA target sequence for 4930548G07Rik (NM_023773.1,1760-1778).
gggaagatgagccctttat

SEQ ID NO: 450375 - DNA, 19 bp, Mus musculus
  siRNA target sequence for 4930548G07Rik (NM_023773.1,1809-1827).
gagggatgctgtgaaaaat

SEQ ID NO: 450376 - DNA, 19 bp, Mus musculus
  siRNA target sequence for 4930548G07Rik (NM_023773.1,1848-1866).
ggttgcactgaactcaaat

SEQ ID NO: 450377 - DNA, 19 bp, Mus musculus
  siRNA target sequence for 4930548G07Rik (NM_023773.1,1853-1871).
cactgaactcaaatgaaga

SEQ ID NO: 450378 - DNA, 19 bp, Mus musculus
  siRNA target sequence for 4930548G07Rik (NM_023773.1,2000-2018).
ggactacagccctcattca

SEQ ID NO: 450379 - DNA, 19 bp, Mus musculus
  siRNA target sequence for 4930548G07Rik (NM_023773.1,2069-2087).
gagcttttgtgaatgttca

SEQ ID NO: 450380 - DNA, 19 bp, Mus musculus
  siRNA target sequence for 4930548G07Rik (NM_023773.1,2112-2130).
catgaaagcatgcaaaaga

SEQ ID NO: 450381 - DNA, 19 bp, Mus musculus
  siRNA target sequence for 4930548G07Rik (NM_023773.1,2119-2137).
gcatgcaaaagaggaaatt

SEQ ID NO: 450382 - DNA, 19 bp, Mus musculus
  siRNA target sequence for 4930548G07Rik (NM_023773.1,2129-2147).
gaggaaattcggacattgt

SEQ ID NO: 450383 - DNA, 19 bp, Mus musculus
  siRNA target sequence for 4930548G07Rik (NM_023773.1,2142-2160).
cattgtccgccttgtgatt

SEQ ID NO: 450384 - DNA, 19 bp, Mus musculus
  siRNA target sequence for 4930548G07Rik (NM_023773.1,2146-2164).
gtccgccttgtgattgaat

SEQ ID NO: 450385 - DNA, 19 bp, Mus musculus
  siRNA target sequence for 4930548G07Rik (NM_023773.1,2148-2166).
ccgccttgtgattgaatgt

SEQ ID NO: 450386 - DNA, 19 bp, Mus musculus
  siRNA target sequence for 4930548G07Rik (NM_023773.1,2187-2205).
gtcaaagcaccaaaatagt

SEQ ID NO: 450387 - DNA, 19 bp, Mus musculus
  siRNA target sequence for 4930548G07Rik (NM_023773.1,2197-2215).
caaaatagtgcattgtact

SEQ ID NO: 450388 - DNA, 19 bp, Mus musculus
  siRNA target sequence for 4930548G07Rik (NM_023773.1,2219-2237).
caaagcagtgtaataatgt

SEQ ID NO: 450389 - DNA, 19 bp, Mus musculus
  siRNA target sequence for 4930548G07Rik (NM_023773.1,2228-2246).
gtaataatgtgcttgtata

SEQ ID NO: 450390 - DNA, 19 bp, Mus musculus
  siRNA target sequence for 4930548G07Rik (NM_023773.1,2284-2302).
gttgcagaagaaacaatca

SEQ ID NO: 450391 - DNA, 19 bp, Mus musculus
  siRNA target sequence for 4930548G07Rik (NM_023773.1,2293-2311).
gaaacaatcagggattact

SEQ ID NO: 450392 - DNA, 19 bp, Mus musculus
  siRNA target sequence for 4930548G07Rik (NM_023773.1,2301-2319).
cagggattactttgaatct

SEQ ID NO: 450393 - DNA, 19 bp, Mus musculus
  siRNA target sequence for 4930548G07Rik (NM_023773.1,2377-2395).
ccggatttctcaacagatt

SEQ ID NO: 450394 - DNA, 19 bp, Mus musculus
  siRNA target sequence for 4930548G07Rik (NM_023773.1,2378-2396).
cggatttctcaacagattt

SEQ ID NO: 450395 - DNA, 19 bp, Mus musculus
  siRNA target sequence for 4930548G07Rik (NM_023773.1,2469-2487).
gggcaaagacgttattgct

SEQ ID NO: 450396 - DNA, 19 bp, Mus musculus
  siRNA target sequence for 4930548G07Rik (NM_023773.1,2557-2575).
gacagtcactttgtttatt

SEQ ID NO: 450397 - DNA, 19 bp, Mus musculus
  siRNA target sequence for 4930548G07Rik (NM_023773.1,2585-2603).
ctgttgctggccccaataa

SEQ ID NO: 450398 - DNA, 19 bp, Mus musculus
  siRNA target sequence for 4930548G07Rik (NM_023773.1,2595-2613).
ccccaataagttgtttata

SEQ ID NO: 450399 - DNA, 19 bp, Mus musculus
  siRNA target sequence for 4930548G07Rik (NM_023773.1,2626-2644).
gcaccctttgccaaggtta

SEQ ID NO: 450400 - DNA, 19 bp, Mus musculus
  siRNA target sequence for 4930548G07Rik (NM_023773.1,2627-2645).
caccctttgccaaggttaa

SEQ ID NO: 450401 - DNA, 19 bp, Mus musculus
  siRNA target sequence for 4930548G07Rik (NM_023773.1,2636-2654).
ccaaggttaagttgctaat

SEQ ID NO: 450402 - DNA, 19 bp, Mus musculus
  siRNA target sequence for 4930548G07Rik (NM_023773.1,2637-2655).
caaggttaagttgctaata

SEQ ID NO: 450403 - DNA, 19 bp, Mus musculus
  siRNA target sequence for 4930548G07Rik (NM_023773.1,2640-2658).
ggttaagttgctaataggt

SEQ ID NO: 450404 - DNA, 19 bp, Mus musculus
  siRNA target sequence for 4930548G07Rik (NM_023773.1,2649-2667).
gctaataggtgcatacaga

SEQ ID NO: 450405 - DNA, 19 bp, Mus musculus
  siRNA target sequence for 5430439G14Rik (NM_173368.1,1379-1397).
ctgatgcgtggcagaaact

SEQ ID NO: 450406 - DNA, 19 bp, Mus musculus
  siRNA target sequence for 5430439G14Rik (NM_173368.1,1398-1416).
ggagacatcccgtgagtat

SEQ ID NO: 450407 - DNA, 19 bp, Mus musculus
  siRNA target sequence for 5430439G14Rik (NM_173368.1,1399-1417).
gagacatcccgtgagtata

SEQ ID NO: 450408 - DNA, 19 bp, Mus musculus
  siRNA target sequence for 5430439G14Rik (NM_173368.1,1408-1426).
cgtgagtataggaacagta

SEQ ID NO: 450409 - DNA, 19 bp, Mus musculus
  siRNA target sequence for 5430439G14Rik (NM_173368.1,1444-1462).
caactcgaggggatgaact

SEQ ID NO: 450410 - DNA, 19 bp, Mus musculus
  siRNA target sequence for 5430439G14Rik (NM_173368.1,1534-1552).
cagtccatcgcattccttt

SEQ ID NO: 450411 - DNA, 19 bp, Mus musculus
  siRNA target sequence for 5430439G14Rik (NM_173368.1,1539-1557).
catcgcattcctttcagaa

SEQ ID NO: 450412 - DNA, 19 bp, Mus musculus
  siRNA target sequence for 5430439G14Rik (NM_173368.1,1544-1562).
cattcctttcagaaatctt

SEQ ID NO: 450413 - DNA, 19 bp, Mus musculus
  siRNA target sequence for 5430439G14Rik (NM_173368.1,1601-1619).
cactttccaccatcactaa

SEQ ID NO: 450414 - DNA, 19 bp, Mus musculus
  siRNA target sequence for 5430439G14Rik (NM_173368.1,1638-1656).
gacatggacggagatgaat

SEQ ID NO: 450415 - DNA, 19 bp, Mus musculus
  siRNA target sequence for 5430439G14Rik (NM_173368.1,1704-1722).
gtacgaaatggtatacaga

SEQ ID NO: 450416 - DNA, 19 bp, Mus musculus
  siRNA target sequence for 5430439G14Rik (NM_173368.1,1827-1845).
gagctgtgtgataattgat

SEQ ID NO: 450417 - DNA, 19 bp, Mus musculus
  siRNA target sequence for 5430439G14Rik (NM_173368.1,1863-1881).
gaataggaactgcaaactt

SEQ ID NO: 450418 - DNA, 19 bp, Mus musculus
  siRNA target sequence for 5430439G14Rik (NM_173368.1,2022-2040).
ggagtttggtgatctcaaa

SEQ ID NO: 450419 - DNA, 19 bp, Mus musculus
  siRNA target sequence for 5430439G14Rik (NM_173368.1,2058-2076).
gaaattgcagtctatccta

SEQ ID NO: 450420 - DNA, 19 bp, Mus musculus
  siRNA target sequence for 5430439G14Rik (NM_173368.1,2064-2082).
gcagtctatcctaaaacca

SEQ ID NO: 450421 - DNA, 19 bp, Mus musculus
  siRNA target sequence for 5430439G14Rik (NM_173368.1,2133-2151).
gcaagagaccatcattgaa

SEQ ID NO: 450422 - DNA, 19 bp, Mus musculus
  siRNA target sequence for 5430439G14Rik (NM_173368.1,2139-2157).
gaccatcattgaagtagaa

SEQ ID NO: 450423 - DNA, 19 bp, Mus musculus
  siRNA target sequence for 5430439G14Rik (NM_173368.1,2149-2167).
gaagtagaactgaccaata

SEQ ID NO: 450424 - DNA, 19 bp, Mus musculus
  siRNA target sequence for 5430439G14Rik (NM_173368.1,2185-2203).
cgtgctatcctagagaaaa

SEQ ID NO: 450425 - DNA, 19 bp, Mus musculus
  siRNA target sequence for 5430439G14Rik (NM_173368.1,2186-2204).
gtgctatcctagagaaaaa

SEQ ID NO: 450426 - DNA, 19 bp, Mus musculus
  siRNA target sequence for 5430439G14Rik (NM_173368.1,2188-2206).
gctatcctagagaaaaact

SEQ ID NO: 450427 - DNA, 19 bp, Mus musculus
  siRNA target sequence for 5430439G14Rik (NM_173368.1,2189-2207).
ctatcctagagaaaaactt

SEQ ID NO: 450428 - DNA, 19 bp, Mus musculus
  siRNA target sequence for 5430439G14Rik (NM_173368.1,2214-2232).
cctgaccaaaggtgcaaat

SEQ ID NO: 450429 - DNA, 19 bp, Mus musculus
  siRNA target sequence for 5430439G14Rik (NM_173368.1,2225-2243).
gtgcaaatcaacacaacat

SEQ ID NO: 450430 - DNA, 19 bp, Mus musculus
  siRNA target sequence for 5430439G14Rik (NM_173368.1,2241-2259).
catgcccaatcttatcaat

SEQ ID NO: 450431 - DNA, 19 bp, Mus musculus
  siRNA target sequence for 5430439G14Rik (NM_173368.1,2244-2262).
gcccaatcttatcaatact

SEQ ID NO: 450432 - DNA, 19 bp, Mus musculus
  siRNA target sequence for 5430439G14Rik (NM_173368.1,2523-2541).
cacctatgagcgaattgat

SEQ ID NO: 450433 - DNA, 19 bp, Mus musculus
  siRNA target sequence for 5430439G14Rik (NM_173368.1,2572-2590).
ccatcgaccggttctgtaa

SEQ ID NO: 450434 - DNA, 19 bp, Mus musculus
  siRNA target sequence for 5430439G14Rik (NM_173368.1,2595-2613).
gactcagaccgctttgtct

SEQ ID NO: 450435 - DNA, 19 bp, Mus musculus
  siRNA target sequence for 5430439G14Rik (NM_173368.1,2714-2732).
ggctcaggcccgatgtcat

SEQ ID NO: 450436 - DNA, 19 bp, Mus musculus
  siRNA target sequence for C79802 (NM_019673.1,268-286).
gagagatgacggaagtaca

SEQ ID NO: 450437 - DNA, 19 bp, Mus musculus
  siRNA target sequence for C79802 (NM_019673.1,270-288).
gagatgacggaagtacaat

SEQ ID NO: 450438 - DNA, 19 bp, Mus musculus
  siRNA target sequence for C79802 (NM_019673.1,898-916).
ctgcgtcatccaggatttt

SEQ ID NO: 450439 - DNA, 19 bp, Mus musculus
  siRNA target sequence for C79802 (NM_019673.1,900-918).
gcgtcatccaggattttca

SEQ ID NO: 450440 - DNA, 19 bp, Mus musculus
  siRNA target sequence for C79802 (NM_019673.1,977-995).
ccaaccgtccactacgaat

SEQ ID NO: 450441 - DNA, 19 bp, Mus musculus
  siRNA target sequence for C79802 (NM_019673.1,978-996).
caaccgtccactacgaatt

SEQ ID NO: 450442 - DNA, 19 bp, Mus musculus
  siRNA target sequence for C79802 (NM_019673.1,1022-1040).
ggggcagagcggctgaaaa

SEQ ID NO: 450443 - DNA, 19 bp, Mus musculus
  siRNA target sequence for C79802 (NM_019673.1,1023-1041).
gggcagagcggctgaaaat

SEQ ID NO: 450444 - DNA, 19 bp, Mus musculus
  siRNA target sequence for C79802 (NM_019673.1,1360-1378).
gatttctaaacaggaatat

SEQ ID NO: 450445 - DNA, 19 bp, Mus musculus
  siRNA target sequence for Cbx1 (NM_007622.2,330-348).
gggcaaggtggaatatctt

SEQ ID NO: 450446 - DNA, 19 bp, Mus musculus
  siRNA target sequence for Cbx1 (NM_007622.2,332-350).
gcaaggtggaatatcttct

SEQ ID NO: 450447 - DNA, 19 bp, Mus musculus
  siRNA target sequence for Cbx1 (NM_007622.2,417-435).
ccttattgctgagtttcta

SEQ ID NO: 450448 - DNA, 19 bp, Mus musculus
  siRNA target sequence for Cbx1 (NM_007622.2,480-498).
caagcgcaaagctgattct

SEQ ID NO: 450449 - DNA, 19 bp, Mus musculus
  siRNA target sequence for Cbx1 (NM_007622.2,585-603).
gccagagcggattattgga

SEQ ID NO: 450450 - DNA, 19 bp, Mus musculus
  siRNA target sequence for Cbx1 (NM_007622.2,700-718).
ccacaggttgtcatatcct

SEQ ID NO: 450451 - DNA, 19 bp, Mus musculus
  siRNA target sequence for Cbx1 (NM_007622.2,701-719).
cacaggttgtcatatcctt

SEQ ID NO: 450452 - DNA, 19 bp, Mus musculus
  siRNA target sequence for Cbx1 (NM_007622.2,705-723).
ggttgtcatatccttctat

SEQ ID NO: 450453 - DNA, 19 bp, Mus musculus
  siRNA target sequence for Cbx1 (NM_007622.2,731-749).
ggctaacgtggcattccta

SEQ ID NO: 450454 - DNA, 19 bp, Mus musculus
  siRNA target sequence for Cbx2 (NM_007623.2,183-201).
ggctggtcctccaaacaca

SEQ ID NO: 450455 - DNA, 19 bp, Mus musculus
  siRNA target sequence for Cbx2 (NM_007623.2,184-202).
gctggtcctccaaacacaa

SEQ ID NO: 450456 - DNA, 19 bp, Mus musculus
  siRNA target sequence for Cbx2 (NM_007623.2,372-390).
ccagatgcgccatccaaat

SEQ ID NO: 450457 - DNA, 19 bp, Mus musculus
  siRNA target sequence for Cbx2 (NM_007623.2,548-566).
gctgaaggatcccattaga

SEQ ID NO: 450458 - DNA, 19 bp, Mus musculus
  siRNA target sequence for Cbx2 (NM_007623.2,939-957).
gggctagacctgaaagtga

SEQ ID NO: 450459 - DNA, 19 bp, Mus musculus
  siRNA target sequence for Cbx2 (NM_007623.2,1319-1337).
caagcgggacaccgttaaa

SEQ ID NO: 450460 - DNA, 19 bp, Mus musculus
  siRNA target sequence for Cbx2 (NM_007623.2,1418-1436).
cacgggagaggagaatagt

SEQ ID NO: 450461 - DNA, 19 bp, Mus musculus
  siRNA target sequence for Cbx2 (NM_007623.2,1477-1495).
ctgcgcagaacctatctgt

SEQ ID NO: 450462 - DNA, 19 bp, Mus musculus
  siRNA target sequence for Cbx2 (NM_007623.2,1619-1637).
cttcaacttgaggcattat

SEQ ID NO: 450463 - DNA, 19 bp, Mus musculus
  siRNA target sequence for Cbx4 (NM_007625.1,166-184).
gcggtggagagcatcgaaa

SEQ ID NO: 450464 - DNA, 19 bp, Mus musculus
  siRNA target sequence for Cbx4 (NM_007625.1,167-185).
cggtggagagcatcgaaaa

SEQ ID NO: 450465 - DNA, 19 bp, Mus musculus
  siRNA target sequence for Cbx4 (NM_007625.1,232-250).
ggctggtcccccaaatata

SEQ ID NO: 450466 - DNA, 19 bp, Mus musculus
  siRNA target sequence for Cbx4 (NM_007625.1,392-410).
cccgacgctccaatgttct

SEQ ID NO: 450467 - DNA, 19 bp, Mus musculus
  siRNA target sequence for Cbx4 (NM_007625.1,572-590).
gcggcaagtattattatca

SEQ ID NO: 450468 - DNA, 19 bp, Mus musculus
  siRNA target sequence for Cbx4 (NM_007625.1,849-867).
ggcagtgaccggtaatggt

SEQ ID NO: 450469 - DNA, 19 bp, Mus musculus
  siRNA target sequence for Cbx4 (NM_007625.1,850-868).
gcagtgaccggtaatggta

SEQ ID NO: 450470 - DNA, 19 bp, Mus musculus
  siRNA target sequence for Cbx4 (NM_007625.1,851-869).
cagtgaccggtaatggtat

SEQ ID NO: 450471 - DNA, 19 bp, Mus musculus
  siRNA target sequence for Cbx4 (NM_007625.1,865-883).
ggtattgggggcaagatga

SEQ ID NO: 450472 - DNA, 19 bp, Mus musculus
  siRNA target sequence for Cbx4 (NM_007625.1,910-928).
gggcgcatcgtgatcgtta

SEQ ID NO: 450473 - DNA, 19 bp, Mus musculus
  siRNA target sequence for Cbx4 (NM_007625.1,911-929).
ggcgcatcgtgatcgttat

SEQ ID NO: 450474 - DNA, 19 bp, Mus musculus
  siRNA target sequence for Cbx4 (NM_007625.1,948-966).
cggcatgcaggcagtgaaa

SEQ ID NO: 450475 - DNA, 19 bp, Mus musculus
  siRNA target sequence for Cbx4 (NM_007625.1,949-967).
ggcatgcaggcagtgaaaa

SEQ ID NO: 450476 - DNA, 19 bp, Mus musculus
  siRNA target sequence for Cbx4 (NM_007625.1,950-968).
gcatgcaggcagtgaaaat

SEQ ID NO: 450477 - DNA, 19 bp, Mus musculus
  siRNA target sequence for Cbx4 (NM_007625.1,1044-1062).
ccagggcgacaggactttt

SEQ ID NO: 450478 - DNA, 19 bp, Mus musculus
  siRNA target sequence for Cbx4 (NM_007625.1,1045-1063).
cagggcgacaggactttta

SEQ ID NO: 450479 - DNA, 19 bp, Mus musculus
  siRNA target sequence for Cbx4 (NM_007625.1,1453-1471).
gagcaccctgccaacgtat

SEQ ID NO: 450480 - DNA, 19 bp, Mus musculus
  siRNA target sequence for Cbx4 (NM_007625.1,1495-1513).
cagcccgaggtcatccttt

SEQ ID NO: 450481 - DNA, 19 bp, Mus musculus
  siRNA target sequence for Cbx4 (NM_007625.1,1499-1517).
ccgaggtcatccttttaga

SEQ ID NO: 450482 - DNA, 19 bp, Mus musculus
  siRNA target sequence for Cbx4 (NM_007625.1,1501-1519).
gaggtcatccttttagact

SEQ ID NO: 450483 - DNA, 19 bp, Mus musculus
  siRNA target sequence for Cbx4 (NM_007625.1,1525-1543).
ctggatgaacccatagact

SEQ ID NO: 450484 - DNA, 19 bp, Mus musculus
  siRNA target sequence for Cbx5 (NM_007626.2,163-181).
gggcaagtggaatatctgt

SEQ ID NO: 450485 - DNA, 19 bp, Mus musculus
  siRNA target sequence for Cbx5 (NM_007626.2,218-236).
gggaacctgagaagaactt

SEQ ID NO: 450486 - DNA, 19 bp, Mus musculus
  siRNA target sequence for Cbx5 (NM_007626.2,234-252).
cttggattgtcctgaacta

SEQ ID NO: 450487 - DNA, 19 bp, Mus musculus
  siRNA target sequence for Cbx5 (NM_007626.2,237-255).
ggattgtcctgaactaatt

SEQ ID NO: 450488 - DNA, 19 bp, Mus musculus
  siRNA target sequence for Cbx5 (NM_007626.2,238-256).
gattgtcctgaactaattt

SEQ ID NO: 450489 - DNA, 19 bp, Mus musculus
  siRNA target sequence for Cbx5 (NM_007626.2,242-260).
gtcctgaactaatttctga

SEQ ID NO: 450490 - DNA, 19 bp, Mus musculus
  siRNA target sequence for Cbx5 (NM_007626.2,247-265).
gaactaatttctgagttta

SEQ ID NO: 450491 - DNA, 19 bp, Mus musculus
  siRNA target sequence for Cbx5 (NM_007626.2,358-376).
gctgatgatattaaatcta

SEQ ID NO: 450492 - DNA, 19 bp, Mus musculus
  siRNA target sequence for Cbx5 (NM_007626.2,441-459).
gatcatcggagcaacagat

SEQ ID NO: 450493 - DNA, 19 bp, Mus musculus
  siRNA target sequence for Cbx5 (NM_007626.2,457-475).
gattcctgcggtgacttaa

SEQ ID NO: 450494 - DNA, 19 bp, Mus musculus
  siRNA target sequence for Cbx5 (NM_007626.2,464-482).
gcggtgacttaatgttctt

SEQ ID NO: 450495 - DNA, 19 bp, Mus musculus
  siRNA target sequence for Cbx5 (NM_007626.2,465-483).
cggtgacttaatgttctta

SEQ ID NO: 450496 - DNA, 19 bp, Mus musculus
  siRNA target sequence for Cbx5 (NM_007626.2,471-489).
cttaatgttcttaatgaaa

SEQ ID NO: 450497 - DNA, 19 bp, Mus musculus
  siRNA target sequence for Cbx5 (NM_007626.2,543-561).
gtgtccacagattgtgata

SEQ ID NO: 450498 - DNA, 19 bp, Mus musculus
  siRNA target sequence for Cbx5 (NM_007626.2,582-600).
gacgtggcacgcatatcca

SEQ ID NO: 450499 - DNA, 19 bp, Mus musculus
  siRNA target sequence for Cbx5 (NM_007626.2,599-617).
cagaggatgcggaaaacaa

SEQ ID NO: 450500 - DNA, 19 bp, Mus musculus
  siRNA target sequence for Cbx8 (NM_013926.1,127-145).
cgcaaaggacgcatggaat

SEQ ID NO: 450501 - DNA, 19 bp, Mus musculus
  siRNA target sequence for Cbx8 (NM_013926.1,129-147).
caaaggacgcatggaatat

SEQ ID NO: 450502 - DNA, 19 bp, Mus musculus
  siRNA target sequence for Cbx8 (NM_013926.1,163-181).
ggctggtcgcagaagtaca

SEQ ID NO: 450503 - DNA, 19 bp, Mus musculus
  siRNA target sequence for Cbx8 (NM_013926.1,188-206).
gggagcccgaagaaaatat

SEQ ID NO: 450504 - DNA, 19 bp, Mus musculus
  siRNA target sequence for Cbx8 (NM_013926.1,189-207).
ggagcccgaagaaaatatt

SEQ ID NO: 450505 - DNA, 19 bp, Mus musculus
  siRNA target sequence for Cbx8 (NM_013926.1,277-295).
cgaggacccaagcctaaaa

SEQ ID NO: 450506 - DNA, 19 bp, Mus musculus
  siRNA target sequence for Cbx8 (NM_013926.1,747-765).
ctcagacctggtgcaatat

SEQ ID NO: 450507 - DNA, 19 bp, Mus musculus
  siRNA target sequence for Cbx8 (NM_013926.1,897-915).
cagggttcgacatagttca

SEQ ID NO: 450508 - DNA, 19 bp, Mus musculus
  siRNA target sequence for Cbx8 (NM_013926.1,1059-1077).
gaaagtggtcgttacagat

SEQ ID NO: 450509 - DNA, 19 bp, Mus musculus
  siRNA target sequence for Cbx8 (NM_013926.1,1115-1133).
gcaacacggaccaaggatt

SEQ ID NO: 450510 - DNA, 19 bp, Mus musculus
  siRNA target sequence for Cbx8 (NM_013926.1,1121-1139).
cggaccaaggattctttaa

SEQ ID NO: 450511 - DNA, 19 bp, Mus musculus
  siRNA target sequence for Cdyl (NM_009881.1,258-276).
ggcaatagccagcctaatt

SEQ ID NO: 450512 - DNA, 19 bp, Mus musculus
  siRNA target sequence for Cdyl (NM_009881.1,260-278).
caatagccagcctaattca

SEQ ID NO: 450513 - DNA, 19 bp, Mus musculus
  siRNA target sequence for Cdyl (NM_009881.1,318-336).
caacctactgatgataaca

SEQ ID NO: 450514 - DNA, 19 bp, Mus musculus
  siRNA target sequence for Cdyl (NM_009881.1,388-406).
cgtcccctgcaattcaaga

SEQ ID NO: 450515 - DNA, 19 bp, Mus musculus
  siRNA target sequence for Cdyl (NM_009881.1,411-429).
gagactcaggtggaaagta

SEQ ID NO: 450516 - DNA, 19 bp, Mus musculus
  siRNA target sequence for Cdyl (NM_009881.1,422-440).
ggaaagtatcgttgacaaa

SEQ ID NO: 450517 - DNA, 19 bp, Mus musculus
  siRNA target sequence for Cdyl (NM_009881.1,427-445).
gtatcgttgacaaaaggaa

SEQ ID NO: 450518 - DNA, 19 bp, Mus musculus
  siRNA target sequence for Cdyl (NM_009881.1,531-549).
gtgaactgtgaggaataca

SEQ ID NO: 450519 - DNA, 19 bp, Mus musculus
  siRNA target sequence for Cdyl (NM_009881.1,800-818).
cgccaagtcagggatcaaa

SEQ ID NO: 450520 - DNA, 19 bp, Mus musculus
  siRNA target sequence for Cdyl (NM_009881.1,1060-1078).
ccacaggcttagctgttaa

SEQ ID NO: 450521 - DNA, 19 bp, Mus musculus
  siRNA target sequence for Cdyl (NM_009881.1,1067-1085).
cttagctgttaatggaaaa

SEQ ID NO: 450522 - DNA, 19 bp, Mus musculus
  siRNA target sequence for Cdyl (NM_009881.1,1071-1089).
gctgttaatggaaaaggta

SEQ ID NO: 450523 - DNA, 19 bp, Mus musculus
  siRNA target sequence for Cdyl (NM_009881.1,1192-1210).
gagaccaaccttttgacaa

SEQ ID NO: 450524 - DNA, 19 bp, Mus musculus
  siRNA target sequence for Cdyl (NM_009881.1,1241-1259).
gagtgcctacagatacaga

SEQ ID NO: 450525 - DNA, 19 bp, Mus musculus
  siRNA target sequence for Cdyl (NM_009881.1,1284-1302).
ggcttcacccacatcttgt

SEQ ID NO: 450526 - DNA, 19 bp, Mus musculus
  siRNA target sequence for Cdyl (NM_009881.1,1286-1304).
cttcacccacatcttgtta

SEQ ID NO: 450527 - DNA, 19 bp, Mus musculus
  siRNA target sequence for Cdyl (NM_009881.1,1307-1325).
cacaaaatcgtcagagaat

SEQ ID NO: 450528 - DNA, 19 bp, Mus musculus
  siRNA target sequence for Cdyl (NM_009881.1,1435-1453).
gtggtctggactttattta

SEQ ID NO: 450529 - DNA, 19 bp, Mus musculus
  siRNA target sequence for Cdyl (NM_009881.1,1516-1534).
gaaacttcgtgaatacttt

SEQ ID NO: 450530 - DNA, 19 bp, Mus musculus
  siRNA target sequence for Cdyl (NM_009881.1,1584-1602).
ggactaggagcatccatat

SEQ ID NO: 450531 - DNA, 19 bp, Mus musculus
  siRNA target sequence for Cdyl (NM_009881.1,1585-1603).
gactaggagcatccatatt

SEQ ID NO: 450532 - DNA, 19 bp, Mus musculus
  siRNA target sequence for Cdyl (NM_009881.1,1597-1615).
ccatattgcctctttgtga

SEQ ID NO: 450533 - DNA, 19 bp, Mus musculus
  siRNA target sequence for Cdyl (NM_009881.1,1683-1701).
ggctgctctaccgttatgt

SEQ ID NO: 450534 - DNA, 19 bp, Mus musculus
  siRNA target sequence for Cdyl (NM_009881.1,1684-1702).
gctgctctaccgttatgtt

SEQ ID NO: 450535 - DNA, 19 bp, Mus musculus
  siRNA target sequence for Cdyl (NM_009881.1,1685-1703).
ctgctctaccgttatgttt

SEQ ID NO: 450536 - DNA, 19 bp, Mus musculus
  siRNA target sequence for Cdyl (NM_009881.1,1694-1712).
cgttatgtttcccaagatt

SEQ ID NO: 450537 - DNA, 19 bp, Mus musculus
  siRNA target sequence for Cdyl (NM_009881.1,1719-1737).
ggagcatctgcgaatgaaa

SEQ ID NO: 450538 - DNA, 19 bp, Mus musculus
  siRNA target sequence for Cdyl (NM_009881.1,1720-1738).
gagcatctgcgaatgaaat

SEQ ID NO: 450539 - DNA, 19 bp, Mus musculus
  siRNA target sequence for Cdyl (NM_009881.1,1723-1741).
catctgcgaatgaaatgct

SEQ ID NO: 450540 - DNA, 19 bp, Mus musculus
  siRNA target sequence for Cdyl (NM_009881.1,1891-1909).
ccctggtgcgctgcaatat

SEQ ID NO: 450541 - DNA, 19 bp, Mus musculus
  siRNA target sequence for Cdyl (NM_009881.1,1893-1911).
ctggtgcgctgcaatatga

SEQ ID NO: 450542 - DNA, 19 bp, Mus musculus
  siRNA target sequence for Cdyl (NM_009881.1,1928-1946).
ggccaatgagagagaatgt

SEQ ID NO: 450543 - DNA, 19 bp, Mus musculus
  siRNA target sequence for Cdyl (NM_009881.1,1981-1999).
gcatggactccatgttaaa

SEQ ID NO: 450544 - DNA, 19 bp, Mus musculus
  siRNA target sequence for Cdyl (NM_009881.1,1990-2008).
ccatgttaaagtacttaca

SEQ ID NO: 450545 - DNA, 19 bp, Mus musculus
  siRNA target sequence for Cdyl2 (NM_029441.1,29-47).
cttctggggacctttacga

SEQ ID NO: 450546 - DNA, 19 bp, Mus musculus
  siRNA target sequence for Cdyl2 (NM_029441.1,37-55).
gacctttacgaggttgaaa

SEQ ID NO: 450547 - DNA, 19 bp, Mus musculus
  siRNA target sequence for Cdyl2 (NM_029441.1,85-103).
gggaaatgggaatatctta

SEQ ID NO: 450548 - DNA, 19 bp, Mus musculus
  siRNA target sequence for Cdyl2 (NM_029441.1,199-217).
cacttgtccaaggataaga

SEQ ID NO: 450549 - DNA, 19 bp, Mus musculus
  siRNA target sequence for Cdyl2 (NM_029441.1,434-452).
cccccagtggcttacagat

SEQ ID NO: 450550 - DNA, 19 bp, Mus musculus
  siRNA target sequence for Cdyl2 (NM_029441.1,437-455).
ccagtggcttacagatcat

SEQ ID NO: 450551 - DNA, 19 bp, Mus musculus
  siRNA target sequence for Cdyl2 (NM_029441.1,507-525).
gaaggacgagtcacacttt

SEQ ID NO: 450552 - DNA, 19 bp, Mus musculus
  siRNA target sequence for Cdyl2 (NM_029441.1,511-529).
gacgagtcacactttggaa

SEQ ID NO: 450553 - DNA, 19 bp, Mus musculus
  siRNA target sequence for Cdyl2 (NM_029441.1,729-747).
cagcgtccgccagaatgaa

SEQ ID NO: 450554 - DNA, 19 bp, Mus musculus
  siRNA target sequence for Cdyl2 (NM_029441.1,789-807).
gggcttcacacacattctt

SEQ ID NO: 450555 - DNA, 19 bp, Mus musculus
  siRNA target sequence for Cdyl2 (NM_029441.1,936-954).
ctgcagcggactagactat

SEQ ID NO: 450556 - DNA, 19 bp, Mus musculus
  siRNA target sequence for Cdyl2 (NM_029441.1,941-959).
gcggactagactattccta

SEQ ID NO: 450557 - DNA, 19 bp, Mus musculus
  siRNA target sequence for Cdyl2 (NM_029441.1,1001-1019).
ctcgaatcgcagaagctat

SEQ ID NO: 450558 - DNA, 19 bp, Mus musculus
  siRNA target sequence for Cdyl2 (NM_029441.1,1059-1077).
catcgtggtagccattaat

SEQ ID NO: 450559 - DNA, 19 bp, Mus musculus
  siRNA target sequence for Cdyl2 (NM_029441.1,1111-1129).
cccctctgtgacatcgtat

SEQ ID NO: 450560 - DNA, 19 bp, Mus musculus
  siRNA target sequence for Cdyl2 (NM_029441.1,1138-1156).
gagaaggcctggtttcaga

SEQ ID NO: 450561 - DNA, 19 bp, Mus musculus
  siRNA target sequence for Cdyl2 (NM_029441.1,1225-1243).
gtggcgctggccaatgaaa

SEQ ID NO: 450562 - DNA, 19 bp, Mus musculus
  siRNA target sequence for Cdyl2 (NM_029441.1,1229-1247).
cgctggccaatgaaatgct

SEQ ID NO: 450563 - DNA, 19 bp, Mus musculus
  siRNA target sequence for Cdyl2 (NM_029441.1,1378-1396).
gttttggaggagtccaaat

SEQ ID NO: 450564 - DNA, 19 bp, Mus musculus
  siRNA target sequence for Cdyl2 (NM_029441.1,1505-1523).
gctatctgcaggacaaaat

SEQ ID NO: 450565 - DNA, 19 bp, Mus musculus
  siRNA target sequence for Chd1 (NM_007690.1,411-429).
gtcgacggagccgagtttt

SEQ ID NO: 450566 - DNA, 19 bp, Mus musculus
  siRNA target sequence for Chd1 (NM_007690.1,414-432).
gacggagccgagttttgga

SEQ ID NO: 450567 - DNA, 19 bp, Mus musculus
  siRNA target sequence for Chd1 (NM_007690.1,416-434).
cggagccgagttttggaaa

SEQ ID NO: 450568 - DNA, 19 bp, Mus musculus
  siRNA target sequence for Chd1 (NM_007690.1,420-438).
gccgagttttggaaatcta

SEQ ID NO: 450569 - DNA, 19 bp, Mus musculus
  siRNA target sequence for Chd1 (NM_007690.1,459-477).
cagagatctgcaatgctta

SEQ ID NO: 450570 - DNA, 19 bp, Mus musculus
  siRNA target sequence for Chd1 (NM_007690.1,504-522).
cagcgcccagcttcatcta

SEQ ID NO: 450571 - DNA, 19 bp, Mus musculus
  siRNA target sequence for Chd1 (NM_007690.1,506-524).
gcgcccagcttcatctaat

SEQ ID NO: 450572 - DNA, 19 bp, Mus musculus
  siRNA target sequence for Chd1 (NM_007690.1,507-525).
cgcccagcttcatctaata

SEQ ID NO: 450573 - DNA, 19 bp, Mus musculus
  siRNA target sequence for Chd1 (NM_007690.1,509-527).
cccagcttcatctaatagt

SEQ ID NO: 450574 - DNA, 19 bp, Mus musculus
  siRNA target sequence for Chd1 (NM_007690.1,706-724).
ccgactacgagccgaaaaa

SEQ ID NO: 450575 - DNA, 19 bp, Mus musculus
  siRNA target sequence for Chd1 (NM_007690.1,708-726).
gactacgagccgaaaaaca

SEQ ID NO: 450576 - DNA, 19 bp, Mus musculus
  siRNA target sequence for Chd1 (NM_007690.1,710-728).
ctacgagccgaaaaacaaa

SEQ ID NO: 450577 - DNA, 19 bp, Mus musculus
  siRNA target sequence for Chd1 (NM_007690.1,737-755).
ccgaaagcctcagaataga

SEQ ID NO: 450578 - DNA, 19 bp, Mus musculus
  siRNA target sequence for Chd1 (NM_007690.1,738-756).
cgaaagcctcagaatagat

SEQ ID NO: 450579 - DNA, 19 bp, Mus musculus
  siRNA target sequence for Chd1 (NM_007690.1,744-762).
cctcagaatagatctaagt

SEQ ID NO: 450580 - DNA, 19 bp, Mus musculus
  siRNA target sequence for Chd1 (NM_007690.1,867-885).
caagccaccgtcaatgtga

SEQ ID NO: 450581 - DNA, 19 bp, Mus musculus
  siRNA target sequence for Chd1 (NM_007690.1,1029-1047).
ggtgctactacaaccattt

SEQ ID NO: 450582 - DNA, 19 bp, Mus musculus
  siRNA target sequence for Chd1 (NM_007690.1,1030-1048).
gtgctactacaaccattta

SEQ ID NO: 450583 - DNA, 19 bp, Mus musculus
  siRNA target sequence for Chd1 (NM_007690.1,1094-1112).
caaagagccaggagacata

SEQ ID NO: 450584 - DNA, 19 bp, Mus musculus
  siRNA target sequence for Chd1 (NM_007690.1,1100-1118).
gccaggagacatacagtat

SEQ ID NO: 450585 - DNA, 19 bp, Mus musculus
  siRNA target sequence for Chd1 (NM_007690.1,1101-1119).
ccaggagacatacagtatt

SEQ ID NO: 450586 - DNA, 19 bp, Mus musculus
  siRNA target sequence for Chd1 (NM_007690.1,1107-1125).
gacatacagtatttaatta

SEQ ID NO: 450587 - DNA, 19 bp, Mus musculus
  siRNA target sequence for Chd1 (NM_007690.1,1176-1194).
ctgaagcagcagaacgtta

SEQ ID NO: 450588 - DNA, 19 bp, Mus musculus
  siRNA target sequence for Chd1 (NM_007690.1,1187-1205).
gaacgttagagggatgaaa

SEQ ID NO: 450589 - DNA, 19 bp, Mus musculus
  siRNA target sequence for Chd1 (NM_007690.1,1198-1216).
ggatgaaaaaattggataa

SEQ ID NO: 450590 - DNA, 19 bp, Mus musculus
  siRNA target sequence for Chd1 (NM_007690.1,1230-1248).
gatcaagagacgaaacgat

SEQ ID NO: 450591 - DNA, 19 bp, Mus musculus
  siRNA target sequence for Chd1 (NM_007690.1,1240-1258).
cgaaacgatggctgaaaaa

SEQ ID NO: 450592 - DNA, 19 bp, Mus musculus
  siRNA target sequence for Chd1 (NM_007690.1,1331-1349).
gatagtggagcgcataatt

SEQ ID NO: 450593 - DNA, 19 bp, Mus musculus
  siRNA target sequence for Chd1 (NM_007690.1,1343-1361).
cataattgctcattccaat

SEQ ID NO: 450594 - DNA, 19 bp, Mus musculus
  siRNA target sequence for Chd1 (NM_007690.1,1350-1368).
gctcattccaatcaaaaat

SEQ ID NO: 450595 - DNA, 19 bp, Mus musculus
  siRNA target sequence for Chd1 (NM_007690.1,1372-1390).
cagctggtcttcctgatta

SEQ ID NO: 450596 - DNA, 19 bp, Mus musculus
  siRNA target sequence for Chd1 (NM_007690.1,1377-1395).
ggtcttcctgattattatt

SEQ ID NO: 450597 - DNA, 19 bp, Mus musculus
  siRNA target sequence for Chd1 (NM_007690.1,1433-1451).
ggaggatggagctctcatt

SEQ ID NO: 450598 - DNA, 19 bp, Mus musculus
  siRNA target sequence for Chd1 (NM_007690.1,1434-1452).
gaggatggagctctcattt

SEQ ID NO: 450599 - DNA, 19 bp, Mus musculus
  siRNA target sequence for Chd1 (NM_007690.1,1464-1482).
cagacatgcatcgatgaat

SEQ ID NO: 450600 - DNA, 19 bp, Mus musculus
  siRNA target sequence for Chd1 (NM_007690.1,1466-1484).
gacatgcatcgatgaatat

SEQ ID NO: 450601 - DNA, 19 bp, Mus musculus
  siRNA target sequence for Chd1 (NM_007690.1,1499-1517).
gtcaaaaacgacacctttt

SEQ ID NO: 450602 - DNA, 19 bp, Mus musculus
  siRNA target sequence for Chd1 (NM_007690.1,1501-1519).
caaaaacgacaccttttaa

SEQ ID NO: 450603 - DNA, 19 bp, Mus musculus
  siRNA target sequence for Chd1 (NM_007690.1,1510-1528).
caccttttaaagattgcaa

SEQ ID NO: 450604 - DNA, 19 bp, Mus musculus
  siRNA target sequence for Chd1 (NM_007690.1,1588-1606).
gacatgagggcttagaact

SEQ ID NO: 450605 - DNA, 19 bp, Mus musculus
  siRNA target sequence for Chd1 (NM_007690.1,1611-1629).
gactatcagctgaatggtt

SEQ ID NO: 450606 - DNA, 19 bp, Mus musculus
  siRNA target sequence for Chd1 (NM_007690.1,1617-1635).
cagctgaatggtttaaact

SEQ ID NO: 450607 - DNA, 19 bp, Mus musculus
  siRNA target sequence for Chd1 (NM_007690.1,1702-1720).
caatacagacgatctcatt

SEQ ID NO: 450608 - DNA, 19 bp, Mus musculus
  siRNA target sequence for Chd1 (NM_007690.1,1711-1729).
cgatctcatttttgaacta

SEQ ID NO: 450609 - DNA, 19 bp, Mus musculus
  siRNA target sequence for Chd1 (NM_007690.1,1712-1730).
gatctcatttttgaactat

SEQ ID NO: 450610 - DNA, 19 bp, Mus musculus
  siRNA target sequence for Chd1 (NM_007690.1,1816-1834).
cgtgggcgtctcagatgaa

SEQ ID NO: 450611 - DNA, 19 bp, Mus musculus
  siRNA target sequence for Chd1 (NM_007690.1,1832-1850).
gaatgctgtggtttactta

SEQ ID NO: 450612 - DNA, 19 bp, Mus musculus
  siRNA target sequence for Chd1 (NM_007690.1,1842-1860).
gtttacttaggcgacatta

SEQ ID NO: 450613 - DNA, 19 bp, Mus musculus
  siRNA target sequence for Chd1 (NM_007690.1,1904-1922).
gaccaaacggttaaaattt

SEQ ID NO: 450614 - DNA, 19 bp, Mus musculus
  siRNA target sequence for Chd1 (NM_007690.1,1906-1924).
ccaaacggttaaaatttaa

SEQ ID NO: 450615 - DNA, 19 bp, Mus musculus
  siRNA target sequence for Chd1 (NM_007690.1,1907-1925).
caaacggttaaaatttaat

SEQ ID NO: 450616 - DNA, 19 bp, Mus musculus
  siRNA target sequence for Chd1 (NM_007690.1,1978-1996).
gtctgaattgggcattcat

SEQ ID NO: 450617 - DNA, 19 bp, Mus musculus
  siRNA target sequence for Chd1 (NM_007690.1,2007-2025).
gaagcgcatcgattaaaga

SEQ ID NO: 450618 - DNA, 19 bp, Mus musculus
  siRNA target sequence for Chd1 (NM_007690.1,2011-2029).
cgcatcgattaaagaatga

SEQ ID NO: 450619 - DNA, 19 bp, Mus musculus
  siRNA target sequence for Chd1 (NM_007690.1,2012-2030).
gcatcgattaaagaatgat

SEQ ID NO: 450620 - DNA, 19 bp, Mus musculus
  siRNA target sequence for Chd1 (NM_007690.1,2016-2034).
cgattaaagaatgatgatt

SEQ ID NO: 450621 - DNA, 19 bp, Mus musculus
  siRNA target sequence for Chd1 (NM_007690.1,2035-2053).
cccttctgtacaaaacttt

SEQ ID NO: 450622 - DNA, 19 bp, Mus musculus
  siRNA target sequence for Chd1 (NM_007690.1,2036-2054).
ccttctgtacaaaacttta

SEQ ID NO: 450623 - DNA, 19 bp, Mus musculus
  siRNA target sequence for Chd1 (NM_007690.1,2068-2086).
ctaaccatcgccttctgat

SEQ ID NO: 450624 - DNA, 19 bp, Mus musculus
  siRNA target sequence for Chd1 (NM_007690.1,2128-2146).
cactgctgcacttcattat

SEQ ID NO: 450625 - DNA, 19 bp, Mus musculus
  siRNA target sequence for Chd1 (NM_007690.1,2161-2179).
cttcatgggaagattttga

SEQ ID NO: 450626 - DNA, 19 bp, Mus musculus
  siRNA target sequence for Chd1 (NM_007690.1,2244-2262).
ctgttacgcagagttaaga

SEQ ID NO: 450627 - DNA, 19 bp, Mus musculus
  siRNA target sequence for Chd1 (NM_007690.1,2334-2352).
caatattacaagtggattt

SEQ ID NO: 450628 - DNA, 19 bp, Mus musculus
  siRNA target sequence for Chd1 (NM_007690.1,2463-2481).
ccaccagataataatgaat

SEQ ID NO: 450629 - DNA, 19 bp, Mus musculus
  siRNA target sequence for Chd1 (NM_007690.1,2464-2482).
caccagataataatgaatt

SEQ ID NO: 450630 - DNA, 19 bp, Mus musculus
  siRNA target sequence for Chd1 (NM_007690.1,2495-2513).
ggaggccttacaacactta

SEQ ID NO: 450631 - DNA, 19 bp, Mus musculus
  siRNA target sequence for Chd1 (NM_007690.1,2496-2514).
gaggccttacaacacttaa

SEQ ID NO: 450632 - DNA, 19 bp, Mus musculus
  siRNA target sequence for Chd1 (NM_007690.1,2517-2535).
cgtagtagcggaaaactca

SEQ ID NO: 450633 - DNA, 19 bp, Mus musculus
  siRNA target sequence for Chd1 (NM_007690.1,2518-2536).
gtagtagcggaaaactcat

SEQ ID NO: 450634 - DNA, 19 bp, Mus musculus
  siRNA target sequence for Chd1 (NM_007690.1,2552-2570).
gttgattcgcctaagagaa

SEQ ID NO: 450635 - DNA, 19 bp, Mus musculus
  siRNA target sequence for Chd1 (NM_007690.1,2555-2573).
gattcgcctaagagaaaga

SEQ ID NO: 450636 - DNA, 19 bp, Mus musculus
  siRNA target sequence for Chd1 (NM_007690.1,2603-2621).
ggtgcggatgttagacata

SEQ ID NO: 450637 - DNA, 19 bp, Mus musculus
  siRNA target sequence for Chd1 (NM_007690.1,2616-2634).
gacatactcgcagagtatt

SEQ ID NO: 450638 - DNA, 19 bp, Mus musculus
  siRNA target sequence for Chd1 (NM_007690.1,2643-2661).
cgccagttcccctttcaaa

SEQ ID NO: 450639 - DNA, 19 bp, Mus musculus
  siRNA target sequence for Chd1 (NM_007690.1,2662-2680).
gattagatggatcgataaa

SEQ ID NO: 450640 - DNA, 19 bp, Mus musculus
  siRNA target sequence for Chd1 (NM_007690.1,2697-2715).
caggctttggatcacttta

SEQ ID NO: 450641 - DNA, 19 bp, Mus musculus
  siRNA target sequence for Chd1 (NM_007690.1,2721-2739).
gagggctcagaggatttct

SEQ ID NO: 450642 - DNA, 19 bp, Mus musculus
  siRNA target sequence for Chd1 (NM_007690.1,2765-2783).
gggtttaggcattaaccta

SEQ ID NO: 450643 - DNA, 19 bp, Mus musculus
  siRNA target sequence for Chd1 (NM_007690.1,2788-2806).
ctgctgacaccgttgttat

SEQ ID NO: 450644 - DNA, 19 bp, Mus musculus
  siRNA target sequence for Chd1 (NM_007690.1,2790-2808).
gctgacaccgttgttatat

SEQ ID NO: 450645 - DNA, 19 bp, Mus musculus
  siRNA target sequence for Chd1 (NM_007690.1,2795-2813).
caccgttgttatattcgat

SEQ ID NO: 450646 - DNA, 19 bp, Mus musculus
  siRNA target sequence for Chd1 (NM_007690.1,2802-2820).
gttatattcgattctgatt

SEQ ID NO: 450647 - DNA, 19 bp, Mus musculus
  siRNA target sequence for Chd1 (NM_007690.1,2861-2879).
ccgaattggacagaagaaa

SEQ ID NO: 450648 - DNA, 19 bp, Mus musculus
  siRNA target sequence for Chd1 (NM_007690.1,2900-2918).
ggttacaaagggatcagtt

SEQ ID NO: 450649 - DNA, 19 bp, Mus musculus
  siRNA target sequence for Chd1 (NM_007690.1,2931-2949).
cttgaaagggccaaaaaga

SEQ ID NO: 450650 - DNA, 19 bp, Mus musculus
  siRNA target sequence for Chd1 (NM_007690.1,2955-2973).
gttttggatcatcttgtta

SEQ ID NO: 450651 - DNA, 19 bp, Mus musculus
  siRNA target sequence for Chd1 (NM_007690.1,2961-2979).
gatcatcttgttattcaaa

SEQ ID NO: 450652 - DNA, 19 bp, Mus musculus
  siRNA target sequence for Chd1 (NM_007690.1,2964-2982).
catcttgttattcaaagaa

SEQ ID NO: 450653 - DNA, 19 bp, Mus musculus
  siRNA target sequence for Chd1 (NM_007690.1,3015-3033).
ggctcggctccgtcaagtt

SEQ ID NO: 450654 - DNA, 19 bp, Mus musculus
  siRNA target sequence for Chd1 (NM_007690.1,3031-3049).
gttccacccccttcaataa

SEQ ID NO: 450655 - DNA, 19 bp, Mus musculus
  siRNA target sequence for Chd1 (NM_007690.1,3266-3284).
ggaacctgaaagaaattca

SEQ ID NO: 450656 - DNA, 19 bp, Mus musculus
  siRNA target sequence for Chd1 (NM_007690.1,3287-3305).
gaactgggaggagatcatt

SEQ ID NO: 450657 - DNA, 19 bp, Mus musculus
  siRNA target sequence for Chd1 (NM_007690.1,3314-3332).
gcaaagacggcgactagaa

SEQ ID NO: 450658 - DNA, 19 bp, Mus musculus
  siRNA target sequence for Chd1 (NM_007690.1,3389-3407).
ctgtgcaaagcagataagt

SEQ ID NO: 450659 - DNA, 19 bp, Mus musculus
  siRNA target sequence for Chd1 (NM_007690.1,3391-3409).
gtgcaaagcagataagttt

SEQ ID NO: 450660 - DNA, 19 bp, Mus musculus
  siRNA target sequence for Chd1 (NM_007690.1,3399-3417).
cagataagtttcaatggaa

SEQ ID NO: 450661 - DNA, 19 bp, Mus musculus
  siRNA target sequence for Chd1 (NM_007690.1,3420-3438).
gaagggaggcggagtagaa

SEQ ID NO: 450662 - DNA, 19 bp, Mus musculus
  siRNA target sequence for Chd1 (NM_007690.1,3443-3461).
gagatattctggatctgat

SEQ ID NO: 450663 - DNA, 19 bp, Mus musculus
  siRNA target sequence for Chd1 (NM_007690.1,3550-3568).
cggagattcggcggtttat

SEQ ID NO: 450664 - DNA, 19 bp, Mus musculus
  siRNA target sequence for Chd1 (NM_007690.1,3552-3570).
gagattcggcggtttatca

SEQ ID NO: 450665 - DNA, 19 bp, Mus musculus
  siRNA target sequence for Chd1 (NM_007690.1,3562-3580).
ggtttatcaagagctataa

SEQ ID NO: 450666 - DNA, 19 bp, Mus musculus
  siRNA target sequence for Chd1 (NM_007690.1,3572-3590).
gagctataagaaatttggt

SEQ ID NO: 450667 - DNA, 19 bp, Mus musculus
  siRNA target sequence for Chd1 (NM_007690.1,3599-3617).
ggagaggttagatgcaatt

SEQ ID NO: 450668 - DNA, 19 bp, Mus musculus
  siRNA target sequence for Chd1 (NM_007690.1,3619-3637).
ctcgagatgctgaattggt

SEQ ID NO: 450669 - DNA, 19 bp, Mus musculus
  siRNA target sequence for Chd1 (NM_007690.1,3624-3642).
gatgctgaattggttgata

SEQ ID NO: 450670 - DNA, 19 bp, Mus musculus
  siRNA target sequence for Chd1 (NM_007690.1,3635-3653).
ggttgataagtcagaaaca

SEQ ID NO: 450671 - DNA, 19 bp, Mus musculus
  siRNA target sequence for Chd1 (NM_007690.1,3738-3756).
ggcagacttggaaaagtga

SEQ ID NO: 450672 - DNA, 19 bp, Mus musculus
  siRNA target sequence for Chd1 (NM_007690.1,3880-3898).
caatcccctgccatacaaa

SEQ ID NO: 450673 - DNA, 19 bp, Mus musculus
  siRNA target sequence for Chd1 (NM_007690.1,3895-3913).
caaaggctgcgcactttga

SEQ ID NO: 450674 - DNA, 19 bp, Mus musculus
  siRNA target sequence for Chd1 (NM_007690.1,3899-3917).
ggctgcgcactttgatata

SEQ ID NO: 450675 - DNA, 19 bp, Mus musculus
  siRNA target sequence for Chd1 (NM_007690.1,4010-4028).
cagtttaacacacaagatt

SEQ ID NO: 450676 - DNA, 19 bp, Mus musculus
  siRNA target sequence for Chd1 (NM_007690.1,4081-4099).
cagactacctcatcaaact

SEQ ID NO: 450677 - DNA, 19 bp, Mus musculus
  siRNA target sequence for Chd1 (NM_007690.1,4085-4103).
ctacctcatcaaactactt

SEQ ID NO: 450678 - DNA, 19 bp, Mus musculus
  siRNA target sequence for Chd1 (NM_007690.1,4141-4159).
gtggtgcgggaggttcaaa

SEQ ID NO: 450679 - DNA, 19 bp, Mus musculus
  siRNA target sequence for Chd1 (NM_007690.1,4143-4161).
ggtgcgggaggttcaaaga

SEQ ID NO: 450680 - DNA, 19 bp, Mus musculus
  siRNA target sequence for Chd1 (NM_007690.1,4163-4181).
gagaaaaacgagagctaaa

SEQ ID NO: 450681 - DNA, 19 bp, Mus musculus
  siRNA target sequence for Chd1 (NM_007690.1,4171-4189).
cgagagctaaaaagagtaa

SEQ ID NO: 450682 - DNA, 19 bp, Mus musculus
  siRNA target sequence for Chd1 (NM_007690.1,4192-4210).
caatgaagtccatcaaagt

SEQ ID NO: 450683 - DNA, 19 bp, Mus musculus
  siRNA target sequence for Chd1 (NM_007690.1,4269-4287).
gacgataaactgaatgact

SEQ ID NO: 450684 - DNA, 19 bp, Mus musculus
  siRNA target sequence for Chd1 (NM_007690.1,4286-4304).
ctccaagcctgaaagtaaa

SEQ ID NO: 450685 - DNA, 19 bp, Mus musculus
  siRNA target sequence for Chd1 (NM_007690.1,4330-4348).
ccgatgctcccgttcacat

SEQ ID NO: 450686 - DNA, 19 bp, Mus musculus
  siRNA target sequence for Chd1 (NM_007690.1,4395-4413).
ctggatcagaagacattca

SEQ ID NO: 450687 - DNA, 19 bp, Mus musculus
  siRNA target sequence for Chd1 (NM_007690.1,4397-4415).
ggatcagaagacattcagt

SEQ ID NO: 450688 - DNA, 19 bp, Mus musculus
  siRNA target sequence for Chd1 (NM_007690.1,4438-4456).
cggtgaaagcagctttgaa

SEQ ID NO: 450689 - DNA, 19 bp, Mus musculus
  siRNA target sequence for Chd1 (NM_007690.1,4475-4493).
gaaaggcctttcagaaaga

SEQ ID NO: 450690 - DNA, 19 bp, Mus musculus
  siRNA target sequence for Chd1 (NM_007690.1,4506-4524).
cacactagacagtgcttaa

SEQ ID NO: 450691 - DNA, 19 bp, Mus musculus
  siRNA target sequence for Chd1 (NM_007690.1,4513-4531).
gacagtgcttaatcaagat

SEQ ID NO: 450692 - DNA, 19 bp, Mus musculus
  siRNA target sequence for Chd1 (NM_007690.1,4529-4547).
gatcggagaccatatcact

SEQ ID NO: 450693 - DNA, 19 bp, Mus musculus
  siRNA target sequence for Chd1 (NM_007690.1,4533-4551).
ggagaccatatcactgaat

SEQ ID NO: 450694 - DNA, 19 bp, Mus musculus
  siRNA target sequence for Chd1 (NM_007690.1,4638-4656).
gcaaggaaattacataaat

SEQ ID NO: 450695 - DNA, 19 bp, Mus musculus
  siRNA target sequence for Chd1 (NM_007690.1,4664-4682).
gcatgctattaaaaaacga

SEQ ID NO: 450696 - DNA, 19 bp, Mus musculus
  siRNA target sequence for Chd1 (NM_007690.1,4722-4740).
gctaccactcatgtgatta

SEQ ID NO: 450697 - DNA, 19 bp, Mus musculus
  siRNA target sequence for Chd1 (NM_007690.1,4746-4764).
ccagatatggaaaggttaa

SEQ ID NO: 450698 - DNA, 19 bp, Mus musculus
  siRNA target sequence for Chd1 (NM_007690.1,4747-4765).
cagatatggaaaggttaaa

SEQ ID NO: 450699 - DNA, 19 bp, Mus musculus
  siRNA target sequence for Chd1 (NM_007690.1,4851-4869).
cgccatcagggagattctt

SEQ ID NO: 450700 - DNA, 19 bp, Mus musculus
  siRNA target sequence for Chd1 (NM_007690.1,4853-4871).
ccatcagggagattcttat

SEQ ID NO: 450701 - DNA, 19 bp, Mus musculus
  siRNA target sequence for Chd1 (NM_007690.1,4854-4872).
catcagggagattcttata

SEQ ID NO: 450702 - DNA, 19 bp, Mus musculus
  siRNA target sequence for Chd1 (NM_007690.1,4860-4878).
ggagattcttataaaaaga

SEQ ID NO: 450703 - DNA, 19 bp, Mus musculus
  siRNA target sequence for Chd1 (NM_007690.1,4898-4916).
ctactcctcatttagcaat

SEQ ID NO: 450704 - DNA, 19 bp, Mus musculus
  siRNA target sequence for Chd1 (NM_007690.1,4964-4982).
ctatagtgaccgagagaaa

SEQ ID NO: 450705 - DNA, 19 bp, Mus musculus
  siRNA target sequence for Chd1 (NM_007690.1,5071-5089).
ctcactcggaccatcgaat

SEQ ID NO: 450706 - DNA, 19 bp, Mus musculus
  siRNA target sequence for Chd1 (NM_007690.1,5113-5131).
ccgagcacacacatcataa

SEQ ID NO: 450707 - DNA, 19 bp, Mus musculus
  siRNA target sequence for Chd1 (NM_007690.1,5197-5215).
ctaggtcacctttagatca

SEQ ID NO: 450708 - DNA, 19 bp, Mus musculus
  siRNA target sequence for Chd1 (NM_007690.1,5231-5249).
ctccaggtccccatttgaa

SEQ ID NO: 450709 - DNA, 19 bp, Mus musculus
  siRNA target sequence for Chd1 (NM_007690.1,5233-5251).
ccaggtccccatttgaaca

SEQ ID NO: 450710 - DNA, 19 bp, Mus musculus
  siRNA target sequence for Chd1 (NM_007690.1,5234-5252).
caggtccccatttgaacat

SEQ ID NO: 450711 - DNA, 19 bp, Mus musculus
  siRNA target sequence for D15Ertd417e (NM_144811.2,180-198).
cgtgcggaagggcaaagtt

SEQ ID NO: 450712 - DNA, 19 bp, Mus musculus
  siRNA target sequence for D15Ertd417e (NM_144811.2,184-202).
cggaagggcaaagttgaat

SEQ ID NO: 450713 - DNA, 19 bp, Mus musculus
  siRNA target sequence for D15Ertd417e (NM_144811.2,480-498).
cacgctcccctcaagtgaa

SEQ ID NO: 450714 - DNA, 19 bp, Mus musculus
  siRNA target sequence for D15Ertd417e (NM_144811.2,484-502).
ctcccctcaagtgaagtta

SEQ ID NO: 450715 - DNA, 19 bp, Mus musculus
  siRNA target sequence for Hmgn3 (NM_026122.1,121-139).
gatggaaccaagctaacta

SEQ ID NO: 450716 - DNA, 19 bp, Mus musculus
  siRNA target sequence for Hmgn3 (NM_026122.1,177-195).
gaaacctgttccaccaaaa

SEQ ID NO: 450717 - DNA, 19 bp, Mus musculus
  siRNA target sequence for Hmgn3 (NM_026122.1,188-206).
caccaaaaccggagtctaa

SEQ ID NO: 450718 - DNA, 19 bp, Mus musculus
  siRNA target sequence for Hmgn3 (NM_026122.1,343-361).
gcacagagaactgaatcta

SEQ ID NO: 450719 - DNA, 19 bp, Mus musculus
  siRNA target sequence for Hmgn3 (NM_026122.1,344-362).
cacagagaactgaatctat

SEQ ID NO: 450720 - DNA, 19 bp, Mus musculus
  siRNA target sequence for Hmgn3 (NM_026122.1,350-368).
gaactgaatctatagaaaa

SEQ ID NO: 450721 - DNA, 19 bp, Mus musculus
  siRNA target sequence for Hmgn3 (NM_026122.1,353-371).
ctgaatctatagaaaagga

SEQ ID NO: 450722 - DNA, 19 bp, Mus musculus
  siRNA target sequence for Htatip (NM_178637.1,113-131).
gtggccgaaagcttttcta

SEQ ID NO: 450723 - DNA, 19 bp, Mus musculus
  siRNA target sequence for Htatip (NM_178637.1,116-134).
gccgaaagcttttctatgt

SEQ ID NO: 450724 - DNA, 19 bp, Mus musculus
  siRNA target sequence for Htatip (NM_178637.1,178-196).
cacgagcggctggacttaa

SEQ ID NO: 450725 - DNA, 19 bp, Mus musculus
  siRNA target sequence for Htatip (NM_178637.1,181-199).
gagcggctggacttaaaga

SEQ ID NO: 450726 - DNA, 19 bp, Mus musculus
  siRNA target sequence for Htatip (NM_178637.1,184-202).
cggctggacttaaagaaga

SEQ ID NO: 450727 - DNA, 19 bp, Mus musculus
  siRNA target sequence for Htatip (NM_178637.1,185-203).
ggctggacttaaagaagat

SEQ ID NO: 450728 - DNA, 19 bp, Mus musculus
  siRNA target sequence for Htatip (NM_178637.1,426-444).
caaccaccgctcaacgaaa

SEQ ID NO: 450729 - DNA, 19 bp, Mus musculus
  siRNA target sequence for Htatip (NM_178637.1,501-519).
ctcggttttccctcagaat

SEQ ID NO: 450730 - DNA, 19 bp, Mus musculus
  siRNA target sequence for Htatip (NM_178637.1,553-571).
ggacggaagcggaaatcta

SEQ ID NO: 450731 - DNA, 19 bp, Mus musculus
  siRNA target sequence for Htatip (NM_178637.1,554-572).
gacggaagcggaaatctaa

SEQ ID NO: 450732 - DNA, 19 bp, Mus musculus
  siRNA target sequence for Htatip (NM_178637.1,600-618).
ggacagctcagatggaata

SEQ ID NO: 450733 - DNA, 19 bp, Mus musculus
  siRNA target sequence for Htatip (NM_178637.1,621-639).
gtcagcaccacgaatgact

SEQ ID NO: 450734 - DNA, 19 bp, Mus musculus
  siRNA target sequence for Htatip (NM_178637.1,659-677).
ggagccacgacgacattgt

SEQ ID NO: 450735 - DNA, 19 bp, Mus musculus
  siRNA target sequence for Htatip (NM_178637.1,676-694).
gtcacccggatgaagaaca

SEQ ID NO: 450736 - DNA, 19 bp, Mus musculus
  siRNA target sequence for Htatip (NM_178637.1,678-696).
cacccggatgaagaacatt

SEQ ID NO: 450737 - DNA, 19 bp, Mus musculus
  siRNA target sequence for Htatip (NM_178637.1,724-742).
ctcaagccgtggtacttct

SEQ ID NO: 450738 - DNA, 19 bp, Mus musculus
  siRNA target sequence for Htatip (NM_178637.1,777-795).
cctctacctgtgcgaattt

SEQ ID NO: 450739 - DNA, 19 bp, Mus musculus
  siRNA target sequence for Htatip (NM_178637.1,778-796).
ctctacctgtgcgaatttt

SEQ ID NO: 450740 - DNA, 19 bp, Mus musculus
  siRNA target sequence for Htatip (NM_178637.1,788-806).
gcgaattttgcctcaaata

SEQ ID NO: 450741 - DNA, 19 bp, Mus musculus
  siRNA target sequence for Htatip (NM_178637.1,829-847).
caacgccacttgaccaaat

SEQ ID NO: 450742 - DNA, 19 bp, Mus musculus
  siRNA target sequence for Htatip (NM_178637.1,833-851).
gccacttgaccaaatgtga

SEQ ID NO: 450743 - DNA, 19 bp, Mus musculus
  siRNA target sequence for Htatip (NM_178637.1,837-855).
cttgaccaaatgtgatctt

SEQ ID NO: 450744 - DNA, 19 bp, Mus musculus
  siRNA target sequence for Htatip (NM_178637.1,859-877).
caccctccaggcaatgaaa

SEQ ID NO: 450745 - DNA, 19 bp, Mus musculus
  siRNA target sequence for Htatip (NM_178637.1,890-908).
gcaccatctccttttttga

SEQ ID NO: 450746 - DNA, 19 bp, Mus musculus
  siRNA target sequence for Htatip (NM_178637.1,897-915).
ctccttttttgagattgat

SEQ ID NO: 450747 - DNA, 19 bp, Mus musculus
  siRNA target sequence for Htatip (NM_178637.1,916-934).
ggacggaaaaacaagagtt

SEQ ID NO: 450748 - DNA, 19 bp, Mus musculus
  siRNA target sequence for Htatip (NM_178637.1,917-935).
gacggaaaaacaagagtta

SEQ ID NO: 450749 - DNA, 19 bp, Mus musculus
  siRNA target sequence for Htatip (NM_178637.1,919-937).
cggaaaaacaagagttact

SEQ ID NO: 450750 - DNA, 19 bp, Mus musculus
  siRNA target sequence for Htatip (NM_178637.1,998-1016).
ctgaccccttcctcttcta

SEQ ID NO: 450751 - DNA, 19 bp, Mus musculus
  siRNA target sequence for Htatip (NM_178637.1,1003-1021).
cccttcctcttctacgtaa

SEQ ID NO: 450752 - DNA, 19 bp, Mus musculus
  siRNA target sequence for Htatip (NM_178637.1,1004-1022).
ccttcctcttctacgtaat

SEQ ID NO: 450753 - DNA, 19 bp, Mus musculus
  siRNA target sequence for Htatip (NM_178637.1,1018-1036).
gtaatgacggagtatgact

SEQ ID NO: 450754 - DNA, 19 bp, Mus musculus
  siRNA target sequence for Htatip (NM_178637.1,1027-1045).
gagtatgactgcaaaggtt

SEQ ID NO: 450755 - DNA, 19 bp, Mus musculus
  siRNA target sequence for Htatip (NM_178637.1,1048-1066).
cacatcgtgggctacttct

SEQ ID NO: 450756 - DNA, 19 bp, Mus musculus
  siRNA target sequence for Htatip (NM_178637.1,1082-1100).
ccacagaagattacaatgt

SEQ ID NO: 450757 - DNA, 19 bp, Mus musculus
  siRNA target sequence for Htatip (NM_178637.1,1139-1157).
gctatggcaagctgcttat

SEQ ID NO: 450758 - DNA, 19 bp, Mus musculus
  siRNA target sequence for Htatip (NM_178637.1,1167-1185).
ctatgaactctcgaaagta

SEQ ID NO: 450759 - DNA, 19 bp, Mus musculus
  siRNA target sequence for Htatip (NM_178637.1,1310-1328).
cacagatcaccatcaatga

SEQ ID NO: 450760 - DNA, 19 bp, Mus musculus
  siRNA target sequence for Htatip (NM_178637.1,1334-1352).
gtgaaatcactagtatcaa

SEQ ID NO: 450761 - DNA, 19 bp, Mus musculus
  siRNA target sequence for Htatip (NM_178637.1,1370-1388).
ccacactgcagtatctcaa

SEQ ID NO: 450762 - DNA, 19 bp, Mus musculus
  siRNA target sequence for Htatip (NM_178637.1,1404-1422).
caagggccagtatatccta

SEQ ID NO: 450763 - DNA, 19 bp, Mus musculus
  siRNA target sequence for Htatip (NM_178637.1,1471-1489).
cggctccttcggattgact

SEQ ID NO: 450764 - DNA, 19 bp, Mus musculus
  siRNA target sequence for Myst1 (NM_026370.1,423-441).
caagatcactcgaaaccaa

SEQ ID NO: 450765 - DNA, 19 bp, Mus musculus
  siRNA target sequence for Myst1 (NM_026370.1,526-544).
gaggcgatcaccaaagtga

SEQ ID NO: 450766 - DNA, 19 bp, Mus musculus
  siRNA target sequence for Myst1 (NM_026370.1,530-548).
cgatcaccaaagtgaagta

SEQ ID NO: 450767 - DNA, 19 bp, Mus musculus
  siRNA target sequence for Myst1 (NM_026370.1,536-554).
ccaaagtgaagtatgtaga

SEQ ID NO: 450768 - DNA, 19 bp, Mus musculus
  siRNA target sequence for Myst1 (NM_026370.1,561-579).
ccacattgggaactatgaa

SEQ ID NO: 450769 - DNA, 19 bp, Mus musculus
  siRNA target sequence for Myst1 (NM_026370.1,562-580).
cacattgggaactatgaaa

SEQ ID NO: 450770 - DNA, 19 bp, Mus musculus
  siRNA target sequence for Myst1 (NM_026370.1,577-595).
gaaatcgatgcctggtatt

SEQ ID NO: 450771 - DNA, 19 bp, Mus musculus
  siRNA target sequence for Myst1 (NM_026370.1,724-742).
gggaaggagatctatcgaa

SEQ ID NO: 450772 - DNA, 19 bp, Mus musculus
  siRNA target sequence for Myst1 (NM_026370.1,806-824).
gtctactggccaagctttt

SEQ ID NO: 450773 - DNA, 19 bp, Mus musculus
  siRNA target sequence for Myst1 (NM_026370.1,990-1008).
gcgtggctatgggaagttt

SEQ ID NO: 450774 - DNA, 19 bp, Mus musculus
  siRNA target sequence for Myst1 (NM_026370.1,1148-1166).
gcacattgtctatcaaaga

SEQ ID NO: 450775 - DNA, 19 bp, Mus musculus
  siRNA target sequence for Myst1 (NM_026370.1,1149-1167).
cacattgtctatcaaagat

SEQ ID NO: 450776 - DNA, 19 bp, Mus musculus
  siRNA target sequence for Myst1 (NM_026370.1,1151-1169).
cattgtctatcaaagatct

SEQ ID NO: 450777 - DNA, 19 bp, Mus musculus
  siRNA target sequence for Myst1 (NM_026370.1,1184-1202).
gcatcacccagaatgacat

SEQ ID NO: 450778 - DNA, 19 bp, Mus musculus
  siRNA target sequence for Myst1 (NM_026370.1,1211-1229).
ccctgcagtccctcaacat

SEQ ID NO: 450779 - DNA, 19 bp, Mus musculus
  siRNA target sequence for Myst1 (NM_026370.1,1245-1263).
gggccagcatgttatctgt

SEQ ID NO: 450780 - DNA, 19 bp, Mus musculus
  siRNA target sequence for Myst1 (NM_026370.1,1279-1297).
gtagaggaacacctcaaaa

SEQ ID NO: 450781 - DNA, 19 bp, Mus musculus
  siRNA target sequence for Myst1 (NM_026370.1,1352-1370).
cacccccgaagcacaaaca

SEQ ID NO: 450782 - DNA, 19 bp, Mus musculus
  siRNA target sequence for Ncoa1 (NM_010881.1,659-677).
gcaaacccagactctcata

SEQ ID NO: 450783 - DNA, 19 bp, Mus musculus
  siRNA target sequence for Ncoa1 (NM_010881.1,698-716).
gacacgctggcatcaagta

SEQ ID NO: 450784 - DNA, 19 bp, Mus musculus
  siRNA target sequence for Ncoa1 (NM_010881.1,700-718).
cacgctggcatcaagtact

SEQ ID NO: 450785 - DNA, 19 bp, Mus musculus
  siRNA target sequence for Ncoa1 (NM_010881.1,727-745).
gcgcagggagcaagaaaat

SEQ ID NO: 450786 - DNA, 19 bp, Mus musculus
  siRNA target sequence for Ncoa1 (NM_010881.1,728-746).
cgcagggagcaagaaaata

SEQ ID NO: 450787 - DNA, 19 bp, Mus musculus
  siRNA target sequence for Ncoa1 (NM_010881.1,799-817).
cagcttgagtgtaaaacca

SEQ ID NO: 450788 - DNA, 19 bp, Mus musculus
  siRNA target sequence for Ncoa1 (NM_010881.1,815-833).
ccagataaatgcaagattt

SEQ ID NO: 450789 - DNA, 19 bp, Mus musculus
  siRNA target sequence for Ncoa1 (NM_010881.1,848-866).
gatcagatacagctaatga

SEQ ID NO: 450790 - DNA, 19 bp, Mus musculus
  siRNA target sequence for Ncoa1 (NM_010881.1,883-901).
gaaatccacgactgatgat

SEQ ID NO: 450791 - DNA, 19 bp, Mus musculus
  siRNA target sequence for Ncoa1 (NM_010881.1,1020-1038).
gaattgtatttgtatcaga

SEQ ID NO: 450792 - DNA, 19 bp, Mus musculus
  siRNA target sequence for Ncoa1 (NM_010881.1,1048-1066).
cagctacttgggttacaat

SEQ ID NO: 450793 - DNA, 19 bp, Mus musculus
  siRNA target sequence for Ncoa1 (NM_010881.1,1059-1077).
gttacaatcaggaagaatt

SEQ ID NO: 450794 - DNA, 19 bp, Mus musculus
  siRNA target sequence for Ncoa1 (NM_010881.1,1067-1085).
caggaagaattaatgaata

SEQ ID NO: 450795 - DNA, 19 bp, Mus musculus
  siRNA target sequence for Ncoa1 (NM_010881.1,1070-1088).
gaagaattaatgaatacca

SEQ ID NO: 450796 - DNA, 19 bp, Mus musculus
  siRNA target sequence for Ncoa1 (NM_010881.1,1115-1133).
gatcatgcagaatttgtca

SEQ ID NO: 450797 - DNA, 19 bp, Mus musculus
  siRNA target sequence for Ncoa1 (NM_010881.1,1132-1150).
caagaatctgctaccaaaa

SEQ ID NO: 450798 - DNA, 19 bp, Mus musculus
  siRNA target sequence for Ncoa1 (NM_010881.1,1142-1160).
ctaccaaaatcactagtaa

SEQ ID NO: 450799 - DNA, 19 bp, Mus musculus
  siRNA target sequence for Ncoa1 (NM_010881.1,1181-1199).
gaggcaacacgccgaaata

SEQ ID NO: 450800 - DNA, 19 bp, Mus musculus
  siRNA target sequence for Ncoa1 (NM_010881.1,1190-1208).
cgccgaaatagccatacat

SEQ ID NO: 450801 - DNA, 19 bp, Mus musculus
  siRNA target sequence for Ncoa1 (NM_010881.1,1269-1287).
gccagcgctatgaagtaat

SEQ ID NO: 450802 - DNA, 19 bp, Mus musculus
  siRNA target sequence for Ncoa1 (NM_010881.1,1388-1406).
gccattacaggtgtagaat

SEQ ID NO: 450803 - DNA, 19 bp, Mus musculus
  siRNA target sequence for Ncoa1 (NM_010881.1,1395-1413).
caggtgtagaatcctttat

SEQ ID NO: 450804 - DNA, 19 bp, Mus musculus
  siRNA target sequence for Ncoa1 (NM_010881.1,1397-1415).
ggtgtagaatcctttatga

SEQ ID NO: 450805 - DNA, 19 bp, Mus musculus
  siRNA target sequence for Ncoa1 (NM_010881.1,1488-1506).
gggaagacctagtaaggaa

SEQ ID NO: 450806 - DNA, 19 bp, Mus musculus
  siRNA target sequence for Ncoa1 (NM_010881.1,1592-1610).
gcctccagcccatcctata

SEQ ID NO: 450807 - DNA, 19 bp, Mus musculus
  siRNA target sequence for Ncoa1 (NM_010881.1,1594-1612).
ctccagcccatcctataga

SEQ ID NO: 450808 - DNA, 19 bp, Mus musculus
  siRNA target sequence for Ncoa1 (NM_010881.1,1600-1618).
cccatcctatagattcata

SEQ ID NO: 450809 - DNA, 19 bp, Mus musculus
  siRNA target sequence for Ncoa1 (NM_010881.1,1601-1619).
ccatcctatagattcatat

SEQ ID NO: 450810 - DNA, 19 bp, Mus musculus
  siRNA target sequence for Ncoa1 (NM_010881.1,1602-1620).
catcctatagattcatatt

SEQ ID NO: 450811 - DNA, 19 bp, Mus musculus
  siRNA target sequence for Ncoa1 (NM_010881.1,1641-1659).
gcgcccacaccaagtgtaa

SEQ ID NO: 450812 - DNA, 19 bp, Mus musculus
  siRNA target sequence for Ncoa1 (NM_010881.1,1642-1660).
cgcccacaccaagtgtaaa

SEQ ID NO: 450813 - DNA, 19 bp, Mus musculus
  siRNA target sequence for Ncoa1 (NM_010881.1,1646-1664).
cacaccaagtgtaaacttt

SEQ ID NO: 450814 - DNA, 19 bp, Mus musculus
  siRNA target sequence for Ncoa1 (NM_010881.1,1650-1668).
ccaagtgtaaactttgcta

SEQ ID NO: 450815 - DNA, 19 bp, Mus musculus
  siRNA target sequence for Ncoa1 (NM_010881.1,1753-1771).
cagtaattctggaatgtca

SEQ ID NO: 450816 - DNA, 19 bp, Mus musculus
  siRNA target sequence for Ncoa1 (NM_010881.1,1755-1773).
gtaattctggaatgtcaat

SEQ ID NO: 450817 - DNA, 19 bp, Mus musculus
  siRNA target sequence for Ncoa1 (NM_010881.1,1768-1786).
gtcaattccccgaataaat

SEQ ID NO: 450818 - DNA, 19 bp, Mus musculus
  siRNA target sequence for Ncoa1 (NM_010881.1,1908-1926).
gcagcagcagtcatactaa

SEQ ID NO: 450819 - DNA, 19 bp, Mus musculus
  siRNA target sequence for Ncoa1 (NM_010881.1,1933-1951).
caacaaccaagggaacttt

SEQ ID NO: 450820 - DNA, 19 bp, Mus musculus
  siRNA target sequence for Ncoa1 (NM_010881.1,1980-1998).
ccaatgttgccttaaacca

SEQ ID NO: 450821 - DNA, 19 bp, Mus musculus
  siRNA target sequence for Ncoa1 (NM_010881.1,2019-2037).
gcagcaatccctctttaaa

SEQ ID NO: 450822 - DNA, 19 bp, Mus musculus
  siRNA target sequence for Ncoa1 (NM_010881.1,2022-2040).
gcaatccctctttaaacct

SEQ ID NO: 450823 - DNA, 19 bp, Mus musculus
  siRNA target sequence for Ncoa1 (NM_010881.1,2091-2109).
ctccgaggagacaagctaa

SEQ ID NO: 450824 - DNA, 19 bp, Mus musculus
  siRNA target sequence for Ncoa1 (NM_010881.1,2093-2111).
ccgaggagacaagctaatt

SEQ ID NO: 450825 - DNA, 19 bp, Mus musculus
  siRNA target sequence for Ncoa1 (NM_010881.1,2128-2146).
ggccaggatgtcaaacaat

SEQ ID NO: 450826 - DNA, 19 bp, Mus musculus
  siRNA target sequence for Ncoa1 (NM_010881.1,2154-2172).
ctccaaatattccaacatt

SEQ ID NO: 450827 - DNA, 19 bp, Mus musculus
  siRNA target sequence for Ncoa1 (NM_010881.1,2156-2174).
ccaaatattccaacattaa

SEQ ID NO: 450828 - DNA, 19 bp, Mus musculus
  siRNA target sequence for Ncoa1 (NM_010881.1,2176-2194).
ctccccagttggcattact

SEQ ID NO: 450829 - DNA, 19 bp, Mus musculus
  siRNA target sequence for Ncoa1 (NM_010881.1,2179-2197).
cccagttggcattactagt

SEQ ID NO: 450830 - DNA, 19 bp, Mus musculus
  siRNA target sequence for Ncoa1 (NM_010881.1,2193-2211).
ctagtggtgcctgtaataa

SEQ ID NO: 450831 - DNA, 19 bp, Mus musculus
  siRNA target sequence for Ncoa1 (NM_010881.1,2196-2214).
gtggtgcctgtaataataa

SEQ ID NO: 450832 - DNA, 19 bp, Mus musculus
  siRNA target sequence for Ncoa1 (NM_010881.1,2387-2405).
gagattgcatccattttaa

SEQ ID NO: 450833 - DNA, 19 bp, Mus musculus
  siRNA target sequence for Ncoa1 (NM_010881.1,2431-2449).
cgacaacagtgctaacgaa

SEQ ID NO: 450834 - DNA, 19 bp, Mus musculus
  siRNA target sequence for Ncoa1 (NM_010881.1,2496-2514).
cagaaggagacagtaaata

SEQ ID NO: 450835 - DNA, 19 bp, Mus musculus
  siRNA target sequence for Ncoa1 (NM_010881.1,2498-2516).
gaaggagacagtaaatact

SEQ ID NO: 450836 - DNA, 19 bp, Mus musculus
  siRNA target sequence for Ncoa1 (NM_010881.1,2523-2541).
ctagtcacaagctagtaca

SEQ ID NO: 450837 - DNA, 19 bp, Mus musculus
  siRNA target sequence for Ncoa1 (NM_010881.1,2533-2551).
gctagtacagctattgact

SEQ ID NO: 450838 - DNA, 19 bp, Mus musculus
  siRNA target sequence for Ncoa1 (NM_010881.1,2534-2552).
ctagtacagctattgacta

SEQ ID NO: 450839 - DNA, 19 bp, Mus musculus
  siRNA target sequence for Ncoa1 (NM_010881.1,2647-2665).
cccctcaggaggtacttgt

SEQ ID NO: 450840 - DNA, 19 bp, Mus musculus
  siRNA target sequence for Ncoa1 (NM_010881.1,2819-2837).
caggggagtgccagcataa

SEQ ID NO: 450841 - DNA, 19 bp, Mus musculus
  siRNA target sequence for Ncoa1 (NM_010881.1,2884-2902).
gctcctacgctacctttta

SEQ ID NO: 450842 - DNA, 19 bp, Mus musculus
  siRNA target sequence for Ncoa1 (NM_010881.1,2888-2906).
ctacgctaccttttagaca

SEQ ID NO: 450843 - DNA, 19 bp, Mus musculus
  siRNA target sequence for Ncoa1 (NM_010881.1,2893-2911).
ctaccttttagacaaagat

SEQ ID NO: 450844 - DNA, 19 bp, Mus musculus
  siRNA target sequence for Ncoa1 (NM_010881.1,2909-2927).
gatgagaaagatttaaggt

SEQ ID NO: 450845 - DNA, 19 bp, Mus musculus
  siRNA target sequence for Ncoa1 (NM_010881.1,2981-2999).
cagatggatccttgtaaca

SEQ ID NO: 450846 - DNA, 19 bp, Mus musculus
  siRNA target sequence for Ncoa1 (NM_010881.1,3077-3095).
gaccagtttgatcagttat

SEQ ID NO: 450847 - DNA, 19 bp, Mus musculus
  siRNA target sequence for Ncoa1 (NM_010881.1,3243-3261).
gattgcctgaactagaatt

SEQ ID NO: 450848 - DNA, 19 bp, Mus musculus
  siRNA target sequence for Ncoa1 (NM_010881.1,3247-3265).
gcctgaactagaattagaa

SEQ ID NO: 450849 - DNA, 19 bp, Mus musculus
  siRNA target sequence for Ncoa1 (NM_010881.1,3257-3275).
gaattagaagcgatcgata

SEQ ID NO: 450850 - DNA, 19 bp, Mus musculus
  siRNA target sequence for Ncoa1 (NM_010881.1,3305-3323).
cagattccatgggcaaata

SEQ ID NO: 450851 - DNA, 19 bp, Mus musculus
  siRNA target sequence for Ncoa1 (NM_010881.1,3312-3330).
catgggcaaataatacttt

SEQ ID NO: 450852 - DNA, 19 bp, Mus musculus
  siRNA target sequence for Ncoa1 (NM_010881.1,3353-3371).
ccagaagaccaatgtatta

SEQ ID NO: 450853 - DNA, 19 bp, Mus musculus
  siRNA target sequence for Ncoa1 (NM_010881.1,3356-3374).
gaagaccaatgtattagct

SEQ ID NO: 450854 - DNA, 19 bp, Mus musculus
  siRNA target sequence for Ncoa1 (NM_010881.1,3526-3544).
ccagggaggcggattagat

SEQ ID NO: 450855 - DNA, 19 bp, Mus musculus
  siRNA target sequence for Ncoa1 (NM_010881.1,3530-3548).
ggaggcggattagatgtat

SEQ ID NO: 450856 - DNA, 19 bp, Mus musculus
  siRNA target sequence for Ncoa1 (NM_010881.1,3531-3549).
gaggcggattagatgtatt

SEQ ID NO: 450857 - DNA, 19 bp, Mus musculus
  siRNA target sequence for Ncoa1 (NM_010881.1,3533-3551).
ggcggattagatgtattat

SEQ ID NO: 450858 - DNA, 19 bp, Mus musculus
  siRNA target sequence for Ncoa1 (NM_010881.1,3535-3553).
cggattagatgtattatct

SEQ ID NO: 450859 - DNA, 19 bp, Mus musculus
  siRNA target sequence for Ncoa1 (NM_010881.1,3599-3617).
gacagacccaccctctatt

SEQ ID NO: 450860 - DNA, 19 bp, Mus musculus
  siRNA target sequence for Ncoa1 (NM_010881.1,3613-3631).
ctattcccagccatactca

SEQ ID NO: 450861 - DNA, 19 bp, Mus musculus
  siRNA target sequence for Ncoa1 (NM_010881.1,3699-3717).
gggctatgccggttcaagt

SEQ ID NO: 450862 - DNA, 19 bp, Mus musculus
  siRNA target sequence for Ncoa1 (NM_010881.1,3700-3718).
ggctatgccggttcaagta

SEQ ID NO: 450863 - DNA, 19 bp, Mus musculus
  siRNA target sequence for Ncoa1 (NM_010881.1,3701-3719).
gctatgccggttcaagtaa

SEQ ID NO: 450864 - DNA, 19 bp, Mus musculus
  siRNA target sequence for Ncoa1 (NM_010881.1,3722-3740).
cctcctcgaggaacctttt

SEQ ID NO: 450865 - DNA, 19 bp, Mus musculus
  siRNA target sequence for Ncoa1 (NM_010881.1,3877-3895).
ccagtttgcagcaaatgct

SEQ ID NO: 450866 - DNA, 19 bp, Mus musculus
  siRNA target sequence for Ncoa1 (NM_010881.1,3951-3969).
ccttgaatgctcagatgtt

SEQ ID NO: 450867 - DNA, 19 bp, Mus musculus
  siRNA target sequence for Ncoa1 (NM_010881.1,3977-3995).
cgccagcgggagttgtaca

SEQ ID NO: 450868 - DNA, 19 bp, Mus musculus
  siRNA target sequence for Ncoa1 (NM_010881.1,4086-4104).
ctggactcccagttcaaat

SEQ ID NO: 450869 - DNA, 19 bp, Mus musculus
  siRNA target sequence for Ncoa1 (NM_010881.1,4144-4162).
cccctacccaccaaactat

SEQ ID NO: 450870 - DNA, 19 bp, Mus musculus
  siRNA target sequence for Ncoa1 (NM_010881.1,4152-4170).
caccaaactatggtacaaa

SEQ ID NO: 450871 - DNA, 19 bp, Mus musculus
  siRNA target sequence for Ncoa1 (NM_010881.1,4324-4342).
gaatgtcttccaatatcca

SEQ ID NO: 450872 - DNA, 19 bp, Mus musculus
  siRNA target sequence for Ncoa1 (NM_010881.1,4494-4512).
cctggcagcaaggaacaat

SEQ ID NO: 450873 - DNA, 19 bp, Mus musculus
  siRNA target sequence for Ncoa1 (NM_010881.1,4563-4581).
cacagccaggagtgtacaa

SEQ ID NO: 450874 - DNA, 19 bp, Mus musculus
  siRNA target sequence for Ncoa1 (NM_010881.1,4608-4626).
caggtggaaacgcaaacat

SEQ ID NO: 450875 - DNA, 19 bp, Mus musculus
  siRNA target sequence for Ncoa1 (NM_010881.1,4759-4777).
gtccactgaccttctcaaa

SEQ ID NO: 450876 - DNA, 19 bp, Mus musculus
  siRNA target sequence for Ncoa6 (NM_019825.1,56-74).
ctttgaagacatctatact

SEQ ID NO: 450877 - DNA, 19 bp, Mus musculus
  siRNA target sequence for Ncoa6 (NM_019825.1,113-131).
gtttgactctggactagaa

SEQ ID NO: 450878 - DNA, 19 bp, Mus musculus
  siRNA target sequence for Ncoa6 (NM_019825.1,119-137).
ctctggactagaagatgat

SEQ ID NO: 450879 - DNA, 19 bp, Mus musculus
  siRNA target sequence for Ncoa6 (NM_019825.1,161-179).
ggaggattccacaattttt

SEQ ID NO: 450880 - DNA, 19 bp, Mus musculus
  siRNA target sequence for Ncoa6 (NM_019825.1,164-182).
ggattccacaatttttgta

SEQ ID NO: 450881 - DNA, 19 bp, Mus musculus
  siRNA target sequence for Ncoa6 (NM_019825.1,227-245).
ggatgcaatattaaagaat

SEQ ID NO: 450882 - DNA, 19 bp, Mus musculus
  siRNA target sequence for Ncoa6 (NM_019825.1,242-260).
gaatgtgcccaacttgtta

SEQ ID NO: 450883 - DNA, 19 bp, Mus musculus
  siRNA target sequence for Ncoa6 (NM_019825.1,246-264).
gtgcccaacttgttacaca

SEQ ID NO: 450884 - DNA, 19 bp, Mus musculus
  siRNA target sequence for Ncoa6 (NM_019825.1,274-292).
gcaagctaaaggtacagaa

SEQ ID NO: 450885 - DNA, 19 bp, Mus musculus
  siRNA target sequence for Ncoa6 (NM_019825.1,310-328).
gcgtgcgagtcacattcaa

SEQ ID NO: 450886 - DNA, 19 bp, Mus musculus
  siRNA target sequence for Ncoa6 (NM_019825.1,312-330).
gtgcgagtcacattcaaca

SEQ ID NO: 450887 - DNA, 19 bp, Mus musculus
  siRNA target sequence for Ncoa6 (NM_019825.1,400-418).
ggattctctccgttcagat

SEQ ID NO: 450888 - DNA, 19 bp, Mus musculus
  siRNA target sequence for Ncoa6 (NM_019825.1,535-553).
caagtggtccaggtctaat

SEQ ID NO: 450889 - DNA, 19 bp, Mus musculus
  siRNA target sequence for Ncoa6 (NM_019825.1,540-558).
ggtccaggtctaataagga

SEQ ID NO: 450890 - DNA, 19 bp, Mus musculus
  siRNA target sequence for Ncoa6 (NM_019825.1,664-682).
cttctcagtcagatgcaat

SEQ ID NO: 450891 - DNA, 19 bp, Mus musculus
  siRNA target sequence for Ncoa6 (NM_019825.1,742-760).
ctccagcgcatcactcaat

SEQ ID NO: 450892 - DNA, 19 bp, Mus musculus
  siRNA target sequence for Ncoa6 (NM_019825.1,768-786).
gttcctgtgaacagacaaa

SEQ ID NO: 450893 - DNA, 19 bp, Mus musculus
  siRNA target sequence for Ncoa6 (NM_019825.1,771-789).
cctgtgaacagacaaatga

SEQ ID NO: 450894 - DNA, 19 bp, Mus musculus
  siRNA target sequence for Ncoa6 (NM_019825.1,783-801).
caaatgaacccagctaatt

SEQ ID NO: 450895 - DNA, 19 bp, Mus musculus
  siRNA target sequence for Ncoa6 (NM_019825.1,944-962).
ggggattcgaccacagttt

SEQ ID NO: 450896 - DNA, 19 bp, Mus musculus
  siRNA target sequence for Ncoa6 (NM_019825.1,945-963).
gggattcgaccacagttta

SEQ ID NO: 450897 - DNA, 19 bp, Mus musculus
  siRNA target sequence for Ncoa6 (NM_019825.1,947-965).
gattcgaccacagtttact

SEQ ID NO: 450898 - DNA, 19 bp, Mus musculus
  siRNA target sequence for Ncoa6 (NM_019825.1,1047-1065).
ctgggcacaatgactacaa

SEQ ID NO: 450899 - DNA, 19 bp, Mus musculus
  siRNA target sequence for Ncoa6 (NM_019825.1,1088-1106).
cttgcctagcccaatgcaa

SEQ ID NO: 450900 - DNA, 19 bp, Mus musculus
  siRNA target sequence for Ncoa6 (NM_019825.1,1099-1117).
caatgcaagcgcaacttca

SEQ ID NO: 450901 - DNA, 19 bp, Mus musculus
  siRNA target sequence for Ncoa6 (NM_019825.1,1191-1209).
gcctcacaagcccatacaa

SEQ ID NO: 450902 - DNA, 19 bp, Mus musculus
  siRNA target sequence for Ncoa6 (NM_019825.1,1370-1388).
ctccccaacggttaaccaa

SEQ ID NO: 450903 - DNA, 19 bp, Mus musculus
  siRNA target sequence for Ncoa6 (NM_019825.1,1375-1393).
caacggttaaccaaactca

SEQ ID NO: 450904 - DNA, 19 bp, Mus musculus
  siRNA target sequence for Ncoa6 (NM_019825.1,1405-1423).
gaccaaggccacctcaaaa

SEQ ID NO: 450905 - DNA, 19 bp, Mus musculus
  siRNA target sequence for Ncoa6 (NM_019825.1,1407-1425).
ccaaggccacctcaaaata

SEQ ID NO: 450906 - DNA, 19 bp, Mus musculus
  siRNA target sequence for Ncoa6 (NM_019825.1,1429-1447).
cactttcccagggatttca

SEQ ID NO: 450907 - DNA, 19 bp, Mus musculus
  siRNA target sequence for Ncoa6 (NM_019825.1,1462-1480).
ctccaggtcggaatcctat

SEQ ID NO: 450908 - DNA, 19 bp, Mus musculus
  siRNA target sequence for Ncoa6 (NM_019825.1,1471-1489).
ggaatcctatggttcaaca

SEQ ID NO: 450909 - DNA, 19 bp, Mus musculus
  siRNA target sequence for Ncoa6 (NM_019825.1,1538-1556).
ccaggggccacagagttta

SEQ ID NO: 450910 - DNA, 19 bp, Mus musculus
  siRNA target sequence for Ncoa6 (NM_019825.1,1611-1629).
caggccaatcccaacttca

SEQ ID NO: 450911 - DNA, 19 bp, Mus musculus
  siRNA target sequence for Ncoa6 (NM_019825.1,1760-1778).
gtctcacgggccaccaaat

SEQ ID NO: 450912 - DNA, 19 bp, Mus musculus
  siRNA target sequence for Ncoa6 (NM_019825.1,1762-1780).
ctcacgggccaccaaatat

SEQ ID NO: 450913 - DNA, 19 bp, Mus musculus
  siRNA target sequence for Ncoa6 (NM_019825.1,1790-1808).
cagcctcatgggaattcat

SEQ ID NO: 450914 - DNA, 19 bp, Mus musculus
  siRNA target sequence for Ncoa6 (NM_019825.1,1799-1817).
gggaattcatggcaacata

SEQ ID NO: 450915 - DNA, 19 bp, Mus musculus
  siRNA target sequence for Ncoa6 (NM_019825.1,1910-1928).
gggcatgcaccaacagatt

SEQ ID NO: 450916 - DNA, 19 bp, Mus musculus
  siRNA target sequence for Ncoa6 (NM_019825.1,1977-1995).
caaaatcctatgatccttt

SEQ ID NO: 450917 - DNA, 19 bp, Mus musculus
  siRNA target sequence for Ncoa6 (NM_019825.1,2030-2048).
ggtgaacgctcaaaaccaa

SEQ ID NO: 450918 - DNA, 19 bp, Mus musculus
  siRNA target sequence for Ncoa6 (NM_019825.1,2031-2049).
gtgaacgctcaaaaccaaa

SEQ ID NO: 450919 - DNA, 19 bp, Mus musculus
  siRNA target sequence for Ncoa6 (NM_019825.1,2033-2051).
gaacgctcaaaaccaaaat

SEQ ID NO: 450920 - DNA, 19 bp, Mus musculus
  siRNA target sequence for Ncoa6 (NM_019825.1,2122-2140).
caccacataaccagatgat

SEQ ID NO: 450921 - DNA, 19 bp, Mus musculus
  siRNA target sequence for Ncoa6 (NM_019825.1,2143-2161).
ggcctcaggggcaagtttt

SEQ ID NO: 450922 - DNA, 19 bp, Mus musculus
  siRNA target sequence for Ncoa6 (NM_019825.1,2165-2183).
ccagcagaacccaatgata

SEQ ID NO: 450923 - DNA, 19 bp, Mus musculus
  siRNA target sequence for Ncoa6 (NM_019825.1,2174-2192).
cccaatgatagagcaaata

SEQ ID NO: 450924 - DNA, 19 bp, Mus musculus
  siRNA target sequence for Ncoa6 (NM_019825.1,2210-2228).
ggggaataaggcgcaattt

SEQ ID NO: 450925 - DNA, 19 bp, Mus musculus
  siRNA target sequence for Ncoa6 (NM_019825.1,2212-2230).
ggaataaggcgcaatttaa

SEQ ID NO: 450926 - DNA, 19 bp, Mus musculus
  siRNA target sequence for Ncoa6 (NM_019825.1,2256-2274).
ccgggaccagcacaaataa

SEQ ID NO: 450927 - DNA, 19 bp, Mus musculus
  siRNA target sequence for Ncoa6 (NM_019825.1,2257-2275).
cgggaccagcacaaataat

SEQ ID NO: 450928 - DNA, 19 bp, Mus musculus
  siRNA target sequence for Ncoa6 (NM_019825.1,2278-2296).
ggggaccaactccgaatat

SEQ ID NO: 450929 - DNA, 19 bp, Mus musculus
  siRNA target sequence for Ncoa6 (NM_019825.1,2281-2299).
gaccaactccgaatatgca

SEQ ID NO: 450930 - DNA, 19 bp, Mus musculus
  siRNA target sequence for Ncoa6 (NM_019825.1,2287-2305).
ctccgaatatgcaaggaaa

SEQ ID NO: 450931 - DNA, 19 bp, Mus musculus
  siRNA target sequence for Ncoa6 (NM_019825.1,2290-2308).
cgaatatgcaaggaaacat

SEQ ID NO: 450932 - DNA, 19 bp, Mus musculus
  siRNA target sequence for Ncoa6 (NM_019825.1,2597-2615).
gtctttcaatgcaccattt

SEQ ID NO: 450933 - DNA, 19 bp, Mus musculus
  siRNA target sequence for Ncoa6 (NM_019825.1,2639-2657).
gatgtcttgtggtcaaaat

SEQ ID NO: 450934 - DNA, 19 bp, Mus musculus
  siRNA target sequence for Ncoa6 (NM_019825.1,2662-2680).
gctttcccgtcaataaaga

SEQ ID NO: 450935 - DNA, 19 bp, Mus musculus
  siRNA target sequence for Ncoa6 (NM_019825.1,2667-2685).
cccgtcaataaagatgtaa

SEQ ID NO: 450936 - DNA, 19 bp, Mus musculus
  siRNA target sequence for Ncoa6 (NM_019825.1,2672-2690).
caataaagatgtaacgtta

SEQ ID NO: 450937 - DNA, 19 bp, Mus musculus
  siRNA target sequence for Ncoa6 (NM_019825.1,2686-2704).
cgttaacgagcccattgtt

SEQ ID NO: 450938 - DNA, 19 bp, Mus musculus
  siRNA target sequence for Ncoa6 (NM_019825.1,2698-2716).
cattgttggtcaacttact

SEQ ID NO: 450939 - DNA, 19 bp, Mus musculus
  siRNA target sequence for Ncoa6 (NM_019825.1,2736-2754).
ggccattttggtgtaaaca

SEQ ID NO: 450940 - DNA, 19 bp, Mus musculus
  siRNA target sequence for Ncoa6 (NM_019825.1,2737-2755).
gccattttggtgtaaacaa

SEQ ID NO: 450941 - DNA, 19 bp, Mus musculus
  siRNA target sequence for Ncoa6 (NM_019825.1,2738-2756).
ccattttggtgtaaacaat

SEQ ID NO: 450942 - DNA, 19 bp, Mus musculus
  siRNA target sequence for Ncoa6 (NM_019825.1,2739-2757).
cattttggtgtaaacaata

SEQ ID NO: 450943 - DNA, 19 bp, Mus musculus
  siRNA target sequence for Ncoa6 (NM_019825.1,2860-2878).
gtctagaggaagttgatca

SEQ ID NO: 450944 - DNA, 19 bp, Mus musculus
  siRNA target sequence for Ncoa6 (NM_019825.1,2892-2910).
ggagaacaaggaatcaact

SEQ ID NO: 450945 - DNA, 19 bp, Mus musculus
  siRNA target sequence for Ncoa6 (NM_019825.1,2948-2966).
ccggccaccaggttatcct

SEQ ID NO: 450946 - DNA, 19 bp, Mus musculus
  siRNA target sequence for Ncoa6 (NM_019825.1,2949-2967).
cggccaccaggttatccta

SEQ ID NO: 450947 - DNA, 19 bp, Mus musculus
  siRNA target sequence for Ncoa6 (NM_019825.1,2965-2983).
ctacacaaccagttgaaca

SEQ ID NO: 450948 - DNA, 19 bp, Mus musculus
  siRNA target sequence for Ncoa6 (NM_019825.1,3126-3144).
cagcaacaacaaatgatga

SEQ ID NO: 450949 - DNA, 19 bp, Mus musculus
  siRNA target sequence for Ncoa6 (NM_019825.1,3161-3179).
gcaagatcctaaatccatt

SEQ ID NO: 450950 - DNA, 19 bp, Mus musculus
  siRNA target sequence for Ncoa6 (NM_019825.1,3162-3180).
caagatcctaaatccatta

SEQ ID NO: 450951 - DNA, 19 bp, Mus musculus
  siRNA target sequence for Ncoa6 (NM_019825.1,3305-3323).
gccaccatcacctgataaa

SEQ ID NO: 450952 - DNA, 19 bp, Mus musculus
  siRNA target sequence for Ncoa6 (NM_019825.1,3452-3470).
cagtgaagtaccatctgtt

SEQ ID NO: 450953 - DNA, 19 bp, Mus musculus
  siRNA target sequence for Ncoa6 (NM_019825.1,3471-3489).
gcaggaggcccaaataaca

SEQ ID NO: 450954 - DNA, 19 bp, Mus musculus
  siRNA target sequence for Ncoa6 (NM_019825.1,3492-3510).
ccctcacatttagtagttt

SEQ ID NO: 450955 - DNA, 19 bp, Mus musculus
  siRNA target sequence for Ncoa6 (NM_019825.1,3507-3525).
gtttctcagaatcaattaa

SEQ ID NO: 450956 - DNA, 19 bp, Mus musculus
  siRNA target sequence for Ncoa6 (NM_019825.1,3513-3531).
cagaatcaattaatgatga

SEQ ID NO: 450957 - DNA, 19 bp, Mus musculus
  siRNA target sequence for Ncoa6 (NM_019825.1,3583-3601).
cccagcaacctcctgtaaa

SEQ ID NO: 450958 - DNA, 19 bp, Mus musculus
  siRNA target sequence for Ncoa6 (NM_019825.1,3584-3602).
ccagcaacctcctgtaaat

SEQ ID NO: 450959 - DNA, 19 bp, Mus musculus
  siRNA target sequence for Ncoa6 (NM_019825.1,3654-3672).
cagacatctaggcctaaaa

SEQ ID NO: 450960 - DNA, 19 bp, Mus musculus
  siRNA target sequence for Ncoa6 (NM_019825.1,3656-3674).
gacatctaggcctaaaaca

SEQ ID NO: 450961 - DNA, 19 bp, Mus musculus
  siRNA target sequence for Ncoa6 (NM_019825.1,3794-3812).
cttccctccacagattaat

SEQ ID NO: 450962 - DNA, 19 bp, Mus musculus
  siRNA target sequence for Ncoa6 (NM_019825.1,3801-3819).
ccacagattaatattcctt

SEQ ID NO: 450963 - DNA, 19 bp, Mus musculus
  siRNA target sequence for Ncoa6 (NM_019825.1,3802-3820).
cacagattaatattccttt

SEQ ID NO: 450964 - DNA, 19 bp, Mus musculus
  siRNA target sequence for Ncoa6 (NM_019825.1,3806-3824).
gattaatattcctttacct

SEQ ID NO: 450965 - DNA, 19 bp, Mus musculus
  siRNA target sequence for Ncoa6 (NM_019825.1,3822-3840).
cctcccaggccaaatttaa

SEQ ID NO: 450966 - DNA, 19 bp, Mus musculus
  siRNA target sequence for Ncoa6 (NM_019825.1,3825-3843).
cccaggccaaatttaaata

SEQ ID NO: 450967 - DNA, 19 bp, Mus musculus
  siRNA target sequence for Ncoa6 (NM_019825.1,3860-3878).
gggcttaaatccaacaact

SEQ ID NO: 450968 - DNA, 19 bp, Mus musculus
  siRNA target sequence for Ncoa6 (NM_019825.1,3893-3911).
gcaagcaccttcaaatctt

SEQ ID NO: 450969 - DNA, 19 bp, Mus musculus
  siRNA target sequence for Ncoa6 (NM_019825.1,3894-3912).
caagcaccttcaaatctta

SEQ ID NO: 450970 - DNA, 19 bp, Mus musculus
  siRNA target sequence for Ncoa6 (NM_019825.1,3897-3915).
gcaccttcaaatcttacta

SEQ ID NO: 450971 - DNA, 19 bp, Mus musculus
  siRNA target sequence for Ncoa6 (NM_019825.1,3904-3922).
caaatcttactataactaa

SEQ ID NO: 450972 - DNA, 19 bp, Mus musculus
  siRNA target sequence for Ncoa6 (NM_019825.1,3949-3967).
ctcataaattagattctgt

SEQ ID NO: 450973 - DNA, 19 bp, Mus musculus
  siRNA target sequence for Ncoa6 (NM_019825.1,3989-4007).
gtctaatcctggaacaaca

SEQ ID NO: 450974 - DNA, 19 bp, Mus musculus
  siRNA target sequence for Ncoa6 (NM_019825.1,4074-4092).
cctggaaggcaaaactcaa

SEQ ID NO: 450975 - DNA, 19 bp, Mus musculus
  siRNA target sequence for Ncoa6 (NM_019825.1,4088-4106).
ctcaaaagctcctaaactt

SEQ ID NO: 450976 - DNA, 19 bp, Mus musculus
  siRNA target sequence for Ncoa6 (NM_019825.1,4104-4122).
cttactctggcttctcaaa

SEQ ID NO: 450977 - DNA, 19 bp, Mus musculus
  siRNA target sequence for Ncoa6 (NM_019825.1,4149-4167).
gagctgcctagaaatgtgt

SEQ ID NO: 450978 - DNA, 19 bp, Mus musculus
  siRNA target sequence for Ncoa6 (NM_019825.1,4206-4224).
ggaagctttcctaacaata

SEQ ID NO: 450979 - DNA, 19 bp, Mus musculus
  siRNA target sequence for Ncoa6 (NM_019825.1,4270-4288).
ggactgtccttgaggataa

SEQ ID NO: 450980 - DNA, 19 bp, Mus musculus
  siRNA target sequence for Ncoa6 (NM_019825.1,4273-4291).
ctgtccttgaggataacaa

SEQ ID NO: 450981 - DNA, 19 bp, Mus musculus
  siRNA target sequence for Ncoa6 (NM_019825.1,4429-4447).
ggcaaccattggatcctaa

SEQ ID NO: 450982 - DNA, 19 bp, Mus musculus
  siRNA target sequence for Ncoa6 (NM_019825.1,4435-4453).
cattggatcctaacaaact

SEQ ID NO: 450983 - DNA, 19 bp, Mus musculus
  siRNA target sequence for Ncoa6 (NM_019825.1,4500-4518).
gaagcaccaacatcattaa

SEQ ID NO: 450984 - DNA, 19 bp, Mus musculus
  siRNA target sequence for Ncoa6 (NM_019825.1,4532-4550).
caactctggagctcctaat

SEQ ID NO: 450985 - DNA, 19 bp, Mus musculus
  siRNA target sequence for Ncoa6 (NM_019825.1,4649-4667).
ggatccgccttctaaagaa

SEQ ID NO: 450986 - DNA, 19 bp, Mus musculus
  siRNA target sequence for Ncoa6 (NM_019825.1,4665-4683).
gaaccctctacttctttaa

SEQ ID NO: 450987 - DNA, 19 bp, Mus musculus
  siRNA target sequence for Ncoa6 (NM_019825.1,4759-4777).
caagcatccctccagtaat

SEQ ID NO: 450988 - DNA, 19 bp, Mus musculus
  siRNA target sequence for Ncoa6 (NM_019825.1,4812-4830).
cccttacctccaaaccaaa

SEQ ID NO: 450989 - DNA, 19 bp, Mus musculus
  siRNA target sequence for Ncoa6 (NM_019825.1,4827-4845).
caaataactgtatttgtta

SEQ ID NO: 450990 - DNA, 19 bp, Mus musculus
  siRNA target sequence for Ncoa6 (NM_019825.1,4854-4872).
cccatcaccacttcatcta

SEQ ID NO: 450991 - DNA, 19 bp, Mus musculus
  siRNA target sequence for Ncoa6 (NM_019825.1,4902-4920).
cagtctgcattgatgtcaa

SEQ ID NO: 450992 - DNA, 19 bp, Mus musculus
  siRNA target sequence for Ncoa6 (NM_019825.1,4934-4952).
gcccaacgtgggtaacaaa

SEQ ID NO: 450993 - DNA, 19 bp, Mus musculus
  siRNA target sequence for Ncoa6 (NM_019825.1,4937-4955).
caacgtgggtaacaaagtt

SEQ ID NO: 450994 - DNA, 19 bp, Mus musculus
  siRNA target sequence for Ncoa6 (NM_019825.1,4973-4991).
gtcagctgctcagtctaat

SEQ ID NO: 450995 - DNA, 19 bp, Mus musculus
  siRNA target sequence for Ncoa6 (NM_019825.1,5016-5034).
gtctttatcaactcatctt

SEQ ID NO: 450996 - DNA, 19 bp, Mus musculus
  siRNA target sequence for Ncoa6 (NM_019825.1,5123-5141).
cgcagttgttggaccttta

SEQ ID NO: 450997 - DNA, 19 bp, Mus musculus
  siRNA target sequence for Ncoa6 (NM_019825.1,5125-5143).
cagttgttggacctttaca

SEQ ID NO: 450998 - DNA, 19 bp, Mus musculus
  siRNA target sequence for Ncoa6 (NM_019825.1,5127-5145).
gttgttggacctttacaca

SEQ ID NO: 450999 - DNA, 19 bp, Mus musculus
  siRNA target sequence for Ncoa6 (NM_019825.1,5142-5160).
cacatacctcagaacataa

SEQ ID NO: 451000 - DNA, 19 bp, Mus musculus
  siRNA target sequence for Ncoa6 (NM_019825.1,5200-5218).
gtagtcctgctccaaatat

SEQ ID NO: 451001 - DNA, 19 bp, Mus musculus
  siRNA target sequence for Ncoa6 (NM_019825.1,5203-5221).
gtcctgctccaaatataca

SEQ ID NO: 451002 - DNA, 19 bp, Mus musculus
  siRNA target sequence for Ncoa6 (NM_019825.1,5205-5223).
cctgctccaaatatacaga

SEQ ID NO: 451003 - DNA, 19 bp, Mus musculus
  siRNA target sequence for Ncoa6 (NM_019825.1,5313-5331).
ccttctgtccagcaagtaa

SEQ ID NO: 451004 - DNA, 19 bp, Mus musculus
  siRNA target sequence for Ncoa6 (NM_019825.1,5403-5421).
cagccaaccacagtagttt

SEQ ID NO: 451005 - DNA, 19 bp, Mus musculus
  siRNA target sequence for Ncoa6 (NM_019825.1,5654-5672).
cacagagctggacagtaaa

SEQ ID NO: 451006 - DNA, 19 bp, Mus musculus
  siRNA target sequence for Ncoa6 (NM_019825.1,5684-5702).
ctcagcacccactctacta

SEQ ID NO: 451007 - DNA, 19 bp, Mus musculus
  siRNA target sequence for Ncoa6 (NM_019825.1,5691-5709).
cccactctactaaaaatga

SEQ ID NO: 451008 - DNA, 19 bp, Mus musculus
  siRNA target sequence for Ncoa6 (NM_019825.1,5774-5792).
caccagtgtacgctcaata

SEQ ID NO: 451009 - DNA, 19 bp, Mus musculus
  siRNA target sequence for Ncoa6 (NM_019825.1,5776-5794).
ccagtgtacgctcaatagt

SEQ ID NO: 451010 - DNA, 19 bp, Mus musculus
  siRNA target sequence for Ncoa6 (NM_019825.1,5777-5795).
cagtgtacgctcaatagta

SEQ ID NO: 451011 - DNA, 19 bp, Mus musculus
  siRNA target sequence for Ncoa6 (NM_019825.1,5945-5963).
gaatttagccccaaaggaa

SEQ ID NO: 451012 - DNA, 19 bp, Mus musculus
  siRNA target sequence for Ncoa6 (NM_019825.1,6040-6058).
gctgtgagccaaaagagat

SEQ ID NO: 451013 - DNA, 19 bp, Mus musculus
  siRNA target sequence for Ncoa6 (NM_019825.1,6041-6059).
ctgtgagccaaaagagata

SEQ ID NO: 451014 - DNA, 19 bp, Mus musculus
  siRNA target sequence for Ncoa6 (NM_019825.1,6043-6061).
gtgagccaaaagagatagt

SEQ ID NO: 451015 - DNA, 19 bp, Mus musculus
  siRNA target sequence for Ncoa6 (NM_019825.1,6076-6094).
ccctgacgagccgaagaaa

SEQ ID NO: 451016 - DNA, 19 bp, Mus musculus
  siRNA target sequence for Ncoa6 (NM_019825.1,6078-6096).
ctgacgagccgaagaaact

SEQ ID NO: 451017 - DNA, 19 bp, Mus musculus
  siRNA target sequence for Ncoa6 (NM_019825.1,6080-6098).
gacgagccgaagaaactct

SEQ ID NO: 451018 - DNA, 19 bp, Mus musculus
  siRNA target sequence for Ncoa6 (NM_019825.1,6121-6139).
cttctgagagcgtggaaaa

SEQ ID NO: 451019 - DNA, 19 bp, Mus musculus
  siRNA target sequence for Ncoa6 (NM_019825.1,6134-6152).
ggaaaatggacatcgaaaa

SEQ ID NO: 451020 - DNA, 19 bp, Mus musculus
  siRNA target sequence for Ncoa6 (NM_019825.1,6175-6193).
cctccagctctactaaaga

SEQ ID NO: 451021 - DNA, 19 bp, Mus musculus
  siRNA target sequence for Ncoa6 (NM_019825.1,6176-6194).
ctccagctctactaaagat

SEQ ID NO: 451022 - DNA, 19 bp, Mus musculus
  siRNA target sequence for Ncoa6 (NM_019825.1,6178-6196).
ccagctctactaaagatat

SEQ ID NO: 451023 - DNA, 19 bp, Mus musculus
  siRNA target sequence for Ncoa6 (NM_019825.1,6179-6197).
cagctctactaaagatata

SEQ ID NO: 451024 - DNA, 19 bp, Mus musculus
  siRNA target sequence for Ncoa6 (NM_019825.1,6182-6200).
ctctactaaagatataact

SEQ ID NO: 451025 - DNA, 19 bp, Mus musculus
  siRNA target sequence for Ncoa6 (NM_019825.1,6199-6217).
ctggtgccgtgcaatccaa

SEQ ID NO: 451026 - DNA, 19 bp, Mus musculus
  siRNA target sequence for Nsbp1 (NM_016710.1,1002-1020).
ctaaggaagatcaaaagga

SEQ ID NO: 451027 - DNA, 19 bp, Mus musculus
  siRNA target sequence for Pparbp (NM_013634.1,135-153).
ggaacggctccatgcaaaa

SEQ ID NO: 451028 - DNA, 19 bp, Mus musculus
  siRNA target sequence for Pparbp (NM_013634.1,136-154).
gaacggctccatgcaaaat

SEQ ID NO: 451029 - DNA, 19 bp, Mus musculus
  siRNA target sequence for Pparbp (NM_013634.1,139-157).
cggctccatgcaaaattta

SEQ ID NO: 451030 - DNA, 19 bp, Mus musculus
  siRNA target sequence for Pparbp (NM_013634.1,167-185).
gaccttggagtgaaaccat

SEQ ID NO: 451031 - DNA, 19 bp, Mus musculus
  siRNA target sequence for Pparbp (NM_013634.1,208-226).
gagaagagggtcgtaatga

SEQ ID NO: 451032 - DNA, 19 bp, Mus musculus
  siRNA target sequence for Pparbp (NM_013634.1,233-251).
gagggcatcagcatttggt

SEQ ID NO: 451033 - DNA, 19 bp, Mus musculus
  siRNA target sequence for Pparbp (NM_013634.1,276-294).
ggctctcaaagtaacatct

SEQ ID NO: 451034 - DNA, 19 bp, Mus musculus
  siRNA target sequence for Pparbp (NM_013634.1,277-295).
gctctcaaagtaacatctt

SEQ ID NO: 451035 - DNA, 19 bp, Mus musculus
  siRNA target sequence for Pparbp (NM_013634.1,299-317).
cagcaatgactgatcgttt

SEQ ID NO: 451036 - DNA, 19 bp, Mus musculus
  siRNA target sequence for Pparbp (NM_013634.1,367-385).
ggcactgagtgttacatca

SEQ ID NO: 451037 - DNA, 19 bp, Mus musculus
  siRNA target sequence for Pparbp (NM_013634.1,384-402).
cacgtcagatatgttctat

SEQ ID NO: 451038 - DNA, 19 bp, Mus musculus
  siRNA target sequence for Pparbp (NM_013634.1,386-404).
cgtcagatatgttctatgt

SEQ ID NO: 451039 - DNA, 19 bp, Mus musculus
  siRNA target sequence for Pparbp (NM_013634.1,476-494).
gctgtccagagcttgtaca

SEQ ID NO: 451040 - DNA, 19 bp, Mus musculus
  siRNA target sequence for Pparbp (NM_013634.1,520-538).
gaattttccaagcatctta

SEQ ID NO: 451041 - DNA, 19 bp, Mus musculus
  siRNA target sequence for Pparbp (NM_013634.1,532-550).
catcttaagggtcttgtta

SEQ ID NO: 451042 - DNA, 19 bp, Mus musculus
  siRNA target sequence for Pparbp (NM_013634.1,600-618).
ggctctccaatccttagaa

SEQ ID NO: 451043 - DNA, 19 bp, Mus musculus
  siRNA target sequence for Pparbp (NM_013634.1,629-647).
ctaaaatggctattatgta

SEQ ID NO: 451044 - DNA, 19 bp, Mus musculus
  siRNA target sequence for Pparbp (NM_013634.1,664-682).
gccgctcccttggataaga

SEQ ID NO: 451045 - DNA, 19 bp, Mus musculus
  siRNA target sequence for Pparbp (NM_013634.1,665-683).
ccgctcccttggataagat

SEQ ID NO: 451046 - DNA, 19 bp, Mus musculus
  siRNA target sequence for Pparbp (NM_013634.1,666-684).
cgctcccttggataagatt

SEQ ID NO: 451047 - DNA, 19 bp, Mus musculus
  siRNA target sequence for Pparbp (NM_013634.1,668-686).
ctcccttggataagattct

SEQ ID NO: 451048 - DNA, 19 bp, Mus musculus
  siRNA target sequence for Pparbp (NM_013634.1,724-742).
ggtcatttaatgaatatga

SEQ ID NO: 451049 - DNA, 19 bp, Mus musculus
  siRNA target sequence for Pparbp (NM_013634.1,834-852).
gaatgcctcagtgacaatt

SEQ ID NO: 451050 - DNA, 19 bp, Mus musculus
  siRNA target sequence for Pparbp (NM_013634.1,879-897).
cccaattgccccattaatt

SEQ ID NO: 451051 - DNA, 19 bp, Mus musculus
  siRNA target sequence for Pparbp (NM_013634.1,880-898).
ccaattgccccattaatta

SEQ ID NO: 451052 - DNA, 19 bp, Mus musculus
  siRNA target sequence for Pparbp (NM_013634.1,953-971).
gtgccaacagtgttgatct

SEQ ID NO: 451053 - DNA, 19 bp, Mus musculus
  siRNA target sequence for Pparbp (NM_013634.1,1000-1018).
cagccaattccagtatcta

SEQ ID NO: 451054 - DNA, 19 bp, Mus musculus
  siRNA target sequence for Pparbp (NM_013634.1,1047-1065).
cacaggaatcccgttgttt

SEQ ID NO: 451055 - DNA, 19 bp, Mus musculus
  siRNA target sequence for Pparbp (NM_013634.1,1125-1143).
ggatcctgaccctttacct

SEQ ID NO: 451056 - DNA, 19 bp, Mus musculus
  siRNA target sequence for Pparbp (NM_013634.1,1186-1204).
cagcactgctattttctca

SEQ ID NO: 451057 - DNA, 19 bp, Mus musculus
  siRNA target sequence for Pparbp (NM_013634.1,1188-1206).
gcactgctattttctcaat

SEQ ID NO: 451058 - DNA, 19 bp, Mus musculus
  siRNA target sequence for Pparbp (NM_013634.1,1277-1295).
ctggccgagttcctcttat

SEQ ID NO: 451059 - DNA, 19 bp, Mus musculus
  siRNA target sequence for Pparbp (NM_013634.1,1280-1298).
gccgagttcctcttatctt

SEQ ID NO: 451060 - DNA, 19 bp, Mus musculus
  siRNA target sequence for Pparbp (NM_013634.1,1282-1300).
cgagttcctcttatcttga

SEQ ID NO: 451061 - DNA, 19 bp, Mus musculus
  siRNA target sequence for Pparbp (NM_013634.1,1288-1306).
cctcttatcttgaatatga

SEQ ID NO: 451062 - DNA, 19 bp, Mus musculus
  siRNA target sequence for Pparbp (NM_013634.1,1291-1309).
cttatcttgaatatgatca

SEQ ID NO: 451063 - DNA, 19 bp, Mus musculus
  siRNA target sequence for Pparbp (NM_013634.1,1310-1328).
gacaccaagtggcctataa

SEQ ID NO: 451064 - DNA, 19 bp, Mus musculus
  siRNA target sequence for Pparbp (NM_013634.1,1312-1330).
caccaagtggcctataaca

SEQ ID NO: 451065 - DNA, 19 bp, Mus musculus
  siRNA target sequence for Pparbp (NM_013634.1,1318-1336).
gtggcctataacactctaa

SEQ ID NO: 451066 - DNA, 19 bp, Mus musculus
  siRNA target sequence for Pparbp (NM_013634.1,1320-1338).
ggcctataacactctaatt

SEQ ID NO: 451067 - DNA, 19 bp, Mus musculus
  siRNA target sequence for Pparbp (NM_013634.1,1323-1341).
ctataacactctaattgga

SEQ ID NO: 451068 - DNA, 19 bp, Mus musculus
  siRNA target sequence for Pparbp (NM_013634.1,1343-1361).
gctgtgtcaaaagaactat

SEQ ID NO: 451069 - DNA, 19 bp, Mus musculus
  siRNA target sequence for Pparbp (NM_013634.1,1344-1362).
ctgtgtcaaaagaactatt

SEQ ID NO: 451070 - DNA, 19 bp, Mus musculus
  siRNA target sequence for Pparbp (NM_013634.1,1520-1538).
ggctgtcagatgcactaat

SEQ ID NO: 451071 - DNA, 19 bp, Mus musculus
  siRNA target sequence for Pparbp (NM_013634.1,1522-1540).
ctgtcagatgcactaatct

SEQ ID NO: 451072 - DNA, 19 bp, Mus musculus
  siRNA target sequence for Pparbp (NM_013634.1,1524-1542).
gtcagatgcactaatctgt

SEQ ID NO: 451073 - DNA, 19 bp, Mus musculus
  siRNA target sequence for Pparbp (NM_013634.1,1554-1572).
cattgccaaagttgttcaa

SEQ ID NO: 451074 - DNA, 19 bp, Mus musculus
  siRNA target sequence for Pparbp (NM_013634.1,1558-1576).
gccaaagttgttcaaagat

SEQ ID NO: 451075 - DNA, 19 bp, Mus musculus
  siRNA target sequence for Pparbp (NM_013634.1,1611-1629).
gaggaaggctgaaaccata

SEQ ID NO: 451076 - DNA, 19 bp, Mus musculus
  siRNA target sequence for Pparbp (NM_013634.1,1656-1674).
cattgcagagacagttgaa

SEQ ID NO: 451077 - DNA, 19 bp, Mus musculus
  siRNA target sequence for Pparbp (NM_013634.1,1809-1827).
gagcatgagcatcaaagat

SEQ ID NO: 451078 - DNA, 19 bp, Mus musculus
  siRNA target sequence for Pparbp (NM_013634.1,1880-1898).
caattcttaccagtttgtt

SEQ ID NO: 451079 - DNA, 19 bp, Mus musculus
  siRNA target sequence for Pparbp (NM_013634.1,2010-2028).
catgaaccttcttaaagat

SEQ ID NO: 451080 - DNA, 19 bp, Mus musculus
  siRNA target sequence for Pparbp (NM_013634.1,2031-2049).
ccctgcccaggatttctca

SEQ ID NO: 451081 - DNA, 19 bp, Mus musculus
  siRNA target sequence for Pparbp (NM_013634.1,2095-2113).
ggatcaccccggatggaaa

SEQ ID NO: 451082 - DNA, 19 bp, Mus musculus
  siRNA target sequence for Pparbp (NM_013634.1,2096-2114).
gatcaccccggatggaaat

SEQ ID NO: 451083 - DNA, 19 bp, Mus musculus
  siRNA target sequence for Pparbp (NM_013634.1,2397-2415).
cattggcccagatgtaact

SEQ ID NO: 451084 - DNA, 19 bp, Mus musculus
  siRNA target sequence for Pparbp (NM_013634.1,2402-2420).
gcccagatgtaactgatat

SEQ ID NO: 451085 - DNA, 19 bp, Mus musculus
  siRNA target sequence for Pparbp (NM_013634.1,2494-2512).
gttcgagattcctcaagtt

SEQ ID NO: 451086 - DNA, 19 bp, Mus musculus
  siRNA target sequence for Pparbp (NM_013634.1,2522-2540).
ctcagagtgccctctttga

SEQ ID NO: 451087 - DNA, 19 bp, Mus musculus
  siRNA target sequence for Pparbp (NM_013634.1,2614-2632).
ggaagccccaatagtgatt

SEQ ID NO: 451088 - DNA, 19 bp, Mus musculus
  siRNA target sequence for Pparbp (NM_013634.1,2735-2753).
gtcagagtggggataatga

SEQ ID NO: 451089 - DNA, 19 bp, Mus musculus
  siRNA target sequence for Pparbp (NM_013634.1,2739-2757).
gagtggggataatgatgat

SEQ ID NO: 451090 - DNA, 19 bp, Mus musculus
  siRNA target sequence for Pparbp (NM_013634.1,2741-2759).
gtggggataatgatgattt

SEQ ID NO: 451091 - DNA, 19 bp, Mus musculus
  siRNA target sequence for Pparbp (NM_013634.1,2815-2833).
gacaatggggagccaaaat

SEQ ID NO: 451092 - DNA, 19 bp, Mus musculus
  siRNA target sequence for Pparbp (NM_013634.1,2817-2835).
caatggggagccaaaattt

SEQ ID NO: 451093 - DNA, 19 bp, Mus musculus
  siRNA target sequence for Pparbp (NM_013634.1,2854-2872).
gacacggtggacttcagta

SEQ ID NO: 451094 - DNA, 19 bp, Mus musculus
  siRNA target sequence for Pparbp (NM_013634.1,2858-2876).
cggtggacttcagtattat

SEQ ID NO: 451095 - DNA, 19 bp, Mus musculus
  siRNA target sequence for Pparbp (NM_013634.1,3079-3097).
gatgggaagagcaaggata

SEQ ID NO: 451096 - DNA, 19 bp, Mus musculus
  siRNA target sequence for Pparbp (NM_013634.1,3140-3158).
catctcacagttcttctaa

SEQ ID NO: 451097 - DNA, 19 bp, Mus musculus
  siRNA target sequence for Pparbp (NM_013634.1,3356-3374).
gcaaaagccaccatagtca

SEQ ID NO: 451098 - DNA, 19 bp, Mus musculus
  siRNA target sequence for Pparbp (NM_013634.1,3357-3375).
caaaagccaccatagtcat

SEQ ID NO: 451099 - DNA, 19 bp, Mus musculus
  siRNA target sequence for Pparbp (NM_013634.1,3497-3515).
gatccagccagtccaaaaa

SEQ ID NO: 451100 - DNA, 19 bp, Mus musculus
  siRNA target sequence for Pparbp (NM_013634.1,3501-3519).
cagccagtccaaaaattca

SEQ ID NO: 451101 - DNA, 19 bp, Mus musculus
  siRNA target sequence for Pparbp (NM_013634.1,3504-3522).
ccagtccaaaaattcatct

SEQ ID NO: 451102 - DNA, 19 bp, Mus musculus
  siRNA target sequence for Pparbp (NM_013634.1,3543-3561).
ctcctctcccattaccaaa

SEQ ID NO: 451103 - DNA, 19 bp, Mus musculus
  siRNA target sequence for Pparbp (NM_013634.1,3546-3564).
ctctcccattaccaaacat

SEQ ID NO: 451104 - DNA, 19 bp, Mus musculus
  siRNA target sequence for Pparbp (NM_013634.1,3581-3599).
ccagcagtaccaagatgaa

SEQ ID NO: 451105 - DNA, 19 bp, Mus musculus
  siRNA target sequence for Pparbp (NM_013634.1,3582-3600).
cagcagtaccaagatgaaa

SEQ ID NO: 451106 - DNA, 19 bp, Mus musculus
  siRNA target sequence for Pparbp (NM_013634.1,3620-3638).
cccttatgaacccttctat

SEQ ID NO: 451107 - DNA, 19 bp, Mus musculus
  siRNA target sequence for Pparbp (NM_013634.1,3622-3640).
cttatgaacccttctataa

SEQ ID NO: 451108 - DNA, 19 bp, Mus musculus
  siRNA target sequence for Pparbp (NM_013634.1,3677-3695).
ccggaggctcagataagct

SEQ ID NO: 451109 - DNA, 19 bp, Mus musculus
  siRNA target sequence for Pparbp (NM_013634.1,3678-3696).
cggaggctcagataagctt

SEQ ID NO: 451110 - DNA, 19 bp, Mus musculus
  siRNA target sequence for Pparbp (NM_013634.1,3862-3880).
ccagcatctaattcttgta

SEQ ID NO: 451111 - DNA, 19 bp, Mus musculus
  siRNA target sequence for Pparbp (NM_013634.1,3921-3939).
gtcatcctctcagaatcaa

SEQ ID NO: 451112 - DNA, 19 bp, Mus musculus
  siRNA target sequence for Pparbp (NM_013634.1,3945-3963).
cagttccaaagggaaatct

SEQ ID NO: 451113 - DNA, 19 bp, Mus musculus
  siRNA target sequence for Pparbp (NM_013634.1,3986-4004).
ccttgacagctgtcataga

SEQ ID NO: 451114 - DNA, 19 bp, Mus musculus
  siRNA target sequence for Pparbp (NM_013634.1,3994-4012).
gctgtcatagataaattga

SEQ ID NO: 451115 - DNA, 19 bp, Mus musculus
  siRNA target sequence for Pparbp (NM_013634.1,4065-4083).
gatgggcgcaagcacaaat

SEQ ID NO: 451116 - DNA, 19 bp, Mus musculus
  siRNA target sequence for Pparbp (NM_013634.1,4068-4086).
gggcgcaagcacaaattct

SEQ ID NO: 451117 - DNA, 19 bp, Mus musculus
  siRNA target sequence for Pparbp (NM_013634.1,4069-4087).
ggcgcaagcacaaattctt

SEQ ID NO: 451118 - DNA, 19 bp, Mus musculus
  siRNA target sequence for Pparbp (NM_013634.1,4072-4090).
gcaagcacaaattcttcta

SEQ ID NO: 451119 - DNA, 19 bp, Mus musculus
  siRNA target sequence for Pparbp (NM_013634.1,4096-4114).
cccatgtcctccaaacata

SEQ ID NO: 451120 - DNA, 19 bp, Mus musculus
  siRNA target sequence for Pparbp (NM_013634.1,4135-4153).
cagagcaaacgtgagaaaa

SEQ ID NO: 451121 - DNA, 19 bp, Mus musculus
  siRNA target sequence for Pparbp (NM_013634.1,4139-4157).
gcaaacgtgagaaaagtga

SEQ ID NO: 451122 - DNA, 19 bp, Mus musculus
  siRNA target sequence for Pparbp (NM_013634.1,4238-4256).
gcacgggggtggcaaaaat

SEQ ID NO: 451123 - DNA, 19 bp, Mus musculus
  siRNA target sequence for Pparbp (NM_013634.1,4243-4261).
ggggtggcaaaaatcatta

SEQ ID NO: 451124 - DNA, 19 bp, Mus musculus
  siRNA target sequence for Pparbp (NM_013634.1,4349-4367).
cacagatagcctcatcaaa

SEQ ID NO: 451125 - DNA, 19 bp, Mus musculus
  siRNA target sequence for Pparbp (NM_013634.1,4351-4369).
cagatagcctcatcaaaga

SEQ ID NO: 451126 - DNA, 19 bp, Mus musculus
  siRNA target sequence for Pparbp (NM_013634.1,4431-4449).
cagtaagtcgccagcatat

SEQ ID NO: 451127 - DNA, 19 bp, Mus musculus
  siRNA target sequence for Pparbp (NM_013634.1,4458-4476).
gaatgtggacagtgaaagt

SEQ ID NO: 451128 - DNA, 19 bp, Mus musculus
  siRNA target sequence for Pparbp (NM_013634.1,4682-4700).
cgacggcgtctgtgacaaa

SEQ ID NO: 451129 - DNA, 19 bp, Mus musculus
  siRNA target sequence for Pparbp (NM_013634.1,4683-4701).
gacggcgtctgtgacaaat

SEQ ID NO: 451130 - DNA, 19 bp, Mus musculus
  siRNA target sequence for Pparbp (NM_013634.1,4685-4703).
cggcgtctgtgacaaataa

SEQ ID NO: 451131 - DNA, 19 bp, Mus musculus
  siRNA target sequence for Pparbp (NM_013634.1,4737-4755).
cagccctgacttcatgatt

SEQ ID NO: 451132 - DNA, 19 bp, Mus musculus
  siRNA target sequence for Pparbp (NM_134027.1,414-432).
ctgatcgtttggaatctat

SEQ ID NO: 451133 - DNA, 19 bp, Mus musculus
  siRNA target sequence for Pparbp (NM_134027.1,821-839).
cggagtgggggtcatttaa

SEQ ID NO: 451134 - DNA, 19 bp, Mus musculus
  siRNA target sequence for Pparbp (NM_134027.1,822-840).
ggagtgggggtcatttaat

SEQ ID NO: 451135 - DNA, 19 bp, Mus musculus
  siRNA target sequence for Pparbp (NM_134027.1,825-843).
gtgggggtcatttaatgaa

SEQ ID NO: 451136 - DNA, 19 bp, Mus musculus
  siRNA target sequence for Pparbp (NM_134027.1,827-845).
gggggtcatttaatgaata

SEQ ID NO: 451137 - DNA, 19 bp, Mus musculus
  siRNA target sequence for Pparbp (NM_134027.1,828-846).
ggggtcatttaatgaatat

SEQ ID NO: 451138 - DNA, 19 bp, Mus musculus
  siRNA target sequence for Pparbp (NM_134027.1,1831-1849).
gaagcggcaggataaacca

SEQ ID NO: 451139 - DNA, 19 bp, Mus musculus
  siRNA target sequence for Pparbp (NM_134027.1,1884-1902).
caccctcctgtttgaaaga

SEQ ID NO: 451140 - DNA, 19 bp, Mus musculus
  siRNA target sequence for Pparbp (NM_134027.1,1904-1922).
ggcaaggacatgaagtcaa

SEQ ID NO: 451141 - DNA, 19 bp, Mus musculus
  siRNA target sequence for Pparbp (NM_134027.1,1920-1938).
caacgtgtacctatttgct

SEQ ID NO: 451142 - DNA, 19 bp, Mus musculus
  siRNA target sequence for Pparbp (NM_134027.1,2006-2024).
gtctttgggcttcatgtta

SEQ ID NO: 451143 - DNA, 19 bp, Mus musculus
  siRNA target sequence for Pparbp (NM_134027.1,2060-2078).
gaatatttcagtgtatctt

SEQ ID NO: 451144 - DNA, 19 bp, Mus musculus
  siRNA target sequence for Rnf2 (NM_011277.1,158-176).
gggaactcagtttgtatga

SEQ ID NO: 451145 - DNA, 19 bp, Mus musculus
  siRNA target sequence for Rnf2 (NM_011277.1,160-178).
gaactcagtttgtatgagt

SEQ ID NO: 451146 - DNA, 19 bp, Mus musculus
  siRNA target sequence for Rnf2 (NM_011277.1,225-243).
ggtttcacctagaagtcta

SEQ ID NO: 451147 - DNA, 19 bp, Mus musculus
  siRNA target sequence for Rnf2 (NM_011277.1,260-278).
gcccaatttgtttggatat

SEQ ID NO: 451148 - DNA, 19 bp, Mus musculus
  siRNA target sequence for Rnf2 (NM_011277.1,294-312).
gactacaaaggagtgttta

SEQ ID NO: 451149 - DNA, 19 bp, Mus musculus
  siRNA target sequence for Rnf2 (NM_011277.1,296-314).
ctacaaaggagtgtttaca

SEQ ID NO: 451150 - DNA, 19 bp, Mus musculus
  siRNA target sequence for Rnf2 (NM_011277.1,316-334).
cggttttgcgcggattgta

SEQ ID NO: 451151 - DNA, 19 bp, Mus musculus
  siRNA target sequence for Rnf2 (NM_011277.1,317-335).
ggttttgcgcggattgtat

SEQ ID NO: 451152 - DNA, 19 bp, Mus musculus
  siRNA target sequence for Rnf2 (NM_011277.1,318-336).
gttttgcgcggattgtatt

SEQ ID NO: 451153 - DNA, 19 bp, Mus musculus
  siRNA target sequence for Rnf2 (NM_011277.1,324-342).
cgcggattgtattatcaca

SEQ ID NO: 451154 - DNA, 19 bp, Mus musculus
  siRNA target sequence for Rnf2 (NM_011277.1,379-397).
cggaaaaaactggtttcta

SEQ ID NO: 451155 - DNA, 19 bp, Mus musculus
  siRNA target sequence for Rnf2 (NM_011277.1,410-428).
ggccagacccgaactttga

SEQ ID NO: 451156 - DNA, 19 bp, Mus musculus
  siRNA target sequence for Rnf2 (NM_011277.1,487-505).
gtcttagcaaggatcaaca

SEQ ID NO: 451157 - DNA, 19 bp, Mus musculus
  siRNA target sequence for Rnf2 (NM_011277.1,489-507).
cttagcaaggatcaacaaa

SEQ ID NO: 451158 - DNA, 19 bp, Mus musculus
  siRNA target sequence for Rnf2 (NM_011277.1,572-590).
gattacagcgaggcaaaaa

SEQ ID NO: 451159 - DNA, 19 bp, Mus musculus
  siRNA target sequence for Rnf2 (NM_011277.1,591-609).
gcagcagatagaaaatggt

SEQ ID NO: 451160 - DNA, 19 bp, Mus musculus
  siRNA target sequence for Rnf2 (NM_011277.1,631-649).
gacagctcccactgtagta

SEQ ID NO: 451161 - DNA, 19 bp, Mus musculus
  siRNA target sequence for Rnf2 (NM_011277.1,721-739).
cttgaacttgataacaaca

SEQ ID NO: 451162 - DNA, 19 bp, Mus musculus
  siRNA target sequence for Rnf2 (NM_011277.1,776-794).
ccagtgagattgagttagt

SEQ ID NO: 451163 - DNA, 19 bp, Mus musculus
  siRNA target sequence for Rnf2 (NM_011277.1,800-818).
ggccccatccaactcttat

SEQ ID NO: 451164 - DNA, 19 bp, Mus musculus
  siRNA target sequence for Rnf2 (NM_011277.1,803-821).
cccatccaactcttatgga

SEQ ID NO: 451165 - DNA, 19 bp, Mus musculus
  siRNA target sequence for Rnf2 (NM_011277.1,804-822).
ccatccaactcttatggaa

SEQ ID NO: 451166 - DNA, 19 bp, Mus musculus
  siRNA target sequence for Rnf2 (NM_011277.1,805-823).
catccaactcttatggaaa

SEQ ID NO: 451167 - DNA, 19 bp, Mus musculus
  siRNA target sequence for Rnf2 (NM_011277.1,829-847).
gacagcgcacagacaagat

SEQ ID NO: 451168 - DNA, 19 bp, Mus musculus
  siRNA target sequence for Rnf2 (NM_011277.1,833-851).
gcgcacagacaagatacat

SEQ ID NO: 451169 - DNA, 19 bp, Mus musculus
  siRNA target sequence for Rnf2 (NM_011277.1,840-858).
gacaagatacataaagact

SEQ ID NO: 451170 - DNA, 19 bp, Mus musculus
  siRNA target sequence for Rnf2 (NM_011277.1,863-881).
gcaatgccactgttgatca

SEQ ID NO: 451171 - DNA, 19 bp, Mus musculus
  siRNA target sequence for Rnf2 (NM_011277.1,868-886).
gccactgttgatcacttat

SEQ ID NO: 451172 - DNA, 19 bp, Mus musculus
  siRNA target sequence for Rnf2 (NM_011277.1,872-890).
ctgttgatcacttatccaa

SEQ ID NO: 451173 - DNA, 19 bp, Mus musculus
  siRNA target sequence for Rnf2 (NM_011277.1,925-943).
cgaagcaaaggagaatcaa

SEQ ID NO: 451174 - DNA, 19 bp, Mus musculus
  siRNA target sequence for Rnf2 (NM_011277.1,1006-1024).
ggccagttcaccgttttaa

SEQ ID NO: 451175 - DNA, 19 bp, Mus musculus
  siRNA target sequence for Rnf2 (NM_011277.1,1099-1117).
cccaccaaggagcacaaat

SEQ ID NO: 451176 - DNA, 19 bp, Mus musculus
  siRNA target sequence for Rpa1 (NM_026653.1,80-98).
ggccatcgaggtcatgata

SEQ ID NO: 451177 - DNA, 19 bp, Mus musculus
  siRNA target sequence for Rpa1 (NM_026653.1,82-100).
ccatcgaggtcatgataca

SEQ ID NO: 451178 - DNA, 19 bp, Mus musculus
  siRNA target sequence for Rpa1 (NM_026653.1,92-110).
catgatacagcaggaaaat

SEQ ID NO: 451179 - DNA, 19 bp, Mus musculus
  siRNA target sequence for Rpa1 (NM_026653.1,123-141).
cccatcctgcaggtcatta

SEQ ID NO: 451180 - DNA, 19 bp, Mus musculus
  siRNA target sequence for Rpa1 (NM_026653.1,286-304).
gccaggtccacaagttcat

SEQ ID NO: 451181 - DNA, 19 bp, Mus musculus
  siRNA target sequence for Rpa1 (NM_026653.1,367-385).
ctgctgaagacgttggatt

SEQ ID NO: 451182 - DNA, 19 bp, Mus musculus
  siRNA target sequence for Rpa1 (NM_026653.1,369-387).
gctgaagacgttggattaa

SEQ ID NO: 451183 - DNA, 19 bp, Mus musculus
  siRNA target sequence for Rpa1 (NM_026653.1,372-390).
gaagacgttggattaaaga

SEQ ID NO: 451184 - DNA, 19 bp, Mus musculus
  siRNA target sequence for Rpa1 (NM_026653.1,394-412).
ggaatccagtgccctataa

SEQ ID NO: 451185 - DNA, 19 bp, Mus musculus
  siRNA target sequence for Rpa1 (NM_026653.1,395-413).
gaatccagtgccctataat

SEQ ID NO: 451186 - DNA, 19 bp, Mus musculus
  siRNA target sequence for Rpa1 (NM_026653.1,404-422).
gccctataatgaaggatat

SEQ ID NO: 451187 - DNA, 19 bp, Mus musculus
  siRNA target sequence for Rpa1 (NM_026653.1,662-680).
ccagtccaagtggactatt

SEQ ID NO: 451188 - DNA, 19 bp, Mus musculus
  siRNA target sequence for Rpa1 (NM_026653.1,663-681).
cagtccaagtggactattt

SEQ ID NO: 451189 - DNA, 19 bp, Mus musculus
  siRNA target sequence for Rpa1 (NM_026653.1,665-683).
gtccaagtggactatttgt

SEQ ID NO: 451190 - DNA, 19 bp, Mus musculus
  siRNA target sequence for Rpa1 (NM_026653.1,684-702).
gcccgtgtcaccaacaaaa

SEQ ID NO: 451191 - DNA, 19 bp, Mus musculus
  siRNA target sequence for Rpa1 (NM_026653.1,686-704).
ccgtgtcaccaacaaaagt

SEQ ID NO: 451192 - DNA, 19 bp, Mus musculus
  siRNA target sequence for Rpa1 (NM_026653.1,688-706).
gtgtcaccaacaaaagtca

SEQ ID NO: 451193 - DNA, 19 bp, Mus musculus
  siRNA target sequence for Rpa1 (NM_026653.1,707-725).
gatccgcacctggagtaat

SEQ ID NO: 451194 - DNA, 19 bp, Mus musculus
  siRNA target sequence for Rpa1 (NM_026653.1,753-771).
ctagaacttgtggatgaaa

SEQ ID NO: 451195 - DNA, 19 bp, Mus musculus
  siRNA target sequence for Rpa1 (NM_026653.1,765-783).
gatgaaagcggtgaaatca

SEQ ID NO: 451196 - DNA, 19 bp, Mus musculus
  siRNA target sequence for Rpa1 (NM_026653.1,784-802).
gagctactgctttcaatga

SEQ ID NO: 451197 - DNA, 19 bp, Mus musculus
  siRNA target sequence for Rpa1 (NM_026653.1,801-819).
gagcaagtggacaagttct

SEQ ID NO: 451198 - DNA, 19 bp, Mus musculus
  siRNA target sequence for Rpa1 (NM_026653.1,865-883).
ccctgaagatcgctaacaa

SEQ ID NO: 451199 - DNA, 19 bp, Mus musculus
  siRNA target sequence for Rpa1 (NM_026653.1,866-884).
cctgaagatcgctaacaaa

SEQ ID NO: 451200 - DNA, 19 bp, Mus musculus
  siRNA target sequence for Rpa1 (NM_026653.1,885-903).
cagttctccgctgttaaaa

SEQ ID NO: 451201 - DNA, 19 bp, Mus musculus
  siRNA target sequence for Rpa1 (NM_026653.1,887-905).
gttctccgctgttaaaaat

SEQ ID NO: 451202 - DNA, 19 bp, Mus musculus
  siRNA target sequence for Rpa1 (NM_026653.1,892-910).
ccgctgttaaaaatgacta

SEQ ID NO: 451203 - DNA, 19 bp, Mus musculus
  siRNA target sequence for Rpa1 (NM_026653.1,969-987).
cccacagttcagtttgatt

SEQ ID NO: 451204 - DNA, 19 bp, Mus musculus
  siRNA target sequence for Rpa1 (NM_026653.1,1016-1034).
ggctaaagacgcactagta

SEQ ID NO: 451205 - DNA, 19 bp, Mus musculus
  siRNA target sequence for Rpa1 (NM_026653.1,1018-1036).
ctaaagacgcactagtaga

SEQ ID NO: 451206 - DNA, 19 bp, Mus musculus
  siRNA target sequence for Rpa1 (NM_026653.1,1025-1043).
cgcactagtagacatcatt

SEQ ID NO: 451207 - DNA, 19 bp, Mus musculus
  siRNA target sequence for Rpa1 (NM_026653.1,1029-1047).
ctagtagacatcattggaa

SEQ ID NO: 451208 - DNA, 19 bp, Mus musculus
  siRNA target sequence for Rpa1 (NM_026653.1,1055-1073).
gagctatgaagattcgatt

SEQ ID NO: 451209 - DNA, 19 bp, Mus musculus
  siRNA target sequence for Rpa1 (NM_026653.1,1057-1075).
gctatgaagattcgattaa

SEQ ID NO: 451210 - DNA, 19 bp, Mus musculus
  siRNA target sequence for Rpa1 (NM_026653.1,1062-1080).
gaagattcgattaaaatca

SEQ ID NO: 451211 - DNA, 19 bp, Mus musculus
  siRNA target sequence for Rpa1 (NM_026653.1,1104-1122).
gttgctaagagaaatatct

SEQ ID NO: 451212 - DNA, 19 bp, Mus musculus
  siRNA target sequence for Rpa1 (NM_026653.1,1202-1220).
gcccgtgatggccatcaaa

SEQ ID NO: 451213 - DNA, 19 bp, Mus musculus
  siRNA target sequence for Rpa1 (NM_026653.1,1267-1285).
catccagcactgtcattgt

SEQ ID NO: 451214 - DNA, 19 bp, Mus musculus
  siRNA target sequence for Rpa1 (NM_026653.1,1298-1316).
cccagaggcctataagctt

SEQ ID NO: 451215 - DNA, 19 bp, Mus musculus
  siRNA target sequence for Rpa1 (NM_026653.1,1314-1332).
cttcgtggctggtttgact

SEQ ID NO: 451216 - DNA, 19 bp, Mus musculus
  siRNA target sequence for Rpa1 (NM_026653.1,1403-1421).
caactggaaaactttgcat

SEQ ID NO: 451217 - DNA, 19 bp, Mus musculus
  siRNA target sequence for Rpa1 (NM_026653.1,1449-1467).
ggagacaaggcggactatt

SEQ ID NO: 451218 - DNA, 19 bp, Mus musculus
  siRNA target sequence for Rpa1 (NM_026653.1,1452-1470).
gacaaggcggactatttca

SEQ ID NO: 451219 - DNA, 19 bp, Mus musculus
  siRNA target sequence for Rpa1 (NM_026653.1,1494-1512).
ctccgcaaagagaactgta

SEQ ID NO: 451220 - DNA, 19 bp, Mus musculus
  siRNA target sequence for Rpa1 (NM_026653.1,1596-1614).
cgggaatttcccaatttca

SEQ ID NO: 451221 - DNA, 19 bp, Mus musculus
  siRNA target sequence for Rpa1 (NM_026653.1,1613-1631).
caaataccgcatgatctta

SEQ ID NO: 451222 - DNA, 19 bp, Mus musculus
  siRNA target sequence for Rpa1 (NM_026653.1,1628-1646).
cttatcggcaaatattgca

SEQ ID NO: 451223 - DNA, 19 bp, Mus musculus
  siRNA target sequence for Rpa1 (NM_026653.1,1633-1651).
cggcaaatattgcagattt

SEQ ID NO: 451224 - DNA, 19 bp, Mus musculus
  siRNA target sequence for Rpa1 (NM_026653.1,1718-1736).
gtaccttggggaactcaaa

SEQ ID NO: 451225 - DNA, 19 bp, Mus musculus
  siRNA target sequence for Rpa1 (NM_026653.1,1753-1771).
cgtttgaagaggttttcca

SEQ ID NO: 451226 - DNA, 19 bp, Mus musculus
  siRNA target sequence for Rpa1 (NM_026653.1,1776-1794).
gccaacttccggtcattta

SEQ ID NO: 451227 - DNA, 19 bp, Mus musculus
  siRNA target sequence for Rpa1 (NM_026653.1,1785-1803).
cggtcatttacgttcagaa

SEQ ID NO: 451228 - DNA, 19 bp, Mus musculus
  siRNA target sequence for Rpa1 (NM_026653.1,1786-1804).
ggtcatttacgttcagaat

SEQ ID NO: 451229 - DNA, 19 bp, Mus musculus
  siRNA target sequence for Rpa1 (NM_026653.1,1820-1838).
gacctacaatgatgaatct

SEQ ID NO: 451230 - DNA, 19 bp, Mus musculus
  siRNA target sequence for Rpa1 (NM_026653.1,1896-1914).
cggctgatcgcgaacatca

SEQ ID NO: 451231 - DNA, 19 bp, Mus musculus
  siRNA target sequence for Rpa1 (NM_026653.1,1905-1923).
gcgaacatcaggaagaaca

SEQ ID NO: 451232 - DNA, 19 bp, Mus musculus
  siRNA target sequence for Smarcc1 (NM_009211.1,234-252).
gcactacaagaagtatgtt

SEQ ID NO: 451233 - DNA, 19 bp, Mus musculus
  siRNA target sequence for Smarcc1 (NM_009211.1,237-255).
ctacaagaagtatgttcat

SEQ ID NO: 451234 - DNA, 19 bp, Mus musculus
  siRNA target sequence for Smarcc1 (NM_009211.1,256-274).
gcagatgctcctaccaata

SEQ ID NO: 451235 - DNA, 19 bp, Mus musculus
  siRNA target sequence for Smarcc1 (NM_009211.1,257-275).
cagatgctcctaccaataa

SEQ ID NO: 451236 - DNA, 19 bp, Mus musculus
  siRNA target sequence for Smarcc1 (NM_009211.1,259-277).
gatgctcctaccaataaaa

SEQ ID NO: 451237 - DNA, 19 bp, Mus musculus
  siRNA target sequence for Smarcc1 (NM_009211.1,345-363).
cccagctttcaccaaacta

SEQ ID NO: 451238 - DNA, 19 bp, Mus musculus
  siRNA target sequence for Smarcc1 (NM_009211.1,354-372).
caccaaactacctgcaaaa

SEQ ID NO: 451239 - DNA, 19 bp, Mus musculus
  siRNA target sequence for Smarcc1 (NM_009211.1,449-467).
gctggcggagatttgatct

SEQ ID NO: 451240 - DNA, 19 bp, Mus musculus
  siRNA target sequence for Smarcc1 (NM_009211.1,450-468).
ctggcggagatttgatctt

SEQ ID NO: 451241 - DNA, 19 bp, Mus musculus
  siRNA target sequence for Smarcc1 (NM_009211.1,476-494).
catcccgaatggatcgtaa

SEQ ID NO: 451242 - DNA, 19 bp, Mus musculus
  siRNA target sequence for Smarcc1 (NM_009211.1,480-498).
ccgaatggatcgtaacgtt

SEQ ID NO: 451243 - DNA, 19 bp, Mus musculus
  siRNA target sequence for Smarcc1 (NM_009211.1,487-505).
gatcgtaacgttgaaatgt

SEQ ID NO: 451244 - DNA, 19 bp, Mus musculus
  siRNA target sequence for Smarcc1 (NM_009211.1,542-560).
gtctgactagaccaaacat

SEQ ID NO: 451245 - DNA, 19 bp, Mus musculus
  siRNA target sequence for Smarcc1 (NM_009211.1,561-579).
ctacctcattccagacatt

SEQ ID NO: 451246 - DNA, 19 bp, Mus musculus
  siRNA target sequence for Smarcc1 (NM_009211.1,571-589).
ccagacattgatttgaagt

SEQ ID NO: 451247 - DNA, 19 bp, Mus musculus
  siRNA target sequence for Smarcc1 (NM_009211.1,591-609).
ggctaacaagttgaaagat

SEQ ID NO: 451248 - DNA, 19 bp, Mus musculus
  siRNA target sequence for Smarcc1 (NM_009211.1,592-610).
gctaacaagttgaaagata

SEQ ID NO: 451249 - DNA, 19 bp, Mus musculus
  siRNA target sequence for Smarcc1 (NM_009211.1,619-637).
cggcatcaggggacattta

SEQ ID NO: 451250 - DNA, 19 bp, Mus musculus
  siRNA target sequence for Smarcc1 (NM_009211.1,650-668).
caaaagcttcccaccatat

SEQ ID NO: 451251 - DNA, 19 bp, Mus musculus
  siRNA target sequence for Smarcc1 (NM_009211.1,663-681).
ccatatttatccatatcct

SEQ ID NO: 451252 - DNA, 19 bp, Mus musculus
  siRNA target sequence for Smarcc1 (NM_009211.1,664-682).
catatttatccatatcctt

SEQ ID NO: 451253 - DNA, 19 bp, Mus musculus
  siRNA target sequence for Smarcc1 (NM_009211.1,774-792).
cacttgggtccacagtaat

SEQ ID NO: 451254 - DNA, 19 bp, Mus musculus
  siRNA target sequence for Smarcc1 (NM_009211.1,779-797).
gggtccacagtaatgatgt

SEQ ID NO: 451255 - DNA, 19 bp, Mus musculus
  siRNA target sequence for Smarcc1 (NM_009211.1,780-798).
ggtccacagtaatgatgtt

SEQ ID NO: 451256 - DNA, 19 bp, Mus musculus
  siRNA target sequence for Smarcc1 (NM_009211.1,834-852).
gccctggaaggttcatgta

SEQ ID NO: 451257 - DNA, 19 bp, Mus musculus
  siRNA target sequence for Smarcc1 (NM_009211.1,864-882).
ggacactgacgttttcaat

SEQ ID NO: 451258 - DNA, 19 bp, Mus musculus
  siRNA target sequence for Smarcc1 (NM_009211.1,867-885).
cactgacgttttcaatgaa

SEQ ID NO: 451259 - DNA, 19 bp, Mus musculus
  siRNA target sequence for Smarcc1 (NM_009211.1,933-951).
gagctttcgtcaacgaatt

SEQ ID NO: 451260 - DNA, 19 bp, Mus musculus
  siRNA target sequence for Smarcc1 (NM_009211.1,940-958).
cgtcaacgaatttcaacaa

SEQ ID NO: 451261 - DNA, 19 bp, Mus musculus
  siRNA target sequence for Smarcc1 (NM_009211.1,1172-1190).
ccacacctgtacctaacat

SEQ ID NO: 451262 - DNA, 19 bp, Mus musculus
  siRNA target sequence for Smarcc1 (NM_009211.1,1175-1193).
cacctgtacctaacataga

SEQ ID NO: 451263 - DNA, 19 bp, Mus musculus
  siRNA target sequence for Smarcc1 (NM_009211.1,1200-1218).
ggttctccctaagaatgta

SEQ ID NO: 451264 - DNA, 19 bp, Mus musculus
  siRNA target sequence for Smarcc1 (NM_009211.1,1201-1219).
gttctccctaagaatgtaa

SEQ ID NO: 451265 - DNA, 19 bp, Mus musculus
  siRNA target sequence for Smarcc1 (NM_009211.1,1222-1240).
ccaaagaaggacagtgaaa

SEQ ID NO: 451266 - DNA, 19 bp, Mus musculus
  siRNA target sequence for Smarcc1 (NM_009211.1,1379-1397).
cagaacagaccaatcacat

SEQ ID NO: 451267 - DNA, 19 bp, Mus musculus
  siRNA target sequence for Smarcc1 (NM_009211.1,1410-1428).
ctacgcatcctggtttgat

SEQ ID NO: 451268 - DNA, 19 bp, Mus musculus
  siRNA target sequence for Smarcc1 (NM_009211.1,1414-1432).
gcatcctggtttgattata

SEQ ID NO: 451269 - DNA, 19 bp, Mus musculus
  siRNA target sequence for Smarcc1 (NM_009211.1,1415-1433).
catcctggtttgattataa

SEQ ID NO: 451270 - DNA, 19 bp, Mus musculus
  siRNA target sequence for Smarcc1 (NM_009211.1,1419-1437).
ctggtttgattataattgt

SEQ ID NO: 451271 - DNA, 19 bp, Mus musculus
  siRNA target sequence for Smarcc1 (NM_009211.1,1421-1439).
ggtttgattataattgtat

SEQ ID NO: 451272 - DNA, 19 bp, Mus musculus
  siRNA target sequence for Smarcc1 (NM_009211.1,1493-1511).
ccaagacccctgaaatata

SEQ ID NO: 451273 - DNA, 19 bp, Mus musculus
  siRNA target sequence for Smarcc1 (NM_009211.1,1512-1530).
cttggcatatcgaaatttt

SEQ ID NO: 451274 - DNA, 19 bp, Mus musculus
  siRNA target sequence for Smarcc1 (NM_009211.1,1516-1534).
gcatatcgaaattttatga

SEQ ID NO: 451275 - DNA, 19 bp, Mus musculus
  siRNA target sequence for Smarcc1 (NM_009211.1,1517-1535).
catatcgaaattttatgat

SEQ ID NO: 451276 - DNA, 19 bp, Mus musculus
  siRNA target sequence for Smarcc1 (NM_009211.1,1522-1540).
cgaaattttatgattgaca

SEQ ID NO: 451277 - DNA, 19 bp, Mus musculus
  siRNA target sequence for Smarcc1 (NM_009211.1,1620-1638).
gagggttcatgccttctta

SEQ ID NO: 451278 - DNA, 19 bp, Mus musculus
  siRNA target sequence for Smarcc1 (NM_009211.1,1622-1640).
gggttcatgccttcttaga

SEQ ID NO: 451279 - DNA, 19 bp, Mus musculus
  siRNA target sequence for Smarcc1 (NM_009211.1,1780-1798).
gccgctcaacagatgttaa

SEQ ID NO: 451280 - DNA, 19 bp, Mus musculus
  siRNA target sequence for Smarcc1 (NM_009211.1,1781-1799).
ccgctcaacagatgttaaa

SEQ ID NO: 451281 - DNA, 19 bp, Mus musculus
  siRNA target sequence for Smarcc1 (NM_009211.1,1782-1800).
cgctcaacagatgttaaat

SEQ ID NO: 451282 - DNA, 19 bp, Mus musculus
  siRNA target sequence for Smarcc1 (NM_009211.1,1846-1864).
ggtcttcgaactgacattt

SEQ ID NO: 451283 - DNA, 19 bp, Mus musculus
  siRNA target sequence for Smarcc1 (NM_009211.1,1847-1865).
gtcttcgaactgacattta

SEQ ID NO: 451284 - DNA, 19 bp, Mus musculus
  siRNA target sequence for Smarcc1 (NM_009211.1,2743-2761).
gttgaaacacaaatgaaga

SEQ ID NO: 451285 - DNA, 19 bp, Mus musculus
  siRNA target sequence for Suv39h1 (NM_011514.1,27-45).
ggcggaaaatttaaaaggt

SEQ ID NO: 451286 - DNA, 19 bp, Mus musculus
  siRNA target sequence for Suv39h1 (NM_011514.1,52-70).
gtgtgctgtaaatcttctt

SEQ ID NO: 451287 - DNA, 19 bp, Mus musculus
  siRNA target sequence for Suv39h1 (NM_011514.1,94-112).
cgactagccaagctttctt

SEQ ID NO: 451288 - DNA, 19 bp, Mus musculus
  siRNA target sequence for Suv39h1 (NM_011514.1,131-149).
ctaagaagaatctgtatga

SEQ ID NO: 451289 - DNA, 19 bp, Mus musculus
  siRNA target sequence for Suv39h1 (NM_011514.1,138-156).
gaatctgtatgactttgaa

SEQ ID NO: 451290 - DNA, 19 bp, Mus musculus
  siRNA target sequence for Suv39h1 (NM_011514.1,166-184).
ctgtgtgattataagaaga

SEQ ID NO: 451291 - DNA, 19 bp, Mus musculus
  siRNA target sequence for Suv39h1 (NM_011514.1,188-206).
gtgagcaggagtattacct

SEQ ID NO: 451292 - DNA, 19 bp, Mus musculus
  siRNA target sequence for Suv39h1 (NM_011514.1,220-238).
gggtatcccgactcagaaa

SEQ ID NO: 451293 - DNA, 19 bp, Mus musculus
  siRNA target sequence for Suv39h1 (NM_011514.1,221-239).
ggtatcccgactcagaaaa

SEQ ID NO: 451294 - DNA, 19 bp, Mus musculus
  siRNA target sequence for Suv39h1 (NM_011514.1,246-264).
ggagccacggcagaatcta

SEQ ID NO: 451295 - DNA, 19 bp, Mus musculus
  siRNA target sequence for Suv39h1 (NM_011514.1,247-265).
gagccacggcagaatctaa

SEQ ID NO: 451296 - DNA, 19 bp, Mus musculus
  siRNA target sequence for Suv39h1 (NM_011514.1,249-267).
gccacggcagaatctaaaa

SEQ ID NO: 451297 - DNA, 19 bp, Mus musculus
  siRNA target sequence for Suv39h1 (NM_011514.1,250-268).
ccacggcagaatctaaaat

SEQ ID NO: 451298 - DNA, 19 bp, Mus musculus
  siRNA target sequence for Suv39h1 (NM_011514.1,253-271).
cggcagaatctaaaatgta

SEQ ID NO: 451299 - DNA, 19 bp, Mus musculus
  siRNA target sequence for Suv39h1 (NM_011514.1,254-272).
ggcagaatctaaaatgtat

SEQ ID NO: 451300 - DNA, 19 bp, Mus musculus
  siRNA target sequence for Suv39h1 (NM_011514.1,258-276).
gaatctaaaatgtatacga

SEQ ID NO: 451301 - DNA, 19 bp, Mus musculus
  siRNA target sequence for Suv39h1 (NM_011514.1,269-287).
gtatacgagttcttaagca

SEQ ID NO: 451302 - DNA, 19 bp, Mus musculus
  siRNA target sequence for Suv39h1 (NM_011514.1,348-366).
gcatctggacccaaaccta

SEQ ID NO: 451303 - DNA, 19 bp, Mus musculus
  siRNA target sequence for Suv39h1 (NM_011514.1,359-377).
caaacctagccaattacct

SEQ ID NO: 451304 - DNA, 19 bp, Mus musculus
  siRNA target sequence for Suv39h1 (NM_011514.1,493-511).
ccaaggtcctttgtctata

SEQ ID NO: 451305 - DNA, 19 bp, Mus musculus
  siRNA target sequence for Suv39h1 (NM_011514.1,494-512).
caaggtcctttgtctatat

SEQ ID NO: 451306 - DNA, 19 bp, Mus musculus
  siRNA target sequence for Suv39h1 (NM_011514.1,500-518).
cctttgtctatatcaatga

SEQ ID NO: 451307 - DNA, 19 bp, Mus musculus
  siRNA target sequence for Suv39h1 (NM_011514.1,614-632).
gagcatccctgcacaagtt

SEQ ID NO: 451308 - DNA, 19 bp, Mus musculus
  siRNA target sequence for Suv39h1 (NM_011514.1,759-777).
ctgcatcttccgcactaat

SEQ ID NO: 451309 - DNA, 19 bp, Mus musculus
  siRNA target sequence for Suv39h1 (NM_011514.1,761-779).
gcatcttccgcactaatga

SEQ ID NO: 451310 - DNA, 19 bp, Mus musculus
  siRNA target sequence for Suv39h1 (NM_011514.1,762-780).
catcttccgcactaatgat

SEQ ID NO: 451311 - DNA, 19 bp, Mus musculus
  siRNA target sequence for Suv39h1 (NM_011514.1,794-812).
gtgtccgcacgctggaaaa

SEQ ID NO: 451312 - DNA, 19 bp, Mus musculus
  siRNA target sequence for Suv39h1 (NM_011514.1,796-814).
gtccgcacgctggaaaaga

SEQ ID NO: 451313 - DNA, 19 bp, Mus musculus
  siRNA target sequence for Suv39h1 (NM_011514.1,807-825).
ggaaaagatccgaaaaaat

SEQ ID NO: 451314 - DNA, 19 bp, Mus musculus
  siRNA target sequence for Suv39h1 (NM_011514.1,813-831).
gatccgaaaaaatagcttt

SEQ ID NO: 451315 - DNA, 19 bp, Mus musculus
  siRNA target sequence for Suv39h1 (NM_011514.1,816-834).
ccgaaaaaatagctttgtt

SEQ ID NO: 451316 - DNA, 19 bp, Mus musculus
  siRNA target sequence for Suv39h1 (NM_011514.1,838-856).
gagtatgtgggagagatta

SEQ ID NO: 451317 - DNA, 19 bp, Mus musculus
  siRNA target sequence for Suv39h1 (NM_011514.1,930-948).
ctacgtggaagacgtatat

SEQ ID NO: 451318 - DNA, 19 bp, Mus musculus
  siRNA target sequence for Suv39h1 (NM_011514.1,950-968).
ccgtggatgccgcttatta

SEQ ID NO: 451319 - DNA, 19 bp, Mus musculus
  siRNA target sequence for Suv39h1 (NM_011514.1,951-969).
cgtggatgccgcttattat

SEQ ID NO: 451320 - DNA, 19 bp, Mus musculus
  siRNA target sequence for Suv39h1 (NM_011514.1,971-989).
gcaacatctctcattttgt

SEQ ID NO: 451321 - DNA, 19 bp, Mus musculus
  siRNA target sequence for Suv39h1 (NM_011514.1,1012-1030).
ctgcaggtgtacaacgtat

SEQ ID NO: 451322 - DNA, 19 bp, Mus musculus
  siRNA target sequence for Suv39h1 (NM_011514.1,1015-1033).
caggtgtacaacgtattca

SEQ ID NO: 451323 - DNA, 19 bp, Mus musculus
  siRNA target sequence for Suv39h1 (NM_011514.1,1017-1035).
ggtgtacaacgtattcata

SEQ ID NO: 451324 - DNA, 19 bp, Mus musculus
  siRNA target sequence for Suv39h1 (NM_011514.1,1155-1173).
ccgaatggactccaacttt

SEQ ID NO: 451325 - DNA, 19 bp, Mus musculus
  siRNA target sequence for Suv39h1 (NM_011514.1,1203-1221).
gaaacgagtccgtattgaa

SEQ ID NO: 451326 - DNA, 19 bp, Mus musculus
  siRNA target sequence for Suv39h1 (NM_011514.1,1208-1226).
gagtccgtattgaatgcaa

SEQ ID NO: 451327 - DNA, 19 bp, Mus musculus
  siRNA target sequence for Suv39h1 (NM_011514.1,1210-1228).
gtccgtattgaatgcaaat

SEQ ID NO: 451328 - DNA, 19 bp, Mus musculus
  siRNA target sequence for Suv39h1 (NM_011514.1,1212-1230).
ccgtattgaatgcaaatgt

SEQ ID NO: 451329 - DNA, 19 bp, Mus musculus
  siRNA target sequence for Suv39h1 (NM_011514.1,1235-1253).
caacggcttgccgaaaata

SEQ ID NO: 451330 - DNA, 19 bp, Mus musculus
  siRNA target sequence for Suv39h1 (NM_011514.1,1238-1256).
cggcttgccgaaaatacct

SEQ ID NO: 451331 - DNA, 19 bp, Mus musculus
  siRNA target sequence for Suv39h2 (NM_022724.2,239-257).
gtgcacgaggtgccttatt

SEQ ID NO: 451332 - DNA, 19 bp, Mus musculus
  siRNA target sequence for Suv39h2 (NM_022724.2,241-259).
gcacgaggtgccttattca

SEQ ID NO: 451333 - DNA, 19 bp, Mus musculus
  siRNA target sequence for Suv39h2 (NM_022724.2,324-342).
gctcacatgtaaatcgatt

SEQ ID NO: 451334 - DNA, 19 bp, Mus musculus
  siRNA target sequence for Suv39h2 (NM_022724.2,329-347).
catgtaaatcgattggaat

SEQ ID NO: 451335 - DNA, 19 bp, Mus musculus
  siRNA target sequence for Suv39h2 (NM_022724.2,389-407).
gtgactacaaggtagcaaa

SEQ ID NO: 451336 - DNA, 19 bp, Mus musculus
  siRNA target sequence for Suv39h2 (NM_022724.2,440-458).
gatggccagattctacaaa

SEQ ID NO: 451337 - DNA, 19 bp, Mus musculus
  siRNA target sequence for Suv39h2 (NM_022724.2,551-569).
gcaaggctgtcaattcaaa

SEQ ID NO: 451338 - DNA, 19 bp, Mus musculus
  siRNA target sequence for Suv39h2 (NM_022724.2,580-598).
cctgcaattgctgagtata

SEQ ID NO: 451339 - DNA, 19 bp, Mus musculus
  siRNA target sequence for Suv39h2 (NM_022724.2,581-599).
ctgcaattgctgagtatat

SEQ ID NO: 451340 - DNA, 19 bp, Mus musculus
  siRNA target sequence for Suv39h2 (NM_022724.2,640-658).
caagattacctcaacagaa

SEQ ID NO: 451341 - DNA, 19 bp, Mus musculus
  siRNA target sequence for Suv39h2 (NM_022724.2,666-684).
ccataaggggatgatattt

SEQ ID NO: 451342 - DNA, 19 bp, Mus musculus
  siRNA target sequence for Suv39h2 (NM_022724.2,716-734).
ctttagacttctactacat

SEQ ID NO: 451343 - DNA, 19 bp, Mus musculus
  siRNA target sequence for Suv39h2 (NM_022724.2,751-769).
gctcccgggatcagcataa

SEQ ID NO: 451344 - DNA, 19 bp, Mus musculus
  siRNA target sequence for Suv39h2 (NM_022724.2,756-774).
cgggatcagcataaacagt

SEQ ID NO: 451345 - DNA, 19 bp, Mus musculus
  siRNA target sequence for Suv39h2 (NM_022724.2,780-798).
cacctttggatgttcatgt

SEQ ID NO: 451346 - DNA, 19 bp, Mus musculus
  siRNA target sequence for Suv39h2 (NM_022724.2,844-862).
gtgttggcttataataaga

SEQ ID NO: 451347 - DNA, 19 bp, Mus musculus
  siRNA target sequence for Suv39h2 (NM_022724.2,886-904).
ggcactcccatctacgaat

SEQ ID NO: 451348 - DNA, 19 bp, Mus musculus
  siRNA target sequence for Suv39h2 (NM_022724.2,890-908).
ctcccatctacgaatgcaa

SEQ ID NO: 451349 - DNA, 19 bp, Mus musculus
  siRNA target sequence for Suv39h2 (NM_022724.2,929-947).
ctgaatgtcccaataggat

SEQ ID NO: 451350 - DNA, 19 bp, Mus musculus
  siRNA target sequence for Suv39h2 (NM_022724.2,937-955).
cccaataggattgtacaaa

SEQ ID NO: 451351 - DNA, 19 bp, Mus musculus
  siRNA target sequence for Suv39h2 (NM_022724.2,938-956).
ccaataggattgtacaaaa

SEQ ID NO: 451352 - DNA, 19 bp, Mus musculus
  siRNA target sequence for Suv39h2 (NM_022724.2,1094-1112).
gacggggacagttctatga

SEQ ID NO: 451353 - DNA, 19 bp, Mus musculus
  siRNA target sequence for Suv39h2 (NM_022724.2,1096-1114).
cggggacagttctatgaca

SEQ ID NO: 451354 - DNA, 19 bp, Mus musculus
  siRNA target sequence for Suv39h2 (NM_022724.2,1170-1188).
ggatgcagctcgatatgga

SEQ ID NO: 451355 - DNA, 19 bp, Mus musculus
  siRNA target sequence for Suv39h2 (NM_022724.2,1171-1189).
gatgcagctcgatatggaa

SEQ ID NO: 451356 - DNA, 19 bp, Mus musculus
  siRNA target sequence for Suv39h2 (NM_022724.2,1177-1195).
gctcgatatggaaacgtat

SEQ ID NO: 451357 - DNA, 19 bp, Mus musculus
  siRNA target sequence for Suv39h2 (NM_022724.2,1191-1209).
cgtatcccattttgtgaat

SEQ ID NO: 451358 - DNA, 19 bp, Mus musculus
  siRNA target sequence for Suv39h2 (NM_022724.2,1287-1305).
gttctctacaagaaccata

SEQ ID NO: 451359 - DNA, 19 bp, Mus musculus
  siRNA target sequence for Suv39h2 (NM_022724.2,1397-1415).
gggtcagaacccaatgtaa

SEQ ID NO: 451360 - DNA, 19 bp, Mus musculus
  siRNA target sequence for Suv39h2 (NM_022724.2,1398-1416).
ggtcagaacccaatgtaaa

SEQ ID NO: 451361 - DNA, 19 bp, Mus musculus
  siRNA target sequence for Suv39h2 (NM_022724.2,1399-1417).
gtcagaacccaatgtaaat

SEQ ID NO: 451362 - DNA, 19 bp, Mus musculus
  siRNA target sequence for Ttf1 (NM_009442.1,42-60).
ggggcacaagcaaatttaa

SEQ ID NO: 451363 - DNA, 19 bp, Mus musculus
  siRNA target sequence for Ttf1 (NM_009442.1,44-62).
ggcacaagcaaatttaaga

SEQ ID NO: 451364 - DNA, 19 bp, Mus musculus
  siRNA target sequence for Ttf1 (NM_009442.1,63-81).
cccacactgaaactttgta

SEQ ID NO: 451365 - DNA, 19 bp, Mus musculus
  siRNA target sequence for Ttf1 (NM_009442.1,110-128).
gaaaaaagacctcagaaat

SEQ ID NO: 451366 - DNA, 19 bp, Mus musculus
  siRNA target sequence for Ttf1 (NM_009442.1,537-555).
ctgggatcatccttgtaga

SEQ ID NO: 451367 - DNA, 19 bp, Mus musculus
  siRNA target sequence for Ttf1 (NM_009442.1,630-648).
gacaaaggtcagcaaaagt

SEQ ID NO: 451368 - DNA, 19 bp, Mus musculus
  siRNA target sequence for Ttf1 (NM_009442.1,817-835).
cttgtcttctgaagattta

SEQ ID NO: 451369 - DNA, 19 bp, Mus musculus
  siRNA target sequence for Ttf1 (NM_009442.1,916-934).
catccccgacagtcttgat

SEQ ID NO: 451370 - DNA, 19 bp, Mus musculus
  siRNA target sequence for Ttf1 (NM_009442.1,1064-1082).
gttgctcttgccacatcta

SEQ ID NO: 451371 - DNA, 19 bp, Mus musculus
  siRNA target sequence for Ttf1 (NM_009442.1,1293-1311).
cagcaagacacatatctga

SEQ ID NO: 451372 - DNA, 19 bp, Mus musculus
  siRNA target sequence for Ttf1 (NM_009442.1,1328-1346).
gatgactcggatgttgatt

SEQ ID NO: 451373 - DNA, 19 bp, Mus musculus
  siRNA target sequence for Ttf1 (NM_009442.1,1408-1426).
caccatcagacgcatgtat

SEQ ID NO: 451374 - DNA, 19 bp, Mus musculus
  siRNA target sequence for Ttf1 (NM_009442.1,1463-1481).
caaggtgtggctattagat

SEQ ID NO: 451375 - DNA, 19 bp, Mus musculus
  siRNA target sequence for Ttf1 (NM_009442.1,1485-1503).
gcaaattttctgctaaaga

SEQ ID NO: 451376 - DNA, 19 bp, Mus musculus
  siRNA target sequence for Ttf1 (NM_009442.1,1605-1623).
ctctgatcaccaacctaaa

SEQ ID NO: 451377 - DNA, 19 bp, Mus musculus
  siRNA target sequence for Ttf1 (NM_009442.1,1671-1689).
cctggaagctcgtgtacta

SEQ ID NO: 451378 - DNA, 19 bp, Mus musculus
  siRNA target sequence for Ttf1 (NM_009442.1,1720-1738).
ctacaaaggcaggtacaat

SEQ ID NO: 451379 - DNA, 19 bp, Mus musculus
  siRNA target sequence for Ttf1 (NM_009442.1,1728-1746).
gcaggtacaatgaagaaga

SEQ ID NO: 451380 - DNA, 19 bp, Mus musculus
  siRNA target sequence for Ttf1 (NM_009442.1,1753-1771).
gaagctgaaggcataccat

SEQ ID NO: 451381 - DNA, 19 bp, Mus musculus
  siRNA target sequence for Ttf1 (NM_009442.1,1916-1934).
gtggaggacgtgatcctaa

SEQ ID NO: 451382 - DNA, 19 bp, Mus musculus
  siRNA target sequence for Ttf1 (NM_009442.1,1922-1940).
gacgtgatcctaaagaaga

SEQ ID NO: 451383 - DNA, 19 bp, Mus musculus
  siRNA target sequence for Ttf1 (NM_009442.1,1942-1960).
gtctccccaggagttaaga

SEQ ID NO: 451384 - DNA, 19 bp, Mus musculus
  siRNA target sequence for Ttf1 (NM_009442.1,1944-1962).
ctccccaggagttaagaga

SEQ ID NO: 451385 - DNA, 19 bp, Mus musculus
  siRNA target sequence for Ttf1 (NM_009442.1,1989-2007).
ctgagggtcgcctgtcaat

SEQ ID NO: 451386 - DNA, 19 bp, Mus musculus
  siRNA target sequence for Ttf1 (NM_009442.1,2002-2020).
gtcaattgtccgggaaaaa

SEQ ID NO: 451387 - DNA, 19 bp, Mus musculus
  siRNA target sequence for Ttf1 (NM_009442.1,2004-2022).
caattgtccgggaaaaact

SEQ ID NO: 451388 - DNA, 19 bp, Mus musculus
  siRNA target sequence for Ttf1 (NM_009442.1,2021-2039).
ctctacaagggcatatctt

SEQ ID NO: 451389 - DNA, 19 bp, Mus musculus
  siRNA target sequence for Ttf1 (NM_009442.1,2187-2205).
ggttgtatgaactaaatgt

SEQ ID NO: 451390 - DNA, 19 bp, Mus musculus
  siRNA target sequence for Ttf1 (NM_009442.1,2268-2286).
cttttgttcaggcaaaatt

SEQ ID NO: 451391 - DNA, 19 bp, Mus musculus
  siRNA target sequence for Ttf1 (NM_009442.1,2312-2330).
cccttttggcagaaaaaga

SEQ ID NO: 451392 - DNA, 19 bp, Mus musculus
  siRNA target sequence for Ercc1 (NM_007948.1,199-217).
caggggtcaagcccttatt

SEQ ID NO: 451393 - DNA, 19 bp, Mus musculus
  siRNA target sequence for Ercc1 (NM_007948.1,204-222).
gtcaagcccttattcagat

SEQ ID NO: 451394 - DNA, 19 bp, Mus musculus
  siRNA target sequence for Ercc1 (NM_007948.1,382-400).
gagcaaagtctaatagcat

SEQ ID NO: 451395 - DNA, 19 bp, Mus musculus
  siRNA target sequence for Ercc1 (NM_007948.1,421-439).
ggggcaaccccgtgttgaa

SEQ ID NO: 451396 - DNA, 19 bp, Mus musculus
  siRNA target sequence for Ercc1 (NM_007948.1,424-442).
gcaaccccgtgttgaagtt

SEQ ID NO: 451397 - DNA, 19 bp, Mus musculus
  siRNA target sequence for Ercc1 (NM_007948.1,425-443).
caaccccgtgttgaagttt

SEQ ID NO: 451398 - DNA, 19 bp, Mus musculus
  siRNA target sequence for Ercc1 (NM_007948.1,756-774).
gccgacctccttatggaaa

SEQ ID NO: 451399 - DNA, 19 bp, Mus musculus
  siRNA target sequence for Ercc1 (NM_007948.1,944-962).
ccgcaggctctttgaagta

SEQ ID NO: 451400 - DNA, 19 bp, Mus musculus
  siRNA target sequence for Msh2 (NM_008628.1,90-108).
gggcttcgtgcgcttcttt

SEQ ID NO: 451401 - DNA, 19 bp, Mus musculus
  siRNA target sequence for Msh2 (NM_008628.1,218-236).
cccagggcgtgatcaagta

SEQ ID NO: 451402 - DNA, 19 bp, Mus musculus
  siRNA target sequence for Msh2 (NM_008628.1,220-238).
cagggcgtgatcaagtaca

SEQ ID NO: 451403 - DNA, 19 bp, Mus musculus
  siRNA target sequence for Msh2 (NM_008628.1,297-315).
gtctttcgtgaaagatctt

SEQ ID NO: 451404 - DNA, 19 bp, Mus musculus
  siRNA target sequence for Msh2 (NM_008628.1,299-317).
ctttcgtgaaagatcttct

SEQ ID NO: 451405 - DNA, 19 bp, Mus musculus
  siRNA target sequence for Msh2 (NM_008628.1,326-344).
gccagtatcgagttgaagt

SEQ ID NO: 451406 - DNA, 19 bp, Mus musculus
  siRNA target sequence for Msh2 (NM_008628.1,330-348).
gtatcgagttgaagtttat

SEQ ID NO: 451407 - DNA, 19 bp, Mus musculus
  siRNA target sequence for Msh2 (NM_008628.1,370-388).
gcgtctaaggagaatgagt

SEQ ID NO: 451408 - DNA, 19 bp, Mus musculus
  siRNA target sequence for Msh2 (NM_008628.1,385-403).
gagtggtatctggcattta

SEQ ID NO: 451409 - DNA, 19 bp, Mus musculus
  siRNA target sequence for Msh2 (NM_008628.1,405-423).
ggcttctcccggcaatctt

SEQ ID NO: 451410 - DNA, 19 bp, Mus musculus
  siRNA target sequence for Msh2 (NM_008628.1,406-424).
gcttctcccggcaatcttt

SEQ ID NO: 451411 - DNA, 19 bp, Mus musculus
  siRNA target sequence for Msh2 (NM_008628.1,410-428).
ctcccggcaatctttctca

SEQ ID NO: 451412 - DNA, 19 bp, Mus musculus
  siRNA target sequence for Msh2 (NM_008628.1,414-432).
cggcaatctttctcagttt

SEQ ID NO: 451413 - DNA, 19 bp, Mus musculus
  siRNA target sequence for Msh2 (NM_008628.1,416-434).
gcaatctttctcagtttga

SEQ ID NO: 451414 - DNA, 19 bp, Mus musculus
  siRNA target sequence for Msh2 (NM_008628.1,417-435).
caatctttctcagtttgaa

SEQ ID NO: 451415 - DNA, 19 bp, Mus musculus
  siRNA target sequence for Msh2 (NM_008628.1,438-456).
catcctgtttggtaacaat

SEQ ID NO: 451416 - DNA, 19 bp, Mus musculus
  siRNA target sequence for Msh2 (NM_008628.1,472-490).
gttggcgttatgggtatta

SEQ ID NO: 451417 - DNA, 19 bp, Mus musculus
  siRNA target sequence for Msh2 (NM_008628.1,475-493).
ggcgttatgggtattaaaa

SEQ ID NO: 451418 - DNA, 19 bp, Mus musculus
  siRNA target sequence for Msh2 (NM_008628.1,476-494).
gcgttatgggtattaaaat

SEQ ID NO: 451419 - DNA, 19 bp, Mus musculus
  siRNA target sequence for Msh2 (NM_008628.1,498-516).
cgtggttgatggtcaaaga

SEQ ID NO: 451420 - DNA, 19 bp, Mus musculus
  siRNA target sequence for Msh2 (NM_008628.1,842-860).
catcactatctgcagtaat

SEQ ID NO: 451421 - DNA, 19 bp, Mus musculus
  siRNA target sequence for Msh2 (NM_008628.1,847-865).
ctatctgcagtaatcaagt

SEQ ID NO: 451422 - DNA, 19 bp, Mus musculus
  siRNA target sequence for Msh2 (NM_008628.1,861-879).
caagtttttagaactctta

SEQ ID NO: 451423 - DNA, 19 bp, Mus musculus
  siRNA target sequence for Msh2 (NM_008628.1,876-894).
cttatcagacgattcaaat

SEQ ID NO: 451424 - DNA, 19 bp, Mus musculus
  siRNA target sequence for Msh2 (NM_008628.1,890-908).
caaattttgggcagtttga

SEQ ID NO: 451425 - DNA, 19 bp, Mus musculus
  siRNA target sequence for Msh2 (NM_008628.1,907-925).
gaactggccacttttgact

SEQ ID NO: 451426 - DNA, 19 bp, Mus musculus
  siRNA target sequence for Msh2 (NM_008628.1,958-976).
gttagagccctcaaccttt

SEQ ID NO: 451427 - DNA, 19 bp, Mus musculus
  siRNA target sequence for Msh2 (NM_008628.1,962-980).
gagccctcaaccttttcca

SEQ ID NO: 451428 - DNA, 19 bp, Mus musculus
  siRNA target sequence for Msh2 (NM_008628.1,1013-1031).
ctctggccgcattattgaa

SEQ ID NO: 451429 - DNA, 19 bp, Mus musculus
  siRNA target sequence for Msh2 (NM_008628.1,1015-1033).
ctggccgcattattgaata

SEQ ID NO: 451430 - DNA, 19 bp, Mus musculus
  siRNA target sequence for Msh2 (NM_008628.1,1017-1035).
ggccgcattattgaataaa

SEQ ID NO: 451431 - DNA, 19 bp, Mus musculus
  siRNA target sequence for Msh2 (NM_008628.1,1018-1036).
gccgcattattgaataaat

SEQ ID NO: 451432 - DNA, 19 bp, Mus musculus
  siRNA target sequence for Msh2 (NM_008628.1,1052-1070).
gacaaagattggttaacca

SEQ ID NO: 451433 - DNA, 19 bp, Mus musculus
  siRNA target sequence for Msh2 (NM_008628.1,1184-1202).
gccggtttccagaccttaa

SEQ ID NO: 451434 - DNA, 19 bp, Mus musculus
  siRNA target sequence for Msh2 (NM_008628.1,1224-1242).
gagacaagcagcgaattta

SEQ ID NO: 451435 - DNA, 19 bp, Mus musculus
  siRNA target sequence for Msh2 (NM_008628.1,1226-1244).
gacaagcagcgaatttaca

SEQ ID NO: 451436 - DNA, 19 bp, Mus musculus
  siRNA target sequence for Msh2 (NM_008628.1,1350-1368).
gactcctcttattgatctt

SEQ ID NO: 451437 - DNA, 19 bp, Mus musculus
  siRNA target sequence for Msh2 (NM_008628.1,1434-1452).
ccacgagttccttgtaaaa

SEQ ID NO: 451438 - DNA, 19 bp, Mus musculus
  siRNA target sequence for Msh2 (NM_008628.1,1443-1461).
ccttgtaaaaccttcattt

SEQ ID NO: 451439 - DNA, 19 bp, Mus musculus
  siRNA target sequence for Msh2 (NM_008628.1,1465-1483).
cctaacctgagtgaactaa

SEQ ID NO: 451440 - DNA, 19 bp, Mus musculus
  siRNA target sequence for Msh2 (NM_008628.1,1512-1530).
gatgcagtccaccttaata

SEQ ID NO: 451441 - DNA, 19 bp, Mus musculus
  siRNA target sequence for Msh2 (NM_008628.1,1515-1533).
gcagtccaccttaataaat

SEQ ID NO: 451442 - DNA, 19 bp, Mus musculus
  siRNA target sequence for Msh2 (NM_008628.1,1518-1536).
gtccaccttaataaatgca

SEQ ID NO: 451443 - DNA, 19 bp, Mus musculus
  siRNA target sequence for Msh2 (NM_008628.1,1554-1572).
ggatcctggcaaacagatt

SEQ ID NO: 451444 - DNA, 19 bp, Mus musculus
  siRNA target sequence for Msh2 (NM_008628.1,1558-1576).
cctggcaaacagattaaat

SEQ ID NO: 451445 - DNA, 19 bp, Mus musculus
  siRNA target sequence for Msh2 (NM_008628.1,1562-1580).
gcaaacagattaaattgga

SEQ ID NO: 451446 - DNA, 19 bp, Mus musculus
  siRNA target sequence for Msh2 (NM_008628.1,1578-1596).
ggactccagtgcacagttt

SEQ ID NO: 451447 - DNA, 19 bp, Mus musculus
  siRNA target sequence for Msh2 (NM_008628.1,1583-1601).
ccagtgcacagtttggata

SEQ ID NO: 451448 - DNA, 19 bp, Mus musculus
  siRNA target sequence for Msh2 (NM_008628.1,1636-1654).
cttcgcaacaacaagaact

SEQ ID NO: 451449 - DNA, 19 bp, Mus musculus
  siRNA target sequence for Msh2 (NM_008628.1,1639-1657).
cgcaacaacaagaacttca

SEQ ID NO: 451450 - DNA, 19 bp, Mus musculus
  siRNA target sequence for Msh2 (NM_008628.1,1709-1727).
cctctttaaatgaagaata

SEQ ID NO: 451451 - DNA, 19 bp, Mus musculus
  siRNA target sequence for Msh2 (NM_008628.1,1755-1773).
ggcccaggatgccattgtt

SEQ ID NO: 451452 - DNA, 19 bp, Mus musculus
  siRNA target sequence for Msh2 (NM_008628.1,1756-1774).
gcccaggatgccattgtta

SEQ ID NO: 451453 - DNA, 19 bp, Mus musculus
  siRNA target sequence for Msh2 (NM_008628.1,1761-1779).
ggatgccattgttaaagaa

SEQ ID NO: 451454 - DNA, 19 bp, Mus musculus
  siRNA target sequence for Msh2 (NM_008628.1,1827-1845).
cgatgtgctggctcactta

SEQ ID NO: 451455 - DNA, 19 bp, Mus musculus
  siRNA target sequence for Msh2 (NM_008628.1,1840-1858).
cacttagacgccattgtta

SEQ ID NO: 451456 - DNA, 19 bp, Mus musculus
  siRNA target sequence for Msh2 (NM_008628.1,1859-1877).
gcttcgctcatgtgtcaaa

SEQ ID NO: 451457 - DNA, 19 bp, Mus musculus
  siRNA target sequence for Msh2 (NM_008628.1,1878-1896).
cgcagcacccgttccttat

SEQ ID NO: 451458 - DNA, 19 bp, Mus musculus
  siRNA target sequence for Msh2 (NM_008628.1,1880-1898).
cagcacccgttccttatgt

SEQ ID NO: 451459 - DNA, 19 bp, Mus musculus
  siRNA target sequence for Msh2 (NM_008628.1,1961-1979).
gtgttgaagttcaagatga

SEQ ID NO: 451460 - DNA, 19 bp, Mus musculus
  siRNA target sequence for Msh2 (NM_008628.1,2047-2065).
cccaatatgggaggtaaat

SEQ ID NO: 451461 - DNA, 19 bp, Mus musculus
  siRNA target sequence for Msh2 (NM_008628.1,2049-2067).
caatatgggaggtaaatca

SEQ ID NO: 451462 - DNA, 19 bp, Mus musculus
  siRNA target sequence for Msh2 (NM_008628.1,2105-2123).
cccaaatcgggtgttttgt

SEQ ID NO: 451463 - DNA, 19 bp, Mus musculus
  siRNA target sequence for Msh2 (NM_008628.1,2207-2225).
ccacattcatggctgaaat

SEQ ID NO: 451464 - DNA, 19 bp, Mus musculus
  siRNA target sequence for Msh2 (NM_008628.1,2258-2276).
ccaaagactccttaataat

SEQ ID NO: 451465 - DNA, 19 bp, Mus musculus
  siRNA target sequence for Msh2 (NM_008628.1,2267-2285).
ccttaataatcattgatga

SEQ ID NO: 451466 - DNA, 19 bp, Mus musculus
  siRNA target sequence for Msh2 (NM_008628.1,2322-2340).
gttagcatgggctatatca

SEQ ID NO: 451467 - DNA, 19 bp, Mus musculus
  siRNA target sequence for Msh2 (NM_008628.1,2326-2344).
gcatgggctatatcagatt

SEQ ID NO: 451468 - DNA, 19 bp, Mus musculus
  siRNA target sequence for Msh2 (NM_008628.1,2327-2345).
catgggctatatcagatta

SEQ ID NO: 451469 - DNA, 19 bp, Mus musculus
  siRNA target sequence for Msh2 (NM_008628.1,2331-2349).
ggctatatcagattacatt

SEQ ID NO: 451470 - DNA, 19 bp, Mus musculus
  siRNA target sequence for Msh2 (NM_008628.1,2373-2391).
catgtttgccacccatttt

SEQ ID NO: 451471 - DNA, 19 bp, Mus musculus
  siRNA target sequence for Msh2 (NM_008628.1,2385-2403).
ccattttcatgaacttact

SEQ ID NO: 451472 - DNA, 19 bp, Mus musculus
  siRNA target sequence for Msh2 (NM_008628.1,2416-2434).
caaataccaactgttaata

SEQ ID NO: 451473 - DNA, 19 bp, Mus musculus
  siRNA target sequence for Msh2 (NM_008628.1,2463-2481).
ggagaccctaactatgctt

SEQ ID NO: 451474 - DNA, 19 bp, Mus musculus
  siRNA target sequence for Msh2 (NM_008628.1,2464-2482).
gagaccctaactatgcttt

SEQ ID NO: 451475 - DNA, 19 bp, Mus musculus
  siRNA target sequence for Msh2 (NM_008628.1,2468-2486).
ccctaactatgctttacca

SEQ ID NO: 451476 - DNA, 19 bp, Mus musculus
  siRNA target sequence for Msh2 (NM_008628.1,2469-2487).
cctaactatgctttaccaa

SEQ ID NO: 451477 - DNA, 19 bp, Mus musculus
  siRNA target sequence for Msh2 (NM_008628.1,2478-2496).
gctttaccaagtgaaaaaa

SEQ ID NO: 451478 - DNA, 19 bp, Mus musculus
  siRNA target sequence for Msh2 (NM_008628.1,2581-2599).
gctctagagcttgaagaat

SEQ ID NO: 451479 - DNA, 19 bp, Mus musculus
  siRNA target sequence for Msh2 (NM_008628.1,2671-2689).
gagcaaggtgagaaaatta

SEQ ID NO: 451480 - DNA, 19 bp, Mus musculus
  siRNA target sequence for Msh2 (NM_008628.1,2777-2795).
ccgaggtggtcgcaaagaa

SEQ ID NO: 451481 - DNA, 19 bp, Mus musculus
  siRNA target sequence for Msh2 (NM_008628.1,2782-2800).
gtggtcgcaaagaacaaca

SEQ ID NO: 451482 - DNA, 19 bp, Mus musculus
  siRNA target sequence for Msh2 (NM_008628.1,2801-2819).
gcttcgtaaacgagatcat

SEQ ID NO: 451483 - DNA, 19 bp, Mus musculus
  siRNA target sequence for Msh2 (NM_008628.1,2802-2820).
cttcgtaaacgagatcatt

SEQ ID NO: 451484 - DNA, 19 bp, Mus musculus
  siRNA target sequence for Msh3 (NM_010829.1,82-100).
ggtgggcccactaagaaaa

SEQ ID NO: 451485 - DNA, 19 bp, Mus musculus
  siRNA target sequence for Msh3 (NM_010829.1,83-101).
gtgggcccactaagaaaaa

SEQ ID NO: 451486 - DNA, 19 bp, Mus musculus
  siRNA target sequence for Msh3 (NM_010829.1,175-193).
ctgaggcccaggattgttt

SEQ ID NO: 451487 - DNA, 19 bp, Mus musculus
  siRNA target sequence for Msh3 (NM_010829.1,177-195).
gaggcccaggattgtttta

SEQ ID NO: 451488 - DNA, 19 bp, Mus musculus
  siRNA target sequence for Msh3 (NM_010829.1,272-290).
gggagagacttgaagttct

SEQ ID NO: 451489 - DNA, 19 bp, Mus musculus
  siRNA target sequence for Msh3 (NM_010829.1,289-307).
ctgccaaggtgtactgatt

SEQ ID NO: 451490 - DNA, 19 bp, Mus musculus
  siRNA target sequence for Msh3 (NM_010829.1,293-311).
caaggtgtactgattttga

SEQ ID NO: 451491 - DNA, 19 bp, Mus musculus
  siRNA target sequence for Msh3 (NM_010829.1,296-314).
ggtgtactgattttgaaga

SEQ ID NO: 451492 - DNA, 19 bp, Mus musculus
  siRNA target sequence for Msh3 (NM_010829.1,331-349).
gcaaagaatgcggttttgt

SEQ ID NO: 451493 - DNA, 19 bp, Mus musculus
  siRNA target sequence for Msh3 (NM_010829.1,340-358).
gcggttttgtccgaagatt

SEQ ID NO: 451494 - DNA, 19 bp, Mus musculus
  siRNA target sequence for Msh3 (NM_010829.1,348-366).
gtccgaagattccaaatct

SEQ ID NO: 451495 - DNA, 19 bp, Mus musculus
  siRNA target sequence for Msh3 (NM_010829.1,350-368).
ccgaagattccaaatctca

SEQ ID NO: 451496 - DNA, 19 bp, Mus musculus
  siRNA target sequence for Msh3 (NM_010829.1,359-377).
ccaaatctcaggctaatca

SEQ ID NO: 451497 - DNA, 19 bp, Mus musculus
  siRNA target sequence for Msh3 (NM_010829.1,395-413).
gaccctgccctgaagtttt

SEQ ID NO: 451498 - DNA, 19 bp, Mus musculus
  siRNA target sequence for Msh3 (NM_010829.1,417-435).
gaagacttccgattgtaaa

SEQ ID NO: 451499 - DNA, 19 bp, Mus musculus
  siRNA target sequence for Msh3 (NM_010829.1,420-438).
gacttccgattgtaaacct

SEQ ID NO: 451500 - DNA, 19 bp, Mus musculus
  siRNA target sequence for Msh3 (NM_010829.1,422-440).
cttccgattgtaaaccttt

SEQ ID NO: 451501 - DNA, 19 bp, Mus musculus
  siRNA target sequence for Msh3 (NM_010829.1,459-477).
cgtctatacaccgttagaa

SEQ ID NO: 451502 - DNA, 19 bp, Mus musculus
  siRNA target sequence for Msh3 (NM_010829.1,470-488).
cgttagaactgcagtactt

SEQ ID NO: 451503 - DNA, 19 bp, Mus musculus
  siRNA target sequence for Msh3 (NM_010829.1,475-493).
gaactgcagtacttagata

SEQ ID NO: 451504 - DNA, 19 bp, Mus musculus
  siRNA target sequence for Msh3 (NM_010829.1,599-617).
gccacttagaccacaactt

SEQ ID NO: 451505 - DNA, 19 bp, Mus musculus
  siRNA target sequence for Msh3 (NM_010829.1,615-633).
ctttatgactgcaagcata

SEQ ID NO: 451506 - DNA, 19 bp, Mus musculus
  siRNA target sequence for Msh3 (NM_010829.1,726-744).
ggccatcggagacaataaa

SEQ ID NO: 451507 - DNA, 19 bp, Mus musculus
  siRNA target sequence for Msh3 (NM_010829.1,732-750).
cggagacaataaaagttct

SEQ ID NO: 451508 - DNA, 19 bp, Mus musculus
  siRNA target sequence for Msh3 (NM_010829.1,751-769).
gtcttctcccggaaattga

SEQ ID NO: 451509 - DNA, 19 bp, Mus musculus
  siRNA target sequence for Msh3 (NM_010829.1,768-786).
gaccgctctttatacgaaa

SEQ ID NO: 451510 - DNA, 19 bp, Mus musculus
  siRNA target sequence for Msh3 (NM_010829.1,772-790).
gctctttatacgaaatcca

SEQ ID NO: 451511 - DNA, 19 bp, Mus musculus
  siRNA target sequence for Msh3 (NM_010829.1,783-801).
gaaatccacacttattggt

SEQ ID NO: 451512 - DNA, 19 bp, Mus musculus
  siRNA target sequence for Msh3 (NM_010829.1,789-807).
cacacttattggtgaagat

SEQ ID NO: 451513 - DNA, 19 bp, Mus musculus
  siRNA target sequence for Msh3 (NM_010829.1,817-835).
ctcatcaggctggatgatt

SEQ ID NO: 451514 - DNA, 19 bp, Mus musculus
  siRNA target sequence for Msh3 (NM_010829.1,822-840).
caggctggatgattctgta

SEQ ID NO: 451515 - DNA, 19 bp, Mus musculus
  siRNA target sequence for Msh3 (NM_010829.1,825-843).
gctggatgattctgtaaat

SEQ ID NO: 451516 - DNA, 19 bp, Mus musculus
  siRNA target sequence for Msh3 (NM_010829.1,826-844).
ctggatgattctgtaaata

SEQ ID NO: 451517 - DNA, 19 bp, Mus musculus
  siRNA target sequence for Msh3 (NM_010829.1,850-868).
gaggtaatgacagatacat

SEQ ID NO: 451518 - DNA, 19 bp, Mus musculus
  siRNA target sequence for Msh3 (NM_010829.1,852-870).
ggtaatgacagatacatct

SEQ ID NO: 451519 - DNA, 19 bp, Mus musculus
  siRNA target sequence for Msh3 (NM_010829.1,853-871).
gtaatgacagatacatcta

SEQ ID NO: 451520 - DNA, 19 bp, Mus musculus
  siRNA target sequence for Msh3 (NM_010829.1,883-901).
ctgtgtatctacgaagaaa

SEQ ID NO: 451521 - DNA, 19 bp, Mus musculus
  siRNA target sequence for Msh3 (NM_010829.1,887-905).
gtatctacgaagaaaagga

SEQ ID NO: 451522 - DNA, 19 bp, Mus musculus
  siRNA target sequence for Msh3 (NM_010829.1,965-983).
caactggcgaggttgtgtt

SEQ ID NO: 451523 - DNA, 19 bp, Mus musculus
  siRNA target sequence for Msh3 (NM_010829.1,1017-1035).
gctggagactcgcatatca

SEQ ID NO: 451524 - DNA, 19 bp, Mus musculus
  siRNA target sequence for Msh3 (NM_010829.1,1107-1125).
caccaatgtcaggttgaaa

SEQ ID NO: 451525 - DNA, 19 bp, Mus musculus
  siRNA target sequence for Msh3 (NM_010829.1,1114-1132).
gtcaggttgaaaactgtaa

SEQ ID NO: 451526 - DNA, 19 bp, Mus musculus
  siRNA target sequence for Msh4 (NM_031870.1,170-188).
ctgcgcctgcgcgattaca

SEQ ID NO: 451527 - DNA, 19 bp, Mus musculus
  siRNA target sequence for Msh4 (NM_031870.1,464-482).
ccaggttcatcatttggaa

SEQ ID NO: 451528 - DNA, 19 bp, Mus musculus
  siRNA target sequence for Msh4 (NM_031870.1,558-576).
ccacttacccacatacatt

SEQ ID NO: 451529 - DNA, 19 bp, Mus musculus
  siRNA target sequence for Msh4 (NM_031870.1,565-583).
cccacatacatttagaact

SEQ ID NO: 451530 - DNA, 19 bp, Mus musculus
  siRNA target sequence for Msh4 (NM_031870.1,627-645).
ggacaccacaagtaggata

SEQ ID NO: 451531 - DNA, 19 bp, Mus musculus
  siRNA target sequence for Msh4 (NM_031870.1,628-646).
gacaccacaagtaggatat

SEQ ID NO: 451532 - DNA, 19 bp, Mus musculus
  siRNA target sequence for Msh4 (NM_031870.1,676-694).
cgccccatcagtcattgta

SEQ ID NO: 451533 - DNA, 19 bp, Mus musculus
  siRNA target sequence for Msh4 (NM_031870.1,720-738).
ccagaggcgagataggaat

SEQ ID NO: 451534 - DNA, 19 bp, Mus musculus
  siRNA target sequence for Msh4 (NM_031870.1,730-748).
gataggaatggcaagcatt

SEQ ID NO: 451535 - DNA, 19 bp, Mus musculus
  siRNA target sequence for Msh4 (NM_031870.1,734-752).
ggaatggcaagcattgatt

SEQ ID NO: 451536 - DNA, 19 bp, Mus musculus
  siRNA target sequence for Msh4 (NM_031870.1,735-753).
gaatggcaagcattgattt

SEQ ID NO: 451537 - DNA, 19 bp, Mus musculus
  siRNA target sequence for Msh4 (NM_031870.1,775-793).
gtcacagtttgcagacaat

SEQ ID NO: 451538 - DNA, 19 bp, Mus musculus
  siRNA target sequence for Msh4 (NM_031870.1,779-797).
cagtttgcagacaatacaa

SEQ ID NO: 451539 - DNA, 19 bp, Mus musculus
  siRNA target sequence for Msh4 (NM_031870.1,788-806).
gacaatacaacatatgcaa

SEQ ID NO: 451540 - DNA, 19 bp, Mus musculus
  siRNA target sequence for Msh4 (NM_031870.1,834-852).
cacctttggaaataataat

SEQ ID NO: 451541 - DNA, 19 bp, Mus musculus
  siRNA target sequence for Msh4 (NM_031870.1,874-892).
gggaaattcaaccaagtta

SEQ ID NO: 451542 - DNA, 19 bp, Mus musculus
  siRNA target sequence for Msh4 (NM_031870.1,875-893).
ggaaattcaaccaagttat

SEQ ID NO: 451543 - DNA, 19 bp, Mus musculus
  siRNA target sequence for Msh4 (NM_031870.1,938-956).
gtccaaaggaaatacttca

SEQ ID NO: 451544 - DNA, 19 bp, Mus musculus
  siRNA target sequence for Msh4 (NM_031870.1,1022-1040).
gaggtgcagtccaggtatt

SEQ ID NO: 451545 - DNA, 19 bp, Mus musculus
  siRNA target sequence for Msh4 (NM_031870.1,1025-1043).
gtgcagtccaggtattact

SEQ ID NO: 451546 - DNA, 19 bp, Mus musculus
  siRNA target sequence for Msh4 (NM_031870.1,1052-1070).
gctgctgcagctttattaa

SEQ ID NO: 451547 - DNA, 19 bp, Mus musculus
  siRNA target sequence for Msh4 (NM_031870.1,1076-1094).
gtcgaattcattcagaatt

SEQ ID NO: 451548 - DNA, 19 bp, Mus musculus
  siRNA target sequence for Msh4 (NM_031870.1,1078-1096).
cgaattcattcagaattca

SEQ ID NO: 451549 - DNA, 19 bp, Mus musculus
  siRNA target sequence for Msh4 (NM_031870.1,1103-1121).
gcacccaaatcgctaaaga

SEQ ID NO: 451550 - DNA, 19 bp, Mus musculus
  siRNA target sequence for Msh4 (NM_031870.1,1104-1122).
cacccaaatcgctaaagat

SEQ ID NO: 451551 - DNA, 19 bp, Mus musculus
  siRNA target sequence for Msh4 (NM_031870.1,1161-1179).
catcatcggcccaaaacct

SEQ ID NO: 451552 - DNA, 19 bp, Mus musculus
  siRNA target sequence for Msh4 (NM_031870.1,1198-1216).
ccaggactacaggagtaat

SEQ ID NO: 451553 - DNA, 19 bp, Mus musculus
  siRNA target sequence for Msh4 (NM_031870.1,1202-1220).
gactacaggagtaatcaca

SEQ ID NO: 451554 - DNA, 19 bp, Mus musculus
  siRNA target sequence for Msh4 (NM_031870.1,1219-1237).
cactctcttcggtgtttta

SEQ ID NO: 451555 - DNA, 19 bp, Mus musculus
  siRNA target sequence for Msh4 (NM_031870.1,1370-1388).
ggactccagtcagtcatat

SEQ ID NO: 451556 - DNA, 19 bp, Mus musculus
  siRNA target sequence for Msh4 (NM_031870.1,1375-1393).
ccagtcagtcatatcaaga

SEQ ID NO: 451557 - DNA, 19 bp, Mus musculus
  siRNA target sequence for Msh4 (NM_031870.1,1404-1422).
cggagcagctgctttctgt

SEQ ID NO: 451558 - DNA, 19 bp, Mus musculus
  siRNA target sequence for Msh4 (NM_031870.1,1450-1468).
ggttaacgcagctgaatca

SEQ ID NO: 451559 - DNA, 19 bp, Mus musculus
  siRNA target sequence for Msh4 (NM_031870.1,1451-1469).
gttaacgcagctgaatcaa

SEQ ID NO: 451560 - DNA, 19 bp, Mus musculus
  siRNA target sequence for Msh4 (NM_031870.1,1457-1475).
gcagctgaatcaaagataa

SEQ ID NO: 451561 - DNA, 19 bp, Mus musculus
  siRNA target sequence for Msh4 (NM_031870.1,1460-1478).
gctgaatcaaagataacaa

SEQ ID NO: 451562 - DNA, 19 bp, Mus musculus
  siRNA target sequence for Msh4 (NM_031870.1,1476-1494).
caaatttgatctatctgaa

SEQ ID NO: 451563 - DNA, 19 bp, Mus musculus
  siRNA target sequence for Msh4 (NM_031870.1,1517-1535).
cctttaaaggtcaccttaa

SEQ ID NO: 451564 - DNA, 19 bp, Mus musculus
  siRNA target sequence for Msh4 (NM_031870.1,1576-1594).
cttggaagaccataggttt

SEQ ID NO: 451565 - DNA, 19 bp, Mus musculus
  siRNA target sequence for Msh4 (NM_031870.1,1591-1609).
gtttgggctaatacttgat

SEQ ID NO: 451566 - DNA, 19 bp, Mus musculus
  siRNA target sequence for Msh4 (NM_031870.1,1596-1614).
ggctaatacttgataagat

SEQ ID NO: 451567 - DNA, 19 bp, Mus musculus
  siRNA target sequence for Msh4 (NM_031870.1,1597-1615).
gctaatacttgataagatt

SEQ ID NO: 451568 - DNA, 19 bp, Mus musculus
  siRNA target sequence for Msh4 (NM_031870.1,1598-1616).
ctaatacttgataagatta

SEQ ID NO: 451569 - DNA, 19 bp, Mus musculus
  siRNA target sequence for Msh4 (NM_031870.1,1728-1746).
ggacatacacagagatagt

SEQ ID NO: 451570 - DNA, 19 bp, Mus musculus
  siRNA target sequence for Msh4 (NM_031870.1,1770-1788).
cacagctcgcagagaagta

SEQ ID NO: 451571 - DNA, 19 bp, Mus musculus
  siRNA target sequence for Msh4 (NM_031870.1,1818-1836).
cctcacgggggttcttcat

SEQ ID NO: 451572 - DNA, 19 bp, Mus musculus
  siRNA target sequence for Msh4 (NM_031870.1,1874-1892).
cagcttccttcggagttta

SEQ ID NO: 451573 - DNA, 19 bp, Mus musculus
  siRNA target sequence for Msh4 (NM_031870.1,1876-1894).
gcttccttcggagtttatt

SEQ ID NO: 451574 - DNA, 19 bp, Mus musculus
  siRNA target sequence for Msh4 (NM_031870.1,1877-1895).
cttccttcggagtttatta

SEQ ID NO: 451575 - DNA, 19 bp, Mus musculus
  siRNA target sequence for Msh4 (NM_031870.1,1881-1899).
cttcggagtttattaagat

SEQ ID NO: 451576 - DNA, 19 bp, Mus musculus
  siRNA target sequence for Msh4 (NM_031870.1,1923-1941).
gctttacatcagcagattt

SEQ ID NO: 451577 - DNA, 19 bp, Mus musculus
  siRNA target sequence for Msh4 (NM_031870.1,1924-1942).
ctttacatcagcagattta

SEQ ID NO: 451578 - DNA, 19 bp, Mus musculus
  siRNA target sequence for Msh4 (NM_031870.1,1929-1947).
catcagcagatttaattaa

SEQ ID NO: 451579 - DNA, 19 bp, Mus musculus
  siRNA target sequence for Msh4 (NM_031870.1,1967-1985).
gagtctttgcgagaaatct

SEQ ID NO: 451580 - DNA, 19 bp, Mus musculus
  siRNA target sequence for Msh4 (NM_031870.1,1969-1987).
gtctttgcgagaaatctat

SEQ ID NO: 451581 - DNA, 19 bp, Mus musculus
  siRNA target sequence for Msh4 (NM_031870.1,1971-1989).
ctttgcgagaaatctatca

SEQ ID NO: 451582 - DNA, 19 bp, Mus musculus
  siRNA target sequence for Msh4 (NM_031870.1,2099-2117).
gcgcatgcctgtactcttt

SEQ ID NO: 451583 - DNA, 19 bp, Mus musculus
  siRNA target sequence for Msh4 (NM_031870.1,2125-2143).
cgttcgaccagagtttact

SEQ ID NO: 451584 - DNA, 19 bp, Mus musculus
  siRNA target sequence for Msh4 (NM_031870.1,2142-2160).
ctgacactttagcaatcaa

SEQ ID NO: 451585 - DNA, 19 bp, Mus musculus
  siRNA target sequence for Msh4 (NM_031870.1,2146-2164).
cactttagcaatcaaacaa

SEQ ID NO: 451586 - DNA, 19 bp, Mus musculus
  siRNA target sequence for Msh4 (NM_031870.1,2176-2194).
cattcttgaaaaaatatct

SEQ ID NO: 451587 - DNA, 19 bp, Mus musculus
  siRNA target sequence for Msh4 (NM_031870.1,2204-2222).
cctgtcgccaacaatacct

SEQ ID NO: 451588 - DNA, 19 bp, Mus musculus
  siRNA target sequence for Msh4 (NM_031870.1,2209-2227).
cgccaacaatacctacatt

SEQ ID NO: 451589 - DNA, 19 bp, Mus musculus
  siRNA target sequence for Msh4 (NM_031870.1,2215-2233).
caatacctacattacagaa

SEQ ID NO: 451590 - DNA, 19 bp, Mus musculus
  siRNA target sequence for Msh4 (NM_031870.1,2272-2290).
cggaaagtccacgtactta

SEQ ID NO: 451591 - DNA, 19 bp, Mus musculus
  siRNA target sequence for Msh4 (NM_031870.1,2342-2360).
gcagaatacgcctccttta

SEQ ID NO: 451592 - DNA, 19 bp, Mus musculus
  siRNA target sequence for Msh4 (NM_031870.1,2345-2363).
gaatacgcctcctttagga

SEQ ID NO: 451593 - DNA, 19 bp, Mus musculus
  siRNA target sequence for Msh4 (NM_031870.1,2362-2380).
gattgctgcacagatcttt

SEQ ID NO: 451594 - DNA, 19 bp, Mus musculus
  siRNA target sequence for Msh4 (NM_031870.1,2372-2390).
cagatctttacgagaatca

SEQ ID NO: 451595 - DNA, 19 bp, Mus musculus
  siRNA target sequence for Msh4 (NM_031870.1,2374-2392).
gatctttacgagaatcagt

SEQ ID NO: 451596 - DNA, 19 bp, Mus musculus
  siRNA target sequence for Msh4 (NM_031870.1,2389-2407).
cagtactgatgatgatatt

SEQ ID NO: 451597 - DNA, 19 bp, Mus musculus
  siRNA target sequence for Msh4 (NM_031870.1,2412-2430).
caaactcatcaacgtttat

SEQ ID NO: 451598 - DNA, 19 bp, Mus musculus
  siRNA target sequence for Msh4 (NM_031870.1,2421-2439).
caacgtttatgaaagaaat

SEQ ID NO: 451599 - DNA, 19 bp, Mus musculus
  siRNA target sequence for Msh4 (NM_031870.1,2500-2518).
gcttggcagaggcactaat

SEQ ID NO: 451600 - DNA, 19 bp, Mus musculus
  siRNA target sequence for Msh4 (NM_031870.1,2501-2519).
cttggcagaggcactaata

SEQ ID NO: 451601 - DNA, 19 bp, Mus musculus
  siRNA target sequence for Msh4 (NM_031870.1,2505-2523).
gcagaggcactaatacaga

SEQ ID NO: 451602 - DNA, 19 bp, Mus musculus
  siRNA target sequence for Msh4 (NM_031870.1,2576-2594).
gcatttacactcttcacta

SEQ ID NO: 451603 - DNA, 19 bp, Mus musculus
  siRNA target sequence for Msh4 (NM_031870.1,2605-2623).
ggaactatgccatctagat

SEQ ID NO: 451604 - DNA, 19 bp, Mus musculus
  siRNA target sequence for Msh4 (NM_031870.1,2625-2643).
ccctgtatcttaatgtaga

SEQ ID NO: 451605 - DNA, 19 bp, Mus musculus
  siRNA target sequence for Msh4 (NM_031870.1,2626-2644).
cctgtatcttaatgtagaa

SEQ ID NO: 451606 - DNA, 19 bp, Mus musculus
  siRNA target sequence for Msh4 (NM_031870.1,2743-2761).
gaactatggattaaaagct

SEQ ID NO: 451607 - DNA, 19 bp, Mus musculus
  siRNA target sequence for Msh4 (NM_031870.1,2773-2791).
ctcacttccgtcatcgatt

SEQ ID NO: 451608 - DNA, 19 bp, Mus musculus
  siRNA target sequence for Msh4 (NM_031870.1,2777-2795).
cttccgtcatcgattgtct

SEQ ID NO: 451609 - DNA, 19 bp, Mus musculus
  siRNA target sequence for Msh4 (NM_031870.1,2798-2816).
gatgccagagacatcacaa

SEQ ID NO: 451610 - DNA, 19 bp, Mus musculus
  siRNA target sequence for Msh4 (NM_031870.1,2856-2874).
cccctgagatggatagaca

SEQ ID NO: 451611 - DNA, 19 bp, Mus musculus
  siRNA target sequence for Msh5 (NM_013600.1,421-439).
gatacctgggcattgctta

SEQ ID NO: 451612 - DNA, 19 bp, Mus musculus
  siRNA target sequence for Msh5 (NM_013600.1,488-506).
ccacgagagcctaaagctt

SEQ ID NO: 451613 - DNA, 19 bp, Mus musculus
  siRNA target sequence for Msh5 (NM_013600.1,653-671).
ggattttggtccagagata

SEQ ID NO: 451614 - DNA, 19 bp, Mus musculus
  siRNA target sequence for Msh5 (NM_013600.1,654-672).
gattttggtccagagataa

SEQ ID NO: 451615 - DNA, 19 bp, Mus musculus
  siRNA target sequence for Msh5 (NM_013600.1,682-700).
gtctcctttccggaaacta

SEQ ID NO: 451616 - DNA, 19 bp, Mus musculus
  siRNA target sequence for Msh5 (NM_013600.1,684-702).
ctcctttccggaaactact

SEQ ID NO: 451617 - DNA, 19 bp, Mus musculus
  siRNA target sequence for Msh5 (NM_013600.1,719-737).
catgactgctactgagaaa

SEQ ID NO: 451618 - DNA, 19 bp, Mus musculus
  siRNA target sequence for Msh5 (NM_013600.1,812-830).
cctgagtcgaagaagaatt

SEQ ID NO: 451619 - DNA, 19 bp, Mus musculus
  siRNA target sequence for Msh5 (NM_013600.1,823-841).
gaagaattggggttgaact

SEQ ID NO: 451620 - DNA, 19 bp, Mus musculus
  siRNA target sequence for Msh5 (NM_013600.1,832-850).
gggttgaactggaagacta

SEQ ID NO: 451621 - DNA, 19 bp, Mus musculus
  siRNA target sequence for Msh5 (NM_013600.1,865-883).
ctatcctgggattcaagaa

SEQ ID NO: 451622 - DNA, 19 bp, Mus musculus
  siRNA target sequence for Msh5 (NM_013600.1,907-925).
gcatagatcaagacactta

SEQ ID NO: 451623 - DNA, 19 bp, Mus musculus
  siRNA target sequence for Msh5 (NM_013600.1,922-940).
cttacagcgttctacagat

SEQ ID NO: 451624 - DNA, 19 bp, Mus musculus
  siRNA target sequence for Msh5 (NM_013600.1,928-946).
gcgttctacagattttcaa

SEQ ID NO: 451625 - DNA, 19 bp, Mus musculus
  siRNA target sequence for Msh5 (NM_013600.1,955-973).
ctcacccctcggtgtacaa

SEQ ID NO: 451626 - DNA, 19 bp, Mus musculus
  siRNA target sequence for Msh5 (NM_013600.1,959-977).
cccctcggtgtacaaagta

SEQ ID NO: 451627 - DNA, 19 bp, Mus musculus
  siRNA target sequence for Msh5 (NM_013600.1,1102-1120).
cccgactggatgtcattca

SEQ ID NO: 451628 - DNA, 19 bp, Mus musculus
  siRNA target sequence for Msh5 (NM_013600.1,1104-1122).
cgactggatgtcattcagt

SEQ ID NO: 451629 - DNA, 19 bp, Mus musculus
  siRNA target sequence for Msh5 (NM_013600.1,1348-1366).
ctgacgacctgcatcacat

SEQ ID NO: 451630 - DNA, 19 bp, Mus musculus
  siRNA target sequence for Msh5 (NM_013600.1,1400-1418).
ggaaagtcttgctgaaaat

SEQ ID NO: 451631 - DNA, 19 bp, Mus musculus
  siRNA target sequence for Msh5 (NM_013600.1,1426-1444).
cagtcctccctaacataga

SEQ ID NO: 451632 - DNA, 19 bp, Mus musculus
  siRNA target sequence for Msh5 (NM_013600.1,1546-1564).
catgcagtgtcatctacat

SEQ ID NO: 451633 - DNA, 19 bp, Mus musculus
  siRNA target sequence for Msh5 (NM_013600.1,1556-1574).
catctacatccctctgatt

SEQ ID NO: 451634 - DNA, 19 bp, Mus musculus
  siRNA target sequence for Msh5 (NM_013600.1,1665-1683).
gacaagctgcactatcgta

SEQ ID NO: 451635 - DNA, 19 bp, Mus musculus
  siRNA target sequence for Msh5 (NM_013600.1,1863-1881).
cgggactacggctattcga

SEQ ID NO: 451636 - DNA, 19 bp, Mus musculus
  siRNA target sequence for Msh5 (NM_013600.1,2029-2047).
cctcagggaaaagcatata

SEQ ID NO: 451637 - DNA, 19 bp, Mus musculus
  siRNA target sequence for Msh5 (NM_013600.1,2055-2073).
caggtaggcttgatcactt

SEQ ID NO: 451638 - DNA, 19 bp, Mus musculus
  siRNA target sequence for Msh5 (NM_013600.1,2058-2076).
gtaggcttgatcactttca

SEQ ID NO: 451639 - DNA, 19 bp, Mus musculus
  siRNA target sequence for Msh5 (NM_013600.1,2113-2131).
ccgagattggggtaatcga

SEQ ID NO: 451640 - DNA, 19 bp, Mus musculus
  siRNA target sequence for Msh5 (NM_013600.1,2132-2150).
cgccatcttcactcgaatt

SEQ ID NO: 451641 - DNA, 19 bp, Mus musculus
  siRNA target sequence for Msh5 (NM_013600.1,2134-2152).
ccatcttcactcgaattca

SEQ ID NO: 451642 - DNA, 19 bp, Mus musculus
  siRNA target sequence for Msh5 (NM_013600.1,2176-2194).
gcctctccaccttcatgat

SEQ ID NO: 451643 - DNA, 19 bp, Mus musculus
  siRNA target sequence for Msh5 (NM_013600.1,2210-2228).
ggcgaaagcagtgaacaat

SEQ ID NO: 451644 - DNA, 19 bp, Mus musculus
  siRNA target sequence for Msh5 (NM_013600.1,2406-2424).
ggacccctggtgcagtatt

SEQ ID NO: 451645 - DNA, 19 bp, Mus musculus
  siRNA target sequence for Msh6 (NM_010830.1,251-269).
gtcgccggaggcaaaggat

SEQ ID NO: 451646 - DNA, 19 bp, Mus musculus
  siRNA target sequence for Msh6 (NM_010830.1,309-327).
gccgtgcctcccagttctt

SEQ ID NO: 451647 - DNA, 19 bp, Mus musculus
  siRNA target sequence for Msh6 (NM_010830.1,355-373).
gggctaagatggaaggtta

SEQ ID NO: 451648 - DNA, 19 bp, Mus musculus
  siRNA target sequence for Msh6 (NM_010830.1,448-466).
gtgttcatgtacagttctt

SEQ ID NO: 451649 - DNA, 19 bp, Mus musculus
  siRNA target sequence for Msh6 (NM_010830.1,481-499).
caaggggctgggttagcaa

SEQ ID NO: 451650 - DNA, 19 bp, Mus musculus
  siRNA target sequence for Msh6 (NM_010830.1,552-570).
ggtcatttctacagttcaa

SEQ ID NO: 451651 - DNA, 19 bp, Mus musculus
  siRNA target sequence for Msh6 (NM_010830.1,553-571).
gtcatttctacagttcaaa

SEQ ID NO: 451652 - DNA, 19 bp, Mus musculus
  siRNA target sequence for Msh6 (NM_010830.1,563-581).
cagttcaaagtctgagata

SEQ ID NO: 451653 - DNA, 19 bp, Mus musculus
  siRNA target sequence for Msh6 (NM_010830.1,578-596).
gatactcagagcaatgcaa

SEQ ID NO: 451654 - DNA, 19 bp, Mus musculus
  siRNA target sequence for Msh6 (NM_010830.1,600-618).
gcagatgaggccttaagta

SEQ ID NO: 451655 - DNA, 19 bp, Mus musculus
  siRNA target sequence for Msh6 (NM_010830.1,601-619).
cagatgaggccttaagtaa

SEQ ID NO: 451656 - DNA, 19 bp, Mus musculus
  siRNA target sequence for Msh6 (NM_010830.1,690-708).
gaggtgcatgaggcttatt

SEQ ID NO: 451657 - DNA, 19 bp, Mus musculus
  siRNA target sequence for Msh6 (NM_010830.1,692-710).
ggtgcatgaggcttattta

SEQ ID NO: 451658 - DNA, 19 bp, Mus musculus
  siRNA target sequence for Msh6 (NM_010830.1,693-711).
gtgcatgaggcttatttat

SEQ ID NO: 451659 - DNA, 19 bp, Mus musculus
  siRNA target sequence for Msh6 (NM_010830.1,699-717).
gaggcttatttatctgata

SEQ ID NO: 451660 - DNA, 19 bp, Mus musculus
  siRNA target sequence for Msh6 (NM_010830.1,787-805).
gcagccggcaagtcaagaa

SEQ ID NO: 451661 - DNA, 19 bp, Mus musculus
  siRNA target sequence for Msh6 (NM_010830.1,841-859).
gtggctctgatgtagaatt

SEQ ID NO: 451662 - DNA, 19 bp, Mus musculus
  siRNA target sequence for Msh6 (NM_010830.1,843-861).
ggctctgatgtagaattca

SEQ ID NO: 451663 - DNA, 19 bp, Mus musculus
  siRNA target sequence for Msh6 (NM_010830.1,844-862).
gctctgatgtagaattcaa

SEQ ID NO: 451664 - DNA, 19 bp, Mus musculus
  siRNA target sequence for Msh6 (NM_010830.1,1050-1068).
ctctcagaaaccaagagta

SEQ ID NO: 451665 - DNA, 19 bp, Mus musculus
  siRNA target sequence for Msh6 (NM_010830.1,1141-1159).
gtggacccactgtttggta

SEQ ID NO: 451666 - DNA, 19 bp, Mus musculus
  siRNA target sequence for Msh6 (NM_010830.1,1152-1170).
gtttggtatcacgaaactt

SEQ ID NO: 451667 - DNA, 19 bp, Mus musculus
  siRNA target sequence for Msh6 (NM_010830.1,1157-1175).
gtatcacgaaactttagaa

SEQ ID NO: 451668 - DNA, 19 bp, Mus musculus
  siRNA target sequence for Msh6 (NM_010830.1,1218-1236).
cccgatcaccctgaattta

SEQ ID NO: 451669 - DNA, 19 bp, Mus musculus
  siRNA target sequence for Msh6 (NM_010830.1,1219-1237).
ccgatcaccctgaatttaa

SEQ ID NO: 451670 - DNA, 19 bp, Mus musculus
  siRNA target sequence for Msh6 (NM_010830.1,1398-1416).
gagctggggctgatattca

SEQ ID NO: 451671 - DNA, 19 bp, Mus musculus
  siRNA target sequence for Msh6 (NM_010830.1,1519-1537).
ccgagactccagaaatgat

SEQ ID NO: 451672 - DNA, 19 bp, Mus musculus
  siRNA target sequence for Msh6 (NM_010830.1,1561-1579).
cacacgtgtccaagtttga

SEQ ID NO: 451673 - DNA, 19 bp, Mus musculus
  siRNA target sequence for Msh6 (NM_010830.1,1563-1581).
cacgtgtccaagtttgata

SEQ ID NO: 451674 - DNA, 19 bp, Mus musculus
  siRNA target sequence for Msh6 (NM_010830.1,1565-1583).
cgtgtccaagtttgataga

SEQ ID NO: 451675 - DNA, 19 bp, Mus musculus
  siRNA target sequence for Msh6 (NM_010830.1,1584-1602).
gtggtgagaagggagattt

SEQ ID NO: 451676 - DNA, 19 bp, Mus musculus
  siRNA target sequence for Msh6 (NM_010830.1,1595-1613).
ggagatttgcaggatcatt

SEQ ID NO: 451677 - DNA, 19 bp, Mus musculus
  siRNA target sequence for Msh6 (NM_010830.1,1596-1614).
gagatttgcaggatcatta

SEQ ID NO: 451678 - DNA, 19 bp, Mus musculus
  siRNA target sequence for Msh6 (NM_010830.1,1648-1666).
gtgatccctctgagaacta

SEQ ID NO: 451679 - DNA, 19 bp, Mus musculus
  siRNA target sequence for Msh6 (NM_010830.1,1653-1671).
ccctctgagaactacagta

SEQ ID NO: 451680 - DNA, 19 bp, Mus musculus
  siRNA target sequence for Msh6 (NM_010830.1,1677-1695).
cttcttagcctcaaagaga

SEQ ID NO: 451681 - DNA, 19 bp, Mus musculus
  siRNA target sequence for Msh6 (NM_010830.1,1753-1771).
cactgggcaagtttttcat

SEQ ID NO: 451682 - DNA, 19 bp, Mus musculus
  siRNA target sequence for Msh6 (NM_010830.1,1790-1808).
ccgccactgttccagattt

SEQ ID NO: 451683 - DNA, 19 bp, Mus musculus
  siRNA target sequence for Msh6 (NM_010830.1,1791-1809).
cgccactgttccagattta

SEQ ID NO: 451684 - DNA, 19 bp, Mus musculus
  siRNA target sequence for Msh6 (NM_010830.1,1925-1943).
cataccaggttcccaattt

SEQ ID NO: 451685 - DNA, 19 bp, Mus musculus
  siRNA target sequence for Msh6 (NM_010830.1,2021-2039).
gcctctggtgcttaaagga

SEQ ID NO: 451686 - DNA, 19 bp, Mus musculus
  siRNA target sequence for Msh6 (NM_010830.1,2045-2063).
ctcggagtcagattctgtt

SEQ ID NO: 451687 - DNA, 19 bp, Mus musculus
  siRNA target sequence for Msh6 (NM_010830.1,2099-2117).
ctctgctctaggtggtatt

SEQ ID NO: 451688 - DNA, 19 bp, Mus musculus
  siRNA target sequence for Msh6 (NM_010830.1,2101-2119).
ctgctctaggtggtattgt

SEQ ID NO: 451689 - DNA, 19 bp, Mus musculus
  siRNA target sequence for Msh6 (NM_010830.1,2103-2121).
gctctaggtggtattgttt

SEQ ID NO: 451690 - DNA, 19 bp, Mus musculus
  siRNA target sequence for Msh6 (NM_010830.1,2129-2147).
caaaaaatgcctgattgat

SEQ ID NO: 451691 - DNA, 19 bp, Mus musculus
  siRNA target sequence for Msh6 (NM_010830.1,2165-2183).
ggctaattttgaagagtat

SEQ ID NO: 451692 - DNA, 19 bp, Mus musculus
  siRNA target sequence for Msh6 (NM_010830.1,2199-2217).
gacacggtcagcacagtaa

SEQ ID NO: 451693 - DNA, 19 bp, Mus musculus
  siRNA target sequence for Msh6 (NM_010830.1,2258-2276).
gctagacgcagtgacatta

SEQ ID NO: 451694 - DNA, 19 bp, Mus musculus
  siRNA target sequence for Msh6 (NM_010830.1,2259-2277).
ctagacgcagtgacattaa

SEQ ID NO: 451695 - DNA, 19 bp, Mus musculus
  siRNA target sequence for Msh6 (NM_010830.1,2323-2341).
ggaccctgctagagagatt

SEQ ID NO: 451696 - DNA, 19 bp, Mus musculus
  siRNA target sequence for Msh6 (NM_010830.1,2365-2383).
gcaagcggctcttaaaaca

SEQ ID NO: 451697 - DNA, 19 bp, Mus musculus
  siRNA target sequence for Msh6 (NM_010830.1,2417-2435).
catcagtgaccgtctagat

SEQ ID NO: 451698 - DNA, 19 bp, Mus musculus
  siRNA target sequence for Msh6 (NM_010830.1,2513-2531).
gaggctactgagtaagatt

SEQ ID NO: 451699 - DNA, 19 bp, Mus musculus
  siRNA target sequence for Msh6 (NM_010830.1,2516-2534).
gctactgagtaagattcat

SEQ ID NO: 451700 - DNA, 19 bp, Mus musculus
  siRNA target sequence for Msh6 (NM_010830.1,2517-2535).
ctactgagtaagattcata

SEQ ID NO: 451701 - DNA, 19 bp, Mus musculus
  siRNA target sequence for Msh6 (NM_010830.1,2522-2540).
gagtaagattcataatgtt

SEQ ID NO: 451702 - DNA, 19 bp, Mus musculus
  siRNA target sequence for Msh6 (NM_010830.1,2580-2598).
gctataatgtacgaagaaa

SEQ ID NO: 451703 - DNA, 19 bp, Mus musculus
  siRNA target sequence for Msh6 (NM_010830.1,2595-2613).
gaaacgacatacagcaaaa

SEQ ID NO: 451704 - DNA, 19 bp, Mus musculus
  siRNA target sequence for Msh6 (NM_010830.1,2684-2702).
ggaggtcgcgggtggtttt

SEQ ID NO: 451705 - DNA, 19 bp, Mus musculus
  siRNA target sequence for Msh6 (NM_010830.1,2685-2703).
gaggtcgcgggtggtttta

SEQ ID NO: 451706 - DNA, 19 bp, Mus musculus
  siRNA target sequence for Msh6 (NM_010830.1,2688-2706).
gtcgcgggtggttttacgt

SEQ ID NO: 451707 - DNA, 19 bp, Mus musculus
  siRNA target sequence for Msh6 (NM_010830.1,2694-2712).
ggtggttttacgtccaaaa

SEQ ID NO: 451708 - DNA, 19 bp, Mus musculus
  siRNA target sequence for Msh6 (NM_010830.1,2727-2745).
gttactctgcagtcaaaaa

SEQ ID NO: 451709 - DNA, 19 bp, Mus musculus
  siRNA target sequence for Msh6 (NM_010830.1,2735-2753).
gcagtcaaaaagtcctaaa

SEQ ID NO: 451710 - DNA, 19 bp, Mus musculus
  siRNA target sequence for Msh6 (NM_010830.1,2981-2999).
ccgttaccagttagagatt

SEQ ID NO: 451711 - DNA, 19 bp, Mus musculus
  siRNA target sequence for Msh6 (NM_010830.1,3017-3035).
ccgtaatctacctgaagaa

SEQ ID NO: 451712 - DNA, 19 bp, Mus musculus
  siRNA target sequence for Msh6 (NM_010830.1,3018-3036).
cgtaatctacctgaagaat

SEQ ID NO: 451713 - DNA, 19 bp, Mus musculus
  siRNA target sequence for Msh6 (NM_010830.1,3019-3037).
gtaatctacctgaagaata

SEQ ID NO: 451714 - DNA, 19 bp, Mus musculus
  siRNA target sequence for Msh6 (NM_010830.1,3039-3057).
gagctgaaatctactaaaa

SEQ ID NO: 451715 - DNA, 19 bp, Mus musculus
  siRNA target sequence for Msh6 (NM_010830.1,3041-3059).
gctgaaatctactaaaaaa

SEQ ID NO: 451716 - DNA, 19 bp, Mus musculus
  siRNA target sequence for Msh6 (NM_010830.1,3069-3087).
cgatactggaccaaaacga

SEQ ID NO: 451717 - DNA, 19 bp, Mus musculus
  siRNA target sequence for Msh6 (NM_010830.1,3070-3088).
gatactggaccaaaacgat

SEQ ID NO: 451718 - DNA, 19 bp, Mus musculus
  siRNA target sequence for Msh6 (NM_010830.1,3080-3098).
caaaacgattgagaagaaa

SEQ ID NO: 451719 - DNA, 19 bp, Mus musculus
  siRNA target sequence for Msh6 (NM_010830.1,3126-3144).
cgcagggacacatccttaa

SEQ ID NO: 451720 - DNA, 19 bp, Mus musculus
  siRNA target sequence for Msh6 (NM_010830.1,3237-3255).
ctgtgcctggctaactaca

SEQ ID NO: 451721 - DNA, 19 bp, Mus musculus
  siRNA target sequence for Msh6 (NM_010830.1,3274-3292).
ctatgtgtcgcccagaaat

SEQ ID NO: 451722 - DNA, 19 bp, Mus musculus
  siRNA target sequence for Msh6 (NM_010830.1,3313-3331).
cacatcccttcttagagtt

SEQ ID NO: 451723 - DNA, 19 bp, Mus musculus
  siRNA target sequence for Msh6 (NM_010830.1,3342-3360).
cgacatccctgcattacaa

SEQ ID NO: 451724 - DNA, 19 bp, Mus musculus
  siRNA target sequence for Msh6 (NM_010830.1,3343-3361).
gacatccctgcattacaaa

SEQ ID NO: 451725 - DNA, 19 bp, Mus musculus
  siRNA target sequence for Msh6 (NM_010830.1,3348-3366).
ccctgcattacaaagactt

SEQ ID NO: 451726 - DNA, 19 bp, Mus musculus
  siRNA target sequence for Msh6 (NM_010830.1,3349-3367).
cctgcattacaaagacttt

SEQ ID NO: 451727 - DNA, 19 bp, Mus musculus
  siRNA target sequence for Msh6 (NM_010830.1,3372-3390).
ggagacgattttattccta

SEQ ID NO: 451728 - DNA, 19 bp, Mus musculus
  siRNA target sequence for Msh6 (NM_010830.1,3373-3391).
gagacgattttattcctaa

SEQ ID NO: 451729 - DNA, 19 bp, Mus musculus
  siRNA target sequence for Msh6 (NM_010830.1,3474-3492).
ggcaagtctacactcataa

SEQ ID NO: 451730 - DNA, 19 bp, Mus musculus
  siRNA target sequence for Msh6 (NM_010830.1,3476-3494).
caagtctacactcataaga

SEQ ID NO: 451731 - DNA, 19 bp, Mus musculus
  siRNA target sequence for Msh6 (NM_010830.1,3521-3539).
ccagctgggttgttacgta

SEQ ID NO: 451732 - DNA, 19 bp, Mus musculus
  siRNA target sequence for Msh6 (NM_010830.1,3587-3605).
gcttggtgcctcagataga

SEQ ID NO: 451733 - DNA, 19 bp, Mus musculus
  siRNA target sequence for Msh6 (NM_010830.1,3591-3609).
ggtgcctcagatagaataa

SEQ ID NO: 451734 - DNA, 19 bp, Mus musculus
  siRNA target sequence for Msh6 (NM_010830.1,3665-3683).
gcatgcaacagcacattct

SEQ ID NO: 451735 - DNA, 19 bp, Mus musculus
  siRNA target sequence for Msh6 (NM_010830.1,3709-3727).
gaggcaccgcaacttttga

SEQ ID NO: 451736 - DNA, 19 bp, Mus musculus
  siRNA target sequence for Msh6 (NM_010830.1,3742-3760).
ccaatgcggttgttaaaga

SEQ ID NO: 451737 - DNA, 19 bp, Mus musculus
  siRNA target sequence for Msh6 (NM_010830.1,3743-3761).
caatgcggttgttaaagaa

SEQ ID NO: 451738 - DNA, 19 bp, Mus musculus
  siRNA target sequence for Msh6 (NM_010830.1,3759-3777).
gaacttgctgaaaccataa

SEQ ID NO: 451739 - DNA, 19 bp, Mus musculus
  siRNA target sequence for Msh6 (NM_010830.1,3791-3809).
gttttctacacactatcat

SEQ ID NO: 451740 - DNA, 19 bp, Mus musculus
  siRNA target sequence for Msh6 (NM_010830.1,3803-3821).
ctatcattcattagtagaa

SEQ ID NO: 451741 - DNA, 19 bp, Mus musculus
  siRNA target sequence for Msh6 (NM_010830.1,3841-3859).
gtgtgcgcctaggacatat

SEQ ID NO: 451742 - DNA, 19 bp, Mus musculus
  siRNA target sequence for Msh6 (NM_010830.1,3860-3878).
ggcatgcatggtagaaaat

SEQ ID NO: 451743 - DNA, 19 bp, Mus musculus
  siRNA target sequence for Msh6 (NM_010830.1,3895-3913).
gccaggagactattacttt

SEQ ID NO: 451744 - DNA, 19 bp, Mus musculus
  siRNA target sequence for Msh6 (NM_010830.1,3964-3982).
cagcaaggcttgctaatct

SEQ ID NO: 451745 - DNA, 19 bp, Mus musculus
  siRNA target sequence for Msh6 (NM_010830.1,4033-4051).
ggatgaatcagtcattaca

SEQ ID NO: 451746 - DNA, 19 bp, Mus musculus
  siRNA target sequence for Msh6 (NM_010830.1,4050-4068).
cagctatttcgggaagttt

SEQ ID NO: 451747 - DNA, 19 bp, Mus musculus
  siRNA target sequence for Msh6 (NM_010830.1,4052-4070).
gctatttcgggaagtttgt

SEQ ID NO: 451748 - DNA, 19 bp, Mus musculus
  siRNA target sequence for Msh6 (NM_010830.1,4078-4096).
ctgaaaagccgactataaa

SEQ ID NO: 451749 - DNA, 19 bp, Mus musculus
  siRNA target sequence for Msh6 (NM_010830.1,4090-4108).
ctataaacggtgaagctat

SEQ ID NO: 451750 - DNA, 19 bp, Mus musculus
  siRNA target sequence for Msh6 (NM_010830.1,4114-4132).
ggctgctggccttgattaa

SEQ ID NO: 451751 - DNA, 19 bp, Mus musculus
  siRNA target sequence for Rad1 (NM_011232.1,227-245).
gccagccttgacaacgtta

SEQ ID NO: 451752 - DNA, 19 bp, Mus musculus
  siRNA target sequence for Rad1 (NM_011232.1,231-249).
gccttgacaacgttaggaa

SEQ ID NO: 451753 - DNA, 19 bp, Mus musculus
  siRNA target sequence for Rad1 (NM_011232.1,232-250).
ccttgacaacgttaggaat

SEQ ID NO: 451754 - DNA, 19 bp, Mus musculus
  siRNA target sequence for Rad1 (NM_011232.1,260-278).
gtcttgaaagccattcatt

SEQ ID NO: 451755 - DNA, 19 bp, Mus musculus
  siRNA target sequence for Rad1 (NM_011232.1,287-305).
cacgccacgtgttttgcta

SEQ ID NO: 451756 - DNA, 19 bp, Mus musculus
  siRNA target sequence for Rad1 (NM_011232.1,303-321).
ctaccaaaaacggaatcaa

SEQ ID NO: 451757 - DNA, 19 bp, Mus musculus
  siRNA target sequence for Rad1 (NM_011232.1,339-357).
caaagtgtgtgcaagcaaa

SEQ ID NO: 451758 - DNA, 19 bp, Mus musculus
  siRNA target sequence for Rad1 (NM_011232.1,372-390).
ctgacgtgtttcaggaatt

SEQ ID NO: 451759 - DNA, 19 bp, Mus musculus
  siRNA target sequence for Rad1 (NM_011232.1,377-395).
gtgtttcaggaatttgtca

SEQ ID NO: 451760 - DNA, 19 bp, Mus musculus
  siRNA target sequence for Rad1 (NM_011232.1,400-418).
ggaagaatctgttactttt

SEQ ID NO: 451761 - DNA, 19 bp, Mus musculus
  siRNA target sequence for Rad1 (NM_011232.1,489-507).
ctgcgcttcggatgtgtta

SEQ ID NO: 451762 - DNA, 19 bp, Mus musculus
  siRNA target sequence for Rad1 (NM_011232.1,493-511).
gcttcggatgtgttaccaa

SEQ ID NO: 451763 - DNA, 19 bp, Mus musculus
  siRNA target sequence for Rad1 (NM_011232.1,499-517).
gatgtgttaccaaggttat

SEQ ID NO: 451764 - DNA, 19 bp, Mus musculus
  siRNA target sequence for Rad1 (NM_011232.1,502-520).
gtgttaccaaggttatggt

SEQ ID NO: 451765 - DNA, 19 bp, Mus musculus
  siRNA target sequence for Rad1 (NM_011232.1,518-536).
ggtcacccactgatgctat

SEQ ID NO: 451766 - DNA, 19 bp, Mus musculus
  siRNA target sequence for Rad1 (NM_011232.1,519-537).
gtcacccactgatgctatt

SEQ ID NO: 451767 - DNA, 19 bp, Mus musculus
  siRNA target sequence for Rad1 (NM_011232.1,523-541).
cccactgatgctatttcta

SEQ ID NO: 451768 - DNA, 19 bp, Mus musculus
  siRNA target sequence for Rad1 (NM_011232.1,525-543).
cactgatgctatttctaga

SEQ ID NO: 451769 - DNA, 19 bp, Mus musculus
  siRNA target sequence for Rad1 (NM_011232.1,556-574).
ggtgacggtctgcaaaatt

SEQ ID NO: 451770 - DNA, 19 bp, Mus musculus
  siRNA target sequence for Rad1 (NM_011232.1,557-575).
gtgacggtctgcaaaatta

SEQ ID NO: 451771 - DNA, 19 bp, Mus musculus
  siRNA target sequence for Rad1 (NM_011232.1,619-637).
caccaatgttatgaataaa

SEQ ID NO: 451772 - DNA, 19 bp, Mus musculus
  siRNA target sequence for Rad1 (NM_011232.1,658-676).
gctccgggaagccttttct

SEQ ID NO: 451773 - DNA, 19 bp, Mus musculus
  siRNA target sequence for Rad1 (NM_011232.1,719-737).
cctgacaagccctatttca

SEQ ID NO: 451774 - DNA, 19 bp, Mus musculus
  siRNA target sequence for Rad1 (NM_011232.1,728-746).
ccctatttcaggttgtcta

SEQ ID NO: 451775 - DNA, 19 bp, Mus musculus
  siRNA target sequence for Rad1 (NM_011232.1,742-760).
gtctacttttggaaatgca

SEQ ID NO: 451776 - DNA, 19 bp, Mus musculus
  siRNA target sequence for Rad1 (NM_011232.1,762-780).
gaaactcccatcttgacta

SEQ ID NO: 451777 - DNA, 19 bp, Mus musculus
  siRNA target sequence for Rad1 (NM_011232.1,806-824).
gcctttcactgtgataaga

SEQ ID NO: 451778 - DNA, 19 bp, Mus musculus
  siRNA target sequence for Rad1 (NM_011232.1,851-869).
ctactgaagccctctacaa

SEQ ID NO: 451779 - DNA, 19 bp, Mus musculus
  siRNA target sequence for Rad1 (NM_011232.1,864-882).
ctacaaaggcactagcttt

SEQ ID NO: 451780 - DNA, 19 bp, Mus musculus
  siRNA target sequence for Rad1 (NM_011232.1,893-911).
gtgtctatccggacagata

SEQ ID NO: 451781 - DNA, 19 bp, Mus musculus
  siRNA target sequence for Rad51 (NM_011234.2,324-342).
gccaatgatgtgaagaaat

SEQ ID NO: 451782 - DNA, 19 bp, Mus musculus
  siRNA target sequence for Rad51 (NM_011234.2,384-402).
gcaccgaagaaggaactaa

SEQ ID NO: 451783 - DNA, 19 bp, Mus musculus
  siRNA target sequence for Rad51 (NM_011234.2,385-403).
caccgaagaaggaactaat

SEQ ID NO: 451784 - DNA, 19 bp, Mus musculus
  siRNA target sequence for Rad51 (NM_011234.2,479-497).
caccacggcaactgagttt

SEQ ID NO: 451785 - DNA, 19 bp, Mus musculus
  siRNA target sequence for Rad51 (NM_011234.2,481-499).
ccacggcaactgagtttca

SEQ ID NO: 451786 - DNA, 19 bp, Mus musculus
  siRNA target sequence for Rad51 (NM_011234.2,507-525).
cggtcagagatcatacaga

SEQ ID NO: 451787 - DNA, 19 bp, Mus musculus
  siRNA target sequence for Rad51 (NM_011234.2,554-572).
gctgcttcaaggtggaatt

SEQ ID NO: 451788 - DNA, 19 bp, Mus musculus
  siRNA target sequence for Rad51 (NM_011234.2,622-640).
cacagatctgtcatacgtt

SEQ ID NO: 451789 - DNA, 19 bp, Mus musculus
  siRNA target sequence for Rad51 (NM_011234.2,633-651).
catacgttggctgttacat

SEQ ID NO: 451790 - DNA, 19 bp, Mus musculus
  siRNA target sequence for Rad51 (NM_011234.2,681-699).
gaagggaaggccatgtaca

SEQ ID NO: 451791 - DNA, 19 bp, Mus musculus
  siRNA target sequence for Rad51 (NM_011234.2,685-703).
ggaaggccatgtacattga

SEQ ID NO: 451792 - DNA, 19 bp, Mus musculus
  siRNA target sequence for Rad51 (NM_011234.2,765-783).
ggcagcgatgtcctagata

SEQ ID NO: 451793 - DNA, 19 bp, Mus musculus
  siRNA target sequence for Rad51 (NM_011234.2,766-784).
gcagcgatgtcctagataa

SEQ ID NO: 451794 - DNA, 19 bp, Mus musculus
  siRNA target sequence for Rad51 (NM_011234.2,767-785).
cagcgatgtcctagataat

SEQ ID NO: 451795 - DNA, 19 bp, Mus musculus
  siRNA target sequence for Rad51 (NM_011234.2,769-787).
gcgatgtcctagataatgt

SEQ ID NO: 451796 - DNA, 19 bp, Mus musculus
  siRNA target sequence for Rad51 (NM_011234.2,770-788).
cgatgtcctagataatgta

SEQ ID NO: 451797 - DNA, 19 bp, Mus musculus
  siRNA target sequence for Rad51 (NM_011234.2,776-794).
cctagataatgtagcatat

SEQ ID NO: 451798 - DNA, 19 bp, Mus musculus
  siRNA target sequence for Rad51 (NM_011234.2,821-839).
gacccagctcctttaccaa

SEQ ID NO: 451799 - DNA, 19 bp, Mus musculus
  siRNA target sequence for Rad51 (NM_011234.2,862-880).
ccaggtatgcactgcttat

SEQ ID NO: 451800 - DNA, 19 bp, Mus musculus
  siRNA target sequence for Rad51 (NM_011234.2,863-881).
caggtatgcactgcttatt

SEQ ID NO: 451801 - DNA, 19 bp, Mus musculus
  siRNA target sequence for Rad51 (NM_011234.2,865-883).
ggtatgcactgcttattgt

SEQ ID NO: 451802 - DNA, 19 bp, Mus musculus
  siRNA target sequence for Rad51 (NM_011234.2,866-884).
gtatgcactgcttattgta

SEQ ID NO: 451803 - DNA, 19 bp, Mus musculus
  siRNA target sequence for Rad51 (NM_011234.2,1025-1043).
ggtagtagcccaagtagat

SEQ ID NO: 451804 - DNA, 19 bp, Mus musculus
  siRNA target sequence for Rad51 (NM_011234.2,1221-1239).
gtgggcgatgccaaagact

SEQ ID NO: 451805 - DNA, 19 bp, Mus musculus
  siRNA target sequence for Rad51c (NM_053269.1,105-123).
cgagctcagcaaagaagtt

SEQ ID NO: 451806 - DNA, 19 bp, Mus musculus
  siRNA target sequence for Rad51c (NM_053269.1,114-132).
caaagaagttgggatatct

SEQ ID NO: 451807 - DNA, 19 bp, Mus musculus
  siRNA target sequence for Rad51c (NM_053269.1,142-160).
gccttggaaactctacaaa

SEQ ID NO: 451808 - DNA, 19 bp, Mus musculus
  siRNA target sequence for Rad51c (NM_053269.1,143-161).
ccttggaaactctacaaat

SEQ ID NO: 451809 - DNA, 19 bp, Mus musculus
  siRNA target sequence for Rad51c (NM_053269.1,144-162).
cttggaaactctacaaatt

SEQ ID NO: 451810 - DNA, 19 bp, Mus musculus
  siRNA target sequence for Rad51c (NM_053269.1,147-165).
ggaaactctacaaattcta

SEQ ID NO: 451811 - DNA, 19 bp, Mus musculus
  siRNA target sequence for Rad51c (NM_053269.1,148-166).
gaaactctacaaattctaa

SEQ ID NO: 451812 - DNA, 19 bp, Mus musculus
  siRNA target sequence for Rad51c (NM_053269.1,170-188).
gagaatgtctcacaaataa

SEQ ID NO: 451813 - DNA, 19 bp, Mus musculus
  siRNA target sequence for Rad51c (NM_053269.1,284-302).
gttcagcactcgataacat

SEQ ID NO: 451814 - DNA, 19 bp, Mus musculus
  siRNA target sequence for Rad51c (NM_053269.1,300-318).
cattcttgggggtggaata

SEQ ID NO: 451815 - DNA, 19 bp, Mus musculus
  siRNA target sequence for Rad51c (NM_053269.1,310-328).
ggtggaatacccctaatga

SEQ ID NO: 451816 - DNA, 19 bp, Mus musculus
  siRNA target sequence for Rad51c (NM_053269.1,311-329).
gtggaatacccctaatgaa

SEQ ID NO: 451817 - DNA, 19 bp, Mus musculus
  siRNA target sequence for Rad51c (NM_053269.1,327-345).
gaagacgacagaagtttgt

SEQ ID NO: 451818 - DNA, 19 bp, Mus musculus
  siRNA target sequence for Rad51c (NM_053269.1,368-386).
cacagttatgtatgcaatt

SEQ ID NO: 451819 - DNA, 19 bp, Mus musculus
  siRNA target sequence for Rad51c (NM_053269.1,426-444).
ggccggtgaagcagtattt

SEQ ID NO: 451820 - DNA, 19 bp, Mus musculus
  siRNA target sequence for Rad51c (NM_053269.1,427-445).
gccggtgaagcagtattta

SEQ ID NO: 451821 - DNA, 19 bp, Mus musculus
  siRNA target sequence for Rad51c (NM_053269.1,428-446).
ccggtgaagcagtatttat

SEQ ID NO: 451822 - DNA, 19 bp, Mus musculus
  siRNA target sequence for Rad51c (NM_053269.1,429-447).
cggtgaagcagtatttatt

SEQ ID NO: 451823 - DNA, 19 bp, Mus musculus
  siRNA target sequence for Rad51c (NM_053269.1,550-568).
cagaaagccttgaaggatt

SEQ ID NO: 451824 - DNA, 19 bp, Mus musculus
  siRNA target sequence for Rad51c (NM_053269.1,565-583).
gattttactcttgaaaata

SEQ ID NO: 451825 - DNA, 19 bp, Mus musculus
  siRNA target sequence for Rad51c (NM_053269.1,627-645).
gctgctggcacaagtctat

SEQ ID NO: 451826 - DNA, 19 bp, Mus musculus
  siRNA target sequence for Rad51c (NM_053269.1,678-696).
ggtgcagctagtgataata

SEQ ID NO: 451827 - DNA, 19 bp, Mus musculus
  siRNA target sequence for Rad51c (NM_053269.1,690-708).
gataatagacggaattgct

SEQ ID NO: 451828 - DNA, 19 bp, Mus musculus
  siRNA target sequence for Rad51c (NM_053269.1,740-758).
cccttcgtactcgattact

SEQ ID NO: 451829 - DNA, 19 bp, Mus musculus
  siRNA target sequence for Rad51c (NM_053269.1,741-759).
ccttcgtactcgattacta

SEQ ID NO: 451830 - DNA, 19 bp, Mus musculus
  siRNA target sequence for Rad51c (NM_053269.1,742-760).
cttcgtactcgattactaa

SEQ ID NO: 451831 - DNA, 19 bp, Mus musculus
  siRNA target sequence for Rad51c (NM_053269.1,766-784).
ctcgcccaacaaatgatca

SEQ ID NO: 451832 - DNA, 19 bp, Mus musculus
  siRNA target sequence for Rad51c (NM_053269.1,780-798).
gatcagccttgcaaataat

SEQ ID NO: 451833 - DNA, 19 bp, Mus musculus
  siRNA target sequence for Rad51c (NM_053269.1,811-829).
gttattttaactaatcaga

SEQ ID NO: 451834 - DNA, 19 bp, Mus musculus
  siRNA target sequence for Rad51c (NM_053269.1,821-839).
ctaatcagatgacaacaaa

SEQ ID NO: 451835 - DNA, 19 bp, Mus musculus
  siRNA target sequence for Rad51c (NM_053269.1,887-905).
gggggcatgctgctacaat

SEQ ID NO: 451836 - DNA, 19 bp, Mus musculus
  siRNA target sequence for Rad51c (NM_053269.1,934-952).
caaagatttgcaacattgt

SEQ ID NO: 451837 - DNA, 19 bp, Mus musculus
  siRNA target sequence for Rad51c (NM_053269.1,966-984).
ccagaaggagtctacgata

SEQ ID NO: 451838 - DNA, 19 bp, Mus musculus
  siRNA target sequence for Rad51c (NM_053269.1,996-1014).
cacacctcagggatttaga

SEQ ID NO: 451839 - DNA, 19 bp, Mus musculus
  siRNA target sequence for Rad51l1 (NM_009014.2,77-95).
gagcagcaagaaactaaga

SEQ ID NO: 451840 - DNA, 19 bp, Mus musculus
  siRNA target sequence for Rad51l1 (NM_009014.2,90-108).
ctaagacgagtgggtttat

SEQ ID NO: 451841 - DNA, 19 bp, Mus musculus
  siRNA target sequence for Rad51l1 (NM_009014.2,117-135).
ctgtgtgaccgtttaagca

SEQ ID NO: 451842 - DNA, 19 bp, Mus musculus
  siRNA target sequence for Rad51l1 (NM_009014.2,133-151).
gcagataccagattgttaa

SEQ ID NO: 451843 - DNA, 19 bp, Mus musculus
  siRNA target sequence for Rad51l1 (NM_009014.2,147-165).
gttaactgtcagcactttt

SEQ ID NO: 451844 - DNA, 19 bp, Mus musculus
  siRNA target sequence for Rad51l1 (NM_009014.2,152-170).
ctgtcagcactttttaagt

SEQ ID NO: 451845 - DNA, 19 bp, Mus musculus
  siRNA target sequence for Rad51l1 (NM_009014.2,154-172).
gtcagcactttttaagtct

SEQ ID NO: 451846 - DNA, 19 bp, Mus musculus
  siRNA target sequence for Rad51l1 (NM_009014.2,175-193).
ccccactagaacttatgaa

SEQ ID NO: 451847 - DNA, 19 bp, Mus musculus
  siRNA target sequence for Rad51l1 (NM_009014.2,180-198).
ctagaacttatgaaagtga

SEQ ID NO: 451848 - DNA, 19 bp, Mus musculus
  siRNA target sequence for Rad51l1 (NM_009014.2,217-235).
gtgtccacgagcttcttca

SEQ ID NO: 451849 - DNA, 19 bp, Mus musculus
  siRNA target sequence for Rad51l1 (NM_009014.2,219-237).
gtccacgagcttcttcata

SEQ ID NO: 451850 - DNA, 19 bp, Mus musculus
  siRNA target sequence for Rad51l1 (NM_009014.2,221-239).
ccacgagcttcttcataca

SEQ ID NO: 451851 - DNA, 19 bp, Mus musculus
  siRNA target sequence for Rad51l1 (NM_009014.2,266-284).
gcaaacggcttatgagtta

SEQ ID NO: 451852 - DNA, 19 bp, Mus musculus
  siRNA target sequence for Rad51l1 (NM_009014.2,267-285).
caaacggcttatgagttaa

SEQ ID NO: 451853 - DNA, 19 bp, Mus musculus
  siRNA target sequence for Rad51l1 (NM_009014.2,272-290).
ggcttatgagttaaagaca

SEQ ID NO: 451854 - DNA, 19 bp, Mus musculus
  siRNA target sequence for Rad51l1 (NM_009014.2,312-330).
ccggcattcctgtctacta

SEQ ID NO: 451855 - DNA, 19 bp, Mus musculus
  siRNA target sequence for Rad51l1 (NM_009014.2,375-393).
ggatctctcacagagatta

SEQ ID NO: 451856 - DNA, 19 bp, Mus musculus
  siRNA target sequence for Rad51l1 (NM_009014.2,399-417).
ccaccaggttgcggaaaaa

SEQ ID NO: 451857 - DNA, 19 bp, Mus musculus
  siRNA target sequence for Rad51l1 (NM_009014.2,403-421).
caggttgcggaaaaactca

SEQ ID NO: 451858 - DNA, 19 bp, Mus musculus
  siRNA target sequence for Rad51l1 (NM_009014.2,428-446).
cataatgatgagtgtctta

SEQ ID NO: 451859 - DNA, 19 bp, Mus musculus
  siRNA target sequence for Rad51l1 (NM_009014.2,461-479).
cagcctgggaggattagaa

SEQ ID NO: 451860 - DNA, 19 bp, Mus musculus
  siRNA target sequence for Rad51l1 (NM_009014.2,520-538).
ctgagagactggttgagat

SEQ ID NO: 451861 - DNA, 19 bp, Mus musculus
  siRNA target sequence for Rad51l1 (NM_009014.2,536-554).
gattgcggaatctcgtttt

SEQ ID NO: 451862 - DNA, 19 bp, Mus musculus
  siRNA target sequence for Rad51l1 (NM_009014.2,549-567).
cgttttccacaatatttta

SEQ ID NO: 451863 - DNA, 19 bp, Mus musculus
  siRNA target sequence for Rad51l1 (NM_009014.2,593-611).
cagcagtagagttcatctt

SEQ ID NO: 451864 - DNA, 19 bp, Mus musculus
  siRNA target sequence for Rad51l1 (NM_009014.2,743-761).
gcttcaaggcaacatcaaa

SEQ ID NO: 451865 - DNA, 19 bp, Mus musculus
  siRNA target sequence for Rad51l1 (NM_009014.2,787-805).
gagcgtccttactgaagta

SEQ ID NO: 451866 - DNA, 19 bp, Mus musculus
  siRNA target sequence for Rad51l1 (NM_009014.2,954-972).
gctgcactaggaaacacat

SEQ ID NO: 451867 - DNA, 19 bp, Mus musculus
  siRNA target sequence for Rad51l3 (NM_011235.2,228-246).
ctcagaggccgaaagataa

SEQ ID NO: 451868 - DNA, 19 bp, Mus musculus
  siRNA target sequence for Rad51l3 (NM_011235.2,353-371).
ctcggctttccccttaaat

SEQ ID NO: 451869 - DNA, 19 bp, Mus musculus
  siRNA target sequence for Rad51l3 (NM_011235.2,430-448).
gaagcctggacaaactact

SEQ ID NO: 451870 - DNA, 19 bp, Mus musculus
  siRNA target sequence for Rad51l3 (NM_011235.2,675-693).
gtggtgcgttcatttgaca

SEQ ID NO: 451871 - DNA, 19 bp, Mus musculus
  siRNA target sequence for Rad51l3 (NM_011235.2,698-716).
ccggatgctagatatgcta

SEQ ID NO: 451872 - DNA, 19 bp, Mus musculus
  siRNA target sequence for Rad51l3 (NM_011235.2,741-759).
cagcaggaagcaacttctt

SEQ ID NO: 451873 - DNA, 19 bp, Mus musculus
  siRNA target sequence for Rad51l3 (NM_011235.2,766-784).
ccgtgaaggttgtgattgt

SEQ ID NO: 451874 - DNA, 19 bp, Mus musculus
  siRNA target sequence for Rad51l3 (NM_011235.2,935-953).
ggatggtagaagattcaaa

SEQ ID NO: 451875 - DNA, 19 bp, Mus musculus
  siRNA target sequence for Rad51l3 (NM_011235.2,1037-1055).
cagccaacgcacagtatgt

SEQ ID NO: 451876 - DNA, 19 bp, Mus musculus
  siRNA target sequence for Rad51l3 (NM_011235.2,1081-1099).
cgggtctgcaggagatgat

SEQ ID NO: 451877 - DNA, 19 bp, Mus musculus
  siRNA target sequence for Rad51l3 (NM_011235.2,1084-1102).
gtctgcaggagatgataga

SEQ ID NO: 451878 - DNA, 19 bp, Mus musculus
  siRNA target sequence for Rad51l3 (NM_011235.2,1124-1142).
ggagcagagcccagaatta

SEQ ID NO: 451879 - DNA, 19 bp, Mus musculus
  siRNA target sequence for Trpc2 (NM_011644.1,104-122).
cctgggatcgacttcgatt

SEQ ID NO: 451880 - DNA, 19 bp, Mus musculus
  siRNA target sequence for Trpc2 (NM_011644.1,201-219).
ggctgaccctgtagtagat

SEQ ID NO: 451881 - DNA, 19 bp, Mus musculus
  siRNA target sequence for Trpc2 (NM_011644.1,233-251).
ggagctctgggcttaacca

SEQ ID NO: 451882 - DNA, 19 bp, Mus musculus
  siRNA target sequence for Trpc2 (NM_011644.1,241-259).
gggcttaaccagaactcta

SEQ ID NO: 451883 - DNA, 19 bp, Mus musculus
  siRNA target sequence for Trpc2 (NM_011644.1,281-299).
ctaggccctggctgactaa

SEQ ID NO: 451884 - DNA, 19 bp, Mus musculus
  siRNA target sequence for Trpc2 (NM_011644.1,290-308).
ggctgactaatccttctat

SEQ ID NO: 451885 - DNA, 19 bp, Mus musculus
  siRNA target sequence for Trpc2 (NM_011644.1,305-323).
ctatccggaggacattctt

SEQ ID NO: 451886 - DNA, 19 bp, Mus musculus
  siRNA target sequence for Trpc2 (NM_011644.1,356-374).
cagagctcaagggtatgtt

SEQ ID NO: 451887 - DNA, 19 bp, Mus musculus
  siRNA target sequence for Trpc2 (NM_011644.1,358-376).
gagctcaagggtatgttga

SEQ ID NO: 451888 - DNA, 19 bp, Mus musculus
  siRNA target sequence for Trpc2 (NM_011644.1,452-470).
gtgtggtaagcccaaacaa

SEQ ID NO: 451889 - DNA, 19 bp, Mus musculus
  siRNA target sequence for Trpc2 (NM_011644.1,454-472).
gtggtaagcccaaacaaca

SEQ ID NO: 451890 - DNA, 19 bp, Mus musculus
  siRNA target sequence for Trpc2 (NM_011644.1,649-667).
caccgacctcagaccaaaa

SEQ ID NO: 451891 - DNA, 19 bp, Mus musculus
  siRNA target sequence for Trpc2 (NM_011644.1,651-669).
ccgacctcagaccaaaagt

SEQ ID NO: 451892 - DNA, 19 bp, Mus musculus
  siRNA target sequence for Trpc2 (NM_011644.1,691-709).
gctggacagtgtcctattt

SEQ ID NO: 451893 - DNA, 19 bp, Mus musculus
  siRNA target sequence for Trpc2 (NM_011644.1,816-834).
cgtgctgagacgtcatcat

SEQ ID NO: 451894 - DNA, 19 bp, Mus musculus
  siRNA target sequence for Trpc2 (NM_011644.1,873-891).
gcccaactggactgagatt

SEQ ID NO: 451895 - DNA, 19 bp, Mus musculus
  siRNA target sequence for Trpc2 (NM_011644.1,875-893).
ccaactggactgagattgt

SEQ ID NO: 451896 - DNA, 19 bp, Mus musculus
  siRNA target sequence for Trpc2 (NM_011644.1,881-899).
ggactgagattgtgaacaa

SEQ ID NO: 451897 - DNA, 19 bp, Mus musculus
  siRNA target sequence for Trpc2 (NM_011644.1,1105-1123).
ctgctggccaatgtcaaat

SEQ ID NO: 451898 - DNA, 19 bp, Mus musculus
  siRNA target sequence for Trpc2 (NM_011644.1,1430-1448).
gatacgacctgctgaagtt

SEQ ID NO: 451899 - DNA, 19 bp, Mus musculus
  siRNA target sequence for Trpc2 (NM_011644.1,1520-1538).
ccatgctggccgcttttca

SEQ ID NO: 451900 - DNA, 19 bp, Mus musculus
  siRNA target sequence for Trpc2 (NM_011644.1,1581-1599).
gtttaagcctcagtacatt

SEQ ID NO: 451901 - DNA, 19 bp, Mus musculus
  siRNA target sequence for Trpc2 (NM_011644.1,1771-1789).
cggttggctgtcaactaca

SEQ ID NO: 451902 - DNA, 19 bp, Mus musculus
  siRNA target sequence for Trpc2 (NM_011644.1,1772-1790).
ggttggctgtcaactacaa

SEQ ID NO: 451903 - DNA, 19 bp, Mus musculus
  siRNA target sequence for Trpc2 (NM_011644.1,2420-2438).
cccgactggcatatattct

SEQ ID NO: 451904 - DNA, 19 bp, Mus musculus
  siRNA target sequence for Trpc2 (NM_011644.1,2472-2490).
ctccatcggcaagatgatt

SEQ ID NO: 451905 - DNA, 19 bp, Mus musculus
  siRNA target sequence for Trpc2 (NM_011644.1,2494-2512).
gacatgatccggttcatgt

SEQ ID NO: 451906 - DNA, 19 bp, Mus musculus
  siRNA target sequence for Trpc2 (NM_011644.1,2546-2564).
gtggcctcaacaacatcta

SEQ ID NO: 451907 - DNA, 19 bp, Mus musculus
  siRNA target sequence for Trpc2 (NM_011644.1,2549-2567).
gcctcaacaacatctatgt

SEQ ID NO: 451908 - DNA, 19 bp, Mus musculus
  siRNA target sequence for Trpc2 (NM_011644.1,2582-2600).
ccgagaagctaggcaattt

SEQ ID NO: 451909 - DNA, 19 bp, Mus musculus
  siRNA target sequence for Trpc2 (NM_011644.1,2605-2623).
gaaacgttccagtttctct

SEQ ID NO: 451910 - DNA, 19 bp, Mus musculus
  siRNA target sequence for Trpc2 (NM_011644.1,2731-2749).
gtcattgtgctacttaaca

SEQ ID NO: 451911 - DNA, 19 bp, Mus musculus
  siRNA target sequence for Trpc2 (NM_011644.1,2861-2879).
cgctgcctgtgccctttaa

SEQ ID NO: 451912 - DNA, 19 bp, Mus musculus
  siRNA target sequence for Trpc2 (NM_011644.1,2863-2881).
ctgcctgtgccctttaaca

SEQ ID NO: 451913 - DNA, 19 bp, Mus musculus
  siRNA target sequence for Trpc2 (NM_011644.1,2907-2925).
ctacctcgtcaggagaatt

SEQ ID NO: 451914 - DNA, 19 bp, Mus musculus
  siRNA target sequence for Trpc2 (NM_011644.1,2984-3002).
ccatcgggacctttaccaa

SEQ ID NO: 451915 - DNA, 19 bp, Mus musculus
  siRNA target sequence for Xpa (NM_011728.1,96-114).
cgacggccgaggaaaagca

SEQ ID NO: 451916 - DNA, 19 bp, Mus musculus
  siRNA target sequence for Xpa (NM_011728.1,261-279).
gaggcgtggccagtgtaaa

SEQ ID NO: 451917 - DNA, 19 bp, Mus musculus
  siRNA target sequence for Xpa (NM_011728.1,265-283).
cgtggccagtgtaaaagca

SEQ ID NO: 451918 - DNA, 19 bp, Mus musculus
  siRNA target sequence for Xpa (NM_011728.1,282-300).
cagctcccaaaatgattga

SEQ ID NO: 451919 - DNA, 19 bp, Mus musculus
  siRNA target sequence for Xpa (NM_011728.1,375-393).
ccgtcatggagtttgatta

SEQ ID NO: 451920 - DNA, 19 bp, Mus musculus
  siRNA target sequence for Xpa (NM_011728.1,436-454).
ccttatgaaccactttgat

SEQ ID NO: 451921 - DNA, 19 bp, Mus musculus
  siRNA target sequence for Xpa (NM_011728.1,479-497).
gatgctgatgataaacaca

SEQ ID NO: 451922 - DNA, 19 bp, Mus musculus
  siRNA target sequence for Xpa (NM_011728.1,570-588).
cgctcaggttccttgtgaa

SEQ ID NO: 451923 - DNA, 19 bp, Mus musculus
  siRNA target sequence for Xpa (NM_011728.1,617-635).
gatatgaagctctacctaa

SEQ ID NO: 451924 - DNA, 19 bp, Mus musculus
  siRNA target sequence for Xpa (NM_011728.1,646-664).
ggtaaagcgggctcttgaa

SEQ ID NO: 451925 - DNA, 19 bp, Mus musculus
  siRNA target sequence for Xpa (NM_011728.1,761-779).
gaattgcggcgagcaataa

SEQ ID NO: 451926 - DNA, 19 bp, Mus musculus
  siRNA target sequence for Xpa (NM_011728.1,879-897).
gtggccacgaactgacata

SEQ ID NO: 451927 - DNA, 19 bp, Mus musculus
  siRNA target sequence for Xpa (NM_011728.1,882-900).
gccacgaactgacatatga

SEQ ID NO: 451928 - DNA, 19 bp, Mus musculus
  siRNA target sequence for Xpa (NM_011728.1,886-904).
cgaactgacatatgaaaaa

SEQ ID NO: 451929 - DNA, 19 bp, Mus musculus
  siRNA target sequence for Xpc (NM_009531.1,393-411).
ggtggaagagcttactgaa

SEQ ID NO: 451930 - DNA, 19 bp, Mus musculus
  siRNA target sequence for Xpc (NM_009531.1,470-488).
cggtggagattgaaattga

SEQ ID NO: 451931 - DNA, 19 bp, Mus musculus
  siRNA target sequence for Xpc (NM_009531.1,472-490).
gtggagattgaaattgaaa

SEQ ID NO: 451932 - DNA, 19 bp, Mus musculus
  siRNA target sequence for Xpc (NM_009531.1,560-578).
ggatgatgaagcgtttcaa

SEQ ID NO: 451933 - DNA, 19 bp, Mus musculus
  siRNA target sequence for Xpc (NM_009531.1,561-579).
gatgatgaagcgtttcaat

SEQ ID NO: 451934 - DNA, 19 bp, Mus musculus
  siRNA target sequence for Xpc (NM_009531.1,570-588).
gcgtttcaataaagaagta

SEQ ID NO: 451935 - DNA, 19 bp, Mus musculus
  siRNA target sequence for Xpc (NM_009531.1,572-590).
gtttcaataaagaagtaca

SEQ ID NO: 451936 - DNA, 19 bp, Mus musculus
  siRNA target sequence for Xpc (NM_009531.1,629-647).
ccagtggcttctatcgaaa

SEQ ID NO: 451937 - DNA, 19 bp, Mus musculus
  siRNA target sequence for Xpc (NM_009531.1,630-648).
cagtggcttctatcgaaat

SEQ ID NO: 451938 - DNA, 19 bp, Mus musculus
  siRNA target sequence for Xpc (NM_009531.1,634-652).
ggcttctatcgaaatagca

SEQ ID NO: 451939 - DNA, 19 bp, Mus musculus
  siRNA target sequence for Xpc (NM_009531.1,635-653).
gcttctatcgaaatagcat

SEQ ID NO: 451940 - DNA, 19 bp, Mus musculus
  siRNA target sequence for Xpc (NM_009531.1,711-729).
caaggtgccacttcaagat

SEQ ID NO: 451941 - DNA, 19 bp, Mus musculus
  siRNA target sequence for Xpc (NM_009531.1,860-878).
cgagggataatgaagagtt

SEQ ID NO: 451942 - DNA, 19 bp, Mus musculus
  siRNA target sequence for Xpc (NM_009531.1,871-889).
gaagagttggtccatatat

SEQ ID NO: 451943 - DNA, 19 bp, Mus musculus
  siRNA target sequence for Xpc (NM_009531.1,876-894).
gttggtccatatatttctt

SEQ ID NO: 451944 - DNA, 19 bp, Mus musculus
  siRNA target sequence for Xpc (NM_009531.1,1067-1085).
cgaccagcaggagaatcaa

SEQ ID NO: 451945 - DNA, 19 bp, Mus musculus
  siRNA target sequence for Xpc (NM_009531.1,1068-1086).
gaccagcaggagaatcaaa

SEQ ID NO: 451946 - DNA, 19 bp, Mus musculus
  siRNA target sequence for Xpc (NM_009531.1,1252-1270).
gctgccaaggtgtcataca

SEQ ID NO: 451947 - DNA, 19 bp, Mus musculus
  siRNA target sequence for Xpc (NM_009531.1,1256-1274).
ccaaggtgtcatacaaaga

SEQ ID NO: 451948 - DNA, 19 bp, Mus musculus
  siRNA target sequence for Xpc (NM_009531.1,1298-1316).
gcagcggctctgactttga

SEQ ID NO: 451949 - DNA, 19 bp, Mus musculus
  siRNA target sequence for Xpc (NM_009531.1,1299-1317).
cagcggctctgactttgaa

SEQ ID NO: 451950 - DNA, 19 bp, Mus musculus
  siRNA target sequence for Xpc (NM_009531.1,1452-1470).
gtgtgagccgtcaagcttt

SEQ ID NO: 451951 - DNA, 19 bp, Mus musculus
  siRNA target sequence for Xpc (NM_009531.1,1641-1659).
gcctgtggcctgttacaaa

SEQ ID NO: 451952 - DNA, 19 bp, Mus musculus
  siRNA target sequence for Xpc (NM_009531.1,1642-1660).
cctgtggcctgttacaaat

SEQ ID NO: 451953 - DNA, 19 bp, Mus musculus
  siRNA target sequence for Xpc (NM_009531.1,1643-1661).
ctgtggcctgttacaaata

SEQ ID NO: 451954 - DNA, 19 bp, Mus musculus
  siRNA target sequence for Xpc (NM_009531.1,1804-1822).
ccctatcggagcctactta

SEQ ID NO: 451955 - DNA, 19 bp, Mus musculus
  siRNA target sequence for Xpc (NM_009531.1,1902-1920).
caagaaccaccctctgtat

SEQ ID NO: 451956 - DNA, 19 bp, Mus musculus
  siRNA target sequence for Xpc (NM_009531.1,1931-1949).
gccacctcttgaaattcca

SEQ ID NO: 451957 - DNA, 19 bp, Mus musculus
  siRNA target sequence for Xpc (NM_009531.1,2012-2030).
gggattgcgtgcatacctt

SEQ ID NO: 451958 - DNA, 19 bp, Mus musculus
  siRNA target sequence for Xpc (NM_009531.1,2078-2096).
gagaagtgccctataagat

SEQ ID NO: 451959 - DNA, 19 bp, Mus musculus
  siRNA target sequence for Xpc (NM_009531.1,2199-2217).
gtatcagcctcctatagct

SEQ ID NO: 451960 - DNA, 19 bp, Mus musculus
  siRNA target sequence for Xpc (NM_009531.1,2357-2375).
ccatcactggcttcgattt

SEQ ID NO: 451961 - DNA, 19 bp, Mus musculus
  siRNA target sequence for Xpc (NM_009531.1,2457-2475).
gaatgaacaggccatcatt

SEQ ID NO: 451962 - DNA, 19 bp, Mus musculus
  siRNA target sequence for Xpc (NM_009531.1,2616-2634).
cggactctcttctgatgaa

SEQ ID NO: 451963 - DNA, 19 bp, Mus musculus
  siRNA target sequence for Xpc (NM_009531.1,2713-2731).
cagaagtccgagtacacta

SEQ ID NO: 451964 - DNA, 19 bp, Mus musculus
  siRNA target sequence for Xrcc1 (NM_009532.1,551-569).
catacggcctgagttttgt

SEQ ID NO: 451965 - DNA, 19 bp, Mus musculus
  siRNA target sequence for Xrcc1 (NM_009532.1,929-947).
ccctcaagagacccaaatt

SEQ ID NO: 451966 - DNA, 19 bp, Mus musculus
  siRNA target sequence for Xrcc1 (NM_009532.1,931-949).
ctcaagagacccaaattgt

SEQ ID NO: 451967 - DNA, 19 bp, Mus musculus
  siRNA target sequence for Xrcc1 (NM_009532.1,1256-1274).
gccggattgtgcgtaaaga

SEQ ID NO: 451968 - DNA, 19 bp, Mus musculus
  siRNA target sequence for Xrcc1 (NM_009532.1,1258-1276).
cggattgtgcgtaaagagt

SEQ ID NO: 451969 - DNA, 19 bp, Mus musculus
  siRNA target sequence for Xrcc1 (NM_009532.1,1554-1572).
ggacaacggggcagaagat

SEQ ID NO: 451970 - DNA, 19 bp, Mus musculus
  siRNA target sequence for Xrcc1 (NM_009532.1,1555-1573).
gacaacggggcagaagatt

SEQ ID NO: 451971 - DNA, 19 bp, Mus musculus
  siRNA target sequence for Xrcc1 (NM_009532.1,1808-1826).
gctacgtgaccgctttcaa

SEQ ID NO: 451972 - DNA, 19 bp, Mus musculus
  siRNA target sequence for Xrcc1 (NM_009532.1,1809-1827).
ctacgtgaccgctttcaat

SEQ ID NO: 451973 - DNA, 19 bp, Mus musculus
  siRNA target sequence for Xrcc1 (NM_009532.1,1828-1846).
ggcgagctcgaggactata

SEQ ID NO: 451974 - DNA, 19 bp, Mus musculus
  siRNA target sequence for Xrcc1 (NM_009532.1,1829-1847).
gcgagctcgaggactatat

SEQ ID NO: 451975 - DNA, 19 bp, Mus musculus
  siRNA target sequence for Xrcc1 (NM_009532.1,1831-1849).
gagctcgaggactatatga

SEQ ID NO: 451976 - DNA, 19 bp, Mus musculus
  siRNA target sequence for Xrcc1 (NM_009532.1,1833-1851).
gctcgaggactatatgaat

SEQ ID NO: 451977 - DNA, 19 bp, Mus musculus
  siRNA target sequence for Xrcc1 (NM_009532.1,1945-1963).
cggtggatctacagttgta

SEQ ID NO: 451978 - DNA, 19 bp, Mus musculus
  siRNA target sequence for Xrcc1 (NM_009532.1,1947-1965).
gtggatctacagttgtaat

SEQ ID NO: 451979 - DNA, 19 bp, Mus musculus
  siRNA target sequence for Xrcc1 (NM_009532.1,1961-1979).
gtaatgagaagcagaagtt

SEQ ID NO: 451980 - DNA, 19 bp, Mus musculus
  siRNA target sequence for Xrcc2 (NM_020570.2,140-158).
gcagaagctcgttgaaaga

SEQ ID NO: 451981 - DNA, 19 bp, Mus musculus
  siRNA target sequence for Xrcc2 (NM_020570.2,141-159).
cagaagctcgttgaaagaa

SEQ ID NO: 451982 - DNA, 19 bp, Mus musculus
  siRNA target sequence for Xrcc2 (NM_020570.2,143-161).
gaagctcgttgaaagaact

SEQ ID NO: 451983 - DNA, 19 bp, Mus musculus
  siRNA target sequence for Xrcc2 (NM_020570.2,168-186).
caacctgtttgctgatgaa

SEQ ID NO: 451984 - DNA, 19 bp, Mus musculus
  siRNA target sequence for Xrcc2 (NM_020570.2,191-209).
caccagtgcacggtgatat

SEQ ID NO: 451985 - DNA, 19 bp, Mus musculus
  siRNA target sequence for Xrcc2 (NM_020570.2,193-211).
ccagtgcacggtgatattt

SEQ ID NO: 451986 - DNA, 19 bp, Mus musculus
  siRNA target sequence for Xrcc2 (NM_020570.2,194-212).
cagtgcacggtgatatttt

SEQ ID NO: 451987 - DNA, 19 bp, Mus musculus
  siRNA target sequence for Xrcc2 (NM_020570.2,233-251).
gaacggggaaaacagaaat

SEQ ID NO: 451988 - DNA, 19 bp, Mus musculus
  siRNA target sequence for Xrcc2 (NM_020570.2,269-287).
cccgatgtatacttccaaa

SEQ ID NO: 451989 - DNA, 19 bp, Mus musculus
  siRNA target sequence for Xrcc2 (NM_020570.2,270-288).
ccgatgtatacttccaaaa

SEQ ID NO: 451990 - DNA, 19 bp, Mus musculus
  siRNA target sequence for Xrcc2 (NM_020570.2,271-289).
cgatgtatacttccaaaat

SEQ ID NO: 451991 - DNA, 19 bp, Mus musculus
  siRNA target sequence for Xrcc2 (NM_020570.2,294-312).
gggtggactgcaaatagaa

SEQ ID NO: 451992 - DNA, 19 bp, Mus musculus
  siRNA target sequence for Xrcc2 (NM_020570.2,299-317).
gactgcaaatagaagtctt

SEQ ID NO: 451993 - DNA, 19 bp, Mus musculus
  siRNA target sequence for Xrcc2 (NM_020570.2,353-371).
ggctcgtgacagttcttga

SEQ ID NO: 451994 - DNA, 19 bp, Mus musculus
  siRNA target sequence for Xrcc2 (NM_020570.2,526-544).
gacagcctgtcgtcttttt

SEQ ID NO: 451995 - DNA, 19 bp, Mus musculus
  siRNA target sequence for Xrcc2 (NM_020570.2,658-676).
gcgacaacgcagagtctaa

SEQ ID NO: 451996 - DNA, 19 bp, Mus musculus
  siRNA target sequence for Xrcc2 (NM_020570.2,659-677).
cgacaacgcagagtctaat

SEQ ID NO: 451997 - DNA, 19 bp, Mus musculus
  siRNA target sequence for Xrcc2 (NM_020570.2,742-760).
ggctacagagcctatctct

SEQ ID NO: 451998 - DNA, 19 bp, Mus musculus
  siRNA target sequence for Xrcc2 (NM_020570.2,824-842).
gcagccggttctcattagt

SEQ ID NO: 451999 - DNA, 19 bp, Mus musculus
  siRNA target sequence for Xrcc2 (NM_020570.2,825-843).
cagccggttctcattagtt

SEQ ID NO: 452000 - DNA, 19 bp, Mus musculus
  siRNA target sequence for Xrcc2 (NM_020570.2,828-846).
ccggttctcattagtttca

SEQ ID NO: 452001 - DNA, 19 bp, Mus musculus
  siRNA target sequence for Xrcc3 (NM_028875.1,140-158).
gacctaaacccccgaatta

SEQ ID NO: 452002 - DNA, 19 bp, Mus musculus
  siRNA target sequence for Xrcc3 (NM_028875.1,142-160).
cctaaacccccgaattact

SEQ ID NO: 452003 - DNA, 19 bp, Mus musculus
  siRNA target sequence for Xrcc3 (NM_028875.1,496-514).
gttcccaagacaatatgga

SEQ ID NO: 452004 - DNA, 19 bp, Mus musculus
  siRNA target sequence for 1210002E11Rik (NM_133772.1,875-893).
ccaactccagcgagaatat

SEQ ID NO: 452005 - DNA, 19 bp, Mus musculus
  siRNA target sequence for 1210002E11Rik (NM_133772.1,923-941).
gcgctggcagggctaactt

SEQ ID NO: 452006 - DNA, 19 bp, Mus musculus
  siRNA target sequence for 1210002E11Rik (NM_133772.1,964-982).
ggcccaatggcctcaatga

SEQ ID NO: 452007 - DNA, 19 bp, Mus musculus
  siRNA target sequence for 1210002E11Rik (NM_133772.1,1033-1051).
gacgggctgccgaagaatt

SEQ ID NO: 452008 - DNA, 19 bp, Mus musculus
  siRNA target sequence for 1210002E11Rik (NM_133772.1,1139-1157).
cgttcccgagcgaaagcta

SEQ ID NO: 452009 - DNA, 19 bp, Mus musculus
  siRNA target sequence for Brca2 (NM_009765.1,42-60).
cccgttgaatacaaaagga

SEQ ID NO: 452010 - DNA, 19 bp, Mus musculus
  siRNA target sequence for Brca2 (NM_009765.1,114-132).
ccgataagcctcaattggt

SEQ ID NO: 452011 - DNA, 19 bp, Mus musculus
  siRNA target sequence for Brca2 (NM_009765.1,115-133).
cgataagcctcaattggtt

SEQ ID NO: 452012 - DNA, 19 bp, Mus musculus
  siRNA target sequence for Brca2 (NM_009765.1,116-134).
gataagcctcaattggttt

SEQ ID NO: 452013 - DNA, 19 bp, Mus musculus
  siRNA target sequence for Brca2 (NM_009765.1,177-195).
ccggaggaatctgagtata

SEQ ID NO: 452014 - DNA, 19 bp, Mus musculus
  siRNA target sequence for Brca2 (NM_009765.1,210-228).
gaaccacagctgtttaaaa

SEQ ID NO: 452015 - DNA, 19 bp, Mus musculus
  siRNA target sequence for Brca2 (NM_009765.1,251-269).
ccatcagtttgcttcaact

SEQ ID NO: 452016 - DNA, 19 bp, Mus musculus
  siRNA target sequence for Brca2 (NM_009765.1,262-280).
cttcaactccaataatgtt

SEQ ID NO: 452017 - DNA, 19 bp, Mus musculus
  siRNA target sequence for Brca2 (NM_009765.1,278-296).
gttcaaagaacgaagtcaa

SEQ ID NO: 452018 - DNA, 19 bp, Mus musculus
  siRNA target sequence for Brca2 (NM_009765.1,314-332).
gtcgcctttcagagaatta

SEQ ID NO: 452019 - DNA, 19 bp, Mus musculus
  siRNA target sequence for Brca2 (NM_009765.1,335-353).
gaaggttgttgcaagtagt

SEQ ID NO: 452020 - DNA, 19 bp, Mus musculus
  siRNA target sequence for Brca2 (NM_009765.1,349-367).
gtagtaaacataaaactca

SEQ ID NO: 452021 - DNA, 19 bp, Mus musculus
  siRNA target sequence for Brca2 (NM_009765.1,389-407).
ggaccctgtggtagatgtt

SEQ ID NO: 452022 - DNA, 19 bp, Mus musculus
  siRNA target sequence for Brca2 (NM_009765.1,408-426).
gctagtccgcctctgaaat

SEQ ID NO: 452023 - DNA, 19 bp, Mus musculus
  siRNA target sequence for Brca2 (NM_009765.1,490-508).
cagtggtatctggaagttt

SEQ ID NO: 452024 - DNA, 19 bp, Mus musculus
  siRNA target sequence for Brca2 (NM_009765.1,492-510).
gtggtatctggaagtttat

SEQ ID NO: 452025 - DNA, 19 bp, Mus musculus
  siRNA target sequence for Brca2 (NM_009765.1,533-551).
gggtcagacaccaaaacct

SEQ ID NO: 452026 - DNA, 19 bp, Mus musculus
  siRNA target sequence for Brca2 (NM_009765.1,534-552).
ggtcagacaccaaaaccta

SEQ ID NO: 452027 - DNA, 19 bp, Mus musculus
  siRNA target sequence for Brca2 (NM_009765.1,535-553).
gtcagacaccaaaacctat

SEQ ID NO: 452028 - DNA, 19 bp, Mus musculus
  siRNA target sequence for Brca2 (NM_009765.1,590-608).
gtcttggacaagctcatta

SEQ ID NO: 452029 - DNA, 19 bp, Mus musculus
  siRNA target sequence for Brca2 (NM_009765.1,641-659).
catagcccgagatgaagaa

SEQ ID NO: 452030 - DNA, 19 bp, Mus musculus
  siRNA target sequence for Brca2 (NM_009765.1,657-675).
gaagcacgcagctctgtaa

SEQ ID NO: 452031 - DNA, 19 bp, Mus musculus
  siRNA target sequence for Brca2 (NM_009765.1,682-700).
ctgactctcccgctacttt

SEQ ID NO: 452032 - DNA, 19 bp, Mus musculus
  siRNA target sequence for Brca2 (NM_009765.1,684-702).
gactctcccgctactttga

SEQ ID NO: 452033 - DNA, 19 bp, Mus musculus
  siRNA target sequence for Brca2 (NM_009765.1,686-704).
ctctcccgctactttgaaa

SEQ ID NO: 452034 - DNA, 19 bp, Mus musculus
  siRNA target sequence for Brca2 (NM_009765.1,760-778).
cagtgattgacagtgaaaa

SEQ ID NO: 452035 - DNA, 19 bp, Mus musculus
  siRNA target sequence for Brca2 (NM_009765.1,762-780).
gtgattgacagtgaaaaca

SEQ ID NO: 452036 - DNA, 19 bp, Mus musculus
  siRNA target sequence for Brca2 (NM_009765.1,864-882).
cttagaaagccaataccaa

SEQ ID NO: 452037 - DNA, 19 bp, Mus musculus
  siRNA target sequence for Brca2 (NM_009765.1,912-930).
gatacttccgaagaagata

SEQ ID NO: 452038 - DNA, 19 bp, Mus musculus
  siRNA target sequence for Brca2 (NM_009765.1,916-934).
cttccgaagaagatagttt

SEQ ID NO: 452039 - DNA, 19 bp, Mus musculus
  siRNA target sequence for Brca2 (NM_009765.1,920-938).
cgaagaagatagtttctca

SEQ ID NO: 452040 - DNA, 19 bp, Mus musculus
  siRNA target sequence for Brca2 (NM_009765.1,953-971).
gcgtagaaccagaaatcta

SEQ ID NO: 452041 - DNA, 19 bp, Mus musculus
  siRNA target sequence for Brca2 (NM_009765.1,955-973).
gtagaaccagaaatctaca

SEQ ID NO: 452042 - DNA, 19 bp, Mus musculus
  siRNA target sequence for Brca2 (NM_009765.1,1048-1066).
gaagacaacctgatgataa

SEQ ID NO: 452043 - DNA, 19 bp, Mus musculus
  siRNA target sequence for Brca2 (NM_009765.1,1207-1225).
caaacctttctggtctaaa

SEQ ID NO: 452044 - DNA, 19 bp, Mus musculus
  siRNA target sequence for Brca2 (NM_009765.1,1211-1229).
cctttctggtctaaatgaa

SEQ ID NO: 452045 - DNA, 19 bp, Mus musculus
  siRNA target sequence for Brca2 (NM_009765.1,1212-1230).
ctttctggtctaaatgaaa

SEQ ID NO: 452046 - DNA, 19 bp, Mus musculus
  siRNA target sequence for Brca2 (NM_009765.1,1290-1308).
gacttcatagatatgaaga

SEQ ID NO: 452047 - DNA, 19 bp, Mus musculus
  siRNA target sequence for Brca2 (NM_009765.1,1311-1329).
gaaggtactggctctatta

SEQ ID NO: 452048 - DNA, 19 bp, Mus musculus
  siRNA target sequence for Brca2 (NM_009765.1,1314-1332).
ggtactggctctattactt

SEQ ID NO: 452049 - DNA, 19 bp, Mus musculus
  siRNA target sequence for Brca2 (NM_009765.1,1366-1384).
cagaaccggaaaagatgtt

SEQ ID NO: 452050 - DNA, 19 bp, Mus musculus
  siRNA target sequence for Brca2 (NM_009765.1,1368-1386).
gaaccggaaaagatgttca

SEQ ID NO: 452051 - DNA, 19 bp, Mus musculus
  siRNA target sequence for Brca2 (NM_009765.1,1466-1484).
ggtgtctagaacaagtcaa

SEQ ID NO: 452052 - DNA, 19 bp, Mus musculus
  siRNA target sequence for Brca2 (NM_009765.1,1500-1518).
ccgagtatcaggaagtcta

SEQ ID NO: 452053 - DNA, 19 bp, Mus musculus
  siRNA target sequence for Brca2 (NM_009765.1,1501-1519).
cgagtatcaggaagtctat

SEQ ID NO: 452054 - DNA, 19 bp, Mus musculus
  siRNA target sequence for Brca2 (NM_009765.1,1504-1522).
gtatcaggaagtctatatt

SEQ ID NO: 452055 - DNA, 19 bp, Mus musculus
  siRNA target sequence for Brca2 (NM_009765.1,1580-1598).
caactcaacctttacagaa

SEQ ID NO: 452056 - DNA, 19 bp, Mus musculus
  siRNA target sequence for Brca2 (NM_009765.1,1585-1603).
caacctttacagaagaaca

SEQ ID NO: 452057 - DNA, 19 bp, Mus musculus
  siRNA target sequence for Brca2 (NM_009765.1,1588-1606).
cctttacagaagaacatga

SEQ ID NO: 452058 - DNA, 19 bp, Mus musculus
  siRNA target sequence for Brca2 (NM_009765.1,1647-1665).
cagagagaggattctatat

SEQ ID NO: 452059 - DNA, 19 bp, Mus musculus
  siRNA target sequence for Brca2 (NM_009765.1,1727-1745).
gaaaaatgcaggtttgata

SEQ ID NO: 452060 - DNA, 19 bp, Mus musculus
  siRNA target sequence for Brca2 (NM_009765.1,1738-1756).
gtttgatatccactctaaa

SEQ ID NO: 452061 - DNA, 19 bp, Mus musculus
  siRNA target sequence for Brca2 (NM_009765.1,1772-1790).
gtttatttactctgtaagt

SEQ ID NO: 452062 - DNA, 19 bp, Mus musculus
  siRNA target sequence for Brca2 (NM_009765.1,1835-1853).
gttagagcttactaatctt

SEQ ID NO: 452063 - DNA, 19 bp, Mus musculus
  siRNA target sequence for Brca2 (NM_009765.1,1884-1902).
gtaccattgacctttacaa

SEQ ID NO: 452064 - DNA, 19 bp, Mus musculus
  siRNA target sequence for Brca2 (NM_009765.1,1969-1987).
catccttgaccaactcttt

SEQ ID NO: 452065 - DNA, 19 bp, Mus musculus
  siRNA target sequence for Brca2 (NM_009765.1,1991-2009).
gactgctaccagtaaagaa

SEQ ID NO: 452066 - DNA, 19 bp, Mus musculus
  siRNA target sequence for Brca2 (NM_009765.1,1995-2013).
gctaccagtaaagaaatta

SEQ ID NO: 452067 - DNA, 19 bp, Mus musculus
  siRNA target sequence for Brca2 (NM_009765.1,2002-2020).
gtaaagaaattagttatat

SEQ ID NO: 452068 - DNA, 19 bp, Mus musculus
  siRNA target sequence for Brca2 (NM_009765.1,2058-2076).
gcaatagtcattgaagaaa

SEQ ID NO: 452069 - DNA, 19 bp, Mus musculus
  siRNA target sequence for Brca2 (NM_009765.1,2103-2121).
gctgactttctgttatgct

SEQ ID NO: 452070 - DNA, 19 bp, Mus musculus
  siRNA target sequence for Brca2 (NM_009765.1,2120-2138).
cttgccagaaagaacatgt

SEQ ID NO: 452071 - DNA, 19 bp, Mus musculus
  siRNA target sequence for Brca2 (NM_009765.1,2225-2243).
cagcattagctttgaatca

SEQ ID NO: 452072 - DNA, 19 bp, Mus musculus
  siRNA target sequence for Brca2 (NM_009765.1,2227-2245).
gcattagctttgaatcaca

SEQ ID NO: 452073 - DNA, 19 bp, Mus musculus
  siRNA target sequence for Brca2 (NM_009765.1,2264-2282).
ccacaacggaacaagtact

SEQ ID NO: 452074 - DNA, 19 bp, Mus musculus
  siRNA target sequence for Brca2 (NM_009765.1,2267-2285).
caacggaacaagtactctt

SEQ ID NO: 452075 - DNA, 19 bp, Mus musculus
  siRNA target sequence for Brca2 (NM_009765.1,2271-2289).
ggaacaagtactcttaaat

SEQ ID NO: 452076 - DNA, 19 bp, Mus musculus
  siRNA target sequence for Brca2 (NM_009765.1,2376-2394).
gagagttgtaaagttaata

SEQ ID NO: 452077 - DNA, 19 bp, Mus musculus
  siRNA target sequence for Brca2 (NM_009765.1,2493-2511).
gaagtggcctcttcaatga

SEQ ID NO: 452078 - DNA, 19 bp, Mus musculus
  siRNA target sequence for Brca2 (NM_009765.1,2517-2535).
cagttcaatcaaaatgcaa

SEQ ID NO: 452079 - DNA, 19 bp, Mus musculus
  siRNA target sequence for Brca2 (NM_009765.1,2519-2537).
gttcaatcaaaatgcaaaa

SEQ ID NO: 452080 - DNA, 19 bp, Mus musculus
  siRNA target sequence for Brca2 (NM_009765.1,2583-2601).
gtagcagtcaatatgaact

SEQ ID NO: 452081 - DNA, 19 bp, Mus musculus
  siRNA target sequence for Brca2 (NM_009765.1,2623-2641).
gtgggaataattttgcttt

SEQ ID NO: 452082 - DNA, 19 bp, Mus musculus
  siRNA target sequence for Brca2 (NM_009765.1,2666-2684).
gcctgatttaggaagttca

SEQ ID NO: 452083 - DNA, 19 bp, Mus musculus
  siRNA target sequence for Brca2 (NM_009765.1,2721-2739).
gggcctagtctcaagaact

SEQ ID NO: 452084 - DNA, 19 bp, Mus musculus
  siRNA target sequence for Brca2 (NM_009765.1,2738-2756).
ctctcccatggcagtagat

SEQ ID NO: 452085 - DNA, 19 bp, Mus musculus
  siRNA target sequence for Brca2 (NM_009765.1,2740-2758).
ctcccatggcagtagatga

SEQ ID NO: 452086 - DNA, 19 bp, Mus musculus
  siRNA target sequence for Brca2 (NM_009765.1,2744-2762).
catggcagtagatgaagat

SEQ ID NO: 452087 - DNA, 19 bp, Mus musculus
  siRNA target sequence for Brca2 (NM_009765.1,2781-2799).
gcccaagtgttgattacaa

SEQ ID NO: 452088 - DNA, 19 bp, Mus musculus
  siRNA target sequence for Brca2 (NM_009765.1,2878-2896).
ccgaagacaaagatttcaa

SEQ ID NO: 452089 - DNA, 19 bp, Mus musculus
  siRNA target sequence for Brca2 (NM_009765.1,2897-2915).
gtcaaattcctccttgaat

SEQ ID NO: 452090 - DNA, 19 bp, Mus musculus
  siRNA target sequence for Brca2 (NM_009765.1,2925-2943).
gatgggaacagtgattgtt

SEQ ID NO: 452091 - DNA, 19 bp, Mus musculus
  siRNA target sequence for Brca2 (NM_009765.1,2933-2951).
cagtgattgttcagacaaa

SEQ ID NO: 452092 - DNA, 19 bp, Mus musculus
  siRNA target sequence for Brca2 (NM_009765.1,2967-2985).
gatccagtcttgaaccata

SEQ ID NO: 452093 - DNA, 19 bp, Mus musculus
  siRNA target sequence for Brca2 (NM_009765.1,2975-2993).
cttgaaccataattttgga

SEQ ID NO: 452094 - DNA, 19 bp, Mus musculus
  siRNA target sequence for Brca2 (NM_009765.1,3038-3056).
gcataatgtcaagaaaagt

SEQ ID NO: 452095 - DNA, 19 bp, Mus musculus
  siRNA target sequence for Brca2 (NM_009765.1,3091-3109).
ctactaggttagcttgtat

SEQ ID NO: 452096 - DNA, 19 bp, Mus musculus
  siRNA target sequence for Brca2 (NM_009765.1,3102-3120).
gcttgtattgacattgtta

SEQ ID NO: 452097 - DNA, 19 bp, Mus musculus
  siRNA target sequence for Brca2 (NM_009765.1,3103-3121).
cttgtattgacattgttaa

SEQ ID NO: 452098 - DNA, 19 bp, Mus musculus
  siRNA target sequence for Brca2 (NM_009765.1,3154-3172).
gtgaacctcatatatttga

SEQ ID NO: 452099 - DNA, 19 bp, Mus musculus
  siRNA target sequence for Brca2 (NM_009765.1,3176-3194).
gaaatcagttactactgta

SEQ ID NO: 452100 - DNA, 19 bp, Mus musculus
  siRNA target sequence for Brca2 (NM_009765.1,3246-3264).
gcacctcagatgttatctt

SEQ ID NO: 452101 - DNA, 19 bp, Mus musculus
  siRNA target sequence for Brca2 (NM_009765.1,3250-3268).
ctcagatgttatcttcaaa

SEQ ID NO: 452102 - DNA, 19 bp, Mus musculus
  siRNA target sequence for Brca2 (NM_009765.1,3279-3297).
cattcaaataatttaacga

SEQ ID NO: 452103 - DNA, 19 bp, Mus musculus
  siRNA target sequence for Brca2 (NM_009765.1,3319-3337).
cagaactgtctactatttt

SEQ ID NO: 452104 - DNA, 19 bp, Mus musculus
  siRNA target sequence for Brca2 (NM_009765.1,3346-3364).
caggaagtcagtttgaatt

SEQ ID NO: 452105 - DNA, 19 bp, Mus musculus
  siRNA target sequence for Brca2 (NM_009765.1,3505-3523).
cagatcacagcaagcaatt

SEQ ID NO: 452106 - DNA, 19 bp, Mus musculus
  siRNA target sequence for Brca2 (NM_009765.1,3529-3547).
gttcggctggagttaaaca

SEQ ID NO: 452107 - DNA, 19 bp, Mus musculus
  siRNA target sequence for Brca2 (NM_009765.1,3561-3579).
ctgttagaagacacttgta

SEQ ID NO: 452108 - DNA, 19 bp, Mus musculus
  siRNA target sequence for Brca2 (NM_009765.1,3640-3658).
ctgctcttggcacaaaact

SEQ ID NO: 452109 - DNA, 19 bp, Mus musculus
  siRNA target sequence for Brca2 (NM_009765.1,3642-3660).
gctcttggcacaaaactta

SEQ ID NO: 452110 - DNA, 19 bp, Mus musculus
  siRNA target sequence for Brca2 (NM_009765.1,3722-3740).
ggagccttctgcaaaagta

SEQ ID NO: 452111 - DNA, 19 bp, Mus musculus
  siRNA target sequence for Brca2 (NM_009765.1,3763-3781).
gtgcacaccatgattctgt

SEQ ID NO: 452112 - DNA, 19 bp, Mus musculus
  siRNA target sequence for Brca2 (NM_009765.1,3828-3846).
gatgaaaaatctagtaagt

SEQ ID NO: 452113 - DNA, 19 bp, Mus musculus
  siRNA target sequence for Brca2 (NM_009765.1,3944-3962).
ctatactagctctcaaaga

SEQ ID NO: 452114 - DNA, 19 bp, Mus musculus
  siRNA target sequence for Brca2 (NM_009765.1,3981-3999).
gatggtagtatgtcaagta

SEQ ID NO: 452115 - DNA, 19 bp, Mus musculus
  siRNA target sequence for Brca2 (NM_009765.1,3997-4015).
gtacaagtggcccagttta

SEQ ID NO: 452116 - DNA, 19 bp, Mus musculus
  siRNA target sequence for Brca2 (NM_009765.1,4000-4018).
caagtggcccagtttatat

SEQ ID NO: 452117 - DNA, 19 bp, Mus musculus
  siRNA target sequence for Brca2 (NM_009765.1,4005-4023).
ggcccagtttatattcata

SEQ ID NO: 452118 - DNA, 19 bp, Mus musculus
  siRNA target sequence for Brca2 (NM_009765.1,4006-4024).
gcccagtttatattcataa

SEQ ID NO: 452119 - DNA, 19 bp, Mus musculus
  siRNA target sequence for Brca2 (NM_009765.1,4007-4025).
cccagtttatattcataaa

SEQ ID NO: 452120 - DNA, 19 bp, Mus musculus
  siRNA target sequence for Brca2 (NM_009765.1,4020-4038).
cataaaggtgacagtgatt

SEQ ID NO: 452121 - DNA, 19 bp, Mus musculus
  siRNA target sequence for Brca2 (NM_009765.1,4044-4062).
gccgatcaaggcagtaagt

SEQ ID NO: 452122 - DNA, 19 bp, Mus musculus
  siRNA target sequence for Brca2 (NM_009765.1,4046-4064).
cgatcaaggcagtaagtgt

SEQ ID NO: 452123 - DNA, 19 bp, Mus musculus
  siRNA target sequence for Brca2 (NM_009765.1,4112-4130).
ggaaaatatatcagattta

SEQ ID NO: 452124 - DNA, 19 bp, Mus musculus
  siRNA target sequence for Brca2 (NM_009765.1,4158-4176).
gaaacatgtatgaaatctt

SEQ ID NO: 452125 - DNA, 19 bp, Mus musculus
  siRNA target sequence for Brca2 (NM_009765.1,4188-4206).
caattaccttcagataaga

SEQ ID NO: 452126 - DNA, 19 bp, Mus musculus
  siRNA target sequence for Brca2 (NM_009765.1,4198-4216).
cagataagatggaacaaaa

SEQ ID NO: 452127 - DNA, 19 bp, Mus musculus
  siRNA target sequence for Brca2 (NM_009765.1,4200-4218).
gataagatggaacaaaata

SEQ ID NO: 452128 - DNA, 19 bp, Mus musculus
  siRNA target sequence for Brca2 (NM_009765.1,4271-4289).
ctccaaagagtcattaaat

SEQ ID NO: 452129 - DNA, 19 bp, Mus musculus
  siRNA target sequence for Brca2 (NM_009765.1,4437-4455).
gaccatttcccaattgtaa

SEQ ID NO: 452130 - DNA, 19 bp, Mus musculus
  siRNA target sequence for Brca2 (NM_009765.1,4481-4499).
gcatcctgaatatgaaata

SEQ ID NO: 452131 - DNA, 19 bp, Mus musculus
  siRNA target sequence for Brca2 (NM_009765.1,4512-4530).
gaacctactctgttgagtt

SEQ ID NO: 452132 - DNA, 19 bp, Mus musculus
  siRNA target sequence for Brca2 (NM_009765.1,4537-4555).
cagctagtgggaaaaaagt

SEQ ID NO: 452133 - DNA, 19 bp, Mus musculus
  siRNA target sequence for Brca2 (NM_009765.1,4577-4595).
ggacaaagtgaaaaacctt

SEQ ID NO: 452134 - DNA, 19 bp, Mus musculus
  siRNA target sequence for Brca2 (NM_009765.1,4578-4596).
gacaaagtgaaaaaccttt

SEQ ID NO: 452135 - DNA, 19 bp, Mus musculus
  siRNA target sequence for Brca2 (NM_009765.1,4619-4637).
gaaaactgccagttttagt

SEQ ID NO: 452136 - DNA, 19 bp, Mus musculus
  siRNA target sequence for Brca2 (NM_009765.1,4630-4648).
gttttagtcaaggatcaaa

SEQ ID NO: 452137 - DNA, 19 bp, Mus musculus
  siRNA target sequence for Brca2 (NM_009765.1,4663-4681).
gtaaaaaagaacttacatt

SEQ ID NO: 452138 - DNA, 19 bp, Mus musculus
  siRNA target sequence for Brca2 (NM_009765.1,4698-4716).
gaagtaactgcctcaaaat

SEQ ID NO: 452139 - DNA, 19 bp, Mus musculus
  siRNA target sequence for Brca2 (NM_009765.1,4764-4782).
cagcaaaattatcatatgt

SEQ ID NO: 452140 - DNA, 19 bp, Mus musculus
  siRNA target sequence for Brca2 (NM_009765.1,4800-4818).
ctcaaaacatcaaatggta

SEQ ID NO: 452141 - DNA, 19 bp, Mus musculus
  siRNA target sequence for Brca2 (NM_009765.1,4911-4929).
gattctgctttggcatatt

SEQ ID NO: 452142 - DNA, 19 bp, Mus musculus
  siRNA target sequence for Brca2 (NM_009765.1,4934-4952).
ggaggacagtaggaaaact

SEQ ID NO: 452143 - DNA, 19 bp, Mus musculus
  siRNA target sequence for Brca2 (NM_009765.1,4960-4978).
gagagtcttctctatccaa

SEQ ID NO: 452144 - DNA, 19 bp, Mus musculus
  siRNA target sequence for Brca2 (NM_009765.1,4971-4989).
ctatccaaaggcagaaaat

SEQ ID NO: 452145 - DNA, 19 bp, Mus musculus
  siRNA target sequence for Brca2 (NM_009765.1,4996-5014).
gagaacagggtgataagct

SEQ ID NO: 452146 - DNA, 19 bp, Mus musculus
  siRNA target sequence for Brca2 (NM_009765.1,5016-5034).
ggaacaagaaatactatca

SEQ ID NO: 452147 - DNA, 19 bp, Mus musculus
  siRNA target sequence for Brca2 (NM_009765.1,5071-5089).
caggaaatgcctcatatga

SEQ ID NO: 452148 - DNA, 19 bp, Mus musculus
  siRNA target sequence for Brca2 (NM_009765.1,5079-5097).
gcctcatatgaacatagtt

SEQ ID NO: 452149 - DNA, 19 bp, Mus musculus
  siRNA target sequence for Brca2 (NM_009765.1,5088-5106).
gaacatagtttggtcatta

SEQ ID NO: 452150 - DNA, 19 bp, Mus musculus
  siRNA target sequence for Brca2 (NM_009765.1,5108-5126).
cagaactgaaattgataca

SEQ ID NO: 452151 - DNA, 19 bp, Mus musculus
  siRNA target sequence for Brca2 (NM_009765.1,5166-5184).
gaccctaatgtgtgtcata

SEQ ID NO: 452152 - DNA, 19 bp, Mus musculus
  siRNA target sequence for Brca2 (NM_009765.1,5175-5193).
gtgtgtcatagctatctat

SEQ ID NO: 452153 - DNA, 19 bp, Mus musculus
  siRNA target sequence for Brca2 (NM_009765.1,5194-5212).
cccagtctagtttttgtca

SEQ ID NO: 452154 - DNA, 19 bp, Mus musculus
  siRNA target sequence for Brca2 (NM_009765.1,5195-5213).
ccagtctagtttttgtcat

SEQ ID NO: 452155 - DNA, 19 bp, Mus musculus
  siRNA target sequence for Brca2 (NM_009765.1,5215-5233).
gtgatgacatgcataatga

SEQ ID NO: 452156 - DNA, 19 bp, Mus musculus
  siRNA target sequence for Brca2 (NM_009765.1,5225-5243).
gcataatgattcaggatat

SEQ ID NO: 452157 - DNA, 19 bp, Mus musculus
  siRNA target sequence for Brca2 (NM_009765.1,5232-5250).
gattcaggatatttcttaa

SEQ ID NO: 452158 - DNA, 19 bp, Mus musculus
  siRNA target sequence for Brca2 (NM_009765.1,5292-5310).
gctgaaggcaataccattt

SEQ ID NO: 452159 - DNA, 19 bp, Mus musculus
  siRNA target sequence for Brca2 (NM_009765.1,5348-5366).
cccacaaactataaatgaa

SEQ ID NO: 452160 - DNA, 19 bp, Mus musculus
  siRNA target sequence for Brca2 (NM_009765.1,5418-5436).
gtagccattgacccatttt

SEQ ID NO: 452161 - DNA, 19 bp, Mus musculus
  siRNA target sequence for Brca2 (NM_009765.1,5422-5440).
ccattgacccatttttgct

SEQ ID NO: 452162 - DNA, 19 bp, Mus musculus
  siRNA target sequence for Brca2 (NM_009765.1,5438-5456).
gctggattcaaggaattgt

SEQ ID NO: 452163 - DNA, 19 bp, Mus musculus
  siRNA target sequence for Brca2 (NM_009765.1,5460-5478).
gtaggctcactcgtgttta

SEQ ID NO: 452164 - DNA, 19 bp, Mus musculus
  siRNA target sequence for Brca2 (NM_009765.1,5463-5481).
ggctcactcgtgtttatta

SEQ ID NO: 452165 - DNA, 19 bp, Mus musculus
  siRNA target sequence for Brca2 (NM_009765.1,5465-5483).
ctcactcgtgtttattaca

SEQ ID NO: 452166 - DNA, 19 bp, Mus musculus
  siRNA target sequence for Brca2 (NM_009765.1,5516-5534).
gatagtcacagataactgt

SEQ ID NO: 452167 - DNA, 19 bp, Mus musculus
  siRNA target sequence for Brca2 (NM_009765.1,5592-5610).
cataaagtattggatgatt

SEQ ID NO: 452168 - DNA, 19 bp, Mus musculus
  siRNA target sequence for Brca2 (NM_009765.1,5640-5658).
ggtgatgtttgcataaact

SEQ ID NO: 452169 - DNA, 19 bp, Mus musculus
  siRNA target sequence for Brca2 (NM_009765.1,5651-5669).
cataaactcacgtaaggat

SEQ ID NO: 452170 - DNA, 19 bp, Mus musculus
  siRNA target sequence for Brca2 (NM_009765.1,5657-5675).
ctcacgtaaggatagtttt

SEQ ID NO: 452171 - DNA, 19 bp, Mus musculus
  siRNA target sequence for Brca2 (NM_009765.1,5677-5695).
gtcctcataatgaacaaat

SEQ ID NO: 452172 - DNA, 19 bp, Mus musculus
  siRNA target sequence for Brca2 (NM_009765.1,5680-5698).
ctcataatgaacaaatttt

SEQ ID NO: 452173 - DNA, 19 bp, Mus musculus
  siRNA target sequence for Brca2 (NM_009765.1,5700-5718).
caacataaccaaagtatgt

SEQ ID NO: 452174 - DNA, 19 bp, Mus musculus
  siRNA target sequence for Brca2 (NM_009765.1,5713-5731).
gtatgtttggactgaagaa

SEQ ID NO: 452175 - DNA, 19 bp, Mus musculus
  siRNA target sequence for Brca2 (NM_009765.1,5745-5763).
cctgttggtttggaaactt

SEQ ID NO: 452176 - DNA, 19 bp, Mus musculus
  siRNA target sequence for Brca2 (NM_009765.1,5756-5774).
ggaaacttgggatacaagt

SEQ ID NO: 452177 - DNA, 19 bp, Mus musculus
  siRNA target sequence for Brca2 (NM_009765.1,5764-5782).
gggatacaagtaaatctat

SEQ ID NO: 452178 - DNA, 19 bp, Mus musculus
  siRNA target sequence for Brca2 (NM_009765.1,5765-5783).
ggatacaagtaaatctata

SEQ ID NO: 452179 - DNA, 19 bp, Mus musculus
  siRNA target sequence for Brca2 (NM_009765.1,5812-5830).
cacgcacttatgggatttt

SEQ ID NO: 452180 - DNA, 19 bp, Mus musculus
  siRNA target sequence for Brca2 (NM_009765.1,5814-5832).
cgcacttatgggattttta

SEQ ID NO: 452181 - DNA, 19 bp, Mus musculus
  siRNA target sequence for Brca2 (NM_009765.1,5882-5900).
ggcaaggcaagtgttttct

SEQ ID NO: 452182 - DNA, 19 bp, Mus musculus
  siRNA target sequence for Brca2 (NM_009765.1,5910-5928).
ggtgatgctaaacagttat

SEQ ID NO: 452183 - DNA, 19 bp, Mus musculus
  siRNA target sequence for Brca2 (NM_009765.1,5936-5954).
ggtgtcactggaaggtaat

SEQ ID NO: 452184 - DNA, 19 bp, Mus musculus
  siRNA target sequence for Brca2 (NM_009765.1,6002-6020).
cacccagggtgtattgtca

SEQ ID NO: 452185 - DNA, 19 bp, Mus musculus
  siRNA target sequence for Brca2 (NM_009765.1,6031-6049).
ccctcccaggcaatgtcaa

SEQ ID NO: 452186 - DNA, 19 bp, Mus musculus
  siRNA target sequence for Brca2 (NM_009765.1,6032-6050).
cctcccaggcaatgtcaat

SEQ ID NO: 452187 - DNA, 19 bp, Mus musculus
  siRNA target sequence for Brca2 (NM_009765.1,6033-6051).
ctcccaggcaatgtcaatt

SEQ ID NO: 452188 - DNA, 19 bp, Mus musculus
  siRNA target sequence for Brca2 (NM_009765.1,6035-6053).
cccaggcaatgtcaattca

SEQ ID NO: 452189 - DNA, 19 bp, Mus musculus
  siRNA target sequence for Brca2 (NM_009765.1,6036-6054).
ccaggcaatgtcaattcat

SEQ ID NO: 452190 - DNA, 19 bp, Mus musculus
  siRNA target sequence for Brca2 (NM_009765.1,6041-6059).
caatgtcaattcatctgta

SEQ ID NO: 452191 - DNA, 19 bp, Mus musculus
  siRNA target sequence for Brca2 (NM_009765.1,6045-6063).
gtcaattcatctgtattct

SEQ ID NO: 452192 - DNA, 19 bp, Mus musculus
  siRNA target sequence for Brca2 (NM_009765.1,6057-6075).
gtattctctggatttagca

SEQ ID NO: 452193 - DNA, 19 bp, Mus musculus
  siRNA target sequence for Brca2 (NM_009765.1,6084-6102).
ggaaaactggtcacagttt

SEQ ID NO: 452194 - DNA, 19 bp, Mus musculus
  siRNA target sequence for Brca2 (NM_009765.1,6109-6127).
gtgccttacacaaagttaa

SEQ ID NO: 452195 - DNA, 19 bp, Mus musculus
  siRNA target sequence for Brca2 (NM_009765.1,6130-6148).
gaatgttagaggagtttga

SEQ ID NO: 452196 - DNA, 19 bp, Mus musculus
  siRNA target sequence for Brca2 (NM_009765.1,6141-6159).
gagtttgatttgatcagaa

SEQ ID NO: 452197 - DNA, 19 bp, Mus musculus
  siRNA target sequence for Brca2 (NM_009765.1,6152-6170).
gatcagaactgaacatact

SEQ ID NO: 452198 - DNA, 19 bp, Mus musculus
  siRNA target sequence for Brca2 (NM_009765.1,6189-6207).
cctgaagacgtatcaaaaa

SEQ ID NO: 452199 - DNA, 19 bp, Mus musculus
  siRNA target sequence for Brca2 (NM_009765.1,6190-6208).
ctgaagacgtatcaaaaat

SEQ ID NO: 452200 - DNA, 19 bp, Mus musculus
  siRNA target sequence for Brca2 (NM_009765.1,6243-6261).
gaataccctgtaaactcaa

SEQ ID NO: 452201 - DNA, 19 bp, Mus musculus
  siRNA target sequence for Brca2 (NM_009765.1,6250-6268).
ctgtaaactcaaaattgca

SEQ ID NO: 452202 - DNA, 19 bp, Mus musculus
  siRNA target sequence for Brca2 (NM_009765.1,6269-6287).
gaaaacctacaatgataaa

SEQ ID NO: 452203 - DNA, 19 bp, Mus musculus
  siRNA target sequence for Brca2 (NM_009765.1,6289-6307).
ccagcttaccaagtaatta

SEQ ID NO: 452204 - DNA, 19 bp, Mus musculus
  siRNA target sequence for Brca2 (NM_009765.1,6319-6337).
gttcttcgggcaatactca

SEQ ID NO: 452205 - DNA, 19 bp, Mus musculus
  siRNA target sequence for Brca2 (NM_009765.1,6325-6343).
cgggcaatactcaatctat

SEQ ID NO: 452206 - DNA, 19 bp, Mus musculus
  siRNA target sequence for Brca2 (NM_009765.1,6326-6344).
gggcaatactcaatctatt

SEQ ID NO: 452207 - DNA, 19 bp, Mus musculus
  siRNA target sequence for Brca2 (NM_009765.1,6328-6346).
gcaatactcaatctattga

SEQ ID NO: 452208 - DNA, 19 bp, Mus musculus
  siRNA target sequence for Brca2 (NM_009765.1,6395-6413).
ggtattaggaacaaaagta

SEQ ID NO: 452209 - DNA, 19 bp, Mus musculus
  siRNA target sequence for Brca2 (NM_009765.1,6406-6424).
caaaagtatcccatagtaa

SEQ ID NO: 452210 - DNA, 19 bp, Mus musculus
  siRNA target sequence for Brca2 (NM_009765.1,6415-6433).
cccatagtaaggctaatct

SEQ ID NO: 452211 - DNA, 19 bp, Mus musculus
  siRNA target sequence for Brca2 (NM_009765.1,6437-6455).
gggaaaagaacaaacttta

SEQ ID NO: 452212 - DNA, 19 bp, Mus musculus
  siRNA target sequence for Brca2 (NM_009765.1,6447-6465).
caaactttaccccaaaaca

SEQ ID NO: 452213 - DNA, 19 bp, Mus musculus
  siRNA target sequence for Brca2 (NM_009765.1,6517-6535).
caaatgtaggagagtatta

SEQ ID NO: 452214 - DNA, 19 bp, Mus musculus
  siRNA target sequence for Brca2 (NM_009765.1,6528-6546).
gagtattactccaaagagt

SEQ ID NO: 452215 - DNA, 19 bp, Mus musculus
  siRNA target sequence for Brca2 (NM_009765.1,6576-6594).
gagagtgccaaagctttta

SEQ ID NO: 452216 - DNA, 19 bp, Mus musculus
  siRNA target sequence for Brca2 (NM_009765.1,6624-6642).
cagactcatgccaaatgct

SEQ ID NO: 452217 - DNA, 19 bp, Mus musculus
  siRNA target sequence for Brca2 (NM_009765.1,6655-6673).
gcccccaaaatgagacttt

SEQ ID NO: 452218 - DNA, 19 bp, Mus musculus
  siRNA target sequence for Brca2 (NM_009765.1,6666-6684).
gagactttgtttaattcga

SEQ ID NO: 452219 - DNA, 19 bp, Mus musculus
  siRNA target sequence for Brca2 (NM_009765.1,6731-6749).
cccaatcaaaagaagctta

SEQ ID NO: 452220 - DNA, 19 bp, Mus musculus
  siRNA target sequence for Brca2 (NM_009765.1,6742-6760).
gaagcttattaaatgaatt

SEQ ID NO: 452221 - DNA, 19 bp, Mus musculus
  siRNA target sequence for Brca2 (NM_009765.1,6767-6785).
gataatagaaagtaaagga

SEQ ID NO: 452222 - DNA, 19 bp, Mus musculus
  siRNA target sequence for Brca2 (NM_009765.1,6847-6865).
cacaccacatgtctttaga

SEQ ID NO: 452223 - DNA, 19 bp, Mus musculus
  siRNA target sequence for Brca2 (NM_009765.1,6883-6901).
ccttctgctcaagtaaaga

SEQ ID NO: 452224 - DNA, 19 bp, Mus musculus
  siRNA target sequence for Brca2 (NM_009765.1,6884-6902).
cttctgctcaagtaaagaa

SEQ ID NO: 452225 - DNA, 19 bp, Mus musculus
  siRNA target sequence for Brca2 (NM_009765.1,6971-6989).
gagacactcagctttggaa

SEQ ID NO: 452226 - DNA, 19 bp, Mus musculus
  siRNA target sequence for Brca2 (NM_009765.1,7003-7021).
gtcctatagtttcaatctt

SEQ ID NO: 452227 - DNA, 19 bp, Mus musculus
  siRNA target sequence for Brca2 (NM_009765.1,7052-7070).
cgaaaggaccagacattca

SEQ ID NO: 452228 - DNA, 19 bp, Mus musculus
  siRNA target sequence for Brca2 (NM_009765.1,7072-7090).
gcaaatccaccaaagtctt

SEQ ID NO: 452229 - DNA, 19 bp, Mus musculus
  siRNA target sequence for Brca2 (NM_009765.1,7092-7110).
gtcccgcctttcaagatga

SEQ ID NO: 452230 - DNA, 19 bp, Mus musculus
  siRNA target sequence for Brca2 (NM_009765.1,7139-7157).
caatagcaagaacgttaat

SEQ ID NO: 452231 - DNA, 19 bp, Mus musculus
  siRNA target sequence for Brca2 (NM_009765.1,7213-7231).
gccatgttcgtcagtttaa

SEQ ID NO: 452232 - DNA, 19 bp, Mus musculus
  siRNA target sequence for Brca2 (NM_009765.1,7215-7233).
catgttcgtcagtttaaca

SEQ ID NO: 452233 - DNA, 19 bp, Mus musculus
  siRNA target sequence for Brca2 (NM_009765.1,7221-7239).
cgtcagtttaacaaagatt

SEQ ID NO: 452234 - DNA, 19 bp, Mus musculus
  siRNA target sequence for Brca2 (NM_009765.1,7269-7287).
ctacaggatatgcgaatta

SEQ ID NO: 452235 - DNA, 19 bp, Mus musculus
  siRNA target sequence for Brca2 (NM_009765.1,7275-7293).
gatatgcgaattaaaaaca

SEQ ID NO: 452236 - DNA, 19 bp, Mus musculus
  siRNA target sequence for Brca2 (NM_009765.1,7316-7334).
gcagccaggcagtctgtat

SEQ ID NO: 452237 - DNA, 19 bp, Mus musculus
  siRNA target sequence for Brca2 (NM_009765.1,7319-7337).
gccaggcagtctgtatctt

SEQ ID NO: 452238 - DNA, 19 bp, Mus musculus
  siRNA target sequence for Brca2 (NM_009765.1,7329-7347).
ctgtatcttacaaagtcat

SEQ ID NO: 452239 - DNA, 19 bp, Mus musculus
  siRNA target sequence for Brca2 (NM_009765.1,7408-7426).
ctcctaagcagctctatat

SEQ ID NO: 452240 - DNA, 19 bp, Mus musculus
  siRNA target sequence for Brca2 (NM_009765.1,7410-7428).
cctaagcagctctatatat

SEQ ID NO: 452241 - DNA, 19 bp, Mus musculus
  siRNA target sequence for Brca2 (NM_009765.1,7411-7429).
ctaagcagctctatatata

SEQ ID NO: 452242 - DNA, 19 bp, Mus musculus
  siRNA target sequence for Brca2 (NM_009765.1,7438-7456).
ctaaagagtgcataaacgt

SEQ ID NO: 452243 - DNA, 19 bp, Mus musculus
  siRNA target sequence for Brca2 (NM_009765.1,7443-7461).
gagtgcataaacgttaata

SEQ ID NO: 452244 - DNA, 19 bp, Mus musculus
  siRNA target sequence for Brca2 (NM_009765.1,7448-7466).
cataaacgttaatagcaaa

SEQ ID NO: 452245 - DNA, 19 bp, Mus musculus
  siRNA target sequence for Brca2 (NM_009765.1,7496-7514).
ggatcattttggtaaagaa

SEQ ID NO: 452246 - DNA, 19 bp, Mus musculus
  siRNA target sequence for Brca2 (NM_009765.1,7524-7542).
gctggcaaaggctttcagt

SEQ ID NO: 452247 - DNA, 19 bp, Mus musculus
  siRNA target sequence for Brca2 (NM_009765.1,7559-7577).
gctgatcccctccaatgat

SEQ ID NO: 452248 - DNA, 19 bp, Mus musculus
  siRNA target sequence for Brca2 (NM_009765.1,7626-7644).
ggtgtggatccaaagctta

SEQ ID NO: 452249 - DNA, 19 bp, Mus musculus
  siRNA target sequence for Brca2 (NM_009765.1,7667-7685).
ccattacaggtggattgta

SEQ ID NO: 452250 - DNA, 19 bp, Mus musculus
  siRNA target sequence for Brca2 (NM_009765.1,7760-7778).
gcttcaactgaaatacaga

SEQ ID NO: 452251 - DNA, 19 bp, Mus musculus
  siRNA target sequence for Brca2 (NM_009765.1,7801-7819).
gcaggagatcggctctaaa

SEQ ID NO: 452252 - DNA, 19 bp, Mus musculus
  siRNA target sequence for Brca2 (NM_009765.1,7810-7828).
cggctctaaagaagatact

SEQ ID NO: 452253 - DNA, 19 bp, Mus musculus
  siRNA target sequence for Brca2 (NM_009765.1,7892-7910).
cacaaaggtgtctgaaact

SEQ ID NO: 452254 - DNA, 19 bp, Mus musculus
  siRNA target sequence for Brca2 (NM_009765.1,7905-7923).
gaaacttcaggcggtaaaa

SEQ ID NO: 452255 - DNA, 19 bp, Mus musculus
  siRNA target sequence for Brca2 (NM_009765.1,8004-8022).
ccactcatggctcttgtaa

SEQ ID NO: 452256 - DNA, 19 bp, Mus musculus
  siRNA target sequence for Brca2 (NM_009765.1,8007-8025).
ctcatggctcttgtaaaga

SEQ ID NO: 452257 - DNA, 19 bp, Mus musculus
  siRNA target sequence for Brca2 (NM_009765.1,8168-8186).
cagcaggctggggttcttt

SEQ ID NO: 452258 - DNA, 19 bp, Mus musculus
  siRNA target sequence for Brca2 (NM_009765.1,8211-8229).
cccttgtcctcaatgttca

SEQ ID NO: 452259 - DNA, 19 bp, Mus musculus
  siRNA target sequence for Brca2 (NM_009765.1,8225-8243).
gttcagtgacggaggaaat

SEQ ID NO: 452260 - DNA, 19 bp, Mus musculus
  siRNA target sequence for Brca2 (NM_009765.1,8251-8269).
gtgtggatatcattgttca

SEQ ID NO: 452261 - DNA, 19 bp, Mus musculus
  siRNA target sequence for Brca2 (NM_009765.1,8306-8324).
gtctggattgtacatattt

SEQ ID NO: 452262 - DNA, 19 bp, Mus musculus
  siRNA target sequence for Brca2 (NM_009765.1,8310-8328).
ggattgtacatatttcgta

SEQ ID NO: 452263 - DNA, 19 bp, Mus musculus
  siRNA target sequence for Brca2 (NM_009765.1,8371-8389).
cccagcagaagaaactaga

SEQ ID NO: 452264 - DNA, 19 bp, Mus musculus
  siRNA target sequence for Brca2 (NM_009765.1,8547-8565).
caccttgaggcttgtttca

SEQ ID NO: 452265 - DNA, 19 bp, Mus musculus
  siRNA target sequence for Brca2 (NM_009765.1,8599-8617).
gacaaatgctgaatgataa

SEQ ID NO: 452266 - DNA, 19 bp, Mus musculus
  siRNA target sequence for Brca2 (NM_009765.1,8625-8643).
gcgcggatccagtcagaat

SEQ ID NO: 452267 - DNA, 19 bp, Mus musculus
  siRNA target sequence for Brca2 (NM_009765.1,8626-8644).
cgcggatccagtcagaatt

SEQ ID NO: 452268 - DNA, 19 bp, Mus musculus
  siRNA target sequence for Brca2 (NM_009765.1,8667-8685).
gagaaagaggagggtttat

SEQ ID NO: 452269 - DNA, 19 bp, Mus musculus
  siRNA target sequence for Brca2 (NM_009765.1,8679-8697).
ggtttatcaagggatgtta

SEQ ID NO: 452270 - DNA, 19 bp, Mus musculus
  siRNA target sequence for Brca2 (NM_009765.1,8715-8733).
cgggttacaagctacaaga

SEQ ID NO: 452271 - DNA, 19 bp, Mus musculus
  siRNA target sequence for Brca2 (NM_009765.1,8716-8734).
gggttacaagctacaagaa

SEQ ID NO: 452272 - DNA, 19 bp, Mus musculus
  siRNA target sequence for Brca2 (NM_009765.1,8717-8735).
ggttacaagctacaagaaa

SEQ ID NO: 452273 - DNA, 19 bp, Mus musculus
  siRNA target sequence for Brca2 (NM_009765.1,8718-8736).
gttacaagctacaagaaaa

SEQ ID NO: 452274 - DNA, 19 bp, Mus musculus
  siRNA target sequence for Brca2 (NM_009765.1,8766-8784).
cgtccatcatcagacttat

SEQ ID NO: 452275 - DNA, 19 bp, Mus musculus
  siRNA target sequence for Brca2 (NM_009765.1,8769-8787).
ccatcatcagacttatcct

SEQ ID NO: 452276 - DNA, 19 bp, Mus musculus
  siRNA target sequence for Brca2 (NM_009765.1,8778-8796).
gacttatcctccctgttaa

SEQ ID NO: 452277 - DNA, 19 bp, Mus musculus
  siRNA target sequence for Brca2 (NM_009765.1,8788-8806).
ccctgttaacagaaggaaa

SEQ ID NO: 452278 - DNA, 19 bp, Mus musculus
  siRNA target sequence for Brca2 (NM_009765.1,8826-8844).
cttgcagtgtcaaaatcga

SEQ ID NO: 452279 - DNA, 19 bp, Mus musculus
  siRNA target sequence for Brca2 (NM_009765.1,8832-8850).
gtgtcaaaatcgaaaagta

SEQ ID NO: 452280 - DNA, 19 bp, Mus musculus
  siRNA target sequence for Brca2 (NM_009765.1,8834-8852).
gtcaaaatcgaaaagtaaa

SEQ ID NO: 452281 - DNA, 19 bp, Mus musculus
  siRNA target sequence for Brca2 (NM_009765.1,8911-8929).
cggtttccagtgagacttt

SEQ ID NO: 452282 - DNA, 19 bp, Mus musculus
  siRNA target sequence for Brca2 (NM_009765.1,8912-8930).
ggtttccagtgagacttta

SEQ ID NO: 452283 - DNA, 19 bp, Mus musculus
  siRNA target sequence for Brca2 (NM_009765.1,8947-8965).
ccagggagtcccttcactt

SEQ ID NO: 452284 - DNA, 19 bp, Mus musculus
  siRNA target sequence for Brca2 (NM_009765.1,9011-9029).
ggatgtcgtaggagttgta

SEQ ID NO: 452285 - DNA, 19 bp, Mus musculus
  siRNA target sequence for Brca2 (NM_009765.1,9015-9033).
gtcgtaggagttgtagttt

SEQ ID NO: 452286 - DNA, 19 bp, Mus musculus
  siRNA target sequence for Brca2 (NM_009765.1,9024-9042).
gttgtagtttctgttgtaa

SEQ ID NO: 452287 - DNA, 19 bp, Mus musculus
  siRNA target sequence for Brca2 (NM_009765.1,9110-9128).
cgggatagaccttaatgaa

SEQ ID NO: 452288 - DNA, 19 bp, Mus musculus
  siRNA target sequence for Brca2 (NM_009765.1,9112-9130).
ggatagaccttaatgaaga

SEQ ID NO: 452289 - DNA, 19 bp, Mus musculus
  siRNA target sequence for Brca2 (NM_009765.1,9285-9303).
gctattgagaatatcgata

SEQ ID NO: 452290 - DNA, 19 bp, Mus musculus
  siRNA target sequence for Brca2 (NM_009765.1,9291-9309).
gagaatatcgatacatttt

SEQ ID NO: 452291 - DNA, 19 bp, Mus musculus
  siRNA target sequence for Brca2 (NM_009765.1,9364-9382).
ggtccacaccgaacaaaga

SEQ ID NO: 452292 - DNA, 19 bp, Mus musculus
  siRNA target sequence for Brca2 (NM_009765.1,9465-9483).
cctactggtcagcaaagtt

SEQ ID NO: 452293 - DNA, 19 bp, Mus musculus
  siRNA target sequence for Brca2 (NM_009765.1,9466-9484).
ctactggtcagcaaagtta

SEQ ID NO: 452294 - DNA, 19 bp, Mus musculus
  siRNA target sequence for Brca2 (NM_009765.1,9469-9487).
ctggtcagcaaagttatca

SEQ ID NO: 452295 - DNA, 19 bp, Mus musculus
  siRNA target sequence for Brca2 (NM_009765.1,9568-9586).
gtggagagaacgagattga

SEQ ID NO: 452296 - DNA, 19 bp, Mus musculus
  siRNA target sequence for Brca2 (NM_009765.1,9651-9669).
ccggtcagtcccatctgta

SEQ ID NO: 452297 - DNA, 19 bp, Mus musculus
  siRNA target sequence for Brca2 (NM_009765.1,9656-9674).
cagtcccatctgtaccttt

SEQ ID NO: 452298 - DNA, 19 bp, Mus musculus
  siRNA target sequence for Brca2 (NM_009765.1,9711-9729).
cggagctgtggcacgaaat

SEQ ID NO: 452299 - DNA, 19 bp, Mus musculus
  siRNA target sequence for Brca2 (NM_009765.1,9712-9730).
ggagctgtggcacgaaata

SEQ ID NO: 452300 - DNA, 19 bp, Mus musculus
  siRNA target sequence for Brca2 (NM_009765.1,9725-9743).
gaaatacgcaacacctatt

SEQ ID NO: 452301 - DNA, 19 bp, Mus musculus
  siRNA target sequence for Brca2 (NM_009765.1,9766-9784).
ggaggaaaacgccatttca

SEQ ID NO: 452302 - DNA, 19 bp, Mus musculus
  siRNA target sequence for Brca2 (NM_009765.1,9993-10011).
ggcgacagcagtgagaaat

SEQ ID NO: 452303 - DNA, 19 bp, Mus musculus
  siRNA target sequence for Brca2 (NM_009765.1,9994-10012).
gcgacagcagtgagaaatt

SEQ ID NO: 452304 - DNA, 19 bp, Mus musculus
  siRNA target sequence for Ercc5 (NM_011729.1,290-308).
ggtgctggccgtggatatt

SEQ ID NO: 452305 - DNA, 19 bp, Mus musculus
  siRNA target sequence for Ercc5 (NM_011729.1,291-309).
gtgctggccgtggatatta

SEQ ID NO: 452306 - DNA, 19 bp, Mus musculus
  siRNA target sequence for Ercc5 (NM_011729.1,294-312).
ctggccgtggatattagca

SEQ ID NO: 452307 - DNA, 19 bp, Mus musculus
  siRNA target sequence for Ercc5 (NM_011729.1,296-314).
ggccgtggatattagcatt

SEQ ID NO: 452308 - DNA, 19 bp, Mus musculus
  siRNA target sequence for Ercc5 (NM_011729.1,297-315).
gccgtggatattagcattt

SEQ ID NO: 452309 - DNA, 19 bp, Mus musculus
  siRNA target sequence for Ercc5 (NM_011729.1,316-334).
ggctaaaccaagcacttaa

SEQ ID NO: 452310 - DNA, 19 bp, Mus musculus
  siRNA target sequence for Ercc5 (NM_011729.1,345-363).
gatagccatgggaatgtga

SEQ ID NO: 452311 - DNA, 19 bp, Mus musculus
  siRNA target sequence for Ercc5 (NM_011729.1,349-367).
gccatgggaatgtgataga

SEQ ID NO: 452312 - DNA, 19 bp, Mus musculus
  siRNA target sequence for Ercc5 (NM_011729.1,372-390).
gctcatcttctcacattat

SEQ ID NO: 452313 - DNA, 19 bp, Mus musculus
  siRNA target sequence for Ercc5 (NM_011729.1,421-439).
gtatccgccctatttttgt

SEQ ID NO: 452314 - DNA, 19 bp, Mus musculus
  siRNA target sequence for Ercc5 (NM_011729.1,448-466).
gtgatgctccgctgctaaa

SEQ ID NO: 452315 - DNA, 19 bp, Mus musculus
  siRNA target sequence for Ercc5 (NM_011729.1,497-515).
gaaggattctgcatccatt

SEQ ID NO: 452316 - DNA, 19 bp, Mus musculus
  siRNA target sequence for Ercc5 (NM_011729.1,530-548).
caccgagaaacttctgaaa

SEQ ID NO: 452317 - DNA, 19 bp, Mus musculus
  siRNA target sequence for Ercc5 (NM_011729.1,644-662).
ctatgttttgccaccttta

SEQ ID NO: 452318 - DNA, 19 bp, Mus musculus
  siRNA target sequence for Ercc5 (NM_011729.1,735-753).
gcattgcaggaagaattct

SEQ ID NO: 452319 - DNA, 19 bp, Mus musculus
  siRNA target sequence for Ercc5 (NM_011729.1,736-754).
cattgcaggaagaattctt

SEQ ID NO: 452320 - DNA, 19 bp, Mus musculus
  siRNA target sequence for Ercc5 (NM_011729.1,763-781).
ctcaggccatagatatcga

SEQ ID NO: 452321 - DNA, 19 bp, Mus musculus
  siRNA target sequence for Ercc5 (NM_011729.1,803-821).
gcctcctgaagtaaagcat

SEQ ID NO: 452322 - DNA, 19 bp, Mus musculus
  siRNA target sequence for Ercc5 (NM_011729.1,854-872).
gcgaaggcgaacactgttt

SEQ ID NO: 452323 - DNA, 19 bp, Mus musculus
  siRNA target sequence for Ercc5 (NM_011729.1,856-874).
gaaggcgaacactgtttga

SEQ ID NO: 452324 - DNA, 19 bp, Mus musculus
  siRNA target sequence for Ercc5 (NM_011729.1,887-905).
ggagtctaatgacttttca

SEQ ID NO: 452325 - DNA, 19 bp, Mus musculus
  siRNA target sequence for Ercc5 (NM_011729.1,1017-1035).
gatgagggaggctttctga

SEQ ID NO: 452326 - DNA, 19 bp, Mus musculus
  siRNA target sequence for Ercc5 (NM_011729.1,1065-1083).
gaagacacctcacattaca

SEQ ID NO: 452327 - DNA, 19 bp, Mus musculus
  siRNA target sequence for Ercc5 (NM_011729.1,1073-1091).
ctcacattacatcttgata

SEQ ID NO: 452328 - DNA, 19 bp, Mus musculus
  siRNA target sequence for Ercc5 (NM_011729.1,1075-1093).
cacattacatcttgataaa

SEQ ID NO: 452329 - DNA, 19 bp, Mus musculus
  siRNA target sequence for Ercc5 (NM_011729.1,1082-1100).
catcttgataaaaggtatt

SEQ ID NO: 452330 - DNA, 19 bp, Mus musculus
  siRNA target sequence for Ercc5 (NM_011729.1,1085-1103).
cttgataaaaggtattcaa

SEQ ID NO: 452331 - DNA, 19 bp, Mus musculus
  siRNA target sequence for Ercc5 (NM_011729.1,1186-1204).
caccccacgagaaagtgaa

SEQ ID NO: 452332 - DNA, 19 bp, Mus musculus
  siRNA target sequence for Ercc5 (NM_011729.1,1243-1261).
gaactctactggctattca

SEQ ID NO: 452333 - DNA, 19 bp, Mus musculus
  siRNA target sequence for Ercc5 (NM_011729.1,1274-1292).
gggaagtagctcagaagat

SEQ ID NO: 452334 - DNA, 19 bp, Mus musculus
  siRNA target sequence for Ercc5 (NM_011729.1,1370-1388).
ccggacctgtgcagctatt

SEQ ID NO: 452335 - DNA, 19 bp, Mus musculus
  siRNA target sequence for Ercc5 (NM_011729.1,1372-1390).
ggacctgtgcagctattca

SEQ ID NO: 452336 - DNA, 19 bp, Mus musculus
  siRNA target sequence for Ercc5 (NM_011729.1,1560-1578).
gaggtaaaggagtgtgtaa

SEQ ID NO: 452337 - DNA, 19 bp, Mus musculus
  siRNA target sequence for Ercc5 (NM_011729.1,1610-1628).
ctcagctcattcatttaca

SEQ ID NO: 452338 - DNA, 19 bp, Mus musculus
  siRNA target sequence for Ercc5 (NM_011729.1,1631-1649).
cgcgagtcaccgatgtgat

SEQ ID NO: 452339 - DNA, 19 bp, Mus musculus
  siRNA target sequence for Ercc5 (NM_011729.1,1632-1650).
gcgagtcaccgatgtgata

SEQ ID NO: 452340 - DNA, 19 bp, Mus musculus
  siRNA target sequence for Ercc5 (NM_011729.1,1634-1652).
gagtcaccgatgtgatact

SEQ ID NO: 452341 - DNA, 19 bp, Mus musculus
  siRNA target sequence for Ercc5 (NM_011729.1,1640-1658).
ccgatgtgatactccaaaa

SEQ ID NO: 452342 - DNA, 19 bp, Mus musculus
  siRNA target sequence for Ercc5 (NM_011729.1,1642-1660).
gatgtgatactccaaaaga

SEQ ID NO: 452343 - DNA, 19 bp, Mus musculus
  siRNA target sequence for Ercc5 (NM_011729.1,1812-1830).
gcacctccgacgacaagaa

SEQ ID NO: 452344 - DNA, 19 bp, Mus musculus
  siRNA target sequence for Ercc5 (NM_011729.1,1818-1836).
ccgacgacaagaacacatt

SEQ ID NO: 452345 - DNA, 19 bp, Mus musculus
  siRNA target sequence for Ercc5 (NM_011729.1,1822-1840).
cgacaagaacacattctga

SEQ ID NO: 452346 - DNA, 19 bp, Mus musculus
  siRNA target sequence for Ercc5 (NM_011729.1,1823-1841).
gacaagaacacattctgat

SEQ ID NO: 452347 - DNA, 19 bp, Mus musculus
  siRNA target sequence for Ercc5 (NM_011729.1,1995-2013).
gcagaggcaatgagtaact

SEQ ID NO: 452348 - DNA, 19 bp, Mus musculus
  siRNA target sequence for Ercc5 (NM_011729.1,2000-2018).
ggcaatgagtaacttagaa

SEQ ID NO: 452349 - DNA, 19 bp, Mus musculus
  siRNA target sequence for Ercc5 (NM_011729.1,2027-2045).
gccttctaatgctgaagaa

SEQ ID NO: 452350 - DNA, 19 bp, Mus musculus
  siRNA target sequence for Ercc5 (NM_011729.1,2158-2176).
gcgagtctgatggaagttt

SEQ ID NO: 452351 - DNA, 19 bp, Mus musculus
  siRNA target sequence for Ercc5 (NM_011729.1,2162-2180).
gtctgatggaagtttcatt

SEQ ID NO: 452352 - DNA, 19 bp, Mus musculus
  siRNA target sequence for Ercc5 (NM_011729.1,2189-2207).
gagtgtggtcagcaatagt

SEQ ID NO: 452353 - DNA, 19 bp, Mus musculus
  siRNA target sequence for Ercc5 (NM_011729.1,2195-2213).
ggtcagcaatagtgaactt

SEQ ID NO: 452354 - DNA, 19 bp, Mus musculus
  siRNA target sequence for Ercc5 (NM_011729.1,2376-2394).
gaggacatgcccaacgaat

SEQ ID NO: 452355 - DNA, 19 bp, Mus musculus
  siRNA target sequence for Ercc5 (NM_011729.1,2385-2403).
cccaacgaatggcaagata

SEQ ID NO: 452356 - DNA, 19 bp, Mus musculus
  siRNA target sequence for Ercc5 (NM_011729.1,2386-2404).
ccaacgaatggcaagatat

SEQ ID NO: 452357 - DNA, 19 bp, Mus musculus
  siRNA target sequence for Ercc5 (NM_011729.1,2387-2405).
caacgaatggcaagatatt

SEQ ID NO: 452358 - DNA, 19 bp, Mus musculus
  siRNA target sequence for Ercc5 (NM_011729.1,2390-2408).
cgaatggcaagatattaat

SEQ ID NO: 452359 - DNA, 19 bp, Mus musculus
  siRNA target sequence for Ercc5 (NM_011729.1,2391-2409).
gaatggcaagatattaatt

SEQ ID NO: 452360 - DNA, 19 bp, Mus musculus
  siRNA target sequence for Ercc5 (NM_011729.1,2418-2436).
ctggatgccctggaaagta

SEQ ID NO: 452361 - DNA, 19 bp, Mus musculus
  siRNA target sequence for Ercc5 (NM_011729.1,2487-2505).
cggattgctgcctctgtaa

SEQ ID NO: 452362 - DNA, 19 bp, Mus musculus
  siRNA target sequence for Ercc5 (NM_011729.1,2489-2507).
gattgctgcctctgtaaca

SEQ ID NO: 452363 - DNA, 19 bp, Mus musculus
  siRNA target sequence for Ercc5 (NM_011729.1,2616-2634).
cagacttctggaacgatta

SEQ ID NO: 452364 - DNA, 19 bp, Mus musculus
  siRNA target sequence for Ercc5 (NM_011729.1,2620-2638).
cttctggaacgattactga

SEQ ID NO: 452365 - DNA, 19 bp, Mus musculus
  siRNA target sequence for Ercc5 (NM_011729.1,2629-2647).
cgattactgacgatagtga

SEQ ID NO: 452366 - DNA, 19 bp, Mus musculus
  siRNA target sequence for Ercc5 (NM_011729.1,2667-2685).
cggcatgtctataagaatt

SEQ ID NO: 452367 - DNA, 19 bp, Mus musculus
  siRNA target sequence for Ercc5 (NM_011729.1,2726-2744).
ggacttttacagtcaacta

SEQ ID NO: 452368 - DNA, 19 bp, Mus musculus
  siRNA target sequence for Ercc5 (NM_011729.1,2751-2769).
gaccgtaacaagctaatca

SEQ ID NO: 452369 - DNA, 19 bp, Mus musculus
  siRNA target sequence for Ercc5 (NM_011729.1,2754-2772).
cgtaacaagctaatcaact

SEQ ID NO: 452370 - DNA, 19 bp, Mus musculus
  siRNA target sequence for Ercc5 (NM_011729.1,2781-2799).
ctactgggcagtgactata

SEQ ID NO: 452371 - DNA, 19 bp, Mus musculus
  siRNA target sequence for Ercc5 (NM_011729.1,2866-2884).
gcctggacccactcctaaa

SEQ ID NO: 452372 - DNA, 19 bp, Mus musculus
  siRNA target sequence for Ercc5 (NM_011729.1,2899-2917).
ggcacgaagctcaaaataa

SEQ ID NO: 452373 - DNA, 19 bp, Mus musculus
  siRNA target sequence for Ercc5 (NM_011729.1,2901-2919).
cacgaagctcaaaataaca

SEQ ID NO: 452374 - DNA, 19 bp, Mus musculus
  siRNA target sequence for Ercc5 (NM_011729.1,3068-3086).
gcctgatgtggacaagatt

SEQ ID NO: 452375 - DNA, 19 bp, Mus musculus
  siRNA target sequence for Ercc5 (NM_011729.1,3069-3087).
cctgatgtggacaagatta

SEQ ID NO: 452376 - DNA, 19 bp, Mus musculus
  siRNA target sequence for Ercc5 (NM_011729.1,3090-3108).
gaattttgtcagaggtatt

SEQ ID NO: 452377 - DNA, 19 bp, Mus musculus
  siRNA target sequence for Ercc5 (NM_011729.1,3176-3194).
gacccagctccggattgat

SEQ ID NO: 452378 - DNA, 19 bp, Mus musculus
  siRNA target sequence for Ercc5 (NM_011729.1,3183-3201).
ctccggattgattcctttt

SEQ ID NO: 452379 - DNA, 19 bp, Mus musculus
  siRNA target sequence for Ercc5 (NM_011729.1,3185-3203).
ccggattgattcctttttt

SEQ ID NO: 452380 - DNA, 19 bp, Mus musculus
  siRNA target sequence for Ercc5 (NM_011729.1,3186-3204).
cggattgattcctttttta

SEQ ID NO: 452381 - DNA, 19 bp, Mus musculus
  siRNA target sequence for Ercc5 (NM_011729.1,3228-3246).
gatgccaaactcataaaga

SEQ ID NO: 452382 - DNA, 19 bp, Mus musculus
  siRNA target sequence for Ercc5 (NM_011729.1,3260-3278).
cagagcagtgacatgtata

SEQ ID NO: 452383 - DNA, 19 bp, Mus musculus
  siRNA target sequence for Ercc5 (NM_011729.1,3264-3282).
gcagtgacatgtatactga

SEQ ID NO: 452384 - DNA, 19 bp, Mus musculus
  siRNA target sequence for Ercc5 (NM_011729.1,3364-3382).
gagagctaccatataaaaa

SEQ ID NO: 452385 - DNA, 19 bp, Mus musculus
  siRNA target sequence for Ercc5 (NM_011729.1,3369-3387).
ctaccatataaaaaagaga

SEQ ID NO: 452386 - DNA, 19 bp, Mus musculus
  siRNA target sequence for Ercc5 (NM_011729.1,3438-3456).
gacccctactgctcagaat

SEQ ID NO: 452387 - DNA, 19 bp, Mus musculus
  siRNA target sequence for Ercc5 (NM_011729.1,3440-3458).
cccctactgctcagaatca

SEQ ID NO: 452388 - DNA, 19 bp, Mus musculus
  siRNA target sequence for Ercc5 (NM_011729.1,3453-3471).
gaatcaccccaggaatctt

SEQ ID NO: 452389 - DNA, 19 bp, Mus musculus
  siRNA target sequence for Ercc5 (NM_011729.1,3522-3540).
gcagctgagtcgtcaaaaa

SEQ ID NO: 452390 - DNA, 19 bp, Mus musculus
  siRNA target sequence for Ercc5 (NM_011729.1,3523-3541).
cagctgagtcgtcaaaaat

SEQ ID NO: 452391 - DNA, 19 bp, Mus musculus
  siRNA target sequence for Ercc5 (NM_011729.1,3550-3568).
cagatgtgcctgacttagt

SEQ ID NO: 452392 - DNA, 19 bp, Mus musculus
  siRNA target sequence for Ercc5 (NM_011729.1,3594-3612).
ggctgtgtgtccactagta

SEQ ID NO: 452393 - DNA, 19 bp, Mus musculus
  siRNA target sequence for Ercc5 (NM_011729.1,3656-3674).
gactgctagacctgtattt

SEQ ID NO: 452394 - DNA, 19 bp, Mus musculus
  siRNA target sequence for Ercc5 (NM_011729.1,3676-3694).
ggaagaaaaaactgaaact

SEQ ID NO: 452395 - DNA, 19 bp, Mus musculus
  siRNA target sequence for Refbp2 (NM_019484.2,527-545).
ggacggcggatgtacactt

SEQ ID NO: 452396 - DNA, 19 bp, Mus musculus
  siRNA target sequence for Refbp2 (NM_019484.2,528-546).
gacggcggatgtacacttt

SEQ ID NO: 452397 - DNA, 19 bp, Mus musculus
  siRNA target sequence for Refbp2 (NM_019484.2,530-548).
cggcggatgtacactttga

SEQ ID NO: 452398 - DNA, 19 bp, Mus musculus
  siRNA target sequence for Refbp2 (NM_019484.2,531-549).
ggcggatgtacactttgaa

SEQ ID NO: 452399 - DNA, 19 bp, Mus musculus
  siRNA target sequence for Ssbp2 (NM_024272.1,293-311).
gccttccatgattatgtaa

SEQ ID NO: 452400 - DNA, 19 bp, Mus musculus
  siRNA target sequence for Ssbp2 (NM_024272.1,312-330).
gagagcgcgcacttggtaa

SEQ ID NO: 452401 - DNA, 19 bp, Mus musculus
  siRNA target sequence for Ssbp2 (NM_024272.1,316-334).
gcgcgcacttggtaacaaa

SEQ ID NO: 452402 - DNA, 19 bp, Mus musculus
  siRNA target sequence for Ssbp2 (NM_024272.1,318-336).
gcgcacttggtaacaaagt

SEQ ID NO: 452403 - DNA, 19 bp, Mus musculus
  siRNA target sequence for Ssbp2 (NM_024272.1,320-338).
gcacttggtaacaaagtgt

SEQ ID NO: 452404 - DNA, 19 bp, Mus musculus
  siRNA target sequence for Ssbp3 (NM_023672.2,427-445).
gggcaggctcgggaaaagt

SEQ ID NO: 452405 - DNA, 19 bp, Mus musculus
  siRNA target sequence for Ssbp3 (NM_023672.2,428-446).
ggcaggctcgggaaaagtt

SEQ ID NO: 452406 - DNA, 19 bp, Mus musculus
  siRNA target sequence for Ssbp3 (NM_023672.2,429-447).
gcaggctcgggaaaagtta

SEQ ID NO: 452407 - DNA, 19 bp, Mus musculus
  siRNA target sequence for Ssbp3 (NM_023672.2,433-451).
gctcgggaaaagttagctt

SEQ ID NO: 452408 - DNA, 19 bp, Mus musculus
  siRNA target sequence for Ssbp3 (NM_023672.2,434-452).
ctcgggaaaagttagcttt

SEQ ID NO: 452409 - DNA, 19 bp, Mus musculus
  siRNA target sequence for Ssbp3 (NM_023672.2,436-454).
cgggaaaagttagctttat

SEQ ID NO: 452410 - DNA, 19 bp, Mus musculus
  siRNA target sequence for Ssbp3 (NM_023672.2,448-466).
gctttatacgtctacgaat

SEQ ID NO: 452411 - DNA, 19 bp, Mus musculus
  siRNA target sequence for Ssbp3 (NM_023672.2,449-467).
ctttatacgtctacgaata

SEQ ID NO: 452412 - DNA, 19 bp, Mus musculus
  siRNA target sequence for Ssbp3 (NM_023672.2,477-495).
cgtaggagcacagaaatct

SEQ ID NO: 452413 - DNA, 19 bp, Mus musculus
  siRNA target sequence for Ssbp3 (NM_023672.2,497-515).
cacagaccttcttatcaga

SEQ ID NO: 452414 - DNA, 19 bp, Mus musculus
  siRNA target sequence for Ssbp3 (NM_023672.2,501-519).
gaccttcttatcagagatt

SEQ ID NO: 452415 - DNA, 19 bp, Mus musculus
  siRNA target sequence for Ssbp3 (NM_023672.2,621-639).
cacttgtgaacattcaagt

SEQ ID NO: 452416 - DNA, 19 bp, Mus musculus
  siRNA target sequence for Ssbp3 (NM_023672.2,731-749).
ccatcccgccaggtttctt

SEQ ID NO: 452417 - DNA, 19 bp, Mus musculus
  siRNA target sequence for Ssbp3 (NM_023672.2,1023-1041).
ggggcctggcccacagaat

SEQ ID NO: 452418 - DNA, 19 bp, Mus musculus
  siRNA target sequence for Ssbp3 (NM_023672.2,1025-1043).
ggcctggcccacagaatta

SEQ ID NO: 452419 - DNA, 19 bp, Mus musculus
  siRNA target sequence for Ssbp3 (NM_023672.2,1155-1173).
cccgtactcctcatcatca

SEQ ID NO: 452420 - DNA, 19 bp, Mus musculus
  siRNA target sequence for Ssbp3 (NM_023672.2,1240-1258).
gcagattcaacaaattcca

SEQ ID NO: 452421 - DNA, 19 bp, Mus musculus
  siRNA target sequence for Ssbp3 (NM_023672.2,1269-1287).
ctacacaatgattaatcct

SEQ ID NO: 452422 - DNA, 19 bp, Mus musculus
  siRNA target sequence for Ssbp3 (NM_023672.2,1297-1315).
ggaggcagccggtctaact

SEQ ID NO: 452423 - DNA, 19 bp, Mus musculus
  siRNA target sequence for Ssbp3 (NM_023672.2,1304-1322).
gccggtctaactttccaat

SEQ ID NO: 452424 - DNA, 19 bp, Mus musculus
  siRNA target sequence for Ssbp3 (NM_023672.2,1365-1383).
ggagccccaccacatgaat

SEQ ID NO: 452425 - DNA, 19 bp, Mus musculus
  siRNA target sequence for Ssbp3 (NM_023672.2,1389-1407).
cctaggatcaggtgacata

SEQ ID NO: 452426 - DNA, 19 bp, Mus musculus
  siRNA target sequence for Ssbp3 (NM_023672.2,1437-1455).
cataagtggcattagcaat

SEQ ID NO: 452427 - DNA, 19 bp, Mus musculus
  siRNA target sequence for Ssbp3 (NM_023672.2,1508-1526).
ccttccagaacgacaatta

SEQ ID NO: 452428 - DNA, 19 bp, Mus musculus
  siRNA target sequence for Ssbp3 (NM_023672.2,1509-1527).
cttccagaacgacaattat

SEQ ID NO: 452429 - DNA, 19 bp, Mus musculus
  siRNA target sequence for Ssbp3 (NM_023672.2,1512-1530).
ccagaacgacaattattct

SEQ ID NO: 452430 - DNA, 19 bp, Mus musculus
  siRNA target sequence for Ssbp3 (NM_198438.1,742-760).
ggtttctttcagcctttta

SEQ ID NO: 452431 - DNA, 19 bp, Mus musculus
  siRNA target sequence for Tef (NM_017376.2,641-659).
gtgtggaggtcgatgtgaa

SEQ ID NO: 452432 - DNA, 19 bp, Mus musculus
  siRNA target sequence for Tef (NM_017376.2,646-664).
gaggtcgatgtgaacttca

SEQ ID NO: 452433 - DNA, 19 bp, Mus musculus
  siRNA target sequence for Tef (NM_017376.2,757-775).
ccccagcccatgatcaaaa

SEQ ID NO: 452434 - DNA, 19 bp, Mus musculus
  siRNA target sequence for Tef (NM_017376.2,759-777).
ccagcccatgatcaaaaaa

SEQ ID NO: 452435 - DNA, 19 bp, Mus musculus
  siRNA target sequence for Tef (NM_017376.2,830-848).
gacgtaagaagaacaatgt

SEQ ID NO: 452436 - DNA, 19 bp, Mus musculus
  siRNA target sequence for Usp8 (NM_019729.2,219-237).
gaactctacctcagttctt

SEQ ID NO: 452437 - DNA, 19 bp, Mus musculus
  siRNA target sequence for Usp8 (NM_019729.2,224-242).
ctacctcagttcttcacta

SEQ ID NO: 452438 - DNA, 19 bp, Mus musculus
  siRNA target sequence for Usp8 (NM_019729.2,238-256).
cactaaaagacctcaataa

SEQ ID NO: 452439 - DNA, 19 bp, Mus musculus
  siRNA target sequence for Usp8 (NM_019729.2,257-275).
gaagaccgaagttaaacct

SEQ ID NO: 452440 - DNA, 19 bp, Mus musculus
  siRNA target sequence for Usp8 (NM_019729.2,267-285).
gttaaacctgagaaaacca

SEQ ID NO: 452441 - DNA, 19 bp, Mus musculus
  siRNA target sequence for Usp8 (NM_019729.2,286-304).
gcaccaagaattatataca

SEQ ID NO: 452442 - DNA, 19 bp, Mus musculus
  siRNA target sequence for Usp8 (NM_019729.2,303-321).
cacagcgcgcagaagatct

SEQ ID NO: 452443 - DNA, 19 bp, Mus musculus
  siRNA target sequence for Usp8 (NM_019729.2,364-382).
gggcctatgtgctttatat

SEQ ID NO: 452444 - DNA, 19 bp, Mus musculus
  siRNA target sequence for Usp8 (NM_019729.2,396-414).
gtttataatcttatcaaaa

SEQ ID NO: 452445 - DNA, 19 bp, Mus musculus
  siRNA target sequence for Usp8 (NM_019729.2,428-446).
caagcaacagcaggattat

SEQ ID NO: 452446 - DNA, 19 bp, Mus musculus
  siRNA target sequence for Usp8 (NM_019729.2,437-455).
gcaggattattatctttca

SEQ ID NO: 452447 - DNA, 19 bp, Mus musculus
  siRNA target sequence for Usp8 (NM_019729.2,438-456).
caggattattatctttcaa

SEQ ID NO: 452448 - DNA, 19 bp, Mus musculus
  siRNA target sequence for Usp8 (NM_019729.2,440-458).
ggattattatctttcaata

SEQ ID NO: 452449 - DNA, 19 bp, Mus musculus
  siRNA target sequence for Usp8 (NM_019729.2,462-480).
ggacctgcaaacatcaaaa

SEQ ID NO: 452450 - DNA, 19 bp, Mus musculus
  siRNA target sequence for Usp8 (NM_019729.2,506-524).
ctccgaaagccttaaacta

SEQ ID NO: 452451 - DNA, 19 bp, Mus musculus
  siRNA target sequence for Usp8 (NM_019729.2,509-527).
cgaaagccttaaactaaga

SEQ ID NO: 452452 - DNA, 19 bp, Mus musculus
  siRNA target sequence for Usp8 (NM_019729.2,515-533).
ccttaaactaagatacgaa

SEQ ID NO: 452453 - DNA, 19 bp, Mus musculus
  siRNA target sequence for Usp8 (NM_019729.2,538-556).
ctgaagttcggaaacaact

SEQ ID NO: 452454 - DNA, 19 bp, Mus musculus
  siRNA target sequence for Usp8 (NM_019729.2,640-658).
ccaaacgctctgtggaaaa

SEQ ID NO: 452455 - DNA, 19 bp, Mus musculus
  siRNA target sequence for Usp8 (NM_019729.2,744-762).
gcaaaggaactatatacga

SEQ ID NO: 452456 - DNA, 19 bp, Mus musculus
  siRNA target sequence for Usp8 (NM_019729.2,745-763).
caaaggaactatatacgat

SEQ ID NO: 452457 - DNA, 19 bp, Mus musculus
  siRNA target sequence for Usp8 (NM_019729.2,750-768).
gaactatatacgatgatga

SEQ ID NO: 452458 - DNA, 19 bp, Mus musculus
  siRNA target sequence for Usp8 (NM_019729.2,781-799).
caagcttaattataatgga

SEQ ID NO: 452459 - DNA, 19 bp, Mus musculus
  siRNA target sequence for Usp8 (NM_019729.2,802-820).
ctcgaaaaatacaggatta

SEQ ID NO: 452460 - DNA, 19 bp, Mus musculus
  siRNA target sequence for Usp8 (NM_019729.2,940-958).
gggggagtgtggactatgt

SEQ ID NO: 452461 - DNA, 19 bp, Mus musculus
  siRNA target sequence for Usp8 (NM_019729.2,960-978).
gtccttctcgactggttta

SEQ ID NO: 452462 - DNA, 19 bp, Mus musculus
  siRNA target sequence for Usp8 (NM_019729.2,962-980).
ccttctcgactggtttagt

SEQ ID NO: 452463 - DNA, 19 bp, Mus musculus
  siRNA target sequence for Usp8 (NM_019729.2,963-981).
cttctcgactggtttagtt

SEQ ID NO: 452464 - DNA, 19 bp, Mus musculus
  siRNA target sequence for Usp8 (NM_019729.2,974-992).
gtttagttcagcgaaagat

SEQ ID NO: 452465 - DNA, 19 bp, Mus musculus
  siRNA target sequence for Usp8 (NM_019729.2,979-997).
gttcagcgaaagatttgct

SEQ ID NO: 452466 - DNA, 19 bp, Mus musculus
  siRNA target sequence for Usp8 (NM_019729.2,1007-1025).
cactctacggagtctgaaa

SEQ ID NO: 452467 - DNA, 19 bp, Mus musculus
  siRNA target sequence for Usp8 (NM_019729.2,1107-1125).
ctttgctacccgcagttta

SEQ ID NO: 452468 - DNA, 19 bp, Mus musculus
  siRNA target sequence for Usp8 (NM_019729.2,1115-1133).
cccgcagtttacaaccaat

SEQ ID NO: 452469 - DNA, 19 bp, Mus musculus
  siRNA target sequence for Usp8 (NM_019729.2,1172-1190).
ggtgtctgtctcattggat

SEQ ID NO: 452470 - DNA, 19 bp, Mus musculus
  siRNA target sequence for Usp8 (NM_019729.2,1173-1191).
gtgtctgtctcattggatt

SEQ ID NO: 452471 - DNA, 19 bp, Mus musculus
  siRNA target sequence for Usp8 (NM_019729.2,1274-1292).
ggcactgttggtaactgat

SEQ ID NO: 452472 - DNA, 19 bp, Mus musculus
  siRNA target sequence for Usp8 (NM_019729.2,1283-1301).
ggtaactgatcaagatgaa

SEQ ID NO: 452473 - DNA, 19 bp, Mus musculus
  siRNA target sequence for Usp8 (NM_019729.2,1436-1454).
caagttgcctgaagatcat

SEQ ID NO: 452474 - DNA, 19 bp, Mus musculus
  siRNA target sequence for Usp8 (NM_019729.2,1504-1522).
gatccaccaagccagtatt

SEQ ID NO: 452475 - DNA, 19 bp, Mus musculus
  siRNA target sequence for Usp8 (NM_019729.2,1537-1555).
ccatgttaacagatgaaga

SEQ ID NO: 452476 - DNA, 19 bp, Mus musculus
  siRNA target sequence for Usp8 (NM_019729.2,1560-1578).
gctcgtattcatcaagaaa

SEQ ID NO: 452477 - DNA, 19 bp, Mus musculus
  siRNA target sequence for Usp8 (NM_019729.2,1673-1691).
gcgcaaagctggaaagaca

SEQ ID NO: 452478 - DNA, 19 bp, Mus musculus
  siRNA target sequence for Usp8 (NM_019729.2,1708-1726).
gtgactccactgagaatca

SEQ ID NO: 452479 - DNA, 19 bp, Mus musculus
  siRNA target sequence for Usp8 (NM_019729.2,1822-1840).
gaacacaaagacaaagtaa

SEQ ID NO: 452480 - DNA, 19 bp, Mus musculus
  siRNA target sequence for Usp8 (NM_019729.2,1985-2003).
gacgagagcacgaagtgaa

SEQ ID NO: 452481 - DNA, 19 bp, Mus musculus
  siRNA target sequence for Usp8 (NM_019729.2,2065-2083).
ccgggacctttcgttacta

SEQ ID NO: 452482 - DNA, 19 bp, Mus musculus
  siRNA target sequence for Usp8 (NM_019729.2,2092-2110).
ccacaaacacagttcatat

SEQ ID NO: 452483 - DNA, 19 bp, Mus musculus
  siRNA target sequence for Usp8 (NM_019729.2,2095-2113).
caaacacagttcatatgta

SEQ ID NO: 452484 - DNA, 19 bp, Mus musculus
  siRNA target sequence for Usp8 (NM_019729.2,2195-2213).
ggacagggagccatcgaaa

SEQ ID NO: 452485 - DNA, 19 bp, Mus musculus
  siRNA target sequence for Usp8 (NM_019729.2,2228-2246).
ctcctcaccagatatcact

SEQ ID NO: 452486 - DNA, 19 bp, Mus musculus
  siRNA target sequence for Usp8 (NM_019729.2,2401-2419).
ctcttactggacttcgtaa

SEQ ID NO: 452487 - DNA, 19 bp, Mus musculus
  siRNA target sequence for Usp8 (NM_019729.2,2403-2421).
cttactggacttcgtaatt

SEQ ID NO: 452488 - DNA, 19 bp, Mus musculus
  siRNA target sequence for Usp8 (NM_019729.2,2503-2521).
gctaccaggatgatatcaa

SEQ ID NO: 452489 - DNA, 19 bp, Mus musculus
  siRNA target sequence for Usp8 (NM_019729.2,2562-2580).
gaatttggtataatcatga

SEQ ID NO: 452490 - DNA, 19 bp, Mus musculus
  siRNA target sequence for Usp8 (NM_019729.2,2586-2604).
ctgtggacaggacagtata

SEQ ID NO: 452491 - DNA, 19 bp, Mus musculus
  siRNA target sequence for Usp8 (NM_019729.2,2588-2606).
gtggacaggacagtataga

SEQ ID NO: 452492 - DNA, 19 bp, Mus musculus
  siRNA target sequence for Usp8 (NM_019729.2,2631-2649).
gtcaccattggtaagatta

SEQ ID NO: 452493 - DNA, 19 bp, Mus musculus
  siRNA target sequence for Usp8 (NM_019729.2,2635-2653).
ccattggtaagattaatga

SEQ ID NO: 452494 - DNA, 19 bp, Mus musculus
  siRNA target sequence for Usp8 (NM_019729.2,2911-2929).
ccttcgaggccttcatgta

SEQ ID NO: 452495 - DNA, 19 bp, Mus musculus
  siRNA target sequence for Usp8 (NM_019729.2,2940-2958).
ccgctagcatccacaagta

SEQ ID NO: 452496 - DNA, 19 bp, Mus musculus
  siRNA target sequence for Usp8 (NM_019729.2,2941-2959).
cgctagcatccacaagtaa

SEQ ID NO: 452497 - DNA, 19 bp, Mus musculus
  siRNA target sequence for Usp8 (NM_019729.2,2946-2964).
gcatccacaagtaaatgta

SEQ ID NO: 452498 - DNA, 19 bp, Mus musculus
  siRNA target sequence for Usp8 (NM_019729.2,2977-2995).
gccttagattattttccaa

SEQ ID NO: 452499 - DNA, 19 bp, Mus musculus
  siRNA target sequence for Usp8 (NM_019729.2,3000-3018).
gaaaagcttacagataaca

SEQ ID NO: 452500 - DNA, 19 bp, Mus musculus
  siRNA target sequence for Usp8 (NM_019729.2,3158-3176).
cgtggatttcccattggaa

SEQ ID NO: 452501 - DNA, 19 bp, Mus musculus
  siRNA target sequence for Usp8 (NM_019729.2,3183-3201).
gacctgtcacagtacgtta

SEQ ID NO: 452502 - DNA, 19 bp, Mus musculus
  siRNA target sequence for Usp8 (NM_019729.2,3185-3203).
cctgtcacagtacgttatt

SEQ ID NO: 452503 - DNA, 19 bp, Mus musculus
  siRNA target sequence for Usp8 (NM_019729.2,3194-3212).
gtacgttattggtccaaaa

SEQ ID NO: 452504 - DNA, 19 bp, Mus musculus
  siRNA target sequence for Usp8 (NM_019729.2,3303-3321).
gcaaggcagcgctggttta

SEQ ID NO: 452505 - DNA, 19 bp, Mus musculus
  siRNA target sequence for Usp8 (NM_019729.2,3304-3322).
caaggcagcgctggtttaa

SEQ ID NO: 452506 - DNA, 19 bp, Mus musculus
  siRNA target sequence for Usp8 (NM_019729.2,3307-3325).
ggcagcgctggtttaagtt

SEQ ID NO: 452507 - DNA, 19 bp, Mus musculus
  siRNA target sequence for Usp8 (NM_019729.2,3308-3326).
gcagcgctggtttaagttt

SEQ ID NO: 452508 - DNA, 19 bp, Mus musculus
  siRNA target sequence for Usp8 (NM_019729.2,3313-3331).
gctggtttaagtttgatga

SEQ ID NO: 452509 - DNA, 19 bp, Mus musculus
  siRNA target sequence for Usp8 (NM_019729.2,3367-3385).
ggtcatcagcagcttatat

SEQ ID NO: 452510 - DNA, 19 bp, Mus musculus
  siRNA target sequence for Usp8 (NM_019729.2,3370-3388).
catcagcagcttatatcct

SEQ ID NO: 452511 - DNA, 19 bp, Mus musculus
  siRNA target sequence for Usp8 (NM_019729.2,3375-3393).
gcagcttatatcctctttt

SEQ ID NO: 452512 - DNA, 19 bp, Mus musculus
  siRNA target sequence for Usp8 (NM_019729.2,3376-3394).
cagcttatatcctctttta

SEQ ID NO: 452513 - DNA, 19 bp, Mus musculus
  siRNA target sequence for Usp8 (NM_019729.2,3401-3419).
cctgggaccacgcataact

SEQ ID NO: 452514 - DNA, 19 bp, Mus musculus
  siRNA target sequence for Usp8 (NM_019729.2,3404-3422).
gggaccacgcataactgat

SEQ ID NO: 452515 - DNA, 19 bp, Mus musculus
  siRNA target sequence for Zbp1 (NM_021394.1,136-154).
cttgagcacaggagacaat

SEQ ID NO: 452516 - DNA, 19 bp, Mus musculus
  siRNA target sequence for Zbp1 (NM_021394.1,209-227).
ggccagctggtgaagaaat

SEQ ID NO: 452517 - DNA, 19 bp, Mus musculus
  siRNA target sequence for Zbp1 (NM_021394.1,246-264).
ccctcaatcaagtccttta

SEQ ID NO: 452518 - DNA, 19 bp, Mus musculus
  siRNA target sequence for Zbp1 (NM_021394.1,372-390).
cccagcctagccttgatga

SEQ ID NO: 452519 - DNA, 19 bp, Mus musculus
  siRNA target sequence for Zbp1 (NM_021394.1,373-391).
ccagcctagccttgatgaa

SEQ ID NO: 452520 - DNA, 19 bp, Mus musculus
  siRNA target sequence for Zbp1 (NM_021394.1,376-394).
gcctagccttgatgaaaga

SEQ ID NO: 452521 - DNA, 19 bp, Mus musculus
  siRNA target sequence for Zbp1 (NM_021394.1,377-395).
cctagccttgatgaaagaa

SEQ ID NO: 452522 - DNA, 19 bp, Mus musculus
  siRNA target sequence for Zbp1 (NM_021394.1,378-396).
ctagccttgatgaaagaat

SEQ ID NO: 452523 - DNA, 19 bp, Mus musculus
  siRNA target sequence for Zbp1 (NM_021394.1,487-505).
cctgtattccatgagaaat

SEQ ID NO: 452524 - DNA, 19 bp, Mus musculus
  siRNA target sequence for Zbp1 (NM_021394.1,488-506).
ctgtattccatgagaaata

SEQ ID NO: 452525 - DNA, 19 bp, Mus musculus
  siRNA target sequence for Zbp1 (NM_021394.1,528-546).
gacagacgtggaagatcta

SEQ ID NO: 452526 - DNA, 19 bp, Mus musculus
  siRNA target sequence for Zbp1 (NM_021394.1,565-583).
ccaagacatagctcattct

SEQ ID NO: 452527 - DNA, 19 bp, Mus musculus
  siRNA target sequence for Zbp1 (NM_021394.1,596-614).
gagtcccctgcgattattt

SEQ ID NO: 452528 - DNA, 19 bp, Mus musculus
  siRNA target sequence for Zbp1 (NM_021394.1,598-616).
gtcccctgcgattatttgt

SEQ ID NO: 452529 - DNA, 19 bp, Mus musculus
  siRNA target sequence for Zbp1 (NM_021394.1,620-638).
cacaatccggtcaacatga

SEQ ID NO: 452530 - DNA, 19 bp, Mus musculus
  siRNA target sequence for Zbp1 (NM_021394.1,703-721).
cgggaatgtcatagtaaga

SEQ ID NO: 452531 - DNA, 19 bp, Mus musculus
  siRNA target sequence for Zbp1 (NM_021394.1,705-723).
ggaatgtcatagtaagaga

SEQ ID NO: 452532 - DNA, 19 bp, Mus musculus
  siRNA target sequence for Zbp1 (NM_021394.1,810-828).
cccacggagctcagtacat

SEQ ID NO: 452533 - DNA, 19 bp, Mus musculus
  siRNA target sequence for Zbp1 (NM_021394.1,812-830).
cacggagctcagtacatct

SEQ ID NO: 452534 - DNA, 19 bp, Mus musculus
  siRNA target sequence for Zbp1 (NM_021394.1,815-833).
ggagctcagtacatctaca

SEQ ID NO: 452535 - DNA, 19 bp, Mus musculus
  siRNA target sequence for Zbp1 (NM_021394.1,902-920).
gggaagcacccctcttata

SEQ ID NO: 452536 - DNA, 19 bp, Mus musculus
  siRNA target sequence for Zbp1 (NM_021394.1,908-926).
cacccctcttatagctttt

SEQ ID NO: 452537 - DNA, 19 bp, Mus musculus
  siRNA target sequence for Zbp1 (NM_021394.1,910-928).
cccctcttatagcttttct

SEQ ID NO: 452538 - DNA, 19 bp, Mus musculus
  siRNA target sequence for Zbp1 (NM_021394.1,912-930).
cctcttatagcttttctga

SEQ ID NO: 452539 - DNA, 19 bp, Mus musculus
  siRNA target sequence for Zbp1 (NM_021394.1,966-984).
caggagcttcattcaacat

SEQ ID NO: 452540 - DNA, 19 bp, Mus musculus
  siRNA target sequence for Zbp1 (NM_021394.1,1028-1046).
cagacagtccacatcaaat

SEQ ID NO: 452541 - DNA, 19 bp, Mus musculus
  siRNA target sequence for Zbp1 (NM_021394.1,1058-1076).
gaggacgccaccattggta

SEQ ID NO: 452542 - DNA, 19 bp, Mus musculus
  siRNA target sequence for Smc4l1 (NM_133786.3,288-306).
gtttagaggagattttgaa

SEQ ID NO: 452543 - DNA, 19 bp, Mus musculus
  siRNA target sequence for Smc4l1 (NM_133786.3,351-369).
gagctcctcgtctcatgat

SEQ ID NO: 452544 - DNA, 19 bp, Mus musculus
  siRNA target sequence for Smc4l1 (NM_133786.3,353-371).
gctcctcgtctcatgataa

SEQ ID NO: 452545 - DNA, 19 bp, Mus musculus
  siRNA target sequence for Smc4l1 (NM_133786.3,359-377).
cgtctcatgataactcata

SEQ ID NO: 452546 - DNA, 19 bp, Mus musculus
  siRNA target sequence for Smc4l1 (NM_133786.3,360-378).
gtctcatgataactcatat

SEQ ID NO: 452547 - DNA, 19 bp, Mus musculus
  siRNA target sequence for Smc4l1 (NM_133786.3,399-417).
cctatgctggagagaaagt

SEQ ID NO: 452548 - DNA, 19 bp, Mus musculus
  siRNA target sequence for Smc4l1 (NM_133786.3,436-454).
gcgcttttcctgtattatt

SEQ ID NO: 452549 - DNA, 19 bp, Mus musculus
  siRNA target sequence for Smc4l1 (NM_133786.3,458-476).
ccaaatggcagtggaaaat

SEQ ID NO: 452550 - DNA, 19 bp, Mus musculus
  siRNA target sequence for Smc4l1 (NM_133786.3,468-486).
gtggaaaatccaatgttat

SEQ ID NO: 452551 - DNA, 19 bp, Mus musculus
  siRNA target sequence for Smc4l1 (NM_133786.3,477-495).
ccaatgttattgattccat

SEQ ID NO: 452552 - DNA, 19 bp, Mus musculus
  siRNA target sequence for Smc4l1 (NM_133786.3,482-500).
gttattgattccatgcttt

SEQ ID NO: 452553 - DNA, 19 bp, Mus musculus
  siRNA target sequence for Smc4l1 (NM_133786.3,488-506).
gattccatgctttttgtgt

SEQ ID NO: 452554 - DNA, 19 bp, Mus musculus
  siRNA target sequence for Smc4l1 (NM_133786.3,510-528).
gctatcgagcacaaaaaat

SEQ ID NO: 452555 - DNA, 19 bp, Mus musculus
  siRNA target sequence for Smc4l1 (NM_133786.3,511-529).
ctatcgagcacaaaaaata

SEQ ID NO: 452556 - DNA, 19 bp, Mus musculus
  siRNA target sequence for Smc4l1 (NM_133786.3,515-533).
cgagcacaaaaaataaggt

SEQ ID NO: 452557 - DNA, 19 bp, Mus musculus
  siRNA target sequence for Smc4l1 (NM_133786.3,541-559).
gctatcggtactgatacat

SEQ ID NO: 452558 - DNA, 19 bp, Mus musculus
  siRNA target sequence for Smc4l1 (NM_133786.3,542-560).
ctatcggtactgatacata

SEQ ID NO: 452559 - DNA, 19 bp, Mus musculus
  siRNA target sequence for Smc4l1 (NM_133786.3,553-571).
gatacataattctgatgaa

SEQ ID NO: 452560 - DNA, 19 bp, Mus musculus
  siRNA target sequence for Smc4l1 (NM_133786.3,577-595).
ggatattcagagttgtact

SEQ ID NO: 452561 - DNA, 19 bp, Mus musculus
  siRNA target sequence for Smc4l1 (NM_133786.3,588-606).
gttgtactgtagaagttca

SEQ ID NO: 452562 - DNA, 19 bp, Mus musculus
  siRNA target sequence for Smc4l1 (NM_133786.3,732-750).
cgtttaaagatgttggaaa

SEQ ID NO: 452563 - DNA, 19 bp, Mus musculus
  siRNA target sequence for Smc4l1 (NM_133786.3,762-780).
gccatggcattgacttaga

SEQ ID NO: 452564 - DNA, 19 bp, Mus musculus
  siRNA target sequence for Smc4l1 (NM_133786.3,768-786).
gcattgacttagaccataa

SEQ ID NO: 452565 - DNA, 19 bp, Mus musculus
  siRNA target sequence for Smc4l1 (NM_133786.3,769-787).
cattgacttagaccataat

SEQ ID NO: 452566 - DNA, 19 bp, Mus musculus
  siRNA target sequence for Smc4l1 (NM_133786.3,775-793).
cttagaccataatcgattt

SEQ ID NO: 452567 - DNA, 19 bp, Mus musculus
  siRNA target sequence for Smc4l1 (NM_133786.3,779-797).
gaccataatcgatttttaa

SEQ ID NO: 452568 - DNA, 19 bp, Mus musculus
  siRNA target sequence for Smc4l1 (NM_133786.3,782-800).
cataatcgatttttaatct

SEQ ID NO: 452569 - DNA, 19 bp, Mus musculus
  siRNA target sequence for Smc4l1 (NM_133786.3,805-823).
gggtgaagttgaacagatt

SEQ ID NO: 452570 - DNA, 19 bp, Mus musculus
  siRNA target sequence for Smc4l1 (NM_133786.3,838-856).
caaaggccagactgaacat

SEQ ID NO: 452571 - DNA, 19 bp, Mus musculus
  siRNA target sequence for Smc4l1 (NM_133786.3,843-861).
gccagactgaacatgatga

SEQ ID NO: 452572 - DNA, 19 bp, Mus musculus
  siRNA target sequence for Smc4l1 (NM_133786.3,864-882).
gtatgcttgagtatttaga

SEQ ID NO: 452573 - DNA, 19 bp, Mus musculus
  siRNA target sequence for Smc4l1 (NM_133786.3,872-890).
gagtatttagaagatataa

SEQ ID NO: 452574 - DNA, 19 bp, Mus musculus
  siRNA target sequence for Smc4l1 (NM_133786.3,894-912).
gctgtggacggctaaatga

SEQ ID NO: 452575 - DNA, 19 bp, Mus musculus
  siRNA target sequence for Smc4l1 (NM_133786.3,895-913).
ctgtggacggctaaatgaa

SEQ ID NO: 452576 - DNA, 19 bp, Mus musculus
  siRNA target sequence for Smc4l1 (NM_133786.3,900-918).
gacggctaaatgaacctat

SEQ ID NO: 452577 - DNA, 19 bp, Mus musculus
  siRNA target sequence for Smc4l1 (NM_133786.3,902-920).
cggctaaatgaacctatta

SEQ ID NO: 452578 - DNA, 19 bp, Mus musculus
  siRNA target sequence for Smc4l1 (NM_133786.3,903-921).
ggctaaatgaacctattaa

SEQ ID NO: 452579 - DNA, 19 bp, Mus musculus
  siRNA target sequence for Smc4l1 (NM_133786.3,925-943).
cttgtgtcggagagttgaa

SEQ ID NO: 452580 - DNA, 19 bp, Mus musculus
  siRNA target sequence for Smc4l1 (NM_133786.3,932-950).
cggagagttgaaatattaa

SEQ ID NO: 452581 - DNA, 19 bp, Mus musculus
  siRNA target sequence for Smc4l1 (NM_133786.3,934-952).
gagagttgaaatattaaat

SEQ ID NO: 452582 - DNA, 19 bp, Mus musculus
  siRNA target sequence for Smc4l1 (NM_133786.3,1047-1065).
ccctggaaaatgaaatgtt

SEQ ID NO: 452583 - DNA, 19 bp, Mus musculus
  siRNA target sequence for Smc4l1 (NM_133786.3,1079-1097).
cacatctgtcaatactaca

SEQ ID NO: 452584 - DNA, 19 bp, Mus musculus
  siRNA target sequence for Smc4l1 (NM_133786.3,1084-1102).
ctgtcaatactacatttat

SEQ ID NO: 452585 - DNA, 19 bp, Mus musculus
  siRNA target sequence for Smc4l1 (NM_133786.3,1086-1104).
gtcaatactacatttatga

SEQ ID NO: 452586 - DNA, 19 bp, Mus musculus
  siRNA target sequence for Smc4l1 (NM_133786.3,1111-1129).
gaatagaattgctgaaata

SEQ ID NO: 452587 - DNA, 19 bp, Mus musculus
  siRNA target sequence for Smc4l1 (NM_133786.3,1223-1241).
gtaaaggatgtagaaaaga

SEQ ID NO: 452588 - DNA, 19 bp, Mus musculus
  siRNA target sequence for Smc4l1 (NM_133786.3,1417-1435).
caagagtaagactgtcata

SEQ ID NO: 452589 - DNA, 19 bp, Mus musculus
  siRNA target sequence for Smc4l1 (NM_133786.3,1420-1438).
gagtaagactgtcataaat

SEQ ID NO: 452590 - DNA, 19 bp, Mus musculus
  siRNA target sequence for Smc4l1 (NM_133786.3,1439-1457).
gagacaacaactagaaaca

SEQ ID NO: 452591 - DNA, 19 bp, Mus musculus
  siRNA target sequence for Smc4l1 (NM_133786.3,1441-1459).
gacaacaactagaaacaat

SEQ ID NO: 452592 - DNA, 19 bp, Mus musculus
  siRNA target sequence for Smc4l1 (NM_133786.3,1452-1470).
gaaacaattcgcttgagaa

SEQ ID NO: 452593 - DNA, 19 bp, Mus musculus
  siRNA target sequence for Smc4l1 (NM_133786.3,1571-1589).
cttatgggttttaacaaat

SEQ ID NO: 452594 - DNA, 19 bp, Mus musculus
  siRNA target sequence for Smc4l1 (NM_133786.3,1627-1645).
gtcagaacttgatatctat

SEQ ID NO: 452595 - DNA, 19 bp, Mus musculus
  siRNA target sequence for Smc4l1 (NM_133786.3,1629-1647).
cagaacttgatatctatct

SEQ ID NO: 452596 - DNA, 19 bp, Mus musculus
  siRNA target sequence for Smc4l1 (NM_133786.3,1631-1649).
gaacttgatatctatctca

SEQ ID NO: 452597 - DNA, 19 bp, Mus musculus
  siRNA target sequence for Smc4l1 (NM_133786.3,1642-1660).
ctatctcagtcgacataat

SEQ ID NO: 452598 - DNA, 19 bp, Mus musculus
  siRNA target sequence for Smc4l1 (NM_133786.3,1664-1682).
gcagtgtctcaattaagta

SEQ ID NO: 452599 - DNA, 19 bp, Mus musculus
  siRNA target sequence for Smc4l1 (NM_133786.3,1665-1683).
cagtgtctcaattaagtaa

SEQ ID NO: 452600 - DNA, 19 bp, Mus musculus
  siRNA target sequence for Smc4l1 (NM_133786.3,1733-1751).
gctgcaatcaaggatataa

SEQ ID NO: 452601 - DNA, 19 bp, Mus musculus
  siRNA target sequence for Smc4l1 (NM_133786.3,1879-1897).
gagttccttagcaatgaat

SEQ ID NO: 452602 - DNA, 19 bp, Mus musculus
  siRNA target sequence for Smc4l1 (NM_133786.3,1902-1920).
gtagggggaaagtacttga

SEQ ID NO: 452603 - DNA, 19 bp, Mus musculus
  siRNA target sequence for Smc4l1 (NM_133786.3,1946-1964).
ggcaggatcccaggaatat

SEQ ID NO: 452604 - DNA, 19 bp, Mus musculus
  siRNA target sequence for Smc4l1 (NM_133786.3,1975-1993).
gggagacttaggagctatt

SEQ ID NO: 452605 - DNA, 19 bp, Mus musculus
  siRNA target sequence for Smc4l1 (NM_133786.3,2029-2047).
ccatgcattggactacatt

SEQ ID NO: 452606 - DNA, 19 bp, Mus musculus
  siRNA target sequence for Smc4l1 (NM_133786.3,2034-2052).
cattggactacattgttgt

SEQ ID NO: 452607 - DNA, 19 bp, Mus musculus
  siRNA target sequence for Smc4l1 (NM_133786.3,2067-2085).
cagcccaagaatgtgtaaa

SEQ ID NO: 452608 - DNA, 19 bp, Mus musculus
  siRNA target sequence for Smc4l1 (NM_133786.3,2069-2087).
gcccaagaatgtgtaaact

SEQ ID NO: 452609 - DNA, 19 bp, Mus musculus
  siRNA target sequence for Smc4l1 (NM_133786.3,2099-2117).
cataatattgggattgcaa

SEQ ID NO: 452610 - DNA, 19 bp, Mus musculus
  siRNA target sequence for Smc4l1 (NM_133786.3,2140-2158).
gacagtgtgggccaaaaaa

SEQ ID NO: 452611 - DNA, 19 bp, Mus musculus
  siRNA target sequence for Smc4l1 (NM_133786.3,2144-2162).
gtgtgggccaaaaaaatga

SEQ ID NO: 452612 - DNA, 19 bp, Mus musculus
  siRNA target sequence for Smc4l1 (NM_133786.3,2151-2169).
ccaaaaaaatgagcaaaat

SEQ ID NO: 452613 - DNA, 19 bp, Mus musculus
  siRNA target sequence for Smc4l1 (NM_133786.3,2190-2208).
ctcggttatttgatctagt

SEQ ID NO: 452614 - DNA, 19 bp, Mus musculus
  siRNA target sequence for Smc4l1 (NM_133786.3,2192-2210).
cggttatttgatctagtta

SEQ ID NO: 452615 - DNA, 19 bp, Mus musculus
  siRNA target sequence for Smc4l1 (NM_133786.3,2230-2248).
ccgccaagccttttacttt

SEQ ID NO: 452616 - DNA, 19 bp, Mus musculus
  siRNA target sequence for Smc4l1 (NM_133786.3,2239-2257).
cttttactttgctttacga

SEQ ID NO: 452617 - DNA, 19 bp, Mus musculus
  siRNA target sequence for Smc4l1 (NM_133786.3,2262-2280).
ccttggtggctaacaattt

SEQ ID NO: 452618 - DNA, 19 bp, Mus musculus
  siRNA target sequence for Smc4l1 (NM_133786.3,2266-2284).
ggtggctaacaatttggat

SEQ ID NO: 452619 - DNA, 19 bp, Mus musculus
  siRNA target sequence for Smc4l1 (NM_133786.3,2281-2299).
ggatcaagctacaagagta

SEQ ID NO: 452620 - DNA, 19 bp, Mus musculus
  siRNA target sequence for Smc4l1 (NM_133786.3,2295-2313).
gagtagcgtaccaaagaga

SEQ ID NO: 452621 - DNA, 19 bp, Mus musculus
  siRNA target sequence for Smc4l1 (NM_133786.3,2407-2425).
gggctcttcggttatcgat

SEQ ID NO: 452622 - DNA, 19 bp, Mus musculus
  siRNA target sequence for Smc4l1 (NM_133786.3,2412-2430).
cttcggttatcgatgaaat

SEQ ID NO: 452623 - DNA, 19 bp, Mus musculus
  siRNA target sequence for Smc4l1 (NM_133786.3,2431-2449).
ctctgtagaagaggtaaat

SEQ ID NO: 452624 - DNA, 19 bp, Mus musculus
  siRNA target sequence for Smc4l1 (NM_133786.3,2462-2480).
cagttggaaaggcattcta

SEQ ID NO: 452625 - DNA, 19 bp, Mus musculus
  siRNA target sequence for Smc4l1 (NM_133786.3,2478-2496).
ctaaacaagcaatgcaaat

SEQ ID NO: 452626 - DNA, 19 bp, Mus musculus
  siRNA target sequence for Smc4l1 (NM_133786.3,2516-2534).
catgaagaagcagtagtta

SEQ ID NO: 452627 - DNA, 19 bp, Mus musculus
  siRNA target sequence for Smc4l1 (NM_133786.3,2519-2537).
gaagaagcagtagttaagt

SEQ ID NO: 452628 - DNA, 19 bp, Mus musculus
  siRNA target sequence for Smc4l1 (NM_133786.3,2547-2565).
gtgaacgagacatgagaaa

SEQ ID NO: 452629 - DNA, 19 bp, Mus musculus
  siRNA target sequence for Smc4l1 (NM_133786.3,2553-2571).
gagacatgagaaatacact

SEQ ID NO: 452630 - DNA, 19 bp, Mus musculus
  siRNA target sequence for Smc4l1 (NM_133786.3,2589-2607).
gcatccagggcttatcaga

SEQ ID NO: 452631 - DNA, 19 bp, Mus musculus
  siRNA target sequence for Smc4l1 (NM_133786.3,2598-2616).
gcttatcagagcaagaaga

SEQ ID NO: 452632 - DNA, 19 bp, Mus musculus
  siRNA target sequence for Smc4l1 (NM_133786.3,2642-2660).
ctggaagctaacgttctta

SEQ ID NO: 452633 - DNA, 19 bp, Mus musculus
  siRNA target sequence for Smc4l1 (NM_133786.3,2644-2662).
ggaagctaacgttcttact

SEQ ID NO: 452634 - DNA, 19 bp, Mus musculus
  siRNA target sequence for Smc4l1 (NM_133786.3,2776-2794).
gctacacaataccatcata

SEQ ID NO: 452635 - DNA, 19 bp, Mus musculus
  siRNA target sequence for Smc4l1 (NM_133786.3,2780-2798).
cacaataccatcatagata

SEQ ID NO: 452636 - DNA, 19 bp, Mus musculus
  siRNA target sequence for Smc4l1 (NM_133786.3,2830-2848).
caaacttgacacgataaat

SEQ ID NO: 452637 - DNA, 19 bp, Mus musculus
  siRNA target sequence for Smc4l1 (NM_133786.3,2880-2898).
ctaaggcccaagtagcaat

SEQ ID NO: 452638 - DNA, 19 bp, Mus musculus
  siRNA target sequence for Smc4l1 (NM_133786.3,2885-2903).
gcccaagtagcaatcaaga

SEQ ID NO: 452639 - DNA, 19 bp, Mus musculus
  siRNA target sequence for Smc4l1 (NM_133786.3,2995-3013).
gacagagctaaaaaatatt

SEQ ID NO: 452640 - DNA, 19 bp, Mus musculus
  siRNA target sequence for Smc4l1 (NM_133786.3,2997-3015).
cagagctaaaaaatattga

SEQ ID NO: 452641 - DNA, 19 bp, Mus musculus
  siRNA target sequence for Smc4l1 (NM_133786.3,3029-3047).
gaggtcataaacaatacaa

SEQ ID NO: 452642 - DNA, 19 bp, Mus musculus
  siRNA target sequence for Smc4l1 (NM_133786.3,3031-3049).
ggtcataaacaatacaaaa

SEQ ID NO: 452643 - DNA, 19 bp, Mus musculus
  siRNA target sequence for Smc4l1 (NM_133786.3,3079-3097).
gaaagaacatcgtaatcta

SEQ ID NO: 452644 - DNA, 19 bp, Mus musculus
  siRNA target sequence for Smc4l1 (NM_133786.3,3146-3164).
gatgcacttagtattaagt

SEQ ID NO: 452645 - DNA, 19 bp, Mus musculus
  siRNA target sequence for Smc4l1 (NM_133786.3,3149-3167).
gcacttagtattaagttga

SEQ ID NO: 452646 - DNA, 19 bp, Mus musculus
  siRNA target sequence for Smc4l1 (NM_133786.3,3150-3168).
cacttagtattaagttgaa

SEQ ID NO: 452647 - DNA, 19 bp, Mus musculus
  siRNA target sequence for Smc4l1 (NM_133786.3,3156-3174).
gtattaagttgaaacttga

SEQ ID NO: 452648 - DNA, 19 bp, Mus musculus
  siRNA target sequence for Smc4l1 (NM_133786.3,3178-3196).
gatagatggccacatttct

SEQ ID NO: 452649 - DNA, 19 bp, Mus musculus
  siRNA target sequence for Smc4l1 (NM_133786.3,3186-3204).
gccacatttctgaacataa

SEQ ID NO: 452650 - DNA, 19 bp, Mus musculus
  siRNA target sequence for Smc4l1 (NM_133786.3,3275-3293).
gagacagtagcagttctaa

SEQ ID NO: 452651 - DNA, 19 bp, Mus musculus
  siRNA target sequence for Smc4l1 (NM_133786.3,3304-3322).
gcttgaggcaatcaagaat

SEQ ID NO: 452652 - DNA, 19 bp, Mus musculus
  siRNA target sequence for Smc4l1 (NM_133786.3,3316-3334).
caagaatccagagtctata

SEQ ID NO: 452653 - DNA, 19 bp, Mus musculus
  siRNA target sequence for Smc4l1 (NM_133786.3,3319-3337).
gaatccagagtctataaca

SEQ ID NO: 452654 - DNA, 19 bp, Mus musculus
  siRNA target sequence for Smc4l1 (NM_133786.3,3359-3377).
gctcagtgtcgtgaaatga

SEQ ID NO: 452655 - DNA, 19 bp, Mus musculus
  siRNA target sequence for Smc4l1 (NM_133786.3,3360-3378).
ctcagtgtcgtgaaatgaa

SEQ ID NO: 452656 - DNA, 19 bp, Mus musculus
  siRNA target sequence for Smc4l1 (NM_133786.3,3392-3410).
gccatcgctgagtataaaa

SEQ ID NO: 452657 - DNA, 19 bp, Mus musculus
  siRNA target sequence for Smc4l1 (NM_133786.3,3393-3411).
ccatcgctgagtataaaaa

SEQ ID NO: 452658 - DNA, 19 bp, Mus musculus
  siRNA target sequence for Smc4l1 (NM_133786.3,3394-3412).
catcgctgagtataaaaaa

SEQ ID NO: 452659 - DNA, 19 bp, Mus musculus
  siRNA target sequence for Smc4l1 (NM_133786.3,3437-3455).
gtagccgaactggacaaaa

SEQ ID NO: 452660 - DNA, 19 bp, Mus musculus
  siRNA target sequence for Smc4l1 (NM_133786.3,3440-3458).
gccgaactggacaaaatta

SEQ ID NO: 452661 - DNA, 19 bp, Mus musculus
  siRNA target sequence for Smc4l1 (NM_133786.3,3526-3544).
ggctggtttttacgtaata

SEQ ID NO: 452662 - DNA, 19 bp, Mus musculus
  siRNA target sequence for Smc4l1 (NM_133786.3,3527-3545).
gctggtttttacgtaataa

SEQ ID NO: 452663 - DNA, 19 bp, Mus musculus
  siRNA target sequence for Smc4l1 (NM_133786.3,3538-3556).
cgtaataacaaataaacta

SEQ ID NO: 452664 - DNA, 19 bp, Mus musculus
  siRNA target sequence for Smc4l1 (NM_133786.3,3648-3666).
gtgttcggccacctaagaa

SEQ ID NO: 452665 - DNA, 19 bp, Mus musculus
  siRNA target sequence for Smc4l1 (NM_133786.3,3650-3668).
gttcggccacctaagaaaa

SEQ ID NO: 452666 - DNA, 19 bp, Mus musculus
  siRNA target sequence for Smc4l1 (NM_133786.3,3653-3671).
cggccacctaagaaaagtt

SEQ ID NO: 452667 - DNA, 19 bp, Mus musculus
  siRNA target sequence for Smc4l1 (NM_133786.3,3689-3707).
ctctcaggaggcgagaaaa

SEQ ID NO: 452668 - DNA, 19 bp, Mus musculus
  siRNA target sequence for Smc4l1 (NM_133786.3,3714-3732).
gttccttggccttagtgtt

SEQ ID NO: 452669 - DNA, 19 bp, Mus musculus
  siRNA target sequence for Smc4l1 (NM_133786.3,3763-3781).
ctacttcatggatgagatt

SEQ ID NO: 452670 - DNA, 19 bp, Mus musculus
  siRNA target sequence for Smc4l1 (NM_133786.3,3808-3826).
gtctattgttgcattttat

SEQ ID NO: 452671 - DNA, 19 bp, Mus musculus
  siRNA target sequence for Smc4l1 (NM_133786.3,3840-3858).
caaaaaatgcccagttcat

SEQ ID NO: 452672 - DNA, 19 bp, Mus musculus
  siRNA target sequence for Smc4l1 (NM_133786.3,3867-3885).
ctcttcgaaataatatgtt

SEQ ID NO: 452673 - DNA, 19 bp, Mus musculus
  siRNA target sequence for Smc4l1 (NM_133786.3,3872-3890).
cgaaataatatgtttgaga

SEQ ID NO: 452674 - DNA, 19 bp, Mus musculus
  siRNA target sequence for Smc4l1 (NM_133786.3,3887-3905).
gagatttcagacagactta

SEQ ID NO: 452675 - DNA, 19 bp, Mus musculus
  siRNA target sequence for Smc4l1 (NM_133786.3,3898-3916).
cagacttattggcatctat

SEQ ID NO: 452676 - DNA, 19 bp, Mus musculus
  siRNA target sequence for Smc4l1 (NM_133786.3,3900-3918).
gacttattggcatctataa

SEQ ID NO: 452677 - DNA, 19 bp, Mus musculus
  siRNA target sequence for Smc4l1 (NM_133786.3,3902-3920).
cttattggcatctataaaa

SEQ ID NO: 452678 - DNA, 19 bp, Mus musculus
  siRNA target sequence for Smc4l1 (NM_133786.3,3945-3963).
cagtgaacccaaaacaaat

SEQ ID NO: 452679 - DNA, 19 bp, Mus musculus
  siRNA target sequence for 0610007P08Rik (NM_023507.2,218-236).
ccatctttggataacaaaa

SEQ ID NO: 452680 - DNA, 19 bp, Mus musculus
  siRNA target sequence for 0610007P08Rik (NM_023507.2,252-270).
gcataaaatctattactgt

SEQ ID NO: 452681 - DNA, 19 bp, Mus musculus
  siRNA target sequence for 0610007P08Rik (NM_023507.2,421-439).
cccagatcgaaaaattcca

SEQ ID NO: 452682 - DNA, 19 bp, Mus musculus
  siRNA target sequence for 0610007P08Rik (NM_023507.2,422-440).
ccagatcgaaaaattccat

SEQ ID NO: 452683 - DNA, 19 bp, Mus musculus
  siRNA target sequence for 0610007P08Rik (NM_023507.2,445-463).
ggctagtgcttttcaatta

SEQ ID NO: 452684 - DNA, 19 bp, Mus musculus
  siRNA target sequence for 0610007P08Rik (NM_023507.2,446-464).
gctagtgcttttcaattat

SEQ ID NO: 452685 - DNA, 19 bp, Mus musculus
  siRNA target sequence for 0610007P08Rik (NM_023507.2,450-468).
gtgcttttcaattatctga

SEQ ID NO: 452686 - DNA, 19 bp, Mus musculus
  siRNA target sequence for 0610007P08Rik (NM_023507.2,473-491).
ggagactcaattccttata

SEQ ID NO: 452687 - DNA, 19 bp, Mus musculus
  siRNA target sequence for 0610007P08Rik (NM_023507.2,485-503).
ccttatactattaataggt

SEQ ID NO: 452688 - DNA, 19 bp, Mus musculus
  siRNA target sequence for 0610007P08Rik (NM_023507.2,501-519).
ggtacttgcgagattacca

SEQ ID NO: 452689 - DNA, 19 bp, Mus musculus
  siRNA target sequence for 0610007P08Rik (NM_023507.2,502-520).
gtacttgcgagattaccaa

SEQ ID NO: 452690 - DNA, 19 bp, Mus musculus
  siRNA target sequence for 0610007P08Rik (NM_023507.2,603-621).
caatacaggttatttcatt

SEQ ID NO: 452691 - DNA, 19 bp, Mus musculus
  siRNA target sequence for 0610007P08Rik (NM_023507.2,627-645).
ctgcagttttgcataaaaa

SEQ ID NO: 452692 - DNA, 19 bp, Mus musculus
  siRNA target sequence for 0610007P08Rik (NM_023507.2,676-694).
gccagagtttttactaaaa

SEQ ID NO: 452693 - DNA, 19 bp, Mus musculus
  siRNA target sequence for 0610007P08Rik (NM_023507.2,680-698).
gagtttttactaaaaagta

SEQ ID NO: 452694 - DNA, 19 bp, Mus musculus
  siRNA target sequence for 0610007P08Rik (NM_023507.2,709-727).
gccgccttctacagctaaa

SEQ ID NO: 452695 - DNA, 19 bp, Mus musculus
  siRNA target sequence for 0610007P08Rik (NM_023507.2,710-728).
ccgccttctacagctaaaa

SEQ ID NO: 452696 - DNA, 19 bp, Mus musculus
  siRNA target sequence for 0610007P08Rik (NM_023507.2,711-729).
cgccttctacagctaaaaa

SEQ ID NO: 452697 - DNA, 19 bp, Mus musculus
  siRNA target sequence for 0610007P08Rik (NM_023507.2,714-732).
cttctacagctaaaaagat

SEQ ID NO: 452698 - DNA, 19 bp, Mus musculus
  siRNA target sequence for 0610007P08Rik (NM_023507.2,769-787).
ctggaaggatgaattggat

SEQ ID NO: 452699 - DNA, 19 bp, Mus musculus
  siRNA target sequence for 0610007P08Rik (NM_023507.2,793-811).
gggatatttcagagttact

SEQ ID NO: 452700 - DNA, 19 bp, Mus musculus
  siRNA target sequence for 0610007P08Rik (NM_023507.2,820-838).
cggtagcaaaaaagacaat

SEQ ID NO: 452701 - DNA, 19 bp, Mus musculus
  siRNA target sequence for 0610007P08Rik (NM_023507.2,848-866).
cgtttaaagcagaggaaat

SEQ ID NO: 452702 - DNA, 19 bp, Mus musculus
  siRNA target sequence for 0610012J09Rik (NM_178848.2,332-350).
cacaggtgtgggagtttta

SEQ ID NO: 452703 - DNA, 19 bp, Mus musculus
  siRNA target sequence for 0610012J09Rik (NM_178848.2,366-384).
ggtcatgcggagcaaagaa

SEQ ID NO: 452704 - DNA, 19 bp, Mus musculus
  siRNA target sequence for 0610012J09Rik (NM_178848.2,510-528).
ggaaatccacggaacctta

SEQ ID NO: 452705 - DNA, 19 bp, Mus musculus
  siRNA target sequence for 0610012J09Rik (NM_178848.2,511-529).
gaaatccacggaaccttat

SEQ ID NO: 452706 - DNA, 19 bp, Mus musculus
  siRNA target sequence for 0610012J09Rik (NM_178848.2,516-534).
ccacggaaccttatttaaa

SEQ ID NO: 452707 - DNA, 19 bp, Mus musculus
  siRNA target sequence for 0610012J09Rik (NM_178848.2,519-537).
cggaaccttatttaaaact

SEQ ID NO: 452708 - DNA, 19 bp, Mus musculus
  siRNA target sequence for 0610012J09Rik (NM_178848.2,559-577).
gttgccgagaactatagga

SEQ ID NO: 452709 - DNA, 19 bp, Mus musculus
  siRNA target sequence for 0610012J09Rik (NM_178848.2,638-656).
gaatcccagtcgacaaact

SEQ ID NO: 452710 - DNA, 19 bp, Mus musculus
  siRNA target sequence for 0610012J09Rik (NM_178848.2,850-868).
gtcccggtggccgagttta

SEQ ID NO: 452711 - DNA, 19 bp, Mus musculus
  siRNA target sequence for 0610012J09Rik (NM_178848.2,853-871).
ccggtggccgagtttaaca

SEQ ID NO: 452712 - DNA, 19 bp, Mus musculus
  siRNA target sequence for 0610012J09Rik (NM_178848.2,854-872).
cggtggccgagtttaacat

SEQ ID NO: 452713 - DNA, 19 bp, Mus musculus
  siRNA target sequence for 0610012J09Rik (NM_178848.2,883-901).
ccagccaccgacagattca

SEQ ID NO: 452714 - DNA, 19 bp, Mus musculus
  siRNA target sequence for 0610012J09Rik (NM_178848.2,891-909).
cgacagattcaggtttcat

SEQ ID NO: 452715 - DNA, 19 bp, Mus musculus
  siRNA target sequence for 1100001A21Rik (NM_025651.2,167-185).
ggtattcggggactaatga

SEQ ID NO: 452716 - DNA, 19 bp, Mus musculus
  siRNA target sequence for 1100001A21Rik (NM_025651.2,209-227).
gaattcttcgttgatttga

SEQ ID NO: 452717 - DNA, 19 bp, Mus musculus
  siRNA target sequence for 1100001A21Rik (NM_025651.2,234-252).
ggaacacaaaacttatcat

SEQ ID NO: 452718 - DNA, 19 bp, Mus musculus
  siRNA target sequence for 1100001A21Rik (NM_025651.2,238-256).
cacaaaacttatcattgat

SEQ ID NO: 452719 - DNA, 19 bp, Mus musculus
  siRNA target sequence for 1100001A21Rik (NM_025651.2,271-289).
ccaccgactttgcttcaat

SEQ ID NO: 452720 - DNA, 19 bp, Mus musculus
  siRNA target sequence for 1100001A21Rik (NM_025651.2,272-290).
caccgactttgcttcaatt

SEQ ID NO: 452721 - DNA, 19 bp, Mus musculus
  siRNA target sequence for 1100001A21Rik (NM_025651.2,274-292).
ccgactttgcttcaattct

SEQ ID NO: 452722 - DNA, 19 bp, Mus musculus
  siRNA target sequence for 1100001A21Rik (NM_025651.2,276-294).
gactttgcttcaattctga

SEQ ID NO: 452723 - DNA, 19 bp, Mus musculus
  siRNA target sequence for 1100001A21Rik (NM_025651.2,331-349).
cgcagatgttgtacagaaa

SEQ ID NO: 452724 - DNA, 19 bp, Mus musculus
  siRNA target sequence for 1100001A21Rik (NM_025651.2,381-399).
gtccgtatgttgtattaga

SEQ ID NO: 452725 - DNA, 19 bp, Mus musculus
  siRNA target sequence for 1100001A21Rik (NM_025651.2,517-535).
catccgagaagtgttcata

SEQ ID NO: 452726 - DNA, 19 bp, Mus musculus
  siRNA target sequence for 1100001A21Rik (NM_025651.2,550-568).
gcttgaggtatgtttcgta

SEQ ID NO: 452727 - DNA, 19 bp, Mus musculus
  siRNA target sequence for 1100001A21Rik (NM_025651.2,584-602).
gcagatcgggacattatga

SEQ ID NO: 452728 - DNA, 19 bp, Mus musculus
  siRNA target sequence for 1100001A21Rik (NM_025651.2,702-720).
ggagaaatctgaacactat

SEQ ID NO: 452729 - DNA, 19 bp, Mus musculus
  siRNA target sequence for 1100001A21Rik (NM_025651.2,710-728).
ctgaacactattaaagata

SEQ ID NO: 452730 - DNA, 19 bp, Mus musculus
  siRNA target sequence for 1100001A21Rik (NM_025651.2,725-743).
gatacacaagattactaca

SEQ ID NO: 452731 - DNA, 19 bp, Mus musculus
  siRNA target sequence for 1100001A21Rik (NM_025651.2,742-760).
cattcccgccagaagcttt

SEQ ID NO: 452732 - DNA, 19 bp, Mus musculus
  siRNA target sequence for 1100001A21Rik (NM_025651.2,756-774).
gcttttccctcaatgcatt

SEQ ID NO: 452733 - DNA, 19 bp, Mus musculus
  siRNA target sequence for 1100001A21Rik (NM_025651.2,881-899).
gtacgtctaccccttagtt

SEQ ID NO: 452734 - DNA, 19 bp, Mus musculus
  siRNA target sequence for 1100001A21Rik (NM_025651.2,884-902).
cgtctaccccttagttcta

SEQ ID NO: 452735 - DNA, 19 bp, Mus musculus
  siRNA target sequence for 1100001A21Rik (NM_025651.2,885-903).
gtctaccccttagttctaa

SEQ ID NO: 452736 - DNA, 19 bp, Mus musculus
  siRNA target sequence for 1100001A21Rik (NM_025651.2,900-918).
ctaaggggaggagatatca

SEQ ID NO: 452737 - DNA, 19 bp, Mus musculus
  siRNA target sequence for 1100001A21Rik (NM_025651.2,940-958).
ctggttgtctcatttcgat

SEQ ID NO: 452738 - DNA, 19 bp, Mus musculus
  siRNA target sequence for 1100001A21Rik (NM_025651.2,962-980).
cccactgaagcactagata

SEQ ID NO: 452739 - DNA, 19 bp, Mus musculus
  siRNA target sequence for 1100001A21Rik (NM_025651.2,963-981).
ccactgaagcactagataa

SEQ ID NO: 452740 - DNA, 19 bp, Mus musculus
  siRNA target sequence for 1100001A21Rik (NM_025651.2,966-984).
ctgaagcactagataacgt

SEQ ID NO: 452741 - DNA, 19 bp, Mus musculus
  siRNA target sequence for 1100001A21Rik (NM_025651.2,972-990).
cactagataacgttctgaa

SEQ ID NO: 452742 - DNA, 19 bp, Mus musculus
  siRNA target sequence for 1100001A21Rik (NM_025651.2,1003-1021).
gaagagtcgagaaaatgtt

SEQ ID NO: 452743 - DNA, 19 bp, Mus musculus
  siRNA target sequence for 1100001A21Rik (NM_025651.2,1079-1097).
gacttcttccagtatggta

SEQ ID NO: 452744 - DNA, 19 bp, Mus musculus
  siRNA target sequence for 1100001A21Rik (NM_025651.2,1084-1102).
cttccagtatggtagttat

SEQ ID NO: 452745 - DNA, 19 bp, Mus musculus
  siRNA target sequence for 1100001A21Rik (NM_025651.2,1088-1106).
cagtatggtagttatgtct

SEQ ID NO: 452746 - DNA, 19 bp, Mus musculus
  siRNA target sequence for 1100001A21Rik (NM_025651.2,1265-1283).
cagcccatccgccaaatca

SEQ ID NO: 452747 - DNA, 19 bp, Mus musculus
  siRNA target sequence for 1100001A21Rik (NM_025651.2,1269-1287).
ccatccgccaaatcatcta

SEQ ID NO: 452748 - DNA, 19 bp, Mus musculus
  siRNA target sequence for 1100001A21Rik (NM_025651.2,1270-1288).
catccgccaaatcatctat

SEQ ID NO: 452749 - DNA, 19 bp, Mus musculus
  siRNA target sequence for 1100001A21Rik (NM_025651.2,1306-1324).
cccatcacacgcagaagat

SEQ ID NO: 452750 - DNA, 19 bp, Mus musculus
  siRNA target sequence for 1100001A21Rik (NM_025651.2,1307-1325).
ccatcacacgcagaagata

SEQ ID NO: 452751 - DNA, 19 bp, Mus musculus
  siRNA target sequence for 1100001A21Rik (NM_025651.2,1308-1326).
catcacacgcagaagatat

SEQ ID NO: 452752 - DNA, 19 bp, Mus musculus
  siRNA target sequence for 1100001A21Rik (NM_025651.2,1370-1388).
gtggaaagaattgatacaa

SEQ ID NO: 452753 - DNA, 19 bp, Mus musculus
  siRNA target sequence for 1100001A21Rik (NM_025651.2,1418-1436).
caactgctcaaggatcaat

SEQ ID NO: 452754 - DNA, 19 bp, Mus musculus
  siRNA target sequence for 1100001A21Rik (NM_025651.2,1433-1451).
caatgtgacttgagcaaat

SEQ ID NO: 452755 - DNA, 19 bp, Mus musculus
  siRNA target sequence for 1100001A21Rik (NM_025651.2,1474-1492).
gcggcagatgcttctctta

SEQ ID NO: 452756 - DNA, 19 bp, Mus musculus
  siRNA target sequence for 1100001A21Rik (NM_025651.2,1522-1540).
ggagtccatccctactttt

SEQ ID NO: 452757 - DNA, 19 bp, Mus musculus
  siRNA target sequence for 1100001A21Rik (NM_025651.2,1692-1710).
gtggtgccaagatgttgta

SEQ ID NO: 452758 - DNA, 19 bp, Mus musculus
  siRNA target sequence for 1100001A21Rik (NM_025651.2,1747-1765).
gggtccaagagtggattta

SEQ ID NO: 452759 - DNA, 19 bp, Mus musculus
  siRNA target sequence for 1100001A21Rik (NM_025651.2,1749-1767).
gtccaagagtggatttaga

SEQ ID NO: 452760 - DNA, 19 bp, Mus musculus
  siRNA target sequence for 1100001A21Rik (NM_025651.2,1800-1818).
gtctccagatggggttata

SEQ ID NO: 452761 - DNA, 19 bp, Mus musculus
  siRNA target sequence for 1100001A21Rik (NM_025651.2,1805-1823).
cagatggggttatatctca

SEQ ID NO: 452762 - DNA, 19 bp, Mus musculus
  siRNA target sequence for 1100001A21Rik (NM_025651.2,1847-1865).
ccagagccaaacctaactt

SEQ ID NO: 452763 - DNA, 19 bp, Mus musculus
  siRNA target sequence for 1100001A21Rik (NM_025651.2,1903-1921).
gcaactgccagcatctagt

SEQ ID NO: 452764 - DNA, 19 bp, Mus musculus
  siRNA target sequence for 1100001A21Rik (NM_025651.2,1909-1927).
gccagcatctagttctgta

SEQ ID NO: 452765 - DNA, 19 bp, Mus musculus
  siRNA target sequence for 1100001A21Rik (NM_025651.2,1913-1931).
gcatctagttctgtagaaa

SEQ ID NO: 452766 - DNA, 19 bp, Mus musculus
  siRNA target sequence for 1100001A21Rik (NM_025651.2,1928-1946).
gaaagcctcctgagtctat

SEQ ID NO: 452767 - DNA, 19 bp, Mus musculus
  siRNA target sequence for 1100001A21Rik (NM_025651.2,1950-1968).
ctgaggcaaagcaacttta

SEQ ID NO: 452768 - DNA, 19 bp, Mus musculus
  siRNA target sequence for 1100001A21Rik (NM_025651.2,1978-1996).
gttcaatgccacaaaatca

SEQ ID NO: 452769 - DNA, 19 bp, Mus musculus
  siRNA target sequence for 1100001A21Rik (NM_025651.2,2006-2024).
gctgaattgttcttaccaa

SEQ ID NO: 452770 - DNA, 19 bp, Mus musculus
  siRNA target sequence for 1100001A21Rik (NM_025651.2,2007-2025).
ctgaattgttcttaccaaa

SEQ ID NO: 452771 - DNA, 19 bp, Mus musculus
  siRNA target sequence for 1110005A23Rik (NM_025364.1,435-453).
gacaccaagcctatggtta

SEQ ID NO: 452772 - DNA, 19 bp, Mus musculus
  siRNA target sequence for 1110005A23Rik (NM_025364.1,439-457).
ccaagcctatggttaacct

SEQ ID NO: 452773 - DNA, 19 bp, Mus musculus
  siRNA target sequence for 1110011F09Rik (NM_029576.1,139-157).
ggtttgctgatgacactta

SEQ ID NO: 452774 - DNA, 19 bp, Mus musculus
  siRNA target sequence for 1110011F09Rik (NM_029576.1,264-282).
cggttcaggaccatcactt

SEQ ID NO: 452775 - DNA, 19 bp, Mus musculus
  siRNA target sequence for 1110011F09Rik (NM_029576.1,275-293).
catcacttccagctactat

SEQ ID NO: 452776 - DNA, 19 bp, Mus musculus
  siRNA target sequence for 1110011F09Rik (NM_029576.1,343-361).
cctacgccaacgtgaaaca

SEQ ID NO: 452777 - DNA, 19 bp, Mus musculus
  siRNA target sequence for 1110011F09Rik (NM_029576.1,458-476).
caccacggccaaggaattt

SEQ ID NO: 452778 - DNA, 19 bp, Mus musculus
  siRNA target sequence for 1110011F09Rik (NM_029576.1,531-549).
gttgagcaggcattcatga

SEQ ID NO: 452779 - DNA, 19 bp, Mus musculus
  siRNA target sequence for 1110018N15Rik (NM_172551.1,306-324).
gccgctgggcgcaaaagct

SEQ ID NO: 452780 - DNA, 19 bp, Mus musculus
  siRNA target sequence for 1110018N15Rik (NM_172551.1,307-325).
ccgctgggcgcaaaagcta

SEQ ID NO: 452781 - DNA, 19 bp, Mus musculus
  siRNA target sequence for 1110018N15Rik (NM_172551.1,477-495).
ccacgaactcagaggaaaa

SEQ ID NO: 452782 - DNA, 19 bp, Mus musculus
  siRNA target sequence for 1110018N15Rik (NM_172551.1,1028-1046).
gccccaagcccagttaaca

SEQ ID NO: 452783 - DNA, 19 bp, Mus musculus
  siRNA target sequence for 1110018N15Rik (NM_172551.1,1030-1048).
cccaagcccagttaacaca

SEQ ID NO: 452784 - DNA, 19 bp, Mus musculus
  siRNA target sequence for 1110018N15Rik (NM_172551.1,1053-1071).
cgctgctcaaggacatata

SEQ ID NO: 452785 - DNA, 19 bp, Mus musculus
  siRNA target sequence for 1110018N15Rik (NM_172551.1,1054-1072).
gctgctcaaggacatatat

SEQ ID NO: 452786 - DNA, 19 bp, Mus musculus
  siRNA target sequence for 1110018N15Rik (NM_172551.1,1055-1073).
ctgctcaaggacatatata

SEQ ID NO: 452787 - DNA, 19 bp, Mus musculus
  siRNA target sequence for 1110018N15Rik (NM_172551.1,1058-1076).
ctcaaggacatatatagca

SEQ ID NO: 452788 - DNA, 19 bp, Mus musculus
  siRNA target sequence for 1110018N15Rik (NM_172551.1,1190-1208).
gagaaggctccagtaatgt

SEQ ID NO: 452789 - DNA, 19 bp, Mus musculus
  siRNA target sequence for 1110018N15Rik (NM_172551.1,1278-1296).
gcgtgctgcgggagacaaa

SEQ ID NO: 452790 - DNA, 19 bp, Mus musculus
  siRNA target sequence for 1110018N15Rik (NM_172551.1,1448-1466).
ctgggccttcgggtgttaa

SEQ ID NO: 452791 - DNA, 19 bp, Mus musculus
  siRNA target sequence for 1110018N15Rik (NM_172551.1,1740-1758).
ccatcccagtgctttacca

SEQ ID NO: 452792 - DNA, 19 bp, Mus musculus
  siRNA target sequence for 1110018N15Rik (NM_172551.1,1927-1945).
gctgagctccaccaaacta

SEQ ID NO: 452793 - DNA, 19 bp, Mus musculus
  siRNA target sequence for 1110018N15Rik (NM_172551.1,2709-2727).
gcaatggcttacagcatta

SEQ ID NO: 452794 - DNA, 19 bp, Mus musculus
  siRNA target sequence for 1110018N15Rik (NM_172551.1,2756-2774).
gctgcctcagtcaacctaa

SEQ ID NO: 452795 - DNA, 19 bp, Mus musculus
  siRNA target sequence for 1110018N15Rik (NM_172551.1,2781-2799).
ccgacctgccccaagatgt

SEQ ID NO: 452796 - DNA, 19 bp, Mus musculus
  siRNA target sequence for 1110018N15Rik (NM_172551.1,3031-3049).
cgtgcgccaggtcttcaaa

SEQ ID NO: 452797 - DNA, 19 bp, Mus musculus
  siRNA target sequence for 1110018N15Rik (NM_172551.1,3034-3052).
gcgccaggtcttcaaaagt

SEQ ID NO: 452798 - DNA, 19 bp, Mus musculus
  siRNA target sequence for 1110018N15Rik (NM_172551.1,3036-3054).
gccaggtcttcaaaagtct

SEQ ID NO: 452799 - DNA, 19 bp, Mus musculus
  siRNA target sequence for 1110018N15Rik (NM_172551.1,3193-3211).
caaggtccaggtaaaaggt

SEQ ID NO: 452800 - DNA, 19 bp, Mus musculus
  siRNA target sequence for 1110018N15Rik (NM_172551.1,3605-3623).
gatctaggacaggtgataa

SEQ ID NO: 452801 - DNA, 19 bp, Mus musculus
  siRNA target sequence for 1110018N15Rik (NM_172551.1,3608-3626).
ctaggacaggtgataagat

SEQ ID NO: 452802 - DNA, 19 bp, Mus musculus
  siRNA target sequence for 1110018N15Rik (NM_172551.1,3619-3637).
gataagatccacctacttt

SEQ ID NO: 452803 - DNA, 19 bp, Mus musculus
  siRNA target sequence for 1110020M19Rik (NM_027927.2,81-99).
gcactaggtttcttacatt

SEQ ID NO: 452804 - DNA, 19 bp, Mus musculus
  siRNA target sequence for 1110020M19Rik (NM_027927.2,84-102).
ctaggtttcttacattcaa

SEQ ID NO: 452805 - DNA, 19 bp, Mus musculus
  siRNA target sequence for 1110020M19Rik (NM_027927.2,96-114).
cattcaaagagtaaagatt

SEQ ID NO: 452806 - DNA, 19 bp, Mus musculus
  siRNA target sequence for 1110020M19Rik (NM_027927.2,111-129).
gattctgctgaaaagctaa

SEQ ID NO: 452807 - DNA, 19 bp, Mus musculus
  siRNA target sequence for 1110020M19Rik (NM_027927.2,133-151).
cgttgcttgatgagtcttt

SEQ ID NO: 452808 - DNA, 19 bp, Mus musculus
  siRNA target sequence for 1110020M19Rik (NM_027927.2,170-188).
cagttaccgtccaactcaa

SEQ ID NO: 452809 - DNA, 19 bp, Mus musculus
  siRNA target sequence for 1110020M19Rik (NM_027927.2,172-190).
gttaccgtccaactcaaaa

SEQ ID NO: 452810 - DNA, 19 bp, Mus musculus
  siRNA target sequence for 1110020M19Rik (NM_027927.2,176-194).
ccgtccaactcaaaaggat

SEQ ID NO: 452811 - DNA, 19 bp, Mus musculus
  siRNA target sequence for 1110020M19Rik (NM_027927.2,195-213).
gtggaaccacccaaaattt

SEQ ID NO: 452812 - DNA, 19 bp, Mus musculus
  siRNA target sequence for 1110020M19Rik (NM_027927.2,197-215).
ggaaccacccaaaatttca

SEQ ID NO: 452813 - DNA, 19 bp, Mus musculus
  siRNA target sequence for 1110020M19Rik (NM_027927.2,264-282).
ctcccttccggcagtagta

SEQ ID NO: 452814 - DNA, 19 bp, Mus musculus
  siRNA target sequence for 1110020M19Rik (NM_027927.2,409-427).
gatcctctcccattactgt

SEQ ID NO: 452815 - DNA, 19 bp, Mus musculus
  siRNA target sequence for 1110020M19Rik (NM_027927.2,426-444).
gtccaaaccagcaaggatt

SEQ ID NO: 452816 - DNA, 19 bp, Mus musculus
  siRNA target sequence for 1110020M19Rik (NM_027927.2,429-447).
caaaccagcaaggatttga

SEQ ID NO: 452817 - DNA, 19 bp, Mus musculus
  siRNA target sequence for 1110020M19Rik (NM_027927.2,433-451).
ccagcaaggatttgagtat

SEQ ID NO: 452818 - DNA, 19 bp, Mus musculus
  siRNA target sequence for 1110020M19Rik (NM_027927.2,507-525).
gggttggcctgtgttgttt

SEQ ID NO: 452819 - DNA, 19 bp, Mus musculus
  siRNA target sequence for 1110020M19Rik (NM_027927.2,517-535).
gtgttgtttgtagacaaat

SEQ ID NO: 452820 - DNA, 19 bp, Mus musculus
  siRNA target sequence for 1110020M19Rik (NM_027927.2,549-567).
ggaaaccaactggtagaat

SEQ ID NO: 452821 - DNA, 19 bp, Mus musculus
  siRNA target sequence for 1110020M19Rik (NM_027927.2,610-628).
cccaggtgacagacaaaga

SEQ ID NO: 452822 - DNA, 19 bp, Mus musculus
  siRNA target sequence for 1110020M19Rik (NM_027927.2,664-682).
ggtgcactagacagatgaa

SEQ ID NO: 452823 - DNA, 19 bp, Mus musculus
  siRNA target sequence for 1110020M19Rik (NM_027927.2,751-769).
ctgtcaaggatccattagt

SEQ ID NO: 452824 - DNA, 19 bp, Mus musculus
  siRNA target sequence for 1110020M19Rik (NM_027927.2,753-771).
gtcaaggatccattagtca

SEQ ID NO: 452825 - DNA, 19 bp, Mus musculus
  siRNA target sequence for 1110020M19Rik (NM_027927.2,802-820).
caaccttcctagcattcaa

SEQ ID NO: 452826 - DNA, 19 bp, Mus musculus
  siRNA target sequence for 1110020M19Rik (NM_027927.2,842-860).
cacggttatttcaggaaat

SEQ ID NO: 452827 - DNA, 19 bp, Mus musculus
  siRNA target sequence for 1110020M19Rik (NM_027927.2,845-863).
ggttatttcaggaaattct

SEQ ID NO: 452828 - DNA, 19 bp, Mus musculus
  siRNA target sequence for 1110020M19Rik (NM_027927.2,855-873).
ggaaattcttctagtaaca

SEQ ID NO: 452829 - DNA, 19 bp, Mus musculus
  siRNA target sequence for 1110020M19Rik (NM_027927.2,856-874).
gaaattcttctagtaacaa

SEQ ID NO: 452830 - DNA, 19 bp, Mus musculus
  siRNA target sequence for 1110020M19Rik (NM_027927.2,875-893).
cgtgtcctcttcagtaact

SEQ ID NO: 452831 - DNA, 19 bp, Mus musculus
  siRNA target sequence for 1110020M19Rik (NM_027927.2,876-894).
gtgtcctcttcagtaacta

SEQ ID NO: 452832 - DNA, 19 bp, Mus musculus
  siRNA target sequence for 1110020M19Rik (NM_027927.2,878-896).
gtcctcttcagtaactagt

SEQ ID NO: 452833 - DNA, 19 bp, Mus musculus
  siRNA target sequence for 1110020M19Rik (NM_027927.2,1056-1074).
ggtggaataggttccaaaa

SEQ ID NO: 452834 - DNA, 19 bp, Mus musculus
  siRNA target sequence for 1110020M19Rik (NM_027927.2,1097-1115).
cccctctgtcccgttgaaa

SEQ ID NO: 452835 - DNA, 19 bp, Mus musculus
  siRNA target sequence for 1110020M19Rik (NM_027927.2,1155-1173).
cgctcagtgagttgtgata

SEQ ID NO: 452836 - DNA, 19 bp, Mus musculus
  siRNA target sequence for 1110020M19Rik (NM_027927.2,1156-1174).
gctcagtgagttgtgataa

SEQ ID NO: 452837 - DNA, 19 bp, Mus musculus
  siRNA target sequence for 1110020M19Rik (NM_027927.2,1159-1177).
cagtgagttgtgataacgt

SEQ ID NO: 452838 - DNA, 19 bp, Mus musculus
  siRNA target sequence for 1110020M19Rik (NM_027927.2,1195-1213).
ctagtcctagtagtttagt

SEQ ID NO: 452839 - DNA, 19 bp, Mus musculus
  siRNA target sequence for 1110020M19Rik (NM_027927.2,1235-1253).
gagtgggaatggaaatagt

SEQ ID NO: 452840 - DNA, 19 bp, Mus musculus
  siRNA target sequence for 1110020M19Rik (NM_027927.2,1312-1330).
gtacctcagcatctcttaa

SEQ ID NO: 452841 - DNA, 19 bp, Mus musculus
  siRNA target sequence for 1110020M19Rik (NM_027927.2,1351-1369).
cacagctcaacgcaatgaa

SEQ ID NO: 452842 - DNA, 19 bp, Mus musculus
  siRNA target sequence for 1110020M19Rik (NM_027927.2,1372-1390).
gattacagatggtcaagaa

SEQ ID NO: 452843 - DNA, 19 bp, Mus musculus
  siRNA target sequence for 1110020M21Rik (NM_021432.1,140-158).
cgaggacgaggtaatggaa

SEQ ID NO: 452844 - DNA, 19 bp, Mus musculus
  siRNA target sequence for 1110020M21Rik (NM_021432.1,297-315).
cgggttctggcgctcaaaa

SEQ ID NO: 452845 - DNA, 19 bp, Mus musculus
  siRNA target sequence for 1110020M21Rik (NM_021432.1,298-316).
gggttctggcgctcaaaaa

SEQ ID NO: 452846 - DNA, 19 bp, Mus musculus
  siRNA target sequence for 1110020M21Rik (NM_021432.1,321-339).
cagaagcgctgcgataaga

SEQ ID NO: 452847 - DNA, 19 bp, Mus musculus
  siRNA target sequence for 1110020M21Rik (NM_021432.1,375-393).
gagaagaagtacaacgata

SEQ ID NO: 452848 - DNA, 19 bp, Mus musculus
  siRNA target sequence for 1110020M21Rik (NM_021432.1,549-567).
cccaacttcgccaagaagt

SEQ ID NO: 452849 - DNA, 19 bp, Mus musculus
  siRNA target sequence for 1190030G24 (NM_177645.2,366-384).
ctacactacttcttcgaaa

SEQ ID NO: 452850 - DNA, 19 bp, Mus musculus
  siRNA target sequence for 1190030G24 (NM_177645.2,374-392).
cttcttcgaaacatagaga

SEQ ID NO: 452851 - DNA, 19 bp, Mus musculus
  siRNA target sequence for 1190030G24 (NM_177645.2,402-420).
cacagttgactgagatcat

SEQ ID NO: 452852 - DNA, 19 bp, Mus musculus
  siRNA target sequence for 1190030G24 (NM_177645.2,404-422).
cagttgactgagatcatta

SEQ ID NO: 452853 - DNA, 19 bp, Mus musculus
  siRNA target sequence for 1190030G24 (NM_177645.2,409-427).
gactgagatcattaacagt

SEQ ID NO: 452854 - DNA, 19 bp, Mus musculus
  siRNA target sequence for 1190030G24 (NM_177645.2,413-431).
gagatcattaacagtttga

SEQ ID NO: 452855 - DNA, 19 bp, Mus musculus
  siRNA target sequence for 1190030G24 (NM_177645.2,550-568).
ctccagtagctggttactt

SEQ ID NO: 452856 - DNA, 19 bp, Mus musculus
  siRNA target sequence for 1190030G24 (NM_177645.2,552-570).
ccagtagctggttacttaa

SEQ ID NO: 452857 - DNA, 19 bp, Mus musculus
  siRNA target sequence for 1190030G24 (NM_177645.2,553-571).
cagtagctggttacttaat

SEQ ID NO: 452858 - DNA, 19 bp, Mus musculus
  siRNA target sequence for 1190030G24 (NM_177645.2,558-576).
gctggttacttaatcagaa

SEQ ID NO: 452859 - DNA, 19 bp, Mus musculus
  siRNA target sequence for 1190030G24 (NM_177645.2,618-636).
ctccatccttggctatcat

SEQ ID NO: 452860 - DNA, 19 bp, Mus musculus
  siRNA target sequence for 1190030G24 (NM_177645.2,620-638).
ccatccttggctatcatga

SEQ ID NO: 452861 - DNA, 19 bp, Mus musculus
  siRNA target sequence for 1190030G24 (NM_177645.2,650-668).
cgaacaaggccccttcaaa

SEQ ID NO: 452862 - DNA, 19 bp, Mus musculus
  siRNA target sequence for 1190030G24 (NM_177645.2,658-676).
gccccttcaaagtttccat

SEQ ID NO: 452863 - DNA, 19 bp, Mus musculus
  siRNA target sequence for 1190030G24 (NM_177645.2,659-677).
ccccttcaaagtttccata

SEQ ID NO: 452864 - DNA, 19 bp, Mus musculus
  siRNA target sequence for 1190030G24 (NM_177645.2,712-730).
ctggactcccgagacttta

SEQ ID NO: 452865 - DNA, 19 bp, Mus musculus
  siRNA target sequence for 1190030G24 (NM_177645.2,715-733).
gactcccgagactttacct

SEQ ID NO: 452866 - DNA, 19 bp, Mus musculus
  siRNA target sequence for 1190030G24 (NM_177645.2,720-738).
ccgagactttaccttcaaa

SEQ ID NO: 452867 - DNA, 19 bp, Mus musculus
  siRNA target sequence for 1190030G24 (NM_177645.2,724-742).
gactttaccttcaaaagaa

SEQ ID NO: 452868 - DNA, 19 bp, Mus musculus
  siRNA target sequence for 1190030G24 (NM_177645.2,814-832).
caggtctcacctgttaaga

SEQ ID NO: 452869 - DNA, 19 bp, Mus musculus
  siRNA target sequence for 1190030G24 (NM_177645.2,817-835).
gtctcacctgttaagagaa

SEQ ID NO: 452870 - DNA, 19 bp, Mus musculus
  siRNA target sequence for 1190030G24 (NM_177645.2,874-892).
gtcattgccatcagaaatt

SEQ ID NO: 452871 - DNA, 19 bp, Mus musculus
  siRNA target sequence for 1190030G24 (NM_177645.2,944-962).
gagcttgctgaaaatcaat

SEQ ID NO: 452872 - DNA, 19 bp, Mus musculus
  siRNA target sequence for 1190030G24 (NM_177645.2,992-1010).
cctgtacaaggtacttctt

SEQ ID NO: 452873 - DNA, 19 bp, Mus musculus
  siRNA target sequence for 1190030G24 (NM_177645.2,1019-1037).
cagtggagaaatggatatt

SEQ ID NO: 452874 - DNA, 19 bp, Mus musculus
  siRNA target sequence for 1190030G24 (NM_177645.2,1021-1039).
gtggagaaatggatattca

SEQ ID NO: 452875 - DNA, 19 bp, Mus musculus
  siRNA target sequence for 1190030G24 (NM_177645.2,1041-1059).
ctatatgtaagcctcaaat

SEQ ID NO: 452876 - DNA, 19 bp, Mus musculus
  siRNA target sequence for 1190030G24 (NM_177645.2,1071-1089).
catctgtacaactattaca

SEQ ID NO: 452877 - DNA, 19 bp, Mus musculus
  siRNA target sequence for 1190030G24 (NM_177645.2,1131-1149).
gagaaagaactagatttga

SEQ ID NO: 452878 - DNA, 19 bp, Mus musculus
  siRNA target sequence for 1190030G24 (NM_177645.2,1137-1155).
gaactagatttgaagaatt

SEQ ID NO: 452879 - DNA, 19 bp, Mus musculus
  siRNA target sequence for 1190030G24 (NM_177645.2,1234-1252).
gaatccatcctcacaaaat

SEQ ID NO: 452880 - DNA, 19 bp, Mus musculus
  siRNA target sequence for 1190030G24 (NM_177645.2,1272-1290).
gaagtgagagctcttatga

SEQ ID NO: 452881 - DNA, 19 bp, Mus musculus
  siRNA target sequence for 1190030G24 (NM_177645.2,1275-1293).
gtgagagctcttatgatat

SEQ ID NO: 452882 - DNA, 19 bp, Mus musculus
  siRNA target sequence for 1190030G24 (NM_177645.2,1279-1297).
gagctcttatgatatagat

SEQ ID NO: 452883 - DNA, 19 bp, Mus musculus
  siRNA target sequence for 1190030G24 (NM_177645.2,1281-1299).
gctcttatgatatagataa

SEQ ID NO: 452884 - DNA, 19 bp, Mus musculus
  siRNA target sequence for 1190030G24 (NM_177645.2,1289-1307).
gatatagataacattgtga

SEQ ID NO: 452885 - DNA, 19 bp, Mus musculus
  siRNA target sequence for 1190030G24 (NM_177645.2,1306-1324).
gattcccatgtcattagta

SEQ ID NO: 452886 - DNA, 19 bp, Mus musculus
  siRNA target sequence for 1190030G24 (NM_177645.2,1325-1343).
gcaccagccaaattagaga

SEQ ID NO: 452887 - DNA, 19 bp, Mus musculus
  siRNA target sequence for 1190030G24 (NM_177645.2,1397-1415).
ccccttgatgagcataact

SEQ ID NO: 452888 - DNA, 19 bp, Mus musculus
  siRNA target sequence for 1190030G24 (NM_177645.2,1408-1426).
gcataacttaaacaaagaa

SEQ ID NO: 452889 - DNA, 19 bp, Mus musculus
  siRNA target sequence for 1190030G24 (NM_177645.2,1720-1738).
gtgggagcggcgagcattt

SEQ ID NO: 452890 - DNA, 19 bp, Mus musculus
  siRNA target sequence for 1190030G24 (NM_177645.2,1754-1772).
gatacagcagccttattgt

SEQ ID NO: 452891 - DNA, 19 bp, Mus musculus
  siRNA target sequence for 1190030G24 (NM_177645.2,1764-1782).
ccttattgtgccaagatga

SEQ ID NO: 452892 - DNA, 19 bp, Mus musculus
  siRNA target sequence for 1190030G24 (NM_177645.2,1765-1783).
cttattgtgccaagatgaa

SEQ ID NO: 452893 - DNA, 19 bp, Mus musculus
  siRNA target sequence for 1190030G24 (NM_177645.2,1812-1830).
cagccttccacgatgaagt

SEQ ID NO: 452894 - DNA, 19 bp, Mus musculus
  siRNA target sequence for 1190030G24 (NM_177645.2,1815-1833).
ccttccacgatgaagtctt

SEQ ID NO: 452895 - DNA, 19 bp, Mus musculus
  siRNA target sequence for 1190030G24 (NM_177645.2,1820-1838).
cacgatgaagtcttctgta

SEQ ID NO: 452896 - DNA, 19 bp, Mus musculus
  siRNA target sequence for 1190030G24 (NM_177645.2,1873-1891).
gcagttagatggaatggaa

SEQ ID NO: 452897 - DNA, 19 bp, Mus musculus
  siRNA target sequence for 1190030G24 (NM_177645.2,1903-1921).
ctttggtataggagttact

SEQ ID NO: 452898 - DNA, 19 bp, Mus musculus
  siRNA target sequence for 1500012D09Rik (NM_172601.1,188-206).
cgtgcacgacctcacaata

SEQ ID NO: 452899 - DNA, 19 bp, Mus musculus
  siRNA target sequence for 1500012D09Rik (NM_172601.1,220-238).
gagcacgtatggtcaacat

SEQ ID NO: 452900 - DNA, 19 bp, Mus musculus
  siRNA target sequence for 1500012D09Rik (NM_172601.1,374-392).
ccacctgacctcatggtta

SEQ ID NO: 452901 - DNA, 19 bp, Mus musculus
  siRNA target sequence for 1500012D09Rik (NM_172601.1,440-458).
cgggaataagagtgatcta

SEQ ID NO: 452902 - DNA, 19 bp, Mus musculus
  siRNA target sequence for 1500012D09Rik (NM_172601.1,507-525).
gagcacggccttatattca

SEQ ID NO: 452903 - DNA, 19 bp, Mus musculus
  siRNA target sequence for 1500012D09Rik (NM_172601.1,542-560).
gacagcctgcaatgttgaa

SEQ ID NO: 452904 - DNA, 19 bp, Mus musculus
  siRNA target sequence for 1500012D09Rik (NM_172601.1,544-562).
cagcctgcaatgttgaaga

SEQ ID NO: 452905 - DNA, 19 bp, Mus musculus
  siRNA target sequence for 1500012D09Rik (NM_172601.1,555-573).
gttgaagaggcctacatta

SEQ ID NO: 452906 - DNA, 19 bp, Mus musculus
  siRNA target sequence for 1500012D09Rik (NM_172601.1,579-597).
gccaaagaaatatatagga

SEQ ID NO: 452907 - DNA, 19 bp, Mus musculus
  siRNA target sequence for 1500012D09Rik (NM_172601.1,595-613).
ggaagatccagcaaggttt

SEQ ID NO: 452908 - DNA, 19 bp, Mus musculus
  siRNA target sequence for 1500012D09Rik (NM_172601.1,596-614).
gaagatccagcaaggttta

SEQ ID NO: 452909 - DNA, 19 bp, Mus musculus
  siRNA target sequence for 1500012D09Rik (NM_172601.1,599-617).
gatccagcaaggtttattt

SEQ ID NO: 452910 - DNA, 19 bp, Mus musculus
  siRNA target sequence for 1500012D09Rik (NM_172601.1,602-620).
ccagcaaggtttatttgat

SEQ ID NO: 452911 - DNA, 19 bp, Mus musculus
  siRNA target sequence for 1500012D09Rik (NM_172601.1,694-712).
ctcagcagaacgtttctga

SEQ ID NO: 452912 - DNA, 19 bp, Mus musculus
  siRNA target sequence for 1700001F22Rik (NM_027036.1,222-240).
cctaccttggctttaaaga

SEQ ID NO: 452913 - DNA, 19 bp, Mus musculus
  siRNA target sequence for 1700001F22Rik (NM_027036.1,273-291).
ccatctcaaagcacgaaaa

SEQ ID NO: 452914 - DNA, 19 bp, Mus musculus
  siRNA target sequence for 1700001F22Rik (NM_027036.1,286-304).
cgaaaaggcaaagtatgaa

SEQ ID NO: 452915 - DNA, 19 bp, Mus musculus
  siRNA target sequence for 1700001F22Rik (NM_027036.1,327-345).
cccggtaccagcaagaaat

SEQ ID NO: 452916 - DNA, 19 bp, Mus musculus
  siRNA target sequence for 1700051E09Rik (NM_026097.1,498-516).
gcttggactgtaagaaaaa

SEQ ID NO: 452917 - DNA, 19 bp, Mus musculus
  siRNA target sequence for 1700051E09Rik (NM_026097.1,659-677).
gacatctctacggaaatgt

SEQ ID NO: 452918 - DNA, 19 bp, Mus musculus
  siRNA target sequence for 1700051E09Rik (NM_026097.1,1016-1034).
cgtaactttgtcaactata

SEQ ID NO: 452919 - DNA, 19 bp, Mus musculus
  siRNA target sequence for 1700051E09Rik (NM_026097.1,1068-1086).
gggtgactcggctgtacaa

SEQ ID NO: 452920 - DNA, 19 bp, Mus musculus
  siRNA target sequence for 1700051E09Rik (NM_026097.1,1077-1095).
ggctgtacaaggatcagaa

SEQ ID NO: 452921 - DNA, 19 bp, Mus musculus
  siRNA target sequence for 1700051E09Rik (NM_026097.1,1162-1180).
ggagaacctgtgtaagatt

SEQ ID NO: 452922 - DNA, 19 bp, Mus musculus
  siRNA target sequence for 1700054O13Rik (NM_026096.1,219-237).
catagggtccacaacttca

SEQ ID NO: 452923 - DNA, 19 bp, Mus musculus
  siRNA target sequence for 1700054O13Rik (NM_026096.1,223-241).
gggtccacaacttcagatt

SEQ ID NO: 452924 - DNA, 19 bp, Mus musculus
  siRNA target sequence for 1700054O13Rik (NM_026096.1,224-242).
ggtccacaacttcagattt

SEQ ID NO: 452925 - DNA, 19 bp, Mus musculus
  siRNA target sequence for 1700054O13Rik (NM_026096.1,312-330).
caaccagcaaaatatctca

SEQ ID NO: 452926 - DNA, 19 bp, Mus musculus
  siRNA target sequence for 1700054O13Rik (NM_026096.1,318-336).
gcaaaatatctcacaagat

SEQ ID NO: 452927 - DNA, 19 bp, Mus musculus
  siRNA target sequence for 1700054O13Rik (NM_026096.1,367-385).
ccctctcgaggcttcaaga

SEQ ID NO: 452928 - DNA, 19 bp, Mus musculus
  siRNA target sequence for 1700054O13Rik (NM_026096.1,368-386).
cctctcgaggcttcaagaa

SEQ ID NO: 452929 - DNA, 19 bp, Mus musculus
  siRNA target sequence for 1700054O13Rik (NM_026096.1,369-387).
ctctcgaggcttcaagaat

SEQ ID NO: 452930 - DNA, 19 bp, Mus musculus
  siRNA target sequence for 1700054O13Rik (NM_026096.1,381-399).
caagaatgcgcctttctct

SEQ ID NO: 452931 - DNA, 19 bp, Mus musculus
  siRNA target sequence for 1700113O17Rik (NM_026627.1,166-184).
cctacgagagggaaactat

SEQ ID NO: 452932 - DNA, 19 bp, Mus musculus
  siRNA target sequence for 1700113O17Rik (NM_026627.1,167-185).
ctacgagagggaaactatt

SEQ ID NO: 452933 - DNA, 19 bp, Mus musculus
  siRNA target sequence for 1810004B07Rik (NM_026909.1,108-126).
gacttcccaagaaagacaa

SEQ ID NO: 452934 - DNA, 19 bp, Mus musculus
  siRNA target sequence for 1810004B07Rik (NM_026909.1,195-213).
cgacctctgagtacatcta

SEQ ID NO: 452935 - DNA, 19 bp, Mus musculus
  siRNA target sequence for 1810004B07Rik (NM_026909.1,222-240).
ccaaacacttcgaggaaaa

SEQ ID NO: 452936 - DNA, 19 bp, Mus musculus
  siRNA target sequence for 1810004B07Rik (NM_026909.1,257-275).
ggaatcagtgggtatcaca

SEQ ID NO: 452937 - DNA, 19 bp, Mus musculus
  siRNA target sequence for 1810004B07Rik (NM_026909.1,288-306).
gggcagtccccaccatatt

SEQ ID NO: 452938 - DNA, 19 bp, Mus musculus
  siRNA target sequence for 1810004B07Rik (NM_026909.1,340-358).
gaccaaggggcatggttat

SEQ ID NO: 452939 - DNA, 19 bp, Mus musculus
  siRNA target sequence for 1810004B07Rik (NM_026909.1,343-361).
caaggggcatggttatcca

SEQ ID NO: 452940 - DNA, 19 bp, Mus musculus
  siRNA target sequence for 1810004B07Rik (NM_026909.1,403-421).
gcgctgctccgaaagacaa

SEQ ID NO: 452941 - DNA, 19 bp, Mus musculus
  siRNA target sequence for 1810004B07Rik (NM_026909.1,449-467).
cctcgtgccgatatcatct

SEQ ID NO: 452942 - DNA, 19 bp, Mus musculus
  siRNA target sequence for 1810004B07Rik (NM_026909.1,696-714).
gagcctacatccagaatga

SEQ ID NO: 452943 - DNA, 19 bp, Mus musculus
  siRNA target sequence for 1810007M14Rik (NM_026110.1,259-277).
caccaaatcttgattcctt

SEQ ID NO: 452944 - DNA, 19 bp, Mus musculus
  siRNA target sequence for 1810007M14Rik (NM_026110.1,280-298).
gacgtgatcgggcacttta

SEQ ID NO: 452945 - DNA, 19 bp, Mus musculus
  siRNA target sequence for 1810007M14Rik (NM_026110.1,283-301).
gtgatcgggcactttatca

SEQ ID NO: 452946 - DNA, 19 bp, Mus musculus
  siRNA target sequence for 1810007M14Rik (NM_026110.1,417-435).
gaagagacgtctacagata

SEQ ID NO: 452947 - DNA, 19 bp, Mus musculus
  siRNA target sequence for 1810007M14Rik (NM_026110.1,420-438).
gagacgtctacagatatta

SEQ ID NO: 452948 - DNA, 19 bp, Mus musculus
  siRNA target sequence for 1810007M14Rik (NM_026110.1,422-440).
gacgtctacagatattact

SEQ ID NO: 452949 - DNA, 19 bp, Mus musculus
  siRNA target sequence for 1810007M14Rik (NM_026110.1,425-443).
gtctacagatattactaat

SEQ ID NO: 452950 - DNA, 19 bp, Mus musculus
  siRNA target sequence for 1810007M14Rik (NM_026110.1,453-471).
gagaaagatcgaattttga

SEQ ID NO: 452951 - DNA, 19 bp, Mus musculus
  siRNA target sequence for 1810007M14Rik (NM_026110.1,455-473).
gaaagatcgaattttgaaa

SEQ ID NO: 452952 - DNA, 19 bp, Mus musculus
  siRNA target sequence for 1810007M14Rik (NM_026110.1,459-477).
gatcgaattttgaaagagt

SEQ ID NO: 452953 - DNA, 19 bp, Mus musculus
  siRNA target sequence for 1810007M14Rik (NM_026110.1,498-516).
gtccttgagagtttctatt

SEQ ID NO: 452954 - DNA, 19 bp, Mus musculus
  siRNA target sequence for 1810007M14Rik (NM_026110.1,500-518).
ccttgagagtttctattca

SEQ ID NO: 452955 - DNA, 19 bp, Mus musculus
  siRNA target sequence for 1810007M14Rik (NM_026110.1,543-561).
gaagcatggcgttcaaaat

SEQ ID NO: 452956 - DNA, 19 bp, Mus musculus
  siRNA target sequence for 1810007M14Rik (NM_026110.1,546-564).
gcatggcgttcaaaatact

SEQ ID NO: 452957 - DNA, 19 bp, Mus musculus
  siRNA target sequence for 1810007M14Rik (NM_026110.1,547-565).
catggcgttcaaaatacta

SEQ ID NO: 452958 - DNA, 19 bp, Mus musculus
  siRNA target sequence for 1810007M14Rik (NM_026110.1,550-568).
ggcgttcaaaatactacat

SEQ ID NO: 452959 - DNA, 19 bp, Mus musculus
  siRNA target sequence for 1810007M14Rik (NM_026110.1,569-587).
gtcctataaggatgcttat

SEQ ID NO: 452960 - DNA, 19 bp, Mus musculus
  siRNA target sequence for 1810007M14Rik (NM_026110.1,571-589).
cctataaggatgcttatat

SEQ ID NO: 452961 - DNA, 19 bp, Mus musculus
  siRNA target sequence for 1810007M14Rik (NM_026110.1,572-590).
ctataaggatgcttatatt

SEQ ID NO: 452962 - DNA, 19 bp, Mus musculus
  siRNA target sequence for 1810007M14Rik (NM_026110.1,659-677).
ggcaaaatgccgtgacttt

SEQ ID NO: 452963 - DNA, 19 bp, Mus musculus
  siRNA target sequence for 1810007M14Rik (NM_026110.1,661-679).
caaaatgccgtgactttga

SEQ ID NO: 452964 - DNA, 19 bp, Mus musculus
  siRNA target sequence for 1810007M14Rik (NM_026110.1,667-685).
gccgtgactttgaaaccat

SEQ ID NO: 452965 - DNA, 19 bp, Mus musculus
  siRNA target sequence for 1810007M14Rik (NM_026110.1,802-820).
cagtgatagctgaaaccat

SEQ ID NO: 452966 - DNA, 19 bp, Mus musculus
  siRNA target sequence for 1810007M14Rik (NM_026110.1,824-842).
ggatcccttttctacaaca

SEQ ID NO: 452967 - DNA, 19 bp, Mus musculus
  siRNA target sequence for 1810007M14Rik (NM_026110.1,853-871).
ggatggttggaatcacaat

SEQ ID NO: 452968 - DNA, 19 bp, Mus musculus
  siRNA target sequence for 1810007M14Rik (NM_026110.1,858-876).
gttggaatcacaatgaaat

SEQ ID NO: 452969 - DNA, 19 bp, Mus musculus
  siRNA target sequence for 1810007M14Rik (NM_026110.1,886-904).
gctacccctcagtagtcaa

SEQ ID NO: 452970 - DNA, 19 bp, Mus musculus
  siRNA target sequence for 1810007M14Rik (NM_026110.1,887-905).
ctacccctcagtagtcaat

SEQ ID NO: 452971 - DNA, 19 bp, Mus musculus
  siRNA target sequence for 1810007M14Rik (NM_026110.1,920-938).
cacgcaggtataccttaaa

SEQ ID NO: 452972 - DNA, 19 bp, Mus musculus
  siRNA target sequence for 1810007M14Rik (NM_026110.1,942-960).
cttttactgaggatgagaa

SEQ ID NO: 452973 - DNA, 19 bp, Mus musculus
  siRNA target sequence for 1810007M14Rik (NM_026110.1,953-971).
gatgagaagaactttagat

SEQ ID NO: 452974 - DNA, 19 bp, Mus musculus
  siRNA target sequence for 1810007M14Rik (NM_026110.1,1027-1045).
ggccttacttattttttca

SEQ ID NO: 452975 - DNA, 19 bp, Mus musculus
  siRNA target sequence for 1810007M14Rik (NM_026110.1,1057-1075).
ggtcgtctgttaagctatt

SEQ ID NO: 452976 - DNA, 19 bp, Mus musculus
  siRNA target sequence for 1810007M14Rik (NM_026110.1,1117-1135).
ctcttcaggagttatcaat

SEQ ID NO: 452977 - DNA, 19 bp, Mus musculus
  siRNA target sequence for 1810007M14Rik (NM_026110.1,1132-1150).
caatagatggcttgttaaa

SEQ ID NO: 452978 - DNA, 19 bp, Mus musculus
  siRNA target sequence for 1810007M14Rik (NM_026110.1,1209-1227).
gcccaaaatgtaatcaact

SEQ ID NO: 452979 - DNA, 19 bp, Mus musculus
  siRNA target sequence for 1810007M14Rik (NM_026110.1,1212-1230).
caaaatgtaatcaactgtt

SEQ ID NO: 452980 - DNA, 19 bp, Mus musculus
  siRNA target sequence for 1810007M14Rik (NM_026110.1,1294-1312).
gccgatatcttgtacattt

SEQ ID NO: 452981 - DNA, 19 bp, Mus musculus
  siRNA target sequence for 1810007M14Rik (NM_026110.1,1295-1313).
ccgatatcttgtacattta

SEQ ID NO: 452982 - DNA, 19 bp, Mus musculus
  siRNA target sequence for 1810007M14Rik (NM_026110.1,1308-1326).
catttagcagatacaattt

SEQ ID NO: 452983 - DNA, 19 bp, Mus musculus
  siRNA target sequence for 1810007M14Rik (NM_026110.1,1342-1360).
ggtgctctgatgtggaaaa

SEQ ID NO: 452984 - DNA, 19 bp, Mus musculus
  siRNA target sequence for 1810007M14Rik (NM_026110.1,1343-1361).
gtgctctgatgtggaaaaa

SEQ ID NO: 452985 - DNA, 19 bp, Mus musculus
  siRNA target sequence for 1810007M14Rik (NM_026110.1,1416-1434).
gctttggatcacgctatat

SEQ ID NO: 452986 - DNA, 19 bp, Mus musculus
  siRNA target sequence for 1810007M14Rik (NM_026110.1,1421-1439).
ggatcacgctatatctgtt

SEQ ID NO: 452987 - DNA, 19 bp, Mus musculus
  siRNA target sequence for 1810007M14Rik (NM_026110.1,1440-1458).
gcaagtgaccacaatgtga

SEQ ID NO: 452988 - DNA, 19 bp, Mus musculus
  siRNA target sequence for 1810007M14Rik (NM_026110.1,1441-1459).
caagtgaccacaatgtgaa

SEQ ID NO: 452989 - DNA, 19 bp, Mus musculus
  siRNA target sequence for 1810055P05Rik (NM_024250.3,345-363).
cctccttcaagcggaaata

SEQ ID NO: 452990 - DNA, 19 bp, Mus musculus
  siRNA target sequence for 1810055P05Rik (NM_024250.3,346-364).
ctccttcaagcggaaatat

SEQ ID NO: 452991 - DNA, 19 bp, Mus musculus
  siRNA target sequence for 1810055P05Rik (NM_024250.3,442-460).
gtgcacactgggtttaaca

SEQ ID NO: 452992 - DNA, 19 bp, Mus musculus
  siRNA target sequence for 1810055P05Rik (NM_024250.3,466-484).
gcgcagtgatgaagtgatt

SEQ ID NO: 452993 - DNA, 19 bp, Mus musculus
  siRNA target sequence for 1810055P05Rik (NM_024250.3,507-525).
cagctaaacacgctgaata

SEQ ID NO: 452994 - DNA, 19 bp, Mus musculus
  siRNA target sequence for 1810055P05Rik (NM_024250.3,509-527).
gctaaacacgctgaatatt

SEQ ID NO: 452995 - DNA, 19 bp, Mus musculus
  siRNA target sequence for 1810055P05Rik (NM_024250.3,519-537).
ctgaatattcggttatcct

SEQ ID NO: 452996 - DNA, 19 bp, Mus musculus
  siRNA target sequence for 1810055P05Rik (NM_024250.3,528-546).
cggttatcctacaagaaaa

SEQ ID NO: 452997 - DNA, 19 bp, Mus musculus
  siRNA target sequence for 1810055P05Rik (NM_024250.3,547-565).
ggaacgtcagagaattaca

SEQ ID NO: 452998 - DNA, 19 bp, Mus musculus
  siRNA target sequence for 1810055P05Rik (NM_024250.3,566-584).
gatcattataaagagtatt

SEQ ID NO: 452999 - DNA, 19 bp, Mus musculus
  siRNA target sequence for 1810055P05Rik (NM_024250.3,708-726).
gaagagcctattttgactt

SEQ ID NO: 453000 - DNA, 19 bp, Mus musculus
  siRNA target sequence for 1810055P05Rik (NM_024250.3,821-839).
ggacagttccaggagtatt

SEQ ID NO: 453001 - DNA, 19 bp, Mus musculus
  siRNA target sequence for 1810055P05Rik (NM_024250.3,822-840).
gacagttccaggagtatta

SEQ ID NO: 453002 - DNA, 19 bp, Mus musculus
  siRNA target sequence for 1810055P05Rik (NM_024250.3,824-842).
cagttccaggagtattata

SEQ ID NO: 453003 - DNA, 19 bp, Mus musculus
  siRNA target sequence for 1810055P05Rik (NM_024250.3,863-881).
cttcggtacttgccattaa

SEQ ID NO: 453004 - DNA, 19 bp, Mus musculus
  siRNA target sequence for 1810055P05Rik (NM_024250.3,866-884).
cggtacttgccattaaaca

SEQ ID NO: 453005 - DNA, 19 bp, Mus musculus
  siRNA target sequence for 1810055P05Rik (NM_024250.3,914-932).
gagctcccggcactagata

SEQ ID NO: 453006 - DNA, 19 bp, Mus musculus
  siRNA target sequence for 1810055P05Rik (NM_024250.3,916-934).
gctcccggcactagatagt

SEQ ID NO: 453007 - DNA, 19 bp, Mus musculus
  siRNA target sequence for 1810055P05Rik (NM_024250.3,919-937).
cccggcactagatagtgat

SEQ ID NO: 453008 - DNA, 19 bp, Mus musculus
  siRNA target sequence for 1810055P05Rik (NM_024250.3,1064-1082).
cacggaagacagaaatcaa

SEQ ID NO: 453009 - DNA, 19 bp, Mus musculus
  siRNA target sequence for 1810055P05Rik (NM_024250.3,1111-1129).
cggctccaaacgttctgta

SEQ ID NO: 453010 - DNA, 19 bp, Mus musculus
  siRNA target sequence for 1810055P05Rik (NM_024250.3,1121-1139).
cgttctgtactgtccaaat

SEQ ID NO: 453011 - DNA, 19 bp, Mus musculus
  siRNA target sequence for 1810055P05Rik (NM_024250.3,1199-1217).
ggtaaggagtccaacaaga

SEQ ID NO: 453012 - DNA, 19 bp, Mus musculus
  siRNA target sequence for 1810055P05Rik (NM_024250.3,1226-1244).
gctgaatcacttatacact

SEQ ID NO: 453013 - DNA, 19 bp, Mus musculus
  siRNA target sequence for 1810055P05Rik (NM_024250.3,1246-1264).
ctcccagtgtgataacagt

SEQ ID NO: 453014 - DNA, 19 bp, Mus musculus
  siRNA target sequence for 1810055P05Rik (NM_024250.3,1268-1286).
cacccttcttgcttggata

SEQ ID NO: 453015 - DNA, 19 bp, Mus musculus
  siRNA target sequence for 1810055P05Rik (NM_024250.3,1271-1289).
ccttcttgcttggatatga

SEQ ID NO: 453016 - DNA, 19 bp, Mus musculus
  siRNA target sequence for 1810055P05Rik (NM_024250.3,1295-1313).
gagcttgtttctatgatta

SEQ ID NO: 453017 - DNA, 19 bp, Mus musculus
  siRNA target sequence for 1810055P05Rik (NM_024250.3,1317-1335).
cctacccatggcagtgtat

SEQ ID NO: 453018 - DNA, 19 bp, Mus musculus
  siRNA target sequence for 1810055P05Rik (NM_024250.3,1322-1340).
ccatggcagtgtatggaat

SEQ ID NO: 453019 - DNA, 19 bp, Mus musculus
  siRNA target sequence for 1810055P05Rik (NM_024250.3,1413-1431).
gttatcatactttttgtgt

SEQ ID NO: 453020 - DNA, 19 bp, Mus musculus
  siRNA target sequence for 1810055P05Rik (NM_024250.3,1452-1470).
caggtcgctggatttgtga

SEQ ID NO: 453021 - DNA, 19 bp, Mus musculus
  siRNA target sequence for 2010005A06Rik (NM_029357.2,330-348).
cataccacccaggtagtat

SEQ ID NO: 453022 - DNA, 19 bp, Mus musculus
  siRNA target sequence for 2010005A06Rik (NM_029357.2,417-435).
gacgtgggtcatctgtata

SEQ ID NO: 453023 - DNA, 19 bp, Mus musculus
  siRNA target sequence for 2010005A06Rik (NM_029357.2,443-461).
ggtaggtgctccgtatctt

SEQ ID NO: 453024 - DNA, 19 bp, Mus musculus
  siRNA target sequence for 2010005A06Rik (NM_029357.2,761-779).
caatggcgtagcatcctat

SEQ ID NO: 453025 - DNA, 19 bp, Mus musculus
  siRNA target sequence for 2010005A06Rik (NM_029357.2,963-981).
cgtgtcactgtgcttgata

SEQ ID NO: 453026 - DNA, 19 bp, Mus musculus
  siRNA target sequence for 2010005A06Rik (NM_029357.2,1095-1113).
gccaatgcggagattgact

SEQ ID NO: 453027 - DNA, 19 bp, Mus musculus
  siRNA target sequence for 2010005A06Rik (NM_029357.2,1154-1172).
gcgactagaccgaaacact

SEQ ID NO: 453028 - DNA, 19 bp, Mus musculus
  siRNA target sequence for 2010005A06Rik (NM_029357.2,1164-1182).
cgaaacactggacttatca

SEQ ID NO: 453029 - DNA, 19 bp, Mus musculus
  siRNA target sequence for 2010005A06Rik (NM_029357.2,1196-1214).
cgtggaccgagaggattta

SEQ ID NO: 453030 - DNA, 19 bp, Mus musculus
  siRNA target sequence for 2010005A06Rik (NM_029357.2,1200-1218).
gaccgagaggatttaagca

SEQ ID NO: 453031 - DNA, 19 bp, Mus musculus
  siRNA target sequence for 2010005A06Rik (NM_029357.2,1270-1288).
cccgtgcccaggtagttgt

SEQ ID NO: 453032 - DNA, 19 bp, Mus musculus
  siRNA target sequence for 2010005A06Rik (NM_029357.2,1342-1360).
ggctggtgactcatcaaga

SEQ ID NO: 453033 - DNA, 19 bp, Mus musculus
  siRNA target sequence for 2010005A06Rik (NM_029357.2,1359-1377).
gacggaatggctaacatat

SEQ ID NO: 453034 - DNA, 19 bp, Mus musculus
  siRNA target sequence for 2010005A06Rik (NM_029357.2,1361-1379).
cggaatggctaacatatca

SEQ ID NO: 453035 - DNA, 19 bp, Mus musculus
  siRNA target sequence for 2010005A06Rik (NM_029357.2,1363-1381).
gaatggctaacatatcaga

SEQ ID NO: 453036 - DNA, 19 bp, Mus musculus
  siRNA target sequence for 2010005A06Rik (NM_029357.2,1549-1567).
cccctctcgactatgagaa

SEQ ID NO: 453037 - DNA, 19 bp, Mus musculus
  siRNA target sequence for 2010005A06Rik (NM_029357.2,1552-1570).
ctctcgactatgagaaagt

SEQ ID NO: 453038 - DNA, 19 bp, Mus musculus
  siRNA target sequence for 2010005A06Rik (NM_029357.2,1774-1792).
ctaacgcagagctagtata

SEQ ID NO: 453039 - DNA, 19 bp, Mus musculus
  siRNA target sequence for 2010005A06Rik (NM_029357.2,1815-1833).
gcccaagggctcttcacta

SEQ ID NO: 453040 - DNA, 19 bp, Mus musculus
  siRNA target sequence for 2010005A06Rik (NM_029357.2,1816-1834).
cccaagggctcttcactat

SEQ ID NO: 453041 - DNA, 19 bp, Mus musculus
  siRNA target sequence for 2010005A06Rik (NM_029357.2,1818-1836).
caagggctcttcactatct

SEQ ID NO: 453042 - DNA, 19 bp, Mus musculus
  siRNA target sequence for 2010005A06Rik (NM_029357.2,1970-1988).
gctcgactgtaatgacaat

SEQ ID NO: 453043 - DNA, 19 bp, Mus musculus
  siRNA target sequence for 2010005A06Rik (NM_029357.2,2057-2075).
gggtatggtgactgtcatt

SEQ ID NO: 453044 - DNA, 19 bp, Mus musculus
  siRNA target sequence for 2010005A06Rik (NM_029357.2,2059-2077).
gtatggtgactgtcattga

SEQ ID NO: 453045 - DNA, 19 bp, Mus musculus
  siRNA target sequence for 2010005A06Rik (NM_029357.2,2123-2141).
ggacaatggtgactttgtt

SEQ ID NO: 453046 - DNA, 19 bp, Mus musculus
  siRNA target sequence for 2010005A06Rik (NM_029357.2,2124-2142).
gacaatggtgactttgtta

SEQ ID NO: 453047 - DNA, 19 bp, Mus musculus
  siRNA target sequence for 2010005A06Rik (NM_029357.2,2203-2221).
cctacaccttccaactgaa

SEQ ID NO: 453048 - DNA, 19 bp, Mus musculus
  siRNA target sequence for 2010005A06Rik (NM_029357.2,2242-2260).
cacctcgttcggcttatgt

SEQ ID NO: 453049 - DNA, 19 bp, Mus musculus
  siRNA target sequence for 2010005A06Rik (NM_029357.2,2292-2310).
gacaatgcaccctttatca

SEQ ID NO: 453050 - DNA, 19 bp, Mus musculus
  siRNA target sequence for 2010005A06Rik (NM_029357.2,2393-2411).
cattgactctggtatcaat

SEQ ID NO: 453051 - DNA, 19 bp, Mus musculus
  siRNA target sequence for 2010005A06Rik (NM_029357.2,2451-2469).
gggctcttccagattggat

SEQ ID NO: 453052 - DNA, 19 bp, Mus musculus
  siRNA target sequence for 2010005A06Rik (NM_029357.2,2456-2474).
cttccagattggatcacat

SEQ ID NO: 453053 - DNA, 19 bp, Mus musculus
  siRNA target sequence for 2010005A06Rik (NM_029357.2,2654-2672).
ggacacgcccctggatatt

SEQ ID NO: 453054 - DNA, 19 bp, Mus musculus
  siRNA target sequence for 2010005A06Rik (NM_029357.2,2680-2698).
ctggggatccggaatacga

SEQ ID NO: 453055 - DNA, 19 bp, Mus musculus
  siRNA target sequence for 2010005A06Rik (NM_029357.2,2705-2723).
caagcagcgtggcaacatt

SEQ ID NO: 453056 - DNA, 19 bp, Mus musculus
  siRNA target sequence for 2010005A06Rik (NM_029357.2,2711-2729).
gcgtggcaacattctcttt

SEQ ID NO: 453057 - DNA, 19 bp, Mus musculus
  siRNA target sequence for 2010005A06Rik (NM_029357.2,2750-2768).
ggccgtcgccttactcata

SEQ ID NO: 453058 - DNA, 19 bp, Mus musculus
  siRNA target sequence for 2010005A06Rik (NM_029357.2,2827-2845).
ctggtaagaaggagactaa

SEQ ID NO: 453059 - DNA, 19 bp, Mus musculus
  siRNA target sequence for 2010005A06Rik (NM_029357.2,2973-2991).
ctcaagttcaacctaatga

SEQ ID NO: 453060 - DNA, 19 bp, Mus musculus
  siRNA target sequence for 2010005A06Rik (NM_029357.2,3152-3170).
cctgccgcctgcaaacaca

SEQ ID NO: 453061 - DNA, 19 bp, Mus musculus
  siRNA target sequence for 2010013E08Rik (NM_175152.2,280-298).
ccacggtgttcgcttttca

SEQ ID NO: 453062 - DNA, 19 bp, Mus musculus
  siRNA target sequence for 2010013E08Rik (NM_175152.2,283-301).
cggtgttcgcttttcagaa

SEQ ID NO: 453063 - DNA, 19 bp, Mus musculus
  siRNA target sequence for 2010013E08Rik (NM_175152.2,522-540).
gccctttcggacttggata

SEQ ID NO: 453064 - DNA, 19 bp, Mus musculus
  siRNA target sequence for 2010013E08Rik (NM_175152.2,533-551).
cttggataccctcaaaaaa

SEQ ID NO: 453065 - DNA, 19 bp, Mus musculus
  siRNA target sequence for 2210402G22Rik (NM_144516.1,222-240).
ccgagtccacggtatgcat

SEQ ID NO: 453066 - DNA, 19 bp, Mus musculus
  siRNA target sequence for 2210402G22Rik (NM_144516.1,232-250).
ggtatgcatcccaaagaga

SEQ ID NO: 453067 - DNA, 19 bp, Mus musculus
  siRNA target sequence for 2210402G22Rik (NM_144516.1,272-290).
ctgtgaaagatggtcttat

SEQ ID NO: 453068 - DNA, 19 bp, Mus musculus
  siRNA target sequence for 2210402G22Rik (NM_144516.1,284-302).
gtcttattgtcgaaactct

SEQ ID NO: 453069 - DNA, 19 bp, Mus musculus
  siRNA target sequence for 2210402G22Rik (NM_144516.1,309-327).
gggctgcaaaggttcaaaa

SEQ ID NO: 453070 - DNA, 19 bp, Mus musculus
  siRNA target sequence for 2210402G22Rik (NM_144516.1,332-350).
gtattgaacaggaaggata

SEQ ID NO: 453071 - DNA, 19 bp, Mus musculus
  siRNA target sequence for 2210402G22Rik (NM_144516.1,337-355).
gaacaggaaggatattggt

SEQ ID NO: 453072 - DNA, 19 bp, Mus musculus
  siRNA target sequence for 2210402G22Rik (NM_144516.1,354-372).
gttaccaggagatgagatt

SEQ ID NO: 453073 - DNA, 19 bp, Mus musculus
  siRNA target sequence for 2210402G22Rik (NM_144516.1,385-403).
gaaactcatgactggtatt

SEQ ID NO: 453074 - DNA, 19 bp, Mus musculus
  siRNA target sequence for 2210402G22Rik (NM_144516.1,389-407).
ctcatgactggtattgttt

SEQ ID NO: 453075 - DNA, 19 bp, Mus musculus
  siRNA target sequence for 2210402G22Rik (NM_144516.1,420-438).
gcctggagaggtgttgata

SEQ ID NO: 453076 - DNA, 19 bp, Mus musculus
  siRNA target sequence for 2210402G22Rik (NM_144516.1,421-439).
cctggagaggtgttgatat

SEQ ID NO: 453077 - DNA, 19 bp, Mus musculus
  siRNA target sequence for 2210402G22Rik (NM_144516.1,609-627).
gcgggctatagaccttaat

SEQ ID NO: 453078 - DNA, 19 bp, Mus musculus
  siRNA target sequence for 2210402G22Rik (NM_144516.1,614-632).
ctatagaccttaataagaa

SEQ ID NO: 453079 - DNA, 19 bp, Mus musculus
  siRNA target sequence for 2210402G22Rik (NM_144516.1,728-746).
ggagttacgaggagttcaa

SEQ ID NO: 453080 - DNA, 19 bp, Mus musculus
  siRNA target sequence for 2210402G22Rik (NM_144516.1,810-828).
ggacattgcacggatgtta

SEQ ID NO: 453081 - DNA, 19 bp, Mus musculus
  siRNA target sequence for 2210402G22Rik (NM_144516.1,811-829).
gacattgcacggatgttat

SEQ ID NO: 453082 - DNA, 19 bp, Mus musculus
  siRNA target sequence for 2210402G22Rik (NM_144516.1,813-831).
cattgcacggatgttatat

SEQ ID NO: 453083 - DNA, 19 bp, Mus musculus
  siRNA target sequence for 2210402G22Rik (NM_144516.1,820-838).
cggatgttatataaagaca

SEQ ID NO: 453084 - DNA, 19 bp, Mus musculus
  siRNA target sequence for 2210402G22Rik (NM_144516.1,869-887).
gcaagaactgcttctatct

SEQ ID NO: 453085 - DNA, 19 bp, Mus musculus
  siRNA target sequence for 2210402G22Rik (NM_144516.1,912-930).
gttctgctacccttgcata

SEQ ID NO: 453086 - DNA, 19 bp, Mus musculus
  siRNA target sequence for 2210402G22Rik (NM_144516.1,917-935).
gctacccttgcatacctaa

SEQ ID NO: 453087 - DNA, 19 bp, Mus musculus
  siRNA target sequence for 2210402G22Rik (NM_144516.1,923-941).
cttgcatacctaatcatga

SEQ ID NO: 453088 - DNA, 19 bp, Mus musculus
  siRNA target sequence for 2210402G22Rik (NM_144516.1,1074-1092).
ggatatcacggtcaatgtt

SEQ ID NO: 453089 - DNA, 19 bp, Mus musculus
  siRNA target sequence for 2210402G22Rik (NM_144516.1,1174-1192).
ggaaggttctggaagtcta

SEQ ID NO: 453090 - DNA, 19 bp, Mus musculus
  siRNA target sequence for 2210402G22Rik (NM_144516.1,1216-1234).
gaggcagaatccagtatct

SEQ ID NO: 453091 - DNA, 19 bp, Mus musculus
  siRNA target sequence for 2210402G22Rik (NM_144516.1,1406-1424).
caacccagaccaagaagtt

SEQ ID NO: 453092 - DNA, 19 bp, Mus musculus
  siRNA target sequence for 2210402G22Rik (NM_144516.1,1490-1508).
gcatgtgccacgacaagta

SEQ ID NO: 453093 - DNA, 19 bp, Mus musculus
  siRNA target sequence for 2210402G22Rik (NM_144516.1,1498-1516).
cacgacaagtacaccaaaa

SEQ ID NO: 453094 - DNA, 19 bp, Mus musculus
  siRNA target sequence for 2210402G22Rik (NM_144516.1,1500-1518).
cgacaagtacaccaaaatt

SEQ ID NO: 453095 - DNA, 19 bp, Mus musculus
  siRNA target sequence for 2210402G22Rik (NM_144516.1,1506-1524).
gtacaccaaaatttttaat

SEQ ID NO: 453096 - DNA, 19 bp, Mus musculus
  siRNA target sequence for 2210402G22Rik (NM_144516.1,1579-1597).
cgtgaagcgctggaaaagt

SEQ ID NO: 453097 - DNA, 19 bp, Mus musculus
  siRNA target sequence for 2210402G22Rik (NM_144516.1,1580-1598).
gtgaagcgctggaaaagtt

SEQ ID NO: 453098 - DNA, 19 bp, Mus musculus
  siRNA target sequence for 2310005P05Rik (NM_026189.2,499-517).
ccctcggacctgtcacata

SEQ ID NO: 453099 - DNA, 19 bp, Mus musculus
  siRNA target sequence for 2310005P05Rik (NM_026189.2,561-579).
gaatcaggagcggctaaat

SEQ ID NO: 453100 - DNA, 19 bp, Mus musculus
  siRNA target sequence for 2310005P05Rik (NM_026189.2,565-583).
caggagcggctaaatatca

SEQ ID NO: 453101 - DNA, 19 bp, Mus musculus
  siRNA target sequence for 2310005P05Rik (NM_026189.2,568-586).
gagcggctaaatatcaaca

SEQ ID NO: 453102 - DNA, 19 bp, Mus musculus
  siRNA target sequence for 2310005P05Rik (NM_026189.2,638-656).
cccgaagcatcgtggaata

SEQ ID NO: 453103 - DNA, 19 bp, Mus musculus
  siRNA target sequence for 2310005P05Rik (NM_026189.2,648-666).
cgtggaataccgagaatat

SEQ ID NO: 453104 - DNA, 19 bp, Mus musculus
  siRNA target sequence for 2310005P05Rik (NM_026189.2,649-667).
gtggaataccgagaatata

SEQ ID NO: 453105 - DNA, 19 bp, Mus musculus
  siRNA target sequence for 2310005P05Rik (NM_026189.2,730-748).
gaacaggtcaagtttgaga

SEQ ID NO: 453106 - DNA, 19 bp, Mus musculus
  siRNA target sequence for 2310005P05Rik (NM_026189.2,852-870).
cctcactcctcgagtcaat

SEQ ID NO: 453107 - DNA, 19 bp, Mus musculus
  siRNA target sequence for 2310005P05Rik (NM_026189.2,853-871).
ctcactcctcgagtcaata

SEQ ID NO: 453108 - DNA, 19 bp, Mus musculus
  siRNA target sequence for 2310005P05Rik (NM_026189.2,857-875).
ctcctcgagtcaatatcaa

SEQ ID NO: 453109 - DNA, 19 bp, Mus musculus
  siRNA target sequence for 2310005P05Rik (NM_026189.2,954-972).
ggaacacggtccttttcga

SEQ ID NO: 453110 - DNA, 19 bp, Mus musculus
  siRNA target sequence for 2310005P05Rik (NM_026189.2,955-973).
gaacacggtccttttcgaa

SEQ ID NO: 453111 - DNA, 19 bp, Mus musculus
  siRNA target sequence for 2310005P05Rik (NM_026189.2,990-1008).
gagaatggatggaatcaat

SEQ ID NO: 453112 - DNA, 19 bp, Mus musculus
  siRNA target sequence for 2310005P05Rik (NM_026189.2,1010-1028).
cagccttcctggacagaat

SEQ ID NO: 453113 - DNA, 19 bp, Mus musculus
  siRNA target sequence for 2310005P05Rik (NM_026189.2,1076-1094).
ccaatgggggtcttacctt

SEQ ID NO: 453114 - DNA, 19 bp, Mus musculus
  siRNA target sequence for 2310005P05Rik (NM_026189.2,1226-1244).
ggcgacctgtgtttaggtt

SEQ ID NO: 453115 - DNA, 19 bp, Mus musculus
  siRNA target sequence for 2310005P05Rik (NM_026189.2,1313-1331).
gcatgacgcttctggaaaa

SEQ ID NO: 453116 - DNA, 19 bp, Mus musculus
  siRNA target sequence for 2310005P05Rik (NM_026189.2,1577-1595).
ccagcaacggtcatgctaa

SEQ ID NO: 453117 - DNA, 19 bp, Mus musculus
  siRNA target sequence for 2310005P05Rik (NM_026189.2,1686-1704).
cccaggagctgagaattca

SEQ ID NO: 453118 - DNA, 19 bp, Mus musculus
  siRNA target sequence for 2310005P05Rik (NM_026189.2,1687-1705).
ccaggagctgagaattcaa

SEQ ID NO: 453119 - DNA, 19 bp, Mus musculus
  siRNA target sequence for 2310005P05Rik (NM_026189.2,1718-1736).
gtgatggccaccgattatt

SEQ ID NO: 453120 - DNA, 19 bp, Mus musculus
  siRNA target sequence for 2310005P05Rik (NM_026189.2,1720-1738).
gatggccaccgattattga

SEQ ID NO: 453121 - DNA, 19 bp, Mus musculus
  siRNA target sequence for 2310005P05Rik (NM_026189.2,1723-1741).
ggccaccgattattgaact

SEQ ID NO: 453122 - DNA, 19 bp, Mus musculus
  siRNA target sequence for 2310005P05Rik (NM_026189.2,1725-1743).
ccaccgattattgaacttt

SEQ ID NO: 453123 - DNA, 19 bp, Mus musculus
  siRNA target sequence for 2310005P05Rik (NM_026189.2,1810-1828).
gggccagatagcaatgact

SEQ ID NO: 453124 - DNA, 19 bp, Mus musculus
  siRNA target sequence for 2310005P05Rik (NM_026189.2,1811-1829).
ggccagatagcaatgacta

SEQ ID NO: 453125 - DNA, 19 bp, Mus musculus
  siRNA target sequence for 2310005P05Rik (NM_026189.2,1816-1834).
gatagcaatgactacgata

SEQ ID NO: 453126 - DNA, 19 bp, Mus musculus
  siRNA target sequence for 2310005P05Rik (NM_026189.2,1821-1839).
caatgactacgatatccta

SEQ ID NO: 453127 - DNA, 19 bp, Mus musculus
  siRNA target sequence for 2310005P05Rik (NM_026189.2,1864-1882).
gtcccggctcacactttca

SEQ ID NO: 453128 - DNA, 19 bp, Mus musculus
  siRNA target sequence for 2310005P05Rik (NM_026189.2,1913-1931).
ccaagtctgtggacaacat

SEQ ID NO: 453129 - DNA, 19 bp, Mus musculus
  siRNA target sequence for 2310005P05Rik (NM_026189.2,1934-1952).
ggatcagcaaaagcttaaa

SEQ ID NO: 453130 - DNA, 19 bp, Mus musculus
  siRNA target sequence for 2310005P05Rik (NM_026189.2,2002-2020).
ccttggattccagataact

SEQ ID NO: 453131 - DNA, 19 bp, Mus musculus
  siRNA target sequence for 2310005P05Rik (NM_026189.2,2028-2046).
gggtggagtcgcttctgaa

SEQ ID NO: 453132 - DNA, 19 bp, Mus musculus
  siRNA target sequence for 2310005P05Rik (NM_026189.2,2032-2050).
ggagtcgcttctgaacatt

SEQ ID NO: 453133 - DNA, 19 bp, Mus musculus
  siRNA target sequence for 2310008M14Rik (NM_133984.1,165-183).
gaagctctggggacaaata

SEQ ID NO: 453134 - DNA, 19 bp, Mus musculus
  siRNA target sequence for 2310008M14Rik (NM_133984.1,284-302).
gtgccacagggatggttaa

SEQ ID NO: 453135 - DNA, 19 bp, Mus musculus
  siRNA target sequence for 2310008M14Rik (NM_133984.1,347-365).
gggaatccagtgagtacat

SEQ ID NO: 453136 - DNA, 19 bp, Mus musculus
  siRNA target sequence for 2310008M14Rik (NM_133984.1,378-396).
cctcggagccaaaacattt

SEQ ID NO: 453137 - DNA, 19 bp, Mus musculus
  siRNA target sequence for 2310008M14Rik (NM_133984.1,382-400).
ggagccaaaacatttcaga

SEQ ID NO: 453138 - DNA, 19 bp, Mus musculus
  siRNA target sequence for 2310008M14Rik (NM_133984.1,426-444).
gccactgacccctcaacaa

SEQ ID NO: 453139 - DNA, 19 bp, Mus musculus
  siRNA target sequence for 2310008M14Rik (NM_133984.1,427-445).
ccactgacccctcaacaat

SEQ ID NO: 453140 - DNA, 19 bp, Mus musculus
  siRNA target sequence for 2310008M14Rik (NM_133984.1,428-446).
cactgacccctcaacaatt

SEQ ID NO: 453141 - DNA, 19 bp, Mus musculus
  siRNA target sequence for 2310008M14Rik (NM_133984.1,437-455).
ctcaacaattggaatgcat

SEQ ID NO: 453142 - DNA, 19 bp, Mus musculus
  siRNA target sequence for 2310008M14Rik (NM_133984.1,485-503).
ggatgccggtgcagtatat

SEQ ID NO: 453143 - DNA, 19 bp, Mus musculus
  siRNA target sequence for 2310008M14Rik (NM_133984.1,708-726).
ccccaagagtcgagttgtt

SEQ ID NO: 453144 - DNA, 19 bp, Mus musculus
  siRNA target sequence for 2310008M14Rik (NM_133984.1,738-756).
ggaggaagctgctgttagt

SEQ ID NO: 453145 - DNA, 19 bp, Mus musculus
  siRNA target sequence for 2310042M24Rik (NM_025868.1,612-630).
cgttagcacacggtacaaa

SEQ ID NO: 453146 - DNA, 19 bp, Mus musculus
  siRNA target sequence for 2310042M24Rik (NM_025868.1,760-778).
gtgattcgagaattcaact

SEQ ID NO: 453147 - DNA, 19 bp, Mus musculus
  siRNA target sequence for 2310042M24Rik (NM_025868.1,767-785).
gagaattcaacttgaatga

SEQ ID NO: 453148 - DNA, 19 bp, Mus musculus
  siRNA target sequence for 2310042M24Rik (NM_025868.1,777-795).
cttgaatgagctataccaa

SEQ ID NO: 453149 - DNA, 19 bp, Mus musculus
  siRNA target sequence for 2310042M24Rik (NM_025868.1,865-883).
gtgccagatggggaaaaca

SEQ ID NO: 453150 - DNA, 19 bp, Mus musculus
  siRNA target sequence for 2310065A22Rik (NM_144873.1,320-338).
gggcaagcagttggaaaat

SEQ ID NO: 453151 - DNA, 19 bp, Mus musculus
  siRNA target sequence for 2310065A22Rik (NM_144873.1,326-344).
gcagttggaaaatggatat

SEQ ID NO: 453152 - DNA, 19 bp, Mus musculus
  siRNA target sequence for 2310065A22Rik (NM_144873.1,329-347).
gttggaaaatggatatact

SEQ ID NO: 453153 - DNA, 19 bp, Mus musculus
  siRNA target sequence for 2310065A22Rik (NM_144873.1,356-374).
ctacgacgttggactgaat

SEQ ID NO: 453154 - DNA, 19 bp, Mus musculus
  siRNA target sequence for 2310065A22Rik (NM_144873.1,359-377).
cgacgttggactgaatgat

SEQ ID NO: 453155 - DNA, 19 bp, Mus musculus
  siRNA target sequence for 2310065A22Rik (NM_144873.1,360-378).
gacgttggactgaatgata

SEQ ID NO: 453156 - DNA, 19 bp, Mus musculus
  siRNA target sequence for 2310065A22Rik (NM_144873.1,362-380).
cgttggactgaatgatata

SEQ ID NO: 453157 - DNA, 19 bp, Mus musculus
  siRNA target sequence for 2310065A22Rik (NM_144873.1,363-381).
gttggactgaatgatataa

SEQ ID NO: 453158 - DNA, 19 bp, Mus musculus
  siRNA target sequence for 2310065A22Rik (NM_144873.1,419-437).
cacatctaagcagaatgat

SEQ ID NO: 453159 - DNA, 19 bp, Mus musculus
  siRNA target sequence for 2310065A22Rik (NM_144873.1,431-449).
gaatgatgctcaggttaaa

SEQ ID NO: 453160 - DNA, 19 bp, Mus musculus
  siRNA target sequence for 2310065A22Rik (NM_144873.1,457-475).
ctcataatccgcctaaagt

SEQ ID NO: 453161 - DNA, 19 bp, Mus musculus
  siRNA target sequence for 2310065A22Rik (NM_144873.1,459-477).
cataatccgcctaaagtaa

SEQ ID NO: 453162 - DNA, 19 bp, Mus musculus
  siRNA target sequence for 2310065A22Rik (NM_144873.1,503-521).
cagtcagccatctacatca

SEQ ID NO: 453163 - DNA, 19 bp, Mus musculus
  siRNA target sequence for 2310065A22Rik (NM_144873.1,520-538).
cagctcgcacttgtcttat

SEQ ID NO: 453164 - DNA, 19 bp, Mus musculus
  siRNA target sequence for 2310065A22Rik (NM_144873.1,523-541).
ctcgcacttgtcttattga

SEQ ID NO: 453165 - DNA, 19 bp, Mus musculus
  siRNA target sequence for 2310065A22Rik (NM_144873.1,596-614).
ccttggtgcttggtttgaa

SEQ ID NO: 453166 - DNA, 19 bp, Mus musculus
  siRNA target sequence for 2310065A22Rik (NM_144873.1,607-625).
ggtttgaagcacatataca

SEQ ID NO: 453167 - DNA, 19 bp, Mus musculus
  siRNA target sequence for 2310065A22Rik (NM_144873.1,608-626).
gtttgaagcacatatacat

SEQ ID NO: 453168 - DNA, 19 bp, Mus musculus
  siRNA target sequence for 2310065A22Rik (NM_144873.1,618-636).
catatacatagtgttacta

SEQ ID NO: 453169 - DNA, 19 bp, Mus musculus
  siRNA target sequence for 2310065A22Rik (NM_144873.1,677-695).
gaatggcagttcttataaa

SEQ ID NO: 453170 - DNA, 19 bp, Mus musculus
  siRNA target sequence for 2310065A22Rik (NM_144873.1,698-716).
gactaatggaaatgtaaat

SEQ ID NO: 453171 - DNA, 19 bp, Mus musculus
  siRNA target sequence for 2310065A22Rik (NM_144873.1,724-742).
ccaaagagaacacaaataa

SEQ ID NO: 453172 - DNA, 19 bp, Mus musculus
  siRNA target sequence for 2310065A22Rik (NM_144873.1,736-754).
caaataaattggacaatgt

SEQ ID NO: 453173 - DNA, 19 bp, Mus musculus
  siRNA target sequence for 2310065A22Rik (NM_144873.1,753-771).
gtaccctctacgtctaatt

SEQ ID NO: 453174 - DNA, 19 bp, Mus musculus
  siRNA target sequence for 2310065A22Rik (NM_144873.1,786-804).
gctgatgaagacgttattt

SEQ ID NO: 453175 - DNA, 19 bp, Mus musculus
  siRNA target sequence for 2310065A22Rik (NM_144873.1,807-825).
catatcgagtatgatgaat

SEQ ID NO: 453176 - DNA, 19 bp, Mus musculus
  siRNA target sequence for 2310065A22Rik (NM_144873.1,829-847).
cagaaagtggtatactaga

SEQ ID NO: 453177 - DNA, 19 bp, Mus musculus
  siRNA target sequence for 2310065A22Rik (NM_144873.1,835-853).
gtggtatactagagatgaa

SEQ ID NO: 453178 - DNA, 19 bp, Mus musculus
  siRNA target sequence for 2310065A22Rik (NM_144873.1,870-888).
ccacgagcaaggaccattt

SEQ ID NO: 453179 - DNA, 19 bp, Mus musculus
  siRNA target sequence for 2310065A22Rik (NM_144873.1,873-891).
cgagcaaggaccattttaa

SEQ ID NO: 453180 - DNA, 19 bp, Mus musculus
  siRNA target sequence for 2310065A22Rik (NM_144873.1,880-898).
ggaccattttaaaatggaa

SEQ ID NO: 453181 - DNA, 19 bp, Mus musculus
  siRNA target sequence for 2310065A22Rik (NM_144873.1,913-931).
gtgatgtggtaatggttaa

SEQ ID NO: 453182 - DNA, 19 bp, Mus musculus
  siRNA target sequence for 2310065A22Rik (NM_144873.1,920-938).
ggtaatggttaattacaat

SEQ ID NO: 453183 - DNA, 19 bp, Mus musculus
  siRNA target sequence for 2310065A22Rik (NM_144873.1,926-944).
ggttaattacaatgtagaa

SEQ ID NO: 453184 - DNA, 19 bp, Mus musculus
  siRNA target sequence for 2310065A22Rik (NM_144873.1,952-970).
gcaaaagaggattttggta

SEQ ID NO: 453185 - DNA, 19 bp, Mus musculus
  siRNA target sequence for 2310065A22Rik (NM_144873.1,1045-1063).
gctctgaaggcacattaaa

SEQ ID NO: 453186 - DNA, 19 bp, Mus musculus
  siRNA target sequence for 2310065A22Rik (NM_144873.1,1081-1099).
ctgtagatgaaatcttcaa

SEQ ID NO: 453187 - DNA, 19 bp, Mus musculus
  siRNA target sequence for 2310065A22Rik (NM_144873.1,1134-1152).
gcagatggaaagtttttaa

SEQ ID NO: 453188 - DNA, 19 bp, Mus musculus
  siRNA target sequence for 2310065A22Rik (NM_144873.1,1137-1155).
gatggaaagtttttaagga

SEQ ID NO: 453189 - DNA, 19 bp, Mus musculus
  siRNA target sequence for 2310065A22Rik (NM_144873.1,1211-1229).
gtgttcgtgtcataagtgt

SEQ ID NO: 453190 - DNA, 19 bp, Mus musculus
  siRNA target sequence for 2310065A22Rik (NM_144873.1,1273-1291).
gcaatatggcctatcacat

SEQ ID NO: 453191 - DNA, 19 bp, Mus musculus
  siRNA target sequence for 2310065A22Rik (NM_144873.1,1320-1338).
gtcccggaagaggaatact

SEQ ID NO: 453192 - DNA, 19 bp, Mus musculus
  siRNA target sequence for 2310065A22Rik (NM_144873.1,1326-1344).
gaagaggaatactggtatt

SEQ ID NO: 453193 - DNA, 19 bp, Mus musculus
  siRNA target sequence for 2310065A22Rik (NM_144873.1,1340-1358).
gtattgtccttcctgtaaa

SEQ ID NO: 453194 - DNA, 19 bp, Mus musculus
  siRNA target sequence for 2310065A22Rik (NM_144873.1,1393-1411).
gactcaagctgagtaagaa

SEQ ID NO: 453195 - DNA, 19 bp, Mus musculus
  siRNA target sequence for 2310065A22Rik (NM_144873.1,1395-1413).
ctcaagctgagtaagaaga

SEQ ID NO: 453196 - DNA, 19 bp, Mus musculus
  siRNA target sequence for 2310065A22Rik (NM_144873.1,1474-1492).
gtgttggtcgtacaaaaga

SEQ ID NO: 453197 - DNA, 19 bp, Mus musculus
  siRNA target sequence for 2310065A22Rik (NM_144873.1,1476-1494).
gttggtcgtacaaaagaat

SEQ ID NO: 453198 - DNA, 19 bp, Mus musculus
  siRNA target sequence for 2310065A22Rik (NM_144873.1,1479-1497).
ggtcgtacaaaagaatgta

SEQ ID NO: 453199 - DNA, 19 bp, Mus musculus
  siRNA target sequence for 2310065A22Rik (NM_144873.1,1482-1500).
cgtacaaaagaatgtacta

SEQ ID NO: 453200 - DNA, 19 bp, Mus musculus
  siRNA target sequence for 2310065A22Rik (NM_144873.1,1495-1513).
gtactattgtcccttcaaa

SEQ ID NO: 453201 - DNA, 19 bp, Mus musculus
  siRNA target sequence for 2310065A22Rik (NM_144873.1,1498-1516).
ctattgtcccttcaaatca

SEQ ID NO: 453202 - DNA, 19 bp, Mus musculus
  siRNA target sequence for 2310065A22Rik (NM_144873.1,1505-1523).
cccttcaaatcattatgga

SEQ ID NO: 453203 - DNA, 19 bp, Mus musculus
  siRNA target sequence for 2310065A22Rik (NM_144873.1,1545-1563).
ggatcaacttggagattca

SEQ ID NO: 453204 - DNA, 19 bp, Mus musculus
  siRNA target sequence for 2310065A22Rik (NM_144873.1,1574-1592).
gagcgaagcaggtgttcat

SEQ ID NO: 453205 - DNA, 19 bp, Mus musculus
  siRNA target sequence for 2310065A22Rik (NM_144873.1,1625-1643).
caatgatggggcttattct

SEQ ID NO: 453206 - DNA, 19 bp, Mus musculus
  siRNA target sequence for 2310065A22Rik (NM_144873.1,1683-1701).
ggtgatgagttcacgtata

SEQ ID NO: 453207 - DNA, 19 bp, Mus musculus
  siRNA target sequence for 2310065A22Rik (NM_144873.1,1754-1772).
ggctgaccagacactaaca

SEQ ID NO: 453208 - DNA, 19 bp, Mus musculus
  siRNA target sequence for 2310065A22Rik (NM_144873.1,1755-1773).
gctgaccagacactaacaa

SEQ ID NO: 453209 - DNA, 19 bp, Mus musculus
  siRNA target sequence for 2310065A22Rik (NM_144873.1,1784-1802).
ggcattggccctaaactgt

SEQ ID NO: 453210 - DNA, 19 bp, Mus musculus
  siRNA target sequence for 2310065A22Rik (NM_144873.1,1803-1821).
gatgctccattggatgata

SEQ ID NO: 453211 - DNA, 19 bp, Mus musculus
  siRNA target sequence for 2310065A22Rik (NM_144873.1,1806-1824).
gctccattggatgataaaa

SEQ ID NO: 453212 - DNA, 19 bp, Mus musculus
  siRNA target sequence for 2310065A22Rik (NM_144873.1,1807-1825).
ctccattggatgataaaat

SEQ ID NO: 453213 - DNA, 19 bp, Mus musculus
  siRNA target sequence for 2310065A22Rik (NM_144873.1,1830-1848).
gcagagtctcggaattgga

SEQ ID NO: 453214 - DNA, 19 bp, Mus musculus
  siRNA target sequence for 2310065A22Rik (NM_144873.1,1865-1883).
cagagtgatacgcagtttt

SEQ ID NO: 453215 - DNA, 19 bp, Mus musculus
  siRNA target sequence for 2310065A22Rik (NM_144873.1,1867-1885).
gagtgatacgcagttttaa

SEQ ID NO: 453216 - DNA, 19 bp, Mus musculus
  siRNA target sequence for 2310065A22Rik (NM_144873.1,1901-1919).
caaatatgctccagaagaa

SEQ ID NO: 453217 - DNA, 19 bp, Mus musculus
  siRNA target sequence for 2310065A22Rik (NM_144873.1,1927-1945).
gatatgatggcatttataa

SEQ ID NO: 453218 - DNA, 19 bp, Mus musculus
  siRNA target sequence for 2310065A22Rik (NM_144873.1,1936-1954).
gcatttataaggtggtaaa

SEQ ID NO: 453219 - DNA, 19 bp, Mus musculus
  siRNA target sequence for 2310065A22Rik (NM_144873.1,1997-2015).
gcgttatcttttaagaaga

SEQ ID NO: 453220 - DNA, 19 bp, Mus musculus
  siRNA target sequence for 2310065A22Rik (NM_144873.1,2098-2116).
gttacccctcggaaaagga

SEQ ID NO: 453221 - DNA, 19 bp, Mus musculus
  siRNA target sequence for 2310065A22Rik (NM_144873.1,2208-2226).
gtgctgaaggcatcagatt

SEQ ID NO: 453222 - DNA, 19 bp, Mus musculus
  siRNA target sequence for 2310065A22Rik (NM_144873.1,2211-2229).
ctgaaggcatcagattcaa

SEQ ID NO: 453223 - DNA, 19 bp, Mus musculus
  siRNA target sequence for 2310065A22Rik (NM_144873.1,2213-2231).
gaaggcatcagattcaaca

SEQ ID NO: 453224 - DNA, 19 bp, Mus musculus
  siRNA target sequence for 2310065A22Rik (NM_144873.1,2334-2352).
gaaggaccgaattttctga

SEQ ID NO: 453225 - DNA, 19 bp, Mus musculus
  siRNA target sequence for 2310065A22Rik (NM_144873.1,2349-2367).
ctgaagaaattggaacaat

SEQ ID NO: 453226 - DNA, 19 bp, Mus musculus
  siRNA target sequence for 2310065A22Rik (NM_144873.1,2360-2378).
ggaacaatcttttatgtgt

SEQ ID NO: 453227 - DNA, 19 bp, Mus musculus
  siRNA target sequence for 2310065A22Rik (NM_144873.1,2383-2401).
gctgccaagaactagttta

SEQ ID NO: 453228 - DNA, 19 bp, Mus musculus
  siRNA target sequence for 2310065A22Rik (NM_144873.1,2386-2404).
gccaagaactagtttacca

SEQ ID NO: 453229 - DNA, 19 bp, Mus musculus
  siRNA target sequence for 2310065A22Rik (NM_144873.1,2432-2450).
cgtctgtaaggattgctta

SEQ ID NO: 453230 - DNA, 19 bp, Mus musculus
  siRNA target sequence for 2310065A22Rik (NM_144873.1,2446-2464).
gcttacagcgctcctttaa

SEQ ID NO: 453231 - DNA, 19 bp, Mus musculus
  siRNA target sequence for 2310065A22Rik (NM_144873.1,2496-2514).
catgatctcgggcagaatt

SEQ ID NO: 453232 - DNA, 19 bp, Mus musculus
  siRNA target sequence for 2410075D05Rik (NM_028604.1,47-65).
ccttgaatcgctatctctt

SEQ ID NO: 453233 - DNA, 19 bp, Mus musculus
  siRNA target sequence for 2410075D05Rik (NM_028604.1,90-108).
gttccgcttaccggaaata

SEQ ID NO: 453234 - DNA, 19 bp, Mus musculus
  siRNA target sequence for 2410075D05Rik (NM_028604.1,94-112).
cgcttaccggaaataaagt

SEQ ID NO: 453235 - DNA, 19 bp, Mus musculus
  siRNA target sequence for 2410075D05Rik (NM_028604.1,96-114).
cttaccggaaataaagtct

SEQ ID NO: 453236 - DNA, 19 bp, Mus musculus
  siRNA target sequence for 2410075D05Rik (NM_028604.1,101-119).
cggaaataaagtctttact

SEQ ID NO: 453237 - DNA, 19 bp, Mus musculus
  siRNA target sequence for 2410075D05Rik (NM_028604.1,130-148).
ggagggcagttcactaaca

SEQ ID NO: 453238 - DNA, 19 bp, Mus musculus
  siRNA target sequence for 2410075D05Rik (NM_028604.1,173-191).
cattttggattcttaacat

SEQ ID NO: 453239 - DNA, 19 bp, Mus musculus
  siRNA target sequence for 2410075D05Rik (NM_028604.1,230-248).
ctgtgtgtgccaagtctat

SEQ ID NO: 453240 - DNA, 19 bp, Mus musculus
  siRNA target sequence for 2410075D05Rik (NM_028604.1,277-295).
cccgaggagctgtatactt

SEQ ID NO: 453241 - DNA, 19 bp, Mus musculus
  siRNA target sequence for 2410075D05Rik (NM_028604.1,279-297).
cgaggagctgtatacttct

SEQ ID NO: 453242 - DNA, 19 bp, Mus musculus
  siRNA target sequence for 2410075D05Rik (NM_028604.1,343-361).
gattcgacatataaaataa

SEQ ID NO: 453243 - DNA, 19 bp, Mus musculus
  siRNA target sequence for 2410075D05Rik (NM_028604.1,409-427).
cgaattgatgcacttgaat

SEQ ID NO: 453244 - DNA, 19 bp, Mus musculus
  siRNA target sequence for 2410075D05Rik (NM_028604.1,410-428).
gaattgatgcacttgaatt

SEQ ID NO: 453245 - DNA, 19 bp, Mus musculus
  siRNA target sequence for 2410075D05Rik (NM_028604.1,439-457).
caaggaaaagtgaacttaa

SEQ ID NO: 453246 - DNA, 19 bp, Mus musculus
  siRNA target sequence for 2410075D05Rik (NM_028604.1,442-460).
ggaaaagtgaacttaaaga

SEQ ID NO: 453247 - DNA, 19 bp, Mus musculus
  siRNA target sequence for 2410075D05Rik (NM_028604.1,496-514).
ggtttggacccaaactcta

SEQ ID NO: 453248 - DNA, 19 bp, Mus musculus
  siRNA target sequence for 2410075D05Rik (NM_028604.1,497-515).
gtttggacccaaactctat

SEQ ID NO: 453249 - DNA, 19 bp, Mus musculus
  siRNA target sequence for 2410075D05Rik (NM_028604.1,522-540).
ggatccacataatatttat

SEQ ID NO: 453250 - DNA, 19 bp, Mus musculus
  siRNA target sequence for 2410075D05Rik (NM_028604.1,523-541).
gatccacataatatttatt

SEQ ID NO: 453251 - DNA, 19 bp, Mus musculus
  siRNA target sequence for 2410075D05Rik (NM_028604.1,565-583).
caaagagagctaattgagt

SEQ ID NO: 453252 - DNA, 19 bp, Mus musculus
  siRNA target sequence for 2410075D05Rik (NM_028604.1,631-649).
gctggtttatcattcatca

SEQ ID NO: 453253 - DNA, 19 bp, Mus musculus
  siRNA target sequence for 2410075D05Rik (NM_028604.1,653-671).
ccaaccatgcaaaagtgaa

SEQ ID NO: 453254 - DNA, 19 bp, Mus musculus
  siRNA target sequence for 2410075D05Rik (NM_028604.1,704-722).
gaacaggtggcctccttat

SEQ ID NO: 453255 - DNA, 19 bp, Mus musculus
  siRNA target sequence for 2410075D05Rik (NM_028604.1,709-727).
ggtggcctccttatagcat

SEQ ID NO: 453256 - DNA, 19 bp, Mus musculus
  siRNA target sequence for 2410075D05Rik (NM_028604.1,733-751).
cactttggtgcatatgtgt

SEQ ID NO: 453257 - DNA, 19 bp, Mus musculus
  siRNA target sequence for 2410075D05Rik (NM_028604.1,752-770).
gtgggacagacatagacta

SEQ ID NO: 453258 - DNA, 19 bp, Mus musculus
  siRNA target sequence for 2410075D05Rik (NM_028604.1,843-861).
ggcaaatcttcgtcagtat

SEQ ID NO: 453259 - DNA, 19 bp, Mus musculus
  siRNA target sequence for 2410075D05Rik (NM_028604.1,958-976).
ccatatggtatcagagaat

SEQ ID NO: 453260 - DNA, 19 bp, Mus musculus
  siRNA target sequence for 2410075D05Rik (NM_028604.1,1063-1081).
cacctgagtgacatgtttt

SEQ ID NO: 453261 - DNA, 19 bp, Mus musculus
  siRNA target sequence for 2410075D05Rik (NM_028604.1,1065-1083).
cctgagtgacatgtttttt

SEQ ID NO: 453262 - DNA, 19 bp, Mus musculus
  siRNA target sequence for 2410075D05Rik (NM_028604.1,1100-1118).
cagctgagacccttgtact

SEQ ID NO: 453263 - DNA, 19 bp, Mus musculus
  siRNA target sequence for 2410075D05Rik (NM_028604.1,1119-1137).
gggtggaagactagtctat

SEQ ID NO: 453264 - DNA, 19 bp, Mus musculus
  siRNA target sequence for 2410075D05Rik (NM_028604.1,1120-1138).
ggtggaagactagtctatt

SEQ ID NO: 453265 - DNA, 19 bp, Mus musculus
  siRNA target sequence for 2410075D05Rik (NM_028604.1,1134-1152).
ctattggctaccagtatat

SEQ ID NO: 453266 - DNA, 19 bp, Mus musculus
  siRNA target sequence for 2410075D05Rik (NM_028604.1,1193-1211).
gcctgagactcattagcaa

SEQ ID NO: 453267 - DNA, 19 bp, Mus musculus
  siRNA target sequence for 2410075D05Rik (NM_028604.1,1324-1342).
ccgtaccaaggacataatt

SEQ ID NO: 453268 - DNA, 19 bp, Mus musculus
  siRNA target sequence for 2410075D05Rik (NM_028604.1,1326-1344).
gtaccaaggacataattct

SEQ ID NO: 453269 - DNA, 19 bp, Mus musculus
  siRNA target sequence for 2410075D05Rik (NM_028604.1,1347-1365).
ccgtgagaaatattttagt

SEQ ID NO: 453270 - DNA, 19 bp, Mus musculus
  siRNA target sequence for 2410075D05Rik (NM_028604.1,1364-1382).
gtggtgtaacaaaaagaat

SEQ ID NO: 453271 - DNA, 19 bp, Mus musculus
  siRNA target sequence for 2410141M05Rik (NM_030064.1,276-294).
gatccgcctccgactctta

SEQ ID NO: 453272 - DNA, 19 bp, Mus musculus
  siRNA target sequence for 2410141M05Rik (NM_030064.1,281-299).
gcctccgactcttaaacca

SEQ ID NO: 453273 - DNA, 19 bp, Mus musculus
  siRNA target sequence for 2410141M05Rik (NM_030064.1,484-502).
cgtcggaccttcgaactat

SEQ ID NO: 453274 - DNA, 19 bp, Mus musculus
  siRNA target sequence for 2410141M05Rik (NM_030064.1,496-514).
gaactatccagacttttgt

SEQ ID NO: 453275 - DNA, 19 bp, Mus musculus
  siRNA target sequence for 2410141M05Rik (NM_030064.1,499-517).
ctatccagacttttgttaa

SEQ ID NO: 453276 - DNA, 19 bp, Mus musculus
  siRNA target sequence for 2410141M05Rik (NM_030064.1,503-521).
ccagacttttgttaagaaa

SEQ ID NO: 453277 - DNA, 19 bp, Mus musculus
  siRNA target sequence for 2410141M05Rik (NM_030064.1,513-531).
gttaagaaagcaaagtcat

SEQ ID NO: 453278 - DNA, 19 bp, Mus musculus
  siRNA target sequence for 2410141M05Rik (NM_030064.1,536-554).
gagaagggcagttcaatca

SEQ ID NO: 453279 - DNA, 19 bp, Mus musculus
  siRNA target sequence for 2410141M05Rik (NM_030064.1,573-591).
cccccaaggtccacttttt

SEQ ID NO: 453280 - DNA, 19 bp, Mus musculus
  siRNA target sequence for 2410141M05Rik (NM_030064.1,575-593).
cccaaggtccactttttct

SEQ ID NO: 453281 - DNA, 19 bp, Mus musculus
  siRNA target sequence for 2410141M05Rik (NM_030064.1,684-702).
ccactctctcccacatcat

SEQ ID NO: 453282 - DNA, 19 bp, Mus musculus
  siRNA target sequence for 2410141M05Rik (NM_030064.1,783-801).
gaccgaaagaatagaaagt

SEQ ID NO: 453283 - DNA, 19 bp, Mus musculus
  siRNA target sequence for 2410141M05Rik (NM_030064.1,873-891).
cggtctcgaatcaagaaga

SEQ ID NO: 453284 - DNA, 19 bp, Mus musculus
  siRNA target sequence for 2410141M05Rik (NM_030064.1,916-934).
cagatcggggagatagact

SEQ ID NO: 453285 - DNA, 19 bp, Mus musculus
  siRNA target sequence for 2410141M05Rik (NM_030064.1,956-974).
ggctcctcccagtgataca

SEQ ID NO: 453286 - DNA, 19 bp, Mus musculus
  siRNA target sequence for 2410141M05Rik (NM_030064.1,958-976).
ctcctcccagtgatacaga

SEQ ID NO: 453287 - DNA, 19 bp, Mus musculus
  siRNA target sequence for 2410141M05Rik (NM_030064.1,1143-1161).
gtgggcagcacagaaacaa

SEQ ID NO: 453288 - DNA, 19 bp, Mus musculus
  siRNA target sequence for 2410141M05Rik (NM_030064.1,1212-1230).
gaggacatcatggtagaat

SEQ ID NO: 453289 - DNA, 19 bp, Mus musculus
  siRNA target sequence for 2410141M05Rik (NM_030064.1,1214-1232).
ggacatcatggtagaatca

SEQ ID NO: 453290 - DNA, 19 bp, Mus musculus
  siRNA target sequence for 2410141M05Rik (NM_030064.1,1248-1266).
gatctgatcacgtgttact

SEQ ID NO: 453291 - DNA, 19 bp, Mus musculus
  siRNA target sequence for 2410141M05Rik (NM_030064.1,1354-1372).
ccaacgttcccgacttctt

SEQ ID NO: 453292 - DNA, 19 bp, Mus musculus
  siRNA target sequence for 2410141M05Rik (NM_030064.1,1355-1373).
caacgttcccgacttcttt

SEQ ID NO: 453293 - DNA, 19 bp, Mus musculus
  siRNA target sequence for 2410141M05Rik (NM_030064.1,1359-1377).
gttcccgacttcttttatt

SEQ ID NO: 453294 - DNA, 19 bp, Mus musculus
  siRNA target sequence for 2510005D08Rik (NM_026526.1,28-46).
ggtcgcagacactttgtga

SEQ ID NO: 453295 - DNA, 19 bp, Mus musculus
  siRNA target sequence for 2510005D08Rik (NM_026526.1,29-47).
gtcgcagacactttgtgaa

SEQ ID NO: 453296 - DNA, 19 bp, Mus musculus
  siRNA target sequence for 2510005D08Rik (NM_026526.1,31-49).
cgcagacactttgtgaaat

SEQ ID NO: 453297 - DNA, 19 bp, Mus musculus
  siRNA target sequence for 2510005D08Rik (NM_026526.1,80-98).
gctctcttcccatacctta

SEQ ID NO: 453298 - DNA, 19 bp, Mus musculus
  siRNA target sequence for 2510005D08Rik (NM_026526.1,143-161).
ccccagaggggatgataaa

SEQ ID NO: 453299 - DNA, 19 bp, Mus musculus
  siRNA target sequence for 2510005D08Rik (NM_026526.1,144-162).
cccagaggggatgataaat

SEQ ID NO: 453300 - DNA, 19 bp, Mus musculus
  siRNA target sequence for 2510005D08Rik (NM_026526.1,373-391).
ccatatatggggatgaatt

SEQ ID NO: 453301 - DNA, 19 bp, Mus musculus
  siRNA target sequence for 2510005D08Rik (NM_026526.1,433-451).
gaatcgctgcgcatagctt

SEQ ID NO: 453302 - DNA, 19 bp, Mus musculus
  siRNA target sequence for 2510005D08Rik (NM_026526.1,596-614).
gaagatgtgcaagtttatt

SEQ ID NO: 453303 - DNA, 19 bp, Mus musculus
  siRNA target sequence for 2510005D08Rik (NM_026526.1,627-645).
cgaaacttggccaatgagt

SEQ ID NO: 453304 - DNA, 19 bp, Mus musculus
  siRNA target sequence for 2510005D08Rik (NM_026526.1,628-646).
gaaacttggccaatgagtt

SEQ ID NO: 453305 - DNA, 19 bp, Mus musculus
  siRNA target sequence for 2510005D08Rik (NM_026526.1,647-665).
ccgctgttacacgaactat

SEQ ID NO: 453306 - DNA, 19 bp, Mus musculus
  siRNA target sequence for 2510005D08Rik (NM_026526.1,649-667).
gctgttacacgaactatga

SEQ ID NO: 453307 - DNA, 19 bp, Mus musculus
  siRNA target sequence for 2610005H11Rik (NM_028106.1,210-228).
cccgtggggccatcatact

SEQ ID NO: 453308 - DNA, 19 bp, Mus musculus
  siRNA target sequence for 2610005H11Rik (NM_028106.1,660-678).
cgtgaagcactgagtaagt

SEQ ID NO: 453309 - DNA, 19 bp, Mus musculus
  siRNA target sequence for 2610005H11Rik (NM_028106.1,666-684).
gcactgagtaagtggataa

SEQ ID NO: 453310 - DNA, 19 bp, Mus musculus
  siRNA target sequence for 2610005H11Rik (NM_028106.1,667-685).
cactgagtaagtggataaa

SEQ ID NO: 453311 - DNA, 19 bp, Mus musculus
  siRNA target sequence for 2610016F04Rik (NM_025847.1,50-68).
cctgccctatgagttgtat

SEQ ID NO: 453312 - DNA, 19 bp, Mus musculus
  siRNA target sequence for 2610016F04Rik (NM_025847.1,108-126).
ctcctgcaggccaactgaa

SEQ ID NO: 453313 - DNA, 19 bp, Mus musculus
  siRNA target sequence for 2610016F04Rik (NM_025847.1,110-128).
cctgcaggccaactgaaat

SEQ ID NO: 453314 - DNA, 19 bp, Mus musculus
  siRNA target sequence for 2610016F04Rik (NM_025847.1,114-132).
caggccaactgaaatacca

SEQ ID NO: 453315 - DNA, 19 bp, Mus musculus
  siRNA target sequence for 2610016F04Rik (NM_025847.1,152-170).
gtgagagccgctataatga

SEQ ID NO: 453316 - DNA, 19 bp, Mus musculus
  siRNA target sequence for 2610016F04Rik (NM_025847.1,154-172).
gagagccgctataatgaga

SEQ ID NO: 453317 - DNA, 19 bp, Mus musculus
  siRNA target sequence for 2610016F04Rik (NM_025847.1,210-228).
gttttcactctctgctaaa

SEQ ID NO: 453318 - DNA, 19 bp, Mus musculus
  siRNA target sequence for 2610016F04Rik (NM_025847.1,215-233).
cactctctgctaaagttgt

SEQ ID NO: 453319 - DNA, 19 bp, Mus musculus
  siRNA target sequence for 2610016F04Rik (NM_025847.1,221-239).
ctgctaaagttgtagatga

SEQ ID NO: 453320 - DNA, 19 bp, Mus musculus
  siRNA target sequence for 2610016F04Rik (NM_025847.1,279-297).
ggaaccctcacctttgtta

SEQ ID NO: 453321 - DNA, 19 bp, Mus musculus
  siRNA target sequence for 2610016F04Rik (NM_025847.1,323-341).
ctaaatttgcagagttaga

SEQ ID NO: 453322 - DNA, 19 bp, Mus musculus
  siRNA target sequence for 2610016F04Rik (NM_025847.1,378-396).
ggatagtgaagtcattgaa

SEQ ID NO: 453323 - DNA, 19 bp, Mus musculus
  siRNA target sequence for 2610016F04Rik (NM_025847.1,422-440).
cacccctggccaatgagtt

SEQ ID NO: 453324 - DNA, 19 bp, Mus musculus
  siRNA target sequence for 2610016F04Rik (NM_025847.1,501-519).
gaaggaaagttctaaacga

SEQ ID NO: 453325 - DNA, 19 bp, Mus musculus
  siRNA target sequence for 2610016F04Rik (NM_025847.1,512-530).
ctaaacgaaaaatcaacat

SEQ ID NO: 453326 - DNA, 19 bp, Mus musculus
  siRNA target sequence for 2610016F04Rik (NM_025847.1,525-543).
caacatgagtggctacatt

SEQ ID NO: 453327 - DNA, 19 bp, Mus musculus
  siRNA target sequence for 2610016F04Rik (NM_025847.1,734-752).
gacaacaggtaggagtttt

SEQ ID NO: 453328 - DNA, 19 bp, Mus musculus
  siRNA target sequence for 2610016F04Rik (NM_025847.1,825-843).
gccaacaacgcccatgttt

SEQ ID NO: 453329 - DNA, 19 bp, Mus musculus
  siRNA target sequence for 2610016F04Rik (NM_025847.1,916-934).
gctgaatccaacagcatta

SEQ ID NO: 453330 - DNA, 19 bp, Mus musculus
  siRNA target sequence for 2610016F04Rik (NM_025847.1,962-980).
gaagacgggatgtccattt

SEQ ID NO: 453331 - DNA, 19 bp, Mus musculus
  siRNA target sequence for 2610016F04Rik (NM_025847.1,1059-1077).
ctggcgcctacgggattta

SEQ ID NO: 453332 - DNA, 19 bp, Mus musculus
  siRNA target sequence for 2610016F04Rik (NM_025847.1,1061-1079).
ggcgcctacgggatttaat

SEQ ID NO: 453333 - DNA, 19 bp, Mus musculus
  siRNA target sequence for 2610016F04Rik (NM_025847.1,1064-1082).
gcctacgggatttaatgct

SEQ ID NO: 453334 - DNA, 19 bp, Mus musculus
  siRNA target sequence for 2610016F04Rik (NM_025847.1,1065-1083).
cctacgggatttaatgctt

SEQ ID NO: 453335 - DNA, 19 bp, Mus musculus
  siRNA target sequence for 2610040C18Rik (NM_027263.1,141-159).
gtgaacttcagcaaacaga

SEQ ID NO: 453336 - DNA, 19 bp, Mus musculus
  siRNA target sequence for 2610040C18Rik (NM_027263.1,169-187).
cgatctccgaggtgacttt

SEQ ID NO: 453337 - DNA, 19 bp, Mus musculus
  siRNA target sequence for 2610040C18Rik (NM_027263.1,173-191).
ctccgaggtgacttttcga

SEQ ID NO: 453338 - DNA, 19 bp, Mus musculus
  siRNA target sequence for 2610040C18Rik (NM_027263.1,207-225).
gccaaagaccttgaaatgt

SEQ ID NO: 453339 - DNA, 19 bp, Mus musculus
  siRNA target sequence for 2610040C18Rik (NM_027263.1,208-226).
ccaaagaccttgaaatgtt

SEQ ID NO: 453340 - DNA, 19 bp, Mus musculus
  siRNA target sequence for 2610040C18Rik (NM_027263.1,273-291).
ctcttagccaggcgaaata

SEQ ID NO: 453341 - DNA, 19 bp, Mus musculus
  siRNA target sequence for 2610040C18Rik (NM_027263.1,275-293).
cttagccaggcgaaataat

SEQ ID NO: 453342 - DNA, 19 bp, Mus musculus
  siRNA target sequence for 2610040C18Rik (NM_027263.1,280-298).
ccaggcgaaataattcact

SEQ ID NO: 453343 - DNA, 19 bp, Mus musculus
  siRNA target sequence for 2610102M01Rik (NM_030203.1,58-76).
ggaacaacgagctatctct

SEQ ID NO: 453344 - DNA, 19 bp, Mus musculus
  siRNA target sequence for 2610102M01Rik (NM_030203.1,106-124).
ccgaagatctggatctgaa

SEQ ID NO: 453345 - DNA, 19 bp, Mus musculus
  siRNA target sequence for 2610102M01Rik (NM_030203.1,342-360).
gccgacgacagcagtaaaa

SEQ ID NO: 453346 - DNA, 19 bp, Mus musculus
  siRNA target sequence for 2610102M01Rik (NM_030203.1,344-362).
cgacgacagcagtaaaaat

SEQ ID NO: 453347 - DNA, 19 bp, Mus musculus
  siRNA target sequence for 2610102M01Rik (NM_030203.1,529-547).
gagcggcaatgcaggaaaa

SEQ ID NO: 453348 - DNA, 19 bp, Mus musculus
  siRNA target sequence for 2610102M01Rik (NM_030203.1,609-627).
gctccgaagatcaattgca

SEQ ID NO: 453349 - DNA, 19 bp, Mus musculus
  siRNA target sequence for 2610102M01Rik (NM_030203.1,610-628).
ctccgaagatcaattgcat

SEQ ID NO: 453350 - DNA, 19 bp, Mus musculus
  siRNA target sequence for 2610102M01Rik (NM_030203.1,738-756).
cagcgcagaagtttcatca

SEQ ID NO: 453351 - DNA, 19 bp, Mus musculus
  siRNA target sequence for 2610102M01Rik (NM_030203.1,802-820).
cccagctgtcaccaatgat

SEQ ID NO: 453352 - DNA, 19 bp, Mus musculus
  siRNA target sequence for 2610102M01Rik (NM_030203.1,803-821).
ccagctgtcaccaatgatt

SEQ ID NO: 453353 - DNA, 19 bp, Mus musculus
  siRNA target sequence for 2610102M01Rik (NM_030203.1,804-822).
cagctgtcaccaatgatta

SEQ ID NO: 453354 - DNA, 19 bp, Mus musculus
  siRNA target sequence for 2610102M01Rik (NM_030203.1,818-836).
gattagtggccaagatgaa

SEQ ID NO: 453355 - DNA, 19 bp, Mus musculus
  siRNA target sequence for 2610102M01Rik (NM_030203.1,837-855).
gacatgatgaggtacatga

SEQ ID NO: 453356 - DNA, 19 bp, Mus musculus
  siRNA target sequence for 2610102M01Rik (NM_030203.1,885-903).
ccaagagtagggtgcaaat

SEQ ID NO: 453357 - DNA, 19 bp, Mus musculus
  siRNA target sequence for 2610102M01Rik (NM_030203.1,889-907).
gagtagggtgcaaatttaa

SEQ ID NO: 453358 - DNA, 19 bp, Mus musculus
  siRNA target sequence for 2610102M01Rik (NM_030203.1,891-909).
gtagggtgcaaatttaagt

SEQ ID NO: 453359 - DNA, 19 bp, Mus musculus
  siRNA target sequence for 2610102M01Rik (NM_030203.1,895-913).
ggtgcaaatttaagttcat

SEQ ID NO: 453360 - DNA, 19 bp, Mus musculus
  siRNA target sequence for 2610102M01Rik (NM_030203.1,946-964).
ggctggtcaaagaatatga

SEQ ID NO: 453361 - DNA, 19 bp, Mus musculus
  siRNA target sequence for 2610102M01Rik (NM_030203.1,1066-1084).
cgattcccagtttcttcaa

SEQ ID NO: 453362 - DNA, 19 bp, Mus musculus
  siRNA target sequence for 2610102M01Rik (NM_030203.1,1106-1124).
cctagaattcgacagaata

SEQ ID NO: 453363 - DNA, 19 bp, Mus musculus
  siRNA target sequence for 2610102M01Rik (NM_030203.1,1150-1168).
ggtccaatcccctacaata

SEQ ID NO: 453364 - DNA, 19 bp, Mus musculus
  siRNA target sequence for 2610102M01Rik (NM_030203.1,1154-1172).
caatcccctacaatactat

SEQ ID NO: 453365 - DNA, 19 bp, Mus musculus
  siRNA target sequence for 2610102M01Rik (NM_030203.1,1158-1176).
cccctacaatactatctga

SEQ ID NO: 453366 - DNA, 19 bp, Mus musculus
  siRNA target sequence for 2610102M01Rik (NM_030203.1,1159-1177).
ccctacaatactatctgat

SEQ ID NO: 453367 - DNA, 19 bp, Mus musculus
  siRNA target sequence for 2610511G16Rik (NM_026201.1,124-142).
ccatgggctactcagttta

SEQ ID NO: 453368 - DNA, 19 bp, Mus musculus
  siRNA target sequence for 2610511G16Rik (NM_026201.1,200-218).
gagcatctcctaccattta

SEQ ID NO: 453369 - DNA, 19 bp, Mus musculus
  siRNA target sequence for 2610511G16Rik (NM_026201.1,257-275).
cacaaacgccagcaaacta

SEQ ID NO: 453370 - DNA, 19 bp, Mus musculus
  siRNA target sequence for 2610511G16Rik (NM_026201.1,263-281).
cgccagcaaactatcagtt

SEQ ID NO: 453371 - DNA, 19 bp, Mus musculus
  siRNA target sequence for 2610511G16Rik (NM_026201.1,264-282).
gccagcaaactatcagtta

SEQ ID NO: 453372 - DNA, 19 bp, Mus musculus
  siRNA target sequence for 2610511G16Rik (NM_026201.1,269-287).
caaactatcagttaacaca

SEQ ID NO: 453373 - DNA, 19 bp, Mus musculus
  siRNA target sequence for 2610511G16Rik (NM_026201.1,404-422).
cacagccagctgttgcatt

SEQ ID NO: 453374 - DNA, 19 bp, Mus musculus
  siRNA target sequence for 2610511G16Rik (NM_026201.1,457-475).
gcagcacagattactgtat

SEQ ID NO: 453375 - DNA, 19 bp, Mus musculus
  siRNA target sequence for 2610511G16Rik (NM_026201.1,517-535).
cagaagcagcgtgttttca

SEQ ID NO: 453376 - DNA, 19 bp, Mus musculus
  siRNA target sequence for 2610511G16Rik (NM_026201.1,519-537).
gaagcagcgtgttttcaca

SEQ ID NO: 453377 - DNA, 19 bp, Mus musculus
  siRNA target sequence for 2610511G16Rik (NM_026201.1,544-562).
gttacaaagctacatgata

SEQ ID NO: 453378 - DNA, 19 bp, Mus musculus
  siRNA target sequence for 2610511G16Rik (NM_026201.1,553-571).
ctacatgatacatttggat

SEQ ID NO: 453379 - DNA, 19 bp, Mus musculus
  siRNA target sequence for 2610511G16Rik (NM_026201.1,621-639).
cccccaagttggtgataga

SEQ ID NO: 453380 - DNA, 19 bp, Mus musculus
  siRNA target sequence for 2610511G16Rik (NM_026201.1,625-643).
caagttggtgatagagtat

SEQ ID NO: 453381 - DNA, 19 bp, Mus musculus
  siRNA target sequence for 2610511G16Rik (NM_026201.1,649-667).
gaagcaacttataatccta

SEQ ID NO: 453382 - DNA, 19 bp, Mus musculus
  siRNA target sequence for 2610511G16Rik (NM_026201.1,653-671).
caacttataatcctaatat

SEQ ID NO: 453383 - DNA, 19 bp, Mus musculus
  siRNA target sequence for 2610511G16Rik (NM_026201.1,695-713).
gaattcaaacactaccaaa

SEQ ID NO: 453384 - DNA, 19 bp, Mus musculus
  siRNA target sequence for 2610511G16Rik (NM_026201.1,704-722).
cactaccaaatcagaatca

SEQ ID NO: 453385 - DNA, 19 bp, Mus musculus
  siRNA target sequence for 2610511G16Rik (NM_026201.1,706-724).
ctaccaaatcagaatcagt

SEQ ID NO: 453386 - DNA, 19 bp, Mus musculus
  siRNA target sequence for 2610511G16Rik (NM_026201.1,723-741).
gtctcaaacgcaaccttta

SEQ ID NO: 453387 - DNA, 19 bp, Mus musculus
  siRNA target sequence for 2610511G16Rik (NM_026201.1,725-743).
ctcaaacgcaacctttact

SEQ ID NO: 453388 - DNA, 19 bp, Mus musculus
  siRNA target sequence for 2610511G16Rik (NM_026201.1,749-767).
ctccgactgctgttattca

SEQ ID NO: 453389 - DNA, 19 bp, Mus musculus
  siRNA target sequence for 2610511G16Rik (NM_026201.1,837-855).
gatctcagctgcctctatt

SEQ ID NO: 453390 - DNA, 19 bp, Mus musculus
  siRNA target sequence for 2610511G16Rik (NM_026201.1,840-858).
ctcagctgcctctattaca

SEQ ID NO: 453391 - DNA, 19 bp, Mus musculus
  siRNA target sequence for 2610511G16Rik (NM_026201.1,848-866).
cctctattacaccactatt

SEQ ID NO: 453392 - DNA, 19 bp, Mus musculus
  siRNA target sequence for 2610511G16Rik (NM_026201.1,872-890).
cgcagccacagcccttatt

SEQ ID NO: 453393 - DNA, 19 bp, Mus musculus
  siRNA target sequence for 2610511G16Rik (NM_026201.1,925-943).
cctcctgtccgaatagtgt

SEQ ID NO: 453394 - DNA, 19 bp, Mus musculus
  siRNA target sequence for 2610511G16Rik (NM_026201.1,970-988).
gatccaccatcacgatttt

SEQ ID NO: 453395 - DNA, 19 bp, Mus musculus
  siRNA target sequence for 2610511G16Rik (NM_026201.1,999-1017).
cgacagaggggatcaagta

SEQ ID NO: 453396 - DNA, 19 bp, Mus musculus
  siRNA target sequence for 2610511G16Rik (NM_026201.1,1165-1183).
cggtacacagtgcagtttt

SEQ ID NO: 453397 - DNA, 19 bp, Mus musculus
  siRNA target sequence for 2610511G16Rik (NM_026201.1,1176-1194).
gcagttttcaaagttttct

SEQ ID NO: 453398 - DNA, 19 bp, Mus musculus
  siRNA target sequence for 2610511G16Rik (NM_026201.1,1232-1250).
gccgttatcagaacttata

SEQ ID NO: 453399 - DNA, 19 bp, Mus musculus
  siRNA target sequence for 2610511G16Rik (NM_026201.1,1233-1251).
ccgttatcagaacttatat

SEQ ID NO: 453400 - DNA, 19 bp, Mus musculus
  siRNA target sequence for 2610511G16Rik (NM_026201.1,1234-1252).
cgttatcagaacttatata

SEQ ID NO: 453401 - DNA, 19 bp, Mus musculus
  siRNA target sequence for 2610511G16Rik (NM_026201.1,1235-1253).
gttatcagaacttatatat

SEQ ID NO: 453402 - DNA, 19 bp, Mus musculus
  siRNA target sequence for 2610511G16Rik (NM_026201.1,1290-1308).
ggatgctttccctttgtca

SEQ ID NO: 453403 - DNA, 19 bp, Mus musculus
  siRNA target sequence for 2610511G16Rik (NM_026201.1,1312-1330).
ccatttcaactgggaaatt

SEQ ID NO: 453404 - DNA, 19 bp, Mus musculus
  siRNA target sequence for 2610511G16Rik (NM_026201.1,1313-1331).
catttcaactgggaaatta

SEQ ID NO: 453405 - DNA, 19 bp, Mus musculus
  siRNA target sequence for 2610511G16Rik (NM_026201.1,1360-1378).
gtagagtccttagaaaaaa

SEQ ID NO: 453406 - DNA, 19 bp, Mus musculus
  siRNA target sequence for 2610511G16Rik (NM_026201.1,1413-1431).
cctgtacagtgcaaaggta

SEQ ID NO: 453407 - DNA, 19 bp, Mus musculus
  siRNA target sequence for 2610511G16Rik (NM_026201.1,1440-1458).
ggctagccctagtatggaa

SEQ ID NO: 453408 - DNA, 19 bp, Mus musculus
  siRNA target sequence for 2610511G16Rik (NM_026201.1,1456-1474).
gaagacttgtatcataagt

SEQ ID NO: 453409 - DNA, 19 bp, Mus musculus
  siRNA target sequence for 2610511G16Rik (NM_026201.1,1522-1540).
catcctgctagacttgtta

SEQ ID NO: 453410 - DNA, 19 bp, Mus musculus
  siRNA target sequence for 2610511G16Rik (NM_026201.1,1525-1543).
cctgctagacttgttaagt

SEQ ID NO: 453411 - DNA, 19 bp, Mus musculus
  siRNA target sequence for 2610511G16Rik (NM_026201.1,1526-1544).
ctgctagacttgttaagtt

SEQ ID NO: 453412 - DNA, 19 bp, Mus musculus
  siRNA target sequence for 2610511G16Rik (NM_026201.1,1529-1547).
ctagacttgttaagtttct

SEQ ID NO: 453413 - DNA, 19 bp, Mus musculus
  siRNA target sequence for 2610511G16Rik (NM_026201.1,1532-1550).
gacttgttaagtttctagt

SEQ ID NO: 453414 - DNA, 19 bp, Mus musculus
  siRNA target sequence for 2610511G16Rik (NM_026201.1,1542-1560).
gtttctagtgggaatgaaa

SEQ ID NO: 453415 - DNA, 19 bp, Mus musculus
  siRNA target sequence for 2610511G16Rik (NM_026201.1,1630-1648).
gatccctctgtgttgatta

SEQ ID NO: 453416 - DNA, 19 bp, Mus musculus
  siRNA target sequence for 2610511G16Rik (NM_026201.1,1635-1653).
ctctgtgttgattaaaact

SEQ ID NO: 453417 - DNA, 19 bp, Mus musculus
  siRNA target sequence for 2610511G16Rik (NM_026201.1,1652-1670).
ctgccattcgttgttgtaa

SEQ ID NO: 453418 - DNA, 19 bp, Mus musculus
  siRNA target sequence for 2610511G16Rik (NM_026201.1,1710-1728).
gtaccgttttgcagagatt

SEQ ID NO: 453419 - DNA, 19 bp, Mus musculus
  siRNA target sequence for 2610511G16Rik (NM_026201.1,1752-1770).
ccacaaggggcgtacagtt

SEQ ID NO: 453420 - DNA, 19 bp, Mus musculus
  siRNA target sequence for 2610511G16Rik (NM_026201.1,1976-1994).
ggtctaagcttgatccaaa

SEQ ID NO: 453421 - DNA, 19 bp, Mus musculus
  siRNA target sequence for 2610511G16Rik (NM_026201.1,1995-2013).
ggcaatgaaggtaaatgat

SEQ ID NO: 453422 - DNA, 19 bp, Mus musculus
  siRNA target sequence for 2610511G16Rik (NM_026201.1,2053-2071).
ggactaaaatcgcagttaa

SEQ ID NO: 453423 - DNA, 19 bp, Mus musculus
  siRNA target sequence for 2610511G16Rik (NM_026201.1,2054-2072).
gactaaaatcgcagttaat

SEQ ID NO: 453424 - DNA, 19 bp, Mus musculus
  siRNA target sequence for 2610511G16Rik (NM_026201.1,2078-2096).
gcctaacaaagcagcttaa

SEQ ID NO: 453425 - DNA, 19 bp, Mus musculus
  siRNA target sequence for 2610511G16Rik (NM_026201.1,2079-2097).
cctaacaaagcagcttaaa

SEQ ID NO: 453426 - DNA, 19 bp, Mus musculus
  siRNA target sequence for 2610511G16Rik (NM_026201.1,2080-2098).
ctaacaaagcagcttaaaa

SEQ ID NO: 453427 - DNA, 19 bp, Mus musculus
  siRNA target sequence for 2610511G16Rik (NM_026201.1,2227-2245).
cagcgtcaagaaagaagat

SEQ ID NO: 453428 - DNA, 19 bp, Mus musculus
  siRNA target sequence for 2610511G16Rik (NM_026201.1,2230-2248).
cgtcaagaaagaagataca

SEQ ID NO: 453429 - DNA, 19 bp, Mus musculus
  siRNA target sequence for 2610511G16Rik (NM_026201.1,2281-2299).
ccgaactgggctgcaaaaa

SEQ ID NO: 453430 - DNA, 19 bp, Mus musculus
  siRNA target sequence for 2610511G16Rik (NM_026201.1,2283-2301).
gaactgggctgcaaaaagt

SEQ ID NO: 453431 - DNA, 19 bp, Mus musculus
  siRNA target sequence for 2610511G16Rik (NM_026201.1,2311-2329).
gattgcagcatcatgtctt

SEQ ID NO: 453432 - DNA, 19 bp, Mus musculus
  siRNA target sequence for 2610511G16Rik (NM_026201.1,2327-2345).
ctttgagtgtccttttgga

SEQ ID NO: 453433 - DNA, 19 bp, Mus musculus
  siRNA target sequence for 2610511G16Rik (NM_026201.1,2344-2362).
gattacagattggaagata

SEQ ID NO: 453434 - DNA, 19 bp, Mus musculus
  siRNA target sequence for 2610511G16Rik (NM_026201.1,2349-2367).
cagattggaagataataaa

SEQ ID NO: 453435 - DNA, 19 bp, Mus musculus
  siRNA target sequence for 2610511G16Rik (NM_026201.1,2351-2369).
gattggaagataataaaga

SEQ ID NO: 453436 - DNA, 19 bp, Mus musculus
  siRNA target sequence for 2610511G16Rik (NM_026201.1,2573-2591).
gaaaatcaggcgacgataa

SEQ ID NO: 453437 - DNA, 19 bp, Mus musculus
  siRNA target sequence for 2610511G16Rik (NM_026201.1,2579-2597).
caggcgacgataaagacaa

SEQ ID NO: 453438 - DNA, 19 bp, Mus musculus
  siRNA target sequence for 2610511G16Rik (NM_026201.1,2581-2599).
ggcgacgataaagacaaaa

SEQ ID NO: 453439 - DNA, 19 bp, Mus musculus
  siRNA target sequence for 2610511G16Rik (NM_026201.1,2583-2601).
cgacgataaagacaaaaaa

SEQ ID NO: 453440 - DNA, 19 bp, Mus musculus
  siRNA target sequence for 2610511G16Rik (NM_026201.1,2793-2811).
ggacagacctgcgaaagat

SEQ ID NO: 453441 - DNA, 19 bp, Mus musculus
  siRNA target sequence for 2610511G16Rik (NM_026201.1,2794-2812).
gacagacctgcgaaagata

SEQ ID NO: 453442 - DNA, 19 bp, Mus musculus
  siRNA target sequence for 2610511G16Rik (NM_026201.1,2827-2845).
cctcaaatggtcacagtta

SEQ ID NO: 453443 - DNA, 19 bp, Mus musculus
  siRNA target sequence for 2610511G16Rik (NM_026201.1,2828-2846).
ctcaaatggtcacagttaa

SEQ ID NO: 453444 - DNA, 19 bp, Mus musculus
  siRNA target sequence for 2610511G16Rik (NM_026201.1,2830-2848).
caaatggtcacagttaaca

SEQ ID NO: 453445 - DNA, 19 bp, Mus musculus
  siRNA target sequence for 2610511G16Rik (NM_026201.1,2857-2875).
ctaatggcctttgtttatt

SEQ ID NO: 453446 - DNA, 19 bp, Mus musculus
  siRNA target sequence for 2610511G16Rik (NM_026201.1,2862-2880).
ggcctttgtttattttgat

SEQ ID NO: 453447 - DNA, 19 bp, Mus musculus
  siRNA target sequence for 2610511G16Rik (NM_026201.1,2989-3007).
ctccgagaatcgtgctttt

SEQ ID NO: 453448 - DNA, 19 bp, Mus musculus
  siRNA target sequence for 2610511G16Rik (NM_026201.1,2991-3009).
ccgagaatcgtgcttttat

SEQ ID NO: 453449 - DNA, 19 bp, Mus musculus
  siRNA target sequence for 2610511G16Rik (NM_026201.1,2999-3017).
cgtgcttttatcggaaatt

SEQ ID NO: 453450 - DNA, 19 bp, Mus musculus
  siRNA target sequence for 2610511G16Rik (NM_026201.1,3000-3018).
gtgcttttatcggaaatta

SEQ ID NO: 453451 - DNA, 19 bp, Mus musculus
  siRNA target sequence for 2610511G16Rik (NM_026201.1,3003-3021).
cttttatcggaaattaaca

SEQ ID NO: 453452 - DNA, 19 bp, Mus musculus
  siRNA target sequence for 2610511G16Rik (NM_026201.1,3075-3093).
catgctaggaaacagatta

SEQ ID NO: 453453 - DNA, 19 bp, Mus musculus
  siRNA target sequence for 2610511G16Rik (NM_026201.1,3078-3096).
gctaggaaacagattatta

SEQ ID NO: 453454 - DNA, 19 bp, Mus musculus
  siRNA target sequence for 2610511G16Rik (NM_026201.1,3138-3156).
ggaaaatgtagggcttatt

SEQ ID NO: 453455 - DNA, 19 bp, Mus musculus
  siRNA target sequence for 2610511G16Rik (NM_026201.1,3181-3199).
gttgggagtctcctacaaa

SEQ ID NO: 453456 - DNA, 19 bp, Mus musculus
  siRNA target sequence for 2610511G16Rik (NM_026201.1,3185-3203).
ggagtctcctacaaaaact

SEQ ID NO: 453457 - DNA, 19 bp, Mus musculus
  siRNA target sequence for 2610511G16Rik (NM_026201.1,3274-3292).
gatgggaaaactatattaa

SEQ ID NO: 453458 - DNA, 19 bp, Mus musculus
  siRNA target sequence for 2610511G16Rik (NM_026201.1,3277-3295).
gggaaaactatattaaact

SEQ ID NO: 453459 - DNA, 19 bp, Mus musculus
  siRNA target sequence for 2610511G16Rik (NM_026201.1,3315-3333).
cctctctggtgaacttaga

SEQ ID NO: 453460 - DNA, 19 bp, Mus musculus
  siRNA target sequence for 2610511G16Rik (NM_026201.1,3325-3343).
gaacttagagaggtcaaaa

SEQ ID NO: 453461 - DNA, 19 bp, Mus musculus
  siRNA target sequence for 2610511G16Rik (NM_026201.1,3348-3366).
ccttggtcaattacaagaa

SEQ ID NO: 453462 - DNA, 19 bp, Mus musculus
  siRNA target sequence for 2610511G16Rik (NM_026201.1,3426-3444).
cagaaacttatctacagtt

SEQ ID NO: 453463 - DNA, 19 bp, Mus musculus
  siRNA target sequence for 2610511G16Rik (NM_026201.1,3428-3446).
gaaacttatctacagttat

SEQ ID NO: 453464 - DNA, 19 bp, Mus musculus
  siRNA target sequence for 2610511G16Rik (NM_026201.1,3437-3455).
ctacagttatggatgatat

SEQ ID NO: 453465 - DNA, 19 bp, Mus musculus
  siRNA target sequence for 2610511G16Rik (NM_026201.1,3440-3458).
cagttatggatgatatcca

SEQ ID NO: 453466 - DNA, 19 bp, Mus musculus
  siRNA target sequence for 2700075B01Rik (NM_029669.2,87-105).
ctggacccaagcttacatt

SEQ ID NO: 453467 - DNA, 19 bp, Mus musculus
  siRNA target sequence for 2700075B01Rik (NM_029669.2,160-178).
ccttgcggctgctgtaact

SEQ ID NO: 453468 - DNA, 19 bp, Mus musculus
  siRNA target sequence for 2700075B01Rik (NM_029669.2,180-198).
catgaaggcgcaaaaggaa

SEQ ID NO: 453469 - DNA, 19 bp, Mus musculus
  siRNA target sequence for 2700075B01Rik (NM_029669.2,238-256).
gaggggaacgccacttaca

SEQ ID NO: 453470 - DNA, 19 bp, Mus musculus
  siRNA target sequence for 2700075B01Rik (NM_029669.2,240-258).
ggggaacgccacttacaca

SEQ ID NO: 453471 - DNA, 19 bp, Mus musculus
  siRNA target sequence for 2700075B01Rik (NM_029669.2,265-283).
cagctacgtggggtacaaa

SEQ ID NO: 453472 - DNA, 19 bp, Mus musculus
  siRNA target sequence for 2700075B01Rik (NM_029669.2,271-289).
cgtggggtacaaagaatca

SEQ ID NO: 453473 - DNA, 19 bp, Mus musculus
  siRNA target sequence for 2700075B01Rik (NM_029669.2,338-356).
gcgatgaagagcttaagaa

SEQ ID NO: 453474 - DNA, 19 bp, Mus musculus
  siRNA target sequence for 2700075B01Rik (NM_029669.2,468-486).
caagagactccgctatgat

SEQ ID NO: 453475 - DNA, 19 bp, Mus musculus
  siRNA target sequence for 2700075B01Rik (NM_029669.2,471-489).
gagactccgctatgatgaa

SEQ ID NO: 453476 - DNA, 19 bp, Mus musculus
  siRNA target sequence for 2700075B01Rik (NM_029669.2,473-491).
gactccgctatgatgaata

SEQ ID NO: 453477 - DNA, 19 bp, Mus musculus
  siRNA target sequence for 2700075B01Rik (NM_029669.2,517-535).
gtccctcgagccagatctt

SEQ ID NO: 453478 - DNA, 19 bp, Mus musculus
  siRNA target sequence for 2700075B01Rik (NM_029669.2,519-537).
ccctcgagccagatcttat

SEQ ID NO: 453479 - DNA, 19 bp, Mus musculus
  siRNA target sequence for 2700075B01Rik (NM_029669.2,521-539).
ctcgagccagatcttatca

SEQ ID NO: 453480 - DNA, 19 bp, Mus musculus
  siRNA target sequence for 2700075B01Rik (NM_029669.2,523-541).
cgagccagatcttatcatt

SEQ ID NO: 453481 - DNA, 19 bp, Mus musculus
  siRNA target sequence for 2700075B01Rik (NM_029669.2,642-660).
gacagacgacagtcagtat

SEQ ID NO: 453482 - DNA, 19 bp, Mus musculus
  siRNA target sequence for 2700075B01Rik (NM_029669.2,714-732).
caaatctcagactccatat

SEQ ID NO: 453483 - DNA, 19 bp, Mus musculus
  siRNA target sequence for 2700075B01Rik (NM_029669.2,725-743).
ctccatattcggcatttgt

SEQ ID NO: 453484 - DNA, 19 bp, Mus musculus
  siRNA target sequence for 2700075B01Rik (NM_029669.2,728-746).
catattcggcatttgttca

SEQ ID NO: 453485 - DNA, 19 bp, Mus musculus
  siRNA target sequence for 2700075B01Rik (NM_029669.2,771-789).
gactatttctgtcattact

SEQ ID NO: 453486 - DNA, 19 bp, Mus musculus
  siRNA target sequence for 2700075B01Rik (NM_029669.2,799-817).
gctgctaatcccccatata

SEQ ID NO: 453487 - DNA, 19 bp, Mus musculus
  siRNA target sequence for 2700075B01Rik (NM_029669.2,803-821).
ctaatcccccatatagtct

SEQ ID NO: 453488 - DNA, 19 bp, Mus musculus
  siRNA target sequence for 2700075B01Rik (NM_029669.2,809-827).
ccccatatagtctgttcta

SEQ ID NO: 453489 - DNA, 19 bp, Mus musculus
  siRNA target sequence for 2700075B01Rik (NM_029669.2,810-828).
cccatatagtctgttctat

SEQ ID NO: 453490 - DNA, 19 bp, Mus musculus
  siRNA target sequence for 2700075B01Rik (NM_029669.2,811-829).
ccatatagtctgttctata

SEQ ID NO: 453491 - DNA, 19 bp, Mus musculus
  siRNA target sequence for 2700075B01Rik (NM_029669.2,812-830).
catatagtctgttctataa

SEQ ID NO: 453492 - DNA, 19 bp, Mus musculus
  siRNA target sequence for 2700075B01Rik (NM_029669.2,833-851).
cgaccttgggctataccat

SEQ ID NO: 453493 - DNA, 19 bp, Mus musculus
  siRNA target sequence for 2700075B01Rik (NM_029669.2,837-855).
cttgggctataccatttct

SEQ ID NO: 453494 - DNA, 19 bp, Mus musculus
  siRNA target sequence for 2700075B01Rik (NM_029669.2,879-897).
gccttacttcgtggataaa

SEQ ID NO: 453495 - DNA, 19 bp, Mus musculus
  siRNA target sequence for 2700075B01Rik (NM_029669.2,880-898).
ccttacttcgtggataaaa

SEQ ID NO: 453496 - DNA, 19 bp, Mus musculus
  siRNA target sequence for 2700075B01Rik (NM_029669.2,952-970).
gagaaagactacattgatt

SEQ ID NO: 453497 - DNA, 19 bp, Mus musculus
  siRNA target sequence for 3110005P07Rik (NM_022985.3,242-260).
cagccaagcacctatgctt

SEQ ID NO: 453498 - DNA, 19 bp, Mus musculus
  siRNA target sequence for 3110005P07Rik (NM_022985.3,265-283).
ccactggctgcggatttta

SEQ ID NO: 453499 - DNA, 19 bp, Mus musculus
  siRNA target sequence for 3110005P07Rik (NM_022985.3,271-289).
gctgcggattttatggaaa

SEQ ID NO: 453500 - DNA, 19 bp, Mus musculus
  siRNA target sequence for 3110005P07Rik (NM_022985.3,294-312).
cgtacaaatggcatgtgtt

SEQ ID NO: 453501 - DNA, 19 bp, Mus musculus
  siRNA target sequence for 3110005P07Rik (NM_022985.3,305-323).
catgtgttcagtatgctat

SEQ ID NO: 453502 - DNA, 19 bp, Mus musculus
  siRNA target sequence for 3110005P07Rik (NM_022985.3,342-360).
cagaacagtagcaatggta

SEQ ID NO: 453503 - DNA, 19 bp, Mus musculus
  siRNA target sequence for 3110005P07Rik (NM_022985.3,347-365).
cagtagcaatggtagaata

SEQ ID NO: 453504 - DNA, 19 bp, Mus musculus
  siRNA target sequence for 3110005P07Rik (NM_022985.3,384-402).
gtcagcagtctgtctgaat

SEQ ID NO: 453505 - DNA, 19 bp, Mus musculus
  siRNA target sequence for 3110005P07Rik (NM_022985.3,441-459).
gctcagtcagcgctagatt

SEQ ID NO: 453506 - DNA, 19 bp, Mus musculus
  siRNA target sequence for 3110005P07Rik (NM_022985.3,453-471).
ctagattctacgtcttcat

SEQ ID NO: 453507 - DNA, 19 bp, Mus musculus
  siRNA target sequence for 3110005P07Rik (NM_022985.3,456-474).
gattctacgtcttcatcta

SEQ ID NO: 453508 - DNA, 19 bp, Mus musculus
  siRNA target sequence for 3110005P07Rik (NM_022985.3,481-499).
caggccctgtgtcaaatca

SEQ ID NO: 453509 - DNA, 19 bp, Mus musculus
  siRNA target sequence for 3110005P07Rik (NM_022985.3,483-501).
ggccctgtgtcaaatcagt

SEQ ID NO: 453510 - DNA, 19 bp, Mus musculus
  siRNA target sequence for 3110005P07Rik (NM_022985.3,530-548).
ccaagtggacagtacatct

SEQ ID NO: 453511 - DNA, 19 bp, Mus musculus
  siRNA target sequence for 3110005P07Rik (NM_022985.3,756-774).
cggtgtggaaatgtttact

SEQ ID NO: 453512 - DNA, 19 bp, Mus musculus
  siRNA target sequence for 3110005P07Rik (NM_022985.3,782-800).
gcaccgttactcagatgtt

SEQ ID NO: 453513 - DNA, 19 bp, Mus musculus
  siRNA target sequence for 3110005P07Rik (NM_022985.3,798-816).
gttcacaattgctcttaca

SEQ ID NO: 453514 - DNA, 19 bp, Mus musculus
  siRNA target sequence for 3110010F15Rik (NM_026067.2,196-214).
ccgctgagcgtggagaaaa

SEQ ID NO: 453515 - DNA, 19 bp, Mus musculus
  siRNA target sequence for 3110010F15Rik (NM_026067.2,216-234).
gcagcgatgcagacttgat

SEQ ID NO: 453516 - DNA, 19 bp, Mus musculus
  siRNA target sequence for 3110010F15Rik (NM_026067.2,245-263).
cagatggatcgaagttcat

SEQ ID NO: 453517 - DNA, 19 bp, Mus musculus
  siRNA target sequence for 3110010F15Rik (NM_026067.2,300-318).
caaagagatcgcaatgaca

SEQ ID NO: 453518 - DNA, 19 bp, Mus musculus
  siRNA target sequence for 3110010F15Rik (NM_026067.2,311-329).
caatgacaaacggttgtat

SEQ ID NO: 453519 - DNA, 19 bp, Mus musculus
  siRNA target sequence for 3110010F15Rik (NM_026067.2,326-344).
gtatcaaccggatgagtaa

SEQ ID NO: 453520 - DNA, 19 bp, Mus musculus
  siRNA target sequence for 3110010F15Rik (NM_026067.2,348-366).
ggaactcagagctaaactt

SEQ ID NO: 453521 - DNA, 19 bp, Mus musculus
  siRNA target sequence for 3110010F15Rik (NM_026067.2,356-374).
gagctaaactttcagaatt

SEQ ID NO: 453522 - DNA, 19 bp, Mus musculus
  siRNA target sequence for 3110010F15Rik (NM_026067.2,469-487).
ggggacagttactatgact

SEQ ID NO: 453523 - DNA, 19 bp, Mus musculus
  siRNA target sequence for 3110010F15Rik (NM_026067.2,535-553).
gctgagttcctacatgaaa

SEQ ID NO: 453524 - DNA, 19 bp, Mus musculus
  siRNA target sequence for 3110010F15Rik (NM_026067.2,540-558).
gttcctacatgaaatcatt

SEQ ID NO: 453525 - DNA, 19 bp, Mus musculus
  siRNA target sequence for 3110010F15Rik (NM_026067.2,584-602).
cacacaccttagaaatcga

SEQ ID NO: 453526 - DNA, 19 bp, Mus musculus
  siRNA target sequence for 3110010F15Rik (NM_026067.2,654-672).
gttctgcatcggtcttact

SEQ ID NO: 453527 - DNA, 19 bp, Mus musculus
  siRNA target sequence for 3110010F15Rik (NM_026067.2,663-681).
cggtcttactggaatcact

SEQ ID NO: 453528 - DNA, 19 bp, Mus musculus
  siRNA target sequence for 3110010F15Rik (NM_026067.2,717-735).
ggtcctgaaaaaagtgatt

SEQ ID NO: 453529 - DNA, 19 bp, Mus musculus
  siRNA target sequence for 3110010F15Rik (NM_026067.2,768-786).
gtacaagtactgtatacta

SEQ ID NO: 453530 - DNA, 19 bp, Mus musculus
  siRNA target sequence for 3110010F15Rik (NM_026067.2,771-789).
caagtactgtatactaaca

SEQ ID NO: 453531 - DNA, 19 bp, Mus musculus
  siRNA target sequence for 3110010F15Rik (NM_026067.2,793-811).
ggctcctgggatatgagta

SEQ ID NO: 453532 - DNA, 19 bp, Mus musculus
  siRNA target sequence for 3110010F15Rik (NM_026067.2,794-812).
gctcctgggatatgagtaa

SEQ ID NO: 453533 - DNA, 19 bp, Mus musculus
  siRNA target sequence for 3110010F15Rik (NM_026067.2,831-849).
ccggctcagcagactcaaa

SEQ ID NO: 453534 - DNA, 19 bp, Mus musculus
  siRNA target sequence for 3110010F15Rik (NM_026067.2,888-906).
gtcatacggaaacttctat

SEQ ID NO: 453535 - DNA, 19 bp, Mus musculus
  siRNA target sequence for 3110010F15Rik (NM_026067.2,890-908).
catacggaaacttctataa

SEQ ID NO: 453536 - DNA, 19 bp, Mus musculus
  siRNA target sequence for 3110010F15Rik (NM_026067.2,894-912).
cggaaacttctataaggtt

SEQ ID NO: 453537 - DNA, 19 bp, Mus musculus
  siRNA target sequence for 3110010F15Rik (NM_026067.2,915-933).
cagaagccagaccaaacta

SEQ ID NO: 453538 - DNA, 19 bp, Mus musculus
  siRNA target sequence for 3110010F15Rik (NM_026067.2,935-953).
caataatgcttgaaaaatt

SEQ ID NO: 453539 - DNA, 19 bp, Mus musculus
  siRNA target sequence for 3110010F15Rik (NM_026067.2,983-1001).
gcggtctcgatgactctaa

SEQ ID NO: 453540 - DNA, 19 bp, Mus musculus
  siRNA target sequence for 3110010F15Rik (NM_026067.2,985-1003).
ggtctcgatgactctaaga

SEQ ID NO: 453541 - DNA, 19 bp, Mus musculus
  siRNA target sequence for 3110010F15Rik (NM_026067.2,986-1004).
gtctcgatgactctaagaa

SEQ ID NO: 453542 - DNA, 19 bp, Mus musculus
  siRNA target sequence for 3110010F15Rik (NM_026067.2,988-1006).
ctcgatgactctaagaaca

SEQ ID NO: 453543 - DNA, 19 bp, Mus musculus
  siRNA target sequence for 3110010F15Rik (NM_026067.2,990-1008).
cgatgactctaagaacatt

SEQ ID NO: 453544 - DNA, 19 bp, Mus musculus
  siRNA target sequence for 3110010F15Rik (NM_026067.2,1002-1020).
gaacattgctagaatagct

SEQ ID NO: 453545 - DNA, 19 bp, Mus musculus
  siRNA target sequence for 3110010F15Rik (NM_026067.2,1040-1058).
gatgtgaacttcgaatcaa

SEQ ID NO: 453546 - DNA, 19 bp, Mus musculus
  siRNA target sequence for 3110010F15Rik (NM_026067.2,1086-1104).
gagtgtgtcctcatcctta

SEQ ID NO: 453547 - DNA, 19 bp, Mus musculus
  siRNA target sequence for 3110024A21Rik (NM_024215.1,218-236).
gcttgcgcgaggtacttca

SEQ ID NO: 453548 - DNA, 19 bp, Mus musculus
  siRNA target sequence for 3110024A21Rik (NM_024215.1,219-237).
cttgcgcgaggtacttcat

SEQ ID NO: 453549 - DNA, 19 bp, Mus musculus
  siRNA target sequence for 3110024A21Rik (NM_024215.1,267-285).
gatccaaagaccacaagaa

SEQ ID NO: 453550 - DNA, 19 bp, Mus musculus
  siRNA target sequence for 3110024A21Rik (NM_024215.1,345-363).
gcatgggctcgtatgttca

SEQ ID NO: 453551 - DNA, 19 bp, Mus musculus
  siRNA target sequence for 3110024A21Rik (NM_024215.1,346-364).
catgggctcgtatgttcaa

SEQ ID NO: 453552 - DNA, 19 bp, Mus musculus
  siRNA target sequence for 3321402G02Rik (NM_028716.1,110-128).
ggcctgtctaagaccaaaa

SEQ ID NO: 453553 - DNA, 19 bp, Mus musculus
  siRNA target sequence for 3321402G02Rik (NM_028716.1,186-204).
ggacagacgggctatatta

SEQ ID NO: 453554 - DNA, 19 bp, Mus musculus
  siRNA target sequence for 3321402G02Rik (NM_028716.1,223-241).
ggtcagcagtcctaagcaa

SEQ ID NO: 453555 - DNA, 19 bp, Mus musculus
  siRNA target sequence for 3321402G02Rik (NM_028716.1,224-242).
gtcagcagtcctaagcaaa

SEQ ID NO: 453556 - DNA, 19 bp, Mus musculus
  siRNA target sequence for 3321402G02Rik (NM_028716.1,338-356).
gtctgcatggggaagactt

SEQ ID NO: 453557 - DNA, 19 bp, Mus musculus
  siRNA target sequence for 3321402G02Rik (NM_028716.1,421-439).
catccccatcgcagttgat

SEQ ID NO: 453558 - DNA, 19 bp, Mus musculus
  siRNA target sequence for 3321402G02Rik (NM_028716.1,763-781).
ctgctccgtgtgtaaccaa

SEQ ID NO: 453559 - DNA, 19 bp, Mus musculus
  siRNA target sequence for 3321402G02Rik (NM_028716.1,778-796).
ccaaggcccagagtatatt

SEQ ID NO: 453560 - DNA, 19 bp, Mus musculus
  siRNA target sequence for 3321402G02Rik (NM_028716.1,782-800).
ggcccagagtatattgaga

SEQ ID NO: 453561 - DNA, 19 bp, Mus musculus
  siRNA target sequence for 3321402G02Rik (NM_028716.1,811-829).
gcgatgggtggatatagtt

SEQ ID NO: 453562 - DNA, 19 bp, Mus musculus
  siRNA target sequence for 3321402G02Rik (NM_028716.1,813-831).
gatgggtggatatagttca

SEQ ID NO: 453563 - DNA, 19 bp, Mus musculus
  siRNA target sequence for 3321402G02Rik (NM_028716.1,827-845).
gttcacctggctctctata

SEQ ID NO: 453564 - DNA, 19 bp, Mus musculus
  siRNA target sequence for 3321402G02Rik (NM_028716.1,865-883).
gaagcggtactttgacttt

SEQ ID NO: 453565 - DNA, 19 bp, Mus musculus
  siRNA target sequence for 3321402G02Rik (NM_028716.1,1010-1028).
ctgtgtggcaaggaaatta

SEQ ID NO: 453566 - DNA, 19 bp, Mus musculus
  siRNA target sequence for 3321402G02Rik (NM_028716.1,1069-1087).
gcctgcccctccaggaaaa

SEQ ID NO: 453567 - DNA, 19 bp, Mus musculus
  siRNA target sequence for 3321402G02Rik (NM_028716.1,1128-1146).
cctccgagctgcttcgtaa

SEQ ID NO: 453568 - DNA, 19 bp, Mus musculus
  siRNA target sequence for 3321402G02Rik (NM_028716.1,1131-1149).
ccgagctgcttcgtaagaa

SEQ ID NO: 453569 - DNA, 19 bp, Mus musculus
  siRNA target sequence for 3321402G02Rik (NM_028716.1,1132-1150).
cgagctgcttcgtaagaaa

SEQ ID NO: 453570 - DNA, 19 bp, Mus musculus
  siRNA target sequence for 3321402G02Rik (NM_028716.1,1200-1218).
ggcgagtttatagaagaaa

SEQ ID NO: 453571 - DNA, 19 bp, Mus musculus
  siRNA target sequence for 3321402G02Rik (NM_028716.1,1201-1219).
gcgagtttatagaagaaaa

SEQ ID NO: 453572 - DNA, 19 bp, Mus musculus
  siRNA target sequence for 3321402G02Rik (NM_028716.1,1286-1304).
caccacctagccagtatat

SEQ ID NO: 453573 - DNA, 19 bp, Mus musculus
  siRNA target sequence for 3321402G02Rik (NM_028716.1,1486-1504).
gcccctgcgagcaaagcaa

SEQ ID NO: 453574 - DNA, 19 bp, Mus musculus
  siRNA target sequence for 3321402G02Rik (NM_028716.1,1637-1655).
cacctcaagtcctctatca

SEQ ID NO: 453575 - DNA, 19 bp, Mus musculus
  siRNA target sequence for 3321402G02Rik (NM_028716.1,1681-1699).
gttggcctgcggggaaaaa

SEQ ID NO: 453576 - DNA, 19 bp, Mus musculus
  siRNA target sequence for 3321402G02Rik (NM_028716.1,1684-1702).
ggcctgcggggaaaaatat

SEQ ID NO: 453577 - DNA, 19 bp, Mus musculus
  siRNA target sequence for 3632413B07Rik (NM_027230.2,206-224).
catccacgagccccattaa

SEQ ID NO: 453578 - DNA, 19 bp, Mus musculus
  siRNA target sequence for 3632413B07Rik (NM_027230.2,670-688).
cccatggacctttgtacat

SEQ ID NO: 453579 - DNA, 19 bp, Mus musculus
  siRNA target sequence for 3632413B07Rik (NM_027230.2,671-689).
ccatggacctttgtacatt

SEQ ID NO: 453580 - DNA, 19 bp, Mus musculus
  siRNA target sequence for 3632413B07Rik (NM_027230.2,676-694).
gacctttgtacattggaaa

SEQ ID NO: 453581 - DNA, 19 bp, Mus musculus
  siRNA target sequence for 3632413B07Rik (NM_027230.2,756-774).
cctgcacaactgcattatt

SEQ ID NO: 453582 - DNA, 19 bp, Mus musculus
  siRNA target sequence for 3632413B07Rik (NM_027230.2,795-813).
gttgacgcaaatagcaaaa

SEQ ID NO: 453583 - DNA, 19 bp, Mus musculus
  siRNA target sequence for 3632413B07Rik (NM_027230.2,837-855).
cgagatgaatgaaatcgaa

SEQ ID NO: 453584 - DNA, 19 bp, Mus musculus
  siRNA target sequence for 3632413B07Rik (NM_027230.2,852-870).
cgaagtctgtccagaatgt

SEQ ID NO: 453585 - DNA, 19 bp, Mus musculus
  siRNA target sequence for 3632413B07Rik (NM_027230.2,1002-1020).
ggttgacgcccgtttcttt

SEQ ID NO: 453586 - DNA, 19 bp, Mus musculus
  siRNA target sequence for 3632413B07Rik (NM_027230.2,1037-1055).
cctgggttccagtcaataa

SEQ ID NO: 453587 - DNA, 19 bp, Mus musculus
  siRNA target sequence for 3632413B07Rik (NM_027230.2,1038-1056).
ctgggttccagtcaataat

SEQ ID NO: 453588 - DNA, 19 bp, Mus musculus
  siRNA target sequence for 3632413B07Rik (NM_027230.2,1058-1076).
gctacctcatgtctaaaga

SEQ ID NO: 453589 - DNA, 19 bp, Mus musculus
  siRNA target sequence for 3632413B07Rik (NM_027230.2,1563-1581).
cagcccaaagcctttctct

SEQ ID NO: 453590 - DNA, 19 bp, Mus musculus
  siRNA target sequence for 3632413B07Rik (NM_027230.2,1591-1609).
ccgacacccatcatgacaa

SEQ ID NO: 453591 - DNA, 19 bp, Mus musculus
  siRNA target sequence for 3632413B07Rik (NM_027230.2,1788-1806).
gaccatagagagttgcaaa

SEQ ID NO: 453592 - DNA, 19 bp, Mus musculus
  siRNA target sequence for 3632413B07Rik (NM_027230.2,2157-2175).
cacaaaggacaaactgaaa

SEQ ID NO: 453593 - DNA, 19 bp, Mus musculus
  siRNA target sequence for 3632413B07Rik (NM_027230.2,2203-2221).
gtgcacttgggcttggatt

SEQ ID NO: 453594 - DNA, 19 bp, Mus musculus
  siRNA target sequence for 3632413B07Rik (NM_027230.2,2235-2253).
cgaacttgtcatagactta

SEQ ID NO: 453595 - DNA, 19 bp, Mus musculus
  siRNA target sequence for 3632413B07Rik (NM_027230.2,2273-2291).
gggagggtcgaaaaaacaa

SEQ ID NO: 453596 - DNA, 19 bp, Mus musculus
  siRNA target sequence for 3632413B07Rik (NM_027230.2,2304-2322).
ggtgccgtcgcctaagcaa

SEQ ID NO: 453597 - DNA, 19 bp, Mus musculus
  siRNA target sequence for 3632413B07Rik (NM_027230.2,2319-2337).
gcaagacgctataggtaaa

SEQ ID NO: 453598 - DNA, 19 bp, Mus musculus
  siRNA target sequence for 3632413B07Rik (NM_027230.2,2498-2516).
cgggaagcccggtgaagaa

SEQ ID NO: 453599 - DNA, 19 bp, Mus musculus
  siRNA target sequence for 3632413B07Rik (NM_027230.2,2565-2583).
cgtgtggaacgcatcaagt

SEQ ID NO: 453600 - DNA, 19 bp, Mus musculus
  siRNA target sequence for 3632413B07Rik (NM_027230.2,2566-2584).
gtgtggaacgcatcaagta

SEQ ID NO: 453601 - DNA, 19 bp, Mus musculus
  siRNA target sequence for 3632413B07Rik (NM_027230.2,2570-2588).
ggaacgcatcaagtaagtt

SEQ ID NO: 453602 - DNA, 19 bp, Mus musculus
  siRNA target sequence for 3632413B07Rik (NM_027230.2,2571-2589).
gaacgcatcaagtaagttt

SEQ ID NO: 453603 - DNA, 19 bp, Mus musculus
  siRNA target sequence for 3632413B07Rik (NM_027230.2,2590-2608).
caaacgtcctcccaaaagt

SEQ ID NO: 453604 - DNA, 19 bp, Mus musculus
  siRNA target sequence for 3632413B07Rik (NM_027230.2,2607-2625).
gtggcacatgcagaagata

SEQ ID NO: 453605 - DNA, 19 bp, Mus musculus
  siRNA target sequence for 3632413B07Rik (NM_027230.2,2699-2717).
cccaggggacgagatatca

SEQ ID NO: 453606 - DNA, 19 bp, Mus musculus
  siRNA target sequence for 3632413B07Rik (NM_027230.2,2701-2719).
caggggacgagatatcaga

SEQ ID NO: 453607 - DNA, 19 bp, Mus musculus
  siRNA target sequence for 3632413B07Rik (NM_027230.2,3013-3031).
cgaaggctgaggattgaga

SEQ ID NO: 453608 - DNA, 19 bp, Mus musculus
  siRNA target sequence for 3632413B07Rik (NM_027230.2,3014-3032).
gaaggctgaggattgagat

SEQ ID NO: 453609 - DNA, 19 bp, Mus musculus
  siRNA target sequence for 3632413B07Rik (NM_027230.2,3355-3373).
gccgaggcaagcacagaaa

SEQ ID NO: 453610 - DNA, 19 bp, Mus musculus
  siRNA target sequence for 3632413B07Rik (NM_027230.2,3534-3552).
gctcttaggctccaatcaa

SEQ ID NO: 453611 - DNA, 19 bp, Mus musculus
  siRNA target sequence for 3632413B07Rik (NM_172270.1,732-750).
gcacaactgcattatttat

SEQ ID NO: 453612 - DNA, 19 bp, Mus musculus
  siRNA target sequence for 3930401K13Rik (NM_028720.1,70-88).
ctggccaggaaagattgtt

SEQ ID NO: 453613 - DNA, 19 bp, Mus musculus
  siRNA target sequence for 3930401K13Rik (NM_028720.1,72-90).
ggccaggaaagattgttaa

SEQ ID NO: 453614 - DNA, 19 bp, Mus musculus
  siRNA target sequence for 3930401K13Rik (NM_028720.1,73-91).
gccaggaaagattgttaat

SEQ ID NO: 453615 - DNA, 19 bp, Mus musculus
  siRNA target sequence for 3930401K13Rik (NM_028720.1,92-110).
ccacccaaggacttaaaga

SEQ ID NO: 453616 - DNA, 19 bp, Mus musculus
  siRNA target sequence for 3930401K13Rik (NM_028720.1,290-308).
gggaaagaccagacatcat

SEQ ID NO: 453617 - DNA, 19 bp, Mus musculus
  siRNA target sequence for 3930401K13Rik (NM_028720.1,554-572).
cctgagtctagcactgtaa

SEQ ID NO: 453618 - DNA, 19 bp, Mus musculus
  siRNA target sequence for 3930401K13Rik (NM_028720.1,555-573).
ctgagtctagcactgtaaa

SEQ ID NO: 453619 - DNA, 19 bp, Mus musculus
  siRNA target sequence for 3930401K13Rik (NM_028720.1,587-605).
ggaccgatggctgcattta

SEQ ID NO: 453620 - DNA, 19 bp, Mus musculus
  siRNA target sequence for 3930401K13Rik (NM_028720.1,588-606).
gaccgatggctgcatttaa

SEQ ID NO: 453621 - DNA, 19 bp, Mus musculus
  siRNA target sequence for 3930401K13Rik (NM_028720.1,590-608).
ccgatggctgcatttaaat

SEQ ID NO: 453622 - DNA, 19 bp, Mus musculus
  siRNA target sequence for 3930401K13Rik (NM_028720.1,621-639).
cgaccgagccagtcaaaga

SEQ ID NO: 453623 - DNA, 19 bp, Mus musculus
  siRNA target sequence for 3930401K13Rik (NM_028720.1,694-712).
ctgttaccaggcaatcaca

SEQ ID NO: 453624 - DNA, 19 bp, Mus musculus
  siRNA target sequence for 3930401K13Rik (NM_028720.1,701-719).
caggcaatcacaaagaagt

SEQ ID NO: 453625 - DNA, 19 bp, Mus musculus
  siRNA target sequence for 3930401K13Rik (NM_028720.1,709-727).
cacaaagaagttgaaaata

SEQ ID NO: 453626 - DNA, 19 bp, Mus musculus
  siRNA target sequence for 3930401K13Rik (NM_028720.1,776-794).
gctgtgaatggcagcatta

SEQ ID NO: 453627 - DNA, 19 bp, Mus musculus
  siRNA target sequence for 3930401K13Rik (NM_028720.1,801-819).
cagacaaaaagataggatt

SEQ ID NO: 453628 - DNA, 19 bp, Mus musculus
  siRNA target sequence for 3930401K13Rik (NM_028720.1,937-955).
cgctgaagtcgtttcaact

SEQ ID NO: 453629 - DNA, 19 bp, Mus musculus
  siRNA target sequence for 3930401K13Rik (NM_028720.1,938-956).
gctgaagtcgtttcaactt

SEQ ID NO: 453630 - DNA, 19 bp, Mus musculus
  siRNA target sequence for 3930401K13Rik (NM_028720.1,951-969).
caacttgtgacatcacttt

SEQ ID NO: 453631 - DNA, 19 bp, Mus musculus
  siRNA target sequence for 3930401K13Rik (NM_028720.1,1071-1089).
cggtggatgcggatacagt

SEQ ID NO: 453632 - DNA, 19 bp, Mus musculus
  siRNA target sequence for 3930401K13Rik (NM_028720.1,1453-1471).
cctacaaggaaactttaaa

SEQ ID NO: 453633 - DNA, 19 bp, Mus musculus
  siRNA target sequence for 3930401K13Rik (NM_028720.1,1505-1523).
ctccgcctggccattgcat

SEQ ID NO: 453634 - DNA, 19 bp, Mus musculus
  siRNA target sequence for 3930401K13Rik (NM_028720.1,1567-1585).
caatgaggtatacaaaaga

SEQ ID NO: 453635 - DNA, 19 bp, Mus musculus
  siRNA target sequence for 3930401K13Rik (NM_028720.1,1624-1642).
cgtgtaccgagcctacata

SEQ ID NO: 453636 - DNA, 19 bp, Mus musculus
  siRNA target sequence for 4930415K17Rik (NM_133687.1,178-196).
cctgagcgtcggaacaaga

SEQ ID NO: 453637 - DNA, 19 bp, Mus musculus
  siRNA target sequence for 4930415K17Rik (NM_133687.1,188-206).
ggaacaagagcggtatcat

SEQ ID NO: 453638 - DNA, 19 bp, Mus musculus
  siRNA target sequence for 4930415K17Rik (NM_133687.1,633-651).
gggcgctttccccatcaat

SEQ ID NO: 453639 - DNA, 19 bp, Mus musculus
  siRNA target sequence for 4930415K17Rik (NM_133687.1,857-875).
ctggccatcagatttgcaa

SEQ ID NO: 453640 - DNA, 19 bp, Mus musculus
  siRNA target sequence for 4930415K17Rik (NM_133687.1,859-877).
ggccatcagatttgcaaat

SEQ ID NO: 453641 - DNA, 19 bp, Mus musculus
  siRNA target sequence for 4930415K17Rik (NM_133687.1,860-878).
gccatcagatttgcaaatt

SEQ ID NO: 453642 - DNA, 19 bp, Mus musculus
  siRNA target sequence for 4930415K17Rik (NM_133687.1,862-880).
catcagatttgcaaattca

SEQ ID NO: 453643 - DNA, 19 bp, Mus musculus
  siRNA target sequence for 4930429M06Rik (NM_026250.1,69-87).
ccgtagtgggaaaaatggt

SEQ ID NO: 453644 - DNA, 19 bp, Mus musculus
  siRNA target sequence for 4930429M06Rik (NM_026250.1,86-104).
gtgaccttcatcttaaaca

SEQ ID NO: 453645 - DNA, 19 bp, Mus musculus
  siRNA target sequence for 4930429M06Rik (NM_026250.1,94-112).
catcttaaacagattgcat

SEQ ID NO: 453646 - DNA, 19 bp, Mus musculus
  siRNA target sequence for 4930429M06Rik (NM_026250.1,313-331).
gtccatcacggcatttcca

SEQ ID NO: 453647 - DNA, 19 bp, Mus musculus
  siRNA target sequence for 4930429M06Rik (NM_026250.1,387-405).
caagcagtgggtatatgct

SEQ ID NO: 453648 - DNA, 19 bp, Mus musculus
  siRNA target sequence for 4930429M06Rik (NM_026250.1,425-443).
caaaaaatacagttatcgt

SEQ ID NO: 453649 - DNA, 19 bp, Mus musculus
  siRNA target sequence for 4930429M06Rik (NM_026250.1,477-495).
cccgtggagtgtagttact

SEQ ID NO: 453650 - DNA, 19 bp, Mus musculus
  siRNA target sequence for 4930429M06Rik (NM_026250.1,479-497).
cgtggagtgtagttactgt

SEQ ID NO: 453651 - DNA, 19 bp, Mus musculus
  siRNA target sequence for 4930429M06Rik (NM_026250.1,483-501).
gagtgtagttactgttgat

SEQ ID NO: 453652 - DNA, 19 bp, Mus musculus
  siRNA target sequence for 4930429M06Rik (NM_026250.1,533-551).
gtcatgtgtatgctataat

SEQ ID NO: 453653 - DNA, 19 bp, Mus musculus
  siRNA target sequence for 4930429M06Rik (NM_026250.1,538-556).
gtgtatgctataatcatga

SEQ ID NO: 453654 - DNA, 19 bp, Mus musculus
  siRNA target sequence for 4930429M06Rik (NM_026250.1,544-562).
gctataatcatgacagatt

SEQ ID NO: 453655 - DNA, 19 bp, Mus musculus
  siRNA target sequence for 4930429M06Rik (NM_026250.1,545-563).
ctataatcatgacagattt

SEQ ID NO: 453656 - DNA, 19 bp, Mus musculus
  siRNA target sequence for 4930429M06Rik (NM_026250.1,705-723).
caatgtagaactatataga

SEQ ID NO: 453657 - DNA, 19 bp, Mus musculus
  siRNA target sequence for 4930429M06Rik (NM_026250.1,730-748).
ggtgcaaaagagattgtaa

SEQ ID NO: 453658 - DNA, 19 bp, Mus musculus
  siRNA target sequence for 4930429M06Rik (NM_026250.1,731-749).
gtgcaaaagagattgtaat

SEQ ID NO: 453659 - DNA, 19 bp, Mus musculus
  siRNA target sequence for 4930429M06Rik (NM_026250.1,767-785).
gtgttaatccagctgaaaa

SEQ ID NO: 453660 - DNA, 19 bp, Mus musculus
  siRNA target sequence for 4930429M06Rik (NM_026250.1,911-929).
caccgtatttccaaatgtt

SEQ ID NO: 453661 - DNA, 19 bp, Mus musculus
  siRNA target sequence for 4930429M06Rik (NM_026250.1,913-931).
ccgtatttccaaatgttca

SEQ ID NO: 453662 - DNA, 19 bp, Mus musculus
  siRNA target sequence for 4930429M06Rik (NM_026250.1,914-932).
cgtatttccaaatgttcaa

SEQ ID NO: 453663 - DNA, 19 bp, Mus musculus
  siRNA target sequence for 4930429M06Rik (NM_026250.1,1058-1076).
gccagatggagaacaacaa

SEQ ID NO: 453664 - DNA, 19 bp, Mus musculus
  siRNA target sequence for 4930429M06Rik (NM_026250.1,1089-1107).
gagtaaaagcaaagttgtt

SEQ ID NO: 453665 - DNA, 19 bp, Mus musculus
  siRNA target sequence for 4930429M06Rik (NM_026250.1,1091-1109).
gtaaaagcaaagttgttaa

SEQ ID NO: 453666 - DNA, 19 bp, Mus musculus
  siRNA target sequence for 4930429M06Rik (NM_026250.1,1097-1115).
gcaaagttgttaaaaagaa

SEQ ID NO: 453667 - DNA, 19 bp, Mus musculus
  siRNA target sequence for 4930429M06Rik (NM_026250.1,1122-1140).
gcagttaaatccctttcat

SEQ ID NO: 453668 - DNA, 19 bp, Mus musculus
  siRNA target sequence for 4930429M06Rik (NM_026250.1,1149-1167).
gggtcatgaggttttacga

SEQ ID NO: 453669 - DNA, 19 bp, Mus musculus
  siRNA target sequence for 4930429M06Rik (NM_026250.1,1220-1238).
cttgtgtcatcgactacat

SEQ ID NO: 453670 - DNA, 19 bp, Mus musculus
  siRNA target sequence for 4930429M06Rik (NM_026250.1,1227-1245).
catcgactacattacagaa

SEQ ID NO: 453671 - DNA, 19 bp, Mus musculus
  siRNA target sequence for 4930429M06Rik (NM_026250.1,1283-1301).
gactcaaacgacctatcaa

SEQ ID NO: 453672 - DNA, 19 bp, Mus musculus
  siRNA target sequence for 4930429M06Rik (NM_026250.1,1285-1303).
ctcaaacgacctatcaaaa

SEQ ID NO: 453673 - DNA, 19 bp, Mus musculus
  siRNA target sequence for 4930429M06Rik (NM_026250.1,1309-1327).
caccttaggccctatgtga

SEQ ID NO: 453674 - DNA, 19 bp, Mus musculus
  siRNA target sequence for 4930429M06Rik (NM_026250.1,1337-1355).
gtgagcaggacagtcttta

SEQ ID NO: 453675 - DNA, 19 bp, Mus musculus
  siRNA target sequence for 4930429M06Rik (NM_026250.1,1377-1395).
ggcagatcacgactacatt

SEQ ID NO: 453676 - DNA, 19 bp, Mus musculus
  siRNA target sequence for 4930429M06Rik (NM_026250.1,1381-1399).
gatcacgactacattggat

SEQ ID NO: 453677 - DNA, 19 bp, Mus musculus
  siRNA target sequence for 4930429M06Rik (NM_026250.1,1386-1404).
cgactacattggattacct

SEQ ID NO: 453678 - DNA, 19 bp, Mus musculus
  siRNA target sequence for 4930429M06Rik (NM_026250.1,1430-1448).
caaatattctggtagaaga

SEQ ID NO: 453679 - DNA, 19 bp, Mus musculus
  siRNA target sequence for 4930429M06Rik (NM_026250.1,1460-1478).
ggatagctgataatgaact

SEQ ID NO: 453680 - DNA, 19 bp, Mus musculus
  siRNA target sequence for 4930429M06Rik (NM_026250.1,1468-1486).
gataatgaactattgatat

SEQ ID NO: 453681 - DNA, 19 bp, Mus musculus
  siRNA target sequence for 4930429M06Rik (NM_026250.1,1494-1512).
ggatcatgaactcttagaa

SEQ ID NO: 453682 - DNA, 19 bp, Mus musculus
  siRNA target sequence for 4930429M06Rik (NM_026250.1,1495-1513).
gatcatgaactcttagaat

SEQ ID NO: 453683 - DNA, 19 bp, Mus musculus
  siRNA target sequence for 4930429M06Rik (NM_026250.1,1498-1516).
catgaactcttagaatata

SEQ ID NO: 453684 - DNA, 19 bp, Mus musculus
  siRNA target sequence for 4930429M06Rik (NM_026250.1,1524-1542).
caaaatctctgcattggta

SEQ ID NO: 453685 - DNA, 19 bp, Mus musculus
  siRNA target sequence for 4930429M06Rik (NM_026250.1,1577-1595).
gcctactggattcttcaaa

SEQ ID NO: 453686 - DNA, 19 bp, Mus musculus
  siRNA target sequence for 4930429M06Rik (NM_026250.1,1584-1602).
ggattcttcaaatcaagtt

SEQ ID NO: 453687 - DNA, 19 bp, Mus musculus
  siRNA target sequence for 4930429M06Rik (NM_026250.1,1597-1615).
caagttctcgagtacttaa

SEQ ID NO: 453688 - DNA, 19 bp, Mus musculus
  siRNA target sequence for 4930429M06Rik (NM_026250.1,1600-1618).
gttctcgagtacttaagtt

SEQ ID NO: 453689 - DNA, 19 bp, Mus musculus
  siRNA target sequence for 4930431P11Rik (NM_172723.1,282-300).
ggacaacggacagttctta

SEQ ID NO: 453690 - DNA, 19 bp, Mus musculus
  siRNA target sequence for 4930431P11Rik (NM_172723.1,294-312).
gttcttaagccggaagttt

SEQ ID NO: 453691 - DNA, 19 bp, Mus musculus
  siRNA target sequence for 4930431P11Rik (NM_172723.1,331-349).
ggtgccctgaaatacttca

SEQ ID NO: 453692 - DNA, 19 bp, Mus musculus
  siRNA target sequence for 4930431P11Rik (NM_172723.1,442-460).
ctgcaggtcacctacttga

SEQ ID NO: 453693 - DNA, 19 bp, Mus musculus
  siRNA target sequence for 4930431P11Rik (NM_172723.1,470-488).
gcacccgcaacatctttat

SEQ ID NO: 453694 - DNA, 19 bp, Mus musculus
  siRNA target sequence for 4930431P11Rik (NM_172723.1,473-491).
cccgcaacatctttatcta

SEQ ID NO: 453695 - DNA, 19 bp, Mus musculus
  siRNA target sequence for 4930431P11Rik (NM_172723.1,697-715).
cgaaggctcatgtacttca

SEQ ID NO: 453696 - DNA, 19 bp, Mus musculus
  siRNA target sequence for 4930431P11Rik (NM_172723.1,698-716).
gaaggctcatgtacttcaa

SEQ ID NO: 453697 - DNA, 19 bp, Mus musculus
  siRNA target sequence for 4930431P11Rik (NM_172723.1,737-755).
cccgaggggaagtcttcat

SEQ ID NO: 453698 - DNA, 19 bp, Mus musculus
  siRNA target sequence for 4930431P11Rik (NM_172723.1,738-756).
ccgaggggaagtcttcatt

SEQ ID NO: 453699 - DNA, 19 bp, Mus musculus
  siRNA target sequence for 4930431P11Rik (NM_172723.1,821-839).
ggcctcatggcataaccat

SEQ ID NO: 453700 - DNA, 19 bp, Mus musculus
  siRNA target sequence for 4930431P11Rik (NM_172723.1,822-840).
gcctcatggcataaccatt

SEQ ID NO: 453701 - DNA, 19 bp, Mus musculus
  siRNA target sequence for 4930431P11Rik (NM_172723.1,845-863).
cccctgaccgcaaattcct

SEQ ID NO: 453702 - DNA, 19 bp, Mus musculus
  siRNA target sequence for 4930532D21Rik (NM_180958.1,298-316).
catgggcaaccctttgtca

SEQ ID NO: 453703 - DNA, 19 bp, Mus musculus
  siRNA target sequence for 4930532D21Rik (NM_180958.1,302-320).
ggcaaccctttgtcacaaa

SEQ ID NO: 453704 - DNA, 19 bp, Mus musculus
  siRNA target sequence for 4930532D21Rik (NM_180958.1,326-344).
gttttgatcacgattcatt

SEQ ID NO: 453705 - DNA, 19 bp, Mus musculus
  siRNA target sequence for 4930532D21Rik (NM_180958.1,331-349).
gatcacgattcattcagtt

SEQ ID NO: 453706 - DNA, 19 bp, Mus musculus
  siRNA target sequence for 4930532D21Rik (NM_180958.1,386-404).
gaaattggtggtttgatgt

SEQ ID NO: 453707 - DNA, 19 bp, Mus musculus
  siRNA target sequence for 4930532D21Rik (NM_180958.1,395-413).
ggtttgatgtttataataa

SEQ ID NO: 453708 - DNA, 19 bp, Mus musculus
  siRNA target sequence for 4930532D21Rik (NM_180958.1,455-473).
gccttatacacattaggat

SEQ ID NO: 453709 - DNA, 19 bp, Mus musculus
  siRNA target sequence for 4930532D21Rik (NM_180958.1,463-481).
cacattaggatctattgca

SEQ ID NO: 453710 - DNA, 19 bp, Mus musculus
  siRNA target sequence for 4930532D21Rik (NM_180958.1,470-488).
ggatctattgcagaagaaa

SEQ ID NO: 453711 - DNA, 19 bp, Mus musculus
  siRNA target sequence for 4930532D21Rik (NM_180958.1,533-551).
gatttaaccgggctcttaa

SEQ ID NO: 453712 - DNA, 19 bp, Mus musculus
  siRNA target sequence for 4930532D21Rik (NM_180958.1,541-559).
cgggctcttaactaatgat

SEQ ID NO: 453713 - DNA, 19 bp, Mus musculus
  siRNA target sequence for 4930532D21Rik (NM_180958.1,544-562).
gctcttaactaatgatgat

SEQ ID NO: 453714 - DNA, 19 bp, Mus musculus
  siRNA target sequence for 4930532D21Rik (NM_180958.1,545-563).
ctcttaactaatgatgatt

SEQ ID NO: 453715 - DNA, 19 bp, Mus musculus
  siRNA target sequence for 4930532D21Rik (NM_180958.1,582-600).
gaatgtctgtctatgttct

SEQ ID NO: 453716 - DNA, 19 bp, Mus musculus
  siRNA target sequence for 4930532D21Rik (NM_180958.1,604-622).
ggttctggtttcaaataat

SEQ ID NO: 453717 - DNA, 19 bp, Mus musculus
  siRNA target sequence for 4930532D21Rik (NM_180958.1,643-661).
gagagaagtgggttgtatt

SEQ ID NO: 453718 - DNA, 19 bp, Mus musculus
  siRNA target sequence for 4930532D21Rik (NM_180958.1,665-683).
gttctgtcacagatgttca

SEQ ID NO: 453719 - DNA, 19 bp, Mus musculus
  siRNA target sequence for 4930532D21Rik (NM_180958.1,676-694).
gatgttcaggacagttctt

SEQ ID NO: 453720 - DNA, 19 bp, Mus musculus
  siRNA target sequence for 4930532D21Rik (NM_180958.1,682-700).
caggacagttctttccaat

SEQ ID NO: 453721 - DNA, 19 bp, Mus musculus
  siRNA target sequence for 4930532D21Rik (NM_180958.1,684-702).
ggacagttctttccaatta

SEQ ID NO: 453722 - DNA, 19 bp, Mus musculus
  siRNA target sequence for 4930532D21Rik (NM_180958.1,685-703).
gacagttctttccaattat

SEQ ID NO: 453723 - DNA, 19 bp, Mus musculus
  siRNA target sequence for 4930532D21Rik (NM_180958.1,689-707).
gttctttccaattatgagt

SEQ ID NO: 453724 - DNA, 19 bp, Mus musculus
  siRNA target sequence for 4930532D21Rik (NM_180958.1,696-714).
ccaattatgagttgaattt

SEQ ID NO: 453725 - DNA, 19 bp, Mus musculus
  siRNA target sequence for 4930532D21Rik (NM_180958.1,704-722).
gagttgaatttgtcagata

SEQ ID NO: 453726 - DNA, 19 bp, Mus musculus
  siRNA target sequence for 4930532D21Rik (NM_180958.1,706-724).
gttgaatttgtcagataat

SEQ ID NO: 453727 - DNA, 19 bp, Mus musculus
  siRNA target sequence for 4930532D21Rik (NM_180958.1,709-727).
gaatttgtcagataatagt

SEQ ID NO: 453728 - DNA, 19 bp, Mus musculus
  siRNA target sequence for 4930532D21Rik (NM_180958.1,780-798).
gtgtcaacaatcctcaaaa

SEQ ID NO: 453729 - DNA, 19 bp, Mus musculus
  siRNA target sequence for 4930532D21Rik (NM_180958.1,861-879).
gcatgagacctgaggtaat

SEQ ID NO: 453730 - DNA, 19 bp, Mus musculus
  siRNA target sequence for 4930532D21Rik (NM_180958.1,862-880).
catgagacctgaggtaatt

SEQ ID NO: 453731 - DNA, 19 bp, Mus musculus
  siRNA target sequence for 4930532D21Rik (NM_180958.1,865-883).
gagacctgaggtaattcga

SEQ ID NO: 453732 - DNA, 19 bp, Mus musculus
  siRNA target sequence for 4930532D21Rik (NM_180958.1,872-890).
gaggtaattcgacctatat

SEQ ID NO: 453733 - DNA, 19 bp, Mus musculus
  siRNA target sequence for 4930532D21Rik (NM_180958.1,875-893).
gtaattcgacctatatgct

SEQ ID NO: 453734 - DNA, 19 bp, Mus musculus
  siRNA target sequence for 4930532D21Rik (NM_180958.1,881-899).
cgacctatatgctcattta

SEQ ID NO: 453735 - DNA, 19 bp, Mus musculus
  siRNA target sequence for 4930532D21Rik (NM_180958.1,882-900).
gacctatatgctcatttat

SEQ ID NO: 453736 - DNA, 19 bp, Mus musculus
  siRNA target sequence for 4930532D21Rik (NM_180958.1,892-910).
ctcatttattggacttact

SEQ ID NO: 453737 - DNA, 19 bp, Mus musculus
  siRNA target sequence for 4930532D21Rik (NM_180958.1,894-912).
catttattggacttactct

SEQ ID NO: 453738 - DNA, 19 bp, Mus musculus
  siRNA target sequence for 4930532D21Rik (NM_180958.1,902-920).
ggacttactcttgcaaata

SEQ ID NO: 453739 - DNA, 19 bp, Mus musculus
  siRNA target sequence for 4930532D21Rik (NM_180958.1,951-969).
cgggtggactggatgtttt

SEQ ID NO: 453740 - DNA, 19 bp, Mus musculus
  siRNA target sequence for 4930532D21Rik (NM_180958.1,961-979).
ggatgttttgtgtcaagtt

SEQ ID NO: 453741 - DNA, 19 bp, Mus musculus
  siRNA target sequence for 4930532D21Rik (NM_180958.1,994-1012).
gtctgattcacacaatact

SEQ ID NO: 453742 - DNA, 19 bp, Mus musculus
  siRNA target sequence for 4930532D21Rik (NM_180958.1,1023-1041).
ctaagcttgcagtcatagt

SEQ ID NO: 453743 - DNA, 19 bp, Mus musculus
  siRNA target sequence for 4930532D21Rik (NM_180958.1,1051-1069).
catggatgcatgtattact

SEQ ID NO: 453744 - DNA, 19 bp, Mus musculus
  siRNA target sequence for 4930532D21Rik (NM_180958.1,1054-1072).
ggatgcatgtattactgat

SEQ ID NO: 453745 - DNA, 19 bp, Mus musculus
  siRNA target sequence for 4930532D21Rik (NM_180958.1,1055-1073).
gatgcatgtattactgata

SEQ ID NO: 453746 - DNA, 19 bp, Mus musculus
  siRNA target sequence for 4930532D21Rik (NM_180958.1,1058-1076).
gcatgtattactgataact

SEQ ID NO: 453747 - DNA, 19 bp, Mus musculus
  siRNA target sequence for 4930532D21Rik (NM_180958.1,1082-1100).
gcttttacagtggtattat

SEQ ID NO: 453748 - DNA, 19 bp, Mus musculus
  siRNA target sequence for 4930532D21Rik (NM_180958.1,1119-1137).
ctacacttctggcattact

SEQ ID NO: 453749 - DNA, 19 bp, Mus musculus
  siRNA target sequence for 4930532D21Rik (NM_180958.1,1138-1156).
gcttcatgaaagtcttgat

SEQ ID NO: 453750 - DNA, 19 bp, Mus musculus
  siRNA target sequence for 4930532D21Rik (NM_180958.1,1151-1169).
cttgattcaagagaaaaat

SEQ ID NO: 453751 - DNA, 19 bp, Mus musculus
  siRNA target sequence for 4930532D21Rik (NM_180958.1,1209-1227).
gtgagaaaaatcagtatga

SEQ ID NO: 453752 - DNA, 19 bp, Mus musculus
  siRNA target sequence for 4930532D21Rik (NM_180958.1,1245-1263).
ggcttccattgatgataca

SEQ ID NO: 453753 - DNA, 19 bp, Mus musculus
  siRNA target sequence for 4930532D21Rik (NM_180958.1,1246-1264).
gcttccattgatgatacaa

SEQ ID NO: 453754 - DNA, 19 bp, Mus musculus
  siRNA target sequence for 4930532D21Rik (NM_180958.1,1262-1280).
caagccttaactgagttta

SEQ ID NO: 453755 - DNA, 19 bp, Mus musculus
  siRNA target sequence for 4930532D21Rik (NM_180958.1,1282-1300).
gaatgaagacctaagcaaa

SEQ ID NO: 453756 - DNA, 19 bp, Mus musculus
  siRNA target sequence for 4930532D21Rik (NM_180958.1,1305-1323).
ccacttacgtgcttcacaa

SEQ ID NO: 453757 - DNA, 19 bp, Mus musculus
  siRNA target sequence for 4930532D21Rik (NM_180958.1,1356-1374).
gtctaggacagaattcttt

SEQ ID NO: 453758 - DNA, 19 bp, Mus musculus
  siRNA target sequence for 4930532D21Rik (NM_180958.1,1408-1426).
cgaaaaagagactcttaga

SEQ ID NO: 453759 - DNA, 19 bp, Mus musculus
  siRNA target sequence for 4930532D21Rik (NM_180958.1,1439-1457).
gcagcaaaggaaattctat

SEQ ID NO: 453760 - DNA, 19 bp, Mus musculus
  siRNA target sequence for 4930532D21Rik (NM_180958.1,1447-1465).
ggaaattctatgcagaata

SEQ ID NO: 453761 - DNA, 19 bp, Mus musculus
  siRNA target sequence for 4930532D21Rik (NM_180958.1,1509-1527).
ggagtggacactataagga

SEQ ID NO: 453762 - DNA, 19 bp, Mus musculus
  siRNA target sequence for 4930532D21Rik (NM_180958.1,1510-1528).
gagtggacactataaggat

SEQ ID NO: 453763 - DNA, 19 bp, Mus musculus
  siRNA target sequence for 4930532D21Rik (NM_180958.1,1512-1530).
gtggacactataaggataa

SEQ ID NO: 453764 - DNA, 19 bp, Mus musculus
  siRNA target sequence for 4930532D21Rik (NM_180958.1,1514-1532).
ggacactataaggataata

SEQ ID NO: 453765 - DNA, 19 bp, Mus musculus
  siRNA target sequence for 4930532D21Rik (NM_180958.1,1526-1544).
gataataccccatctatga

SEQ ID NO: 453766 - DNA, 19 bp, Mus musculus
  siRNA target sequence for 4930532D21Rik (NM_180958.1,1600-1618).
cagagcagaagataaggat

SEQ ID NO: 453767 - DNA, 19 bp, Mus musculus
  siRNA target sequence for 4930532D21Rik (NM_180958.1,1604-1622).
gcagaagataaggatataa

SEQ ID NO: 453768 - DNA, 19 bp, Mus musculus
  siRNA target sequence for 4930532D21Rik (NM_180958.1,1632-1650).
gagagcttcgcagctataa

SEQ ID NO: 453769 - DNA, 19 bp, Mus musculus
  siRNA target sequence for 4930532D21Rik (NM_180958.1,1716-1734).
caaatccagttcatccttt

SEQ ID NO: 453770 - DNA, 19 bp, Mus musculus
  siRNA target sequence for 4930532D21Rik (NM_180958.1,1749-1767).
ggcagagtaagattgtaca

SEQ ID NO: 453771 - DNA, 19 bp, Mus musculus
  siRNA target sequence for 4930532D21Rik (NM_180958.1,1753-1771).
gagtaagattgtacatgaa

SEQ ID NO: 453772 - DNA, 19 bp, Mus musculus
  siRNA target sequence for 4930532D21Rik (NM_180958.1,1845-1863).
gtgaccaggtccttaaaca

SEQ ID NO: 453773 - DNA, 19 bp, Mus musculus
  siRNA target sequence for 4930532D21Rik (NM_180958.1,1867-1885).
gcctcatactgtcaaaaat

SEQ ID NO: 453774 - DNA, 19 bp, Mus musculus
  siRNA target sequence for 4930532D21Rik (NM_180958.1,1868-1886).
cctcatactgtcaaaaata

SEQ ID NO: 453775 - DNA, 19 bp, Mus musculus
  siRNA target sequence for 4930532D21Rik (NM_180958.1,1907-1925).
gatccatttacattgtgtt

SEQ ID NO: 453776 - DNA, 19 bp, Mus musculus
  siRNA target sequence for 4930532D21Rik (NM_180958.1,1921-1939).
gtgtttagacataatagat

SEQ ID NO: 453777 - DNA, 19 bp, Mus musculus
  siRNA target sequence for 4930532D21Rik (NM_180958.1,1930-1948).
cataatagatagagaagtt

SEQ ID NO: 453778 - DNA, 19 bp, Mus musculus
  siRNA target sequence for 4930532D21Rik (NM_180958.1,1993-2011).
gtgctcaggttgcatagta

SEQ ID NO: 453779 - DNA, 19 bp, Mus musculus
  siRNA target sequence for 4930532D21Rik (NM_180958.1,2004-2022).
gcatagtagcaagaaaact

SEQ ID NO: 453780 - DNA, 19 bp, Mus musculus
  siRNA target sequence for 4930532D21Rik (NM_180958.1,2023-2041).
cctcaacagccgaaatttt

SEQ ID NO: 453781 - DNA, 19 bp, Mus musculus
  siRNA target sequence for 4930532D21Rik (NM_180958.1,2024-2042).
ctcaacagccgaaatttta

SEQ ID NO: 453782 - DNA, 19 bp, Mus musculus
  siRNA target sequence for 4930532D21Rik (NM_180958.1,2032-2050).
ccgaaattttagcaagttt

SEQ ID NO: 453783 - DNA, 19 bp, Mus musculus
  siRNA target sequence for 4930532D21Rik (NM_180958.1,2068-2086).
ccagtgtgttcaccataaa

SEQ ID NO: 453784 - DNA, 19 bp, Mus musculus
  siRNA target sequence for 4930532D21Rik (NM_180958.1,2075-2093).
gttcaccataaagtcatta

SEQ ID NO: 453785 - DNA, 19 bp, Mus musculus
  siRNA target sequence for 4930532D21Rik (NM_180958.1,2284-2302).
cattccagaggctatggaa

SEQ ID NO: 453786 - DNA, 19 bp, Mus musculus
  siRNA target sequence for 4930532D21Rik (NM_180958.1,2387-2405).
cttttccatggagttaaaa

SEQ ID NO: 453787 - DNA, 19 bp, Mus musculus
  siRNA target sequence for 4930532D21Rik (NM_180958.1,2411-2429).
ggaaatcattggaattcaa

SEQ ID NO: 453788 - DNA, 19 bp, Mus musculus
  siRNA target sequence for 4930532D21Rik (NM_180958.1,2417-2435).
cattggaattcaattttgt

SEQ ID NO: 453789 - DNA, 19 bp, Mus musculus
  siRNA target sequence for 4931428F02Rik (NM_027642.1,225-243).
gctcaattgaacagaaaaa

SEQ ID NO: 453790 - DNA, 19 bp, Mus musculus
  siRNA target sequence for 4931428F02Rik (NM_027642.1,271-289).
cttttgtaagtcaaataga

SEQ ID NO: 453791 - DNA, 19 bp, Mus musculus
  siRNA target sequence for 4931428F02Rik (NM_027642.1,303-321).
gacagttactgatatctga

SEQ ID NO: 453792 - DNA, 19 bp, Mus musculus
  siRNA target sequence for 4931428F02Rik (NM_027642.1,374-392).
gtgtcctcacattctgata

SEQ ID NO: 453793 - DNA, 19 bp, Mus musculus
  siRNA target sequence for 4931428F02Rik (NM_027642.1,376-394).
gtcctcacattctgataat

SEQ ID NO: 453794 - DNA, 19 bp, Mus musculus
  siRNA target sequence for 4931428F02Rik (NM_027642.1,378-396).
cctcacattctgataatga

SEQ ID NO: 453795 - DNA, 19 bp, Mus musculus
  siRNA target sequence for 4931428F02Rik (NM_027642.1,395-413).
gagagtcttggtggatttt

SEQ ID NO: 453796 - DNA, 19 bp, Mus musculus
  siRNA target sequence for 4931428F02Rik (NM_027642.1,405-423).
gtggattttctattgaaga

SEQ ID NO: 453797 - DNA, 19 bp, Mus musculus
  siRNA target sequence for 4931428F02Rik (NM_027642.1,572-590).
ccttcgcaagggatttaca

SEQ ID NO: 453798 - DNA, 19 bp, Mus musculus
  siRNA target sequence for 4931428F02Rik (NM_027642.1,583-601).
gatttacatggtttattgt

SEQ ID NO: 453799 - DNA, 19 bp, Mus musculus
  siRNA target sequence for 4931428F02Rik (NM_027642.1,593-611).
gtttattgtcgaaaacaca

SEQ ID NO: 453800 - DNA, 19 bp, Mus musculus
  siRNA target sequence for 4931428F02Rik (NM_027642.1,628-646).
ctcggaagctgatttagaa

SEQ ID NO: 453801 - DNA, 19 bp, Mus musculus
  siRNA target sequence for 4931428F02Rik (NM_027642.1,630-648).
cggaagctgatttagaaga

SEQ ID NO: 453802 - DNA, 19 bp, Mus musculus
  siRNA target sequence for 4931428F02Rik (NM_027642.1,635-653).
gctgatttagaagaaagtt

SEQ ID NO: 453803 - DNA, 19 bp, Mus musculus
  siRNA target sequence for 4931428F02Rik (NM_027642.1,636-654).
ctgatttagaagaaagttt

SEQ ID NO: 453804 - DNA, 19 bp, Mus musculus
  siRNA target sequence for 4931428F02Rik (NM_027642.1,820-838).
caggagcagtcctaatgat

SEQ ID NO: 453805 - DNA, 19 bp, Mus musculus
  siRNA target sequence for 4931428F02Rik (NM_027642.1,923-941).
gcagccgcacattacaagt

SEQ ID NO: 453806 - DNA, 19 bp, Mus musculus
  siRNA target sequence for 4931428F02Rik (NM_027642.1,978-996).
caacatcaagagcagaatt

SEQ ID NO: 453807 - DNA, 19 bp, Mus musculus
  siRNA target sequence for 4931428F02Rik (NM_027642.1,1017-1035).
ctgtacttcaggagattaa

SEQ ID NO: 453808 - DNA, 19 bp, Mus musculus
  siRNA target sequence for 4931428F02Rik (NM_027642.1,1037-1055).
cgaggaaaaaggatgaaat

SEQ ID NO: 453809 - DNA, 19 bp, Mus musculus
  siRNA target sequence for 4931428F02Rik (NM_027642.1,1072-1090).
gcctggtgctactattgga

SEQ ID NO: 453810 - DNA, 19 bp, Mus musculus
  siRNA target sequence for 4931428F02Rik (NM_027642.1,1073-1091).
cctggtgctactattggat

SEQ ID NO: 453811 - DNA, 19 bp, Mus musculus
  siRNA target sequence for 4931428F02Rik (NM_027642.1,1144-1162).
caaggcaaaatacattgaa

SEQ ID NO: 453812 - DNA, 19 bp, Mus musculus
  siRNA target sequence for 4931428F02Rik (NM_027642.1,1170-1188).
cacgaggaatttacaaact

SEQ ID NO: 453813 - DNA, 19 bp, Mus musculus
  siRNA target sequence for 4931428F02Rik (NM_027642.1,1172-1190).
cgaggaatttacaaactct

SEQ ID NO: 453814 - DNA, 19 bp, Mus musculus
  siRNA target sequence for 4931428F02Rik (NM_027642.1,1173-1191).
gaggaatttacaaactcta

SEQ ID NO: 453815 - DNA, 19 bp, Mus musculus
  siRNA target sequence for 4931428F02Rik (NM_027642.1,1260-1278).
gaagagtagcgattgatca

SEQ ID NO: 453816 - DNA, 19 bp, Mus musculus
  siRNA target sequence for 4932409F11Rik (NM_029404.1,511-529).
gttggagatgcttcagatt

SEQ ID NO: 453817 - DNA, 19 bp, Mus musculus
  siRNA target sequence for 4932409F11Rik (NM_029404.1,532-550).
gaagggagtggtaatggaa

SEQ ID NO: 453818 - DNA, 19 bp, Mus musculus
  siRNA target sequence for 4932409F11Rik (NM_029404.1,681-699).
gccatcagacaaacagtta

SEQ ID NO: 453819 - DNA, 19 bp, Mus musculus
  siRNA target sequence for 4932409F11Rik (NM_029404.1,682-700).
ccatcagacaaacagttaa

SEQ ID NO: 453820 - DNA, 19 bp, Mus musculus
  siRNA target sequence for 4932409F11Rik (NM_029404.1,683-701).
catcagacaaacagttaat

SEQ ID NO: 453821 - DNA, 19 bp, Mus musculus
  siRNA target sequence for 4932409F11Rik (NM_029404.1,686-704).
cagacaaacagttaattaa

SEQ ID NO: 453822 - DNA, 19 bp, Mus musculus
  siRNA target sequence for 4932409F11Rik (NM_029404.1,930-948).
gcccaagaaatggaatctt

SEQ ID NO: 453823 - DNA, 19 bp, Mus musculus
  siRNA target sequence for 4932409F11Rik (NM_029404.1,959-977).
gtcccctgttggactttgt

SEQ ID NO: 453824 - DNA, 19 bp, Mus musculus
  siRNA target sequence for 4932409F11Rik (NM_029404.1,961-979).
cccctgttggactttgtat

SEQ ID NO: 453825 - DNA, 19 bp, Mus musculus
  siRNA target sequence for 4932409F11Rik (NM_029404.1,991-1009).
ctcaatgctatggatgatt

SEQ ID NO: 453826 - DNA, 19 bp, Mus musculus
  siRNA target sequence for 4932409F11Rik (NM_029404.1,1342-1360).
gaccacattctgatttgct

SEQ ID NO: 453827 - DNA, 19 bp, Mus musculus
  siRNA target sequence for 4932409F11Rik (NM_029404.1,1361-1379).
gtgtttgtcttggagataa

SEQ ID NO: 453828 - DNA, 19 bp, Mus musculus
  siRNA target sequence for 4932409F11Rik (NM_029404.1,1363-1381).
gtttgtcttggagataata

SEQ ID NO: 453829 - DNA, 19 bp, Mus musculus
  siRNA target sequence for 4932409F11Rik (NM_029404.1,1390-1408).
gcagatgaaataattcagt

SEQ ID NO: 453830 - DNA, 19 bp, Mus musculus
  siRNA target sequence for 4932409F11Rik (NM_029404.1,1418-1436).
gtggcattacagttcatga

SEQ ID NO: 453831 - DNA, 19 bp, Mus musculus
  siRNA target sequence for 4932409F11Rik (NM_029404.1,1456-1474).
ggggagagtgactctatta

SEQ ID NO: 453832 - DNA, 19 bp, Mus musculus
  siRNA target sequence for 4932409F11Rik (NM_029404.1,1459-1477).
gagagtgactctattatga

SEQ ID NO: 453833 - DNA, 19 bp, Mus musculus
  siRNA target sequence for 4932409F11Rik (NM_029404.1,1461-1479).
gagtgactctattatgagt

SEQ ID NO: 453834 - DNA, 19 bp, Mus musculus
  siRNA target sequence for 4932409F11Rik (NM_029404.1,1521-1539).
ctgtaaatgtggtgtatct

SEQ ID NO: 453835 - DNA, 19 bp, Mus musculus
  siRNA target sequence for 4932409F11Rik (NM_029404.1,1545-1563).
ctgtgaactatgtcctaat

SEQ ID NO: 453836 - DNA, 19 bp, Mus musculus
  siRNA target sequence for 4932409F11Rik (NM_029404.1,1547-1565).
gtgaactatgtcctaatca

SEQ ID NO: 453837 - DNA, 19 bp, Mus musculus
  siRNA target sequence for 4932409F11Rik (NM_029404.1,1664-1682).
gaccagtaacgctaacaga

SEQ ID NO: 453838 - DNA, 19 bp, Mus musculus
  siRNA target sequence for 4932409F11Rik (NM_029404.1,1666-1684).
ccagtaacgctaacagaaa

SEQ ID NO: 453839 - DNA, 19 bp, Mus musculus
  siRNA target sequence for 4932409F11Rik (NM_029404.1,1667-1685).
cagtaacgctaacagaaat

SEQ ID NO: 453840 - DNA, 19 bp, Mus musculus
  siRNA target sequence for 4932409F11Rik (NM_029404.1,1669-1687).
gtaacgctaacagaaatga

SEQ ID NO: 453841 - DNA, 19 bp, Mus musculus
  siRNA target sequence for 4932409F11Rik (NM_029404.1,1686-1704).
gaactattctaaatatggt

SEQ ID NO: 453842 - DNA, 19 bp, Mus musculus
  siRNA target sequence for 4932409F11Rik (NM_029404.1,1705-1723).
gccaaggagtgtagctttt

SEQ ID NO: 453843 - DNA, 19 bp, Mus musculus
  siRNA target sequence for 4932409F11Rik (NM_029404.1,1707-1725).
caaggagtgtagcttttgt

SEQ ID NO: 453844 - DNA, 19 bp, Mus musculus
  siRNA target sequence for 4932409F11Rik (NM_029404.1,1710-1728).
ggagtgtagcttttgtgaa

SEQ ID NO: 453845 - DNA, 19 bp, Mus musculus
  siRNA target sequence for 4932409F11Rik (NM_029404.1,1726-1744).
gaagatcctcgctttgcta

SEQ ID NO: 453846 - DNA, 19 bp, Mus musculus
  siRNA target sequence for 4932409F11Rik (NM_029404.1,1775-1793).
gcatgtgtagagcctattt

SEQ ID NO: 453847 - DNA, 19 bp, Mus musculus
  siRNA target sequence for 4932409F11Rik (NM_029404.1,1855-1873).
gcagatccattttttgctt

SEQ ID NO: 453848 - DNA, 19 bp, Mus musculus
  siRNA target sequence for 4932409F11Rik (NM_029404.1,1885-1903).
catgcagacagattagaca

SEQ ID NO: 453849 - DNA, 19 bp, Mus musculus
  siRNA target sequence for 4932409F11Rik (NM_029404.1,1895-1913).
gattagacagaaaatggaa

SEQ ID NO: 453850 - DNA, 19 bp, Mus musculus
  siRNA target sequence for 4932409F11Rik (NM_029404.1,1933-1951).
ctacaatcctattgtaaaa

SEQ ID NO: 453851 - DNA, 19 bp, Mus musculus
  siRNA target sequence for 4932409F11Rik (NM_029404.1,2010-2028).
ccgactacagcaatatcgt

SEQ ID NO: 453852 - DNA, 19 bp, Mus musculus
  siRNA target sequence for 4932409F11Rik (NM_029404.1,2108-2126).
gtgcttcggctattcgtaa

SEQ ID NO: 453853 - DNA, 19 bp, Mus musculus
  siRNA target sequence for 4932409F11Rik (NM_029404.1,2114-2132).
cggctattcgtaagcttat

SEQ ID NO: 453854 - DNA, 19 bp, Mus musculus
  siRNA target sequence for 4932409F11Rik (NM_029404.1,2152-2170).
ggaatcagtacggatatct

SEQ ID NO: 453855 - DNA, 19 bp, Mus musculus
  siRNA target sequence for 4932409F11Rik (NM_029404.1,2176-2194).
gtggacaactcagatacta

SEQ ID NO: 453856 - DNA, 19 bp, Mus musculus
  siRNA target sequence for 4932409F11Rik (NM_029404.1,2179-2197).
gacaactcagatactagtt

SEQ ID NO: 453857 - DNA, 19 bp, Mus musculus
  siRNA target sequence for 4932409F11Rik (NM_029404.1,2206-2224).
gatggaaggcggaagcata

SEQ ID NO: 453858 - DNA, 19 bp, Mus musculus
  siRNA target sequence for 4932409F11Rik (NM_029404.1,2232-2250).
cgctctcactgctgatttt

SEQ ID NO: 453859 - DNA, 19 bp, Mus musculus
  siRNA target sequence for 4932409F11Rik (NM_029404.1,2268-2286).
gagaaatatgcgcatgatt

SEQ ID NO: 453860 - DNA, 19 bp, Mus musculus
  siRNA target sequence for 4932409F11Rik (NM_029404.1,2304-2322).
ggctgaacaaaagaatata

SEQ ID NO: 453861 - DNA, 19 bp, Mus musculus
  siRNA target sequence for 4932409F11Rik (NM_029404.1,2343-2361).
gcaagaaaagcttcatgta

SEQ ID NO: 453862 - DNA, 19 bp, Mus musculus
  siRNA target sequence for 4932409F11Rik (NM_029404.1,2445-2463).
cttacttggccgaattaca

SEQ ID NO: 453863 - DNA, 19 bp, Mus musculus
  siRNA target sequence for 4932409F11Rik (NM_029404.1,2490-2508).
cttacgagcacctaaggaa

SEQ ID NO: 453864 - DNA, 19 bp, Mus musculus
  siRNA target sequence for 4932409F11Rik (NM_029404.1,2495-2513).
gagcacctaaggaaaggaa

SEQ ID NO: 453865 - DNA, 19 bp, Mus musculus
  siRNA target sequence for 4932409F11Rik (NM_029404.1,2530-2548).
ggaggcacacaaaagacat

SEQ ID NO: 453866 - DNA, 19 bp, Mus musculus
  siRNA target sequence for 4932409F11Rik (NM_029404.1,2585-2603).
gtaagaagaaccatgatca

SEQ ID NO: 453867 - DNA, 19 bp, Mus musculus
  siRNA target sequence for 4932409F11Rik (NM_029404.1,2625-2643).
cacctgtaaactgcattat

SEQ ID NO: 453868 - DNA, 19 bp, Mus musculus
  siRNA target sequence for 4932409F11Rik (NM_029404.1,2656-2674).
cttgatcctcctcttacaa

SEQ ID NO: 453869 - DNA, 19 bp, Mus musculus
  siRNA target sequence for 4932409F11Rik (NM_029404.1,2684-2702).
gaaagacgaaaaacagtta

SEQ ID NO: 453870 - DNA, 19 bp, Mus musculus
  siRNA target sequence for 4932409F11Rik (NM_029404.1,2754-2772).
gatggccatggaaacctta

SEQ ID NO: 453871 - DNA, 19 bp, Mus musculus
  siRNA target sequence for 4932409F11Rik (NM_029404.1,2949-2967).
gcagaggcagtctgtgtta

SEQ ID NO: 453872 - DNA, 19 bp, Mus musculus
  siRNA target sequence for 4932409F11Rik (NM_029404.1,3023-3041).
ctggagataatgagaatct

SEQ ID NO: 453873 - DNA, 19 bp, Mus musculus
  siRNA target sequence for 4932409F11Rik (NM_029404.1,3026-3044).
gagataatgagaatcttgt

SEQ ID NO: 453874 - DNA, 19 bp, Mus musculus
  siRNA target sequence for 4932411N23 (NM_177705.2,618-636).
gagctctgtcttacttagt

SEQ ID NO: 453875 - DNA, 19 bp, Mus musculus
  siRNA target sequence for 4932411N23 (NM_177705.2,697-715).
cctactgaacctctgaata

SEQ ID NO: 453876 - DNA, 19 bp, Mus musculus
  siRNA target sequence for 4932411N23 (NM_177705.2,698-716).
ctactgaacctctgaataa

SEQ ID NO: 453877 - DNA, 19 bp, Mus musculus
  siRNA target sequence for 4932411N23 (NM_177705.2,729-747).
gtcctctgaagttgattct

SEQ ID NO: 453878 - DNA, 19 bp, Mus musculus
  siRNA target sequence for 4932411N23 (NM_177705.2,742-760).
gattctacttcgtatatgt

SEQ ID NO: 453879 - DNA, 19 bp, Mus musculus
  siRNA target sequence for 4932411N23 (NM_177705.2,753-771).
gtatatgtcagctcttgaa

SEQ ID NO: 453880 - DNA, 19 bp, Mus musculus
  siRNA target sequence for 4932411N23 (NM_177705.2,769-787).
gaattcccactacaagaaa

SEQ ID NO: 453881 - DNA, 19 bp, Mus musculus
  siRNA target sequence for 4932411N23 (NM_177705.2,781-799).
caagaaatggagcaaagtt

SEQ ID NO: 453882 - DNA, 19 bp, Mus musculus
  siRNA target sequence for 4932411N23 (NM_177705.2,850-868).
ggggaaaatatgatgcaat

SEQ ID NO: 453883 - DNA, 19 bp, Mus musculus
  siRNA target sequence for 4932411N23 (NM_177705.2,864-882).
gcaattcgaggttttaaaa

SEQ ID NO: 453884 - DNA, 19 bp, Mus musculus
  siRNA target sequence for 4932411N23 (NM_177705.2,940-958).
caagcatggttcacaagta

SEQ ID NO: 453885 - DNA, 19 bp, Mus musculus
  siRNA target sequence for 4932411N23 (NM_177705.2,965-983).
ctaaggatgctctaactca

SEQ ID NO: 453886 - DNA, 19 bp, Mus musculus
  siRNA target sequence for 4932411N23 (NM_177705.2,1017-1035).
caaggaagaaacagctatt

SEQ ID NO: 453887 - DNA, 19 bp, Mus musculus
  siRNA target sequence for 4932411N23 (NM_177705.2,1028-1046).
cagctattctgatgaacaa

SEQ ID NO: 453888 - DNA, 19 bp, Mus musculus
  siRNA target sequence for 4932411N23 (NM_177705.2,1141-1159).
gtatcattgggtctgaata

SEQ ID NO: 453889 - DNA, 19 bp, Mus musculus
  siRNA target sequence for 4932411N23 (NM_177705.2,1153-1171).
ctgaatagacctttgtttt

SEQ ID NO: 453890 - DNA, 19 bp, Mus musculus
  siRNA target sequence for 4932411N23 (NM_177705.2,1181-1199).
gaagagtggtccgaatgta

SEQ ID NO: 453891 - DNA, 19 bp, Mus musculus
  siRNA target sequence for 4932411N23 (NM_177705.2,1229-1247).
gccctgaggaaatagagaa

SEQ ID NO: 453892 - DNA, 19 bp, Mus musculus
  siRNA target sequence for 4932411N23 (NM_177705.2,1543-1561).
cagactggtggtattgagt

SEQ ID NO: 453893 - DNA, 19 bp, Mus musculus
  siRNA target sequence for 4932411N23 (NM_177705.2,1595-1613).
ggctagtagagcttgatgt

SEQ ID NO: 453894 - DNA, 19 bp, Mus musculus
  siRNA target sequence for 4932411N23 (NM_177705.2,1627-1645).
gaaattcgctgggatgaat

SEQ ID NO: 453895 - DNA, 19 bp, Mus musculus
  siRNA target sequence for 4932411N23 (NM_177705.2,1633-1651).
cgctgggatgaattagcta

SEQ ID NO: 453896 - DNA, 19 bp, Mus musculus
  siRNA target sequence for 4932411N23 (NM_177705.2,1635-1653).
ctgggatgaattagctaaa

SEQ ID NO: 453897 - DNA, 19 bp, Mus musculus
  siRNA target sequence for 4932411N23 (NM_177705.2,1675-1693).
ccacaatggctgcgaaata

SEQ ID NO: 453898 - DNA, 19 bp, Mus musculus
  siRNA target sequence for 4932411N23 (NM_177705.2,1676-1694).
cacaatggctgcgaaataa

SEQ ID NO: 453899 - DNA, 19 bp, Mus musculus
  siRNA target sequence for 4932411N23 (NM_177705.2,1678-1696).
caatggctgcgaaataaat

SEQ ID NO: 453900 - DNA, 19 bp, Mus musculus
  siRNA target sequence for 4932411N23 (NM_177705.2,1743-1761).
cccagtcctagtaagatgt

SEQ ID NO: 453901 - DNA, 19 bp, Mus musculus
  siRNA target sequence for 4932411N23 (NM_177705.2,1795-1813).
ctcaggttttgggagaata

SEQ ID NO: 453902 - DNA, 19 bp, Mus musculus
  siRNA target sequence for 4932411N23 (NM_177705.2,1867-1885).
ccctttggagtcacaagta

SEQ ID NO: 453903 - DNA, 19 bp, Mus musculus
  siRNA target sequence for 4932411N23 (NM_177705.2,1868-1886).
cctttggagtcacaagtat

SEQ ID NO: 453904 - DNA, 19 bp, Mus musculus
  siRNA target sequence for 4932411N23 (NM_177705.2,1920-1938).
catgacaggattgcaaatt

SEQ ID NO: 453905 - DNA, 19 bp, Mus musculus
  siRNA target sequence for 4932442K08Rik (NM_024203.1,510-528).
gtgtacacaccctgaattt

SEQ ID NO: 453906 - DNA, 19 bp, Mus musculus
  siRNA target sequence for 4932442K08Rik (NM_024203.1,512-530).
gtacacaccctgaatttaa

SEQ ID NO: 453907 - DNA, 19 bp, Mus musculus
  siRNA target sequence for 4932442K08Rik (NM_024203.1,546-564).
ggatatggaacctgaaata

SEQ ID NO: 453908 - DNA, 19 bp, Mus musculus
  siRNA target sequence for 4932442K08Rik (NM_024203.1,640-658).
ctagtgtacaacattctga

SEQ ID NO: 453909 - DNA, 19 bp, Mus musculus
  siRNA target sequence for 4932442K08Rik (NM_024203.1,715-733).
ccgagccaagcctttatct

SEQ ID NO: 453910 - DNA, 19 bp, Mus musculus
  siRNA target sequence for 4932442K08Rik (NM_024203.1,961-979).
ctagcctgcttcaaccttt

SEQ ID NO: 453911 - DNA, 19 bp, Mus musculus
  siRNA target sequence for 4932442K08Rik (NM_024203.1,1054-1072).
gtccaggtggacactcttt

SEQ ID NO: 453912 - DNA, 19 bp, Mus musculus
  siRNA target sequence for 4932442K08Rik (NM_024203.1,1133-1151).
cccagctcatgcacttaca

SEQ ID NO: 453913 - DNA, 19 bp, Mus musculus
  siRNA target sequence for 4932442K08Rik (NM_024203.1,1144-1162).
cacttacagctggattaca

SEQ ID NO: 453914 - DNA, 19 bp, Mus musculus
  siRNA target sequence for 4932442K08Rik (NM_024203.1,1150-1168).
cagctggattacattaact

SEQ ID NO: 453915 - DNA, 19 bp, Mus musculus
  siRNA target sequence for 4932442K08Rik (NM_024203.1,1211-1229).
ccacattggtactagtcaa

SEQ ID NO: 453916 - DNA, 19 bp, Mus musculus
  siRNA target sequence for 4932442K08Rik (NM_024203.1,1212-1230).
cacattggtactagtcaat

SEQ ID NO: 453917 - DNA, 19 bp, Mus musculus
  siRNA target sequence for 4932442K08Rik (NM_024203.1,1328-1346).
gatatgccgtggaagttct

SEQ ID NO: 453918 - DNA, 19 bp, Mus musculus
  siRNA target sequence for 4932442K08Rik (NM_024203.1,1573-1591).
cgtaaccactggagaagat

SEQ ID NO: 453919 - DNA, 19 bp, Mus musculus
  siRNA target sequence for 4933430F08Rik (NM_028967.1,389-407).
ctgcccctcttggatacaa

SEQ ID NO: 453920 - DNA, 19 bp, Mus musculus
  siRNA target sequence for 5430432N15Rik (NM_172418.1,716-734).
cacacaagctggaacttca

SEQ ID NO: 453921 - DNA, 19 bp, Mus musculus
  siRNA target sequence for 5430432N15Rik (NM_172418.1,726-744).
ggaacttcagacccttaaa

SEQ ID NO: 453922 - DNA, 19 bp, Mus musculus
  siRNA target sequence for 5430432N15Rik (NM_172418.1,957-975).
gaaggcaagcgcgacaaat

SEQ ID NO: 453923 - DNA, 19 bp, Mus musculus
  siRNA target sequence for 5430432N15Rik (NM_172418.1,960-978).
ggcaagcgcgacaaatcgt

SEQ ID NO: 453924 - DNA, 19 bp, Mus musculus
  siRNA target sequence for 5430432N15Rik (NM_172418.1,961-979).
gcaagcgcgacaaatcgta

SEQ ID NO: 453925 - DNA, 19 bp, Mus musculus
  siRNA target sequence for 5430432N15Rik (NM_172418.1,971-989).
caaatcgtaggctgaagtt

SEQ ID NO: 453926 - DNA, 19 bp, Mus musculus
  siRNA target sequence for 5730432L01Rik (NM_025676.2,288-306).
ggaaagcacgcttctgttt

SEQ ID NO: 453927 - DNA, 19 bp, Mus musculus
  siRNA target sequence for 5730432L01Rik (NM_025676.2,289-307).
gaaagcacgcttctgttta

SEQ ID NO: 453928 - DNA, 19 bp, Mus musculus
  siRNA target sequence for 5730432L01Rik (NM_025676.2,293-311).
gcacgcttctgtttacagt

SEQ ID NO: 453929 - DNA, 19 bp, Mus musculus
  siRNA target sequence for 5730432L01Rik (NM_025676.2,294-312).
cacgcttctgtttacagta

SEQ ID NO: 453930 - DNA, 19 bp, Mus musculus
  siRNA target sequence for 5730432L01Rik (NM_025676.2,310-328).
gtaataactctccctttat

SEQ ID NO: 453931 - DNA, 19 bp, Mus musculus
  siRNA target sequence for 5730432L01Rik (NM_025676.2,319-337).
ctccctttattgagaagat

SEQ ID NO: 453932 - DNA, 19 bp, Mus musculus
  siRNA target sequence for 5730432L01Rik (NM_025676.2,322-340).
cctttattgagaagattca

SEQ ID NO: 453933 - DNA, 19 bp, Mus musculus
  siRNA target sequence for 5730432L01Rik (NM_025676.2,361-379).
caaggcatatcgacttata

SEQ ID NO: 453934 - DNA, 19 bp, Mus musculus
  siRNA target sequence for 5730432L01Rik (NM_025676.2,364-382).
ggcatatcgacttatacga

SEQ ID NO: 453935 - DNA, 19 bp, Mus musculus
  siRNA target sequence for 5730432L01Rik (NM_025676.2,365-383).
gcatatcgacttatacgat

SEQ ID NO: 453936 - DNA, 19 bp, Mus musculus
  siRNA target sequence for 5730432L01Rik (NM_025676.2,366-384).
catatcgacttatacgata

SEQ ID NO: 453937 - DNA, 19 bp, Mus musculus
  siRNA target sequence for 5730432L01Rik (NM_025676.2,371-389).
cgacttatacgataaggat

SEQ ID NO: 453938 - DNA, 19 bp, Mus musculus
  siRNA target sequence for 5730432L01Rik (NM_025676.2,380-398).
cgataaggatgaaatagaa

SEQ ID NO: 453939 - DNA, 19 bp, Mus musculus
  siRNA target sequence for 5730432L01Rik (NM_025676.2,442-460).
ctgatgaaataactaactt

SEQ ID NO: 453940 - DNA, 19 bp, Mus musculus
  siRNA target sequence for 5730432L01Rik (NM_025676.2,458-476).
cttgatacccgatatagaa

SEQ ID NO: 453941 - DNA, 19 bp, Mus musculus
  siRNA target sequence for 5730432L01Rik (NM_025676.2,579-597).
gctcaagagggattgtcta

SEQ ID NO: 453942 - DNA, 19 bp, Mus musculus
  siRNA target sequence for 5730432L01Rik (NM_025676.2,580-598).
ctcaagagggattgtctaa

SEQ ID NO: 453943 - DNA, 19 bp, Mus musculus
  siRNA target sequence for 5730432L01Rik (NM_025676.2,599-617).
cggtggagagacaatggta

SEQ ID NO: 453944 - DNA, 19 bp, Mus musculus
  siRNA target sequence for 5730432L01Rik (NM_025676.2,600-618).
ggtggagagacaatggtaa

SEQ ID NO: 453945 - DNA, 19 bp, Mus musculus
  siRNA target sequence for 5730432L01Rik (NM_025676.2,601-619).
gtggagagacaatggtaaa

SEQ ID NO: 453946 - DNA, 19 bp, Mus musculus
  siRNA target sequence for 5730432L01Rik (NM_025676.2,621-639).
gtaccacatatttatgcaa

SEQ ID NO: 453947 - DNA, 19 bp, Mus musculus
  siRNA target sequence for 5730432L01Rik (NM_025676.2,658-676).
ccttgacacacctcaagaa

SEQ ID NO: 453948 - DNA, 19 bp, Mus musculus
  siRNA target sequence for 5730432L01Rik (NM_025676.2,698-716).
gaaatacatctctatacga

SEQ ID NO: 453949 - DNA, 19 bp, Mus musculus
  siRNA target sequence for 5730432L01Rik (NM_025676.2,725-743).
ggtccgggtcagcaacata

SEQ ID NO: 453950 - DNA, 19 bp, Mus musculus
  siRNA target sequence for 5730432L01Rik (NM_025676.2,726-744).
gtccgggtcagcaacataa

SEQ ID NO: 453951 - DNA, 19 bp, Mus musculus
  siRNA target sequence for 5730432L01Rik (NM_025676.2,854-872).
gtgccgagggaggtcattt

SEQ ID NO: 453952 - DNA, 19 bp, Mus musculus
  siRNA target sequence for 5730432L01Rik (NM_025676.2,857-875).
ccgagggaggtcatttgct

SEQ ID NO: 453953 - DNA, 19 bp, Mus musculus
  siRNA target sequence for 5730432L01Rik (NM_025676.2,909-927).
gactggcagttgatcaaaa

SEQ ID NO: 453954 - DNA, 19 bp, Mus musculus
  siRNA target sequence for 5730432L01Rik (NM_025676.2,913-931).
ggcagttgatcaaaatcca

SEQ ID NO: 453955 - DNA, 19 bp, Mus musculus
  siRNA target sequence for 5730432L01Rik (NM_025676.2,968-986).
gatccctcggacgatagaa

SEQ ID NO: 453956 - DNA, 19 bp, Mus musculus
  siRNA target sequence for 5730432L01Rik (NM_025676.2,971-989).
ccctcggacgatagaatgt

SEQ ID NO: 453957 - DNA, 19 bp, Mus musculus
  siRNA target sequence for 5730432L01Rik (NM_025676.2,973-991).
ctcggacgatagaatgtga

SEQ ID NO: 453958 - DNA, 19 bp, Mus musculus
  siRNA target sequence for 5730432L01Rik (NM_025676.2,977-995).
gacgatagaatgtgaactt

SEQ ID NO: 453959 - DNA, 19 bp, Mus musculus
  siRNA target sequence for 5730432L01Rik (NM_025676.2,979-997).
cgatagaatgtgaacttgt

SEQ ID NO: 453960 - DNA, 19 bp, Mus musculus
  siRNA target sequence for 5730432L01Rik (NM_025676.2,996-1014).
gttcacgatcttgtagata

SEQ ID NO: 453961 - DNA, 19 bp, Mus musculus
  siRNA target sequence for 5730432L01Rik (NM_025676.2,999-1017).
cacgatcttgtagatagtt

SEQ ID NO: 453962 - DNA, 19 bp, Mus musculus
  siRNA target sequence for 5730432L01Rik (NM_025676.2,1001-1019).
cgatcttgtagatagttgt

SEQ ID NO: 453963 - DNA, 19 bp, Mus musculus
  siRNA target sequence for 5730432L01Rik (NM_025676.2,1018-1036).
gtgtcccaggagatacagt

SEQ ID NO: 453964 - DNA, 19 bp, Mus musculus
  siRNA target sequence for 5730432L01Rik (NM_025676.2,1074-1092).
gaaggttctcgaaataaga

SEQ ID NO: 453965 - DNA, 19 bp, Mus musculus
  siRNA target sequence for 5730432L01Rik (NM_025676.2,1083-1101).
cgaaataagaatgataagt

SEQ ID NO: 453966 - DNA, 19 bp, Mus musculus
  siRNA target sequence for 5730432L01Rik (NM_025676.2,1095-1113).
gataagtgcatgttccttt

SEQ ID NO: 453967 - DNA, 19 bp, Mus musculus
  siRNA target sequence for 5730432L01Rik (NM_025676.2,1118-1136).
cattgaggcaaattctgtt

SEQ ID NO: 453968 - DNA, 19 bp, Mus musculus
  siRNA target sequence for 5730432L01Rik (NM_025676.2,1349-1367).
gaagtacgcagatgacaaa

SEQ ID NO: 453969 - DNA, 19 bp, Mus musculus
  siRNA target sequence for 5730432L01Rik (NM_025676.2,1355-1373).
cgcagatgacaaaaacaga

SEQ ID NO: 453970 - DNA, 19 bp, Mus musculus
  siRNA target sequence for 5730432L01Rik (NM_025676.2,1391-1409).
cccacatgtcctgattgtt

SEQ ID NO: 453971 - DNA, 19 bp, Mus musculus
  siRNA target sequence for 5730432L01Rik (NM_025676.2,1460-1478).
ggcgccacgtggtgtgtat

SEQ ID NO: 453972 - DNA, 19 bp, Mus musculus
  siRNA target sequence for 5730432L01Rik (NM_025676.2,1462-1480).
cgccacgtggtgtgtatgt

SEQ ID NO: 453973 - DNA, 19 bp, Mus musculus
  siRNA target sequence for 5730432L01Rik (NM_025676.2,1594-1612).
gtggaatagatgaatttga

SEQ ID NO: 453974 - DNA, 19 bp, Mus musculus
  siRNA target sequence for 5730432L01Rik (NM_025676.2,1700-1718).
ccctgcaagaacttccatt

SEQ ID NO: 453975 - DNA, 19 bp, Mus musculus
  siRNA target sequence for 5730432L01Rik (NM_025676.2,1702-1720).
ctgcaagaacttccattat

SEQ ID NO: 453976 - DNA, 19 bp, Mus musculus
  siRNA target sequence for 5730432L01Rik (NM_025676.2,1737-1755).
gtcggaggacactacaata

SEQ ID NO: 453977 - DNA, 19 bp, Mus musculus
  siRNA target sequence for 5730432L01Rik (NM_025676.2,1760-1778).
cagaacggtttctgagaat

SEQ ID NO: 453978 - DNA, 19 bp, Mus musculus
  siRNA target sequence for 5730432L01Rik (NM_025676.2,1762-1780).
gaacggtttctgagaattt

SEQ ID NO: 453979 - DNA, 19 bp, Mus musculus
  siRNA target sequence for 5730432L01Rik (NM_025676.2,1796-1814).
cctactgtccagattcgat

SEQ ID NO: 453980 - DNA, 19 bp, Mus musculus
  siRNA target sequence for 5730432L01Rik (NM_025676.2,1797-1815).
ctactgtccagattcgatt

SEQ ID NO: 453981 - DNA, 19 bp, Mus musculus
  siRNA target sequence for 5730432L01Rik (NM_025676.2,1807-1825).
gattcgatttggtctttat

SEQ ID NO: 453982 - DNA, 19 bp, Mus musculus
  siRNA target sequence for 5730432L01Rik (NM_025676.2,1817-1835).
ggtctttatcttgttagat

SEQ ID NO: 453983 - DNA, 19 bp, Mus musculus
  siRNA target sequence for 5730432L01Rik (NM_025676.2,1818-1836).
gtctttatcttgttagata

SEQ ID NO: 453984 - DNA, 19 bp, Mus musculus
  siRNA target sequence for 5730432L01Rik (NM_025676.2,1829-1847).
gttagatacgccaaatgaa

SEQ ID NO: 453985 - DNA, 19 bp, Mus musculus
  siRNA target sequence for 5730432L01Rik (NM_025676.2,1848-1866).
cagcatgaccacttacttt

SEQ ID NO: 453986 - DNA, 19 bp, Mus musculus
  siRNA target sequence for 5730432L01Rik (NM_025676.2,1934-1952).
gctcagtcaagactcaaat

SEQ ID NO: 453987 - DNA, 19 bp, Mus musculus
  siRNA target sequence for 5730432L01Rik (NM_025676.2,2042-2060).
gctgttgaggaagtacatt

SEQ ID NO: 453988 - DNA, 19 bp, Mus musculus
  siRNA target sequence for 5730432L01Rik (NM_025676.2,2062-2080).
gctatgcacggcagtatgt

SEQ ID NO: 453989 - DNA, 19 bp, Mus musculus
  siRNA target sequence for 5730432L01Rik (NM_025676.2,2075-2093).
gtatgtccacccaaggtta

SEQ ID NO: 453990 - DNA, 19 bp, Mus musculus
  siRNA target sequence for 5730432L01Rik (NM_025676.2,2079-2097).
gtccacccaaggttatcta

SEQ ID NO: 453991 - DNA, 19 bp, Mus musculus
  siRNA target sequence for 5730432L01Rik (NM_025676.2,2181-2199).
cggcagctggagtctttga

SEQ ID NO: 453992 - DNA, 19 bp, Mus musculus
  siRNA target sequence for 5730432L01Rik (NM_025676.2,2213-2231).
ggcacgggcaaggttagaa

SEQ ID NO: 453993 - DNA, 19 bp, Mus musculus
  siRNA target sequence for 5730432L01Rik (NM_025676.2,2219-2237).
ggcaaggttagaattgaga

SEQ ID NO: 453994 - DNA, 19 bp, Mus musculus
  siRNA target sequence for 5730432L01Rik (NM_025676.2,2298-2316).
ggaacttactcagatgaat

SEQ ID NO: 453995 - DNA, 19 bp, Mus musculus
  siRNA target sequence for 5730432L01Rik (NM_025676.2,2299-2317).
gaacttactcagatgaatt

SEQ ID NO: 453996 - DNA, 19 bp, Mus musculus
  siRNA target sequence for 5730432L01Rik (NM_025676.2,2368-2386).
ggtcaacagcaaaaagatt

SEQ ID NO: 453997 - DNA, 19 bp, Mus musculus
  siRNA target sequence for 5730432L01Rik (NM_025676.2,2409-2427).
gctgaaagaacttataaca

SEQ ID NO: 453998 - DNA, 19 bp, Mus musculus
  siRNA target sequence for 5730432L01Rik (NM_025676.2,2410-2428).
ctgaaagaacttataacaa

SEQ ID NO: 453999 - DNA, 19 bp, Mus musculus
  siRNA target sequence for 5730432L01Rik (NM_025676.2,2412-2430).
gaaagaacttataacaaca

SEQ ID NO: 454000 - DNA, 19 bp, Mus musculus
  siRNA target sequence for 5730432L01Rik (NM_025676.2,2445-2463).
caacttcgtcagattgcta

SEQ ID NO: 454001 - DNA, 19 bp, Mus musculus
  siRNA target sequence for 5730432L01Rik (NM_025676.2,2454-2472).
cagattgctaaagaactaa

SEQ ID NO: 454002 - DNA, 19 bp, Mus musculus
  siRNA target sequence for 5730432L01Rik (NM_025676.2,2474-2492).
cattcaggttgccgatttt

SEQ ID NO: 454003 - DNA, 19 bp, Mus musculus
  siRNA target sequence for 5730432L01Rik (NM_025676.2,2478-2496).
caggttgccgattttgaaa

SEQ ID NO: 454004 - DNA, 19 bp, Mus musculus
  siRNA target sequence for 5730432L01Rik (NM_025676.2,2484-2502).
gccgattttgaaaacttca

SEQ ID NO: 454005 - DNA, 19 bp, Mus musculus
  siRNA target sequence for 5730432L01Rik (NM_025676.2,2498-2516).
cttcattggatcactgaat

SEQ ID NO: 454006 - DNA, 19 bp, Mus musculus
  siRNA target sequence for 5730432L01Rik (NM_025676.2,2520-2538).
caaggttatctcttgaaga

SEQ ID NO: 454007 - DNA, 19 bp, Mus musculus
  siRNA target sequence for 5730436L13Rik (NM_172339.1,95-113).
gacgccgaacgagagaaaa

SEQ ID NO: 454008 - DNA, 19 bp, Mus musculus
  siRNA target sequence for 5730436L13Rik (NM_172339.1,97-115).
cgccgaacgagagaaaata

SEQ ID NO: 454009 - DNA, 19 bp, Mus musculus
  siRNA target sequence for 5730436L13Rik (NM_172339.1,98-116).
gccgaacgagagaaaataa

SEQ ID NO: 454010 - DNA, 19 bp, Mus musculus
  siRNA target sequence for 5730436L13Rik (NM_172339.1,100-118).
cgaacgagagaaaataaca

SEQ ID NO: 454011 - DNA, 19 bp, Mus musculus
  siRNA target sequence for 5730436L13Rik (NM_172339.1,131-149).
gagcttgaaaggattttgt

SEQ ID NO: 454012 - DNA, 19 bp, Mus musculus
  siRNA target sequence for 5730436L13Rik (NM_172339.1,133-151).
gcttgaaaggattttgtat

SEQ ID NO: 454013 - DNA, 19 bp, Mus musculus
  siRNA target sequence for 5730436L13Rik (NM_172339.1,159-177).
ccaccagcgtccactttga

SEQ ID NO: 454014 - DNA, 19 bp, Mus musculus
  siRNA target sequence for 5730436L13Rik (NM_172339.1,160-178).
caccagcgtccactttgaa

SEQ ID NO: 454015 - DNA, 19 bp, Mus musculus
  siRNA target sequence for 5730436L13Rik (NM_172339.1,170-188).
cactttgaagtctctgaat

SEQ ID NO: 454016 - DNA, 19 bp, Mus musculus
  siRNA target sequence for 5730436L13Rik (NM_172339.1,337-355).
gacctgtctgcagctaaat

SEQ ID NO: 454017 - DNA, 19 bp, Mus musculus
  siRNA target sequence for 5730436L13Rik (NM_172339.1,430-448).
ggaagagatcctgtttgat

SEQ ID NO: 454018 - DNA, 19 bp, Mus musculus
  siRNA target sequence for 5730436L13Rik (NM_172339.1,486-504).
gaagtctgccctcatacat

SEQ ID NO: 454019 - DNA, 19 bp, Mus musculus
  siRNA target sequence for 5730436L13Rik (NM_172339.1,560-578).
cctcctgccaacgaagaaa

SEQ ID NO: 454020 - DNA, 19 bp, Mus musculus
  siRNA target sequence for 5730436L13Rik (NM_172339.1,749-767).
gtctccagtgagttggaaa

SEQ ID NO: 454021 - DNA, 19 bp, Mus musculus
  siRNA target sequence for 5730436L13Rik (NM_172339.1,871-889).
ctgggagaagatttccaat

SEQ ID NO: 454022 - DNA, 19 bp, Mus musculus
  siRNA target sequence for 5730436L13Rik (NM_172339.1,874-892).
ggagaagatttccaatatt

SEQ ID NO: 454023 - DNA, 19 bp, Mus musculus
  siRNA target sequence for 5730436L13Rik (NM_172339.1,1346-1364).
gcgcaggactggtttaaaa

SEQ ID NO: 454024 - DNA, 19 bp, Mus musculus
  siRNA target sequence for 5730436L13Rik (NM_172339.1,1347-1365).
cgcaggactggtttaaaat

SEQ ID NO: 454025 - DNA, 19 bp, Mus musculus
  siRNA target sequence for 5730436L13Rik (NM_172339.1,1406-1424).
gaccgctacatcagaagat

SEQ ID NO: 454026 - DNA, 19 bp, Mus musculus
  siRNA target sequence for 5730436L13Rik (NM_172339.1,1408-1426).
ccgctacatcagaagatta

SEQ ID NO: 454027 - DNA, 19 bp, Mus musculus
  siRNA target sequence for 5730436L13Rik (NM_172339.1,1410-1428).
gctacatcagaagattaca

SEQ ID NO: 454028 - DNA, 19 bp, Mus musculus
  siRNA target sequence for 5730436L13Rik (NM_172339.1,1480-1498).
ccagctaatagagaaatat

SEQ ID NO: 454029 - DNA, 19 bp, Mus musculus
  siRNA target sequence for 5730436L13Rik (NM_172339.1,1483-1501).
gctaatagagaaatatggt

SEQ ID NO: 454030 - DNA, 19 bp, Mus musculus
  siRNA target sequence for 5730436L13Rik (NM_172339.1,1513-1531).
ggcaagaatcgcttctgaa

SEQ ID NO: 454031 - DNA, 19 bp, Mus musculus
  siRNA target sequence for 5730436L13Rik (NM_172339.1,1514-1532).
gcaagaatcgcttctgaat

SEQ ID NO: 454032 - DNA, 19 bp, Mus musculus
  siRNA target sequence for 5730436L13Rik (NM_172339.1,1515-1533).
caagaatcgcttctgaatt

SEQ ID NO: 454033 - DNA, 19 bp, Mus musculus
  siRNA target sequence for 5730436L13Rik (NM_172339.1,1742-1760).
gcgtctctggagaagagta

SEQ ID NO: 454034 - DNA, 19 bp, Mus musculus
  siRNA target sequence for 5730436L13Rik (NM_172339.1,1764-1782).
cactgactcctcaacagta

SEQ ID NO: 454035 - DNA, 19 bp, Mus musculus
  siRNA target sequence for 5730436L13Rik (NM_172339.1,1998-2016).
gagaccggttcctacactt

SEQ ID NO: 454036 - DNA, 19 bp, Mus musculus
  siRNA target sequence for 5730436L13Rik (NM_172339.1,2025-2043).
cccactcagcaagtttgaa

SEQ ID NO: 454037 - DNA, 19 bp, Mus musculus
  siRNA target sequence for 5730436L13Rik (NM_172339.1,2092-2110).
gccactcctccctagttca

SEQ ID NO: 454038 - DNA, 19 bp, Mus musculus
  siRNA target sequence for 5730436L13Rik (NM_172339.1,2119-2137).
gtctgaccctggcaacaat

SEQ ID NO: 454039 - DNA, 19 bp, Mus musculus
  siRNA target sequence for 5730436L13Rik (NM_172339.1,2172-2190).
gaacttaccagaataagca

SEQ ID NO: 454040 - DNA, 19 bp, Mus musculus
  siRNA target sequence for 5730436L13Rik (NM_172339.1,2197-2215).
caagagacaggctctacat

SEQ ID NO: 454041 - DNA, 19 bp, Mus musculus
  siRNA target sequence for 5730436L13Rik (NM_172339.1,2304-2322).
ctgcaaccgttcagactaa

SEQ ID NO: 454042 - DNA, 19 bp, Mus musculus
  siRNA target sequence for 5730436L13Rik (NM_172339.1,2331-2349).
gcatccggatgcagttaga

SEQ ID NO: 454043 - DNA, 19 bp, Mus musculus
  siRNA target sequence for 5730436L13Rik (NM_172339.1,2363-2381).
gccagcactccggtattca

SEQ ID NO: 454044 - DNA, 19 bp, Mus musculus
  siRNA target sequence for 5730436L13Rik (NM_172339.1,2365-2383).
cagcactccggtattcaca

SEQ ID NO: 454045 - DNA, 19 bp, Mus musculus
  siRNA target sequence for 5730436L13Rik (NM_172339.1,2373-2391).
cggtattcacactgcttat

SEQ ID NO: 454046 - DNA, 19 bp, Mus musculus
  siRNA target sequence for 5730436L13Rik (NM_172339.1,2374-2392).
ggtattcacactgcttatt

SEQ ID NO: 454047 - DNA, 19 bp, Mus musculus
  siRNA target sequence for 5730436L13Rik (NM_172339.1,2393-2411).
cagctattgcagattgata

SEQ ID NO: 454048 - DNA, 19 bp, Mus musculus
  siRNA target sequence for 5730436L13Rik (NM_172339.1,2395-2413).
gctattgcagattgatact

SEQ ID NO: 454049 - DNA, 19 bp, Mus musculus
  siRNA target sequence for 5730436L13Rik (NM_172339.1,2548-2566).
catgacgggggaacaaact

SEQ ID NO: 454050 - DNA, 19 bp, Mus musculus
  siRNA target sequence for 5730436L13Rik (NM_172339.1,2662-2680).
ccggccaaagcctaagact

SEQ ID NO: 454051 - DNA, 19 bp, Mus musculus
  siRNA target sequence for 5730436L13Rik (NM_172339.1,2666-2684).
ccaaagcctaagactgttt

SEQ ID NO: 454052 - DNA, 19 bp, Mus musculus
  siRNA target sequence for 5730436L13Rik (NM_172339.1,2838-2856).
caacgtccagtgtagaact

SEQ ID NO: 454053 - DNA, 19 bp, Mus musculus
  siRNA target sequence for 5730436L13Rik (NM_172339.1,2873-2891).
ccggtgatggtcagttcaa

SEQ ID NO: 454054 - DNA, 19 bp, Mus musculus
  siRNA target sequence for 5730436L13Rik (NM_172339.1,2875-2893).
ggtgatggtcagttcaagt

SEQ ID NO: 454055 - DNA, 19 bp, Mus musculus
  siRNA target sequence for 5730436L13Rik (NM_172339.1,2945-2963).
cccaacctacagaccattt

SEQ ID NO: 454056 - DNA, 19 bp, Mus musculus
  siRNA target sequence for 5730436L13Rik (NM_172339.1,3435-3453).
cagctttggacctaagtct

SEQ ID NO: 454057 - DNA, 19 bp, Mus musculus
  siRNA target sequence for 5730436L13Rik (NM_172339.1,3499-3517).
gtgccaaggtgcttttgta

SEQ ID NO: 454058 - DNA, 19 bp, Mus musculus
  siRNA target sequence for 5730436L13Rik (NM_172339.1,3529-3547).
gagcaggatgccctatcat

SEQ ID NO: 454059 - DNA, 19 bp, Mus musculus
  siRNA target sequence for 5730436L13Rik (NM_172339.1,3744-3762).
cgcgtttcctggctatctt

SEQ ID NO: 454060 - DNA, 19 bp, Mus musculus
  siRNA target sequence for 5730436L13Rik (NM_172339.1,3746-3764).
cgtttcctggctatcttct

SEQ ID NO: 454061 - DNA, 19 bp, Mus musculus
  siRNA target sequence for 5730436L13Rik (NM_172339.1,3866-3884).
gacttggagctcaaggata

SEQ ID NO: 454062 - DNA, 19 bp, Mus musculus
  siRNA target sequence for 5730436L13Rik (NM_172339.1,4008-4026).
gccttgatgaccttaacgt

SEQ ID NO: 454063 - DNA, 19 bp, Mus musculus
  siRNA target sequence for 5730555F13Rik (NM_025690.1,129-147).
caagaaggggcagatatga

SEQ ID NO: 454064 - DNA, 19 bp, Mus musculus
  siRNA target sequence for 5730555F13Rik (NM_025690.1,132-150).
gaaggggcagatatgagaa

SEQ ID NO: 454065 - DNA, 19 bp, Mus musculus
  siRNA target sequence for 5730555F13Rik (NM_025690.1,178-196).
gagggctagcctagataaa

SEQ ID NO: 454066 - DNA, 19 bp, Mus musculus
  siRNA target sequence for 5730555F13Rik (NM_025690.1,186-204).
gcctagataaaaaaagaga

SEQ ID NO: 454067 - DNA, 19 bp, Mus musculus
  siRNA target sequence for 5730555F13Rik (NM_025690.1,254-272).
caaagattgagagaacatt

SEQ ID NO: 454068 - DNA, 19 bp, Mus musculus
  siRNA target sequence for 5730555F13Rik (NM_025690.1,349-367).
gcgtgaacgcattagaata

SEQ ID NO: 454069 - DNA, 19 bp, Mus musculus
  siRNA target sequence for 5730555F13Rik (NM_025690.1,350-368).
cgtgaacgcattagaataa

SEQ ID NO: 454070 - DNA, 19 bp, Mus musculus
  siRNA target sequence for 5730555F13Rik (NM_025690.1,351-369).
gtgaacgcattagaataat

SEQ ID NO: 454071 - DNA, 19 bp, Mus musculus
  siRNA target sequence for 5730555F13Rik (NM_025690.1,383-401).
gaacgggaacgcttacaga

SEQ ID NO: 454072 - DNA, 19 bp, Mus musculus
  siRNA target sequence for 5730555F13Rik (NM_025690.1,406-424).
gagagagcgcctagaaatt

SEQ ID NO: 454073 - DNA, 19 bp, Mus musculus
  siRNA target sequence for 5730555F13Rik (NM_025690.1,408-426).
gagagcgcctagaaattga

SEQ ID NO: 454074 - DNA, 19 bp, Mus musculus
  siRNA target sequence for 5730555F13Rik (NM_025690.1,455-473).
gaacgcgaacgcttggaaa

SEQ ID NO: 454075 - DNA, 19 bp, Mus musculus
  siRNA target sequence for 5730555F13Rik (NM_025690.1,474-492).
gggaacgcattcgtattga

SEQ ID NO: 454076 - DNA, 19 bp, Mus musculus
  siRNA target sequence for 5730555F13Rik (NM_025690.1,475-493).
ggaacgcattcgtattgaa

SEQ ID NO: 454077 - DNA, 19 bp, Mus musculus
  siRNA target sequence for 5730555F13Rik (NM_025690.1,505-523).
cagggaagctgaaaggatt

SEQ ID NO: 454078 - DNA, 19 bp, Mus musculus
  siRNA target sequence for 5730555F13Rik (NM_025690.1,563-581).
cttcgctatgaacaagaaa

SEQ ID NO: 454079 - DNA, 19 bp, Mus musculus
  siRNA target sequence for 5730555F13Rik (NM_025690.1,632-650).
ccttactggagcgagaata

SEQ ID NO: 454080 - DNA, 19 bp, Mus musculus
  siRNA target sequence for 5730555F13Rik (NM_025690.1,633-651).
cttactggagcgagaataa

SEQ ID NO: 454081 - DNA, 19 bp, Mus musculus
  siRNA target sequence for 5730555F13Rik (NM_025690.1,639-657).
ggagcgagaataaaaagtt

SEQ ID NO: 454082 - DNA, 19 bp, Mus musculus
  siRNA target sequence for 5730555F13Rik (NM_025690.1,643-661).
cgagaataaaaagttatct

SEQ ID NO: 454083 - DNA, 19 bp, Mus musculus
  siRNA target sequence for 5730555F13Rik (NM_025690.1,767-785).
gtgcagtcatcctttgaaa

SEQ ID NO: 454084 - DNA, 19 bp, Mus musculus
  siRNA target sequence for 5730555F13Rik (NM_025690.1,860-878).
gaaaggtaccctaaaaact

SEQ ID NO: 454085 - DNA, 19 bp, Mus musculus
  siRNA target sequence for 5730555F13Rik (NM_025690.1,908-926).
ccaccaagaaatgaactta

SEQ ID NO: 454086 - DNA, 19 bp, Mus musculus
  siRNA target sequence for 5730555F13Rik (NM_025690.1,1059-1077).
ggaaaagcgaagcgaatat

SEQ ID NO: 454087 - DNA, 19 bp, Mus musculus
  siRNA target sequence for 5730555F13Rik (NM_025690.1,1091-1109).
cgggagtcacgagttgaaa

SEQ ID NO: 454088 - DNA, 19 bp, Mus musculus
  siRNA target sequence for 5730555F13Rik (NM_025690.1,1473-1491).
cggggtttaagccgtttaa

SEQ ID NO: 454089 - DNA, 19 bp, Mus musculus
  siRNA target sequence for 5730555F13Rik (NM_025690.1,1477-1495).
gtttaagccgtttaagagt

SEQ ID NO: 454090 - DNA, 19 bp, Mus musculus
  siRNA target sequence for 5730555F13Rik (NM_025690.1,1496-1514).
ggacctccacggcgatttt

SEQ ID NO: 454091 - DNA, 19 bp, Mus musculus
  siRNA target sequence for 5730589K01Rik (NM_023434.1,362-380).
ccaacccacctgttacaat

SEQ ID NO: 454092 - DNA, 19 bp, Mus musculus
  siRNA target sequence for 5730589K01Rik (NM_023434.1,368-386).
cacctgttacaattgatgt

SEQ ID NO: 454093 - DNA, 19 bp, Mus musculus
  siRNA target sequence for 5730589K01Rik (NM_023434.1,423-441).
cagccagttgaccactatt

SEQ ID NO: 454094 - DNA, 19 bp, Mus musculus
  siRNA target sequence for 5730589K01Rik (NM_023434.1,514-532).
cctgaggatcgtctttcaa

SEQ ID NO: 454095 - DNA, 19 bp, Mus musculus
  siRNA target sequence for 5730589K01Rik (NM_023434.1,517-535).
gaggatcgtctttcaacta

SEQ ID NO: 454096 - DNA, 19 bp, Mus musculus
  siRNA target sequence for 5730589K01Rik (NM_023434.1,685-703).
ccagtctctgcgtatgcat

SEQ ID NO: 454097 - DNA, 19 bp, Mus musculus
  siRNA target sequence for 5730589K01Rik (NM_023434.1,686-704).
cagtctctgcgtatgcatt

SEQ ID NO: 454098 - DNA, 19 bp, Mus musculus
  siRNA target sequence for 5730589K01Rik (NM_023434.1,755-773).
cctttggggaggtatcgaa

SEQ ID NO: 454099 - DNA, 19 bp, Mus musculus
  siRNA target sequence for 5730589K01Rik (NM_023434.1,1021-1039).
cccccttgcatcatagtga

SEQ ID NO: 454100 - DNA, 19 bp, Mus musculus
  siRNA target sequence for 5730589K01Rik (NM_023434.1,1022-1040).
ccccttgcatcatagtgaa

SEQ ID NO: 454101 - DNA, 19 bp, Mus musculus
  siRNA target sequence for 5730589K01Rik (NM_023434.1,1023-1041).
cccttgcatcatagtgaat

SEQ ID NO: 454102 - DNA, 19 bp, Mus musculus
  siRNA target sequence for 5730589K01Rik (NM_023434.1,1085-1103).
ctggaggtcagcccaatat

SEQ ID NO: 454103 - DNA, 19 bp, Mus musculus
  siRNA target sequence for 5730589K01Rik (NM_023434.1,1087-1105).
ggaggtcagcccaatatta

SEQ ID NO: 454104 - DNA, 19 bp, Mus musculus
  siRNA target sequence for 5730589K01Rik (NM_023434.1,1091-1109).
gtcagcccaatattaccaa

SEQ ID NO: 454105 - DNA, 19 bp, Mus musculus
  siRNA target sequence for 5730589K01Rik (NM_023434.1,1096-1114).
cccaatattaccaagttga

SEQ ID NO: 454106 - DNA, 19 bp, Mus musculus
  siRNA target sequence for 5730589K01Rik (NM_023434.1,1097-1115).
ccaatattaccaagttgat

SEQ ID NO: 454107 - DNA, 19 bp, Mus musculus
  siRNA target sequence for 5730589K01Rik (NM_023434.1,1106-1124).
ccaagttgattattaccaa

SEQ ID NO: 454108 - DNA, 19 bp, Mus musculus
  siRNA target sequence for 5730589K01Rik (NM_023434.1,1207-1225).
ctccaggtaggccaaacaa

SEQ ID NO: 454109 - DNA, 19 bp, Mus musculus
  siRNA target sequence for 5730589K01Rik (NM_023434.1,1210-1228).
caggtaggccaaacaagta

SEQ ID NO: 454110 - DNA, 19 bp, Mus musculus
  siRNA target sequence for 5730589K01Rik (NM_023434.1,1366-1384).
ccaactcaacagcaagtaa

SEQ ID NO: 454111 - DNA, 19 bp, Mus musculus
  siRNA target sequence for 5730589K01Rik (NM_023434.1,1370-1388).
ctcaacagcaagtaaccat

SEQ ID NO: 454112 - DNA, 19 bp, Mus musculus
  siRNA target sequence for 5730589K01Rik (NM_023434.1,1426-1444).
cctccacctcagaaagtta

SEQ ID NO: 454113 - DNA, 19 bp, Mus musculus
  siRNA target sequence for 5730589K01Rik (NM_023434.1,1595-1613).
caacctctcctgagacaat

SEQ ID NO: 454114 - DNA, 19 bp, Mus musculus
  siRNA target sequence for 5730589K01Rik (NM_023434.1,1603-1621).
cctgagacaatctgtgaaa

SEQ ID NO: 454115 - DNA, 19 bp, Mus musculus
  siRNA target sequence for 5730589K01Rik (NM_023434.1,1771-1789).
gagtactgcagcaatgagt

SEQ ID NO: 454116 - DNA, 19 bp, Mus musculus
  siRNA target sequence for 5730589K01Rik (NM_023434.1,1833-1851).
ctctagaaatccaaactct

SEQ ID NO: 454117 - DNA, 19 bp, Mus musculus
  siRNA target sequence for 5830483C08Rik (NM_177331.3,237-255).
gagcctgtaaagcaacata

SEQ ID NO: 454118 - DNA, 19 bp, Mus musculus
  siRNA target sequence for 5830483C08Rik (NM_177331.3,284-302).
cattgccgttgatttgagt

SEQ ID NO: 454119 - DNA, 19 bp, Mus musculus
  siRNA target sequence for 5830483C08Rik (NM_177331.3,357-375).
ccccacctcaggaacctat

SEQ ID NO: 454120 - DNA, 19 bp, Mus musculus
  siRNA target sequence for 5830483C08Rik (NM_177331.3,360-378).
cacctcaggaacctatttt

SEQ ID NO: 454121 - DNA, 19 bp, Mus musculus
  siRNA target sequence for 5830483C08Rik (NM_177331.3,365-383).
caggaacctattttttcgt

SEQ ID NO: 454122 - DNA, 19 bp, Mus musculus
  siRNA target sequence for 5830483C08Rik (NM_177331.3,408-426).
gtaaaactggtgtttgtaa

SEQ ID NO: 454123 - DNA, 19 bp, Mus musculus
  siRNA target sequence for 5830483C08Rik (NM_177331.3,446-464).
gctgaaagctgatgtcata

SEQ ID NO: 454124 - DNA, 19 bp, Mus musculus
  siRNA target sequence for 5830483C08Rik (NM_177331.3,447-465).
ctgaaagctgatgtcataa

SEQ ID NO: 454125 - DNA, 19 bp, Mus musculus
  siRNA target sequence for 5830483C08Rik (NM_177331.3,488-506).
cgggccttctggaaaatca

SEQ ID NO: 454126 - DNA, 19 bp, Mus musculus
  siRNA target sequence for 5830483C08Rik (NM_177331.3,489-507).
gggccttctggaaaatcaa

SEQ ID NO: 454127 - DNA, 19 bp, Mus musculus
  siRNA target sequence for 5830483C08Rik (NM_177331.3,520-538).
cagggagatcacattttaa

SEQ ID NO: 454128 - DNA, 19 bp, Mus musculus
  siRNA target sequence for 5830483C08Rik (NM_177331.3,524-542).
gagatcacattttaagtca

SEQ ID NO: 454129 - DNA, 19 bp, Mus musculus
  siRNA target sequence for 5830483C08Rik (NM_177331.3,664-682).
ccaacgacggcgatgcttt

SEQ ID NO: 454130 - DNA, 19 bp, Mus musculus
  siRNA target sequence for 5830483C08Rik (NM_177331.3,668-686).
cgacggcgatgctttcctt

SEQ ID NO: 454131 - DNA, 19 bp, Mus musculus
  siRNA target sequence for 5830483C08Rik (NM_177331.3,671-689).
cggcgatgctttcctttat

SEQ ID NO: 454132 - DNA, 19 bp, Mus musculus
  siRNA target sequence for 5830483C08Rik (NM_177331.3,690-708).
ggagcccagactgtttaca

SEQ ID NO: 454133 - DNA, 19 bp, Mus musculus
  siRNA target sequence for 5830483C08Rik (NM_177331.3,727-745).
caaaggatccccatgttga

SEQ ID NO: 454134 - DNA, 19 bp, Mus musculus
  siRNA target sequence for 5830483C08Rik (NM_177331.3,741-759).
gttgactgttacacgatat

SEQ ID NO: 454135 - DNA, 19 bp, Mus musculus
  siRNA target sequence for 5830483C08Rik (NM_177331.3,748-766).
gttacacgatatcatctat

SEQ ID NO: 454136 - DNA, 19 bp, Mus musculus
  siRNA target sequence for 5830483C08Rik (NM_177331.3,812-830).
cgtacttctgggttgtgat

SEQ ID NO: 454137 - DNA, 19 bp, Mus musculus
  siRNA target sequence for 5830483C08Rik (NM_177331.3,813-831).
gtacttctgggttgtgatt

SEQ ID NO: 454138 - DNA, 19 bp, Mus musculus
  siRNA target sequence for 5830483C08Rik (NM_177331.3,887-905).
gattttcaaaggtcaaagt

SEQ ID NO: 454139 - DNA, 19 bp, Mus musculus
  siRNA target sequence for 5830483C08Rik (NM_177331.3,893-911).
caaaggtcaaagtttgctt

SEQ ID NO: 454140 - DNA, 19 bp, Mus musculus
  siRNA target sequence for 5830483C08Rik (NM_177331.3,917-935).
gtttaaccagtggattgaa

SEQ ID NO: 454141 - DNA, 19 bp, Mus musculus
  siRNA target sequence for 5830483C08Rik (NM_177331.3,1006-1024).
gttcgccaaaggatcatga

SEQ ID NO: 454142 - DNA, 19 bp, Mus musculus
  siRNA target sequence for 5830483C08Rik (NM_177331.3,1012-1030).
caaaggatcatgaacgtaa

SEQ ID NO: 454143 - DNA, 19 bp, Mus musculus
  siRNA target sequence for 5830483C08Rik (NM_177331.3,1016-1034).
ggatcatgaacgtaatgga

SEQ ID NO: 454144 - DNA, 19 bp, Mus musculus
  siRNA target sequence for 5830483C08Rik (NM_177331.3,1017-1035).
gatcatgaacgtaatggat

SEQ ID NO: 454145 - DNA, 19 bp, Mus musculus
  siRNA target sequence for 5830483C08Rik (NM_177331.3,1023-1041).
gaacgtaatggatgcatat

SEQ ID NO: 454146 - DNA, 19 bp, Mus musculus
  siRNA target sequence for 5830483C08Rik (NM_177331.3,1026-1044).
cgtaatggatgcatattat

SEQ ID NO: 454147 - DNA, 19 bp, Mus musculus
  siRNA target sequence for 5830483C08Rik (NM_177331.3,1061-1079).
ctgtgaaccacatgattat

SEQ ID NO: 454148 - DNA, 19 bp, Mus musculus
  siRNA target sequence for 5830483C08Rik (NM_177331.3,1065-1083).
gaaccacatgattatgatt

SEQ ID NO: 454149 - DNA, 19 bp, Mus musculus
  siRNA target sequence for 5830483C08Rik (NM_177331.3,1103-1121).
gcatcagacagaccataat

SEQ ID NO: 454150 - DNA, 19 bp, Mus musculus
  siRNA target sequence for 5830483C08Rik (NM_177331.3,1104-1122).
catcagacagaccataata

SEQ ID NO: 454151 - DNA, 19 bp, Mus musculus
  siRNA target sequence for 5830483C08Rik (NM_177331.3,1115-1133).
ccataataggcatctaagt

SEQ ID NO: 454152 - DNA, 19 bp, Mus musculus
  siRNA target sequence for 5830483C08Rik (NM_177331.3,1162-1180).
cttgcagttgcgaaggatt

SEQ ID NO: 454153 - DNA, 19 bp, Mus musculus
  siRNA target sequence for 5830483C08Rik (NM_177331.3,1166-1184).
cagttgcgaaggatttcca

SEQ ID NO: 454154 - DNA, 19 bp, Mus musculus
  siRNA target sequence for 5830483C08Rik (NM_177331.3,1168-1186).
gttgcgaaggatttccatt

SEQ ID NO: 454155 - DNA, 19 bp, Mus musculus
  siRNA target sequence for 5830483C08Rik (NM_177331.3,1172-1190).
cgaaggatttccattccat

SEQ ID NO: 454156 - DNA, 19 bp, Mus musculus
  siRNA target sequence for 5830483C08Rik (NM_177331.3,1232-1250).
gaaaccgatcacataccaa

SEQ ID NO: 454157 - DNA, 19 bp, Mus musculus
  siRNA target sequence for 5830483C08Rik (NM_177331.3,1243-1261).
cataccaaagacctgattt

SEQ ID NO: 454158 - DNA, 19 bp, Mus musculus
  siRNA target sequence for 5830483C08Rik (NM_177331.3,1247-1265).
ccaaagacctgatttatta

SEQ ID NO: 454159 - DNA, 19 bp, Mus musculus
  siRNA target sequence for 5830483C08Rik (NM_177331.3,1248-1266).
caaagacctgatttattat

SEQ ID NO: 454160 - DNA, 19 bp, Mus musculus
  siRNA target sequence for 5830483C08Rik (NM_177331.3,1252-1270).
gacctgatttattattgtt

SEQ ID NO: 454161 - DNA, 19 bp, Mus musculus
  siRNA target sequence for 5830483C08Rik (NM_177331.3,1295-1313).
ggagtggcccagtcactat

SEQ ID NO: 454162 - DNA, 19 bp, Mus musculus
  siRNA target sequence for 5830483C08Rik (NM_177331.3,1335-1353).
cttttgacccgctatgaca

SEQ ID NO: 454163 - DNA, 19 bp, Mus musculus
  siRNA target sequence for 5830483C08Rik (NM_177331.3,1395-1413).
cagccaattagaattgtta

SEQ ID NO: 454164 - DNA, 19 bp, Mus musculus
  siRNA target sequence for 5830483C08Rik (NM_177331.3,1397-1415).
gccaattagaattgttaaa

SEQ ID NO: 454165 - DNA, 19 bp, Mus musculus
  siRNA target sequence for 5830483C08Rik (NM_177331.3,1431-1449).
ggagtccattgtcttgaaa

SEQ ID NO: 454166 - DNA, 19 bp, Mus musculus
  siRNA target sequence for 5830483C08Rik (NM_177331.3,1505-1523).
gagcctccttacaatggaa

SEQ ID NO: 454167 - DNA, 19 bp, Mus musculus
  siRNA target sequence for 5830483C08Rik (NM_177331.3,1650-1668).
gcagatgatgtgatcaatt

SEQ ID NO: 454168 - DNA, 19 bp, Mus musculus
  siRNA target sequence for 5830483C08Rik (NM_177331.3,1715-1733).
gcaaaatcccaaaattaat

SEQ ID NO: 454169 - DNA, 19 bp, Mus musculus
  siRNA target sequence for 5830483C08Rik (NM_177331.3,1771-1789).
ctacttccccctcattgaa

SEQ ID NO: 454170 - DNA, 19 bp, Mus musculus
  siRNA target sequence for 5830483C08Rik (NM_177331.3,1813-1831).
ctccctgtttgaatttaca

SEQ ID NO: 454171 - DNA, 19 bp, Mus musculus
  siRNA target sequence for 5830483C08Rik (NM_177331.3,1855-1873).
gaactttggctataaagca

SEQ ID NO: 454172 - DNA, 19 bp, Mus musculus
  siRNA target sequence for 5830483C08Rik (NM_177331.3,1921-1939).
gctcttcctcccatgacat

SEQ ID NO: 454173 - DNA, 19 bp, Mus musculus
  siRNA target sequence for 5830483C08Rik (NM_177331.3,1958-1976).
gcagttgagtaccattgat

SEQ ID NO: 454174 - DNA, 19 bp, Mus musculus
  siRNA target sequence for 5830483C08Rik (NM_177331.3,1959-1977).
cagttgagtaccattgatt

SEQ ID NO: 454175 - DNA, 19 bp, Mus musculus
  siRNA target sequence for 5830483C08Rik (NM_177331.3,2031-2049).
caagacttagcatcagaat

SEQ ID NO: 454176 - DNA, 19 bp, Mus musculus
  siRNA target sequence for 5830483C08Rik (NM_177331.3,2214-2232).
gaaagaatacgtatcaaat

SEQ ID NO: 454177 - DNA, 19 bp, Mus musculus
  siRNA target sequence for 5830483C08Rik (NM_177331.3,2233-2251).
cttcatgccctcagtataa

SEQ ID NO: 454178 - DNA, 19 bp, Mus musculus
  siRNA target sequence for 5830483C08Rik (NM_177331.3,2236-2254).
catgccctcagtataatgt

SEQ ID NO: 454179 - DNA, 19 bp, Mus musculus
  siRNA target sequence for 5830483C08Rik (NM_177331.3,2278-2296).
gtttgcccctaaaattgaa

SEQ ID NO: 454180 - DNA, 19 bp, Mus musculus
  siRNA target sequence for 5830483C08Rik (NM_177331.3,2300-2318).
ctcttgtattgcttacagt

SEQ ID NO: 454181 - DNA, 19 bp, Mus musculus
  siRNA target sequence for 5830483C08Rik (NM_177331.3,2321-2339).
ctctgatggctcatccaat

SEQ ID NO: 454182 - DNA, 19 bp, Mus musculus
  siRNA target sequence for 5830483C08Rik (NM_177331.3,2323-2341).
ctgatggctcatccaattt

SEQ ID NO: 454183 - DNA, 19 bp, Mus musculus
  siRNA target sequence for 5830483C08Rik (NM_177331.3,2325-2343).
gatggctcatccaattttt

SEQ ID NO: 454184 - DNA, 19 bp, Mus musculus
  siRNA target sequence for 5830483C08Rik (NM_177331.3,2348-2366).
ggatcttacaggggtatat

SEQ ID NO: 454185 - DNA, 19 bp, Mus musculus
  siRNA target sequence for 5830483C08Rik (NM_177331.3,2356-2374).
caggggtatatcttcacaa

SEQ ID NO: 454186 - DNA, 19 bp, Mus musculus
  siRNA target sequence for 5830483C08Rik (NM_177331.3,2361-2379).
gtatatcttcacaaagagt

SEQ ID NO: 454187 - DNA, 19 bp, Mus musculus
  siRNA target sequence for 5830483C08Rik (NM_177331.3,2378-2396).
gtccagaaactctaaagtt

SEQ ID NO: 454188 - DNA, 19 bp, Mus musculus
  siRNA target sequence for 5830483C08Rik (NM_177331.3,2400-2418).
gacagccgactccaagaaa

SEQ ID NO: 454189 - DNA, 19 bp, Mus musculus
  siRNA target sequence for 5830483C08Rik (NM_177331.3,2427-2445).
gcgaatacttccttacctt

SEQ ID NO: 454190 - DNA, 19 bp, Mus musculus
  siRNA target sequence for 5830483C08Rik (NM_177331.3,2428-2446).
cgaatacttccttacctta

SEQ ID NO: 454191 - DNA, 19 bp, Mus musculus
  siRNA target sequence for 5830483C08Rik (NM_177331.3,2471-2489).
gacttccagtcttcaagtt

SEQ ID NO: 454192 - DNA, 19 bp, Mus musculus
  siRNA target sequence for 5830483C08Rik (NM_177331.3,2492-2510).
gctgccaactgctgctata

SEQ ID NO: 454193 - DNA, 19 bp, Mus musculus
  siRNA target sequence for 5830483C08Rik (NM_177331.3,2520-2538).
ccaagagttgctgtgaaaa

SEQ ID NO: 454194 - DNA, 19 bp, Mus musculus
  siRNA target sequence for 5830483C08Rik (NM_177331.3,2526-2544).
gttgctgtgaaaactacta

SEQ ID NO: 454195 - DNA, 19 bp, Mus musculus
  siRNA target sequence for 5830483C08Rik (NM_177331.3,2539-2557).
ctactaagaaccttgtcat

SEQ ID NO: 454196 - DNA, 19 bp, Mus musculus
  siRNA target sequence for 5830483C08Rik (NM_177331.3,2553-2571).
gtcatgaagaatagtgttt

SEQ ID NO: 454197 - DNA, 19 bp, Mus musculus
  siRNA target sequence for 5830483C08Rik (NM_177331.3,2568-2586).
gtttgcctcgagagagatt

SEQ ID NO: 454198 - DNA, 19 bp, Mus musculus
  siRNA target sequence for 5830483C08Rik (NM_177331.3,2634-2652).
gctccagaaatgaaacaca

SEQ ID NO: 454199 - DNA, 19 bp, Mus musculus
  siRNA target sequence for 5830483C08Rik (NM_177331.3,2713-2731).
ctaaagtggaatctaaaga

SEQ ID NO: 454200 - DNA, 19 bp, Mus musculus
  siRNA target sequence for 5830483C08Rik (NM_177331.3,2741-2759).
gtgtaatgagtcttttaaa

SEQ ID NO: 454201 - DNA, 19 bp, Mus musculus
  siRNA target sequence for 5830483C08Rik (NM_177331.3,2810-2828).
gagttttcgaccatgtcat

SEQ ID NO: 454202 - DNA, 19 bp, Mus musculus
  siRNA target sequence for 5830483C08Rik (NM_177331.3,2871-2889).
cctttacgccagaggttaa

SEQ ID NO: 454203 - DNA, 19 bp, Mus musculus
  siRNA target sequence for 5830483C08Rik (NM_177331.3,2872-2890).
ctttacgccagaggttaaa

SEQ ID NO: 454204 - DNA, 19 bp, Mus musculus
  siRNA target sequence for 6030430O11 (NM_172748.2,631-649).
ggagaagacgagaagttta

SEQ ID NO: 454205 - DNA, 19 bp, Mus musculus
  siRNA target sequence for 6030430O11 (NM_172748.2,637-655).
gacgagaagtttagtttga

SEQ ID NO: 454206 - DNA, 19 bp, Mus musculus
  siRNA target sequence for 6030430O11 (NM_172748.2,1123-1141).
ccgagccaggcattctcat

SEQ ID NO: 454207 - DNA, 19 bp, Mus musculus
  siRNA target sequence for 6030430O11 (NM_172748.2,1176-1194).
gaaaccaaagccacctata

SEQ ID NO: 454208 - DNA, 19 bp, Mus musculus
  siRNA target sequence for 6030430O11 (NM_172748.2,1720-1738).
gacctaagccggagaaagt

SEQ ID NO: 454209 - DNA, 19 bp, Mus musculus
  siRNA target sequence for 6030430O11 (NM_172748.2,1722-1740).
cctaagccggagaaagtca

SEQ ID NO: 454210 - DNA, 19 bp, Mus musculus
  siRNA target sequence for 6030430O11 (NM_172748.2,1802-1820).
ggacaggtgtctccaaaaa

SEQ ID NO: 454211 - DNA, 19 bp, Mus musculus
  siRNA target sequence for 6030430O11 (NM_172748.2,1938-1956).
ggacctccgctggattgaa

SEQ ID NO: 454212 - DNA, 19 bp, Mus musculus
  siRNA target sequence for 6030430O11 (NM_172748.2,1941-1959).
cctccgctggattgaagat

SEQ ID NO: 454213 - DNA, 19 bp, Mus musculus
  siRNA target sequence for 6030430O11 (NM_172748.2,1945-1963).
cgctggattgaagatgtta

SEQ ID NO: 454214 - DNA, 19 bp, Mus musculus
  siRNA target sequence for 6030430O11 (NM_172748.2,1946-1964).
gctggattgaagatgttaa

SEQ ID NO: 454215 - DNA, 19 bp, Mus musculus
  siRNA target sequence for 6030430O11 (NM_172748.2,2040-2058).
gcagggggtggcagaactt

SEQ ID NO: 454216 - DNA, 19 bp, Mus musculus
  siRNA target sequence for 6030430O11 (NM_172748.2,2195-2213).
cccctcttcgagaaacact

SEQ ID NO: 454217 - DNA, 19 bp, Mus musculus
  siRNA target sequence for 9430034D17Rik (NM_029891.1,85-103).
catggcggtgtcgagtatt

SEQ ID NO: 454218 - DNA, 19 bp, Mus musculus
  siRNA target sequence for 9430034D17Rik (NM_029891.1,88-106).
ggcggtgtcgagtattcct

SEQ ID NO: 454219 - DNA, 19 bp, Mus musculus
  siRNA target sequence for 9430034D17Rik (NM_029891.1,119-137).
cttagctgaaggttatgga

SEQ ID NO: 454220 - DNA, 19 bp, Mus musculus
  siRNA target sequence for 9430034D17Rik (NM_029891.1,173-191).
ggctttgaaagttcttcaa

SEQ ID NO: 454221 - DNA, 19 bp, Mus musculus
  siRNA target sequence for 9430034D17Rik (NM_029891.1,174-192).
gctttgaaagttcttcaaa

SEQ ID NO: 454222 - DNA, 19 bp, Mus musculus
  siRNA target sequence for 9430034D17Rik (NM_029891.1,203-221).
cacttatccatctgtcaaa

SEQ ID NO: 454223 - DNA, 19 bp, Mus musculus
  siRNA target sequence for 9430034D17Rik (NM_029891.1,250-268).
ccaaaggatccggaaagaa

SEQ ID NO: 454224 - DNA, 19 bp, Mus musculus
  siRNA target sequence for 9430034D17Rik (NM_029891.1,313-331).
ctgtgtgcacattgaatga

SEQ ID NO: 454225 - DNA, 19 bp, Mus musculus
  siRNA target sequence for 9430034D17Rik (NM_029891.1,326-344).
gaatgatacggctcagttt

SEQ ID NO: 454226 - DNA, 19 bp, Mus musculus
  siRNA target sequence for 9430034D17Rik (NM_029891.1,347-365).
ccgaatgacggttgaatat

SEQ ID NO: 454227 - DNA, 19 bp, Mus musculus
  siRNA target sequence for 9430034D17Rik (NM_029891.1,349-367).
gaatgacggttgaatatgt

SEQ ID NO: 454228 - DNA, 19 bp, Mus musculus
  siRNA target sequence for 9430034D17Rik (NM_029891.1,353-371).
gacggttgaatatgtctat

SEQ ID NO: 454229 - DNA, 19 bp, Mus musculus
  siRNA target sequence for 9430034D17Rik (NM_029891.1,355-373).
cggttgaatatgtctatga

SEQ ID NO: 454230 - DNA, 19 bp, Mus musculus
  siRNA target sequence for 9430034D17Rik (NM_029891.1,385-403).
gtctccgctggaaatgcaa

SEQ ID NO: 454231 - DNA, 19 bp, Mus musculus
  siRNA target sequence for 9430034D17Rik (NM_029891.1,449-467).
gaaaagtgtcaaatacgaa

SEQ ID NO: 454232 - DNA, 19 bp, Mus musculus
  siRNA target sequence for 9430034D17Rik (NM_029891.1,500-518).
gacccagccgactgtcatt

SEQ ID NO: 454233 - DNA, 19 bp, Mus musculus
  siRNA target sequence for 9430034D17Rik (NM_029891.1,502-520).
cccagccgactgtcattaa

SEQ ID NO: 454234 - DNA, 19 bp, Mus musculus
  siRNA target sequence for 9430034D17Rik (NM_029891.1,504-522).
cagccgactgtcattaaca

SEQ ID NO: 454235 - DNA, 19 bp, Mus musculus
  siRNA target sequence for 9430034D17Rik (NM_029891.1,535-553).
ggactgttgaagatgtgat

SEQ ID NO: 454236 - DNA, 19 bp, Mus musculus
  siRNA target sequence for 9430034D17Rik (NM_029891.1,690-708).
cgggagcctatctcagtta

SEQ ID NO: 454237 - DNA, 19 bp, Mus musculus
  siRNA target sequence for 9430034D17Rik (NM_029891.1,691-709).
gggagcctatctcagttaa

SEQ ID NO: 454238 - DNA, 19 bp, Mus musculus
  siRNA target sequence for 9430034D17Rik (NM_029891.1,703-721).
cagttaaagagcagcataa

SEQ ID NO: 454239 - DNA, 19 bp, Mus musculus
  siRNA target sequence for 9430034D17Rik (NM_029891.1,741-759).
gatgtagagagggtcaata

SEQ ID NO: 454240 - DNA, 19 bp, Mus musculus
  siRNA target sequence for 9430034D17Rik (NM_029891.1,744-762).
gtagagagggtcaataaaa

SEQ ID NO: 454241 - DNA, 19 bp, Mus musculus
  siRNA target sequence for 9430034D17Rik (NM_029891.1,751-769).
gggtcaataaaattgctaa

SEQ ID NO: 454242 - DNA, 19 bp, Mus musculus
  siRNA target sequence for 9430034D17Rik (NM_029891.1,766-784).
ctaagagggatatagaaca

SEQ ID NO: 454243 - DNA, 19 bp, Mus musculus
  siRNA target sequence for 9430034D17Rik (NM_029891.1,772-790).
gggatatagaacaaattat

SEQ ID NO: 454244 - DNA, 19 bp, Mus musculus
  siRNA target sequence for 9430034D17Rik (NM_029891.1,859-877).
ggaagcaaatccatcagat

SEQ ID NO: 454245 - DNA, 19 bp, Mus musculus
  siRNA target sequence for 9430034D17Rik (NM_029891.1,860-878).
gaagcaaatccatcagatt

SEQ ID NO: 454246 - DNA, 19 bp, Mus musculus
  siRNA target sequence for 9430034D17Rik (NM_029891.1,913-931).
gggtgggccatgataggta

SEQ ID NO: 454247 - DNA, 19 bp, Mus musculus
  siRNA target sequence for 9430034D17Rik (NM_029891.1,956-974).
gaaggaagacctactagat

SEQ ID NO: 454248 - DNA, 19 bp, Mus musculus
  siRNA target sequence for 9430034D17Rik (NM_029891.1,989-1007).
gggccaagtgggacattat

SEQ ID NO: 454249 - DNA, 19 bp, Mus musculus
  siRNA target sequence for 9530006B08Rik (NM_172683.1,34-52).
gcggacaccgacctgttta

SEQ ID NO: 454250 - DNA, 19 bp, Mus musculus
  siRNA target sequence for 9530006B08Rik (NM_172683.1,35-53).
cggacaccgacctgtttat

SEQ ID NO: 454251 - DNA, 19 bp, Mus musculus
  siRNA target sequence for 9530006B08Rik (NM_172683.1,39-57).
caccgacctgtttatggaa

SEQ ID NO: 454252 - DNA, 19 bp, Mus musculus
  siRNA target sequence for 9530006B08Rik (NM_172683.1,129-147).
caattctgtggataaaact

SEQ ID NO: 454253 - DNA, 19 bp, Mus musculus
  siRNA target sequence for 9530006B08Rik (NM_172683.1,259-277).
cagaacagcgacagtacaa

SEQ ID NO: 454254 - DNA, 19 bp, Mus musculus
  siRNA target sequence for 9530006B08Rik (NM_172683.1,282-300).
gactcttgtcacactaatt

SEQ ID NO: 454255 - DNA, 19 bp, Mus musculus
  siRNA target sequence for 9530006B08Rik (NM_172683.1,303-321).
caacaacaatgctggtaat

SEQ ID NO: 454256 - DNA, 19 bp, Mus musculus
  siRNA target sequence for 9530006B08Rik (NM_172683.1,306-324).
caacaatgctggtaatact

SEQ ID NO: 454257 - DNA, 19 bp, Mus musculus
  siRNA target sequence for 9530006B08Rik (NM_172683.1,376-394).
ggtctgggaacaatggtta

SEQ ID NO: 454258 - DNA, 19 bp, Mus musculus
  siRNA target sequence for 9530006B08Rik (NM_172683.1,391-409).
gttactcaaccagtattga

SEQ ID NO: 454259 - DNA, 19 bp, Mus musculus
  siRNA target sequence for 9530006B08Rik (NM_172683.1,455-473).
ctgtggcctcacaacctat

SEQ ID NO: 454260 - DNA, 19 bp, Mus musculus
  siRNA target sequence for 9530006B08Rik (NM_172683.1,460-478).
gcctcacaacctatcttca

SEQ ID NO: 454261 - DNA, 19 bp, Mus musculus
  siRNA target sequence for 9530006B08Rik (NM_172683.1,461-479).
cctcacaacctatcttcat

SEQ ID NO: 454262 - DNA, 19 bp, Mus musculus
  siRNA target sequence for 9530006B08Rik (NM_172683.1,504-522).
gaatgttcggcctgtacaa

SEQ ID NO: 454263 - DNA, 19 bp, Mus musculus
  siRNA target sequence for 9530006B08Rik (NM_172683.1,511-529).
cggcctgtacaaaatgcaa

SEQ ID NO: 454264 - DNA, 19 bp, Mus musculus
  siRNA target sequence for 9530006B08Rik (NM_172683.1,512-530).
ggcctgtacaaaatgcaat

SEQ ID NO: 454265 - DNA, 19 bp, Mus musculus
  siRNA target sequence for 9530006B08Rik (NM_172683.1,515-533).
ctgtacaaaatgcaatgaa

SEQ ID NO: 454266 - DNA, 19 bp, Mus musculus
  siRNA target sequence for 9530006B08Rik (NM_172683.1,561-579).
gcaaggccaaacagttaga

SEQ ID NO: 454267 - DNA, 19 bp, Mus musculus
  siRNA target sequence for 9530006B08Rik (NM_172683.1,572-590).
cagttagaccaattacatt

SEQ ID NO: 454268 - DNA, 19 bp, Mus musculus
  siRNA target sequence for 9530006B08Rik (NM_172683.1,599-617).
ccccaggtacacagtttgt

SEQ ID NO: 454269 - DNA, 19 bp, Mus musculus
  siRNA target sequence for 9530006B08Rik (NM_172683.1,601-619).
ccaggtacacagtttgtta

SEQ ID NO: 454270 - DNA, 19 bp, Mus musculus
  siRNA target sequence for 9530006B08Rik (NM_172683.1,602-620).
caggtacacagtttgttaa

SEQ ID NO: 454271 - DNA, 19 bp, Mus musculus
  siRNA target sequence for 9530006B08Rik (NM_172683.1,952-970).
ggggttacaggtgaaaata

SEQ ID NO: 454272 - DNA, 19 bp, Mus musculus
  siRNA target sequence for 9530006B08Rik (NM_172683.1,955-973).
gttacaggtgaaaatagca

SEQ ID NO: 454273 - DNA, 19 bp, Mus musculus
  siRNA target sequence for 9530006B08Rik (NM_172683.1,971-989).
gcaacgaagtggccaaatt

SEQ ID NO: 454274 - DNA, 19 bp, Mus musculus
  siRNA target sequence for 9530006B08Rik (NM_172683.1,979-997).
gtggccaaattggtgaata

SEQ ID NO: 454275 - DNA, 19 bp, Mus musculus
  siRNA target sequence for 9530006B08Rik (NM_172683.1,983-1001).
ccaaattggtgaatactct

SEQ ID NO: 454276 - DNA, 19 bp, Mus musculus
  siRNA target sequence for 9530006B08Rik (NM_172683.1,984-1002).
caaattggtgaatactctt

SEQ ID NO: 454277 - DNA, 19 bp, Mus musculus
  siRNA target sequence for 9530006B08Rik (NM_172683.1,990-1008).
ggtgaatactcttaacact

SEQ ID NO: 454278 - DNA, 19 bp, Mus musculus
  siRNA target sequence for 9530006B08Rik (NM_172683.1,1042-1060).
gtggtgtccaacaacagtt

SEQ ID NO: 454279 - DNA, 19 bp, Mus musculus
  siRNA target sequence for 9530006B08Rik (NM_172683.1,1131-1149).
ggacggtggacggaaaata

SEQ ID NO: 454280 - DNA, 19 bp, Mus musculus
  siRNA target sequence for 9530006B08Rik (NM_172683.1,1132-1150).
gacggtggacggaaaatat

SEQ ID NO: 454281 - DNA, 19 bp, Mus musculus
  siRNA target sequence for 9530006B08Rik (NM_172683.1,1134-1152).
cggtggacggaaaatatgt

SEQ ID NO: 454282 - DNA, 19 bp, Mus musculus
  siRNA target sequence for 9530006B08Rik (NM_172683.1,1167-1185).
ccagttccgtgttactgaa

SEQ ID NO: 454283 - DNA, 19 bp, Mus musculus
  siRNA target sequence for 9530006B08Rik (NM_172683.1,1189-1207).
ctgagaggtcacatgtgtt

SEQ ID NO: 454284 - DNA, 19 bp, Mus musculus
  siRNA target sequence for 9530006B08Rik (NM_172683.1,1214-1232).
gccctgaaatggttgagta

SEQ ID NO: 454285 - DNA, 19 bp, Mus musculus
  siRNA target sequence for 9530006B08Rik (NM_172683.1,1219-1237).
gaaatggttgagtaccaaa

SEQ ID NO: 454286 - DNA, 19 bp, Mus musculus
  siRNA target sequence for 9530006B08Rik (NM_172683.1,1402-1420).
gtccagaccaagcttatta

SEQ ID NO: 454287 - DNA, 19 bp, Mus musculus
  siRNA target sequence for 9530006B08Rik (NM_172683.1,1503-1521).
ccgatgccctcattgtact

SEQ ID NO: 454288 - DNA, 19 bp, Mus musculus
  siRNA target sequence for 9530006B08Rik (NM_172683.1,1504-1522).
cgatgccctcattgtacta

SEQ ID NO: 454289 - DNA, 19 bp, Mus musculus
  siRNA target sequence for 9530006B08Rik (NM_172683.1,1505-1523).
gatgccctcattgtactaa

SEQ ID NO: 454290 - DNA, 19 bp, Mus musculus
  siRNA target sequence for 9530006B08Rik (NM_172683.1,1520-1538).
ctaagaggctaaagaacaa

SEQ ID NO: 454291 - DNA, 19 bp, Mus musculus
  siRNA target sequence for 9530006B08Rik (NM_172683.1,1528-1546).
ctaaagaacaacattcgat

SEQ ID NO: 454292 - DNA, 19 bp, Mus musculus
  siRNA target sequence for 9530006B08Rik (NM_172683.1,1563-1581).
gcaccacgtagaacttgat

SEQ ID NO: 454293 - DNA, 19 bp, Mus musculus
  siRNA target sequence for 9530006B08Rik (NM_172683.1,1566-1584).
ccacgtagaacttgatcaa

SEQ ID NO: 454294 - DNA, 19 bp, Mus musculus
  siRNA target sequence for 9530006B08Rik (NM_172683.1,1662-1680).
ccacttggaaaatgttcat

SEQ ID NO: 454295 - DNA, 19 bp, Mus musculus
  siRNA target sequence for 9530006B08Rik (NM_172683.1,1663-1681).
cacttggaaaatgttcata

SEQ ID NO: 454296 - DNA, 19 bp, Mus musculus
  siRNA target sequence for 9530006B08Rik (NM_172683.1,1665-1683).
cttggaaaatgttcatagt

SEQ ID NO: 454297 - DNA, 19 bp, Mus musculus
  siRNA target sequence for 9530006B08Rik (NM_172683.1,1678-1696).
catagtccctatgaatcta
